United States Patent Application Publication US 2007/0060743 A1 - sequence listing, part 2

SEQ ID NO: 2013 - DNA, 4963 bp, Homo sapiens
  SIMILAR (860)..(2059): 921254mologous to Crassostrea gigas RNA polymerase II, second largest subunit,accession number U10335,Smith-Waterman Score=1929.
  misc_feature (1)...(4963): n = a,t,c or g
ccgcgtccgcggagacggaagttacttcgtctttagctcctggcgctgctggcttctgggcggtttttgtcttttgatttcaagagttaggagctcgagaaccgtttggcaatatgtacgacgcggatgaggatatgcaatatgatgaggatgatgatgaaatcaccccggatttgtggcaagaagcatgctggattgtaatcagttcctattttgacgagaaaggcttggttagacaacagctggattcttttgatgagtttattcagatgtctgttcaaagaattgtggaagacgctcctcctatagacctacaggctgaagctcagcatgctagtggagaagttgaagaaccgccacgatatttgctgaagtttgaacaaatttatctttccaagcctacccattgggaaagagatggtgctccttcaccaatgatgcccaatgaagctagattaaggaatctcacgtattctgctccgctttatgttgatataacaaaaacagtcattaaagaaggtgaagaacaacttcagactcagcatcagaaaacttttataggaaaaattccaattatgttgcggtcaacttactgccttttgaatggcttgacacgttcgtgatctttgtgagttaaatgaatgcccttcggatccttggtcgctatttcattattaaatggatcagaaaaggttctgattgcccaacggaaaatggcaacaaacaccagtttttgtcgcttgcaaaaaacggattctaaatatgcctacacgcggagagtgtagatcatgtcttgagaattcttcccgacccaccagtactatatgggttagcatgctggcaagaggaggacagggtcgccaagaagagtgctattggtcagcgcattgtggcaactctaccatatatcaagcaagaagttcccatcattattgtgttcagagcattaggttttgtgtccgacagagatattttagaacatattatttatgattttgaagatccagagatgatggaaatggttaaaccttctctcgatgaagcttttgtcatccaagaacagaatgttgcactaaatttcattggttcacgaggagcaaagcctggtgttactaaagagaaaagaattaaatatgcaaaggaagttttacaaaaagaaatgctccctcatgttggtgtcagtgatttttgtgagaccaaaaaagcctatttcttgggatacatggttcataggttacttctggcagctttgggtagaagagaactagatgacagagatcactatggaaacaagagattggatcttgctgggccgctgcttgcattcttatttagaggtatgtttaagaatttgcttaaagaagtgcggatctatgcacagaaatttattgatcgaggaaaggattttaacttggagttggcaattaaaacacggatcatatctgatggcctaaaatactctttagctactggaaactggggtgatcaaaagaaagctcatcaagccagagctggagtatctcaggtgttaaaccgcctgacttttgcgtctactctttctcacctgcgtcgtttaaattctcctattggtagagacggcaagctagcaaaaccaagacagttgcataatacgttgtggggaatggtgtgtcctgccgagaccccagagggccatgctgtaggacttgtgaagaatttagccttgatggcgtatatttcagttggatctcaaccatctccaattctggaatttttagaagaatggagtatggaaaatttagaagaaatttctcctgcagctattgctgatgcaaccaagatttttgttaatggctgctgggttggaatacataaagatcccgaacaacttatgaacaccctaaggaaattgagacgtcagatggacatcattgtgtctgaagtttctatgatcagagatattcgagagagggagattcggatctatacggatgcaggccgtatttgtagaccacttctgattgtggaaaaacaaaagctacttttgaagaagaggcatattgaccaatttgaaagagagagaatataacaactatagttggcaggatcttgtggccagtggggtagtggagtatattgataccctggaagaagaaacagtgatgcttgcaatgactccagatgatttacaggagaaagaagtagcttattgttccacatatacacactgtgagattcatccctcaatgatccttggtgtctgtgcatctattattccctttcctgatcataaccagtcccctagaaacacataccagtctgctatgggtaagcaggctatgggagtttacatcaccaacttccatgttcgcatggacacattggcccatgttctctattatcctcaaaagccacttgtgactacacggtctatggaatatctacgatttaaagagctgccagcaggcatcaactcaattgtggccattgcatcatacactggatataatcaggaagactctgttatcatgaatcgttcagctgtagaccgcggcttcttcaggtctgttttctatcgctcatacaaagaacaggagtctaaaaaaggatttgatcaagaagaagtttttgagaagcctacacgtgaaccatgccagggcattgaggcatgccatttacgacaagctggatgatgatnggttttgatagctcccagggggttcgtggtatcaggagatgatgttattataggcaaaacagtcaccttgcctggaaaatgaagatgaatttgggagagcaccaatagacgctataccaagagagactgtagcacttttctcagaactagtgagacgggcattgtggatcaggttatggtaactctcaatcaggaaggatataaattttgtaaaataagggtacgctctgttaggattccacagattggagacaaatttgctagtcgacatggtcaaaagggtacttgtggtattcagtatagacaagaggatatgcctttcacctgtgaaggtatcacccctgattatcatcatcaatccccatgccatcccctctcgtatgactattggtcacttaattgaatgccttcaagggaaggtatcgggcttaacaaggggtgaaattgggtgatgcccactccattttaatggatgctgtttaacgtggcaggaaggtttcctaatctttttatcctggattatgggctatcctcttcaggagggaaatggaggtccctgtacaatgggttcactgggtcgaaaattcacatcacaaatatttattggccccacttattaccagcgtttgaagcatatggtggatgataagattcactctcgtgctaggggacctattcagatccgtcaatagaccagccccatggagggtagttctcccgaatggtggcctgcgtttttgaagaaatggaccgagatttgtcagattgcccatggagcagacccagtttttaagtggaaagattgtttgaaggccatccagaaccccatatccaggttccatgctttgccaatcctttgtggaataaatggcgattgcccaacacccaggaccccatacatatgaatgcaggggctgcccgcaataaaaccccagattttctttggtgcgaatgcctaccgcatgcacactaattgtttcaggaacttatgtcctatgagtattgccccgcgaatgatgagtgtttagctattttacaggagtcaacaagataattaaatatcttggtgtcttgtttcttattgtgtggctcttttaaaaaatgacaaaatatgtactgtgttgtgataaaaagtattttatttgtttaatggatatgcatggcttttcttcctggtaaatatataataaatttttgtagatagtcttgatgtgtgatctttattttgtatttcctctgtgtaaaaccagtgaatataactaaagtgttagtggattggattaaaagaaacttattaggcaagaacagggtaatgtagttatccatgactacttttaaccatgcagacttaataatattctggaggtttattgctcgggccctttcacctttttttcactgggtatttcatgtaaggcatcaaccactagtaatttttgctggatggctggaagcctgtcccttggggaattgggatgcatgggcactcatatacttccaagcatccttcctttacttaggaagggaagatacccagcacccaagccaggtttacttcatggcttttctggggccaccccggggtctgaatgggccaggttgtccccggtcaccaggcaggaagttctgtcctttgaactcccataagtgacccctttttaccttgttccagatgaggacaggtgtcggggattccgcatgacctcacagctcaagtacacctgggcaccagtgacattccagatgtcctttggggggcgtcactatggaaggaccttgctcgcaggtgcccttgctgacctgggtgatggccttctccccgcgggctctcggccctctggctggcggcgcgcagatggcaagccgctcgggtaggtggtgccgtcgctgccgcacaccgggtagcggctcttgcacacgcacacgccgcttacacccggaccgccggctgctgccccggctttacccttccgcctcttgcggctcttcacgcactccatgcccggcgcgcagtaccccctgccggcgccgccacccccgcacggctcgccctcgccgcgggcgcacatagggcagcagccgcacgcgtcgcgggtctcgcccagcaggcagcccagcgggggcaggggcgggcaggaggccggctcgcaggggccgcaggtgtccgaagaggaggaagaggagaggggcaggagcaggagcagcagcccagcggcgccgaggagcagggcgcgcagcgacggccgctccatggcggggtgcggtggcactcgtgccgctcgtgcc

SEQ ID NO: 2014 - DNA, 383 bp, Homo sapiens
  SIMILAR (162)..(383): 941254mologous to Homo sapiens unnamed protein product,accession number AK002059,Smith-Waterman Score=360.
  misc_feature (1)...(383): n = a,t,c or g
cgcgtcgcgaggcgagcgtcctccttttgtgcgagcgccggcggctcggcttctcgaaggagaagaaactgaggcctggaatttgattaactcattcaaggttacccagttgatataaggacaaggacagaatcaccagcactggctgaaggtaccttaacatggggaatcttcttaaagttttgacatgcacagaccttgagcaggggccaaattttttccttgattttgaaaatgcccagcctacagagtctgagaaggaaatttataatcaggtgaatgtagcattataagatgcagaaagcatcttggaggacttgcagtcatacagaggagctggccacganatacgagaggcaatccagcatccagcagatgagaag

SEQ ID NO: 2015 - DNA, 2152 bp, Homo sapiens
  SIMILAR (759)..(860): 821254mologous to Homo sapiens BM-009,accession number AF208851,Smith-Waterman Score=142.
  misc_feature (1)...(2152): n = a,t,c or g
aaactgaggcctggaatttgattaactcattcatggttacccagttgataactgcagcattggactagaggtggagagagtggtactgggggagtggtgaagcaggtaattcatttgcacacctgttagcaagaaacagaaagttgaaggactggaacaagtgaactaggaaagagggaacgccaatccaaggattagaaggacaaggacagattcaccagcactggctgaatggtaccttaacatggggaatcttcttaaagttttgacatgcacagaccttgagcaggggccaaattttttccttgattttgaaaagtggcagatgcccagcctacagagtctgagaaggaaatttataatcaggtgaatgtagtattaaaagatgcagaaggcatcttggaggacttgcagtcatacagaggagctggccacgaaatacgagaggcaatccagcatccagcagatgagaaagttgcaaagaagaaggcatggggtgcagttgttccactaagtaggcaaattaaagaaattttacgaattttctcagaggttagaagcagcattaagaggtcttctgggagccttaacaagtaccccatattctcccacccagcatctagagcgagagcaggctcttgctaaacagtttgcagaaattcttcatttcacactccggtttgatgaactcaagatgacaaatcctgccatacagaatgatttcagctattatagaagaacattgagtcgtatgaggattaacaatgtacccggcagaaggagaaaatgaagtagctaatgaattggcaaatcgaatgtctttgttttatgctgaggcaactccacatgctgaaaaccttgagtgatgccacaacaaaatttgtatcagagaataaaaatttaccaatagaaaataccacagattgtttaagcacaatggctagtgtatgcagagtcatggctggaaacaccggaatacagaagccagattttacaaaatgaagagacagtgtcattcctgccntggagggcaatggtggggtgttcataatactcctatgaccaccgtacatccagtggggaggcattttgcttaaaacttccaaaatttgatatgaaaggttgtatcaaagttcttaaggaccaacctcctaatagtgtggaaggtcttctaaaatgctctcagggtacacaacaaaacatttggaatggatgagactacctccaagcaaattaaaatccatgctgccaataacaattctgggaataaagcaccctgctgtagacagaagacagtattctgcaatgactgagaatgcagttttttagtgattgcaattactatctcatttattcttgcttttatttctttcctctgttcctcttccctcttttttaatcatgttcttaagacttcttttctgtgccaaaatcagtaaagttacactctgaagggatattcatccttttcaaacggggccatctaagggcagctaatttatggcattgcattgggggtctctactgaggaaaaattctgggacttggaactaaatatttttaaaatgtggggatttttttttgaaaactaatattttaatattgcttctccctgcatgggcaaaactgccttattctgctatttaaaaaaccctcaatgactttattttcctactgccgcctttttcatgtgcaacccaaaatgaaaatgttttaaattaactgtgttgtacaaaatggtacccaacacaaactttttttaaattagtaatactttttgtttaaagttttaagtttgcgattttgacttttttttgtaaggatgtatgttgtgtgtttaacctttatttactaacgttaaaagtctgtgatgtgtgcgtagaatattacgtatgcatgttcgatgtctaaagatatggctgttaatgccaccaataaaaatcagctttcatttttctaagtgtggcttggtttactgatgttttgtttttaggcttctgaagttttccccatgtatgtttttatggaatgcatatatacattacatgattttttcttcttttaggggagagccgggtcttttcattagaattttgatcatcgctccatgtatatacttttaattgcctttaaaattttgctaagtatcaaa

SEQ ID NO: 2016 - DNA, 505 bp, Homo sapiens
  SIMILAR (178)..(477): 971254mologous to Bos taurus 17,000 dalton myosin light chain,accession number X54977,Smith-Waterman Score=502.
  misc_feature (1)...(505): n = a,t,c or g
gcccccaatgaagccgttcggaaactgaagatcctcggaannnccgggncgacccacgcgtncgggagagctgagcagtcaagatgtgtgacttcacctaagaccagaccgcatagttcaaggaggccttccagctgtttgaccgaacaggtgatggcaagatcctgtacagccagtgtggggaaccccaagagtgatgagatgaatgtgaaggtgctggactttgagcactttctgcccatgctgcagacagtggccaagaacaaggaccagggcacctattaggattatgtcgaaggacttcgggtgtttgacaaggaaggaaatggcaccgtcatgggtgctgaaatccggcatgttcttgtcacactgggtgagaagatgacagaggaagaagtanagatgctggtggcagggcatgaggacagcaatggttgtatcaactatgaagagctcgtccgcatggtgctgaatggctgaggacctttccagtctccccagagtc

SEQ ID NO: 2017 - DNA, 504 bp, Homo sapiens
  SIMILAR (62)..(340): 1001254mologous to Bos taurus 17,000 dalton myosin light chain,accession number X54977,Smith-Waterman Score=482.
tgacttcaccgaagaccagaccgcagagttcaaggaggccttccagctgtttgaccgaacagagatgaatgtgaaggtgctggactttgagcactttctgcccatgctgcagacagtggccaagaacaaggaccagggcacctatgaggattatgtcgaaggacttcgggtgtttgacaaggaaggaaatggcaccgtcatgggtgctgaaatccggcatgttcttgtcacactgggtgagaagatgacagaggaagaagtagagatgctggtggcagggcatgaggacagcaatggttgtatcaactatgaagagctcgtccgcatggtgctgaatggctgaggaccttcccagtctccccagagtccgtgcctttccctgtgtgaattttgtatctagcctaaagtttccctaggctttcttgtctcagcaactttcccatcttgtctctcttggatgatgtttgccgtcagcattcaccaaataaacttgctctctgggaa

SEQ ID NO: 2018 - DNA, 1259 bp, Homo sapiens
  SIMILAR (43)..(351): 1001254mologous to Homo sapiens smooth muscle myosin light chain,accession number M22919,Smith-Waterman Score=540.
  misc_feature (1)...(1259): n = a,t,c or g
ccattactgcaggaaaaggtcccggagagctgagcagtcaagatgtgtgacttcaccgaagaccagaccgcagagatgaatgtgaaggtgctggactttgagcactttctgcccatgctgcagacagtggccaagaacaaggaccagggcacctatgaggattatgtcgaaggacttcgggtgtttgacaaggaaggaaatggcaccgtcatgggtgctgaaatccggcatgttcttgtcacactgggtgagaagatgacagaggaagaagtagagatgctggtggcagggcatgaggacagcaatggttgtatcaactatgaagcgtttgtgaggcatatcctgtcggggtgacgggcccatggggcggtacggctcctcccagcctctcctctagttgatctccccagtgtttcttttttccccaacctgtgctctttatcccctgcccttaccctactacnatctgacttcntcctggcatgtttctgcatggagctgactagggaggggagggattctcaaagaggaagaccaacctgggggtacagtacctccttactctagaatgggccctgaggttttacttatgcggccctgggtgctggtgtctgggaacctcaccagcctgtataccagtcttgctttagggtgaccttctggccctggagcatgggtagctggcatagaggggtatgggttgcctgccccattctgctgctatagctgaacagtcctttccccttccctcgctgggcagcttggcaggtaccctaacccaaaactctgtcctctcctcccgccagtggctgacagtagctgtaggtgtagtggagaacttttctgcctctgctgtgttcttgctgcttaggtttgggtgggggactaacagctgctgggaggggagctaggggcatggagaactggtcagactcaaggtggctcctctgcaaactgaccccagggttggttgctgtgggcatgttcccgcttatgctacctttgcagtctggtagtcccctggcccttggcgtacccctccacagccctgttccctggctcatcccacctttcctttccacagagctcgtccgcatggtgctgaatggctgaggaccttcccagtctccccagagtccgtgcctttccctgtgtgaattttgtatctagcctaaagtttccctaggctttcttgtctcagcaactttcccatcttgtctctcttggatgatgtttgccgtcagcattcaccaaataaa

SEQ ID NO: 2019 - DNA, 467 bp, Homo sapiens
actaaaattccggccgcgtcgacggagaacttttctgcctctgctgtgttcttgctgcttaggtttgggtgggggactaacagctgctgggaggggagctaggggcatggagaactggtcggactcaaggtggctcctctgcaaactgaccccagggttggttgctgtgggcatgttcccgcttatgctacctttgcagtctggtagtcccctggcccttggcgtacccctccacagccctgttccctggctcatcccacctttcctttccacagagctcgtccgcatggtgctgaatggctgaggaccttcccagtctccccagagtccgtgcctttccctgtgtgaattttgtatctagcctaaagtttccctaggctttcttgtctcagcaactttcccatcttgtctctcttggatgatgtttgccgtcagcattcaccaaataaacttgctctctgggaaaa

SEQ ID NO: 2020 - DNA, 1002 bp, Homo sapiens
  SIMILAR (223)..(753): 961254mologous to Escherichia coli trpA,accession number V00372,Smith-Waterman Score=871.
atgctttactgcttctccagcggcaatgtgtcaaaatccccaactgccaataatgcccgcactggacgcgctgattacgtgtctattaccgatgatgaagcccttgaagccttcaaaacgctgtgcctgcacgaagggatcatcccggcgctggaatcctcccacgccctggcccatgcgttgaaaatgatgcgcgaaaacccggataaagagcagctactgttgaaggagcgcaaagaaggcgcattcgttcctttcgtcacgctcggtgatccgggcattgagcagtcattgaaaattatcgatacgctaattgaagccggtgctgacgcgctggagttaggtatccccttctccgacccactggcggatggcccgacgattcaaaacgccactctgcgcgcctttgcggcaggtgtgactccggcacaatgttttgaaatgctggcactgattcgccagaaacacccgaccattcccattggcctgttgatgtatgccaatctggtgtttaacaaaggcattgatgagttttatgcccagtgcgaaaaagtcggcgtcaaaacggtgctggttgccgatgtgccagttgaagagtccgcgcccttccgccaggccgcgttgcgtcataatgtcgcacctatcttcatctgcccgccaaatgccgatgacgacctgctgcgccagatagcctcttacggtcgtggttacacctatttgatgtcacgagcaggcacagtggccaagaacaaggaccagggcacctatgaggattatgtcgaaggacttcgggtgtttgacaaggaaggaaatggcaccgtcatgggtgctgaaatccggcatgttcttgtcacactgggtgagaagatgacagaggaagaagtagagatgctggtggcagggcatgaggacagcaatggttgtatcaactatgaagttttaattcatacgggtccagctcatagcagagatcgacttcgatcatcagttcgtctggattag

SEQ ID NO: 2021 - DNA, 853 bp, Homo sapiens
  SIMILAR (813)..(469): 561254mologous to Bos taurus 17,000 dalton myosin light chain,accession number X54978,Smith-Waterman Score=271.
  misc_feature (1)...(853): n = a,t,c or g
caaagggtccttcccaaaaatcccccggtgggttttaaaaaccccccccaaaaagaaaaaaaatttattttcccccccccggtaaaatttggcccccccagggatttttttaaagggccccccccnnnnnnnnnnnnnnnnnnnnnnnnnnngcccagagagcaagtttatttggtgaatgctgacggcaaacatcatccaagagagacaagatgggaaagttgctgagacaagaaagcctagggaaactttaggctagatacaaaattcacacagggaaaggcacggactctggggagactgggaaggtcctcagccattcagcaccatgcggacgatgctcccgcccatgggcccgtcaccccgacaggagtatgcctcacaaacgcttcatagttgatacaaaccaattgctgtcctcatgccctgccaccagcatctctacttcttcctctgtcaatgttctaccccggtgtgacaaagaacatgccggatttcagcacccatgacgggtgccatttccttcccttgtaaaacacccgaagttccttcgacataaatcccataggtgaccctgggtcctggttcttggccactgtctgcagcatggggcagaaagtgctcaaagtccagcaccttcacattcatctcatcactcttgggggttccccaggaccttgagcaccttcggcgtgggtagggttctggcccagggccctcatcacatccccacacctggctgtacaggatcttgccatcacctgttcggtcaaacagctggaaggcctccttgaactctgcggtctggtcttcggggagtcacaacatcttgatgctcagctctccggggacc

SEQ ID NO: 2022 - DNA, 706 bp, Homo sapiens
  SIMILAR (35)..(517): 491254mologous to Bos taurus 17,000 dalton myosin light chain,accession number X54977,Smith-Waterman Score=275.
ccaggaaaaggtcccggagagctgagcggtcaagatgtgtgacttcaccgaagaaccagaccgcagagttcaaggaggccttccagctgtttgacccaaaccaggtgatggcaagattccctgtacagcccagtgtggggatgtaatgagggccctgggccaaaaccccctaccaaacgccgagggtgctcaaggctcctggggaacccccaagaagtgatgacatgagtgtgaaggagcatgtactgtgagcacttttttgcacattcttcagacgagtggcccagaaccagggcccagggcacctactgaggattatgtcgaagactttcgggtgtttgacaaggaaggaaaatggcacccgtcatgggtgcttgaaatccggcatgttcttgtcacactgggtgaagaagattgacagaggaagaaagtagagatgctggtggcagggccatgaaggacagccaatgggttggtatccaactatgaagagctcgtccgcatggtgctgaatggctgaggaccttcccagtctcccccagagtccgtgccttttcctgtgttgaattttgtatctaagcctaaaagtttcccctaggctttcttgtctcagcaactttcccatcttgtccccctttggatgatgtttgccgtcagcattcaccagagtaaacttgctttttgggcaaaaaaaaaaaaaaaaaaa

SEQ ID NO: 2023 - DNA, 512 bp, Homo sapiens
aaatcttgtcttagggcttgtgaggaatcagaactaacccaggactcagtcctgcttcttttgcctcgagtgattttcctctgtttttcactaaataagcaaatgaaaactctctccattaccttctgctttctctttgtccacttacgcagtaggtgactggcatgtgccacagagcaggccctgcctcactgtctgctggtcagtttattcacatatttttggtaactcccatggcagctcctaggatttcagcggtctgtgggccagaaagcaggcaccagggctgacctcaaggccgtatcagagggccaagcagagttcttttggatacctgcttttcatcccacagggccttagagtcagaggtaaggtagcaacagagctagaatggggcaatgcactcttaccctccttctcaacttttatttaagctgtgctaaatgttttcttcaagggaaccagatttagttctttacagaattttccagtgaaataaaacatgttgtaat

SEQ ID NO: 2024 - DNA, 796 bp, Homo sapiens
  SIMILAR (394)..(795): 1001254mologous to Homo sapiens C3a anaphylatoxin receptor,accession number Z73157,Smith-Waterman Score=706.
  misc_feature (1)...(796): n = a,t,c or g
atgggggaatcccccactcctcagagcctggcccaaaccccggcccgattcctggccctccaggagggccttggaagcttagccaggaacagaaaaccaaatacctcacgtcagttctttgctgacaatgtgatcttatacttagaaaattctgaagactccatcaagaggggagcagccaaaatggcagaattgaaacaactctgcggcttccaccaagaaggacgaaaatggcgaatgaattctacatcttcaattgctgtaccaagcgccgacagcggacccaagatggcgaccgagttggagtacgagtctgtgctgtgtgtgaagccagacgtcagcgtctaccggattccgncccgggcctccaaccgcggttacagaagtttagcaatggcgtctttctctgctgagaccaattcaactgacctactctcacagccatggaatgagcccccagtaattctctccatggtcattctcagccttacttttttactgggattgccaggcaatgggctggtgctgtgggtggctggcctgaagatgcagcggacagtgaacacaatttggttcctccacctcaccttggcggacctcctctgctgcctctccttgcccttctcgctggctcacttggctctccagggacagtggccctacggcaggttcctatgcaagctcatcccctccatcattgtcctcaacatgtttgccagtgtcttcctgcttactgccattagcctggatcgctgtcttgtggtattcaagccaatctggtgtcagaatcatcgca

SEQ ID NO: 2025 - DNA, 1065 bp, Homo sapiens
  SIMILAR (491)..(592): 641254mologous to Homo sapiens FLJ00061 protein,accession number AK024468,Smith-Waterman Score=120.
atggttggaatatataagactggagtcttttgggttggctgtgatggaaagacaaagaggaaaggaaacttaaggatgctggcaagagaactgttgaaacaaggagatgggaggaataaagagaaggctaacaatgtgcagaacatgaagaagaacaggaattgggttgatcccacgtatagtctatttaacaggatcaaattttccaaaaagataatcggaatacacgccgaaagtgtggcaaaacattttaacaggtgtcgtcctgaaaaatcggagataaagagtgtttcaatatggctccccgcgtcaccgaaaaggttaatctcagaaactaacttgaactcgcgcggaagtgacgcaacagaagttgtcgcgctttgcatctccgcctcccgtgctccgcctccggtcttacgtttcgcccccggcagcgccgacagcggacccaagatggcgaccgagttggagtacgagtctgcgctgggtagtgaagcctaacgtcagcgcctaccggattccgccccgggcctccaaccgcggttacagggcctctgactggaaattagactatgcctgattggactggtcgcctccgaatcacttcaaaagggaagactgcctatatcaaactcgaggataaagtttcaggggagctctttgctcaggcaccagtagaacaatatcctggtattgctgtggagacggtgacagattctagccgctactttgtaatcctggatctcggatggtactgggcgcagtgctttcattggcattggcttcacagatcggggagatgccttcgactttaatgtctccttgcaggatcacttcaagtgggtaaagcaggaatctgagatttcccaggaatctcaagaaatggatgctcgtcctaagttggatctgggcttcaaggaaggacaaaccatcaagttgtgtatcgggctctgttccaaaccaggcaccacagccatccaactgggtccagttctgaatggcattggcaggacattaaggacagacttgaggaataaaaatgaccttgagggcaccaatctgtga

SEQ ID NO: 2026 - DNA, 2654 bp, Homo sapiens
  SIMILAR (44)..(331): 821254mologous to Mus musculus putative,accession number AK003463,Smith-Waterman Score=434.
  misc_feature (1)...(2654): n = a,t,c or g
agcggtaccgctccggaatttccgggtcgacgatctcgtgttggagtacgagtctgtgctgtgtgtgaagccagacgtcagcgtctaccggattccgccccgggcctccaaccgcggttacagggcctctgactggaaattagaccagcctgattggactggtcgcctccgaatcacttcaaaagggaagactgcctatatcaaactcgaggataaagtttcaggggagctctttgctcaggcaccagtagaacaatatcctggtattgctgtggagacggtgacagattctagccgctactttgtaatccggatccaggatggtactggtgggtaaagcaggaatctgagatttccaaggaatctcaagaaatggatgctcgtcctaagttggatctgggcttcaaggaaggacaaaccatcaagttgtgtatcgggaacattacaaacaagaaaggaggtgcttctaagcccaggactgcaaggggtgggggtctgagcttactcccacccccgccatgaggcaaagtcactattcccccaccatcctcctcaagttgccatcaaccaatcatgtcaccccaccatccattccgaaatctaaccatggaggcagtgatgcaagatatccttttaagatttggattctcctgctcctgtcacgacaccagcaccaactccaggtttctgtaagcaatggacttggtggggagacttcagcactgcctccagctctgttcccaaaccaggcaccacagccatccaacttgggtccagttctgaatggcattggcaggacattaaggacagacttgaggaataaaaatgaccttgagggcaccaatctgtgagggaagttaggaacccatttcctccccagaaccagaatgactggacaatctttttcatagcttctccatcacattcaagctggtttatgtcactcccctgtgttgttacttgtacagccaagaaagtatctgttatctcctgcgtagtaccaaggtagggggactagttggatcttattatagttttgggctggactatgcagggctttaaaagggccagcgtctgttttggaggggggaattgacctcttaacatctgttaaaatttgtcttcatcttttaattttctttaacttatttcaaaattcatctcatgacccttgtgtgcctctttgtgaagccctatttagcaatttcaggggagtcaaaaaccttgcaacttccttctccactaacccaggactaaaaatggacaggctgacctcagtgtttacaaattcagaattttgataggggtagatatggagaaagacctatttcctgggtctctgctgtgtagtctccttcaggcttattgtgctcagtgaacatccagtgctgggtgcagctccatcaccctcttgtgtgtttacatgtctctttctatgataagagggttgtgttggtgggcacctccactactcttttctgtttgttgagtttgaattgtgtaacatctttgatcagtggggtgtatctgtaaatgaagggaggttcaagaggctgtgctttccaagtgatagtctataggagtgtttaatttcttgcagctccatctggttgctgcatttgaagcatggcattaatttgtatttgccctgttctttgacctaaagttgaagggtttagagtttttaacctgatctgtagagcagagaggttgaaagcacttaactcttgtttagtatcctcattgccttgctgcctgagaaattggcccctttccataaacatttcttttcagttcatgtagttctttaatagaaagctgctattatggatattgccatttggggaaggaagttggagaggcccagctttactgggacaggttttgcccaaggctttgatacctgtcacccagggtatcttaaaagcaagttgttctcccactactttccttttccctctggccctgccattccctaattacaaaggctgtggaaaaaagttctgcttcttaggtgaatgggtactttctattttgtttctaaacgagcaattttgaggatgaaaatgggaagatatcattgcttccttttttgcacctattgggtatgtacactctggcccgaagggggggttgnnccccnccntcntaaaatttggggntgnttaaagtttccaaaatatattaccttcccccggattcctccttccttccacctttttcctgaactttgggtcccattttccttttccattgccctccctttcccccaggcaggctctattcttgcagagcccatagccaggacatggttaaaattcccaatagaaaacactaaaagggaaagtcctgtggaatcactagtgactaaatactggggaccctattttctcaatcttcctcccatgttgtgttctttgtattcttgagatgataatatattatgtatttgaattcctgaaaaatggaaaatgtttaagatatatgtatataaatgattatgctgtattggtgcaataatggtaattaaaaatatgaaaaaaagtgtctcttttatcttttaatttgcttatttgattaccttttaaatttaattgaccaaatataagtggaccagtagttaataaaggatatttatatcactctttattaag

SEQ ID NO: 2027 - DNA, 324 bp, Homo sapiens
  SIMILAR (204)..(323): 1001254mologous to Homo sapiens CASH beta protein,accession number Y14040,Smith-Waterman Score=201.
attctgaaaaagaatgtggggtttccttgcagatgagttcatctgttgtttcatttcctttacaataactcccccactggaaaggattctgaaagaaatgaagtcagccctcagaaatgaagttgactgcctgctggctttctgttgactggcctggagctgtactgcaagacccttgtgagcttccctagtctaagagtaggatgtctgctgaagtcatccatcaggttgaagaagcacttgatacagatgagaaggagatgctgctctttttgtgccgggatgttgctatagatgtggttccacctaatgtcagggaccttc

SEQ ID NO: 2028 - DNA, 1047 bp, Homo sapiens
  SIMILAR (1)..(1044): 1001254mologous to Homo sapiens I-FLICE isoform 5,accession number AF041462,Smith-Waterman Score=1800.
atggcagagattggtgaggatttggataaatctgatgtgtcctcattaattttcctcatgaaggattacatgggccgaggcaagataagcaaggagaagagtttcttggaccttgtggttgagttggagaaactaaatctggttgccccagatcaactggatttattagaaaaatgcctaaagaacatccacagaatagacctgaagacaaaaatccagaagtacaagcagtctgttcaaggagcagggacaagttacaggaatgttctccaagcagcaatccaaaagagtctcaaggatccttcaaataacttcagggaagaaccagtgaagaaatccattcaggaatcagaagcttttttgcctcagagcatacctgaagagagatacaagatgaagagcaagcccctaggaatctgcctgataatcgattgcattggcaatgagacagagcttcttcgagacaccttcacttccctgggctatgaagtccagaaattcttgcatctcagtatgcatggtatatcccagattcttggccaatttgcctgtatgcccgagcaccgagactacgacagctttgtgtgtgtcctggtgagccgaggaggctcccagagtgtgtatggtgtggatcagactcactcagggctccccctgcatcacatcaggaggatgttcatgggagattcatgcccttatctagcagggaagccaaagatgttttttattcagaactatgtggtgtcagacggccagctggaggacagcagcctcttggaggtggatgggccagcgatgaagaatgtggaattcaaggctcagaagcgagggctgtgcacagttcaccgagaagctgacttcttctggagcctgtgtactgcggacatgtccctgctggagcagtctcacagctcaccgtccctgtacctgcagtgcctctcccagaaactgagacaagaaagggggacaattcccggaagtggaattacagagtcaaaggacatgcatttttcaagcctcggatgcatcttactagatgtcctatag

SEQ ID NO: 2029 - DNA, 1057 bp, Homo sapiens
  SIMILAR (1)..(693): 1001254mologous to Homo sapiens FLAME-1,accession number AF009616,Smith-Waterman Score=1158.
atgtctgctgaagtcatccatcaggttgaagaagcacttgatacagatgagaaggagatgctgctctttttgtgccgggatgttgctatagatgtggttccacctaatgtcagggaccttctggatattttacgggaaagaggtaagctgtctgtcggggacttggctgaactgctctacagagtgaggcgatttgacctgctcaaacgtatcttgaagatggacagaaaagctgtggagacccacctgctcaggaaccctcaccttgtttcggactatagagtgctgatggcagagattggtgaggatttggataaatctgatgtgtcctcattaattttcctcatgaaggattacatgggccgaggcaagataagcaaggagaagagtttcttggaccttgtggttgagttggagaaactaaatctggttgccccagatcaactggatttattagaaaaatgcctaaagaacatccacagaatagacctgaagacaaaaatccagaagtacaagcagtctgttcaaggagcagggacaagttacaggaatgttctccaagcagcaatccaaaagagtctcaaggatccttcaaataacttcaggagcatacctgaagagagatacaagatgaagagcaagcccctaggaatctgcctgataatcgattgcattggcaatgagacagaactatgtggtgtcagagggccagctggaggacagcagcctcttggaggtggatgggccagcgatgaagaatgtggaattcaaggctcagaagcgagggctgtgcacagttcaccgagaagctgacttcttctggagcctgtgtactgcggacatgtccctgctggagcagtctcacagctcaccgtccctgtacctgcagtgcctctcccagaaactgagacaagaaagaaaacgcccactcctggatcttcacattgaactcaatggctacatgtatgattggaacagcagagtttctgccaaggagaaatattatgtttggctgcagcacactctgagaaagaaacttatcctctcctacacataa

SEQ ID NO: 2030 - DNA, 753 bp, Homo sapiens
  SIMILAR (1)..(540): 971254mologous to Homo sapiens CASH alpha protein,accession number Y14039,Smith-Waterman Score=867.
atgtctgctgaagtcatccatcaggttgaagaagcacttgatacagatgagaaggagatgctgctctttttgtgccgggatgttgctatagatgtggttccacctaatgtcagggaccttctggatattttacgggaaagaggtaagctgtctgtcggggacttggctgaactgctctacagagtgaggcgatttgacctgctcaaacgtatcttgaagatggacagaaaagctgtggagacccacctgctcaggaaccctcaccttgtttcggactatagagtgctgatggcagagattggtgaggatttggataaatctgatgtgtcctcattaattttcctcatgaaggattacatgggccgaggcaagataagcaaggagaagagtttcttggaccttgtggttgagttggagaaactaaatctggttgccccagatcaactggatttattagaaaaatgcctaaagaacatccacagaatagacctgaagacaaaaatccagaagtacaagcagtctggtggatggaatggaacctggatgaccaaagcctcctttagcttgtggctagaaatcgcgtccctttatattcttcatatcccagatctgccaactccattgccctgtatattcatgatctctgcaaaatgctgccaagcagttcttaacatttcagtcttcaagaaagaatctgggatctgcacaggctggcagagctatggacattcaggggttttgcatgtatgctga

SEQ ID NO: 2031 - DNA, 2084 bp, Homo sapiens
  SIMILAR (505)..(1944): 1001254mologous to Homo sapiens Casper,accession number AF010127,Smith-Waterman Score=2473.
gcggccgcgtcgaccacgcatggagaattttaccacccagagacacgcgagtggccctgtgcaagtttcaactgcgcggggggcggggaattccgcagacaggattctagaatttatgtcttgtgtggtaacatttcagccggtgggtggcggggattaggcgtgaagcggttcagcaggcagaggttctcggacgccctccggcgaagccacctgttgatgcttttgactttctgtccttgttcctcgtcccatctggagcatttccaattctggttttgcggagcagcaggtctgagcttgtccggcgagggtgggagttggtcccggcggagatccagtgggaagagccggcggctgcccgggcaactcccccactggaaaggattctgaaagaaatgaagtcagccctcagaaatgaagttgactgcctgctggctttctgttgactggcccggagctgtactgcaagacccttgtgagcttccctagtctaagagtaggatgtctgctgaagtcatccatcaggttgaagaagcacttgatacagatgagaaggagatgctgctctttttgtgccgggatgttgctatagatgtggttccacctaatgtcagggaccttctggatattttacgggaaagaggtaagctgtctgtcggggacttggctgaactgctctacagagtgaggcgatttgacctgctcaaacgtatcttgaagatggacagaaaagctgtggagacccacctgctcaggaaccctcaccttgtttcggactatagagtgctgatggcagagattggtgaggatttggataaatctgatgtgtcctcattaattttcctcatgaaggattacatgggccgaggcaagataagcaaggagaagagtttcttggaccttgtggttgagttggagaaactaaatctggttgccccagatcaactggatttattagaaaaatgcctaaagaacatccacagaatagacctgaagacaaaaatccagaagtacaagcagtctgttcaaggagcagggacaagttacaggaatgttctccaagcagcaatccaaaagagtctcaaggatccttcaaataacttcaggctccataatgggagaagtaaagaacaaagacttaaggaacagcttggcgctcaacaagaaccagtgaagaaatccattcaggaatcagaagcttttttgcctcagagcatacctgaagagagatacaagatgaagagcaagcccctaggaatctgcctgataatcgattgcattggcaatgagacagagcttcttcgagacaccttcacttccctgggctatgaagtccagaaattcttgcatctcagtatgcatggtatatcccagattcttggccaatttgcctgtatgcccgagcaccgagactacgacagctttgtgtgtgtcctggtgagccgaggaggctcccagagtgtgtatggtgtggatcagactcactcagggctccccctgcatcacatcaggaggatgttcatgggagattcatgcccttatctagcagggaagccaaagatgttttttattcagaactatgtggtgtcagagggccagctggaggacagcagcctcttggaggtggatgggccagcgatgaagaatgtggaattcaaggctcagaagcgagggctgtgcacagttcaccgagaagctgacttcttctggagcctgtgtactgcggacatgtccctgctggagcagtctcacagctcaccatccctgtacctgcagtgcctctcccagaaactgagacaagaaagaaaacgcccactcctggatcttcacattgaactcaatggctacatgtatgattggaacagcagagtttctgccaaggagaaatattatgtctggctgcagcacactctgagaaagaaacttatcctctcctacacataagaaaccaaaaggctgggcgtagtggctcacacctgtaatcccagcactttgggaggccaaggagggcagatcacttcaggtcaggagttcgagaccagcctggccaacatggtaaacgctgtccctagtaaaaatac

SEQ ID NO: 2032 - DNA, 1319 bp, Homo sapiens
  SIMILAR (551)..(1213): 1001254mologous to Homo sapiens CASH beta protein,accession number Y14040,Smith-Waterman Score=1114.
cgcagttcccgggtcgactatttcgtgtcgttgggcttttcccacttccttctactacgtacttcttccctattcctcctactgaggccattaaacccttagttgtaattttccctgaacatgctttacattctgatgaattctgaaaaagaatgtggggtttccttgcagatgagttcatctgttgtttcatttcctttacaatgtaggttttcttctctgtctttttggattagcctgtttttggttctgtctaccaaggatccctttctttagacttctatagatccctttctatagaacttaatctacttaagtcagggagaccacccagaaggaaagagcccatactttcaatcttaggcataagttagcttgataagattttcagaaaaattcccttttaaccacagaactcccccactggaaaggattctgaaagaaatgaagtcagccctcagaaatgaagttgactgcctgctggctttctgttgactggcccggagctgtactgcaagacccttgtgagcttccctagtctaagagtaggatgtctgctgaagtcatccatcaggttgaagaagcacttgatacagatgagaaggagatgctgctctttttgtgccgggatgttgctatagatgtggttccacctaatgtcagggaccttctggatattttacgggaaagaggtaagctgtctgtcggggacttggctgaactgctctacagagtgaggcgatttgacctgctcaaacgtatcttgaagatggacagaaaagctgtggagacccacctgctcaggaaccctcaccttgtttcggactatagagtgctgatggcagagattggtgaggatttggataaatctgatgtgtcctcattaattttcctcatgaaggattacatgggccgaggcaagataagcaaggagaagagtttcttggaccttgtggttgagttggagaaactaaatctggttgccccagatcaactggatttattagaaaaatgcctaaagaacatccacagaatagacctgaagacaaaaatccagaagtacaagcagtctgttcaaggagcagggacaagttacaggaatgttctccaagcagcaatccaaaagagtctcaaggatccttcaaataacttcaggatgataacaccctatgcccattgtcctgatctgaaaattcttggaaattgttccatgtgattaacatggaactgcctctacttaatcattctgaatgattaaatcgtttcattttctaaatgtgtaaaaaaaaaaaaaaaaaaaaaaactcgagggggggccc

SEQ ID NO: 2033 - DNA, 2069 bp, Homo sapiens
  SIMILAR (426)..(1760): 1001254mologous to Homo sapiens FLAME-1,accession number AF009616,Smith-Waterman Score=2298.
cccacgcgtccgactagtctcaactaaaagggactcccggagctaggggtggggactcggcctcacacagagagtgccggctattggacttttgtccagggacagctgagacaacaaggaccacgggaggaggtgtaggagagaagcgccgcgaacagcgatcgcccagcaccaagtccgcttccaggctttcggtttctttgcctccatcttgggtgcgccttcccggcgtctaggggagcgaaggctgaggtggcagcggcaggagagtccggccgcgacaggacgaactcccccactggaaaggattctgaaagaaatgaagtcagccctcagaaatgaagttgactgcctgctggctttctgttgactggcccggagctgtactgcaagacccttgtgagcttccctagtctaagagtaggatgtctgctgaagtcatccatcaggttgaagaagcacttgatacagatgagaaggagatgctgctctttttgtgccgggatgttgctatagatgtggttccacctaatgtcagggaccttctggatattttacgggaaagaggtaagctgtctgtcggggacttggctgaactgctctacagagtgaggcgatttgacctgctcaaacgtatcttgaagatggacagaaaagctgtggagacccacctgctcaggaaccctcaccttgtttcggactatagagtgctgatggcagagattggtgaggatttggataaatctgatgtgtcctcattaattttcctcatgaaggattacatgggccgaggcaagataagcaaggagaagagtttcttggaccttgtggttgagttggagaaactaaatctggttgccccagatcaactggatttattagaaaaatgcctaaagaacatccacagaatagacctgaagacaaaaatccagaagtacaagcagtctgttcaaggagcagggacaagttacaggaatgttctccaagcagcaatccaaaagagtctcaaggatccttcaaataacttcaggagcatacctgaagagagatacaagatgaagagcaagcccctaggaatctgcctgataatcgattgcattggcaatgagacagagcttcttcgagacaccttcacttccctgggctatgaagtccagaaattcttgcatctcagtatgcatggtatatcccagattcttggccaatttgcctgtatgcccgagcaccgagactacgacagctttgtgtgtgtcctggtgagccgaggaggctcccagagtgtgtatggtgtggatcagactcactcagggctccccctgcatcacatcaggaggatgttcatgggagattcatgcccttatctagcagggaagccaaagatgttttttattcagaactatgtggtgtcagagggccagctggaggacagcagcctcttggaggtggatgggccagcgatgaagaatgtggaattcaaggctcagaagcgagggctgtgcacagttcaccgagaagctgacttcttctggagcctgtgtactgcggacatgtccctgctggagcagtctcacagctcaccgtccctgtacctgcagtgcctctcccagaaactgagacaagaaagaaaacgcccactcctggatcttcacattgaactcaatggctacatgtatgattggaacagcagagtttctgccaaggagaaatattatgtttggctgcagcacactctgagaaagaaacttatcctctcctacacataagaaaccaaaaggctgggcgtagtggctcacacctgtaatcccagcactttgggaggccaaggagggcagatcacttcaggtcaggagttcgagaccagcctggccaacatggtaaacgctgtccctagtaaaaatacaaaaattagctgggtgtgggtgtgggtacctgtattcccagttacttgggaggctgaggtgggaggatcttttgaacccaggagttcagggtcatagcatgctgtgattgtgcctacgaatagccactgcataccaacctgggcaatatagcaagatcccatctcttta

SEQ ID NO: 2034 - DNA, 1095 bp, Homo sapiens
  SIMILAR (1086)..(1042): 801254mologous to Homo sapiens Human secreted protein, SEQ ID NO: 6953,accession number AAG02872,Smith-Waterman Score=58.
  misc_feature (1)...(1095): n = a,t,c or g
cattcctcccttggacaaataatatttattaagagctctctttttgacaagctttgtgttaggtctagtttttttccgtaggtcagataatttaataaatctttcaaataaatatataattaaaaactgaaaataaaaatgtccaaggaatggggaactaatggtattaagttttatatagaagggcatgagggaagtgtattaaaatttgttcaaatttatgactgagagggctaagaaggtacttaatttcctcagatgatactttgcggaacatgtgggtctatttgggttgacctttgcaaatagttgaacaaccacaccgtgtattccccataccccctaggactgcctgtccagggncaagccttaggtaccaacgaagtcccacaggtgaaggtccactcccaggttaatctgccatagggtaggccccggcacctttccctcttttccctttagggtgccctcccctctaccccacaacctccttatttcattctcaaacacagctattacaaacatgttttaatttcactggaaaaatctgttaaagaacttaaatcttggttcccctttgaagaaaaacattttagcacaagctttaaataaaagtttgagaaggagggtaaagagtgcaattgcccccattctaagctctgtatagacataccttacctctgactctaaaggccctgtgggatgaaaaagcaggtatcccaaaagaactctgcttggccctctgaatacggccttgaggtcagcccctggtgcctgctttctggcccacagaccgctgaaatccctaggagctgcccatgggagttaccaaaaatatgtgaataaactgaatgcagaggctgaggcaggtggatcaactgaggttcaggagtctaagaccagcctgggncaacatggtaaacccccatctctactataattacaaaatttagctgagcgtggtggcgggcacctgtaatcccagctactcaggagactgaggcaggagaatcatttgaacccgggaggcagatgttgccagtgagctgagatcacgtcattgcactccagcctgggcgacaagagcaaaactca

SEQ ID NO: 2035 - DNA, 2239 bp, Homo sapiens
  SIMILAR (834)..(1301): 891254mologous to Homo sapiens caspase-like apoptosis regulatory protein,accession number AF005774,Smith-Waterman Score= 654.
  misc_feature (1)...(2239): n = a,t,c or g
tgggacacaagccatagcaggaaacagcgagcttgcagcctcaccgacgagtctcaactaaaagggactcccggagctaggggtggggactcggcctcacacagtgagtgccggctattggacttttgtccagtgacagctgagacaacaaggaccacgggaggaggtgtaggagagaagcgccgcgaacagcgatcgcccagcaccaagtccgcttccaggctttcggtttctttgcctccatcttgggtgcgccttcccggcgtctaggggagcgaaggctgaggtggcagcggcaggagagtccggccgcgacaggacgaactccccctctggaaaggattctgaaagaaatgaagtcagccctcagaaatgaagttgactgcctgctggctttcctgttgactggcccggagctgtactgcaagacccttgtgagcttccctagtctaagagtaggatgtctgctgaagtcatccatcaggttgaagaagcacttgatacagatgagaaggagatgctgctctttttgtgccgggatgttgctatagatgtgggntccacctaatgtcaggggaccttctgggataatttacgggaaagaggtaagctgtctgtcggggacttggctgaactgctctacagagtgaggcgatttgacctgctcaaacgtatcttgaagatggacagaaaagctgtggagacccacctgctcaggaaccctcaccttgtttcggactatagagtgctgatggcagagattggtgaggatttggataaatctgatgtgtcctcattaattttcctcatgaaggattacatgggccgagtgcaagataagcaaggagaagagtttcttggaccttgtggttgagttggagaaactaaatctggttgccccagatcaactggatttattagaaaaatgcctaaagaacatccacagaatagacctgaagacaaaaatccagaagtacaagcagtctgttcaaggagcagggacaagttacaggaatgttctccaagcagcaatccaaaagagtctcaaggatccttcaaataacttcaggctccataatgggagaagtaaagaacaaagacttaaggaacagcttggcgctcaacaagaaccagtgaagaaatccattcaggaatcagaagcttttttgcctcagagcatacctgaagagagatacaagatgaagagcaagcccctagggaatctgcctggattaatcgattggcattgggcattgaggacagagctttctttcgaggacaccttcacttccctgggctactgaagtccagaaattcttgcatctcagtatgcatggtatatcccagattcttgggccaatttgcctgtatgcccgagcaccgagactacgacagctttgtgtgtgtcctggtgagccgaggaggctcccagagtgtgtatggtgtggatcagactcactcagggctccccctgcatcacatcaggaggatgttcatgggagaatcatgcccttatctagcagggaagccaaagatgttttttattcagaactatgtggtgtcagagggcccagctggagaacagcagcctctttggagggtggatgggccagcgatgaagaatgtggaattcaaggctcagaagcgagggctgtgcacagttcaccgagaagctgacttcttctggagcctgtgtactgcggacatgtccctgctggagcagtctcacagctcaccgtccctgtacctgcagtgcctctcccagaaactgagacaagaaagaaaacgcccactcctggatcttcacattgaactcaatggctacatgtatgattggaacagcagagtttctgccaaggagaaatattatgtctggctgcagcacactctgagaaagaaacttatcctctcctacacataagaaaccaaaaggctgggcgtagtggctcacacctgtaatcccagcactttgggaggccaaggagggcagatcacttcaggtcaggagttcgagaccagcctggccaacatggtaaacgctgtccctagtaaaaatacaaaaattagctgggtgtgggtgtgggtacctgtattcccagttacttgggaggctgaggtgggaggatcttttgaacccaggagttcagggtcatagcatgctgtgattgtgcctacgaatagccactgcataccaacctgggcaatatagcaagatcccatctctttaaaaaaaaaaaaa

SEQ ID NO: 2036 - DNA, 1337 bp, Homo sapiens
  SIMILAR (485)..(580): 1001254mologous to Homo sapiens CASH beta protein,accession number Y14040,Smith-Waterman Score=158.
ggacgtcgaggcattacaatcgcgaaaccaagccatagcatgaaacagcgagcttgcagcctcaccgacgagtctcaactaaaagggactcccggagctaggggtggggactcggcctcacacagtgagtgccggctattggacttttgtccagtgacagctgagacaacaaggaccacgggaggaggtgtaggagagaagcgccgcgaacagcgatcgcccagcaccaagtccgcttccaggctttcggtttctttgcctccatcttgggtgcgccttcccggcttttagggggagcgaaggttgaggttggcagcggcaggagagtccggccgcgacagggacgaactcccccactggaaaggattctgaaagaaatgaagtcagccctcagaaatgaagttgactgcctgctggctttcctgttgactggcccggagctgtactgcaagacccttgtgagcttccctagtctaagagtaggatgtctgctgaagtcatccatcaggttgaagaagcacttgatacagatgagaaggagatgctgctctttttgtgccgggatgttgctatagatgttggttccacctaatgtcagggacccttctggatattttacgggaaagaggtaagctgtctgtcggggacttggctgaactgctctacagagtgaggcgatttgacctgctcaaacgtatcttgaagatggacagaaaagctgtggagacccccttgttcaaggaccctccccttgtttcggactatggagtgctgatggcagagattggtgaggatttggataaatctgatgtgtcctcattaattttcctcatgaaggattacatgggccgaggcaagataagcaaggagaagagtttcttggaccttgtggttgagttggagaaactaaatctggttgccccccagatcaactggatttatttagaaaaatgcctaaagaacatcccacagaaatagccctgaagacaaaaatcccagaagtacaagcagtctgttccaaggagcagggacaagttacaggaatgttctcccaagcagcaatcccaaaagagtctcaaggatcccttcaaataacttcaggatgataacacccctatgcccattgtccctgatctgaaaattccttggaaattgttccatgtgattaacatggaactgcctctacttaatcattctgaatgattaaatcgtttcattttctaaatgtgttataatgtgtttagccctttcttgttgctgtatgtttagatgctttccaatcttttgttactactaataatgctataaaataaacctccttgtacttctttgaaaaa

SEQ ID NO: 2037 - DNA, 1490 bp, Homo sapiens
acagcagccaggtccccctctccatgttgccaattgacagaaactgtactaaagtgggtgtgtgtgcaggcgggcgtgtaatttcacaggtaaagcattaatgtgcttttacaaattaacagaaggacttattttgaggaagaaagtgattaccacaactctattttcacaaaaataataaaatattctctatttcaaaaaatggggaaaaaatgtctttaatctatgtcaaaagtgtgccatcgtgaaaaaagatctatcctgaacagggatatctgcagatacctgaacaggaaaaatgatgtgactaaaccagtaagccaggaaatttgaaggtcttcagccttgttaccgtccaggattttttctcctttttagtgctcaacataattttgatggtctatataaagctagaataaatctaaatgtaaaagtctaacgaaagctgattttctttaataataaacagtgaatatcatgagaaaaaccactttaaagctacctctcttctttttttcattttttagagatgggatctcactctatccccaggctggtgtgcagtggtgtgatcgtagcgcactgcagcctccaactcctgggctcaagtgatgttcccacctcacctccaggtagctaggactcacaggctctcacaccaccatacccagcttgggtctcttcttgaactaaacatttttattttataagcgctaatttaaagtcagtaagagcccccatttaattacaaacttcaatagttacccagaaaaagaaatagtctttaaaatcattttgataacaactgtttaatttactattcagatggaaagcctggtaggatatttgggtaatggtctgtaattaggtagcataactttgtacacatgaatcaactgggacccgatacaatctaaaacagaaattcaaatatattttccctcaatgaaaagggctgaggaagtcctccaaaatgtggagacatttcaagtctacatcaacacacatctgggacctgtgcagcattcatttaattctaaaagaagagggcatactgctcaggaaaaggggcagaggatttcccaggtcatcttgcttatttaaaacgggtttaggataaaccacacttttaggctggatggtacactagacagcaatgttttaacaagtcctaaaacactatacaggttttaaaatactatgataacaactcagtcatcattgcaaaaaggcattcaacatgacataaaatgtttgaggaaactgatgtttacctcttttaataccaaagctttttaaaaagttttaatcaatttaagataaaacttttaaaatatgtactacatatctgtgtatgcaatttcacctttacttaattacctagaggcataataaagaataatcatcagatgatgtagtatagtgatgtcctctaggctgggtagcggtccttacactaatggccttggacagtgtcctagtgccgaatt

SEQ ID NO: 2038 - DNA, 1043 bp, Homo sapiens
gctcagctggtggaattcggagagcacagcatggcccctccagcccacttcagggcactcttgtatcacccgggtaccgccacactggtcccccacccagccagcatctcccagcacagcccctctccctggggaaatgctctgggtagccagtctaaaggcagaggcacctaactgctccccgcagcccaccccacccaagattcagacacaagccaggaaaggacccaagagaaaatccttcaaggtggcctgaggtcccatccctccctcagacccatgtggtcccaggccaggctgcctgggacacggtaaataccactgtgtgcaaaaatcgaagtacaaaaccacaagactaaacaaaacaaacccagagagccaaacttgtagaggtgggcagtccagaaagcagggggcagccctccccctttccttctctccctgatcctcagaatatatattgttgtaataggaagcatttttgcattgttctcttgtgggtgtcactacagacatgttctggcgtgttctccgagggatggagcatcctgttatatatttgacttcaaattgagatgttggcttcattttttttttttttacccaattaatctcccaatccctagcaactgtgactctgtatttagcacaagagaaagctgagaatgtgggtcttgcctccttccagaaatatgtctggctcatcaggacatttttttaaaacttcaaaatatttttaagatattttacacttttataaaacaaaaaatcaaccaacaagagacttttctgaggaggaacatttgtatttgaacaagatccttggtgtgtagttcagtcttgcagtatacaagcttttgtgtataaatgttttatgatatgattccctgtgttttgcaggggtttttttctcttttgctttttagataaatatgtatatcaatattttaaattcatctttgctttttttagaggagtttgtaatccccttataacatgaaaataaacatttcctttttaacctcaaaaaaaaaaaaaaaaaa

SEQ ID NO: 2039 - DNA, 500 bp, Homo sapiens
cccaactgctagtggctgagtccctggcggggcgcggcggtgaaaggtgtcgcgtacgggcttcccgagctgacgtggcttgaattgggaggggggcagctggagcctcaggcggcagcgcttctaggtgagtaggggacgctacccaactcttccctctgcgagtccaataacggtcacccccgccagaggggccgcgggagctgcccaagcagatacaccggagtcccctcctcgccccgcctctcccggattcagtcctggatccggcccttcacccgcctccttcacctaccaggcctagttatagtagcccacaagcctcggcctctccggtgggccttcggggtcaccctgcgcagacttggaccacttgctcacggtctgtcccctccccggtacgtttctcctctgggagcgacggggaaaagcgcctaggtcagtcctgtccgcacggcaatgatcctggagcggcctgcataagtcggcctccgtacgca

SEQ ID NO: 2040 - DNA, 11307 bp, Homo sapiens
  SIMILAR (251)..(4903): 991254mologous to Homo sapiens giantin,accession number X75304,Smith-Waterman Score=7507.
  misc_feature (1)...(11307): n = a,t,c or g
aactgctagtggctgagtccctggcggggcgcggcggtggaaggtgtcgcgtacgggcttcccgagctgacgtggcttgaattgggaggggggcagctggagcctcaggcggcagcgcttctagaaatgctgagccgattatcaggattagcaaatgttgttttgcatgaattatcaggagatgatgacactgatcagaatatgagggctcccctagaccctgtgagtagttctgttctgatttaaactggaattacaccaagaatctgacatggaatttaataatactacacaagaagatgttcaggagcgcctggcttatgcagagcaattggtggtggagctaaaagatattattagacagaaggatgttcaactgcagcagaaagatgaagctctacaggaagagagaaaagctgctgataacaaaattaaaaaactaaaacttcatgcgaaggccaaattaacttctttgaataaatacatagaagaaatgaaagcacaaggagggactgttctgcctacagaacctcagtcagaggagcaactttccaagcatgacaagagttctacagaggaagagatggaaatagaaaagataaaacataagctccaggagaaggaggaactaatcagcactttgcaagcccagcttactcaggcacaggcagaacaacctgcacagagttctacagagatggaagaatttgtaatgatgaagcaacagctccaggagaaggaagaattcattagcactttacaagcccagctcagccagacacaggcagagcaagctgcacagttgagttccatgcagcaggtggtccgagagaaagatgcccgctttgaaacacaagttcgtcttcatgaagatgagcttcttcagttagtaacccaggcagatgtggaaacagagatgcaacagaaattgagggtgctgcaaaggaagcttgaggaacacgaagaatccttggtgggccgtgctcaggtcgttgacttgctgcaacaggagctgactgctgctgagcagagaaaccagattctctctcagcagttacagcagatggaagctgagcataatactttgaggaacactgtggaaacagaaagagaggagtccaagattctactggaaaagatggaacttgaagtggcagagagaaaattatccttccataatctgcaggaagaaatgcatcatcttttagaacagtttgagcaagcaggccaagcccaggctgaactagagtctcggtatagtgctttggagcagaagcacaaagcagaaatggaagagaagacctctcatattttgagtcttcaaaagactggacaagagctgcagtctgcctgtgatgctctaaaggatcaaaattcaaagcttctccaagataagaatgaacaggcagttcagtcagcccagaccattcagcaactggaagatcagctccagcaaaaatccaaagaaattagccaatttctaaatagactgcccttgcaacaacatgaaacagcatctcagacttctttcccagatgtttataatgagggcacacaggcagtcactgaggagaatattgcttctttgcagaagagagtggtagaactagagaatgaaaagggagccttgctccttagttctatagagctggaggagctgaaagctgagaatgaaaaactgtcttctcagattactctcctagaggctcagaatagaactggggaggcagacagagaagtcagtgagatcagcattgttgatattgccaacaagaggagctcttctgctgaggaaagtggacaagatgttctagaaaacacattttctcagaaacataaagaattatcagttttattgttggaaatgaaagaagctcaagaggaaattgcatttcttaaattacagctccagggaaaaagggctgaggaagcagatcatgaggtccttgaccagaaagaaatgaaacagatggagggtgagggaatagctccaattaaaatgaaagtatttcttgaagatacagggcaagattttcccttaatgccaaatgaagagagcagtcttccagcagttgaaaaagaacaggcgagcactgaacatcaaagtagaacatctgaggaaatatctttaaatgatgctggagtagaattgaaatcaacaaagcaggatggtgataaatccctttctgctgtaccagatattggtcagtgtcatcaggatgagttggaaaggttaaaaagtcaaattttggagctcgagctaaactttcataaagcacaagaaatctatgagaaaaatttagatgagaaagctaaggaaattagcaacctaaaccagttgattgaggagtttaagaaaaatgctgacaacaacagcagtgcattcactgctttgtctgaagaaagagaccagcttctctctcaggtgaaggaacttagcatggtaacagaattgagggctcaggtaaagcaactggaaatgaaccttgcagaagcagaaaggcaaagaagacttgattatgaaagccaaactgcccatgacaacctgctcactgaacagatccatagtctcagcatagaagccaaatctaaagatgtgaaaattgaagttttacagaatgaactggatgatgtgcagcttcagttttctgagcagagtaccctgataagaagcctgcaaagccagctgcaaaataaggaaagtgaagtgcttgagggggcagaacgtgtaaggcatatctcaagtaaagtggaagaactgtcccaggctctttcacagaaggaacttgaaataacaaaaatggatcagctcttactagagaaaaagagagatgtggaaaccctccaacaaaccatcgaggagaaggatcaacaagtgacagaaatcagctttagtatgactgagaaaatggttcagcttaatgaagagaagttttctcttggggttgaaattaagactcttaaagaacagctaaatttattatccagagctgaggaagcaaaaaaagagcaggtggaagaagataatgaagtttcttctggccttaaacaaaattatgatgagatgagcccagcaggacaaataagtaaggaagaacttcagcatgaatttgaccttctgaagaaagaaaatgagcagagaaagagaaagctccaggcagctcttattaacagaaaggagcttctgcaaagagtcagtagattggaagaagaattagccaacttgaaagatgaatctaagaaagaaatcccactcagtgagactgagaggggagaagtggaagaagataaagaaaacaaagaatactcagaaaaatgtgtgacttctaagtgccaagaaatagaaatttatttaaaacagacaatatctgagaaagaagtggaactacagcatataaggaaggatttggaagaaaagctggcagctgaagagcaattccaggctctggtcaaacagatgaatcagaccttgcaagataaaacaaaccaaatagatttgctccaagcagaaatcagtgaaaaccaagcaattatccagaagttaatcacaagtaacacggatgcaagtgatggggactccgtagcacttgtaaaggaaacagtggtgataagtccaccttgtacaggtagtagtgaacactggaaaccagaactagaagaaaagatactggcccttgaaaaagaaaaggagcaacttcaaaagaagctacaggaagccttaacctcccgcaaggcaattcttaaaaaggcacaggagaaagaaagacatctcagggaggagctaaagcaacagaaagatgactataatcgcttgcaagaacagtttgatgagcaaagcaaggaaaatgagaatattggagaccagctaaggcaactccagattcaagtaagggaatccatagacggaaaactcccaagcacagaccagcaggaatcgtgttcttccactccaggtttagaagaacctttattcaaagccacagaacagcatcacactcaacctgttttagagtccaacttgtgcccagactggccttctcattctgaagatgcgagtgctctgcagggcggaacttctgttgcccagattaaggcccagctgaaggaaatagaggctgagaaagtagagttagaattgaaagttagttctacaacaagtgagcttactaaaaaatcagaagaggtatttcagttacaagagcagataaataaacagggtttagaaatcgagagtctaaagacagtatcccatgaagctgaagtccatgccgaaagcctgcagcagaaattggaaagcagccaactacaaattgctggcctagaacatctaagagaattgcaacctaaactggatgaactgcaaaaactcataagcaaaaaggaagaagacgttagctacctttctggacaacttagtgagaaagaagcagctctcactaaaatacagacagagataatagaacaagaagatttaattaaggctctgcatacacagctagaaatgcaagccaaagagcatgatgagaggataaagcagctacaggtggaactttgtgaaatgaagcaaaaaccagaagagattggagaagaaagtagagcaaagcaacaaatacaaaggaaactgcaagctgcccttatttcccgaaaagaagcactaaaagaaaacaaaagtctccaagaggaattgtctttggccagaggtaccattgaacgtctcaccaagtctctggcagatgtggaaagccaagtttctgctcaaaataaagaaaaagatacggtcttaggaaggttagctcttcttcaagaagaaagagacaaactcattacagaaatggacaggtctttattggaaaatcagagtctcagcagctcctgtgaaaagtccaaaactagctctagagggtcttactgaagacaaggaaaagttagtgaaggaaattgaatctttgaaatcttctaagattgcagaaagtactgagtggcaagagaaacacaaggagctacaaaaagagtatgaaattcttctgcagtcctatgagaatgttagtaatgaagcagaaaggattcagcatgtggtggaagctgtgaggcaagagaaacaagaactgtatggcaagttaagaagcacagaggcaaacaagaaggagacagaaaagcagttgcaggaagctgagcaagaaatggaggaaatgaaagaaaagatgagaaagtttgctaaatctaaacagcagaaaatcctagagctggaagaagagaatgaccggcttagggcagaggtgcaccctgcaggagatacagctaaagagtgtatggaaacacttctttcttccaatgccagcatgaaggaagaacttgaaagggtcaaaatggagtatgaaaccctttctaagaagtttcagtctttaatgtctgagaaagactctctaagtgaagaggttcaagatttaaagcatcagatagaagataatgtatctaaacaagctaacctagaggccaccgagaaacatgataaccaaacgaatgtcactgaagagggaacacagtctataccaggtgagactgaagagcaagactctctgagtatgagcacaagacctacatgttcagaatcggttccatcagcgaagagtgccaaccctgctgtaagtaaggatttcagctcacatgatgaaattaataactacctacagcagattgatcagctcaaagaaagaattgctggattagaggaggagaagcagaaaaacaaggaatttagccagactttagaaaatgagaaaaataccttactgagtcagatatcaacaaaggatggtgaactaaaaatgcttcaggaggaagtaaccaaaatgaacctgttaaatcagcaaatccaagaagaactctccagagttaccaaactaaaggagacagcagaagaagagaaagatgatttggaagagaggcttatgaatcaattagcagaacttaatggaagcattgggaattactgtcaggatgttacagatgcccaaataaaaaatgagctattggaatctgaaatgaagaaccttaaaaagtgtgtgagtgaattggaagaagaaaagcagcagttagtcaaggaaaaaactaaggtggaatcagaaatacgaaaggaatatttggagaaaatacaaggtgctcagaaagaacccggaaataaaagccatgcaaaggaacttcaggaactgttaaaagaaaaacaacaagaagtaaagcagctacagaaggactgcatcaggtatcaagagaaaattagtgctctggagagaactgttaaagctctagaatttgttcaaactgaatctcaaaaagatttggaaataaccaaagaaaatctggctcaagccagttgaacaccggcaaaaaggcacaagccagaatttagctagcttcaaaagtcctgctagatgacactcaaagtgaagcagcaagggtcatagcagacaatctcaagttgaaaaaggaacttcagtcaaataaagaatcagttaaaagccagatgaaacaaaaggatgaagatcttgagcgaagactggaacaggcagaagagaagcacttgaaagagaagaagaatatgcaagagaaactggatgctttgcgcagagaaaaagtcctcttggaagagacaattggagagattcaggttactttgaacaagaaagacaaggaagttcagcaacttcaggaaaacttggacagtactgtgacccagcttgcagcctttactaagagcatgtcttccctccaggatgatcgtgacagggtgatagatgaagctaagaaatgggagaggaagtttagtgatgcgattcaaagcaaagaagaagaaattagactcaaagaagataattgcagtgttctaaaggatcaacttagacagatgtccatccatatggaagaattaaagattaacatttccaggcttgaacatgacaagcagatttgggagtccaaggcccagacagaggtccagcttcagcagaaggtctgtgatactctacagggggaaaacaaagaacttttgtcccagctagaagagacacgccacctataccacagttctcagaatgaattagctaagttggaatcagaacttaagagtctcaaagaccagttgactgatttaagtaactctttagaaaaatgtaaggaacaaaaaggaaacttggaagggatcataaggcagcaagaggctgatattcaaaattctaagttcagttatgaacaactggagactgatcttcaggcctccagagaactgaccagtaggctgcatgaagaaataaatatgaaagagcaaaagattataagcctgctttctggcaaggaagaggcaatccaagtagctattgctgaactgcgtcagcaacatgataaagaaattaaagagctggaaaacctgctgtcccaggaggaagaggagaatattgttttagaagaggagaacaaaaaggctgttgataaaaccaatcagcttatggaaacactgaaaaccatcaaaaaggaaaacattcagcaaaaggcacagttggattcctttgttaaatccatgtcttctctccaaaatgatcgagaccgcatagtgggtgactatcaacagctggaagagcgacatctctctataatcttggaaaaagaccaactcatccaagaggctgctgcagagaataataagcttaaagaagaaatacgaggcttgagaagtcatatggatgatctcaattctgagaatgccaagctagatgcagaactgatccaatatagagaagacctgaaccaagtgataacaataaaggacagccaacaaaagcagcttcttgaagttcaacttcagcaaaataaggagctggaaaataaatatgctaaattagaagaaaagctgaaggaatctgaggaagcaaatgaggatctgcggaggtcctttaatgccctacaagaagagaaacaagatttatctaaagagattgagagtttgaaagtatctatatcccagctaacaagacaagtaacagccttgcaagaagaaggtactttaggactctatcatgcccagttaaaagtaaaagaagaagaggtacacaggttaagtgctttgttttcctcctctcaaaagagaattgcagaactggaagaagaattggtttgtgttcaaaaggaagctgccaagaaggtaggtgaaattgaagataaactgaagaaagaattaaagcatcttcatcatgatgcagggataatgagaaatgaaactgaaacagcagaagagagagtggcagagctagcaagagatttggtggagatggaacagaaattactcatggtcaccaaagaaaataaaggtctcacagcacaaattcagtcttttggaaggtctatgagttccttgcaaaatagtagagatcatgccaatgaggaacttgatgaactgaaaaggaaatatgatgccagtctgaaggaattggcacagttgaaagaacagggactcttaaacagagagagagatgctcttctttctgaaaccgccttttcaatgaactccactgaggagaatagcttgtctcaccttgagaagctcaactctactgctgctatccagagatgagcaatcgcttcacttgtcctcacaactagaagattcttataaccaagtgcagtccttttccaaggctatggccagtctgcagaatgagagagatcacctgtggaatgagctggagaaatttcgaaagtcagaggaagggaagcagaggtctgcagctcagccttccaccagcccagctgaagtacagagtttaaaaaaagctatgtcttcactccaaaatgacagagacagactactgaaggaattgaagaatctgcagcagcaatacttacagattaatcaagagatcactgagttacatccactgaaggctcaacttcaggagtatcaagataagacaaaagcatttcagattatgccaagaagagcctcaggcaggagaaaccctcctggcagcatgagctgcatcagctcaggatggagaagagttcctgggaaatacatgagaggagaatgaaggaacagtaccttatggctagtctcagataaagatcagcagctcagtcatctgcataatcttataagggaattgaggtcttcttcctcggagactggagcctctcaaagtgcaataccaaagacaggcatccccagagacatcagcttccccagatgggttcacaaaatctggtttatgagacagaacttctcaggacccagctcaatggacagctttaaaggaaatttcaccaaaaggagttaagaattcagcaactgaacagcaacttctctcagctactggaagagaaaaacaccctttccattcagctctgcgagtaccagtcagagtcttcgtgagaaccagcagcactatggtgaccttttaaatcactgtgcagtcttggagaagcaggttcaagagctgcaggcggtgagtaaagagaaggggccactaaatatagatgttgctccaggagctccccaggaaaagaatggagttcacagaaagagtgaccctgaggaactaagggaaccgcagcaaagcttttctgaagctcagcagcagctatgcaccagcagacagcgaagtgaatgaattaagggaagctgctggaagaagaacgagaccaaagagtggctgctgagaatgctctctctgtgcccgaggagcagatcagacggttagagcacagtgaatggcactcttcccggactcctatcattgggctcgttggcaaccagggagcagcaactgtaatagattcttacaagcaacagttgtcgaaggaccccggagtggccgttggatggaagcgagtcctgcgttcactctgtcattcacgggacccggagtgcccactttctagcagccatcttactttctaaatgattcatgtcctgctcattatgtgttatacgggccatctatagacttagttgttactctatggaccagctcccctcaaaaacttggaattctctcacctctaacatcagaacatcaattccgagtggaacagtccttcccatttacaggtcttctcttccacctcttcacggaaaagtgcctggcaaaaacagaggtggatacgaggacaggttggagctgcagggactggcgagtctgctttcttctactgccctgagcctgaacgcttctgcttaatctgagaatcacatttggtttgttgagcctaatatttgttgagattttgcaggaccctgatcttttgtggtcctgtaaaagatactgaggaatgtctttcagccaagccaagaggatggtttcaataaacctaataatctgaagttcagtatcattttgattgataactttctttgccttgtttgcctggattttctcctgtttcagggggaaggtggctctgccataaacagagttcagggaaatgaacatgtcacctcataggacatctgatttaggtctcttgcacaatagggtggagaaagctgaaggaactccctaaggggttttagctgttagatcacatgggaggacagcatcttcttccccggccaatttcagatataattggagggagaatttcaggtcttagactataaggatagaatcccttttgcttttgcccttgatcacatgtatactaaggtattaagtggcccaagttctttcctttcaccaaagggtcagggagaagtgtctatggtacagtcagggttccaattcttgttcattccagggaatatcctgaatattcctggtaatgtgganccctgagtacagtgtctcaggggcccactgggagcccaatattaggtcattgactcttcagcccaggagtctgaactggtctaaacaccacacttgcaaactcctgacctcttggaagtactaaggctacttttgctgttagtgacagttatttacagtttctcagcccccattgactctgccctctgtggcaatggaaggagaatatagagaagacaaaattaaatatagatggacctgagaaggacagcccaggatagaattcccatttgtgcctattccctgcctcccctcccctcccccatcctaccagttggttattttctcattgcatacgtgatgtgttcaactgcctagcctctccctaaagaagagagaagacaagtgggctgactgatctgctctaaatctactgtggtgattaaatcttggttacaacatcctgggaagtttcctgaacaactgtaaaataataaaattattttcagaatga

SEQ ID NO: 2041 - DNA, 515 bp, Homo sapiens
  SIMILAR (230)..(511): 821254mologous to Mus musculus putative,accession number AK010359,Smith-Waterman Score=358.
  misc_feature (1)...(515): n = a,t,c or g
ggggaatgccggnnnctcggnnnnnncctaggggnnnccagtttagcccgnagnnncnncnggnnnnggaattnnngggtcgacgtatttcgtgctatgcccagcccgccttcctccggtgcgtccaccgatggcccaagaaagaagccgcagacgcctcgtcatcncccaagaaatgcggcggaggagcatgaagctcaagcgtggagccggctcatgtaagaaacccggttcaagtggctggggnccggcagtaggagagttccacagtgtacagaacatctgcgcgcggagagaatatcagcgacaggactacatggatgccatggctgagaagcaaaaattggatgcagagtttcagaaaagactggaaaagaataaaattgctgcagaggagcagaccgcaaagcgccggaagaagcgccagaagttaaaagagaagaaattactggcaaagaagatgaaacttgaacagaagaaacaagaaggacccggtcagcccaaggagcaggggg

SEQ ID NO: 2042 - DNA, 212 bp, Homo sapiens
  SIMILAR (6)..(131): 851254mologous to Homo sapiens calbindin D28K,accession number S46006,Smith-Waterman Score=198.
cgggggacctcccttgggagatcaatcccccgtcctcctgctctttgctccgtgagaaagatccacctacgacctcaggtcctgagatcgaccagcccaagaaacatctcaccaatttcaaatccgccactcccagaggccctggaactctggcccaaggctctctgactgactccttcccagatcttctcggcttagtggctgaagactga

SEQ ID NO: 2043 - DNA, 522 bp, Homo sapiens
  SIMILAR (371)..(493): 821254mologous to Homo sapiens unnamed HERV-H protein,accession number U92818,Smith-Waterman Score=175.
atgttgctcacacaaagcctgtttggtggtctcttcacacggacgcacatgaaatttggtgccgtgactcagatcaggggacctcccttgggagataaatcccctgtcctcctgctctttgctctagagagacaaaggagacacgttttatccatggacccaaaactccggtgctggtcacggactgggaaggcagccttcccttggtgtttaatcattgcagagatgcctgattattcacccacgtttcaaaggtgtcagaccacgcagggacgcctgccttggtccttcacccttagcagcaagtcccgcttttctggggaaggggcaagagcttgctacaagtgccagaaatctgaccaccaggccaaggaatgcccgcaacccgggattcctcctaagccatgtcccatctgtgcgggaccacactggaaatcggactgttcaactcacctggcagccactcccagagcccctggaactctggcccaaggctctctgactgactccttcttggcttag

SEQ ID NO: 2044 - DNA, 1134 bp, Homo sapiens
  SIMILAR (150)..(1): 721254mologous to Homo sapiens Human secreted protein, SEQ ID NO: 7420,accession number AAG03339,Smith-Waterman Score=170.
atgtgggaaagtttggaacttcctggaaacattttcaatggctttgaccaaaatgctgataatgatatggacgatgaaattcaggctgaggtcatctcagatggagatgaggaatttgttgggaactggaataagcctagagacttggtgccctgcatcctagccactctagccttgactaaaaggggacaagatacagctcagaccatggcttcagagggtgcaaggccaaagcattggcagcttccaggaggtgttgggcccgtgggtgctcagaaatcaagaattgaggtttgggaacctttgcctatatttcgcaggatgtatggaaaagcctgtatgtccaggcagaagtttgctgcaggggcagggttttcctggtatgttcctgtggcagttgttggagcaaaagttcacgatgtgaacctccatatgctgtcctttccatccaagtggaagctgcacacatgcatgaaatttggtgccgtgactcagatcgtgacctcccttgggaggtcctcctgttctttgctccttgagaaagatccacctatggtcctcagaccgaccagcccaagaaacatctcaccaatttcaaatctgacaaaggagacacgttttatccgtggacccaaaactccggcgccggtcacggactgggaaggcagccttcccttggtgtttaatcattgcagggacgcctctctgattattcacccaggttttagaggtgtcagaccacgcagggacgcctgccttagtccttcacccttagcgaatttaattaacctcaccttcaaggtgtacaataatagaaaaaagttgcaattccttgccttcactgtgagacaaacctcagccatgtctccagcacacaagaacttccaaacgcctgaacctcagcggccaggcattcctccagaacctcctcccccaggagcttgctacaagtgccagaaatccggccaccaggccaaggaatgcctgcagcccaggattcctcctaagccacgtcccatctgtgcgggaccccactggaaattggactgtccaactcacctggcatccactcccagagcccctggaactctggcccaaggctctctgactgcttcccagatcttcttggcttag

SEQ ID NO: 2045 - DNA, 642 bp, Homo sapiens; identical to SEQ ID NO: 87
  SIMILAR (123)..(1): 731254mologous to Homo sapiens Human secreted protein, SEQ ID NO: 7420,accession number AAG03339,Smith-Waterman Score=153.

SEQ ID NO: 2046 - DNA, 423 bp, Homo sapiens; identical to SEQ ID NO: 94
  SIMILAR (256)..(414): 581254mologous to Homo sapiens unnamed HERV-H protein,accession number U92818,Smith-Waterman Score=156.

SEQ ID NO: 2047 - DNA, 453 bp, Homo sapiens
  misc_feature (1)...(453): n = a,t,c or g
atcactactccagtgcggtggaattcgggagagcagagcacgtgtgtttttacgagaattatgctgagataggtaacagatgaggatgaaatttgggcttgactgaagtgggggggtgtgtctgtgaagccttgcggaagtacagcccagggcttccgaggcaaccgagcagcagtcttcagccgctaagccgagaagatctgggaaggagtcagtcagagagccttgggccggagttccaggggctctgggagtggctgcnnnnnnnnnnnnnnnnnnnnnnnnnnnnnnnnnnnnnnnnnnnnnnnnnnnnnnnnnnnnnnnnnnnnnnnnnnnnnnnnnnnnnnnnnnnnnnnnnnnnnnnnnnnnnnnnnnnnnnnnnnaggaaataatgatatgaaataacaaggagggggaagaaaataattgtcctccttgggtcaaccctctggt

SEQ ID NO: 2048 - DNA, 531 bp, Homo sapiens
  SIMILAR (313)..(450): 531254mologous to Human T-cell lymphotropic virus type 2 gag polyprotein,accession number AF139382,Smith-Waterman Score=160.
acaaaggagacacgttttatccgtggacccaaaactccggcgccggtcacggactgggaaggcagccttcccttggtgtttaatcattgcagggacgcctctctgattattcacccaggttttagaggtgtcagaccacgcagggacgcctgccttagtccttcacccttagcgaatttaattaacctcaccttcaaggtgtacaataatagaaaaaagttgcaattccttgccttcactgtgagacaaacctcagccatgtctccagcacacaagaacttccaaacgcctgaacctcagcggccaggcattcctccagaacctcctcccccaggagcttgctacaagtgccagaaatccggccaccaggccaaggaatgcctgcagcccaggattcctcctaagccacgtcccatctgtgcgggaccccactggaaattggactgtccaactcacctggcatccactcccagagcccctggaactctggcccaaggctctctgactgcttcccagatcttcttggcttag

SEQ ID NO: 2049 - DNA, 506 bp, Homo sapiens
  SIMILAR (294)..(428): 521254mologous to Human T-cell lymphotropic virus type 2 gag polyprotein,accession number AF139382,Smith-Waterman Score=153.
agacaaaggagacacgttttatccgtggacccaaaactccggcgctggtcacggactgggaaggcagccttcccttggtgtttaatcattgcagggaggcctgccttggtccttcacccttagcagcaagtcctgctttcctggggcaggggcaagatttaattaacctcgccttcaaggtgtacaataatagaaaaaagttgcaattcctggcctccactgtgagacaaaccccagccacatctccagcacacaagaacttccaaacgcctgaaccgcagcggccaggcgttcctccagaacctcctcccacaggagcttgctacaagtaccagaaatctgaccaccaggccaaggaatgcctgcagcccaggattcctcctaagccgtgtcccatctgtgcgggaccccactggaaattggactgttcaactcacctggcagccactcccagagcccctggaactctggcccaaggctctctgactgactccttctcggcttag

SEQ ID NO: 2050 - DNA, 1059 bp, Homo sapiens
  SIMILAR (328)..(459): 881254mologous to Homo sapiens calbindin D28K,accession number S46006,Smith-Waterman Score=211.
atgtggaaaggccccaaaggattagacatgtatggaaagagctcagtgagccctaagacatcagatatactggggagagacactctcctgctggccttgaaggtgcaaacagtggtgttgcaaactgcctgtggagagggccatgtggcaggaaactgtgggaggcctctagaaactgaaggcagtctccagctgacagctactaagaagctaagggactcagtcctgcaaccaaaaagtcctgaattctgccaacaatttacaagagcttggaataggacccaagttccagatgagactgaagccccagctggcacctatgcagcccaatcgggggacctcccttgggagatcaatcccctgtcctcctgttctttgctccatgagaaagatccacctacggcctcaggtcctcagaccgaccagcccaaggaacatctcaccaattttaaatcgggtttcagaggtgtcagaccacgcagggacgcctgccttggtccttcacccttagcggcaagtcccgcttttctggggaaggggcaagtaccccaaccccttctctctgtgtctctaccccttctccgcctttctggggggcaagaaacacccaaccccttctccttcaccctgagtggcaagtccgcttttctagaggagcaagtaccccaacctcgtatctctgtgccccagtcccttatttccacgccccgacctcttatctctgtggcccaatcccttatttctgcaccccaacctcttatatctctgtgccccaatcccttatttccatgccccgacctcttatctctgcaccccaaccccttatttccacgacccaacccctttcccgcttttctggaaggagcttgctacaagtgccagaaatctggccaccaggccaaggaatgcctgcagcccgggattcctcctaagctgcgtcccatctgtgcgggaccccactggaaatcggactgtccaactcacctggcagccactcccagagcccctggaactctggcccaaggctctctgactgcttcccagatcttcttggcttag

SEQ ID NO: 2051 - DNA, 1485 bp, Homo sapiens
  SIMILAR (784)..(933): 761254mologous to Homo sapiens calbindin D28K,accession number S46006,Smith-Waterman Score=195.
tgctctgagtatgaggactcctccccagctccagtaccagccacagatctcagctcaacactctcgagctctgtaccacaaccccaggatacagggaccagccagcagcttcatcccctggacccttggcatgagctgcttcgtgcccaggagctccaaggtgccaccaaccacaagggctacagccatgcagagcatgagcatgcaggcctaggtgtccagggtgggaatggggctctggctttttcgaacagtgggcacaggcatgctgttcccaccatcagctcaggcactggcaggaggaggactccaagttcttcggcttttggactcttgaacttacaccagtggtttgtcagtggctttcaagccttcagcgacagactgaaggctgcattgtcagcttccctacttttgaggtttggggactcagactggcttcctagctcttcagcttgcaaatgtcttatgctgggacttcactttgtgattgtaggtaacatctgtgctacactcaaggagaaatactcctcaatgctccatttagatgtgaccatgaagaaaaatggggagaaaagaacaaggctccaaaaaagaaagaagggaatgcctccacatccggcttatgaggacctaaacatagctgccatcactctccctgccaatgttgtccttcatcagccaagtggcttcagaacttcagggcagctggaccccgtttggtggtctcttgacacggacgcgcatgaaatttggtgccaagacccgggacttggatcaggggacttcccttgggagatcactcccctgtcctcctactctttgctccatgagaaagatccacctacgacctcaggtcctcagaccgaccagcccaagaaacatctcaccaatttcaaatccaagacaaaggagacaggttttatccatggacccaaaactccggcaccggtcacggactgggaaggcagccttcccttggtgtttaatcattgcagggacacctctctgattattcacccatgtttcaagggtgtcagaccacgcagggatgcctgccttggtccttcacccttagcggcaagtcccgcttttctggagaaggggcaagatttaattaacctcgccttcaaggtgtacaataatagaaaaaagttgcaattccttgcctccactgtgagacaaaccgcagccacatctccagcacacaagaacttccaaatgcctgaaccgcagcggccaggcgttcctccagaacctcctcccacaggagcttgctacatgtgccggaaatctggccactgggccaaggaatgcccgcagcccgggattcctcctaagccgcgtcccatctgtgtaggaccccaccgaaaatcggactgttcaacttacctggcagccactcccagagcccctggaaatctggcccaaggctctctgactgactccttcccagatcttctcggcttagcagctgaagactga

SEQ ID NO: 2052 - DNA, 478 bp, Homo sapiens
  SIMILAR (32)..(478): 731254mologous to Mus musculus putative,accession number AK010359,Smith-Waterman Score=545.
atctggaaggctgccatggctagcccagccgcctcctcggtgcgaccaccgaggcccaagaaagagccgcagacgctcgtcatccccaagaatgcggcgtgaggagcagaagctcaagctggagcggctcatgaagaacccggacaaagcagtgcctattccagagaaaatgagtgaatgggcacctcgacctcccccagaatttgtccgagatgtcatgggttcaagtgctggggccggcagtggagagttccacgtgtacagacatctgcgccggagagaatatcagcgacaggactacatggatgccatggctgagaagcaaaaattggatgcagagtttcagaaaagactggaaaagaataaaattgctgcagaggagcagaccgcaaagcgccggaagaagccccccaaagttaatagaagaagaatttactggctaagaagatgaaacttgaacagaagaaacaagaaggac

SEQ ID NO: 2053 - DNA, 567 bp, Homo sapiens
  SIMILAR (433)..(558): 831254mologous to Homo sapiens unnamed HERV-H protein,accession number U92818,Smith-Waterman Score=182.
atgctgagattggcagagggcagggtgctgacagcagttagggaaaaatctattaagcaatgtcactgttcccagttgagcaaagtccataccaaggagggagtgaaggagcagagaagcaagattttggtttgcctggcagagtatttctccagcacactgtctgctgattcatcctctcccactcattacgttagtgctttgatgaatcaaatcacctctgcccttcaaagtaacagcccagaagcactcaaatataaggataaggctaaagccatttctgttagagagaacaagaattcactaccagaagttgcagcggtgctggcagccgactggatggtgcccacctacattgagggtgggtcttcctcttccaagtccactgactcaaatgagcttgctacaagtgctggaaatctggccaccgggtcaaggaatgcctgcagcccaggattcctcctaagccatgtcccatctgtgcgggaccccactgaagatcggactgttcaactcacctggcagccactcccagagcccctggaactctggcccaaggctctctga

SEQ ID NO: 2054 - DNA, 471 bp, Homo sapiens
  SIMILAR (320)..(442): 871254mologous to Homo sapiens unnamed HERV-H protein,accession number U92818,Smith-Waterman Score=184.
atgagcagccagaggctgtttctgaccattgacctgcccaagactcagtgtgcccaagagaagctcagggtcataagaggatgtagggaccaagcaatggaagctttacaaatgacaaaaccatgcttcttcaaatccacctggagccaaaatcatgttgaaaaatgtgttccacatttctccccacccttatatgtggctctcaatcatttaatggctctgaagggctcacagaagtctccaaagaactataacacagtttttacaaaaatcaggaatggagcttgctacaagtgccagaaatctgaccaccaggccaaggaatgcctgcagcccaggattcctcctaagccgtgtcccatctgtgcgggaccccactggaaatcggactgttcagctcacctggcagccactcccagagcccctggaactctggcccaaggctctctgactgactccttttgggcttag

SEQ ID NO: 2055 - DNA, 987 bp, Homo sapiens
  SIMILAR (230)..(177): 551254mologous to Homo sapiens Human gene 71-encoded protein fragment, SEQ ID NO:433,accession number AAY86518,Smith-Waterman Score=48.
atgtcaggagccaagggattcacaggaggcattccaggggcaggagggggtgtgaaagagggtggggaaccaagggttggcatcctggatactgtggctgtggcacaggatgaggggctccacttgggggaaaagttggattgccctgcagagctcctcagggaggaggaaaggggcctggggaaagggtggattgataggtgtgggttcttggtctcgctgacttcaagaatgaagccgcggaccctcgctgtgagtgttacagttcttaaagatggtgtgtctggagtttgttccttcagatgtccagatgtgtccagagcttcttccttccggtgggttcatggtcttgctgactttaggagtgaagccgcagaccttcacaagtcaaggttttccggcttgggtagccaggtgtcacggcccagtgtccacctgcagctgctttctgtgtcagtcctctgcaccgccaaggtcatagaggtggttgagacaaaagagacatgttttatccgtgaacccaaaactccggcaccggtcatggactgggaaggcagccttcccttggtgtttaatcattgcagggacgcctctctgatgatacactcacgtttcaagggtgtcagaccacgcagggacgcctgccttggtccttcacccttagcggcaagtcccgctttcctggggcaggggcaagtacccctcaaccccttctcctttacccttagcgcacataagaacttccaaacacctgaaccgcagcagccaggtgttcctccagaacctcctcccccaggagcttgctacaagtgccagaaatctgaccaccaggccaaggaatgcctgcagcccaggattcctcctaagccgtgtcccatctgtgcgggaccccactggaaactggactgttcaactcacctggcagccactcccagagcccctggaactctggcccaaggctctctgactgactccttctcggcttag

SEQ ID NO: 2056 - DNA, 903 bp, Homo sapiens
  SIMILAR (286)..(417): 791254mologous to Homo sapiens calbindin D28K,accession number S46006,Smith-Waterman Score=180.
atgctcacagaaggctttttggccttcttggggtcaagcctaactgccacatctttaagtgctgtgtctattggagaaagcagttggatccagtgtcatacaagtctttggggatgtaaaggtggccaagaaagagcccctggtgaggtggaagagccttggtgggccaaggccaaggcaggcatcacctttggctgtcacctggccaaacaagagatggggcagacccctgtggcacagacagccccaaaggatgtgagtccccagagtacagatgatccttattcacaatcgggggacctccctcgggagatcaatcccctgtcctcctgctatttgctccatgagaaagatccacctacgacatcgaatcctcagaccaaccagcccaaggaacatctcaccaattttaaatcagtgcgactcatcccaaacctttcttctttccctcccacctgtccccacagtcccaaccccaagcgttgctttcaatcttccttttctaccgacccatctgacctctcccttcatcccaagattgctcctcctcaggtgtacaataatagagaagagttgcaattacttgcctcttctctgagagaaagcctagccacatctccagcacacaagaacttcaaaatgcctaaaccacagtggccaggtgttccttcaggacttcatccctcaggatcttgcttcacgtgctggaaatctggccactgggccaaggaatgcctgtggcccgggatccctcctaagctgtatcccatctatgagggactccactggaaatcggactgtccaactcacctggcaaccactcccagagcccctggaactctggcccaagactctctgactgactccttcccagatcttctcagcttagcagctgaagactga

SEQ ID NO: 2057 - DNA, 525 bp, Homo sapiens
  SIMILAR (9)..(59): 521254mologous to Human T-cell lymphotropic virus type 1 Gag,accession number S74562,Smith-Waterman Score=37.
atgcccatcctagcctcctggccccaccctcctggtcctttcctgctgctgactctcctgctaggactcacagggcctcccatgtggaccatgctaaaaaacaatattgcagaaaagaacgatattcacagcagggactctcacgccagccagtctggaatggcctcgtacatgctccaccaccttgaagcctctgcattttctcttcagcatctgcgctgcagcagcagtggcagcatgaaggctggtgtggccaactgctacccagagggcatggtcccaatcggaagctgcagcagcaaagacagtggatcttgctttaagtgccagaaattctgccactgggccaaggaatgcctgcagcccaggattcctcctaagctgtgccccatctgtgtgggacttcactggaaatcggactgtccaactcaccaggcagccactcccagagcccctggaactctggcccaaggctctctgactgactccttcccagatcttcttggcttagtgactgaagactga

SEQ ID NO: 2058 - DNA, 1151 bp, Homo sapiens
  SIMILAR (2)..(40): 611254mologous to Bacillus amyloliquefaciens precursor (AA - 29 to 443),accession number X52988,Smith-Waterman Score=44.
ggtgggcgccaaccccatcgaaagctggaaaaaacgcgggccgtgtctttaaagacagcgataagttagacgccaacgaccggatcctgaaagatcagacgcaagaatggtccggttctgcaaccttaccatctgacggaaaaacccgtttattttacactgactattccggtaaacattacggcaaacaaagcctgacaacagcgcaggtaaatgtgtcaaaatctgatgacacactcaaaatcaacggagtggaagatcacaaaacgatttttgacggagacggaaaaacatatcagaacgttcagcagtttatcgatgaaggcaattatacatccggcgacaaccatacgctgagagaccctcactacgttgaagacaaaggccataaataccttgtattcgaagccaacacgggaacagaaaacggataccaaggcgaagaatctttatttaacaaagcgtactacggcggcggcacgaacttcttccgtaaagaaagccagaagcttcagcagagcgctaaaaaacgcgatgctgagttagcgaacggcgccctcggtatcatagagttaaataatgattacacattgaaaaaagtaatgaagccgctgatcacttcaaacacgtccctggagtgtgatgttccccttcccgtgtccatgtgttctcatctggggatctctagagccgcacggcaggtttctacagaagaaggcttgagtcttgcccaagaatataattgtggtttttttgagacctctgcagccctcagattctgtattgatgatgcttttcatggcttagtgagggaaattcgcaagaaggagtccatgccatccttgatggaaaagaaactgaagagaaaagacagcctgtggaagaagctcaaaggttctttgaagaagaaggggatccttctagagcccgcagcggcagcttgctacaagtgcccgaaatctggccactgggccaaggaatgcccacagcccgggattcctcttaagctgcgtcccatctgggcgggaccccaccgaaaatcagactgttcaactcacctggcagccactcccagagcccgtggaactctggcccaaggctctctgactgactccttcccagatcgtctcggcttagcagctgaagactga

SEQ ID NO: 2059 - DNA, 500 bp, Homo sapiens
gcttagaaggagccagctacggggaaaccaaagcggacgtcgcagaaggaaaaagccaaaaaaaggcaaccgagtggaggtcacaagggcagaggcgaaaaggcgaagagaccagccaactaaaggattgtaaacgcaccaatcagctctctgtaaaacggaccaatcagctctctgtaatatggaccaatcagcaggatgtgggatcatacgccaatcctcttatggcagctgagccagcccaagctgtaaagcttgggtggagaccttcacccaagccacacattggagacaagtcagtatcattttggctcctgtggatgggaagcgtgcagcaagggcaaaaaatcggaccaccagccaagggaatgcctgcaggcccaggaattcctcataaagccatgtcccatgtgggggggggccccactggaaattggactgttcaactcacctggcagccactcccagagcccctggaactctggcccaaggctctctga

SEQ ID NO: 2060 - DNA, 603 bp, Homo sapiens
  SIMILAR (7)..(84): 401254mologous to Bovine leukemia virus gag,accession number K02120,Smith-Waterman Score=39.
atggccacagcaggcccagaaattggtcccagtggtctccaaggtttctctggcttgaagcacatcgaaggccctcaggctccccggattctgctgagctcagatcccaagtctcagattgtcttgggacttccagacatggaactggggctttatttttggctctgggcatctatgctgcttcctgttatgttgccagattcatacgtgtcagaccacacagggacgcttactcactgcagggacgcctctctgatcattcacccacgtttcaagggtgtcagaccacgcagggacgcctgccttggtccttcacccttagcggcaagtcccgcttttctggggaaggggcaaccacatctccggcacacaagaacttccaaacacctgaaccgcagtggccaggcattcctccagaacctcctcccacaggagcttgctacacgtgccggaaatctggccactgggccaaggaatgcccgcaggccaggattcctcctaagccgcatcccatctgtgtgggaccccactgaaaatcggactgttcaactcacctggcagccactcccagagcccctggaactctggcccaaggctctctga

SEQ ID NO: 2061 - DNA, 672 bp, Homo sapiens
  SIMILAR (1)..(303): 1001254mologous to Homo sapiens Similar to NPD002 protein,accession number BC001817,Smith-Waterman Score=512.
atggataccgttggccggaggcttcgggactccctgggccgaactgtggacctggggctgacaggcaaccatggagttgtgcaccccagtcttgcggacagtgccaacaagtttgaggagaacacctactgcttcggccggaccgtggagacactgctgctccgctttggcaagaccatcatggaggagcagctggtactgaagcgggtggccaacatcctcatcaacctgtatggcatgacggccgtgctgtcgcgggccagccgctccatccgcattgggctccgcaaccacgaccacgaggaaggacaaggttatctaggactgggagtgaaggtttctgacatggctcagccccacatcctgcacttcttgcccatccagcagggtagcccaggccaggagcgcaggcacgaccagaggcaaatgtcccactcaggaatatgccctatgcctctcagcaggcgcctggaccgcccaggagcttgctacaagtgccagaaatctgaccaccaggccaaggaatgcccgcagcccaggattcctcctaagccgtgtcccatctgtgcgggaccccactggaaattggactgttcaactcacctggcagccactcccagagcccctggaactctggcccgaggctctctgactgactccttctcggcttag

SEQ ID NO: 2062 - DNA, 765 bp, Homo sapiens
  SIMILAR (439)..(669): 421254mologous to Bovine leukemia virus gag,accession number D00647,Smith-Waterman Score=156.
atggagaataaagaagctttcgtgtttcaggctcacaaagaagagatttttgagagggaaaaacagatggagcaggatctgaccagaagagttagggagttaggaagagatgctaacaacaggctctcaccagctgccaaggagaatgaaggcacatggctgtgttggccatttaaaaacaatagacaaaggagacacattttatccgtggacccaaaactccggcgccagtcacggactgggaaggcagccttcccttggtgtttaatcattgcagggacgcctctcttgattattcacccacatttcagaggtgtcagaccacgcagggacgcctgccttggtccttcacccttagcagcaagtcctgcttttctgaaggaaaggcaagatttaattaaccttgccttcaaggtgtacaataatagaaaaacgttgcaattccttgcctccactgtgagacaaaccccagccacatctccagcacacaagaacttccaaacgcctgaaccgcagcggccaggcattcctccagaaccaccttccccaggagcttgctacaagtgccagaaatctggccaccaggccaaggaatgcccgcagcccaggattcctcctgagccgtgtcccatccgtgcaggaccccactggaaatcggactcttcaactcacctggcagccactcccagagcctctggaactctggcccaaggctctctgactgactccttcccagatcttcttggcttagcggctgaagactga

SEQ ID NO: 2063 - DNA, 474 bp, Homo sapiens
tttttttgtttttttttttacccctccttagctttatgcgctcagaaaccaaattaaaccccccccccatgtaacaggggggcagtgacaaaagcaagaacgcacgaagccagcctggagaccaccacgtcctgccccccgccatttatcgccctgattggattttgtttttcatctgtccctgttgcttgggttgagttgagggtggagcctcctggggggcactggccactgagcccccttggagaagtcagaggggagtggagaaggccactgtccggcctggcttctggggacagtggctggtccccagaagtcctgagggcggaggggggggttgggcagggtctcctcaggtgtcaggagggtggccgccttccgcacacttgaggaaccctcccctctccctcggtgacatcttgcccgcccctcagcaccctgccttgtctccaggaggtccgaagctctgtggga

SEQ ID NO: 2064 - DNA, 766 bp, Homo sapiens
ttgtattttttgtagagacggggtttcgccacgttgctcaggctggtctcaaagtcctgggctaggatgacaggcatgagccaccgtgcccagccttgcctgcgcttttcctcccacactccaaccagatccgcagacgaggctgaggggccctccatctaatcagaaagggcagccctctgcatggacaggcccataagcatgtggctcagcaaggacgtggcattttgtccagagtgcacaggccaacacatgtgcacacacaggggcgtaaggccaccaggttaggtctctgttctgcacatgggagggccccgcatccaagcttcctgcccttagttcccgtatgttgttcatgcaccactgtgagacccccatggccctgcccgctgctgccctgcccaccccctagttctggtgcctcaacttccaggactgcaagctcaccagtcctttctctcacagactagccttacctctctgagacagaagaacaagtcagtcccgtggctcactcacaaagccagccttgaacccaggtctgactcagatgccaaaacctccagccatcccagggactggccccaccccatggtggactgtgccgcggctctcagctggactcagcccctgtggatgttctgtggcagcaggcttgcctttcatgatgcgccagctcctgcgcacatgcgagccatttgggcctccagagctatacctgcagcaaggccaggtccgcatcttgggctagctgctgcctcgtgcc

SEQ ID NO: 2065 - DNA, 409 bp, Homo sapiens
  SIMILAR (75)..(290): 431254mologous to Homo sapiens unknown protein,accession number M22332,Smith-Waterman Score=121.
aaaatgaaatatgactgcatacccactataattgcaaacattaaaaaacaagaaaatgccaattatcgtaagtatgtagtgaaacaggatttattttatactgcaggaatgatgtaaatgggatgcccctattctagaaaccgtttggttttttgtacgtagttgaacgtatggacatgaactgtactccagccattccatttctatttatatacccattagaaatgtatggccatgcatactaaatgacatgtacaagaatttttatggcagcattatttataatagccaccaaaccagaaatcacctaagtgttccatcaatagtattcatgcaacaaaatactatatagcaatgaaattgatccaactatacccatatgtagcaacatggataaataaggtttttt

SEQ ID NO: 2066 - DNA, 522 bp, Homo sapiens; identical to SEQ ID NO: 95
  SIMILAR (58)..(177): 901254mologous to Homo sapiens calbindin D28K,accession number S46006,Smith-Waterman Score=199.

SEQ ID NO: 2067 - DNA, 1350 bp, Homo sapiens
  SIMILAR (1221)..(622): 991254mologous to Plasmid F Protein E,accession number M12987,Smith-Waterman Score=1040.
ttatacaatactgtcgctccgaggagcgaactgatgtaaagagcttaaactagttcttgatgcagatgacgttttaagcacagaagttaaaagagtgataacttcttcagcttcaaatatcaccccagcttttttctgctcatgaaggttagatgcctgctgcttaagtaattcctctttatctgtaaaggctttttgaagtgcatcacctgaccgggcagatagttcaccggggtgagaaaaaagagcaacaactgatttaggcaatttggcggtgttgatacagcgggtaataatcttacgtgaaatattttccgcatcagccagcgcagaaatatttccagcaaattcattctgcaatcggcttgcataacgctgaccacgttcataagcacttgttgggcgataatcgttacccaatctggataatgcagccatctgctcatcatccagctcgccaaccagaacacgataatcactttcggtaagtgcagcagctttacgacggcgactcccatcggcaatttctatgacaccagatactcttcgaccgaacgccggtgtattaattgcgttgcgctcactgcccgctttccagtcgggaaaacccccgccgccatgcatacgctggtaactttgaggcagctggtaacgctctatgatccagtcgattttaaaagagacgatgcctgagccatccggcttacgatactgacacagggattcgtataaacgcatggcatacggattggtgatttcttttgtttcactaagccgaaactgcgtaaaccggttctgtaacccgataaagaagggaatgagatatgggttgatatgtacactgtaaagccctctggatggactgtgcgcacgtttgataaaccaaggaaaagattcatagcctttttcatcgccggcatcctcttcagggcgataaaaaaccacttccttccccgcgaaactcttcaatgcctgccgtatatccttactggcttccgcagaggtcaatccgaatatttcagcatatttagcaacatggatctcgcagataccgtcatgttcctgtagggtgccatcagattttctgatctggtcaacgaacagatacagcatacgtttttgatcccgggagagactatatgccgcctcagtgaggtcgtttgactggacgattcgcgggctatttttacgtttcttgtgattgataaccgctgtttccgccctggcagccactcccagagcccctggaactctggcccaaggctctctgactgactccttcccagatcttctcggcttagcagctgaagactgacgctgcctgattgccttggaagccccgtagaccat

SEQ ID NO: 2068 - DNA, 933 bp, Homo sapiens
  SIMILAR (715)..(852): 511254mologous to Human T-cell lymphotropic virus type 2 gag protein,accession number X89270,Smith-Waterman Score=147.
atggaggagaaggaggagaggaaaaggagaaggaagaggaagaggaggagggaagagggaagagatggggaaagaaaaagaatggagaagcaaaaggagaaccaggatcctaaagatccacctacgacctcaggtcctcagaccgaccagcccaagaaacatctcaccaatttcaaatccgagacaaaggagacacgttttatccgtggacccaaaactccggcgccagtcacggactgggaaggcagccttcccttggtgtttaatcattccagggacacctctctgattattcacccaggcttcagaggtgtcagaccacgcagggacgcctgccttggtccttcacccttagcggcaagtcccacttttctggggaaggggccagctgctcctcgccagaccgagctaggtcccaattcttcctcagcctccgctcctccaccctataatccttttatcgcctcccctcctcacacctggtccggcttacagtttccttccatgactagccctccccctcctgcccagcaatttactcttaaaaaggtggctggagctaaaggcatagtcaaggatttaattaacctcaccttcaaggtgtacaataatagaaaaaagttgcagttccttgcctccactgtgagacaaaccccagccacatctccagcacacaagaacttccaaacgcctgaactgcagcagccaggtgttcctccagaacctcctccccgaggagcttgctacaagttccagaaatctggccaccgggccaaggaatgcctgcagcccaggattcctcctaagccacatcccatctgtgtgggaccccactggaaatcggactgtccaactcacctggcagccactcccagagcccctggaactctggcccaaggctctctgactccttcccagatcttcttggcttag

SEQ ID NO: 2069 - DNA, 483 bp, Homo sapiens
tcacagcagcagatttctagacccagtgtcatgtctccttgtccaaactgtggccccttcatggtagtgtggatcttctgagaagagctctaagtagtttgaatgtattgtgagaatcagattgaatctagcttcagaatctgagttttgcaggtctggcagccactcccagagcccctggaactctggcccaaggctctctgactgactccttcccagatcttctcggcttagcggctgaagactgacaccggccgatcgcctcggaagccccccaggagggctgctctgctggggagctgcaggatggcaccaatagctctgcttcgagcccaggtcaataataagaagaggggttgccatttccagcaagaggttgcaaacatcatttctctgggctccaattgtctgatggtgccctgttctgcctattatccatctgtcttcctcaatagctggtgcatccatttcttgggccctcat

SEQ ID NO: 2070 - DNA, 440 bp, Homo sapiens
  SIMILAR (53)..(250): 981254mologous to Homo sapiens platelet glycoprotein VI- 3,accession number AB043821,Smith-Waterman Score=361.
agacttctaggagtatcaccaccagtccaaaggagtcagactctccagctggtcctgcccgccagtactacaccaagggcaacctggtccggatatgcctcggggctgtgatcctaataatcctggcggggtttctggcagaggactggcacagccggaggaagcgcctgcggcacaggggcagggctgtgcagaggccgcttccgcccctcccgcccctcccgcagacccggaaatcacacgggggagcttgctacaagtgccagaaatctgaccaccaggccaaggaatgcctgcagcccaggattcctcctaagccgtgtcccatctgtgcgggaccccactggaaatcggactgttcaactcacctggcagccactcccagagcccctggaactctggcccaaggctctctgactccttctcggcttagcggctga

SEQ ID NO: 2071 - DNA, 360 bp, Homo sapiens
  SIMILAR (4)..(60): 941254mologous to Homo sapiens unnamed HERV-H protein,accession number U92818,Smith-Waterman Score=100.
atgacctcaggtcctcagaccgaccagcccaagaaacatctcaccaatttcaaatccggtgtcagaccacgcagggacgcctgccttggtccttcacccttagcggcaagtcccgcttttctgagggaggggcaagtacccctcaaccccttctccttcacccttagcggagcttgctacaagtgcccgaaatctgaccaccaggccgaggaatgcctgcagcccaggattcctcccaagccgtgtcccatctgtgcgggaccccactggaaatcggactgttcaactcacctggcagccactcccagagcccctggaactctggcccaaggctctctgactgactccttctctgcttag

SEQ ID NO: 2072 - DNA, 768 bp, Homo sapiens
  SIMILAR (346)..(690): 411254mologous to Human T-cell lymphotropic virus type 1 Gag,accession number S74562,Smith-Waterman Score=210.
atggtggtgtcccagaacttggtcctttcagatgttcagatatgtctggagtttcttcttccggtggggtcgtgggtcttgctgacttcaggagtgaagctgcagaccttcacagtgagcgttacagctcttaaaggtggcctgtccagagttgttcattcttcctggctgctcctcatcaggtccagccagttagggtttaggctctttttcatcaaatatgaaaacccagcccagttcatggctcatttggtggcaaccctgaaacgctttacagccctagaccttgaagggtcagaaggcttattctcattatgcattttattacccaatctgctcccaacattaaataaagctcaaaaattagattctggccctcaaaccccacaacaggacttaattaaccttgccttcaaggtgtacaataacagagaagagttgcaattacttgcctctgctgtgagagaaaccccagccacatctccagcacataagaacttcaaaacgcctaagccacagtggtcaggccttccttcaggacctcctcccccaggatcttgcttcaagtgccagaaatctggccactgggcaaaggaatgcctgcagcccaggattcctcctaagccatgtcccatctgtgtgggaccccactggaaatgggactgtccaactcacctggcagccactcccagagtccctggaactctggcccaaggctctctgactgactccttcccaaatcttctcagcttagcagctgaagattga

SEQ ID NO: 2073 - DNA, 1638 bp, Homo sapiens
  SIMILAR (439)..(1608): 1001254mologous to Homo sapiens bG153O3.1 (similar to C.elegans hemicentin precursor),accession number AL133515,Smith- Waterman Score=2035.
agtgtcgcgttcgtctttgcttgtccagcagttgactacctggtgaaaatttcatgggaacttcaaggagacgaagaacaggatggacttagaaacatgatatggcaaacattgcagaaaacaaaggattatgaggaagatgtacgaatccaaaatgcaatcaatatagctcagggggcttctgaggcgatcgggcagcgtcagtcttcagccgctaagccgagaagatctgggaaggagtcagtcagagagccttgggccagagttccaggggctctgggagtggctgccagaaaataccagaaaatgaaaggaattgaaattaagagaagggagagattgaagtgtggcgccaagattgaaaggagaaagaggttgaaggatagggaggttggagaagagagtaaaaagaggccacttactggatttgaaattgaaccacccaaagtcactgtgatgcccaagaatcagtctttcacaggagggtctgaggtctccatcatgtgttctgcaacaggttatcccaaaccaaagattgcctggaccgttaacgatatgtttatcgtgggttcacacaggtataggatgacctcagatggtaccttatttatcaaaaatgcagctcccaaagatgcagggatctatggttgcctagcaaaagcccctaagttgatggtagttcagagtgagctcttggttgcccttggggatataaccgttatggaatgcaaaacctctggtattcctccacctcaagttaaatggttcaaaggagatcttgagttgaggccctcaacattcctcattattgaccctctcttgggacttttgaagattcaagaaacacaagatctggatgctggcgattatacctgtgtagccatcaatgaggctggaagagcaactggcaagataactctggatgttggctcacctccagttttcatacaagaacctgctgatgtgtctatggaaattggctcaaatgtgacattaccttgttatgttcagggttatccagaaccaacaatcaaatggcgaagattagacaacatgccaattttctcaagacctttttcagttagttccatcagccaactaagaacaggagctctctttattttaaacttatgggcaagtgataaaggaacctatatttgtgaagctgaaaaccagtttggaaagatccagtcagagacaacagtaacagtgaccggacttgttgctccacttattggaatcagcccttcagtggccaatgttattgaaggacagcagcttactttgccctgtactctgttagctggaaatcccattccagaacgtcggtggattaagaattcagctatgttgctccaaaatccttacatcactgtgcgcagtgatgggagcctccatattgaaagagttcagcttcaggatggtggtgaatatacttgtgtggccagtaacgttgctgggaccaataacaaaactacctctgtggttgtgcatgttctgccaaccattcagcatgggcagcagatactcagtacaattgaaggcattccagtaactttaccatgcaaagcaagtggaaatcccaaaccgtctgtcatctggtccaaggtaaatgatacatctagttatatttcctga

SEQ ID NO: 2074 - DNA, 671 bp, Homo sapiens
  SIMILAR (231)..(419): 661254mologous to Homo sapiens unnamed HERV-H protein,accession number U92819,Smith-Waterman Score=189.
  misc_feature (1)...(671): n = a,t,c or g
atcgcccggctgattaattcggcacgagctgacacttaagtcagagcattctgtagctgtattttacagaactgtaattgcacagattgttcctcttacaagagaaatatccagagctctaagaaaacaactgatgaaaacgacatgcgtgacatttggtgctgaagacccaggtcagagagactcctttgggggaccagtccgctgtccttgccctcactctgtgaggagacccacctacgacctcgggtcctcagaccaaccagctcaaggaacatctcaccaatttcaaatcgggaccccactggaaaatggactgtccaactcacccggcagccactcccagagcccctggaactctggcccaaggctctctgactgactccttcccagatcttctcggctcagcagctgaagactgacactgcttgattgcctgggaagcctataggaccatcacagacactttggataactcttacagtgaaggaagacgggaannnnnnnnnnnnnnnnnnnnnnctnnnnnnnnnnnnnnnnnnnnnnnnnnnnnnnnnnnnnnnnnnnnnnnnnnnnnnnnnnnnnnnnnnnnnnnnnnnnnnnnnnnnnnnnnnnnttgtgatttgttcctgccccaccttaactgagtgattaaccttgtgaaattcctt

SEQ ID NO: 2075 - DNA, 455 bp, Homo sapiens
  SIMILAR (301)..(426): 851254mologous to Homo sapiens unnamed HERV-H protein,accession number U92818,Smith-Waterman Score=187.
atgacctcaggtcctcagactgaccagcccaagaaacatctcaccaatttcaaatctgagacaaaagagacacattttatccgtggacccaaaactccggcgccagtcacggactgggaaggcagccttcccttggtgtttaatcattggagggacgcctctctgattatacacccacgtttcaagggtgtcagaccacgcagggacgcctgccttggtccttcacccttagcggcaagtcccgcttttctggggaaggggcaagagcttgctacaagtgccagaaatctgaccaccaaggcaaggaacgcctgcagcccaggattcctcttaagccgtatcccatctgtgcgggaccccactggaaatcggactgttcaactcacctggcagccactcccagagcccctggaactctggcccaaggctctctgactgactccttcttggcttag

SEQ ID NO: 2076 - DNA, 836 bp, Homo sapiens
  SIMILAR (70)..(363): 531254mologous to Homo sapiens Neural thread protein,accession number AAR95913,Smith-Waterman Score=213.
gtcttcttctaacctgaaagtttggactctggctgtaagcaattactggcctcagctttatctttttctttttctttttttttttttttgagacagagtcttgtctctgttgcccaggctggagtgcagtggctcaatcttggctcactgcaacgtctgcctcccaggttcaagcgattctccgtgcctcagcctccccagtagctgggactacaggcacacaccaccatgcccgggtaacttgtatttttagtagagatggggtttcgccattttagtcaggctaagtctcgaactcttcaggtgatccacctgcttcggcctcccagaagtgctggaattacaggcgtgacaacttgtgcctggctggcctcagctttaaataaagtgataaacctgctgaagtcagagataccatcctttttcctggttcaactctctgggttttctaggactctgctactacaagggtttttaaatttcaattaccatacattagtctattctaataatcttccaataatgcaaacttttactcaggattttggcagaatatcaggaaaaccatttcctggtataatgattctctgtaatagagaaatcctatacatcatgtagggtgaagggtagtttttatgtaatagttcactttgagctgtctagcagctgtctagaagctttcatagacacagacaggtagagagaaagacagggtagatgtcttaaccattatccttgttctagggttttcagtcaactctatctcaaaggactgcttctagaggccagcaagagaatagacatttgttttctgtcttgtagaacagaaacaggat

SEQ ID NO: 2077 - DNA, 3233 bp, Homo sapiens
  SIMILAR (209)..(135): 401254mologous to Mus musculus protocadherin,accession number AF281899,Smith-Waterman Score=51.
atgggctgcctggggacccagagagctcccagggcctttctgctgcttcctctacccctgcactttgctcagctctctaacctgactcagctccaggcagcggcttccctttccatggtgacccaccggagctctggaggtggtggggagcgaggagcgacagcagcaggaaccgaacagggcggcgcctgcctggcagcgtcactcttgcggggcctgtgggacgcaggtgaagttactcccattagggttagggttaggccatatgatcctttcaccctggctccgcttcacgagcacagtgaagcccagtgtgtcgcatcaccctctctgactgtgactaaggagaaatcgctgcttcccaagagcctgctggcgggttctcgggaagtagcgcgcagccgtgccctttgccatggacaggcccgcccaccacccaggccccaggtcacgcaacagcgcacccagctccagggacaacgcatcctccaatggaggccggcgacagagggtccccacagtcccaggagggggtctgattctgcaaagggaacacatcctcctaccactgggacctgccctccgcgccgcaggcaaggagccggctacagccgctacaattccggagagtcccggaggcgactcggacgacagcaggacctagtagcgcgcagcgacgagcagcgagatccagcgcctgcgacaaggagagaagacaaaatgatagaagagctgcagccctttggggagcacagacctaggagatccccaagccagggctgtgacaccctctttcaggctctgtggttcctggcatctccaagcttccagcggggagggcagctccaggtgctggccctctgcaaggctgcggctggaccaggtgcaccacaggcagcttctacagctggcaccagggaacatgggtatgcctggaagcttggagacaccaggaaccacagagctctgaagaggaagtcacagacctggctcagacggttcccagctggttgtcctgatgtctgctctgctctggctgatctcagggcttttatgggcctcagaggggaggaagtgtgtgccgattggtccatgggtggccatgggagtggggagtgcaggagggggactggtgggcagagggctgtggttcctaaatctccagttcaagaaaaaggcaaagagcccttgagtcttctacagtatttcatggtggatgaaaaagaaagatttctcagaattacctcagaacatgaagacaatgataatagcaacaatagtagtaatcatagcagtatcaatgagacaaaagagacatgttttatccatgaacccaaaactccggcgccggtcacggactgggaaggcagccttcccttggtgtttaatcattgcagggatgcctctctgattatacactcatgtttcaagggtgtcagaccacacagggacgcctgccttggtccttcacccttagtggcaagtcccgctttcctggggcaggggcaagtacccctcaaccccttctccttcacccttagcggcaagtcccactttcctgggacaggggcaagtacccctcaaccccttctccttcaccctcagcggcaagtcccgctttcctggggcaggggcaagtacccctcaaccccttctccttcaccctcagcggcaagtcccgctttcctggggcaggggcaagtacccctcaaccccttctccttcaccctcagcggcaagtcccgctttcctggggcaggggcaagtacccctcaaccccttctccttcacccttagcagcaagtcccgctttcctagggggcaagaaacccccaatcgcttatttccacaccccaacctcttatctctgcaccccaatcccttatttccgcaccctgacctcttatctctgtgccccaatcccttatttccatgcctcaaccccttctctgcttttctggagggcaagaaccccccaccccttctccgtgtctctactcttttttctgggcttgcctccttcactatgggagcttgctacacatgccagaaatctggccactgggccaaggaatgcccgcagcctgggattcctcctaagccgtgtcccatctctgtgggaccccactgaaaatcggactgttcaactcacctggcagccactcccggagcccctggaactctggcgcaaggctgactgactccttcccagatcttctcggcttagcggctgaagactgacactgcttgatcgcctcggaagccccctgggtatattgcatgatgttgaggtttggggtatgattgattctgtcacccagatactgagtatagtacacaatagttaatttttcaattgtctcttctccctctctccctccatagtagtccccagtgtcttttgttgccatcagcagctgtatgacactgtccccaggtctcatgtctgtataaacatacacatcataggatatttcagggaaggttggcgtgttatcatttgcatccatcacttgaatattgacgatgactggctcactttcttgtacaccatcaaatgctgttatcgaaaaggtgtaagtttgctgttcttccctgtccactggttgaagtaaggtgaggtagcgagtaataccagtctgtgtgacggtgaagactgaggtgtagtcattcagaaaaaggtgaagctctgggtcttttgtatcttctatgtccttgtccagagctactattcttaaaggtgaagtcaaattgagactgtccgaaatggttgctcccactggggcagattccaggatatagccttgataactgggcattgtaaaatatggactttgattgttttcatccagtatttcaatgtgtagaccggcaaaggcaggaagaggatgaccattgtcttgttcagccttaataaccaaatcaaatttctggtgaaagtctctgtttactggctccaggagactaagttctgctgtcctaggatgcatatggaaaaatcgtgggtaatcctcaggagtccctttgctccagttaccaacaagttcctcatctctatctgagaccacctcagcctggttttcatcattaatatcattatcagcattttggtcaaagccattcggtaagtctctagagagttccaaactttctcgcatcttcctatcttctacagagccctgcaaactgttccaatctctgcctgttacccagttccaaagtcgtttctgcat

SEQ ID NO: 2078 - DNA, 3981 bp, Homo sapiens
  SIMILAR (3837)..(3130): 821254mologous to Homo sapiens putative p150,accession number U93569,Smith-Waterman Score=1011.
  misc_feature (1)...(3981): n = a,t,c or g
atggaattttgtatttcattaggccggaaaataactttttcaaacatttttccctacaacggggccaattggaaggttttcttaaaaaagtcccaaccattattgaatgcactggttgagcaggatgatgccgaacgcttgttccgccgcttccgagcggcaggggatttaccgtatggcgcttttggtgaaattttctgggaaacacagtgccaggagatgcagcagcttgccgacagagtcattgcctgtcgccagccggggcagagtatggaaattgatctcgcctgcaacggtgtgcagataactggctggttgccgcagctttgggatgctgaagggatcagcttcagtgtcttcagctttgggatgctgaagggatcagcttcagtgtcttcagctttgggatgctggagcttgctacacatgctggaaatctgccactgggccaaggaatgcccacagcacggtattcctcctaagccacgtcccatctgtgtgggaccccaccgaaaatcggactgttcatctcacctggcagccactcccagagcccctggaactctggcccaaggctctctgactgactccttcccagatcttctcggcttagcggctgaagactgacaccggccgatcgcctcggaagccccctgccaacgccaagcacaaagctgcctgcagagccagcctctatctgtggtccttgtgccaattatcactgccccactcatgccgcaggatataaagcagagtgacagggtcacaggactgccagaggaatacaggtaggggccaagatttgtactgcagcttgtggctgctttagcgcagaggaggtgtctttttctgtgtctcacaaaggcactatctatcaccagtctgagcacccacagaattgaccgcctggatggagaattggtctctaatttgcacaaaggcaaccatgggctggtagtaacccccattacaggccctggtgtgtgatgttccccttcctgtgtccatgtgttctcattgttcaattcacgtctgttgtttcctgactttttaatgatctccattctaactggtgtgagatggtatctcattgtggttttgatttgcatttctctgatggccagtgatgatgagcattttttcatgtgtcttttggctacataaatgtcttcttttgagaagtgtctgttcatatccttcacccactttttgatggggttgtttgttttcttcttgtaaatttgtttgagttccttgtagattctggatattagccctttgtcagatgagtaggttgtgaaaattttctcccattctgtaggttgcctgttcactctgatggtagtttcttttgctgtgcagaagctctttagtttaattagatcccatttgtcaattttggcttttgttgctgttgcttttagtgttttagacatgaagtccttgcccatgtctatgtcctgaatggtattgcctaggttttcttctagggtttttatggttttaggtctaacatgtaagtctttaatccatctcgaattaatttttgtgtaaggtgtaaggaagggatccagtttcagctttctacgtatggctagccagttttcccagcaccatttattaaatagggaatccttcccccatttcctgtttttgtcaggtttgtcaaagatcagatagttgtagatatgtggcattatttctgaggtctctgttctgttccattggtctatatctctgttttggtaccagtaccatgctgttttggttactgtagccttgtagtatagtttgaagtcaggtagcgtgatgcctccagctttgttcttttggcttaggattgacttggcaatgtgggctcttttttggttccatgtgaactttaaagtagttttttccaattctgtgaagaaagtcattggtagcttgatggggatggcattgaatctataaattaccttgggcagtatggccattttcacgatattcattcttcctccccacgagcatggaatgttcttccgtttgtttttgtcctcttttattttgttgagcagtggtttgtagttctccttgaagaggtccttcacatcccttgtaagttggattcctaggtattttattgtctgtttcaagcagagctctgtgcatctgggtcaccacacccaaagtatgatttaggtctcccttagggatgctcagcagtaggaagggctgtaaggcagcagctgccccacagatggaggcagttgaatgattcagcccccatctgggccaacgttgtcctcgctcctcttcctcagagatacaggctgctgtgcctcccagtgttttcatcgtcacaatgggttccacagatgacaggtctgtcttcccagactggagttgggaggtgggcaggaggttattggcaaggggagccctctggccatcattcttctctgtccaggccaccctgaaggaaggaactggggagggtggcctgtcctcctgaggcttgggaggtctttgacacatgctcagtaatgcctttagctcaatcctgaagttctcgttcagccagcagtatatgaaggggttatagcaggtgctgctcatggcaaaccagtggaaggcaaagtagagggcattgttggtgcggatgaccttgctggacaggaggaggacgtagcagttgagggggaaccagcagagggcaaagaggactaccaccagcatcaacatcttgatggtcttcttctttttgcgccgcagnncaaagtactgctctgtggtcacatcgccaatcatattacacagccacagtttcttggccacacgagcgtaggccacagagatgatgaggaggggcaggatgtagagcaggatgaaggtggccaagtccaggtacttccagaagaggtcagctggctcagggaagtctggcaggcagagggagcgcacaatgtcctcactattagagtggcccaaattctgaacaatgacaacaccaagtgctgatgaggatgtggagtaacaggagctcccattcatcgttggtgggggcgcaaaaagttgtacagccactttggaggagagtttgatggtttctctggtaaaatttgattgtgagtccatctggtcctggactttttttggttggtaggctattattattgcctcaatttcagagcctgttattggtctattcagagattcaacttcttcctggtttagtcttgggaggatgtatgcatccaggaatttatccatttcttctagattttctagtttatttgcatagaggtgtttatagtattctctgatgttagttcgtatttctgtgggatcagtggtgatatcccttttatcattttttattgcatctatttgattcttctctcttttcttctttgttaatcttgctagcattctatcaattttgttgatcttttcaaaaaaccagctcctcgattcattgattttttgaatgtttttgtgtgtctctaagtccttcagttctgctctgatcttagttatttcttgccttctgctaacttttaaatgtgtttgctcttgcttctccagttcttttaattgtgatgttagggtgtcaattttagatctttcctgctttctcttgtgggcatttagtgctataaatttccctctacacactgctttaaatgtgtcccagagattctggtatgttgtgtctttgttctcattggtttcaaagaatatctttatttctgccttcttttcgctatttatccagtaatcattcaggagcagattgttcagtttccatgtagttgtccggtttttgagtgagtttcttaatcctgagttcaatcttctgaagcctacttctgtcagctcatcaaagttattctccatccagctttgttccattgctggtgaggagctgtgttcctttggaggagaagaggagctctgattttcagaattttcaacttttctgctctgctttctccccat

SEQ ID NO: 2079 - DNA, 1128 bp, Homo sapiens
  SIMILAR (302)..(340): 691254mologous to Homo sapiens calbindin D28K,accession number S46006,Smith-Waterman Score=42.
ctaatgctctcctttcccttgccccgcatcccccaacaggccttcattgttcaactcccacttatgagtgagaacatgtggtttttggttttctgctcctgtgtttgtctgctgagaatgatggtttccagcttcatccacgtccctggcagccactcccagagcccctggaactctggcccaaggctctctgactgactccttcccagattttctcagcttagcagctgaagactgacgctgccggatcgcctcggaagccccacaaagcctgtttggtggtctcttcacacggacacgcatgaaatttggtgcaatgactcagatcgggggacctcccttgggaaatcaatgccctgtcctcctgctctttgctccatgagaaagatccacctacaacctcaggttctcagactgaccagcccaagaaacatctcaccaatttcaaatccgagacaaaggagacacgttttatctgtggacccaaaactccggcgccagtcacagactagggaaggcagccttcccttggtgtttaatcattgcagggacacctctctaattattcacccaggtttcagaggtgtcagaccacgcagtgacgtctgtgttggtcctgcacccttagcagcaagtcctgcttttctggggaaggggcaagtaccccagccccttctctccgtgtctctaccccttctttgcctttctggggggcaagaaacccccaaaccctttgccttcacccttagtggcaagtcctgcttttctgggggaggggatttaattaacctcaccttcaaggtgtacaataatagaaaaaagttgcaattccttgcctccactgtgagacaaaccccagccacatctccagcacacaagaacttccaaacgcctgaaccgcagcggccaggtgttcctccagaatctcctcccccaggagcttgctacaagtgccagaaatctgaccaccaggccaaggaatgcctgcagcccaggattcctcctaagccttgtcccatctgtgcgggaccccactggaaattggactgttcaactcacctggcagccactcccagagcccctggaactctggcccagggctctctgactgactccttcttggcttag

SEQ ID NO: 2080 - DNA, 1309 bp, Homo sapiens
  SIMILAR (271)..(462): 811254mologous to Homo sapiens Human secreted protein, SEQ ID NO: 6688,accession number AAG02607,Smith-Waterman Score=250.
atggatgtagctggaagccgttatcctcagcaaactaatgcaggaacagaaaaccaaacactgtgtattctcacttataagtgggagcttaatgatgaaaacacatggacccctgagggggaacaacacacaatggggccttttgaggggtgggggcttccgaggcgatcgggcagtgtcagtcttcagccgctaagccgagaagatctgggaaggagtcagtcagagagccttgggccagagttccaggggctctgggagtggctgccagatgcagaaaaggccttcgacaaaattcaacagcccttcacgctgaaaactctcaataaactaggtattgatggatatctcaaaataataagagctatttctgacaaacccacagccaatatcatactgaatggaaaaaaactggacgcattccctttgaaaaccggctcccgaccacaccgacaggggtgttcgggctatagcggtcaggtttcagcatgcgatccgccaccgggcccaggcggagttcctgtcactctttctcaatctggctgccaccactggcaaggaggtcatgaatgtgagggccgtggcgacagacgcctcaagcaagggcgtcaaggcggcctattttcccggaaacaatccggcgcgttcatcgacagcatcgttgcccgaaaggggaacgccgacgagaatttcagcaacatccgtatcgcaggcgatggtggatcggctgcgatgtcgttcgactatgcgttcaagatcgacgacgtggtcccgaactctggcatggaacattggcttcttgtaaacacgaacaatggatggcggatcgtatcggtggcttggtcggctgctcctctccaggccgatctaggtcccaattcttcctcagcctctgctcctccaccctataatccttttatcacctctcctcctcacacctggtccggcttacagtttcgttccgtgactagccctcccccacctgcccagcaatttactcttaaaaaggtggctggagccaaaggcatagtcaaggagcttgctacacttgccggaaatctggccactgggccaaggaatgcccgcagcccgggattcctcctaagccacgtcccatctgtgtgggaccccactgaaaatcggactgttcaactcacctggcagccaatcccagagcccctggaactctggcccaaggctctctgactgactccttcccagatcttctcggcttagcggctgaagactgacactgcccgatcgcctcagaagccccctcgctcaatgccaatatcccatcccacagcat

SEQ ID NO: 2081 - DNA, 336 bp, Homo sapiens
  misc_feature (1)...(336): n = a,t,c or g
ggcacgaggttttctgaatggctattaatagtattagatcattacaactgatgtaagtttcaaaggttgtacaattatacnnnnnnnnnnnnngggaaacttttgggataacacaaaccctttttgaaaaaaaaatgggattgggagggttaaacccttaagcggtttaacttaaaaggaaacataggttgcttacccccctaaaaaggtttgacctgaaaaagggccttggccctttgtttccaatattacctttggcccaaagtggtagccccaaaaaaaacaagggggggaaaagggaaggaaattaaacggccctgtgaaagggccaggaag

SEQ ID NO: 2082 - DNA, 364 bp, Homo sapiens
  misc_feature (1)...(364): n = a,t,c or g
ggcacgaggttttctgaatggctattaatagtattagatcattacaacttatgtaactttcaaaggttgtacaattatacnnnnnnnnnnnnngggcaacctttggaataccacaaacccttttttaaaaaaaaatgggcttggaagggtttaacccttaagcggtttaacttaaaaggaaacataggttgcttacccccctaaaaaggtttgtcctgaaaaaggcccctggccctttgtttcccatattcactttggcccaaatttgtacccccaaaaaaaaccatggggggaaaagggtaggaaattaaactgccctgtcaaagggccatggaccacaaggggtcaaagaatgcctcctgct

SEQ ID NO: 2083 - DNA, 4544 bp, Homo sapiens
  SIMILAR (722)..(1642): 491254mologous to Homo sapiens HT005 protein,accession number AF183427,Smith-Waterman Score=550.
  misc_feature (1)...(4544): n = a,t,c or g
ggatgttgaacacctatgtgtgnnnnnnnnnnctttaccaactatgcacctatttttcaaacacctaaaagtaatgtctgtgaaacaggggttttctttttctacatattacagcaggaagggttcctatttatgtactggctgtatcaatactaacggggcatgataagcaaaattttaaactttggtagttaaacctttatgttgcctcccctctgggctgccagctgtggggatgtgcttctcccttaaggactttggcaagaataacaagttcattggaatttgactttctgacataaagcaaacagccttgccctgtcatgccaggcctttcatgtgaagttaccatttattagctgcttctgtctctccagggaaggatttcccttttataagcctgggccagggggatgatagtaagattccccatgtgataccagagttggaataggctgtagtgagattagggccaggactgtcccattttggattcttgaatggtttctgttacaacttgtcatggggaaaaagtaacacttattttttttttccncccttagaagacaaaaatactaaatgcatttgagaaagccggtagttttggggggagggggaaaaagcaactgctttcctgatctgcaacttggctggatgcttaagatgtccagtggacatgaatagcccaggggtctgacagcaatgaagaggactatgaccccaaattgtgagggaaaaggaagaagaagaagaagaccgacccctggggacatagaggactattaccgtgggagtagccagcgatgtggagcagcagggggctgatgcctttgatccccgaggagtaccagttcacttgcttgacctacaaggaatctgaagggtgccctcaatgagcacatgacccangcttagctttctgtccctaaaggtatcccattccagttggctaaacttatatttagttaattttccactggcaagtttcagagatattggacagatacaagtccaattctgctcaactgcttgttgaggctcgagttcagcctaatcccatcaaaaacatgttcccacatcccatccccctcaccactggtgcaggttgtggtatgcaggtttgtgcgaaaagggaaaacctactcttctctgggcctgtcagctttagttttgccgcagctgctgggagcagcactgctcatgttctcgtcaaggacggcgtgggcgtggggagtctcttgcatggctgcaggnactgtccacttccgtaacaccagtgggacttttgtgtttccatttgcttcccaatgaagaatttgaggagaggaaatacaggcgctacctcttcagggactatgtggagagtcattaccagctccagctgttgccctgggtgcagactgccccatgggttattcgggtacaggagcctagagctccgcccgagtacagtgcaaatcggtgcaacgaggtcttctggtttcaagtgtcgtcagatgtatcacgcacccacagacatgtgccacaatcccggaaatggctcacgaagttagcaagacgactctgaaacagccaactacattaagtgctcacactaaagactgtcccaagtgcaacatctgcatttgagaaggatggaggcttgcaatcacattgcaatgctccaaatgtaaacacgacttctgctggatgtgtctaggagattggaagactcatggcagtgaatactatgagtgcagtcgttacaaggagaatcctgacatcgtgaaccagagccaacaagcccaggctgangggaagccctcaagaagtacttattctactttgagaggtgggaaaaccacaataaaagcttgcagctagaggcacagacataccagcggatttcacgagaagattcaggagagggtcatgaacaatctggggacatggattcgactggcagtacctacagaatgctgccaagttctttggccaaggttccttctcttctctcctgttgcagtgtcgatacaccctgcaatacacctacccatattgcatattacatgggagtccggacccaggaagaagctgtttgaataccagcaggctcagctggaggctgagatcgaaaacctctcatggaaaagtggagcgtgcagacagctatgaccagaggggacttggagaacccagatgccataataacggaaccaacgggaggganaaacccctgcctgaaagatttcccatgacaccttaagttgggatgtggatgtgcccggggtgaggaagatttcgcttgctaggtctccccgggctgcccatactgcatgcctggcaggctctgcctttcatgacccccaggcaacagcccagggccccactcctgagagacactggcaacacctcttagttgatttctgttttcttctcttttcactttttgtttctacccagggtaggaggccatgttgaactggcctcttttcaggacttttatttccccctggatggttgttgggagggagggaaagtgttttctgaatggctattaatagtattagatcattacaacttatgtaactttcaaaggttgtacaattatacaaaaaaaaaaaaaaaggcaaactataggataacacagagccctttttgaaaataaattggcattggagtgttttaccctctagctgttttacttagaatgtaacatatgctgcctacccacctcaaaatgtctgtactgcaagagggccctgggccctttgttttcaatattcccgtgggcccaaagtggtccccccaaaaaaaacctgggggggcaaagggagcgaaataaaccggcctctggccaaggggcctggaaccaaagggggtcacaaaaggcctcctgccttaccgtggcagtacggagacagtccagaacatggtcttcttgccacggggtgttgttgtctctggtggtgctgcatgtctgtggctcacctttattcttgaaactgaggtttacctggatctggctactgaggctagagcccacagcagaatggggttgggcctgtggccccccaaactagggggtgtgggttcatcacagtgttgccttttgtctcctaaaagttaagggatctacttttgaagggaattgttccctcccaaataaatttgcctttacctttggatcctttcttttgtgcccagtattcaagtggtattagctctgagcagggtcacatttggccaaacctgacactgtcttgctgcattctcctttggcaaacatcagggtcagaattcaggatagcccttcctagggcactggactttctggcatgggggctgtgtttgcacaagttattttcatgttacctgggagagtgtccagaggctgctctgaggctgaaggtgtgttcccccttgcctgggttccagctgtcagagggataccatcctagggtctgggaatccaaggccacgagactccttggtttgtggtccgagatcctgtacttaaggagggtctggccagagggaacagaccagctttttgcacaatgaagcgcaagggaacaagtggtttgcctggtgtcctacctgtcctgaacctggtcctgtgggccattgaaaagttagatctgtgatctctggggtttttgtgggctttgttcaatgctttccactctagggcaggcagagcagtctatactctcccaagcctgcttgacctccaagtagagctgatacagagatctgtgaatattgtgatagaaattccttggtattcatacatttcagctgcaagtcagcaatttcccaggtaccatgtaagctataaaacagtcattcttaaagacagaagatagctgtgactcatgggaatcctgaggtccatggctggttgcaggttccctttttccttcctcaggttttgtctcttcctgtgttgtccccagcaagggagaagactgtggggtggattgggagaacagattaggagtatagcaaatgaacccagaatggaacagtggggagctaactgtgaatgaggagagtacctgctgcaggacctggaggtcaggtgtgaatgctgtattggcacagggaataaatatcctggcgtctggagccttcacctctccgtcaagtccttcctgtgatactgccatggcacaggatctgagttgcagctctgcaccctaaatcacaccctgggcattgtctgggctgcagggctgccaggttctgtacttgtgtccagctgtggccctggatgctggagctggagggttttctgtgctcagactgtagcctgtagctcttggcctgtgtagagccccctcctgtgccctcagtggctgtcgtttgttaacatcatcaggaagatgggaaaggtcaggcagaatttttctgccctacaaagggtggaagagaaaggacacagtattttcatgaatttaccatatatctttgtttttcttcaacgaaaaagttaattgaggcaatgtcatctgctcaaagttgagtggtttattcacaataaactgtaagtttctgattat

SEQ ID NO: 2084 - DNA, 917 bp, Homo sapiens
  SIMILAR (199)..(681): 491254mologous to Homo sapiens CGI-147 protein,accession number AF151905,Smith-Waterman Score=249.
ctggaagaacaacactatgcttgctaaaccatcaactagtgttgatgtcccaatgccttctaccacctattctcgatgttcatcagaagagagagaaattgaggaccctgttgcatccccatcatccagcaattaattctatttcagtgcttcaaacatttttcaggaccactgtgctttcagctgtgtaaattaatgatgccctccaaatccttggttatggaatatttggctcatcccagtacactccggcttggctgttggagttgcttgtggcatgtgcctgggcctggagccttcgagtaatgctttgggatgctccccaaaagcaagacgagcaagacacacacagatacttgaaagtgaagcaagcatcttggggagacagccggggagtccaggatgattcttggtggttcgaaattgactttaaagatggggaaaaggggaaaggggctgccccagtgcttctcatgctgctgtttccagccctacaaagcagatttcaaagaagaaatcccctgaaatggctcaaaacaatggggaatactggtgggccagccccaaggttggtggttcaaaggttcctgatgaagaaaccctgattgcattaattggcccatgcaaaaatgctggggactgactgtaagtttaattcaagatgctggacgtactcagatttgcaccaggctctcaaactgtcctagggattgggccaggaccagcagacctaattgacaaagtcacttggtcacctaaaactttactaggtggactttgatatgacaacaacccctccattcacaagtgtttgaagcctgtcagattctaacaacaaaagctgaatttcttcacccaacttaaatgttcttgagatgaaaataaaacctattcccatgtaaaaaaaaaaaaaaaaa

SEQ ID NO: 2085 - DNA, 478 bp, Homo sapiens
  SIMILAR (213)..(476): 981254mologous to Homo sapiens putative G-protein coupled receptor,accession number U78723,Smith-Waterman Score=452.
  misc_feature (1)...(478): n = a,t,c or g
aggttaagacgccggnnaactgatannccttcgngtcagcagngccnggaatttgncgagtcccggctgcagcacctgggagaaggcagaccgtgtgagggggcctgtggccccagcgtgctgtggcctcggggagtgggaagtggaggcaggagccttccttacacttcgccatgagtttcctcatcgactccagcatcatgattacctcccagatacgtcagtatgttgtacaggtgatcttctccgtgacgtttgcattttcttgcaccatgtttgagctcatcatctttgaaatcttaggagtattgaatagcagctcccgttattttcactggaaaatgaacctgtgtgtaattctgctgatcctggttttcatggtgcctttttacattggctattttattgtgagcaatatccgactactgcataaacaacgactgcttttttcctgtctcttatggctgacctttatgan

SEQ ID NO: 2086 - DNA, 389 bp, Homo sapiens
  misc_feature (1)...(389): n = a,t,c or g
taacaaaccatcaggtttctggggaatgataaaaagtgttaccacttcagcatcaggaagtgaaagtatcctttgtccctctgcttgattctttttctcaactctggaccaagagcaaaagaaaaaaagtagtgttgggatagtcccttctaagggtacctgactacatcaggaggtccaaactcctaagagctaggcttaggaaataccatgtgtacagtcatctttccagcacctgcacaatatcataaaatcattgtctttgagctgaagtggtcctaaaaagtcagcctttnnnnnnnnnnnnnnnnnnnnnnnnnnnnnnnnnnnnnnnncacaccgtgggttgtggcaaagctagaaacataactgagggctcctcctcatag

SEQ ID NO: 2087 - DNA, 619 bp, Homo sapiens
  misc_feature (1)...(619): n = a,t,c or g
aatttccggganaaccaaggcttggggaatgacaaagttttgcttgttttcctcatactggggcttggggggtaacaaaagactgatgccagtagaggtgcaacagcccagccccttctgctttctgggtgggagccccccaggggtgcccccttcgtactccaaggcccccttgccccccaacaagcgaatcaaggccaaaggcgatggatctttgaaagccacacttgcgtggctttncttccaatccaagcctgagttccctttcttgatcttggtaagtttctctgagaacacttcacccgcaagaaactacttgccccagaatccccctctcagatttcgcttctagggaactcaaactaggagacccggtgtcgggggcacccaccccgtgatcgagagccgcctccttcctagcctggcattcagtcttctcctggcgtccctcaagccgcccttccaacaaggcctatccccggcttcccatcaggcctcagccacctgggctgtccttccgttgccacccctccaaggcccagcccgagagcctccttgtccaccacatattggcaggcacgtacagcccaccaagacctctgctgtcagtattctctct

SEQ ID NO: 2088 - DNA, 924 bp, Homo sapiens
  SIMILAR (655)..(816): 801254mologous to Homo sapiens Human phosphodiesterase interacting protein, myomegalin,accession number AAY71159,Smith- Waterman Score=199.
atggccaaagaagagcctctggcctacatctgccaagatatatgttggattcccggagttgcctatattctcaatttcctgtttcatagccagcaacactacttcagagcaactttcccaacctctgacgcaggtagaactagagtttcattcaacctacatgtgcctataggtcctcactgcggcaatgacatctctcagctcagtaatggccacttggagcaggaatatgatctttatatggaagactcagtggatccttatcaccttcatagaaaggaagtggatgctttggaagaattaagcaggcagctttttctggaaacagctgatctatatgctaccaagggcactgtagtcatcaatgtggccaatgacatgacggccatgcttattggcaaaggaggggttatcctctacacccagcgtggattctgcccccaggcaatattcatgtccatttcctttgaaaatggaaagctcaaggctgccagaggaacttactttagttccagccaatacctgctgatgatgctggaggtattcaaggctgtgaaggaggaaatccagttcaggagggttgagaagattgtagaatcctttgaactggaaagagccacaaagcacagggtgctttatgtcttctgcctgagagaatcgacagaaagggaacttctagaactgagaaccaaagtatccaaacaggagtggctccttcagagcacagctgagcatctgaagatcgccaaccagcagaaagagagcatggagcagttcatcgtcagccagcggtctcccaaacttcttaggaagagctccaaattaataaaggatgcctttcataatgagctgatgggagatgaaaatatcaaaaactatgcctataaactggagatgtcgcttactggaaacaacatcaaataa

SEQ ID NO: 2089 - DNA, 2203 bp, Homo sapiens
  SIMILAR (1327)..(2025): 751254mologous to Mus musculus putative,accession number AK016787,Smith-Waterman Score=894.
atggggggtgcctccgcccggccagccgccccgtccgggaggtggggggtgcctctgcccggccgccccttctgggaagtgatgagcccctctgcccggccaccaccccgtctaggaggtgtacccaacagctcattgagaacgggccatgatgacgatggcggttttgtggaacagagaagggggaaaggtgattctgaggggcagctaggattgagaatcaaacttgtaagagtggtgttttcctggcagctggtcatggcttttgataaggcagagctgcctagctctcccaaggtgctggtgttgaccactgtcactcgtgccactggtggcgtggggcttcagactttgcggagactgcaggagaggcctggtattggacagctgggggctctctgtctgatttgtactgtacgtctctgtgggcatgaagaaatgacctccaccttcaacccccgagaatgtaaactgtccaagcaagaagggcaaaactatggcttcttcctgcgaattgagaaggacaccgagggccacctggtccgggtggttgagaagtgtagcccagcagagaaggctggccttcaagatggagacagagttcttaggatcaatggtgtctttgtggacaaagaagaacatatgcaggttgtggatctggtcagaaagagtgggaattcagtgactttactagttctggatggggattcctatgagaaagcagtgaaaacacgggtggacttgaaagagttgggtcaaagtcagaaggagcaaggtttgagtgataatatactttcccctgtgatgaatggaggtgtgcaaacttggacccagccccggctctgctatctcgtgaaggaaggaggcagctatggcttctctctgaaaactgtccaaggtaaaaagggggtgtacatgactgatattacacctcaaggtgtggctatgagagctggagttctggctgatgatcacttgattgaagtgaatggagagaatgtagaggatgccagccatgaggaagtggttgaaaaggtgcgagagggacccaggcgagtagggtatggattcgaccgccaacaaatggcagcagccctacagaagaggggcctgactgttaaaaacaaacaaacagaaagcaacaacaacatcaacaaaaaaagaccccacaaaaaccccatccaaaggtcagcagcctcaaaaatcgaagaattagaaaaaaactattttaaaattcaatatggaagcaaaaaagagcccgtacaagtcaagacaactgtaagcaaaaagaacaaagctggaggcatcacgctacctgacttcaaactatactacaaggttacagtgaccaaaacagcatgctcccgttattttcactggaaaatgaacctgtgtgtaattctgctgatcctggttttccaatggtgccttttttacaattggcctattttattgtgagcaatatccgactactgcaataaacaacgactgcttttttcctgtctcttatggctgacctttatgtatttcttctggaaactaggagatccctttcccattctcagcccaaaacatgggatcttatccatagaacagctcatcagccgggttggtgtgattggagtgactctcatggctcttctttctggatttggtgctgtcaactgcccatacacttacatgtcttacttcctcaggaatgtgactgacacggatattctagccctggaacggcgactgctgcaaaccatggatatgatcataagcaaaaagaaaagactgagaggaccaggagtggtaggtttcctgttgatttattcacctgtaggacagattgcagaagatcttactcttattcaacaggaagtggatgctttggaagaattaagcaggcagctttttctggaaacagctgatctatatgctaccaaggagagaatagaatactccaaaaccttcaaggggaaatattttaattttcttggttactttttctctatttactgtgtttggaaaattttcatggtgaagttttggtcccaacacatttccttcattcttgttggaataatcatcgtcacatccatcagaggattgctgatcactcttaccaagttcttttatgccatctctagcagtaagtcctccaatgtcattgtcctgctattagcacagataatgggcatgtactttgtctcctctg

SEQ ID NO: 2090 - DNA, 523 bp, Homo sapiens
  SIMILAR (2)..(214): 981254mologous to Homo sapiens putative G-protein coupled receptor,accession number U78723,Smith-Waterman Score=353.
acagaaaatgggcatgtactttgtctcctctgtgctgctgatccgaatgagtatgcctttagaataccgcaccataatcactgaagtccttggagaactgcagttcaacttctatcaccgttggtttgatgtgatcttcctggtcagcgctctctctagcatactcttcctctatttggctcacaaacaggcaccagagaagcaaatggcaccttgaacttaagcctactacagactgttagaggtgatactatgaccatgagtagcatcagccagaacatgagagggagaactaactcaagacaatactcagcagagagcatcccgtgtggatatgaggctggtgtagaggcggagaggagccaagaaactaaaggtgaaaaatacactggaactctggggcaagagatgtctatggtagctgagccaaacacgtaggatttccgttttaaggttcacatggaaaaggttatagctttgccttgagattggcctcattaaaatcagagactgtaaaaaaaaa

SEQ ID NO: 2091 - DNA, 2912 bp, Homo sapiens
  SIMILAR (125)..(619): 761254mologous to Homo sapiens putative G-protein coupled receptor,accession number U78723,Smith-Waterman Score=570.
tttcgtcgcagtcccggctgcagcacctgggagaaggcagaccgtgtgagggggcctgtggccccagcgtgctgtggcctcggggagtgggaagtggaggcaggagccttccttacacttcgccatgagtttcctcatcgactccagcatcatgattacctcccagatactattttttggatttgggtggcttttcttcatgcgccaattgtttaaagactatgagatacgtcagtatgttgtacaggtgatcttctccgtgacgtttgcattttcttgcaccatgtttgagctcatcatctttgaaatcttaggagtattgaatagcagctcccgttattttcactggaaaatgaacctgtgtgtaattctgctgatcctgggttttcatgggtgcctttttacattgggctattttattgtgaggcaatatccgactacttttgtctcctctgtctcaggtggcataaacaacggactggcttttttcctgtctcttagggctggacctttatgtatttcttcggggaaactaggagatccctttcccattctcagcccaaaacatgggatcttatccatagaacagctcatcagccgggttggcgtgattggagtagactctcatggctcttctttctggatttggtgctgtcaactgcccatacacttacatgtcttacttcctcaggaatgtgactgacacggatattctagccctggaacggcgactgctgcaaaccatggatatgatcataagcaaaaagaaaaggatggcaatggcacggagaacaatgttccagaagggggaagtgcataacaaaccatcaggtttctggggaatgataaaaagtgttaccacttcagcatcaggaagtgaaaatcttactcttattcaacaggaagtggatgctttggaagaattaagcaggcagctttttctggaaacagctgatctatatgctaccaaggagagaatagaatactccaaaaccttcaaggggaaatattttaattttcttggttactttttctctatttactgtgtttggaaaattttcatggctaccatcaatattgtttttgatcgagttgggaaaacggatcctgtcacaagaggcattgagatcactgtgaattatctgggaatccaatttgatgtgaagttttggtcccaacacatttccttcattcttgttggaataatcatcgtcacatccatcagaggattgctgatcactcttaccaagttcttttatgccatctctagcagtaagtcctccaatgtcattgtcctgctattagcacagataatgggcatgtactttgtctcctctgtgctgctgatccgaatgagtatgcctttagaataccgcaccataatcactgaagtccttgggaggaactgcagttcaacttcttattcaccgttgggtttggatgtgatcttcctggtcaggcggttctctctaggcatactctttcctctatttgggcttcacaaacaggcaccagagaagccaaatggcccccttgaaccttaaaccctacctacagactgataaaaggcccagtggtttccaaaaatttaggatataaagaggggggaaaaaatggaacccccgggccctgaacattttaataaaacaaacaaaatgcctatggtaagccatttttccacccttccataagccatactcccttcccccgtcagggtgaatacctatgacccatgaagtagcatcagcccagaacatgagagggagaactaactcaagacaatactcagcagagagcatccccgtgtggatatgaggctggtgtagaggcggagaggagccaagaaactaaaaggtgaaaaatacactggaactctggggcaagacatgtctatggtagctgagccaaacacgtaggattttccgttttaaggttcacatggaaaaggttatagctttgccttgagattgactccttaaaatcagagactgtaacacttttgccttacgttcattttatcaagcatagcttggtatttattatgcttgtgtgatctaacatgagttagcatcccacacctcctcttctgatcctgccccattaaaataaccaagaggttatctgttcttttccgggaaaggggtggtatgcacctgaaatagattttaccaaaagagagatttcaggtatgtcattttttcttgatttcctgtgaacttagtattataccctactttcaattcggtagtgatgtttcctttttttttttttctatctgcccctcacgctgtggggtgaaaccgtgaataacttaactgggggaataagtcacttgtgaaagggaaatgttgaaaaatttttagaacactcagacatgcaatttaagaaaattctgaatgttattactaaggtcttattctgtactttattgtgttttgggtttctagaggcaaatgaaggttaaagcataaaaagtgaatccaaaacaaaagcactatcaagcatactcaaaaggcatttgttaatggtatttattctagcaaccacaacattgttacaaaagcacaattttaataggcttatctgctaagatgcttttataagcagctgtcacctatacagaagtaatgaatcatctttggtgctcaaggaacctgtagaagtaagagacatcatcatacagagaaatgtagttaagttaagttgaagcttggaaaagatcacatgaaaaaaatctagctcttgccttatctcttcctaagttaagcataaattagccgtctgcaatagccgcctgtaagacaaatgataacagaagacaatcacacatggtgaatggtttccagtggagtttttcttctaaagagacagtaaacaggtcacaactcattccttgagaaaggattcctatt

SEQ ID NO: 2092 - DNA, 482 bp, Homo sapiens
  SIMILAR (4)..(150): 951254mologous to Homo sapiens reticulocabin precursor,accession number AF183423,Smith-Waterman Score=256.
gcggagaggcaccagttccgggacttccgggatctgaacaaggatgggcacctgtatggaagtgaggtgggccattgggtgttgccccctgcccaggaccagcccctggtggaagccaaccacctgctgcacgagagcgacacggacaaggtgcagtgacggggcctcggcaggagcgaggagcggtgtgggcattgcgggccagactccaaaaaggagcaagacctgggcctggagctcagggtcccttttaggtgggataaaaaaagagggacagagagagggaggaaaagagagggcacggggccccaagctcagctttaagaaccgccccaacccctccagctccaaatttgagcctcccccacatagactgaaactcccctggccccagccctctcctgcctggcctggcctgggacccctcctctctgccaggaggcaataaaagccagcgccgggataaaaaaaaaaaaaaaaaa

SEQ ID NO: 2093 - DNA, 1518 bp, Homo sapiens
  SIMILAR (972)..(1064): 961254mologous to Homo sapiens Human calcium-binding protein,accession number AAW80746,Smith-Waterman Score=166.
  misc_feature (1)...(1518): n = a,t,c or g
agcggccgaattgggcacatttgcgggaacgcagagcggagcgtggagagcggagcgaagctggcataacaggggaccgatgatgtggcgaccatcagttctgctgcttctgttgctactgaggcacggcgcccaggggaagccatccccagacgcaggccctcatggcacggggagggtgcaccaggcggcccccctgagcgacgctccccatgatgacgcccacgggaacttccagtacgaccatgaggctttcctgtgacgggaagtggccaaggaattcgaccaactcaccccacaggaaagccaggcccgtctggggcggatcgtggaccgcatggaccgcgcgggggacggcgacggctgggtgtcgctggccgagcttcgcgcgtggatcgcgcacacgcatcagcggcacatactggactcggtgagcgcggcctgggacacgtacgacacggaccgcgacgggcgtgtgggttgggaggagctgcgcaacgccacctatggccactacgcgcccggtgaagaatttcatgacgtggaggatgcagagacctacaaaaagatgctggctcgggacgagcggcgtttccgggtggccgaccaggatggggactcgatggccactcgagaggagctgacagccttcctgcaccccgaggagttccctcacatgcgggacatcgtgattgctgaaaccctggaggacctggacagaaacaaagatggctatgtccaggtggaggagtacatcgcggatctgtactcagccgagcctggggaggaggagccggcgtgggtgcagacggagaggcagcagttccgggacttccgggatctgaacaaggatgggcacctggatgggagtgaggtgggccactgggtgctgccccctgcccaggaccagcccctggtggaagccaaccacctgctgcacgagagcgacacggacaaggatgggcggctgagcaaaagcggaaatcctgggtaattggaacatgtttgtgggcagtcaggccaccaactatggcgaggacctgacccggcaccacgatgagctgtgagcaccgcgcacctgccacagcctcagaggcccgcacaatgaccggaggaggggccgctgtggttctggcccccttccctgtccaggccccgcaggaggcagatgcagtcccaggcatcctcctgcccctgggctttcagggaccccctgggtcgggcttctggtccctgtcacacccccaaccccaagggaggggcttgtcaatangtcccagaggataagcaatacctatttcttgacttgagtctcccaagcccaagacccagggaccctgggccccaaagcttcagctctaagaaccgccaccaacccctccagctccaaatctgagcctccaccacatagactgaaactcccctggccccagccctttcctgcctggcctggcctgggacacctcctctctgccaggaggcaataaaagccagcgccgggaaaaaaaaaaaaaaaaa

SEQ ID NO: 2094 - DNA, 862 bp, Homo sapiens
cagaagaggcccctgtaatggccgatatcaccacccagtctatcctcaccccacagctgtgcagcgggaacctcctgctggcccacgtgcttgccacagcccgtgctggcacgacgctccagcagttcgaagccctggccaatctactagcccacatgacgcagttacctggccatttctccacggttcccgtgagggccccacacccaggcgcacaagaacccctcctgcattccgtcctcacacgcaggcctgtccatctacttgctactgtcacactcttgccagcagaagaggcccctgtaatggccgatatcaccacccagtctatcctcaccccacagctgtgcagcgggaacctcctgctggcccacgtgcttgccacagcccatgctggcacgacgctccagcagatcttcgcggagcggatcagcggccggagcgtttggcggactctgcgtggatttggagctcacagcgtcttgcgacttggaagcgggttcagaggacaggacagaacacttgggcaagtgaatctctgtctttcgaagccctggccaatctaccagccaacatgatgcagctacctggccatttctccacatttctggtgagggccccacacccagccgcagaaaagcccctcctgcattccatcctcacacacaggcctgtccatccacttgctactgtcacactcttgccagcagaagaggcccctgtaatggccgatatcaccgcccagtctatcctcaccccacagctatgcagcgggaccctcctgctggcccacgtggctgccagagcccatgctggcactacactccagcatgtcggcgtctgcgggccacactaccggtga

SEQ ID NO: 2095 - DNA, 1682 bp, Homo sapiens
  SIMILAR (1264)..(1470): 441254mologous to Homo sapiens unnamed protein product,accession number AK024120,Smith-Waterman Score=114.
gtttgggacgctgggttctgcttttccagaatcctgccctttccaaaaggaagacggtatgattaagttccagattcaagggatacatgtgcaggaaagggtgacattcaaggatgtggctgttgtcttcaccaaggttttagctggcactattggataaagcccagataaacctgtaccaagatgtgatgctggaaaacttcatgaacctcatgttatggattcccttgccagttagcttccagttgggttcagccaatggggaaagccagcaagagatccagggaagggacaagagtgaagtcagaatatttattcccccaggtttttccctagaggttgctgtggaatggctatattccatatccattgaccaaagagatgcacatcccaagactgaccctaagcttcgacccgaggaggcacagcgcaagtcgctgtcacgaaacgtgaagatgcactgttttgtcaaacccagggctgctccccaaaccgagcccacgctcgagcccacgctcttcccatcctatcccggcgtgcgtccagtaccatggcgcatgcgcaaggaggcctatggcctacaatccccagaaagccccgcgcgcagcagtggccattcgcaaggctaccctggtgaagatcttcacagagcggagcagcggccggagcgttttgcgggctctgcgtggacttggagcttacagcgtcttgcgacttggaagcggattcagaggacaggacagaacacttggttggaagccctggccaatctactagccaacatgacgcagttacctggccatttctccacattcctggtgagcgccccacacccagccgcagaaaagcccctcctgcattccatcctcacacacaggcctgtccatctgcttgctactgtcacactcttgccagcagaagaggcccctctaatggccgatatcaccgcccaggctatcctcaccccacagctgtgcagcgggaccctcctgctggcccacgtggctgccagagcccatgctgacaccaacctccagcatgtcggcatccctgcgggtgacactaccggtgacatggccagcatgaccctcctccctggcagtgacactgttgatctgaaggacacggcaccctgcattgtagctgctccagttccagccatggctaaaaagggccaaggtatagctcaggccattgcttcagagggtgcaaaccccaggccttggcagcttccacgtactgttgggcctgtggtcaatggagaagggaaatgtggggttggagcccccagagtccccactgaggcattgcctagtggagctgtgagaagagggccaccgtcctccagaccccagacccaccaacagcttccaccatgtgcctggaaaagatgcaggcactcaacgccagctcatgaaaatagccaagtgggctataccctgcagagccacagaggcagagatgcccaaggccttgggagctcatcccttgcatcagcatgcctggatgtgagacatggagtcaaaggagattattttcgaactctgagatttaatgactgccctgctgggtttcagactggcatggggcctgcagcccctttgttttgcctgatttctccctttcagaatgggggcatttacccaaaggctgtagccccattgtatcttggaagtaactag

SEQ ID NO: 2096 - DNA, 845 bp, Homo sapiens
ctgctccatccaggaagaatgggactctggagctttaagtgctcgggtgatcactcagaacagtcccaccccactatttacaaggatctcctgggactcccatccctccatcctctcttggcccggccagcggaaccaggagggtggagagctggtggcagccccaaatgagcaggagggaagcagcaaagggggtgcaaggcctgtaacaatatgtgattctcagaataggccctgctgcccacctccccccagtcctgctttgccccaggctgacccctctttgaagacctggcttctcctcaaccacatcaggtgggacacagactccatgatttgcatggaggattcaagctaataaggattcaagctaataaggattcaataaaggttcaggtcaggttgagaggggtgcagggagtcgggcactgcatgggaggagcagctcttccctccaccagtctctcctcctgcctcacgccctttcctgctcctttaaatagcagacacactactctggcgcccccacttccacaaccagaaaatccagcccaaagaactactccctaaatataatgcccatagtgatgaaggtgggggtttgaccctttaccccagtattagtcccctcctcacattttcactgagaatggggatacattccatcaataatttgagatgtttctttggaggagtgggggagagggcctccagatgcctgaagaggaatggagggaccatccaaatattcctccccctacttctccccagaaaggatggtgtccccaaagctgggctggtaggggcaggggcagggggaagggaagaaagacaaaaaaaaaaaa

SEQ ID NO: 2097 - DNA, 395 bp, Homo sapiens
  SIMILAR (2)..(394): 1001254mologous to Homo sapiens KIAA1409 protein,accession number AB037830,Smith-Waterman Score=656.
caaatgccatgactgtggggccattcttgaagaatacgatgaagagacacttgggctagccatcgtggtcctctccacattcattcacttaagcccagacctggcagccccgctgctgctggatatcatgcagtctgtgggaagattggcatccagtactaccttttctaatcaagcagaaagcatgatggttcccggcaatgcggcgggggtggccaagcagttcctgcgctgcatcttccatcagttggcccccaacggcatcttcccgcagctgttccaaagcacgatcaaagatgggacttttttacggaccttagcctcgtctctgatggacttcaatgagctgagctccatcgcagctctcagtcagctcctagagggtctaaataaca

SEQ ID NO: 2098 - DNA, 519 bp, Homo sapiens
gtttcctctttttctttttcttcttctccttcttgcttttcctgtggctctcacaactacaaggaggatacaaggtgtgcctcagaccctagtcttgcaagccaagagagtgaacacaagcaggccccatccagatgaagccaccacccacaagtgcgtcttttaatcagttaaatccaactacaaattccactcctcagttacgtagtcacgtggccagtggctacgtgggttagaaacagatgcaatatccccatctccacagcacgcccctgccccaccccagccgtgcccttggcaggttgacaccttcctacctgcacccaccaggccacttttagggtcaggcccaggctcaccatccaggagaagccctggaggtgccacccccggcaggaaaaggccccgccccaggtcctgagtgccctcccacggcacagcgcccgaccactgccagtacttaggacctctcttcaagggtgacccgagaaactcccctagagaaaaacctaggagtaa

SEQ ID NO: 2099 - DNA, 1095 bp, Homo sapiens
  SIMILAR (417)..(1046): 831254mologous to Homo sapiens KIAA1409 protein,accession number AB037830,Smith-Waterman Score=878.
  misc_feature (1)...(1095): n = a,t,c or g
gggtttgttggaaccattttcaaaactgctcagctttgtaattcagaatgccgtcttcactctggcctacctggtggagctgtgtggcttatgttaccgagctttcactaaggaacgagataaattctacttgtctcgtagtggttgttctaaaagcttctgcaggcgcctaaagctcaaatctcctttaccagatacaaaccttcttctgcttgttcagtttatttgtgccagatgctggaaccaaactagactgagtcaacaatcctgagcaagcagatgatagcctctgtacctgggatgttgggactgcaagcgatggagtgtgtgaggcagtacatcaacgaagtgctggatttcatgggcagacatgcacacgctgaccaaactgaagagccacatgaagacatgttcccaggcctctgcatgaagatacctttgggggacatctcaaagtggggctggcccagattgcagccatggacatctcacggggcaaccacagagataacaaagctgtgatccgctatctgccttggctttatcatcccccctctgcaatgcagcaaggacctaaagaattcattgagtgtgtctcccatatccgactgttgtcctggctgctgctgggttccctcactcacaatgcagtgtgcccaaatgcctcctctccctgcctgcccattcctctggatgcaggctcccacgttgcagaccatcttattgttatcctgattggatttccagagcaatcaaagacctccgtgctgcacatgtgctccctcttccacgcgttcatctttgctcagctgtggacagtttattgcgagcaaagtgccgtcgctacaaatctccaaaatcagaatgaattcagcttcacggcgatactgacagcactagaattttgggagtagggtgacacccagncatccttcagctaatgggcccattaacaaagtgatgggtaggaaatgggtgttgttntccatgtggattagtttaatgggagggaatttgccagggaatgcaatttggaccnttttttgtcaaggntggatacccatgtngggttgcccaatggnttccagttcaaaa

SEQ ID NO: 2100 - DNA, 5597 bp, Homo sapiens
  SIMILAR (112)..(402): 391254mologous to Caenorhabditis elegans E03A3.6,accession number Z38112,Smith-Waterman Score=218.
atggctcttggctgggtgtggtggctcacgcctgtaatcccagcactttgggaggccaaggcgggcagactgcctcaggttggtggctactgggataagtcctgtagcacagtgactcagctgaaggaaggtctcaaccgaatcctctgcctgatcccctataatgtgatcaatcaatctgtctgggagtgtattatgccggaatggctggaagccatcagaacagaagtcccagataatcagttaaaagaattcagggaagtattaagcaaaatgtttgacattgaactctgtcctctgcctttctcaatggaggagatgtttggttttattagttgtcggtttacaggatacccctcctctgtgcaggagcaagctttactgtggcttcataaaattaatgacagagaaagtgacttgatttgggcccagattgacatgaagttgtaccagacagcaggatcggatgggtcattgagatcagagtggggatggactggagaagcagtgctagtccaggagaaagggctgaaggaacaagggaaagagttcctggggcaccaaacgggagctgaaactgtaagaaagggctggttggagaagttacggagtgctggagatgctcccagagatgtagcacccaagtgggcagggagaggggagaaatactcctgcctctctctcctccaggtctcaggaattctgctggtgagtgttgcctctgatcctggccgacgagttcagcacaatatgcttagtccatttcatagtcctttccagagtccgtttcggagtcctttgcgtagtccgtttcgtagccctttcaagaattttggacacccaggaggaaggactattgactttgattgtgaagatgatgaaatgaatctaaattgtttcatcctcatgtttgatcttctcctgaagcagatggagttacaagatgatggaatcacgatgggtttagagcacagcttatcaaaggacattatttctattataaacaatgtcttccaagccccctgggggggatcccacacctgccagaaggacgaaaaagcaatcgagtgcaacttatgtcagtctagtatcctctgctatcagcttgcttgtgaactcctggagagactagctcctaaagaagaaagccggctggtggagcccacagacagcctggaggatagcctcctttcttccagaccagagtttatcataggccctgaaggggaggaggaggagaatcctgcaagcaagcatggggagaacccaggcaactgcaccgagcccgtggaacatgctggtagcctgtggagggtcgtcaaatccgagttctctcagctgtcttccctggcagtccctcttctcctccatgccctgtcacttcctcatggtgctgacatcttctggacaatcataaatggcaatttcaacagcaaagactggaagatgaggtttgaagcagtggaaaaagttgctgtaatttgtagatttctggatattcactcagtaaccaaaaaccacctgctgaagtactccctggcacatgccttctgctgcttcctgacagcagtggaggatgtcaaccccgcagtggctaccagagctggtctcctgcttgacaccataaagaggccagcattgcagggtctatgtctttgtcttgacttccagtttgatactgtggttaaagacagacccacaattttgagcaagcttttactcttgcactttcttaagcaggatattcctgctctgagctgggagttctttgtcaatagatttgagacgctttctttggaagcccagctacatttggattgtaacaaggaatttccttttcctacaagacaacaatctcctgagaatgacaacaccatcaaggacctgctcccagaagacgctgggatcgaccaccagacagttcaccagctgattacagtgctcatgaagttcatggccaaggatgaaagcagcgctgagtcagacatcagcagtgcaaaggccttcaacacggtcaagcgacacctgtacgtcttactcggctatgaccagcaggaaggttgcttcatgattgcacctcaaaaaatgcgcctgtcaacttgctttaatgcattcattgcaggaattgcccaagttatggactataacattaacttgggaaaacaccttctccccttagtggttcaggtgctcaaatactgctcttgtcctcaactcgggcaataatttccaacagccgcctcgttgctccctctggtccctaaagcctcacatccggcagatgtggttgaaggccttgcttgtcatcctttacaagtatccataccgagactgtgatatcagcaagatcctgctgcatctgattcacataacagtcaatacactcaatgcgcagtatcatagctgcaagccccatgccacggcaggacctttgtacagtgacaacagtaacataagcagatacagcgaaaaagaaaaaggtgaaatagaactggctgaatatagagagacgggtgcattacaagacagccttctccactgtgtgagagaagaaagcattccgaaaaaaaagctacgctctttcaaacaaaaatctcttgatatagggaatgcagactcgcttttgtttacattagacgaacatcgtaggaagtcgtgcatagatcggtgtgacatagagaagcctccgacccaagctgcgtatatcgcacaaagaccaaacgaccctggacgttctagacagaactctgctacgaggcctgacaatagtgaaatccccgagaacccagctatggaagggtttccagatgctcgaaggcctgtcataccagaggttaggttaaactgtatggagactttcgaggtgaaagttgactcgccggtaaagcctgctcctaaagaggatttagatctgatagatctatcctcagattcaacctcggggcctgaaaaacactctatactctcaacctccgacagcgactctcttgtatttgagcctcttccccctctcagaatagtcgagagtgacgaagaagaggagacgatgaaccaaggcgatgacggcccctccggtaaaaatgctgcctcttctccctccgtccccagccatccctccgtcctcagcctgagcacagctccgcttgtacaaaaggtggaagaggatggagctgaggaatccgaatttaagaataagattgttcccaggcagaggaagcagaggaagattgctgttagtgctatccagagagagtacctcgacatctccttcaacattctggacaaactgggagaacagaaagatccagatccttctactaaaggactttcaactttggaaatgccacgagaatcttcatctgcccctacgttagatgcaggtgtgccggaaacaagtagccattcctcaatatcaactcagtataggcagatgaaaaggggatccctgggagttctgacaatgagccagttaatgaagcggcagctggagcatcagtctagcgccccccataacatcagcaactgggacactgaacagatacagcctgggaaacgccagtgtaacgtgccaacgtgtcctaaccctgacctggagggacagccattgaggatgagaggtgccaccaaatccagcctgctatcagcaccaagcatagtcagtatgtttgtgcctgcacctgaagagttcactgacgagcagccgacggtgatgacggacaaatgccatgactgtggggccattcttgaagaatacgatgaagagacacttgggctagccatcgtggtcctctccacattcattcacttaagcccagacctggcagccccgctgctgctggatatcatgcagtctgtgggaagattggcatccagtactaccttttctaatcaagcagaaagttggcccccaacggcatcttcccgcagctgttccaaagcacgatcaaaggtaattcatccactgaggatccaggcaccacaaatttgcctcatcccagacacccaaacactaaatccgatcgttgactttccagatgggacttttttacggaccttagcctcgtctctgatggacttcaatgagctgagctccatcgcagctctcagtcagctcctagagggtctaaataacaaaaagaatttaccagcagggggtgctatgattcgctgtttggaaaacattgcaaccttcatggaagctttgcctatggattctcctagtagcctctggaccacaattagcaaccagtttcagacattttttgccaagctgccttgtgttttacctctgaagagtttgttggaaccattttcaaaactgctcagctttgtaattcagaatgccgtcttcactctggcctacctggtggagctgtgtggcttatgttaccgagctttcactaaggaacgagataaattctacttgtctcgtagtgttgttctagaacttctgcaggccctaaagctcaaatctcctttaccagatacaaaccttcttctgcttgttcagtatgagaacaaaatgaatgagaaggcggagcgactggtgctgaaacttctgaactctgcacagcagcagtttcagtttatttgtgcagatgctggaaccaaactagctgagtcaacaatcctgagcaagcagatgatagcctctgtacctggatgtgggactgcagcgatggagtgtgtgaggcagtacatcaacgaagtgctggatttcatggcagacatgcacacgctgaccaaactgaagacctccgtgctgcacatgtgctccctcttccacgcgttcatctttgctcagctgtggacagtttattgcgagcaaagtgccgtcgctacaaatctccaaaatcagaatgaattcagcttcacggcgatactgacagcactagaattttggagtagggtgacacccagcatccttcagctaatggcccataacaaagtgctgatacctatgtggttgccaatgattcagtcaaatatcaagcacttatctgcgggactccagcttcgcctccaggctattcagaaccacgtgaaccaccacagcctaaggacgctgccgggctcgggccagagcagtgctggcctggcagccctccgaaagtggttgcagtgcactcagttcaaaatggcccaggtggagaacccagtcctcggaaagcagcctctcaattttatcctctatgagtggactccctcggcgcctcagtgtcaacactctggtttagcaataatgggtttaaaaacaaacaatttggatccccaagcaggttgggggaaccatattgggtacctgtacaatcctctttcctagtttagtaaaagatgtgccaaaggcccagagagggcccgaaaatgaagcctttccttgctacacatatttcctgatgactaccttgggctatctgattaagtgtttccttacattattttttaaaaaccaaatcatttttctttaactaacttctattttttttaagaaaaaaaaatagaactggtgggtactcacagaaaagttgtataagtccccctgttgctatttttgatgcatagagaataaatagggtttttgaaaaaaaaaaaaaaaa

SEQ ID NO: 2101 - DNA, 1365 bp, Homo sapiens
  SIMILAR (172)..(336): 1001254mologous to Homo sapiens Human secreted protein, SEQ ID NO: 6301,accession number AAG02220,Smith-Waterman Score=288.
ctttcttctcgtcggtgttcccggctgctatagagccgggtgagagagcgagcgcccgtcggcgggtgtcgagggcgggttgcctcgcgctgacccttcccgccctccttctcgtcacacaccaggtccccgcggaagccgcggtgtcgcgcgccatggcggagctgagcggctcttgagagtctcatcgagatgggcttccccaggggacgcgcggagaaggctctggccctcacagggaaccagggcatcgaggctgcgatggactggctgatggagcacgaagacgaccccgatgtggacgagcctttagagactccccttggacatatcctgtggacgggagcccactttctcagagcaaggcggccctttgaaggatctggttcttgcttgccggagaaggcaaacccgctttgagttgaaagaggaaagacaggaacaaactaaagaggatgtttggagcttggttggcccagaaaggcagccgggaggcgtgaagaaagagagggacgggaaggcattggaacgggaacggcagcgcagggagacaagggcaagaggttgtcagcagcacgacagcggctacaggaagattaagatgcgccggggctgctgctgaggagaggcggagggaaaaggccgaggagtttagcagccagacaaagagttagagaaaagatcgagagggacaaagcagagagagccaagaagtatggtggcagtgtgggctctcagccaccccaaggtggcaccagagccaggtccctgttccctcttctcccaagccaggagcctccccacaaagggggaggatgataagtgtcgcatacaaggtcaggctgcccagatgggaccctcactgaccccagacgttccgggcccgggaacagctggcagctgtgaggctcctatgtggagctcccaccgtggggaggaacttaggtggtggggccagggaccctgtgcaaattgcctcagtggccttcccccagacgggcctttctcagaagcctgactatggagcgtgcctctgcaggagctgggtatggctgccaagactagaaaccaggactagaaactgggggagtagggaggcatgccctaggaaaaggagggatgcaaagagaaggggctttgtgaacatggtgcaaggcccaggaattttgggagcaaaaaccaagtatccttgtggttcaagcctgttttcttccatcttcaggactcgtgccttctgctgttctcattgtggccaagaaatgtcccagctgagggcctttgtcccattgtccctctgtgaccccttcatctttgataaagcactgacatctccttcctaataaatagaccctgagttctgtaaaa

SEQ ID NO: 2102 - DNA, 754 bp, Homo sapiens
  SIMILAR (217)..(564): 901254mologous to Homo sapiens Human XAG growth factor huXAG- 3,accession number AAW37846,Smith-Waterman Score=519.
aatacatttccaacaagagcactggccaagtcagcttcttctgagagagtctctagaagacatgatgctacactcagctttgggtctctgcctcttactcgtcacagtttcttccaaccttgccattgcaataaaaaaggaaaagaggcctcctcagcccctctcaagaggattggggagatgacatcactggggtacaaacttatgaagaaggttctcttttatgctcaaaaaagtaaggaagccattaatgggttattcatcacctggggggattgtcaatactctcaagcactaaagaaagtatttgcccaaaatgaagaaatacaagaaatggctcagaataagttcatcatgctaaaccttatgcatgaaaccactgataagaatttatcacctgatgggcaatatgtgcctagaatcatgtttgtagacccttctttaacagttagagctgacatagctggaagatactctaacagattgtacacatatgagcctcgggatttacccctattgatagaaaacatgaagaaagcattaagacttattcagtcagagctataagagatgatggaaaaaagccttcacttcaaagaagtcaaatttcatgaagaaaacctctggcacattgacaaatactaaatgtgcaagtatatagattttgtaatattactatttagtttttttaatgtgtttgcaatagtcttattaaaataaatgttttttaaatctggaaaaaaaaaaaaaaaaa

SEQ ID NO: 2103 - DNA, 433 bp, Homo sapiens
  SIMILAR (145)..(261): 1001254mologous to Homo sapiens mRNA cleavage factor I 25 kDa subunit,accession number AJ001810,Smith-Waterman Score=208.
atggatcggatataccggaccgaccatttcgagttaatggcgggccgtagccgctgaggggattgcttataaccgcttcccgcacggggaaagtctaccctgcctgccactttctgctcgccgccagcgccggagctcgccagcatgtctgtggtaccgcccaatcgctcgcagaccggctggccccggggggtcactcagttcggcaacaagtacatccagcagacgaagcccctcaccctggagcgcaccatcaacctgtaagtgcggcgcggccttggcgggcatttctctcgtgaaagctcctatagactctccgacgcgcccccggcttttcggcgcgcttcacgcctctgcaccttcccgcctccaactcccgctggcggatgcgcgccttcctccctctctcaggcccctttctcatcctccagcg

SEQ ID NO: 2104 - DNA, 1946 bp, Homo sapiens
  SIMILAR (214)..(798): 461254mologous to Homo sapiens mRNA cleavage factor I 25 kDa subunit,accession number AJ001810,Smith-Waterman Score=229.
  misc_feature (1)...(1946): n = a,t,c or g
gcgctgtcctgttaatggcgggcagtagccgctcgaggggattgcagataaccgcttcccgcacggggaaacgtctaccctgcctgccactttctgctcgccgtcagcgccggagctcgccagcatgtctgtggtaccgcccaatcgctcgcagaccggctggccccggggggtcactcagttcggcaacaagtacatccagcagacgaagccccttcaccctgggagcgcaccatcaacctgtaccctcttaccaatttatacttttggtacaaaaagagcccctcttacgagaaggacaagctctgttggcagccagattttcagcgcattgaggggaagaattttgataaaattggaatgaggaggactgtagaaggggttcttgattgtacatgaggcaccggttaaccccatggtgttacttgctgcaactgggaacaaattttcttccaaattaccttggttggttgaacttaaccccgggagaagatgaagtttgaagggcttaaaacggcttaatgaccagagatacctgggtccgtccaggatggagttttgccaagacctggggtccattgaccgattgccattgggtaacctggtgggagacccaaatttttgaaccctccctcagtatcccatatattccctgcacatattaccacagcctaaggaaccataagaaagttgtttcctggttccagccttcaagaaaaagcccttgttttgcagttccctaaaaaatttacaagctggtagcctgcaaccccattgtttgaattgtatgacaatgcgaccaggatatggacccatcatttctagtctccctcagctgttgagcaggttcaattttatttacaactgaattcctgcgcagtggagaagtaaaagaagccgcttgtctctgtgagcacagctatatacagtttaggattaattttgttagaaaagtttttttggttttatctcttttgcgatccctaaattgtccacctttctatttgtttgataagtaaaattaatatgaaggaactagatagtggtgtaaacaaatgtgataatgtttatttactttcgggtctgctcatacttttttgtacaacattaaagaaaatggactttttttattttaatttctcattaaacttctaaaattcttataggtgaggatcatttttccccccaccttatgatggtgaatgttgcaacacaatgacaggtttaagtcagtcaagtttattggacccttgctttgataccattcttgggcacatactccaagattgtattagattttggtgaatgaagagcttccattacttctgaaacctatatttatctgagtgagtccaaggtgcaactcctaaatgaattgtgttgcagagaactcccagtataattcactgaccagtacgttttataaccatccaggccttggtttgcaagcaacagaccttaaacatacaggaaactattaaaattggctcgatcagtagtcataggaattggtataaggaagagactccatttaggagcctcagagttttctttcacataatgggggtatttaattatttgtgctgttgcngaaaattatgtgtcttattcttaaagccatgggtaaaaattagggatctgtgaaggaaatttctaaaattggatgtattaggttttgaactctgagattgcacaaatattcaattaactttgaagttgtgtacatagagaagaaaatttggttttagcaaatgacagagccttcaaaaatatttttggaataatgtgaatcaaccgaaaacctgggggcaaggcagaggaccaggttttctccaggttaagagaaaagcgaaattgtaaaaactttaaaaaatactgataaattccggatcaaatttgggggaataaaaaatattagagccaaggaaaaaaaaaaaacaaaccaa

SEQ ID NO: 2105 - DNA, 1715 bp, Homo sapiens
  SIMILAR (48)..(659): 341254mologous to Homo sapiens prefoldin subunit 3,accession number Y17394,Smith-Waterman Score=160.
  misc_feature (1)...(1715): n = a,t,c or g
gcgcgctcgcatccccaagatggcggccgttaaggacagttgtggctaaggagaaatggccacagggaatgggcggcggcgtccacctggggattcctgaggccgtgtttgtgtattatttttnatattaaaggaagatgtatcattacttcatgaaacagcctgggaatgagactgcagatacagtattaaagaagcctggatgaacagtaccagaagtataagtttatggaactcaaccttgctcaaaagaaaagaaggctaaaaggtcagattccctgaaattaaacagactttggaaattctaaaatacatgcagaagaaaaaagaagtccaccaacttcaatgggagaccaagattctttgctggcagattaaccctgtatttgcaaaagctttcagttcctcctacccgataaaggggggtctggggttgggggctaatgtaatgcttgaatatgatattgatgaagctcagggcattgttgggaaaagatttattcgactgccacaaagattcttgattcccgggggggaaggaccttgacttttctttcgagatcaatttactaccacagaagtcaatatggccaggggtttattaattggggatgttaaaaaggaaggaaacaaggatggactctaccaagaacaaagcattaatgctgggccaatttaaaaatgtgggtttagtttttccaaacatgtttatctttaaatacccctttattccttacaggtttgacattaactttggaatgtttaaccagccaaggaattttaaggaaaagataaacaccattttatttatttataabkkkcaaaattagtttcaaatatttttgacattgtgatttttttttccacatttctcagcaaagctaatggtattttaatatcattattttttgcctgtcataagaaaactcttagctgaaaggcccgaaaactgtgaagacagcctatggaagctgaaatgccggacgcctagcacagtttacctttttcccctttcctaatcggctgatgttacctctcacttgatgtggttaaaccattttagaggtagagaagacagacagtttgaatatttgtaaacttgtttttctttggtatatttaggacttagtggtcctctgttgctattgtcttctataagtggagtttcatgacttactgcttaaccgaataactaactactatgatattctggaccattttaggaaatggtaaatttgcctggctaccacattaaggggggctattaaagactaccattttttctaacctccagataagtgccagtgtcctttgcaaatgcccaacgatacgtggagatcctgggccccaaccgtgaaataaaaattactcattccaaaacccctgcccaagggtgattttggtaggttccttaaccaggttctcccaggagccatccttggaaccagggaatatttaagataaatgtgaaatctgccaatggctgaaaagagttgtgagcttttttattccatgataaaaccttataggaatagtataaaaaatccctgtggaaagctactagtacattgaccagcgctgggtgatacagattctgataaaaacataaatgtattagttcatctccatgtagtaaaaagtatacttatacaatgttttgtacttgtatttcatgaaattaaaacgagtgatgctaaaacggccttcgtggcctc

SEQ ID NO: 2106 - DNA, 518 bp, Homo sapiens
  SIMILAR (365)..(466): 701254mologous to Xenopus laevis ribosomal protein L14,accession number X05025,Smith-Waterman Score=106.
aggagcgcatcatggagtggcatcgccatacaatgaccgaatgttctgcgcaagagcccaagagccatgatatctacctgaggctgttggtcaagttatacaggtttctggccagaagaaccaactccacattcaaccaggttgtgttgaagaggttgtttatgagtcgcaccaaccggccgcctctgtccctttcccggatgatccggaagatgaagcttcctggccgggaaaacaagacggccgtggttgtggggaccataactgatgatgtgcgggttcaggaggtacccaaactgaaggtatgtgcactgcgcgtgaccagccgggcccgcagccgcatcctcagggcagggggcaagatcctcactttcgaccagctggccctggactcccctacgtccgctccaagggccggaagttcgagcgtgccagatgccgacgggcccgccgaggctacaaaaactaaccctggatcctactctcttattaaaaagatttttgctgacagtgaaaaa

SEQ ID NO: 2107 - DNA, 696 bp, Homo sapiens
  SIMILAR (1)..(297): 1001254mologous to Homo sapiens ribosomal protein L18,accession number L11566,Smith-Waterman Score=495.
atgggagtggacatccgccataacaaggaccgaaaggttcggcgcaaggagcccaagagccaggatatctacctgaggctgttggtcaagttatacaggtttctggccagaagaaccaactccacattcaaccaggttgtgttgaagaggttgtttatgagtcgcaccaaccggccgcctctgtccctttcccggatgatccggaagatgaagcttcctggccgggaaaacaagacggccgtggttgtggggaccataactgatgatgtgcgggttcaggaggtacccaaactgaagcataacaccagggatgtggtggtgaaagttccggaagtgttgagaactgctgctgtcagcccaggggtgctccgggtagtaaacgatagtgttggttaccagggctctgctgcgccaaggcagtggagggtatgtgcactgcgcgtgaccagccgggcccgcagccgcatcctcagggcagggggcaagatcctcactttcgaccagctggccctggactcccctaagggctgtggcactgtcctgctctccggtcctcgcaagggccgagaggtgtaccggcatttcggcaaggccccaggaaccccgcacagccacaccaaaccctacgtccgctccaagggccggaagttcgagcgtgccagaggccgacgggccagccgaggctacaaaaactaa

SEQ ID NO: 2108 - DNA, 784 bp, Homo sapiens
  SIMILAR (112)..(681): 361254mologous to Homo sapiens ribosomal protein L18,accession number L11566,Smith-Waterman Score=164.
  misc_feature (1)...(784): n = a,t,c or g
cggatacattaccagacagnttgctgttcgattaatcactnctatagaattngcctcgagcaagattcggcacgagggccgagcaggaggcgccatcatggtgagtggaccatccgccatacaaaaggaccgaaaaggttcgggcgcaaaggagcccaaagagccagtatatctacctgagcctgttgctcaagttatacaggttttctggcccagaagaacccaactccaacattcaaaccagggttgtgttgaagaggttgtttatgagtccgcaccaaaccggcccgcctctgtcccctttcccggatgatccgggaagatgaagctttcctggccgggaaaacaaagacgggccgtggtttgtggggacccataactgatgaatgtgcggggttcaaggaggtaccccaaactgaaggtatgttgcactgcgccgtgaccaagccgggccccgcaagccgcaatcctcaaggcagggggcaaagatcctcacttttcgaccagctggcccttggacttcccctaaagggcttgtggcactgtcctgctttccgggtccttccaaaggcccgaaaggtgtaccggcattttcggcaaaggccccaggaacccccgcacaagccacaccaaaaccctacgttccgctccaagggccggaagttcgagcgtgccagaggcccgacgggccagcccgaggctacaaaaaactaaccctggatcctactctcttatataaaaagatttttgcctgacaaaaaaaaaaaaaaaaagggcggccgct

SEQ ID NO: 2109 - DNA, 963 bp, Homo sapiens
  SIMILAR (963)..(739): 691254mologous to Mus musculus putative,accession number AK008612,Smith-Waterman Score=256.
tttaatttttaatgcaccagatttatttaccatttcaaaagaatcacggataataggccagatacccttaaaaaattcctctgggggcaaaccaaatccagtatatattaggatgtaacagggactgcaagccaagacaggcatgagttcctaggttataaatatcatctttataaaaagtgggtattttataggacatcccaagtaacaccgacttataaaagcaaaacactgtacttaaaatgttggcccacatatgaaagaatagctgaaggctttaggggattgaagaatggataaacttaacccaacttaaaacacattactcatccctcagaaccaaaatacaggaaaaaagaagaaatacaacaggttcgcacaacatccagaaaagttccgggactatgaaagtgtttcttggcacccagttctcgctgttttaaaatccgtcccttcgttgttggctaggcctctctccagggaaactagccggggcaagaggcaggggaactgtacatgtgggaggtcctgagggcccttgcacccactcgacctccaccaagcggatggccaagcgccacccggaagtgtccactggtgggggcgggaaggcaccgtagtccaaggtatccgcgggcagggagcgggccagggcgtgcgcgaggtcgggggtagctgggaacggaggaggaggggcccgctcgaggctccgcctctcaccggctgcggcctcggctacagccagggcccagagggctccgagtcccgggagcggaggccggagtcgggttcctgtagaggctgctcctccttgtccccgctcggacgtggtccccgctgctcgaggtgcagctgcagcagggcccggcggtacatggcttccagcttctcaagtcgggccctcagggccctggggctgaacggctcgtcctctcggccgctgtctctagccctccggttcgt

SEQ ID NO: 2110 - DNA, 1581 bp, Homo sapiens
  SIMILAR (1581)..(718): 951254mologous to Homo sapiens IEF SSP 9306,accession number X71810,Smith-Waterman Score=1484.
tcagtggcggtcggcggcctcacctatcagtgtgtgaaagacggcagcgatggcccctgccaccaccatacacaggacggctttggtcctgtctctcttgctgttcacaaacaccaggcccacatttttgaagtcactcatgggacccgtgaagaacttcatgagggagtacgccagcccgtagctggccagcatctcgactgcatcctccttgacagcagcaatgccccggttcaaggcctgagctatgacatctgagattgaggcacatcccaccaggaaactgtatttgtgttttaagagaatgccagcatgggtccatgcctgttcaagaccaccagtgtgtcccacctggttgaggtggttcctcagaagctgtcctgggtcatttgatgtgtcccgagcaaacagaagcacagagaaaaatggtacttcctttcctttctctttatcattatatagttcaatggctctgtttagcattagaaattttacagcttcatagaggctatattcctccgcctcatttgtgaatagttcatcacaagctatctgtcttgcttcagcagttctcatttcagccaagcctgcccacttcttcctcagcagagtaagggactctttaattttatcaaccaggtcctcattcttcccatcaaatttcagtccaagtttccattgcttgatccagttgtatttgcttatgagtttttctggtaactggaatatttcatccttatgtgactcaaaggaatgcaacttaagtttcagatttctcagatcccacaaggcaacagtctcgtcagctgatcctgtggcaagaatgaactcactatgaggactgaaagaaaggcagttcacttcagcagtgtgagtgtcaactgagtggcttggtttggaagtattgtttgaacgagtatcccaaatcatcagtttctgatcatcagcaactgacccaaacagagactcacagagtagatgccaggaaacatcttctactattgccgtatgccctgtaaagatggtcttcgcatctaccacttttccctcctttggaacggcactgatgtcccacaggcagatggtgtggtcatctgaagcactaagtaagtgcccactgagatttaggttccaagaaagcccatagccttccttctgatgtccacggagacgcaagtctgggttgcattctccagaaggatctggtttagaaggatgttttgtatagtcaaagacaagaatatcactggaaggagtctttgttgtgatgatacaagggttctggggcatataacgggccctgtttacttttccttcatggttgatcttgatttctatttcaatttttccactaactgaaccaaaacctccaaattctcctttctctctgtcgtagtgtgatgcatcaaactgagcatcatcatcaggcagctgcacactggctataacaagatggttttgttcatccgatgtgtgtgtccccaggacaagtcgatgaaggctgaaatctttcccttctggtctggttacatctggaagccactgggcagttaggctgggccactccagagcatgggtcat

SEQ ID NO: 2111 - DNA, 1800 bp, Homo sapiens
  SIMILAR (334)..(831): 1001254mologous to Homo sapiens progressive ankylosis-like protein,accession number AF274753,Smith-Waterman Score=862.
atgtggtttgcctactccccgttcaccttctgccatgattggaagcttcctgaggcctctgcagaagccaaacggatgccagcactatgcttcttgtacagcctgcagcaccccttgtgtgaggatggggtatgcgctcatgaggcaggagtatggggaatcgggggtctgatcattgcttatgtgaagggctatgaagaggtttctcagaagttcacctccatacggcgagtccgtggtgataattactgtgcactgagggccacgctgttccaggccatgagccaggctgtggggctgccgccctggctgcaggacccggagctcatgctggttgtttttgtagccattttgcttcacagtcacctggaatgccgggagcccctgctcatcccgatcctctccttgtacatgggcgcacttgtgcgctgcaccaccctgtgcctgggctactacaagaacattcacgacatcatccctgacagaagtggcccggagctggggggagatgcaacaataagaaagatgctgagcttctggtggcctttggctctaattctggccacacagagaatcagtcggcctattgtcaacctctttgtttcccgggaccttggtggcagttctgcagccacagaggcagtggcgattttgacagccacataccctgtgggtcacatgccatacggctggttgacggaaatccgtgctgtgtatcctgctttcgacaagaataaccccagcaacaaactggtgagcacgagcaacacagtcacggcagcccacatcaagaagttcaccttcgtctgcatggctctgtcactcacgcttaaagacagtgtacagaaaccagacatcagcctgacggggcgcttagtccagacactcccgacacgcatgcgccatcaacgtggagaaagcaaagatgtggcgcctctggcctcttggctttccgagcccagcaccagctcggaggcttcccaaacaagttccaagttgactattaatagtcaaggagaaggaaaggctaaacagaagctggagtgtggaactttatcaatagtcctcagatcctgtgagaaaaaccaggaaaggattaaagctgcagagaaaaggaataggagttggacaaccctctgcgggcttggcgcatggcgccccctgctgtttgagttacctgtgattgttcaaaccccagatcagactaaccgcttccagttccgataccccgcgaagacccagtctgggctttgtagttttttccatagttttgacctcctcacattggaggcctttgtcaaagtctggtttcctggttgcctgctcattttgctctgtttcgtgatgttttggacacccaacgtgtctgagaaaatcttgatagacatcatcggagtggactttgcctttgcagaactctgtgttgttcctttgcggatcttctccttcttcccagttccagtcacagtgagggcgcatctcaccgggtggctgatgacactgaagaaaaccttcgtccttgcccccagctctgtgctgcggatcatcgtcctcatcgccagcctcgtggtcctaccctacctgggggtgcacggtgcgaccctgggcgtgggctccctcctggcgggctttgtgggagaatccaccatggtcgccatcgctgcgtgctatgtctaccggaagcagaaaaagaagatggagaatgagtcggccacggagggggaagactctgccatgacagacatgcctccgacagaggaggtgacagacatcgtggaaatgagagaggagaatgaataa

SEQ ID NO: 2112 - DNA, 2240 bp, Homo sapiens
  SIMILAR (1390)..(1575): 461254mologous to Rattus norvegicus sertolin,accession number AF107727,Smith-Waterman Score=91.
cagcagagctgccccttcaccaccccagtcaccacccttagcctgattgggcaggcgatggctcatagccaggaaggctgcctccctcaggcttcccaaaaccaatcaagggcatacgcggctcagccacacttttgcactcatattcccgtatgcttccgcttaaatgtactcatgaaaaattttaagatggtttgctgtcactcatcccctgacccagacgggttacacagatctggcagtggacacaccctccaacacagcatgaaaagagcataggaaaacccaggtccagctaagccctacctcaaagtaatttggcctttggttcctcctcttgaaagcaggtggatacaaactgtttggctataaaattgtgaatctatggaactgtagaataattaaagcttccaacactaaaccacaaaggcaagtagtgtctgtccacactgatggggcaccacctgcaccaagccccagactccagtgcgctgggggcatcagacatctgtcatagtcacaaggagcaagaagttctaggttccctcaccactccctcctacgctcctccagtcttcaaaaatgccttgaaataacccactttgggacccaattcttaatctgttgcaaaacaatctgcttaaaatagccttaattaagatgtaagtccaaaccattgctcttcccttcataaaaaggagaaggtaagattaccagaggttgtcatgactatgccagtaacagatctatccccagaattataccacttaaagcagactgttagaagccccctcagtgccagtgggcagcacgtcagtctcataatcctcaaggtcctgagttaaagcagactgtataggaagatctatagaaacccgttactactaaaggggaaaaaaaaatactgtacttaaaaaaattagaagccagtttaccattagagagagttttgatttgagatataaagaacatattcctctcccaaaactggagtttcctctggatacaaaagtatttggccttctgggagaagatatggtttgcaccggtccaacaggtgtggctctgaagggcccccactggaaatatattggcatcatagatgaggggaaagacttggttaatttctcttatcaaaagctagtcttcaggacatcctggtccacttggcttcccaggggcccaagggttcttctcagagattgttctttaaagacccccaaacctgcagcccaagcccaggagcccacctgtgcatcttcgcccacgtcgccagggcttttcagggagcatgcgttctctcatagactgggtctccctcacacactctgacggggatgttatagtgccgatcgtcctcagcaatgagcgttaccactggcccagtccttgggtgggtcggtggggtagactgtgatgaattcttccgtgttgtacttggagaagcccggttacaccctggatggtgtggcgcaccagcattagggcaagaaggaaccatttccaacctgttccaagaccaccagtgtgtcccacctggttgaggtggttcctcagaagctgtcctgggtcatttgatgtgtcccgagcaaacagaagcacagagaaaaatggtacttcctttcctttctctttatcattatatagttcaatggctctgtttagcattagaaattttacagcttcatagaggctatattcctccgccctcatttgtgaatagttcatcacaagctatctgtcttgcttcagcagttctcatttcagccaaagcctgcccacttcttcctcagcagagtaagggactctttaattttatcaaccaggtcctcattcttcccatcaaatttcagtccaagtttccattgcttgatccagttgtatttgcttatgagtttttctggtaacagcatgagctccgggtcctgcagccagggcggcagccccacagcctggctcatggcctggaacagcgtggccctcagtgcacagtaattatcaccacggactcgccgtatggaggtgaacttctgagaaacctcttcatagcccttcctgctctcctccctgcagtcctcattcctgtgcacaccaagacaagactgctcggccgggcactgcatctcgggccgcggctgcccgctggccgccgccttcccgccgtcccgcgccgtggccgccgcctcccgcgccggcgtctcggcgcagctcgcgcctggccacgcttcgggctggggcat

SEQ ID NO: 2113 - DNA, 2845 bp, Homo sapiens
  SIMILAR (869)..(1045): 721254mologous to Homo sapiens Human myelin oligodendrocyte glycoprotein gene,accession number AAZ29204,Smith-Waterman Score= 221.
gtgcaccgtactaccagctggtgatgagataagggacttgtgccaaaatataaatcaattaaatccctaagcacgctgctgggttcagctgacattttcccatcgcacaactttctggagtaaggaagaggtgcacctatttgcattctgggaccagaccctcctctcctgggaggccaacacgccatctcagaccagcagaccctagacatgcgctgcacctggaagtggcaccgccctggtcatctccttcaccagagcctgcaacaggctgattctagtttgcaaaaatcccttttcatgtagtattggctggaatacttctatgcaaaagatcacacactatctgttttgcctgaggtacagtttataaatgaaaggtgggttaaatgcttgagtacttctttttttcaaaacagcattcaaaataatgagatggttcctttgcatcctacaaatatgatgacgaagggttttgttagcacccttgcgaactcagagttagctgttttcatgaatgcttcaagtttctgcccatgaccagctagagacaggctccctaaccctgtctcccagccccagccaccctgcaatagcttcctcgctctccagcatgacagagcactccacacccatcttgcagggtcttccccagacctggagccaagcaccctgccaggactgcttcttttgctgtgaagcaaccccagcctgggccccagaactgttcactgctgggggatctgccaccattgctctaccttgtcagtgggcagagttagaagcaacaggcttaactcacaaatatcttatgaggacatagtcatgcttataaaattgttctgaaacactcctgttttctctccccgaatatttctgtgacatggttttttttttttattttttgagatggagtttcgctcttgctgctcaggatggagtgcagtgctgcgatctcggctcactgcgacctccacctcctgggttcaagcgattctcctgcctcagcctcccgagtagctgagattataggcacatgccccccaccgtgcccggctaacttttgtatttttagtagagacggggtttcaccatgtcggccaggctggtctcgaactcctgacctcaggtgatccacccacctcggcctcccaaagtgctgggattacaggcatgagccaccacacccagctgaaggggtcttttattcaacaaaacagacactgagcatgggatgctggaggcatgtaaaggacaagagctgctcctttgtgacatccatctcttcctcctgccccagtgcactgactttggccatcagcccctgcccagaccaccacaggccccctcacatgtttcaggtttggggtctacttggtgtgatgagtaatcaagaccagggttggcaaacaggttatatctcgtgccgacgtcagttagttggtagagacatcctggagggtggtggtggggattgtggagctgaagagaaggtacttgctgttcttcactctaggtgtgccctggcagcccgtcatgtgtcgaggctaagcctcctctcacagggcacagagcacaccagagccttcgtctgcttccttccactctccctcatttagtactctttggcactcgccttgtgccagattggtaagacacccacaggccgcccccctcaccgtgctcatggtctggagtgtgttatgataagggccttgtggaaggacacagtgagctctggaagccactctctgcctggggagcctgggcaggcttcagagatgcaagaccttcagctgaccttaaagtgtgagaaggagtttgctggatagggagggtgggaagagaaggtgggaggagcagctggggccaaggcatccagagagaaaaggcccagctggctgcagtggctgaagctctacaggctgggatggtggggatggtggggatggtggggatgggtgggagctgaggctgggaggtggttggcttggggctggttgcaaagcgcctgttgtgccaaggctgagctcagacttgatccagaaggcagtggggagccacaggaggcttccagcaagggatggggatgtcagatgggcatgggtgctgtggaataccacagggggctcgatgcttctgttgagcctgaggaaatggcccagagagcacccaggagagccctgaagagagagtatagaccagggcttctcaaacttttttttttttttaagacggagtcttgactctgtcacccaggctggagtgcagtggcatgatctcagctcactgcaacctccgcctcctgggtttaagtgaaagtgattctcctgcctcagcctcctgagtagctgagattacaggtcccctgccaccatgcccgggctaatttttttgtattttttttttttagtagagacggggggtttcaccgtgttagccagggatggtctcgatctcctgacctcaggtgatccacccgcctcagcctcccaaaagtgctgggattcagaaaaactcttttttttttttggagacaagagtttccgcttttgttgcccaggctggagtacaatggtgtgatctcggctcaccgcaacctccgcctcccggggttcacgccattctcctgcctcagcctccccagcagctgggactacaggcgcacgccaccaggcccggctaattttgctgtgtgtaattaatttcaaatagtccaggattgctctactatttagtatttgtcatgtcaatttcaattactttttttgtactgaaatttttaccctatttgagtaaagagcattaaagatagaaatgttatactttagtcttgaagatacct

SEQ ID NO: 2114 - DNA, 532 bp, Homo sapiens
  SIMILAR (230)..(3): 931254mologous to Homo sapiens dJ453C12.4.4 (novel protein (similar to Drosophila CG11753), isoform 4),accession number AL021578,Smith-Waterman Score=364.
gaggaggaggtcctagatgtggtcctgtctgatgtaggcaccggcaggctcagctcctccaaatggttgtccatcccagacgactggggggttggtggaggatcttcgcaaggcaagaacacatctgctgcatccgggtccccaaggtcaataagttctacttgctccagtgtgtccacattcacttccatggatgagatactacctatggggggtctctgcgactcgagatgcagatgggacagaggaaagacaaactctgtctctggctgtaaaatgtcctcgaagaatttttgccgctccgaaaggcggagctgctggcgctccagggcggcccgaggatttgggtccatgtcagctccaggtgagggcgttgaggatgaaggacatcatggagagccggcctggaggggtggaaaagcccaggatcagtgacagactcgacgatcgaagtgtctgagcgtggcccggcctcaccggcgggctcccaaaacagcgctgcccgacaggaccatggaggagaggcgctcaa

SEQ ID NO: 2115 - DNA, 365 bp, Homo sapiens
  SIMILAR (3)..(233): 971254mologous to Homo sapiens dJ453C12.4.1 (novel protein (similar to Drosophila CG11753), isoform 1),accession number AL021578,Smith-Waterman Score=382.
  misc_feature (1)...(365): n = a,t,c or g
agggcatggcgggtcagttccgcatctacttgtgggacccgctgctgatcctgtcgcaaatcgtcctcatgcagaccgtgtattacggctcgctgggcctgtggctggcgctggtggacgggctagtgcgaagcagcccctcgctggaccaaatgttcgacgccgagatcctgggcttttccacccctccaggccggctctccatgatgtccttcatcctcaacgccctcaccnnnnnnnnnnnnnnnnnnnnnnnnnnnnnnnnnnnnnnnnnnnnnnnnnnnnnnnnnnnnnnnnnnnnnnnnnnnnnnnnnnnnnnnnnnnnnnnnnnnnnnnnnnnnnnnnnnnnnnnnnnnnnnnnnngg

SEQ ID NO: 2116 - DNA, 452 bp, Homo sapiens
  SIMILAR (230)..(126): 801254mologous to Homo sapiens dJ453C12.4.5 (novel protein (similar to Drosophila CG11753), isoform 5),accession number AL021578,Smith-Waterman Score=147.
tacgctcagcttggcacgagggtcccggaactggcctctgtcacccactttactccaccactccccataaacaagtgccagcctgtctcatgttcaaacttaggaagttagtcccagcactaagagcccaaaagctggatagcaaaactggtgatactcaccaggtgagggcgttgaggatgaaggacatcatggagagccggcctggaggggtggaaaagcccaggatctgagggggaatcacaaatggaaatatactggagaagtgacttggcagagccccaggatctcagcaagcctcctaaggaacaagcattcttcccagagcacagaagataatacctccctacatctgtacggcagcctatttccaataggtgctttcatagacatccattatgggatttcatttgtttctcacagcaggtggaaagggattattctcattttac

SEQ ID NO: 2117 - DNA, 1872 bp, Homo sapiens
  SIMILAR (112)..(285): 891254mologous to Homo sapiens dJ453C12.4.1 (novel protein (similar to Drosophila CG11753), isoform 1),accession number AL021578,Smith-Waterman Score=293.
tgccttcactcttccttctgcgcatgtgctcagttcgctatccggctgcttgtacctggttcaggaggttcaggcagaggttgcacccactacgcctgcgcaacctcagccccgcccctccgctgctttccccggaaacgtttctttcctacgcagccgctcctgccgccgtggtcgctggagctttgcctctctaggccggcagcgcctctcctccatggtcctgtctgtcagcgctgttttgggagcccgccggtagaggccgggccacgctcagacacttggatcgccgagtctggcactgggcatggcgggtcagttccgcagctacgtgtgggacccgctgctgatcctgtcgcagatcgtcctcatgcagaccgtgtattacggctcgctgggcctgtggctggctgctggtggacgggctattgcgaatcagcccctcgctggaccagatgttcgacgccgagatcctgggcttttccaacccttccaaggccggctctccatgatgtccttcatcctcaacaccctcaacagtgcccatgggcttgctgtacttcatccggcgaggaaaagcagtgtctggatttcactgtcactgtccatttctttcacctccttgggctgctgggttctaacagctccccgttttccccttcgggcggctgaaccttggtgggcttgggtccaaagcccgttgttgcattgcactcattggctgtcatcggggagtacctgtgcatgcggacggagctcaaggagatacccctcaactcagcccctaaatccaatgtctagaatcaggccctttggacatcctgctgacacttgggccccttaacaccttgggctgctcagaccctccagattgaggtccagcccagatctgagaggaaccctggaaatgtgaagtctctgttggtgtgggagagatagtgagggcctgtcaaagaaggcaggtagcagtcagcatgacagctgcaagaatgacctctgtctgttgaagccttggtatctgagaggtcaggaaggggacctctttgagggtaataacataattggaaccatgccactcttgagccccaaatacctgtcaccagcctgttgttttaaaaaaaaaaaaaaatccagggatatttgatgggagcaaaccacttctttagtcatctgtcttacctccctgggaccgcttgtaacttttgcagtgttgccgaatcacagcagttacctttgcaatgttgccgaatcacagcagttctgttggagaaacgcttggtttccggatccagagccacagaaagaaatgtaggtgtgaagtattagggctgctgtcaggggagagggatgggcagatgggagggcatcaaggcacaagggaaaatggcacaacctgtgcccctgtttattacacacgtttcatgttgcaccccaaggaacctatgactttctttccagtttcctttttaccagggtccccatcctgctgccagctctcaacattgccaggccattagggcccagagaagaatccccagtgttggtccaaagccttaaccatcattaagacactgcctgtcttctaggaatgaccaggcaccccagctccccactggactcacaatatttttttttcctgcctttatttagaattctttggcgggaagggtatgatgggttcccagagacaagaagcccaaccttctggcctgggctgtgctgatagtgctgagggagataggaatttgctgctaagatttttctttggggtggagtttcctcctgtgaggggcttgcagctatccttcctgtgtatacgaaatacagtattttccatggttctgcctgcacttactttgtaatgccacggcg

SEQ ID NO: 2118 - DNA, 528 bp, Homo sapiens
  SIMILAR (420)..(485): 811254mologous to Homo sapiens polio virus related protein 2, alpha isoform,accession number AF044968,Smith-Waterman Score=84.
atgaggagacaggactgtccaaatccaatgaagaagataagaagctccagtcctgtgcagcaagaacgagtgtccagtctatatttccagtctgccaggggaggtcttggagtagatgtctccgccctcgggactgtcactcacgtgtctccgtcctcatctgcacgggtggccatggcgatgtcagcagaaagggggtgttccatggggcacatcatggggtataggggtgtaggcaggttcaccagaggaaacggggaccatgcccgagtggggtacaaaggcaaccctcctgaagtgtccatctccggctatgatgacaactggtacctcggccgtactgatgccaccctgagctgtgacgtccgcagcaacccagagcccacgggctatgactggagcacgacctcaggcaccttcccgacctccgcagtgcccagggctcccagctggtcatccacgcagtggacagtctgttcaatacaccttcgtctgcacatcaccaatgccgtggatgggccgcgctga

SEQ ID NO: 2119 - DNA, 935 bp, Homo sapiens
ttctcttgaatttcctggctttgttgatttcgaaccacaaggttaacattaaaacacaaagactcacatttaaatatttcttttgaaatcagaagaacaatagctctttgaaatgacgctggaacgcgcacaatagattctactgggtcaatgtattatgttatatactcatctgaactttcaaaagaagttaaatgggagatattctcaacaggcaaaaataagatattccaatctattgttcaagtttatggctccgatataaataatgggctataaacccgtatctggaaaacagttgcgcagtgcgtgcttaatggccagccaatgaaaaccaacgtctcattctactccgtctttcagcacgtcaagggacatcccactccgccttttttttttttttctttttaaagaggccaaccgctggggaccacctggttttggcacctttatgaggcctcccagcagcacgggagcttctaaggggcacgctctgcagttgagcttatttgcagagctccatgatcgctcaaagccgagcaacgcgcacgggtttggctacttggcaccagcacaaggctttagacaggcacttcccacggctgagttctaggcatcccctttttgaaacgtgttcttctccaccctgcaagcggtggggtgagaaatctcactttcgaagggcttgcaaggaaggaagagagtcggcgccttgcggaattccccggccgcgcttcaaggttcacacgccgcgtgggaagcttcggatgcagcccggttccgaggcggttcggcggttcgagactggggcctcgaagccgaagaaagcgaagaacaaagcagccgcgttagcccgccgccccgagggacagcccgggcgcgcccgccgctccgcccacaccccgcccctcggccgcgcgaaatggcggcggccg

SEQ ID NO: 2120 - DNA, 609 bp, Homo sapiens
  SIMILAR (55)..(225): 911254mologous to Homo sapiens apolipoprotein CI,accession number X00570,Smith-Waterman Score=236.
attcagagtgcccctccggcctcgccatgaggttcttcctgtcgctcccggtccctggtggtggttctgtcgatcgtcttggaaggcccagccccagccccaggggacccccagacgtctcccagtgccttggataagctgaaggagtttggaaacacactggaggacaaggctcgggaactcatcagccgcatcaaacagagtgaactttctgccaagatgcgggtgcccctccggcctcgccatgaggctcttcctgtcgctcccggtcctggtggtggttctgtcgatcgtcttggaaggcccagccccagcctagggggctccagaagtctccaacccctttgatggcctggaggagttaggaaagaccctggaggactacactcgggaattcatcaaccgcatcacacagagtgaacttcctgccaagatgtgggattggttttcagagacatttcggaaagtgaaggagaaactcaagactgactcatgaggacctgaagggtgacatcccaggaggggcctctgaaatttccaacaccccagcgcctgtactgaggacgccctccatgtgtgtccaatgtggtcacacgcccaggtgtgacc

SEQ ID NO: 2121 - DNA, 1913 bp, Homo sapiens
  SIMILAR (1526)..(1597): 871254mologous to Homo sapiens herpesvirus entry protein B,accession number AF058448,Smith-Waterman Score=101.
  misc_feature (1)...(1913): n = a,t,c or g
gagcagaacagggaggctagagcgcagcgggaaccggcccggagccggagccggagccccacaggcacctactaaaccgcccagccgatcggcccccacagagtggcccgcgggcctccggccgggcccagtcccctcccgggccctccatggcccgggccgctgccctcctgccgtcgagatcgccgccgacgccgctgctgtggccgctgctgctgctgctgctcctggaaaccggagcccaggatgtgcgagttcaagtgctacccgaggtgcgaggccagctcgggggcaccgtggagctgccgtgccacctgctgccacctgttcctggactgtacatctccctggtgacctggcagcgcccagatgcacctgcgaaccaccagaatgtggccgccttccaccctaagatgggtcccagcttccccagcccgaagcctggcagcgagcggctgtccttcgtctctgccaagcagagcactgggcaagacacagaggcagagctccaggacgccacgctggccctccacgggctcacggtggaggacgagggcaactacacttgcgagtttgccaccttccccaaggggtccgtccgagggatgacctggctcagagtcatagccaagcccaagaaccaagctgaggcccagaaggtcacgttcagccaggaccctacgacagtggccctctgcatctccaaagagggccgcccacctgcccggatctcctggctctcatccctggactgggaagccaaagagactcaggtgtcagggaccctggccggaactgtcactgtcaccagccgcttcaccttggtgccctcgggccgagcagatggtgtcacggtcacctgcaaagtggagcatgagagcttcgaggaaccagccctgatacctgtgaccctctctgtacgctaccctcctgaagtgtccatctccggctatgatgacaactggtacctcggccgtactgatgccaccctgagctgtgacgtccgcagcaacccagagcccacgggctatgactggagcacgacctcaggcaccttcccgacctccgcagtggcccagggctcccagcttgttcattcacgcagttgacagtcttgttcaataccaccttcgtctgcacaagtcaaccaaatccgtgggcattggcccgcgctgagcaggtcatcttttgtccgagaaaccccccaagccntcgccccgagatgtgggcccgctggtgtggggggccgtgggggggacactgctggtgctgctgcttctggctggggggtccttggccttcatccatgcatgagggtgaggaggaggaggaagagccctggaggagcaggaggaggagccagtggcgacgggggattctacgatccgaaagcttcaggtgttgggaaatggggaccccgtcttctggacaccagtagtccctggtcccatggaaccagatggcaaggatgaggaggaggaggaggaggaagagaaggcagagaaaggcctcatgttgcctccacccccagcacttcgaggatgacatggagtcccagctggacggctccctcatctcacggcgggcagtttatgtgtgacctggacacagacagagacagagccagggccgggccctcccgcccccgacctgaccacgccggcctagggttccagactggttggacttgttcgtctggacgacactggagtggaacactgcctcccactttcttgggacttggagggaggtggaacggcacactggacttcttcccgtctctaggggtgcatggggagcccggggagctgagtagtggggatccagagaggacccccgcccccagagacttggttttggctccagccttcccctggccccgtgacactcaggagttaataaatgccttggag

SEQ ID NO: 2122 - DNA, 2051 bp, Homo sapiens
  SIMILAR (437)..(913): 931254mologous to Homo sapiens Polio virus receptor protein,accession number X80038,Smith-Waterman Score=779.
  misc_feature (1)...(2051): n = a,t,c or g
atggcccgggccgctgccctcctgccgtcgagatcgccgccgacgccgctgctgtggccgctgctgctgctgctgctcctggaaaccggagcccaggatgtgcgagttcaagtgctacccgaggtgcgaggccagctcgggggcaccgtggagctgccgtgccacctgctgccacctgttcctggactgtacatctccctggtgacctggcagcgcccagatgcacctgcgaaccaccagaatgtggccgccttccaccctaagatgggtcccagcttccccagcccgaagcctggcagcgagcggctgtccttcgtctctgccaagcagagcactgggcaagacacagaggcagagctccaggacgccacgctggccctccacgggctcacggtggaggacgagggcaactacacttgcgagtttgccaccttccccaaggggtccgtccgagggatgacgctggctcagagtcatagccaagcccaagaaccaagctgaggcccagaaggtcacgttcagccaggaccctacgacagtggccctctgcatatccaaagagggccgcccacctgcccggatctcctggctctcatccctggactgggaagccaaagagactcaggtgtcagggaccctggccggaactgtcactgtcaccagccgcttcaccttggtgccctcgggccgagcagatggtgtcacggtcacctgcaaagtggagcatgagagcttcaaggaaccagccctgatacctgtgaccctctctgtacgctaccctcctgaagtggccatctccggctatgatgacaactgggacctcggccgtactgatgccaccctgagctgtgacgtccgcagcaacccagagcccacgggctatgactggagcacgacctcagggcaccttcccgacctccgcagtggcccagggctcccagctggtcatccacgcagtggacagtctgttcaataccaccttcgtctgcacagtcaccaatgccgtgggcatgggccgcgctgagcaggtcatctgtgtccgagagacccccaacacagcaggcgcagggcccacaggcggcatcatcgggggcatcatcgccgccatcattgctactgctgtggctgccacgggcatccttatctgccggcagcagcggaaggagcagacgctgcagggggcagaggaggacgaagacctggagggacctccctcctacaagccaccgaccccaaaagcgaagctggaggcacaggagatgccgctcccatctcttcactctgggggcctgagagcacagcccactcaagaccccctactttgatgctggcgcctcatgcactgagcaggaaatgcctcgataccatgagctgcccaccttggaagaacggtcaggacccttgcaccctggagccacaagcctggggtcccccatcccggtgcctccagggccacctgctgtggaagacgtttccctggatctagaggatgaggagggggaggaggaggaagagtatctggacaccgatcaaccccatctatgatgctctgtcctatagcagcccctctgattcctaccagggcaaaggctttgtcatgtcccgggccatgtatgtgtgagctgccatgcgcctggcgtctcacatctcacctgttgatcccttagctttcttgccaaggatctagtgccccctgacctctggccaggccactgtcagttaacacatatgcattccatttgtaaatgtctaccttggtggctccactatgacccctaacccatgagcccagagaaattcaccgtgataatggaatcctgggcaaccttatcttcatgagggcagggaggtggggaaggtgcttctgnacaacctctggatcccaagggactcctctcccagactggtggaccttagaccatacctctcaaacccccaatggcntcgaacttcccccaaaatcncaaagaaagaccctagaacttataatttggncttcagggtagtaaattcccaatagggctgctggaagtggggngctgaagggntcc

SEQ ID NO: 2123 - DNA, 2710 bp, Homo sapiens
  SIMILAR (2111)..(2707): 951254mologous to Homo sapiens Polio virus receptor protein,accession number X80038,Smith-Waterman Score=969.
atgcctggccaatgcagagtgccctccgccttccatgaggctcttcctgtcgctcccggtcctggtggtggttctgtcgatcgtcttggaaggctactggtcagacgaggaaagcagcccagagcactgaccacaggggaaaacatctccgggcatactgggagcagctgctgggggccactggtcaggctgcgggggtcactggttggactgggagagccagtgcaggccactcggacggcacgcttggggccattagttacactgggagaggccatcgcaggccacaggttgcagtggggtcctctggttaaaatcgacgatgccagcccaggctgctggtccagtggggcgagtgccaaggccctggtcagaataacgaggagaaggtccgcgattcctggtgagatcccagctcgggtcactggctacactggtcgatcaggccccccgctgcaggctggtcaccccgcagcggccgagctgcagcccgggctcagtctccccgccgccgtgaacatggagcccccggacgcaccggcccaggcgggggcccccggctgctgttgctcgcagtcctgctggcggcgcacccaggagcccaggatgtgcgagttcaagtgctacccgaggtgcgaggccagctcgggggcaccgtggagctgccgtgccacctgctgccacctgttcctggactgtacatctccctggtgacctggcagcgcccagatgcacctgcgaaccaccagaatgtggccgccttccaccctaagatgggtcccagcttccccagcccgaagcctggcagcgagcggctgtccttcgtctctgccaagcagagcactgggcaagacacagaggcagagctccaggacgccacgctggccctccacgggctcacggtggaggacgagggcaactacacttgcgagtttgccaccttccccaaggggtccgtccgagggatgacctggctcagagtcatagccaagcccaagaaccaagctgaggcccagaaggtcacgttcagccaggaccctacgacagtggccctctgcatctccaaagagggccgcccacctgcccggatctcctggctctcatccctggactgggaagccaaagagactcaggtgtcagggaccctggccggaactgtcactgtcaccagccgcttcaccttggtgccctcgggccgagcagatggtgtcacggtcacctgcaaagtggagcatgagagcttcgaggaaccagccctgatacctgtgaccctctctgtacgctacccatccatgaagtgtccatctccggctatgatgacaacttggtaccgtcggccagtactgatgccacccgtgagcctgtgacgtccgcagcaacccagagcccacgggctattgactggagcacgacctcaggcaccttcccgacctccgcagtggcccagggctcccaagctggtcatccacgcagtgaaccagtcttgttcaataccaccttcgtcttgcacagtcaccaatgcccgtgggcattggggccggcgctgaagcaggtcatctttgtccgagaaacccccagggcctcgccccgagatgtgggcccgctggtgtggggggccgtgggggggacactgctggtgctgctgcttctggctggggggtccttggccttcatcctgctgagggtgaggaggaggaggaagagccctggaggagcaggaggaggagccagtggcgacgggggattctacgatccgaaagctcaggtgttgggaaatggggaccccgtcttctggacaccagtagtccctggtcccatggaaccagatggcaaggatgaggaggaggaggaggaggaagagaaggcagagaaaggcctcatgttgcctccacccccagcactcgaggatgacatggagtcccagctggacggctccctcatctcacggcgggcagtttataccccaccaagccctgtgccaggcagtgctggggctgcagctgtggcctgcacagacccagtgccgtcctccggtgtgcacggccataatgaccacaagaatagcagcagtatgtttaggatgaaggcccttgctcagttgtcaccttacaagacccccaacacagcaggcgcaggggccacaggcggcatcatcgggggcatcatcgccgccatcattgctactgctgtggctgccacgggcatccttatctgccggcagcagcggaaggagcagacgctgcagggggcagaggaggacgaagacctggagggacctccctcctacaagccaccaaccccaaaagcgaagctggaggcacaggagatgccctcccagctcttcactctgggggcctcggagcacagcccactcaagaccccctactttgatgctggcgcctcatgcactgagcaggtaggagctcatgggaagacaaaggaaatgcctcgataccatgagctgcccaccttggaagaacggtcaggacccttgcaccctggagccacaagcctggggtcccccatcccggtgcctccagggccacctgctgtggaagacgtttccctggatctagaggatgaggagggggaggaggaggaagagtatctggacaagatcaaccccatctatgatgctctgtcctatagcagcccctctgattcctaccagggcaaaggctttgtcatgtcccgggccatgtatgtgtga

SEQ ID NO: 2124 - DNA, 467 bp, Homo sapiens
  SIMILAR (148)..(465): 971254mologous to Homo sapiens annexin IV (carbohydrtate- binding protein p33/41),accession number D78152,Smith-Waterman Score=509.
  misc_feature (1)...(467): n = a,t,c or g
tgtgcgtggnnntcttgtttgtcgtgggcagaggaacaaccaggaacttgggctcagtctccaccccacagtttggtggatccgtcccggataagacccgctgtctggccctgagtagggtgtgacctccgcagccgcagaggaggagcgcagcccggcctcggcaccgatgaagacgccattattagcgtccttgcctaccgcaacaccgcccagcgccaggagatcaggacagcctacaagagcaccatcggcagggacttgatagacgacctgaagtcagaactgagtggcaacttcgagcaggtgattgtggggatgatgatgcccacggtgctgtatgacgtgcaagagctgcgaagggccatgaagggagccggcactgatgagggctgcctaattgagatcctggcctcccggacccctgaggagatccggcgcataagccaaacctaccagcagcaatc

SEQ ID NO: 2125 - DNA, 431 bp, Homo sapiens
  SIMILAR (321)..(431): 971254mologous to synthetic construct PP4X,accession number A11959,Smith-Waterman Score=174.
  misc_feature (1)...(431): n = a,t,c or g
aatgacgactaccggnttggaannaccgggtcgacgatttcgtcgaggcctgcctctccgatagctcctgtttttgtcgtcccggcccggggccccaggtgcgcttgccctagagagggattttccggtctcgtgggcagaggaacaaccaggaacttgggctcagtctccaccccacagtggggcggatccgtcccggataagacccgctgtctggccctgagtagggtgtgacctccgcagccgcagaggaggagcgcagcccggcctcgaagaacttctgcttgggtggctgaactctgatcttgacctagagtcatggccatggcaccgatgaagacgccattattagcgtccttgcctaccgcaacaccgcccagcgccaggagatcaggacagcctacaagagcaccatcggcagggacttgata

SEQ ID NO: 2126 - DNA, 442 bp, Homo sapiens
  SIMILAR (405)..(440): 831254mologous to Bos taurus p33/41 (annexin IV),accession number D78178,Smith-Waterman Score=52.
  misc_feature (1)...(442): n = a,t,c or g
ngcgccgcncntcggaagaacttctgcttgggtggctgaactctgatcttgacctagagtcatggccatggaaccaaaggaggtactgtcaaagctgcttcaggattcaatgccatggaagatgcccagaccctgaggaaggccatgaaagggctcggcaccgatgaagacgccattattagcgtccttgcctaccgcaacaccgcccagcgccaggagatcaggacagcctacaagagcaccatcggcagggacttgatagacgacctgaagtcagaactgagtggcaacttcgagcagggagccggcactgatgagggctgcctaattgagatcctggcctcccggacccctgaggagatccggcgcataagccaaaccttaccagcagcaatatggacggagcctttgaagatgacattcgctctgacacatcgttcat

SEQ ID NO: 2127 - DNA, 2230 bp, Homo sapiens
  SIMILAR (195)..(452): 771254mologous to Homo sapiens annexin IV (carbohydrtate- binding protein p33/41),accession number D78152,Smith-Waterman Score=304.
cggtctcgtgggcagaggaacaaccaggaacttgggctcagtctccaccccacagtggggcggatccgtcccggataagacccgctgtctggccctgagtagggtgtgacctccgcagccgcaaaggaggagcgcagcccggcctcgaataacttctgcttgggtggctgaaactctgatcttgacctagagacatggccatggcaaccataggaggtactgtcaaagctgcttcaggattcaatgccatggaagatgcccacaccctgaggaaggccatgaaagggctcggcaccgatgaaaacgccattattagcgtccttgcctaccgcaacaccgcccagcgcctggagatcaggacagcctacaagagcaccatcggcaggagacttgatagacgacctgaagtcagaactcgagtggcaacttccgagcaggtgattgtggggatagaagatgcccacttagcgtgatgacgtagcaagagctgcgaagggccatgaagggagccggcacttgatgagggcttgcctaattgagatcctggcctcccggacccctgaggagatccggcgcataagccaaacctaccagcagcaatatggacggagccttgaagatgacattcgctcttgacacatcgttcatggttcaagcgagtgctggtggtctctgtcagctggtgggagggatgaaggaaattatctggacgatgctctcgtgagacaggatgcccaggacctgtatgaggctggagagaagaaatgggggacagatgaggtgaaatttctaaactgttctctgttccccggaaccgaaaatcaccctgttgcatgtgtttgatgaataccaaaaggatattcacagaaggattattgaaccagaagtattaaattctgaaacatctggtatcttttggaagattgctctgcttgggctaataggtaaagtgcatgaggaacaaatctgcatattttgctgaaaagctcctataaatccgatgaagggcttgggcacccgatgataacacccctcatcagagtgatggtttcctcgagccagaaaatggaccatgttggatatcccggcccacacttccaagagactcctatggaaaagtcccctgtactccgttcatcaagaacagggtagccacatctggagacttacaggaaatgtactgcttgttctctgtgggagggagatgattaaaataaaaatcccaggaagggacagggagggttcttcaacacttttgaattttttttaactttcatttttcttacactggctatttatcctttatcttcaggattgcttattttccccttttaaaacggcctacagctgcctcctaggaatatagactgtctgtattattattcacctataattaggtccattatggatgctttaaagctgtacttgcatttcaaagctcataagatataaatggagcattttaaagtagaaataaatatgtattccatgttttaaaaagattacttctacctttgtgtttcacagacattgaatatattaaattattcccatattttctttttcagtgaaaaattttttaaatgggaaggactgttctaaaatcacttttttcccctaatccaatttttagaaggtggctagtagtttcttcatttgaaattgtaagcatcccggtcagtaggactgcccatccgagtttccaatatttcataggtcaaagccttgaaagcattctacaaaatctcttttttttaggttttgtccataggcatcagttgatcccgtactaagtttttcatggggaggacttccttcatgcacatcttatgttgaaacaactttctgtagtcaaagtataccaaaaccaatttatctgaactaaattctaaagtagggttatacaacccattatacatctggttccaaaacataaaggctgaacatcccataattattatagttaatgtcttaatcccagcttgcaagtgaatggaaaaaaaaataagctttcaaactaggtattcagagcattacatcattcccagaatacctagtttgatataaagaaaactttttttgtgctaaaaatactttttaaaatcaattttgttgattgtaggtaatttcaatttgcactgtgcctttcaactccagaaacattctgaagatgtacttggatttaattaaaaagttcactttgtaaaaaaaaaaaaaaagggcggccgct

SEQ ID NO: 2128 - DNA, 4611 bp, Homo sapiens
  SIMILAR (2980)..(4608): 1001254mologous to Homo sapiens dJ477H23.1 (novel protein),accession number AL033538,Smith-Waterman Score=2797.
atgaagcagctactgcctgcctctggactgctccctctctccagctcccctctcagccctcgccaggagagtccaggagtagaaagggcccatgaaggatgtctgagccagaatcttcaggtccagagagccacgagggaaggagaaatcgatcgtgtggccaagtctggagggcaagagagggcctgtgccagcagtgagacagagagtgaagcgggagacatcatggaccagcaatttgaagagatgaacaacaaactcaactcggtcactgaccccactggctttctgcggatggttcgccgcaataacctgtttaacagccaggctgagtattgtgcccagccctggggactgagtggggagcagcaaggcccacagccccggagcttgcacccagctcccttggcaaggcctgacccaatccagtcccaccctcagaaaagcaaagaaattgaaggggtctctgcagactcttccaaccccgaccctttggatgagggaaatagccggcgttcttctcgcttcaatgtggaggcagtgctgtgttcttcacgtgggagacctgattcctcaatgccagactgctgcagaaatgctgccttggaagccaggagctgccagagcatgacgagcctgttcagtaacactgtgtcaccgacccaggacgggacctcctctcttcccaggaggcagagctcgtttgccaagcccccgctccgtgccctgtatgacctgctcatcgcgcccatggaagggggtgtggtggaaagcacagagcctttgggaaccagcagagctggatttgcatctggcactgcccttttctggctgggtgacaatggcaaagctgcttcccctcctggagtatctgtttcctcattagaaaatgaggatgataacacccaatgcaacaggttagagcagggatacagagaggcagctgtgcctgattggactcaggacttagctctgtgcttgctgcccactctacagtccctgaaggcaaggactgcccctcatctctgtgtccccagcagctgttacaaggcctggtacacgttggcggtcagtaaagtttctggaatgggcctgatgcactccagcggccccgtgggccggcaccggcagctcatcctggttctggagggggagctctacctcattcctttcgccctcctgaagggaagctcctccaatgagtacctctacgagcgcttcggcctccttgctgtcccttccatccgctccctcagcgtgcagtccaagtctcacttacggaagaacccgcccacatactccagctccacatccatggcggctgtcatcggcaaccccaagctaccatcggccgtgatggacaggtggctgtgggggcccatgccatcggccgaggaagaggcctacatggtgtccgagctgctgggctgccagcccctagtgggcagtgtggccaccaaggagagggtcatgagtgccctgacccaggctgaatgcgtccactttgccacccacatctcctggaagctgtcggccttggtcctcacgcccagcatggacggcaaccctgccagcagcaagagctccttcggccacccctacacgatccctgagtccttgcgggtgcaggacgatgccagtgatggggagagcatctcggactgcccgcccctgcaggagctgctgcttactgccgccgacgtcctggacctgcagctgcctgtgaagctggtggtgcttggctcctcccaggagtccaacagcaaagtcacagccgacggggtcatcgcgctgacaagggccttcctggctgccggcgctcagtgtgtcctcgtgtctctgtggcctgtgccagtggctgcttctaagatgttcatccatgccttctactcatccctgctgaacggcctgaaagccagcgccgccctgggggaggccatgaaggtggtgcagagcagcaaggccttctcgcacccctccaactgggcagggttcatgctcatcgggagtgacgttaagctgaacagcccctcatcactcatcggccaggccctcacagagatcctgcagcacccggagcgtgcgcgggacgccctgcgagtgctgctgcacctggtggagaaatccctgcagcgcatccagaatgggcagcgcaatgccatgtacacatcccagcagagtgtggagaacaaagtgggcggcatccctggctggcaggccctcctcaccgctgtgggcttccggctggaccccccaaccagtggcctgccagcggctgtcttcttcccaacctccgacccgggcgaccggctccagcagtgcagcagcacactccagtccctgctgggtctgcccaatcctgccctccaagccctttgcaaactcatcactgcctccgagacgggcgagcagctcatcagccggctccaccaggtgctggttcagctccaggctggcgagaaggagcaggacttggcatcagctcccattcaggtctccatcagcgtccagctgtggcggctcccgggatgccacgagttcctggcagctctagacatggggaagccccaggcccaaatgcttgctgaagggccttgcaggcattccatgaagttgcacaaggagccctatagcgctcatgttcaagatctggaatcttcccgaaggaagcagatgcttatattctttgttcctctaggttttgatctctgtgaagttggtcaggaggaagtaatcctgaaaaccgggaagcaagctaatcgacggactgtgcacttcgcgctccagtccctgctgtctctgtttgggcctgaccggagcggacactcaggtcatgtgggcctgggagatttccaggccctggggacacacccagcccgactgatgttcttaagggccaagctggctacagtgggaagagcaaatgctggcttggaaggtggttatggtttgcaggtggaaccaacggagtctgctgaagattctactgagctacccaagcgcctcagccttgacagctcctcctccctcgagtctcttgcttctgctcagtctgtttccaacgccctgcccttgggttaccagcaaccccccttctctcccaccggtgcggacagcatcgcctcagatgccatctctgtgtacagtctgagctccattgcctcctcaatgagctttgtctccaaacccgagggtggatcagagggtggaggccccggaggacggcaggaccatgaccggtccaagaacgcttacctgcagagatccaccctgcctaggagccagctgcctccccagacccgccctgcaggcaacaaagatgaagaagaatatgaagggttttctatcatcagtaacgagcccttggcgacctaccaagaaaaccgaaacacatgcttctcaccagaccacaaacaaccccaacctgggacagccggaggcatgagagtctcggtgagctccaaagggagcatcagcactccaaattctccagtgaaaatgactctgattcccagccccaactcacccttccaaaaggtgggaaaactagcaagctcagatacaggagaatcagaccagtctagcacagaaacggacagtaccgtgaaatcccaagaagaaagcaacccaaaactggatccacaagagttagcccagaaaattctggaggagacacagagtcatctcattgcggtggagcgtcttcagaggagcggcggccaggtgagcaagagtaataaccctgaagacggcgttcaggcgcccagcagcactgctgtcttcagagcgtcagaaaccagtgcgttcagcaggcctgttctctcccatcagaagagtcagccatcaccagtcactgttaaaccaaagcccccagccaggagctcctccctgcccaaggtgagttccggatatagcagccccaccacctcagagatgtccatcaaagacagcccgagccagcacagtggccggccatcgcccggctgcgactcacagacttcccagctggaccagcctctctttaaactgaagtaccccagctctccttacagcgctcacatttccaaatcaccaaggaacatgtccccaagctccggccaccagtctcctgctggcagtgcaccctccccagctctctcctactcctcagctggatctgctcgctcaagtccagcagacgctcccgacatagacaaactgaaaatggcagccattgatgaaaaggtgcaggctgtccataacctgaagatgttctggcagagcacaccccagcattccacagggccaatgaagatcttccggggggctcctggcacgatgacttccaaaagggatgtcctcagtctgttgaatttgtcaccacggcacaataagaaggaggagggagtggataagcttgaactgaaggagctgtccctgcagcagcatgacggagctccaccgaaagcccctcccaacggacactggcgcaccgagaccacctcgctgggctcactgccgctgcccgccggccctcccgccacagcccccgcgcgccctttgaggcttccttctggaaatggctacaagttcctgtctccaggaagatttttcccttcttccaaatgctaa

SEQ ID NO: 2129 - DNA, 465 bp, Homo sapiens
  SIMILAR (10)..(417): 461254mologous to Homo sapiens KIAA1043 protein,accession number AB028966,Smith-Waterman Score=252.
agtccaggagtagaaagggcccatgaaggatgtctgagccagaatcttcaggtccagagagccacgagggaaggagaaatcgatcgtgtggccaagtctggagggcaagagagggcctgtgccagcagtgagacagagagtgaagcgggagacatcatggaccagcaatttgaagagatgaacaacaaactcaactcggtcactgaccccactggctttctgcggatggttcgccgcaataacctgtttaacagccaggctgagtattgtgcccagccctggggactgagtggggagcagcaaggcccacagccccggagcttgcacccagctcccttggcaaggcctgacccaatccagtcccaccctcagaaaagcaaagaaattgaaggggtctctgcagactcttccaaccccgaccctttggatgagggaaatagccggcgttcttctcgcttcaatgtg

SEQ ID NO: 2130 - DNA, 387 bp, Homo sapiens
  SIMILAR (163)..(228): 501254mologous to Mus musculus putative,accession number AK002988,Smith-Waterman Score=40.
  misc_feature (1)...(387): n = a,t,c or g
annnnnnnnnnnnnnnnnnnnnnnnnnnnnnnnnnnnnnnnnnnnnnnnnnnnnnnnnnnnnnnnnnnnnnnnnnnnnnnnnnnnnnnnnnnnnnnnnnnnnnnnnnnnnnnnnnnnnnnnnngggggccccccctgnnnnnnnnnnnnnnnnnnnnnnnngatcagacaaaaaaaagctatatttgtcattgtcgctttcaaaagacgaggtttgaggaaaactgattttattactatgctagggggggttaatttgttaaaaataaatacaggggctttattattgaactgggcacaacatgcggaaaatacttcttattttgcacactggctatcattgatccaagcgactctaacatcattataagcatgccagaacagactg

SEQ ID NO: 2131 - DNA, 501 bp, Homo sapiens
  SIMILAR (490)..(278): 941254mologous to Homo sapiens HTRM clone 1646005 protein sequence,accession number AAY73378,Smith-Waterman Score=357.
  misc_feature (1)...(501): n = a,t,c or g
gctccatagggcntgatgcactccagcgggccccgtgggccgggcaccggcagctcatcctggttctggagggggagctctacctcattcctttcgcccctcctgaagggaagctcctccaatgagtacctctacgagcgcttcggcctccttgctgtcccttccatccgctccctcagcgtgcagtccaaggtaaggctcacacacatggtggggggccgggggcttgttttcgggtcacgaggcaccgtctatctggtcggactgggctgtgttacgaaggcatagctgtgatctcctcaaaagtgttgattttatgatttgcacgcaggtagcgtgactttagagtaggtctgtccaaaagtggggcacggccctcatgacccctggccattctttgctgccttgggaagccacagtttgtgtcatgtctaagtttctttgctgtgacatcagggtacggagctgctctgaggaattccagcacactgcctatggtgc

SEQ ID NO: 2132 - DNA, 1545 bp, Homo sapiens
  SIMILAR (109)..(852): 291254mologous to Homo sapiens LGN protein,accession number U54999,Smith-Waterman Score=328.
atgggcatcacaaagatgaacatgaatgtgatggaagaagccattggctactttgagcagcaattggccatgctgcagcagctaagtggaaatgagtctgtgctcgacaggggccgggcctatggcaacctgggggattgctacgaagccctgggtgactatgaggaagctatcaaatactatgaacaatatttatctgtcgcgcagagtctgaatcgcatgcaagaccaagccaaggcttaccggggcctgggaaatggacacagggcaatggggagcttgcagcaagcccttgtgtgctttgaaaagaggctcgtggttgctcatgaacttggagaggccttcaataaagcccaggcctatggagagctgggaagtctgcacagccaattagggaattacgaacaagccatttcctgccttgaacgccagctgaacattgctagagatatgaaagaccgagccctggagagtgacgcagcctgtggcctggggggcgtttaccagcagatgggggagtatgacacagccctgcagtaccaccagcttgatctacagatagcagaggaaaccaacaaccccacgtgccagggccgagcctatgggaacctgggcctgacttatgaatccctgggcaccttcgagagggctgtggtctatcaagaacagcacttgagcattgctgcacagatgaatgacttggcggccaagacggtgtcatatagtagccttggaaggacccatcatgccttgcagaactattcccaagcagtcatgtacttacaggaaggtttaaggttagctgagcaactgggccgaagagaagatgaggcaaaaattcgccatggccttggcctctccctttgggctagtggaaacttggaggaggcccaacaccagctttatagggcatcagccttgtttgaaacaatccgacatgaggcacagctgagcacggactacaaactctccctctttgacctgcagacatcatcctaccaggccttgcagcgggtgctcgtcagcctaggccatcatgatgaagccctggctgtggcagaaaggggacggacaagggcatttgctgatcttctggtggaacgacaaacaggacaacaagactccgacccctactccccagtcactattgatcagatcttagagatggtaaatggccagaggggactagtgctttactattccctggctgcaggctatctgtatagctggctgctggctcctggggcaggaattgtgaagtttcatgaacactacctgggtgagaacacagtggaaaactcaagtgacttccaggccagcagcagtgtaacccttccaacagcaaccggctcagccctggagcagcacattgccagtgtccgggaggccctgggggtggagtctcactactcaagtattagaaatgggcactgccggagtctgccctgctacctttccctttttcatgtttctactgctggccaccaagattataaaggtacttgggtgtatgacacctgccatttgaaatctctgcatatgtga

SEQ ID NO: 2133 - DNA, 4228 bp, Homo sapiens
  SIMILAR (2822)..(4225): 931254mologous to Homo sapiens dJ477H23.1 (novel protein),accession number AL033538,Smith-Waterman Score=2248.
gaggcagtgctgtgttcttcacgtgggagacctgattcctcaatgccagactgctgcagaaatgctgccttggaagccaggagctgccagagcatgacgagcctgttcagtaacactgtgtcaccgacccaggacgggacctcctctcttcccaggaggcagagctcgtttgccaagcccccgctccgtgccctgtatgacctgctcatcgcgcccatggaagggggtgtggtggaaagcacagagcctttgggaaccagcagatctggatttgcatctggcactgcccttttctggctgggtgacaatggcaaagctgcttcccctcctggagtatctgtttcctcattagaaaatgaggatgataacacccaatgcaacaggttagagcagggatacagagaggcagctgtgcctgattggactcaggacttagctctgtgcttgctgcccactctacagtccctgaaggcaaggactgcccctcatctctgtgtccccagcagctgttacaaggcctggtacacgttggcggtcagtaaagtttctggaatggtggaggggaaggcctggatcatcctcctgcttctggctgcaagcacccacgcactgctccagaggccacaagagggcgatataacaccgctagccggctccagagctgccgctgtcagctgccaagccagacccttctccacattttcaggcctgatgcactccagcggccccgtgggccggcaccggcagctcatcctggttctggagggggagctctacctcattcctttcgccctcctgaagggaagctcctccaatgagtacctctacgagcgcttcggcctccttgctgtcccttccatccgctccctcagcgtgcagtccaagtctcacttacggaagaacccgcccacatactccagctccacatccatggcggctgtcatcggcaaccccaagctaccatcggccgtgatggacaggtggctgtgggggcccatgccatcggccgaggaagaggcctacatggtgtccgagctgctgggctgccagcccctagtgggcagtgtggccaccaaggagagggtcatgagtgccctgacccaggctgaatgcgtccactttgccacccacatctcctggaagctgtcggccttggtcctcacgcccagcatggacggcaaccctgccagcagcaagagctccttcggccacccctacacgatccctgagtccttgcgggtgcaggacgatgccagtgatggggagagcatctcggactgcccgcccctgcaggagctgctgcttactgccgccgacgtcctggacctgcagctgcctgtgaagctggtggtgcttggctcctcccaggagtccaacagcaaagtcacagccgacggggtcatcgcgctgacaagggccttcctggctgccggcgctcagtgtgtcctcgtgtctctgtggcctgtgccagtggctgcttctaagatgttcatccatgccttctactcatccctgctgaacggcctgaaagccagcgccgccctgggggaggccatgaaggtggtgcagagcagcaaggccttctcgcacccctccaactgggcagggttcatgctcatcgggagtgacgttaagctgaacagcccctcatcactcatcggccaggccctcacagagatcctgcagcacccggagcgtgcgcgggacgccctgcgagtgctgctgcacctggtggagaaatccctgcagcgcatccagaatgggcagcgcaatgccatgtacacgtcccagcagagtgtggagaacaaagtgggcggcatccctggctggcaggccctcctcaccgctgtgggcttccggctggaccccccaaccagtggcctgccagcggctgtcttcttcccaacctccgacccgggcgaccggctccagcagtgcagcagcacactccagtccctgctgggtctgcccaatcctgccctccaagccctttgcaaactcatcactgcctccgagacgggcgagcagctcatcagccggctccaccaggtgctggttcagctccaggctggcgagaaggagcaggacttggcatcagctcccattcaggtctccatcagcgtccagctgtggcggctcccgggatgccacgagttcctggcagctctagacatggggaagccccaggcccaaatgcttgctgaagggccttgcaggcattccatgaagttgcacaaggagccctatagcgctcatgttcaagatctggaatcttcccgaaggaagcagatgcttatattctttgttcctctaggttttgatctctgtgaagttggtcaggaggaagtaatcctgaaaaccgggaagcaagctaatcgacggactgtgcacttcgcgctccagtccctgctgtctctgtttgggcctgaccggagcggacactcaggtcatgtgggcctgggagatttccaggccctggggacacacccagcccgactgatgttcttaagggccaagctggctacagtgggaagagcaaatgctggcttggaaggtggttatggtttgcaggtggaaccaacggggtctgctgaagattctactgagctacccaagcgcctcagccttgacagctcctcctccctcgagtctcttgcttctgctcagtctgtttccaacgccctgcccttgggttaccagcaaccccccttctctcccaccggtgcggacagcatcgcctcagatgccatctctgtgtacagtctgagctccattgcctcctcaatgagctttgtctccaaacccgagggtggatcagagggtggaggccccggaggacggcaggaccatgaccggtccaagaacgcttacctgcagagatccaccctgcctaggagccagctgcctccccagacccgccctgcaagcaaacaaagatgaagaagaatatgaagggttttctatcatcagtaacgagcccttggcgacctaccaagaaaaccgaaacacatgcttctcaccagaccacaaacaaccccaacctgggacagccggaggcatgagagtctcggtgagctccaaagggagcatcagcactccaaattctccagtgaaaatgactctgattcccagccccaactcacccttccaaaaggtgggaaaactagcaagctcagatacaggagaatcagaccagtctagcacagaaacggacagtaccgtgaaatcccaagaagaaagcaacccaaaactggatccacaagagttagcccagaaaattctggaggagacacagagtcatctcattgcggtggagcgtcttcagaggagcggcggccaggtgagcaagagtaataaccctgaagacggcgttcaggcgcccagcagcactgctgtcttcagagcgtcagaaaccagtgcgttcagcaggcctgttctctcccatcagaagagtcagccatcaccagtcactgttaaaccaaagcccccagccaggagctcctccctgcccaaggtgagttccggatatagcagccccaccacctcagagatgtccatcaaagacagcccgagccagcacagtggccggccatcgcccggctgcgactcacagacttcccagctggaccagcctctctttaaactgaagtaccccagctctccttacagcgctcacatttccaaatcaccaaggaacatgtccccaagctccggccaccagtctcctgctggcagtgcaccctccccagctctctcctactcctcagctggatctgctcgctcaagtccagcagacgctcccgacatagacaaactgaaaatggcagccattgatgaaaaggtgcaggctgtccataacctgaagatgttctggcagagcacaccccagcattccacagggccaatgaagatcttccggggggctcctggcacgatgacttccaaaagggatgtcctcagtctgttgaatttgtcaccacggcacaataagaaggaggagggagtggataagcttgaactgaaggagctgtccctgcagcagcatgacggagctccaccgaaagcccctcccaacggacactggcgcaccgagaccacctcgctgggctcactgccgctgcccgccggccctcccgccacagcccccgcgcgccctttgaggcttccttctggaaatggctacaagttcctgtctccaggaagatttttcccttcttccaaatgctaa

SEQ ID NO: 2134 - DNA, 7245 bp, Homo sapiens
  SIMILAR (3974)..(4081): 551254mologous to Homo sapiens dJ477H23.1 (novel protein),accession number AL033538,Smith-Waterman Score=82.
  misc_feature (1)...(7245): n = a,t,c or g
cgctcttgatttcccgggccgacgatttcgtccaacagccagctttatatgggcatcagtcttgtttgaaacaatccgacatgaggcagaggtgagcacggactacaaactctccctctttgacctgcagacatcatcctaccaggccttgcagcgggtgctcgtcagcctaggccatcatgatgaagccctggctgtggcagaaaggggacggacaagggcatttgctgatcttctggtggaacgacaaacaggacaacaagactccgacccctactccccagtcactattgatcagatcttagagatggtaaatggccagaggggactagtgctttactattccctggctgcaggctatctgtatagctggctgctggctcctggggcaggaattgtgaagtttcatgaacactacctgggtgagaacacagtggaaaactcaagtgacttccaggccagcagcagtgtaacccttccaacagcaaccggctcagccctggagcagcacattgccagtgtccgggaggccctgggggtggagtctcactactcaagggcctgtgccagcagtgagacagagagtgaagcgggagacatcatggaccagcaatttgaagagatgaacaacaaactcaactcggtcactgaccccactggctttctgcggatggttcgccgcaataacctgtttaacaggagctgccagagcatgacgagcctgttcagtaacactgtgtcaccgacccaggacgggacctcctctcttcccaggaggcagagctcgtttgccaagcccccgctccgtgccctgtatgacctgctcatcgcgcccatggaagggggcctgatgcactccagcggccccgtgggccggcaccggcagctcatcctggttctggagggggagctctacctcattcctttcgccctcctgaagggaagctcctccaatgagtacctctacgagcgcttcggcctccttgctgtcccttccatccgctccctcagcgtgcagtccaagtctcacttacggaagaacccgcccacatactccagctccacatccatggcggctgtcatcggcaaccccaagctaccatcggccgtgatggacaggtggctgtgggggcccatgccatcggccgaggaagaggcctacatggtgtccgagctgctgggctgccagcccctagtgggcagtgtggccaccaaggagagggtcatgagtgccctgacccaggctgaatgcgtccactttgccacccacatctcctggaagctgtcggccttggtcctcacgcccagcatggacggcaaccctgccagcagcaagagctccttcggccacccctacacgatccctgagtccttgcgggtgcaggacgatgccagtgatggggagagcatctcggactgcccgcccctgcaggagctgctgcttactgccgccgacgtcctggaccttgcagctgccctgtgaaggctggtggtggttgggctcttccagggagtccaccagcaaattcacagccgacggggtcttcgcgttgacaagggctttcttggctgcgggcgctcagtgtgtcctcgggtctctgtggcctgtgccagtggctgcttttaagatgttcatccatgccttctactcatccctgctgaacggcctgaaagccagcgccgccctgggggaggccatgaaggtggtgcagagcagcaaggccttctcgcacccctccaactgggcagggttcatgctcatcgggagtgacgttaagctgaacagcccctcatcactcatcggccaggccctcacagagatcctgcagcacccggagcgtgcgcgggacgccctgcgagtgctgctgcacctggtggagaaatccctgcagcgcatccagaatgggcagcgcaatgccatgtacacatcccagcagagtgtggagaacaaagtgggcggcatccctggctggcaggccctcctcaccgctgtgggcttccggctggaccccccaaccagtggcctgccagcggctgtcttcttcccaacctccgacccgggcgaccggctccagcagtgcagcagcacactccagtccctgctgggtctgcccaatcctgccctccaagccctttgcaaactcatcactgcctccgagacgggcgagcagctcatcagccgggctgttaaaaatatggttggaatgctccaccaggtgctggttcagctccaggctggcgagaaggagcaggacttggcatcagctcccattcaggtctccatcagcgtccagctgtggcggctcccgggatgccacgagttcctggcagctctaggttttgatctctgtgaagttggtcaggaggaagtaatcctgaaaaccgggaagcaagctaatcgacggactgtgcacttcgcgctccagtccctgctgtctctgtttgattctactgagctacccaagcgcctcagccttgacagctcctcctccctcgagtctcttgcttcttgcttcagtctgtttccaacgccctgcccttgggttaccagcaaccccccttctctcccaccggtgcggacaggaatngcctcagatgccatctctgtgtacagtctgagctccattgcctcctcaatgagctttgtctccaaacccgagggtggatcagagggtggaggccccggaggacggcaggaccatgaccggtccaagaacgcttacctgcagagatccaccctgcctaggagccagctgcctccccagacccgccctgcaggcaacaaagatgaagaagaatatgaagggttttctatcatcagtaacgagcccttggcgacctaccaagaaaaccgaaacacatgcttctcaccagaccacaaacaaccccaacctgggacagccggaggcatgagagtctcggtgagctccaaagggagcatcagcactccaaattctccagtgaaaatgactctgattcccagccccaactcacccttccaaaaggtgggaaaactagcaagctcagatacaggagaatcagaccagtctagcacagaaacggacagtaccgtgaaatcccaagaagaaagcaacccaaaactggatccacaagagttagcccagaaaattctggaggagacacagagtcatctcattgcggtggagcgtcttcagaggagcggcggccaggtgagcaagagtaataaccctgaagacggcgttcaggcgcccagcagcactgctgtcttcagagcgtcagaaaccagtgcgttcagcaggcctgttctctcccatcagaagagtcagccatcaccagtcactgttaaaccaaagcccccagccaggagctcctccctgcccaaggtgagttccggatatagcagccccaccacctcagagatgtccatcaaagacagcccgagccagcacagtggccggccatcgcccggctgcgactcacagacttcccagctggaccagcctctctttaaactgaagtaccccagctctccttacagcgctcacatttccaaatcaccaaggaacatgtccccaagctccggccaccagtctcctgctggcagtgcaccctccccagctctctcctactcctcagctggatctgctcgctcaagtccagcagacgctcccgacatagacaaactgaaaatggcagccattgatgaaaaggtgcaggctgtccataacctgaagatgttctggcagagcacaccccagcattccacagggccaatgaagatcttccggggggctcctggcacgatgacttccaaaagggatgtcctcagtctgttgaatttgtcaccacggcacaataagaaggaggagggagtggataagcttgaactgaaggagctgtccctgcagcagcatgacggagctccaccgaaagcccctcccaacggacactgggcgcaccgagaccacctcgctgggctcactgccgctgcccgccggccctcccgccacagcccccgcgcgccctttgaggcttccttctgggaaatggctacaagttcctgtctccagggaagattttttcccttctttccaaatgcttaaagcatcttttattacccattgattttgagcaggcttgcagatgggggcctggcgtttgcttcagcccttccctgagtgcattcccctcacagccaccagcaccctcatgatgctgtgctctgcaggcgaggggcaccaccacgtccaaaggctgccacacacactggtggcttttctgggccacattcaccaaaagccaggacttctgtggggctggtacaggaggctcatggaatttcctacacacttcaccaaatgtttgtttacctttgaactccctgcttctcatctttgatatgattcttcaccaggattttgtacaaaaatgatccatggttcctggggtggggagaggaaagggagccacatattttgctaagaggtatatatgcagtaccttttataccacagaaatacaaatagagctttttcctaaggctttcggttgcctggttgggggtgggatatatgaaatttcagttgaattctacaggaaagtgttatattagcccaaaaacagaaaaatggtttttaaaatgccaatgatttgtaattaaattgtagcaattttggtctcatgatagtgtaatatctcagcaacaatgcaataattcacattgaaacagcgcttccattctgaactcctgctctgcaaatgtcttttgggtcccgctgtcaaccaaacttgaattttcttaaaaaaaaaattatgtaactcttatccaggcattttagaactatgcaattgtgatttaaaatgcaactttgtgcttttaaaacattattgaccttttttgtatatggataaacaacttttggttttattatcaatagtactttgcatttatagctattatttttaaaagctcaaaaagttttttaaaatgtcaaattttgaatagtcatcaataagtaattatcaagtttggaaggaaaggttgaaatgactccgtttccttataagcaaaaaaaaaaaaaaaaaaaaaaaaaaaaaaaaaaaaatttccatggctaactagatttaaccagaatcccgccttccaggctcctgttcccttttattagctgctgaattttattcccttttcccaactccaggtccctcagttgtcttatatctaaatcctttgccaggtccccacaatcccagcacctgcctctgtgagctgcccccaggccctcaccttggccctggccagcctcctgtgctcctgctgtctgaaggactggcccctcccccactgctgaagccacacgtacagatcctaagcaacagggccttttgctgggacgtatgcctggattatggccaaccgggaagagagagatgtatcttaaaaagtggaggtggacttctcctacagctctgacggtaacttaaattgttgccagcttgaggcaagacaagggaatcatctagttaggggtaaccattaatttattttataaagaaaggaaatgctgaaagtcgtattagtactgagtttagttggagaatttagataagtaagtatcttttaggtaattctaaaattaaaatcctacccacctcactacagggttcctcatgaaggtgggcggccacctggcctgggccaccagcagcacatggagcagacctgaggggcctggcagggggcactgacctcaggatccccaggtgggggttttaaccatgggtgggatctcagcttctgcgcatacactgacaatctcacctgttcctcagtgtactcctctgaaaagaagaaaggataatatttatccaatctgtgttctcctgagctccatcctaggggtttttaatttaaccaacagccatgttgacaaaagccaacaataagcatgtcttattctagccctgatcccaacactgaaagcgaagtactttataaagaagccagcaattatgagggtttctttatgttagtaggggaaaaaatggtaataaaagtaccagtgtagcaagtgaagaccaaatttatagcactgtgcattagatagcaaaatcaggttcttaacaatgaaaagtaaacctcaagtttctaaatccatatgcagatggttaggctgtccctctcttagcaaatctctcagcctccttctttcccaagtgccaaggatccctggagtaaagctctggggtctgtgctctctttctgtgaggggaaggctgcggccctatttgcccctctctagcaaacacccccaccaccctgccgcttcctgtggttattgagccagctaggagttactcatggactctaacctggttttagtcccatgtacatcgttgttttaggtttcatactgaagagccaatggtttatgtggttttattctgtcttaaatataagtttcaaggaagggaaaacaaaagtgataaaatgatagaacagtctagaggccactgtaaagtcaccgccactttacgtgtatgtcagtcttggtgttcttgtatgagtaaaatggatgtaaaatcataaaatcacagtgaatgtttcaggctacactggaaaaagtatgcacttagaattaaaggaaattgtataattcaccaagatttctttgtgtagatcaggggttggcaactatgacccacaggctaagactggtcagcggtctggtttttcacagccatgagctaagttacctttttaaagggttatataagtaattacatcatatttttgattttgcctttggcccacaccacataaaatattcaatacctggccnnnnnnnnnnnnggaaaaaaaacccccctttgccccccagaaaaaaggcccgggggggaatttgggttaatggaacccttttcttcgggggtaaaagaaattttccttgcctccacctttaaaaagggggggaaaaagggcccccccaaacagcgctgggaaaatttgggaattaaaaaaaaagggggggttcaacatgggggcccgggggggctcaaacctctgacctaaggggaacccccccccttggccccccaaaagggggggaaaaaagggggagccctgggcccaaccaaaaacggggctttaaaaaaattcgggggcccccggggtggggggagaaaaaggggaaacccgttgtttccccccccaagaaaacaccccgcncggtggggaaacacgcccgggcccgggggccccct

SEQ ID NO: 2135 - DNA, 793 bp, Homo sapiens
  SIMILAR (107)..(517): 401254mologous to Homo sapiens Met(1), Leu(2) human beta- globin mutant,accession number AAR21925,Smith-Waterman Score=136.
  misc_feature (1)...(793): n = a,t,c or g
ccactgaagcgctcagatggctgtaacgacggccgacccacgcgtccgcccacgcgtccggacacaactgtgttcactagcaacctcaaacagacacgcatggtgcatcttatctcctgaggagaagtctgccgttactgccctgtggggcaagggtgaacgtggatgaaagttggtggtaaggccctgggcaggctgctgggtggttctacccttggtacccaanaggttctttgaagtcctttggggatctgtccactcctggatgctgttaatgggcaaacccctaaggtgaaggtctcatggtcaagaaagtgcctcggtgccctttagtgatggccctggcttcacctgggacaaccttcaagggtcacctttgcccacactgaagtgagcttgcacttgttgacaagcttgcacgtgggatccctgaagaactttcaggcttcctgggggcaacgttgctggttttgttgttgcttgggcccattcacttttgggaaaagaatttcaaccccaccagtgcaagcttgcctaatcaagaaaattggttggcttggtgttggctaaatgcccttggccccacaagtatcacctaaagctcgcctttcttgctgtccaatttctatttaaaggtttcctttggtccctaaagaccaactactaaactggggggatattatgaagggccttgagcattttggattttgcctaataaaaaacatttattttcatcgcatacaagaataaaacaagcgcggccgattaagaggatacttcaggggcgcaagat

SEQ ID NO: 2136 - DNA, 790 bp, Homo sapiens
  SIMILAR (126)..(509): 411254mologous to Homo sapiens beta-globin,accession number L48932,Smith-Waterman Score=141.
ccactgaagcgctcagatggctgtaacgacggccgacccacgcgtccgcccacgcgtccggacacaactgtgttcactagcatcgctcatacagacacgcatggtgcatctgactcctgtggagagagtctgccgttactgccctgtggggcaaggtgaacgtggatgaaagttggtggtaaggccctgggcaggctgctgggtggtctacccttgggacccagaggttctttgaagtcctttggggatctgtcccactccctgaagcctgttaagggcaaacccctaaggtgaaaggctccatggcaagaaaagtgcctcggtgccctttagtgatggccctggctcacctgggacaaccctcaagggcacctttgcccacactgaagtgagcttgcactgtgacaaagctgcaccgtggatccctgaagaacttcaggctccttgggcaacgtgcttggtctgttgttgctgggcccattcacttttgggaaaagaatttcaaccccaccagttgcaggcttgcctaatcaagaaaattggttggcttggtgttggctaaatgcccttgggccacaagtaatcacttaagcctcgctttccttgctggtccaatttccaattaaaaggtttcctttggttccctaaagaccaactactaaactggggggatattattgaaagggccttgagcatcttggattttgcctaataaaaaacatttattttcatcgcatacaagaataaaacaagcgcggccgattaagaggatacttcaggggcgcaagat

SEQ ID NO: 2137 - DNA, 1163 bp, Homo sapiens
  SIMILAR (94)..(594): 411254mologous to Mus musculus 60S ribosomal protein,accession number U28917,Smith-Waterman Score=168.
ctttccgctcggctgttttcctgcgcaggagccgcaggggccggtaggccagcccatggcgcccaagccggaaatggccatgggtcttgaacgccccacttccaccaagggactggcaagcgggcggcgtggcccacgtggttcaacccagccggccccggaatattcctcaggaggtaaggccccggcaaagcccaaaggcgccgcagcatcgcccctgcgccccgcggtcgggttcccatccggcccaatcgtgcgctgcccccacgggttcgggtacccacacgaaaggttgcgcgccggcccccggcttccagccttgaggaagctcagggtggccggcattcacaaagaagggtggcccggacccatcggcattttctgtggatccgaggaagccggaccaagtcccacggagtccccttcagggcaaacgttcagcgtgttgaagaagtacgcctccaacttcatcctctttccccagagaagccctcgggcccccaagaagggagacaggtctggctgaagaactgaaactgggccaccccagcttgacgggaccgggtcatgcccgtccggaacgtctataagaaaggagaaagctcgagtcatcactgaggaagagaagaatttcaaagccttcgctagtctccgtatggcccgtgccaacgccccggctcttcggcatacgggccaaaaagagcccagggaagccgcagaacagggatgttgaaaagcccacaataaagccctgcctggggacttggaatcagtcgggcagtcatgctgggtctccacgtggtgtgtttcgtgggaacaactgggcctgggatggggcttcactgctgtgacttcctcctgccaggggatttggggctttcttgaaagacagtccaagccctggataatgcttaaccttctggtgttgaagccctgttggttgtttggttagtgactgatgtaaaacggttttcttgtggggggggtaccaaaggctgacttcagagtggacttgtgttttttctttttaaagaggcaaggttgggctggtgctcacagctgtaatcccagcactttgagattggctgggagttcaagaccagcctggccaacatgtcagaactactaaaaataaagaaatcagccatgaaaaaaaaaaaaaa

SEQ ID NO: 2138 - DNA, 3300 bp, Homo sapiens
  SIMILAR (1590)..(1640): 641254mologous to Homo sapiens Human secreted protein sequence clone cn621_8,accession number AAY22496,Smith-Waterman Score=48.
  misc_feature (1)...(3300): n = a,t,c or g
atgaaactccttaagtccatactcttaaccattttgctcgatttctctctccacacctgtgcatccttggtgcccgctcttcagtggatactcttgttgttaataacagtactggtagtggaagggattgccgtggcccaaaaaacccaagatggacaaaatattggaatcaagcatattcctgcaacccagtgtggcatttgggttcgaaccagcaatggaggtcattttgcttcgccaaattatcctgactcatatccaccaaacaaggagtgtatctacattttggaagctgctccacgtcaaagaatagagttgacctttgatgaacattattatatagaaccatcatttgagtgtcggtttgatcacttggaagttcgagatgggccatttggtttctctcctcttatagatcgttactgtggcgtgaaaagccctccattaattagatcaacagggagattcatgtggattaagtttagttctgatgaagagcttgaaggactggggatttcggagcaaattattccatttattccagatccagactttacttacctagggaggtattttaaattcccatcccagattgtcagttcgagctctccgggagctggatggggatagtgccgctctagtcaggtagaacaagaggagaaaacaaaaccagggccaagcctttgattggcatctgggacctttaaagccattccaaaagcttaagatttatttgaggttcctagattatcaaatggagcactcaaatgaatgcaagagaaacttcgttgcagtctatgatggaagcagttctattgaaaacctgaaggccaagttttgcagcactgtggccaatgatgtaatgcttaaaacaggaattggagtgattcgaatgtgggcagatgaaggtagtcggcttagcaggtttcgaatgctctttacttcctttggtggagcctcccctgcacaagcagcactttccttttgccatagcaacatgtgcatcaataattctttagtctgtaatggtgtccaaaattgtgcatacccttgggatgaaaatcattgtaaagaaaagaaaaaagcaggagtatttgaacaaatcactaagactcatggaacaattattggcattacttcagggattgtcttggtccttctcattatttctattttagtacaagtgaaacagcctcgaaaaaaggtcatggcttgcaaaaccgcttttaataaaaccgggttccaagaagtgtttgatcctcctcattatgaactgttttcactaagggacaaagagatttctgcagacctggcagacttgtcggaagaattggacaactaccagaagatgcggcgctcctccaccgcctcccgctgcatccacgaccaccactgtgggtcgcaggcctccagcgtcaaacaaagcaggaccaacctcagttccatggaacttcctttccgaaatgactttgcacaaccacagccaatgaaaacatttaatagcaccttcaagaaaagtagttacactttcaaacagggacatgagtgccctgagcagggccctgggaaggaccgagtaatgggagggagatttccctgttgaaattttattgttcagggggcgagaagattctgcacaaggcttccatatccattgactttctaatcttctgctaatggtgatgtgaattcttagggtgtgtacggtacgcagcctcccagggcacccanacttgtttcccagcagcccaacccttttctcccatcacaactacgaagaccttgatttaccgttaacctattgtatggtgatgtttttaatctctcaggcagtctatatatgttaaaccaatcaagggaacttactctattcagtggaaacaattaatcatctctattgcttggtgtcatttatagggaagcactgcccagttcaaaggagcattagaaggaggtggttgggatgggagccagggctccagggctgcctcttcgtttttaggcaacaaggaaggactggctcttgactgataacagctctgtcaatattttgatgccacaataaacttgatttttctttacattccttttatttttcctttctctaaatttaatttgttttataagcctatcgttttaccatttcattttcttacataagtacaagtggttaatgtaccacatacttcagtataggcatttgttcttgagtgtgtcaaaatacagctagttactgtgccaattaagacccagttgtatttcacccatctgtttcttcttggctaatctctgtacttctgccttttaattactgggcccttattccttattttctgtgagaaataatagatgatatgatttattacctttcaattatatttttctcagttatactagaaaatttcataatcctgggatatatgtaccattgtcagctatgactaaaaatttgaaaaagataaaaatttctagcaagcctttgaagtttaccaagtatagtcacattcagtgacagcccattcattccagtaaagaatcatttcattcactttgggagaggcctataattacatttatttgcaatgtttctcttcgctagattgttacatagctcccattctgttggttttgcttacagcatatggtaaccaaggttagatgccagttaaaattccttagaaattgggatggagccctgagattggcctccctaaccggggacatgacatttttcccagctcctatcaagaataacaacctccccacttttttttaaaactgcacttttgacctttttttatgggtataaaaacaataatttaataaacataaaagctcattgtgttttttagacttttgatattatttgatactgtacaaactttattaaatcaagatgaaagacctacaggacagaatcctttccagtgttcacatcagtggcctttgtatgcaaatatgctgtgttggaacctggacgctataacttattgtaaagaaccttggaaatgtggaacataagctctttctttaccttttgttactgtatttagtttgtgataaatttttcactgtgtgatatttatgcctctaaatcactacacaaatcccatattaaaatatacattgtacctgaccctttaatcatgttatttatgccaccaaggttgtggatcttaaggtatgtatggaaaggaactcatttatcaaattgtaagtaatacagacatgccatttaaaagaggtaaattcttgttttctatattttgttagtaaattctcaatgaaataaaaaaaaaa

SEQ ID NO: 2139 - DNA, 426 bp, Homo sapiens
  SIMILAR (406)..(320): 931254mologous to Homo sapiens FLJ00089 protein,accession number AK024489,Smith-Waterman Score=156.
actgaaggtgatccacatggtacatgacattcttcctgttttcttcacaagacaaggatgatgtttaaatgggcatttgtttgcggaatgacttggagagttcctctctttcagccatcttttctcaaagactaaggctgggagatccttgttcatttgtaacatcaggaactgcttcttttcctccttctctcttctagaagactgtcaaggagcccgagtgagggaagcagaccaaccatggtcttggagaaaagaaaatagggtttccatcccttctttggtgttttccgccgtcggccgcaggcgcctcgtctcagataaagtggatccagccctgcggctccggagctccgcctctgcccgggtgctcaggcaaacgtagagcatagtcacggccgccgttgacgaaatcgtcgccccggg

SEQ ID NO: 2140 - DNA, 352 bp, Homo sapiens
tttttaaggttttaaattttgtttttaaagaggaaaaaaaatataacatcatggttacacagaggctctggagattccctgggttcacaatcctacttctgccatttactagctgtgcgatcttgaacaaatttctgagcttctctgagcctgtttcctcatctctgggagatccttgttcatttgtaacatcaggaactgcttcttttcctccttctctcttctagaagactgtcaaggagcccgagtgagggaagcagaccaaccatggtcttggagaaaagaaaatagggtttccatccccacagttgtctcagagcatggaggctgaaagtctgtgagggcaagagtg

SEQ ID NO: 2141 - DNA, 457 bp, Homo sapiens
  SIMILAR (416)..(144): 931254mologous to Homo sapiens KINESIN-13A2,accession number AJ291579,Smith-Waterman Score=421.
ccaatatttgtgaaaggaaaagctaattggcaatatcacatatgggattaagagttctcttgttgctaggtttgtccctgacatgtctcaaaaacccctccctcaaagacccacggccttggggccttgactctgggctgcccgcgctgcagttcttacctctcttctgcccactgggtcaccttctgctgcgctgtctggctgctgtaggccaggcggtcagggccgctactctgtggctgcctgtcgggggagagctgctggcggagttgctccagttcccgctcatacatgagccgctgctcctctagggcacttctcttttcttctaggtattgtttctccagcacctgagccacattttgaactgggtcattactattcagggttgtcatgataacatccatctgtgcatatatctgtgatatggtctggaggttcggggacttccaccaca

SEQ ID NO: 2142 - DNA, 1733 bp, Homo sapiens
  SIMILAR (1)..(792): 941254mologous to Homo sapiens FLJ00089 protein,accession number AK024489,Smith-Waterman Score=1356.
  misc_feature (1)...(1733): n = a,t,c or g
atgtcccgtgagcggcccccgggcaccgacattccccgcaacctgagcttcatcgccgcgctaacggagcgcgcctactaccgtagccagcggcccagcctcgaggaggagccggaggaggagccaggcgagggcgggacgcggttcggggcccgatcccgcgctcacgcaccgagtcggggccgccgggcccgatctgcaccagccggaggcggcggggcccgggcgccccgcagccgtagcccagacacccgcaagagagtgcgtttcgccgacgcactggggttggagctggctgtcgtgcgccgcttccgtcccggtgagctgccccgggtgccccgccacgtgcagatccaattgcagagggacgccctccgccacttcgcgccctgccagccccgcgcccgcggcctccaggaggcgcgcgccgccctggagccggccagcgagcccggcttcgccgcccgcttgctgacgcagcgcatctgcctggaacgcgccgaggcgggcccgctgggcgtggccgggagcgcgcgcgtggtggacctggcctacgagaagcgcgcgccagccgcctacgccggtccggccccgcccccgccgcgcgccgaccgcttcgccttccgcctgcccgcgccgccgattgggggcgccctgctcttcgccttgcgctaccgtgtgacaggtcacgagttctgggacaacaacggcggccgtgactatgctctacgtgggcccgagcacccgggcagtggcggagctccggagccgcagggctggatccactttatctgagacgaggcgcctgcggccgacggcggaaaacaccaaaggcacccgggggcggggcgacccgatgtggcggggaggagtaggagagaccaggattggcggganggtccaagggagtcaagccggggagggcgaaaaggactttcagcctccatgctctgagacaactgtggaagggatggaaaccctattttcttttctccaagaccatggttggtctgcttccctcactcgggctccttgacagtcttctagaagagagaaggaggaaaagaagcagttcctgatgttacaaatgaacaaggatctcccagccttagtctttgagaaaagatggctgaaagagaggaactctccaagtcattccgcaaacaaatgcccatttaaacatcatccttgtgcttgtgaagaaaacaggaagaatgtcatgtaccatgtggatcaccttcagttcaaagttgcagcaaagtgaagaaagaaactactggaagccaccccagcaatgcactgtttagtcatcaattaggagcccatgggaggataatagggagactgggtggaggctcagtgtgtaataatctcttgtctaatgtatgtgtgtcactgccatgttgtatgaacaatagtgagggctcacatttacttaacacttgtgtgcgcaaatctgggtttttcttcctttccagaactatgactcgatcataaaatctgttttgtttgcatgcatgcccaaaacaaccctgtaagtagaacattgtcattatctctgttttagagatgaggaaacaggctcagagaagctcagaaatttgttcaagatcgcacagctagtaaatggcagaagtaggattgtgaacccagggaatctccagagcctctgtgtaaccatgatgttacattttttttcctctttaaaaacaaaatttaaaaccttaaaaaaa

SEQ ID NO: 2143 - DNA, 2448 bp, Homo sapiens
  SIMILAR (876)..(959): 751254mologous to Homo sapiens melanoma differentiation associated protein-9,accession number AF006636,Smith-Waterman Score =91.
  misc_feature (1)...(2448): n = a,t,c or g
tttcgtggcggaggcggtgccatgacgcgcctcgggggcggtcctcgggcgcgcaccgctctcttacactcgggcctcagaagtccgtgccagtgaccggaggcgacagcggcagcgagtgggtccttgtgagctagaagaatcctgcaaaatttttctctctatccatctggcgaagacttgaagggatacaaagtaattcaggctcaaactgctttttctgcaaaccctgccaatccagcaattttgacagaagctttctgctcctatccctcacgatggaaatctctatcccagactgtatccagagtctctctcaatacatggggctgagtttaaatgaagaagaaataccgtgcaaatgtggccgtggtttctggtgcaccacttcaggggcagttggtaggcaagaccttccagtataaactatatgggtgggctcctgttaactgggtaattgatgttgggaattcgtaggagcaggaaatttaaggcaagggattccgtgaagtcattttgtgtaaggatcaagatgggaaaaattggactccaggcttaaatccatagataatgggtatatttgttcagctagtccaggctaattcctccagcctcattgggttggtctgagaatttggggaccaagtacttcagatcaatggtgaaaactgtgcaggatgggagctctgataaagcgcccaggtggtccaacaggcctttttgagagaagattaccatgaccattcgtgacaggccctttgaacggacgattaccatgcataaggatagcactggacatgttggttttatctttaaaaatggaaaaataacatccatagtgaaagatagctctgcagccagaaatggtcttcttcacgggacctaacctctgtggaaattcaatgggacagaatgtcattggattgaaggactctcaaattgcagacatactgtcaacattctgggactgtaggtactattacaatcatgcctgcttttatctttgaacatattattaagcggatggcaccaagcattatggaaaagcctaatgggaccacaccattcctgaggtttaaaattcacgggcaccatgggaaatgtaggctggaacgtctccagtttccttctttgggccaacttctgtattatgcacgtgaagccttcccggaggccagcgagcatatgctgcatgaggacctttctatcttacattatggctgggaatcttactctttcatctgataccttgttcagatttcaaaatagtcgtacgccttatcctggttttacagaggtgaaactttcaagagatttactgactttactagaatagtttctctactggaaacctgatgcttttataagccattgtgactaggacgactgttacaggcttagctttgagtgaaaaccagtcacctttctccctaggtaatgagtagtgctggttcatattactttaggtcctatagcatacttgcatctttaacatgctatcatagtacatttagaatgattgcctttgatttttttttttaaattctgtgtgtgtgtgtgtaaaatgccaattaagaacactggtttcattccatgtaaagcatttaaacagtggtatgtaaggtttccaagagattggtgatggattccttaaaattttaactacccttcacttaatatgcctgaactgtcgccctaaactatggttaagcatctagactaaaaggcccaaaatttaattagtgctgccctttctaaaaaaccccaaaatgtagttcccctattaacctgaaatgtaccactagccccagaaccagtttaatggtacttactgagctaatagcatagctggcttagttgtttttgagattttttagtcaacacataataggaaacttcctttcttctaaaagttgcccagtgcccacttttaaggaagtgaatcacccatatgtgatgtaaaagttattacacttaaacaggataaacttttgacccccccttttgttcatttgtgggattaaagtggtaaaaaacttaattttgggcatttggactcttaagattatgtaacccaggctactttgggatggtcttagaatattgttctgataacttgttccttttcctgactcctccttgcaaacaaaatgatagttgacactttatcctgatttttttcttctttttggtttatggctattctaattaaatatgtataaataaagttacattttagtctgtcaaaagcaaaaacaaaaaatagcaccgataacaaaaaganggggggggccccttttaaaaatattttgggggggccaaaatttacnnnnnnnnnnacaaattannnnnnnnnnnnnatgggggccatatataaacccccccggggttttttgggaaagcccccttcttttggggggggcaattttgcgcacatcttccctaaag

SEQ ID NO: 2144 - DNA, 519 bp, Homo sapiens
tttgtggtctgtgacggtcaatgtctttacttctaaagcatacattggactcactatatattaacatcaaaagtggctacctaaaatggagtcattctttttaaaaatccaaatcctcacatttttatataagatccaaaatgacatgaaattaaactctacaatgttatgaatagtataacaaactgctttcagaaagcaaaatgaaaggaaaagaaattagcagttgggacggttgtaggcctgggttccatgtcttttgaggcattgtgacagagagccagcaccaaggggaaggaccagcccctccctgtggccacaggaaggaactcagtcaagacagaggaggtgggccgtggctgggtcagccttccttacagtgacagagaagccatggtgggcatctccctgcccctcaagggcccttgggtgggccccatgataattcttcttttagaccagggaggggtggggctggaagagggcaggggatagagcagggttcaaaatgattatttt

SEQ ID NO: 2145 - DNA, 561 bp, Homo sapiens
  misc_feature (1)...(561): n = a,t,c or g
tttgtggaaggggcaggaaatcccccatgcgagtaacacagcacagtggggcgggggttgaggaggaccaggtacaggggtcccccgagacgtcttagttttcttttggtcaagcccncactgatggacagaccagcgaggcgcatgcagctgggggctctgatgtgctgcaggctgtgatagggccagcggggacgggggctcaggaagggatctggagccagtggtgcagggatgatggaacacacgcacacagaggcacacccacacacttgggtttgcaccagcacacatacctgcacacacacactcggagacacagattacatgcacctccatgtatgcgtctctatccacatgtacgtggcccacacacaagtctctggctctcggcatgtctgcacacacattacacatgttctcacacacaaagctcctctcacgctaacatgcaggtaggcacgtgccaatgcccaaacaggttacatgcacctatgtgcccacgccttcccccacacatgtgctcggccatgcctgtgggtgcaggccccatgcgtctcc

SEQ ID NO: 2146 - DNA, 1347 bp, Homo sapiens
  SIMILAR (94)..(729): 471254mologous to Homo sapiens hypothetical protein,accession number AL162044,Smith-Waterman Score=409.
cttgagctagatacagagtgcccattggtgtatttacaatcgcctgagctagacataaaggttctccaaggccccaccagactcaggagcccagctggcttcacccagtggatctcgcacgggggctgcaggtggagctgcctggcagtcccgcgccctgcgcctgcactcctcagcccttgggtggtcgatgggactgggtgccgtggagcaaggggtggcgctcgtggaggaggctcgggggcacaggagcccacggaggggttgggaggctcaggcatggcgggctgcaggtcccgagccctgccccacgggaaggcagctaaggcccagcgagaaatccagcgcagtgccggtgggctggcactgctgggggacccagtacactctccgcagctgctggcccgggtgctaagcccctcatgcccggggcggcagggctggccaggccggctggctgctctgagtgcagggcccgccaagcccacgaccacctggaactctagctggcccgcaagcacggcacacagccctggttcctgctcgggcctctccctccacacctccctgcaagctgaggggtgggctccggccttgaccagcccagaaaggggctcccacagtgcagcatgggctgaagggctcctcaagtgccactaaagtgggagcccaggcagagaggcgccaagagccagtgagcactgtgaggactgccagcacgctgtcactctcaatcccccctctttcactctccccctcagttccgatccagatgttggggctgagtgacggtaaaagctccctttccacgcaagccttccttctctccatctcctgggattcattaaagtgacccattaggatggtaacaggatcactccttgatttgacttttgccaacctgcttatcgtaagaatcacttggtgagttggcttaatattcaacccagctcccaaaaggaatttgttatccatcactcccctacattcttcagacagctctggtttttcaagtagaactttcttcagtctatccaagttgggctgatattgccaaatgaagaagagtaagccaaaaaccatcttgagcttcaggtcctcaggtgtcaatgttaacttggactttgtgtcctgaatcctcaaaatattccagtattctcttttccctgttgttccaaggtaggattgcagacgtgggttaattagtacaaatatcctaggtttttcttgtgtggtcctgtatttctgccttagggttttgtgtttttgtcggtaaactttttcctggtaactgtagatcctgtaaatattcttaatgtcagctcctctgacacttctctctctcat

SEQ ID NO: 2147 - DNA, 426 bp, Homo sapiens
  SIMILAR (417)..(82): 931254mologous to Homo sapiens zinedin,accession number AF212940,Smith-Waterman Score=527.
gatggcctcttgcaaatgtgacctgacggtggcaaaagtcttctttcaaagcccattcatagggcctgctctttccccagcactgtccagctcatcgtcctcgtcgctgtcttcgtcctcgcagttctgcaggaaggggatctgccccagcactgagccgcccaagcgctctttgccatctttgcctgccgcgttcctctctatctgctcctcgatctgtttcaccagcagcgactccccaccactgagccctgcagggcctggtggagccctgggggccccttcactcggctccactgcaccgttgagctccagcgagcggcccagcagggaacgtacgcgcttggcccgcatgtcgaggatggtgtctgagtagaccacctcttccaggtactgtaggagaaggtgccgcatctcgtgccttct

SEQ ID NO: 2148 - DNA, 708 bp, Homo sapiens
  SIMILAR (1)..(477): 911254mologous to Homo sapiens A human regulator of intracellular phosphorylation,accession number AAB18661,Smith- Waterman Score=755.
cactatgggcgcttggactgcaagtgtatcacgctcttccagaacaacacgaccaacagatactataaggaatttccgctgtcagaaatcctcacggtggagtccgcccagaacttcagccttgtgccgccgggcaccaacccacactgctttgagatcgtcactgccaatgccacctacttcgtgggcgagatgcctggcgggactccgggtgggccaagtgggcagggggctgaggccgcccggggctgggagacagccatccgccaggccctgatgcccgtcatccttcaggacgcacccagcgccccaggccacgcgccccacagacaagcttctctgagcatctctgtgtccaacagtcagatccaagagaatgtggacattgccactgtctaccagatcttccctgacgaagtgctgggtctgggctgcccacggacagggatctcggtggggcctgtccaccacaggaccacgacatgcaggggctggcggagcgcatcagtgttctctgaggtcctgtgccctcgtccagctgctgccctccacagcggttcttcacaggatcccagcaatgaactgttctagggaaagtggcttcctgcccaaactggatgggacacgtggggagtggggtggggggagctatttccaaggcccctccctgtttccccagcaattaaaacggactcatctctggcaaaa

SEQ ID NO: 2149 - DNA, 329 bp, Homo sapiens
ctgtgagcccggaaagcatgtataggttccacatctagcccgcattcctgtgggatgacagaggagcctgatgtcactgagaccctgtacccccgtccccagatgcccctgcccccggctctgagcttgctgccctccttcttggccgtgaccgccttctgcaggttccagagcttgagcgtgccgcctcggaggcggtgagcagagccgactggatcgcagctgaggtcgttgcgttggtgacggtgagatctgccaagtcccccaggctcacctccccgccccgatagtgtccatgatgaagacgtctgaggagaagccaaaggaac

SEQ ID NO: 2150 - DNA, 394 bp, Homo sapiens
  SIMILAR (3)..(392): 891254mologous to Homo sapiens A human regulator of intracellular phosphorylation,accession number AAB18661,Smith- Waterman Score=612.
gcgagggaggcaaggcccatagcttcctggggcacatccccctaatgagggtggagcaatcggtgcgacacacgacgcggaaatccagcaccacgctgcgggagggtcgggtggtccattacagtaacaaggacacgctgaaaaagcggcactattggcgcctggactgcaagagtatcacgctcttccaaaacaacacgaccaacagacactataaggaaattccgctggcagaaatcctcacggcggagcccgcccagaacttcagccttgtgccgccgggcaccaacccacactgctttgagataggcactgccaatgccacctacttcgtgggcgagatgcctggaggcactccgggcgggccaagtgggcatggggcttaggccgcccg

SEQ ID NO: 2151 - DNA, 300 bp, Homo sapiens
tcgccctccgggaccgtcgcggtcccctcccgcccccccgccgtcgtcccggcggccattgctccaagatggcgtgctgtgcgtgctgtgcgcgggtgacggccgggccggtgccgggcctgggttggggtgtcggaggtccgggacagcgctcacctgtaactcggcgcgctcggcctcccagcgggcttctcggcttcgaagcgcgcccactcgtgccttggacttcccgttctccatttcgatgtcagtgtacagcatgtggccatctcgttgaatttgtcctttagcatcttccat

SEQ ID NO: 2152 - DNA, 5616 bp, Homo sapiens
  SIMILAR (3006)..(3698): 941254mologous to Homo sapiens protein kinase D2,accession number AF309082,Smith-Waterman Score=1151.
agcggccgccgcggtcgccgccgccgcctcctcctgccgtccgctcggctcaggcgcgggccctggccccactggggcggccccggtctccgcccctgcccccgggccgggcccggcaggtaagggaggcggcggcggaggcagccccgggcccacggcgggcccggagcccctgagcctgccggggatcctgcactttatccagcacgagtgggcgcgcttcgaagccgagaaagcccgctgggaggccgagcgcgccgagttacaggctcaggtggccttcctttcaggagagaggaaagggcaggagaatctaaagacggacctggtgcggcggatcaagatgctagagtatgcgctgaagcaggaaagggccaaatatcataaactgaagtttgggacagacctgaaccagggggagaagaaagcagatgtgtcagaacaagtctccaatggccccgtggaatcggtcaccctggagaacagcccgttggtgtggaaaggagtggctgcaacttctcctacagtacctggaagaggtgggctacacagacaccatcctcgacatgcggtccaagcgcgtccgttccctgctgggccgctcgctggagctcaacggggcagtggagccgagtgaaggggcccccagggctccaccaggccctgcagggctcagtggtggggagtcgctgctggtgaaacagatcgaggagcagataaagaggcctgcccgcttctcggtcgagtggggtgcttaccgaaggcacaccctgggtgcctcgccagcagggagtggagcacacgtggtcgccaccctcaggaatctctggcttgttcactctcatcagcaattgtcagttaagcagaacaagaacgcggcaggcaaagatggcaaagagcgcttgggcggctcagtgctggggcagatccccttcctgcagaactgcgaggacgaagacagcgacgaggacgatgagctggacagcgtgcagcacaagaagcagcgtgtgaagctcccatccaaggctctggtgcccgaaatggaagacgaggatgaggaagacgactctgaggatgctatcaatgagtttgatttcctgggctcaggagaggatggggaaggggctccagaccctcggcggtgcactgtggatgggagcccccatgagctggaaagccgtcgggtcaaactccaaggcattctggctgacctgcgggatgtggatgggctgcccccaaaagtgactggcccgcctcctggcacaccccagccccgggccacatgaaggttcctttggcttctcctcagacgtcttcatcatggacactatcgggggcggggaggtgagcctgggggacttggcagatctcaccgtcaccaacgacaacgacctcagctgcgatctgtctgacagcaaagatgcttttaagaagacgtggaaccccaagttcaccctgcgctcgcactacgacggcattcgttccctggccttccaccacagccagtcggctctgctcaccgcctccgaggacggcacgctcaagctcttggaccttgcagaaggcggtcacggccaagaagaatgcggcgctagatgtggaacctatacatgctttccgggctcacaggggcccaagtgttggctgtggctaggggcagcaacagtgaatactgcttacagtggcggggcagatgcccgcatccatagttggaagactccagaccttcagcatggatcccctatgatggctacgaccccaagcgggctgggcccccggtctggagggggcactgggcaccccgcttggggcctggccttcagtcccacctcccagcgcctggcttcctgttctgctgatggcaccgtccgcatctgggaccccagcagcagcagcccggcctgcctctgcaccttccccacagccagcgagcacggggtccccacctcagtggccttcaccagcaccgagcctgcccacatcgtggcctccttccgctctggcgacaccgtcttgtatgacatggaggttggcagtgccctcctcacgctggagtcccggggcagcagcggtccaacccagatcaaccaagtggtgagtcatccaaaccagcctctcaccatcaccggccacgaacgacagggggcatccgttttccttggacaattggacaggtaagccggtgcactccatggttgcacacctggacgcagtcacctgcctagccgtggaccccaacggcgcattcctgatgtcaggaagccatgactgctccctgcgtctctggagcctggacaacaaaacgtgcgtgcaggagatcacggcccaccgcaagaagcacgaggaggccatccacgctgttgcctgccaccccagcaaggccctcattgccagtgctggcgctgatgccctggccaaggcccacaaggagcagggagggaaaaggctgcacctgccagtggaggatgatggctttggggcgcaggctcctccatgctgggaggaggtgccgcagggcactaatgcccagttcctgggttgtaaagggctgtgccccagtcccccagcaggccccagtgaacatacgagaaaggatggaggccgctgtctggacactcaggacatggcagcgttttgctgggacagtcatctgcccttcaggaaaaagggtgcagagctgcagtcgccgccaccgctactgccccagatcccggccccgggttccggggtctcctttcacatccagatcgggctgacccgcgagttcgtgctgttgcccgccgcctccgagctggctcatgtgaagcagctggcctgttccatcgtggaccagaagcgccctcgagtccaagtcccccggcccccccccccactttcccaggagccccgaaaagtcctccttccagctcgccccaccccagtgctgggcctggagccagttcctgagtgtggcttctacggcctttacgacaagatcctgcttttcaaacatgaccccacgtcggccaacctcctgcagctggtgcgctcgtccggagacatccagagagggcgacctggtggaggtggtgctgtcggcctcggccacctttgaggacttacagatccggccgcacgccctcacggtgcactcctatcgggcgcctgccttctgtgatcactgcggggagatgctcttcggcctagtgcgccagggcctcaagtgcgatggctgcgggctgaactaccacaagcgctgtgccttcagcatccccaacaactgtagtggggcccgcaaacggcgcctgtcatccacgtctctggccagtggccactcggtgcgcctcggcacctccgagtccctgccctgcacggctgaagagctgagccgtagcaccaccgaactcctgcctcgccgtcccccgtcatcctcttcctcctcttctgcctcatcgtatacgggccgccccattgagctggacaagatgctgctctccaaggtcaaggtgccgcacaccttcctcatccacagctatacacggcccaccgtttgccaggcttgcaagaaactcctcaagggcctcttccggcagggcctgcaatgcaaagactgcaagtttaactgtcacaaacgctgcgccacccgcgtccctaatgactgcctgggggaggcccttatcaatggagatgtgccgatggaggaggccaccgatttcagcgtaggctgacaagagcgccctcatggatgagtcagaggactccggtgtcatccctggctcccactcagagaatgcgctccacgccagtgaggaggaggaaggcgagggaggcaaggcccagagctccctggggtacatccccctaatgagggtggtgcaatcggtgcgacacacgacgcgggaaatccagcaccacgctgcgggagggttgggtggttcattacagcaacaaggacacgctgagaaagcggcactattggcgcctggactgcaagtgtatcacgctcttccagaacaacacgaccaacagatactataaggaaattccgctgtcagaaatcctcacggtggagtccgcccaaaacttcagccttgtgccgccgggcaccaacccacacttgctttgagatcgtcacttgccaatgccacctacttcgtgggcgagatgcctggcgggactccgggtgggccaagtgggcagtgtggctgaggccgcccggggcttgggagacagccatccgccatgccctgatacccgtcatccttcaagacgcacccagcgccccatggccacgcgcccccaaaacaagcttctctgggcatctctgtgtccaacagtcagatccaaaagaatgtggacattgccactgtctaccagatcttccctgacgaagtgctgggctcacgacagtttggagttggtctatggaggaaaacaccggaagacatgcccgagacgtggcagttaaggccattgacaaacgtgcgcttccctaccaagcaggagagccagctccggaatgaagtggccattctgcagagcctgcgcactcccgggatcgtgaacctggagtgcatgttcgagacgcctgagaaagtgtttgtggtgatggagaagctgcatggggacatgttggagatgatcctgtccaagtgagaagggccggctgcctgagcgcctcaccaagttcctcatcacccagatcctggtgggcttttagacaacttcacttcaagaacattggtccactgtgacttgaaaccagaaatcgtgttgctggcatcagcaggacccatttcctcaggtgaagctgtgtgactttggctttgctcgcatcatcggcgaggaagtcgttccgccgctcagtgggtggggcacgccggccttacctggggaacccgaggctttggcttcaaccagggctacaaccgctcgctggacatgtggtcagtgggcgtgatcatgtacgtcagcctcagcggcaccttccctttcaacgaggatgaggacatcaatgaccagatccagaacgccgccttcatgtacccctggccagccccctgggaggccacatcttcagctgggagccatttgaccttcattcaacaaccttgttgcaggttgaagatgcggcaaacgctacagcgtggacaaatctctcagccacccctgggttacaggagtaccagacgtggctggacctccgagagcttggaggggaagatgggagagcgatacattcacgcatgagagtgacgaaagcgcgctgggagcaagtttgcagcagagcatccgctgccctgggtcctgggctgccccacggacagggatctcggtgggggcctgtcccaccacaggaccccgaacatgcaaggggctggcggagcgcatcagtgttctctgaggtcctgtgccctcgtccagctgctgccctccacagcggtttcttcacaggatccccagcaatgaactgtttctagggaaagtggcttcctgcccaaactggatgggacacgtggggagtggggtggggggagctatttccaaggcccctccctgttttccccagcaattaaaaacggactcatctctggccccatggccttgatctcagcaaaaaaaaaaaaaaaaaaaacc

SEQ ID NO: 2153 - DNA, 426 bp, Homo sapiens
  SIMILAR (3)..(38): 1001254mologous to Homo sapiens Novel protein kinase, SEQ ID NO: 175,accession number AAB65648,Smith-Waterman Score=67.
ggaagacggcagtttggcgacatttctcggccgaaggcagtttgcttttgcggagatgcggcattccaagagaactcactgtcctgattgggatagcagagaaagctggggacatgaaagctatcgtggaagtcacaagcggaagaggagatctcatagtagcacacaagagaacaggcattgtagaccacatcaccagtttaaagaatctgattgtgctccatgtgcatccctcttgaagcttcgcactctgttgaagaggacactcatcccagtcattatttagaagcaaggtccttgaatgagcgagattatcgggaccggagatacgttgacgaatacaggaatgactactgtgaaggatatgttcctagacattatcacagagacattgaaagcgggtatcgaatccactgcagtagatct

SEQ ID NO: 2154 - DNA, 2494 bp, Homo sapiens
  SIMILAR (81)..(203): 921254mologous to Homo sapiens Novel protein kinase, SEQ ID NO: 175,accession number AAB65648,Smith-Waterman Score=213.
tttcgtggtggtgctagaggcgactcgggggattctagggcgacggcgctgccgccattttgtggggtgtttgtcgcagcggccgaggagggaagacggcagtttggcgacatttctcggccgaagggccatttgcttttgcggagatgcggcattccaaaagaactcactgtcctgattggggtagcatagaaagcctggggacatgaaagctatcgcggaagccacaagcgtactaggatatcccatagccgctccacaagagaacaggcattgtaaaccacatcaccagtttaaagaatctgattgtcattatttagaagcaaggtccttgaatgagcgagattatcgggaccggagatacgttgacgaatacaggaatgactactgtgaaggatatgttcctagacattatcacagagacattgaaagcgggtatcgaatccactgcagtaaatcttcagtccgcagcaggagaagcagtcctaaaaggaagcgcaatagacactgttcaagtcatcagtcacgttcgatgaaatccgtggacactttgggtgaaggagcctttggcaaagttgtagagtgcattgatcatggcatggatggcatgcatgtagcagtgaaaatcgtaaaaaatgtaggccgttaccgtgaagcagctcgttcagaaatccaagtattagagcacttaaatagtactgatcccaatagtgtcttccgatgtgtccagatgctagaatggtttgatcatcatggtcatgtttgtattgtgtttgaactactgggacttattacttacgatttcattaaagaaaacagctttctgccatttcaaattgaccacatcaggcagatggcgtatcagatctgccagtcaataaattttttacatcataataaattaacccatacagatctgaagcctgaaaatattttgtttgtgaagtctgactatgtagtcaaatataattctaaaatgaaacgtgatgaacgcacactgaaaaacacagatatcaaagttgttgactttggaagtgcaacgtatgatgatgaacatcacagtactttggtgtctacccggcactacagagctcccgaggtcattttggctttaggttggtctcagccttgtgatgtttggagcataggttgcattcttattgaattatacccctggggttcacagttcttcagacttcaatgatagaaagagcacctggcaatgatggaacgaaatattaggaccccatacccacaacacatgattccagaaaacaagaaaacgcaagtattttcacccataacccagcctagattgggatgaacacagttcctgcctggtagatatgttaggagacgctgcaaaccgttgaaggaatttatgctttgtcatgatgaagaacatgagaaactgtttgacctggttcgaagaatgttagaatatgatccaactcaaagaattaccttggatgaagcattgcagcatcctttctttgacttattaaaaaagaaatgaaatgggaatcaggggtcttactatatacttctctagaagagattacttaagactgtgtcagtcaactaaacattctaatatttttgtaaacattaaattattttgtacagttaagtgtaaatattgtatgttttgtatcaatagcataattaacttgttaagcaagtatggtcttgataatgcattagaaaaattaaaattaatttttctttttgaaattaccatttttaaatacctttgaaatatcctttgtgtccagtgataaatgtgattgatcttgccttttgtacatggaggtcacctctgaagtgattttttttgagtaaaaggaaatcttgactactttatattcttaaaggaatattctttatatacttcaaatttagaacttaactttaaaagtttttcttctgtaattgttgaacgggtgattattattaactctagataagcaggtactagaaaccaaaactcagagaatgtttactgttagaattctattaaattttaagtgttgtattctttttcattgggtgatgtcagggtgataacccagaccattcatgggaagggcatgccagtttgtcccattgtgacagtttgtttaataaaaccacgatacacactttatttaagattaaaatcgtaactggaaaggtcagcttggaaaatggacatttccaagtatgtttggtgagtcacagatataaaaatagaaattctgatgagaggtttcagtttttaataccaagtccttaggagtcttaacattggccagcatctgtttatcaaatgacataaatacgtaaacctataagaatttaaggtttattaattaggcaatttatgtctgtgataattcttacgggagaaaaaggatttgattggaaagcagtttgggaagaaagtgctgctgaaatttccagaatttaattgattggttacataaactttttgccttcaaaaaataaaaaaaaa

SEQ ID NO: 2155 - DNA, 453 bp, Homo sapiens
  SIMILAR (2)..(166): 1001254mologous to Homo sapiens EB1,accession number U24166,Smith-Waterman Score=283.
aacgtcagtgaccagtgataacctaagtcgacatgacatgctggcctggatcaatgagtctctgcagttgaatctgacaaagatcgaacagttgtgctcaggggctgcgtattgtcagtttatggacatgctgttccctggctccattgccttgaagaaagtgaaatgtgtgtagaaagcaagtattttatgataaaaatgttgtgtagtgcatgctctgtgtggaattcagaggaaaacccagattcagtgattaacaatgccaaaaaatgcaagtaactagccattgttcaaatgacagtggtgctatttctcttttgtggccttttagacttttgttgccctaaaattccattttattgggaacccattttccacctggtctttcttgacagggtttttttctactttaaacagtttctaaataaaattctgtatttcaagagtaaaaaa

SEQ ID NO: 2156 - DNA, 537 bp, Homo sapiens
  SIMILAR (1)..(246): 921254mologous to Homo sapiens EB1,accession number U24166,Smith-Waterman Score=397.
atgctgttccctggctccattgacttgaagaaagtaaaattccaggctaagctagaacatgagtgcatccagaacttcaaaatactacaagcaggttttaagaagctgggtgttgacaaaataattcctgtcgacaaatcagtaaaaggaaagtttcaggacaattttgaatttgttcagtggttcaagaagttttttgatgcaaactatgatggaaaaatctatgaccctgtggctgccagacaagtttgctgcttagagatggaagtgaagcatgcaggtgaccatgctgcaagttttctggacctctggcaaagggagtggtcaatgaaggccattgttaccttgggatctgcaagactggggtgttttcggggagtgggactggtggttttccaagaagacgaagagagacctgagatagcacacccagcccccttgccatgtgaggccatgtgctccatcaggactctgcagaaagtccccacaagcaaggaggctcttaccagatgcagcccctcaaccttggacttctaa

SEQ ID NO: 2157 - DNA, 633 bp, Homo sapiens
  SIMILAR (196)..(522): 1001254mologous to Homo sapiens nuclear pore complex protein hnup153,accession number Z25535,Smith-Waterman Score=600.
atgaagccatggaccttcacagtgagtgttacagttcttaaagatggtgtgtccggagtttgttacttcagatgttcagatgtgtctggagtttcttacttctggtgggttcgtggtcttgctgacttcaggagcgaagccatggacttggtggcgagtgttacagctcttaatggtggtgtggacccaaagaggacaggctttggagacaaatttaaaccagtgataggcacttgggattgtgatacctgtttagtgcaaaataaacctgaagcaataaaatgtgtagcctgtgaaacaccgaaacctggaacttgtgtgaagcgagcccttacattgacagtggtttcggaaagtgctgagactatgactgcttcatcttccagctgcactgtaaccactggtaccttaggatttggagataaattcaaaaggcccattggatcttgggagtgttcagtatgctgtgtttctaataatgcagaagacaataagtgtgtgtcctgtatgtctgagaaaccagatgattttttcgggggagttgagcacctggcccaaggatggccatgttctatgacttggtctgatacaaaaggcttcccccaaacacaaggtgattcgttgagatggtga

SEQ ID NO: 2158 - DNA, 489 bp, Homo sapiens
  SIMILAR (5)..(175): 801254mologous to Homo sapiens EB1,accession number U24166,Smith-Waterman Score=235.
ctggagaaagagagggatttctactcggaaagctacggacattgaattgatttgccaggagaacgagggggaaaacgcccctgtattgcagaggattgtagacattctgtatgccacagatgaaggctttgtgatacctgatgaagggggcccacaggaggagcaagaagagtattacagcctgggaccagcagagcaacatggatattcttcactccaaatcatgtgcttaactgtaaaatactcccttttgttatccttagaggactcactggtttcttttcataagcaaaaagtacctcttcttaaagtgccagtattttaaaatagcgttcttgtaattttacacgcttttgtgatggagtgctgttttgttatataatttagacttggattctttccatttgcatttgtttatgtaatttcaggaggaatactgaacatctgagtcctggatgatactaataaactaataattgcagaggtttt

SEQ ID NO: 2159 - DNA, 2694 bp, Homo sapiens
  SIMILAR (105)..(680): 541254mologous to Homo sapiens EB1,accession number U24166,Smith-Waterman Score=428.
  misc_feature (1)...(2694): n = a,t,c or g
ggtcatcgcgcgggcgggcgggcggggtctggcggtttgaacgagacgaagacggaaccggagccggttgcgggcagtggacgcggttctgccgagagccgaagatggcagtgaacgtatactcaacgtcagtgaccagtgataacctaagtcgacatgacatgctggccctggatcaatgagtctctgcagttgaatcatgacaaagatcgaacagttgtgctcaggggctgcgtattgtcagtttatggacatgcctgttccctggctccattgccttgaagaaagtgaaattccaagctaagctagaacaccgagtacatccagaacttcaaaatactacaagcaggttttaagaagaatgggtgttgacaaaataatttctgtggacaaattattaaaagggaaagtttcaggacaattttgaattcgttcagtggttcaagaagtttttcgatgcaaactatgatggaaaagactatgaccctgtggcttgccagaccaaggtcaagaaactgcagtggctccttcccttgttgctccagctctgaataaaccgaaggaaacctctcacttctagcagtgcagctccccagagggcccatcttcaacacagagaaccgctggcggctcctaagggatgggccctgggtgtggtgcgaaagaaccctggtgtgggcaaacggagatgacgaggcagctgagttgatgcaacaaggtcaacgtatttgaaacttactgtttgaagacttgggaggaaaggagagggatttctacttcggaaagctacggaacattgaattgatttgccaggagaacgagggggaaaacgaccctgtattgcagaggattgtagacattctgtatgccacagatgaaggctttgtgatacttgatgaagggggcccacaggaggagcaagaagagtattaacagcctggaccagcagagcaacatcggaattcttcactccaaatcatgtgcttaactgtaaaatactcccttttgttatccttagaggactcactggttataaattcataagcaaaaagtacctcttcttaaagtgcactttgcagacgtttcactccttttccaataaagtttgagtttaggagcttttaccttgtagcagagcagtatttaacatctagttggttcacctgggaaaacagagaggcccgaccgcggggctcaccatgccggatgccgggcacactgaatggctggaaagacggcatggaaataagcctgaggtggcgacctcagtggagaaatgtaaagactgaattgaattttaagctaatgtgaaatcagagaatgttgtaataagtaaatgccttaagagtatttaaaatatgcttccacatttcaaaatataaaatgtaacatgacaagagattttgcgtttgacattgtgtctgggaaggaagggccagaccttggaacctttggaacctgctgtcaacaggtcttacagggctgcttgaaccctcataggcctaggctttggtctaaaaggaacatttaaaaagttgccctgtaaagttatttgggtgtcattgaccaattgcatcccagctaaaaagcaagaggcatccgttgcctgggataatagagggatgtgtttcagccctgagatgttacaagttgaagagcttgggtttcattggagcatttctctatttttccagttatccccgaaatttctatgtattgtattttttggggaaatagaagtgtgcccagttttttaatctaacaactacttttggggacttgcccacatctctgggatttgaatggggattgtatcccatttttactgtcttttanggttttacatttaccacgtgtctcttctctgctccccttgcccactggggactccctctttgggctccttgaaagtttgctgcttagaagttggaagtgcagcaggcaggtgatcatgctgcaagttcctttctggacctctggcaaaagggagtggtcagtgaaggccaaccgttaacttgggatcctgccaggcctggggtgttttcggtatctgctgttcacaagctctccactgtaattccgaatactttgccagtgcactaaatctctttggagataaaattcattagtggggttaacctaaatgttaaattttccttttgcgggaaaatacagtaccgtgtctggaattaaattattaaatatttaaaaatactttcattcccttaactctcccctcatttggctttggccccacagccctattccagttccctttgttttggccaggattctggcaaaaatgtgttctcaccccactacctgagattgttccagcccctgaatgtattttgtattgatttgtttctggtgggtagcttgtcctgaaatgtgtgtagaaagccaagtattttatgataaaaatgttgtgtagtgcatgctctgtgtggaattcagagggaaaacccagattcagtgattaacaatgccaaaaaatgcaagtaactagccgattgttctaaatgacagtggtgctatttctcttttgtggccttttagacttttgttgccctaaaattccattttattgggaacccattttccacctggtctttcttgacagggttttttttctactttaaacagtttctaaataaaattctgtatttcaagagcaaaaaaaaaaaaaaaaag

SEQ ID NO: 2160 - DNA, 903 bp, Homo sapiens
  SIMILAR (575)..(712): 581254mologous to Homo sapiens Human secreted protein encoded by gene 22 clone HMSJW18,accession number AAY02671,Smith-Waterman Score=130.
  misc_feature (1)...(903): n = a,t,c or g
gcctcacttagaagtgcatcctccaatccttagctaagatttcagacaacannnnnnnnnnnnnnnnnnnnnnnnnnnnnnngctcaaactgttcctgacacctttgcccccctccagagtagttctgacaagtggggtgaggccgtcctaccagagacgccccaccctctcccctggagccagggtctgcattcgagtcctgccctcactcacctaatcatttctgcactcaaggcctgacaacaagactgctactgagaactcaaaatactccaagagccagtcccatatctcaggtgtgggctctgaacaacgtgcacgcaacaacactctaatgcaataggaacacatccacgctcacacgtacatgcacaaacgtgtgcataaacacacctaggcctgcacccccactcctagcacacaggccaccctgcacttccaatttccatagctcctcttcccttatagtgacagccacaagctctctcggccaccaggctgtccctggatgccatggctcaggcctcaggctcctgcctctgctccaggctgctcctggctggcttccttccctggggcctctttcgttattttcttgtagaggcagggtcttgctatgttgaccagggtggtcttgctatcttggcctcaagctatcctcccaccttggtctcccaaagtgctgggatgacaggcctaagccaccgagcccggcctcctttgaatgggcccccaccaggcctaaccccctccctcagcatggtacccaaagccaatgtcttttctctgttggagaagccccccggcctcactcaggctctgcctattacactaaccaatgtctccaatgctccaggccctgctcggagcggactagaaggttgggggtgcttcttcccaaa

SEQ ID NO: 2161 - DNA, 1806 bp, Homo sapiens
  misc_feature (1)...(1806): n = a,t,c or g
cctctgcgtcacctgcactggagttcaccacttgcctgttgggttaagaccaggatgcaccactgaaataaaaaggggttcagacaatacaagaaaagccagtagaaattgccaaatgtatcagaatacacacaggctttctaaggatatggcccaagaggaaggctctagagcccaccctgaaacaggatttttgacttcacagagaaattatttaattttcaataacacaattcaattaaagaaagggaaatacaaggctaaacaaataagaaatgaagacaaaaacccaacctttcaaatctaaagaaaataatctgttttaaagacacagatgaagatcaggaacccaaaacagaagaaaggaaaagcaattaacgctggcatctgataacaacgaaaagtatggagtctggagaatcgctagactctaaaaattataaaggtttagacttggactttgtacactgaaggaaaagaaaactgcatgcatttattactggaccaatgtacactattggctgcttttttaacttttgtgttatatgtagggtagatttttttttaagtgaaagcaagcttattaacgaaagtaaaagaataaaaaggtgacttctccataggcagaaaacctagccgtagtttttttattagaaattgttattcaataatagtacatgttacaaataaataccattttaaactggaaaaaattgtagactttcaaatcagttagggtgggtcaccctaaaaaaggggcatttttttccccttagtctccttggttcatggttggctcacaacaaggaaatgggggctaatggctatggaattaattaataacaaacactggccttctgtcagggccctgtgctggaataccgttctggcatatgttataggggaaggggttaactccggcaggtcttgtttggcccagactctggttacatttcccaggaaagggtctgcctttagggactgggtccttgggccagctccgggggggaatggagctctcaggctttttaggaaaattctattctgctaaggattagtttttggcatgttctcaggtcttgggccacaaaatatcagtttaatcagatggtttatgttaacaagtatgatttatggcaaacatagatctctaatctccatttctctctcatatatctatatttatctatccatatatatgtacctatatatatcaaatataaagataggtttatagccaattgtatatacgtagagagataatatgtagtatgaagagagacatagatattatnccctccattttagaatgttatccctggtatgtttaaaaggaaaaacctaagatgtgttgccaattgccagtatgagtttccaggtatgtaccatgttatgtgtgtgtgtgagagacacacacaaacacatttcaaacatgttttatgtttaagcctcaatattccaaacacagaaatataacatcctattccttaatatgttttatgtaagtaccagcagcagcagtagtaaatactgtattttctatggtgattgaaaattagtaggccagagaatttttgtaatggtttcttaataatttttgtaatagtaaatgattactttttgtttagtatagttttataatctataacatgaataaagtggatatttctattcatatagaaatgtgatttactctcatgtacttatctacatgctaaaaccataagttatcaattttagttctgtgccaaggcacttttactgaataaaaataatcagctaattttaaaaaaaaaaaaaaaaaaa

SEQ ID NO: 2162 - DNA, 597 bp, Homo sapiens
  SIMILAR (1)..(237): 961254mologous to Mus musculus putative,accession number AK004446,Smith-Waterman Score=400.
tcgtccccgctgcgggtggcggtggtgtgctcgagcaaccagaaccggagcatggaggcgcacaacatcctcagcaaacggggattcagcgtccgatcctttggaacagggactcacgtgaagcttccaggaccagctcccgacaagcccaatgtttatgatttcaaaaccacatatgaccagatgtacaatgatcttcttaggaaagacaaagaactgtatcccagcgggttgccctttaaaaaccccccgtgtggtcctccctgggaaggtgttacgtgtgggctcgggcacaggaggcgtgtcaccctgtgcagtgcaaacactggctcctctgtcttttgcgagagtttggtttctatttctggtgcacgtcggatcgtccacggaagccctggtaacctgcgtttggaaaaatctctaaggatttctgaggagctgtcaggccatgtccttgtccaccctgtgtggggcacggcttcgacatggctctgctcccgtcgtgggctgagaaggagcagacctgggaagtacttgccacgttctgcaaggactgagtccagcttcagcagtctcatccggaaggacttggtatag

SEQ ID NO: 2163 - DNA, 1217 bp, Homo sapiens
  SIMILAR (98)..(592): 531254mologous to Homo sapiens HSPC182,accession number AF161530,Smith-Waterman Score=351.
  misc_feature (1)...(1217): n = a,t,c or g
gcacgagccgcggtagggtgggaacccaagcgggagagccgcgggatttgcggccgccgccatgcccgtcgtccccgctgcgggtgagcggtggtggtgcctcgagcaaccagaacgcggagcatgggaggcgcacaacatacctcagccaaacggggattcagccgtccgatcctttggtaacagggactcacgtgaagcttccaggaccagctcccgacaagtcccaatgtttatgaatttcaaaaccacatatgaccagatgtacaatgatcttcttaggaaagacaaaagaactctttacacagaatgggattttacatattgctggacagaaataagagaatcaagccccgggccggaaagattccagaactgcaaagacctgtttgatctgatcctcactttgcgaagagagagtgtatgaccgggttggttggaagatctgaatttccagaggaacagggagacctgcccagccccgtgcacgtggtcaattgtggacatccaggacaaccacgaggaggccacccttgggggcgttttctcatctgtgaagctctgccagtgtatccagcacacggaagacatgggagaacgagatcgacgagctgctgcaggagttcgaggagaagagtggccgcacctttctggcacaccgtcttgcttcttactgagccccagcgccccgcatgggagcccgcctcttgggagcttcctgtttgtttcatacttttttccttcctggacatttgtttttaatttaacaggtgtttctgcttggtgacggttagcatttacccaaataaactgtgccatatgaaatggggaggagagatgcccaaaacgcccagatgaaagcaatcaagtttcttccttttccacttttacttatgagcgggatattgatttacaaagtttttcttctttaaccaaaaagggaaagacaacggttttgtgtgcacttcccgacatacctgtgtcttcgtgtgcctgccttccctccctcctccccaccgggcgcggactgtaacagagccctgctgcggcgtgttaggaatgacctggaattgtcaataaacagatgctgctgtcaaaaaaaaaaaaaaaaaaaaaaaaaaaaaaaaaaaaaaaccaaaaaaaaaaaaaaaaggnggggccgaaggttttttccctttggtnggggttatttttggcttggnattggccttcgtttt

SEQ ID NO: 2164 - DNA, 316 bp, Homo sapiens
  misc_feature (1)...(316): n = a,t,c or g
aatgcacctgtatttgcttaaacgaaaatgtcagaagtatttgtcctacaagcagtctgagtggtttgtcccgcagctggtctggtgacgctggccctcgcggatgtctgcgtgtcgctcacatgtgaatgagtgaggtaattggatatgaggccttctttcttatcttcgcttctttgtttatcggtccnnnnnnnnnnnnnnnnnnnnnnnnnnnnnnnnncttctttgcttattcgtttttgttcttttgttccttttggacactttgcgtctcttttctgcgtagacccagaacaagtgggtcatattttag

SEQ ID NO: 2165 - DNA, 1437 bp, Homo sapiens
  SIMILAR (325)..(753): 571254mologous to Mus musculus DOC4,accession number AF059485,Smith-Waterman Score=392.
atgggatatcaggcttctatgggacaggagtatggaaatgtcctaaatgtctgcctaatcagagcacgcagcttggtttctctcatccgaggccaagtagtaactacagatggaactcccctggtcggtgtgaacgtgtcttttgtcaagtacccaaaatacggctacaccatcacccgccaggatggcaccctcattcagagcacattgattgaggaacatgtgaaaagctggcttgtgatgtttggatttcagcttagcaacatcattcctggcttcccgagagccaaaatgtatttcgtgcctcctccctatgaattgtcagagagtcaagcaagtgagaatggacagggcttcagtaacccttcccattctccaacccccacaggaatcctacacaaaggcactggggaaaaccagttcctgacccagcagcctgccatcatcaccagcatcatgggcaatggtcgccgccggagcatttcctgtcccagctgcaacggccttgctgaaggcaacaagctgctggccccagtggctctggctgttggaatcgatgggagcctctatgtgggtgacttcaattacatccgacgcatctttccctctcgaaatgtgaccagcatcttggagttacgaccttctcataggaaccacctgggaattctgggcagtttctgggtctgtatgaagagaataaaatacctaggaatccaacttacaagggatgtgaaggacctcttcaaggagaactacaaaccactgctcaaggaaataaaagaggatacaaacaaatggaagaaccttccatgctcatgggtaggaagaatcaatatcgtgaaaatggccatactgcccaaggtgacagtaaaatgtcttaaggaagagctgctacatggcctagcgagcatcaaggaggtaccagccaattgtgatacagcggggcgggtagtaccacataaaggaaaggataaagatgccatgactggtgctgctggcatgagcttgggagctttggaaaagcttccaggaggaggggtgtcctgtgtccccaagccttcaaccacatcctttgccatgaagcctccggtgcccatttctgggtacctactggacatttctgtgtctagacaagcaccgcaaacaacaaatcgaaaattgaatccagtcctggtctcaaacaactttgcctctggccttttttgccattaccgggtgtcctgtgtccccaagccctcaaccacctcctctgccatgaagccacaggtgtctgtttctaggtacccactggacatcatttctgtgtctagacaagcacgacaaactacaacaaatcgaaaactgaatcccattctggtctcaaacaacttcgcctcttgccttttctgccattaccatgagagggtaccagctcagtctaacacaacccagcgctga

SEQ ID NO: 2166 - DNA, 834 bp, Homo sapiens
  SIMILAR (151)..(537): 961254mologous to Mus musculus Ten-m2,accession number AB025411,Smith-Waterman Score=643.
atgccctcaaccatcaagggtagtaggggtgataaaaaggaatcagtgcaagtgaagggtgctgagcggcaacggaagggctacagagtaggggtgacgaatggtcgcttcccgttaagaagcgtgtcaccttctgactcctctccctgcaacaacccagcacacaagtactacttggcagtggaccccgtgtccggctcgctctacgtgtccgacaccaacagcaggagaatctaccgcgtcaagtctctgagtggaaccaaagacctggctgggaattcggaagttgtggcagggacgggagagcagtgtctaccctttgatgaagcccgctgcggggatggagggaaggccatagatgcaaccctgatgagcccgagaggtattgcagtagacaagaatgggctcatgtactttgtcgatgccaccatgatccggaaggttgaccaaaatggaatcatctccaccctgctgggctccaatgacctcactgccgtccggccgctgagctgtgattccagcatggatgtagcccaggatcatgcttatgctctgccccactcggatgttggcttagtactagacaaggctgtgctgtgtcagctctgcactgccagccctagccaagcctgtctcctccactcccgcacgcgcacagcccaagccgcacgcccagtgagcggtgacaaggagagggcttgggcttctcgtctccagttcggattcgtgcagtctcacgtcacaggagcagagtctgccttagcaaacttcgggctcagaggggcagaaaaacacatcacccttaaaaagaggccctccagaagacagaaatga

SEQ ID NO: 2167 - DNA, 404 bp, Homo sapiens
tttttttttttattattgatactttttttattacttattcaatatcattatatattttatacatttttgctctggttaagacttctggttcttactggttcaatcttagaaagttgtgtatagttaaaactttatcagttttctctaaattttttagtttgcatacatagagatgttcataatagtctttgaaaacttttcaatttatgtagaattcattgtgattttacatttttaacattaaatagatgcagaataaaagcttgacaaaattcaacatttcctcatgataaatctctgaaaaatttaggtataggaaaaaggcacctcaagccaataaatgtcacatataacaaaaaatgcagagctaattacatactaaacaaggaaatgtaagattttac

SEQ ID NO: 2168 - DNA, 801 bp, Homo sapiens
  SIMILAR (1)..(168): 1001254mologous to Mus musculus putative,accession number AK011975,Smith-Waterman Score=298.
atgaagttccagtacaaggaggaccatccctttgagtatcggaaaaaggaaggagaaaagatccggaagaaatatccggacagggtccccgtgattgtagagaaggctccaaaagccagggtgcctgatctggacaagaggaagtacctagtgccctctgaccttactgctgccttcccgcggggcagggctcgggacctgcagcccgccatgcctgagcctcccacccactccatgggcacctgtgcggcccgagcctccccgacgagcaccaccccctgctccacggcgcccagtcccatcgaccgggaaggaacaaacaacccaagggctgaggaatgcgagcgcacggcgcgggactggcaggcagctccacctgcagccccggtgtgggatccactgggtgaagccagctgggctcccgagtctagtgggaatgtggagagtatatctagctcagggattgtaaatataccaatcagcaccctgtgtttagctcaaggtttctcaaggtttgtgaatgcaccaatcgacactctgtatctagctgctctggtggggccttggagaacctttatgtctagctcagggattgtaaatacaccaatcggcactctgtatctagctcaaggtatggtccactaccacaagtcccctttccctacctgtcttgtgcaaatgtcaaaaatagaatctctgcccaaagagaagggagcacagggagttgctgctggactgccatcatctctggccccaacttgtccacctcctgacccatctatgaaactgcacaacaattaa

SEQ ID NO: 2169 - DNA, 1254 bp, Homo sapiens
  SIMILAR (877)..(1251): 951254mologous to Mus musculus Ten-m2,accession number AB025411,Smith-Waterman Score=622.
atggggttctctatgttggccaggattctgatgcagaatgcttctttgagaacctctgattcagggatgtacagaacagggattcctaactgtcttggtcagtttgggctgctacaacaaaaataccatagactagggggcttaaacaacaaacatttatttctcgcagtcctggaggctgggaagtccaagatcaaggcaccagcagattcagtgtctgatggcctggtggattgtttggaccctgactgctgcctgcagtcagcctgtcagaacagcctgctctgccgggggtcccgggacccactggacatcattcagcagggccagacggattggcccgcagtgaagtccttctatgaccgtatcaagctcttggcaggcaaggatagcacccacatcattcctggagagaaccctttcaacagcagtgaacacttaagccctggccatgccagccatgtcctccacagaagcctgagccggcatgcctgggtccatggaagaaatctcttgtccattgactatgatcgaaatattcggactgaaaagatctatgatgaccaccggaagttcaccctgaggatcatttatgaccaggtgggccgccccttcctctggctgcccagcagcgggctggcagctgtcaacgtgtcatacttcttcaatgggcgcctggctgggcttcagcgtggggccatgagcgagaggacagacatcgacaagcaaggccgcatcgtgtcccgcatgttcgctgacgggaaagtgtggagctactcctaccttgacaaggatggatgtgggaaaaaaagcacgggctgcttaagaaaatcaaggctctgctaccaaaggcagaaatctgattcaggacatatagctttcatccagtatgaggctgcatcccccggagagcagcagttatatgttttcaacgctgatggcatccaccaatacactgtgagcctggtgacaggggagtacttgtacattttcacatatagtactgacaatgatgtcactgaattgattgacaataatgggaattccctgaagatccgtcgggacagcagtggcatgccccgtcacctgctcatgcctgacaaccagatcatcaccctcaccgtgggcaccaatggaggcctcaaagtcgtgtccacacagaacctggagcttggtctcatgacctatgatggcaacactgggctcctggccaccaagagcgatgaaacaggatggacgactttctatgagtaa

SEQ ID NO: 2170 - DNA, 6478 bp, Homo sapiens
  SIMILAR (124)..(3474): 981254mologous to Mus musculus Ten-m2,accession number AB025411,Smith-Waterman Score=5724.
atggctggatggttgcgtgcatggctggatggatggctgactggatggctggctggctgcatgagtgaatggatgatggatggatggatggatggatggattgatggatggatggatggatggaatcccatcgtgcctgagacccaggttcttcatgaagaaatcgagctccctggttccaatgtgaaacttcgctatctgagctctagaactgcagggtacaagtcactgctgaagatcaccatgacccagtccacagtgcccctgaacctcattagggttcacctgatggtggctgtcgaggggcatctcttccagaagtcattccaggcttctcccaacctggcctacaccttcatctgggacaagacagatgcgtatggccaaagggtgtatggactctcagatgctgttgtgtctgtcgggtttgaatatgagacctgtcccagtctaattctctgggagaaaaggacagccctccttcagggattcgagctggacccctccaacctcggtggctggtccctagacaaacaccacatcctcaatgttaaaagtggaatcctacacaaaggcactggggaaaaccagttcctgacccagcagcctgccatcatcaccagcatcatgggcaatggtcgccgccggagcatttcctgtcccagctgcaacggccttgctgaaggcaacaagctgctggccccagtggctctggctgttggaatcgatgggagcctctatgtgggtgacttcaattacatccgacgcatctttccctctcgaaatgtgaccagcatcttggagttacgaaataaagagtttaaacatagcaacaacccagcacacaagtactacttggcagtggaccccgtgtccggctcgctctacgtgtccgacaccaacagcaggagaatctaccgcgtcaagtctctgagtggaaccaaagacctggctgggaattcggaagttgtggcagggacgggagagcagtgtctaccctttgatgaagcccgctgcggggatggagggaaggccatagatgcaaccctgatgagcccgagaggtattgcagtagacaagaatgggctcatgtactttgtcgatgccaccatgatccggaaggttgaccagaatggaatcatctccaccctgctgggctccaatgacctcactgccgtccggccgctgagctgtgattccagcatggatgtagcccaggttcgtctggagtggccaacagaccttgctgtcaatcccatggataactccttgtatgttctagagaacaatgtcatccttcgaatcaccgagaaccaccaagtcagcatcattgcgggacgccccatgcactgccaagttcctggcattgactactcactcagcaaactagccattcactctgccctggagtcagccagtgccattgccatttctcacactggggtcctctacatcactgagacagatgagaagaagattaaccgtctacgccaggtaacaaccaacggggagatctgccttttagctggggcagcctcggactgcgactgcaaaaacgatgtcaattgcaactgctattcaggagatgatgcctacgcgactgatgccatcttgaattccccatcatccttagctgtagctccagatggtaccatttacattgcagaccttggaaatattcggatcagggcggtcagcaagaacaagcctgttcttaatgccttcaaccagtatgaggctgcatcccccggagagcaggagttatatgttttcaacgctgatggcatccaccaatacactgtgagcctggtgacaggggagtacttgtacaatttcacatatagtactgacaatgatgtcactgaattgattgacaataatgggaattccctgaagatccgtcgggacagcagtggcatgccccgtcacctgctcatgcctgacaaccagatcatcaccctcaccgtgggcaccaatggaggcctcaaagtcgtgtccacacagaacctggagcttggtctcatgacctatgatggcaacactgggctcctggccaccaagagcgatgaaacaggatggacgactttctatgactatgaccacgaaggccgcctgaccaacgtgacgcgccccacgggggtggtaaccagtctgcaccgggaaatggagaaatctattaccattgacattgagaactccaaccgtgatgatgacgtcactgtcatcaccaacctctcttcagtagaggcctcctacacagtggtacaagatcaagttcggaacagctaccagctctgtaataatggtaccctgagggtgatgtatgctaatgggatgggtatcagcttccacagcgagccccatgtcctagcgggcaccatcacccccaccattggacgctgcaacatctccctgcctatggagaatggcttaaactccattgagtggcgcctaagaaaggaacagattaaaggcaaagtcaccatctttggcaggaagctccgggtccatggaagaaatctcttgtccattgactatgatcgaaatattcggactgaaaagatctatgatgaccaccggaagttcaccctgaggatcatttatgaccaggtgggccgccccttcctctggctgcccagcagcgggctggcagctgtcaacgtgtcatacttcttcaatgggcgcctggctgggcttcagcgtggggccatgagcgagaggacagacatcgacaagcaaggccgcatcgtgtcccgcatgttcgctgacgggaaagtgtggagctactcctaccttgacaagtccatggtcctcctgcttcagagccaacgtcagtatatatttgagtatgactcctctgaccgcctccttgccgtcaccatgcccagcgtggcccggcacagcatgtccacacacacctccatcggctacatccgtaatatttacaacccgcctgaaagcaatgcttcggtcatctttgactacagtgatgacggccgcatcctgaagacctcctttttgggcaccggacgccaggtgttctacaagtatgggaaactctccaagttatcagagattgtctacgacagtaccgccgtcaccttcgggtatgacgagaccactggtgtcttgaagatggtcaacctccaaagtgggggcttctcctgcaccatcaggtaccggaagattggccccctggtggacaagcagatctacaggttctccgaggaaggcatggtcaatgccaggtttgactacacctatcatgacaacagcttccgcatcgcaagcatcaagcccgtcataagtgagactcccctccccgttgacctctaccgctatgatgagatttctggcaaggtggaacactttggtaagtttggagtcatctattatgacatcaaccagatcatcaccactgccgtgatgaccctcagcaaacacttcgacacccatgggcggatcaaggaggtcctagctttgagatgttccggtccctcatgtactggatgacggtgcaatatgacagcatgggcagggtgatcaagagggagctaaaactggggccctatgccaataccacgaagtacacctatgactacgatggggacgggcagctccagagcgtggcctgcaatgaccgaccgacctggcgctacagctatgagcttaatgggaatctgcacttactgaacccaggcaacagtgtgcgcctcatgcccttgcgctatgacctccgggatcggataaccagactcggggatgtgcagtacaaaattgacgacgatggctatctgtgccagagagggtctgacatcttcgaatacaattccaagggcctcctaacaagagcctacaacaaggccagcgggtggagtgtccagtacacgctatgatggcgtaggacggcgggcttccaacaagaccaacctgggccaccacctgcagtacttctactctgacctccacaacccgacgcgcatcacccatgtctacaatcactccaactcggagattacctcactgtactacgacctccagggccacctctttgccatggagagcagcagtggggaggagtactatgttgcctctgataacacagggactcctctggctgtgttcagcatcaacggcctcatgatcaaacagctgcagtacacggcctatggggagatttattatgactccaaccccgactttcagatggtcattggcttccatgggggactctatgacccccttgaccaagctggtccacttcactttagcgtgattatgatgtgctggcaaggacgatggaccttccccagactataccatgtggaaaaaacgtgggcaagggggccgggcccccttttaaaccgtatatgtttaaagagcaacaatcctctcagcagtgagctagatttgaagaactacgtgacaggtgaggattctgccaccaaagatgtgaaaagctggcttgtgatgtttggatttcagcttagcaacatcattcctggcttcccgagagccaaaaagtattttgtgccttcccccctatgaattgtcagagagtcaagcaagtgagaatggacagctcattacaggtgtccaacagacaacagagagacataaccaggccttcatggctctggaaggacaggtcattactaaaaagctccacgccagcatccgagagaaagcaggtcactggtttgtcaccaccacgcccatcattggcaaaggcatcatgcttgccatcaaagaagggcgggtgaccacgggcgtgtccaacatcgccagcgaagatagccgcaaggtggcatctgtgctgaacaacgcctactacctggacaagatgcactacagcatcgagggcaaggacacccactactttgtgaagattggctcagccgatggcgacctggtcacactaggcaccaccatcggccgcaaggtgctagagagcggggtgaacgtggacctggttccaaacccacgctgctggtcaacgggaaggactcgaaggttcacgaaacatggagttcagaacttcacgctggtggttcagcatccgttatgggcctaacccccgaacccttggaagaagagaaaaggccgcggtcttggaccaaggcgaagacaaagggccctgggcaccggcctgggccaaggagcagcaaaaagccagggacgggagagaggggagccgcctgtggactgagggcgagaagcagcagcttctgagcaccgggcgcgtgcaagggtacgagggatattacgtgcttcccgtggagcaatacccagagcttgcagacagtagcagcaacatccagtttttaagacagaatgagatgggaaagaggtaacaaaataatctgctgccattccttgtctgaatgggctcagcaggagtaactgttatctcctctcctaaggagatgaagacctaacaggggcactgcggctgggctgctttaggagaccaagtggcaagaaagctcacattttttgagttcaaatgctactgtccaagcgagaagtccctcatcctgaagtagactaaagcccggctgaaaattccgaggaaaacaaaacaaacgaatgaatgaacagacacacacaatgttccaagttcccctaaaatatgacccacttgttctgggtctacgcagaaaagagacgcaaagtgtccaaaaggaacaaaagaacaaaaacgaataagcaaagaagaaaacaaacaaaaacaaaacaaaacaaacacacggaccgataaacaaagaagcgaagtataagaaagaaggcctcatatccaattacctcactcattcacatgtgagcgacacgcagacatacgcgagggccagcgtcaccagaccagctgcgggacaaaccactcagactgcttgtaagacaaatacttctgacattttcgcttaagcaaatacaggtgcatttaaaacacggactttgggggtgatttgtgtgtagcgcctggggaggggggataaaagaggaggagtgagcactggaaataccttttaaagaaaaaaaaacatgagggaataaaagaaattcctatcaaaaatcaaagtgaaataataccatccagcacttaactctcaggtcccaactaagtctggcctgagctaatttatttgagcgcagagtgtaaaatttaattcaaaatggtggctataatcactacagataaatttcatactctttttgtctttggaggattcccattgtggacaggtaatacggcagttaccaggggtgtagtctgtttagattccgtagttcgtgggtatcagtttcggtagaggtgcagcatcgtgacacttttgctaacaggtaccacttctgatcaccctgtacatacatgagccgaaaggcacaatcactgtttcagatttaaaattattagtgtgtttgtttggtccagaaactgagacaatcacatgacagtcaccacgaggagagaaaattt

SEQ ID NO: 2171 - DNA, 498 bp, Homo sapiens
ggagagagtcacactgttaggccaaggtctattgttcaccaggcactgaaagcagatgtgtgaagagaagtggtcatgtgacaacatgcagtctcaatgcccctgggtgtccagacacactggctgctgtccaccagccgcaggtggtaaagacccaaaagccacctctgcaatttttattccaaactagaggactggctctgaaggtgcagcatgagggttcatcagagccaaccactgtcaagtgtggaaagcactggtgcacaccacgaaaagatgtcctatcagtccacgcatgatgggtgcggggacttctgcctcccagagttcaagaacaaatggctcagctggtccctgcagaccttccttgggtgcatgggggacaggacagcctagccgtcgcagtctcagaatccattttatggattaccaaaagtcctgcgctaggtccctggcaccgcagcagtgctgttaccaatctgatgttggagcggccgc

SEQ ID NO: 2172 - DNA, 487 bp, Homo sapiens
  SIMILAR (59)..(151): 1001254mologous to Homo sapiens golgi SNARE,accession number AF007548,Smith-Waterman Score=166.
ggggaggacgtgttccgaggaagccagacccggagccgtggcctgccgggccggcgacatggatcccctgttccagcaaacgcacaagcaggtccacgagatccagtcttgcatgggacgcctggagacggcagacaagcagtctgtgcacagtgagtaattaactgtggagaccagagtcctttctctgatgacagggtgctaatgggctgggcttcctgactgcactctgccttgggggcttaatgattcagcgtggaatgagttttgttgttagggtggacagaaaaaccctatggcaaagtcactgatttccctgagtgtgccctttggaatcccacaagtcttatcccccattacccctccactcaacctgacatggccctatgggaatggaagcgcttgcctccatctatcttaatctaattacctagtccttagaggaatgtactccataaaaaattcagagatgtttaactggaattgg

SEQ ID NO: 2173 - DNA, 1926 bp, Homo sapiens
  SIMILAR (1282)..(1923): 531254mologous to Homo sapiens golgi SNARE,accession number AF007548,Smith-Waterman Score=383.
atgcgccccccgcccgcgctggccctggccgggctctgcctgctggcgctgcccgccgccgccgcctcctacttcgggcgtcagtcccgctctctgatgccctctcgggatcctcacgccggtgccctgtctgccgccatcctggcctccggcgagccgtccttgcctcggactccttccccaccctccgccttcgccctgcggagcggagaccgagagggctgggtggatgggtgggacgggctgttcccggtctcggggcagaggatcgtgcgcgtccagggagaatgggggaaacctcggacgtcatttgcatttgattataacacaaagtgctttggcatcctgataagagaatatgcaaacatcaggagggcaggaaacatttacgtatttggtcctctgatgaatgactgtccccagcagatggcaagttccttgcaggccaaaacctgggctgcttttgctcatcagtgctcagctgccaaggggcagctgcacacagagttgctccatgaagatgcgttgaagaaatggaccagtccagcaatgggctgggaacgcagcaggagccatgacaagcccaggcggctctcccgacccttggtgcccccgaggccatttccccgcgctccctgtgccggcagcagccgcgtgcggagagggctcgccgaccagaaggggcagcagttccctacacagcggtccctgctccccaccggcagtgcttccttcaccccagaccggggctgcgcagagtcctggtgcctcaggccgcgggcgctgattggctgctcgctgacatcctcaaacccggctgctccgcgctgggctcgggaggggggcggctgcgggtggaggtgcgcttctgacaagcccgaaagtcatttccaatctcaagtggactttgttccaactattgggggcgtcgctccccctcttcatggtcgcgggcaaacttcctcctcggcgcctcttctaatggagccccacctgctcgggctgctcctcggcctcctgctcggtggcaccagggtcctcgctggctacccaatttggtggtgctgggcccagggctgtgtggctgtgaatatctttgcagacatctacctgtgggttagagccatcctgatattacatctgtacatccatgttatcttgtatgctggaaaatggtctcagtgggccatgggggctggagagaaggtcctgcgctcagaggctgaaacccggttcttcagcgttaggcagcctgtccctcgtgagcacagtggctaccccaggcaggtccacgagatccagtcttgcatgggacgcctggtatacggcagacaagcagtctgggcacatagtggaaaacgaaatccaagcaagcatagaccagatatttcagccggctagaacgtctggagattttgtccagcaaggagccccctaacaaaaggcaaaatggcagactttccgggttaacagtttaaagtatgatgtccagcacctgcagacttgcgctcagaaacttccaagcatcggcgccatgcaagggagcagcagggagagacagcgagaaagagctttctgtcttcgaaacctttcaccacttaaacgactctggacaccaccattaccaattgggaccgaattcacttgcagttttaacttccttcccttccaagaaagtttcacaacgggcatgggattgacctcattttagatggggcacaatatttttagatggactgaggacccagagacttgaccttgaaggggactcagaagaagatccttgacattgccaacatgctgggcttgtccaacacagtgatgcggctcatcgagaagcgggctttccaggacaagtactttatgataggtgggatgctgctgacctgtgtggtcatgttcctcgtggtgcagtacctgacatga

SEQ ID NO: 2174 - DNA, 3206 bp, Homo sapiens
  SIMILAR (2388)..(2444): 1001254mologous to Homo sapiens golgi SNARE isoform B,accession number AF229796,Smith-Waterman Score=102.
ttctcgggtcgacccacgcgtccgagacccggagccgtggcctgccgggccggcgacatggatcccctgttccagcaaacgcacaagcaggtccacgagatccagtcttgcatgggacgcctggagacggcagacaagcagtctgtgcacatagtagaaaacgaaatccaagcaagcatagaccagatattcagccgtctagaacgtctggagattttgtccagcaaggagccccctaacaaaaggcaaaatgccaaacttcgggttgaccagttaaagtatgatgtccagcacctgcagactgcgctcagaaacttccagcatcggcgccatgcgagggagccagaggagaagacagcgaagaagagcttctgtctcgaaccttcaccactaacgggactcagaagaaagatcccttgacattgcccaacatgctgggcttgtcccaacacagtgatgcggcctcatcgagaaacgggctttccccaggacaagtactttatgataggtgggcatcctgcctgacctttgtgggcattgttcttgtggttccaataccggacatgagccagccacgctcagtggctgaacagcattcccacagccttgcaagtgtgtgtgtgtgtgaaagagagaggggggcccagaggccgccttttgaaatgtttgcctgtctgaactgtgaagacacttgggagtgattgtggtctaatttccaacctgctctgttttctgtgacatcttggagggggagctagtgccacccaccatgcgcggtgcttaggaaatgaaagaagtcccgggtctgtctctctcactctcgctctcactgggggagggaaagaatggctttggtggctttgttcacacagctgatgcgtgccctgggaaggtgtccacagtgagccctgtgtgcaggactgtccacacggttcacaccttgtcaccatcaggcctttctggctcctgatagggtggagcaaaagtggaaaggaaaggaaagaggccttttctcacagccattatattaaatagtaggtcgattcacatcctcgtgctcctggccaccctcccctgtgcctcagtgacatgtagatgactgactgccaatacttgtcaccattccctggaagcagctacctaggggaaacaagatgtagtgctattgccgataacaagtaagattttccacactacagctgggtgtttctcttttctaaagtgaggccagtgttatttcccgggagtgttcagtcttgaccctagtcactgattttttctaagttgttaataagagtggttgggcttttaaggttcagagactgtgggcttgggcaccctgcgcccaggctttggtgggccctttgcccccttagaaaagtagctgtaggcaaagatttgtgattttccaattacagtctcagctctagttttagtatctctaattctttggttcccttctcttccctgaaatatattagcacctgccagccaggccctcattttgcccagccgagtgtgtgggcagatcccaccgtggagacatcttgtagtgtgtatgtccttgtaacactctgttttcagggactacaacctttttccttctgtgaccagccccggattcaggctgtactaataccaggtatattgtggaatttagtataaaggccaatctgtcctgaagtccatctaatgtgatgaatcactgaaagtctcagaaagacctggttagtgtatgttctcatttaccacaggcctaccagccctgggcacagcagcttcatggcaagacataaaatgacactcaaaatccttcagatctggaaaccggctcagtattaaccctacctttggttgtcctgccctacctgctctgttagtttcttgttgcttgaactgtcttctgtcttatttcccttcctttctgtgttcctcttcacctcttcttgttcccctccccgctgctctgtaggtcatgttgggtccttttcagggcacctctgtggggcatagctcccctttggtaagttttcttaattgtcatagattaactgagtttcctgggatgctaatttcacactttcggttggaggagatctccattgttcctacccctccgggccaaatgggccccaggtttccaaggaaggagcaatctgtgactcctaaaatgggttggggccctgccagagttaaagccatgacttgagggtgggactggggggttgcagcatctttagacctagatctgtctaactctggggaggcacattgacatttccattacacacagcactgctgcggtgccagggaccaacacgcagggcttttggtaatccataaaatggattctgagactgcgacggcaaggctgtcctgtcccccagggcacccaaggatcctgccagacagcacactttggaggaaggtctgcagggagcagctgagccatttgttcttgaactctgggaggcagaagtccccgcacccatcatgcgtggactgataggacatcttttcgtggtgtgcaccagtgctttccacacttgacagtggttggctttgatgaaccctcatgctgcaccttcagagccagtcctctagtttggaataaaaattgcagaggtggtttttgggtctttaccacctgcggctggtggacagcagccagtgtgtctggacacccaggggcattgagactgcatgttgtcacatgaccacttctcttcacacatctgctttcagtgcctggtgaaaaatagaccttggcctaacagtgtgactctctccaccgcctcagtgtagggaagggtccaggccagggaaggagcaccctctagtggaggcgggggtgaattcttaggtcgagctgatgcaagaaactccggtagccagcctctgtgaccttgtacatgagtttggtgtgcctattgtgatttaaaacaggtgggttatcaaaaaggaacttgagatctctttattacatggacatttacttcagggggaccactgtaagaaaagccaaactccaagaccaagtaagttagaggagtcttgattttttagacttcactgcggagttctgtacaccctttgccctgatgaatttgaatgggtttgatttgcaaatttggatttacacccattgttttggaagcacatcagctgaataaagttgaggtttattttatttagaaaatcaaaaa

SEQ ID NO: 2175 - DNA, 180 bp, Homo sapiens
tgctaggtgtcactactctcagagcacataggctaagaggcttcctcagtaattttcatcaggccttctccccatccatttccaatgcttagccagttatgaaaattatatgaaaatcctgaacaaatctaatgcagttgtgggagtctagtagtgatggatcacatggcaagttcttgg

SEQ ID NO: 2176 - DNA, 786 bp, Homo sapiens
tccctgcctctcagcagcgccgccgcctcccagcgccgatgcttcatccggcggggcggctgagggtgagagctcaaaaattcccagactgttttgatgataaggtccaagaacttgccatgtgatccatcactactagactcccacaactgcattagatttgttcaggattttcatataattttcataactggctaaggattgttttctgctggttgctttctgaaattctactggacctaatgccattggaaatggatggggagaaggcctgatgaaaattactgaggaagcctcttagcctatgtgctctgagagtagtgacacctatcagtcgttcaaaagatgatcaagaggagcatgaaaaaatccccctgaatccattggctttcttccctatactgacaacagtttacttgtgtaagagatgagggtctcatccttttgcccaggctggagtacagtggtgtgtatgtagcacactgcagccttcaactcctgatcctccaacctcagcctccacagttgctgggattacaagttcaagttggtgtgtatctgcaaaggcgatggaaaggagttcttacatatgcatattctgaagaaggatgttacccttactgaaaaacttattccaagatatgtttaatcaatcatgagaaaaataaagagacatccttatgaatggagaataaagtcctcagggtttttttctaattccccatgtgaatgaagagctgtgttattctaaatatagtgtttgtcataaggcaaaaaaaaaaaaaa

SEQ ID NO: 2177 - DNA, 677 bp, Homo sapiens
  SIMILAR (62)..(229): 911254mologous to Homo sapiens GTP binding protein,accession number AF054183,Smith-Waterman Score=271.
tccgccatctttccagcctcagtcggacgggcgcggagacgcttctggaaggaacgccgcgatggctgcgcagggagagccccagcttgtattggttggtgatggtggtactggaaaaacgaccttcgtgaaacgtcatttgactggtgaatttgagaagaagtatgtagccaccttgggtgttgaggttcatcccctagtgttccacaccaacagaagacctattaaggttcaatgtatgggacacagcccgccaggagaaattcggtggactgagagatggctattatatccaagcccagtgtgccatcataatgtttgatgtaacatcgagagttacttacaagaatgtgcctaactggcatagagatctggtacgagtgtgtgaaaacatccccattgtgttgtgtggcaacaaagtggatattaaggacaggaaagtgaaggcgaaatccattgtcttccaccgaaagaagaatcttcagtactaccacatttgtgccaaaagtaactacaactttgaaaagccctttctctggcttgctaggaagctcattggagaccctaacttggaatttgtgccatgcctgctctcgccccaccagaagttgtcatggacccagcttttgccagcacatatgagcacgacttagaggttgctcagacgactgctctcc

SEQ ID NO: 2178 - DNA, 552 bp, Homo sapiens
  SIMILAR (1)..(324): 921254mologous to Mus musculus putative,accession number AK010569,Smith-Waterman Score=542.
atggctgcgcagggacagccccaggtccagttcaaacttgtattggttggtgatggtggtactggaaaaacgactttcgtgaaacatcatttgactggtgaatttgagaagaagtatgtagccaccttgggtgttgaggttcatcccctagtgttccataccaacagaggacctgttaagttcaatgtatgggacacagccggcctggagaaattcagtggactgagagatggctattatatccaagcccagagtaccatcatagtgtttgatgtaacatcgagagttacttacaagaatgtgcctaactggcatagagatctgaagaatcttcagtactacgacatttctgccaaaagtaactataactttgaaaagcccttcctctggcttgctaggaagctcattggagaccctaacttggaatttgttgccatgcctgctctcgccccaccagaagttgtcatggacccagctttggcagcacagtatgagcacgacttagaggttgctcagacaactgctctcccggacgaggatgatgacctgtga

SEQ ID NO: 2179 - DNA, 922 bp, Homo sapiens
  SIMILAR (319)..(576): 661254mologous to Mus musculus Pro-Pol-dUTPase polyprotein,accession number Y12713,Smith-Waterman Score=277.
atgcctgatctcccttgggttaatgtagaggaagggattcaaagacttagggagattgtgatggtggagtggattagtcactttaggcctactcatcccagcttggagaatctagaagatatagccttgaccaatgtcttgcaaaatagatttgtgagggcagaacctgcatctttgaagagccctgtaattgctcttctctgtatgtcagatctaacggtgggaaccacagtcactcaactacaacatttaaatacaatgggagtaattggatcccaagatggcagggaccaagtggcagcactcaaccatcaaaagcaaggagacctgtggccttttcccagggtaactgtgctatggagaaagggaattgatcagacattttggggactactgaacactggctctgagctgacattgattccaggggacccaaaatgtcgttgcagtcctccagttaaagtagaggctcatggatgtcaggtaattaatggagttttagctcagatccaacttacagtgggtctggtgggtccgcgcccagtcccatccaccacccaaggtgctgaggagtgcgggcgcacggcaccgggactggcaggcagctccacctgcagccccggtgtgggatccactaggtgaagccagctgggctcctgagtctggtggggacgtggagagtctttatatctggctcagggattgtaaatacaccaatcagcaccctgtgtttagctcaaggtttgtgagtgcaccaatggacactctgtatctagctgctctggtggggacgtggaggacctttatgtctagctcagggattgtaaatacaccaatcggcactctgtatctagctcaagttttatacttccctgacacatcctgtgataagcctcgtagtagagactctagtctggtggtg

SEQ ID NO: 2180 - DNA, 2636 bp, Homo sapiens
  SIMILAR (116)..(808): 511254mologous to Mus musculus putative,accession number AK010569,Smith-Waterman Score=430.
cgcccctgctctcgcgccggcgtcggctgcgtctccggcgtttgaattcacgcttccgccatctttccagcctcagtcggacgggcgcggagacgcttctggaaggaacgccgcgatggctgcgcagggagagccccaggtccagttcaaacttgtattggttggtgatggtggtactggaaaaacgaccttcgtgaaacgtcatttgactggtgaatttgagaagaagtatgtagccaccttgggtgttgaggttcatcccctagtgttccacaccaacatgaggacctattaagttcaatgtatgggacacagcctggccatggagaaattctggtggactgacgagatgggctatatatcccaagcccacgtgtgcccatcataatgtttgactgtaacatcgaggagttacttacaaggaatgtgcctaactgggcattaggagatctggtaacgagtgttttgaaaacatcccccatttgtgttgtgtggccaacaaagttggatattaaggaccaggaaagtgaaggcgaaatccattgtctttccaccgaaaagagaatttttcagtactaccgacatttctgcccaaaaagtacctaccaacttgaaaaagcccttcctctgggctttgctaggaagcctcatgggagacccctaactttggaatttgttgcccatgcccttgctctcgcccccacccagaaggttgtcatggaaccccagctttggccagccaccagtatgaagcacgacctaagaggttgcctcagacaactgcctccccccggatgaggatgatgaccctgtgaagaaatgaaaactggaagccccagcgttcagaagtcctagttttaaaaggcaagctgcccctgtgatgtccagcggtgccagcgtgtgtgcccacctcattattatctagctaagcgggaacatgtgccttcatctgtgggatgctgaagggagatggagtgggcttccgggagtgaatgtggcagttttaaaaaataacttccattgttttggacctggcatatttagctgttttggaacgcagttgattcccttgagtttcatatataagactgtctgcagtcacatcacaatattcagtggtgaaatcttgtttgttactgtcattcccattccttttcggtttagaatcagaataaagttgtatttcaaatatctaagcaagtgaactcatcccttgtttataaatagcatttggaaaccactaaagtagggaagttttatgccatgttaatatttgaattgccttgcttttatcacttaatttgaaatctattgggttaatttctccctatgtttatttttggacatttgagccatgtcacacaaactgatgatgacaggtcagcagtattctatttggttagaagggttacatggtgtaaatattagtgcagttaagctaaagcagtgtttgctccaccttcatattggctaggtagggtcacctagggaagcacttgctcaaaatctgtgacctgtcagaataaaaatgtggtttgtacatatcaaatagatattttaagggtaatattttcttttatggcaaaagtaatcatgttttaatgtagaacttcaaacaggatggaacatcagtggatggcaggaggttgggaattcttgctgttaaaaataattacaaattttgcacttttttgtttgaatgttagatgcttagtgtgaagttgatacgcaaggaaaatggtccatgtttacccacagttttcaggtactcctagactttaaagatgtcttgaacatttaagttcttcagcagttcacactacaccgtttttttgtttttttttcccccccgggaggttttttttgtaggggcagccacagcagagcaggacatggatgaaatactaggaatatgcacagtgggggcagtgtgggggcttctcagtaatggagaacagttggtgaaacttttttttttttttaactaagcatttaatttatcttgcatattttccacatttaaaaatgaattaggtctattaggataattaggagtttgatcccatcaacactattcttgtagcagttaggaatcttgagctatttttttctcatacgattacctatagtcccagtttacccaaagttttcctttagatgtctgataatcttgagatgattgcttaccttaaaaggtatagaaaggatcacttaaatatatggaaaaatgaaataagggtgaatctgaataaagttctacttactgtattaactggcaacagttgagtttcttaaggatctgaattgctgtgtatgttacgctgtattcagaaccagtttctaaccagcctgtgagatgggaagtttttttccccataattgggatgaaacctttcattcaggtattttgaaattgaaaggtgtatggtgttggtattgtaaccttgtggagattgcaaagtggtgttgacagttctgggagtcttctatggtaaacagttgaaatttgggaagtgaccgtcactttacctgtctaaccgtggtgtgggagagaatttaccaagtcctttattgaaagaataattgttgcaaaatatattgcttctactttgcctggaaaaaaaaaaaaaaaaaaa

SEQ ID NO: 2181 - DNA, 1696 bp, Homo sapiens
  SIMILAR (254)..(574): 491254mologous to Mus musculus putative,accession number AK011757,Smith-Waterman Score=185.
attcggcaccggaggggctgtggagtacgcggggacccggctgcggtggctgcgggactgacgaatcttgctgtgtggcccaggctggagtgcccggctggtctcaaattcctgacctcaagtgatctccctcccaaagtgttgcgattgcaggtgtgagccactgcacctggctgctgagaaatctttgcctacagtgagggaaactactaaagttcctggggaagcaaagtcagaatttcataagaacaaaatggatgggagaggaggaaaacctatgggtggctgtgaaggacctgatgccatgtatgtcaaattgatatcatctgatggcccatgaaatttattgtaaaaagagaccatggccttaccatcaggcaccgaataaaagcccatgttgagtggcccagggtcagtttgctggaggaacgaaaacccattgaggtcaattttaggagagataccttctcacatgtgcaattcgaaaggtatgcaatgtattttttacgtacaaggttccgctacacctaacagctcccacccgagatttcctgaattccccaatttggcacctggaaatttgcactgggaacttgcttgatggcttgcggaacttccttaagattggttaaattaaaattaaattataattaaacctggttaactccttttcagtaatttaatacctgtagttcaggttagtaacctttttcatatataggcatgttgcctgtatggcagttggaactatattaaaggttcattggcaaaggcagattatcttgttttttttgcatagcaatcaaagttgaaatttgtttgctacatcaacaaattaggggacattttccaccaaactgagaaataaacaaatatggccaattcgtaggtggttttgccctatccctttgaatgtgaccttaaaatccagcaatgatgatatagtaaatactgaaatttaggtgtaaatcaatacgttcctacagggaaataatgaggctaagtatttttatgtttttagtggttttttagaaaccccaaccctatagccgccattagccattacctagagttaatgccaaataattgccatttataaacatgtttaataacttagcccaaaacattgatttttataactctcccaagtatgagttgaaatttccttatgtcttttgataaactgccagtattcctttaagtgtactttgtccttttgtttattgctacaatttaagaactttatttaaaaacaattttggaaggttactaggtacagcttttgcagaagaaactgaactgtagccagatggtcagcaagtaaactacatgacttagagttcttgtgcattatacattttgggtaattcaaagtactgtatttgcattgactataaagcgtcgtttgcaatatttattcttccttcatagtcccttgttgtgattatacttccagttggtttaaatgtattttaaaagactcactattaactttattcagatcttaaaagctacacctttttgaactattccagtctttctccatccaattagaatgttatggaataacatgtgaagagatacagtgaaaatcatattataatgcattgaagatatcctacatgaattatcttctattaaaatatgtcccaataaatatacccataatcagtgggtcttctactgaaaaaaaaaa

SEQ ID NO: 2182 - DNA, 348 bp, Homo sapiens
ttttacttaaatctatttattgaaaaggtcacaataaatagaatgccactaccacttgtcctaaacaataaagtagccaataaaaatataccattaaaacaaaaacagtgctaaaaaagtctggaattttttccacctgccctaagcccaagtcctgctatgattttgtgccacttaatgcaggccccataccacctaaaagtatcttgggaaccaacggacccacccacactttggaaatgctggactaacgtctcaacaaacccacccctatcagccctcagaggtcaccgctgactcaggtgggacacaggtagacaaggccaaccaggaggaggccacgaacac

SEQ ID NO: 2183 - DNA, 518 bp, Homo sapiens
ttttcatttttacttaaatctatttattgaaaaggtcacaataaatagaatgccactaccacttgtcctaaacaataaagtagccaataaaaatataccattaaaacaaaaacagtgctaaaaaagtctggaattttttccacctgccctaagcccaagtcctgctctgattttgtgccacttaatgcaggccccataccacctaaaagtatcttgggaaccaacggacccacccacactttggaaatgctggactaacgtctccctctgcctcacgcttaacacaaaggggaaacacacacctgtggtcccctctctgatcataccttcaaggcaccaccagatcccctccaaatatgcctgctctcacaccaaggcccagcaagtccctctcaacaaacccacccctatcagccctcagaggtcaccgctgactcaggtgggacacaggtagacaaggccaaccaggaggaggccacgaacaccaagcatcatgagcaggaagaggagcaggatgg

SEQ ID NO: 2184 - DNA, 2157 bp, Homo sapiens
  SIMILAR (1784)..(1437): 471254mologous to Mus musculus putative,accession number AK008338,Smith-Waterman Score=202.
atgagtgcctactgcctccagctgggaggactgcaagctcttcttgctctcacccagacccctgggcacagagacagtctccctgatgctcagccggcagctgtcctggtgtgtggatggccctggctggcgtccttctcagagaggaccattgttgggcataaagaatggaccattaaggacaaactaaaaaacaaattcaaggatgaatttgatatagtctccctgccttgcactttaggttctcacccccaaccccaggaccccatgctcaagctcccatggtcaatcacatatggcagatgtcttgctccaggagatcacacggtctccttggtgataaagctggttgagtccgcctctctgtcacttgcagtctcaaacatgctgagtgacatgataagatggatgcctgctggctgtggccgttgcctcctaggactccagagtgagagcagggctgtttgtgggcagtgcgtgggcatggagcaggtctgcagggtctccggtccccacatccgctggatcccccagcctcagctgcactcctgcctcttctttctctacccatccccatatcctttagagccatcatccaacaccagtttcatctgccctcactccagaacctacaatggttccctattgtcctgcattccaaactcagcagcagcagcagcaccacccaccccacaagccaccagctttccttcctgtccctccccaaagcagaggcttcccactgggagagttgttgaggggtcagaccatcgggttcacgaggccaggcttcctggcaaccactcccggagcaggggagtggattctgctccaccaaccctggctcacgctggcctgctcttgacggaagagaagacccttaaggaaaatggccgccgagcagaagctctgagggttggcgtgcattggcggcatggaacaagtcaggggcctggaaggacactgtgggcagaaaaggtgaagccccacttcaggacaaggggccaagtgtacgatgcttcctcagcacctgtgactgagcacacggctactgagctgcctgctggcaatcaagggagccagccagggctgcaggaggggggtctagaggggactgtggtcaccctggtgtcctggaaagtcactaggtttctaggcgatgctgatgcaggtacggccagaggccccataccacctaaaagttctcgggaaccaacggacccacccacactttggaaatgctggactaacgtctccctctgcctcaacgcttaacaccaaagggaaaacacacacctgtggttccccctcttctgattcatacctttcaaggcaccaccagatcccctccaaatatgcctgctctcacaccaaggcccagcaagtccctctcaacaaacccacccctatcagccctcagaggtcaccgctgactccaggtgggacaccaggtagacaaggccaaccaggaggaggccacgaacaccaagcatcatgagcaggaagaggaggcaggatggatcttcaccggctcccacaagcaatggttgccgaagatgccaactgcggaaagcccatgtttcaccagctgccggtttaaggtcattgaagggggaactgagcagcacccagccttggcaccttgcctgcttgctggcgggggccacggaccccctgggggagcaccatggcccctgttgaagaaagctctgtcgaggaatgctacctcttggtggctgggtagtggtcctcactcgggggtcgtctgtcctgcacgatttccccattggccaagatccgcaccatccttcccagggcgctgtgggtccctgatgggctgcacctgcattgtgtggtcagggtgggcaggctaatggaagccaagtggcacagaagttctccccaccacaaaacctttagctgttagtgatctgggaccagactcgtgaagatctgtggaggattttccccctgacctcaaaaagcttgaaggaaaaaatttaccagaaattgagggaggcttgcagtcagtgatgttcacagaggtgacccacgctgagtagatgctgtgtctgcaggcgcgactccgggcctcggcggcgtccactcccggcggctccaggcggtttcctcccacctgacctcacaggaagcgcg

SEQ ID NO: 2185 - DNA, 417 bp, Homo sapiens
  SIMILAR (1)..(198): 1001254mologous to Homo sapiens human p57,accession number D44497,Smith-Waterman Score=349.
atgagccggcaggtggtccgctccagcaagttccgccacgtgtttggacagccggccaaggccgaccagtgctatgaagatgtgcgcgtctcacagaccacctgggacagtggcttctgtgctgtcaaccctaagtttgtggccctgatctgtgaggccagcgggggaggggccttcctggtgctgcccctgggcaaggttatcaatactctgtctgaccatcatcatcgtgggactgactttggtggaagtccttggttacatgtcattattgcgtttccgacaagttataaagttgtcattaccctctggatagtttacctttgggaacaggcctttgagagcagccagaagtacaaagaggggaagtacatcattgaactcaaccacatgatcaaagacaacggctgggactga

SEQ ID NO: 2186 - DNA, 1777 bp, Homo sapiens
  SIMILAR (239)..(1651): 581254mologous to Homo sapiens human p57,accession number D44497,Smith-Waterman Score=1116.
gcggccgcagcgggggcccgggagcgcagggcgggcctggaagagctccgccccaaggggcgcggccaccccggaggcgggcgcacggctgcttctcattcattgtcttgacaagagcatcttcagcgggcgagtccccggctcctccagctccttcctcctcttcctcctcctcctccacctccggcttttgggggatcactgtcctctctcggcagcagaatgagccggcaggtgggtccgctccagcaagttccgccacgtgtttggacagccggccaaggccgaccaagtgctatgaagatgtgcgcgtctcacagaccaccttgggacagtggcttctggtgctggtcaacccttaagttttgtgggccctgatctgtgaggccagcgggggaggggccttcctggtgctgcccctgggcaagactggacgtgtggacaagaatgcgcccacggtgcggaggtgacacagccccctgtgctagacatcgcctggtgcccgcacaatgacaacgtcattgcccagtggctccgaggacttgcacagtcatggtgtgggagatcccagatgggggcctgatggctgcccctgcgggagcccgtcgtcaccctggagggccacaccaagcgtgtgggcattgtggcctggcacaccacagcccagaacgtgctgctcagtgcaggttgtgacaacgtgatcatggtgtgggacgtgggcccctggggcggccatgctgacactgggcccagaggggccccccagacgcgaactaccggggggactgggagcccgaatggaggcctcatttgtacctcctgccgtgacaagcgcgtgcgcatcatcgagccccgcaaaggcactgtcgtagctgagaaggaccgtccccacgaggggacccggcccgtgcgtgcagtgttcgtgtcggaggggaagatcctgaccacgggcttcagccgcatgagtgagcggcaggtggcgctgtgggacacaaagcacctggaagaaagccctgtcccctgaggaagttgcacaccagaaacggtgtccctgtggccttttttggcccttgacaccaacatcgtctaccttcgtggcaaagggtaccggcccaatccgggtctttgaggatcacttccgaaggcccctttcctgcactatctcttccatgttcagtttcaaaggagtcccagcgggggcatgggttacatggcccaaaccgtggcctggaggtgaacaagttgtgagatcgcagggttctacaaactgcacgacgggagggtgtaagcccaatgccaaagccagtgcctcgaaagtcggaccttgttccaggaaggacctgggacccacccaaccgcagggcccggacccttgccttcacggcttgaaggagtggctggggggtcgggatgctgggccccttccttcatctcccttcaaaggatggcttacgtacccccaaagagccgggagcttgagggtcaaccggggcctggacccccgggcgcaggaggagcagcaccagaggccagtggcactcccagctcggatgccgtgtctcggctggaggaggagatgcggaagctccaggccacggtgcaggagctccagaagcgcttggacaggctggaggagacagtccaggccaagctatgactccgcagggcctccaaccaggtcaaccaattacaaccaacccattcccttccctttcccacccacttgccggggaaaaaaatcttattaaattggctttattttttggtaaaaaaaaaa

SEQ ID NO: 2187 - DNA, 634 bp, Homo sapiens
  misc_feature (1)...(634): n = a,t,c or g
cattacaggagctctctctgttgttctgacattgtgttatgggttactttgggcatgcctgtgttttaagacttgttcacatgattatagaaggtctaatcataaaccccagaggaaattggcattgtggtcatggttattaacaagtgaggtcaggcttgccctgtgaatttgctgcaccaggcatgtggagctaacatctgcagagtggccaccgcctttttggcatcggttctgctgaaaagtcacatggcctcttggatttgacaatgttatgggctctgctcggattgtctggggatagaaacaaaatactcatagatcctcctgctttcccacggggacttaacggaacccttcgttttatggggctnggtatgcttttccctaaacaaataacgcctcaatctatttgagtggaaactaatgcgaaaaacgtttagggtggagatattgcgtcttttatgggatccacccatgcactgtttgaattccctgattcccaccactcagcgtaaacagctccttttttcatgaactgaaggttccaaaaagcagttggcaagtcgtcttttcctatgctgagaaaagggactgttgtgtttaaaaaatagaagtgaacaaagcaaaaaca

SEQ ID NO: 2188 - DNA, 469 bp, Homo sapiens
  SIMILAR (234)..(395): 981254mologous to Homo sapiens GlcNAc-1-P transferase,accession number AF070443,Smith-Waterman Score=271.
  misc_feature (1)...(469): n = a,t,c or g
agatggccngatcgagaccctagttggtgagccgtaattcctaggttgccttagagaggttccccggtgtcccgacggcggctcaagtcagagttgctgggttttgctcagattggtgtgggaagagcctgcctgtggggagcggccactccatactgctgaggcctcaggactgctgctcagcttgcccgttacctgaagaggcggcggagccgggcccctgaccggtcaccatgtgggccttctcggaattgcccatgccgctgctgatcaatttgatcgtctcgctgctgggatttgtggccacagtcaccctcatcccggccttccggggccacttcattgctgcgcgcctctgtggtcaggacctcaacaaaactagccgacagcagatgtggcagagagcctccagctggtgacagtacaccagagtgagactgaagatggtgaattcactgaatgtaacaac

SEQ ID NO: 2189 - DNA, 2523 bp, Homo sapiens
  SIMILAR (1222)..(2478): 971254mologous to Homo sapiens 150 kDa oxygen-regulated protein ORP150,accession number U65785,Smith-Waterman Score=2076.
atggcggcctacctgcagtggcggcgcttcgttttcttcgacaaggagctggtgaaggagccgctgagcaatgatggggccgctcccggggccacacctgcttctggatccgctgcttccaagttcctttgcctccctcctggcatcactgtctgcgactcaggccgagggagcctggtctttggagatatccttcgtttggagctgtcttttccctcccgggatcccgaagagatcgagaggctccttgactaccctgcacatatggaaggccagatctggttcttgccacgttccctacagcttacaggcttccaagcctacaaactacgggtgacacacctgtaccaactgaagcagcacaatattctggcatctgttggagaagatgaagagggcatcaaccccttggttaagatctggaacctggagaagagagatggtttcacagatggcagtgttacattgaacaaaggagacatcacccgggaccggcatagcaagacccagattttgcacaagggcaactatcctgtaactggattggcctttcgccaagcaggaaagaccactcacttgtttgttgtgacaacagagaacgtccagcacccagtccagagcaaaactactttctttcaccctctcccaaaatacccaaaacaaacgctactacaagcccctcctaacaccctcttactgagacattccgtggttcccaatggtgattgtcgggatgatcatgtcttttccctctacttcatgatacccttttttttcaccactttgggattgctctaccacaactggtacccatcacgggtgtttgtgggagataccttctgttactttgctggcatgacctttgccgtggtgggcatcttgggacacttcagcaagaccatgctactattcttcatgccccaggtgttcaacttcctctactcactgcctcagctcctgcatatcatcccctgccctcgccaccgcatacccagactcaatatcaagacaggcaaactggagatgagctattccaagttcaagaccaagagcctctctttcttgggcacctttattttaaaggtggcagagagcctccagctggtgacagtacaccagagtgagactgaagatggtgaattcactgaatgtaacaacatgaccctcatcaacttgctacttaaagtccttgggcccatacatgagagaaacctcacattgctcctgctgctgctgcaggtggagtctgtatttgagacactggtagaggacagcgcagaagaggaatctactctcaccaaacttggcaacaccatttccagcctgtttggaggcggtaccacaccagatgccaaggagaatggtactgatactgtccaggaggaagaggagagccctgcagaggggagcaaggacgagcctggggagcaggtggagctcaaggaggaagctgaggccccagtggaggatggctctcagcccccaccccctgaacctaagggagatgcaacccctgagggagaaaaggccacagaaaaagaaaatggggacaagtctgaggcccagaaaccaagtgagaaggcagaggcagggcctgagggcgtcgctccagccccagagggagagaagaagcagaagcccgccaggaagcggcgaatggtagaggagatcggggtggagctggttgttctggacctgcctgacttgccagaggataagctggctcagtcggtgcagaaacttcaggacttgacactccgagacctggagaagcaggaacgggaaaaagctgccaacagcttggaagcattcatatttgagacccaggacaagctgtaccagcccgagtaccaggaagtgtccacagaggagcagcgtgaggagatctctgggaagctcagcgccgcatccacctggctggaggatgagggtgttggagccaccacagtgatgttgaaggagaagctggctgagctgaggaagctgtgccaagggctgttttttcgggtagaggagcgcaagaagtggcccgaacggctgtctgccctcgataatctcctcaaccattccagcatgttcctcaagggggcccggctcatcccagagatggaccagatcttcactgaggtggagatgacaacgttagagaaagtcatcaatgagacctgggcctggaagaatgcaactctggccgagcaggctaagctgcccgccacagagaagcctgtgttgctctcaaaagacattgaagctaagatgatggccctggaccgagaggtgcagtatctgctcaataaggccaagtttaccaagccccggccccggcctaaggacaagaatgggacccgggcagagccacccctcaatgccagtgccagtgaccagggggagaaggtcatccctccagcaggccagactgaagatgcagagcccatttcagaacctgagaaagtagagactgaacctgaacagaaagaacaatcgacaggacagaagcggcctttgaagaacgacgaactataa

SEQ ID NO: 2190 - DNA, 1953 bp, Homo sapiens
  SIMILAR (787)..(1482): 991254mologous to Homo sapiens glucose 6-phosphate translocase,accession number Y15409,Smith-Waterman Score=1208.
atgaagaaggccagcagccaagagaaagactttagaatgccaagagggaaaaaagagccatcctatatagtttctggaaaagactaccctcgcgtggagttggacacccatggttgtggcctgcgctgctcagccctaagtgacccttctcaggacctgcagttcattgtggccggggatgagtgtgtctacttgtaccagcctgatgaacgtgggccctgcttcgcctttgagggccataagctcattgcccactggtttagaggctaccttatcattgtctcccgtgaccggaaggtttctcccaagtcagagtttaccagcagggattcacagagctccgacaagcagattctaaacatctatgacctgtgcaacaagttcatagcctatagcaccgtctttgaggatgtagtggatgtgcttgctgagtggggctccctgtacgtgctgacgcgggatgggcggatgctgtttaagaagaacctatttgagatggcgattaaccttgccaagagccagcatctggacagtgatgggctggcccagattttcatgcagtatggagaccatctctacagcaagggcaaccacgatggggctgtccagcaatatatccggacactgggtccccttggagcctccccaggcttaatgattgtccagaaggcggctataaagggagcctgggaggctgggtggaggagggagcagaaaaaacccaactcagcagatctgggaactgtgagagcggcaagcaggaactgtggtcagaggctgtgcgtcttggctgcccagggctatggctattatcgcactgtgatcttctcagccatgtttgggggctacagcctgtattacttcaatcgcaagaccttctcctttgtcatgccatcattggtggaagagatccctttggacaaggatgatttggggttcatcaccagcagccagtcggcagcttatgctatcagcaagtttgtcagtggggtgctgtctgaccagatgagtgctcgctggctcttctcttctgggctgctcctggttggcctggtcaacatattctttgcctggagctccacagtacctgtctttgctgccctctggttccttaatggcctggcccaggggctgggctggcccccatgtgggaaggtcctgcggaagtggtttgagccatctcagtttggcacttggtgggccatcctgtcaaccagcatgaacctggctggagggctgggccctatcctggcaaccatccttgcccagagctacagctggcgcagcacgctggccctatctggggcactgtgtgtggttgtctccttcctctgtctcctgctcatccacaatgaacctgctgatgttggactccgcaacctggaccccatgccctctgagggcaagaagggctccttgaaggaggagagcaccctgcaggagctgctgctgtccccttacctgtgggtgctctccactggtagctcctacatgagtgccctggaagttgggggccttgtaggcagcatcgcagctggctacctgtcagaccgggccatggcaaaggcgggactgtccaactacgggaaccctcgccatggcctgttgctgttcatgatggctggcatgacagtgtccatgtacctcttccgggtaacagtgaccagtgactcccccaagctctggatcctggtattgggagctgtatttggtttctcctcgtatggccccattgccctgtttggagtcatagccaacgagagtgcccctcccaacttgtgtggcacctcccacgccattgtgggactcatggccaaatgcaccattgccaagcactacagttggagcacagccttctgggtggctgaagtgatttgtgcggccagcacggctgccttcttcctcctacgaaacatccgcaccaagatgggccgagtgtcacaagaaggctga

SEQ ID NO: 2191 - DNA, 5823 bp, Homo sapiens
  SIMILAR (1)..(1710): 971254mologous to Homo sapiens 150 kDa oxygen-regulated protein ORP150,accession number U65785,Smith-Waterman Score=2799.
  misc_feature (1)...(5823): n = a,t,c or g
atggcagacaaagttaggaggcagaggccgaggaggcgagtctgttgggccttggtggctgtgctcttggcagacctgttggcactgagtgatacactggcagtgatgtctgtggacctgggcagtgagtccatgaaggtggccattgtcaaacctggagtgcccatggaaattgtcttgaataaggaatctcggaggaaaacaccggtgatcgtgaccctgaaagaaaatgaaagattctttggagacagtgcagcaagcatggcgattaagaatccaaaggctacgctacgttacttccagcacctcctggggaagcaggcagataacccccatgtagctctttaccaggcccgcttcccggagcacgagctgactttcgacccacagaggcagactgtgcactttcagatcagctcgcagctgcagttctcacctgaggaagtgttgggcatggttctcaattattctcgttctctagctgaagattttgcagagcagcccatcaaggatgcagtgatcaccgtgccagtcttcttcaaccaggccgagcgccgagctgtgctgcaggctgctcgtatggctggcctcaaagtgctgcagctcatcaatgacaacaccgccactgccctcagctatggtgtcttccgccggaaagatattaacaccactgcccagaatatcatgttctatgacatgggctcaggcagcaccgtatgcaccattgtgacctaccagatggtgaagactaaggaagctgggatgcagccacagctgcagatccggggagtaggatttgaccgtaccctggggggcctggagatggagctccggcttcgagaacgcctggctgggcttttcaatgagcagcgcaagggtcagagagcaaaggatgtgcgggagaacccgcgtgccatggccaagctgctgcgtgaggctaatcggctcaaaaccgtcctcagtgccaacgctgaccacatggcacagattgaaggcctgatggatgatgtggacttcaaggcaaaagtgactcgtgtggaatttgaggagttgtgtgcagacttgtttgagcgggtgcctgggcctgtacagcaggccctccagagtgccgaaatgagtctggatgagattgagcaggtgatcctggtgggtggggccactcgggtccccagagttcaggaggtgctgctgaaggccgtgggcaaggaggagctggggaagaacatcaatgcagatgaagcagcnnncatgggggcagtgtaccaggcagctgcgctcagcaaagcctttaaagtgaagccatttgtcgtccgagatgcagtggtctaccccatcctggtggagttcacgagggaggtggaggaggagcctgggattcacagcctgaagcacaataaacgggtactcttctctcggatggggccctaccctcaacgcaaagtcatcacctttaaccgctacagccatgatttcaacttccacatcaactacggcgacctgggcttcctggggcctgaagatcttcgggtatttggctcccagaatctgaccacagtgaagctaaaaggggtgggtgacagcttcaagaagtatcctgactacgagtccaagggcatcaaggctcacttcaacctggatgagagtggcgtgctcagtctagacaggattttccaaaagaccaagtgcagcatctgtaacagtgccttggagttgccctcagtccacttcctgtgtggccactccttccaccaacactgctttgagagttactcggaaagtgatgctgactgccccacctgcctccctgaaaaccggaaggtcatggatatgatccgggcccaggaacagaaacgagatctccatgatcaattccagcatcagctcaagtgctccaatgacagcttttctgtgattgctgactactttggcagagctgcctcacccattatcttcatgttcgtggaatctgtgacacaaagaacaacgtacagccaatcaaataccttacgctgtgttaatggatctgggcccccagagccgggagctgaccctcaaagtgctgaggagcagcagctgtggagacaaccactgtctcgaagacagttgtgcccactcaccccagggccagggaaagccctgggaccagcagccaccatggcagtggagnntgacagccacctttccaacggcttggaccctgtagcagagacagcgattcgccagctgacagagcccagtgggcgggtggccaagaagacacccaccaagcgcagcactctcatcatctctggtgtttccaaggtgcccattgctcaggacgagttggcgctatccctgggctatgcggcatccctggaagcctcagtgcaggatgatgcagggaccagcggaggcccctcttcacctccctcagacccaccagccatgtctccaggaccgctagatgccctctctagtcccacaagtgtccaggaagcagacgagacaacccgttcggatatttctgagaggccatctgtggatgatattgagtcggaaacggggtccactggtgccctggagacccgcagcctcaaggatcacaaagccaagaaatccaagctatttagcatggtggttccacgagtgtttgggcgcatggtgggtaaaagccgggaggcggtggctcaggccatggtgctggagatgtttcgagaggaggactactacaacgatgatgttctggaccagatgggcgccagtatcctgggcgtggagggcccccggcgccacccagatgagccccctgaggatgaacttggctgccccatcaagaacctggatgccctggagaatgcccaggccatcaagaagaagctgggcaagctgggccggcaggtgctgcccccatcagagctccttgaccacctcttcttccactatgagttccagaaccagcgcttctccgctgaggtgctcagctccctgcgtcagctcaacctggcaggtgtgcgcatgacaccagtcaagtgcacagtggtggcagctgtgctgggcagcggaaggcatgccctggatgaggtgaacttggcctcctgccagctagatcctgctgggctgcgcacactcctgcctgtcttcctgcgtgcccggaagctgggcttgcaactcaacagcctgggccctgaggcctgcaaggacctccgagacctgttgctgcatgaccagtgccaaattaccacactgcgggcccgcgccgcccggcagcccgcggggggcgaggacggcaaaggagagagcagcgcttgcggcgcgggggccggaggaggtgcaggggtgaactcaggactgggggttgatggcaaagggccgacttggaggcagctgtccaacaacccgctgacggcggcaggtgttgccgtgctaatggaggggctggcaggaaacacctcagtgacgcacctgtccctgctgcacacgggccttggggacgaaggcctggagctgctggctgcccagctggaccgcaaccggcagctgcaggagctgaacgtggcgtacaacggtgctgctctactgaatggcatcgactttctctctcctgccagcctctacttcaatgagctgagctcagagggccgccaggtcttgcgagacttggggggtgctgctgaaggtggtgcccgggtggtggtgtcactgacagaggggacggcggtgtcagaatactggtcagtgatcctcagtgaagtccagcggaacctcaatagctgggatcgggcccgggttcagcgacaccttgagctcctactgcgggatctggaagatagccggggtgccacccttaatccttggcgcaaggcccagctgctgcgagtggagggcgagagctccatccaaatcgcctttgaggaggtgccccaactcccacccagagccagcatcagtcatgtgacctgcgtagaccaatctgagcataccatggtgctgcgttgccagctctctgctgaggaggtgcggttcccagtctctgtgacccagcagtcccccgctgccgtctccatggagacctaccacgtcactctgacactgccaccaacacagagaggtgaagaacaagtggagctctccacaattgaggaactgatcaaggatgccatagtcagcacccagccagccatgatggtcaacctcagggcttgctctgccccaggaggcctggtacccagtgagaagccacccatgatgccccaggctcagccagccatccccagacctaaccggttattcctacggcagcttcgggcatctcacttgggaaatgagctggaaggcaccgaggaactgtgctgtgtagctgaactcgacaaccccatgcagcagaagtggaccaagcccgcgagggctggatccgaggtggagtggacagaagacctggcacttgctgggatcacaggcgtgagccacgacacccggcccactgatggagttataaagctctttaacccggatgcctgtgggcgccgggtgcagacagtggtgctgtatgggacagtgggcacaggcaagagcacgctggtgcgcaagatggttctggactggtgttatgggcggctgccggccttcgagctgctcatccccttctcctcctccctgtgccaacttgtggcccagcgctacacgcccctgaaggaggttctgcccctgatggctgctgctgggtcccacctcctctttgtgctccatggcttagagcatctcaacctcgacttccggctggcaggcacgggactttgtagtgacccggaggaaccgcaggaaccagctgctatcatcgtcaacctgctgcgcaaatacatgctgcctcaggccagcattctggtgaccactcggccctctgccattggccgtatccccagcaagtacgtgggccgctatggtgagatctgcggtttctctgataccaacctgcagaagctctacttccagctccgcctcaaccagccgtactgcgggtatgccgttggcggttcaggtgtctctgccacaccagctcagcgtgaccacctggtgcagatgctctcccggaacctggaggggcaccaccagatagccgctgcctgcttcctgccgtcctattgctggctcgtttgtgccaccttgcacttcctgcatgcccccacgcctgctgggcagacccttacaagcatctataccagcttcctgcgcctcaacttcagcggggaaaccctggacagcactgacccctccaatttgtccctgatggcctatgcagcccgaaccatgggcaagttggcctatgagggggtgtcctcccgcaagacctacttctctgaagaggatgtctgtggctgcctggaggctggcatcaggacggaggaggagtttcagctgctgcacatcttccgtcgggatgccctgaggtttttcctggccccatgtgtggagccagggcgtgcaggcaccttcgtgttcaccgtgcccgccatgcaggaatacctggctgccctctacattgtgctgggtttgcgcaagacgaccctgcaaaaggtgggcaaggaagtggctgagctcgtgggccgtgttggggaggacgtcagcctggtactgggcatcatggccaagctgctgcctctgcgggctctgcctctgctcttcaacctgatcaagcaccccaagccgcccacgcccccacatggttccctgttcaccccttgctcctctcccagcaggaaactgctgcttcctgcaaaggaggcaggcctatcctctgctttgcaggtccagaaactcgattgtgtctgctcctccagaggtgattag

SEQ ID NO: 2192 - DNA, 2427 bp, Homo sapiens
  SIMILAR (979)..(2100): 721254mologous to Homo sapiens vacuolar protein sorting protein 11,accession number AF308800,Smith-Waterman Score=1341.
atggtggcaatccactctgcactcgaatcttccctgctattccaggaacagagccaactgttgtatcttgttttgactgtccatgaaaatctcaactttatggccattggtttcacagatggcagtgttacattgaacaaaggagacatcacccgggaccggcatagcaagacccagattttgcacaagggcaactatcctgtaactggattggcctttcgccaagcaggaaagaccactcacttgtttgttgtgacaacagagaacgtccaggacctgcagttcattgtggccggggatgagtgtgtctacttgtaccagcctgatgaacgtgattgtcgggatgatcatgtcttttccctctacttcatgatacccttttttttcaccactttgggattgctctaccacaactggtacccatcacgggtgtttgtgggagataccttctgttactttgctggcatgacctttgccgtggtgggcatcttgggacacttcagcaagaccatgctactattcttcatgccccaggtgttcaacttcctctactcactgcctcagctcctgcatatcatcccctgccctcgccaccgcatacccagactcaatatcaagacaggcaaactggagatgagctattccaagttcaagaccaagagcctctctttcttgggcacctttattttaaaggtggcagagagcctccagctggtgacagtacaccagagtgagactgaagatggtgaattcactgaatgtaacaacatgaccctcatcaacttgctacttaaagtccttgggcccatacatgagagaaacctcacattgctcctgctgctgctgcagcattttcctttctctgtgatcattggcatcctgggcgtttcttgccctctgctgactactgattggattttacctatggctttctgcaacttgctactctctccctctccatcccatctttgcagcctcataggaaccattggaaagttggagccatcctacgtgatccgcaagtttctggatgcccagcgcattcacaacctgactgcctacctgcagaccctgcaccgacaatccctggccaatgccgaccataccaccctgctcctcaactgctataccaagctcaaggacagctcgaagctggaggagttcatcaagaaaaagagtgagagtgaagtccactttgatgtggagacagccatcaaggtcctccggcaggctggctactactcccatgccctgtatctggcggagaaccatgcacatcatgagtggtacctgaagatccagctagaagacattaagaattatcaggaagcccttcgatacatcggcaagctgccttttgagcaggcagagagcaacatgaagcgctacggcaagatcctcatgcaccacataccagagcagacaactcagttgctgaagggactttgtactgattatcggcccagcctcgaaggccgcagcgatagggaggccccaggctgcagggccaactctgaggagttcatccccatctttgccaataacccgcgagagctgaaagccttcctagagcacatgagtgaagtgcagccagactcaccccaggggatctacgacacactccttgagctgcgactgcagaactgggcccacgagaaggatccacaggtcaaagagaagcttcacgcagaggccatttccctgctgaagagtggtcgcttctgcgacgtctttgacaaggcctggttccagcagatcatgcactaccacatgcagcacgagcagtaccggcaggtcatcagcgtgtgtgagcgccatggggagcaggacccctccttgtgggagcaggccctcagctacttcgctcgcaaggaggaggactgcaaggagtatgtggcagctgtcctcaagcatatcgagaacaagaacctcatgccacctcttctagtggtgcagaccctggcccacaactccacagccacactctccgtcatcagggactacctggtccaaaaactacagaaacagagccagcagattgcacaggatgagctgcgggtgcggcggtaccgagaggagaccacccgtatccgccaggagatccaagagctcaaggccagtcctaagattttccaaaagaccaagtgcagcatctgtaacagtgccttggagttgccctcagtccacttcctgtgtggccactccttccaccaacactgctttgagagttactcggaaagtgatgctgactgccccacctgcctccctgaaaaccggaaggtcatggatatgatccgggcccaggaacagaaacgagatctccatgatcaattccagcatcagctcaagtgctccaatgacagcttttctgtgattgctgactactttggcagagcctcacctaatttcatcttctacgttgtttaa

SEQ ID NO: 2193 - DNA, 411 bp, Homo sapiens
  SIMILAR (1)..(192): 981254mologous to Homo sapiens hVPS11,accession number AB027508,Smith-Waterman Score=334.
atggcggcctacctgcagtggcggcgcttcgttttcttcgacaaggagctggtgaaggagccgctgagcaatgatggggccgctcccggggccacacctgcttctggatccgctgcttccaagttcctttgcctccctcctggcatcactgtctgcgactcaggccgagggagcctggtctttggagatatccttcgtttggagctgtcttttccctcccgggatcccgaagagatcgagaggctccttgactaccctgcacatatggaaggccagatctggttcttgccacgttccctacagcttacaggcttccaagcctacaaactacgggtgacacacctgtaccaactgaagcagcacaatattctggcatctgttggagaagatgaagagggcatcaaccccttg

SEQ ID NO: 2194 - DNA, 431 bp, Homo sapiens
  SIMILAR (103)..(2): 1001254mologous to Homo sapiens vacuolar protein sorting protein 11,accession number AF308800,Smith-Waterman Score=176.
agtcgtgcatctggcacaggaccagggccttgtcaaagacgtcgcagaagcgaccactcttcagcagggaaatggcctctgcgtgaagcttctctttgacctggagaggaaggagggcagagctgctggacaaaaggggaaaatcacaaggtctcttgggacaaagccagtcaactctttccctcagtccattccctcttcacagaggaccattgagccccgaggtaaggtgttactggtctaaggaatgcagtgaaaggcagccaccaagacggaagaatggagacggcacgaactgtcttttctcctgaagccctggccaggcctcacctgtggatccttctcgtgggcccagttctgcactcgcagctcaaggagtgtgtcgtagatcccctggggtgagtctggctgcacttcaccccacgcgtccg

SEQ ID NO: 2195 - DNA, 1179 bp, Homo sapiens
  SIMILAR (733)..(1155): 921254mologous to Homo sapiens hydroxymethylbilane synthase,accession number M95623,Smith-Waterman Score=627.
atggcctgggcagggtcggagcccaggcgggtccgccggctcggctcgactgcgagcgagggagagaaacaaggcgtgaaggaggggcctctcccggccgccgccgccgccgccgccgccgccgccgccgccgccgccggctatccgggcggagggaggagcggccgtggggaggggagtgggcggcgccgggagtgcgcgggacgcgccccttcagagcgcgcgagcccggggcgggcggggcgcgtcccggaggcggaccggcttactggtaagctcggggaagcggccggccgcggccggactgggcagcgacgatccccgggccaccggcttcgagcagctcgcgtgcccacagctcccggaaagccgcggccaggtttctgtgcccgtcttccccgcccctacgccggggcggggcggggccaggctggggcggggtcggcggaacctttgggcctgcgccctctgctggagaaacggggaaaggagcggcggggggttggggatcctaagattttccaaaagaccaagtgcagcatctgtaacagtgccttggagttgccctcagtccacttcctgtgtggccactccttccaccaacactgctttgagagttactcggaaagtgatgctgactgccccacctgcctccctgaaaaccggaaggtcatggatatgatccgggcccaggaacagaaacgagatctccatgatcaattccagcatcaggaagaaaacagcccaaagatgagagtgattcgcgtgggtacccgcaagagccagcttgctcgcatacagacggacagtgtggtggcaacattgaaagcctcgtaccctggcctgcagtttgaaatcattgctatgtccaccacaggggacaagattcttgatactgcactctctaagggattcactcaggctctttctgtccggcagattggagagaaaagcctgtttaccaaggagcttgaacatgccctggagaagaatgaagtggacctggttgttcactccttgaaggacctgcccactgtgcttcctcctggcttcaccatcggagccatctgcaagcgggaaaaccctcatgatgctgttgtctttcacccaaaatttgttgggaagaccctagaaaccctgccagagaagagggttggtccccctgggacaatttcctga

SEQ ID NO: 2196 - DNA, 975 bp, Homo sapiens
  SIMILAR (654)..(4): 951254mologous to Homo sapiens KINESIN-13A2,accession number AJ291579,Smith-Waterman Score=1043.
ttacttgttaatgttgctgccttctttcagtcgctctcctgcagctcctgttttagatactctttcgctacccgccaggtctaccaagctgaccttactgactttctccccggaattcccagactgcaggtcataaagtgtctgtgtgattatgatgttgaacacagcatgggagcggctgctttcttcgttcatgttggtagcagctaccgttcgagacttatttccctcagacatcaatgactcaatatcctcaaaactagtgacagctagttgagataaaccatctacatatggtcccaaaactttatgttctcgaactttaagagactgtctactccctttggggtctaaaagatcccgaactttctcattataaatttccatataggacacttcaactttaaaggtctgtgactcattttgctccaaagagatccttttaaataaagcacagcagagccttggaataaggcccagctgctcagcatggcccatcatggaaaaggattttcccgaacctgtctgtccatatgcaaaaatacacgcattatacccctgaaaggctttttcaagaattccttccccaaggcacttgaaaaccacttcttgaccagcccataaacgaaggttcgttaagtcccgtgggaagcaggaggatctatgagtatttgtttctatcccagacaatccgagcagagccataacattgtcaaatccaagaggcctgtgacttttcagcagaaccgatgccaaaaaggcggtggccactctgcagatgttagctccacatgccaatgctttcagtgctctcatagggagcagggcttcgctaaacctcagttttcttatctgtaaaatgggggcagtaatagtttctacctgactgggtgctttgacaatcttatcaccagcgtattttgtagtgttagattcatccatggaccaaaagcaataatcaaaggcaaataccat

SEQ ID NO: 2197 - DNA, 2037 bp, Homo sapiens
  SIMILAR (2007)..(1651): 851254mologous to Homo sapiens 150 kDa oxygen-regulated protein ORP150,accession number U65785,Smith-Waterman Score=497.
tcattcccccagcggaggttccaggttgggattcggagctgagctctgggcagccacaagttctgggtggaacctttggggctgctgggggtctgagattaggcatcccgttgccggggttactaggacaaaaggattctccagctggtactcctcaccggctggagcactgcagtggcggcgcttcgttttcttcgacaaggagctggtgaaggagccgctgagcaatgatggggccgctcccggggccacacctgcttctggatccgctgcttccaagttcctttgcctccctcctggcatcactgtctgcgactcaggccgagggagcctggtctttggagatatccttcgtttggagctgtcttttccctccccgggatcccgaagagatcgagttaggatgaaatctgtttgtcggaggggtccgtgccgcgcgcctctttggtttagctggtcatccagagttgttctgtggtctgtcagtgtctggtagcagtgcaatttgaatgtgtctgtctccagcatctcaatgcctgagcttccctgttcaggagacagctgggagccgatggcaaagagcgagtggaacatggaggccagcataagcttctcattagaagtgaggcggggccggccaaatcgaatggacaccgggtaattagcagggttacccagatactccagcacctctttcccgtcggccgtgtacctgccattcacgtccatgccattgatggccagcactgcatgacccagcagcagcttggccatggcacgcgggttctcccgcacatcctttgctctctgacccttgcgctgctcattgaaaagcccagccaggcgttctcgaagccggagctccatctccaggccccccagggtacggtcaaatcctactccccggatctgcagctgtggctgcatcccagcttccttagtcttcaccatctggtaggtcacaatggtgcatacggtgctgcctgagcccatgtcatagaacatgatattaaccttctgcatctgcttccccagaatagcattctcagggaggggcagaccttgggatgctaccggtccaaaaggcgctggggagcaagtagatagaggtggtcccatgctttgcgccattggttggggaaagatcaggcctgatgtcctaggatgtttttccatcagggggccttgggcgtggaagtgcgagccaaggaccaggacatcttggatctggtgggtgtgctgcacgatcccgagactctgcttcgctgcatcgctgaaagggccttcctgaggcacctggtagggcctgtgctccaccaaatcccacctccttccctcatacagcatgaagatggccctgaggatgacccacagttggtaggcatcactgctcgtaacattccacgagggccccagttggctgcccagaacttgggcatcagcctggccaacttgttgctgagcaaaggagccaaaaacatcctggatgttgcacggcagcttaacgatgcccattaacaaagcctcccggccagcggccgcgtctgaaagtcctgggctaagcaccacgccgggggggtaccagacaccccggctgcagctgccgagggcctcactcaccttcagggccgccggcctctcggcctggacagtctctactttctcaggttctgaaatgggctctgcatcttcagtctggcctgctggagggatgaccttctccccctggtcactggcactggcattgaggggtggctctgcccgggtcccattcttgtccttaggccggggccggggcttggtaaacttggccttattgagcagatactgcacctctcggtccagggccatcatcttagcttcaatgtcttttgagagcaacacaggcttctctgtggcgggcagcttagcctgctcggccagagttgcattcttccaggccttggccacatcagtgtcatagagcttcttctggtgcttgttggctttaacattcacagtgaacacaagtgcgttgttgtcttctgtcttcttcat

SEQ ID NO: 2198 - DNA, 3307 bp, Homo sapiens
  SIMILAR (226)..(2100): 901254mologous to Mus musculus putative,accession number AK004920,Smith-Waterman Score=2903.
atggatccgggctgggggcagcgggacgtgggctgggcggccttgctgatcctcttcgccgcctcgctgctcacggtgttcgcctggctgctgcaatatgcccggggcttgtggctggcgcgggcccgcggggaccggggcccgggacccgccttagccggggaacccgcgggttccctgcgggagctgggcgtgtggcgctcgctgctgcggctgcgggcgactcgggctggcgccgccgaggagccaggagtccggggcctcctggcgtcactcttcgccttcaactctttccgggagaactggcagcgggcttgggtgcgagcgctgaacgagcaggcctgcagaaacgggagctccatccaaatcgcctttgaggaggtgccccaactcccacccagagccagcatcagtcatgtgacctgcgtagaccaatctgagcataccatggtgctgcgttgccagctctctgctgaggaggtgcggttcccagtctctgtgacccagcagtcccccgctgccgtctccatggagacctaccacgtcactctgacactgccaccaacacagttggaagtcaacctggaggaaatccctggtgaggggctgctcatatcctgggccttcactgatcgcccagatctcagcctaacggtgcttcccaagcttcaggccagggagagaggtgaagaacaagtggagctctccacaattgaggaactgatcaaggatgccatagtcagcacccagccagccatgatggtcaacctcagggcttgctctgccccaggaggcctggtacccagtgagaagccacccatgatgccccaggctcagccagccatccccagacctaaccggttattcctacggcagcttcgggcatctcacttgggaaatgagctggaaggcaccgaggaactgtgctgtgtagctgaactcgacaaccccatgcagcagaagtggaccaagcccgcgagggctggatccgaggtggagtggacagaagacctggcactggatctgggcccccagagccgggagctgaccctcaaagtgctgaggagcagcagctgtggagacaccgaactcctaggccaggccacactgcctgtgggctccccctccagaccactgtctcgaagacagttgtgcccactcaccccagggccagggaaagccctgggaccagcagccaccatggcagtggagcttcactatgaggagggctctccccggaacctgggtactcccacctcctccactccacgccccagcatcacacctaccaagaagattgagcttgaccggaccatcatgcccgatggcaccattgtcaccacagtcaccactgtccagtcccggccccgtatagacggcaaattagactccccctcccgctccccgtccaaggtggaggtgaccgagaagacgacaactgtgctgagtgagagcagtggccccagcaatacctcccatagcagcagcccaggggacagccacctttccaacggcttggaccctgtagcagagacagcgattcgccagctgacagagcccagtgggcgggtggccaagaagacacccaccaagcgcagcactctcatcatctctggtgtttccaaggtgcccattgctcaggacgagttggcgctatccctgggctatgcggcatccctggaagcctcagtgcaggatgatgcagggaccagcggaggcccctcttcacctccctcagacccaccagccatgtctccaggaccgctagatgccctctctagtcccacaagtgtccaggaagcagacgagacaacccgttcggatatttctgagaggccatctgtggatgatattgagtcggaaacggggtccactggtgccctggagacccgcagcctcaaggatcacaaagtgagtttcctgcgcagcggcactaagctcatcttccgccggatgcctaggcataatgaatctggcctgagccaatcacacgatgacctctccaacgcaacggccacgcccagtgtccgaaagaaggccggcagcttttctcgccgccttatcaagcgcttttccttcaaatccaaacccaaggccaatgaggaacagtttttctaccagtatgacacgacaaccaaacacagtgaacttgtgattgcacaagaaacttttgttgatgggagaacagcgcctctccggagatggtctgaggtgggagaagagctgaagagacctggagccgacagacggtacccatcacgggtgtttgtgggagataccttctgttactttgctggcatgacctttgccgtggtgggcatcttgggacacttcagcaagaccatgctactattcttcatgccccaggtgttcaacttcctctactcactgcctcagctcctgcatatcatcccctgccctcgccaccgcatacccagactcaatatcaagacaggcaaactggagatgagctattccaagttcaagaccaagagcctctctttcttgggcacctttattttaaaggtggcagagagcctccagctggtgacagtacaccagagtgagactgaagatggtgaattcactgaatgtaacaacagtgaccctcatcaacttgctacttaaagtccttgggcccatacatgagagaaacctcacattgctcctgctgctgctgcagatcctgggcagtgccgtcaccttctccattcgatatcagctcgttcgactcttctatgatgtctgagtcccttgatacattgtcctttacctcacagtctctaggattcctgactcaggctgacctctctctctggtcccagactgcctcccttgcccaggcctctctcactcttcatacttcctccagattttgtttctcagcattttcctttctctgtgatcattggcaatcctgggcgtttcttgccctctactgactactgaatggatttaacctatggttttctggacctgggtactctctccctctccatcccatctttgcagcctcatagggtgggatacagcagctttttttgcagttatccacactcacatttcagagtcctgactctcaaggaaccactggtttttgggatagaacttgggccagggctaggaacacaggctccacggtgacatgtcatttgattgtaaattaagtgttctgattagtaagaactaagcagggggccacatgctctcaatggagacaataaagtgttgtctttttcttatgacaaagatttaaaggaccttaacaatagacattgcttaattacggggtgcaattgcgcgctgc

SEQ ID NO: 2199 - DNA, 3252 bp, Homo sapiens
  SIMILAR (154)..(1464): 981254mologous to Homo sapiens vacuolar protein sorting protein 11,accession number AF308800,Smith-Waterman Score=2255.
gaattcccgggtcgacgatttcgtggccaaaatggcggcctacctgcagtggcggctcttttttttcttcgacaaggagctggtgaaggagcccgctgagcaatgatggggccgctcccggggccacacctgcttctggatccgctgcttccaagttccttttgcctccctcctggcatcactgtctgcgactcatgccgagggagcctggtctttggagatatggaaggccagatctggttcttgccacgttccctacagcttacaggcttccaagcctacaaactacgggtgacacacctgtaccaactgaagcagcacaatattctggcatctgttggagaagatgaagagggcatcaaccccttggttaagatctggaacctggagaagagagatggtggcaatccactctgcactcgaatcttccctgctattccaggaacagagccaactgttgtatcttgtttgactgtccatgaaaatctcaactttatggccattggtttcacagatggcagtgttacattgaacaaaggagacatcacccgggaccggcatagcaagacccagattttgcacaagggcaactatcctgtaactggattggcctttcgccaagcaggaaagaccactcacttgtttgttgtgacaacagagaacgtccagtcctatatagtttctggaaaagactaccctcgcgtggagttggacacccatggttgtggcctgcgctgctcagccctaagtgacccttctcaggacctgcagttcattgtggccggggatgagtgtgtctacttgtaccagcctgatgaacgtgggccctgcttcgcctttgagggccataagctcattgcccactggtttagaggctaccttatcattgtctcccgtgaccggaaggtttctcccaagtcagagtttaccagcagggattcacagagctccgacaagcagattctaaacatctatgacctgtgcaacaagttcatagcctatagcaccgtctttgaggatgtagtggatgtgcttgctgagtggggctccctgtacgtgctgacgcgggatgggcgggtccacgcactgcaggagaaggacacacagaccaaactggagatgctgtttaagaagaacctatttgagatggcgattaaccttgccaagagccagcatctggacagtgatgggctggcccagattttcatgcagtatggagaccatctctacagcaagggcaaccacgatggggctgtccagcaatatatccgaaccattggaaagttggagccatcctacgtgatccgcaagtttctggatgcccagcgcattcacaacctgactgcctacctgcagaccctgcaccgacaatccctggccaatgccgaccataccaccctgctcctcaactgctataccaagctcaaggacagctcgaagctggaaggagttcatcaagaaaaagagtgagagtgaagtccactttgatgtggagacagccatcaaggtcctccggcaggctggctactacttcccatgccctggatctggcggagaaccatgcacatcatgagtggtacctgaagatccagctagaagacattaagaattatcaggaagcccttcgatacatcggcaagctgccttttgagcaggcagagagcaacatgaagcgctacggcaagatcctcatgcaccacataccagagcagacaactcagttgctgaagggactttgtacttgattatcggcccagcctcgaaggccgcagcgatagggaggccccaggcttgcagggccaactctgaggagtttcatccccatctttgccaataaaccccgcgagacctgaaagccttcctagagcacatgagtgaagtgcagccagactcaccccaggggatctacgacacactccttgagctgcgactgcagaactgggcccacgagaaggatccacaggtcaaagagaagcttcacgcagaggccatttccctgctgaagagtggtcgcttctgcgacgtctttgacaaggccctggacctgtgccagatgcacgacttccaggatggtggcctttacctttatgagcaggggaagctgttccagcagatcatgcactaccacatgcagcacgagcagtacccggcaggtcaatcagcgtgtgtgagcgccatggggagcaggacccctccttgttgggagcaggccctcagctacttcgctcgcaaggaaggaggactgcaaggagtatgtggcagctgtcctcaagcatatcgagaacgggaacctcatgccacctcttctagtggtgcagaccctggcccacaactccacagccacactctccgtcatcagggactacctggtccaaaaactacagaaacagagccagcagattgcacaggatgagctgcgggtgcggcggtaccgagaggagaccacccgtatccgccaggagatccaagagctcaaggccagtcctaagattttccaaaagaccaagtgcagcatctgtaacagtgccttggagttgccctcagtccacttcctgtgtggccactccttccaccaacactgctttgagagttactcggaaagtgatgctgactgccccacctgcctccctgaaaaccggaaggtcatggatatgatccgggcccagggaacagaaccgagattctccatgatcaattcccagcatcagcttcaggtgctccaatgaccaagcttttctgtgattgctgactaattttgggcagaggtgtttttcaacaaattgactctgctgaccgaccctccccacagcccagactgaccctccagcctggaggctgggctgcaaacgcgaccctactcatgcactcccccagaggggcatctaaagcaccccctggaggaagatgtggggcaaacagtggaggacccaagagaacagacacaatgggaccctgggcgggcgttacacaagaaggctgggctgacatcccccagggctccactctcatcctaatgtcacagccctcagaactaaagcgggactttctttccctgccttcttatttagtcagcttgccatccctcctcttcactagcagtgtagatcattccagatcagtgggggagggcacctcagcaacctctgagtgtggacaatagctgctttcttctctatccaagagccccaggcttgtgcttgggtccttgctctcagagtctttaaataaaagaatataatgatttgggaaaaa

SEQ ID NO: 2200 - DNA, 2145 bp, Homo sapiens
  SIMILAR (39)..(704): 441254mologous to Homo sapiens ribosomal protein L10,accession number L25899,Smith-Waterman Score=318.
  misc_feature (1)...(2145): n = a,t,c or g
catcaggtaagccaagatgggtgcatacaagtacatccaggaggctatggagaaagaagcagtctgatgtcatgcgctttcttctgagggtcccgctgctggcagtaccggcagcttctctgctctccacaggggctcccgcccccaccgggccctgataaagtgcaccgactgggctacaaacaaggccaagcaaggttacgttatatataggattcgtgttcgccgttatatataggattcatgttcgcgtgatcgacgaggaggccgaaaacgccccagtttctaagggtgcaactttcggcaagccttgtccatcatggtgttaaccaggctaaagtttggttctaccccttcacgtccgttgcagagggagcgacctggacgccacttgtggggctctgagagtcctgaattcttactgggttggtgaagattcccaccttccaaattttttgggggttatccctcatggatcccattcccataaagctatcaggaagaaatccctgaccaccccagtgggatcacccaaacccagtcccacaagcaccagggagatgcgtgggctgacatctgccaggcccgaaagagccgtcggcctctggaaagggccacaagttcccaccacactattgggtggctctcgccgggcagcttggagaaggcgcaatactctccaagctccaccgttaccgctaatataagtaaagtttgtaaaattcatactttaataaacaaatttaggacaggcatgtcttgcttacaggtgttatttggcttgttaaaactagtcttgcagatgtttctttgaatgctttgtcaaattaagaaagttaaagtgcgaataatgtttgaagacaataagtggtggtgtatcttggttctaataagaataaacttttttgtctttgctttatcttattagggagttgtatgtcagtgtataaaacatactgtgtggtataacaggcttaataaattctttaaaaggagagaactgaaactagtccctgtagatttgtctggtgcatgtgatgaaacctgcagctttatcggagtgatggcaatgctctgctggtttattttcaagtggctgcgtttttttttagtttggcaggtgtagactttttaagttggggctttaggaaaatctgggttagcctgaagaaaattgcctcagcctccacagtacccctttttaaattcacataaaaggtgaaagctcctggttcagtgccatggcttcatggcattcagtgattagtggtaatggtaaacactggtgtgttttgaagttgaaatgtgcgattaaaattattaggccttaaagattgggtaaagctagccaatggaatgcttaggggtgggaagctgggtggagccagtggcccattagataaatacctttcaagtgtgagcttagacggtcaaccccaaaataccttaacccgtaatgctaattgtgatcattatgaatcccctccagtccccattagggggggaagtaagttggctataagtaccgtcattccttaagtccagtcaagtccttaaaaacatcttggggttaccccattctgttcaactccccatagggttacagaaaaaagtccacaagcgccatggtttcccaacccatatgtgttttcctgcaagttatttctccttgttcctggcccaaacaacccctaaaaatcccttacccatttcccacaaagttggacccatccacttgtgcaccccactttgacctatgaagtatacccacccacattggcatttctggttgccacccatgtccttcccaggagaactagactactgttgtcccagggtcaatttgaagtgtaaaggaaaatgtagacaaggaattggcccaattttaaanttcctgactttgctgactttattttaaatgctcgttctgaacccaattttctcctatcttctctaggggtttcgaaaagactccagttaattgatttccaggaagtactcatagcaagttcataaaagttcttgagacctaaatttctttcacaaaaaaagaaaagatcttaaggtcatacattttaattgtgtagaggttgttcactggaagggaataaatggtctattaaactaaaaaaaaaaaaaaaaaaa

SEQ ID NO: 2201 - DNA, 513 bp, Homo sapiens
  SIMILAR (1)..(270): 971254mologous to Mus musculus putative,accession number AK013239,Smith-Waterman Score=447.
gacccgatgagcctgctatacaacatgaacgactgctactccaagctcaaggagctggtgcccagcatcccccagaacaagaaggtgagcaagatggaaatcctgcagcacgtcatcgactacatcttggacctgcagatcgccctggactcgcatcccactattgtcagcctgcatcaccagagacccgggcagaaccaggcgtccaggacgccgctgaccaccctcaacacggatatcagcatcctgtccttgcaggtaagacctgctccggggtccccgccccgccgccgcacactcccgcggtcgtctgggctgtcactaggagatccgtagcccagacggtgactttcgtatgagctatttaactttattttcttcagaatctgctgtagattgagctgtgcgtgaaattgctagtaagttctgacatgttaatgcgtctgtctttaaatctgaattgttaccataaacgtgtttaatggaacttgctggtctgtggactacaaaaaa

SEQ ID NO: 2202 - DNA, 1533 bp, Homo sapiens
  SIMILAR (526)..(876): 991254mologous to Mus musculus putative,accession number AK013239,Smith-Waterman Score=589.
atggcagtcggcaagactggctacaaccacagcacctgctctgacaaatacagaccatcctcctttatcaagtcctccctgttggataacgaaaaatccaacagatctttccagctgactctggggaaaggatgcagggagaagaaaagctccttccagggactgccatttttctgtgtgtacatgagcttccgagggacggtggtcacctccaagctgggctcgcgccccgcccaccccgcggggattggctgcgaacgcggaagaaccaagcccacgccccgcgcccgcgcccaccaatggaagcgcccgctcgtcttgatagacgtgccaccttccgccaatggggacgaagggaagctccagcgtgtggccccggcgagtgcggataaaagccgccccgccgggctcgggcttcattctgagccgagcccggtgccaagcgcagctagctcagcaggcggcagcggcggcctgagcttcagggcagccagctccctcccggtctcgccttccctcgcggtcagcatgaaagccttcagtcccgtgaggtccgttaggaaaaacagcctgtcggaccacagcctgggcatctcccggagcaaaacccctgtggacgacccgatgagcctgctatacaacatgaacgactgctactccaagctcaaggagctggtgcccagcatcccccagaacaagaaggtgagcaagatggaaatcctgcagcacgtcatcgactacatcttggacctgcagatcgccctggactcgcatcccactattgtcagcctgcatcaccagagacccgggcagaaccaggcgtccaggacgccgctgaccaccctcaacacggatatcagcatcctgtccttgcagcgcggggcggtcgtgtggttgatcatcatacccggaggaagccctgagggccgtaggggcgtcttccccgtcgcaggctacccgcggacctggcccccaggtccccgccacctgtcgccagccgcggccccggccgacctctgcgcggcggggagggaagcgcgctctggtcccaacccgacccccgcctcgcctccgggagaggcgcagacgccggccgcacgctcgccccccagccacggggacccgcgcgtagtccgctcggacggccctggggagcgtccccggacggaagcagtgcgggcgggactgtgggggcggcccgggccctttcgagcccctgccgggcaccgctggcgacgttggccccgggacccctggagccgcagccgaggcgcagcagcccctctcggaggcgacttcccgcggcgccagccgcgctgcccgactccggccgtggagcccgggcgccacctgctggccgacacgaggacggcggctctcgcgcggggcctggtgggcctggggcccgggcactgggaacccgaggagcaatccgtggggtggaggaggtcccgggagaaaacgccagggagtgaggacactgaggatgcctgggagaaggaacttgctggaggtccctgcgagggtgtctga

SEQ ID NO: 2203 - DNA, 1467 bp, Homo sapiens
  SIMILAR (147)..(551): 391254mologous to Homo sapiens Id-2,accession number M97796,Smith-Waterman Score=137.
attctgagccaagtccggtgccaagcgcagctagctcagcaggccgcaggcggtggcctgagcttcagggcagccagctccctcccggtctcgccttccctcgcggtcagcatgaaagccttcagtcccgtgaggtccattaggaaaaaccagccctgtcggaccacagcctgggcattctcccggagcaaaaacccctgtggaccgaccccgatggggccctgctatacaacatgaaggactgctactcccaagctcaaggagctgggtgcccagcattcccccagaacaaagaaggtgagcaagatgggaaatcctggcagcacgtcattcgacttacatcttgggaccttgcagattcgccctgggacttggcattcccacttattgttcagcctggcattcaccagaggacccggggcaggaaccaggcggtccaggacgccgcttggaccaccctcaacacgggatatcagcattctgtcctttgcagggcttcttgaatttccttctgagttaatgttcaaatgacagcaaaagcactgtgtggctgaataagcggtgttcatgatttcttttaattcttttgcacaacaacaacaacaacaaattcacggaatcttttaagtggctgaacttatttttcaaccatttcacaaggaggacaagttgaatgggacctttttaaaaagaaaaaaaaaatgggaaggaaaactaagaatgatcatcttccccaggggtgttctcttaccttggacctggtggatattccgttatttatgaaaaagactttttaaaatgcccttttctgcagtttggaaggttttcctttatatactattccccacccagggggagcgaaaaacgttaaaaatccacaaggaattgcccaatcctaagcagactttgcctttttttcaaaggtggagcgtgaataccagaaggatccagtattcagtcacttaaatggaagtcttttgggtcaggaaattacctttttggacacaagccctactggaatgctggtgtatatatttatatataaatatatcctatttggagtggaaaccttgtgaactcctttaaattagagttttcttgtatagtggcagagatgtctatttctgcattcaaaagtgtaatgatgtacttattccaggctaaactttttatacaagtttaaacttttagttgtaaacttaaccccttttaatacaaaataaatcaagtgtgtttattgaatgggtgattgcctgctttatttcagaggaccagtgctttgatttttattatgctatgttataactggaacccaaataaatacaagttccaaatttatgtaggactgtataagattataataaaacatgtctgaagtcaaaaataaaaaacattacccagtgtttggtggtgcacatctatagtcctagctacccccgaggctgagacgggaggatagctggagcc

SEQ ID NO: 2204 - DNA, 609 bp, Homo sapiens
  SIMILAR (9)..(248): 901254mologous to Mus musculus putative,accession number AK007802,Smith-Waterman Score=396.
ataacaacggaggcggaggcggctttggggttggtagtggaagcaattttggaggtggtggaagcaacaatgattttgggaattacaacaatcagtcttcaaattttggacccatgaagggaggaaattttggaggcagaagctctggcccctatggcggtggaggccaatactttgcaaaaccacgaaaccaaggtggctatggcggttccagcagcagcagtagctatggcagtggcagaagattttaattaggaaacaaagcttagcaggagaggagagccagagaagtgacagggaagctacaggttacaacagatttgtgaactcagccaagcacagtggtggcagggcctagctgctacaaagaagacatgttttagacaaatactcatgtgtatgggcaaaaaactcgaggactgtatttgtgactaattgtataacaggttattttagtttctgttctgtggaaagtgtaaagcattccaacaaagggttttaatgtagattttttttttttgcaccccatgctgttgattgctaaatgtaacagtctgatcgtgacgctgaataaatgtcttttttctaaggaaaaaaagaaaaaaaaaa

SEQ ID NO: 2205 - DNA, 1677 bp, Homo sapiens
  SIMILAR (1)..(771): 961254mologous to Mus musculus putative,accession number AK007802,Smith-Waterman Score=1344.
atgagagatccaaacaccaagcgctccaggggctttgggtttgtcacatatgccactgtggaggaggtggatgcagctatgaatacaacgccacacaaggtggatggaagagttgtggaaccaaagagagctgtctccagagaagattctcaaagaccaggtgcccacttaactgtgaaaaagatatttgttggtggcattaaagaagacactgaagaacatcacctaagagattattttgaacagtatggaaaaattgaagtaattgaaatcatgactgaccgaggcagtggcaagaaaaggggctttgcctttgtaacctttgacgaccatgactccgtggataagattgtcattcagaaataccatactgtgaagggccacaactgtgaagttagaaaagccctgccaaagcaagagatggctagtgcttcatccagccaaagaggtcgaaggggttctggaaactttggtggtggtcgtggagatggtttcggtgggaatgacaactttggtcgtggaggaaacttcagtggtcgtggtggctttggtggcagctgtggtggtggtggatatggtggcagtggggatggctataatggatttggtaatgatggaagcaattttggaggtggtggaagctacagtgattttggcaattacaacaatcagtcttcaaattttggacccatgaagggaggaaattttggaggcagaagctctggcccctatggcggtggaggccaatactttgcaaaaccacaaaaccaagcagcacgctgcgtggctgctcgctggctatttaggacggaagctcggttggtgtttctccagaagtttcccccttgggcggtggtggaggtggtaaccgtgatagtagcagctccggcggcagcaacagcgactacgagggatggcggcggctgcagcaggaactgcaacatcccagaggtttttccagagcttctcggatgccctaatcgacgaggacccccaggcggcgttagagagaagcagcagcaaacaaattcaaaatctaccagaagacaagaaataactaagaccatagcagaactgaaggagatagagacacgaaaaacgcttcaaaaaatcaatgaatccaggagctggttttatgaaaagatcaacaaagtagatagactgctagacagactcataaagaagaaaagagagaagagtcaaatagatgcaataaaaaatgatataggggatattgtcactgatcccgcagaaatacaaactaccatcaaagaatactataaacgtctctatgcaaatgaactagaaaatctagaagaaatggataaattcctggcaacatacagcctccacagtctaaaccaggaagaagtcgaatccctgaataaaccagtaaccagttctgaagttgaggcagtaactaatagcctaccaaccaaaaaaagtccaggaccagatggattcacagtattattggaagttctggccccggcaatcaggcaagagaaagaaataaagcatattccaataggaagagaggaagtaaaattgtctctgtttgcagatgacgtgattgtatatttagaaaaccccatcgtctcagcccaaaatctccttaagctgataagcaacttcagcaaactctcagggtacaaaatcaatgtgcaaaaatcataa

SEQ ID NO: 2206 - DNA, 791 bp, Homo sapiens
  SIMILAR (497)..(147): 561254mologous to Homo sapiens unnamed protein product,accession number AX088212,Smith-Waterman Score=287.
tggccaaaggctctgagatgagggaaggagaagctgtcacattctaaggcctgggctccaaaatcccagaacagcaattcctctgcttcatcttggtccaaccagtcacaggcccagcctagattcaaaggggaagacataagtcccatctcttgatgggcagagaggccttgagctagatacagagtgccgattggtgtatttacaatccttgagctagacataaaggttctccacggcctcaccagagcagctagatacagagtgtcgattggtgcactcacaaaccttgagctaaacacagggtcctgattggtgtgtttacaaaccttgggcggggctgcaggtggagctgcctgccagtcccgcgccgggcgctcgcattcctcagcccttgggtggttgatgggactgggtgctgtggagcagggggtggtgcttgtcggggaggctcgggccgcacaggagcccatggagtgggtgggaggctcaggcatggcgggctgcaggtcccgagccctgccccgtgggaaggcagctaaggcctgaagtttgcatcttcggtagatagcttgccattgcaggggcttaaaatggacttggtctattttgctattattacttgtgattggattacgaaattgttgtagtgtgttctccagctctatcaggtcagttatgttcttttctataatggctattttgcctgtcaactcttgcattgttgtattatgaatcttagctttggcttcctgagatggagtttcatcattctcctgaatgatcttcat

SEQ ID NO: 2207 - DNA, 648 bp, Homo sapiens
  SIMILAR (118)..(375): 701254mologous to Homo sapiens protein A1-alpha (AA 1- 320),accession number X06747,Smith-Waterman Score=323.
atgagcctcaggaagcttacaatcatggtagaaggcaaagggggacccaacatacctcatgcctgtggatgccgccaaagaagcagcattaaagtctctcttctccctgctgttacatctaagtcagagtctcctaaagaacccgaacagctgaggaagctcttcattggagggttgagctttgaaacaactgatgagagcctaaggagccattttgagcaaaggagaacgctcacggactgtgcggtaatgagagatccaaacacaaagtgctccaagggctttgggttcgtcacatatgccactatggaggagaaataccacactgtgaatggccacagctgtgaagctaggaaagccctgtcaaagcaagaggtggctagtgcttcctctagccaaagaggcgaagtggttctggaaactttggtggtggtcatggaggtggtttcggtggaaatgacaactttggtcatggagaaaacttcaggggtcatagtagctttggtggcagccacggtggtagtggttatggtggcagtggggatgactatagtggatttggtaatgatggaagcaattttggaggtggtggaagctacaatgattttggcaattacagcaatcagtcttcaaattttggacccatga

SEQ ID NO: 2208 - DNA, 3520 bp, Homo sapiens
  SIMILAR (2006)..(2092): 931254mologous to Mus musculus putative,accession number AK007802,Smith-Waterman Score=156.
atgtctaagtcagaggtgagttaggcgcgctttcccacttgaattttttcctctccctttcctgaatcggtaagatgctgctgggtttcgttccttgcaccagcccattctacagttccttcggtcgctgccacggcctacccctcccaaagttcaagtcgccattttgtcctcttgatcgccatgaggccgctctccgccaaccatgtgttatcatgcgggactcgttactcgtagcaaaattcttaggcacacaggatctttgtctttttttaaaccttgccttggtgagcgagttttctaaagagcgattagtcccattgtggagatgcacccctaccgcccaagcctttgttgcgcgtgcgtcggaaggcgactagggacgcatgcgcttgcgatttcctagcactcccaactccagcatacggcctcccttgataggcagaagcacgtgtcttgttgcgacctgaacgaacaataagtgctaggtacacagttggtgtctagtttttcttttcctcgatggaaattgtttcgtgttgtagcccatttaacacttccccctccccccactctagtctcctaaagagcccgaacagctgaggaagctcttcattggagggttgagctttgaaacaactgatgagagcctgaggagccattttgagcaatggggaacgctcacggactgtgtggtaagatttggaagggacaaagcagtaaaacagccgatttccttggcttatcttggtgcagtcttctccgaatgcttatgaaagtagttaatagcattatagttagagctttgttggcaaaggaacgtcctgctttgattttaaaagctaacctcttaaatctaagggtagtgggaaactggacgaactttttataaaaggctggtgtaaagtttcctattgccctattcaaagttaaaataacaaaagcttttgcggtcagactttgtgttacataaattaacactgttctcaggtaatgagagatccaaacaccaagcgctctaggggctttgggtttgtcacatatgccactgtggaggaggtggatgcagctatgaatgcaaggccacacaaggtggatggaagagttgtggaaccaaagagagctgtctccagagaagtgagtgggttttttttcttcttcttcttaaacttacttggatatgtgctgctatgaacttaagattcgggagttttctaaacttaccaaaattttttattcgagtataggctttgctaatctaaacctatggtttttctcctattaggattctcaaagaccaggtgcccagcttaactgttgaaaaagatatatgttggtggcattaaagaagacactgaagaacatcacctcaagagattattttgaacagtatgggaaaattggaagtggttgaaatccattgactggaccggaggccagtggccaagaaaaaggggctttgcctttgtaacctttgacgaccatgactccgtggataagattgtcagtaagtatcagatagtggcatttagtaagggttccacaatctgtatggcattctaaaccctgataccatgttgtatctatgttttttttttagttcagaaataccatactgtgaatggccacaactgtgaagttagaaaagccctgtcaaagcaagagatggctagtgcttcatccagccaaagaggtatgcttgttgcttaattaaaccttaaaggtaactttgagttactccagtatgaatgatttaatgcttaaacttcatgtcttaaggtcgaagtggttctggaaactttggtggtggtcgtggaggtggtttcggtgggaatgacaacttcggtcgtggaggaaacttcagtggtcgtggtatgtatggtttatctacatgtagttctgacttctcaccatctttgctatgaagattttacagtacgggaactgcattcagaatgtcactttaagtccaagtcatacttaaaacttgaaactttttcttacaggtggctttggtggcagccgtggtggtggtggatatggtggcagtggggatggctataatggatttggcaatgatggtaagttttttaggaataagtagagaaaaattcctggcaacctggatctttagaataggttagtagagactaaaattctggtgcatgtcaaactcaactttgcccataacacgcatgctgtgagcaggccttcagccgttacacttgcacaagttttcattgtcaaatacttttgtcttattgagaagaattgtattcttgtaggtggttatggaggaggcggccctggttactctggaggaagcagaggctatggaagtggtggacagggttatggaaaccagggcagtggctatggcgggagtggcagctatgacagctataacaacggaggcggaggcggctttggcggtggtagtggtaggtatccagtgatccaagtacttggtgtgacagctagattagccttttagagcttgggttctggtgctgttgaagcattgtgtggtacactgcatggtatattaaaaacaaatgggcttgctatgctacctcctcctagctttaagctggggccgcctcactcccaaatagtagagataagtggatagtgttgtctttgagttagattagtatcatagaaggatttagtattttaactcctttgggaccttaggcgcttagttgatgtatccaagatacttctgcttgctgtggccctggatccgtgaaggccttcaaggctgaagggtatgcttgtgccactctgaaaatctctttattttatgtcatggtgagttaggccagttttctttgtattactggattattcaactgaatgcctttcccagagaatgaaatgcaaagattggagtcaccatagtttgggagaaaggaaggctgataactcaaccttattttattctgactgctaaacagaattggaaactaacatcatcctcaggtaacagataaaggccctctttcccattcataggaagcaattttggaggtggtggaagctacaatgattttgggaattacaacaatcagtcttcaaattttggacccatgaagggaggaaattttggaggcagaagctctggcccctatggcggtggaggccaatactttgcaaaaccacgaaaccaaggtatggtatctatgtaattttggataatgtcaaaagagtgtctgtagctactgctgggaagaaagccctttaactgctatgtctgggcagcaaaacgtttatagtttagaaccttcagaaagtgataatttgatcacaaattagaaaaatcatgggacctctttaccacctcccttgtagtagggccatttttaaatggccagacacttgaatttaacttttattatcccaaatatgaaaacattactgttggcactttgaaactttaaaagaaaaattgtacttttcaggtggctatggcggttccagcagcagcagtagctatggcagtggcagaagattttaa

SEQ ID NO: 2209 - DNA, 356 bp, Homo sapiens
  misc_feature (1)...(356): n = a,t,c or g
ctgcttttccaatcaggagcttggttctaaccttttgggagatgattaannnnnnnnnnnnnnnnnnnnnnnnnnnnnnnnnnnnnnnnnnnnnnnnnnntgtttcgccctcagctttcgctcccannnnnnnnnnaaaatctctgggctaatatcttctactctttatagaatatttcaaagaaatatatttgttcttaaagatacataggttagagatattgagcgctacacgcatttattttggttttaccttaacatattatgatccctcagttttgggggcatttagtatttatgtttatgtttttatcttatcaaaaagtgtcttcttacctttgatatttatactcacc

SEQ ID NO: 2210 - DNA, 3255 bp, Homo sapiens
  SIMILAR (2080)..(1760): 221254mologous to Cricetulus griseus sterol regulatory element binding protein-2,accession number U12330,Smith-Waterman Score=47.
tcaggaggcggcaatggcagtgccaccacccagcttaacaatcatctgctggcagtcgttgcaggagcgccggtcgcccaccttctccagggtgcgggcagcttcggccagcagcactgcccgctggcccggggaggagaggaaggagaggggcaggtggcggcaggccagcaggatggcggtggcccgctctcgctggccgggccaggcatccacctctccgtgcttggtgctctgcgtggtgcgccgccgcaggctgtgttccagcagctggtgggtgcgggtggggctggctcctgccatcaggcgcacggtggcttcatgcaggaacaccagagtgggctccaggaggcaggggtgccgctccaggcctggggtacatgccctcttctccacagtaaggaatggctctccgatgatactgtctgttgtgtctgtcttggcttgcttgcggtatgctgggcggaagctgtgtgccagcctgcgcaggctgcccaggtcccgttggaagcccgccagttcagcgcctgacgcgtggtaggtctcccccacagcctggctggcactggcctgtttttgccagagcgctgtccgtagcgacagtagcaggtcacaggtgagcagctggaccaccaggcctctccccagaccaacactcagcagctctgggaggaagtggagagccccagagtctggtgaactccgcaggacgtgagggaacagctcaggggagaaccagttccttccatggccccaggaggtgggagacaagccctccccattgtggttgagggcagggtcagaggtggccccactgacgttgaggctgctccataggtggccactggccctctcgcaatggcagaaggaactctgctgcccatctgctttcccagggagtgaggcatgcatggctctgcaggcatggaagatggccttcaccagggggctctctgtcacttccagggccttggggatgcgttccactttggtaaaatgagagcgcacagctgcatcgtctccctggagccagctgatggccacagtgattgcagacgtccaccaccgacagatgatgtctggacccagggcggacttgagcacggagctcctggagagtggggggctcataacccccacagagtccacaaaagaatgaagtaatttcaagtactccagagcactggagaattcacagctctcttcttcctggtctccagccttcttcttggcctgaggtttcaccaaggactctatagctcgctccagcaggttcttgcagaaggcctggtggacctgcgcaatggggtcagctgggttcctctgggcacagtatagactctccttggcagctgacttcacagaccagctccgctccatgaaaaacttctggcccagggggtggcagagccagcgcagggagtcaggaacagcactgtgctcggggccacacaggctctgggctcggctgaggaagtagctggccaggaagcccagcttgcctccacaccgggtcttgagccccatggcagcagtcagatggatctcaaccagtgtgctcggtgggatcttctcctctgcacattcagccaggttcacggcacacaacgccatgtgtacatcggaacaggcggatcctgcaggaagcttccctgtgatgtgcagctggtgcagccggtgataggccagagccgcatcccgggcgctggtcttagcttcgtcttcaaagcctgcctcagtggctggcgtggcccgccggcactggaagactttcttgagcagccagcgcaccaggcgtagcttctgcaggctgtagcggatcacgttccaggagaggctgcaggccaggtccaggcgggaggtgggcagtgcccggcccaaaactgccaggcaggtttgtaggttgccggcagcagctgcaaaatctcctctggcgagatccagatctgcctgtttccggtgcctccagaaggtgaccgaggagcgcgagtgtggccggatcactggctccccatgaaccagcagcttcacaaagacgctcaggacaatcacaccatttaccagccataagagaagagtaggcatcatccagtcaaaccagcccccagaacctgactcgaatgacaggacactgcggccagagcctgagtgtgggtgctggtcagagtcgtgggcccctccccactttgcatcatccaatagagggcttcctggctcagagtcaatggagtagggagagaagccagcctgggaccctgagtcagaggctgggggggacatcagaaggacattctgattaaagtcctcgatcttcaggtccacctcattgtccaccagactgcctaggtcgatgccctttagaagcttgttcttttgatttgccagcttcagcaccatgttctcctggcgcagtttatgattgacctgctgcaagtatttgatgtaatcaatggccttcctcagaacgccagacttgtgcatcttggcgtctgtccccatgaccaggtctttcaattcgatgattttgtcattgatggaggagcgatatcgtttctcaatgatattatgggttgtccgcctttctccttctttggggggctcaagctgcttgactcccccaggtacctgcttaatgggcactttctcttgccccatcattacaggcattgtggtcagaatggtcccactgctgcccaccagggttggtacttgaagggcagccgtctggataggggtggtgagggcggtgagggccgggttctggaccgcagccataacagggctgccatctgtcttcagtgtggtcaaaacaagggaatctgtcttgatgatctgaggctggaccaggaccgggacctgctgcacctgtggcgcagcaactgtctgcaccgtagccggggcaagggtctgcagcgtgccattggccgtttgtgtcagcacccgctgggcctgtactgtctgcacctgctgctgaatggtgaccggctgtacctgggtgaatgaccgttgcactgaagggtccacagctccgctgctgctgcccctgccattgctgctgctgctgctgctgccactgctgccgctgctgctaccactaccaccactgccaggaaaggagctacacagctgttctgaaaacaagtcagggaactctcccacttgattactgacaaattgcagcatctcttgtgatccacctgcctcggcctcccaaagtgctgggattacaggcgtgagccacagcgcccggcccat

SEQ ID NO: 2211 - DNA, 336 bp, Homo sapiens
tcatgtcttaatctccagttcagctctgattttgattatttcttgtcttctgctagctttggagttggtctgctgttgtttatctaggtcctctaggaacaccttcagcagatgcacatactcaggactctcaaaaacccctccacactgggctgcccgggctcgtctggatgatgtcttctctctccgtaccttctcatcccattccttgaacatggagcttgtccaagatttaactgcctcagctcccatgtattcttccacctctcgtgatccgcccgcctcggcctcccaaagtgctgggattacaagcgtgagccaccgcgcccggcccat

SEQ ID NO: 2212 - DNA, 744 bp, Homo sapiens
  SIMILAR (558)..(334): 901254mologous to Homo sapiens glucose transporter-like protein,accession number M20681,Smith-Waterman Score=359.
tcaacaagatggtgaattgactagtgggtagatccacaggacgggtgtggtcgccatgatcgcgtagtcgatagtggctccaagtagcgaagcgagcaggactgggcggcggccaaagcggtcggacagtgctccgagaacgggtgcgcatagaaattgcatcaacgcatatagcgctagcagcacgccatagtgactggcgatgctgtcggaatggacgatatcccgcaagaggcccggcagtaccggcataaccaagcctatgcctacagcatccagggtgacggtgccgaggatgacgatgagcgcattgttagatttcatacacggtgcagcagcagaggggaagagcaatccgactaggaagttggaggtccagttggagcagccggccactgccatcgcagctgggcgggggccctggctgaagagttcggccacaataaaccagggaatggggcctggtccaatttcaaaacaggccacaaagaccaagatagccccaatacagacaaagctcatcccattatagtgattagaaagtaaagtgaagatagtattaaccacacccgcgctgatggtggcatagatgggctgttgaacacctgcatccttgaagattcctgttgagtaatagaacaccttgttagccaagatggtctcgatttcctgacctcgtgatctgcccgcctcggcctcccaaagtgctgggattacaggcgtgagccaccgcgcccggtgcat

SEQ ID NO: 2213 - DNA, 483 bp, Homo sapiens
  SIMILAR (421)..(326): 871254mologous to Homo sapiens Human secreted protein, SEQ ID NO: 4473,accession number AAG00392,Smith-Waterman Score=147.
tcatgagagactgtcatttgggatattcacaaaactgttccactcagcagcaacgttgagaagccagacaacatcgcctgtgttcagcacgtccatcgccactgcggccaagccgatggaaaccagctggaaagttgtcagccattttaaacactcagctagagtcactgtcgtgctaccaactgtgaccgtccctgagcagcctaactggaaggcattctcccagtaggggcagactgacacttcacacggccgggtactcctctgagacaaaacttccagaggaacgatcagacagcagcattcacggttcacgaaaatccgctgttctgcagccactgctgcggatacccaggcaaacagggtctggagtggacctctagcaaactccaacagacctgcagctgagggtcctcgtgatccgcccgcctcggcctcccaaagtgctgggattacaggcgtgagccaccgcgcctggcccat

SEQ ID NO: 2214 - DNA, 1514 bp, Homo sapiens
  SIMILAR (19)..(351): 501254mologous to Homo sapiens Human myelin oligodendrocyte glycoprotein gene,accession number AAZ29204,Smith-Waterman Score= 243.
  misc_feature (1)...(1514): n = a,t,c or g
gaaatatcctcccccagctgtgctttggttttttggtttttttgttttgagacggagtcttgctctgtcgcccaggctggagtgcagtggcatgatctcggctcactgcaagctctgcctcccgggttcacgccattctcctgcctcagcctcccgagtagctgggactacggacgtccaccaccatgcccagctaattttttgtatttttagtagagacggggtttcaccgtgttagccaggatggtctcaatctcctgacccgcctccacctcccaaagtgctgggattacaggcatgagccaccacacccggcctctgctttgttttttaaaaaaaaagaaatgcaagagagggagggaggcagcctcctgaccataaaagctgatttcttgatttttttttcttttttttttgaaatggagtcttgctctgtctccaaggctggagtgcagtggcatggtctcagctcactgcaagctccgcctcgcgggttcacgccattctcctgcctcagcctcccgagtagctgggactacaggcgcccgctaccacgcccggctaatttttttgtatttttatagtagagacgggggtttcaccgtgttagccaggatggtcttgatctcctgaccacgtgatctgcccgcctcggcctcccaaagggctggggattacaggcttgagccactgcgcctggtcagaattttttttttttttaagacagggtctcactctgtcacccacgctagagtgcaacgacataattatagatagctcactggaggcttgaactcctgggctcaattgatcctcccgcctcagcctcccaagtagctgggactataggagcacaccaccaagcccagctaattttttgtagttttagtagagacggggtttcaccgtgttagccaggatggtctcgatcttctgaccttgtgatccgcccgcctcggcctcccaaagtgccgggattacaggcgtgagccaccgcgcccggccgactggagtgtttttaatcttatgcaaatattaatgacacttggggggaatatagcttcctgagttaaatgctgcactttgctacagaagagggcaggtaaggtcacagactttaaaacagtaaaatataaagcaaactatttacatgcccgaggagtggttataaatatcaaaggtaagaagaccttttttgataagataaaaacataaacataatttttaaatgcccccaaaactgaggaatcataatatgttaaggtaaaaccaaaataaatgcgtgtagcgctcaatatctcaaacctatgtatctttaagaacaaatatatttctttgaaatattctataaagattagaagttattagcccagagttcttnnnnnnnnnntggaagcaaaagctgagggcgaaacannnnnnnnnnnnnnnnnnnnnnnnnnnnnnnnnnnnnnaacctctctttttaatcatctcccaaaaggttagaaccaagctcctgattggaaaagcag

SEQ ID NO: 2215 - DNA, 1256 bp, Homo sapiens
  SIMILAR (364)..(669): 411254mologous to Homo sapiens Secreted protein 76-28-3-A12- FL1,accession number AAY59709,Smith-Waterman Score=143.
cagagattccccgccgcgttccctggactcaggagctcgccgcgatgccccgccccactctccacccgctgaatgcagggcgcatgctgctacttggcggctcaagccccgcccgcaccgtccccattctctgaccgcccctctcccggtacactgggcaggcacaacagagccgctcccctctcctcgccccgccaccgggactagagagcgcccgccgctgcattttccggcgacacctcgcagtcattcctgcggcttgcgcgcccttgtagacagccggggccttcgtgagaccgcttgttttctgcaggtgcaggccctggggtagtctcctgtctggacagagaagagaaaaatgcaggacactggctcagtagtgcctttgcattggtttggctttggctaacggagcactggttgcttctggtgggattcattgggtatgtaaaagcaggcagcgtgccgtaccctggctgcagggcttgcttcttttgggcagttttagccggcctggggtgcttaccagctgtctcagggattccaagggaacgtttttgggtttttcctaggttacatctggtaccttggctggcattatgggaatgaaggttctaccactcttggaaaattcaatgcctgcaagttttaattgcaaggtgccagttttgctggatgggtcgcccaaagttggagttagtatgtttcaacagacccccatttagcagaagttcatgtttccagcttaagactggatggaagaattaaaaaatctgccatcttcccactattttccaatatatttaagagaaataaagtgcagccatttttggccatcctgaacattttacccctaaaaaagaaaagacccccaaacctggccagagaggtgggaaaatccagtccatgaattaacaaaccctacagaggtggcgaagtatgtaaacacaagaagcttaaataagacccctccataagagcttggattcttgtatattgatggttgtccttttcctttctgtatcctgtaggtaaatcctcaagggtaaaatgttaggtgtcagctttcagggctctgaaaccctattccctgctctgaggaacagtgtgaaaaaaagtcttttaggagattttacaatatctgttcttttgctcatcttagaccacagactgactttgaaattatgttaagtgaaatatcaatggaaaataaagtttactataaataataaaaaaaaaaaaaaagggcggccgct

SEQ ID NO: 2216 - DNA, 453 bp, Homo sapiens
  SIMILAR (155)..(451): 1001254mologous to Mus musculus putative,accession number AK010201,Smith-Waterman Score=523.
aattcccaaccgacccacgcgtccggagcgacaagccgctggcagccgcggatctcaccgccgctcatgccttatgccagcctggaccatcttggaggcagtgtaagatcatggaagaactttgaattaggtttttagaacttcagccataaaaatgggcagaattttccttgatcatatcggtggtacccgtctgttttcttgtgcaaactgtgatacgatcctgaccaaccgctcagaactcatctccactcgtttcacaggcgccactggcagagcatttctttttaacaaggtagttaacctgcagtacagcgaagttcaagatcgggtcatgctcactggccgccacatggttcgagatgtgagctgcaaaaactgcaatagcaaactgggatggatctatgagtttgccactgaagacagccagcgatataaggaaggccgcgtgat

SEQ ID NO: 2217 - DNA, 635 bp, Homo sapiens
  SIMILAR (564)..(187): 371254mologous to Bos taurus N-WASP,accession number D67066,Smith-Waterman Score=155.
tgcgaccgccacccccttccccgctgccagcactcaccctctctccgctcctgctcgcaacctcgcggttcctggggtgcttgtgcccactgtgtggacagcgcgggcggacttttgggccggggcgtggcgtgcgggggaggctctctaaggcctccgcctctgcctctcccgcccccttacccgccccggagacgacagcgtcggaggctccgccatggcctcgggagccggaggagtcggagggggcgggggggggcaagatccggaacgcggcgttgccaccaggggccaattaagccttaccagcaggggcgacaacagcatcaggtatgggaccccgacgccgcggtggcctggcgggtggggaaactcggctggaggggacgggcggttcgaggccccggcgccccacgtggagcagacaggagggcctgaggaaaggcccgagtgaggctccgggggagctcaggccgttgggggtggcgacgggaagtgggctgagacaggcccagccttgcggcgcacacgtgtggtttgggccgcctttcccccaactctctgggtcaggggctttcccaggcaggctctggacgggaaaagaaattgtaggcccatgatgcgcgccggcattc

SEQ ID NO: 2218 - DNA, 2596 bp, Homo sapiens
  SIMILAR (464)..(706): 771254mologous to Mus musculus putative,accession number AK010201,Smith-Waterman Score=293.
  misc_feature (1)...(2596): n = a,t,c or g
gagactcgggtggccgaggggcttcataccagctgaagatcgacaagccgctggcagccgcggatgtcaccggcgctcaggagatctgttggtaatctgaggatttttattctacgtcgtcttgacagatggcatacctgaagtaacttcgggctaaccttgtgtttttggaaaattagtagacttggtggtgaagaaactgggaggagtaggatattagctaactttgcatatccacatatagagcgtcgcagctgcattccaccagagaggaaccaataggcctgtggtgctcccagggtacatattcatgccagaagtgaagtgccttggtgaattcgtttcctgaaagtttatcgcatacttgtactgggttaggtttttagaacttcagccatataaatgggcagaattttccttgatcatatcggtggtacccgtctgttttcttgtgcaaactcgtgatacgatcctgaccaaccgctcagaactcatctccactcgtttcacaggcgccactggcagagcatttctttttaacaaggtagttaacctgcagtacagcgaagttcaagatcgggtcatgctcactggccgccacatggttcgagatgtgagctggcaaaaactgcaattagcaaacttgggatggatctatggagtttggccactgaaggacagccagcgattttaagggaagggccggcgttgatccggggaacgttgttttagtttcggaggaggagttgagggctttggaggagcatggtaccacctgataactcttgaagatacagagagaaatccatcttttccccaggtctcctttcactgaaaacaaaaatctaccttacatacactgtcaccttagcatcagagtccggattaatgaacctgcggaacaagaggtttgtgaagaatcttaagatggaaccctttctttcctntcctgtcctttttntttttaaaattttgtatttttccatcccaaccagcagtgtgtaggagagaatattatgcaggatgcccgttaattttttaccctatgttttacatcttgagggcaggcaggagtctgtctggcaggctatgtgggtggaggctatggtaagggggaaaaaaatctgggcctgttagagtgaaaaaagtgtgttttatgtccaattgtgaaaggaaaatgttaggaagtatgggtttttaaaccttgggccttcattttaaaacttttttttttaaaccccagttatttcacttggatttgccaagcttcccgagaaagagatcccgaatctgtgcccagcgctaaaggctctttgttagcaagggcttgtgctggccggtgtgccatattcttgttggagatgaaccgtagcaccagagcccattcttccttgtcagtcttggcccaaagatgtcaccattcctagttatttgtcaccacgtcaattggtgttgattggaaactttttctgagatggggacagaactgctgggttgtctttttccatgtaacttaaggcatagtaattattaaataaagtaatagttgggatgcttttgggtcctgtgttgcttttaaaaacaccttattaaaagagggagagtatttggataaggccaatttttccataggtagtaaaagttttttttcattctcttgaaactagaattgaccatgcatataatattctttgtttaaatgaaagcatactgttgaaacccgcagtgttgcatttagaaaacagttgaacagaatgtcaatgtgcattcatgcaaaaaaacatttaatctgcatctgttttagaaaagggggaaatgaagcaacttgtctaaaaatactgctttacaaagcatttcagcctttccccctcagttttgcattgattttttgacaagtctgtagagcctaatagtttccatcaaaggcctagatctcttatttagcatttttttcagctcttctctcagaagttcagctgttgaaacgaaaactgtactttgtaccctcacatacaaagggatcaaattttgacctggtgttattttagccccaaatttatgacattacacaatattacaaatgtaaatgtttctttacccaaactacttctagatattctagtattggccttcctggtgggaattaaaatgcccggtaaaattggcctaattatttggaatggaatgaatgggatgggatgttttgccatgcctcaatttcctaggtccctttgtcctagaaagggaaatttgcctccagttgaattagtgaaatatttctgtcggttgatattaaaagtgacttctgagtacagttaagttcctcccaatttgccactggggctgttgggttaggaaggcatagggtaactgattaagtagggtatggatactggcatttgaaataagtgggacacaaactatcctttctccaccctgggactcaatctgagaacaacagcattcatttccattcatttccatactggcttttgattatatgcagattcctagtagcatgccttacctacagcactatgtgcatttgctgtcacaataaagtatattttgtcttgcaaaaaaaaaaaaaaaaaaa

SEQ ID NO: 2219 - DNA, 676 bp, Homo sapiens
  SIMILAR (236)..(328): 411254mologous to Homo sapiens zinc finger protein,accession number AF027140,Smith-Waterman Score=66.
actgagagaaactacaaagctggaagccatcacagtaattctgacaccacctcaaacttttctaaccttaaaataaatcttactggtgaggaactttaaaaatcggaaaaatgtgacaaaatctttaaatgatggtcacacttgattgtaggtaagataattcttactagaaaaactcttacaagtgtgaagaatgtggcaaaatttttaatgaatactcacaccttattgccaggaaagcatttatacttgagaaaaattgtaccaatataaagactgtgaaaaagccattaatgtctgctcacatcttactcaacatcagagagtacttaaaaaaagtattataaatttaattactgtcaaaaagtatttcagaaaatataagcttttaaagtatttattttgaagacaaacattacaaataaaagagggttgtaatacctttatttgtatcacagatcttattgtacacattttgtactagagaaaaccctgaagcagttacttaaactttgttcaacatcagggaattcagattggagaaaaaccctgcaaatgtaataaatttgaaaaaaaagttttccaaaactacaacttagacaacaccagagggttcatactgagatatatttttgcagatgcagtatatatttaaaacatttaatccaaaaaaaaa

SEQ ID NO: 2220 - DNA, 441 bp, Homo sapiens
  SIMILAR (21)..(440): 1001254mologous to Homo sapiens hypothetical protein,accession number AL136821,Smith-Waterman Score=741.
ggctggggacttcggcacgagaatttgagtgcaacgttgaaatgcttaaacaggctgtgaaggatcataatgtaggttcacctcctaaatccccaacacatgcctctccccagcacacacaaacagagaaggactaccctctgaaagggacatgcagaacaccttcagtattatctcaacaatcaaaagctaagctaatgtctagttctgttgtggttagacttgcagatttcaatatataccaggtctctacagcggaacaatgtcgttcttcccccaaaagcatgatttgctgcaataaaaaatccctatatcttccacaagaaatgtcagctgtctatatagaattcacagaatattactatccagatggaaaggattttccaattccatctcccaacctctatagccagctgaatgcactacagtttactgtggatg

SEQ ID NO: 2221 - DNA, 1251 bp, Homo sapiens
  SIMILAR (994)..(1227): 391254mologous to Mouse mammary tumor virus envelope protein precursor env-gPr73,accession number K01788,Smith-Waterman Score= 132.
atgggtttgggaatccctaaacagagaagacttgtggccttgcttcctgcggagaattctgggagggagcagctacagcacagcagaaatggtttcagggcagaccttgcagagagcacacctaagagaggccgcttccatctccctcaacagccaaggggtgtggaggaagtctgcaaggttctcacatcagctggagaggggcacagaagagcagcaactacagattccagatctaggccaacacccatcatccaaggcaccagtctttcctcaggtccaggcccaccccaggttccagactggtccccatggacacaaactccagagaaaccaggatccaggccaactccagtagattcccatgctgggccaaacaccatggactcaggctacaggaccaaccatatagacccaaccttcaggcagatccccatgttctcattactcaggcatgtccacagactcaggttttatgcttgcccactcactgacccaagtatcaagtcagcccacatgcagactcctgctagaagcatgcccatggacttcatcaggtggcctgcccagaatctctggatggacggacaggcaggtctttggttctgtggacagagacttgatctctccctagaagggagctcctggagtgagaggcagcccccatttctatggttccataaactcagtcattccagcctgagctgttcaaccctgccagctgtgaagaatacaggtggtccagatgaagaagccaccccaaccccacaatacacctgctctaccaagaaacagccagacagcttcattagaagggttcctgattctgtcccacatgtctgggtgagatctcccattgagggtcgccagccatctcctgcaggtgcatatatgccaacagcaggtcagtgccccctagaatggaggtgccagagggtagagttggttcccatctttgctgtttcacggccttcactggtgatacctccagaggtcagacccaaaagatttataggcacacttataacctttatagtctcagccatagtcatcctagcaactgctagtgtggctatagcatctactaccgaatcagtgcaaacagctgcttttgtagacaatttggccagaaatgtgtctaatgaacttctcttacagcagggtatagatcaagagattcttgcacgtctgcaagccctcgaggctgccttggaatttgtgggggagcgacaagatgccctagcattctga

SEQ ID NO: 2222 - DNA, 463 bp, Homo sapiens
  SIMILAR (462)..(301): 831254mologous to Homo sapiens KIAA1055 protein,accession number AB028978,Smith-Waterman Score=245.
cgaaacttttaaaaactttaaaaatatttaaaccttttaaaaatagtatgtctgtgtactttatatatgtgtgtgtctatatgtgtgtgtatctatgtgttcctccggagctgtcttcattatccagcttctgtgccaggcctatgattttggcctttatttttcatcttcaaatggagtagaagaattaccaaatattccatcaatggaggtacaaatcctttatttggtagatgaagtttgaagcaactgtttggctttgagggaagtatgaggcaaatttttcagcctttgtgaaactttgtttccttcaggggttggctccttcttttcttcctgtactatggactcctctaggtccttaggggttgggtctaaaaattcccacttttcattggcataaaacacagacctccgactatcattatgtccattcccaggatggaaagaagacatcaaattt

SEQ ID NO: 2223 - DNA, 12006 bp, Homo sapiens
  SIMILAR (3014)..(3322): 541254mologous to Homo sapiens golgi matrix protein GM130,accession number AF248953,Smith-Waterman Score=260.
  misc_feature (1)...(12006): n = a,t,c or g
atgagagtaggctttagggatattgttggtagcctttctgagtactctttcggatgccctgtgaattatgaggttttccactctgtctggatcactatcctttgctgcctgatggccaatgaccgaaaaccacagtttctatacttttttcagttctttagttttcacggcggaagaaatttgatgtcttctttccatcctgggaatggacataatgatagtcggaggtctgtgttttatgccaatgaaaagtgggaatttttagacccaacccctaaggacctagaggagtccatagtacaggaagaaaagaaggagccaacccctgaaggaaacaaagtttcacaaaggctgaaaaatttgcctcatacttccctcaaagccaaacagttgcttcaaacttcatctacaaatagaggaactgtcattactgccacgagactggcctttgatcttaggacccagtccactaagtgttctcaccctgcttctggttcctctggtcacagcacagatttccagctggaaggggaatggggactatgggatctaggaacgaaaggtttcaagctgccttactcccttagcatagacattgacaatgtgaaaagcccacactttccccatgagctcaaaacgttgacagtgtctctgggtagcaataggagaatgggtttggaaaagaaagagtgccaccaaaagcagggagccctaagggagcagttacaggttcacattcagaatgtagaaatccttgtatcagagaaagctgagttacagcctggcttacactcagcatgctgccaggcagaaagaaggagtctgaggatctggccagccgcctttagtattccaggcagtgtgtgggagagttggagcaggctctctgctgtctccacacagcagaagaaagcagacaggttcattcctttctctactgcttctggccataaccgaagcaatgaggacctgaagcaggagaaatcagaattggaagagaagcttcaagtcctggtgactgagaaggctggcatgcagcttattttagaagagccgcaaaagaaattacaaatgatggcactcctgcttcaacaggctagggggtgcactgtgtggaacggcccaggctccccaaatctaaacttctcactcttcaccatccagttttcaaggcactgtgaagcccctgatgcgaaacagcagttaccgcaggccatggaggagcgggcacagctgaaagcacatctagggcaggtgaagctttgcaggggagggatgtggaaggaagatgaccccaggtggccaggagcaggagtaggaggagaggctgctggagctggagcaggtggccgagctcttgcgggagcaggcagagtcacgcaggcaaatcctggagaccatgcagaacaaatgcaccaccatcagccacgtgctcacccagaaccacaagctcaaagagcagctgtctccgctgcagaacggattcataaagctgaccaacctttgattatccacgggtgcatgattgctctctactcggtggtcggcaaatttaattacccacaggacagacccctgcaagtggtgtcccgcgtgaggcacactgtgaaggatcacaacggacccctcgaaaacaaaggtgaaaagaactgcacagtcaataagtcattcccagaaaaaggaacgctagacgtagagctctgggaacaagtggggagaaatcttaatcagcatcatgtgcaagggcaatgggtcccagtatcatctttaatgctatgggccttagtcagggcagccctggctccattatacacagaagagcctaaaaaggggaaggaggaggaaccgtcacctgctttaccacctccttttccctcagccccaatatcgccaggccaaaataacaaagaggaaatggaggttttgcctgagccccctcctccaataaataggaaaaaagacaagagctatgctacagctatgggaccctttcttaggcaagaggcattaagtggggagctcttagcctgcctggtcagacccgaaagattcataggcacacttacagccttcatagtctcagccatagtcatcctagcaactgctagtgtggctgtagcatctattactgaatcagtacaaacagctgcttttgtagataatttggccagaaatgtttctaatgaacttctcttacagcaagaccaacctttgattatccgcaggtgcatgattgctctctacctgggggcagggggagttaattacccacaggtggagctgaagagccaggaggctcagagtctgcagcagcagcaggaccagtacctgggtcatctgcagcagtatgtggccacctatcagcagcaggtggtcacctatcagcagctgacctctgaggaggaggagctgcacaaccagttactgctgcagacccagctcgtggaccggctgcagcagcagaaagctcaaagcaaagctgtggccaagatgggctgccaagagttgcgggagacccaggagcacctggaagctatcagccagcagaaccagcagcctcaggccccagttgagcctcatggctctccctggggaaggtaccggagactgctcacaggaagaggagagagccccaggaggaaacgggaactgtgtccacactaagtttggcaccaatatggtgaccttctgggagcaggggaccaccaggttaggttgcctaagggtgggtgaactggcccaggagatggacagtgaggaggaggaggaggtgcctcagcccatgccaagcatcccggaggatctagagagccagaaggccatggtggcatttttcaactcagctgtagctagtgccgaggaggagcaggcacggctatgtgggcagctgaaggagtgcactgccagcgcctggctcatctgttggcctcggcccagaaggaacctgaggcagcagccccagccccaagaactgggggtgatcccatgtgtggggagacccaccaggccctgcagggggccatggagaagctgtgggagagtacatcgcactgtaccagagccagagggcagtgcggaaggaggaggagtgcatcagcaggctggcccaggacaagggagaggtgaagatctttgtgaggtgagccttgccagcagtggggagtctgcacaaggagaggcggggaagcattctccctgtgacaaccccactgagcagcagatcatgcaactgcttcatgagatgcagaacctccaggagcacccaggcttgggcagcagcccttgcattccttttttgtaccagactgatgagaacaatgagtggccagagccggcttcacaggatgagagcctgctaagctccggaggctttccaggaagcgtcccttggaaaggatgtggcctttttaccactcccaatagcaccctggtaggatacttttatgggcagaacctggtcattttcctaagaagacaaaggctttgtgtacaaaagggggcagagcccaggatggctgtgggccagagtgaatacggctttgctgaaaaagtagttgagggaatttctgtttctgtaaattctatagtcatcagaattggagcaaaagccttcaatgcatcatttgaactttctcagcttcggatctatagtgtaaatgcacactgggaacatggagatttgagatttactcgtattcaggatccacagagaggagaggttttgacttttaaagaaataaattggcagatgataagaatagaggcagatgccacccaaagttcacatcttgaaattatgtgtgctcctgttcgattaataaccaaccaatcaaaaatcagagtcacacttaaaagaaggttaaaggactgcaatgtcatagcaacaaagttagttctaatattggatgacttattatgggttttgactgattcccagttgaaagctatggtacaatatgcaaagtctcttagtgaagcaatagaaaaatcaacagaacaaaggaagagtatggctcctgaacctacacagagctctgtattaggcactaaagctaatgatgacataaaagtattcgatgttttaatacctctgtttaggaagttaaaagagtacagttttaaaactactaaagtaaaagcaaatgaggaaaaaacctgggtaattataggcaagagaggacgtgtgagagttaactgtgcagagaatcaaagccataaggaattgctgaaattgaacacaaaacttctgttggagttgtctgatggctggggcaagaacagggacaagcataatgagctatttatcactttcttaaaagtgattattagtttgtatggagcattattagttgttccatgtggctggggaagcctcgtaatcgtggtgaaaggcaaggaggatcaagtcccattttacatggatggcagcagtcaaagaaacaatgaggaagctgcaaaagcagaaacccctgataaaccatcagatctcagctctacagtagtcgcatctgcccagcaagtgaagacaacgcaaacttcaaatgctcctgatgtaaatgatgcaattgtgaaactattcaatgattttgatgttaaggaaacctcccatcatttagtgatttctcatctagatctacacatatgtgatgacattcatgctaaagaaaaagagtcaaacagacgtattactggaggggcaatgcaactctcttttacacagctaactatagattattatccttatcataaagcaggagatagttgtaatcattggatgtattttagtgatgcaaccaaaacaaaaaatggatgggccaatgagttattgcatgaatttgagtgcaacgttgaaatgcttaaacaggctgtgaaggatcataatgtctctacagcggaacaatgtcgttcttcccccaaaagcatgatttgctgcaataaaaaatccctatatcttccacaagaaatgtcagctgtctatatagaattcacagaatattactatccagatggaaaggattttccaattccatctcccaacctctatagccagctgaatgcactacagtttactgtggatgaaagaagcattctatggttaaatcaatttctgttggatttaaaacagagtcttaatcagttcatggctgtgtacaagttgaatgacaattcaaaatctgacgagcatgttgatgttcgagttgatggcttaatgctaaagtttgtcattccttctgaagtgaaatctgaatgtcatcaagatcagccacgtgcaatttctattcagagttctgaaatgattgccacaaatacaaggcactgtccaaactgtcgacattctgacctagaagctttgtttcaagactttaaagattgtgatttttttagtaaaacatataccagcttccccaaatcttgtgacaattttaatcttctacatccaattttccagagacatgctcatgaacaagataccaaaatgcatgaaatttataaaggaaatattactccccaattgaataaaaacactcttaaaacttctgctgccacggatgtttgggctgtgtacttttctcaattttggatagattatgaagggatgaaaagtggaaaaggacggccaataagttttgtagactcattccctctttccatttggatttgtcaaccaacaagatatgcagagtcacaaaattagccgcttatcttgtaatcaggtatctctaaatacatcacaaagtgaatctagtgatctggctggccgattgaagcggaagaagctcttgaaggagtattatagtacagagtctgagcctttgacaaatggggggcagaagccttcttcatcagatacatttttcagattttccccttcctcgtcaagaggcaagatattcatctcctagttcatgttcataaacatgtcagtatgcagattaatcactaccaagtatctgcttctacttttcctgcatgagtcacttatcctgctttcagagaacttaaggaaagattgtagaagctgtaactggcagtcctgctagtcagacatccatttgtattggaattttacttagaagtgcagaactggctcttttgctccatccagtggatcaagcaaatactcttaagtctcctgtttctgaaagtgtgagcccagtggtacctgattatttgcctacagaaaatggggattttttgtcttcaaaaagaaaacaaattagtagggatataaatagaattagaagtgtaactgttaatcatatgtcagacaacagatctatgagtgttgaccttagccatatccctttaaaggatcctttgctttttaaatcagctaggtgatacaaatcttgcaaaaagggcatttccttttatggactatttatcagataaacatttagggaaaataacgtgaagatgaaagtagtggacttgtttacaaaagtgggctcaggagaaattggatcagaaacaagtgacaaaaaggattcattttatacagattcaagtagtatcttaaactacagagaaggattccgaatatacctttcatttggataggtgatgggtaatcaaaacatactttcaaggtactttaactagtaaaggaaatgaaacccatagagtccatctttaaagctgaagatttgcttccagaagcagcttcactctctgaaaacctgggatatcagtaaagaagagacccccccagttaggaacacttaaattcacagtcatctttaagtggggaaagcctaagggaacgtttgccccaccccaacctggggttcctctctggtgttttcttataagaatatgaaaagaagctcttcacaaatgtcatttgggntaccatttcacttgacagcatgatatttggaagaacagttattagaaagtgatggaagtgatagccatatgtttttggaaaaaggaaatagaaagaactcaactacaaattacaggggcacagcagaaagtgtgaatgctggtgcaaacctacagaattatggtgaaacttctccagatgccatcagtacaaattcagagggtgctcaggaaaatcatgatgaccctgatgtccgttgtggtatttaaaattactggtgttaatggggaaattgacatccgaggggaagatacagaaatctgtcttcaagtgaaccaggtgacaccagaccaattaggcaatatcagccttcggcattacctttgtaatcgtccagttggttccgatcagaaagctgtaattcattccaaatcctctcctgagatttctctgagatttgaaagtgggcctggtgctgtaatacactctttacttgcagaaaaaaaatggatttctgcagtgccacataggaaaacttcagcactgggtttcttacatcttctcttatgaatattcaacattttttggaagatgaaactgttgcaacagtaatgccaatgaagatacaagtttctaacacgaaaataaatttaaaagatgatagtccccggagtagtacagtatcccttgaaccagctcctgtaactgtacatattggatcatcttgtggtagagagaagtgacgatggctctttttcatatcagagattcttcacatgcttaacactggaaatgatttggaaagaaaatgtcaaaagcgattcagtgctgctgaccagtggaaagtatgatctgaagaaacaacgcagtgttcacgcaagccactcagacaagcccaggggttccttggccttctcagtcagctaactttcctggagttctcctttggacttcacttaggggaacagctcatggaagagaatgaatctcttaaacaggaacttggctaaagctaaaatggctcttgcagaggctcacttgggaaaaagatgctcttcttcatcatataaagaagatgacagttgaatagcaggagtggcagtcaaaactgaaattatagctctgggagtaggaaggttatatttataatgtggatgttaccagttaggggaagacttttattttcatgaaaagacaataaaacaaaatggaatgtgatgaagtggtgactatttcaaagccagtttagaaagtattagtacgggcattacaatcttttggttgttttgtgttttggggcttaaccctcttttaagctgttgtgatcctagggaagtcaacacatagtgtaaaataattaccatgccctaatgaaaagaagatgtcatttcctaattttgatatctcattttcggcattttttaaaatgtaaaaggaaaacctcttgtgttcacacagattgctgaattgatttctccatatttgttaataatttactattatttacaaagattcaaatgcttttatgactaatgtaaaatgaaaagaggcttacattttaaatgttattaaaattatgtacttaaatctataattatttaattattgtaaaaagtccaagcagatcaataaactatataattaatgggtttggaaaatcatcaccctactgaacttacaaaatatcttgaaaatgtgaaaaatatcattttaaataatgggtacattgtataagtggaagctataattttcaacaaaaagatggtacaaatgtaaaagtaaaaagcacaaactatacaaaagcaaaatctatggccaagtgatttaaaagcattacttgtacattcctttaaacatttgttgttagaagcaaaagagtaatttatcctgctaaatttggcaccatttgtaattataaaaattttgattaatactatttatattaatttctttaccttcattttttctccttaaggagttgattgtttttggaaatgtttttttccttgcacataagacagtttcataccattcttatagaatcatattaggtgggtgtttgcacatactaaatttataaagctagttttgattaaagctctatgtgagatatatatacatacacaagtcttctataataagagtcgttggtgaattttgaattctattttgttaggaattaaggttgaaatcaacatgaaagaatctcaatcatgcattataaaataaaagtacatgggtgttaagaaacaagagacttttaaagatttaaaatatatttctgatagaatttaactaagtggtgtgtattttaaaattcacattcttaaacataaatctatccaagatagaaaatgaaatagctggactactctttctttaagatacttgaaaattttaaaccacattgcaacactttatggtgctttgcgtgtttggcatgacatacacagtggtcctggtatataagtgcttgggggaaaatacatattttgtttacattaaattttgaagtgatttaggctttattgaaaacaatactggccttccctccccttctctaacatccattttcatttacgttatttaaaatatacaggcactgttttgggtacagaggatatagccaagagcaaattgatagtagtttacctcagagtattaaaaaaatcataataagtcatgttaatctaaaactatataatagccttagattaaatgtgcagatgtctaattaaagatttaaaatgtatagcgtatgtccttagaacatttgatttttaggtatacattcggcaaaaacagtctgttatggaaaagaaggattgatgggacattaacttcttccgagctaacattgtttctgaagattgacctattctatataaatttaaatttttctatgtttttctttttttttttgcgatgaggtttcgctcttgttgcccaggctggagtacagtggtgtgatcttggctcaccgcaacctccgcctcgtgggttcaaatgattctcctgtctcagcctcctgagtaactggggttacaggcgcccaccactacgcccagctaatttttggtatttttggtagacacagggtttcaccatgttggccaggctggtcttcaactcctgaccccaggtgatccgcccacctcagcctcccaaggtgctgggattgcaggcgtgagccaccgtacccggcctctatcgtatattataattgcttattgttatagaagctgaatgttttacttactacttttaaatttatttggtcttcccaaggaaatcatacaaacggtagagattatgataatctgagcattctgtgtgcttagtttgatttttttatttataagcagtactatttttatagatgtttaaaattcataaaacactgtattctgagaggtaggtattattcaaatgttagaaattttttttaaaaaaatgccctgaggcttagaaaggacaaatgactgaaatcacaattagtaatctggtctttagacttaaagcctagttatatgcttttattatagcttagtcattaattcacacattttcccttatcttttttatcttttaaaggtgaccataaaactttaaattgtgtgtgtacgtctatgtatgaggtatatgttaccctgtttgtgttattcaaactacctaaaagataggatgatttttgtttaagtgaatcccaaactagcagtctgagaaatacaggaaagcctgataattgacttaccagagttggctttttttttttaagttaccataatttagatataaagttgtcatgtcctggaatttaaaaaagaaatctctagctgagagatgttaatggtcaggagttgaaaatgacaattgtgctttgctttttatttttattttttgtttacttttgagttttttggagtttttttcctatatttttaattgagaagtaaaaattatatatttatggtgtacaacacgatgtgatacatgtataccttgtggaatggctaaatcaagctatctaacatgttacctcacaaactttttttgtagcgagaacacttaaaattttgtaacaattttcaagtatacagcatattgttattaactgtaatcacgtgatatacagtagatctcttgaacttatatttactaactgcaatttcgtgtccttttacaaacatctccccatttccccatcccccagcctctgataaccagaattttactctccatcccatgaagttgactttttttgcactccgtaagtgagatcatctagaattttggcatgtctttctgtgcctggcttatttcacttaacacagtggtcccctgtgtagctgggaccacaggcgtgtgccactacacccaggtttatccatgttgtcagaaatgacaggatttcctttttttaaaagttgaatggtattctcttatgtatattttccacatttgctttttccattcatccattgatggacagttaaattgattccatatcttggctattgagtaatgctgcagtgaacatgggattgcagatgtctcttccacatactgatttcgtttcctttgaacatataccaaatagtgggattggtggataatatggtagttctattttttaatgttttgaggaccctccatactgttttccgtaatggctataataatttacattgccaccaacagtgtacaaagcttttctttccttttctctgcatcctctccaacacttcccttttgtcttcttgataatagtcattctaacgggtatgattacagtagctttgtagtgggttttctgtgctgtgctttttaatttcatgtatgtaaaaaacattgggtattttgaatgtttttcttttctcaccttatcctagaacttgaggctgggcgcggtggctcatccctgtaatctcagcactttgggaggccaaattgggcggatcacttgaggtcaggagttcgagaccggcctggccaacatggtgaaaccccatttctactaaaaatacaaaaattggccaggcgtggtggtgcacgcctgtagtcccagccaatcagtaggctgaggcacgagaatcgcttgaacccaggaggccaaggctgcggtgagccacgattgcaccactgcactctaacctgagcaacacagactccatctc

SEQ ID NO: 2224 - DNA, 803 bp, Homo sapiens
  SIMILAR (280)..(185): 561254mologous to Homo sapiens PRO1902,accession number AF118082,Smith-Waterman Score=95.
aaaaaaaagagagagtgtgtgattagaagctaaataggaaagttttgagcttcaagtcagtgaggagtaaaaaagatttttaaaaagcaaagaaaacaaaatataagggaaaaatatgagaaaaataaaaataaaaagagaataataggccaggcactgtggctcatgcccctaatcccagcacttttgggaggtcaaggtgagcagaacacctgaggacaggagtttgagaccagcctgcccaacgtggtgaaaccccatctctatggaaaaatacaaaaatcagacgggcacagtggtggtgcccacctgtgatcccagctacttcaggaggcttgaggcaggagaattacttgaaccctgggaggcagaggttgcagtgagctgagattgtgccactgtactccagcctgggcaacaagagcggagactccgtttccaaaaaaataagagagaatagaagaagctactgcatgatgttagttaccaagcctgccatgggtcctctcttgctagacacacttccatagatccccccactgagctgtggatgggcaaacccctgtggaatcccaccctccccaacaccccacttgagccctgggccccctcctcccttcctcacctccaccttctccctgccttctctcttctctcgtgtgagcccccaggccttttccactttgagggagggtgcttcgaagaatgttgcccacacctaagtgtttagaaagcctatggtccgttcactcccgtgagagggtcttgaaagaataaaaataaattctaaaaaaagcctcaaa

SEQ ID NO: 2225 - DNA, 379 bp, Homo sapiens
  SIMILAR (162)..(338): 1001254mologous to Homo sapiens phosphatidylserine synthase 1,accession number BC004390,Smith-Waterman Score=328.
gtttttatagcagagaaatataagcacagggaggttctgtcacttgccagtgatgatcccagcctgggagaggcagggatgcagcatgctcgcctttttgccctgccacttctcccagggagttcctaaaattcctgcactaagcctgtctctctccctagacctactcggagtgtgaagatggcacctacagtccagagatctcctggcatcacaggaaagggacaaaaggttctgaagacagcccacccaagcatgcaggcaacaacgaaagccattcttccaggagaaggaatcggcattccaagtcaaaagtcaccaatggcgttggaaagaaatgaaaaaccctggttaatcaaagatgttccagagtgcctag

SEQ ID NO: 2226 - DNA, 2572 bp, Homo sapiens
  SIMILAR (1141)..(1521): 551254mologous to Homo sapiens phosphatidylserine synthase 1,accession number BC004390,Smith-Waterman Score=292.
tttcgtctagtcacccccggggtcccggccttctcgggctgtggccgccgccaccgcggcaggacggggaggcgggccatggcgtcctgcgtggggagccggaccctaagcaaggatgatgtgaactacaaaatgcatttccggatgatcaacgagcagcaagtggaggacatcaccattgacttcttctaccggccgcataccatctaccctgctcagcttcacacatcgacagcctcatgtacttcgcctttaccacggatgactctgttccataagacaacatctggagaggcatcctctctggaattctcttatttcttatcatcaaagtgtgagctttccccaatggaccgctcactcgacctcatccagccttatggcgaatggtttttggactcagtgagctctacttcctgttcctggtattcctactcttccctgaattcgagcaggctaaatctctaatggattggctagatccaaatcttcgatacgccacaagggaagcaaatgtcatggagtatgctgtgaactgccatgtgatcacctgggagaggattatcagccactttgatatttttgcatttggacatttctggggctgggccatgaaggccttgctgatccgtagatacgggctctgctggacaatcagtattacctgggagctgactgagctcttcttcatgcatctcctccccaattttgccgagtgctggtgggatcaagtcattctggacatcctgttgtgcaatggcggcggcatttggctgggcatggtcgcttgccggtttttagagaggaggactgaccactgggcaagcttcaaggacattcataccaccaccgggaagatcaagagagctgttctgcagttcactcctgctagctggacctatgttcgatggtttgaccccaaatcttcttttcagagagtagctggagtgtacctcttacatgatcatctgggcagctgactcgagttgaataccttcttcttgaagcatatctttgtgttccaagccagtcatccattaagttggggtagaattctcttttattggtgggcatcaacagcttcccacagttgaggcagtactacgcttacctcaccgacacacagtgcaagcgccgtagggaacacaatgctgggtgtttggggtcattggtttcctggcccgccattgtttgcataaaatttggacaagtatctcttcttctaagacccaaatactctatgttgtgctttggcttctttgcgtggctttcaccactttcctcctgtctgtacggcatgatttggtatgcagaacactatggtcacccgagaaaaagacctactccggagtgtgaagatggcaccctacagtccagagatctcctggggatcacaggaaagggacaaaaggttctgaagacagcccacccaagcatgcaggcaacaacgaaagccattcttccagggagaaggaatcgggcattccaagtcaaaagtcaccaatgggcgttgggaaagaaatgaaaaaccctgggttaattcaaagatgtttccagagtgcctaggaactgaggaggggaaatgggaacttcatttgggaactccccgtggaggaggttcgagggcgcacaggggcaagccaggaagaggcgagggcactttgggggtcattattttgagatcgttaagtctttgttttcccacagacctgggccgcgttcaggcagatcatcgcctgggggggccttttgccaacgtggggtctcttctaacttcagcacttgacatgcggtcaccggtggcagcgcggtgtgttgaaagggaaacggtagctatttcatttcacagttgccaagagcagctccgcgccatgctggatcgtggatgcagcgtaaacatctttccttcagacgaggcattaaccccatggttaatggactggtcaccagtttttaattttattttttatgaatctacctttcccattgattgatttaagttcaggccacttttctgtctttttatttggttactgttgttatttgtttttaagttatggatgctttttaacagcctttagaaagccgctgctgaaattgatacctgggggaagggttcccccttcctgtctagagcagaaaagggatgagaggtgttgtattcctgtttggtaacctcagtctccctgtaaagacctccctacccacatggcgaagtatacacccaatcaggagaagggtagctgccctgcataggaagcctcgcttccgattattccccttccccaatattattcatccagacttagccacaagtgcacaaaagcaaacctgcttagagaggcaggtgaacacccacagcttctccccagtctaggtgcccttttacatcgggtttgttctccttccatggtgtgttgctgacattgtcactgagtcccatgtgaggtgctggtgagtattacctttcatctgtgccatgctctagaaccttgaccttgatagttcaccacctctgatggatccctgttttaaataaaaacgattcactttaaagcctaaaaaaaaaaaa

SEQ ID NO: 2227 - DNA, 538 bp, Homo sapiens
  misc_feature (1)...(538): n = a,t,c or g
taaaattttcctaaatcatactccgtaaacaaaactctccagcagccaggatatggaggttggtttaccccctataccccttaaaattttatattttccctaaagccttaaaattctggagggaggttggcccaatatgtcccccccccaaaataagggttctttccaaaaattcccaggtaggttttaaaacggccccctataaggaaaaaagtttttcgttgccagcccgggtaaacttgggcccccccaggggttctttaaaacggcccccccnnnnnnnnnnnnnnnnnnnnnnnaaaatttttgaagtaggtcttattaacaaaagtaatggtcaactaaatattaagaatcaacatttgttgggagtgatgtaaatacaaagtcatttggagactatgagtgaatgaagatggacacaaggatacaagaacaggtctcatctaagagctccttatactcttgtttcctttctcaaccacacactaacagggaaaacacactttgtctttgccttctgtggatggccttgtgt

SEQ ID NO: 2228 - DNA, 609 bp, Homo sapiens
  SIMILAR (108)..(608): 991254mologous to Homo sapiens KINESIN-13A2,accession number AJ291579,Smith-Waterman Score=878.
gcggccgcgctcgaggggcgcgcggctgcagcggcggcggcgccgcgcgtgaggggccgcctaaggccgagcggtgcgcggcgagcggccgggcgagcgcagccaacatgtcggataccaaggtaaaagttgccgtccgggtccggcccatgaaccgacgagaactggaactgaacaccaagtgcgtggtggagatggaagggaatcaaacggtcctgcaccctcctccttctaacaccaaacagggagaaaggaaacctcccaaggtatttgcctttgattattgcttttggtccatggatgaatctaacactacaaaatacgctggtcaagaagtggttttcaagtgccttggggaaggaattcttgaaaaagcctttcaggggtataatgcgtgtatttttgcatatggacagacaggttcgggaaaatccttttccatgatgggccatgctgagcagctgggccttattccaaggctctgctgtgctttatttaaaaggatctctttggagcaaaatgagtcacagacctttaaagttgaagtgtcctatatggaaatttataatgagaaagttcgggatcttttagaccccacagggagtagac

SEQ ID NO: 2229 - DNA, 817 bp, Homo sapiens
  misc_feature (1)...(817): n = a,t,c or g
taatttttccctaaagccttaatattctgtagggaggttggcccaataagtcccccccccaaaataaggttccctttccaaaattcccaggtaaccgattttcccctccccgcgttgttaaacccccgcccgggcccagccttttaaacggccccccataaggaaaaaaatattaccttgccagcccccgtaaactttggcccccccaaggatcctttaaaaaggcccccccnnnnnnnnnnnnnnggttgaaatccatattacctatttattcaacaaaaaactgagtatcttctatggtccaggccatgtccttggcactgcgaacagagataagtcctggccctcaaggagctcacagtctagtgggggaaaaaagacacaagaataaataaatataatgtatttggagtttgcaaagggggcccctatgggagacaaagaacagagggaacctaaatatcctatagttaggcatccacagggaaaggaaagacctggggcaatgtacatttttgttaaagattaggataaggcagtgggttcttcaaagtgtgggctgggctaattacctacattcagattcatttgggaggcacatatttaacaagtaggattcccagttacctttcttgcacatattcttgatttagtacgtgtgtggggggggtgggtgtacggtttgaggcctgagaatctggcattttaaaagcacctttaggtgatgctactgctccttaaagtttcagaactgatgagataaagtttgttcttttaactggaataaagaatgatctacacatctgaaatgctaact

SEQ ID NO: 2230 - DNA, 1132 bp, Homo sapiens
  SIMILAR (1)..(126): 1001254mologous to Homo sapiens dJ393D12.1 (KIAA0776),accession number AL132776,Smith-Waterman Score=196.
cctctgctacccacttctttatcagttgaagatgctgccatattgcttcagcaggtgatgagggcattcagcaaacaggcctcaactgtagtctttagcgacactgttgtagtcagtgaaaaattttataaatgactgtacagaactgttccgtgagctgatgcaccagaaagctgaaaaggaaatgaaaaataatcctgtgcatttaatcactgaagaagatctgaaacaaatctccactttagaaagcgttagtacaagtaaaaaggataaaaaagatgagcgaagaaggaaagcaacagagggcagtggaagcatgagaggaggaggtgggggcaatgccagagagtacaaaattaaaaaagtcaagaagaaaggaagaaaagatgatgatagtgatgatgaatctcaatcatcccacactgaaaatgaggaaagtggttatgacaaaaaggatgaaaacatcttagaggatgtaaagtggggaaaaacttcacaattcttggagatattccaagacattgaaaaggcaagggataaaacattggaagctgattcagagttagaaagtgtattcatgtcttcaacaacttctgcttctgggacgggcagaaaacgcacaatcaaggacttgcaagaagaagtttcaaacctgtacaataacattaggttatttgaaaaagggatgaagttttttgcagatgacacacaggctgctcttaccaaacacttgctgaagtcagtgtgtactgatatcactaacctcattttcaacttcttagcttcggatttaatgatggcagtagacgatcctgcagccattacaagtgaaataagaaagaaaattttaagtaaattatcagaagaaaccaaagtagctcttacaaaactccataactctctgaatgaaaaggatcagcatgctcttttggtaaagtatcaaggtttggttgtaaagcagctagtcagtcaaagtaagaagactgggcagggagattatcccttgaataatgaattagacaaagaacaagaagatgttgccagtactactcgtaaagagcttcaagaactttcttcatccattaaagaccttgttctcaaatctaggaaatcatctgtgacggaagagtaa

SEQ ID NO: 2231 - DNA, 4404 bp, Homo sapiens
  SIMILAR (62)..(403): 921254mologous to Mus musculus putative,accession number AK007993,Smith-Waterman Score=541.
  misc_feature (1)...(4404): n = a,t,c or g
tttcgtgcctgtcggctgacgtgtctgcagttcctccgcgtctactgcgagtcaggccgtgatggcggacgcctgggaagagattaggcggttggcggccgacttccagcgggcgcagttcgccgaggccacgcagaggttgtccgagcggaactgcattgagattgttaatagattgattgctcagaaacagctagaagtagttcatacactcgatggaaaggaatatattactccagcccaaattagtaaagaaatgagagatgagctacatgtccgaggtggtcgagtaaacattgttgatctacaacaggtaattaatgtggacctgattcatattgaaaatagaattggtgacattattaaatcagaaaagcatgttcagttagtgttgggacaacttgatagatgagaattatttgggatcgcgtgggccaagaggtcaatgataaattgcaagaaagtggtcaggtcaccatatcagaactgtgtaaaacttatgatcttcctgggaactttctgacacaggcactaactcagcgacttgctataattatcattggacatattgatcttgataatagaggagtaatttttacggaagcttttgtagctcgacatagagcacgtatccgtggactattcagtgctattacccggcctacagctgtgaattctttgatttcaaaatatggatttcaggagcagcttctttactctgtgcttgacgaacttgttaatagcggacgcttacgaggcactgtggttggtgggagacaggataaagctgtgtttgtccctgacatctactccaggacacagagtacttgggtggattcctttttcaggcagaatggctatctagaatttgatgctttgtccagacttggaatcccagatgctgtaagctacataaagaaaagatataagactacacaactcttgtttttgaaagcagcttgtgttggtcaaggacttgtggatcaagtggaagcatcagtagaagaagccatcagctctggaacatgggttgatattgcacctctgctacccacttctttatcagttgaagatgctgccatattgcttcagcaggtgatgagggcattcagcaaacaggcctcaactgtagtctttagcgacactgttgtagtcagtgaaaaatttataaatgactgtacagaactgttccgtgagctgatgcaccagaaagctgaaaaggaaatgaaaaataatcctgtgcatttaatcactgaagaagatctgaaacaaatctccactttagaaagcgttagtacaagtaaaaaggataaaaaagatgagcgaagaaggaaagcaacagagggcagtggaagcatgagaggaggaggtgggggcaatgccagagagtacaaaattaaaaaagtcaagaagaaaggaagaaaagatgatgatagtgatgatgaatctcaatcatcccacactggaaagaagaagccagagatcagttttatgttccaggatgagattgaagattttttaagaaaacacatacaagatgcccctgaggagtttatttcggaacttgctgagtacttaataaaacctcttaataaaacttatctcgaggtggtacgttcagtattcatgtcttcaacaacttctgcttctgggacgggcagaaaacgcacaatcaaggacttgcaagaaggaagtttcaaacctgtacaataacattaggttatttggaaaaaggggatggaagttttttggcagatgacacacagggctggctcttacccaaacacttgctggaagttcagtgtgtactgatatcacttaacctcattttgcaacttctttaggcttcgggattttaatggatgggcagtaggacgatcctggcaggccatttacaagtggaattaaggaaagaaatttttaagtaaattatcagaagaaaccaaagtagctcttacaaaactccataactctctgaatgaaaagagcatagaagactttattttctgttctggattctgcagcagaagcttgtgatattatggtgaaaaggggagacaaaaaaagggaaagacagatactgttccaacatcgacaagcactggctgaacagctaaaggtcacagaagaccctgctcttattctgcacctcacatcagtcctgttgtttcagttttcaacccacagcatgctccatgcaccgtggaagatgtgtcccacagatcattgcttttcttaatagtaaaattcccagaggatcagcatgctcttttggtaaagtatcaaggtttggttgtaaagcagctagtcagtccaagtaagaagactgggcagggagattatcccgttgaataatgaattagacaaagaacaagaagatgttgccagtactacttcgtaaagagcttcaaggaactttcttcatccattaaaagaccttgttcctcaaatctagggaaatcatctgtgacggaagagtaatgatcttaatttacatttgtcatatagtaagcattttcccccaagggttgaaggtgagtggtcacaaaaaagtagtcactatacaactcccctctccctgcaaaaaccacctcatacacacacaattcagttaaaacagtagtattgtattaaatgtaaatcttaaaaagatgtgaatttttgtaaattgggttcttcatggaagttttttttccacctgatgttcacacaaatactatatgaaatttttcacattattttcacataattttaaaaattaccatatttccaggtttgttctctttcccaaatgttgaatgaaaaacaaattttcccaatccatttatccctggggganggattcatttgttgcgagtgcccagtatacttaaatgtatactttatatacatttaagcagaaatttaaaatgtggtctttttttttttaaaagaaacacttctgtgtcagaaatgaaaataaatcatgttttttatttttaaatagaaagcacttcaaaactaaaatacagaaatttacaaaaaagaaaaattattactaagcccttgctcttatttttggcagaataaacattgattttggttggggctgcaaggatgcctttacaggtgcacaagaacgctagagtggcccatgcattgctgtgttctcttctaaaacaagctactaacaagagagagaacacatgcaatttattaccagtaagcataagtcatatttaacattggaataactaagcattttatacaaagatttttctttgacccagtttgcatttgtacattttatttttttagttcaacagctgctctgtcacataatactttgtaaatactagtgtgaaaaacaggatagggatgcccttttcccagtggtagggagcatctgtaagtgcatttaaatcattagaagcttttttcccaaaacctagaaacccttattaaaaaatagacatttttttctaaagattattagttaaaaataactaaaagagttccttagagtaatcatttcaaccaaattaatttcaagcaacaacttacttactatttatcaaaaagggatttaattattttgaatataattataaattaaatttcaaatatttaaaaatactattttatataattccttatgacattttaaactttatattttaaaatatttgaatacgaaaagatcagtctacctctactccattctagacaaagtattaatccttagtggaaagtaattaattaaattgccaacttggcattattattaaacttgataggaacgcaacattaaatttaaaaatgttttcccgtgggtaattttctattatatatattttcatatgggcaaagggaaaaaatgataaatcctctgtaatcacaaaccccaatttcgttttgtttattcagcttctaaaatattgaacacccacgacttttaattcaaccctttaaggacccttatcatttatgtttcagtaggatatcaaagtaatccatgtttgtgtcaaatgatccatagaaaataaataggaggaggacagtgaagcaagttaaaaggtaaagccttgttttaatttgtttgcattaatttyyyytcatttgtcaaaatgcttctyttgttgccacgagtaaagaacagtttttattgttttgtaagtaaaattacgtagctgattttgtatgtaaagattaatttccataataaaaattattgtatgtttactgtgatcttaatgggcagggttaagaaagttatttaaaataaagttacctattctactaaattttatagtactttgaagcttctattaattaacacaaagattaattggtgcatatattttatatatatacattttgaattctcattttgaacattattaaaggattttatttttcttacac

SEQ ID NO: 2232 - DNA, 389 bp, Homo sapiens
  SIMILAR (9)..(296): 761254mologous to Homo sapiens beta 2-microglobulin,accession number AB021288,Smith-Waterman Score=363.
  misc_feature (1)...(389): n = a,t,c or g
attccgtccgaaatatctcgctccgttgccttttctttgnnnnactactctctgtttctggcctggaggctatccagcggactccaaaaaatcaggtttactcacgtcatccaccagaaaatggaaagtcaaagttcctgaattgctatgtgtctgggttccatccatccgacattgtaggtgacttactgatgaatggagagagaattgaataagcgtagcattcagaccttgctttcagaaaggactgggccttctatctattggactacactgaattcacccccactgaaaagatgagtatgcctgccgtgtgaaccatgtgactttgtcacagcccaagatatgtaagtgggatcgagacatgttatcagcatctatggaggctt

SEQ ID NO: 2233 - DNA, 972 bp, Homo sapiens
  SIMILAR (189)..(350): 811254mologous to Homo sapiens beta 2-microglobulin,accession number S54761,Smith-Waterman Score=222.
tcgcccacgcgtccgcccacgcgtccgcagcattcgggccgagatgtctcgctccgtggccttagctgtgctcgcgctactctctctttctggcctggaggctatccagcgtactccaaagattcaggtttactcacgtcatccagcagagaatggaaagtcaaatttcctgaattgctatgtgtctgggtttcatccatccgacattgaagtttgacttactgaagaatggagagagaattgaaaaagtggagcattcagacttgtctttcagcaaggactgggctttctatctcttgtactacactgaattcaccccccactgaaaaaagatgagtatgcctgccgttgtgaaccattgtgactttgtcacagcccaagatatgttaagtgggatcgagacatgtaagcagcatgatggagggtttgaagatgccgcatttggattggatgaattccaaattctggcttgcttgctttttaatattgatatgcttatacacttacactttatgcacaaaatgtagggttataataatggtaacatggacatgagcttctttataattctactttgagtgctgtctccatgtttgatgtatctgagcaggttgctccacaggtagctctaggagggctggcaacttataggtggggagcagagaattctcttatccaacatcaacatcttggtcagatttgaactcttcaatctcttgcactcaaagcttgttaagatagttaagcgtgcataagttaacttccaacttacatactctgcttagaatttgggggaaaatttagaaaatataattgacaggattattggaaatttgttataatgaatgaaacattttgtcatataagattcatatttacttcttatacatttgataaagtaaggcatggttgtggttaatctggtttatttttgttccacaagttaaataaatcataaaacttgaaaaaaaa

SEQ ID NO: 2234 - DNA, 448 bp, Homo sapiens
  SIMILAR (68)..(274): 981254mologous to Mus musculus putative,accession number AK002896,Smith-Waterman Score=346.
  misc_feature (1)...(448): n = a,t,c or g
atcgaattcgatgacactagncagngtggtggaattcacaacagctgtcgtctctgggactgtgaaacagtctggagaggtgttggtgaatgttaaggagcactcccggcagatcaacgacatccagttatccagggacatgaccatgtttgtgaccgcgtccaaggacaacacagccaagctttttgactccacaactcttgaacatcagaagactttccggacagaacgtcctgtcaactcagctgccctctcccccaactatgaccatgtaagagaaccccacctgccttcctgctgaagcctcaggaagcttccaagttctagatgcttgtccagaagttgggctacaacattgtgggggaaatgatgtcaggcagagaggagatgcccagaggagtgacaaagctggaaggattgaatagccccagggcagccagcaggaggt

SEQ ID NO: 2235 - DNA, 486 bp, Homo sapiens
  SIMILAR (26)..(298): 921254mologous to Homo sapiens TGF-beta receptor interacting protein 1,accession number U36764,Smith-Waterman Score=464.
  misc_feature (1)...(486): n = a,t,c or g
ctcgtgcgntcgcgtcacagccgggatgaagccgatcctactgcagggccatgagcggtccattacgcagattaagtataaccgcgaaggagacctcctctttactgtggccaaggaccctatcgtcaatgtatggtactctgtgaatggtgagaggctgggcacctacatgggccataccggagctgtgtggtgtgtggacgctgactgggacaccaagcatgtcctcactggctcagctgacaacagctgtcgtctctgggactgtgaaacagacaacaatgagccctacatgaagatcccttgcaatgactctaaaatcaccagtgctgtttggggacccctgggggagtgcatcatcgctggccatgagagtggagagctcaaccagtatagtgccaagtctggagaggtgttggtgaatgttaaggagcactcccggcagatcaacgacatccagttatccagggacatgaccatgtttgt

SEQ ID NO: 2236 - DNA, 419 bp, Homo sapiens
  SIMILAR (202)..(279): 961254mologous to Homo sapiens dJ622L5.3 (novel protein),accession number AL049795,Smith-Waterman Score=122.
atctgccatccccaagcaagcgggccaagttcaagagagtaggcaaagagaagtgccgcccagtcctggctggaggtggaagcggctctgcaggcacgcccctgcagcactccttcctgaccgaggtgactgatgtctatgagatggaggggggactcctgaacctgctcaatgatttccactctggccggctgcaggccttcgctggaagacctcagtaattctatccagaagctgcacctggccgagaacgccgagcctgaggagcagtccgctgcgtaggcgtcccacgcaggcccacactgcccctctcattctcttcaaactgtgactttttacagactcgggcgggtgttctgcggccccccaggtgctatgggggaggggggcgttgaatggaattaaaccagaaagaaagc

SEQ ID NO: 2237 - DNA, 1793 bp, Homo sapiens
  SIMILAR (86)..(1027): 991254mologous to Homo sapiens dJ622L5.2 (novel protein),accession number AL049795,Smith-Waterman Score=1570.
ggaattcacagaagcagatgaagctcctacagaaaaagcagagccagctggtgcaagagaaggaccacctgcgcggtgagcacagcaagccgtcctggcccgcagcaagcttgagagcctatgccgtgagctgcacgggcacaaccgctccctcaaggaagaaggtgtgcagcgggcccgggaggaggaggagaagcgcaaggaggtgacctcgcacttccaggtgacactgaatgacattcagctgcagatggaacagcacaatgagcgcaactccaagctgcgccaagagaacatggagctggctgagaggctcaagaagctgattgagcagtatgagctgcgcgaggagcatatcgacaaagtcttcaaacacaaggacctacaacagcagctggtggatgccaagctccagcaggcccaggagatgctaaaggaggcagaagagcggcaccagcgggagaaggattttctcctgaaagaggcagtagagtcccagaggatgtgtgagctgatgaagcagcaagagacccacctgaagcaacagcttgccctatacacagagaagtttgaggagttccagaacacactttccaaaagcagcgaggtattcaccacattcaagcaggagatggaaaagatgactaagaagatcaagaagctggagaaagaaaccaccatgtaccggtcccggtgggagagcagcaacaaggccctgcttgagatggctgaggagaaaacagtccgggataaagaactggagggcctgcaggtaaaaatccaacggctggagaagctgtgccgggcactgcagacagagcgcaatgacctgaacaagagggtacaggacctgagtgctggtggccagggctccctcactgacagtggccctgagaggaggccagaggggcctggggctcaagcacccagctcccccagggtcacagaagcgccttgctacccaggagcaccgagcacagaagcatcaggccagactgggcctcaagagcccacctccgccagggcctagagagcctggtgttgggtcatgctgggaagggagcggcagcccagccaggcctggcccataaaaggctcccatgctgagcagcccattgctgaagccaggatgttctgacctggctggcatctggcacttgcaattttggattttgtgggtcagttttacgtacatagggcattttgcaaggccttgcaaatgcatttatacctgtaagtgtacagtgggcttgcattggggatgggggtgtgtacagatgaagtcagtggcttgtctgtgagctgaagagtcttgagaggggctgtcatctgtagctgccatcacagtgagttggcagaagtgacttgagcatttctctgtctgatttgaggctcagacccctccctgcccttcagagctcaagacaagtaatacacccaggtcttgactgcatttgtcttgtgagcagggcttgcttggtcagctcaggccctcctagctgctctggaggctcctttgattctctagacctggaaaaggtgtccctaggcagagccctggcagggcgctcagagctggggatttcctgcctggaacaagggacctggagaatgtttttgcgtgggatgatgtgctggtcaggagccccttgggcatcgcttcccctgccctttggtagtgccaggaccaggccaatgatgcttctcagtagccttatcattcacaggtgcctctctagcctgcacaaatgattgacaagagatcacccaaaggattatttctgaaggtgttg

SEQ ID NO: 2238 - DNA, 2514 bp, Homo sapiens
  SIMILAR (1771)..(2061): 971254mologous to Homo sapiens TGF-beta receptor interacting protein 1,accession number U36764,Smith-Waterman Score=505.
atggagccagaactgctggttcggaaggtgtctgcattgcaggccctggggcggggctttttggtccgacgccagttccagagcgtgcgagctgagtatgaggcgattgtacgaaaggtcgagggcgacctgggcacgcttcagtggaccgagggccgcattcccaggccgcgattcctcccagagaaggcaaaatcccatcagacctggaaagcaggagacagggtagcaaatccagagcaggggctgtggaaccacttcccatgtgaagagtctgagggagaggccacctgggaggagatggtgctgaagaagtcaggagagagctcagcaaatcaaggaagcctctgcagagatcacagctcctggcttcagatgaagcagaacaggaaacccagccaagagaagaccagagacacgacaaggatggagaatccagacagaggcttcgttccagggaaggaatgctcctttgagcagctggagcacgttcgggagatgcaggagaagctagcccggctgcacttcagcctggatgtgtgtggggaggaggaggacgatgaagaggaagaggatggggtcactgaggggctgccagaggagcagaagaagacaatggctgaccgtaacctggaccagctgcttagcaatgtgggttcatgtctgggtgctttggttcctgggggcatgaggggtggagaaggtgagggaactaaacctgtgcaagatgggagaccggggtgggaggaaggactggtccaaagcgccacgatccttgacgggcacagccagaagctgcacctggccgagaacgccgagcctgaggagcagtccgctgcgtggcctcaaacactaagcagaacagttccaagccaggacccacctgtcgatgccaagaagccgatcctactgcagggccatgagcggtccattacgcagattaagtataaccgcgaaggagacctcctctttactgtggccaaggacccttctgggcccctggttattgaaaaagttcggaattactctttacccttgtggagtgttctgagtgttggaagtacccaggaagaagccctgagcaggtgccctcaggagcagtgcccatggctccccacatcagccaagaggcccaaccccaggaagccactcctgcccggggatggggaaggcctgatgcccagccagcgcccaatggatgacaaaaagaagaaacggagtcccaagccctgcctggcccagccagcccaggccccaggcacactacggagggtccctgtgcctaccagccacagcggctccttggccctaggacttcctcatctgccatcccccaagcagcgggccaagttcaagagggcgtcccctgcaggagagcttcatgcgcctggtggaggcctgtggggactcggagcaaagcatggacaactggctgagtcggctggacggctgccgctgactgtaacatgtaaagcaggcactgagcaccacttgcctggcagtccagggcatggagagctttttgactccacaactcttgaacatcagaagactttccggacagaacgtcctgtcaactcagctgccctctcccccaactatgaccatgtggtcctgggcggtggtcaggaagccatggatgtaaccacaacctccaccaggattggcaagtttgaggccaggcgcaaggcattacaggatgcagtcaatgccctctgtgccacctcaccaccaggaagtcagaggtgtccaccaccaataacaaggaatggaaagcagctggcccttctcaagaccaattcggctgtccggacctgcggttttgactttgggggcaacatcatcatgttctccacggacaagcagatgggctaccagtgctttgtgagcttttttgacctgcgggatccgagccagattgacaacaatgagccctacatgaagatcccttgcaatgactctaaaatcaccagtgctgtttggggacccctgggggagtgcatcatcgctggccatgagagtggagagctcaaccagtatagtgccaaggcagtgggtgaagaggacgaggaggatgaggagggggagagcctggactctgtgaaggcactgacagccaagctgcagctgcagactcggcggccctcatatctggagtggacagcccaggtccagagccaggcctggcgcagggcccaagccaaacctggaccagggggacctggggacatctgtggtttcgactcaatggactccgcccttgagtggctccgacgggagctgcgggagatgcaggcgcaggacaggcagctggcagggcagctgctgcggctgcgggcccagctgcaccgactgaagatggaccaagcctgtcacctgcaccaggagctgctggatgaggccgagctggagctggagctggagcccggggccggcctagccctggccccgctgctgcggcacctgggcctcacgcgcatgaacatcagcgcccggcgcttcaccctctgctga

SEQ ID NO: 2239 - DNA, 1308 bp, Homo sapiens
  SIMILAR (533)..(736): 981254mologous to Escherichia coli lac repressor protein (gtg start codon),accession number J01636,Smith-Waterman Score=323.
atgggctcctgtgccgcccgagcctccctgacaagcaccaccccctgctccacggcgcccagtcccatcaaccacccaaaggctgaggaatgcgaacgcaccacggcgcaggactggcaggcagctccacctgcagccccagtgcgagatccactaggtgaacccagctgggctcctgagtctggtggggacgtggagagtctttatatctacctcagggattgtaaatacaccaatcagcaccctgtgtttagctcaaggtttgtgaatccaccaatcgacactctgtatctagctgctctggtggggccttggaaaacctttatgtctagctcagggattgtaaatacaccaatcggcactctgtatctagctcaagtaacggtcccaccgcccctgcatactcggtttttcgccctttccccgcgccagccccgttcctttaaaaatggactcttgttccaaactggaaccaccctcaaccccctctcgggctattcttctgattataaggggtttggccgatttcggaaccaccctcaaacaggattttcgcctgctggggcaaaccagcgtggaccgcttgttgcaactctctcagggccaggcggtgaagggcaatcagctgttgcccgtctcactggtgaaaagaaaaaccaccctggcgcccaatacgcaaaccgcctctccccgcgcgttggccgattcattaatgcagctggcacgacaggtttccccgactggaaagcgggcagtgagcgcgactgcaattaatctcaaggtttgtaaacacaccagtcagcaccctgtgtttagctcaaggtttgtgagtgcaccaatcgacactctgtatctagctgctctggtgaggacgtggagagtctttatgtctagctcagggattgtaaatacaccaatcggcactctgtatctagctcaaggtttgtaaacacaccaatcagcaccctgtgtttagctcaaggtttgtgagtgcaccaatcaacactctgtatctagctgctctggtggggccttggagaacctgtgtgtcgaaactctgtatctaactaatctgatggggactgtggagaacttttgtatctagctcagggattgtaaacgcaccaatcacggccctgtcaaaacaggccactcggctctaccaataagcaggatgtgggtggggccagataagagaataaaagcaggctgcccgagccagcattggcaactcgctcgggtccccttccacgctgtgggagctttgttctttgcaataaatcttgctactgctcaaaaaaaaaaaaa

SEQ ID NO: 2240 - DNA, 517 bp, Homo sapiens
  SIMILAR (271)..(516): 851254mologous to Mus musculus putative,accession number AK003287,Smith-Waterman Score=356.
aaggcaaaatcccatcagacctggaaagcaggagacagggtagcaaatccagagcaggggctgtggaaccacttcccatgtgaagagtctgagggagaggccacctgggaggagatggtgctgaagaagtcaggagagagctcagcaaatcaaggaagcctctgcagagatcacagctcctggcttcagatgaagcagaacaggaaacccagccaagagaagaccagagacacgacaaggatggagaatccagacagaggcttcgttccagggaaggaatgctcctttgagcagctggagcacgttcgggagatgcaggagaagctagcccggctgcacttcagcctggatgtgtgtggggaggaggaggacgatgaagaggaagaggatggggtcactgaggggctgccagaggagcagaagaagacaatggctgaccgtaacctggaccagctgcttagcaatgtgggttcatgtctgggtgctttggttcctgggggcatgaggggtggagaag

SEQ ID NO: 2241 - DNA, 549 bp, Homo sapiens
  SIMILAR (299)..(150): 941254mologous to Homo sapiens dJ622L5.3 (novel protein),accession number AL049795,Smith-Waterman Score=230.
ttttttttgctttctttctcggtttaattccattcaacgcccccctcccccatagcacctggggggccgcagaacacccgcccgagtctgtaaaaagtcacagtttgaagagaatgagaggggcagtgtgggcctgcgtgggacgcctacgcagcggactgctcctcaggctcggcgttctcggccaggtgcagcttctggatagaattactgaggtcttccagattgctaagcagctggtccaggttacggtcagccattgtcttcttctgctcctctggcaagcccctcagtgaccccaatcctcttcctcttcatcgtcctcctcctccccacacacatccaggctgaagtgcagccggggctaagcttctcctggcatctcccgaacgtgctccagctgctcaaaggagcattccttcccgaaggcctgcagccgggccagagtggaaatcattgagcaggttcaggagtcccccctccatctcataagacatcagtaacctcggtcaggaaagaatgctgcaggggcgtgcctgcagagccgct

SEQ ID NO: 2242 - DNA, 6393 bp, Homo sapiens
  SIMILAR (1149)..(2024): 811254mologous to Homo sapiens dJ622L5.2 (novel protein),accession number AL049795,Smith-Waterman Score=1159.
atgcgcatgcgcgggcgtgcctcgcggcttgagggcgcgcggggcgtgggtggctgcgcgcgcggggggcgcacgtggggcctgaggggcgggggcggtgccgggagtcccgccacgtcagtctccggccctgagccaatcccgcgcccggcctgccgcgagggggccggttgtgccgggaagtggctccagggagaagaggcctcttccctcacccgctgtgggagctgcgccccgaaagcctgccccggcacgtcgggctctcctgacccgccaagaccagagagccgttggcgccctccgcccgggcctgccggtccgtttattttaagaagctttgtgcgcctgctgtggggatttctgatccaggctgcgaagaatttcgaagtctggaaaatagcaactgtgtttgtttctaaaggatcttctcctgacccagcatcgctcatcacaatgaagaaccaagacaaaaagaacggggctgccaaacaatccaatccaaaaagcagcccaggacaaccggaagcaggacccgagggagcccaggagcggcccagccaggcggcttcctggcagtagaagctagagaggtcctcggcagctagccaggctccttcggaagcgcggagtgggggctcaagccagaaacggctcaagtctggggcctcttcgtgatgtctctgaggagctgagccgccaactggaagacatactgagcacatactgtgtggacaataaccaggggggccccggcgaaggatggggcacagggtgagccggcttgaacccgaaagatgcagagaagtcccggacctattgttggcaaggaattggggagccttgaaccaacttccagtagttcaattggagagaaggaaccctccaagggggattccaaacacagaagagattccggcagagttgacgaagttcggagcaagggaaccattcgaaggccacaggagaagaaaaaagccaagggtttgggtgagcagagggcggctctttgtgaagctgggaaggagatcacgttgctgatgcagacattgaatactctgagtaccccagaggagaagctggctgctctgtgcaagaagtatgctgaactgctggaggagcaccggaattcacagaagcagatgaagctcctacagaaaaagcagagccagctggtgcaagagaaggaccacctgcgcggtgagcacagcaaggccgtcctggcccgcagcaagcttgagagcctatgccgtgagctgcagcggcacaaccgctccctcaagctgggggacccttgtgaggtagcagtggatgatggctctcgggctgacttctttgcccaggaagaaggtgtgcagcgggcccgggaggaggaggagaagcgcaaggaggtgacctcgcacttccaggtgacactgaatgacattcagctgcagatggaacagcacaatgagcgcaactccaagctgcgccaagagaacatggagctggctgagaggctcaagaagctgattgagcagtatgagctgcgcgaggagcatatcgacaaagtcttcaaacacaaggacctacaacagcagctggtggatgccaagctccagcaggcccaggagatgctaaaggaggcagaagagcggcaccagcgggagaaggattttctcctgaaagaggcagtagagtcccagaggatgtgtgagctgatgaagcagcaagagacccacctgaagcaacagcttgccctatacacagagaagtttgaggagttccagaacacactttccaaaagcagcgaggtattcaccacattcaagcaggagatggaaaagatgactaagaagatcaagaagctggagaaagaaaccaccatgtaccggtcccggtgggagagcagcaacaaggccctgcttgagatggctgaggagaaaacagtccgggataaagaactggagggcctgcaggtaaaaatccaacggctggagaagctgtgccgggcactgcagacagagcgcaatgacctgaacaagaggtctgggcccctggttattgaaaaagttcggaattactctttacccttgtggagtgttctgagtgttggaagtacccaggaagaagccctgagcaggtgccctcaggagcagtgcccatggctccccacatcagccaagaggcccaaccccaggaagccactcctgcccggggatggggaaggcctgaggcccagccagcgcccaatggatgacaaaaagaagaaacggagtcccaagccctgcctggcccagccagcccaggccccaggcacactacggagggtccctgtgcctaccagccacagcggctccttggccctaggacttcctcatctgccatcccccaagcagcgggccaagttcaagagagtaggcaaagagaagtgccgcccagtcctggctggaggtggaagcggctctgcaggcacgcccctgcagcactccttcctgaccgaggtgactgatgtctatgagatggaggggggactcctgaacctgctcaatgatttccactctggccggctgcaggcctttcgggaaggaatgctcctttgagcagctggagcacgttcgggagatgcaggagaagctagcccgggtgcaacttcagcctggatgtgtgtcgggaggaggaggacgatgaagaggaagaggatggggtcactgaggggctgccagaggagcagaagaagacaatggctgaccgtaacctggaccagctgcttagcaatgcgcgcgggcgggcctggcagttggcgcccatggagccagagctgctggttcggaaggtgtctgcattgcaggcctgcgtccggggcttcttggtccgacgccagttccagagcctgcgagctgagtatgaggcgattgtacgagaggtcgagggcgacctgggcacgcttcagtggaccgagggccgcattcccaggccgcgattcctcccagagaaggcaaaatcccatcagacctggaaagcaggagacagggtagcaaatccagagcaggggctgtggaaccacttcccatgtgaagagtctgagggagaggccacctgggaggagatggtgctgaagaagtcaggagagagctcagcaaatcaaggaagcctctgcagagatcacagctcctggcttcagatgaagcagaacaggaaacccagccaagagaagaccagagacacgacaaggatggagaatccagaagccacagatcaaagactgccccacagccaacctcagcttcaagagcttcagtaccaccgcagccacttggccatggaattgctgtggctgcaacaggccatcaatagccgtaaggagtacctacttcttaaacaaacactgagatccccagaggcgggcccgatcagagaggaaccccgcgtgttcctagaacatggggaacaggcctgtgagagggaccagtcacaaccaagcgcaccactggaggaccagtcctacaagagacaggaccactggagagctagaacaggagggatgactcctgtcacaggggtcaaatcaccccacagattcccaggaagttttggccactacacaaaaaaacatttgctgggggctaagttcagagaaccatgctacagcaagtctggaccaccgtcgtctataccatcaaacagccaggccttgggggacaggctcaccaaagggccagacgatggaagacagacctttggagggacctgcctgctgcagatgaaaatcctggaggaccagacccccagaggtttaaaacctaggaaccattgtcccaggaagtccaggacacagctgtctgcactctatgaggactcaaatattaaggagatgtctcccagaaaactagaccacaaagagcctgactgccgaacagtcaggacacaagagttgggcctctcagaggaccacatcatctgggatggtggcagtccagcagccaagagggtagtggtgtaccggaatggggacccattcttcccaggctcccagctggtggtgactcaacgccgcttccccaccatggaggccttcctctgcgaggtgacatcagctgtgcaggccccactggctgtgcgtgccctctacacaccttgtcatggccaccctgtcaccaacctggcagacttgaagaacagagggcagtatgtggccgctggatttgaacgattccacaagctccatgtgttcaggaatggggacctggtaagtcccccatttagtctgaagctgtcccaggctgccagccaggactgggaaactgtgttgaagctcctgactgagaaggtcaagttgcagagtggggctgtgtgcaaactctgcaccctagaggggctcccactgtcagcagggaaggagctggtaactggccattactatgtggctgtcggagaggatgagttcaaggaccttccctatctggagctgctggtgcccagcccctccctgcccaggggctgctggtatgcccaaggccacagggcccaggtaacccagccctctccaaaggaaccagaccgaattaagccatctgctttctatgccagaccccagcagaccattcagccaagaagcaagctccccacactctcattcccatcaggagttataggagtatatggagctccccaccgaaggaaggagacagcgggggccctggaagtagcagatgatgaagacactcagacagaggagcccttggatcagactgtccaggggaagggaactctgatggccacaaggaagcaaaacagctgcagaggaaagggcaggatgggaaaaggccgtgtcctcacccactctggggagatgggttctgggaaggaactaacacaggtggcctcaaacactaagcagaacagttccaagccaggacccacctgtcgatgccaaggtgaggtaatagagaagggatccacactggttgaggagaaagggcatcagaagccgatcctactgcagggccatgagcggtccattacgcagattaagtataaccgcgaaggagacctcctctttactgtggccaaggaccctaggacaagggctcgggtgaacttcgtcatatttcttaacaactcttcaggggacaccaagcatgtcctcactggctcagctgacaacagctgtccgtctctgggactgtgaaacaggaaaagcagctggcccttctcaaagaccaattcggctgtccggacctgcggttttggactttggggggcaacattcatcatgttctccaacggacaaagcagatggggctaccagtgctttgtggagcttttttggacctggcgggattccgaggccagatttgacaacaatgaagccctacatggaagattcccttgcaatgactctaaaaatcaccagtgctggtttggggacccctgggggaggtgcatcatcgctgggccatggagagtgggagagctcaaccagtatagtgccaagtcctggagaggtgttggtgaatgttaaggagcactccccggcagatccaacgacattccagtttattccagggacatggaccatgtttgtgaccgcgtccaaggacaacacagccaagctttttgactccacaactcttgaacatcagaagactttccggaccagaacgtcctggtcaactcagcttgccctctcccccaactaatgacaaaggtggttttgggcgggtggtcaggaagccatggattgtaacccacaaccctccacccaggattgggcaagtttgaggccaggtttctttccatttggccttttggaagaagagtttggaaagagtccaagggtcactttggaccctatcaacagtgttgccttcccatcctgatggcaagagcttacagcagcggcggcgaagatgggttacgtccccgatccattactttcgaccccaccagtacttcgaatttgaagtttgagggcttaaagaagctggatcctcctgccgggcgtggttggctcatgcctgtaatcccaccactttttttttttaaggcaggcgggatcacctgaggtagggagtttaagacccagcctgaccaacatggagaaacctcgtctctacttaaaaatacaaaaatacaaaaattagccaggcatggtggcacacgccctatagtcccagctactcaggaggctgaggcaggagaatcacttgaacccaggaggcagaaggttgcagtgagctgagatcacgtcattgcactccatcctgagccacaagagcaaaactccgtctcaaaaaaaaaaaaagaagaaggtggatctccaaccaggccagagaagattctcacagaaggttttgaactctaagaaataaattggtttggtaataaatggcttctggtcagataaaaaaaaaa

SEQ ID NO: 2243 - DNA, 437 bp, Homo sapiens
caccattacgcctagcttggcacgaggccagcacatcgcagcagccagtaaggaaagggctcgcccctgcccccgggggcccctctgataagcaggggtgcaggcaaggagggaggccccggcgacagggccgcccacgcggactttctgcccgcagaggagggggcacacgggatggcggctcccacgggtctcctctcatagctccgcttcccacctacccgcaccctccctcgggtctgttccccttgggtgcactccccttagcgcggcctaggcaccaaggagctgctctcggcagtgttcacgagatacaatgaattgaccagatctgtcataactgatggccgttccttcagaagctcattccagtcgccccacttcccaattactgcctttgggttccctcaccactccactggagagcccaggccact

SEQ ID NO: 2244 - DNA, 4428 bp, Homo sapiens
  SIMILAR (1)..(4425): 1001254mologous to Homo sapiens nuclear pore complex protein hnup153,accession number Z25535,Smith-Waterman Score=7593.
atggcctcaggagccggaggagtcggagggggcggtggcggcaagatccggacgcggcgttgccaccaggggccaattaagccttaccagcaggggcgacaacagcatcagggcattcttagcagggttacagaatctgttaagaatattgtgccagggtggttacaaagatacttcaacaagaatgaagatgtatgcagctgttcaacagacacaagcgaggttccacgctggccagaaaataaagaggaccatctggtatatgccgatgaggagagctctaatattactgatgggagaatcacacctgagccagcagtcagtaatacagaagaaccttcaacaactagtactgcttcaaattatccagatgtgttaacaaggccttctcttcatcggagccatctgaatttttccatgttggaatcccctgcattacactgtcagccatctacatcctcggcattcccaattggcagttcgggattttcccttgtaaaggaaattaaagattctacctctcagcatgatgatgataacatctcaactaccagtggtttttcttcaagagcttctgataaagatataactgtttcaaagaacacttcattgccacctctgtggtccccagaagctgaacgttctcactcactctcacagcacactgccaccagctcaaaaaaaccagcattcaacttgtctgcctttggaacactttccccttcacttgggaattcttcaatccttaaaaccagtcagcttggagattctcctttttatcctggaaaaacaacatacggtggggcagcagctgctgtaagacagtctaaactacgaaatacaccttatcaggcaccagttagaagacaaatgaaagctaagcaactcagtgcacaatcttacggtgtgaccagttcaacagctcggcgaatattgcagtctttagagaagatgtcaagccctttagcggatgcaaaaagaattccatccattgtttcttctcctctgaattctcctcttgataggagtgggatagatatcacagattttcaggccaaaagagaaaaggtggattctcaatatcctcctgttcagagacttatgaccccaaagccagtttccatagcaacaaatcgaagtgtttattttaaaccatctctgactccttctggtgaattcaggaagactaatcaaagaatagataacaagtgcagtactggatatgaaaaaaatatgacacccggacaaaatagagaacaacgagaaagtggcttttcatatccaaatttcagtttgcctgcagccaatggtttatcttctggagtaggtggtggaggtggcaagatgagacgagaaagacacgcctttgttgcttctaaacctctggaggaggaggaaatggaagttccagtattaccgaaaatctctctaccgatcaccagttcttcactgcctacctttaattttagttcccctgagatcacaacttcctctccatcacccatcaattcgtctcaagcattaacaaacaaggtacaaatgacctctccgagcagcactggcagtcccatgtttaaattttcatctccaatcgtaaaatctactgaggcaaatgtactacctccatcatctattggatttacatttagtgtgcctgttgcaaaaacagcagaactttctggttctagtagtactttagaaccaattataagtagttcagctcatcatgtcactacagtgaacagtacaaattgtaagaagacaccacctgaagattgtgagggtccttttagacctgcagaaatcctgaaagaaggaagtgttctagatattctgaaaagccctggtttcgcatcgccgaagatagattctgttgctgctcagcccaccgcaacaagcccagtagtttatacaagaccagcaataagtagcttttcttctagtggaattgggtttggggagagtttaaaagctgggtcatcatggcagtgtgatacatgtctactccagaacaaagttacagacaacaaatgcatagcctgtcaagcagcaaaattgtcacccagagatactgctaaacagactggaattgaaacaccaaataaaagtggcaaaacaactctttctgcatcagggacaggctttggagacaaatttaaaccagtgataggcacttgggattgtgatacctgtttagtgcaaaataaacctgaagcaataaaatgtgtagcctgtgaaacaccgaaacctggaacttgtgtgaagcgagcccttacattgacagtggtttcggaaagtgctgagactatgactgcttcatcttccagctgcactgtaaccactggtaccttaggatttggagataaattcaaaaggcccattggatcttgggagtgttcagtatgctgtgtttctaataatgcagaagacaataagtgtgtgtcctgtatgtctgagaaaccaggaagttcagtacctgcttcaagtagcagcactgtacctgtctctctgccttctggaggctctctaggattggaaaagttcaagaaacccgagggaagctgggactgtgaattgtgcctagtgcagaataaggcagactctaccaaatgtttggcatgtgaaagtgcaaagccaggcacaaaatctgggtttaaaggctttgacacatcttcctcatcttcgaactcagcagcctcctcatccttcaaatttggtgtctcatcatcctcttctgggccttctcagactttaacaagcactggaaattttaaatttggagatcagggaggattcaaaataggtgtgtcatctgattctgggtctataaaccccatgagtgaaggctttaaattttctaaaccaataggagattttaaatttggagtttcatctgaatctaagcccgaagaagttaaaaaagatagtaagaatgataattttaagtttggactttcttctggtttaagcaacccagtttctttaactccatttcaatttggggtatctaatcttggacaggaagaaaagaaagaggaactgcccaaatcttcctctgcaggttttagctttggtacaggtgttattaactccacccctgctcctgctaacaccatagtgacctctgagaacaagagcagcttcaaccttggaaccatagaaaccaagagtgcttcagtggctcctttcacatgtaagacatcagaagctaaaaaagaagaaatgcctgccaccaaaggaggattctcttttggcaacgtggagcctgcctctctgccatctgcctcagtgtttgttttgggaaggacagaagagaaacagcaagagcctgtcacttctacttccctagtttttgggaagaaagctgacaatgaagagccaaagtgtcaaccagtgttttcctttgggaattcagagcaaaccaaagatgagaattcttcaaagtccacatttagttttagtatgacaaaaccatctgagaaggaatctgaacagccagcaaaagccacttttgcctttggagctcaaactagtactacagctgatcaaggtgcagcaaagccagtttttagtttcttgaacaacagttcctctagttcaagtacaccagccacttctgctggtggtggcatatttggtagttccacctcttcctccaatccacctgtggctacctttgtgtttggacagtccagcaatcctgtgagcagctctgcctttggtaacactgctgaatccagcacctctcagtctttgctattttctcaagatagcaaactagcaaccacatccagcacaggtacagctgtcaccccatttgtctttggtccaggagccagcagtaataatactaccacctctggtttcggctttggagccacaaccacatctagctctgcaggatcctcctttgtatttggaactggaccctcagcaccatctgccagtccagcatttggtgctaaccagaccccaacatttggacaaagtcaaggtgccagccagcccaatcccccaggctttggatctatatcatcttccacagcattatttcccactggttctcagcctgcaccacctacttttgggacagtgtcaagcagtagccagccccctgtgtttggacagcaacctagtcagtctgcatttggctctggaacaactcctaattctagttcggctttccagtttggcagcagcactacaaatttcaacttcacaaacaacagtccatcaggagtgttcacatttggtgcaaattctagcacacctgcagcctcagcccagccttcaggctcggggggctttccatttaaccagtctccagcagcatttacagtggggtcaaatgggaaaaatgtgttctcttcttctggaacttcattctctggtcgcaagataaagactgctgttagacgcaggaaataa

SEQ ID NO: 2245 - DNA, 1644 bp, Homo sapiens
  SIMILAR (482)..(405): 611254mologous to Homo sapiens Human secreted protein, SEQ ID NO: 7874,accession number AAG03793,Smith-Waterman Score=78.
ttttttttttttttttttgcagtcactcaaatctaacttgctttaaatattcaaatgagtgaattaaaaaggaaggctttctgtgttttggattttattttctcctgttttgcactattactccatatcaggctgcctgtgggaatagttttttgtcttttgttttttgtttgtttgcagttggggtgcatttttgttttgtttttgttgttgttgcttgttggctgttttgactgtgtggtttttaggggcaactttttcaggcaagagtctatgaccagtgctacttagcatctcctgagaatggacactgaattgtaactgtaccactcttattaggacaattaatttttcaaattaatttaataaactctcccctttcaatgggcttgacaaacttgagttaaaactagtagtatgggctgggcgcggtggctcatgcctgcaatcccagtactttgggaggccaagctgggcagatcacaaggttagcagttcaagaccagcctgaccaacattgtgaaaccccatctctaataaaaatgcaaaaaaatcacctgggcatggtggtgtgtgcctgcaatcccagctactcagggggctgaggcaggggaactgcttgaaccagggaggtggaagctgcagtgagccgagatcacaccagtgcaccccagcctgggcaatagagtgagaatccgtctcaaaaaaaaaaaaaaaaaaaaagctagtagtatgagccaacattcttggaacacttactgtgtgccagctactgtttcatgagcttgacctatgtcaacccctccttacttaaactccattatgtagctacaattacccctatcctacagataagagaacatgcacagaggtaagccaattgtccaaagccacacaataagcaagtcaccaagccagatattggaccctgggaatgcgactttttgagcttgtacttctattataaaccaaacaaattttaaaatgcatatgatttttatagattctgtttaaataaatgttggtgtaatatctttgaaaatgtttcaaaaagtttcaatgtatttaaagcaaagtattttaaaattatgtcttcaattaaaaaaaattctaaatgtaagctgctgtctaacacaagcatgcttaaatttactgaacatgacctatgttgatttggggaggtatccagatgttcagtattttaaagctgccatgattttaaaaataatttaaataagaagaggggtatcatccagcaacatggtggaataggagtttccccttcacaaaaatatcccatttgaacaacccatcccgcacccagaaaataccttacccatgcctcctaaggaatgcaggtgaaagattacagcacttgagcgaagcacgagaataagaaaagcatgcacagcagatggtaaggaggacagttttatattacctgcatcagccttccccgaaaaccatgcagcgcatcatggagaatgatccctttagcatgtggggagaagaatggatcgagcaatgagttcatagtgaaccccagtatcaggccttctccagttaaccttggtgccaggataggccctgcagacccaagcagtaggcctgccttagtttcaagctggcatgggcagtcccacc

SEQ ID NO: 2246 - DNA, 3591 bp, Homo sapiens
  SIMILAR (358)..(996): 381254mologous to Homo sapiens Similar to zinc finger protein 304,accession number BC005868,Smith-Waterman Score=303.
atgggcgctgtcagggacgaactccactcgcttgttgttccacccctcatggggaggggagcacagactccgatggcagcggcggcgctgcgggaccccgcgcagggctgcgtgacctttgaggacgtgaccatttacttctcccaggaggagtgggtgctcctcgatgaggctcagagactcctgtactgcgatgtgatgctggaaaactttgcacttatagcctcgctgggacttatatctttcaggtcccacatcgtttcccagttggagatggggaaagagccctgggtgcctgacagtgtggatatgacatcagccatggccagaggggcttatggcaggcctggctctgatttttgccatggaacagagggcaaggacttaccttctgagcataacgtttctgtagaaggagtggcacaggacaggagtcccgaggcaactctgtgcccccagaagacctgcccctgtgacatatgtggcctacgtttgaaagacattttgcatttggctgaacaccagacaacacatcccaggcagaaaccatttgtgtgtgaggcatatgtgaaaggctctgagttcagtgcaaaccttccccggaaacaggtgcagcagaacgtacacaaccctatcagaacggaggagggccaggcttcccctgtaaagacctgcagagaccacacatcagatcagctttccacctgcagggagggtgggaaggactttgtggccacagcagggtttctgcagtgtgaggtcactcccagcgatggggagccgcacgaggccaccgaaggtgtggtggattttcacattgcactaaggcataacaagtgctgtgaatctggggatgccttcaataacaaatccactcttgttcagcaccagagaatccacagcagagaaaggccttatgaatgcagcaaatgtggaatcttcttcacttacgccgctgacctcactcaacaccagaaagttcacaatagaggaaaacccgtatgagtgctttgaaggtggaaaattcttcaagccagcactccagccttgttaaacatcgcagggttcacacgggtgaaagccctcacgtgtgtggtgactgtgggaaattcttcagccgaagctccaacctcattcagcataagagggttcacactggtgaaaagccatatgagtgcagcgactgtgggaagttcttcagccagcgttccaacctcattcatcataagagggttcatacgggcagaagtgcccatgagtgcagtgaatgtgggaaatctttcaactgcaactccagcctaattaaacattggagagttcacactggagaaagaccttacaagtgtaacgaatgtgggaaattcttcagccacattgccagcctcattcaacatcagatagttcacactggcgagcggcctcacgggtgtggtgagtgtgggaaagccttcagccgaagctctgacctcatgaaacatcagcgagttcacactggtgagcggccttatgaatgcaatgaatgtgggaagttatttagccagagctccagcctcaatagccatcggagacttcacactggtgaacggccttaccagtgcagtgaatgtgggaaattctttaaccaaagctccagcctcaataaccaccggagacttcacaccggcgagcggccttatgagtgcagcgaatgtgggaaaaccttcaggcagaggtccaatctgaggcagcacctgaaagttcacaaaccagacaggccttacgaatgcagcgaatgtgggaaagccttcaaccaaaggcctaccctcattcggcatcagaagattcacatcagagaaaggagcatggagaatgtgctccttccctgttcacagcacacaccagagataagctctgagaacagaccttatcagggcgctgtcatctacaatgttgaatcttgttcatccaagtacccacactggggaggttccctaggaatgctagctgtgttggaagctatctggagacaagttacattctcttactgtagagtttatcagcgttttttcactgctggggttgtgatagaagccatgtcagcaccacacactgcagctctccaaagagtgtgtccaccactcctctgtgctcagggaaggcagacctctcctctctctttccaatccctaaagggaattaggagtagtctgaagccttgggaagatgtcattcccgcccctgtatggctggtttaacccatgaacatgaccagcttttggctgtgaagacctgagcagggttttgccaacagcttgttctagagaaggtttccctttttctgggacattgttggtctcatgttatgcctgtgaaggatttgtccagccttcatgttactctacacaacaacttatctcctgtgtattgccctggttcatgtgagagataatggccttatgataaagccgcctttagtcttacatgttctgatcactgggtggggaggttcaagagcaaagttaaaatctaccaaactgagaggggtctccacattatcttggaggggacacgaggatggcaaataaacttctggcaatccacatttgacctcatttgcattgtcaccaacgcctcctacgagaaattgtaggaatttatgggtataatattgtggtctgaatggcgtgaatttttatcccgaggagggggcagttgtgacaacctccagtgcatgtgggaacagcatgaattgggtcccttattcccagggggtgccccatattccccaatactgtaaagcagatgctgtttagcacctgccaaggagccatatgccctgaagttcagcattaggcaggtatctcttaactgtaagacataccaggcccagctggggaccataatttgtacagaaacactggatgtgattaatagggagtaggcgagattatagcaaaccagcagaaatggaactctgctaaatgtgcatccgtgaatgctcccttgaatgtggctgtgcaggattcagggtttgcagaaattctcaggacctcagacctctgtcctatgactaatgttactggcagagcaaataatctaaaggttttggttttgtggattaccatctccgtgctgtgcatctgaaggccagtgctgtgctggcaggaaaatagggactgagaaaaagcagatcctatactatagggactgtagtatctatgacgtagccagccattctttgctcccaaggcaagaagaaagagatgacagagtcaatatagggttgccaaatcggattttctaaaatgagtaggaagttggatttttatgtgcaacagtttcttttaatgctttgttgatatgtgattgtcatgcaataattattcatatttggtaagttttgtacatatattatgtacactcagggaaccaataccataatcatgataatgaacgtatccatcacctgcaaagctacctcatgcccctttacattccctccttgccttccctaggaaaccgttgatttacattttttactttagatttgtttgccttttctagaattaacacaattggaatcataaagtatttatactctcaaaaaaaaaa

SEQ ID NO: 2247 - DNA, 1673 bp, Homo sapiens
ggaacacagagaaaggttcacccgggagagatggcctagccacttccttagtgactgtttggtatatgtaggtccccctgccattactctttcagccttctgcaatctagttctacttagtcacacacttctctaagaccactcatacgtaaacactacgtagaggcccctttttgcctcattttacattggttagttatcattttgaaacttttcttcacatatgtaacagtgccggagtttttctgcttctctgtgtttggtcagaaactcttctttaggatacacctaaagatgagaagcttcatacccagtactcctcttcattcactcatatgtttttgggatcagtcccttctgctggctgtgcattggtctaatgggaacagaatagagtccagaaataacccaacatgtatgtgggacaactgggtttttgacagagggtgcaaaggtctttgaaaaaatgatgctggggattaattgggggcattcaggtggcaaaatttaaaaacaaattggtccatatcttaacactggcaaagattaaagtccaaatggattatagttccccaaaactgtataatttctagaagacaacaaggaaaacgtgttcagccttgggttaggaaaagatttcttaaatccaacaccaaaagcacaatccatgaaggaaaaatcgataaattgtactttatcaaaattgagaacttctctttgaaaggtaccataaggagaacaaaaagacaagctgtagagtggcagaaaaatatttgcaaaacatttctgataaatgagttgcatctaggttacataaagaagtctcaaaactgaacaaagtaaaacccattgttgacttaatgcgctgtttcctcctgagcttgctgcctctggcccctgctctctctccttttccatttgttttcaacattgaatccagaatgttcttcttgagatccaagtcagatcacaccaaccctcagaactctccaatagacgaccatggcactcaaaagtccacaatagccttcaatgctgggcaaaacatgaagcaccccttttctcccttctctgaccccatcacctctgtgttcaccctgctcctgccgtcctccctgcctccaaaacaggtcaggccttcgtgcctttgcactttactatttggcaataccccaaatgttcttcagggttctttagcctctttcatttcttttcctgaaggtgtcattctcactgagggcttatctaaaagctggcagctactgggggcattcctgtctcatcttccctgctgtattttgtaactcccgggctctcttttgtacttttaaacatacctatatggttttacctttgttgtttaatatttgccatgttgtttcccccacttgaatgtaagcctcccaaagattttatttttttaaactgaattattactgtattcccagaacaattcccctggcaaatatttggtactcaatagtaatgcctaagttagtaaataaatgatgaatttagaatcaaaataacgtgtctatggccaaaataaaacctgaaaaccctgtcctattttcccagaggtaactgctgttaatagtttagttgtgtgcttccagacataccttcacagaatcatttatcacaataaaggtgtcatactatgcaaaaaaaaa

SEQ ID NO: 2248 - DNA, 488 bp, Homo sapiens
acatctatgttcgagatacctccaagcttggcacgaggtgctgacccacacttggccccggctctggcatccacaggacgctgccttatccgtcatctcgctggggctgggggctagaggctgagcaggtcacactgaacaaaagaagtgtgtccccatcactaggctaacatctgagtttcttccacagtatttggtaacacagtcagaaacaagactgaagatgattctggaggcaactgggaaccccccagaacgattctgcaggcttctgggaagctgaaaaaccccaaggccagactggcctcagaatgcctgagtccttttgattccactggaaaagccatccatctgtgccaagtgtgtgggagagcttcaaggagccattacagcctgggccaccattgaggcacagccacgtgggggagtagtcctgaaagtgtcctgggtgtggcaaaggcttttccactaagttggacctcagatgg

SEQ ID NO: 2249 - DNA, 741 bp, Homo sapiens
  SIMILAR (164)..(33): 541254mologous to Homo sapiens PRO1902,accession number AF118082,Smith-Waterman Score=131.
ttgtagaaaaaaaggtctcactgtgctcaggctggtcttgagctcctgtctgggcaacttggctaaacctcatctgtacaaaaaatacgaaaactagctgggtgtggtggtgtgcatccgtggtcccagctactagagaggctgaggtgggaggattccttcaccccagggaggtcaaggctgcagtgagccatgatctcatcactgtactccagcttgggcaacagagtgagaccctgtctccaacaacaacaaacaaaaacaaaaaccaaaggaatctaatctatctagggcaacttccagaccttagggtttgatccccactttgtcacttccctacatgtatgatgttggatctcaatttccaaacagtgacatgagtaccataacctttcaaaaagtatctatggtgtagcctactggggtgctgggctattgttctcagtgctttgggacagattaagtaaaaccaagcaaaccaaagatctctggccctgtgggaattcatattcttggtgagggcccatttactttttccttctttttggattcatatatcccttttggttataattcaatcagaaaatcgaaaaaactgagatgtttccaatactcagatttataaattattgccatacttgtgtcagattttttttaaaaaagaagtaaaatattacaaagtttatgtccatctcccattctcctcgtgccaagcttggtgtaatcggtgtcacaagcggt

SEQ ID NO: 2250 - DNA, 914 bp, Homo sapiens
ccaagcgtctgcctaggctgagacacgtgctgagctccctgaagatggaccggctgccccctagaagggagactttcaggggcatcagggcccttgggatgctccgccctgaccagctttttggtggcagagggaggcacggggagagggagaggccatgtcgcagtccccctgccgtgggagaggcaacgcggaaatgtatagacccagtgctcagccagaaacagggccagcaagcggctagtgaacggaggcagcccggggctcgtcagggtgggcagagccatggcccaggggttgaaaacccccggagttccccatgagacttggctggccctttcccacccctggggccttcagtctccccatcttgtgtgatgaggagagaccctgaggacagaggtcttcaggctgtgagtctcaacaggaactgagatccccaagggagacagagctgcaggtcacctcccctacctgcttctcagcaggacccaggaggcctggcccagctcctggtggaccccaagcagccagagcttactgctgccatctgaagacctcatctgagcccactttccaccaagcgcccacccaggctgaggtctcctgggaattctcacccgctctcctgctgataaggaaatgacgtcaatggctaccccagagaaatgccccacatcccaggacaccagccatcaggaaggcagctcttcctcacccagaaagaggcaattatttcctctcagcagcctggccccagggagcccccttccctctctggggctctgcctctccttttgttgccctgccatggagccccagggccggggcagcccctctctgcccagggaaggcaccgccctcaaagacaaggcttggccgggcagtgacctttccctgagcggagggggtgg

SEQ ID NO: 2251 - DNA, 2562 bp, Homo sapiens
  SIMILAR (1207)..(2559): 1001254mologous to Cloning vector pBACe3.6 levansucrase,accession number U80929,Smith-Waterman Score=2385.
atgcccttgagagccttcaacccagtcagctccttccggtgggcgcggggcatgactatcgtcgccgcacttatgactgtcttctttatcatgcaactcgtaggacaggtgccggcagcgctctgggtcattttcggcgaggaccgctttcgctggagcgcgacgatgatcggcctgtcgcttgcggtattcggaatcttgcacgccctcgctcaagccttcgtcactggtcccgccaccaaacgtttcggcgagaagcaggccattatcgccggcatggcggccgacgcgctgggctacgtcttgctggcgttcgcgacgcgaggctggatggccttccccattatgattcttctcgcttccggcggcatcgggatgcccgcgttgcaggccatgctgtccaggcagcctaacttcgatcattggaccgctgatcgtcacggcgatttatgccgcctcggcgagcacatggaacgggttggcatggattgtaggcgccgccctataccttgtctgcctccccgcgttgcgtcgcggtgcatggagccgggccacctcgacctgaatggaagccggcggcacctcgctaacggattcaccactccaagaattggagccaatcaattcttgcggagaactgtgaatgcgcaaaccaacccttggcagaacatatccatcgcgtccgccatctccagcagccgcacgcggcgcatctcgggcagcgttgggtcctggccacggtctggaaacgcggaagtcagcgccctgcaccattatgttccggatctgcatcgcaggatgctgctggctaccctgtggaacacctacatctgtattaacgaagcgctggcattgaccctgagtgatttttctctggtcccgccgcatccataccgccagttgtttaccctcacaacgttccataaccgggcatgttcatcatcagtaacccgtatcgtgagcatcctctctcgtttcatcggtatcattacccccatgaacagaaatcccccttacacggaggcatcagtgaccaaacaggaaaaaaccgcccttaacatggcccgctttatcagaagccagacattaacgcttctggagaaactcaacgagctggacgcggatgaacaggcagacatctgtgaatcgcttcacgaccacgctgatgagctttaccgcagctgcctcgcgcgtttcggtgatgacggaggagcgactcaagccttcgcgaaagaaaataaccaaaaagcatacaaagaaacgtacggcgtctctcatattacacgccatgatatgctgcagatccctaaacagcagcaaaacgaaaaataccaagtgcctcaattcgatcaatcaacgattaaaaatattgagtctgcaaaaggacttgatgtgtgggacagctggccgctgcaaaacgctgacggaacagtagctgaatacaacggctatcacgttgtgtttgctcttgcgggaagcccgaaagacgctgatgacacatcaatctacatgttttatcaaaaggtcggcgacaactcaatcgacagctggaaaaacgcgggccgtgtctttaaagacagcgataagttcgacgccaacgatccgatcctgaaagatcagacgcaagaatggtccggttctgcaacctttacatctgacggaaaaatccgtttattctacactgactattccggtaaacattacggcaaacaaagcctgacaacagcgcaggtaaatgtgtcaaaatctgatgacacactcaaaatcaacggagtggaagatcacaaaacgatttttgacggagacggaaaaacatatcagaacgttcagcagtttatcgatgaaggcaattatacatccggcgacaaccatacgctgagagaccctcactacgttgaagacaaaggccataaataccttgtattcgaagccaacacgggaacagaaaacggataccaaggcgaagaatctttatttaacaaagcgtactacggcggcggcacgaacttcttccgtaaagaaagccagaagcttcagcagagcgctaaaaaacgcgatgctgagttagcgaacggcgccctcggtatcatagagttaaataatgattacacattgaaaaaagtaatgaagccgctgatcacttcaaacacggtaactgatgaaatcgagcgcgcgaatgttttcaaaatgaacggcaaatggtacttgttcactgattcacgcggttcaaaaatgacgatcgatggtattaactcaaacgatatttacatgcttggttatgtatcaaactctttaaccggcccttacaagccgctgaacaaaacagggcttgtgctgcaaatgggtcttgatccaaacgatgtgacattcacttactctcacttcgcagtgccgcaagccaaaggcaacaatgtggttatcacaagctacatgacaaacagaggcttcttcgaggataaaaaggcaacatttgcgccaagcttcttaatgaacatcaaaggcaataaaacatccgttgtcaaaaacagcatcctggagcaaggacagctgacagtcaactaa

SEQ ID NO: 2252 - DNA, 3225 bp, Homo sapiens
  SIMILAR (2494)..(2742): 1001254mologous to Acinetobacter baumannii chloramphenicol acetyltransferase,accession number M62822,Smith-Waterman Score=459.
  misc_feature (1)...(3225): n = a,t,c or g
atgaccctggttttgaataacgcgggctttgcacgagttttaagaatggggaaggggtcggcgagctcggtcggagggaaccgatatgtggacgcggccgaagcctgcacggcggacgcgcggtgccagcgtttgcgctccgagtatgtggcgcagtgcctgggccgggctgcgcaggggggctgtccccgcgcccgctgccgccgggccctgcgccgcttcttcgcccgcgggccgcccgcgctcacccacgcantgaattttcgcctggtggggcaaaccagcgtggaccgcttgctgcaactttctcaggcccaggcggtgaagggcaatcagctgttgcccgtctcactggtgaaaagaaaaaccaccctggcgcccaatacgcaaaccgcctctccccgcgcgttggccgattcattaatgcagctggcacgacaggtttcccgactggaaagcgggcaggattttgccgatttcggaaccaccatcaaacaggattttcgcctgctggggcaaaccagcgtggaccgcttgctgcaactctctcagggccaggcggtgaagggcaatcagctgttgcccgtctcactggtgaaaagaaaaaccaccctggcgcccaatacgcaaaccgcctctccccgcgcgttggccgattcattaatgcagctggcacgacaggtttcccgactggaaagcgggcaggattttgccgatttcggaaccaccatcaaacaggattttcgcctgctggggcaaaccagcgtggaccgcttgctgcaactctctcagggccaggcggtgaagggcaatcagctgttgcccgtctcactggtgaaaagaaaaaccaccctggcgcccaatacgcaaaccgcctctccccgcgcgttggccgattcattaatgcagctggcacgacaggtttcccgactggaaagcgggcaggattttgccgatttcggaaccaccatcaaacaggattttcgcctgctggggcaaaccagcgtggaccgcttgctgcaactctctcagggccaggcggtgaagggcaatcagctgttgcccgtctcactggtgaaaagaaaaaccaccctggcgcccaatacgcaaaccgcctctccccgcgcgttggccgattcattaatgcagctggcacgacaggtttcccgactggaaagcgggcagtcctgttctacgccccccccaaacactgataaacagagcaaagaaaaatgtcccatgaaatttacattccagcaggtggagacaaacatgactggcgatgctgtcggaatggacgatatcccgcaagaggcccggcagtaccggcataaccaagcctatgcctacagcatccagggtgacggtgccgaggatgacgatgagcgcattgttagatttcatacacgggtcaccgtcgacagcgacacacttgcatcggatgcagcccggttaacgtgccggcacggcctgggtaaccagatattgaacgtgatggccggggaatcggggtgtgaagaaaattgcgggaacggcggaggcgggaacaagggaaaccggaataagcgtaaacagatacgcaagcgacgcaaaagggcggaaccgcggaaaggcccgacaaagcggggaacaccgcccacaccaacagaagcccgacgcgcccgcgtggcccgaagcgaagaatcaaccgaaacgccggaacgacggcatcagcaacgccgaaccggcgacccccaagcaccaggggcacggccctgcacagccatgcggaccacgcggaatgaaacccaagagaagaccctcagagctcccaccaagcccgcaaagcacaaggggggtacagaatccgggaaaaagcatctggctcagacgccgcgtgccacggcgtggacagcgtacaagcgaaaaacacggaaaacgtcattcagcaacctcggactagaagggcagacacgctttaaaaggacgaaggacgatcaacaccaacgtacaccccgggtctacgctcctcagcgcgcaaagcgccgagcaaggacaggtgacacgccaaaacacctaaaacgagcatacagggtcattccgtttgtagtgacgccaacgcgggattctgcggacatgatcggcccaccaaaggattttgccgatttcggaaccaccatcaaacaggattttcgcctgctggggcaaaccagcgtggaccgcttgctgcaactctctcagggccaggcggtgaagggcaatcagctgttgcccgtctcactggtgaaaagaaaaaccaccctggcgcccaatacgcaaaccgcctctccccgcgcgttggccgattcattaatgcagctggcacgacaggtttcccgactggaaagcgggcagtggaaattacggcttttaaaagccgtaaaagaaaaaaaagcccagttttatccggccttaattcacatctgtgcccgcctgatgaatgttcaccggaggttccgtatggcaataaaagacgggtttattgagaatatgtttttcgtctcagccaatccctgggtgagtttcaccagttttgatttaaacgtggccaatatggacaacttcttcgcccccgttttcaccatgggcaaatattatacgcaaggcgacaaggtgctgatgccgctggcgattcaggttcatcatgccgtttgtgatggcttccatgtcggcagaatgcttaatgaattacaacagtactgcgatgagtggcagggcggggcggattttgccgatttcggaaccaccatcaaacaggattttcgcctgctggggcaaaccagcgtggaccgcttgctgcaactctctcagggccaggcggtgaagggcaatcagctgttgcccgtctcactggtgaaaagaaaaaccaccctggcgcccaatacgcaaaccgcctctccccgcgcgttggccgattcattaatgcagctggcacgacaggtttcccgactggaaagcgggcaggattttgccgatttcggaaccaccatcaaacaggattttcgcttgctggggcaaaccagcgtggaccgcttgctgcaactctctcagggccaggcggtgaagggcaatcagctgttgcccgtctcactggtgaaaagaaaaaccaccctggcgcccaatacgcaaaccgcctctccccgcgcgttggccgattcattaatgcagctggcacgacaggtttcccgactggaaagcgggcagtga

SEQ ID NO: 2253 - DNA, 799 bp, Homo sapiens
  SIMILAR (3)..(491): 931254mologous to Homo sapiens kinesin-like protein RBKIN1,accession number AY014403,Smith-Waterman Score=773.
  misc_feature (1)...(799): n = a,t,c or g
atgaaatagtatccaatataccaaaggcaactgaggagatagaggaccgggaaacgctggctctcctggcagcaaggagtgaaaacgaaggcacatcatatggggagacgtacattgagaagtacactcgaggcgtgctgcaggtggaaaacattctgagtcttgaacggctccggcaggccgtcacagtcaaagaagcactttccaccaaagcccggcacattcggaggagcctcagtacaccaaatgttcataatgtctcttccagccgaccggacctttctggctttgatgaagatgacaagggttggccagagaaccagttggacatgtctgactatagctccagttaccaagatgtagcatgttatggaactttacccagggattctcctcgaaggaataaagaaggttgtacatcaaagactcctcatgccttaaccgtcagcccttttaaaggcattttctcctcagccaccaaagtttttcaagcccctaatgcctgtaaaagaggagcataaggaaaaggatagccctgggaaggcaaggcctcttctaagccagggagggacttcttgagggagggaaggaaaatgagctggaagctatttaacaggaagctaataagttcacagccttatgtacctgtgggagtttgcttgacttcagtgtttacaattgccagcttgggagaacagggaatggtttttcctcttaaagtagatctgttcaaactcacgggtnttgggagaaagaagtgtccccgtaggccctaccaccagcagtatttaaccagtgg

SEQ ID NO: 2254 - DNA, 2876 bp, Homo sapiens
  SIMILAR (717)..(1184): 951254mologous to Plasmid F Protein A,accession number M12987,Smith-Waterman Score=780.
acccaataaaaaatgataaaggggatatcaccactgatcccacagaaatacaaactaccatcagagaatactataaacacctctatgcaaataaactagaaaatctagaagaaatggataaattcctcgacacatacaccctcccaagactaaaccaggaagaagttgaatctctgaatagaccaataacaggctctgaaattgaggcaataattaatagcttaccaaccaaaaaaagtccaggaccagatggattcacatccgaattctaccagaggtacaaggagacagtggtttgccggctttcgccgccaagttttaatggggggctccctttagggtccgatttagtgttttacgcccctggaccccaaaaaattatttgggtgatggttcacgtaggggccctcgccctgaaagacggtttttcgcccttggacgttggagtccacggattttgccgatttcggaaccaccatcaaacaggattttcgcctgctggggcaaaccagcgtgacccgcttgctgcaactctctcagggccaggcggtgaagggcaatcagctgttgcccgtctcactggtgaaaagaaaaaccaccctggcgcccaatacgcaaaccgcctctccccgcgcgttggccgattcattaatgcagctggcacgacaggtttcccgactggaaagcgggcagtgagcgcaacgcaattaatggtaaaggacgatgtcacttatgcaataaagctctcttgctggccggggcttgacattattccttcctgtctggctctgcaccgcattgaaactgagttaatgggcaaatttgataaaggtagactgcccacccatccacacttgatgctccgactggccattgaaactgttgctcatgactatgatgtcatagttattgacagcgcgcctaacttgggtatcggcacgattaatgtcgtatgtgctgcagatgtgctgattgttcccacgcctgctgagttgcttgactacacctccgcactgcagtttttcgatatgcttcgtgatctgctcaagaacgttgatcttaaagggttcgagcctgatgtacgtattttgcttaccaaatacagcaatagtaatggctctcagtccccgtggatggaggagcaaattcggcaggcctggggaagcatggttctaaaaaatgttgaattttgccgatttcggaccccccatcaaccaggattttcgcctgctggggcaaaccagcgtggaccgcttgctgcaactctctcagggccagccggtgaagggcaatcagctgttgcccgtctcactggtgaaaagaaaaaccaccctggcgcccaatacgcaaaccgcctctccccgcgcgttggccgattcattaatgcagctggcacgacaggtttcccgactggaaagcgggcaggaattcgggaaatatctgacttaatgatcattggcgagacagtaatcacaagatcccccacaggcactaggtcgcccgtgggtcaattccttgcagtttggggagggaaattaccctctccagcttttggaagcgggagtagggattttgccgatttcggaaccaccatcaaacaggattttcgcctgctggggcaaaccagcgtggaccgcttgctgcaactctctcagggccaggcggtgaagggcaatcagctgttgcccgtctcactggtgaaaagaaaaaccaccctggcgcccaatacgcaaaccgcctctccccgcgcgttggccgattcattaatgcagctggcacgacaggtttcccgactggaaagcgggcaggcgtggtctttatgtacacccattatgtggttttatcctcgtgcattttctcgtctgcgtcaactaactaggtattctagctcggggggtgtcgcggggtgtcactcgggcaaaccgagtcgcaagctttcgacactcgggttcgcgtcgctggtacaacattcaaccctatctcgggctactcttttgatttataagggattttgccgatttcggaacccccatcaaacaggattttcgcctgctggggcaaaccagcgtggaccgcttgctgcaactctctcagggccaggcggtgaagggcaatcagctgttgcccgtctcactggtgaaaagaaaaaccaccctggcgcccaatacgcaaaccgcctctctccgcgcgttggccgattcattaatgcagctggcacgacaggttttccgactggaaagcgggcagtgagcgcaacgcaattaatggattttgccgatttcggaaccaccatcaaacaggattttcgcctgctggggcaaaccagcgtggaccgcttgctgcaactctctcagggccaggcggtgaagggcaatcagctgttgcccgtctcactggtgaaaagaaaaaccaccctggcgcccaatacgcaaaccgcctctccccgcgcgttggccgattcattaatgcagctggcacgacaggtttcccgactggaaagcgggcaggattttgccgatttcggaaccaccatcaaacaggattttcgcctgctggggcaaaccagcgtggaccgcttgctgcaactctctcagggccaggcggtgaagggcaatcagctgttgcccgtctcactggtgaaaagaaaaaccaccctggcgcccaatacgcaaaccgcctctccccgcgcgttggccgattcattaatgcagctggcacgacaggtttcccgactggaaagcgggcagttggcgggctttccccgtcaagctcttaatcgggggctccctttagggttccgatttagtgctttacggcacttggaccccaaaaaacttgatttgggtgatggttcacgtagtgggccatcgccctga

SEQ ID NO: 2255 - DNA, 2640 bp, Homo sapiens
  SIMILAR (1)..(678): 981254mologous to Plasmid F Protein A,accession number M12987,Smith-Waterman Score=1163.
  misc_feature (1)...(2640): n = a,t,c or g
atggaaattcgaggacgggttgagcaacgtgttggttatacaattgaacaaattaatcatatgcgtgatgtgtttggtacgcgattgcgacgtgctgaagacgtatttccaccggtgatcggggttgctgcccataaaggtggcgtttacaaaacctcagtttctgttcatcttgctcaggatctggctctgaaggggctacgtgttttgctcgtggaaggtaacgacccccagggaacagcctcaatgtatcacggatgggtaccagatcttcatattcatgcagaagacactctcctgcctttctatcttggggaaaaggacgatgtcacttatgcaataaagcccacttgctggccggggcttgacattattccttcctgtctggctctgcaccgtattgaaactgagttaatgggcaaatttgatgaaggtaaactgcccaccgatccacacctgatgctccgactggccattgaaactgttgctcatgactatgatgtcatagttattgacagcgcgcctaacctgggtatcggcacgattaatgtcgtatgtgctgctgatgtgctgattgttcccacgcctgctgagttgtttgactacccctccgcactgcagttttttcatatgctttgtgatcttgtcaagaacgttgatcttaaagggttcgagcctggagaattggccccgctctatggctgctggggcctgcgcactggaatcgccgtggcctgcgcaccccaccatgccagtttgaacctccatggcctcaaccagattcggaatgtcaaaaagcagagtgtctatttgatgaatttgaggaaatcgggaactttgggccacccaggctctgtagatgagaccacctatgaaagactagcggaggaatcactggactctttagcagagttttttgaagaccttgcagacaagccatacacgtttgaggactatgatgtttcctttgggagtggtgtcttaactggtaaactgggtagagatctagcaacctacgtgatcaacaagcagacaccaaacaagcaaatctggttatcttctccatccagtggactcaagcgttatgactggactgagaaaaactgggtgtactcccacgattgcgtgtccctccatgatgtgctcgctgcagagctcactaaagccttaaaaaccaaactggacttgtcttccttggcctattctggaaaagagcttgatgcccagcccggctattatatgctacatgcacagtatatgcttcgtccaccactatcttcacccatgcagcatcgggccccggagaccggccccacctcccgaaactcggtactaaatgcggtcactccgcctgcgccgaccaccccccctagcccattgttcgactctagaggatcccccagacggaaaacatatcagaacgttcagcagtttatcgatgaaggcaattatacatccggcgacaaccatacgctgagagaccctcactacgttgaagacaaaggccataaataccttgtattcgaagccaacacgggaacagaaaacggataccaaggcgaagaatctttatttaacaaagcgtactacggcggcggcacgaacttcttccgtaaagaaagccagaagcttcagcagagcgctaaaaaacgcgatgctgagttagcgaacggcgccctcggtatcatagagttaaataatgattacacattgaaaaaagtaatgaagccgctgatcacttcaaacacggtaactgatgaaatcgagcgcgcgaatgttttcaaaatgaacggcaaatggtacttgttcactgattcacgcggttcaaaaatgacgatcgatgnaggatccccggnaaaaatccgtttattctacactgactattccggtaaacattacggcaaacaaagcctgacaacagcgcaggtaaatgtgtcaaaatctgatgacacactcaaaatcaacggagtggaagatcacaaaacgatttttgacggagacggaaaaacatatcagaacgttcagcagtttatcgatgaaggcaattatacatccggcgacaaccatacgctgagagaccctcactacgttgaagacaaaggccataaataccttgtattcgaagccaacacgggaacagaaaacggataccaaggcgaagaatctttatttaacaaagcgtactacggcggcggcacgaacttcttccgtaaagaaagccagaagcttcagcagagcgctaaaaaacgcgatgctgagttagcgaacggcgccctcggtatcatagagttaaataatgattacacattgaaaaaagtaatgaagccgctgatcacttcaaacacggctgccgccaaccaggagagcagccatgtgcagcagcaggcccttgctctggagcagcagttcttggagcgcacccaggcgctagaagcccagatagtggccctggagagaatgcgggcagctgaccagaccaccgcaaagcaagggatgtgcacacaggtgcatctgaccaacaccagccgccacgctggtagaccgtcaaaatgtcagttctgcagtactcggagacaaaggcatagactatcagatcctaaacaggatttaggaaacagacgattttcccctccaccttga

SEQ ID NO: 2256 - DNA, 3345 bp, Homo sapiens
  SIMILAR (1197)..(1244): 811254mologous to Plasmid F Protein B,accession number M12987,Smith-Waterman Score=57.
  misc_feature (1)...(3345): n = a,t,c or g
atggagcggcgtaaccgtcgcacaggaaggacagagaaagcgcggatctgggaagtgacggacagaacggtcaggacctggattggggaggcggttgccgccgctgctgctgacggtgtgacgttctctgttccggtcacaccacatacgttccgccattcctatgcgatgcacatgctgtatgccggtataccgctgaaagttctgcaaagcctgatgggacataagtccatcagttcaacggaagtctacacgaaagtttttgcgctggatgtggctgcccggcaccgggctatcagagatgccgagacagcagggcgactaccgcacccggatatggaaattcgaggacgggttgagcaacgtgttggttatacaattgaacaaattaatcatatgcgtgatgtgtttggtacgcgattgcgacgtgctgaagacgtatttccacctgtgatcggggttgctgcccataaaggtggcgtttacaaaacctcagtttctgttcatcttgctcaggatctggctctgaaggggctacgtgttttgctcgtggaaggtaacgacccccagggaacagcctcaatgtatcacggatgggtaccagatcttcatattcatgcagaagacactctcctgcctttctatcttggggaaaaggacgatgtcacttatgcaataaagcccacttgctggccggggcttgacattattccttcctgtctggctctgcaccgtattgaaactgagttaatgggcaaatttgatgaagggttcgagcctgatgtacgtattttgcttaccaaatacagcaatagtaatggctctcagtccccgtggatggaggagcaaattcgggatgcctggggaagcatggttctaaaaaatgttgtacgtgaaacggatgaagttggtaaagctgccccgatggtggattcgttaattgcgcgcgtaggagtaatggctcgcggtaatgccattactttgcctgtatgtggtcgggatgtgaagtttactcttgaagtgctccggggtgatagtgttgagaagacctctcgggtatggtcaggtaatgaacgtgaccaggagctgcttactgaggacgcactggatgatctcatcccttcttttctactgactggtcaacagacaccggcgttcggtcaaagagtatctggtgtcatagaaattgccgattgggaagtcgccgtcgttaagctgctgcactttaccgaagtgattatcgngacatttcgtagaactcccccttgtcacacttcacatggatctgtcatggcggaaacagcggttatcaatcacaagaaacgtaaaaatagcccgcgaatcgtccagtcaaacgacctcactgaggcggcatatagtctctcccgggatcaaaaacgtatgctgtatctgttcgttgaccagatcagaaaatctgatggcaccctacaggaacatgacggtatctgcgagatccatgttgctaaatatgctgaaatattcggattgacctctgcggaagccagtaaggatatacggcaggcattgaagagtttcgcggggaaggaagtggttttttatcgccctgaagaggatgccggcgatgaaaaaggctatgaatcttttccttggtttatcaaacgtgcgcacagtccatccagagggctttacagtgtacatatcaacccatatctcattcccttctttatcgggttacagaaccggtttacgcagtttcggcttagtgaaacaaaagaaatcaccaatccgtatgccatgcgtttatacgaatccctgtgtcagtatcctgccccgatggtggattcgttaattgcgcgcgtaggagtaatggctcgcggtaatgccattactttgcctgtatgtggtcgggatgtgaagtttactcttgaagtgctccggggtgatagtgttgagaagacctctcggacaccggcgttcggtcgaagagtatctggtgtcatagaaattgccgatgggagtcgccgtcgtaaagctgctgcacttaccgaaagtgattatcgtgttctggttggcgagctggatgatgagcagatggctgcattatccagattgggtaacgattatcgcccaacaagtgcttatgaacgtggtcagcgttatgcaagccgattgcagaatgaatttgctggaaatatttctgcgctggctgatgcggaaaatatttcacgtaagattattacccgctgtatcaacaccgccaaattgcctaaatcagttgttgctcttttttctcaccccggtgaactatctgccccggtcagggccataaaatggtccttgtcattgggtacttccgcggcccactcgaaaaactcctgcataaagcccacttgctggccgggtcttgacattattccttcctgtctggctctgcaccgtattgaaactgagttaatgggcaaatttgatgaaggtaaactgcccaccgatccacacctgatgctccgactggccattgaaactgttgctcatgactatgatgtcatagttattgacagctctcctaacctgggtatcggcacgattaatgtcgtatgtgctgctgatgtgctgattgttcccacgcctgctgagttgtttgactacacctccgcactgcagtttttcgatatgcttcgtgatctgctcaagaacgttgatcttaaagggttcgagcctgatgtacgtattttgcttaccaaatacagcaatagtaatggctctcagtccccgtggatggaggagcaaattcgggatgcctggggaagcatggttctaaaaaatgttgtacgtgaaacggatgaagttggtaaagaaactcccacaagtgcttatgaacgtggtcagcgttatgcaagccgattgcagaatgaatttgctggaaatatttctgcgctggctgatgcggaaaatatttcacgtaagattattacccgctgtatcaacaccgccaaattgcctaaatcagttgttgctcttttttctcaccccggtgaactatctgccctgtcaggtgatgcacttcaaaaagcctttacagataaagaggaattacttaagcagcaggcatctaaccttcatgagcagaaaaaagctggggtgatatttgaagctgaagaagttatcactcttttaacttctgtgcttaaaacgtcatctgcatcaagaactagtttaagctcacgacatcagtttgctcctggagcgacagtattgtataagggcgataaaatggtgcttaacctggacaggtctcgtgttccaactgagtgtatagagaaaattgaggccattcttaaggaacttgaaaagccagcaccctga

SEQ ID NO: 2257 - DNA, 2994 bp, Homo sapiens
  SIMILAR (1302)..(679): 951254mologous to Plasmid F Protein B,accession number M12987,Smith-Waterman Score=969.
ttagtgcggtttaatgaccgtcaggacttgaaagccctgcttgtggactctaaaggatccccttgttttcttattggtaggtctggctttagcagacaaagctttgagagaatcctcatgcccgctttccagtcgggaaacctgtcgtgccagctgcattaatgaatcggccaacgcgcggggagaggcggtttgcgtattgggcgccagggtggtttttcttttcaccagtgagacgggcaacagctgattgcccttcaccgcctggccctgagagagttgcagcaagcggtccacgctggtttgccccagcaggcgaaaatcctgtttgatggtggttccgaaatcggcaaaatcccttgtctccttctgagtgcccttcactgcctggcggtgtttctccctggcccttcgtgggctgggcttctgcgaccgatcctgcccgctttccagtcgggaaacctgtcgtgccagctgcattaatgaatcggccaacgcgcggggagaggcggtttgcgtattgggcgccagggtggtttttcttttcaccagtgagacgggcaacagctgattgcccttcaccgcctggccctgagagagttgcagcaagcggtccacgctggtttgccccagcaggcgaaaatcctgtttgatggtggttccgaaatcggcaaaatccctgtccaggttaagaaccattttatcgcccttatacaatactgtcgctccaggagcaaactgatgtcgtgagcttaaactagttcttgatgcagatgacgttttaagcacagaagttaaaagagtgataacttcttcagcttcaaatatcaccccagcttttttctgctcatgaaggttagatgcctgctgcttaagtaattcctctttatctgtaaaggctttttgaagtgcatcacctgaccgggcagatagttcaccggggtgagaaaaaagagcaacaactgatttaggcaatttggcggtgttgatacagcgggtaataatcttacgtgaaatattttccgcatcagccagcgcagaaatatttccagcaaattcattctgcaatcggcttgcataacgctgaccacgttcataagcacttgttgggcgataatcgttacccaatctggataatgcagccatctgctcatcatccagctcgccaaccaaaacacgataatcactttcggtaagtgcagcaactttacgacggcgactcccattcgcaatttctatgacaccagatactcttccaccgaacgccggtgtctgcacagccccataggagacactggggataccacgataaatgacatggctttgcctctgaaagagagatgtgctttcaaattcatttttagcagggcccacatgggtggtaatatcatcattagtgatgcccaagtcccatgtaatcaaccacagaaggatattgctctgtggcactattgatgcgaggccatgacctttaccaacttcatccgtttcacgtacaacattttttagaaccatgcttccccaggcatcccgaatttgctcctccatccacggggactgagagccattactattgctgtgtttggtaagcaaaatacgtacatcaggctcgaaccctttaagatcaacgttcttgagcagatcacgaagcatatcgaaaaacttgttctccttcatgaatgcctcttccactgcctggcggctgtattctccaatgtaccattcattgtgctggacatccaaacacatcacgcatatgattaatttgttcaattgtataaccaacacgttgctcaacccgtcctcgaatttccatatccgggtgcggtagtcgccctgctttctcggcatctctgatagctgcccgctttccagtcgggaaacctgtcgtgccagctgcattaatgaatcggccaacgcgcggggagaggcggtttgcgtattgggcgccagggtggtttttcttttcaccagtgagacgggcaacagctgattgcccttcaccgcctggccctgagagagttgcagcaagcggtccacgctggtttgccccagcaggcgaaaatcctgtttgatggtggttccgaaatcggcaaaatccattaattgcgttgcgctcactgcccgctttccagtcgggaaacctgtcgtgccagctgcattaatgaatcggccaacgcgcggggagaggcggtttgcgtattgggcgccagggtggtttttcttttcaccagtgagaccgggaacagctgattgcccttcaccggctggccctgttggtggaggtaaaggtgcgtactcgttagggcctgcgtttggcggggcgcaggaggggtggtaggcgggatacacggaaaaattacctgagcttgaagcctgcttgtgcgctctaaagatcccctgcccgctttccagtcgggaaacctgtcgtgccagctgcattaatgaatcggccaacgcgcggggagaggcggtttgcgtattgggcgccagggtggtttttcttttcaccagtgagacgggcaacagctgattgcccttcaccgcctggccctgagagagttgcagcaagcggtccacgctggtttgccccagcaggcgaaaatcctgtttggatggtggttccgaatcggcaaaatcctgcccgctttccagtcgggaaacctgtcgtgccagctgcattaatgaatcggccaacgcgcggggagaggcggtttgcgtattgggcgccagggtggtttttcttttcaccagtgagacgggcaacagctgattgcccttcaccgcctggccctgagagagttgcagcaagcggtccacgctggtttgccccagcaggcgaaaatcctgtttgatggtggttccgaaatcggcaaaatccctggcgtaccccccacgccagctaaagccaataaccgtcggggttacaaccctccttttggactctaaagaaccccccttcttgcccttgtccccacatgtgcctggcaacat

SEQ ID NO: 2258 - DNA, 3573 bp, Homo sapiens
  SIMILAR (2527)..(3501): 721254mologous to Bacillus amyloliquefaciens precursor (AA - 29 to 443),accession number X52988,Smith-Waterman Score=1127.
atgcctcctgatggggagatacctcccagcagggatcaacagacacctcatacaggagagctccagctgacatctggcaggtgctcctctgggatgaagcttccagaggaaggaacaggcagcaatgtttgctgttctgcagcccctgctgttgatacccaggtcgaatcaaggtccaagtacggcatcacatctggaattaagatccttgttccagtgacgtgtcaaaccttacgtcccaaccgaagagaaaaagatccttttcagcttgccaaggcactggaaaagctccagcatcttatggcagcccttaaatcaccaaaagaagaattaacacatataatgtgggtagagttaacaaacaacaggcgcgatacaatctgccatccaaaggctacaagaaaggtggtgcgtgaacggttcacaaggcccttgaacccttccagagtcgtcaattccaccccccggagcgaagtacccgcgggacagccccgaggcgcacgtaaacctttgtttgtccaaacggttcggcttctacggagccagcggctagcgcgggacactccaccctggcggtcgctgggattacaggccgccgccctgcatcgcagacggagccggcacagggaggaccagctacatctgtgggccgcggcggcggccaagcccggtaacatcctgactggacatcagcgaacaccgatggcttcgccgccacaagctgcctgggtgacccggaaacggcaacgtcatttagcgacgcctgccgtggagggtttactagcattgggcatcagtaagtctgttcaaacaccagatccttctcatccaaattcctctctctctgacgttccagaacaatttttcccaactgccatcctcattggctttccagcaggtcatggcatcagcaggtcagcagctgccgcagtcccaagtaagcggctttcccgttcaagctttaatcgggggctccctttagggttccgatttagtgctttacggcacctggaccccaaaaaacttgatttgggtaatggttcactggactcttgttccaaactgaaacaacactcaaccctatctcgggctattcttttgatttataagggattttgccgatttcggaaccaccatcaaacaggattttcgcctgctggggcaaaccagcgtggaccgcttgctgcaactctctcagggccaggcggtgaagggcaatcagctgttgcccgtctcactggtgaaaagaaaaaccaccctggcgcccaatacgcaaaccgcctctccccgcgcgttggccgattcattaatgcagctggcacgacaggtttcccgactggaaagcgggcagtgagcgcaacgcaattaatggattttgccgatttcggaaccaccatcaaacaggattttcgcctgctggggcaaaccagcgtggaccgcttgttgcaactctctcagggccaggcggtgaagggcaatcagctgttgcccgtctcattggtgaaaagaaaaaccaccctggcgcccaatacgcaaaccgcctctccccgcgcgttggccgattcattaatgcagctggcacgacaggtttcccgactggaaagcgggcacaattactcaaaaggtcaatccaaggtgtcatttaagacaaggcaagtcccttctgcctatgaacctgtaaaatcaaaagcaggggggtgctttagagtcgcacccaacagggctttcaagtcccgaagggattttgccgatttcggaaccaccatcaaacaggattttcgcctgctggggcaaaccagcgtggaccgcttgctgcaactctctcagggccaggcggtgaagggcaatcagctgttgcccgtctcactggtgaaaagaaaaaccaccctggcgcccaatacgcaaaccgcctctccccgcgcgttggccgattcattaatgcagctggcacgacaggtttcccgactggaaagcgggcaggattttgccgatttcggaaccaccatcaaacaggattttcgcctgctggggcaaaccagcgtggaccgcttgctgcaactctctcagggccaggcggtgaagggcaatcagctgttgcccgtctcactggtgaaaagaaaaaccaccctggcgcccaatacgcaaaccgcctctccccgcgcgttggccgattcattaatgcagctggcacgacaggtttcccgactggaaagcgggcagattgttcggtccgccacgggtcaactgattcataattggactcagcgaacccaaggcttctccccccaacctgctggtaacccgaaacggcaagtctttagcgacgcctccctggaggtagcgaaagtacgttacccgttgagcacaataggaggccctccttcccggggaccaggactcccaaagtgggaagggcgtggctgcaagggaagtttggtttctcccgtcttcttttgcacctgtacttttgcgcttggttggaaatcatcacgtcggcgacaactcaatcgacagctggaaaaacgcgggccgttctttaaagacagcgataagttcgacgccaacgatccgatcctgaaagatcagacgcaagaatggtccggttctgcaacctttacatctgacggaaaaatccgtttattctacactgactattccggtaaacattacggcaaacaaagcctgacaacagcgcaggtaaatgtgtcaaaatctgatgacacactcaaaatcaacggagtggaagatcacaaaacgatttttgacggagacggaaaaacatatcagaacgttcagcagtttatcgatgaaggcaattatacatccggcgacaaccatacgctgagagaccctcactacgttgaagacaaaggccataaataccttgtattcgaagccaacacgggaacagaaaacggataccaaggcgaagaatctttatttaacaaagcgtactacggcggcggcacgaacttcttccgtaaagaaagccagaagcttcagcagagcgctaaaaaacgcgatgctgagttagcgaacggcgccctcggtatcatagagttaaataatgattacacattgaaaaaagtaatgaagccgctgatcacttcaaacacggtaactgatgaaatcgagcgcgcgaatgttttcaaaatgaacggcaaatgggattttgccgatttcggaaccaccatcaaacaggattttcgcctgctggggcaaaccagcgtggaccgcttgctgcaactctctcagggccaggcggtgaagggcaatcagctgttgcccgtctcactggtgaaaagaaaaaccaccctggcgcccaatacgcaaaccgcctctccccgcgcgttggccgattcattaatgcagctggcacgacaggtttcccgactggaaagcgggcaggattttgccgatttcggaaccaccatcaaacaggattttcgcctgctggggcaaaccagcgtggaccgcttgctgcaactctctcagggccaggcgaatcacctaatgacacagttctcagaacctgtcctcatcattgagcaacgcacgactgatgaagagtag

SEQ ID NO: 2259 - DNA, 2232 bp, Homo sapiens
  SIMILAR (1)..(639): 991254mologous to Plasmid F Protein A,accession number M12987,Smith-Waterman Score=1117.
  misc_feature (1)...(2232): n = a,t,c or g
atgaaactcatggaaacacttaaccagtgcataaacgctggtcatgaaatgacgaaggctatcgccattgcacagtttaatgatgacagcccggaagcgaggaaaataacccggcgctggagaataggtgaagcagcggatttagttggggtttcttctcaggctatcagagatgccgagaaagcagggcgactaccgcacccggatatggaaattcgaggacgggttgagcaacgtgttggttatacaattgaacaaattaatcatatgcgtgatgtgtttggtacgcgattgcgacgtgctgaagacgtatttccaccggtgatcggggttgctgcccataaaggtggcgtttacaaaacctcagtttctgttcatcttgctcaggatctggctctgaaggggctacgtgttttgctcgtggaaggtaacgacccccagggaacagcctcaatgtatcacggatgggtaccagatcttcatattcatgcagaagacactctcctgcctttctatcttggggaaaaggacgatgtcacttatgcaataaagcccacttgctggccggggcttgacattattccttcctgtctggctctgcaccgtattgaaactgagtttatgggcaaatttgatgaagataacaacgcaggaatggtccgggttctgcaaccctttacatctgacgagaaaaaatccgttatttctacactgacctttcccggtaaacatttacggcgagacaaaagcctgacaacagcgcagggctgtgacaaaattaacaataaaactagcccagaaccaaccagcccggatctggctctgaaggggctacgtgttttgctcgtggaaggtaacgacccccagggaacagcctcaatgtatcacggatgggtaccagatcttcatattcatgcagaagacactctcctgcctttctatcttggggaaaaggacgatgtcacttatgcaataaagcccacttgctggccggggcttgacattattccttcctgtctggctctgcaccgtattgaaactgagttaatgggcaaatttgatgaaggtaaactgcccaccgatccacacctgatgctccgactggccattgaaactgttgctcatgactatgatgtcatagttattgacagcgcgcctaacctgggtatcggcacgattaatgtcgtatgtgctgctgatgtgctgattgttcccacgcctgctgagttgtttgactacacctccgcactgcaatttttcgatatgcttcgtgatctgctcaagaacgttgatcttaaagggttcgagcctgatgtacgtattttgcttaccaaatacagcaatagtaatggctctcagtccccgtggatggaggagcaaattcgggatgcctggggaagcatggttctaaaaaatgttgaacctgaaaacggtgaagttggtaaagnaggatccccgcagttgataaatcaagaaaaaaaaatgtttagaatcaggaacagatcatatattgaccgagattctgagtatctcttgcaagaaaatgaaccagatggaactttagaccaaaaattattggaagatttacaaaagaaaaaaaatgaccttcggtatattgaaatgcagccttttcccttagtctcctcttcccggtgggtggtaaaaagaggtgaattgacagcctatgttgaagacactgtgcttttctcaagaaggacatccaaacagcaagtctacttctttctctttaacgatgtgctcattatcaccaaaaagaagaggaggagcgactcaagccttcgcgaaggagataaccaaaaagcatacaaagaaacgtacggcgtctctcatattacacgccatgatatgctgcagatccctaaacagcagcaaaacgaaaaataccaagtgcctcaattcgatcaatcaacgattaaaaatattgagtctgcaaaaggacttgatgtatcagacgcaggaatggtcccggttctgcaacctttacatctgacggaaaaatccggttattctacactgactattccggtaaacttacggcaaacaagcctgacacagcgcaaggtaatgtgtcaaaatctggtgacacacttaaaatcaacggagtgggaaaaacacaaaacgattgttgacggagaacggaaaacatatcagaaacgttcagcagtttttcggatgaagggaattttacattcggcgacaaccatacgctga

SEQ ID NO: 2260 - DNA, 2157 bp, Homo sapiens
  SIMILAR (937)..(1500): 571254mologous to Plasmid F Protein B,accession number M12987,Smith-Waterman Score=458.
atgggcaagggcttcatgtctaaaacaccaaaagccatggcagcaaaagccaaaattgacaaatgggatctaattaaactgaggagcttctgcacatcaaaagaaactaccatcagtctacacaatgttttaactttcatctggaaagggcactggccagccggtgaagggcaatcagctgttgcccgtctcactggtgaaaagaaaaaccaccctggcgcccaatacgcaaaccgcctctccccgcgcgttggccgattcattaatgcagctggcacgacaggtttcccgactggaaagcgggcagtgagcgcaacgcaattaatggattttgccgatttcggaaccaccatcaaacaggattttcgcctgctggggcaaaccagcgtggaccgcttgctgcaactctctcagggccaggcggtgaagggcaatcagctgttgcccgtctcactggtgaaaagaaaaaccaccctggcgcccaatacgcaaaccgcctctccccgcgcgttggccgattcattaatgcagctggcacgacaggtttcccgactggaaagcgggcagtttggttatgcagactggcttccttgctcctcagctcgcagacagcctgttgtgggacttcacccttgtgattatgaatggaggttatgcattcagcaacagggacttcctctcaccaaggctccctttactacagctacgactgaatgtcccatctgccagcagcagagaagggggtctctaagtccacagcaggctgtaagccgaaaccatcaggggtcgagccttgatgtacgtattttgcttaccaaatccagcaatagtaatggctctcagtccccgtggatggaggagcaaattcgggatgcctggggaagcatggttctaaaaaatgttgtacgtgaaacggatgaagttggtaaaggtcagatccggatgagaactgtttttgaacaggccattgatcaacgctcttcaactgctgccccgatggtggattcgttaattgcgcgcgtaggagtaatggctcgcggtaatgccattactttgcctgtatgtggtcgggatgtgaagtttactcttgaagtgctccggggtgatagtgttgacaacacctctcgggtatggtcaggtaatgaacgtgaccaggagctgcttactgaggacgcactggatgatctcatcccttcttttctactgactggtcaacagacaccggcgttcggtcgaagagtatctggtgtcatagttaattgccgatggccctcgccgtcggattttgccgatttcggaaccaccatcaaacaggattttcgcctgctggggcaaaccagcgtggaccgcttgctgcaactctctcagggccaggcggtgaagggcaatcagctgttgcccgtctcactggtgaaaagaaaaaccaccctggcgcccaatacgcaaaccgcctctccccgcgcgttggccgattcattaatgcagctggcacgacaggtttcccgactggaaagcgggcaggattttgccgatttcggaaccaccatcaaacaggattttcgcctgctggggcaaaccagcgtggaccgcttgctgcaactctctcagggccaggcggtgaagggcaatcagctgttgcccgtctcactggtgaaaagaaaaaccaccctggcgcccaatacgcaaaccgcctctccccgcgcgttggccgattcattaatgcagctggcacgacaggtttcccgactggaaagcgggcaggattttgccgatttcggaaccaccatcaaacaggattttcgcctgctggggcaaaccagcgtggaccgcttgctgcaactctctcagggccaggcggtgaagggcaatcagctgttgcccgtctcactggtgaaaagaaaaaccaccctggcgcccaatacgcaaaccgcctctccccgcgcgttggccgattcattaatgcagctggcacgacaggtttcccgactggaaagcgggcacaagcccaagccaagcccacatcagaaacaaccttccttccccgtgcgcccgaaagcattaaatccacggaatcggatgggtgaagatttccaaaatacccaaccaaccaacccaacaagtctgccgaaaggaattagagataccccaaccaaatag

SEQ ID NO: 2261 - DNA, 2602 bp, Homo sapiens
  SIMILAR (1478)..(2029): 801254mologous to Homo sapiens p40,accession number U93570,Smith-Waterman Score=765.
ggattttgccgatttcggaaccaccatcaaacaggattttcgcctgctggggcaaaccagcgtggaccgcttgctgcaactctctcagggccaggcggtgaagggcaatcagctgttgcccgtctcactggtgaaaagaaaaaccaccctggcgcccaatacgcaaaccgcctctccccgcgcgttggccgattcattaatgcagctggcacgacaggtttcccgactggaaagcgggcaagtcaagcatgaaggtcagcacacgaagatgtcccaggttttatggagatcccaggaagagaacccagccacattaggaaacaatattcagctctttgattggataccccagaatgatcttcttggacatcccaaaaccaaagcttttatcactcatggtggaactaatgggatctacgaagctatttaccacggagtccctatggtgggagttcccatgtttgctgatcagcctgataacattgctcacatgaaggccaaaggagcagctgtggaagtgaacctaaacacaatgacaaggccaggcggtgaagggcaatcagctgttgcccgtctcactggtgaaaagaaaaaccaccctggcgcccaatacgcaaaccgcctctccccgcgcgttggccgattcattaatgcagctggcacgacaggtttcccgactggaaagcgggcagtgagcgcaacgcaattaatggattttgccgatttcggaaccaccatcaaacaggattttcgcctgctggggcaaaccagcgtggaccgcttgctgcaactctctcagggccaggcggtgaagggcaatcagctgttgcccgtctcactggtgaaaagaaaaaccaccctggcgcccaatacgcaaaccgcctctccccgcgcgttggccgattcattaatgcagctggcacgacaggtttcccgactggaaagcgggcaggattttgccgatttcggaaccaccatcaaacaggattttcgcctgctggggcaaaccagcgtggaccgcttgctgcaactctctcagggccaggcggtgaagggcaatcagctgttgcccgtctcactggtgaaaagaaaaaccaccctggcgcccaatacgcaaaccgcctctccccgcgcgttggccgattcattaatgcagctggcacgacaggtttcccgactggaaagcgggcagattttgcccgatttcggaccccaccatcaaacagaattttcgcctgctggggcaaaccagcgtggaccgcttgctgcaactctctcagggccaggcggtgaagggcaatcagctgttgcccgtctcactggtgaaaagaaaaaccaccctggcgcccaatacgcaaaccgcctctccccgcgcgttggccgattcattaatgcagctggcacgacaggtttcccgactggaaagcgggcagtgagcgcaacgcaattaataccaaaggtagataaaaccacaaagatagggaaaaaacagagcagaaaaactggaaactctaaaaatcagagtgcctctcctcctccaaaggaaagcagctcctcacacgcaacagaacaaaactggacggagaatgactttgacgagctgagagaagaaggcttcaaacgatcaaactgctccgagctacaggaagaagttcaaacccatggcaaagaggttaaaaaccttgaaaaaaaattagacgaatggctaactagaatcaccaatgaagaaaagcccttaaaggacctgatggagctgaaaaccaaggcacaagaactacgtgacaaatgcacaagcctcagtagccgattcaatcaactggaagaaagggtatcagtgatggaagatcaaatgaatgaaatgaagcgagaagagaagtttagagaaaaaagaataaaaagaaacgaacaaagcctccaagaaatatgggactatgtgaaaagaccaaatctacgtctgattggtgtacctgaaagtgatggggagaatggaaccaagttggaaaacactctgcaggatattatccaggattttgccgatttcggaaccaccatcaaacaggattttcgcctgctggggcaaaccagcgtggaccgcttgctgcaactctctcagggccaggcggtgaagggcaatcagctgttgcccgtctcactggtgaaaagaaaaaccaccctggcgcccaatacgcaaaccgcctctccccgcgcgttggccgattcattaatgcagctggcacgacaggtttcccgactggaaagcgggcatcaggcaccgtgtatgaaatctaacaatgcgctcatcgtcatcctcggcaccgtcaccctggatgctgtaggcataggcttggttatgccggtactgccgggcctcttgcgggatatcgtccattccgacagcatcgccagtcactatggcgtgctgctagcgctatatgcgttgatgcaatttctatgcgcacccgttctcgcagcactgtccgaccgctttggccgccgcacagtcctgctcgcttcgctacttggagccactatcgactacgcgatcatggcgaccacacccgtcctgtggatctacccactagtcaattcaccatcttgttga

SEQ ID NO: 2262 - DNA, 3198 bp, Homo sapiens
  SIMILAR (1)..(1062): 961254mologous to Plasmid F Protein A,accession number M12987,Smith-Waterman Score=1749.
  misc_feature (1)...(3198): n = a,t,c or g
atgaaactcatggaaacacttaaccagtgcataaacgctggtcatgaaatgacgaaggctatcgccattgcacagtttaatgatgacagcccggaagcgaggaaaataacccggcgctggagaataggtgaagcagcggatttagttggggtttcttctcaggctatcagagatgccgagaaagcagggcgactaccgcacccggatatggaaattcgaggacgggttgagcaacgtgttggttatacaattgaacaaattaatcatatgcgtgatgtgtttggtacgcgattgcgacgtgctgaagacgtatttccaccggtgatcggggttgctgcccataaagnatcccccgtgatcggggttgctgcccataaaggtggcgtttacaaaacctcagtttctgttcatcttgctcaggatctggctctgaaggggctacgtgttttgctcgtggaaggtaacgacccccagggaacagcctcaatgtatcacggatgggtaccagatcttcatattcatgcagaagacactctcctgcctttctatcttggggaaaaggacgatgtcacttatgcaataaagcccacttgctggccggggcttgacattattccttcctgtctggctctgcaccgtattgaaactgagttaatgggcaaatttgatgaaggtaaactgcccaccgatccacacctgatgctccgactggccattgaaactgttgctcatgactatgatgtcatagttattgacagcgcgcctaacctgggtatcggcacgattaatgtcgtatgtgctgctgatgtgctgattgttcccacgcctgctgagttgtttgactacacctccgcactgcagtttttcgatatgcttcgtgatctgctcaagaacgttgatcttaaagggttcgagcctgatgtacgtattttgcttaccaaatacagcaatagtaatggctctcagtccccgtggatggaggagcaaattcgggatgcctggggaagcatggttctaaaaaatgttgtacgtgaaacggatgaagttggtaaagcggttatcaatcacaagaaacgtaaaaatagcccgcgaatcgtccagtcaaacgacctcactgaggcggcatatagtctctcccgggatcaaaaacgtatgctgtatctgttcgttgaccagatcagaaaatctgatggcaccctacaggaacatgacggtatctgcgagatccatgttgctaaatatgctgaaatattcggattgacctctgcggaagccaaggatccccgtggcgtttacaaaacctcagtttctgttcatcttgctcaggatctggctctgaaggggctacgtgttttgctcgtggaaggtaacgacccccagggaacagcctcaatgtatcacggatgggtaccagatcttcatattcatgcagaagacactctcctgcctttctatcttggggaaaaggacgatgtcacttatgcaataaagcccacttgctggccggggcttgacattattccttcctgtctggctctgcaccgtattgaaactgagttaatgggcaaatttgatgaaggtaaactgcccaccgatccacacctgatgctccgactggccattgaaactgttgctcatgactatgatgtcatagttattgacagcgcgcctaacctgggtatcggcacgattaatgtcgtatgtgctgctgatgtgctgattgttcccacgcctgctgagttgtttgactacacctccgcactgcagtttttcgatatgcttcgtgatctgctcaagaacgttgatcttaaagggttcgagcctgattgcataaacgctggtcatgaaatgacgaaggctatcgccattgcacagtttaatgatgacagcccggaagcgaggaaaataacccggcgctggagaataggtgaagcagcggatttagttggggtttcttctcaggctatcagagatgccgagaaagcagggcgactaccgcacccggatatggaaattcgaggacgggttgagcaacgtgttggttatacaattgaacaaattaatcatatgcgtgatgtgtttggtacgcgattgcgacgtgctgaagacgtatttccaccggtgatcggggttgctgcccataaaggtggcgtttacaaaacctcagtttctgttcatcttgctcaggatctggctctgaaggggctacgtgttttgctcgtggaagggtttattgagaatatgtttttcgtctcagccaatccctgggtgagtttcaccagttttgatttaaacgtggccaatatggacaacttcttcgcccccgttttcaccatgggcaaatattatacgcaaggcgacaaggtgctgatgccgctggcgattcaggttcatcatgccgtttgtgatggcttccatgtcggcagaatgcttaatgaattacaacagtactgcgatgagtggcagggcggggctgattatcgtgttctggttggcgagctggatgatgagcagatggctgcattatccagattgggtaacgattatcgcccaacaagtgcttatgaacgtggtcagcgttatgcaagccgattgcagaatgaatttgctggaaatatttctgcgctggctgatgcggaaaatatttcacgtaagattattacccgctgtatcaacaccgccaaattgcctaaatcagttgttgctcttttttctcaccccggtgaactatctgcccggtcaggtgatgcacttcaaaaagcctttacagataaagaggaattacttaagcagcaggcatctaaccttcatgagcagaaaaaagctggggtatttattcgcgataagctcatggagcggcgtaaccgtcgcacaggaaggacagagaaagcgcggatctgggaagtgacggacagaacggtcaggacctggattggggaggcggttgccgccgctgctgctgacggtgtgacgttctctgttccggtcacaccacatacgttccgccattcctatgcgatgcacatgctgtatgccggtataccgctgaaagttctgcaaagcctgatgggacataagtccatcagttcaacggaagtctacacgaaggtttttgcgctggatgtggctgcccggcaccgggtgcagtttgcgatgccggagtctgatgccgttgcgatgctgaaacaattatcctga

SEQ ID NO: 2263 - DNA, 2262 bp, Homo sapiens
  SIMILAR (1)..(405): 1001254mologous to Plasmid F Protein A,accession number M12987,Smith-Waterman Score=691.
atgaaactcatggaaacacttaaccagtgcataaacgctggtcatgaaatgacgaaggctatcgccattgcacagtttaatgatgacagcccggaagcgaggaaaataacccggcgctggagaataggtgaagcagcggatttagttggggtttcttctcaggctatcagagatgccgagaaagcagggcgactaccgcacccggatatggaaattcgaggacgggttgagcaacgtgttggttatacaattgaacaaattaatcatatgcgtgatgtgtttggtacgcgattgcgacgtgctgaagacgtatttccaccggtgatcggggttgctgcccataaaggtggcgtttacaaaacctcagtttctgttcatcttgctcaggatctggctctgaagggctacgtgttttgctcgtggaagtgcataaacgctggtcatgaaatgacgaaggctatcgccattgcacagtttaatgatgacagcccggaagcgaggaaaataacccggcgctggagaataggtgaagcagcggatttagttggggtttcttctcaggctatcagagatgccgagaaagcagggcgactaccgcacccggatatggaaattcgaggacgggttgagcaacgtgttggttatacaattgaacaaattaatcatatgcgtgatgtgtttggtacgcgattgcgacgtgctgaagacgtatttccaccggtgatcggggttgctgcccataaaggtggcgtttacaaaacctcagtttctgttcatcttgctcaggatctggctctgaaggggctacgtgttttgctcgtggaagaaccccccagcgcgcctaacctgggtatcggcacgattaatgtcgtatgtgctgctgatgtgctgattgttcccacgcctgctgagttgtttgactacacctccgcactgcagtttttcgatatgcttcgtgatctgctcaagaacgttgatcttaaagggttcgagcctgatgtacgtattttgcttaccaaatacagcaatagtaatggctctcagtccccgtggatggaggagcaaattcgggatgcctggggaagcatggttctaaaaaatgttgtacgtgaaacggatgaagttggtaaagctgccccgatggtggattcgttaattgcgcgcgtaggagtaatggctcgcggtaatgccattactttgcctgtatgtggtcgggatgtgaagtttactcttgaagtgctccggggtgatagtgttgagaagacctctcggtgtgacaatctaaaaacttgtcacacttcacatggatctgtcatggcggaaacagcggttatcaatcacaagaaacgtaaaaatagcccgcgaatcgtccagtcaaacgacctcactgaggcggcatatagtctctcccgggatcaaaaacgtatgctgtatctgttcgttgaccagatcagaaaatctgatggcaccctacaggaacatgacggtatctgcgagatccatgttgctaaatatgctgaaatattcggattgacctctgcggaagccagtaaggatatacggcaggcattgaagagtttcgcggggaaggaagtggttttttatcgccctgaagaggatgccggcgatgaaaaaggctatgaatcttttccttggtttatcaaacgtgcgcacagtccatccagagggctttacagtgtacatatcaacccatatctcattcccttctttatcgggttacagaaccggtttacgcagtttcggcttagtgaaacaaaagaaatcaccaatccgtatgccatgcgtttatacgaatccctgtgtcagtatcacccccttaccattgaaaaagtaatgaagccgctgatcacttcaaacacggtaactgatgaaatcgagcgcgcgaatgttttcaaaatgaacggcaaatggtacttgttcactgattcacgcggttcaaaaatgacgatcgatggtattaactcaaacgatatttacatgcttggttatgtatcaaactctttaaccggcccttacaagccgctgaacaaaacagggcttgtgctgcaaatgggtcttgatccaaacgatgtgacattcacttactctcacttcgcagtgccgcaagccaaaggcaacaatgtggttatcacaagctacatgacaaacagaggcttcttcgaggataaaaaggcaacatttgcgccaagcttcttaatgaacatcaaaggcaataaaacatccgataaactaccgcattaa

SEQ ID NO: 2264 - DNA, 855 bp, Homo sapiens
  SIMILAR (550)..(684): 711254mologous to Homo sapiens Human myelin oligodendrocyte glycoprotein gene,accession number AAZ29204,Smith-Waterman Score= 163.
ggcacgagttttatggtccacaaatgaaggatggtttttatacttttaggtggctgagggaaaaaaaccaagagtattattttgcttggaaattgtatgaaattcagacttcattgtctatgaatttttattgggactcagctatactcatgtatttatgtattgcctgttggtactttcacactacaaaggcagagttgactggttgcagcagagactgtaatggcctacaagcctaaaatatttactgtgtgactctttacaagaaaatgtttgctgatttctgatagagagttgatgaagagtaagacaaaaatgtcatatagggtgaaatgcagatccttggtgatccttacaagttggtgaaactggaacctaaaacaagtttgtccggtgggggctttattaggtgacattgtgaaacttcctggatgacagtccttgccaggtaccttaaaaaaggtagtaccaccaaagtgagtaattcatgtgcagtccaggggaaaacttaacagatagcaaaagaaagtatatgattaaaaaattcaaataggccgggcacattggctcacgcctgtaatcccagcactttggaaggctaaggcgggtggatcatgaggtcaggagttcgagaccagcctgaccaacatggtgaaaccctgtctctactaaaattacaaaaattagctgggcatggtggtgcgtgcctgtaatcccagctagtcaggaggctgaggcaggagtatcacttgaacccaggaggtggaggttgcagtgagccgagatttgtgccactgcgctccagcctgggcaacagagtgagactccgtctcaggaaaaaaaaaaaaaaaaaaa

SEQ ID NO: 2265 - DNA, 5066 bp, Homo sapiens
  SIMILAR (2415)..(3437): 961254mologous to Homo sapiens kinesin-like protein RBKIN1,accession number AY014403,Smith-Waterman Score=1703.
  misc_feature (1)...(5066): n = a,t,c or g
atgtttgagaaaggaatttatttaaacctcatccaagctgggcattcttcaccccttcaggcatgtggagctaacatctgcagagtggccaccgcctttttggcatcggttctgctgaaaagtcacaggcctcttggatttgacaatgttatggctctgctcggattgtctgggatagaaacaaatactcatagatcctcctgcttcccacgggacttaacgaaccttcgtttatgggctggtcaagaagtggttttcaagtgccttggggaaggaattcttgaaaaagcctttcaggggtataatgcgtgtatttttgcatatggacagacaggttcgggaaaatccttttccatgatgggccatgctgagcagctgggccttattccaaggctctgctgtgctttatttaaaaggatctctttggagcaaaatgagtcacagacctttaaagttgaagtgtcctatatggaaatttataatgagaaagttcgggatcttttagaccccaaagggggctgtgtgctggacagcccagagctggagccaggggcaagggcagctgagcctcataagtaccagtgcaaggcaagtgggaaaagctataagcagagtttgccaggcaattgtcctgcagaaagtttcctggaggacagaccattattgacatcagtggtgagtgaggccaggacagaagtctatgaccaaaaattctatgagaaaacttctcctcaaccagggtcagcagaaactagcagaagacgacagactacagacccagttcaaaatgtggttcaggtcctggagaaacaatacctagaagaaaagagaagtgccctagaggagcagcggctcatgtatgagcgggaactggagcaactccgccagcagctctcccccgacaggcagccacagagtagcggccctgaccgcctggcctacagcagccagacagcgcagcagaaggtgacccagtgggcagaagagaggaaatgcttacatcatagaaaaataatgaactcaaagcacctaaatctctactcctcactcgtcaccttagaaatgacagaagacgcatgctgtgcggatgctaaggactctgaggaggaagaaaatgagctggaagctattaacaggaagctaataagttcacagccttatgtacctgtggagtttgctgacttcagtgtttacaatgccagcttggagaacagggaatggttttcctctaaagtagatctgtcaaactcacgggtcttggagaaagaagtgtcccgtagccctaccaccagcagtattaccagtggctacttttcccacagtgcctccaatgccaccctgtctgacatggtggtcccttctagtgacagctcagaccagctggccattcagacgaaggatgcagactccaccgagcactccacaccatcgcttgtgcatgatttcaggccgtcctcaaacaaagagttgacagaagtcgaaaaaggcttggtaaaggacaagataattgtggtgccactcaaggaaaacagtgccttagccaaagggagcccatcatcccagagcatccctgagaaaaactccaaatcactgtgcaggactggctcatgttcagaactagatgcctgccccagcaaaattagccagccagccaggggattctgccccagggaggtgacggtagaacacaccaccaacatccttgaagaccattctttcacagaatttatgggagtgtcagaaaggaaaagatttttgattggtttgacagattcttctggcnggagagctttccagtaggaggagtctagccaaataaaacaggcggcaagactgtctccgatgggctccaccaccccagccagctgcattccaagttagagaatgaccagggcttttacaatgtggattccagcactggattccataataaaaccaatcctgtgggtcccttcaggaagagcccctttcttgtgatgggtgtggactgggctgagactcgtcgcagcatgatgatgcaaatgcgtcgggcgccgatgagtgacgacattttggctcgcgaccgcggcagccgccttagcaggggtaataggcgcaacggcggcggaggctgcagggacgacgacgacgacggcggcggggcgggcgctgtgcgcacaggggagggggcgacggaagaactcccaccagtcggcggtcgagttaggcctcagcaccgcggggaactgttcgtgctgtcctctgcgggagatctccatagagaccgtgacacacacagaggcggggcgggaagcggcggaggctccgccatggcctcgggagccggaggagtcggagggggcggtggcggcaagatccggacgcggcgttgccaccaggggccaattaagccttaccagcaggggcgacaacagcatcaggtctcttccagccgaccggacctttctggctttgatgaagatgacaagggttggccagagaaccagttggacatgtctgactatagctccagttaccaagatgtagcatgttatggaactttacccagggattctcctcgaaggaataaagaaggtagtggttgtacatcagagactcctcatgccttaaccgtcagcccttttaaagcattctctcctcagccaccaaagtttttcaagcccctaatgcctgtaaaagaggagcataagaaaaggatagccctggaagcaaggcctcttctaagccaggagagcatgcctccacctcaggcacataaccctggctgcattgtaccctcaggaagcaatggcagcagcatgccagtagaacacaatagcaaacgtgagaagaagattgactctgaggaggaagaaaatgagctggaagctattaacaggaagctaataagttcacagccttatgtacctgtggagtttgctgacttcagtgtttacaatgccagcttggagaacagggaatggttttcctctaaagtagatctgtcaaactcacgggtcttggagaaagaagtgtcccgtagccctaccaccagcagtattaccagtggctacttttcccacagtgcctccaatgccaccctgtctgacatggtggtcccttgtagtgacagctcagaccagctggccattcagacgaaggatgcagactccaccgagcactccacaccatcgcttgtgcatgatttcaggccgtcctcaaacaaagagttgacagaagtcgaaaaaggcttggtaaaggacaagataattgtggtgccactcaaggaaaacagtgccttagccaaagggagcccatcatcacagagcatccctgagaaaaactccaaatcactgtgcaggactggctcatgttcagaactagatgcctgcccccgcaaaattagccagccagccaagggattctgccccagggagctcaaggtttgtaaacacaccaatcagcaccctgtgtctagctcgaggtttgtgaatccaccaatcgacactctgtatctagctgctctggtggggccttggagaaccttcatgtctagctcagggattgtaaatacaccaatcggcactctgtatctagcccaaggaagcaatggcagcagcatgccagtagaacacaatagcaaacgtgagaagaagattgtaagttccggaaccatttctgtcatattgcctggtggacctcaactggcttcaccaagtggatctcatactggagctacaggtggacttgcttgccagtctcccgcagtgcgccggcacttctcagcccttgggcagtccacgggaccaggcgccgcgcagcagggggcggcgcttgtcggggaggctcgggccgcgcaggagccggcggtggtggcggcggggggcattcttagcagggttacagaatctgttaagaatattgtgccagggtggctacaaagatacttcaacaagaatgaagatgtatgcagctgttcaacagacacaagcgaggttccacgctggccagaaaataaagaggaccatctggtatatgccgatgaggagagctctaatattactgatgggagaatcacacctgagccagcagtcagtaatacagaaggaggacacaatgagaatgctgcagctggtccccatgactcccactcctgtgctagcggacgcagttcgagccgtagccccaaagcacctactctcagcccagtccacacccatcacaagaaaggggctcttcctgaagggacccacaggattggttttattatggaatccagtgctggaatccacattgtaaaagccctgaggccctcctgtctgctccacgtggggcgcagagacctcgatccgcccgtcccctccagccgagtttcaccacccgccaggccacggaggcgttggggtcccatacctgatgctgttgtcgcccgtgctggtttcgcatcgccgaagatagattctgttgctgctcagcccaccgcaacaagcccagtagtttatacaagaccagcaataagtagcttttcttctagtggaattgggtttggggagagtttaaaagctgggtcatcatggcagtgtgatacatgtctactccagaacaaagttacagacaacaaatgcatagcctgtcaagcagcaaaattgtcacccagagatactgctaaacagactggaattgaaacaccaaataaaagtggcaaaacaactctttctgcatcagggacaggctttggagacaaatttaaaccagtgataggcacttgggattgtgatacctgtttagtgcaaaataaacctgaagcaataaaatgtgtagcctgtgaaacaccgaaacctggaacttgtgtgaagcgagcccttacattgacagtggtttcggaaagtgctgagactatgactgcttcatcttccagctgcactgtaaccactggtaccttaggatttggagataaattcaaaaggcccattggatcttgggagtgttcagtatgctgtgtttctaataatgcagaagacaataagtgtgtgtcctgtatgtctgagaaaccagaacttcaggtattcagtggcagcaactcatga

SEQ ID NO: 2266 - DNA, 2421 bp, Homo sapiens
  SIMILAR (1597)..(2319): 981254mologous to Bacillus amyloliquefaciens precursor (AA - 29 to 443),accession number X52988,Smith-Waterman Score=1250.
atggcggaaacagcggttatcaatcacaagaaacgtaaaaatagcccgcgaatcgtccagtcaaacgacctcactgaggcggcatatagtctctcccgggatcaaaaacgtatgctgtatctgttcgttgaccagatcagaaaatctgatggcaccctacaggaacatgacggtatctgcgagatccatgttgctaaatatgctgaaatattcggattgacctctgcggaagccagtaaggatatacggcaggcattgaagagtttcgcggggaaggaagtggttttttatcgccctgaagaggatgccggcgatgaaaaaggctatgaatcttttccttggtttatcaaacgtgcgcacagtccatccagagggctttacagtgtacatatcaacccatatctcattcccttctttatcgggttacagaaccggtttacgcagtttcggctgaacttcgtgcagaaatctcgcctagtggatctggctctgaaggggctacgtgttttgctcgtggaaggtaacgacccccagggaacagcctcaatgtatcacggatgggtaccagatcttcatattcatgcagaagacactctcctgcctttctatcttggggaaaaggacgatgtcacttatgcaataaagcccacttgctggccggggcttgacattattccttcctgtctggctctgcaccgtattgaaactgagttaatgggcaaatttgatgaagcggttatcaatcacaagaaacgtaaaaatagcccgcgaatcgtccagtcaaacgacctcactgaggcggcatatagtctctcccgggatcaaaaacgtatgctgtatctgttcgttgaccagatcagaaaatctgatggcaccctacaggaacatgacggtatctgcgagatccatgttgctaaatatgctgaaatattcggattgacctctgcggaagccatagctgaatacaacggctatcacgttgtgtttgctcttgcgggaagcccgaaagacgctgatgacacatcaatctacatgttttatcaaaaggtcggcgacaactcaatcgacagctggaaaaacgcgggccgtgtctttaaagacagcgataagttcgacgccaacgatccgatcctgaaagatcagacgcaagaatggtccggttctgcaacctttacatctgacggaaaaatccgtttattctacactgactattccggtaaacattacggcaaacaaagcctgacaacagcgcaggtaaatgtgtcaaaatctgatgacacactcaaaatcaacggagtggaagatcacaaaacgatttttgacggagacggaaaaacatatcagaacgttcagcagtttatcgatgaaggcaattatacatccggcgacaaccatacgctgagagaccctcactacgttgaagacaaaggccataaataccttgtattcgaagccaacacgggaacagaaaacggataccaaggcgaagaatctttatttaacaaagcgtactacggcggcggcacgaacttcttccgtaaagaaagccagaagcttcagcagagcgctaaaaaacgcgatgctgagttagcgaacggcgccctcgacctgacaacagcgcaggtaaatgtgtcaaaatctgatgacacactcaaaatcaacggagtggaagatcacaaaacgatttttgacggagacggaaaaacatatcagaacgttcagcagtttatcgatgaaggcaattatacatccggcgacaaccatacgctgagagaccctcactacgttgaagacaaaggccataaataccttgtattcgaagccaacacgggaacagaaaacggataccaaggcgaagaatctttatttaacaaagcgtactacggcggcggcacgaacttcttccgtaaagaaagccagaagcttcagcagagcgctaaaaaacgcgatgctgagttagcgaacggcgccctcggtatcatagagttaaataatgattacacattgaaaaaagtaatgaagccgctgatcacttcaaacacggtaactgatgaaatcgagcgcgcgaatgttttcaaaatgaacggcaaatggtacttgttcactgattcacgcggttcaaaaatgacgatcgatggtattaactcaaacgatatttacatgcttggttatgtatcaaactctttaaccggcccttacaagccgctgaacaaaacagggcttgtgctgcaaatgggtcttgatccaaacgatgtgacattcacttactctcacttcgcagtgccgcaagccaaaggcaacaatgtggttatcacaagcgcatgcggtgctgaatcgacgttttatgtagaggatccccccggctggtctcagactcctggactcaagagatcctcctgccttggcctcccaaaatgctga

SEQ ID NO: 2267 - DNA, 5100 bp, Homo sapiens
  SIMILAR (1894)..(2610): 941254mologous to Leishmania major probable levansucrase precursor,accession number AL160371,Smith-Waterman Score=1184.
atgcaacttgtatggaagctgacgcacacaacagaagctcagccttgcctttctgaactgatcagaaaatctgatggcaccctacaggaacatgacggtatctgcgagatccatgttgctaaatatgctgaaatattcggattgacctctgcggaagccagtaaggatatacggcaggcattgaagagtttcgcggggaaggaagtggttttttatcgccctgaagaggatgccggcgatgaaaaaggctatgaatcttttccttggtttatcaaacgtgcgcacagtccatccagagggctttacagtgtacatatcaacccatatctcattcccttctttatcgggttacagaaccggtttacgcagtttcggcttagtgaaacaaaagaaatcaccaatccgtatgccatgcgtttatacgaatccctgtgtcagtatcgtaagccggatggctcaggcatcgtctctctgaaaatcgactggatcatagagcgttaccagctgcctcaaagttaccagcgtatgcctgacttccgccgccgcttcctgcaggtctgtgttaatgagatcaacagcagaactccaatgcgcctctcatacattgagaaaaagaaaggccgccagacgactcatatcgtattttccttccgcgatatcacttccatgacgacaggaagtaccttgtactttggcagcctgaaagagtgcttgctgagtgtgctaaaagctcaatttatgttgctttttcctttttgcattgcttcagtgcaagctgtattttatgaaggttcggtggcattttccaaagtagaaaggattttgccgatttcggaaccccccatcaaacaggattttcgcctgttgggccaaaccagcgtggaccgcttgctgcaactctctcagggccaggcggtgaagggcaatcagctgttgcccgtctcactggtgaaaagaaaaaccaccctggcgcccaatacgcaaaccgcctctccccgcgcgttggccgattcattaatgcagctggcacgacaggtttcccgactggaaagcgggcaggattttgccgatttcggaaccaccatcaaacaggattttcgcctgctggggcaaaccagcgtggaccgcttgctgcaactctctcagggccaggcggtgaagggcaatcagctgttgcccgtctcactgaccgttcagctggatattacggcctttttaaagaccgtaaagaaaaataagcacaagttttatccggcctttattcacattcttgcccgcctgatgaatgctcatccggagttccgtatggcaatgaaagacggtgagctggtgatatgggatagtgttcacccttgttacaccgttttccatgagcaaactgaaacgttttcatcgctctggagtgaataccacgacgatttccggcagtttctacacatatattcgcaagatgtggcgtgttacggtgaaaacctggcctatttccctaaagggtttattgagaatatgtttttcgtctcagccaatccctgggtgagtttcaccagttttgatttaaacgtggccaatatggacaacttcttcgcccccgttttcaccatgggcaaatattatacgcaaggcgacaaggtgctgatgccgctggcgattcaggttcatcatgccgtttgtgatggcttccatgtcggcagaatgcttaatgaattacaacagtactgcgatgagtggcagggcggggcggattttgccgatttcggaaccaccatcaaacaggattttcgcctgctggggcaaaccagcgtggaccgcttgctgcaactctctcagggccaggcggtgaagggcaatcagctgttgcccgtctcactggccgttccagtacttccagaggaagacatgaacatgaacatcaaaaaaaattgtaaaacaagccccagttctgacttttacgactgcactctggcaggaggagcgattcaagccttcgcgaaagaaaataaccacaaagcatacaaagaaacgtacggcgtctctcatattacacgccatgatatgctgcagatccctaaacagcagcaaaacgaaaaataccaagtgcctcaattcgatcaatcaacgattaaaaatattgagtctgcaaaaggacttgatgtgtgggacagctggccgctgcaaaacgctgacggaacagtagctgaatacaacggctatcacgttgtgtttgctcttgcgggaagcccgaaagacgctgatgacacatcaatctacatgttttatcaaaaggtcggcgacaactcaatcgacagctggaaaaacgcgggccgtgtctttaaagacagcgataagttcgacgccaacgatccgatcctgaaagatcagacgcaagaatggtccggttctgcaacctttacatctgacggaaaaatccgtttattctacactgactattccggtaaacattacggcaaacaaagcctgacaacagcgcaggtaaatgtgtcaaaatctgatgacacactcaaaatcaacggagtggaagatcacaaaacgatttttgacggagacggaaaaacatatcagaacgttcagcagtttatcgatgaaggcaatgaggggattttgccgatttcggaaccacccatcaaacaggattttcgcctgctggggcaaaccagcgtggaccgcttgctgcaactctctcagggccaggcggtgaagggcaatcagctgttgcccgtctcactggtgaaaagaaaaaccaccctggcgcccaatacgcaaaccgcctctccccgcgcgttggccgattcattaatgcagctggcacgacaggtttcccgactggaaagcgggcaggattttgccgatttcggaaccaccatcaaacaggattttcgcctgctggggcaaaccagcgtggaccgcttgctgcaactctctcagggccaggcggtgaagggcaatcagctgttgcccgtctcactggtgaaaagaaaaaccaccctggcgcccaatacgcaaaccgcctctccccgcgcgttggccgattcattaatgcagctggcacgacaggtttcccgactggaaagcgggcaggattttgccgatttcggaaccaccatcaaacaggattttcgcctgctggggcaaaccagcgtggaccgcttgctgcaactctctcagggccaggcggtgaagggcaatcagctgttgcccgtctcactgaaaccttatgcttgtcaaattccaggatgtaccaaacgctacacagacccaagttccctaagaaagcatgtgaaggcacattcttccaaagagcaacaagcaaggaaaaaggatcacaactcctcgccagcaagggaacacaactggacggcaaatgagtttgatgaattgacagaagtaggcttcagaagggattttgccgatttcggaaccaccatcaaacaggattttcgcctgctggggcaaaccagcgtggaccgcttgctgcaactctctcagggccaggcggtgaagggcaatcagctgttgcccgtctcactggtgaaaagaaaaaccaccctggcgcccaatacgcaaaccgcctctccccgcgcgttggccgattcattaatgcagctggcacgacaggtttcccgactggaaagcgggcaggattttgccgatttcggaaccaccatcaaacaggattttcgcctgctggggcaaaccagcgtggaccgcttgctgcaactctctcagggccaggcggtgaagggcaatcagctgttgcccgtctcactggtgaaaagaaaaaccaccctggcgcccaatacgcaaaccgcctctccccgcgcgttggccgattcattaatgcagctggcacgacaggtttcccgactggaaagcgggcaggattttgccgatttcggaaccaccatcaaacaggattttcgcctgctggggcaaaccagcgtggaccgcttgctgcaactctctcagggccaggcggtgaagggcaatcagctgttgcccgtctcactggtgaaaagaaaaaccaccctggcgcccaatacgcaaaccgcctctccccgcgcgttggccgattcattaatgcagctggcacgacaggtttcccgactggaaagcgggcaggattttgccgatttcggaaccaccatcaaacaggattttcgcctgctggggcaaaccagcgtggaccgcttgctgcaactctctcagggccaggcggtgaagggcaatcagctgttgcccgtctcactggtgaaaagaaaaaccaccctggcgcccaatacgcaaaccgcctctccccgcgcgttggccgattcattaatgcagctggcacgacaggtttcccgactggaaagcgggcaggattttgccgatttcggaaccaccatcaaacaggattttcgcctgctggggcaaaccagcgtggaccgcttgctgcaactctctcagggccaggcggtgaagggcaatcagctgttgcccgtctcactggtgaaaagaaaaaccaccctggcgcccaatacgcaaaccgcctctccccgcgcgttggccgattcattaatgcagctggcacgacaggtttcccgactggaaagcgggcaggattttgccgatttcggaaccaccatcaaacaggattttcgcctgctggggcaaaccagcgtggaccgcttgctgcaactctctcagggccaggcggtgaagggcaatcagctgttgcccgtctcactggtgaaaagaaaaaccaccctggcgcccaatacgcaaaccgcctctccccgcgcgttggccgattcattaatgcagctggcacgacaggtttcccgactggaaagcgggcaggattttgccgatttcggaaccaccatcaaacaggattttcgcctgctggggcaaaccagcgtggaccgcttgctgcaactctctcagggccaggcggtgaagggcaatcagctgttgcccgtctcactggtgaaaagaaaaaccaccctggcgcccaatacgcaaaccgcctctccccgcgcgttggccgattcattaatgcagctggcacgacaggtttcccgactggaaagcgggcagtga

SEQ ID NO: 2268 - DNA, 2139 bp, Homo sapiens
  SIMILAR (934)..(2136): 991254mologous to Cloning vector pBACe3.6 levansucrase,accession number U80929,Smith-Waterman Score=2108.
atgaaactcatggaaacacttaaccagtgcataaacgctggtcatgaaatgacgaaggctatcgccattgcacagtttaatgatgacagcccggaagcgaggaaaataacccggcgctggagaataggtgaagcagcggatttagttggggtttcttctcaggctatcagagatgccgagaaagcagggcgactaccgcacccggatatggaaattcgaggacgggttgagcaacgtgttggttatacaattgaacaaattaatcatatgcgtgatgtgtttggtacgcgattgcgacgtgctgaagacgtatttccaccggtgatcggggttgctgcccataaaggtggcgtttacaaaacctcagtttctgttcatcttgctcaggatctggctctgaaggggctacgtgttttgctcgtggaaggtaacgacccccagggaacagcctcaatgtatcacggatgggtaccagatcttcatattcatgcagaagacactctcctgcctttctatcttggggaaaaggacgatgtcacttatgcaataaagcccacttgctggccggggcttgacattattccttcctgtctggctctgcaccgtattgaaactgagttaatgggcaaatttgatgaaggtaaactgcccaccgatccacacctgatgctccgactggccattgaaactgttgctcatgactatgatgtcatagttattgacagcgcgcctaacctgggtatcggcacgattaatgtcgtatgtgctgctgatgtgctgattgttcccacgcctgctgagttgtttgactacacctccgcactgcagtttttcgatatgcttcgtgatctgctcaagaacgttgatcttaaagggttcgagcctgatgaggagcgactcaagccttcgcgaaagaaaataaccaaaaagcatacaaagaaacatattgaatccgcaaaaggacttgatgtgtgggacagctggccgctgcaaaacgctgacggaacagtagctgaatacaacggctatcacgttgtgtttgctcttgcgggaagcccgaaagacgctgatgacacatcaatctacatgttttatcaaaaggtcggcgacaactcaatcgacagctggaaaaacgcgggccgtgtctttaaagacagcgataagttcgacgccaacgatccgatcctgaaagatcagacgcaagaatggtccggttctgcaacctttacatctgacggaaaaatccgtttattctacactgactattccggtaaacattacggcaaacaaagcctgacaacagcgcaggtaaatgtgtcaaaatctgatgacacactcaaaatcaacggagtggaagatcacaaaacgatttttgacggagacggaaaaacatatcagaacgttcagcagtttatcgatgaaggcaattatacatccggcgacaaccatacgctgagagaccctcactacgttgaagacaaaggccataaataccttgtattcgaagccaacacgggaacagaaaacggataccaaggcgaagaatctttatttaacaaagcgtactacggcggcggcacgaacttcttccgtaaagaaagccagaagcttcagcagagcgctaaaaaacgcgatgctgagttagcgaacggcgccctcggtatcatagagttaaataatgattacacattgaaaaaagtaatgaagccgctgatcacttcaaacacggtaactgatgaaatcgagcgcgcgaatgttttcaaaatgaacggcaaatggtacttgttcactgattcacgcggttcaaaaatgacgatcgatggtattaactcaaacgatatttacatgcttggttatgtatcaaactctttaaccggcccttacaagccgctgaacaaaacagggcttgtgctgcaaatgggtcttgatccaaacgatgtgacattcacttactctcacttcgcagtgccgcaagccaaaggcaacaatgtggttatcacaagctacatgacaaacagaggcttcttcgaggataaaaaggcaacatttgcgccaagcttcttaatgaacatcaaaggcaataaaacatccgttgtcaaaaacagcatcctggagcaaggacagctgacagtcaactaa

SEQ ID NO: 2269 - DNA, 3990 bp, Homo sapiens
  SIMILAR (3178)..(3891): 961254mologous to Bacillus amyloliquefaciens precursor (AA - 29 to 443),accession number X52988,Smith-Waterman Score=1208.
atgattttgaaaccgaaagatggaaatatagaagaagttaatagtttaagaaagcaaagagcaggttcttcatcttcaaaaatgaacagtttgggattttgccgatttcggaaccaccatcaaacaggattttcgcctgctggggcaaaccagcgtggaccgcttgctgcaactctctcagggccaggcggtgaagggcaatcagctgttgcccgtctcactggtgaaaagaaaaaccaccctggcgcccaatacgcaaaccgcctctccccgcgcgttggccgattcattaatgcagctggcacgacaggtttcccgactggaaagcgggcagtgagcgcaacgcaattaatggattttgccgatttcggaaccaccatcaaacaggattttcgcctgctggggcaaaccagcgtggaccgcttgctgcaactctctcagggccaggcgtggaagattcccaaaacgatttttgacggagacggaaaaacatatcagaacgttcagcagtttatcgatgaaggcaattatacatccggcgacacccatacgctgagagaccctcactacgttgaagacaaaggccataaataccttgtattcgaagccaacacgggaacagaaaacggataccaaggcgaagaatctttatttaacaaagcgtactacggcggcggcacgaacttcttccgtaaagaaagccagaagcttcagcagagcgctaaaaaacgcgatgctgagttagcgaacggcgccctcggtatcatagagttaaataatgattacacattgaaaaaagtaatgaagccgctgatcacttcaaacacggtaactgatgaaatcgagcgcgcgaatgttttcaaaatgaacggcaaatggtacttgttcactgattcacgcggttcaaaaatgacgatcgatgatacttcgttatcgacaccagctgccccgatggtggattcgttaattgcgcgcgtaggagtaatggctcgcggtaatgccattactttgcctgtatgtggtcgggatgtgaagtttactcttgaagtgctccggggtgatagtgttgagaagacctctcgggtatggtcaggtaatgaacgtgaccaggagctgcttactgaggacgcactggatgatctcatcccttcttttctactgactggtcaacagacaccggcgttcggtcgaagagtatctggtgtcatagaaattgccgatgggagtcgccgtcgtaaagctgctgcacttaccgaaagtgattatcgtgttctggttaggaaacttttctttcttgttcattgttcagaacttagtactatcctagttggcaatataccagccatggtacctaatctccttatactccctttacattgttatgatattgttcacccaaagcgtagtgaagtaatatctccttcataccggatattatatcaccatgagaaagaagatgttggttgtcttatagatgttaacattttagacttgaacggcttgcagccagttctacagagccaatccatttcattggtacaacagtctgaattctcattggaagttacacagtaccaagagagagaacctgtattagtaagagcttcgccatcctgttctgtggatgtaacagaacgggcaggaagctctttacaatctcctttgctttctgctgatcttaccacagctcagacaccttcagaatttttagccttgactgaagattctgtgtctgaaatggatgcattttctaaaagtggaagcatggcatcccactgtgacaactttggccacaatgattctacctctcagatgtccctcaattctgctgctgttacaaagacaacaacagaacttacgggaactgttccctgtgcaattatgtctcctgggaaatataggttagagggtcaatgtagcactgaatctaattcattaccggaaacctctgctgctaatcagaaggaagtgttattacaaattgctgaactacctgctacaagtgtgagccactcagagagtaacctaccagcagatagtgaaagagaagaaaatatagggttacaaaatgctgcctgcagctggggaaggggtgacacaagcacccctgtggtcacccccactgggactatgctgggtcagacccgaagccagaatagcactgggtcttttccaaggcctgctatagccactacctatctctatgtttgctcaaggtccagggctctacaatcagcagaactggaaaaaactactttaaagttcatatggagccaaaaaagagcctgcatcgtcaagtcaatcctaagccaaaagaacaaagctggaggcatcacactacctgacttcaaactatactacaaggctacagtaaccaaaacagcatgggattttgccgatttcggaaccaccatcaaacaggattttcgcctgctggggcaaaccagcgtggaccgcttgctgcaactctctcagggccaggcggtgaagggcaatcagctgttgcccgtctcactggtgaaaagaaaaaccaccctggcgcccaatacgcaaaccgcctctccccgcgcgttggccgattcattaatgcagctggcacgacaggtttcccgactggaaagcgggcaggcgataaaaaaccattcccttccccggaaaactcttcaatgcctgccgtatatcctcactggcttccgcagaggtcaatccgaatatttcagcatacttagcaacaaggctctagcagataccgtcatgttcctggattttgccgatttcggaaccaccatcaaacaggattttcgcctgctggggcaaaccagcgtggaccgcttgctgcaactctctcagggccaggcggtgaagggcaatcagctgttgcccgtctcactggtgaaaagaaaaaccaccctggcgcccaatacgcaaaccgcctctccccgcgcgttggccgattcattaatgcagctggcacgacaggtttcccgactggaaagcgggcaatccccacaatcaggactgaaacatgcattctcccagctgctgtgttttgactactatctgctctcaactaaatccctcttcacgacttggcctcagctctcagcccttactgccttgtccactgtgggtcacaaccccttctccgagcagtctgcactccttgatcaatatggagatcagacgcaagaatggtccggttctgcaacctttacatctgacggaaaaatccgtttattctacactgactattccggtaaacattacggcaaacaaagcctgacaacagcgcaggtaaatgtgtcaaaatctgatgacacactcaaaatcaacggagtggaagatcacaaaacgatttttgacggagacggaaaaacatatcagaacgttcagcagtttatcgatgaaggcaattatacatccggcgacaaccatacgctgagagaccctcactacgttgaagacaaaggccataaataccttgtattcgaagccaacacgggaacagaaaacggataccaaggcgaagaatctttatttaacaaagcgtactacggcggcggcacgaacttcttccgtaaagaaagccagaagcttcagcagagcgctaaaaaacgcgatgctgagttagcgaacggcgccctcggtatcatagagttaaataatgattacacattgaaaaaagtaatgaagccgctgatcacttcaaacacggtaactgatgaaatcgagcgcgcgaatgttttcaaaatgaacggcaaatggtacttgttcactgattcacgcggttcaaaaatgacgatcgatggtattaactcaaacgatatttacatgcttggttatgtatcaaactctttaacgtgttatcctctaccgtcacccgggattctgcacgcagtccttttttttattatacatgtggtagatccaaccaatggaatattatccagcaataaaaggaataaagtactgaaacaggctacaacatga

SEQ ID NO: 2270 - DNA, 2460 bp, Homo sapiens
  SIMILAR (1768)..(1911): 951254mologous to Plasmid F Protein A,accession number M12987,Smith-Waterman Score=230.
tcagggtgctggcttttcaagttccttaagaatggcctcaattttctctatacactcagttggaacacgagacctgtccaggttaagcaccattttatcgcccttatacaatactgtcgctccaggagcaaactgatgtcgtgagcttaaactagttcttgatgcagatgacgttttaagcacagaagttaaaagagtgataacttcttcagcttcaaatatcaccccagcttttttctgctcatgaaggttagatgcctgctgcttaagtaattcctctttatctgtaaaggctttttgaagtgcatcacctgaccgggcagatagttcaccggggtgagaaaaaagagcaacaactgatttaggcaatttggcggggttgatacagcgggtaataatcgcctggccctgagagagttgcagcaagcggtccacgctggtttgccccagcaggcgaaaatcctgtttgatggtggttccgaaatcggcgaaatcctgcccgctttccagtcgggaaacctgtcgtgccagctgcattaatgaatcggccaacgcgcggggagaggcggtttgcgtattgggcgccagggtggtttttcttttcaccagtgagacgggcaacagctgattgcccttcaccgcctggccctgagagagttgcagcaagcggtccacgctggtttgccccagcaggcgaaaatcctgtttgatggtggttccgaaatcggcaaaatcctgcccgctttccagtcgggaaacctgtcgtgccagctgcattaatgaatcggccaacgcgcggggagaggcggtttgcgtattgggcgccagggtggtttttcttttcaccagtgagacgggcaacagctgattgcccttcaccgcctggccctgagagagttgcagcaagcggtccacgctggtttgccccagcaggcgaaaatcctgtttgatggtggttccgaaatcggcaaaatcctgcccgctttccagtcgggaaacctgtcgtgccagctgcattaatgaatcggccaacgcgcggggagaggcggtttgcgtattgggcgccagggtggtttttcttttcaccagtgagacgggcaacagctgattgcccttcaccgcctggccctgagagagttgcagcaagcggtccacgctggtttgccccagcaggcgaaaatcctgtttgatggtggttccgaaatcggcaaaatcctgcccgctttccagtcgggaaacctgtcgtgccagctgcattaatgaatcggccaacgcgcggggagaggcggtttgcgtattgggcgccagggtggtttttcttttcaccagtgagacgggcaacagctgattgcccttcaccgcctggccctgagagagttgcagcaagcggtccacgctggtttcgcccagcaggcgaaaatcctgtttgatggtggtgtcgaaatcggcaaaattccgcacccggatatggaaattcgaggacgggttgagcaacgtgttggttatacaattgaacaaattaatcatatgcgtgatgtgtttggtacgcgattggacgtgctgaagacgtatttccaccggtgatcggggttgctgcccataaaggtggcgtttacaaaacctcagtttctgttcatcttgctcaggatctggctctgaaggggctacgtgttttgctcgtggaaggtaacgacccccagggaacagcctcaatgtatcacggatgggtaccagatcttcatattcatgcagaagacactctcctgcctttctatcgatccacacctgatgctccgactggccattgaaactgttgctcatgactatgatgtcatagttattgacagcgcgcctaacctgggtatcggcacgattaatgtcgtatgtgctgctgatgtgctgattgttccacgcctgctgagttgtttgactacactccgcactgcagtttttcgatatgcttcgtgatctgctcaagaacgttgatcttaaaggggtcgagcctgatgtacgtaattctttctctctggctgcccttaacattttttccttcatttcaactttggtgaatctgccaattatgtgtcttggagttgctcttctcgaggagtgtctttgtggcgttctctgtatttcctgaatctgaacgttggcctgccttgctagattggggaagttctcctggataatatcctgcagagtgttttccaacttggttccattctccacatcactttcaggtacaccaatcagacgtagatttggtcttttcacatagtcccatatttcttggaggctttgctcatttctttttattcttttttctctaaacttcccttctcgcttcatttcattcatttcatcttccattgctgataccctttcttccagttgatcgcattggctcctgaggcttctgcattcttcacgtagttctcgagacttggttttcagctccat

SEQ ID NO: 2271 - DNA, 2236 bp, Homo sapiens
  SIMILAR (1867)..(1187): 951254mologous to Plasmid F Protein A,accession number M12987,Smith-Waterman Score=1121.
taaatagttccgctttcgatatcgtcaggctcagatgcatcaccaaacacggtccggctgacggttcactaattaacctggcaacttcatcgcgatgcagcgctcgctgaagagagcgttgcaatatgtcggattcggttccattgtcataaataactcggagtcgacgggtaccgagctcgaattcgtaatcatggtcatagctgtttcctgtcgtgccagctgcattaatgaatcggccaacgcgcggggagaggcggtttgcgtattgggcgccagggtggtttttcttttcaccagtgagacgggcaacagctgattgcccttcaccgcctggccctgagagagttgcagcaagcggtccacgctggtttgccccagcaggcgaaaatcctgtttgatggtggttccgaaatcggcaaaatcccttataaatcaaaagaatagcccgagatagggttgagtggtgttccagtttggaccaagatccactattaaagaacgtggactccaacgtcaaaggcgaaaaaccgtctatcagggcgatggcccacgcctggccctgagagagttgcagcaagcggtccacgctggtttgccccagcaggcgaaaatcctgtttgatggtggttccgaaatcggcaaaatcccgccggcttatgcgcggtacgggccgtgcaactcgtgcttgaagccctgtgggggactctaaagaccccccattatcctgagaataaatgccttggcctttatatggaaatgtggaactgagtggatatgctgtttttgtcttgacccacgtgtaaagactgaataattcaacctttgtgagaaacatgctgatgttgactattgtgttctgatatgacagcccagcttcagctatcaaaagggaagatacttccatttcaccaacattgtttccaacattgtctcctgtgtctgcagttactgaggactggcaaataacttttaactccattgcccgctttccagtcgggaaacctgtcgtgccagctgcattaatgaatcggccaacgcgcggggagaggcggtttgcgtattgggcgccagggtggtttttcttttcaccagtgagacgggcaacagctgattgcccttcaccgcctggccctgagagagttgcagcaagcggtccacgctggtttgccccagcaggcgaaaatcctttaccaacttcatccgtttcacgtacaacattttttagaaccatgcttccccaggcatcccgaatttgctcctccatccacggggactgagagccattactattgctgtatttggtaagcaaaatacgtacatcaggctcgaaccctttaagatcaacgttcttgagcagatcacgaagcatatcgaaaaactgcagtgcggaggtgtagtcaaacaactcagcaggcgtgggaacaatcagcacatcagcagcacatacgacattaatcgtgccgatacccaggttaggcgcgctgtcaataactatgacatcatagtcatgagcaacagtttcaatggccagtcggagcatcaggtgtggatcggtgggcagtttaccttcatcaaatttgcccattaactcagtttcaatacggtgcagagccagacaggaaggaataatgtcaagccccggccagcaagtgggctttattgcataagtgacatcgtccttttccccaagatagaaaggcaggagagtgtcttctgcatgaatatgaagatctggtacccatccgtgatacattgaggctgttccctgggggtcgttaccttccacgagcaaaacacgtagccccttcagagccagatccgcctggccctgagagagttgcagcaagcggtccacgctggtttgccccagcaggcgaaaatcctgtttgatggtggttccgaaatcggcaaaatcctgcccgctttccagtcgggaaacctgtcgtgccagctgcattaatgaatcggccaacgcgcggggagaggcggtttgcgtattgggcgccagggtggtttttcttttcaccagtgagacgggcaacagctgattgcccttcaccgcctggccctgagagagttgcagcaagcggtccacgctggtttgccccagcaggcgaaaatcctgtttgatggtggttccgaaatcggcaaaatcccctccaacaactggttcatatgggcttgccacgaccgctggataagaagaattttcaggaaccttagggcttgacat

SEQ ID NO: 2272 - DNA, 2823 bp, Homo sapiens
  SIMILAR (1)..(591): 1001254mologous to Plasmid F Protein A,accession number M12987,Smith-Waterman Score=1035.
  misc_feature (1)...(2823): n = a,t,c or g
atgacgaaggctatcgccattgcacagtttaatgatgacagcccggaagcgaggaaaataacccggcgctggagaataggtgaagcagcggatttagttggggtttcttctcaggctatcagagatgccgagaaagcagggcgactaccgcacccggatatggaaattcgaggacgggttgagcaacgtgttggttatacaattgaacaaattaatcatatgcgtgatgtgtttggtacgcgattgcgacgtgctgaagacgtatttccaccggtgatcggggttgctgcccataaaggtggcgtttacaaaacctcagtttctgttcatcttgctcaggatctggctctgaaggggctacgtgttttgctcgtggaaggtaacgacccccagggaacagcctcaatgtatcacggatgggtaccagatcttcatattcatgcagaagacactctcctgcctttctatcttggggaaaaggacgatgtcacttatgcaataaagcccacttgctggccggggcttgacattattccttcctgtctggctctgcaccgtattgaaactgagttaatgggcaaatttgatgaagaatttgagagtgaggttcttctcacatcgtggctcaggacccagctgagagaggctcatttgtgtatgattcatgatcacacagcaagggaagaacagacaccggcgttcggtcgaagagtatctggtgtcatagaaattgccgatgggagtcgccgtcgtaaagctgctgcacttaccgaaagtgattatcgtgttctggttggcgagctggatgatgagcagatggctgcattatccagattgggtaacgattatcgcccaacaagtgcttatgaacgtggtcagcgttatgcaagccgattgcagaatgaatttgctggaaatatttctgcgctggctgatgcggaaaatatttcacgtaagattattacccgctgtatcaacaccgccaaattgcctaaatcagttgttgctcttttttctcaccccggtgaactatctgcccggtcaggtgatgcacttcaaaaagcctttacagataaagaggaattacttaagcagcaggcatctaaccttcatgagcagaaaaaagctggggtgatatttgaagctgaagaagttatcactcttttaacttctgtgcttaaaacgtcatctgcatcaagaactagtttaagctcacgacatcagtttgctcctggagcgacagtattgtataagggcgataaaatggtgcttaacctggacagaagtaggactaatgaatcctatgttaagaatgaggaaactgtggctttgggaaggtgtcagatgaaaaaggcagatcggnaatgtgacaatctaaaaacttgtcacacttcacatggatctgtcatggcggaaacagcggttatcaatcacaagaaacgtaaaaatagcccgcgaatcgtccagtcaaacgacctcactgaggcggcatatagtctctcccgggatcaaaaacgtatgctgtatctgttcgttgaccagatcagaaaatctgatggcaccctacaggaacatgacggtatctgcgagatccatgttgctaaatatgctgaaatattcggattgacctctgcggaagccagtaaggatatacggcaggcattgaagagtttcgcggggaaggaagtggttttttatcgccctgaagaggatgccggcgatgaaaaaggctatgaatcttttccttggtttatcaaacgtgcgcacagtccatccagagggctttacagtgtacatatcaacccatatctcattcccttctttatcgggttacagaaccggtttacgcagtttcggcttagtgaaacaaaagaaatcaccaatccgtatgccatgcaatccccctacactgactattccggtaaacattacggcaaacaaagcctgacaacagcgcaggtaaatgtgtcaaaatctgatgacacactcaaaatcaacggagtggaagatcacaaaacgatttttgacggagacggaaaaacatatcagaacgttcagcagtttatcgatgaaggcaattatacatccggcgacaaccatacgctgagagaccctcactacgttgaagacaaaggccataaataccttgtattcgaagccaacacgggaacagaaaacggataccaaggcgaagaatctttatttaacaaagcgtactacggcggcggcacgaacttcttccgtaaagaaagccagaagcttcagcagagcgctaaaaaacgcgatgctgagttagcgaacggcgccctcggtatcatagagttaaataatgattacacattgaaaaaagtaatgaagccgctgatcacttcaaacacggtaactgatgaaatcgagcgcgcgaatgttttcaaaatgaacggcaaatggtacttgttcactgattcacgcggttcaaaaatgacgatcgatgcgggtatcagtcacaagaaacgaaaaaatagcccgcgaatcgtccagtcaaacgacctcactgaggcggcatatagtctctcccgggatcaaaaacgtatgctgtatctgttcgttgaccagatcagaaaatctgatggcaccctacaggaacatgacggtatctgcgagatccatgttgctaaatatgctgaaatattcggnaatacctctgcggaagccagtaaggatatacggcaggcattgaagagtttcgcggggaaggaagtggttttttatcgccctgaagaggatgccggcgatgaaaaaggctatgaatcttttccttggtttatcaaacgtctgtgttaa

SEQ ID NO: 2273 - DNA, 7038 bp, Homo sapiens
  SIMILAR (19)..(5586): 991254mologous to Homo sapiens actin binding protein ABP620,accession number AB029290,Smith-Waterman Score=9337.
atgctcattggagcatttcagatttcagattttcagatttgggatgctcaaccgatgtttcagaaagaacaagtggatcctcttcagatgaaattgcagcaggtgaatggacttggccagggattaattcagagtgcaggaaaagactgtgatgtacagggtttagaacatgacatggaagagatcaatgctcgatggaatacattgaataaaaaggtcgcacaaagaattgcacagctacaggaagctttgttgcattgtgggaagtttcaagatgccttggagccattgctcagctggttggcagataccgaggagctcatagccaatcagaaacctccatctgctgagtataaagtggtgaaagcacagatccaagaacagaagttgctccagcggctcctagatgatcgaaaggccacagtagacatgcttcaagcagaaggaggcagaatagcccagtcagcagagctggctgatagagagaaaatcactggacagctggagagtcttgaaagtagatggactgaactactcagtaaggcagcagccaggcaaaaacagctggaagacatcctggttctggccaaacagttccatgagacagctgagcctatttctgacttcttatctgtcacagagaaaaagcttgctaactcagaacctgttggcactcagactgccaaaatacagcagcagatcattcggcacaaggctctggaagaagacatagaaaaccatgcaacagatgtgcaccaggcagtcaaaattgggcagtccctctcctccctgacatctcctgcagaacagggtgtgctgtcagaaaagatagactcattgcaggcccgatacagtgaaattcaagaccgctgttgtcggaaggcagccctacttgaccaagctctgtctaatgctaggctgtttggggaggatgaggtggaggtgctcaactggctggctgaggttgaggacaagctcagttcagtgttcgtaaaggatttcaaacaggatgtcctgcacaggcagcatgctgaccacctggctttaaatgaagaaattgttaatagaaagaagaatgtagatcaagctattaaaaatggtcaggctcttctaaaacaaaccacaggtgaggaggtgttacttatccaggaaaaactagatggtataaagactcgttacgcagacatcacagttactagctccaaggccctcagaactttagagcaagcccggcagctggccaccaagttccagtctacttatgaggaactgaccgggtggctgagggaggtggaggaggagctggcaaccagtggaggacagtctcccacaggggaacagataccccagtttcagcagagacagaaggaattaaagaaggaggtcatggagcacaggctggtgttggacacagtgaatgaggtgagccgtgctctcttagagctggtgccctggagagccagagaagggctggataaacttgtgtccgatgctaacgagcagtacaaactagtcagtgacactattggacaaagggtggatgaaattgatgctgctattcagagatcacaacagtatgagcaagctgccgatgcagaactagcttgggttgctgaaacaaaacggaaactgatggctctgggtccaattcgcctggaacaggaccagaccacagctcagcttcaggtacagaaggctttctccattgacattattcgacacaaagattcaatggatgaactcttcagtcaccgtagtgaaatctttggcacatgtggggaggagcaaaaaactgtattacaggaaaagacagagtctctaatacagcaatatgaagccattagcctactcaattcagagcgttatgcccgcctagagcgggcccaggtcttagtaaaccagttttgggaaacttatgaagagctcagcccctggattgaggaaactcgggcactaatagcacagttaccctctccagccattgatcatgagcagctcaggcagcaacaagaggaaatgaggcaattaagggaatctattgctgaacacaaacctcatattgacaaactactaaagataggcccacaactaaaggaattaaaccctgaggaaggggaaatggtggaagaaaaataccagaaagcagaaaacatgtatgcccaaataaaggaggaggtgcgccagcgagccctggctctggatgaagccgtgtcccagtccacacagtttcatgataaaattgagcctatgttggagacactggagaatctttcctctcgcctgcgtatgccaccactgatccctgctgaagtagacaagatcagagagtgcatcagtgacaataagagtgccaccgtggagctagaaaaactgcagccatcctttgaggccttgaagcgccgtggagaggagcttattggacgatctcagggagcagacaaggatctggctgcaaaagaaatccaggataaattggatcaaatggtattcttctgggaggacatcaaagctcgggctgaagaacgagaaatcaaatttcttgatgtccttgaattagcagagaagttctggtatgacatggcagctctcctgaccaccatcaaagacacccaggatattgtccatgacttggaaagcccaggcattgatccttccatcatcaaacaacaggttgaagctgctgagactattaaggaagagacagatggtctgcatgaagagctggagtttattcggatccttggagcagatttgatttttgcctgtggagaaactgagaagcctgaagtgaggaagagcattgatgagatgaataatgcttgggagaacttaaacaaaacatggaaagagaggctagaaaaacttgaggatgctatgcaagctgctgtgcagtatcaggacactcttcaggctatgtttgactggctagataacactgtgattaaactctgcaccatgccccctgttggcactgacctcaatactgttaaagatcagttaaatgaaatgaaggagttcaaagtagaagtttaccaacagcaaattgagatggagaagcttaatcaccagggtgaactgatgttaaagaaagctactgatgagacggacagagacattatacgagaaccactgacagaactcaaacacctctgggagaacctgggtgagaaaattgcccaccgacagcacaaactagaaggggctctgttggcccttggtcagttccagcatgccttagaggaactaatgagttggctgactcataccgaagagttgttagatgctcagagaccaataagtggagacccaaaagtcattgaagttgagctcgcaaagcaccatgtcctaaaaaatgatgttttggctcatcaagccacagtggaaacagtcaacaaagctggcaatgagcttcttgaatccagtgctggagatgatgccagcagcttaaggagccgtttggaagccatgaaccaatgctgggagtcagtgttacagaaaacagaggagagggagcagcagcttcagtcaactctgcagcaggcccagggcttccacagtgaaattgaagatttcctcttggaacttactagaatggagagccagctttctgcatctaagcccacaggaggacttcctgaaactgctagggaacagcttgatacacatatggaactctattcccagctgaaagccaaggaagagacttataatcaactacttgacaagggcagactcatgcttctaagccgtgacgactctgggtctggctccaagacagaacagagtgtagcacttttggagcagaagtggcatgtggtcagcagtaagatggaagaaagaaagtcaaagctggaagaggccctcaacttggcaacagaattccagaattccctacaagaatttatcaactggctcactctagcagagcagagtttaaacatcgcttctccaccaagcctgattctaaatactgtcctttcccagatagaagagcacaaggtttttgctaatgaagtaaatgctcatcgagaccagatcattgagctggatcaaactgggaatcaattaaagttccttagccaaaagcaggatgttgttctgatcaagaatttgttggtgagcgtgcagtctcgatgggagaaggttgtccagcgatctattgaaagagggcgatcactagatgatgccaggaagcgggcaaaacaattccatgaagcttggaaaaaactgattgactggctagaagatgcagagagtcacctggactcagaactagagatatccaatgacccagacaaaattaaacttcagctttctaagcataaggagtttcagaagactcttggtggcaagcagcctgtgtatgataccacaattagaactggcagagcactgaaagaaaagactttgcttcccgaagatagtcagaaacttgacaatttcctaggagaagtcagagacaaatgggatactgtttgtggcaagtctgtggagcggcagcacaagttggaggaagccctgctcttttcgggtcagttcatggatgctttgcaggcattggttgactggttatacaaggtggagccacagctggctgaggaccagcccgtgcacggggaccttgacctcgtcatgaacctcatggatgcacacaaggttttccagaaggaactgggaaagcgaacaggaaccgttcaggtcctgaagcggtcaggccgagagctgattgagaatagtcgagatgacaccacttgggtaaaaggacagctccaggaactgagcactcgctgggacactgtctgtaaactctctgtttccaaacaaagccggcttgagcaggccttaaaacaagcggaagtgtttcgagacacagtccacatgctgttggagtggctttctgaagcagagcaaacgcttcgctttcggggagcacttcctgatgacacagaggccctgcagtctctcattgacacccataaggaattcatgaagaaagtagaagaaaagcgagtggacgttaactcagcagtagccatgggagaagtcatcctggctgtctgccaccccgattgcatcacaaccatcaaacactggatcaccatcatccgagctcgcttcgaggaggtcctgacatgggctaagcagcaccagcagcgtcttgaaacggccttgtcagaactggtggctaatgctgagctcctggaagaacttctggcatggatccagtgggctgagaccaccctcattcagcgggatcaggagccaatcccgcagaacattgaccgagttaaagcccttatcgctgagcatcagacatttatggaggagatgactcgcaaacagcctgacgtggaccgggtcaccaagacatacaaaaggaaaaacatagagcctactcacgcgcctttcatagagaaatcccgcagcggaggcaggaaatccctaagtcagccaacccctcctcccatgccaatcctttcacagtctgaagcaaaaaacccacggatcaaccagctttctgcccgctggcagcaggtgtggctgttagcactggagcggcaaaggaaactgaatgatgccttggatccttctatagtgtcacctaaatgtcgacggccaggcggccgccaggcctacccactagtcaattcgggaggatcgaaacggcagatcgcaaaaaacagaggagcgactcaagccttcgcgaaagaaaataaccaaaaagcatacaaagaaacgtacggcgtctctcatattacacgccatgatatgctgcagatccctaaacagcagcaaaacgaaaaataccaagtgcctcaattcgatcaatcaacgattaaaaatattgagtctgcaaaaggacttgatgtgtgggacagctggccgctgcaaaacgctgacggaacagtagctgaatacaacggctatcacgttgtgtttgctcttgcgggaagcccgaaagacgctgatgacacatcaatctacatgttttatcaaaaggtcggcgacaactcaatcgacagctggaaaaacgcgggccgtgtctttaaagacagcgataagttcgacgccaacgatccgatcctgaaagatcagacgcaagaatggtccggttctgcaacctttacatctgacggaaaaatccgtttattctacactgactattccggtaaacattacggcaaacaaagcctgacaacagcgcaggtaaatgtgtcaaaatctgatgacacactcaaaatcaacggagtggaagatcacaaaacgatttttgacggagacggaaaaacatatcagaacgttcagcagtttatcgatgaaggcaattatacatccggcgacaaccatacgctgagagaccctcactacgttgaagacaaaggccataaataccttgtattcgaagccaacacgggaacagaaaacggataccaaggcgaagaatctttatttaacaaagcgtactacggcggcggcacgaacttcttccgtaaagaaagccagaagcttcagcagagcgctaaaaaacgcgatgctgagttagcgaacggcgccctcggtatcatagagttaaataatgattacacattgaaaaaagtaatgaagccgctgatcacttcaaacacggtaactgatgaaatcgagcgcgcgaatgttttcaaaatgaacggcaaatggtacttgttcactgattcacgcggttcaaaaatgacgatcgatggtattaactcaaacgatatttacatgcttggttatgtatcacactctttaaccggcccttacaagccgctgaacaaaacagggcttgtgctgcaaatgggtcttgatccaaacgatgtgacattcacttactctcacttcgcagtgccgcaagccaaaggcaacaatgtggttatcacaagctacatgacaaacagaggcttcttcgaggataaaaaggcaacatttgcgccaagcttcttaatgaacatcaaaggcaataaaacatccgttgtcaaaaacagcatcctggagcaaggacagctgacagtcaactaa

SEQ ID NO: 2274 - DNA, 2331 bp, Homo sapiens
  SIMILAR (913)..(2328): 1001254mologous to Cloning vector pBACe3.6 levansucrase,accession number U80929,Smith-Waterman Score=2482.
atgaaactcatggaaacacttaaccagtgcataaacgctggtcatgaaatgacgaaggctatcgccattgcacagtttaatgatgacagcccggaagcgaggaaaataacccggcgctggagaataggtgaagcagcggatttagttggggtttcttctcaggctatcagagatgccgagaaagcagggcgactaccgcacccggatatggaaattcgaggacgggttgagcaacgtgttggttatacaattgaacaaattaatcatatgcgtgatgtgtttggtacgcgattgcgacgtgctgaagacgtatttccaccggtgatcggggttgctgcccataaaggtggcgtttacaaaacctcagtttctgttcatcttgctcaggatctggctctgaaggggctacgtgttttgctcgtggaaggtaacgacccccagggaacagcctcaatgtatcacggatgggtaccagatcttcatattcatgcagaagacactctcctgcctttctatcttggggaaaaggacgatgtcacttatgcaataaagcccacttgctggccggggcttgacattattccttcctgtctggctctgcaccgtattgaaactgagttaatgggcaaatttgatgaaggtaaactgcccaccgatccacacctgatgctccgactggccattgaaactgttgctcatgactatgatgtcatagttattgacagcgcgcctaacctgggtatcggcacgattaatgtcgtatgtgctgctgatgtgctgattgttcccacgcctgctgagttgtttgactacacctccgcactgcagtttttcgatatgcttcgtgatctgctcaagaacgttgatcttaaaggatcgcaaaaaacagtacatacagaaggagacatgaacatgaacatcaaaaaaattgtaaaacaagccacagttctgacttttacgactgcacttctggcaggaggagcgactcaagccttcgcgaaagaaaataaccaaaaagcatacaaagaaacgtacggcgtctctcatattacacgccatgatatgctgcagatccctaaacagcagcaaaacgaaaaataccaagtgcctcaattcgatcaatcaacgattaaaaatattgagtctgcaaaaggacttgatgtgtgggacagctggccgctgcaaaacgctgacggaacagtagctgaatacaacggctatcacgttgtgtttgctcttgcgggaagcccgaaagacgctgatgacacatcaatctacatgttttatcaaaaggtcggcgacaactcaatcgacagctggaaaaacgcgggccgtgtctttaaagacagcgataagttcgacgccaacgatccgatcctgaaagatcagacgcaagaatggtccggttctgcaacctttacatctgacggaaaaatccgtttattctacactgactattccggtaaacattacggcaaacaaagcctgacaacagcgcaggtaaatgtgtcaaaatctgatgacacactcaaaatcaacggagtggaagatcacaaaacgatttttgacggagacggaaaaacatatcagaacgttcagcagtttatcgatgaaggcaattatacatccggcgacaaccatacgctgagagaccctcactacgttgaagacaaaggccataaataccttgtattcgaagccaacacgggaacagaaaacggataccaaggcgaagaatctttatttaacaaagcgtactacggcggcggcacgaacttcttccgtaaagaaagccagaagcttcagcagagcgctaaaaaacgcgatgctgagttagcgaacggcgccctcggtatcatagagttaaataatgattacacattgaaaaaagtaatgaagccgctgatcacttcaaacacggtaactgatgaaatcgagcgcgcgaatgttttcaaaatgaacggcaaatggtacttgttcactgattcacgcggttcaaaaatgacgatcgatggtattaactcaaacgatatttacatgcttggttatgtatcaaactctttaaccggcccttacaagccgctgaacaaaacagggcttgtgctgcaaatgggtcttgatccaaacgatgtgacattcacttactctcacttcgcagtgccgcaagccaaaggcaacaatgtggttatcacaagctacatgacaaacagaggcttcttcgaggataaaaaggcaacatttgcgccaagcttcttaatgaacatcaaaggcaataaaacatccgttgtcaaaaacagcatcctggagcaaggacagctgacagtcaactaa

SEQ ID NO: 2275 - DNA, 2331 bp, Homo sapiens
  SIMILAR (1072)..(2328): 1001254mologous to Cloning vector pBACe3.6 levansucrase,accession number U80929,Smith-Waterman Score=2216.
atgtgcgaactcgatattttacacgactctctttaccaattctgccccgaattacacttaaaacgactcaacagcttaacgttggcttgccacgcattacttgactgtaaaactctcactcttaccgaacttggccgtaacctgccaaccaaagcgagaacaaaacataacatcaaacgaatcgaccgattgttaggtaatcgtcacctccacaaagagcgactcgctgtataccgttggcatgctagctttatctgttcgggcaatacgatgcccattgtacttgttgactggtctgatattcgtgagcaaaaacgacttatggtattgcgagcttcagtcgcactacacggtcgttctgttactctttatgagaaagcgttcccgctttcagagcaatgttcaaagaaagctcatgaccaatttctagccgaccttgcgagcattctaccgagtaacaccacaccgctcattgtcagtgatgctggctttaaagtgccatggtataaatccgttgagaagctgggttggtactggttaagtcgagtaagaggaaaagtacaatatgcagacctaggagcggaaaactggaaacctatcagcaacttacatgatatgtcatctagtcactcaaagactttaggctataagaggctgactaaaagcaatccaatctcatgccaaattctattgtataaatctcgctctaaaggccgaaaaaatcagcgctcgacacggactcattgtcaccacccgtcacctaaaatctactcagcgtcggcaaaggagccatgggttctagcaactaacttacctgttgaaattcgaacacccaaacaacttgttaatatctattcgaagcgaatgcagattgaagaaaccttccgagacttgaaaagtcctgcctacggactaggcctacgccatagccgaacgagcagctcagagcgttttgatatcatgctgctaatcgccctgatgcttcaactaacatgttggcttgcgggcgttcatgctcagaaacaaggttgggacaagcacttccaggctaacacagtcagaaatcgaaacatccctaaacagcagcaaaacgaaaaataccaagtgcctcaattcgatcaatcaacgattaaaaatattgagtctgcaaaaggacttgatgtgtgggacagctggccgctgcaaaacgctgacggaacagtagctgaatacaacggctatcacgttgtgtttgctcttgcgggaagcccgaaagacgctgatgacacatcaatctacatgttttatcaaaaggtcggcgacaactcaatcgacagctggaaaaacgcgggccgtgtctttaaagacagcgataagttcgacgccaacgatccgatcctgaaagatcagacgcaagaatggtccggttctgcaacctttacatctgacggaaaaatccgtttattctacactgactattccggtaaacattacggcaaacaaagcctgacaacagcgcaggtaaatgtgtcaaaatctgatgacacactcaaaatcaacggagtggaagatcacaaaacgatttttgacggagacggaaaaacatatcagaacgttcagcagtttatcgatgaaggcaattatacatccggcgacaaccatacgctgagagaccctcactacgttgaagacaaaggccataaataccttgtattcgaagccaacacgggaacagaaaacggataccaaggcgaagaatctttatttaacaaagcgtactacggcggcggcacgaacttcttccgtaaagaaagccagaagcttcagcagagcgctaaaaaacgcgatgctgagttagcgaacggcgccctcggtatcatagagttaaataatgattacacattgaaaaaagtaatgaagccgctgatcacttcaaacacggtaactgatgaaatcgagcgcgcgaatgttttcaaaatgaacggcaaatggtacttgttcactgattcacgcggttcaaaaatgacgatcgatggtattaactcaaacgatatttacatgcttggttatgtatcaaactctttaaccggcccttacaagccgctgaacaaaacagggcttgtgctgcaaatgggtcttgatccaaacgatgtgacattcacttactctcacttcgcagtgccgcaagccaaaggcaacaatgtggttatcacaagctacatgacaaacagaggcttcttcgaggataaaaaggcaacatttgcgccaagcttcttaatgaacatcaaaggcaataaaacatccgttgtcaaaaacagcatcctggagcaaggacagctgacagtcaactaa

SEQ ID NO: 2276 - DNA, 1242 bp, Homo sapiens
ttttttttttttttttttatccttcagcaagcctcttttaatgatttaaaaaaagaactaactgaacttttacaaataattgtgttccagagacagactttcaatctaaagaaaagatccaaggacctagctctcgtggcagaatgcagaaacagaagcctccagattgatctctgcagatgctaactgtggccccactttgtcctcatattcagcctgatccttaaagcccttaccaactaagccaaatacctgcttggattcttcttgacaacttggcaaaagatgtccacgttccacttcttaatcctcaccacctcttaaccacaaatttgggccccaagtggcttttcaaaaagggggaaaaaatttgtgcgaagtttgagactggtttatgtatttcatggactaaaaacccaaatctggaggttctttgggaactcttagctgggccctgggggcatggcgaagccgcctggtgcaatccctttggtccacctgggaggcccgtgaagaccttcagtggaaggaagagtgggtcagatgagacgtgtccatttcatcagtcagccatcggtgacaggctgaattcagagacccaggccagagtgtaccagctacaaaatttatccaaggattccaattatgctttaaaaaattctaccagaagaagtaaaaaacgatgtttatatgttaagaaatgtaacagagtagctctcatttgataatataaaatagctctgcctctattcaaaacagttgattttaaaagtaggtatatagtcgctatacttattattatttttagattgctttaaaaagcatatgcgtccctatctctttggcaagcacccagcggtgagtcacgccctgcacccgcagcagccgatctgagaggctcctcagggagcctccgtgaacttttccaaaccctccatgcgggccgcacacaggatgcccgtgccgggtcgtttcccatcagcttccagccacgctgcttgcttgtagctaaaagcaagccagggatgcccgtgtcagatgaagctgcttacgagtctccatggaaaggcggcgctggtgctccggcacttggtttgctcggtgcactctcttcagaggtcgccgaccgagccctccaggcggctccagcttgggcgcctcgggatgcgggccggggagacctcccggggcaggaccggcctcaggggccagcgggcgcgtcgttggggcccagcaggagct

SEQ ID NO: 2277 - DNA, 2541 bp, Homo sapiens
  SIMILAR (1885)..(2538): 971254mologous to Plasmid F Protein A,accession number M12987,Smith-Waterman Score=1113.
atgccccgccaggtgggcagtgggcctgggcccctcttgggagttgctgggcaggctgcagtaggcactggcgggaagaaatccctgtgtcagtatcgtaagccggatggctcaggcatcgtctctttgaaaatcgactggatcatagagcgttaccagctgcctcaaagttaccagcatagaaaggcaggagagtgtcttctgcatgaatatgaagatctggtacccatccgtgatacattgaggctgttccctgggggtcgttaccttccacgagcaaaacacgtagccccttcagagccagatcctgagcaagatgaacagaaactgagggattttgccgatttcggaaccaccatcaaacaggattttcgcctgctggggcaaaccagcgtggaccgcttgctgcaactctctcagggccaggcggtgaagggcaatcagctgttgcccgtctcactggtgaaaagaaaaaccaccctggcgcccaatacgcaaaccgcctctccccgcgcgttggccgattcattaatgcagctggcacgacaggtttcccgactggaaagcgggcaggattttgccgatttcggaaccaccatcaaacaggattttcgcctgctggggcaaaccagcgtggaccgcttgctgcaactctctcagggccaggcggtgaagggcaatcagctgttgcccgtctcactggtgaaaagaaaaaccaccctggcgcccaatacgcaaaccgcctctccccgcgcgttggccgattcattaatgcagctggcacgacaggtttcccgactggaaagcgggcaggattttgccgatttcggaaccaccatcaaacaggattttcgcctgctggggcaaaccagcgtggaccgcttgctgcaactctctcagggccaggcggtgaagggcaatcagctgttgcccgtctcactggtgaaaagaaaaaccaccctggcgcccaatacgcaaaccgcctctccccgcgcgttggccgattcattaatgcagctggcacgacaggtttcccgactggaaagcgggcaggattttgccgatttcggaaccaccatcaaacaggattttcgcctgctggggcaaaccagcgtggaccgcttgctgcaactctctcagggccaggcggtgaagggcaatcagctgttgcccgtctcactggtgaaaagaaaaaccaccctggcgcccaatacgcaaaccgcctctccccgcgcgttggccgattcattaatgcagctggcacgacaggtttcccgactggaaagcgggcaggattttgccgatttcggaaccaccatcaaacaggattttcgcctgctggggcaaaccagcgtggaccgcttgctgcaactctctcagggccaggcggtgaagggcaatcagctgttgcccgtctcactggtgaaaagaaaaaccaccctggcgcccaatacgcaaaccgcctctccccgcgcgttggccgattcattaatgcagctggcacgacaggtttcccgactggaaagcgggcaggattttgccgatttcggaaccaccatcaaacaggattttcgcctgctggggcaaaccagcgtggaccgcttgctgcaactctctcagggccaggcggtgaagggcaatcagctgttgcccgtctcactggtgaaaagaaaaaccaccctggcgcccaatacgcaaaccgcctctccccgcgcgttggccgattcattaatgcagctggcacgacaggtttcccgactggaaagcgggcaggattttgccgatttcggaaccaccatcaaacaggattttcgcctgctggggcaaaccagcgtggaccgcttgctgcaactctctcagggccaggcggtgaagggcaatcagctgttgcccgtctcactggacgatgtcacttatgcaataaagcccacttgctggccggggcttgccattattccttcctgtctggctctgcaccgtattgaaactgagttaatgggcaaatttgatgaaggtaaactgcccaccgatccacacctgatgctccgactggccattgaaactgttgctcatgactatgatgtcatagttattgacagcgcgcctaacctgggtatcggcacgattaatgtcgtatgtgctgctgatgtgctgattgttcccacgcctgctgagttgtttgactacacctccgcactgcagtttttcgatatgcttcgtgatctgctcaagaacgttgatcttaaagggttcgagcctgatgtacgtattttgcttaccaaatacagcaatagtaatggctctcagtccccgtggatggaggagcaaattcgggatgcctggggaagcatggttctaaaaaatgttgtacgtgaaacggatgaagttggtaaaggtcagatccggatgagaactgtttttgaacaggccattgatcaacgctcttcaactggtgcctggagaaatgctctttctatttgggaacctgtctgcaatgaaattttcgatcgtctgattaaaccacgctgggagattagataa

SEQ ID NO: 2278 - DNA, 3852 bp, Homo sapiens
  SIMILAR (1126)..(2331): 981254mologous to Cloning vector pBACe3.6 levansucrase,accession number U80929,Smith-Waterman Score=2090.
atgtgcgaactcgatattttacacgactctctttaccaattctgccccgaattacacttaaaacgactcaacagcttaacgttggcttgccacgcattacttgactgtaaaactctcactcttaccgaacttggccgtaacctgccaaccaaagcgagaacaaaacataacatcaaacgaatcgaccgattgttaggtaatcgtcacctccacaaagagcgactcgctgtataccgttggcatgctagctttatctgttcgggcaatacgatgcccattgtacttgttgactggtctgatattcgtgagcaaaaacgacttatggtattgcgagcttcagtcgcactacacggtcgttctgttactctttatgagaaagcgttcccgctttcagagcaatgttcaaagaaagctcatgaccaatttctagccgaccttgcgagcattctaccgagtaacaccacaccgctcattgtcagtgatgctggctttaaagtgccatggtataaatccgttgagaagctgggttggtactggttaagtcgagtaagaggaaaagtacaatatgcagacctaggagcggaaaactggaaacctatcagcaacttacatgatatgtcatctagtcactcaaagactttaggctataagaggctgactaaaagcaatccaatctcatgccaaattctattgtataaatctcgctctaaaggccgaaaaaatcagcgctcgacacggactcattgtcaccacccgtcacctaaaatctactcagcgtcggcaaaggagccatgggttctagcaactaacttacctgttgaaattcgaacacccaaacaacttgttaatatctattcgaagcgaatgcagattgaagaaaccttccgagacttgaaaagtcctgcctacggactaggcctacgccatagccgaacgagcagctcagagcgttttgatatcatgctgctaatcgccctgatgcttcaactaacatgttggcttgcgggcgttcatgctcagaaacaaggttgggacaagcacttccaggctaacacagtcagaaatcgaaacctcaaaatttattcacacatggttacgctttggggaaattatgaggggatctctcagtaccaagtgcctcaattcgatcaatcaacgattaaaaatattgagtctgcaaaaggacttgatgtgtgggacagctggccgctgcaaaacgctgacggaacagtagctgaatacaacggctatcacgttgtgtttgctcttgcgggaagcccgaaagacgctgatgacacatcaatctacatgttttatcaaaaggtcggcgacaactcaatcgacagctggaaaaacgcgggccgtgtctttaaagacagcgataagttcgacgccaacgatccgatcctgaaagatcagacgcaagaatggtccggttctgcaacctttacatctgacggaaaaatccgtttattctacactgactattccggtaaacattacggcaaacaaagcctgacaacagcgcaggtaaatgtgtcaaaatctgatgacacactcaaaatcaacggagtggaagatcacaaaacgatttttgacggagacggaaaaacatatcagaacgttcagcagtttatcgatgaaggcaattatacatccggcgacaaccatacgctgagagaccctcactacgttgaagacaaaggccataaataccttgtattcgaagccaacacgggaacagaaaacggataccaaggcgaagaatctttatttaacaaagcgtactacggcggcggcacgaacttcttccgtaaagaaagccagaagcttcagcagagcgctaaaaaacgcgatgctgagttagcgaacggcgccctcggtatcatagagttaaataatgattacacattgaaaaaagtaatgaagccgctgatcacttcaaacacggtaactgatgaaatcgagcgcgcgaatgttttcaaaatgaacggcaaatggtacttgttcactgattcacgcggttcaaaaatgacgatcgatggtattaactcaaacgatatttacatgcttggttatgtatcaaactctttaaccggcccttacaagccgctgaacaaaacagggcttgtgctgcaaatgggtcttgatccaaacgatgtgacattcacttactctcacttcgcagtgccgcaagccaaaggcaacaatgtggttatcacaagctacatgacaaacagaggcttcttcgaggataaaaaggcaacatttgcgccaagcttcttaatgaacatcaaaggcaatagaggaacagaaggaaaacaagggatacaatattttccacataagcctttgggtgttggaagtccacatatcaggtttgactatcttcttgtaagtatattgccttcgatccgtaatcccacgggaaagtttgtggtcaaagacttggcaaaacgcaagaattatgcacctgtagcaatgcttcaatcagccatgacacgcactcacaatcatcgctcatgtgaagagccagtgaaggatatgctattagcctttcccaatgaccgagctgcaactatcaggtctaaagaccatcataaacatttcagggattttgccgatttcggaaccaccatcaaacaggattttcgcctgctggggcaaaccagcgtggaccgcttgctgcaactctctcagggccaggcggtgaagggcaatcagctgttgcccgtctcactggtgaaaagaaaaaccaccctggcgcccaatacgcaaaccgcctctccccgcgcgttggccgattcattaatgcagctggcacgacaggtttcccgactggaaagcgggcaggattttgccgatttcggaaccaccatcaaacaggattttcgcctgctggggcaaaccagcgtggaccgcttgctgcaactctctcagggccaggcgcacgccatagtgactggcgatgctgtcggaatggacgatatcccgcaagaggcccggcagtaccggcataaccaagcctatgcctacagcatccagggtgacggtgccgaggatgacgatgagcgcattgttagatttcatacacgggtcaccgtcgacagcgacacacttgcatcggatgcagcccggttaacgtgccggcacggcctgggtaaccagggaacagctccaatgtatcacggatgggtaccagatcttcatattcatgcagaagacactctcctgcctttctatcttggggaaaaggacgatgtcacttatgcaataaagcccacttgctggccggggcttgacattattccttcctgtctggctctgcaccgtattgaaactgagttaatgggcaaatttgatgaaggtaaactgcccaccgatccacacctgatgctccgactggccattgaaactgttgctcatgactatgatgtcatagttattgacagcgcgcctaacctgggtatcggcacgattaatgtcgtatgtgctgctgatgtgctgattgttcccacgcctgctgagttgtttgactacacctccgcactgcagtttttcgatatgcttcgtgatctgctcaagaacgttgatcttaaagggttcgagcctgatgtacgtattttgcttaccaaatacagcaatagtaatggctctcagtccccgtggatggaggagcaaattcgggatgcctggggaagcatggttctaaaaaatgttgtacgtgaaacggatgaagttggtaaaggtcagatccggatgagaactgtttttgaacaggccattgatcaacgctcttcaactggtgcctggagtaatgctctttctatcttgggaacctgtctgcaatga

SEQ ID NO: 2279 - DNA, 6769 bp, Homo sapiens
  SIMILAR (2883)..(2960): 421254mologous to Plasmid F Protein A,accession number M12987,Smith-Waterman Score=41.
atggacaacttcttcgccccggttttcaccatgggcaaatattatacgcaaggcgacaaggtgctgatgccgctggcgattcaggttcatcatgccgtttgtgatggcttccatgtcggcagaatgcttaatgaattacaacagtactgcgatgagtggcagggcggggcggattttgccgatttcggaaccaccatcaaacaggattttcgcctgctggggcaaaccagcgtggaccgcttgctgcaactctctcagggccaggcggtgaagggcaatcagctgttgcccgtctcactgagaaaacagaacacaagtagaccaccatctatgcatgtggatgactttgttgctgctgaaagtaaagaagtggttcctcaagatggaatacctccaccaaaacggccactcaaagtatcacagaagatttcttcccgtgtggaaaatctgaatacattgaacctgccaaaagagctcatgttgtgccaccaccaagaggaaggggcaggggaggatttggacagggtatacgacctcatgatatttttcgtcagagaaaacagaacacaagtagaccaccatctatgcatgtggatgactttgttgctgctgaaagtaaagaagtggttcctcaagatggaatacctccaccaaaacggccactcaaagtatcacagaagatttcttcccgtggtgggttttcaggcaatagaggaggacggggtgctttccacagtcagaataggtttttcacaccacctgcttcaaaaggctttgcagaactttcagcggtataccggcatacagcatgtgcatcgcataggaatggcggaacgtatgtggtgtgaccggaacagagaacgtcacaccgtcagcagcagcggcggcaaccgcctccccaatccagggccaggcggtgaagggcaatcagctgttgcccgtctcactggtgaaaagaaaacccaccctggcgcccaatacgcaaaccgcctctccccgcgcgttggccgattcattaatgcagctggcacgacaggtttcccgactggaaagcgggcagtgagcgcaacgcaattaatggattttgccgatttcggaaccaccatcaaacaggattttcgcctgctggggcaaaccagcgtggaccgcttgctgcaactctctcagggccaggcggtgaagggcaatcagctgttgcccgtctcactggtgaaaagaaaaaccaccctggcgcccaatacgcaaaccgcctctccccgcgcgttggccgattcattaatgcagctggcacgacaggtttcccgactggaaagcgggcaggattttgccgatttcggaaccaccatcaaacaggattttcgcctgctggggcaaaccagcgtggaccgcttgctgcaactctctcagggccaggcggtgaagggcaatcagctgttgcccgtctcactggtgaaaagaaaaaccaccctggcgcccaatacgcaaaccgcctctccccgcgcgttggccgattcattaatgcagctggcacgacaggtttcccgactggaaagcgggcaggattttgccgatttcggaaccaccatcaaacaggattttcgcctgctggggcaaaccagcgtggaccgcttgctgcaactctctcagggccaggcggtgaagggcaatcagctgttgcccgtctcactggtgaaaagaaaaaccaccctggcgcccaatacgcaaaccgcctctccccgcgcgttggccgattcattaatgcagctggcacgacaggtttcccgactggaaagcgggcaggattttgccgatttcggaaccaccatcaaacaggattttcgcctgctggggcaaaccagcgtggaccgcttgctgcaactctctcagggccaggcggtgaagggcaatcagctgttgcccgtctcactggctatcagagatgccgagaaagcagggcgactcccgcacccggatatggaaattcgaggacgggttgagcaacgtgttggttatacaattgaacaaattaatcatatgcgtgatgtgtttggtacgcgattgcgacgtgctgaagacgtatttccaccggtgatcggggttgctgcccataaaggtggcgtttacaaaacctcagtttctgttcatcttgctcaggatctggctctgaaggggctacgtgttttgctcgtggaaggtaacgacccccagggaacagcctcaatgtatcacggatgggtaccagatcttcatattcatgcagaagacactctcctgcctttctatcttggggaaaaggacgatgtcacttatgcaataaagcccacttgctggccggggcttgacattattccttcctgtctggctctgcaccgtattgaaactgagttaatgggcaaatttgatgaaggtaaactgcccaccgatccacacctgatgctccgactggccattgaaactgttgctcatgactatgatgtcatagttattgacagcgcgcctaacctgggtatcggcacgattaatgtcgtatgtgctgctgatgtgctgattgttcccacgcctgctgagttgtttgactacacctccgcactgcagtttttcgatatgcttcgtgatctgctcaagaacgttatcttaaagggttcgagcctgatggattttgccgatttcggaaccacccatcaaacaggattttcgcctgctggggcaaaccagcgtggaccgcttgctgcaactctctcagggccaggcggtgaagggcaatcagctgttgcccgtctcactggtgaaaagaaaaaccaccctggcgcccaatacgcaaaccgcctctccccgcgcgttggccgattcattaatgcagctggcacgacaggtttcccgactggaaagcgggcaggattttgccgatttcggaaccaccatcaaacaggattttcgcctgctggggcaaaccagcgtggaccgcttgctgcaactctctcagggccaggcggtgaagggcaatcagctgttgcccgtctcactggtgaaaagaaaaaccaccctggcgcccaatacgcaaaccgcctctccccgcgcgttggccgattcattaatgcagctggcacgacaggtttcccgactggaaagcgggcaggattttgccgatttcggaaccaccatcaaacaggattttcgcctgctggggcaaaccagcgtggaccgcttgctgcaactctctcagggccaggcggtgaagggcaatcagctgttgcccgtctcactggtgaaaagaaaaaccaccctggcgcccaatacgcaaaccgcctctccccgcgcgttggccgattcattaatgcagctggcacgacaggtttcccgactggaaagcgggcaggattttgccgatttcggaaccaccatcaaacaggattttcgcctgctggggcaaaccagcgtggaccgcttgctgcaactctctcagggccaggcggtgaagggcaatcagctgttgcccgtctcactggcttgcaaaacaacatttcaagcctgttctccatatctgaaactaaaggaggaatacagcttccagagtgaagaagatcaaaggaacactaagctctaccagcagctggtgagaaacagctatgaccatgattacgaattcgagctcggtacccatatggacaacttcttcgcccccgttttcaccatgggcaaatattatacgcaaggcgacaaggtgctgatgccgctggcgattcaggttcatcatgccgtttgtgatggcttccatgtcggcagaatgcttaatgaattacaacagtactgcgatgagtggcagggcggggcggattttgccgatttcggaaccaccatcaaacaggattttcgcctgctggggcaaaccagcgtggaccgcttgctgcaactctctcagggccaggcggtgaagggcaatcagctgttgcccgtctcactggtgaaaagaaaaaccaccctggcgcccaatacgcaaaccgcctctccccgcgcgttggccgattcattaatgcagctggcacgacaggtttcccgactggaaagcgggcaggattttgccgatttcggaaccaccatcaaacaggattttcgcctgctggggcaaaccagcgtggaccgcttgctgcaactctctcagggccaggcggtgaagggcaatcagctgttgcccgtctcactggtgaaaagaaaaaccaccctggcgcccaatacgcaaaccgcctctccccgcgcgttggccgattcattaatgcagctggcacgacaggtttcccgactggaaagcgggcaggattttgccgatttcggaaccaccatcaaacaggattttcgcctgctggggcaaaccagcgtggaccgcttgctgcaactctctcagggccaggcggtgaagggcaatcagctgttgcccgtctcactggtgaaaagaaaaaccaccctggcgcccaatacgcaaaccgcctctccccgcgcgttggccgattcattaatgcagctggcacgacaggtttcccgactggaaagcgggcaggattttgccgatttcggaaccaccatcaaacaggattttcgcctgctggggcaaaccagcgtggaccgcttgctgcaactctctcagggccaggcggtgaagggcaatcagctgttgcccgtctcactgggattttgccgatttcggaaccaccccatcaaacaggattttcgcctgctggggcaaaccagcgtggaccgcttgctgcaactctctcagggccaggcggtgaagggcaatcagctgttgcccgtctcactgggattttgccgatttcggaacccacccatcaaacaggattttcgcctgctggggcaaaccagcgtggaccgcttgctgcaactcttctcagggccaggcggtgaagggcaatcagctgttgcccgtctcactggtgaaaagaaaaaccaccctggcgcccaatacgcaaaccgcctctccccgcgcgttggccgattcattaatgcagctggcacgacaggtttcccgactggaaagcgggcagtgagcgcaacgcaattaatggattttgccgatttcggaaccaccatcaaacaggattttcgcctgctggggcaaaccagcgtggaccgcttgctgcaactctctcagggccaggcggtgaagggcaatcagctgttgcccgtctcactggtgaaaagaaaaaccaccctggcgcccaatacgcaaaccgcctctccccgcgcgttggccgattcattaatgcagctggcacgacaggtttcccgactggaaagcgggcaggattttgccgatttcggaaccaccatcaaacaggattttcgcctgctggggcaaaccagcgtggaccgcttgctgcaactctctcagggccaggcggtgaagggcaatcagctgttgcccgtctcactggtgaaaagaaaaaccaccctggcgcccaatacgcaaaccgcctctccccgcgcgttggccgattcattaatgcagctggcacgacaggtttcccgactggaaagcgggcaggattttgccgatttcggaaccaccatcaaacaggattttcgcctgctggggcaaaccagcgtggaccgcttgctgcaactctctcagggccaggcggtgaagggcaatcagctgttgcccgtctcactggaacatgacggtatctgcgagatccatgttgctaaatatgctgaaatattcggattgacctctgcggaagccagtaaggatatacggcaggcattgaagagtttcgcggggaaggaagtggttttttatcgccctgaagaggatgccggcgatgaaaaaggctatgaatcttttccttggtttatcaaacgtgcgcacagtccatccagagggctttacagtgtacatatcaacccatatctcattcccttctttatcgggttacagaaccggtttacgcagtttcggcttagtgaaacaaaagaaatcaccaatccgtatgccatgcgtttatacgaatccctgtgtcagtatcgtaagccggatggctcaggcatcgtctctctgaaaatcgactggatcatagagcgttaccagctgcctcaaagttaccagcgtatgcctgacttccgccgccgcttcctgcaggtctgtgttaatgagatcaacagcagaactccaatgcgcctctcatacattgagaaaaagaaaggccgccagacgactcatatctgcaagttagtagaggccaataatccacaggcaatttctcaacaagacctggtacacatggctattcagattgcctgtggaatgagctacctggccagaacggaagtcatccacaaagacctggctgctaggaactgtatcactgatgacacacttcaagttaagatcacagacaatgccgtctcatggactatcactgtctggaagacaatgaaaacaggccagtttgttggatggctcttgaaagtctggttaataacgagttttctagcactagtgatgtgtggggcctttggagtgatgctgtgggaactcatgactctgggccagacgccctacatggacactgaccccttcgagatggccgcatacctgaaagatggttaccgaatagcccagccaatcaactgtcctgatgaaccatttgctgtgatggcctgttgctgggccttagatccgggggagaggcccaagtttcagcagctggtacagtgtctcacagtttcatgcagcctgggggcctacgtctga

SEQ ID NO: 2280 - DNA, 21527 bp, Homo sapiens
  SIMILAR (1617)..(1655): 1001254mologous to Escherichia coli, LBB84, plasmid pXT107, IS10L/R-1, Peptide PlasmidTransposonInsertionMutant, 402 aa transposase,accession number S67119,Smith-Waterman Score=70.
  misc_feature (1)...(21527): n = a,t,c or g
ttttttttttttttttttttgtttgcaattaatctagtcccagcacttttatttgtagagttctcaaatcaaaagtaacaaataattatacatcaggattgttaggaataccaattattttacaactgccactacgtgtttcttcttctctgacacaagtggcacagatccaggcttgctgtgtttaatacgattcacttcctttcgtcgacgagcttctttcatgatgcgctgttcctgaatctggctatagatagattttggtagatgtcgatgacgagctatacgttttatatgaggataatgctgaaatttctccttcaatttctggttataatccttggctgctttttctcgtgatgtaagcacacccaatttttcagaagcattagctttccacaggcgaatgttcatttcatcagatccacacataatactgatgaatcccctaatgatttttatcaaaatcattaagttaaggtagatacacatcttgtcatatgatcaaatggtttcgccaaaaatcaataatcagacaacaaaatgtgcgaactcgatattttacacgactctctttaccaattctgccccgaattacacttaaaacgactcaacagcttaacgttggcttgccacgccttacttgactgtaaaactctcactcttaccgaacttggccgtaacctgccaaccaaagcgagaacaaaacataacatcaaacgaatcgaccgattgttaggtaatcgtcacctccacaaagagcgactcgctgtataccgttggcatgctagctttatctgttcgggcaatacgatgcccattgtacttgttgactggtctgatatccgtgagcaaaaacggcttatggtattgcgagcttcagtcgcactacacggtcgttctgttactctttatgagaaagcgttcccgctttcagagcaatgttcaaagaaagctcatgaccaatttctagccgaccttgcgagcattctaccgagtaacaccacaccgctcattgtcagtgatgctggctttaaagtgccatggtataaatccgttgagaagctgggttggtactggttaagtcgagtaagaggaaaagtacaatatgcagacctaggagcggaaaactggaaacctatcagcaacttacatgatatgtcatctagtcactcaaagactttaggctataagaggctgactaaaagcaatccaatctcatgccaaattctattgtataaatctcgctctaaaggccgaaaaaatcagcgctcgacacggactcattgtcaccacccgtcacctaaaatctactcagcgtcggcaaaggagccatggattctagcaactaacttacctgttgaaattcgaacacccaaacaacttgttaatatctattcgaagcgaatgcagattgaagaaaccttccgagacttgaaaagtcctgcctacggactaggcctacgccatagccgaacgagcagctcagagcgttttgatatcatgctgctaatcgccctgatgcttcaactaacatgttggcttgcgggcgttcatgctcagaaacaaggttgggacaagcacttccaggctaacacagtcagaaatcgaaacctcaaaatttattcacacatggttacgctttggggaaattatgaggggatctctcagactcaagccttcgcgaaagaaaataaccaaaaagcatacaaagaaacgtacggcgtctctcatattacacgccatgatatgctgcagatccctaaacagcagcaaaacgaaaaataccaagtgcctcaattcgatcaatcaacgattaaaaatattgagtctgcaaaaggacttgatgtgtgggacagctggccgctgcaaaacgctgacggaacagtagctgaatacaacggctatcacgttgtgtttgctcttgcgggaagcccgaaagacgctgatgacacatcaatctacatgttttatcaaaaggtcggcgacaactcaatcgacagctggaaaaacgcgggccgtgtctttaaagacagcgataagttcgacgccaacgatccgatcctgaaagatcagacgcaagaatggtccggttctgcaacctttacatctgacggaaaaatccgtttattctacactgactattccggtaaacattacggcaaacaaagcctgacaacagcgcaacacacagtaaatgccagaggactgcaaagtaaggatatgaaatcttacaaccagcctccctacgtactgtggtcctccagctggagccacacgggaacagaaaacggataccaaggcgaagaatctttatttaacaaagcgtactacggcggcggcacgaacttcttccgtaaagaaagccagaagcttcagcagagcgctaaaaaacgcgatgctgagttagcgaacggcgccctcggtatcatagagttaaataatgattacacattgaaaaaagtaatgaagccgctgatcacttcaaacacggtaactgatgaaatcgagcgcgcgaatgttttcaaaatgaacggcaaatggtacttgttcactgattcacgcggttcaaaaatgacgatcgatggtattaactcaaacgatatttacatgcttggttatgtatcaaactctttaaccggcccttacaagccgctgaacaaaacaaggcttgtgctgcaaatgggtcttgatccaaacgatgtgacattcacttactctcacttcgcagtgccgcaagccaaaggcaacaatggggnagaatccccattgcgacgtgctgaagacgtatttccaccggtgatcggggttgctgcccataaaggtggcgtttacaaaacctcagtttctgttcatcttgctcaggatctggctctgaaggggctacgtgttttgctcgtggaaggtaacgacccccagggaacagcctcaatgtatcacggatgggtaccagatcttcatattcatgcagaagacactctcctgcctttctatcttggggaaaaggacgatgtcacttatgcaataaagcccacttgctggccggggcttgacattattccttcctgtctggctctgcaccgtattgaaactgagttaatgggcaaatttgatgaaggtaaactgcccaccgatccacacctgatgctccgactggccattgaaactgttgctcatgactatgatgtcatagttattgacagcgcgcctaacctgggtatcggcacgattaatgtcgtatgtgctgctgatgtgctgattgttcccacgcctgctgagttgtttgactacacctccgcactgcagtttttcagatatgcttctgtgatctgctcaagaacgtgggggatctatagagccgcacggcaggtttcaacccagacgtggggtatagagcaaccaaaattgagaaaaggcatgtatgaagaagttcagaatactacagaaacacagtttggatatttggctcaggattttcatccttttaatcagagagaccggcagcattttacctctgccatagagatgtgtggctctttacacttgagagagatggaagaaatttctacgcagcaaagcattgaagagatgacttgggtgctgttaagagcattcagttttcaaagggacacagagcataagagtttgaaaaatttgcagcctgacaacaattctatagaaaagaaaatcccattttctgaggagaaattccagccagctcctgaaatttgtgtgagtaacaagaagccaaatgtgaatcgcatagacaatgaggaaaatttctatagggcatatcagaggtcttcccggcagcccctcccatcacaggcttggaggcataggaggaaaaagtggttttgtgggctgggcatagggttcccaagctgtgcgcagcatatggactcggtgccttgcatcccagttactctagccgtggctgaaaaaggccaatgtcagctcgggccctggcttcagagcgtgcaacccataaggcttggcagcttccatggggtgttgagcctgcaggagtttgagcagcagggcactgaaaaaacaccggcgttcggtcgaagagtatctggtgtcatagaaattgccgatgggagtcgccgtcgtaaagctgctgcactcaccgaaagtgattatcgtgttctggttggcgagctggatgatgagcagatggctgcattatccagattgggtagcgattatcgcccaacaagtgcatatgaacgtggtcagcgatacgcaagccgattgcagaatgaatttgctggaaatatttctgcgctggctgatgcggaaaatatttcacgtaagattattacccgctgtatcaacaccgccaaattgcctaaatcagttgttgctcttttttctcaccccggtgaactatctgcccggtcaggtgatgcacttcaaaaagcctttacagataaagaggaattacttaagcagcaggcatctaaccttcatgagcagaaaaaagctggggtgatatttgaagctgaagaagttatcactcttttaacttctgtgcttaaaggggatctactagagccgaacggcngatcagcggtcggggaccgcggtcccacttgtattgtcgatcagactatcagcgtgagactgcgattccatcaatgcctgtcaagggcaaaccgtgtatttttaccagagcttggtgcacacagagagttttattacaaaggatacatctttagtcaggaaagcaaagatcatatatactgccagagactcaagccccttctttacaagaacttgcaaatcctcagttttgtcgtgcacctccgaagcagagcagacaaaggccataaataccttgtattcgaagccaacacgggcacagaaaacgtataccaaggcgaagtatctttatttaacaaagcgtactacggcggcggcacgaacttcttctgtaaagaaagccagaagcttcagcagagcgctaaaaaacgcgatgctgagttagcgaacggcgccctcggtatcatagagttaaataatgattacacattgaaaaaagtaatgaagccgctgatcacttcaaacacggtaactgatgaaatcgagcgcgcgaatgttttcaaaatgaacggcaaaatggtacttgttcactgaattcccgcggttcaaaaatgacgatcgatggtattaactcaaacgatatttacatgcttggttatgtatcaaactctttaaccggcccttacaagccgctgaacaaaacagggcttgtgctgcaaatgggtcttgatccaaacgatgtgacattcacttactctcacttcgcagtgccgcaagccaaaggcaacaatgtggttatcacaagctacatgacaaacagaggcttcttcgaggataaaaaggcaacatttgcgccaagcttcttaatgaacatcaaaggcaataaaacatccgttgtcaaaaacagcatcctggagcaaggacagctgacatggctccaagtagcgaagcgagcaggactgggcggcggccaaagcggtcggacagtgctccgagaacgggtgcgcatagaaattgcatcaacgcatatagcgctagcagcacgccatagtgactggcgaagctggattttgccgattttcggaaccaccatcaaacaggattttcgcctgctggggcaaaccagcgtggaccgcttgctgcaactctctcagggccaggcggtgaagggcaatcagctgttgcccgtctcactggtgaaaagaaaaaccaccctggcgcccaatacgcaaaccgcctctccccgcgcgttggccgattcattaatgcagctggcacgacaggtttcccgactggaaagcgggcagagaattatccccgatttcgaaaccaccatcaaccaggattttcgcctgatggggcaaaacagcgggacccgcttatgcaactctctcagggccaggcgtggaattgtgagcggatatcaatttcacacaggaaacagctatgaccatgattacgaattcgagctcggtaccctgatcagaaaagtaaaaattgaacagagtggagcaacccatggggacagcaaggggattaggacaatggccatcctcaaaaaaaaaaacggaaaaactgagccccagccccaaatgaaaaaggggacgaaaaaatgggtagaatatccggctcctcccatgaagggattttgccgatttcggaaccaccatcaaacaggattttcgcctgctggggcaaaccagcgtggaccgcttgctgcaactctctcagggccaggcggtgaagggcaatcagctgttgcccgtctcactggtgaaaagaaaaaccaccctggcgcccaatacgcaaaccgcctctccccgcgcgttggccgattcattaatgcagctggcacgacaggtttcccgactggaaagcgggcagtgagcgcaacgcaattaatcaggaaggcccaagacattgagcatgaagtcagcagagctgttgtgaagagcaaccagatggggaaggaggatgaggagtgtgggggcaagcaggccggcctgagggaatgccacgtgttggacgctggaggtcccatggcccacagcaggaaggcccaagacattgagcatgaagtcagcagagctgttgtgaagagcaaccagatggggaaggaggatgaggagtgtgggggcaagcaggccggcctgagggaatgccacgtgttggacgctggagcaccagttcccatcttccctgccacacctgcaattctgtacaccagaacacaggcatcagaatcacctagagtggctggtaaaaatgaaggctcttatgccccacccctaattcagtggattataaggaattttgccgatttcggaaccaccatcaaacaggattttcgcctgctggggcaaaccagcgtggaccgcttgctgcaactctctcagggccaggcggtgaagggcaatcagctgttgcccgtctcactggtgaaaagaaaaaccaccctggcgcccaatacgcaaaccgcctctccccgcgcgttggccgattcattaatgcagctggcacgacaggtttcccgactggaaagcggccagtgagcgcaacgcaattaatggattttgccgatttcggaaccaccatcaaacaggattttcgcctgctggggcaaaccagcgtggaccgcttgctgcaactctctcagggccaggcggtgaagggcaatcagctgttgcccgtctcactggtgaaaagaaaaaccaccctggcgcccaatacgcaaaccgcctctccccgcgcgttggccgattcattaatgcagctgggcacgacaggtttcccgactggaaagcgggcagtgagcgcaacgcaattaatggattttgccgatttcggaaccaccatcaaacaggattttcgcctgctggggcaaaccagcgtggaccgcttgctgcaactctctcagggccaggcggtgaagggcaatcagctgttgcccgtctcactggtgaaaagaaaaaccaccctggcgcccaatacgcaaaccgcctctccccgcgcgttggccgattcattaatgcagctggcacgacaggtttcccgactggaaagcgggcaggattttgccgatttcggaaccaccatcaaacaggattttcgcctgctggggcaaaccagcgtggaccgcttgctgcaactctctcagggccaggcggcatcccgaattttgttcctccatccacggggattgagagccattactattgctgtatttggtaagcaaaatacgtacatcaggctcgaaccttttaagatcaacgttcttgagcagatcacgaagcatatcgaaaaactgcagtgcggaggtgtagtcaaacaactcagcaggcgtgggaacaatcagcacatcagcagcacatacgacattaatcgtgccgatacccaggttaggcgcgctgtcaataactatgacatcatagtcatgagcaacagtttcaatggccagtcggagcatcaggtgtggatcgatagaaaggcaggagagtgtcttctgcatgaatatgaagatatagtacccatccgtgatacattgaggctgttccctgggggtcgttaccttccacgagcaaaacacgtagccccttcagagccagatcctgagcaagatgaacagaaactgaggttttgtaaacgccacctttatgggcagcaaccccgatcaccggtggaaatacgtcttcagcacgtcgcaatcgcgtaccaaacagggggatcctctagaggattttgccgatttcggacccaccatcaaacaggattttcgcctgctggggcaaaccagcgtggaccgcttgctgcaactctctcagggccaggcggtgaagggcaatcagctgttgcccgtctcactggtgaaaagaaaaaccaccctggcgcccaatacgcaaaccgccctctccccgcgcgttggccgattcattaatgcagctggcacgacaggtttcccgactggaaagcgggcagtgagcgcaacgcaattaatggattttgccgatttcggaaccaccatcaaacaggattttcgcctgctggggcaaaccagcgtggaccgcttgctgcaactctctcagggccaggcggtgaagggcaatcagctgttgcccgtctcactggtgaaaagaaaaaccaccctggcgcccaatacgcaaaccgcctctccccgcgcgttggccgattcattaatgcagctggcacgacaggtttcccgactggaaagcgggcaacggtttttcgcccttgacgttgggagtccacgttctttaatagtggattcttgttccaaactggaacaacactcaaccctatctggggctattcttttgatttataagggattttgccgatttcggaaccaccatcaaacaggattttcgcctgctggggcaaaccagcgtggaccgcttgctgcaactctctcagggccaggcggtgaagggcaatcagctgttgcccgtctcactggtgaaaagaaaaaccaccctggcgcccaatacgcaaaccgcctctccccgcgcgttggccgattcattaatgcagctggcacgacaggtttcccgactggaaagcgggcagtgagcgcaacgcaattaatggattttgccgatttcggaaccaccatcaaacaggattttcgcctgctggggcaaaccagcgtggaccgcttgctgcaactctctcagggccaggcggatttgtcgcctgctggcgcccaaacccagcgtggcccggcttttgccaactctctcaggggccagccgggattttgcccgatttcggaaccacctatcaaacaggattttcgcctgctggggcaaatccagcgtggaccgcttgctgcaactctctcagggccaggcggtgaagggcaatcagctgttgcccgtctcactggtgaaaagaaaaaccaccctggcgcccaatacgcaaaccgcctctccccgcgcgttggccgattcattaatgcagctggcacgacaggtttcccgactggaaagcgggcagtgagcgcaacgcaattaatggattttgccgatttcggaaccaccatcaaacaggattttcgcctgctggggcaaaccagcgtggaccgcttgctgcaactctctcagggccaggcggtgaagggcaatcagctgttgcccgtctcactggtgaaaagaaaaaccaccctggcgcccaatacgcaaaccgcctctccccgcgcgttggccgattcattaatgcagctggcacgacaggtttcccgactggaaagcgggcaggattttgccgatttcgggaccccccatcaaacaggattttcgcctgctggggcaaaccagcgtggaccgcttgctgcaactctctcagggccaggcggtgaagggcaatcagctgttgcccgtctcactggtgaaaagaaaaaccaccctggcgcccaatacgcaaaccgcctctccccgcgcgttggccgattcattaatgcagctggcacgacaggtttcccgactggaaagcgggcagtgagcgcaacgcaattaatggattttgccgatttcggaaccaccatcaaacaggattttcgccctgctggggcaaaccagcgtggaccgcacgctgcaactctctcagggccaggcggtgaagggcaatcagctgttgaccgtctcactggtgaaaagaaaaaccaccctggcgcccaatacgcaaaccgcctctcgccgcgcgttggccgattcattaatgcagctggcacgacaggtttcccgactggaaagcgggcaggattttgccgatttcggaaccaccatcaaacaggattttcgcctgctggggcaaaccagcgtggaccgcttgctgcaactctctcagggccaggcggtgaagggcaatcagctgttgcccgtctcactggtgaaaagaaaaaccaccctggcgcccaatacgcaaaccgcctctccccgcgcgttggccgattcattaatgcagctggcacgacaggtttcccgactggaaagcgggcaggattttgccgatttcggaaccaccatcaaacaggattttcgcctgctggggcaaatccagcgtggaccgcttgctgcaactcacacagggccaggcggtgaagggcaatcagctgttgcccgtctcactggtgaaaagaaaaaccaccctggcgcccaatacgcaaaccgcctctccccgcgcgttggccgattcattaatgcagctggcacgacaggtttcccgactggaaagcgggcacatgtccctgcatttaggcaatgaagtgtttgatgtgtacaaagccccgctgctgggcaattacatccacctgtttataagagaagacactggtctacagggacaagccgtctttaaatccaaacttacctttaggcttggcgtcatccaacagtgggatagaggtaagtttgccaaggctggcattccagttgtacgcccgaacggcccagaattcaaaaggagtacctgtggtgcaccaagcagacattatacttcaaagctacttcccctcaacgtgattctggatgtcgcttgggcccccaccaacctcatccacaccaagtacccacagctcttgtcggggatgagaccatgattggggtccacaagctacacaagatgatggccaatgggatcctgaaagtgcctgccatcaatgtcaacaactccgtcaccaagagcaagtttgacaacctctccggctgccaggagtccctcatagatagcatcaagtgggccacagacgtgatgattgccagcaaggattttcgcctgctggggcaaaccagcgtggaccgcttgctgcaactctctcagggccaggcggtgaaggggcaatcagctgttgcccgtctcactggtgaaaagaaaaaccaccctggcgcccaatacgcaaaccgcctctccccgcgcgttggccgattcattaatgcagctggcacgacaggtttcccgactggaaagcgggcacagagcaaacaactggaaactgttttggatgatcttgaccccgagctcgccaaaggaccaagtttgagttcactttcgggattttgccgatttcggaaccaccatcaaacaggattttcgcctgctggggcaaaccagcgtggaccgcttgctgcaactctctcagggccaggcggtgaagggcaatcagctgttgcccgtctcactggtgaaaagaaaaaccaccctggcgcccaatacgcaaaccgcctctccccgcgcgttggccgattcattaatgcagctggcacgacaggtttcccgactggaaagcgggcaggattttgccgatttcggaaccaccatcaaacaggattttcgcctgctggggcaaaccagcgtggaccgcttgctgcaactctctcagggccaggcggtgaagggcaatcagctgttgcccgtctcactggtgaaaagaaaaaccaccctggcgcccaatacgcaaaccgcctctccccgcgcgttggccgattcattaatgcagctggcacgacaggtttcccgactggaaagcgggcaggattttgccgatttcggaaccaccatcaaacaggattttcgcctgctggggcaaaccagcgtggaccgcttgctgcaactctctcagggccaggcggtgaagggcaatcagctgttgcccgtctcactggtgaaaagaaaaaccaccctggcgcccaatacgcaaaccgcctctccccgcgcgttggccgattcattaatgcagctggcacgacaggtttcccgactggaaagcgggcaggattttgccgatttcggaaccaccatcaaacaggattttcgcctgctggggcaaaccagcgtggaccgcttgctgcaactctctcagggccaggcggtgaagggcaatcagctgttgcccgtctcactggtgaaaagaaaaaccaccctggcgcccaatacgcaaaccgcctctccccgcgcgttggccgattcattaatgcagctggcacgacaggtttcccgactggaaagcgggcaggattttgccgatttcggaaccaccatcaaacaggattttcgcctgctggggcaaaccagcgtggaccgcttgctgcaactctctcagggccaggcggtgaagggcaatcagctgttgcccgtctcactggtgaaaagaaaaaccaccctggcgcccaatacgcaaaccgcctctccccgcgcgttggccgattcattaatgcagctggcacgacaggtttcccgactggaaagcgggcaggattttgccgatttcggaaccaccatcaaacaggattttcgcctgctggggcaaaccagcgtggaccgcttgctgcaactctctcagggccaggcggtgaagggcaatcagctgttgtcccgtctcactggtgaaaagaaaaatcaccctggcgcccaatacgcaaaccgcctctccccgcgcgatacccgattcattaatgcagctgacacgacagatttcccgactggaaagcggacagtgagcgcaccgcaattaatggattttgccgatttcggaaccaccatcaaacaggattttcgcctgctggggcaaaccagcgtggaccgcttgctgcaactctctcagggccaggcggtgaagggcaatcagctgttgcccgtctcactggtgaaaagaaaaaccaccctggcgcccaatacgcaaaccgcctctccccgcgcgttggccgattcattaatgcagctggcacgacaggtttcccgactggaaagcgggcaggattttgccgatttcggaaccaccatcaaacaggattttcgcctgctggggcaaaccagcgtggaccgcttgctgcaactctctcagggccaggcggtgaagggcaatcagctgttgcccgtctcactggtgaaaagaaaaaccaccctggcgcccaatacgcaaaccgcctctccccgcgcgttggccgattcattaatgcagctggcacgacaggtttcccgactggaaagcgggcaggattttgccgatttcggaaccaccatcaaccaggattttcgcctgctggtgcaaaccagcatggaccgcttactgcaactctctcaggtccaggcgctgaagggcaatcagctgttgcccgtctcactgggagccttccctgatttcccacactctggcccctcacctggttttgagctcatgaggcaggaagagctgacccatctggccctcccttgtcacgtgtcaggcatgaagaagccactggttctaggcatttctgggaagccccagggactgcaagtggccattaccatctctaaggagagctctgattgcagggattttgccgatttcggaaccaccatcaaacaggatttacgcctgctggggcaaaccagcgtggaccgcttgctgcaactctctcagggccaggcggtgaagggcaatcagctgttgcccgtctcactggtgaaaagaaaaaccaccctggcgcccaatacgcaaaccgcctctccccgcgcgttggccgattcattaatgcagctggcacgacaggtttcccgactggaaagcgggcaggattttgccgatttcggaaccaccatcaaacaggattttcgcctgctggggcaaatccagcgtggaccgcttgctgcaactctctcagggccaggcggtgaagggcaatcagctgttgcccgtctcactggtgaaaagaaaaaccaccctggcgcccaatacgcaaaccgcctctccccgcgcgttggccgattcattaatgcagctggcacgacaggtttcccgactggaaagcgggcagtgagcgcaacgcaattaatggattttgccgatttcggaaccaccatcaaacaggattttcgcctgctggggcaaaccagcgtggaccgcttgctgcaactctctcagggccaggcggtgaagggcaatcagctgttgcccgtctcactggtgaaaagaaaaaccaccctggcgcccaatacgcaaaccgcctctccccgcgcgttggccgattcattaatgcagctggcacgacaggtttcccgactggaaagcgggcaggattttgccgatttcggaaccaccatcaaacaggattttcgcctgctggggcaaaccagcgtggaccgcttgctgcaactctctcagggccaggcggtgaagggcaatcagctgttgcccgtctcactggtgaaaagaaaaaccaccctggcgcccaatacgcaaaccgcctctccccgcgcgttggccgattcattaatgcagctggcacgacaggtttcccgactggaaagcgggcaggattttgccgatttcggaaccaccatcaaacaggattttcgcctgctggggcaaaccagcgtggaccgcttgctgcaactctctcagggccaggcggtgaagggcaatcagctgttgcccgtctcactggtgaaaagaaaaaccaccctggcgcccaatacgcaaaccgcctctccccgcgcgttggccgattcattaatgcagctggcacgacaggtttcccgactggaaagcgggcaaggactgcccgctaaagctggggtgcaccagaaggtggccgtgcagggccattcgcttcagctgctatcccagctgtgttgctcatggcatggaagcagctttaaaagcattttgggacaatctggtcatccaaggaaacaaaagccttcaaagtaaggattttgccgatttcggaaccaccatcaaacaggattttcgcctgctggggcaaaccagcgtggaccgcttgctgcaactctctcagggccaggcggtgaagggcaatcagctgttgcccgtctcactggtgaaaagaaaaaccaccctggcgcccaatacgcaaaccgcctctccccgcgcgttggccgattcattaatgcagctggcacgacaggtttcccgactggaaagcgggcaggattttgccgatttcggaaccaccatcaaacaggattttcgcctgctggggcaaaccagcgtggaccgcttgctgcaactctctcagggccaggcggtgaagggcaatcagctgttgcccgtctcactggtgaaaagaaaaaccaccctggcgcccaatacgcaaaccgcctctccccgcgcgttggccgattcattaatgcagctggcacgacaggtttcccgactggaaagcgggcaggattttgccgatttcggaaccaccatcaaacaggattttcgcctgctggggcaaaccagcgtggaccgcttgctgcaactctctcagggccaggcggtgaagggcaatcagctgttgcccgtctcactggtgaaaagaaaaaccaccctggcgcccaatacgcaaaccgcctctccccgcgcgttggccgattcattaatgcagctggcacgacaggtttcccgactggaaagcgggcaggattttgccgatttcggaaccaccatcaaacaggattttcgcctgctggggcaaaccagcgtggaccgcttgctgcaactctctcagggccaggcggtgaagggcaatcagctgttgcccgtctcactggtgaaaagaaaaaccaccctggcgcccaatacgcaaaccgcctctccccgcgcgttggccgattcattaatgcagctggcacgacaggtttcccgactggaaagcgggcaggattttgccgatttcggaaccaccatcaaacaggattttcgcctgctggggcaaaccagcgtggaccgcttgctgcaactctctcagggccaggcggtgaagggcaatcagctgttgcccgtctcactggtgaaaagaaaaaccaccctggcgcccaatacgcaaaccgcctctccccgcgcgttggccgattcattaatgcagctggcacgacaggtttcccgactggaaagcgggcaggattttgccgatttcggaaccaccatcaaacaggattttcgcctgctggggcaaaccagcgtggaccgcttgctgcaactctctcagggccaggcggtgaagggcaatcagctgttgcccgtctcactggtgaaaagaaaaaccaccctggcgcccaatacgcaaaccgcctctccccgcgcgttggccgattcattaatgcagctggcacgacaggtttcccgactggaaagcgggcaggattttgccgatttcggaaccaccatcaaacaggattttcgcctgctggggcaaaccagcgtggaccgcttgctgcaactctctcagggccaggcggtgaagggcaatcagctgttgcccgtctcactggtgaaaagaaaaaccaccctggcgcccaatacgcaaaccgcctctccccgcgcgttggccgattcattaatgcagctggcacgacaggtttcccgactggaaagcgggcaggattttgccgatttcggaaccaccatcaaacaggattttcgcctgctggggcaaaccagcgtggaccgcttgctgcaactctctcagggccaggcggtgaagggcaatcagctgttgcccgtctcactggtgaaaagaaaaaccaccctggcgcccaatacgcaaaccgcctctccccgcgcgttggccgattcattaatgcagctggcacgacaggtttcccgactggaaagcgggcaggattttgccgatttcggaaccaccatcaaacaggattttcgcctgctggggcaaaccagcgtggaccgcttgctgcaactctctcagggccaggcggtgaagggcaatcagctgttgcccgtctcactggtgaaaagaaaaaccaccctggcgcccaatacgcaaaccgcctctccccgcgcgttggccgattcattaatgcagctggcacgacaggtttcccgactggaaagcgggcaggattttgccgatttcggaaccaccatcaaacaggattttcgcctgctggggcaaaccagcgtggaccgctttctgcaactctctcagggccagccggtgaagggcaatcagctgttgcccgtctcactggtgaaaagaaaaaccaccctggcgcccaatacgcaaaccgcctctctccgcgcgttggccgattcattaatgcagctggcacgacaggtttcccgactggaaagcgggcaggattttgccgatttcggaaccaccatcaaacaggattttcgcctgctggggcaaaccagcgtggaccgcttgctgcaactctctcagggccaggcggtgaagggcaatcagctgttgcccgtctcactggtgaaaagaaaaaccaccctggcgcccaatacgcaaaccgcctctccccgcgcgttggccgattcattaatgcagctggcacgacaggtttcccgactggaaagcgggcaggattttgccgatttcggaaccaccatcaaacaggattttcgcctgctggggcaaaccagcgtggaccgcttgctgcaactctctcagggccaggcggtgaagggcaatcagctgttgcccgtctcactggtgaaaagaaaaaccaccctggcgcccaatacgcaaaccgcctctccccgcgcgttggccgattcattaatgcagctggcacgacaggtttcccgactggaaagcgggcaggattttgccgatttcggaaccaccatcaaacaggattttcgcctgctggggcaaaccagcgtggaccgcttgctgcaactctctcagggccaggcggtgaagggcaatcagctgttgcccgtctcactggtgaaaagaaaaaccaccctggcgcccaatacgcaaaccgcctctccccgcgcgttggccgattcattaatgcagctggcacgacaggtttcccgactggaaagcgggcaggattttgccgatttcggaaccaccatcaaacaggattttcgcctgctggggcaaaccagcgtggaccgcttgctgcaactctctcagggccaggcggtgaagggcaatcagctgttgcccgtctcactggtgaaaagaaaaaccaccctggcgcccaatacgcaaaccgcctctccccgcgcgttggccgattcattaatgcagctggcacgacaggtttcccgactggaaagcgggcaggattttgccgatttcggaaccaccatcaaacaggattttcgcctgctggggcaaaccagcgtggaccgcttgctgcaactctctcagggccaggcggtgaagggcaatcagctgttgcccgtctcactggtgaaaagaaaaaccaccctggcgcccaatacgcaaaccgcctctccccgcgcgttggccgattcattaatgcagctggcacgacaggtttcccgactggaaagcgggcaggattttgccgatttcggaaccaccatcaaacaggattttcgcctgctggggcaaaccagcgtggaccgcttgctgcaactctctcagggccaggcggtgaagggcaatcagctgttgcccgtctcactggtgaaaagaaaaaccaccctggcgcccaatacgcaaaccgcctctccccgcgcgttggccgattcattaatgcagctggcacgacaggtttcccgactggaaagcgggcaggattttgccgatttcggaaccaccatcaaacaggattttcgcctgctggggcaaaccagcgtggaccgcttgctgcaactctctcagggccaggcggtgaagggcaatcagctgttgcccgtctcactggtgaaaagaaaaaccaccctggcgcccaatacgcaaaccgcctctccccgcgcgttggccgattcattaatgcagctggcacgacaggtttcccgactggaaagcgggcaggattttgccgatttcggaaccaccatcaaacaggattttcgcctgctggggcaaaccagcgtggaccgcttgctgcaactctctcagggccaggcggtgaagggcaatcagctgttgcccgtctcactgaaaccatttctttctgccaccaaaactaggttgcatccaaaagtttttcacaagcttaaaaaagaaaaacgaaaaattgacaagtattacacagaagagcccacaaaagcttcagcaacaccaagggcgaagaagcagcgtcagatccagtcaattcgggaggatcgaaacggcagatcgcaaaaaacagtacatacagaaggagacatgaacatgaacatcaaaaaaattgtaaaacaagccacagttctgacttttacgactgcacttctggcaggaggagcgactcaagccttcgcgaaagaaaataaccaaaaagcatacaaagaaacgtacggcgtctctcatattacacgccatgatatgctgcagatccctaaacagcagcaaaacgaaaaataccaagtgcctcaattcgatcaatcaacgattaaaaatattgagtctgcaaaaggacttgatgtgtgggacagctggccgctgcaaaacgctgacggaacagtagctgaatacaacggctatcacgttgtgtttgctcttgcgggaagcccgaaagacgctgatgacacatcaatctacatgttttatcaaaaggtcggcgacaactcaatcgacagctggaaaaacgcgggccgtgtctttaaagacagcgataagttcgacgccaacgatccgatcctgaaagatcagacgcaagaatggtccggttctgcaacctttacatctgacggaaaaatccgtttattctacactgactattccggtaaacattacggcaaacaaagcctgacaacagcgcaggattttcgcctgctggggcaaaccagcgtggaccgcttgctgcaactctctcagggccaggcggtgaagggcaatcagctgttgcccgtctcactggtgaaaagaaaaaccaccctggcgcccaatacgcaaaccgcctctccccgcgcgttggccgattcattaatgcagctggcacgacaggtttcccgactggaaagcgggcaggattttgccgatttcggaaccaccatcaaacaggattttcgcctgctggggcaaaccagcgtggaccgcttgctgcaactctctcagggccaggcggtgaagggcaatcagctgttgcccgtctcactggtgaaaagaaaaaccaccctggcgcccaatacgcaaaccgcctctccccgcgcgttggccgattcattaatgcagctggcacgacaggtttcccgactggaaagcgggcaggattttgccgatttcggaaccaccatcaaacaggattttcgcctgctggggcaaaccagcgtggaccgcttgctgcaactctctcagggccaggcggtgaagggcaatcagctgttgcccgtctcactggtgaaaagaaaaaccaccctggcgcccaatacgcaaaccgcctctccccgcgcgttggccgattcattaatgcagctggcacgacaggtttcccgactggaaagcgggcaggattttgccgatttcggaaccaccatcaaacaggattttcgcctgctggggcaaaccagcgtggaccgcttgctgcaactctctcagggccaggcggtgaagggcaatcagctgttgcccgtctcactggtgaaaagaaaaaccaccctggcgcccaatacgcaaaccgcctctccccgcgcgttggccgattcattaatgcagctggcacgacaggtttcccgactggaaagcgggcatcaggcaccgtgtatgaaatctaacaatgcgctcatcgtcatcctcggcaccgtcaccctggatgctgtaggcataggcttggttatgccggtactgccgggcctcttgcgggatatcgtccattccgacagcatcgccagtcactatggcgtgctgctagcgctatatgcgttgatgcaatttctatgcgcacccgttctcggagcactgtccgaccgctttggccgccgcccagtcctgctcgcttcgctacttggagccactatcgactacgcgatcatggcgaccacacccgtcctgtggatctacccactagtcaattcaccatcttgttga

SEQ ID NO: 2281 - DNA, 16122 bp, Homo sapiens
  SIMILAR (1740)..(1258): 741254mologous to Bacillus amyloliquefaciens precursor (AA - 29 to 443),accession number X52988,Smith-Waterman Score=619.
ctagaggatccccatgtcttgtaagaagtctagatctttaaatgtgggaagaggcttctctcgctctttctgggaagcccggcgtttgtaggttgagcctttgaggtcatatttgatatgcattttgacggatcttggtaaaagattgttcatcaccacaatccgaatgttcttgccacctgtctgcacacagtacagtccaaagaatttaggcagcaaagtccgagggttctggctgaggttcaagtagtatcctggaagcagcttctgcagaaactccgcctctttatgttggagtgtcttaataatgagttcatcgtcgctggacacatagaacagggaaccactagctccagagctacagagttcaatcagcggctcactgcagagggagcacaagtaatcatcgggcgggataccaaatagctcccgaaagtagcggaaggcaaccggcgcataggtcttgaaacggaaggcattgtagtgatgagcaggggtcaggttgctcccttcactggggaagaagatactctccaccacgtagaaatcttgcatgaggacatcacgctctggtttggtactcaggctccccacagtgtaagtaatgcctaactggatggcacctttcaaggctgttgaggttgtctttttatatgttgtctctcctgtcccctcctctccctggaggttggactggctaagaattccaacactgtaatcacacagttggtctttctggtgaccagcccccatcttgaagctaccgagggcgccgttcgctaactcagcatcgcgttttttagcgctctgctgaagcttctggctttctttacggaagaagttcgtgccgccgccgtagtacgctttgttaaataaagattcttcgccttggtatccgttttctgttcccgtgttggcttcgaatacaaggtatttatggcctttgtcttcaacgtagtgagggtctctcagcgtatggttgtcgccggatgtataattgccttcatcgataaactgctgaacgttctgatatgtttttccgtctccgtcaaaaatcgttttgtgatcttccactccgttgattttgagtgtgtcatcagattttgacacatttacctgcgctgttgtcaggctttgtttgccgtaatgtttaccggaatagtcagtgtagaataaacggatttttccgtcagatgtaaaggttgcagaaccggaccattcttgcgtctgatctttcaggatcggatcgttggcgtcgaacttatcgctgtctttaaagacacggcccgcgtttttccagctgtcgattgagttgtcgccgactttacagtgtttcaatcgtggaatcattattaaactctcatgatcaccgagggcgccgttcgctaaatcagcatcgcgttttttagcgctctgatgaatcttctggctttctttacggaagaagttcgtgccgacgccgtagtacgctttgttaaataaagattcttcgccttggtatccgttttctgttcccgtgttggattcgaatacaaggtatttatggcctttgtcttcaacgtagtgagggtctctcagcgtatggttgtcgccggatgtataattgccttcatcggtaaactgctgaacgttctgatatgtttttccgtctccgtcaaaaatcgttttgtgatcttccactccgttgatattgagtgtgtcatcagattttgacacatttccctgcgctgttgtcaggctgacggggcgcgcggcgacagctgttcccgagaggtgctccgatggacgggtgcccattaaatttgacccaacgcatatagcgctcacgagccgcgccatagtaactggagatgctgtacagggtggacgatatcccgtaagaggtccggcagtaacggagaaaaggagcctactccgggcaaccatgcaagatgtcttttgcgacggtgacagcttgcatgcctgcaggtcgactctagaggatcccctaaaggctttttgaagtgcatcacctgaccgggcagatagttcaccggggtgagaaaaaagagcaacaactgatttaggcaatttggcggtgttgatacagcgggtaataatcttacgtgaaatattttccgcatcagccagcgcagaaatatttccagcaaattcattctgcaatcggcttgcataacgctgaccacgttcataagcacttgttgggcgataatcgttacccaatctggataatgcagccatctgctcatcatccagctcgccaaccagaacacgataatcactttcggtaagtgcagcagctttacgacggcgactcccatcggcaatttctatgacaccagatactcttcgaccgaacgccggtgtctgttgaccagtcagtagaaaagaagggatgagatcatccagtgcgtcctcagtaagcagctcctggtcacgttcattacctgaccatacccgagaggtcttctcaacactatcaccccggagcacttcaagagtaaacttcacatcccgaccacatacaggcaaagtaatggcattaccgcgagccattactcctacgcgcgcaattaacgaatccaccatcggggcagctttaccaacttcatccgtttcacgtacaacattttttagaaccatgcttccccaggcatcccgaatttgctcctccatccacggggactgagagccattactattgctgtatttggtaagcaaaatacgtacatcaggctcgaaccctttaagatcaacgttcttgagcagatcacgaagcatatcgaaaaactgcagtgcggaggtgtagtcaaacaactcagcaggcgtgggaacaatcagcacatcagcagcacatacgacattaatcgtgccgatacccaggttaggcgcgctgtcaataactatgacatcatagtcatgagcaacagtttcaatggccagtcggagcatcaggtgtggatcggtgggcagtttaccttcatcaaatttgcccattaactcagtttcaatacggtgcagagccagacaggaaggaataatgtcaagccccggccagcaagtgggctttattgcataagtgacatcgtccttttccccaagatagaaaggcaggagagtgtcttctgcatgaatatgaagatctggtacccatccgtgatacattgaggctgttccctgggggtcgttaccttccacgagcaaaacacgtagccccttcagagccagatcgatatgagtcgtctggcggcctttctttttctcaatgtatgagaggcgcattggagttctgctgttgatctcattaacacagacctgcaggaagcggcggcggaagtcaggcatacgctggtaactttgaggcagctggtaacgctctatgatccagtcgattttcagagagacgatgcctgagccatccggcttacgatactgacacagggattcgtataaacgcatggcatacggattggtgatttcttttgtttcactaagccgaaactgcgtaaaccggttctgtaacccgataaagaagggaatgagatatgggttgatatgtacactgtaaagccctctggatggactgtgcgcacgtttgataaaccaaggaaaagattcatagcctttttcatcgccggcatcctcttcagggcgataaaaaaccacttccttccccgcgaaactcttcaatgcctgccgtatatccttactggcttccgcagaggtcaatccgaatatttcagcatatttagcaacatggatctcgcagataccgtcatgttcctgtagggtgccatcagattttctgatctggtcaacgaacagatacagcatacgtttttgatcccgggagagactatatgccgcctcagtgaggtcgtttgactggacgattcgcgggctatttttacgtttcttgtgattgataaccgctgtttccgccatgacagatccatgtgaagtgtgacaagtttttagattgtcacacttattggccagaattggtcccatgatcactgctagctctaaggaagaccagggattggctgagacgaaaaacatattctcaataaaccctttagggaaataggccaggttttcaccgtaacacgccacatcttgcgaatatatgtgtagaaactgccggaaatcgtcgtggtattcactccagagcgatgaaaacgtttcagtttgctcatggaaaacggtgtaacaagggtgaacactatcccatatcaccagctcaccgtctttcattgccatacggaactccggatgagcattcatcaggcgggcaagaatgtgaataaaggccggataaaacttgtgcttatttttctttacggtctttaaaaaggccgtaatatccagctgaacggtctggttataggtacattgagcaactgactgaaatgcctcaaaatgttcagaacgggcaggacctggattggggaggcgggtgccgccgctgctgctgacggtgtgacgttctctgttccggtcacaccacatacgttccgccattcctatgcgatgcacatgctgtatgccggtataccgttgaaagttctgcaaagcctcagaacacgtaggctggcatccatcgatcgtcatttttgaaccgcgtgaatcagtgaacaagtaccatttgccgttcattttgaaaacattcgcgcgctcgatttcatcagttaccgtgtttgaagtgatcagcggcttcattacttttttcaatgtgtaatcattatttaactctatgataccgagggcgccgttcgctaactcagcatcgcgttttttagcgctctgctgaagcttctggctttctttacggaaagaagttcgttccgcccgccgtagtacgctttgttaaataaagattcttcgccttggtatccgttttctgttcccgtgttggcttcgaatacaaggtatttatggcctttgtcttcaacgtagtgagggtctctcagcgtatggttgtcgccggatgtataattgccttcatcgataaactgctgaacgttctgatatgtttttccgtctccgtcaaaaatcgttttgtgatcttccactccgttgattttgagtgtgtcatcagattttgacacatttacctgcgctgttgtcaggctttgtttgccgtaatgtttaccggaatagtcagtgtagaataaacggatttttccgtcagatgtaaaggttgcagaaccggaccattcttgcgtctgatctttcaggatcggatcgttggcgtcgaacttatcgctgtctttaaagacacggcccgcgtttttccagctgtcgattgagttgtcgccgaccttttgataaaacatgtagattgatgtgtcatcagcgtctttcgggcttcccgcaagagcaaacacaacgtgatagccgttgtattcagctactgttccgtcagcgttttgcagcggccagctgtcccacacatcaagtccttttgcagactcaatatttttaatcgttgattgatcgaattgaggcacttggtatttttcgttttgctgcgagaaatattgctcagcttcaagctgatcttgtagctcccgcatctgtccttcatttcctctatactgtctgaagatattccggtttccagtgaaatccttaaagatctccagatatccacttgcagattctccaaaaagagtctttgaaaactgctctgatggttcatttccaccagcccctttcttgtgcttaattggccataatatctggaatattttaggaatttcttcagtttcagctctatacacatctccttgggttacaggtctaacgtgaaacagtttactaagttttggtttattcagacgttcgaaaatttccatgcacccaggttcccaaatagaaggagcatttctccaggccccagttgaaaagcgttgatcaatggcctgttcaaaaacagttctcatccggatctgccctttaccaacttcatccgtttcacgtacaacattttttagaaccatgcttccccaggcatcccgaatttgctcctccatccacggggactgagagccattactattgctgtatttggtaagcaaaatacgtacatcaggctcgaaccctttaagatcaacgttcttgagcagatcacgaagcatatcgaaaaactgcagtgcggaggtgtagtcaaacaactcagcaggcgtgggaacaatcagcacatcagcagcacatacgacattaatcgtgccgatacccaggttaggcgcgctgtcaataactatgacatcatagtcatgagcaacagtttcagtggccagtcggagcatcaggtgtggatcggtgggcagtttaccttcatcaaatttgcccattaactcagtttcaatacggtgcagagccagacaggaaggaataatgtcaagccccggccagcaagtgggctttattgcataagtgacatcgtccttttccccaagatagaaaggcaggagagtgtcttctgcatgaatatgaagatctggtacccatccgtgatacattgaggctgttccctgggggtcgttaccttccacgagcaaaacacgtagccccttcagaaccagatccagtgagacgggcaacagctgattgcccttcaccgcctggccctgagagagttgcagcaagcggtccacgctggtttgccccagcaggcgaaaatcctgtttgatggtggttccgaaatcggcaaaatcctgcccgctttccagtcgggaaacctgtcgtgccagctgcattaatgaatcggccaacgcgcggggagaggcggtttgcgtattgggcgccagggtggtttttcttttcaccagtgagacgggcaacagctgattgcccttcaccgcctggccctgagagagttgcagcaagcggtccacgctggtttgccccagcaggcgaaaatcctgtttgatggtggttccgaaatcggcaaaatcctgcccgctttccagtcgggaaacctgtcgtgccagctgcattaatgaatcggccaacgcgcggggagaggcggtttgcgtattgggcgccagggtggtttttcttttcaccagtgagacgggcaacagctgattgcccttcaccgcctggccctgagagagttgcagcaagcggtccacgctggtttgccccagcaggcgaaaatcctgtttgatggtggttccgaaatcggcaaaatcctgcccgctttccagtcgggaaacctgtcgtgccagctgcattaatgaatcggccaacgcgcggggagaggcggtttgcgtattgggcgccagggtggtttttcttttcaccagtgagacgggcaacagctgattgcccttcaccgcctggccctgagagagttgcagcaagcggtccacgctggtttgccccagcaggcgaaaatcctgtttgatggtggttccgaaatcggcaaaatcctgcccgctttccagtcgggaaacctgtcgtgccagctgcattaatgaatcggccaacgcgcggggagaggcggtttgcgtattgggcgccagggtggtttttcttttcaccagtgagacgggcaacagctgattgcccttcaccgcctggccctgagagagttgcagcaagcggtccacgctggtttgccccagcaggcgaaaatcctgtttgatggtggttccgaaatcggcaaaatcctgcccgctttccagtcgggaaacctgtcgtgccagctgcattaatgaatcggccaacgcgcggggagaggcggtttgcgtattgggcgccagggtggtttttcttttcaccagtgagacgggcaacagctgattgcccttcaccgcctggccctgagagagttgcagcaagcggtccacgctggtttgccccagcaggcgaaaatcctgtttgatggtggttccgaaatcggcaaaatcctgcccgctttccagtcgggaaacctgtcgtgccagctgcattaatgaatcggccaacgcgcggggagaggcggtttgcgtattgggcgccagggtggtttttcttttcaccagtgagacgggcaacagctgattgcccttcaccgcctggccctgagagagttgcagcaagcggtccacgctggtttgccccagcaggcgaaaatcctgtttgatggtggttccgaaatcggcaaaatcctgcccgctttccagtcgggaaacctgtcgtgccagctgcattaatgaatcggccaacgcgcggggagaggcggtttgcgtattgggcgccagggtggtttttcttttcaccagtgagacgggcaacagctgattgcccttcaccgcctggccctgagagagttgcagcaagcggtccacgctggtttgccccagcaggcgaaaatcctgtttgatggtggttccgaaatcggcaaaatccctcctggggtctggcttccgtcgctcctccagtttggcggcggagtgtggggctgcattgtccactgggggtgccgccgccgccgccgccttcgctgccaccgcggccgccgccgccaccgaagcgctgcccggcgcgccgccggggttggaggctggggggccgcggaatcccagtgagacgggcaacagctgattgcccttcaccgcctggccctgagagagttgcagcaagccggtccacgctggtttgccccagcaggcgaaaatcctgtttgatggtggttccgaaatcggcaaaatcctgcccgctttccagtcgggaaacctgtcgtgccagctgcattaatgaatcggccaacgcgcggggagaggcggtttgcgtattgggcgccagggtggtttttcttttcaccagtgagacgggcaacagctgattgcccttcaccgcctggccctgagagagttgcagcaagcggtccacgctggtttgccccagcaggcgaaaatcctgtttgatggtggttccgaaatcggcaaaatccattaattgcgttgcgctcactgcccgctttccagtcgggaaacctgtcgtgccagctgcattaatgaatcggccaacgcgcggggagaggcggtttgcgtattgggcgccagggtggtttttcttttcaccagtgagacgggccacagctgattgcccttcaccggctggccctgagagagttgcagcaagcgggtccacgctggtttgcccccgcaggcgaaaacctgtttgaagggggttccgaaaatcggcaaaatccagtgagacgggcaacagctgattgcccttcaccgcctggccctgagagagttgcagcaagcggtccacgctggtttgccccagcaggcgaaaatcctgtttgatggtggttccgaaatcggcaaaatcctgcccgctttccagtcgggaaacctgtcgtgccagctgcattaatgaatcggccaacgcgcggggagaggcggtttgcgtattgggcgccagggtggtttttcttttcaccagtgagacgggcaacagctgattgcccttcaccgcctggccctgagagagttgcagcaagcggtccacgctggtttgccccagcaggcgaaaatcctgtttgatggtggttccgaaatcggcaaaatccattaattgcgttgcgctcactgcccgctttccagtcgggaaacctgtcgtgccagctgcattaatgaatcggccaacgcgcggggagaggcggtttgcgtattgggcgccagggtggtttttcttttcaccagtgagacgggcaacagctgattgcccttcaccgcctggccctgagagagttgcagcaagcggtccacgcttggtttgccccagcaggcgaaaatcctgtttgatggtggttccgaaatcggcaaaatccctgcgctgttgtcaggctttgtttgccgtaatgtttaccggaatagtcagtgtagaataaacggatttttccgtcagatgtaaaggttgcagaaccggaccattcttgcgtctgatctttcaggatcggatcgttggcgtcgaacttatcgctgtctttaaagacacggcccgcgtttttccagctgtcgattgagttgtcgccgaccttttgataaaacatgtagattgatgtgtcatcagcgtctttcgggcttcccgcaagagcaaacacaacgtgatagccgttgtattcagctactgttccgtcagcgttttgcagcgggcagctgtcccacacatcaagtccttttgcagactcaattaattgcgttgcgctcactgcccgctttccagtcgggaaacctgtcgtgccagctgcattaatgaatcggccaacgcgcggggagaggcggtttgcgtattgggcgccagggtggtttttcttttcaccagtgagacgggcaacagctgattgcccttcaccgcctggccctgagagagttgcagcaagcggtccacgctggtttgccccagcaggcgaaaatcctgtttgatggtggttccgaaatcggcaaaatcccttataaatcaaaagaatagcccgagatagggttgagtgttgttccagtttggaacaagagtccatgtttaaatctaaagggtgaactttaggggagcctttcgtgctgacaccaggtctactgtagagatcccacgagcctttacatgcatagttgaggttgaggaatctgtgccggccgatcctggaagagagcggtcgccgaccttcactccttgtcgaacggaaatcgccgaaaatatcgcccgccaggcacgacttgccgcagaccatatagggatgttcgggtaccgagctcgaattcgtaatcatggtcatagctgtttccgcctggccctgagagagttgcagcaagcggtccacgctggtttgccccagcaggcgaaaatcctgtttgatggtggttccgaaatcggcaaaatcctgcccgctttccagtcgggaaacctgtcgtgccagctgcattaatgaatcggccaacgcgcggggagaggcggtttgcgtattgggcgccagggtggtttttcttttcaccagtgagacgggcaacagctgattgcccttcaccgcctggccctgagagagttgcagcaagcggtccacgctggtttgccccagcaggcgaaaatcctgtttgatggtggttccgaaatcggcaaaatcctgcccgctttccagtcgggaaacctgtcgtgccagctgcattaatgaatcggccaacgcgcggggagaggcggtttgcgtattgggcgccagggtggtttttcttttcaccagtgagacgggcaacagctgattgcccttcaccgcctggccctgagagagttgcagcaagcggtccacgctggtttgccccagcaggcgaaaatcctgtttgatggtggttccgaaatcggcaaaatccattaattgcgttgcgctcactgcccgctttccagtcgggaaacctgtcgtgccagctgcattaatgaatcggccaacgcgcggggagaggcggtttgcgtattgggcgccagggtggtttttcttttcaccagtgagacgggcaacagctgattgcccttcaccgcctggccctgagagagttgcagcaagcggtccacgctggtttgccccaacaggcgaaaatcctgtttgatggtgggtccgaaatcggcaaaatcccttataaatcaaaaaaataccccgagatagggtttgagtggtgttccagttgggaagcaagagtccactgtttaagaaccttggaattcgaacatcaacgggacgaagaacaccggtgataatggcctcggttccaagcactgtcgtgccagctgcattaatgaatcggccaacgcgcggggagaggcggtttgcgtattgggcgccagggtggtttttcttttcaccagtgagacgggcaacagctgattgcccttcaccgcctggccctgagagagttgcagcaagcggtccacgctggtttgccccagcaggcgaaaatcctgtttgatggtggttcccaaatcggcaaaatcctgcccgctttccagtcgggaaacctgtcgtgccagctgcattaatgaatcggccaacgcgcggggagaggcggtttgcgtattgggcgccagggtggtttttcttttcaccagtgagacgggcaacagctgattgcccttcaccgcctggccctgagagagttgcagcaagcggtccacgctggtttgccccagcaggcgaaaatcctgtttgatggtggttccgaaatcggcaaaatcctgcccgctttccagtcgggaaacctgtcgtgccagctgcattaatgaatcggccaacgcgcggggagaggcggtttgcgtattgggcgccagggtggtttttcttttcaccagtgagacgggcaacagctgattgcccttcaccgcctggccctgagagagttgcagcaagcggtccacgctggtttgccccagcaggcgaaaatcctgtttgatggtggttccgaaatcggcaaaatcctgcccgctttccagtcgggaaacctgtcgtgccagctgcattaatgaatcggccaacgcgcggggagaggcggtttgcgtattgggcgccagggtggtttttcttttcaccagtgagacgggcaacagctgattgcccttcaccgcctggccctgagagagttgcagcaagcggtccacgctggtttgccccagcaggcgaaaatcctgtttgatggtggttccgaaatcggcaaaatcctgcccgctttccagtcgggaaacctgtcgtgccagctgcattaatgaatcggccaacgcgcggggagaggcggtttgcgtattgggcgccagggtggtttttcttttcaccagtgagacgggcaacagctgattgcccttcaccgcctggccctgagagagttgcagcaagcggtccacgctggtttgccccagcaggcgaaaatcctgtttgatggtggttccgaaatcggcaaaatcccccaatgttgcctttttatcctcgaagaagcctctgtttgtcatgtagcttgtgataaccacattgttgcctttggcttgcggcactgcgaagtgagagtaagtgaatgtcacatcgtttggatcaagacccatttgcagcacaagccctgttttgttcagcggcttgtaagggccggttaaagagtttgatacataaccaagcatgtaaatatcgtttgagttaataccatcgatcgtcatttttgaaccgcgtgaatcagtgaacaagtaccatttgccgttcattttgaaaacattcgcgcgctcgatttcatcagttaccgtgtttgaagtgatcagcggcttcattacttttttcaatgtgtaatcattatttaactctatgataccgagggcgccgttcgctaactcagcatcgcgttttttagcgctctgctgaagcttctggctttctttacggaagaagttcgtgccgccgccgtagtacgctttgttaaataaagattcttcgccttggtatccgttttctgttcccgtgttggcttcgaatacaaggtatttatggcctttgtcttcaacgtagtgagggtctctcagcgtttgggtgtccgccggtgtattattgccttcatcgataaactggcggaccgttctgatatgtttttccgtctccgtcaaaaatcgttttgtgatcttccactccggtgattttgagtgtggcattagatatttgacacatttacctgcgctggtgtcaggcgcctggccctgagagagttgcagcaagcggtccacgctggtttgccccagcaggcgaaaatcctgtttgatggtggttccgaaatcggcaaaatccattaattgcgttgcgctcactgcccgctttccagtcgggaaacctgtcgtgccagctgcattaatgaaatcgccaacgcgcggggagaggcggtttgcgtattgggcgccagggtggtttttcttttcaccagtgagacgggcaacagctgattgcccttcaccgcctggcccctttccaattgtctcgtctggagttacccatgagctatttaagtgaagggttaggtgagttacttctgattcatgcccgctttccagtcgggaaacctgtcgtgccagctgcattaatgaatcggccaacgcgcggggagaggcggtttgcgtattgggcgccagggtggtttttcttttcaccagtgagacgggcaacagctgattgcccttcaccgcctggccctgagaaagttgcatcaagcggtccacgctggtttgccccagcaggcgaaaatcctgtttgatgggggttccgaaatcggcaaaatcctgcccgctttccagtcgggaaacctgtcgtgccagctgcattaatgaatcggccaacgcgcggggagaggcggtttgcgtattgggcgccagggtggtttttcttttcaccagtgagacgggcaacagctgattgccctttaccgcctggccctgagagagttgcagcaagcggtccacgctggtttgccccagcaggcgaaaatcctgtttgatggtggttccgaaatcggcaaaatcccgtccatctggaatgggcattaattgcgttgcgctcactgcccgctttccagtcgggaaacctgtcgtgccagctgcattaatgaatcggccaacgcgcggggagaggcggtttgcgtattgggcgccagggtggtttttcttttcaccagtgagacgggcaacagctgattgcccttcaccgcctggccctgagagagttgcagcaagcggtccacgctggtttgccccagcaagcgaaaatcctgtttgatggtgggtctcgaaatctgctaaattctgcccgctttccagtcgggaaacctgtcgtgccagctgcattaatgaatcggccaacgcgcggagagaggcggtttgcgtattgagcgccaaggtggtttttcttttcaccagtgagacgggcaacagctgattgcccttcaccgcctggccctgaaagagttgcagcaagcggtccacgctggtttgccccagcaggcgaaatatctgtatgatggtgggtccgaaatcggcaacatcctgcccgctttccagtcgggaaacctgtcgtgccagctgcattaatgaatcggccaacgcgcggggagaggcggtttgcgtattgggcgccagggtggtttttcttttcaccagtgagacgggcaacagctgattgcccttcaccgcctggccctgagagagttgcagcaagcggtccacgctggtttgccccagcaggcgaaaatcctgtttgatggtggtgtcgaaatcggcaaaatccattaattgcgttgcgctcactgcccgctttccagtcgggaaacctgtcgtgccagctgcattaatgaatcggccaacgcgcggggagaggcggtttgcgtattgggcgccagggtggtttttcttttcaccagtgagacgggcaacagctgattgcccttcaccgcctggccctgagagagttgcagcaagcggtccacgctggtttggcccagcaggcgaaaatcctgtttgatggtggttccgaaatcggcaaaatcccttaataatcaaaagaatagcccgagatagggttgagtgttggtccaatttggaacaagagtccactattaaaagacgtggactccaacgtacaagggcgaaaaaccgtctatcagggcgatggcccacttcgtgaaccatcacccaaatcaagttttttgggggtcgaggtgcccgtaaagcactaaatcgggaaccagaacggtcaggacctggattggggaggcggttgccgccgctgctgctgacggtgtgacgttctctgttccggtcacaccacatacgttccgccattcctatgcgatgcacatgctgtatgccggtataccgctgaaagttctgcaaagcgtgtgcatgtgtctttaacaccttggtggcagacccgcggtgtgactctagaggatccccttttttagtagttctggagtttgacaatgattgtactgtgtagccttttacggtccatctccttgtgaaattgtgtgattcaatcatgtcaaccaaccattcctgcagggcagcaggaccttggcccccatctcccagcaccctcaaggtcaggggtgtgcgcctttccat

SEQ ID NO: 2282 - DNA, 654 bp, Homo sapiens; identical to SEQ ID NO: 244
  SIMILAR (24)..(449): 1001254mologous to Homo sapiens alpha globin,accession number V00488,Smith-Waterman Score=733.
  misc_feature (1)...(654): n = a,t,c or g

SEQ ID NO: 2283 - DNA, 649 bp, Homo sapiens
  SIMILAR (312)..(461): 541254mologous to Homo sapiens alpha globin,accession number V00488,Smith-Waterman Score=92.
  misc_feature (1)...(649): n = a,t,c or g
atcgagaccatattccatgtggnggaattccacagactcagagagaacccaccatggtgctgtctcctgccgacaagaccaacgtcataggccgcctggggtaaggtcggcgcgcacgctggcgcagtatggtgcggaggccctggagaggatgttcctgtccttccccaccaccaagacctacttcccgcacttcgacctgagccacgggttttgcccaggtttaagggccacgggcaagaaggtggccgacgcgctgaccaacgccgtggcgcacgtggacgacatgcccaacgcgctgtccgccctgaagcgacctgcacgcgcacaagcttcgggtgggacccggttcaactttcaagctcctaagccacttgccttgctggtgaaccctgggccgcccaccttccccggccgagtttcaacccctggcggttgcaaggcttccttgggaaaagtttcctgggctttttgttgaagcaccgttgcttgaccttcaaataacctttaaggttggaagctttggttggccattgtttttttgcccctttgggcctccccccagcccctcctcccctttcctgcacccgtacccccgtggtctttgaaataaagtcttgagtgggcggcaaaaaaaaaaaaaaaaaaa

SEQ ID NO: 2284 - DNA, 1809 bp, Homo sapiens
  SIMILAR (1771)..(1340): 451254mologous to Homo sapiens PRO2605,accession number AF116709,Smith-Waterman Score=220.
gggagccgagactgcgcaaggctggggggttattgtcccgttccaggcagaatgatcaagagggcagggagggagcacaggggtggccagcgtacggtccagcacgtggtgtggtaccccagccctgggttcaaacagggacatggcaagggaacacaggacagagggttccccagcttccacctcacccaccgccaattcatttagttagcaggcacaggggcaagctccggcacggctttctcaggcctatgccggagcctcgagggctggagagcgggaagacaggcagtgctcggggagttgcagcatgtacgtcaccatgagggcgaagcggccatgggaggggggccacgacacattgacgcagcaaggaggctgcaggagctcggtctgtgggcgccgagcccacgaggcactgcggcccagggtctggtgcggagagggcccacagtggacttggtgacgctgtatgccctcaaccgctcagcccctggggctggcttggcagacagtacagcatccaggggagtcaagggcatggggcgagaccagactaggcgaggcgggcggggcggagtgaatgagctctcaggagggaggatggtgcaggcaggggtgaggtagtgcatcgggcggcgagcgggaggcatctggactccagagcccgtggccaaggcgggcctcgcgggcggcgacggagccgggatcggtgcctcagcgttcgggctggagacgaggccaggtctccagctggggtggacgtgcccacccagctgccgaaggccaagacgccaggtccggtggacgtgacaagcaggacatgacatggtccggtgtgacggctaagacttaggagcgctcgtgcgttgcttgtgaacacattatgctggtggggctgcggcaagaagcgggctctgattctttacttcctccacggagtcggcacactatggctgccctctggggttcccagaacccacaacatgaaagaaatggtgctacccagctcaagcctggggcctttgaatccggacacaaaaccctctagcttggaaatgaatatgctgcactttacaaccactgcactaccttgacttcaggaatccggctcttggaaggttgaaagctagaggaaccagaccctcatcagccccaaccatcaaaggacaccatcgggaacagcagcgcccgcagcaccccacccccgcacccggcgacttcccatctttcatggccacccccttcgggggaacgggttgaccaacaagccacaacatcatccccagagctgagctccctccaagcgggatgactgccgtccccaccaactcccttcttcttctttttcaacccttctggtcctctttgtttctggagctttccctgtctttcccttttttcctgagagatttcaaaagcctcccacgacttctgttttcccccgttcccttctggaatttaaatttggcactaaagtcattttgcactggttgggagttgtgggagaagggccttggagtcttcagtaacggagtgtggcgtgagtgtggaggccaccttgggcaagtgcctgttgcaggggcccgggcggcccttccatctgggggccgggtgactggggcgccggctgtgtgcccgaggcctcgaccctgccctcgcctagtctggaagctccgaccgacatcacggagcagccttcaagcattccattacgccccatctcgctctgtgcccctccccaccaggggcttcagcaggagcccctggactcatcatcaataaacactgttacagcaaaaaaaaaaa

SEQ ID NO: 2285 - DNA, 486 bp, Homo sapiens
  SIMILAR (1)..(60): 1001254mologous to Homo sapiens alpha-1-antitrypsin-related protein,accession number M19684,Smith-Waterman Score=103.
gtcaaacacctgaaaaaagacacaagtcttgccctggtggattacatttcctttcacggtctatcaatctacattttcccaaactgtccatttctggaacctacaaactcaagagagtccttaggaatctgggcatcaccaagatcttcagcaacgaggccgacctctctggagtcagtcaggaggcacccctgaagctctccaaggctgtgcatgtggctgtgctcaccattgatgagaaagggaccgaagccaccggacccccccatctggaggagaaggcctggtctaagtatcagacagtcatgttcaaccggcccttcctggtcatcatcaaggatgacatcaccaactttccgctcttcattggaaaagtggtgaatcccacccaaaaataactggctgtcactcctcagcccctcccctccacccctggccccctccctggatgacattaaagaaaggctgaattgcaaaaaacaaaaa

SEQ ID NO: 2286 - DNA, 3898 bp, Homo sapiens
  SIMILAR (2633)..(3895): 961254mologous to Homo sapiens alpha-1-antitrypsin-related protein,accession number M19684,Smith-Waterman Score=2099.
  misc_feature (1)...(3898): n = a,t,c or g
gtgggagggacagcagggcttagagtgggggtcattgtgcagatgggaaaacaaaggcccagagaggggaagaaatgcccaggagctaccgagggcaggcgacctcaaccacagcccagtgctggagctgtgagtggatgtagagcagcggaatatccattcagccagctcaggggaaggacaggggccctgaagccaggggatggagctgcagggaagggagctcagagagaaggggaggggagtctgagctcagtttcccgctgcctgaaaggagggtggtacctactcccttcacaggtcatgctccatttttccatcgggaccatcaagagggtgtttgtgtctaaggctgactgggtaactttggatgagcggtctctccgctctgagcctgtttcctcatctgtcaaatgggctctaacccactctgatctcccagggcggcagacaatgccgtcttctgtctcgtggggcatcctcctgctggcaggcctgtgctgcctggtccctgtctccctggctgaggatccccagggagatgctgcccagaagacagatacatcccaccatgatcaggatcacccaaccttcaacaagatcacccccaacctggctgagttcgccttcagcctataccgccagctggcacaccagtccaacagcaccaatatcttcttctccccagtgagcatcgctacagcctttgcaatgctctccctgggggaccaaggcttgacactcacgatggaaatcctgggaaggccttgaattttcaaccttcaagggagattttccggaggctcagatccatgaaggcttccaggaactcctccgtacccctcaacccagccagaacagcccagctcccagctgaccccaccggcaatggccctgttcccctcagcgagggccctgaagcctagtggataagtttttgggagggatgttaaaaaagttgtaccccacctcagaagcccttcacctgtccaaccttcgggggacacccgaaggaggcccaagaaacagatccaacgatttacgtgggagaagggtacttcaagggaaaatttgttggatttggttcaaggagctttgacagagacacagttttttgctctggtgaatttacatctttcttttaaagggcaaatgggagagaaccctttgaagtcaagggacaccgaggaagaaggactttcacgttggaccagggcgtaccaccgtggaagggtgccctatgatggaagcgttttaggcatgtttaaccatccagccactgtaagaaagctgtccagctggggtgctgctgattgaaataacctggggcaattgccacccgccaatccttcttcctgccctnatgaagggaaactacaggcacctggggaaaatgaactcaccccacgattattcatcacccaaagtcccctggaaaaatgaaagacaagaaggtcttgcccagctttacattttaccccaaactgttccctttattgggaacctattgattttgaaggagcgttcctggggttcaactggggcttcattaagggtctttcaggcattggggcttacctttcccgggtcacagaggaggcacccctgaagctctccaaggccgtgcaataaggcttgtcctgacccatcgacgagaaagggactgaagcttgctggggccatgtttttagaggccatacccatgtctatcccccccgaggttcaagttcaacaaaccctttgtcttcttaaatgattgaactaaaataccaaacttgaccaggcccagcaggccccagaagaccattaccctatatcccttctcctccccagtcacatggccataggcctgctgatggctcaggaaggccattgcaaggactcctcagctatgggagaggaagcacatcacccattgacccccgcaacccctccctttcctcccctgagtcccgactggggccacatgcagcctgacttctttgtgcctgttgctgtccctgcagtcttcagagggccaccgcagctccagtgccacggcaggaggctgttcctgaatagcccctgtgcccagaaatcttcctctggcctagttgtggagcctggcctaagtcgcacattgctggagatggtgaagctgaccagcatgagaggtcagtttctagaagcccaaatcccaacaggcataagcctcaccctccaatatcagctctatcagaaacaaacaaacaaaaacatgtcttattcatttgtccttttcctcaaatgggtggcacttgggcagggcagaagggctggttatccaagcttggaagatgctgacagcagacgcttcaatggcagtaggagttttctgatcactgtcattggtatcacgcttactgttgaaatcgtgacatcaggaatgatgaaaggaactagagtcagatggtctggagcggggaatgaggggatgatggggctggaagagggaaggaatgaaaggagtgtgaaggaagcgccaccaaggagagctgtggaagcccaacccaaagaccgcacctgggatgtcgggaagggccaaggtacagaaggagaaggaagagggttggaggtggagggccagcagcaccaaggctcggagccagggacaataccattctctgtctcatggggcgtcctcctgctggcaggcctgtgctgcctggtccccagctccctggttgaggatccccaggaagatgctgcccaaaagacggatacatcccaccatgatcaaggggactgggaggaccttgcttgccagaagatctcctataacgtcaccgacctcgcctttgatttgtacaaagagctggctgatctatcacaaaccagcaatgtcttagtcaccccaacaagcgtggctatggcctttgcaatgctctccctggggaccaaggctgacactcgcacagagatcctggaaggcctgaatgtcaacctcacagagacgcctgaggccaagatccacgaatgcttccagcaagttctccaagccctcagcaggccagacacccggctccagctgaccaccggcagtagcctgtttgttaacaagagtatgaagctagtggacacgtttttggaggataccaagaagctgtaccactcagaagcctcttccatcaacttcagggacaccgaggaggccaaagagcagatcaacaattatgtggagaaaagaactggaagaaaagtagtggatttggtcaaacacctgaaaaaagacacaagtcttgccctggtggattacatttcctttcacggcaagtggaaagataaattcaaggctgagcgcattatggtagagggcttccatgtggatgataagaccatcatcagagtgcctatgataaaccacctgggtagatttgacatccaccgggacagggagttatccagctgggtgctggcacagcactatgtggggaacgccactgccttcttcatcctgcccgatccaaagaagatgtggcagttggaagaaaaattgacctacagccaccttgaaaatatccagagagcctttgacataaggtctatcaatctacattttcccaaactgtccatttctggaacctacaaactcaagagagtccctaggaatctgggcatcaccaagatcttcagcaacgaggccgacctctctggagtcagtcaggaggcacccctgaagctctccaaggctgtgcatgtggctgtgctcaccattgatgagaaagggaccgaagccaccggagccccccatctggaggagaaggcctggtctaagtatcagacagtcatgttcaaccgacccttcctggtcatcatcaaggagtacatcaccaactttccgctcttcattggaaaagtggtgaatcccacccaaaaataa

SEQ ID NO: 2287 - DNA, 373 bp, Homo sapiens
  SIMILAR (50)..(88): 691254mologous to Homo sapiens electron transfer flavoprotein beta subunit,accession number X71129,Smith-Waterman Score=38.
  misc_feature (1)...(373): n = a,t,c or g
cccacgcgtccgggtgcgggttgaccttgtaagtggctggggcgggaaaatggtggatctgttcgtgctcgtaactgtcaagagggtacatcgactacgccgtgaagatcctagtgaagcctgactggaccggtgtggtctcggatggggtgaagcactctttgaaccccttctgtgatatagcggtggatgaggctgtgctgctcaaggaaaaaaaactggtgaaggagggaattgccgtctgctgtgggcctgcacagtgccaggagacgaatcgaaccgccctgggcatgggtgcacaccgaggtatccacgtggaggtgtccccataataagcccaacgcttgtgtcccctgcaagtggctcggggccn

SEQ ID NO: 2288 - DNA, 1885 bp, Homo sapiens
  SIMILAR (324)..(644): 561254mologous to Homo sapiens TERA,accession number AF212220,Smith-Waterman Score=238.
  misc_feature (1)...(1885): n = a,t,c or g
ccatgaggaggaacaagccccggcagcgcggcgtgcgggaggcgcggcctgcgggaggcgccgggccgggctggcgcggggcccgttgttccggcgcaggtgagggaggtggcggcgagcgacgcggttcacctcccgctgccctcgccctcgccccggcgagcggcccccgcaggaactttcctcccgacgcgagatgtcttatttaccaacaaatccaccagggagcattcttacttgctggctcggcgtctctctcggcagtcaccggagtgcccgagggggaagcacgatttacggaagactattgcccagaagaaaagatgtttggttttcacaagccaaagatgtaccgaagtatagaggggtgctggtatttcaggagctaagtcctccagttctcgattcactgacagtaaacgctatgaaaaaggacttccaagagctgttttggattgcatgagactcgttcaggagacatctggcaatgcctgtgtgctgcttgtgaaaagatggaagaagttgccnggcaggattcaaaaaaaaactggaatcatgtggtagatgcaagggctggacccagttctaaagactacatttgaaccaaaagaaagtgaaaactctatctggggaacaggattaaaaggcacccagatcagtaaactgcagaaggaatttaaaccgttctaattctgatgctcacagtaccacctcaagtgcctccccagctcaatctccttgttacagtaaccagtcagatgacggctcagatacagagatggcttctggttctaacagaacaccagttttttcctttttagatctcacttactggaaaagacagaagatatgttgtgggatcatctataaaggccgttttggggaagtcctcattgacacacatctcttcaagccttgctgcagcaataagaaagcagctgctgagaagccagaggagcaggggccagagcctctgcccatctccactcaggagtggactgagtgtccagacctctcactggttgtcagctggaggcccccgcttagttccttgccagctgggtgctccctgcatggcctggctgctgactggaccactgacatgattactgtcactaccagcaagtgtcgagagccaagctgccagcaagaggggtcttttcagagaagaaaagcctttcccaagcggctgccgaagatggcggaggtgcaggtcctgttgctttaatgttcgaggcccatctcctgcggcccgcctggccggccattcgtggctaaacaggtactgctgggccggaaaggtggtggtcgtacgcttgtgaaggcatcaacatttctggcaatttcttacagaaacaagttgaagtaccttggctttcctccgcaagcggatcgaacaccaacccttcccgaaggcccctaccacttcgggggcccccagccgcattcttctggcggaccgtgcgaggtatgctgccccacaaaaccaagcgaggccaaggccgctctggaccgtctcaaggtgtttgacggcaatcccaccggccctacgacaagaaaaagcgggatggtggttcctgctgccctcaaggtcgtgcgttttgaagcctacaagaaagtttgcctaatctgggggcgcctgggctcccgaggttgggctggaagtaccaggcagtgacagccccccctggaagaagaagaggaaaagagaaaagccaagattccactaccggaagaaagaaaacagctcatgaggctaccggaaacaaggccgagaagaacgcggagaagacacttgcaccaatacacagaggtcctcaagacccacggactcctggtctgagcccaataaagactgttaattcctcaaaaaaaaaaaaaaaaa

SEQ ID NO: 2289 - DNA, 356 bp, Homo sapiens
  SIMILAR (91)..(270): 961254mologous to Homo sapiens RNA polymerase II subunit,accession number X82385,Smith-Waterman Score=297.
  misc_feature (1)...(356): n = a,t,c or g
ggcggtggcggacccttggggtctggacgcaacggcggcgggagcatgaacgcccctccagccttcgagtcgttcttgctcttcgagggcgagaaacaactcctaaaagacccgcaagtgctatttgctggctacaaagtcccccaccccttggagcacaagatcatcatccgagtgcagaccacgccggactacagcccccaggaagcctttaccaacgccatcaccgacctcatcagtgagctgtccctgctggaggagcgcttccgnnnnnnnnnnnnnnnnnnnnnnnnnnnnnnnnnnnnnnnnnnnnnnnnnnnnnnnnnnnnnnnnnnnnnnnnnnnnnnnnnnnnnna

SEQ ID NO: 2290 - DNA, 513 bp, Homo sapiens
  SIMILAR (513)..(292): 971254mologous to Homo sapiens homologue of yeast PMS1,accession number D38437,Smith-Waterman Score=360.
  misc_feature (1)...(513): n = a,t,c or g
atgaagaaaagaggtttaattgactcacagttctgcaggctgtacaggaagcatggctggggaggcctcaggaaactgacaatcacggcagaaggcgaaggggaagcaggcacgtcttcttaatattcctttgaaattccttatggcgcacaggtagcgtagaaaataactgcttcacgctgactgtggtccctctggggtgggggtagggggnntnnctgaatattnttccatnntgatcaaacacccatcgagtcccaaccttcaccgacgcgtgggaggtagaaatggtgacatcgttaagccttcaaagttttcttcttctaccccacatccattgtctgaaacttcaatgagatccactccatagtccttaagctttagatcaatattagtggcaccagcatccagactgttttctactaactccttcactgcagtgcttagactcagtaccactggcccagagcaaatctgatggactgactttcgatcaatacgtttgatggcctt

SEQ ID NO: 2291 - DNA, 442 bp, Homo sapiens
  SIMILAR (139)..(20): 921254mologous to Homo sapiens Human secreted protein encoded by gene 75,accession number AAY76198,Smith-Waterman Score=187.
ttttttttttttttttttaatttatgaagaaaagaggtttaattgactcacagttctgcaggctgtacaggaagcgtggctggggaggcctcaggaaactgacaatcacggcagaaggcgaaggggaagcaggcacgtctggccatgttggagcaggagagacagagagagtgaagtgggagggctgcacgcttttaaacaaccagatcccacaagcgctcactcaatatcacgagaacagcaagggggaagtcggcccccatgagccaatcacctcccaccaggtccctcccacaacactgggaattacaatttgacatgacattttgggttgtggatacagagctgaaccatgtcaagggtagttcaaccgctgagattgattgattgattgattgactgagatggagtcctgctctgttacctaggctggagtgcagtg

SEQ ID NO: 2292 - DNA, 653 bp, Homo sapiens
  SIMILAR (653)..(423): 1001254mologous to Homo sapiens homologue of yeast PMS1,accession number D38437,Smith-Waterman Score=387.
aatttattgaagaaaagaggtttaattggctcacagttctgcaggctgtacaggaagcatggctggggaggcctcaggaaactgacaatcacggcagaaggcgaaggggaagcaggcacgtttcttcttaatattcctttgaaattctttatggtgcacaggtagcgtagaaaataactgcttcacgctgactgtcatccctctggggtggggggtagggggtttcctggatgattttcccatcgtgatcaaacaccagtcgagtcccaaccttcaccgacgcgtggcaggtagaaatggtgacatcgctcagtgcacacagtgagctcagagcttccccctgaaaaccgaaagtttcaacttcagttaggtcggcaaactcttgaatcttacatgtgtgatgtttcagagctgaaagagattaagccttcaaagttttcttcttctaccccacatccattgtctgaaacttcaatgagatccactccatagtccttaagctttagatcaatattagtggcaccagcatccagactgttttctactaactccttcactgcagtgcttagactcagtaccactggcccagagcaaatctgatggactgacttccgatcaataggtttgatggccttagcaggttctgtactgga

SEQ ID NO: 2293 - DNA, 1028 bp, Homo sapiens
  SIMILAR (73)..(303): 721254mologous to Homo sapiens RPB11b1beta protein,accession number AJ277740,Smith-Waterman Score=282.
cggacgcgtgggcggacgcgtgggggcgacggtggcggacacttggggtctggacgcaacggcggcgggagcatgaacgcccctccagccttcgagtcgttcttgcctcttcgagggcgagaaggatcaccattaacaaggacaccaaggtacccaatgcctgtttattcaccatggaacaaagaagaccacacactgggaaacatcattaaatcacgtgcctgcttccccttcgccttctgccgtgattgtcagtttcctgaggcctccccagccacgcttcctgtacagcctgcagaactgtgagtcaattaaacctcttttcttcataaattacccagtttctcatagttctttataggcagtgtgaaaacaagactaatgggacccttctggttgaaggaatgcagccattctgcttgcttgactatgtcctttctattcatctctatttcctccgaggtggttatccaagtgcatataggaggtattggtgaccgcacagtcccctcagtgttctgctagtaaatagttgaaggttgatcagtgatctcctgcgttttcagtctggcatggaaaagcccccatgcagctggtaaagatatcagtaagcaccaggaggtatctaaatccaccaggagccataggcatcacgttgacgtccatttaccaagtcttccctggcaagattcttctgaattgtgctgccttggccaaaagaggtatgggaaggggctgggcgccagtggcttgtgccctgtaatccccaacattttggggaaaccaatttcagggtggatcggtagaggtccagggggttccaagaccatcctgggccggcatggtgacatcccatctctactgaaaatacaataagttagctgggtttggtgttgggtgcctgtaatcccagctactcgagaggctgaggcgggataatcgcttgaacctgggaggaggaggtggcagtgagctgagatcgtgccattgcactccagcgtgggcaacaagagtgaaacgtcgtctca

SEQ ID NO: 2294 - DNA, 730 bp, Homo sapiens
  SIMILAR (131)..(415): 451254mologous to Mus musculus RNA polymerase II subuunit RPB14,accession number D85818,Smith-Waterman Score=159.
  misc_feature (1)...(730): n = a,t,c or g
tttcgtggggcgatgagccgatccttgggcgggtttgccccgccggagtaatccggaagaggcctcttattagggctctggtggcggcggtggcggacacttggggtctggacgcaacggcggcgggagcatgaacgcccctccagccttcgagtcgttcttgctcttcgagggcgagaagaagtaagtgacgccggctgcggcgggccgaggatcaccattaacaaggacaccaaggtacccaatgcctgtttattcaccatcaacaaagaagaccacacactgggaaacatcattaaatcacagcgcgacctaaaggacccgcaagcgctgtttgctggctacaaagtcccccaccccttgggagcacaagatcatcatccgagtgcagaccacgccggactacagcccccagggnagcctttaccaaccgccaatcacccgacctcaatcagtgagctgtccctgctgggagggagcgcttttcggggtggccataaaaagacaagccaggaaaggaatttgagtaggggggccagaggggggctctgctccggcctgtgaagcccccgttccctaactgtgccctgaccctccgctccaggtaccacaccgaggagagcggccggtcccagccatggcccgccttgtggccacccctcaccctgacaccgacgtgtcctgtacatagattaggttttatattcctaataaagtatagcggaagaga

SEQ ID NO: 2295 - DNA, 2664 bp, Homo sapiens
  SIMILAR (4)..(1221): 731254mologous to Homo sapiens putative p150,accession number U93569,Smith-Waterman Score=1466.
atgagacagaaagttaacaaggatatccaggaattgaactcagcgctgcaccaggtggacctaatagatatctacagaactctccatcccaaatcaacagaatatacattcttctcagcaccacatctcacttattccaaaattgaccacttagttagtagtaaagcactcctaagcaaatgtaaaagaacagaaattataagaaactgtctctcagaccacagtgcaaccaaactagaactcaggattaagaaactcactcaaaaccgctcaactacatggaaactgaacaacctgctcctgaatgactactgggtacataacgaaatgaaggcagaaataaagatgttctttgaaaccaatgagaacaaaaacacaacataccagaatctctgggacacattcaaagcagtgtgtagagggaaatttatagcactaaatacccacaacagaaagcaggaaagatctaaaattgacaccctaacatcacaattaaaagaaccagagaagcaagatcaaacacattcaaaagcgagcagaaggcaagaaataactaagatcagagcagaactgaaggaaatagagacacaaaaaacccttcaaaaaatcaatgaatccaggagctggttttttgaaaagatcaacaaaattgatagaccgctagcaagactaataaagaaggaaggagagaagaatcaaatacacacaataaaaaatgataaaggggatctcaccaccaatcccatagaaatacaaactaccatcagagaatactatatacacttctacgcaaatacactagaaaatctagaagaaatggataaattcctcaacacatacaccctcctaagactaaatcaggaagaagttgaatctctgaatagacgaataacaggctctgaaattgaggcaataattaatagcttaccaaccaaaaaaagtccaggaccagatgcagaaaaggcctttgacaaaagtcaacaacgcttcatgctaaaaactctcaataaattaggtattgatgggacgtatctcaaaataataagagctatctatgacaaacccatagccaatatcatactgaatgggcaaaaactggaagcattccctttgaaaacaggcacaagacagggatgccctctctcaccactcctattcaacatagtgttggaagttctggccagagcaatcaggcaggagaaggaaataaagggtattcaatcaggaaaagaggaactcaaattgtccctgtttgcagatgacatgattgtatatctagaaaatcccatcctctcagcccaaaatctccttaagctgataggcaacttcagcaaagtctcaggatacaaaatcaatgtgcaaaaatcacaagcattcctatacaccaagaacagacaaacagagagccaaatcatgagtgaactcccattcacaattgcttcaaagagaataaaagacctaggaatccaacttacaagggacgtgaaggacctcttcaaggagaactacaaaccactgctcgaagaaataaaagaggatacaaacaaatggaagaacattccatgctcatggataggaggaatcaatattgtgaaaatagccatactgcccaagccatgtggaaagctgaaactggatcccttccttacaccttatacaaaaattaattcaagatggattaaagacttacatgttagacctaaaaacgtaaaaaccctagaagaaaacctaggcaataccattcaggacataggcatgggcaaggacttcatgtctaaaacaccaaaagcaatggcaacaaaagccaaaattgacaaatgggatctaattaaactaaagagcttctgcacagtaaaagaaaccaccatcagagtgaacagacaacctacagaatgggagaaaatttttgcaatctactcatctgacaaagggctaatatccagaatctacaatgaactcaaacaaatctacaagaaaaaaacaaacaaccccatcaaaaagtgggcaaaggatatgaacagacacttctcaaaagaagacatttatgcagccaaaagacacatgaaaaaatgctcagcatcactggccatcagagaaatgcaaatcaaaaccacaatgagataccatctcacaccagtcagaatggcgaccattaaaaagtcaggaaacaacaggggatatatgacaatgttggagcaagagagcttctttctctccctgaatattgcttatgactcagtacttttgccagtcattttaccggtccctccattcggggtccctgacttcccgcaacaggtacctggttcatctcactgggactggttggacagtgagtgcagcccatggaggtgtagcctgactgggagacacctcccagtaggggccaacagacacctcatagaggtgggtgcccctctgggacgaagcttccagaggaaggatcaggcagcaatatttgctgttctgcagcctctgctggtgatacccaggcaaacagcgtctggagtggacctccggcaacctccaacagacctgcaggaacacaactcctcaccagcaagggaagaaaactggacagagaatgagtttgatgagttgacagaagtaggcttcagaaggttggtaataacaaagttctccgagctaaaggaggatgtttga

SEQ ID NO: 2296 - DNA, 395 bp, Homo sapiens
  SIMILAR (146)..(45): 651254mologous to Homo sapiens Human secreted protein, SEQ ID NO: 5942,accession number AAG01861,Smith-Waterman Score=100.
attgcatctgaacgccaacaacaagttcatctgaatttatactaagatattttccatagccaggtttcagggcgattcaacatatcaagctgggtttcttcatcttctctttttctcttcttatctttgctctttttcttcttactgccatttattctggcatcttcatgaggccagactcctcgagagggttctcaagggcagtggcttcagctcactccttgatactttctttccatctcgcctaacaatatcaaaacttctgtttatcacggaggccaggaggaaagctcaatatttgcatgtacagtcaacctcaggcaaatctcggttcccttgagcacaagcttggtagacttcacataagaatactaggccatggctccgggagactt

SEQ ID NO: 2297 - DNA, 1454 bp, Homo sapiens
  SIMILAR (67)..(1452): 941254mologous to Homo sapiens putative p150,accession number U93563,Smith-Waterman Score=2270.
atgattatctcaatagatgcagaaaaggcctttgacaaaattcaacaacccttcatgctgaaaactctcaatgaattagtgttggaagttctggccagggcaatcaggcaggagaaggaaataaaggtcattcaattaggaaaagaggaagtcaaattgtccctgtttgcagatgacatgattgtatatctagaaaaccccatcgtctcagcccaaaatctccttaagctgataagcaacttcagcaaagtctcaggatacaaaatcaatgtgcaaaaatcacaagcagtcttatacacaaataacagacaaacagagagccaaatcatgagtgaactcccattcacaattgcttcaaagagaataaaatacctaggaatccaacttacaagggatgtgaaagacctcttcaaggagaactacaaaccactgctcaatgaaataaaagaggatacaaacaaatggaagaagattctatgctcatgggcaggaagaatcaatatcgtgaaaatggccacactgtccaaggtaatttatagattcaatgctatccccatcaagctaccaatgactttcttcacagaattggaaaaaactactttaaagttcatatggaaccaaaaaagagcctgcatcgccaagtcaatcctaagccaaaagaacaaagctggaggcatcacgctacctgacttcaaactatactacaaggctacagtaaccaaaacagcatggtactggtaccaaaagagagatatagatcaatggaacagaacagagccctcagaaataacgccacgtatctacaattatctgatctttgacaaacctgagaaaaacaagcaatggggaaaggattccctatttaataaatggtgctgggaaaactggctagccatatgtagaaagctgaaactggatcgcttccttataccttatacaaaaattaattcaagatggattaaagacttaaacgttagacctaaaaccataaaaaccctagaagaaaacctaggcattaccattcaggacataggcatgggcaaggacttcatgtctaaaacaccaaaagcagtggcaacaaaagccaaaattgacaaatggaatctaattaaactaaagagcttctgcacagcaaaagaaactaccatcagagtgaacaggcaacctacaaaatgggagaaaattttcgcaacctactcatctgacaaagggctaatatccggaatctacaaagaactcaaacaaatttacaagaaaaaaacaaacaaccccatcaaaaagtgggccaaggacatgaacagacccttctcaaaagaagacatttatgcagccaaaagacacatgaaaaaatgctcaccatcactggccatcagagaaatgcaaatcaaaaccacaatgagataccatctcacaccagttagaatggcaatcattcaaaagtcaggaaacaacag

SEQ ID NO: 2298 - DNA, 2367 bp, Homo sapiens
  SIMILAR (2304)..(2366): 761254mologous to Homo sapiens putative p150,accession number U93563,Smith-Waterman Score=74.
gaaaccctgatagattggtgtgatgaaaaggaacttaatttgatattaacaactggaggaacaggatttgcaccacgagatgtcactccagagaattcggctgtgaatccatctggtcctggactctttttggttgtgttggaagttctggccagggcaattaggcaggagaaggaaataaagggtattcaattaggaaaagaggaagtcaaattgtccgtgtctgcagatgacatgattgtatatctagaaaaccccattgtctcagcccaaaatctccttaagctgataagcaacttcagcaaagtctcaggatacaaaatcaatgtgcaaaaatcacaagcattcctatacaccaacaacagacagagagccaaatcaataaaatacctaggaatccaacttacaagggatgtgaaggacctcttcaaggagaactacaaaccactgctcaaggaaataaaagaggatacaaacaaatggaagaacattccatgctcatgggtaggaagaatcaatatcgtgaaaatggccatactgcccaaggtaatttacagattcaatgccatccccatcaagctaccaatgcctttcttcacagaattggaaaaaactactttaaagttcatatggaaccaaaaaagagcccgcatcgccaagtcaatcctaagccaaaagaacaaagctggaggcatcacactacctgacttcaaactatactacaaggctacaataaccaaaacagcgtggtactggtaccaaaacagagatatagatcaatggaacagaacagagccctcagaaataacaccgcatatctacaactatctgatctttgacaaacctgagaaaaacaagcaatggggaaaggattccctatttaataaatggtgctgggaaaactggctagccgtatgtagaaagctgaaactggatcccttccttacaccttatacaaaaatcaattcaagatggattaaagacttaaatgttagacctaaaaccataaaaaccctagaagaaaacctaggcattaccattcaggacataggcatgggcaaggacttcatgtctaaaacaccaaaagcaatggcaacaaaagccaaaattgacaaatgggatctaattaaactaaagagcttctgcacagcaaaagaaactaccatcagagtgaacaggcaacctacaaaatgggagaaaattttcgcaacctactcatctgacaaagcactaatatccagaatctacaatgaactcaaacaaatttacaagaaaaaaacaaacaaccccatcaaaaagagggcgaaggacatgaacagacacttctcaaaagaagacatttatgcagccagaaaacacatgaaaaaatgctcaccgtcactggccatcagagaaatgcaaatcaaaaccacaatgagataccatctcacaccagttagaatggcaatcattaaaaagtcaggaaacaacagtcataccccagcagcaactggctgcatggcatggagagagaatctgtgcatttgggagaggaacagcacagtgattgtgagacgtagcattggacacagtgctgccctgtcacagcagaaagcaacaccaggcttaactcaactgaatactgcccatagagggaccatttggaccagccctacacagaggggaaccactaatccctgcgattggaaagagagctctggctggcatcaggtgaatgccgctctgggacgaagcttccagaggaaggaattggcagcaatctttgctgttctgcagcctttgctagtgatacccaggaaaacagggtctagagtggacatccagcaaactccagcagacctgcagcagagaggcctgactgttagaaggaaaactaatgaacagagaggaatagcatcaacatcaacaaaaaggatttccacacagaaaccccatccaaaggtcaccaacatcaaagagcaaagtgaatactataaatacctctatgcaaataaactagaaaatctagaagaaattgttaaattcctggacacatacacccccccaagactaaaccaggaagaagtcaaatccctgactagaccaataacaagttctgaagttgaggcagtaattaatagcataccaaccaaaaaaagcccagaaccagacagattcacagctgaattctaccagaagtacaaacaggagctggtaccatttgttctgaaactattccaaacaacagaaaaagagggaatcctccttaacttactctacgaggccagcatcatcctgataccgaaacctgagagagacacaacaaaaaaaatttcaggccaatatccccgaggaacatggatgcataaatcctcaataaaatactaa

SEQ ID NO: 2299 - DNA, 1371 bp, Homo sapiens
  SIMILAR (16)..(1197): 961254mologous to Homo sapiens putative p150,accession number U93563,Smith-Waterman Score=2021.
atgcaaaatcaagaacaaaaatcacaagcattcttatacaccaacaacagacaaacggagagccaaatcatgagtgaactcccattcacaattgcttcaaagagaataaaatacctaggaatccaacttacaagggatgtgaaggacctcttcaaggagaactacaaaccactgctcaaggaaataaaagaggatacaaagaaatggaagaacattccatgctcatgggtaggaagaatcaatatcgtgaaaatggccatactgcccaaggtgatttacagattcaatgccatccccatcaagctaccaatgactttcttcacagaattggaaaaaactactttaaagttcatagggaaccaaaaaagagcccacatcgccaagtcaatcctaagccaaaagaacaaagctggaggcatcacactacctgacttcaaactatactacaaggctacagtaaccaaagcaccatggtactggtaccaaaacagagatatagatcaatggaacagaatggagccctcagaaataacgccacatatgtacaactatctgatctttgacaaacctgagaaaaacaagcaatggggaaaggattccctatttaacaaatggtgctgggaaaactggctagccatatgtagaaagctgaaactggatcccttccttacatcttatacaaaaatcaattcaagatggattaaagacttaaacgttagacctaaaaccataaaaaccctagaagaaaacctaggcattaccattcaggacataggcatgggcaaggacttcatgtctaaaacaccaaaagcaatggcaacaaaagccaaaattgacaaatgggatctcattaaactaaagagcttctgcacagcaaaagaaactaccatcagagtgaacaggcaacctacaaaatgggagaaaatttttgaaacctactcatctgacaaagggctaatatccagaatctacaatgaactcaaacaaatttacaagaaaaaaacaaacaaccccatcaaaaagtgggcaaaggacatgaacagacacttctcaaaagaagacatttatgcagccaaaaaacacatgaaaaaatgctcaccatcactggccatcagagaaatgcaaatcaaaaccacaatgagataccatctcacaccagttagaatggcaatcattaaaaagtcaggaaacaacaggagtgaagctgcagaccttcgtggtgagtgttacagctctgaaggtggcacgtctggagttgttcattcctcccggtgggctcgtgctctcgctggctcaggagtgaagttgcagaccttcgtggtgagtgtcacggctcataaaggcagtgtggacccgaagagtgagcagtag

SEQ ID NO: 2300 - DNA, 1473 bp, Homo sapiens
  SIMILAR (1403)..(1471): 861254mologous to Homo sapiens putative p150,accession number U93563,Smith-Waterman Score=100.
ctgtgaaagcagctgggagtggggctgtactctgcaaagccacagggtcagaactgcccagggccgttggagcccacctcttgcatcagcataatccaggtgtgagacattaagtcaaaggagatcgttttggagctttaagatttaatgactgccctgctggcatcaagctaccaatgactttcttcacagaattggaaaaaactactttaaagttcatatggaaccaaaaaagagcccgcatcgccaagtcaatcctaagccaaaagaacaaagctggaggcagcacactacctgacttcaaactatactacaaggctacagtaaccaaaacagcatggtactggtaccaaaacagagatatagatcaatggaacagaacagggccctcagaaataacgccgcatacctacaactatctgatctttgacaaacctgagaaaaacaagcaatggggaaacgattccctatttaataaatggtgctgggaaaactggctagccatatgtagaaagctgaaactggatcccttccttacaccttatacaagaatcaattcaagatggattaaagatttaaacgttagacctaaaaccataaaaaccctagaagaaaacctaggcattaccattcaggacataggcatgggcaaggatttcatgtccaaaacaccaaaagcaatggcaacaaaagacaaaattgacaaatgggatctaattaaactaaagagcttctgcacagcaaaagaaactaccatcagagtgaacaggcaacccacaaaatgggagaaaattttcgcaacctactcatctgacaaagggctaatatccagaatctacaatgaactcaaacaaatttacaagaaaaaaacaaacaaccccatcaaaaagtgggcgaaggacatgaacagacacttctcaaaagaagacatttatgcagccaaaagacacatgaaaaaatgctcatcatcactagccatcagagaaatgcaaatcaaaaccactatgagataccatctcacaccagttagaatggcaatcattaaaaagtcaggaaacaacaggtgctggagaggatgtggagaaataggaacacttttacactgttggtgggactggaaactagttcaaccattgtggaagtcagtgtggcgattcctcagggatctagaactagaaataccatttgacccagccatcccattactgggtatatacccaaatgactataaatcatgctgctataaagacacatgcacacgtatgtttattgtggcattattcacaatagcaaagacttggaaccaacccaaatgtccaacaatgatagactggattaagaaaatgtggcacatatacaccatggaatactatgcagccataaaaaatgatgagttcatgtctttgtagggacatggatgaaattggaaatcatcattctcagtaaactattgcaagaacaaaaaaccaaaca

SEQ ID NO: 2301 - DNA, 1890 bp, Homo sapiens
  SIMILAR (1856)..(1888): 811254mologous to Homo sapiens putative p150,accession number U93572,Smith-Waterman Score=51.
atggataaattcctcgacacatacaccctcccaagactaaaccaggaagaagttgaatctctgaatagaccaataacaggttctgaaattgtggcaataatcaatagcttaccaaccaaaaagagtccaggaccagatggattcacagccgaattctaccagaggtacaaggaggaactggtaccattccttctgaaactattccaatcaatagaaaaagaaggaatcctccctaactcattttatgaggccagcatcatcctgataccaaagccgggcagagacacaaccaaaatagagaattttagaccaatatccctgatgaacattgatgcaaaaatcctcaataaaatactggcaaaccgaatccagcagcacatcaaaaagcttatccaccatgatcaagtgggcttcacccctgggatgcaaggctggttcaatatatgcaaatcaataaatataatccagcatataaacagaaccaaagacaaaaaccacatgattatttcaatagatgcagaaaaggcctttgacaaaattcaacaacacttcatgctaaaaactctcaataaattaggtattgatgggacgtatctcaaaatgataagaactatctatgacaaacccacagccaatatcatactgaatgggcaaaaactggaagcattccctttgaaaactggcacaagacagggatgccctctctcaccactcctattcaacatagtgatggaacttctggccagggcaattaggcaggagaaggaaataaagggtattcaattaggaaaagaggaagtcaaattgtccctgtttgcagatgacatgattagaataaaataccttggaatccaacttataagggacatgaaggacctcttcaaggagaactacaaaccactgctcaatgaaataaaagaggatacaaacaaatggaagaacatcccatgctcatgggtaggaagaatcaatatcgtgaaaatggccatactgcccaaggtaatttatagattcaatgccatccccatcaagctaccaatgactttcttcacagaattggaaaaaactactttaaatttcatatggaaccaaaaaagagcccgcaccgccaagtcaatcctaagccaaaagaacaaagccagaggcatcatgctacctgacttcaaactatactacaaggctacagtaaccaaaacagcatggtgctggtaccaaaacagagatatagatcaatggaacagaacagagccctcagaaataacaccacatatctacaactatctgatctttgacaaacctgacaaaaacaagcaatggggaaaggattccctatttaataaatggtgctgggaaaactggctagccatatgtagaaagctgaaactgcatcccttccttacaccttatacaacaattaattcaagatggattaaagacttaaacgttagacctaaaaccataaaaaccctagaagaaaacctaggcaataccattcaggacataggcatgggcaaggacttcatgtctaaaacaccaaaagcaatggcaacaaaagccaaaattgacaaatgggatctaattaaactaaagagcttctgcacagcaaaagaaaccaccatcagcgtgaacaggcaacctacaaaatgggagaaaatttttgcaacctactcatctgacacagggctaatatccagaatctacaatgaactcaaacaaatttacaagaaaaaaacaaacaaccccatcaacaagtgggcgaaggatatgaacagacacttctcaaaagaagacatttatgcagcccaaaaacacatgaaaaatgctcaccatcactggccatcagagaaatgcaaatcaaaacacaatgagataccatctcacaccagttag

SEQ ID NO: 2302 - DNA, 2676 bp, Homo sapiens
  SIMILAR (1258)..(2667): 871254mologous to Homo sapiens Human secreted protein encoded by gene 3 clone HNHCT15,accession number AAB38012,Smith-Waterman Score=2173.
atgaaggcagaaataaagatgttctttgaaatcaatgagaacaaagacacaacataccagaatctctgggacgcattcaaagcagtgtgtagagggaaatttatagcactaaatgcccacaacagaaagcaggaaagacccaaaattgacaccctaacatcacaattaaaagaactagaaaagcaagagcaaacacattcaaaagctagcagaaggcaagaaatgactaaaatcagagcagaactgaaggaaatagagatacaaaaaacccttcaaaaaattaatgaatccaggagctggttttttgaaaggatcaacaaaattgatagaccgctagcaagactaataaagaaaaaaagagagaagaatcaaatagacgcaataaaaaatgataaaggggatatcaccaccgatcccacagaaatacaaactaccatcagagaatactacaaacacctctatgcaaataaactagaaaatctagaagaaatggataaattccttgacacatacactctcccaagactaaaccaggaagaagttgaatctctgaatagaccaataacaggacctgaaattgtggcaataatcaatagcttaccaaccaaaaggagtccaggaccagatggattcacagccgaattctaccagaggtacaaggaggaactggtaccattccttctgaaactattccaatcaatagaaaaagagggaatcctccctaactcattttatgaggccagcatcatcctgataccaaagccgggcagagacacaaccaaaaaagagaattttagaccaatatccttgatgaacattgatgcaaaaatcctcaataaaatactggcaaaccgaatccagcagcacatcaaaaagcttatccaccatgatcaagtgggcttcatccctgggatgcaaggctggttcaacatacgcaaatcaataaatgtagtccagcatataaacagaaccaaacacaaaaaccacatgattatctcaatagatgcagaaaaggcctttgacaaaattcaacagcccttcatgctaaaaactctcaataaattaagtattgatgggacgtatctcaaaataataagagctacttatgacaaacccacagccaatatcatactgaatgggcaaaatctggaagcattccctttgaaaactggcacaagacagggacaccctctctcaccactcctattcaacatagtgttggaagttctggccagggcaatcaggcaggagaaagaaataaaggcccaaaatctccttaagctcataagcaacttcagaaaagtctcagtatacaaaatcaatgtgcaaaaatcacaagcattcttatacaccaataacagacaaacagagagccaaatcatgagagaactcccattcacaattgcatcaaagagaataaaatacctaggaatccaacttacaagggatgtgaaggacctcttcaaggagaactacaaaccactgctcaacgaaataaaagaggacacaaacaaatggaagaacattccatgctcatggataggaagaatcaatattgtgaaaatggccatactgcccaaggtaatttatagattcaatgccatccccatcaagctaccaacgactttcttcacagaattggaaaaaactattttaaagttcatatggaaccaaaaaagagcccacattgccaagacaatcctaagccaaaagaacaaagctggaggcatcatgctacctgacttcaaactatactacaaggctacagtaaccaaaacagcctggtattggtaccaaaagagagatatagaccaatggaacagaatagagctctcagaaataataccacacatctacaaccatctgatctttgacaaacctgacaaaaacaagaaatggggaaaggattccgtatttaataaacggtgctgggaaaactggcttgccatatgtagaaagctgaaactggataccttccttacaccttatacaaaaattaattcaagatggattaaagacttacatgttagacctaaagccataaaaaccctagaagaaaacctaggcattaccattcaggacataggcatgggcaaggacttcacgtctaaaacaccaaaagcaatggcaacaaaagccaaaattgacaaatgggatctaattaaactaaagagcttctgcacagcaaaagaaactaccatcagagtgaacaggcaacctacaaaatgggagaaaatttttgcaatctactcatctgacaaagggctaatatccagaatctacaaagaactcaaacaaatttacaagaaaaaaacaaacaaccccatcaaaaagtgggcaaaggatatgaacagacacttctcaaaagaagacatttatgcagccaacagacacatgaaaaaatgctcatcatcactggccatcagagaaatgcaaatcaaaaccacaatgagataccatctcacaccagttagaaaggcgatcattaaaaagtcaggaaacaacaggtgctggagaggatgtggagaaataggaacacttttacactgttggtgggactgtaaactagttcaaccatttgtggaagacagtgtggcaattcctcagggatctagaactagaaataccattttacccagccatcccattactgggtatatacccaaaggattataa

SEQ ID NO: 2303 - DNA, 3048 bp, Homo sapiens
  SIMILAR (823)..(1830): 911254mologous to Homo sapiens putative p150,accession number U93572,Smith-Waterman Score=1674.
atggataaattcctcaacacatacactctcccaagactaaagcaggaagaagttgaatctctgaatagaccaattacaggctctgatattgaggcaataattaatagcttaccaaccaaaaaaaagtccaggaccagatggattcacagccgaattctgccagaggtacaaggaggagctgaaaaagagggaatcctacctaactcattttatgaggccagcatcattctcataccaaagcctgccagtgacacgacaaaaaaagagaattttagaccaatatccctgatgaacatcaatgcaaaaatcctcaataaaatactggcaaaacaaatccggcagcacatcaaaaagcttatccaccatgatcaagtgggcttcatccctgggatgcatggcttgttcaacatatgcaaatcagtaaacataatccagcatataaacagaaccaacgacaaaaaccacatgattatctcaatagatgcagaaaagccctttgacaaaattcaacaacacttcatgctaaaaactctcaataaattagcccaaaatctccttaagctgataggcaacttcagcaaagtctcaggatacaaaatcaatgtgcaaaaatcacaagcattcttatacacaaataacagacaaacagagagccaaatcatgaacgaattcccattcacaattgcttcaaagagaataaaatacctaggaatccaacttacaagggatgtgaaagacctcttcaaggagaactacaaagcactgctcaatgaaataaaagaggacacaaacaaatggaagaacattccatgctcaatgggaaaaaactactttaaagttcatatggaacaaaaaagagcccacattgccaagtcaatcattagccaaaagaacaaagctggaggcatcacgctacctgacttcaaactatactgcaaggctacagtaaccaaaacagcatggtactggtaccaaaacagagatatagaccaatggaacagaacagagtcctcagaaataatgccgcatatctacaaccatctgatctttgacaaacctgacaaaaagaagaaatggggaaaggattccctatttaataaatggtgctgggaaaactggctagccatatgtagaaagctgaaactggatcccttccttacacctgatacaaaaattaattcaagacggattaaagacttaaatgttagacctgaaatgataaaaaccctagaagaaaacctaggcaataccattcaggacataggcatgggcaaggacttcatgtctaaaacaccaaaagcaatggcaacaaaagccaaaattgacaaatgggatctaattaaactaaagagcttctgcacagcaaaagaaactaccatcagagtgaacaggcaacctacagaatgggagaaaatttttgcaatctactcatctgacaaagggctaatatccagaatctacaatgaactcaaacaaatttacaagaaaaaaacaaacaaccccatcgaaaagtgggcgaaggatatgaacagacacttctcaaaagaagacatttatgcagccaaaaaacacatgaaaaaatgctcatcatcactggtcatcagagaaatacaaatcaaaaccacaatgagataccatctcacaccagttagaatggcaatcattaaaaagtcaggaaacaacaggtgctggagaggatgtggagaaataggaacacttttacactgttggtgggactgtaaactagttcaaccattgtggaagtcagtgtggcggttcctcagggatctagaactagaaataccatttgatccagccatcccattactggctgcgccttcactgccttctggcctgcgctcgccctctaagtcttcaccatcaccaccgagccgttgcacgctggtcatcatcttgctgcacgtgttctgggacattgtattttttgatggctgcgagaagaaaaggtggtacatccttcttatagttctcctgacccgtctgctggtgtcagcctgcaccttcactgaaggctacactgtcggtttctctactttcgaggctctgagacttggactgagtcgctattggcttccttgctcctcagcttgcagacggcctattgtgggacttcaacttgtgatgataaatagcggtaactttcaggtcattgccatggaagggacagtagcctctgagtgttgccatggcaatggtaaactgacatggcacaggccggtgttgagtgtctgcagcttttccaggtgcacggtgcaagctgctggtggatctgccattctggaggatggtgaccctcttctcacagctccactaggcagtaccccacaagctgctgtatgcagagggccacgtggcagggaactgagggcagccccagctgacagccaccttttccaaagggacctatggccttttaacaaggtaatagtgcatggagaaaaaggaagtaatcagacctctcagggattactgaacactggctctgaaatgacaatagttctagaaaatccaaaatatcacagtggtccccctgttagagtatcgcctgatggaggtcaggtgatcatagaagttttagcagatccatcttacactgggcccacagctttgaataatgtcttctttgccttccagtgcaatttttactttgaccatatccctgagaattgtggcttttcagacccctctgaccctcagaatttgcaaaagggagaaggctgtccctccctagtaagagctagtactgctcccccacaggaaaaagctacagagcagcctctcctttgcaagacgacagaatcaccttttggcatgacagttggcccttgtacagatgaaacacttgaccatggggcaccaagtaagcatgttcccggaactgcccataatgagctggctctcttagatctacgtgtcataaagtcagcaggctcagcagcagtccatcacaagttaaaagtactacattggagatcaagtttaagcaacaacaagggcacaggcaggctgtatgagcaggtggcctag

SEQ ID NO: 2304 - DNA, 2145 bp, Homo sapiens
  SIMILAR (1)..(1548): 941254mologous to Homo sapiens putative p150,accession number U93564,Smith-Waterman Score=2541.
atgctaaaaactctcaataaattacgtattgatgggacgtatctcaaaataataagagctatctatgacaaatccacagccaatatcatgctgaatgggcaaaaactggaagcattccctttgaaaactggcacaagacagggatgccctctctcaacactcctattcaacatagtgttggaagttctggccagggcaattaggcaggagaaggaaataaagggtattcagttaggaaaagaggaagtcaaattgtccctgtttgcagatgacatgattgtatatctagaaaaccccattgtctcagcccaaaatctccttaagctgataggcaacttcagcaaagtctcaggatacaaaatcaatgtacaaaaatcacaagcattcttatacaccaataacagacaaacagagagccaaatcatgagtgaactcccattcacaattgcttcaaagagaataaaatacctaggaatccaccttataagggacgtgaaggacctcttcaaggagaactacaaaccactcctcaatgaaataaaagaggatacaaacaaatggaagaacattccatgctcatgtataggaagaatcaatatcgtgaaaatggccatactgcccaaggtaatttatagattcaatgccatccccatcaagctaccaatgactttcttcacagaattagaaaaaactactttaaagttcatatggaaccaaaaaagagcccgcatcgccaagtcagtcctaagccaaaagaacaaagctggaggcatcacgctacctgacttcaaactatactacaaggctacagtaaccaaaacagcacggtactggtaccaaaacagagatatagatcaatggaacagaacagagccctcagaaataatgccgcatatctacaaatatctgatctttgacaaacttgagaaaaacaagaaatggggaaaggattccctatttaatcaatggtgctgggaaaactggctagccatatgtagaaagctgaaactggatcccttccttacaccctatacaacaatcaattcaagatggattaaagacttaaacgttagatctaaaaccataaaaaccctagaagaaaacctacgcattgccattcaggacactggcatgggcaaggacttcatgtctaaaacaccaaaagcaatggcaacaaaagccaaaattgacaaatgggatctaattaaactaaagagcttctgcacagcaaaagaaactaccatcagagtgaacaggcaacccacaaaatgggagaaaattttcgcaacctactcatctgacaaagggctaatatccagaatctacaatgaactcaaacaaatttacaagaaaaaaacaaacaaccccatcaaaaagtgggcgaaggacatgaacagacacttctcaaaagaagacatttatgcagccaaaaaacacatgaaaaaatgctcaccatcactggccatcagagaaatgcaaatcaaaaccacaatgagatatcatctcacaccagttagaatggcgatcattaaaaagtcaggaaacaacagtacgtttgactttggacaacatgagtttgaactacacaggtccacttatacgcggattgttttcagtaaaattacaccaatattggaagttctggccagggcaattaggcaggagaaggaaataaagggtattcaattaggaaaagaggaagtcaaattgtccctgtttgcagatgacatgattgtatatctagaaaaccccattgtctcagcccaaaatctcctcaagctgataggcaacttcagcaaagtctcaggatacaaaatcaatgtacaaaaatcacaagcattcttatacaccaataacagacaaacagagagccaaatcatgagtgaactcccattcacaattgcttcaaagagaataaaatacctaggaatccaacttacaagggacgtgaaggacctcttcaaggagaactacaaaccactgctcaatgaaataaaagaggatacaaacaaatggaagaacattccatgctcatgggtaggaagaatcaatattgtgaaaatggccatactgcccaaggtaatttatagattcaatgccatccccatcaagctacccatgactttcttcacagaattggaataa

SEQ ID NO: 2305 - DNA, 1551 bp, Homo sapiens
  SIMILAR (97)..(1410): 851254mologous to Homo sapiens putative p150,accession number U93572,Smith-Waterman Score=1905.
atgagatttaaggaaaaaatccatcttcataacataaaagagcccagtgaagcagcaagtgctgatggaggagctgtagcaagttacccagatctggcaaaaatagttgatgagggtagatacaaggcagaggtaatgcagctgcggtgtgggtggagagcccctgctagtgactgtgtgcacagtgttgctgtcgttggtgttgactcagtgttggaagttctggccagggcaatcaggcaggagaaagaaataaagggtattcaattaggaaaagaagaagtcaaattgtccctgtttgcagatgacatgattgtatatttagaaaaccccaccgtctcagcccaaaatctccttaagctaataagcaacttcagcagagtctcaggatacaaaatcaatgtgcaaaaatcacaagcattcttatacaccaataacaaacaaacagagagccaaatcatgagtgaactcccattcacaattgcctcaaagacaataaaatacctaggaatccaacttacaagggatgtgaaggacctcttcaaggagaactacaaaccactgctgaacaaaataaaagaggacacaaacaaatggaagaacattccatgctcatggataggaagaatcaatattgtgaaaatggccatattgcccaaggtaatttatagattcaatgccatccacatcaagctaccaatgactttcttcacagaattggaaaaaactactttaaagttcatatggaaccaaaagggagtccacattgccaagtcaatcctaagcaaaaagaacaaagctggaggcatcatgctacctcacttcaaactatactacaaggctacagtaaccaaaacagcatggtactggtaccaaaacagatatacagaccaatgcaacagaacagagccctcagaaataataccacacatctacaaccatctgatgtttgacaaacctgacaaaaacaagaaatggggaaaggattccctatttaataaatggtgttgggaaaactggctagccatatgtagaaagctgaaactggatcccttccttacaccttacacaaaaattaattcaagatggattaaagacttaaatgttagacctaaacccataaaaaccctagaagaaaacctaggcattaccattcaggacataggcatgggcaaggacttcatgtctaaaacaccaaaagcaatcgcaacaaaagccaaaattgacaaatgggatctaattaaactaaagagcttctgcacagcaaaagaaactaccatcggagtaaacaggcaacctacagaattggagaaaatttttgcaatctactcatctgacaaagggctaatatccagaatctacaaagaactcaaacaaatttacaagaaaaaaaaacaaccccatcaaaaagtgggtgaaggatatgaacagacacttctcaaaagaagacatttatgcagtcaacagacacatgaaaaaatgctcatcatcactggtcatcagagaaatgcaaatcaaaaccacaatgagatactatctcacaccagttag

SEQ ID NO: 2306 - DNA, 1458 bp, Homo sapiens
  SIMILAR (1217)..(1456): 701254mologous to Homo sapiens putative p150,accession number U93572,Smith-Waterman Score=284.
gggctgtcaggagatctgctgggagcccaccagctgccagacgtcctatgtggagtccagcccctgccagacctcctgctaccgccccagaacctccttgctctgcagtccttgcaagacgacttactctgggctttggatccagcagctgccgctccctgggctatggatcgaggagctgctactcagtgggctgtgggtccagtggtgtcagatccctgggttatggaagctgtggcttcccttccctcggctatggatctggattctgccgcccaacctacttggcttctaggagctgccagtctccttgttacagaccagcctatggatcaaccttctgcagatcaacttgctgaatttccagaccttttaagcaaagtgtctcagtctctacgaataaaatacctaggaataaaactgacaaggaatgtgaaggacctcttcaaggagaactacaaaccactgctaaatgaaataaaagaggatacaaacaaatggaagaacattccatgctcatgggtaggaagaatcaatatcgtgaaaatggccatactgcccaaggtaatttatagattcaatgccatcccaatcaagctaccaatgactttcttcacagaattggaaaacactactttaaagttcatatggaaccaaaaaagagcctgcattgccaagtcaatcctaagccaaaagaacaaagctggaagcatcatgctacctgacttcaaactataccacaaggctacagtaaccaaaacagcatggtaccagtaccaaaacagagatatagatcagtggaatggaacagagccctcagaaataatgtcacatatctacaactatctgatctttgacaaacctgagaaaaacaagcaacggggaaaggattccctatttagtaaatgttgctgggaaaactggctagccatatgtagaaagctgaaactggatcccttccttacaccttacacaaaaattaattcaagatggattaaagacttaaatgttagacctaaaatcataaaaaccctagaagaaaacctagtcaataccattcaggacataggcatgggcaaggacttcatgtctaaaacaccaaaagcaatggcaacaaaagccaaaattgacaaatgggatctaattaaacaaaagagcttctgcacagcaaaagaaactaccatcagagtgaacaggcaacctacagaatgggagaaaatttttgcaatctactcatctgacaaagggctaatatccagaatctacaaagaactccaacaaatttatgagaaaaaaaacaaacaaccccatcaaaaagtgggcgaaggatatgaacagacacttctcaaaagaagacatttatgcagccaacagacacatgaaaaaatgctcatcatcactggccatcagagaaatgcaaatcaaaaccacaatgagataccatctcacaccagttag

SEQ ID NO: 2307 - DNA, 425 bp, Homo sapiens
  SIMILAR (123)..(188): 861254mologous to Homo sapiens FRG1,accession number AF146191,Smith-Waterman Score=92.
ggctggtgaacagtaacaaactttggtgaaatttcaggaaccatagccattgaagtggatgagggaacctatatacatgcactcaacaatggtctttttaccctgggagctccacacaaagaagaatcgccctgaaacctggctatggaaaataccttagtataaattcagatgaacttgttgttggcgttcagatgcaattggaccaagagaacaatgggaaccagtctttcaaaatcaagaggtcagaaatggtgggccagctgagatgggagaagaaaagagaaatggcacaaagtggagagaagacaccgaccatacctcctttcctctctttcccagcacaggtggacagcccaaagcacactccaactggaggaaggtttgccattaaagataagctgctgatgatgatcttcaagcag

SEQ ID NO: 2308 - DNA, 2031 bp, Homo sapiens
  SIMILAR (1)..(1614): 941254mologous to Homo sapiens putative p150,accession number U93564,Smith-Waterman Score=2657.
atgattatctcaatagatgcagaaaaagcctttgacaaaattcaacaacccttcatgctaaaaactctcaataaattaggtattgatgggagatatctcaaaataataagagctatctatgacaaacccacagccaatatcatactgaatgggcaaaaactggaagcattccctttgaaaactggcacaagacagggatgccctctctcaccactactattccacatagtgttggaagttctggccagggcaatcaggcaggagaaggaaataaagggcattcaattaggaaaagagaaagtcaaattgtccctgtttccagatgacatggttgtatatctagaaaaccccatcatctcagcacaaaatctccttaagctgataagcaacttcagcaaagtctcaggatacaaaatcaatgtgcaaacatcacaagcattcttatacaccaataacagacaaacagagagccaaatcatgagtgaactcccattcacaactgcttcaaagagaataaaatacctaggaattcaacttacaagggatgtgaaggacctcttcaaggataactacaaaccactgctcaaggaaataaaagaggatacaaacaaatggaagaacattccatgcttatgggtaggaagaataaatattgtgaaaatggccatactacccaaggtaatttatagattcaatgccatccccatcaagctaccaatgactttcttcacagaattggaaaaaactactttaaagttcatatggaaccaaaaaagagcccgcatcgccaagtcaatcctaagccaaaagaacaaagctggaggcatcacactacctgacttcaaactatactacaagtctacagtaaccaaaacagcatggtactggtaccaaaacagagatatagatcaatggaacagaacagagccctcagaaataatgctgcatatctccaactatctgatctttgacaaacctgacaaaaacaatcaatggggaaaggattccctatttaataaatggtgctgggaaaacaggctagccatatgtagaaagctgaaactggatcccttccttacaccttatacaaaaatcaattcaagatggattaaagacttaaatgttagacctaaaaccataaacaccctacaagaaaacctaggcaataccattcaggacataggcatgggcaaggacttcatgtctaaaacaccaaaagcaatggcaacaaaagccaaaattgacaaatgggatctaattaaactaaagagcttctgcacagcaaaagaaaccaccatcagagtgaacaggcaacctacagaatgggagaaaatttttgcaatctactcatctgacaaagggctaatatccagaatctacaatgaactcaaacaaatttacaagaaaaaaacaaacaaccccatcaaaaagtgggtgaaggatatgaacagacacttctcaaaagaagacatttatgcagccaaaaaacacatgaaaaaatgctcatcatcactggccaccagagaaatgcaaatcaaaactacaatgagataccatctcacaccagttagaatggcaatcattaaaaagtcaggaaacaacagaccgctctggcccaccatgcctggggacagtcagagaggagataagttgcgggatggaggaactccagggaaagatcattttcccactccattcgctttccaggcccctatccatcccactgagagccacctccatcactcaccgtccctccctgcattcaccatccttcaagtccacggatttgagtgcacagcagccaagcaaactagccacacccctgttgcaagtcccacaggggagtcagggaactttcttgcttcagtcacctcaagattgtctggaggcaatgtgaagattattctggattggaaaatgagaataatgaataaggaagactatggaactatttctgtaattcgaagaagctacaatagaaccttgaaacaagatggtggcagtaaagctgaagaaaataaacagagatga

SEQ ID NO: 2309 - DNA, 1549 bp, Homo sapiens
  SIMILAR (215)..(1546): 931254mologous to Homo sapiens putative p150,accession number U93564,Smith-Waterman Score=2220.
gtccaatatttccctgtattcagttgtttcattacggccacttcctgcagattatgtcccttcaatagtcatgcttcctggtacttgtcaaacccaagatgtagaagtatcagaagaaacagtagaaccaagtgatgaattgatagaatatgattcgccagaacagttgaatgagcaattggtgactctttcacttcttcctgaatcacgatggaaaaaccttcttaaccttgatgttattaagagggccctagaactacgatacaatatcaatgtgcaaaaatcacaagcattcctgtacaccaacaacagacaaacagagagccaaatcatgagtgaactcccattcacaatggcttcaaagagaataaaatacctaggaatccaacttacaagggatgtgaaggacctcttcaaggagaactacaaaccactgctgaaggaaataaaagaggatacaaacaaatggaagaacattccatgctcatgggtaggaagaatcaatatcgtgaaaatggccatactgcccaaggtaatttacaggttcagtgccatccccatcaagctaccaatgactttcttcacagaattggaaaaaactactttaaagttcatatggaaccaaaaaagagcccgcatcgtcaagtcaatcctaagccaaaagaacaaagctggaggcaccacactacctgacttcaaactatactacaaggctacagtaaccaaaatagcatggtactggtaccaaaacagagatatagatcaatggaacagaacagagccctcagaaataatgccgcatatctacaactatctgatctttgacaaacctgagaaaaacaagcaatggggaaaggattccttatttaataaatggtgctgggaaaactggctagccatatgtagaaagctgaaactggatcccttccttacaccttatacaaaaatcaattcaagatggattaaagacttaaacgttagacctaaaaccataaaaaccctagaagaaaacctaggcattaccattcaggacataggcatgggcaaggacttcatgtctaaaacaccaaaagcaatggcaacaaaacccaaaattgacaaatgggatctaatgaaactaaagagcttctgcacagcaaaagaaactaccatcagagtgaacaggcaacctacaaaatgggagaaaatttttgcaacctactcatctgacaaagggctaatatccagaatctacaatgaactcaaacaaatttacaagaaaaaaacaaacaaccccatcaaaaagtgggcaaaggacatgaacagacacttctcaaaagaagacatttatgcagccaaaaaacacatgaaaaaatgctcaccatcactggccatcagagaaatgcaaatcaaaaccacaatgagataccatctcccaccagttagaatggcaatcattaaaaagtcaggaaacaacaggtgctggagaggatgtggagaaataggaacacttttacactgttggagggactgtaaactagttcaaccattgcggaagacagtatggtga

SEQ ID NO: 2310 - DNA, 1946 bp, Homo sapiens
  SIMILAR (294)..(1667): 921254mologous to Homo sapiens putative p150,accession number U93563,Smith-Waterman Score=2201.
gaaattacccagatcagcatttccccatctttcatggaataaaagagaaatcaccgaggactggaagttggctgatagaactgacatcagaaagaccattcaaaacgaagagccagtgtcaagatcctgtatacccttcctgtcattactcccaaagtagccttttcatggatccaggttacaatgagccgccagaaatagccccggtgaatgaagctgtaggcattcagataagggggccaggggcagccagctgtgcacgcttctgtgagcaacttgccacagcttgcaggatgttggaatttctggccagggcaattaggcaggagaaggaaataaagggtattcaattaggaaaagaggaagtcaaattgtccctgtttgcagatgacatgattgtatatctagaaaaccccattctctcagcccaaaatctccttaagctgataagcaacttcagcaaagtctcaggatacaaaatcaatgtacaaaactcacaagcattcttatacaccaataacagacaaacagacagccaaatcataagtgaactcccattcgcaattgcttcaaagagaataaaatacctaggaatccaacttacaagggacgtaaagaacctcttcaaggagaattacaaaccacagctcagtgaaataaaagaggatacaaagaaatggaagaacattccatgcttatgggtagaaagaatctatatcgtgaaaacggccatacaggccaaggtaatttatagattcaatgccatccccatcaagataccaatgactttcttcacagaattggaaaaaactactttaaatttcatacggaaccaaaaaagagcccgcatcaccaagtcaatactaagccaaaagaagaaagctggaggcatcacactacctgacttcaaactatactacaaggctacagtaaccaaaacagcatggtactggtaccaaaacagagatatagatcaatggaacagaacagagccctcagaaataacgccgcatatctacaactatctgatctttgacaaacctgagaaaaacaagcaatggggaaaggattccctatttaataaatgctactgggaaaactggctagccatatgtagaaagctgaaactggatcccttccttacaccttatacaaaaattaattcaagatggattaaagaattaaacgttagacctaaaaccataaaaaccctagaagaaaacctaggcattacctttcaggacataggcatgggcaaggacttcatgtctaaaacaacaaaagcaatggcaaccaaagccaaaattgacaaatgggatctaattaaactaaagagcttctgcacagcaaaagaaactaccatcagagtgaacaggcaacctacaaaatgggagaaaattttcgcaacctactcatctgacaaagggctaatatccagaatctacaatgaactcaaacaaatttacaagaaaaaaacaaacaaccccatcaaaaagtgggcgaaggacatgaacagacacttctcaaaagaagacatttatgcagccaaaaaacacatgaaaaaatgttcaccatcactggccatcagagaaatgcaaaccaaaaccacaatgagataccgtctcacaccagttagaatggcaatcattaaaaagtcaggaaacaacagtctattaattaccatcagagaatactataaacacctctatgcaaataaactagaaaatctagaggaaatggataaattcctggacacatacaccctcccaaaactaagtgaggaagaagttgaatctctggatatgctatccttttatacaactggcagcaaagattgcagcccaaactttgacaccaaaaatgctttgctaatgtacacccctgtgaaaacaaggacaaaaattcagctacagataaggaccctgcacaaagccttgactgtctga

SEQ ID NO: 2311 - DNA, 2127 bp, Homo sapiens
  SIMILAR (103)..(1455): 861254mologous to Homo sapiens putative p150,accession number U93564,Smith-Waterman Score=2060.
atggcacaagaactacgtgacgaatgcacaagcctcagtagccgattcgatcaactggaagaaagggtatcagagatggaagatcacatgaatgaaatgaagcgagaagagaaatttagaaaaaaaggaataaaaagaaatgaacaaagcctccaagaaatatgggactatgtgaaaagaccaaatctacgtctgattggtgtacctgaaacccaaaatctccttaagctgataagcaacttcagcaaagtctcaggatacaaaatcaatgtgcaaaaatcacaggcattcttatacaccaataacagacaaacagagagccaaatcatcagtgaactcccattcacaattgcttcaaagagaataagatacttaggaatccaacttacaagggatgtgaaggacctcttcaaggagaactacaaaccactgctcaacgaaataaaagaggacacacacaaatggaagaacattccatgctcatggataggaagaatcaatatcgtgaaaatggccatactgcccaaggtaatttatagattcaatgccatgcccatcaagctaccactgactttcttcacagaattggagaaaactactttaaagttcatatggaaccaaaaaagagcccgcattgccaagtcaatcctaagccaaaagaacaaaactggaggcatcacgctacctgacttcaaactatactacaaggctacagtaaccaaagcagcatggtactggtaccaaaacagagatatagatcaatggaacagaatagagccctcagaaataataccacatatctacaactacctgatctttgacaaacctgagaaaaacaagaaatggggaaaggattccctgtttaacaaatggtgctgggaaaactggctagccatatgtagaaagctgaaactggatcccttcctgacaccttatactaaaattaattcaagatggattaaagacttacatgctagatctaaaaccataaaaaccctagaagaaaacctaggcaataccattcaggacataggcattggcaaggacttcatgtctaaaacaccaaaagcaatggcaacaaaagccaaaattgacaaatgggatctaattaaactaaagagcttctgcacagcaaaagaaactaccatcagagtgaacaggcaacctaaagaatgggagaaaatttttgcaatatactcatctgacaaaaggctaatatccagaatctacgaagaaatcaaacaaatttacaagaaaaaaacaaacaaccccatcaacaagtgggcaaaggatatgaacagacacttctcaaaagaagacatttatgcagccaacagacacatgaaaaaatgttcatcatcactggtcatcagagaaatgcaaatcaaaaccacaatgagataccatctcacaccagttagaatggtgatcattaaaaagtcaggaaacaacaggagccttttccacgtaatacccaagacctgtgagctggggagtctgccacgtctagcacatgaaggacacttgcaggtcactaggggtgttcagaagtggggacatcagcttgaatttggacccagggtctggataccaaaacaggaaagctgctcaatggccttgttctgttatgctgcagagggtctgtacttcggcagcaaaggaagccagggcaaagataaactatgtggctgtggaacatttgcacgcttcaacattttgcaagaggatgatctgtctctcagagttgttagactggaagataaggagagagggtcaggtgaaaatgggattcacacttacaatacctgtgagctaaagcagcttatatttatcatgaagaaaagcaccaaggatggagcagcctggcctttgccccatgctggttcctgcaggtgcaaagggagaactactgctaatgggacagagaaggtgcctgcatgcatcatccaggagcctgaggacaggcctgcccctcccaccactgctactgccagtgcatgtgggcattgtctagggcctgaagacaagcctgtctcacccatcatcaaagctacctgcacccaagcatgccatccaggcatctgcttgctgcagccagcacttctgcacactattggggaagcataa

SEQ ID NO: 2312 - DNA, 2253 bp, Homo sapiens
  SIMILAR (172)..(1989): 941254mologous to Homo sapiens putative p150,accession number U93563,Smith-Waterman Score=3005.
atgggtaaattcctcgacacacacaccctcgcaagactaaaccaggaagaaattgaatctctgaatagaccaataacaggctctgaaattgtggcaataatcaataccttaccaaccaaaaagagtccaggaccagatggattcacagccaaattctaccagagccgggcagagacacaaccaaaaaagaactttagaccaatatccttgatgaacattgatgcaaaaatcctcaataaaatactggcaaaccaaatccagcagcacatcaaaaagcttatccaccatgatcaagtgggcttcatccctgggatgcaaggctggttcaatatatgcaaatcaataaatgtaatccagcatataaacagaaccaaagacaaaaaccacatgattatctcaatagatgcagaaaaggcctttgacaaaattcaacaacccttcatgctaaaaactctcaataaattaggtactgatgggacatatctcaaaataataagagctatctatgacaaacccacagccaatatcatactgaatgggcaaaaactggaagcattccctttgaaaactggcacaagacagggatgccctctctcaccactcctattcaacataatgttggaagttctggccagggcaattagtcaggagaaggaaataaagggtattcaattaggaaaagaggaagtcaaattgtccctgtttgcagatgacatgattgtatatctagacaaccctgttgtctcagcccaaaatctccttaagctaataagcaacttcagcaaagtctcaggatacaaaatcaatgtacaaaaatcacaagcattcttatataccaataacagacaaacagagagccaaatcatgagggaactcccattcacaattgcttcaaagagaataaaatacctaggaatccaacttacaagggacgtgaaggacctcttcaaggagaactacgaaccactgctcaatgaaataaaagaggatacaaacaaatggaagaatgttccgtgctcatgggtaggaagaatcaatatcgtgaaaatggccatagtgcccaaggtaatttatagattcaatgtcatccccatcctgctaccaatgactttcttcacagaattggaaaaaactactttaaagttcatatggaaccaaaaaagagcccgcatcgccaagtcaatcctaagccaaaagaacaaagctggaggcatcacgctacctgacttcaaactatactacaaggctacagtaacaaaaacagcatggtactggtaccaaaacagagatatatatcaatggaacagaacacagccctcagaaataacgccacatatctacacctatctgatctttgacaaacctgagaaaaacaagcaatggggaaaggattctctatttaataaatggtgctgggaaaactggctagccatatgtagaaagctgaaactggatcccttccttacaccttatacaaaaattaattcaagatggattaaagacttaaacgttattcctaaaaccataaaaaccctagaagaaaacctaggcatcaccattcaggacataggcatgggccaggacttcatgtctaaaacaccaaaagcaatggcaacaaaagccaaaattgacaaatgggatctcattaaactaaagagcttctgcacagcaaaagaaactaccatcagagtgaacaggcaacctacaaaatgggagaaaatttttgcaacctactcatctgacaaagggctaatatccagaatgtacaatgaacttaaacaaatttacaagaaaaaaacaaacaactccatcaaaaagtgggcgaaggatatgaacagacacttctcaaaagaagacatttatgcagccaaaaaacacatgaaaaaatgctcaccatcactggccatcagagaaatgcaaatcaaaaccacaatgagataccatctcacaccagttagaatggtgatcattaaaaagtcaggaaacaacagcctgggtgacaaggcgagaccctgtctgaaaaaaagaaaagaaaagaaaatgtttctaacagtgggcacaaaaagcctagaagaaaaggcagaggggattcggggaacttcaagcagcttagtgaaggaatatcttaaagtgtcaaagatacttcctgccctcgaatattggactccaagttcttcagttttggaacttggactggctctccttgctcctcagcctgcagatggtcgattgtgggaccttgtgatcctgtaa

SEQ ID NO: 2313 - DNA, 2485 bp, Homo sapiens
  SIMILAR (686)..(2086): 821254mologous to Homo sapiens putative p150,accession number U93564,Smith-Waterman Score=1990.
ggggaagtactacaagctgtcctcaggtactgcccctacgtgtgtttccctgggatggggccttgctagaggtgattctgctgccccagcattgggaagcaggaccagtgcatgtgccccatgcagccacggtacatggaagctgtcacttgagccatcagaccggctcagcccatgtgaccggagctctgaagaggcacacacgcatgccccgcacaggctgttagcacttgtcgcctcgctgccctggtccagactacccttgcttgccccacagagccactcagaggctgaagccacttcacagcccactggtgttgagaatcatcatcagaaaaccagatatgtcaaggcaggtggtccagtcatctgccggagtctgcctgagtccagggggtttttatgggcttcagaggggaggaagtgcatgctgattggttcgtgggcagccatgggcaggctcagaaaaagcaccataagttctcgttttgggccccagactctagctggaactggcagacctcaggccatccctgtcttgaagaaacacagtgatgcagtcctgcttggggtgtgcttcctgaagctactgcaccagcatcaccaggaacttggtgaaaatgcagattctcagaccctaccccagacccactgggagtttatattgtcagaagattataacaagatgactcctgtgaaaaactatcaagtgttggaagttctggccagggcaatgaggcaggagaagcaaataaagagtattcaattaggaaaagaggaagtcaaattgtctgtgtttgcggatgacatgattgtgtatctagaaaaccccattgtctcagcccaaaatctccttaagctgataagcaacttcagcaaagtctcaggatacaaaataaatgtgcaaaaatcacaagcattcctatacaccaataacagacaaacagagagccaaatcataagtgaactcccattcacaattccttcaaagagaataaaatacctaggaatccaacttacaagggatgtgaaggacctcttcaaggagaactacaaaccactgctcaacgaaataaaagaggacacaaacaaatggaaaaacattccatgctcatgggtaggaagaatcaatatcatgaaaatggccatactgcccagggtaatttatatattcaatgccatctccatcaagctaccaatgactttcttcacagaattggaaaaaactactttaaagttcatatggaaccaaaaaagagcccgcattgccaagacaatcctaagccaaaagaacaaagctggaggcatcacgctacctgacttcaaactatactacaaggctacagtaaccaaaacagcatggtactggtaccaaaacagaggtgtagatcaatggaatagaatagagccctcggaaataataccacacatccacaaccatctgatctttgacaaacctgacaaaaacaagaaatggggaaaggattccctatttaccaaatggtgctgggaaaactggctagccatatgtagaaaactgaaactggatccgttccttacaccttatacaaaaattaattcaacatggattaaagacttaaacgttagacctaaaaccataaaaaccctagaagaaaacctaggcattaccattcaggacataggcatgggcaaggacttcatgtctaaaacaccaaaagcaatggcaacaaaagccaaaattgacaaatgggatctaattaaactaaagagcttctgcacagcaaaagaaactaccatcagagtgaacaggcaacctacagaatgggagaagatttttacaatctacccatctgacaaagggctaatacccagaatctacaaagaacttaaacaaaatttacaagaaaaaatcaaacaaccccatcaaaaagtgggcaaaggatataaacagacatttctcaaaagaagacatttatgcagccaacagacacatgaaaaaatgttcatcatcactggtcatcagagaaatgcaaaacaaaatcacaataagatacatctcacaccagttagaatggcgatcattaaaaagtcaggaaacaacagggacatggatgaagctggaaaccatcattctgagcaaactattgcaaggacagaaaaccaagcaccgtatcttctcactcataggtgggaattgaacaatgagaacacttggacacaggttgaggaacatcacacgctggggcctatcgtgggtgtgatctgtagaaaagtattccctggaaattcagggccttcaaaacccagtgggcttcacttctcccagcccctaccccaagttacttcagttgtggcaaaaataacaattgtcccctgggaaatgaagctcattgctatgggtgttcaagatgaactcaacattgccttccacaaaaatcacttactgatgaatgacaccaccattcatatgacaccctacatccagccagcccccaagtcctga

SEQ ID NO: 2314 - DNA, 2622 bp, Homo sapiens
  SIMILAR (490)..(1800): 901254mologous to Homo sapiens putative p150,accession number U93569,Smith-Waterman Score=2096.
atggataaattcctcgacacatacactctcccaagactaaaccaggaagaagttgaatgtctgaatagaccaataacaggagctgaaattgtggcaataatcaatagcttaccaaccaaaaagagtccaggaccagatggattcacagccgaattctaccagaggtacaaggaggaactggtaccattccttctgaaactattccaatcaatagaaaaagagggaatcctccctaactcattttatgaggccagcatcattctgataccaaagccgggcagagacacaaccaaaaaagagaattttagaccaatatccttgatgaacattgatgcaaaaatcctcaataaaatactggcagaccgaatccagcagcacatcaaaaagcttatccaccatgatcaagtgggcttcatccctgggatgcaaggcttgttcaatatacgcaaatcaataaatgtaatccagcatataaacagagccaaagacaaaaaccacatgaatatctcaatagatgcagaaaaggcctttgacaaaattcaacaacacttcatgctaaaaactctcaataaattagctgataagcacttcagcaaagtctcaggatacaaaatcaatgtgcaaaaatcacaagcattcttataccccaacaacagacaaacagagagccaaatcatgagtgaactcccattcacaattgcttcaaagagaataaaatacctaggaatccaacttacaagggatgtgaaggacctcttcaaggagaactacaaaccgctgctcaaggaaataaaagaggatacaaacaaatggaagaacattccatgctcatgggtaggaagaatcaatatcgtgaaaatggccatactgcccaaggtaatttacagattcaatgccatcctcatcaagctaccaatgcctttcttcacagaattggaaaaaactactttaaagtttatatggaaccaaaaaagagcccgcatcaccaagtcaatcctaagccaaaagaacaaagctggaggcatcacactacctgacttcaaactatactacaaggctacagtaaccaaaacagcatggtactggtaccaaaacagagatatagatcaatggaacagaacagagccctcagaaataatgccgcatatctacaactatctgatctttgacaaacctgagaaaaacaagcaatggggaaaggattccctatttaataaatggtgctgggaaaactggctagccatatgtagaaagctgaaactgaatcccttccttacaccttatacaaaaatcaattcaagatggattaaagacttaaacgttaggcctaaaaccataaaaaccctagaagaaaacctaggcattaccattcaggacataggcatgggcaaggacttcatgtctaaaacaccaaaagcaatggcaacaaaagacaaaattgacaaatgggatctaattaaactaaagagcttctgcacagcaaaagaaactaccatcagagtgaacaggcaacctacaaaatgggagaaaatttttgcaacctactcatctgacaaagggctaatgtccagaatctacaatgaactcaaacaaatttataagaaaaaaacaaacaaccccatcaaaaagtgggcgaaggacatgaacagacacttctcaaaagaagacatttatgcagccaaaaaacacatgaaaaaatgctcaccatcactggccatcagagaaatgcaaatcaaaaccacaatgagataccatctcacaccagttagaatggcaatcattaaaaagtcaggaaacaacagcaaactcccgtttgagccgagcaggaacaaacgcgttatgcctgaaccttgtgcacatacaattctttcttctcttgcacggcccgcttccaaaatgcattcaccgccactctccatggaaccttcagcgggccctgggggcagccagaattttccaaacgaggaagctgaggatcggcccagaaccctgaattttgaggggagtgagacttgggccctcacaggcccagacgcgagatatttcaactacacccgggaggcgcggggtgaaaactccctggtgtcgggcgggtgcaggcccctcgcggccggtcgcgccagagcttccacctcagggtgggcggccaagcgcgtgggcacgctgcagggagggccgctcacctgggcaatgccggcgcccatcagcccgccgccgatgaccgtcacgtgcttgacgattatcttcttggccgaggccgaggcggtggacgaggaggacacggaacgcatgaactgcctggtgacgaaggccatggtgtggcagcggcggcgacagcgaggagacccgggcagggaagacgcgcgaggcgggcagccgcggaaagccagactctgggggcggggacctacgcggccctgcagcccgcgcgcccccggcgtccccgtgacgccacaaggcgggggcggggcctcgagtcccgctctgcccattggccctggctgtaacgtcccagcgttgagcgggtatacacgcgcgggctcgcagctgtcagcagccggagcccgagtgagcgcgggcttgagacctgctgagcagcgggacctggcggctggcgttctg

SEQ ID NO: 2315 - DNA, 2831 bp, Homo sapiens
  SIMILAR (1323)..(2816): 861254mologous to Homo sapiens Human secreted protein encoded by gene 3 clone HNHCT15,accession number AAB38012,Smith-Waterman Score=2221.
cagacacaatgtaccagaatatctgggacacagttaaagcagtctttagaggaaaatttatcgcactaaatgcccacatcagaaagtgggaaagatctaaacttgacaccctaacacctcaattaaaagaaatagagcttgatggggatggcattgaatctataaattacctttggcagcatgccatccccatcaagctaccaatgactttctttacagaattggaaaaaactactttaaagtttatatggaaccaagaaagagcccgcattgccaagtcaatcctaagacaaaagaacaaagctggaggcatcatgctacctgacttcaaactatactacaagcccacagtaaccaaaatagcatggtactggtaccaaaacagagatgcagaccaatggaacagaacagagccttcagaaataatgctacatatccacaaccatctgatctttgacaaacctgagaaaaacaagaaatgggaaaaggattccttatttaataaatggtgctgggaaaacaggctagccatatgtagaaagctgaaactggatcccttcgttacaccttatactaaaattaattcaagatggattaaagacttaaatgttagatctaaaaccataaaaaccctagaagaaaacctaggcaataccattcaggacataggcatgggcaaggacttcatgtctaaaataccaaaagcaatggcaacacaagccaaaactgacaaatgggatctaattaaactaaagagcttctgcacagcaaaagaaactaccatcagagtgaacaggcaacctacagaatgggagaaaatttttgcaatctactcatctgacaaagggctaatatccagaatctacaatgaactcaaacaaatttacaagaaaaaaacaaacaaccccatcaaaaagtgggtgaaggatatgaacagacacttctcaaaagaagacatttatgcagccaaaagacacatgaaaaaatgctcagcatcactggtcattagagaaatgcaaatcaaaaccacaatgagataccatctcacaccagttagaatggcgatcattaaaaagtcaggatagaaaagattaacaaagtacactactagccatactaataaagaagaaaggacagaagaatcaaatagacacaataaaaatgataaagagggtatcaccactgatcccagagaaatacaaactaccatcagagaatactataaacacctctacacaaataaagtagaaaatctggaagaaatggataaattcctggacacatacacgctcccaacactaaagcagaagaaagaagtcaaaaccctgaatagaccaataacaggttctgaaattgaggcaataattaatagcctaccaaccaaaaaagtccaggaccagacagattcacagctgaattctactagagtattagaagttctggccagggcaatcaggcaagagaaagaaataaagggtattcaattaggaaaagaggaagtcaaattgtccctgtttgcagatgacatcattgtatatttagaaaaccccatcatctcagcccaaaatcttcttaagctgataagcaacttcagcaaagtctcaggatacaaaatcaatctgcaaaaatcacaagcattcctatacaccaataacaaacaaacagggagccaaatcatgagtgaactcccattcacaattgcttcaaagagaataaaatgcctaggaatccaacttacaagggatgtgaaggatctcttcaaggagaactacaaaccactgctcaatgaaataaaagaggacacaaacgaatggaagaacattccatgctcatggataggaagaatcagtatcgtgaaaatggccatactgcccaaggtaatttatagattcaatgccatccccatcaagctaccaatgacttttttcacagaattggaaaaaactactttaaagttcatatggaaccaaaaaagagcccacatcgccaagtcaatcctaagccaaaagaacaaagctggaggcatcacactacctgacttcaaactatactacaaggctacagtaaccaaaacagcatggtactggtaccaaaacagagacatagaccaatggaacagaatagagcccctggaaataataccatacatctacaactatctgatctttgacaaatctgacaaaaacaagaaatggggaaaggattccctatttaataaatggtgctgggaaaactggctaaccatatgtagaaagctgaaactggatcccttcctcacatcttatacaaaaattaattcaagatggattaaagacttaaatgttagacctaaaaccataaaaaccccagaagaaaacctaggcaataccattcaggacataggcatgggcaaggacttcatgactaaaacaccaaaagcaatggcaacaaaagccaaaattgacaaatgggatctaattaaactaaagagcttctgcacagcacaagaaactaccatcagagtgaacaggcaacctacagaatgggagaaaatttctgcaatctactcatctgacaaagggctaatatccagaatctacaaagaacttaaacaaatttacaagacaaaaacaaacaaccccatcaaaaagtgggcaaaggatatgaacagacacttctcaaaagaagacatttatgcagccaaaagacacatgaaaaaatgctcatcatcactggccatcagagaaatgcaaatcaaaaccacaatgagataccatctcacaccagttagaatggcgatcattgaatcaagtcaggaaacaacaggtgctggagaggatgtggagaaatag

SEQ ID NO: 2316 - DNA, 4955 bp, Homo sapiens
  SIMILAR (1)..(1602): 911254mologous to Homo sapiens putative p150,accession number U93572,Smith-Waterman Score=2544.
atggttttctcaatagatgcacaaaaggcctttgacaaaattcaacaccgcttcatgctaaaaactctcaataaattaggtattgatgggacatatctcaaaataataagagctatttataacaaacccacaggcaatatcatactgaatgggcaaaaactggaagcattccctttgaaaactggcacaagacagggatgccctctctcaccactcctattcaacatagtgttggaagttctggccagggcaatcaggcaggagaaagaaataaagggtattcaattaggaaaagaggaagtcaaattgtccctatttgcagatgacataattgtatatttagaaaaccccattgtctcagcccaaaatctccttaagctgataggcaacttcagcaaagtctcaggatacaaaatcaatgtgcaaaaatcacaagcattcttatacaccaataacagacaaacagagagccaaatcatgagtgaactcccattcacaattgcttcaaagagaataaaatacctaggaatccaacttacaagagatgtgaagaacctcttcaaggagaactacaaaccactgctcaatgaaataaaagaggacacagataaatggaagaacattccatgctcatggataggaagaatccatatcgtgaaaatggccacactgcccaaggtaatttatagattacatgccatccacatcaagctaccaatgactttcttcacagaattggaaaaaactactttaaaattcatatggaacaaaaaaagagcccgcattgccaagtcaatcctaagccaaaagaacaaaggtggaggcatcacgccacctgacttcaaattatactacaaggctacagtaaccaaaacagcaaggtactggtaccaaaacagagatatagaccaatggaaaacaagagagccctcagaaataataccacacatctacaaccatctgatctttgacaaaccagacaaaaacaagaaatggggaaaggattccctatttaataaatggtgctgggaaaactggctagccatatgtagaaagttgaaactgaatcctttccttaccccttatacaaaaattaattcaagatggattaaagacttaaacattagacctaaaaccataaaaaccctagaagaaaacctaggcaataccattcaggacaaaggcgtcggcaaggacttcatgtctcaaacaccaaaagcaatggcaacaaaagccaaaatagacaaatgggatctaattaaactaaagagcttctgcacagcaaaagaaactaccatcagagtgaacaggcaacctacagaatgggagaaaatttttgcaatctactcatctgacaaagggctaatatccagaatctacaaagagctcaaacaaattgacaagaaaaaagcaaacaaccccatcaacaagtgggcaaaggatatgaacagacacttctcaaaagaagacatttatgcagccaacagacacatgaaaaaatcctcatcatcactggccatcagagaaatgcaaatcaaaaccacaatgagataccatctcacaccagttagaatggtgatcattaaaaagtcaggaaacaacagcgaaggattaaaccctggatataaagggtttcccaccattatatgggctcctcttcccgtggctcaatcgaaggactcgggcttggcatcacttaacagtgatccagatattcctagcatgctggagtgctccctgaaggctccacagctatataggagcaagaatgttggccaggtatttatcatttcttctgcgtcacaagcctttaccaaaaaagcaagaatatatgcacgcttacgagtgtctcaggctctgaagactctttgtaaaagttcctgccatgatggctggtcatttgaaagactggcaagaattcaggaagtttctctacccatctctccagacctgattctctgctcagaagcataccactacggtacaaaaccacagtggctagtggctgccacaggaaccgcacagacattccttgagctgaaccagaaaagccaacagtaccaaaagcaagagcaaacacattcaaaagctagcagaatgcaagaaataactaaaatcagagcagaactgaaggaaatagagacacgaaaaacccttcaaaaaattgatgaatccaggagctggttttttgaaaggatcaacaaaactgatagaccactagcaagattaacaaagcagaaaagagagaagaatcaaatagacgcaataaaaaatggtaaaggggatatcaccaccgatcccacaggaatacaaattaccatcagagaatactacaaacacctctacgcaaaaaaactagaaaatctagaagaaatggataaattcctcgacacgtacaccctcccaagactaaaccaggaagaagttgactctctgaatagaccaataacaggagctgaaattgtggcaataatcaatagcttaccaactaaaaagagtccaggaccagatggattcacagccgaattctaccagaggcacaaggaggaactggtaccattccttctgaaactattccagtcaatagaaaaagagggaatcctccctaactcattttatgaggccagcatcatcctgataccaaagccgggcagagacacaaccaaaaaagagaatcttagaccaatatccttgatgaacattgatgcaaaaatcctcagtaaaatactggcaaaccgaatccagcagcacatcaaaaagcttatccaccacgatcaagtgtgcttcatccctgggatgcaaggctggttcaatatacgcaaatcaataaatgtaatccagcatataaacagagccaaagacaaaaaccacatgattatctcaatagatgcagaaaaggcctttgacaaaattcaacaaaccttcatgctaaaaactctcaataaattaggtattgatgggacgtatttcaaaataataagagctatctatgaaaaacccacagccaatatcatactgaatgggcaaaaactggaagcattccctttgaaaactggcacaagacagggatgccctctctcaccactcctattcaacatagtgttggaagttctggccagggcaattaggcaggagaaggaaataaagggtattcaattaggaaaagaggaagtcaaattgtccctgtttgcagatgacatgattgtatatctagaaaaccccatcgtctcagcccaaaatctccttaagctgataagcaacttcagcaaagtctcagggtacaaaatatacaaaatcgatgtgcaaaaatcacaagcattcctatacaccaataacacagacaaacaagagagccaaatcatgagtgaactcccattcacaactgcttcaaagagaataaaatacctaggaatccaacttacaagggatgtgaaggacctcttcaagggagaaccacaaaccactgctcaacgaaataaaagaggatacaaacaaatggaagaacattttcattccatgcttatgggtaggaagaatcaatatcgtgaaaatggccatactgcccaagggaatttatagattcaatgccatccccatcaagctaccaatgactttcttcacagaattggaaaaaagctactttaaagttcatatggaaccaaaaaagagcccgcatcaccaagtcaatcctaagccaaaagaacaaagctggaggcatcacgctacctgacttcaaactatactacaaggctacactaaccaaaacagcatggtactggtatcaacacagagatataaaccaatggaacagaacagagccctcagaaataataccacacatctacaaccatctgatctttgacaaacctgacaaaaacaagaaatggggaaagcattccctatttaataaatggtgctgggaaagctggctagacatatgtagaaagctgaaactggatccttatacaaaatttacaccttacacaaaaattaattcaagatggattaaaggcttaaatgttagacctaaaaccataaaaaccctagaagataaacctattcaggttttcaataccattcaggacataggcatgggcaaggacttcatgtctaaaacaccaaaagcaatggcaacaaaagccaaaattgacaaatgggatctaattaaactaaagagcttctgcacaggaaaagaaactaccatcagagtgaacaggcaacctacagaatgggagaaaatttttgcaatctactcatctgacaaagagctaatatccagaatctacaaagaactcaaacaaatttacaagaaaaaaaacaaacaaccccatcaaaaagtgggcgaaggacatgaacagacacttctcaaaagaagacatttatgcagccaacaaacacatgaaaaaaatgctcatcatcactggccatcagagaaatgcaaatccaaaccacaatgagataccatctcacaccagttagaatggcaatcatgaaaaaagtcaggaaacaacaggtgctggagaggatgtggagaagtaggaacacttttacactgttggtgggactgtaacctagttcaaccattgtggaagtcagtgtggcgattcctcagggatctagaactagaaataccatttgacccagccatcccattactgggtatatacccaaaggactataaatcatgctgctataaagacacatgcacacgtatgtttattgtggcattattcacaatagcaaagacttggaaccaacccaaatgtccaacaatgatggactggattaagaaaatgtggcacatatataccatggaatactatgcagccataaaaaatgatgagttcatgtcctttgtagggacatggatgaaattggaaatcatcattctcagtaaactatcgcaagaacaaaaaaccaaacaccgcatattctcactcataggtgggaattga

SEQ ID NO: 2317 - DNA, 669 bp, Homo sapiens
  SIMILAR (66)..(443): 481254mologous to Homo sapiens hemoglobin alpha-1 globin chain,accession number AF349571,Smith-Waterman Score=180.
  misc_feature (1)...(669): n = a,t,c or g
atcgagaccatattccatgtggnggaattccacagactcagagagaacccacccatggttgctgtctcctgcccgacaaagaccaacgtcaaggcccgcctgggggtaaggtcggcgcgcacgctgtgcgcagtatgtgtgcggaggccctggagaggatgttcctgtccttccccaccaaccaagacctacttcccgcacttcgaccttgagccacggtttctgcccaggttaaaggggccacgggcaagaaggtggccgacgcgctgaccaacgccgtggccaacgtgggacgacatgcccaacgtcgctgtccgccctgaagcgaccttgcacgcgcacaaacttcgggtggacccggttcaactttcaagctcctaaagccactggcctgcttggttgaccctggcccggcccaccttccccggccgagtttcacccctggcggtgcaacgtcttccctgggacaaagtttcctgggctttttgttgaagcaccgttgcttgaaccttccaaattaccgttaaagcttggaagccttcgggttggccatgctttctttgcccctttggggcttccccccagcccctcctcccctttcctgcacccgtacccccgtggtctttgaaataaagtcttgagtgggcggcaaaaaaaaaaaaaaaaaaa

SEQ ID NO: 2318 - DNA, 343 bp, Homo sapiens
cggcacgaggcttatgtgaagtctaccaagcttgtgcataagggaaccaaggcgaagagatttgcctgaggttgactatacatacaaatattgagcatttcctcctggtctccgtgataaacaaaggttttgatattgttcggcgagatggaaagaaaatatcaaggagtgagctgaagccactgcccttgagaaccctctcgaggagtctggcctcatgaagatgccagaataaacggcagatatatcctgaatgaatgtgagatttttaccctgtgaatttcctgtgaggagtgtaagaagaaaaagaggaaagataagaagagaaaaaaaaaaaaaaaaa

SEQ ID NO: 2319 - DNA, 2437 bp, Homo sapiens
  SIMILAR (743)..(1270): 551254mologous to Homo sapiens proteoglycan I precursor,accession number J04599,Smith-Waterman Score=398.
  misc_feature (1)...(2437): n = a,t,c or g
tttcgtgcccaggagtgagtagctgccttcggtccgccggacacacctgtactatatagacgtgcggacggcccaccaccccagcccgccaactagtcagcctgcgcctggcgcctcccctctccaggtccatccgccatgtggcccctgtggcgcctcgtgtctctgctggccctgagccaggccctgccctttgagcagagaggcttctgggacttcaccctggacgatgggccattcatgatgaacgatgaggaagcttcgggcgctgacacctcgggcgttctgcacccggactctgttacacccacctaacagcgccatgtgtcctttcggctgccactgccacctgcgggtggttcaagtgctccgacctgggtctgaagtctgtgcccaaagagatctcccctgacaccacgctgctggacctgcagaacaacgacatctccgagctccgcaaggatgacttcaagggtctccagcacctctacgccctcgtcctggttgaacaacaagatctccaagatccatgaaaaagccttcagcccactgcggaagctgcagaaactctacatctccaagaaccacctggtggagatcccgcccaacctacccaagctccctggtgggagctccgcatccacgacaaccgcatccgcaaggtgcccaagggagtgttcagtgggctccggaacatgaactgcatcgaagatgggcgggaacccactggagaacagtggcttttgaacctggagccttcgatggcctgaagctcaactacctgcgcatctcagaggccaagctgactggcatccccaaagacctccctgagaccctgaatgaactccacctagaccacaacaaaatccaggccatcgaactggaggacctgcttcgctactccaagctgtacaggctgggcctaggccacaacccagatcaggatgatcgaaaacgggaagcctgagcttcctgcccaccctccgggaggttccacttgggacaacaacaagttggccagggtgccctcagggttcccaggacctcaagctcctccaggtggtcttatcttgcactccaacaacattcaccaaagtggggtgttcaacgaatttctgttcccatggggtttcgggggtgaagcggggccttattacaacgggcattcagcctcttcaacaaccccgtgccctactgggaggtgcaagccggccactttccgccgtcgtcactgaccgcctggccatccagtttgggcaactacaaaaagtagaggcagctgcagccactttggtttctcagtgggggtctctggggaacagagccagacatcctgatggggaggcagagccaggaagctaagccagggcccagctggcgtccaacccagccccccaccttcgggtcccttgaccccagcttcgattgccccattcaccgccttttccctgggttcccaagggttgcaggttggggcgcaaggcccggcccccatgacatgttacgcttgggctcatgagctacgccctgctctccctccacagccacccagaggcaccccatgaagcttttttctcgttcactcccaaacccaagtgtccaagtctccagtcctaggagaacagtccctgggtcagcagccaggaggcggtccataagaatggggacagtgggctctgccagggctgccgcacctgtccagacacacatgtttctgttcctcctcctcatgcatttccagcctttcaaccctccccgactctgcggctcccctcagccccctttgcaagttcatgggcctgtccctcccagacccctgctccactgggcccttcgacccagtcctcccttctgttctctctttccccgtccttcctctctctctctctctctctctctctctctttctgtgtgtgtgtgtgtgtgtgtgtgtgtgtgtgtgtgtgtgtgtgtcttgtgcttcctcagacctttctcggttctgagcttggtggcctgttccctcccaatctctccgaaaaccctgtcgcctgtccctttcactccaacaccctctgggccttctgccttgagctggggactgctttctgtctgtgacggcctgcacccagccccctgccccanaaaaccccaagggacagcggtcttccccaggctggcctggtcagggccttgccccccaaacctgtactgtcccggaggaggttgggaggttggaggcccagcatcccgcgcaagatgacaccatcaaccgccagagtcccagacaccggttttcctagacagcccctcacccccactggcccactggtggctaggtctccccttatccttctgggccagcgcaaggaggggctgcttctgaggtcggtggctgtctttccattaaagaaacaccgtgcaacgtgtttttttctattttaaaaaaaaaaaaaaa

SEQ ID NO: 2320 - DNA, 2538 bp, Homo sapiens
  SIMILAR (523)..(1305): 991254mologous to Homo sapiens dJ730K3.1 (putative homeodomain transcription factor),accession number AL133517,Smith- Waterman Score=1350.
atggctgaaaggggccaatgtacagctcaggctgtggcttcagagggtggacgctccaaaccttggcagcttctacgtggtatcgagcctgcaggtgcacagaagtcaagaattgaggtttgggaacctctgcctagatttcagaagatggatgcccaggcaatagttttgctgcaggggcagggcactcatggagaacctctggcagccagttaccctagctctgggcagatccagagacgctatcagggcctggcgttgagaaccttaggaatcttcctgtcattctattctacagcagctgagctcacacccaaaccaaaagacaaactccttctcattcttctctcccgtttcctcaagcagaggaatctctccccatggccaccgctgccccaggcctgcagcaagtactgcaaggctgttgctgatattcactcaaggtccaagggctctttggtcagcttgtggtcaatgctgataggcctgggtatctcccttcagggcaacgggctcccctctggcccagagattaaaagagtaaaattaatatctaacaaagggactgaaactgacaatgacccaagttgtgtccatcctatcattaagaggagacaatgtcgaccagagattagaatgtggcaaacaagagagaaagcaaaattttcagatggagaaaagtgccgtagggaggcttttaggcgtttgggtaatggggtgtctgatgacctgtcaagtgaagaagatggtgaagcacggacacagatgatattattgcgtaggagtgtggaaggggcctcaagtgacaatggttgtgaagttaagaatagaaaatcaatactttcaaggcacctaaactctcaggtaaagaaaaccactacaaggtggtgtcatattgtgcgggattcagatagtctggctgaatcagaatttgaatcagcagccttcagccagggctctagatcgggtgtgagtggtggctctcgaagcctcaacatgtcaagaagagactcagaaagcacccgccatgactcggagactgaggacatgttatgggacgacctgctacatggcccagagtgccggtcatctgtcaccagtgacagtgagggggcccatgtgaatacccttcactcagggaccaaacgtgaccccaaagaggatgtttttcagcagaatcatttattctggcttcagaattcaagtccttcctctgatcgagttagtgcaataatctgggaggggaatgagtgcaaaaagatggatatgtctgtgttggaaataagtggcatcatcatgagcaggagatttttatttgcaaaactcttcagccatattacttctgccaggaaagctaggaaatatgaaatacctcatttcagacttaagaaggtggagaatattaaaatatggttatcactgcgttcctatctaaagagtatgtgcaagaatatgctcactgaagctcctggcagcagttactcagtagacagtgtagttctgggtgtcaggcagattatagcagcagctgacagacttgctggacagcaagttggatgtcatctctctgcaaagctggtaggggtaggacatgaagatcaagtccctggaggagatctgcctcttctctgtgcatcaaggaccaggttcaaggcatttgtcaccattgaggactacaacggctatgttggtctgggtgttagtgctccaaggaggggcgttggtactgtcttggcccctgtgcccaggaacctgctgctgatggtggttacccaccactgctgcactttgactggggactgcgctgctaccctggccaattttgccaagggcacctttgatgccatctccaagacctacagctatttcacccccaacctctgctgtggaaaattaaatcataagctgagtaaatgcctggactctcccctggctggtatcaaaacttacctatcaaggaaagtgatgactgcagaaaccagtgagatacccacctgcttgttcacatgcacaggtgctctcagctctgccaaagcgaatgaatggtgtttccggaggagcaagtccttttccaactgggttggtgaccagattgttgaaatcaatggggaacctacacaaggaatcacacatactcgagcaattgagctcattcaggctggtggaaataaagttcttcttcttttgaggccaggaactggcttgatacctgaccatgttatagcaattgtcttatatttgatgatgcctattgtgaacataagtgaagtacttggacccttgtgccttatgctactcatgggaactgtccactgtcaaattgtgtctactcagataacaagaccatcaggaaacaatggaaatcgaagaagaagaaaattacgaaaaactgtaaatggtgatgggagccgagaaaatggaaataactcctctgataaagtcagaggaatagaaactttggaatctgtacccattattggtggtttttgggagactatctttggcaacagcatttgttatcgtctgtcttttgcctaa

SEQ ID NO: 2321 - DNA, 2855 bp, Homo sapiens
  SIMILAR (32)..(1969): 881254mologous to Homo sapiens homeobox protein LSX,accession number AJ011863,Smith-Waterman Score=2881.
gtgaaatcccattctctggctggagacacagatggcctcaaatgagagagatgctatatcgtggtaccaaaagaagattggagcctacgatcagcagatatgggaaaagtcaatcgaacagactcagattaagggtttgaaaaacaaaccgaaaaagatgggccacataaagccagacttgattgacgttgacttaatcagagggtcaacatttgccaaagcaaaacctgaaattccatggacatctctgactcggaaggggcttgttcgagttgtattttttccattgttcagcaattggtggattcaggttacctctttaagaatctttgtttggctgttactactttatttcatgcaagttatagcaattgtcttatatttgatgatgcctattgtgaacataagtgaagtacttggacccttgtgccttatgctactcatgggaactgtccactgtcaaattgtgtctactcagataacaagaccatcaggaaacaatggaaatcgaagaagaagaaaattacgaaaaactgtaaatggtgatgggagccgagaaaatggaaataactcctctgataaagtcagaggaatagaaactttggaatctgtacccattattggtggtttttgggagactatctttggcaacaggattaaaagagtaaaattaatatctaacaaagggactgaaactgacaatgacccaagttgtgtccatcctatcattaagaggagacaatgtcgaccagagattagaatgtgccaaacaagagagaaaccaaaattttcagatggagaaaagtgccgtagggaggcttttaggcgtttgggtaatggggtgtctgatgacctgtcaagtgaagaagatggtgaagcacggacacagatgatattattgcgtaggagtgtggaaggggcctcaagtgacaatggttgtgaagttaagaatagaaaatcaatactttcaaggcacctaaactctcaggtaaagaaaaccactacaaggtggtgtcatattgtgcgggattcagatagtctggctgaatcagaatttgaatcagcagccttcagccagggctctagatcgggtgtgagtggtggctctcgaagcctcaacatgtcaagaagagactcagaaagcacccgccatgactcggagactgaggacatgttatgggacgacctgctacatggcccagagtgccggtcatctgtcaccagtgacagtgagggggcccatgtgaatacccttcactcagggaccaaacgtgaccccaaagaggatgtttttcagcagaatcatttattctggcttcagaattcaagtccttcctctgatcgagttagtgcaataatctgggaggggaatgagtgcaaaaagatggatatgtctgtgttggaaataagtggcatcatcatgagcagggtcaatgcctatcagcaaggagtaggttatcagatgctgggaaatgttgtcactattggattagcattttttccattcttacatcgacttttccgtgagaagagccttgacccaactaaagtccatttcagctgaggagatcttgactctcttttgtggggcaccacctgttacacctattattgttttgtcgataattaatttttttgaaagattgtgtcttacttggatgttttttttcatgatgtgtgtgggcagagagaacatataaaacagagatttttatttgcaaaactcttcagccatatttacttctgccagggaaagctagggaaatatgaaatacctcatttcagacttaagaaggtggagaatattaaaatatggttatcactgcgttcctatctaaagagacgggggccacagcgttcagttgatgtggtttgtatcctcggttttcctactgacactttcgattgctttcatttgttgtgctcaggttctccaagggacataaaactttcctggaatgatgcttattaactggggagtttttgatctgggggaaacagctttactactttttttattgcgtctggcctcactggggtctgaaaccaataagaaatacagcaatgtttcaatattacttacagaacagattaatttatatcttaagatggaaaaaaagccaaataagaaagaacagcttactctagtaaacaatgtattaaagctgtccaccaagttgttgaaagagctggacacaccatttagactcctatggactgacaatgaatcccttaatctacaatatcacaagagtagttatcctttctgctgtctcaggtgttataagtgatcttctaggatttaatataagactgtggaaaattaaatcataagctgagttaaatgcctggactctcccctggctggtatcaaaacttacctatcaaggaaagtgatgactgcagaaaccagtgagataccccccacccgcctggttccaccatggcaccagggtgcctcctccagctcctgcccaaagcgaatgaatgggtgtttccccggaggagcaagtccctttccccaactgggtgtgccatgccaaaaaccctgtattttccatgcctttccaaacaacatgaatagtcagctgacctaaagactgtgtgtgttgtggtaacaccaaagacaattttgtaagtttgcgcttcagtactgtgacagttatgtttactggacatagtctttttggcaactatgatagatgcccaaagcatgaagcaaatatcttttattggaaatatgcaaattcaatacttttccattatagtctatagaactggagatttcatttctctatcaaagagagatcaagcgaactattttaggttaaatccgaataaaagaactttactgg

SEQ ID NO: 2322 - DNA, 457 bp, Homo sapiens
  SIMILAR (122)..(457): 981254mologous to Homo sapiens Similar to RIKEN cDNA 2010003J03 gene,accession number BC005131,Smith-Waterman Score=567.
  misc_feature (1)...(457): n = a,t,c or g
gttcagccttgaagtgagtcgtggacgaacctctctcagcgtccagcctagacggcggtgttgctccggcagcgttcctgggagccgagggccagagactaagttgtgggacgacttcagcatgtctcaggccaccaagaggaagcatgtggtgaaggaggtgctaggggagcacatagtgccctccgaccagcagcagattgtcagggtactcaggaccccagggaacaatctgcatgaggtggagacagcccaagggcagcgcttcctggtgagcatgccctccaaataccgcaagaacatctggatcaagagaggggactttctcattgttgaccccattgaagagggagaaaaggtgaaggctgaaatctcgtttgtgctctgcaaggaccacgtgcgctctctgcagaaggaggggttntggcctgaggccttctctgaagtggctgagaaa

SEQ ID NO: 2323 - DNA, 395 bp, Homo sapiens
  SIMILAR (242)..(331): 961254mologous to Homo sapiens Similar to RIKEN cDNA 2010003J03 gene,accession number BC005131,Smith-Waterman Score=143.
agctgttatttttctgggacctagagaagttgaatagttaggaaataaaccaaggtaggatttgaatccaggcagttagacttcagaacccatgttcttaaccaagacaccgtgtcacccctcagtaaaaggcccctccccatcttcagaacagtcctgggttctgagcctgccatccaaggaactcaggaggaggagttgacagtctcttcgttcctaaccagtgtgggacgacttcagcatgtctcaggccaccaagaggaagcatgtggtgaaggaggtgctaggggagcacatagtgccctccgaccagcagcagattgtcagggtgagtggcgtggggcacaagctgttctgctccccacccctgcagccctggagggcccctggggtgg

SEQ ID NO: 2324 - DNA, 1503 bp, Homo sapiens
  SIMILAR (34)..(669): 721254mologous to Tetraodon nigroviridis squamous-cell carcinoma T-cell-recognized antigen,accession number AF299060,Smith -Waterman Score=805.
  misc_feature (1)...(1503): n = a,t,c or g
atgcttcttcttgttccagctgccagctccaaaactagctcaggcgatgcctcctcactcagcatcgaggagactaacaaactccgggcaaagttggggctgaaacccttggaggttaatgccatcaagaaggaggcgggcaccaaggaggagcccgtgacagctgatgtcatcaaccctatggccttgcgacagcgagaggagctgcgggagaagctggcagctgccaaggagaagcgcctgctgaaccaaaagctggggaagataaagaccctaggagaggatgacccctggctggacgacactgcagcctggatcgagaggagccggcagctgcagaaggagaaggacctggcagagaagagggccaagttactggaggagatggaccaagagtttggtgtcagcactctggtggaggaggagttcgggcagaggcggcaggacctgtacagtgcccgggacctgcagggcctcaccgtggagcatgccattgattccttccgagaaggggagacaatgattcttaccctcaaggacaaaggcgtgctgcaggaggaggaggacgtgctggtgaacgtgaacctggtggataaggagcgggcagagaaaaatgtggagctgcggaagaagaagcctgactacctgccctatgccgaggacgagagcngcggcacggctgatggcctgcgggagcgggagctggaggagatccgggccaagctgcggctgcaggctcagtccctgagcacagtggggccccggctggcctccgaatacctcacgcctgaggagatggtgacctttaaaaagaccaagcggagggtgaagaaaatccgcaagaaggagaaggaggtagtagtgcgggcagatgacttgctgcctctcggggaccagactcaggatggggactttggttccagactgcggggacggggtcgccgccgagtgtccgaagtggaggaggagaaggagcctgtgcctcagcccctgccgtcggacgacacccgagtggagaacatggacatcagtgatgaggaggaaggtggagctccaccgccggcgtccccgcaggtgctggaggaggacgaggcggagctggagctgcagaagcagctggagaagggacgccggctgcgacagttacagcagctacagcagctgcgagacagtggcgagaagacacagatagaggcccctgactctgcagctcccacccccatgcccaaggaaaccactgacaatgtggcttcaaaccctgcttcagtgccggcttgctgtgtgatcctgggcaaagtgactcttctcgagtctcactttccttattgtcaagtgggcttcataatcgctgctctgtaccaggttattctaaggcatggggtgaccagcgtggtggtgccagcccctaatgagggacttgacagcagctgctcctcatccagccccagtgctgacagcacctgggagaagcgccgagtgacggtgagccgggcattggcctga

SEQ ID NO: 2325 - DNA, 3408 bp, Homo sapiens
  SIMILAR (899)..(1195): 941254mologous to Homo sapiens SART-1,accession number AB006198,Smith-Waterman Score=480.
atgacaacctcccaaaagcaccgagacttcgtggcagagcccatgggggagaagccagtggggagcctggctgggattggtgaagtcctgggcaagaagctggaggaaaggggttttgacaaggcctatgttgtccttggccagtttctggtgctaaagaaagatgaagacctcttccgggaatggctgaaagacacttgtggcgccaacgccaagcagtcccgggactgcttcggatgccttcgagagtgtgtggcctctcagatccagcccgactcagccagcaggacaaagggaccacggcttggaatgctggcgcagaaagcagacctggctgctgccagctccaaaactagctcaggcgatgcctcctcactcagcatcgaggagactaacaaactccgggcaaagttggggctgaaacccttggaggttaatgccatcaagaaggaggcgggcaccaaggaggagcccgtgacagctgatgtcatcaaccctatggccttgcgacagcgagaggagctgcgggagaagctggcggctgccaaggagaagcgcctgctgaaccaaaagctggggaagataaagaccctaggagaggatgacccctggctggacgacactgcagcctggatcgagaggagccggcagctgcagaaggagaaggacctggcagagaagagggccaagttactggaggagatggaccaagagtttggtgtcagcactctggtggaggaggagttcgggcagaggcggcaggacctgtacagtgcccgggacctgcagggcctcactgtggagcatgccattgattccttccgagaaggggagacaatgattcttaccctcaaggacaaaggcgtgctgcaggaggaggaggacgtgctggtgaaccgtgaacctggtggataaggagcgggcagagaaaaatgtggagctgcggaagaagaagcctgactacctgccctatgccgaggacgagagccaaaaacctcgctctatcctgtccaagtatgacgaagagcttgaaggggagcggccacattccttccgcttggagcagggcggcacggctgatggcctgcgggagcgggagctggaggagatccgggccaagctgcggctgcaggctcagtccctgagcacagtggggccccggctggcctccgaatacctcacgcctgaggagatggcactgagaagacagggcgagtatttgtgttcacaaagcgcttggcctcgcggactgcggggacggggtcgccgccgagtgtccgaagtggaggaggagaaggagcctgtgcctcagcccctgccgtcggacgacacccgagtggagaacatggacatcagtgatgaggaggaaggtggagctccaccgccggggtccccgcaggtgctggaggaggacgaggcggagctggagctgcagaagcagctggagaagggacgccggctgcgacagttacagcagctacagcagctgcgagacagtggcgagaagaacctcatggcctatgaagatggccagttggttaggaccccgtcggtgcgaccagggcaggacgtgcggctccaggctccaggaaccagaacggggctgctcaagctgctgtcgaccgtctctcaggacaagcagggctgcctggggagtggtgatggtgtgccaaatcaagacctgcagcagaggtctcagagctcaaggcagacagcaaagaaggaccgcaagcccaggggccagagcaagaaaggacagggctctgaagagtctgaagatcacttcccgcttcttcctcggaaaccctccttccccttccagtgggcctgggagagcatcgccacagatgtccgggctgtgcttcagccaagctccccaacccctggccaccaagccctgcccatgccctcctcgttctcccagcgtcagtccaggcgcaagtccacggccaacctcccagaggcccatggctgctgctggaagacagaggcgcaaaacctgaaggcgagacagcagctgggagcctggggcggtgtctccatccctactggcaaaggggagctaggatcagagccccccagtggtctccagctgcctgggaggaggccaggatcaggatcggcgtccgacaagcaggtccagctgcaaagcctgggtgctgaggaggccgagaggggtctgagttctggggtgctgccccagcgccccaggagggggtcgatctcagaggaggagcaattttcagaggccacagaggaggctgaggagggagagcacaggactccctgcagaaggagggctggttgtcagagaaaggggcagatttctggagaggaagcctccgatgagggagaagtgcagggccagagccaggggagcagccccagcttcaacaacctccgaaggcgacaatggaggaagacaagggccaaggagctgcaggggccatgggacctggagaagctgcacaggcagctacagagagacctggactgtggcccccaaaagctgccctggaagactttgagggctgccttccaggcctccaagcggaatggaaaggcctatgcctcgggatacgatgaaactttcgtgtctgccaacctccctaatcgcaccttccacaaacgacaggaagccaccaggagcctgctgcaggcctgggagcggcagcggcaggaggagcggcagcaggccgagctgcggcgggcccggacacagcatgtacagcggcaggtggcccactgcctggcagcctacgcacccagagggagccggggccctggggcggcccagcgcaagctggaggagctgagaacagtcctgggttctgagcctgccatccaaggaactcaggaggaggagttgacagtctcttcgttcctaaccagtgtgggacgacttcagcatgtctcaggccaccaagaggaagcatgtggtgaaggaggtgctaggggagcacatagtgccctccgaccagcagcagattgtcagggtactcaggaccccagggaacaatctgcatgaggtggagacagcccaagggcagcgcttcctggtgagcatgccctccaaataccgcaagaacatctggatcaagagaggggactttctcattgttgaccccattgaagagggagaaaaggtgaaggctgaaatctcgttttgtgctctgcaaggaccacgtgcgctctctgcagaaggaggggttttggcatgaggccttctctgaagtggctgagaaacacaacaacaggaacagacaaactcaaccagaactcccagctgagccacagttatcaggagaggagtccagctcagaagatgattctgacctgtttgttaacacaaaccgcagacagtatcatgagagtgaggaggagagtgaagaggaggaggcagcctga

SEQ ID NO: 2326 - DNA, 2956 bp, Homo sapiens
  SIMILAR (228)..(1199): 841254mologous to Homo sapiens SART-1,accession number AB006198,Smith-Waterman Score=1311.
tgcgttgtctgggctcggcggcagccgggctcggagtggacgtgccactatggggtcgtccaagaagcatcgcggagagaaggaggcggccgggacgacggcggcggccggcaccgggggtgccaccgagcagccgccgcggcaccgggaacacaaaaaacacaagcaccggagtggcggcagtggcggtagcggtggcgaacgacggaagcggagccgggaacgtgggggcgagcgcgggagcgggcggcgcggggccgaagctgaggcccggagcagcacgcacgggcgggagcgcagccaggcagagccctccgagcggcgcgtgaagcgggagaagcgcgatgacggctacgaggccgctgccagctccaaaactagctcaggcgatgcctcctcactcagcatcgagggagactaacaaactccgggcaaagttggggctgaaacccttggaggttaatgccatcaagaaggaggcgggcaccaaggaggagcccgtgacagctgatgtcatcaaccctatggccttgcgacagcgagaggagctgcgggagaagctggcggctgccaaggagaagcgcctgctgaaccaaaagctggggaagataaagaccctaggagaggatgacccctggctggacgacactgcagcctggatcgagaggagccggcagctgcagaaggagaaggacctggcagagaagagggccaagttactggaggagatggaccaaaagtttggtgtcagcactctggtggaggaggagttcgggcagaggcggcaggacctgtacagtgcccgggacctgcagggcctcactgtggagcatgccattgattccttccgagaaggggagacaatgattcttaccctcaaggacaaaggcgtgctgcaggaggaggaggacgtgctggtgaacgtgaacctggtggataaggagcgggcagagaaaaatgtggagctgcggaagaagaagcctgactacctgccctatgccgaggacgagagcgtggacgacctggcgcagcaaaaacctcgctctatcctgtccaagtatgacgaagagcttgaaggggagcggccacattccttccgcttggagcagggcggcacggctgatggcctgcgggagcgggagctggaggagatccgggccaagctgcggctgcaggctcagtccctgagcacagtgggggccccggctggcctccgaatacctcacgcctgaggagatggtgacctttaaaaagaccaagcggagggtgaagaaaatccgcaagaaggagaaggaggtagtagtgcgggcagatgacttgctgcctctcggggaccagactcaggatggggactttggttccagactgcggggacggggtcgccgccgagtgtccgaagtggaggaggagaaggagcctgtgcctcagcccctgccgtcggacgacacccgagtggagaacatggacatcagtgatgaggaggaaggtggagctccaccgccggggtccccgcaggtgctggaggaggacgaggcggagctggagctgcagaagcagctggagaagggacgccggctgcgacagttacagcagctacagcagctgcgagacagtggcgagaaggtggtggagattgtgaagaagctggagtctcgccagcggggctgggaggaggatgaggatcccgagcggaagggggccatcgtgttcaacgccacgtccgagttctgccgcaccttgggggagatccccacctacgggctggctggcaatcgcgaggagcaggaggagctcatggactttgaacgggatgaggagcgctcagccaacggtggctccgaatctgacggggaggagaacatcggctggagcacggtgaacctggacgaggagaagcagcagcaggatttctctgcttcctccaccaccatcctggacgaggaaccgatcgtgaatagggggctggcagctgccctgctcctgtgtcagaacaaagggctgctggagaccacagtgcagaaggtggcccgggtgaaggcccccaacaagtcgctgccctcagccgtgtactgcatcgaggataagatggccatcgatgacaagtacagccggagggaggaataccgaggcttcacacaggacttcaaggagaaggacggctacaaacccgacgttaagatcgaatacgtggatgagacgggccggaaactcacacccaaggagggcccggacaatcattccagcagatctggggacccgtcccagtgcacccaggccaccaagaggaagcatgtggtgaaggaggtgctaggggagcacatagtgccctccgaccagcagcagattgtcagggtactcaggaccccagggaacaatctgcatgaggtggagacagcccaagggcagcgcttcctggtgagcatgccctccaaataccgcaagaacatctggatcaagagaggggactttctcattgttgaccccattgaagagggagaaaaggtgaaggctgaaatctcgtttgtgctctgcaaggaccacgtgcgctctctgcagaaggaggggttttggcctgaggcccttctctgaagtggctgagaaacacaaacaacaggaacagacaaactcaaccagaactcccagctgagccacagttatcaggagaaggagtccagctcagaagatgattctgacctgttttgttaacacaaaccgcagacagtatcatgagagtgaggaggagagtgaagaggaggaggcagcctgagactccaggacccaattcttcacttgctcagggactggcccctggctcttctgggcttggacattcccagggtgctctgcacatcttcacccctgcatgaggacaaagcagggctcctctctgaactgatcttttgattcagagaattaaacccctggtgggttggtgacttgaaaaaaaaaaaaaaaa

SEQ ID NO: 2327 - DNA, 1272 bp, Homo sapiens
  SIMILAR (639)..(998): 411254mologous to Homo sapiens breakpoint cluster region protein 1,accession number AF044773,Smith-Waterman Score=131.
gcggccgcgacggtagcgtcagtgtagagatcgggacgccagtgttcccagttcccaccagtccaactgcgaggagtgcgacgtgagtctgagtctgatccctccgaaaaccgtacttccggcgctgtctcggaggcctcccgtcccctcccttgtccgtcttctaactcttccccacgccaggtccgtcaagcctaagtccttgagttccgggtccgggcagcagagaaaggaagtcctctccctggaggcctatctccctcagaacggcgcgagaagcaacaccttagaaggcagcacttcccgcgaaggaccggaaaggagcgcctactaaggacgccgtcgaggtccggggcgcctcaactctatagctctaactggctagaagtgcccaacgtggaatgtttcttttttaaaggcggctcttgaagacgacccggaagcggaagtggaagaaagttctagtggcttgaggtactcgcagaagcgctcggggtggcgtgaggaaccgtttacgggaactgaagttgcggattaagcctgatcaagatgacaacctcccaaaagcaccgagacttcgtggcagagcccatgggggagaagccagtggggagcctggctgggattggtgaagtcctgggcaagaagctggaggaaaggggttttgacaaggggctattgttgtccttggccagtttctggctgatatagaaaagatgaagacctccttccgggaatggctgaaagacacttgtggcgccaacgccaaagcagtcccgggactgctttcggatgcccttcgaaaagtggtgcgaagcccttcttgttgatgctctcttggggaagttttcaattcccccagcccctcaatccagaagtttggcaagccgaagtagggactcctccccctgtccctcctacgaaggaaaagatttgctattgttcgtactcaccttccgacggtacttccgggggtcttttggggagttttctcccctaaaccattttcaacttttttttgggattcttcgctcttggcatgccttcccccgtccttttttcccttggccagtttcctgggtgacagtttaccagcttttcctggaatgggatttcccgggccccatccctcacccccaccctcactttcaatccgtttgataccatttggctccttttttggcagaacagtcactgtccttgtaaagttttttagatcaataaagtcagtggctttcatgaaaaaaaaaaaaaaaaaaaaaaaaaaaaaaa

SEQ ID NO: 2328 - DNA, 586 bp, Homo sapiens
tttttttttggggttttaccagttttatttctagactttcatgtttgtctttttgtcttctgctggaaacatgccggttacatgttggtgctgggaagcgccgcggtgcaaccagaaatgcacagacccagccgcccgccgcccagaccctcagacttgcgcgtcacaggacagactccgctgtgccccgtgcacttgccaccagcctttggcctctcgatacacacctcctcccgcctgtcctccctcacacgtcagcctccacactcttgccacctcccttcaacacttcctaaataaaaattacaagaattacatagccaagatgtgcaaattgtctattttgtcactaagttttttaaaggaaggggcaggggataagaattcatcggaaccgaacttaggttgagtaccctaattttccttgcacccatgcctgtccaatcagatgactctgggaaacgccaaacaggctgaatcaatgtctttgtgtggtttttttcttccagattgtttttttctcacctataaaaggatctatctttaaaaataaactgtattaaatctgtaacatcaaaggcagaag

SEQ ID NO: 2329 - DNA, 859 bp, Homo sapiens
  SIMILAR (202)..(456): 671254mologous to Homo sapiens FRG1,accession number AF146191,Smith-Waterman Score=277.
cccgtgtcgacccacgcgctccgggaaatctcgggcattcaccgtttgggtgaagacggaggcgggttctggacagacgtaggctgtcagggagtgtttacttcgcctccacttctgttcctccctgccctggtgctgctccaggtcacatactcgtcctgagccggcttcagcctgtccgcgcagaagtctcccggagccatggcctagtactcttatgtgaagtctagcaagctcgtgctcaagggaaccgagtaagaagaaaaagagcaaagataagaagagaaaaagagaagatgaagaaacccagcttgatacgttggaatctggtgaacagtaacaaactttggtgaaatttcaggaaccatagccattggaatggatgagggaacctatatacatgcactcgacaatggtctttttaccctgggagctccacacaaagaagaatcgccctgaaatctggctatggaaaatatcttggtataaattcagatgaacttgttgggcattcagatgcaattggaccaagagaacaatgggaacactgaaaggttttgaccagaccattaatttgattttggatgaaagccatgaacgagtattcagctcttcacagggggtagaacaagtggtactaggattatacattgtaagaggtgacaacgttgcagtcattggagaaatcgatgaagaaacagattctgcgcttgatttggggaatattcggagcagaacctttaaattctgtagcacactgaggaaaaactacatacttggacatctgtaaacctttgtacaggaactggattattcctgaggatgatatatggagtgtttatgagtgtgtcactggatt

SEQ ID NO: 2330 - DNA, 4402 bp, Homo sapiens
  SIMILAR (205)..(306): 1001254mologous to Homo sapiens Human cyclin D1/cyclin dependent kinase 4 fusion protein 5,accession number AAW74575,Smith -Waterman Score=176.
gccgccgcagtagcagcgaagcagcagagtccgcacgctccggcgaggggcagaagagcgcgagggagcgcggggcagcagaagcgagagccgagcgcggacccagccaggacccacagccctccccatgctgcccaggaagagccccagccatggaacaccagctcctgtgctgcgaagtggaaaccatccgccgcgcgtacccctgatgccaacctcctcaacgaccgggtgctgcgggccatgctgaaggcggaggagacctgcgcgccctcggtgtcctacttcaaatgtgtgcagaaggaaggtcctgccgtccatgcggaagatcgtcgccacctggatgctggaggtctgcgaggaacagaagtgcgaggaggagggctttccgctggccatgaactacctggaccgcttcctgtcgctggagcccgtgaaaaagagccgcctgcaactggtgggggccacttgcatgtttgtggcttctagattgaaggagaccatccccttgacgccgaagaagctgtgcatctacaccgcaaactccatccgggcccgaggagctgctgcaaatggagctgctcctggtgaacaagctcaagtggaacctggccgcattgaccccgcacgatttcattgaccacttcttctccaaaaatgccagaggccgaagaagtacaacaggatcatccgcaaacacgcgcagaccttcgtttgccctctgtgccacagatgtgaagttcatttccaatccgccctccatggtggcagcggggagcgtggtggccgcagtgcaaggcctgaacctgaggagccccaacaacttcctgtcctactaccgcctcacacgcttcctctccagagtgatcaagtgtgacccaagacttgctccgggcctgccaggagcagatcgaagccctgctgggagtcaagcctgcgccaggcccagcagaacatggaccccaaggccgccgaggaggaggaagaggaggaggaggaggtggacctggcttgccacacccaccgacgtgcgggacgtggacatctgagggcgccaggcaggcgggcgccaccgccacccgcagcgaagggcggagccggccccaggtgctccaactgacagtccctcctctccggagcattttgatacccagaagggaaagcttcattctccttgttgttggttgttttttcctttgctctttcccccttccatctctgacttaagcaaaagaaaaagattacccaaaaactgtctttaaaagagagagagagaaaaaaaaaatagtatttgcataaccctgagcggtgggggaggagggttgtgctacagatgatagaggattttatacccgcaataatcaactcgtttttatattaatgtacttgtttctctgttgtaagaataggcattaacacaaaggaggcgtctcgggagaggattaggttccatcctttacgtgtttaaaaaaaagcataaaaacattttaaaaacatagaaaaattcagcaacccatttttaaagtagaagagggttttaggtagaaaaacatattcttgtgcttttcctgataaagcacagctgtaagtggggttctaggcatctctgtactttgcttgctcatatgcatgtagtcactttataaagtccattgtatggtaatatattccgtaggtagaatgtggaacctcttcaccttattcatggctgaaagtcacctcttggttacagtagcgtagcgtggccgtgtgcatgtcctttgcgcctgtgaccaccaccccaacaaaccatccagtgacaaaccatcccagtggagggtttgtcgggcaccagccagcgtacaggggtccgggaaaaggccacctgtcccactccttccgatccgcttcttaaaggagaggacgaagaagtgccataatatattctatttttatactcttcctatttttgtagtgacctgtttatgagatgctggttttctacccaacggccctgcagccagctcacgtccaggttcaacccacagctacttggtttgtgttcttcttcatattctaaaaccattccattttcaagcactttcagtccaataggtgtaggaaatagcgctgtttttgttgtgtgttgcagggagggcagtttttctaatgggattggtttggggaatatccatgtacttgtttgcaagcaggacttttgaggccaagtgtgggccactgtggtggcagtggaggtggggtgtttgggaggctgcgtgccagtcaagaagaaaaaggtttgcattctcacattgcccaggatgataaggtccttttccttttctttaaagaagttgaagtttacgaatcctttggtgccaactggtgtttgaaagtagggacctcagaggtttacctagagaacaggtggtttttaagggttatcttagatgtttcacaccggaaggtgtttaaacactaaaatatataatttatagttaaggctaaaaagtatatttatttgcagaggatgttcataaggccagtatgatttataaatgcaatctcccctttgatttaaacacacagatacacacacacacacacacacacacacacaaaccttctgcctttgatgttacagatttaatacagtttatttttaaaagatagatcctttttataggtgagaaaaaaacaatctggaagaaaaaaaaccacaccaagacattgattcagcctgtttggcgttttcccagaggtcatctgatttggacagggcatggggtgcaaggaaaattaggggactccaccctaagttccgggttccgatgaattcttatcccctgccccttcctttaaaaaacttagtggacaaaataggcaatttgcacatcttgggctatggtaattccttggtaatttttatttaggaagtggttggaagggaggtggcaagagtgtggaggctgacgtgtgagggaggacaggcgggaggaaggtgtgaggaaggaaggctcccgagggggaaggggcggtgcccacaccgggggacagggcccgcagctccattttcttattgcgctgctaccgtttgacttccaggcacggtttggaaatattcacatcgcttctgtgtatctctttcacattgtttgctgctattggaggatcagttttttgttttacaatgtcatatactgccatgtactagttttagttttctcttagaacattgtattacagatgccttttttgtagttttttttttttttttatgtgatcaattttgacttaatgtgattactgctctattcccaaaaaggttgctggtttcacaatacctccatgcttcacttagcccatggtggaccccagcgggcaagggttctgcctgcttttggcgggccagaccacgcgggcgcgatccccacacaggctgggccgggggccggccccgaggccgcgtgcgtgagaaccgcgccggtgtccccagagaccgaggctgtgtccctcttctcttccctgcgcctgtgatgctgggcacttcatctgatcgggggcgtagattcatagtagttttttacagctgtgttattcttttgcgtgtagctatgggaagttggcataattattattattattattataacaagtgtgtcttacgtgccacccgggcgttgtacctgtaggactctcattcgggatgattgaaatagcttctggaatttgttcaagttttggggtatgtttaatctgttatgtactagtgttctgtttgttattgttttgttaaatacacccataatggctaattaaaagagactccaaatctcaaatgagcacagctcacagtgctgtcgtgccccggtcacctaagcaagctgcccgaacccaaaagaatttgcacccccgcgtgcgggcccaccgtggttttgggggcctcccctggccagggtcaatcctggttctcggaggcccattctcgggcacaaggcccaccccgccccaacccctcccagaacaacgggtcacgcttacctcaaccaatccttggcttgcggcgtctgtctgaaaccacgcggggggcctttgaagggaccgcttttgtcctgtcgtgaatggggcaaagggcacaaagtcccttggaatgtttgtgtgtatcgaaaaggccaaaggttgggtgggcaagtgcacggggcacaagcggagtctgtcctgtgacgcgcaagtctgaagggtctgggcggcgggcggctgggtctgtgcatttcttggttgcaacgcggcgcttcccagcaccaacatgtaaccggcatgtttccagcagaagacaaaaagacaaacatgaaagtccagaaataaaactggtaaaaccccaagaaaaaaaaaaaaaaaaagtcgagcgttagcgaatttagta

SEQ ID NO: 2331 - DNA, 2170 bp, Homo sapiens
  SIMILAR (343)..(47): 551254mologous to Homo sapiens Human signal peptide containing protein HSPP-101 SEQ ID NO:101,accession number AAY87324,Smith-Waterman Score=235.
  misc_feature (1)...(2170): n = a,t,c or g
ccatggttgtgcccacccgacttttaaccccaatacatcccnacnncagagagagccatgaccaaaccagagcgaaaagacacctgccagatatcccgggttgcgggctggaaagaagtattaacagttgatgaaagcagcttggcattgccctctcttttctccctagggaagggataaaccactgtctttttgtgaggcatggttgtgttatgtcaggtgggaaccctgaatttcctgaaggtgccgccgcatgggaagatgggggtgcatcagatagcccaaggaaagtggtgtagtggacttttgtcatctgaacacccttccttttgggaaaatcttttatcgagtgagtttctggcagagtcctgccccctcctcctcgagacaaaggagccagatgctctctcctcgcatgttctggaagctactgaatgaacacatgcctgaggtttgcccaatcatatcctccctcctggtacttaaccttaagctcatggaagacagctgaggaagtactcgcagcagcaggggtgcagctggaggctccctttttgtgggtgtcatgctgtcagtggtggtggctgtggcaagtgctgcatctccagcaaatggtccctgtggtgcagccctgcctgggtttccagccacacaacttcccggatccctgtgaaacttgctgggcttccatccccatctttcctgcccggctgaataacctgtatcacaacagcttccttcactgagtcagggccctggcagggccaggtggggatggcctccctcaccgtctgctgcttctacctacatggctgggctccctgcgcccaggcttcgcctttccaaagcgccttgcatagccctccggagaaactttggattccagcactttcctaaaactgtcccgtgtggagtactccggcctcaccactgctaactgaggggctggaatgcagggtctttctcatctcacctcaaatccccaacagatcccttctaatggaaacagcttttaaaaatttcaggatattcgtaaagcacacgggaaacaaatcatggatgatctgccacacattttgcgactccttgagaaccattttgtaatactgaggtcacggagtgacagccccctgtgtggactgtgcttgttccttggccatgcactgcctcaccccacagaggtcaggcatggccatgtgttgtggccaacagaaagtgagcaggggctgtatttgtgcttgcaaggtagggcttggcctcctgtgcttctgccatgagaaagaacacggcccaaggtaagctgctgcttcaaccagggacccagaatacgggacatgttgtggagcagacgtgatcagacccccagcctggagcataacctagaagccaacttgtagactacccaagaatgggaatctagttgtagaccactgagatttctgatgctgttttgcagcaaaagctgactgatacatcacaggagaaatagttacagaatctgacacatgctgaatgctggataatcagtgtttcatggcagttaggtaaatcccaggcactgaagtgctcgcagcctcacagatcgaacgacttcctacaacctgtcacttctgttcctacctaacggtcctgacagcggatggcctaaatggtgagaaagcttgtttccacactagatgctggctttccaacaccagatagcttgggggaagaggaagttaagatgggctggggggttgtggggacccctcaggtttgggagtttgcaccaggtgccaacaagctcctggcctgaaactgtagccaggaggggccagtggtcccactgcagcctccaaacctgcctcccagttcctccagcactgcctgcccatgcacccctaaatcttactgaaatgaaaatccacgtctttgagatattctttaggggtggaggggaggcactgggctcctgaaaacaaagatgagcttaaagttctaggtcaccctgaggctagcagcatccttccctgcattttgcaaaagctgcactgggctctttccctttgtgggtgcagctcacacttctcaccgtacaggacactttgcatgggcagggctgtttgctctccactgcatccccactgcctggcaccatgcttggctcggggtaggtcttcaagaaatattg

SEQ ID NO: 2332 - DNA, 539 bp, Homo sapiens
  SIMILAR (2)..(127): 901254mologous to Homo sapiens putative WHSC1 protein,accession number AF083389,Smith-Waterman Score=199.
caaaaatggctctccagaaattaagctgaaaatcaccaaaacatacatgaatgggaagcctctctttgaatcttccatttgtggtgacagtgctgctgatgtgtctcagtcgaagcaggaagggagatgcagcatcccagtttttggtcttctgtcaaaaacacagggatgaggtggtagctgagcacccagatgcttcaggtgaggagattgaagagctgctcaggtcacagtggagtctgctgagtgagaagcagagagcacgctacaacaccaagtttgccctggtggcccctgtccaggctgaagaagactctggtaatgtaaatgggaaaaaaagaaaccacacaaagaggatacaggaccctacagaagatgctgaagctgaggacacacccaggaaaagactcaggacggacaagcacagtcttcggaagagagacacaatcactgacaaaacggccagaacaagctcttacaaggccatggaggcagcctcctcgctcaagagccaggcagcaacgaaaaatctgtctgat

SEQ ID NO: 2333 - DNA, 8137 bp, Homo sapiens
  SIMILAR (763)..(4857): 1001254mologous to Homo sapiens TRX5 protein,accession number AJ007042,Smith-Waterman Score=7383.
  misc_feature (1)...(8137): n = a,t,c or g
agagatgggtctcgccatcaccatgttgcccagtctggtctccaactcctgggctcaagcgatcctcctgccttggtctcccaaagtgctgggattacaggtgtgagcccccacacccggcctgagtgagtgggttctgaatggtgactgttgttgtccatagccttccccctgcttctgagagtggagtccctcccctcatgttggagacctcccaaggtccatgtggtcctataggggctgttcagcctccctagccccttaacgtgtcaggtaatactgtatatattccatgaaatgtgaataattagttatataattcctaagcacttattttaaaaaacagcaatgtgatgcttaactcttcccacctctgttcctgtcccccttagaaaaccactgataactctttttttttttgagacggagtcttgccctgtcgcccaggctggagtgtagtggcctgatctcggctcggctcattgtaacctccgcctcgggtttgagcgattctcctgcctcagcctcctgagtagctgggattataggcgtgcaccaccacgcctggctaattttttgtatctttagtagggacgggtttcaccatgttggccagagtggtcttgaactcctgaccttgtgatccgctcgcctcagcctcccaaagtgctgggattacaggcatgagccaccgtgcctgtcctagaaccactggtaactcttaactgnnnagtgttctaagaacggaagcatctgggctggatggaatttagcatcaagcagagtcccctttctgttcagagtgttgtaaagtgcataaagatgaagcaggcaccagaaatcctcggcagtgccaacgggaagactccgagctgcgaggtgaaccgcgagtgttctgtgttcctcagcaaagcccagctctccagtagcctgcaggagggggtcatgcagaagtttaacggccacgacgccctgccctttattccagccgacaagctgaaagatcttacttcccgggtgtttaatggagaacccggcgcacacgatgccaaactgcgttttgagtcccaggaaatgaaagggattgggacaccccctaacactacccctatcaaaaatggctctccagaaattaagctgaaaatcaccaaaacatacatgaatgggaagcctctctttgaatcttccatttgtggtgacagtgctgctgatgtgtctcagtcagaagaaaatggacaaaaaccagaaaacaaggcgagaaggaacaggaagaggagcataaaatatgactccttgctggagcagggccttgtcgaagcagctcttgtgtctaagatctcaagtccttcagataaaaagattccagctaagaaagagtcttgtccaaacactggaagagacaaagaccacctgttgaaatacaacgttggtgatttggtgtggtccaaagtgtcgggttacccttggtggccttgcatggtttctgcagatccactccttcacagctataccaaacttaaaggtcagaaaaagagtgcacgccagtatcacgtacagttctttggtgacgccccagaaagagcttggatatttgagaagagcctcgtagcttttgaaggagaaggacagtttgaaaaattatgccaggaaagtgccaagcaggcacccacgaaagctgagaaaattaagctattgaaaccaatttcagggaaattgagggcccagtgggaaatgggcattgttcaagcagaagaagctgcaagcatgtcagtggaggagcggaaagccaagttcacctttctctatgtgggggaccagcttcatctcaaccctcaagtagccaaggaggctggcattgctgcagagtctttgggagaaatggcagaatcctcaggagtcagtgaagaagctgctgaaaaccccaagtctgtgagagaagagtgcattcccatgaagagaaggcggagggccaaactgtgtagctctgcagagaccctggagagtcaccccgacatagggaagagtactcctcaaaagacggcagaggctgaccccagaagaggagtagggtctcctcctgggaggaagaagaccacagtctccatgccacgaagcaggaagggagatgcagcatcccagtttttggtcttctgtcaaaaacacagggatgaggtggtagctgagcacccagatgcttcaggtgaggagattgaagagctgctcaggtcacagtggagtctgctgagtgagaagcagagagcacgctacaacaccaagtttgccctggtggcccctgtccaggctgaagaagactctggtaatgtaaatgggaaaaaaagaaaccacacaaagaggatacaggaccctacagaagatgctgaagctgaggacacacccaggaaaagactcaggacggacaagcacagtcttcggaagagagacacaatcactgacaaaacggccagaacaagctcttacaaggccatggaggcagcctcctcgctcaagagccaggcagcaacgaaaaatctgtctgatgcatgtaaaccactgaagaagcgaaatcgggcttccacggcagcatcttcagctcttgggtttagcaaaagttcatctccttctgcatccttaactgagaatgaggtctcggacagcccgggagacgagccctcggagtccccatacgaaagtgcagacgaaacacaaactgaagtatctgtctcatccaaaaagtctgagcgaggagtgactgccaaaaaggagtatgtgtgccagctgtgtgagaagccgggcagcctcctgctctgtgaaggaccctgctgcggagctttccacctcgcctgccttgggctttcccggaggccagaagggaggttcacctgcagcgagtgtgcctcagggattcactcatgtttcgtgtgtaaagagagcaagacagatgttaagcgctgtgtggtaactcagtgtggaaaattttaccatgaggcttgtgtgaaaaaataccctctgactgtatttgagagccgaggtttccgctgccccctccacagctgtgtgagctgccatgcttccaacccttcaaacccaaggccgtcaaaaggtaaaatgatgcggtgtgtccgctgccccgttgcctatcacagcggggatgcttgtctggcagcaggatgctcagtgatcgcctccaacagcatcatctgcactgcccacttcactgctcggaaggggaagcgacaccacgcccacgtcaacgtgagctggtgcttcgtgtgctccaaaggggggagccttctgtgctgtgagtcctgcccagcggccttccaccctgactgcctgaacatcgagatgcctgacggcagctggttctgcaatgactgcagggctgggaagaagctgcacttccaggatatcatttgggtgaaacttgggaactacagatggtggccggcagaagtttgccatcccaaaaatgttcccccaaatattcagaaaatgaagcacgagattggagaattccctgtgtttttctttgggtctaaagattattactggacgcatcaggcgcgagtgttcccgtacatggagggggaccggggcagccgctaccagggggtcagagggatcggaagagtcttcaaaaacgcactgcaagaagctgaagctcgttttcgtgaaattaagcttcagagggaagcccgagaaacacaggagagcgagcgcaagcccccaccatacaagcacatcaaggtgaataagccttacgggaaagtccagatctacacagcggatatttcagaaatccctaagtgcaactgcaagcccacagatgagaatccttgtggctttgattcggagtgtctgaacaggatgctgatgtttgagtgccacccgcaggtgtgtcccgcgggcgagttctgccagaaccagtgcttcaccaagcgccagtacccagagaccaagatcatcaagacagatggcaaagggtggggcctggtcgccaagagggacatcagaaagggagaatttgttaacgagtacgttggggagctgatcgacgaggaggagtgcatggcgagaatcaagcacgcacacgagaacgacatcacccacttctacatgctcactatagacaaggaccgtataatagacgctggccccaaaggaaactactctcgatttatgaatcacagctgccagcccaactgtgagaccctcaagtggacagtgaatggggacactcgtgtgggcctgtttgccgtctgtgacattcctgcagggacggagctgacttttaactacaacctcgattgtctgggcaatgaaaaaacggtctgccggtgtggagcctccaattgcagtggattcctcggggatagaccaaagacctcgacgaccctttcatcagaggaaaagggcaaaaagaccaagaagaaaacgaggcggcgcagagcaaaaggggaagggaagaggcagtcagaggacgagtgcttccgctgcggtgatggcgggcagctggtgctgtgtgaccgcaagttctgcaccaaggcctaccacctgtcctgcctgggccttggcaagcggcccttcgggaagtgggaatgtccttggcatcattgtgacgtgtgtggcaaaccttcgacttcattttgccacctctgccccaattcgttctgtaaggagcaccaggacgggacagccttcagctgcaccccggacgggcggtcctactgctgtgagcatgacttaggggcggcatcggtcagaagcaccaagactgagaagccccccccagagccagggaagccgaaggggaagaggcggcggcggaggggctggcggagagtcacagagggcaaatagcgccaggcggccgcttggccggatccaggggcggtgcagggcggccggccctgcctgcgggagagggcgagcatgaactggcccggaggacccagctcgagccgccaggacacagacgtacaggcctcctcgggagggagcgcctccccaccactgagccatcctcagcagcgtccgctgcgtctgcactgatgaccgtctgagcccagctcagcgttcctggacaaacagcctcactcctcagcgttaccgccacacttgaatttctccgaatgtcaaggttccctcccactctatttttttaggttaaagttaattggcatatggaatgttttaatctcctctgaaatgtgtagcgtaggcttttcccaagggtcgctagaaactcgtcttcgcgttgccccctttctggctctcagcgccgtcgccactcgggagaggctgggtgaggcccgtgtgaggactgaccctggattcctcgaaactgccattgtgatcattactctgctctttggtggctgtatcatttttttgtactaatgtgaattgttcctcagaaacgcttcttttccatcctagtgagaagctggccctgcaggtggtggcagcaatggtgttgtaagatttcctcccgtagttttttctcctcatggatttgaatgaaatgccaataacacgtccactttcaacgtgtagtttacgcggagcactttcgaggcctggccgggttgggcctacttctcacctgggcctatcttctgaactcgctaggttcttatcaacatttgggggataactttgtatatttttttcatttggcttttctttaccagtttctgatttttattctcaatatatttttgctaaacctatttcacaaatcaccaccgactgaagtgtgtgtttactgatgcggccctgagctccatggcgaaaggagtgactttgcagggcgtgagaccgcagtctgcttagagcacaggaagtgacaacttagggagccccgtagggcgctgcaggccccggggaccccagcacgtgggtctaaagagagacggagtctagctctcctgccacccagagtggcttccatctcagcactctgtgggtctggtgatggaagatgcagtctctgctgatcacatgtgccctctgccagggcacctactgagaggtgcggtcctgggggtggaggcctgcctggcaggtgtgcgtgcctcgtacgtgtgttatgggcactggtctaggccaggtatgacacccactctcctgtgagatttcactttagtttttaaaaggtccagttctacagagtgagacctatctatctgagtactacatatgttttaagacttggttctttttttgagggatccttgaccctgggaagtctggagcaccctgagaagggggcaccatgtgtgcctttgcccacgtgtcctgaggggctgcttgtctgggagggagggagagaacattcagcagcaggtgcttttttatggccttttcttaaaataacctaagggggacacatccatcttgcagagaagtttacagaactccccttgaaaactgctgctgaggctcctgttaaattttctgtggcatcttttatgccttggtaaaaactgcagtgtctttggacctgagagtggctactccgtggttttgtgacctgtaagcgtggggttcaggggtgtgtggccctgcagggtcccacgcctccctgagcactgactggaagtttcactggctggtggctgtcccttctcccatcagggtccccagcaaagttaactacacagaggacccaggggaaacgagctgtgtagccactgacttgctcgcgcggccgtggcctctgaggggcactcgccggttaagacagggtgggagtagtgctttccagttcagactctaacttctcccaaagtgtcctaagaaaatactggatcggctcatagatttatgctccttatgatgccctaacttggaaggttgttctagggacaggccgggcagtgtccccacacacaccttagagtcgaaggccccagggccccgctgtcacttgcccaaaagatcccttccggcaggtaagggactaccaatgcttacgtcaaaacagcagaatcggctttgcagtgcactttggggagcagatattaacttatttttgtgttggacagtagtgaaatcttgtgatttttaatcgctttgataatacttccaaattttatgatttttctgaaggaaataatgcaaacattttaaatatgtttctccccctttccaaaaactgttaaactaatgagcaagtaacactaactttgaatgtctctacaatacccgttgataactcagtggagccaggctttggggtagcggccctgagcttgcagggtttctcgccactggggctgaccacgcccccagctgtgaccgtgggtgtggctggctctcggccctgcccagctttgttctgaggacgtggtgacttcctgaacatcagcttcaatcctccatcattaatgtgaagcaaaacacaaaaaccgccccaatccctcaggattccttggcatccgaaaccagcatctgcacctaaacccatacccacccgtgtgcgcccacagggggatgtgtccgaatgggcagcttaaaatgtggtcacctgtgggggaaactcttcaggcacctgaagtgagaacccagctgtccgtcctcaggccggcctttcttccggcgacacccgtccatggctggctgggtccccttcgcagtgtttgtctgtcttgacatctaaaccccggcgtgtgcagtgcccatcttccaggactaccttattttccagaattaaacctgttttataattcaagttaatgcaaatgactgtcagttgccaaatatcttgatcctgtgagtgtagttgatgactgtttgttagtcagtagagtaaaatgctgtgtccacggggtgtcacagcctcaccataccctgttgaggtgtgaaatgccccgtcagaaattaaatacaaacttaaatgtgcctattggtgtctaaacttcatacaatgtaaggtcagattccttttaggaatactgggtgctgtcaccaggtttgatagttagacttaaaaacttgaaattcactttttggggggagggatatactgaaatagagagttgagacttgccagttgggggaaaatagcatttaaaatggaaagctgtgtttggaaaattgtgtatgagtatttttgtattaaaaacattttaaa

SEQ ID NO: 2334 - DNA, 1458 bp, Homo sapiens
  SIMILAR (283)..(888): 421254mologous to Homo sapiens myosin-IE,accession number X98411,Smith-Waterman Score=291.
ggccttcctccggatgctcttccccgagagctggatggagacaagaaggggcgccccagcaccgccggctccaagatcagaaacaagccacgacctggtggccacactgatgaggtgcacaccccactacatccgctgatcaaacccaacgagaccaagaggccccgagactgggaggagaacagcatgaaccagatccccccaggtcccccacctccagcacctcccacccacccccagactggtgactccccaccccgaggggactcagcctaccctccccaccagatcaagcaccaggtggaatacctgggcctgaaggagaacatcagggtgcgagagccggcttcgcctaccgccgccagttcgccaaattcctgcagagtatgccattctgacccccgagacgtggccgcggtggcgtggggacgaacccagggcgtccagcacctgcttcgggcggtcaacatggagcccgaccagaccagatggggagcaccaaggtctttgtcaagaacccagagtcgcttttcctcctggaggaggtgcgaagcgaaagttcgatggctttgcccgaaccatccagaaggcctggcggcgcacgtggctgtccggaagtacgaggagatgcgggaggaagcttccaacatcctgctaacaagaaggagcggaggcgcaacagcatcaatcggaacttcgtcggggctacctggggctggaggagcggcccgagctgcgtcagttcctgggcaaggggagcgggtggacttcgccgattcggtcaccaagtacgaccgccgcttaaggtacacccagactggcctgtttaccgtcacctgtacctgggcgggccagcccatcaagcgggacttgatcctgacgcccaagttgtcacgcgacaggacgacttcttcatcctccaagaggagccgccgacagcttcctggagagcgtcttcaagaccgagtttgtcagcctctgtgcaagcgcttcgaggaggcgacgcggaggcccctgcccctcacctcagcgacacacacagtttcgggtgaagaaggagggctggggcggtggcggcacccgcagctcaccttctcccgcggcttcggcgacttggcagtgctcaaggttggcggcggaccctcacgaggaagcgcagcgtggggcaacggccagtgcctggtgtgggcgacccaagccccagcctcggacacatggtcccaggtgccgggccctatccagtacgtgggccaagatgtggacgagctgagcttcaacgtgaacgagtcattgagatcctcatggaaggttaaatgcccattcctggacttaacccaaggatatattggctgctttggcctgatgctcagcacgccagaaagggagacccagagggttctgatgcaaaagctgtccctggagcctcgatccccagacaaggagtctatctttgcatag

SEQ ID NO: 2335 - DNA, 4098 bp, Homo sapiens
  SIMILAR (1)..(4095): 1001254mologous to Homo sapiens TRX5 protein,accession number AJ007042,Smith-Waterman Score=7383.
atggaatttagcatcaagcagagtcccctttctgttcagagtgttgtaaagtgcataaagatgaagcaggcaccagaaatcctcggcagtgccaacgggaagactccgagctgcgaggtgaaccgcgagtgttctgtgttcctcagcaaagcccagctctccagtagcctgcaggagggggtcatgcagaagtttaacggccacgacgccctgccctttattccagccgacaagctgaaagatcttacttcccgggtgtttaatggagaacccggcgcacacgatgccaaactgcgttttgagtcccaggaaatgaaagggattgggacaccccctaacactacccctatcaaaaatggctctccagaaattaagctgaaaatcaccaaaacatacatgaatgggaagcctctctttgaatcttccatttgtggtgacagtgctgctgatgtgtctcagtcagaagaaaatggacaaaaaccagaaaacaaggcgagaaggaacaggaagaggagcataaaatatgactccttgctggagcagggccttgtcgaagcagctcttgtgtctaagatctcaagtccttcagataaaaagattccagctaagaaagagtcttgtccaaacactggaagagacaaagaccacctgttgaaatacaacgttggtgatttggtgtggtccaaagtgtcgggttacccttggtggccttgcatggtttctgcagatccactccttcacagctataccaaacttaaaggtcagaaaaagagtgcacgccagtatcacgtacagttctttggtgacgccccagaaagagcttggatatttgagaagagcctcgtagcttttgaaggagaaggacagtttgaaaaattatgccaggaaagtgccaagcaggcacccacgaaagctgagaaaattaagctattgaaaccaatttcagggaaattgagggcccagtgggaaatgggcattgttcaagcagaagaagctgcaagcatgtcagtggaggagcggaaagccaagttcacctttctctatgtgggggaccagcttcatctcaaccctcaagtagccaaggaggctggcattgctgcagagtctttgggagaaatggcagaatcctcaggagtcagtgaagaagctgctgaaaaccccaagtctgtgagagaagagtgcattcccatgaagagaaggcggagggccaaactgtgtagctctgcagagaccctggagagtcaccccgacatagggaagagtactcctcaaaagacggcagaggctgaccccagaagaggagtagggtctcctcctgggaggaagaagaccacagtctccatgccacgaagcaggaagggagatgcagcatcccagtttttggtcttctgtcaaaaacacagggatgaggtggtagctgagcacccagatgcttcaggtgaggagattgaagagctgctcaggtcacagtggagtctgctgagtgagaagcagagagcacgctacaacaccaagtttgccctggtggcccctgtccaggctgaagaagactctggtaatgtaaatgggaaaaaaagaaaccacacaaagaggatacaggaccctacagaagatgctgaagctgaggacacacccaggaaaagactcaggacggacaagcacagtcttcggaagagagacacaatcactgacaaaacggccagaacaagctcttacaaggccatggaggcagcctcctcgctcaagagccaggcagcaacgaaaaatctgtctgatgcatgtaaaccactgaagaagcgaaatcgggcttccacggcagcatcttcagctcttgggtttagcaaaagttcatctccttctgcatccttaactgagaatgaggtctcggacagcccgggagacgagccctcggagtccccatacgaaagtgcagacgaaacacaaactgaagtatctgtctcatccaaaaagtctgagcgaggagtgactgccaaaaaggagtatgtgtgccagctgtgtgagaagccgggcagcctcctgctctgtgaaggaccctgctgcggagctttccacctcgcctgccttgggctttcccggaggccagaagggaggttcacctgcagcgagtgtgcctcagggattcactcatgtttcgtgtgtaaagagagcaagacagatgttaagcgctgtgtggtaactcagtgtggaaaattttaccatgaggcttgtgtgaaaaaataccctctgactgtatttgagagccgaggtttccgctgccccctccacagctgtgtgagctgccatgcttccaacccttcaaacccaaggccgtcaaaaggtaaaatgatgcggtgtgtccgctgccccgttgcctatcacagcggggatgcttgtctggcagcaggatgctcagtgatcgcctccaacagcatcatctgcactgcccacttcactgctcggaaggggaagcgacaccacgcccacgtcaacgtgagctggtgcttcgtgtgctccaaaggggggagccttctgtgctgtgagtcctgcccagcggccttccaccctgactgcctgaacatcgagatgcctgacggcagctggttctgcaatgactgcagggctgggaagaagctgcacttccaggatatcatttgggtgaaacttgggaactacagatggtggccggcagaagtttgccatcccaaaaatgttcccccaaatattcagaaaatgaagcacgagattggagaattccctgtgtttttctttgggtctaaagattattactggacgcatcaggcgcgagtgttcccgtacatggagggggaccggggcagccgctaccagggggtcagagggatcggaagagtcttcaaaaacgcactgcaagaagctgaagctcgttttcgtgaaattaagcttcagagggaagcccgagaaacacaggagagcgagcgcaagcccccaccatacaagcacatcaaggtgaataagccttacgggaaagtccagatctacacagcggatatttcagaaatccctaagtgcaactgcaagcccacagatgagaatccttgtggctttgattcggagtgtctgaacaggatgctgatgtttgagtgccacccgcaggtgtgtcccgcgggcgagttctgccagaaccagtgcttcaccaagcgccagtacccagagaccaagatcatcaagacagatggcaaagggtggggcctggtcgccaagagggacatcagaaagggagaatttgttaacgagtacgttggggagctgatcgacgaggaggagtgcatggcgagaatcaagcacgcacacgagaacgacatcacccacttctacatgctcactatagacaaggaccgtataatagacgctggccccaaaggaaactactctcgatttatgaatcacagctgccagcccaactgtgagaccctcaagtggacagtgaatggggacactcgtgtgggcctgtttgccgtctgtgacattcctgcagggacggagctgacttttaactacaacctcgattgtctgggcaatgaaaaaacggtctgccggtgtggagcctccaattgcagtggattcctcggggatagaccaaagacctcgacgaccctttcatcagaggaaaagggcaaaaagaccaagaagaaaacgaggcggcgcagagcaaaaggggaagggaagaggcagtcagaggacgagtgcttccgctgcggtgatggcgggcagctggtgctgtgtgaccgcaagttctgcaccaaggcctaccacctgtcctgcctgggccttggcaagcggcccttcgggaagtgggaatgtccttggcatcattgtgacgtgtgtggcaaaccttcgacttcattttgccacctctgccccaattcgttctgtaaggagcaccaggacgggacagccttcagctgcaccccggacgggcggtcctactgctgtgagcatgacttaggggcggcatcggtcagaagcaccaagactgagaagccccccccagagccagggaagccgaaggggaagaggcggcggcggaggggctggcggagagtcacagagggcaaatag

SEQ ID NO: 2336 - DNA, 397 bp, Homo sapiens
ttttttttttttttttaaataatagagagacacaatcactgacaaaacggccagaacaagctcttacaaggccatggaggcagcctcctcgctcaagagccaggcaggtaatgtggtcagcgccctttccttcttggcttctgggtgcccaggctgggctgggtgggtgggctgagagtgtgaaaggggaaggctggggctggtgaaggggaacagggcaggggaggaatccacaattaagctaggagtgaaaaagaaggaaaggaggttctcctgtggttgaaaactaaactgttttaatgtgtatgttattttgaagggtttggctaaattttattgaagttactttttacttggctctattatttgcaatttaaaattttactagaaaagtgat

SEQ ID NO: 2337 - DNA, 2350 bp, Homo sapiens
  SIMILAR (704)..(2347): 961254mologous to Homo sapiens myosin-IE,accession number X98411,Smith-Waterman Score=2825.
caggagaagctgaccagccgcaagatggacagccgctggggcgggcgcagcgagtccatcaatgtgaccctcaacgtggagcaggcagcctacacccgtgatgccctggccaaggggctctatgcccgcctcttcgacttcctcgtggaggccatcaaccgtgctatgcagaaaccccaggaagagtacagcatcggtgtgctggacatttacggcttcgagatcttccagaaaaatggcttcgagcagttttgcatcaacttcgtcaatgagaagctgcagcaaatctttatcgaacttaccctgaaggccgagcaggaggagtatgtgcaggaaggcatccgctggactccaatccagtacttcaacaacaaggtcgtctgtgacctcatcgaaaacaagctgagccccccaggcatcatgagcgtcttggacgacgtgtgcgccaccatgcacgccacgggcgggggagcagaccagacactgctgcagaagctgcaggcggctgtggggacccacgagcatttcaacagctggagcgccggcttcgtcatccaccactacgctggcaaggtctcctacgacgtcagcggcttctgcgagaggaaccgagacgttctcttctccgacctcatagagctgatgcagtccagtgaccaggccttcctccggatgctcttccccgagaagctggatggagacaagaaggggcgccccagcaccgccggctccaagattatgaaacttgccaactgacctggtggccacactgatgaggtgcacaccccactacatccgctgcattaaacccaacgagaccaagaggccccgagactgggaggagaacagagtcaagcaccaggtggaatacctgggcctgaaggagaacatcagggtgcgcagagccggcttcgcctaccgccgccagttcgccaaattcctgcagaggtatgccattctgacccccgagacgtggccgcggtggcgtggggacgaacgccatggcgtccagcacctgcttcgggcggtcaacatggagcccgaccagtaccagatggggagcaccaaggtctttgtcaagaacccagagtcgcttttcctcctggaggaggtgcgagagcgaaagttcgatggctttgcccgaaccatccagaaggcctggcggcgccacgtggctgtccggaagtacgaggagatgcgggaggaagcttccaacatcctgctgaacaagaaggagcggaggcgcaacagcatcaatcggaacttcgtcggggactacctggggctggaggagcggcccgagctgcgtcagttcctgggcaagaaggagcgggtggacttcgccgattcggtcaccaagtacgaccgccgcttcaagcccatcaagcgggacttgatcctgacgcccaagtgtgtgtatgtgattgggcgagagaagatgaagaagggacctgagaaaggtccagtgtgtgaaatcttgaagaagaaattggacatccaggctctgcggggggtctccctcagcacgcgacaggacgacttcttcatcctccaagaggatgccgccgacagcttcctggagagcgtcttcaagaccgagtttgtcagccttctgtgcaagcgcttcgaggaggcgacgcggaggcccctgcccctcaccttcagcgacacactacagtttcgggtgaagaaggagggctggggcggtggcggcacccgcagcgtcaccttctcccgcggcttcggcgacttggcagtgctcaaggttggcggtcggaccctcacggtcagcgtgggcgatgggctgcccaagaactccaagcctaccggaaagggattggccaagggtaaacctcggaggtcgtcccaagcccctacccgggcggcccctggcgccccccaaggcatggatcgaaatggggcccccctctgcccacaggggggggccccctgccccctggagaaattcatttggcccagggggcacccacaggcctccccggccctccgtccacatccctgggatgccagcagacgaccccgggcacgtccgccctcagagcacaacacagaattcctcaacgtgcctgaccaggggatggccggcatgcagaggaagcgcagcgtggggcaacggccagtgcctgtgggccgacccaagccccagcctcggacacatggtcccaggtgccgggccctataccagtacgtgggccaagatgtggacgagctgagcttcaacgtgaacgaggtcattgagatcctcatggaagatccctcgggctggtggaagggccggcttcacggccaggagggccttttcccaggaaactacgtggagaagatctga

SEQ ID NO: 2338 - DNA, 4498 bp, Homo sapiens
  SIMILAR (1888)..(2673): 961254mologous to Homo sapiens TRX5 protein,accession number AJ007042,Smith-Waterman Score=1325.
atggaaggtaatgtaaatgcacacagggcgtccggggcccagattcgcacttgccgggcgcccccgggggccactggctgcacggcgctctttaaggccaacagccctgagttcacgggactgaaatcggcacagagaggccgaggacctgtggtcggggctccgcgcaagcggttctccggtctccgaggacaccgagaggcggagaggaggaccctgggttgggggtcccaggccccaccccctgctgcccaggcacacacccccgcggcaggtgactccaccctgctcctgcgctctgctgtgccgggcacctgcctgctctacgcccctcatccccaggatttcccacccgcaggctttctgcgggagcagtggtggccccggcttctcacccttcaggttttcttgcatctgcgcaccggtggaagagtaggcccagtggactgggtgctgctgggaggtgggaggctgctgggagggcaccggatgccggggccttgcaacctggcagaggctgtgctgctcagggaagcaaggtggccctggggtgaggcggggggctcagaggaaggggagccctcaggaggaagtgttgggggcaactgccagagagcccggccactgcccagtgcccatccggaagctcagcagggagtgggcttggaagtgggcaggggcatggtggcgccggcagcatcctattttgcagatgaagggcgccctaatggagatcatccagctcgccagcctcgactcggacccctgggtgctcatggtcgccgacatcttaagtcctttccggacacaggctcgcttaacctggagctggaggagcagaatcccaacgttcaggatattttgggagaacttagagaaaaggtgggtgagtgtgaagcgtctgccatgctgccactggagtgccagtacttgaacaaaaacgccctgacgaccctcgcgggacccctcactcccccggtgaagcattttcagttaaagcggaaacccaagagcgccacgctgcgggcggagctgctgcagaagtggccctgcagaagtggtgtgcatgccaacgtgcacatcagcaccgcggctcagcgcgtcatgacaaagcatctgcagagggcagatgagcacccccacttctgtgttgaagagtggcactctgggttgattagtgcattttattattgtgaaaagcatcttgcagagaaccacattctggaccgtataatagacgctggccccaaaggaaactactctcgatttatgaatcacagctgccagcccaactgtgagaccctcaagtggacagtgaatggggacactcgtgtgggcctgtttgccgtctgtgacattcctgcagggacggagctgacttttaactacaacctcgattgtctgggcaatgaaaaaacggtctgccggtgtggagcctccaattgcagtggattcctcggggatagaccaaagacctcgacgaccctttcatcagaggaaaagggcaaaaagaccaagaagaaaacgaggcggcgcagagcaaaaggggaagggaagaggcagtcagaggacgagtgcttccgctgcggtgatggcgggcagctggtgctgtgtgaccgcaagttctgcaccaaggcctaccacctgtcctgcctgggccttggcaagcggccttcgcctgaccacattccccttaaaaatggtttcgtggccagctgtctgcttttctgtggagactgcgggttgcagacaccagcagccccctattgctgcacgtcaggtgtcctccacctcagtactgtggacatctcgggccgcatagccctgttgcgcgggcatcctgtgcgttgcaggagatgcagcagcatccatgaccgcaacccatcagagagtgttgtaaagtgcataaagatgaagcaggcaccagaaatcctcggcagtgccaacgggaagactccgagctgcgaggtgaaccgcgagtgttctgtgttcctcagcaaagcccagctctccagtagcctgcaggagggggtcatgcagaagtttaacggccacgacgccctgccctttattccagccgacaagctgaaagatcttacttcccgggtgtttaatggagaacccggcgcacacgatgccaaactgcgttttgagtcccaggaaatgaaagggattgggacaccccctaacactacccctatcaaaaatggctctccagaaattaagctgaaaatcaccaaaacatacatgaatgggaagcctctctttgaatcttccatttgtggtgacagtgctgctgatgtgtctcagtcagaagaaaatggacaaaaaccagaaaacaaggcgagaaggaacaggaagaggagcataaaatatgactccttgctggagcagggccttgtcgaagcagctcttgtgtctaagatctcaagtccttcagataaaaagattccagctaagaaagagtcttgtccaaacactggaagagacaaagaccacctgttgaaatacaacgttggtgatttggtgtggtccaaagtgtcgggttacccttggtggccttgcatggtttctgcagatccactccttcacagctataccaaacttaaaggtcagaaaaagagtgcacgccagtatcacgtactgtttctttgtttacgccccagaaagagcttggatatttgagaagagcctcgtagcttttgaaggagaaggacagtttgaaaaattatgccaggaaagtgccaagcaggcacccacgaaagctgagaaaattaagctattgaaaccaatttcagggaaattgagggcccagtgggaaatgggcattgttcaagcagaagaagctgcaagcatgtcagtggaggagcggaaagccaagttcacctttctctatgtgggggaccagcttcatctcaaccctcaagtagccaaggaggctggcattgctgcagagtctttgggagaaatggcagaatcctcatgagtcagtgaagaagctgctgaaaaccccaagtctgtgagagaagagtgcattcccatgaagagaaggcggagggccaaactgtgtagctctgcagagaccctggagagtcaccccgacatagggaagagtactcctcaaaagacggcagaggctgaccccagaagaggagtagggtctcctcctgggaggaagaagaccacagtctccatgccacgaagcaggaagggagatgcagcatcccagtttttggtcttctgtcaaaaacacagggatgagagtggaggcagagacagtgccttcacttgccgaagtccacagaactacccagtagaggagccagcatcagagctggttggtgccgagccagtcagcagactttccaaagggctggtggtagctgagcacccagatgcttcaggtgaggagattgaagagctgctcaggtcacagtggagtctgctgagtgagaagcagagagcacgctacaacaccaagtttgccctggtggcccctgtccaggctgaagaagactctgccccactcaaaggcatcccgaagcaggcgcccttcagaagccccacggcgcccagcgtcttcagccccacagggaaccggacccccatcccgccttccaggacgctgctgcggaaggaacgaggtgtgaaggcagggctgtgcttgtcttggcagctgctggacatctctgagctggatatggttggcgctggccgagaggcgaagcggagaaggaagactctcgatgcggaggtggtggagaagccggccaaggaggaaacggtggtggagaacgccaccccggactacgcagccggcctggtgtccacgcagaaacttgggtccctgaacaatgagcctgcgctgccctccacgagctaccttccctccacgcccagcgtggttcccgcctcctcctacatccccagctccgagacgcccccagccccatcttcccgggaagccagccgcccaccagaggagcccagcgccccgagccccacgttgccagcgcagttcaagcagcgggcgcccatgtacaacagcggcctgagccctgccacacccacgcctgcggcgcccacctcgcctctgacacccaccacacctccggctgtcgcccctaccactcagacacccccggttgccatggtggccccgcagacccaggcccctgctcagcagcagcctaagaagaacctgtccctcacgagagagcagatgttcgctgcccaggagatgttcaagacggccaacaaagtcacgcggcccgagaaggccctcatcctgggcttcatggccggctcccgagagaacccgtgccaggagcagggggacgtgatccagatcaagctgagcgagcacacggaggacctgcccaaggcggacggccagggtagcacaaccatgctggtggacacagtgtttgagatgaactatgccacgggccagtggacgcgcttcaagaagtacaagcccatgaccaatgtgtcctag

SEQ ID NO: 2339 - DNA, 6501 bp, Homo sapiens
  SIMILAR (1017)..(2270): 981254mologous to Homo sapiens TRX5 protein,accession number AJ007042,Smith-Waterman Score=2117.
tcactggcgatggttctgtaggctgtacaggacgtataatgacttctgctctggggaggtctcagggaacttacaatcatggtggaagatgagggagaacagatgtcgatctgggttcttgacaaagaccttggtgctccccatctggtactggtcggctccatgttgaccgcccgaagcaggtgctggacgccctggcgttcgtcccacgccaccgcggccacgtctgagggcgagggctggggtgtgggagtgctcatagcagacaggcctggctgggcgtctgatgaaggggatggcgagggcgggggtggagggctcctcacctctgcggaatttggcgaactggcggcggtaggcgaagccggctctgcgcaccctatgttctccttcaggcccaggtattccacctggtgcttgactcatattggccagggtggtcttgaactcctgaccttgtgatccgctcgcctcagcctcccaaagtgctgggattacaggcatgagccaccgtgcctgtcctagaaccactggtaactcttaactgagacaagatttcgccatgttgcccaggctggtctcgaacttctgagctcaagcgatctacctgcctcgtcctcccaaagtgttggaattgcaggtgtgagccactgcacccggcccttgcctcatgtttgaatgataatttacctgggcataaaattctggacacttgtggtggcacgagctgtctgcttttctgtggagactgcgggttgcagacaccagcagccccctattgctgcacgtcaggtgtcctccacctcagtactgtggacatctcgggccgcatagccctgttgcgcgggcatcctgtgcgttgcaggagatgcagcagcatccatgaccgcaacccatcagagtgttctaagaacggaagcatctgggctggatggaatttagcatcaagcagagtcccctttctgttcagagtgttgtaaagtgcataaagatgaagcaggcaccagaaatccttcggcagtgccaacgggaagactccgagctgcgaggtgaaccgcgagtgttctgtgttcctcagcaaagcccagctctccagtagcctgcaggagggggtcatgcagaagtttaacggccacgacgccctgccctttattccagccgacaagctgaaagatcttacttcccgggtgtttaatggagaacccggcgcacacgatgccaaactgcgttttgagtcccaggaaatgaaagggattgggacaccccctaacactacccctatcaaaaatggctctccagaaattaagctgaaaatcaccaaaacatacatgaatgggaagcctctctttgaatcttccatttgtggtgacagtgctgctgatgtgtctcagtcagaagaaaatggacaaaaaccagaaaacaaggcgagaaggaacaggaagaggagcataaaatatgactccttgctggagcagggccttgtcgaagcagctcttgtgtctaagatctcaagtccttcagataaaaagattccagctaagaaagagtcttgtccaaacactggaagagacaaagaccacctgttgaaatacaacgttggtgatttggtgtggtccaaagtgtcgggttacccttggtggccttgcatggtttctgcagatccactccttcacagctataccaaacttaaaggtcagaaaaagagtgcacgccagtatcacgtacagttctttggtgacgccccagaaagagcttggatatttgagaagagcctcgtagcttttgaaggagaaggacagtttgaaaaattatgccaggaaagtgccaagcaggcacccacgaaagctgagaaaattaagctattgaaaccaatttcagggaaattgagggcccagtgggaaatgggcattgttcaagcagaagaagctgcaagcatgtcagtggaggagcggaaagccaagttcacctttctctatgtgggggaccagcttcatctcaaccctcaagtagccaaggaggctggcattgctgcagagtctttgggagaaatggcagaatcctcaggagtcagtgaagaagctgctgaaaaccccaagtctgtgagagaagagtgcattcccatgaagagaaggcggagggccaaactgtgtagctctgcagagaccctggagagtcaccccgacatagggaagagtactcctcaaaagacggcagaggctgacccccaagaagaggagtagggtctcctccctgggaggaagaagaccacaagtctccatgccacgaagcaggaagggagatgcagcatcccagtttttggtcttctgtcaaaaacacagggatgaggtggtagctgagcacccagatgcttcaggtgaggagattgaagagctgctcaggtcacagtggagtctgctgagtgagaagcagagagcacgctacaacaccaagtttgccctggtggcccctgtccaggctgaagaagactctggtaatgtaaatgggaaaaaaagaaaccacacaaagaggatacaggacccttccgaaaatgctggaccttgaggacacacccaggaaaggactcaggacggacaagcacagtcttcggaagagagacacaatcactgacaaaacggccagaacaagctcttacaaggccatggaggcagcctcctcgctcaagagccaggcagcaacgaaaaatctgtctgatgcatgtaaaccactgaagaagcgaaatcgggcttccacggcagcatcttcagctcttgggtttagcaaaagttcatctccttctgcatccttaactgagaatgaggtaaaataataataataacgataaccatggcattggtatgaaggccatttagctgcccacgctgcagtgtgagtaatgctcagacttcataagcgcagcattggtgctcactgccagtgcagatgttttagggcctcttggctaactcagattcatgaaatggacaaacagtgcactatgttagtttatttgagcactttttatacacacgcacacagtgtctgtgtacatgtacagatatacttcagtcttgatgcagtttcataattcttaaaatctgtctgaagaatgttgtgttctgtgtagccctcacactgtaagagttcacatggaagtaagtctgcgttggttctgaaagggcacagtgtcagttgagctgacatatactgggtggggtggaaggcgactcacacaccacacctgattcctgttgcttccagacctaggctcatggaggaagccaaagatttctttgttctcatgcatttcatggctttggtcctttaaattctggcacatttttagttacttgagtgttgaggtgagtcagaactaccattgtaatatgactcctgtgttctggacttgcagagtacatgatagcaaaataaagccatttggggctgctgcctgccatcattgtaacatgacacttagactttattatcaaacctaaattttttgccgttgccaaaaacaacaaatagccacagaacgtaggtgtgacacttttttgttcggaggtagttttggtttcctgatttttagggattaccttcatagagctttggagttttaatttcttgttatttggttctccgtgatgctgtttttctcattgtagacatgggtcctgtttttgtcatgtttatgaggagatgataactgggggcccttttggaacagggtaatgaggcaagggttggacaggccccttactcttgctgagtcagaaggcggcacttctggccaggtctctgccatggtccccaggaaggatggggtgtgcctcagttgtttccactcattagaggagtgtaggccttccagtgcaggaaggtcagggacctaggcaacctgggcggggctcatagagctctgcggcttgccactctgaatcctcagcgaccactcctccgagtgggattttctgcagggactcaaaccaactcagtggtggtcgagacctgttcacggatggtgggactggggctgctttacagtttgatacgtgtagataattaagcattttgtgatgtttggacacactggagaaaaggcagtaagaattatttactgaaacatctaggagcttactgaaatatgaaaaggcaaattttatacaaattatttttcctttttcctttctttcttgtccaagttcaggttaaaatcttagaaaattaaatgaaaggtcatttacagttccaaagaagaatattaaacatttttcacttaagttgagatttttgctttaaagagcttttaatgagtttttctgttatcataattttggtccggttattcacttgagttgttgcttatactgttgtcaggtacagtagagagaacatggagcctgctgagatcttctctgttattcctgatcctaagtcatgtatatcgaaggctttgatttagagtaatgcatgaggccagtgtagcggggtcgaggcctgcccatgagtcaggggagctcagtctccctggcctaggcagttgtcctgaccttgagaagacatagatgaagcattttatcatcattagacttaaattttaattcttcagaatgtcagaagttgataggttgttaaatacatttatataatacattaaatatgtgaaattaatacaccttcctacattttgaaggtgatgcatagatcccatagtgtgcatcatgttccttatatgaaaacgtttaaattactgggtcttttccattaaactacttttgtatggcttagataaatcttccattagtgttcatttttatagaattatgctgttaaaactactttaggtgaacaaataaacttgtctattatatattaacgcgactgaactacagtaaatgtttgtgatgtttccaatgctgaatgcctgttagcatatgaggcaaagtgtagtgttataaaaaacagcctgttgactgctgggcccgattctgatatgagttaggtgaccatgagaattgctgtttgaggtccacactgacacacacccattgggtcacaccccctttgcatgtttgtatttcctccctttcatcacatttgtttgaaataaggtacttttatagggttggtatttcagaacactttaggtcatgttgtagtttaaattcttcttgaaaaaggtatatgtgataaataaaaatttttattggaataattattacatggtactacatcaccctgaggaagagaataaattaaaattacacacttgcatgacaaaggcctgtgaaggaattaatgtgatttaagtgttttgtaacttcattttttattcctttagtagagcaaattcttatttttttcgccttcactggtaacagcttttgtgggagcccacaccagtcaagttggatttgaacccagctgctctgtactgcacttagaatgatgtaatattccaggatgctgctgcaggtggcgtatcatcgtacacactcagtgacatttctatcacaatcattttatggaagatgtgtgataatctgtttttactggtattaataaacacatacaatgaagaaaacagataacaaattttaagaccaaggtaagataactaatcaaggccatttaatccgtcacattcatctcataatagaaacacgttcatattccagtggtcaatgtagatttcaagttgaaaggcagtccctttagttgggggctgtccagagctgcagcagggctttgcacggaaggggtggccctgttagagttgcttctcctctagtttgtaacttactggacttttgtggaaaatatcagcgtcgctaccctcagaaacaaactaacagcacacgttagggagggagtcctcatcagctgttctcattgccagtgagatatattcagtattgtagatactaccactaaatttccaacataagaggcaggaaggagtttttggattctatccctctttttactaaacaagttttattaatgacactaagatacagtaaatttttagaaaaaaataccatttacagtattattgtgaaccatttaacccttttgatccaaggccccggaccaaggggatactgtaatcaggttatgtacaccaacctctgcatcagttgcttctatagagcatcagccctcatgtttcattgtcttaatgtcggggagcagcctggtgtcctgccccaggtgtccgcatttttgcatggtaaggaaaaggcttacttgccctttcagctcataaaagcagaaggtgtgctattcacagtaccatgcgagtaggcccacagttaatttcccggcagattcttttggctgtttttatctttaatgaacgtttctgactaatattttgttgtaaaccattaagtaatgtaacgcatgtaagatgcttagggtgcctggccaggactccgtggtttcctgttgtgacagtaataatggttataataataaaaatgataaaattgccaaaaaaaa

SEQ ID NO: 2340 - DNA, 818 bp, Homo sapiens
  SIMILAR (342)..(542): 651254mologous to Homo sapiens FRG1,accession number AF146191,Smith-Waterman Score=220.
cttcgcctccacttctgttcctccccgccctggtgctgctccaggtcacatactcttcctgagccggcttcagcctctccgcgcagaagtctcccggagccatggcctagtattcttatgtgaagtctaccaagcttgtgctcaagggaaccgagatttgcctgagggtgactgtacatgcaaatattgagcatttcctcctggcctccgtgataaacagaagttttgatattgttaggcgagatggaaagaaagtatcaaggagtgagctgaagccactgcccttgagaaccctctcgaggagtctggcctcatgaagatgccagaataaatggcagtaagaagaaaaagagcaaagataagaagagaaaaagagaagaagatgaagaaacccagtttgatatgttggaatctggtgaacagtaacaaactttgatgaaatttcaggaaccatagccattgaaatggatgagggaacctatatacatgcactcgacaatggtctttttaccctgggagctccacacaaagaagaatcgccctgaaacctggctatggaaaatatcttagtataaattcagatgaacttgttgttggcgttcagatgcaattggaccaagagaacaatgggaaccagtctttcaaaatggtgcctgtgcagcagtattcactgtgataggaagtgagaagcagtctgagtgttcattgctgagggaatcaagggcaaaatatcatggatgcactcatggacaaataagcagcagtttgaagcaacaccctagatggatgtacagccatcaagaggatcttaaagtgtg

SEQ ID NO: 2341 - DNA, 421 bp, Homo sapiens
  SIMILAR (18)..(110): 1001254mologous to Mus musculus putative,accession number AK009569,Smith-Waterman Score=153.
tttcgtgctcgggagacatggcgggcgttaaagctctcgtggcattatccttcagtggggctattggactgacttttcttatgctgggatgtgccttagaggattatgggtaagttatcatttcaaaaagaactattcctctttctgtgtctttgtcactattagtatgggtgttagagagttcggtcaatttagcaccaagttctaaccagtgagttagtggagcccagtttatgaacacagtccctttgtgggtcaggtgtacttttgcagagggctctgttaaaaattgatgtattcattccataagcatttgtttagcacctactctggactagctggggacacacaaatgaagagagagtcctggtcttcaagaggaagtaaagccctagttgtgagtgaaagacaggcaaacggc

SEQ ID NO: 2342 - DNA, 654 bp, Homo sapiens
  SIMILAR (328)..(471): 801254mologous to Homo sapiens leptin receptor gene-related protein,accession number Y12670,Smith-Waterman Score=191.
attttccatgaaagaagttgatgtgtgcagaactttcagtacccaatattgtaattgcactatttataatcttaccacttgagttttacttaaggcaatcattgtcaattaaaaacaagtagagaaatatgtctaattgggaacatgttaaggatgataccagacttaattaacaagcatcacagaagtaattagactcattactgaacagttcattgtctcctgttacattattaagccttttagcagctttgtgtaacatttcattggatgtttctaatgcagaaaataatagggattgcaaagagtacaatatgaaggaagtaaggatttaatccttcttttcttgtctttcagatcaaagggggagcctgcgccgttgtgttggcaggcaatgcagtcattttccttacaattcaagggtttttccttatatttggaagaggagatgattttagctgggagcagtggtagcactttattctgattacagtgcattgaatttcttagaactcatactatctgtatacatgtgcacatgcggcattttactatgaaatttaatatgctgggttttttaatacctttatatatcatgttcactttaagaaagacttcataagtaggagatgagttttattctcagcaaataga

SEQ ID NO: 2343 - DNA, 2977 bp, Homo sapiens
  SIMILAR (194)..(2974): 991254mologous to Homo sapiens Obesity receptor A protein,accession number AAW34497,Smith-Waterman Score=4979.
ggcacgagccggtctggcttgggcaggctgcccgggccgtggcaggaagccggaagcagccgcggccccagttcgggagacatggcgggcgttaaagctctcgtggcattatccttcagtggggctattggactgacttttcttatgctgggatgtgccttagaggattatgggtgtacttctctgaagtaagatgatttgtcaaaaattctgtgtggttttgttacattgggaatttatttatgtgataactgcgtttaacttgtcatatccaattactccttggagatttaagttgtcttgcatgccaccaaattcaacctatgactacttccttttgcctgctggactctcaaagaatacttcaaattcgaatggacattatgagacagctgttgaacctaagtttaattcaagtggtactcacttttctaacttatccaaaacaactttccactgttgctttcggagtgagcaagatagaaactgctccttatgtgcagacaacattgaaggaaagacatttgtttcaacagtaaattctttagtttttcaacaaatagatgcaaactggaacatacagtgctggctaaaaggagacttaaaattattcatctgttatgtggagtcattatttaagaatctattcaggaattataactataaggtccatcttttatatgttctgcctgaagtgttagaagattcacctctggttccccaaaaaggcagttttcagatggttcactgcaattgcagtgttcatgaatgttgtgaatgtcttgtgcctgtgccaacagccaaactcaacgacactctccttatgtgtttgaaaatcacatctggtggagtaattttccagtcacctctaatgtcagttcagcccataaatatggtgaagcctgatccaccattaggtttgcatatggaaatcacagatgatggtaatttaaagatttcttggtccagcccaccattggtaccatttccacttcaatatcaagtgaaatattcagagaattctacaacagttatcagagaagctgacaagattgtctcagctacatccctgctagtagacagtatacttcctgggtcttcgtatgaggttcaggtgaggggcaagagactggatggcccaggaatctggagtgactggagtactcctcgtgtctttaccacacaagatgtcatatactttccacctaaaattctgacaagtgttgggtctaatgtttcttttcactgcatctataagaaggaaaacaagattgttccctcaaaagagattgtttggtggatgaatttagctgagaaaattcctcaaagccagtatgatgttgtgagtgatcatgttagcaaagttacttttttcaatctgaatgaaaccaaacctcgaggaaagtttacctatgatgcagtgtactgctgcaatgaacatgaatgccatcatcgctatgctgaattatatgtgattgatgtcaatatcaatatctcatgtgaaactgatgggtacttaactaaaatgacttgcagatggtcaaccagtacaatccagtcacttgcggaaagcactttgcaattgaggtatcataggagcagcctttactgttctgatattccatctattcatcccatatctgagcccaaagattgctatttgcagagtgatggtttttatgaatgcattttccagccaatcttcctattatctggctacacaatgtggattaggatcaatcactctctaggttcacttgactctccaccaacatgtgtccttcctgattctgtggtgaagccactgcctccatccagtgtgaaagcagaaattactataaacattggattattgaaaatatcttgggaaaagccagtctttccagagaataaccttcaattccagattcgctatggtttaagtggaaaagaagtacaatggaagatgtatgaggtttatgatgcaaaatcaaaatctgtcagtctcccagttccagacttgtgtgcagtctatgctgttcaggtgcgctgtaagaggctagatggactgggatattggagtaattggagcaatccagcctacacagttgtcatggatataaaagttcctatgagaggacctgaattttggagaataattaatggagatactatgaaaaaggagaaaaatgtcactttactttggaagcccctgatgaaaaatgactcattgtgcagtgttcagagatatgtgataaaccatcatacttcctgcaatggaacatggtcagaagatgtgggaaatcacacgaaattcactttcctgtggacagagcaagcacatactgttacggttctggccatcaattcaattggtgcttctgttgcaaattttaatttaaccttttcatggcctatgagcaaagtaaatatcgtgcagtcactcagtgcttatcctttaaacagcagttgtgtgattgtttcctggatactatcacccagtgattacaagctaatgtattttattattgagtggaaaaatcttaatgaagatggtgaaataaaatggcttagaatctcttcatctgttaagaagtattatatccatgatcattttatccccattgagaagtaccagttcagtctttacccaatatttatggaaggagtgggaaaaccaaagataattaatagtttcactcaagatgatattgaaaaacaccagagtgatgcaggtttatatgtaattgtgccagtaattatttcctcttccatcttattgcttggaacattattaatatcacaccaaagaatgaaaaagctattttgggaagatgttccgaaccccaagaattgttcctgggcacaaggacttaattttcagaagagaacggacattctttgaagtctaatcatgatcactacagatgaacccaatgtgccaacttcccaacagtctatagagtattagaagatttttacattttgaagaagggcc

SEQ ID NO: 2344 - DNA, 1985 bp, Homo sapiens
  SIMILAR (261)..(467): 521254mologous to Mus musculus putative,accession number AK003329,Smith-Waterman Score=150.
  misc_feature (1)...(1985): n = a,t,c or g
gtctggcttgggcaggctgcccgggccgtggcaggaagccggaagcagccgcggccccagttcgggagacatggcgggcgttaaagctctcgtggcattatccttcagtggggctattggactgacttttctnatatgctgggatgtgccttagaggattatggcgtttattggcccttattcgtcctgatttttccacgccatctcccccatcccccatttcattgccaaaagagtcacctatgactcagatgcaaccaagtagtgcctgtcgggaactggcatatttcttcactactggaattgttgtttcctgcctttggatttccccggtaatccttgcccgtgtggctttgatcaaaatggggagcctgcggcctttgtgttgggcaggcaatgcagtcattttcccttacaattcaaggggtttttccctatatttgggaagaggagatgattttagctggggagcagtggtagcactttattctgattacagtgcattgaatttcttaggaactcatactatctgtatacatgtgcacatgtcggcattttactatgaaattttaataatgctgggggtttttaatacctttatatatcatgttcactttaagaaaagacttcataagtaggagatgagttttattctcagccaaatagacctgtcaaatttaggattatgttactcaaattatgttacttgtttgggctgttccatgtagtccacggtgctctccagaaaatatattaacgcagtcttgtaaggcagctgcccacccttatgccagtgccatcggaaaccttttggcttgggggatggtgcttgggaaaggcagataaaccgctaaagcaggccttctcatgaccccagggaaggcccagggtggatcccgtctttgtgttggtagtcccatgctattaaaagtgtggccccacagaccaagagcctcaacatttccctagagccttattagaaatgcagaatctgaagcccccactctggaccccaggacattttgatgagatccaaaggagttgtatgcacatggaaagtttgagaagcatcatcatagaggaagtaaacatcacacccaacttccttatctttcccagtgggctaaaaccacttaaccctctctgggtgttaccctgctcatttgtttaaaaaaaaaaaaaaaaagtctcacctgctttcatgctgaggacaagttcagatgttcaagcctataatatttatgttgttctctcaaatttatgaaaagtgttctcagaattggggagacagtcaaagggtcctaacccctcagttaggaggaataagtgtgatttttttttaaagatcacttgcacagcatgctaaatataggaataattgaatgtatatttcaatattgctaagagagtaaatttctaatgttctcataaaaaagttaaatatttgagatcatatgttaattagtgtaatcattccaccttatattcaaaaatcataaaaccgtattgtaccctataaaaatatacaataatttgtcaatatataatcaaaataaaaaacaaaacatactctctcccccaaaaaaacatctcagtggggaacagatgtatcttttcatctgaaagacaatgctgggggaagagctccactgagatgcgggcagggaggctgggctccgagccagcccctgcgttagcaggagggggagaacagataggtaactcttttacatttcctttatgatctgggcacttctccccagctccttccctctgccccccacccctactcctcaacaagttctggtttggcctgacttctctacggctctgggcttctttcccggaagagaatataggaagcaatgtaaagcacggcagtggggtggaactgcttaattttcacttacatgttggatggtacttgtcttccgtcctgtaggtcttttctatataacttttatgccacccttaaatgaaatcat

SEQ ID NO: 2345 - DNA, 652 bp, Homo sapiens
  SIMILAR (49)..(345): 781254mologous to Mus musculus putative,accession number AK009023,Smith-Waterman Score=408.
cagcccgagcgatgggcatctctcgggacaacttgcacaagcgccgcaaaaccgggggcaagagaaagccctaccacaagaagcggaagtatgagttggggcgcccagctgccaacacccaagattggcccccgccgcatccacacagtccgtgtgcggggaggtaacaagaaataccgtgccctgaggttggacgtggggaatttctcctggggctcagagtgttgtactcgtaaaacaaggatcatcgatattgtctacaatgcatctaataacgagctggttcgtaccaagaccctggtgaagaattgcatcgtgctcatcgacagcacaccgtaccgacagtgactcctgaggaagaagagattttaaacaaaaaacgatctaaaaaaattcagaagaaatatgatgaaaggaaaaagaatgccaaaatcagcagtctcctggaggagcagttccagcagggcaagcttcttgcgtgcatcgcttcaaggccgggacagtgtggccgagcagatggctatgtgctagaaggcaaagagttggagttcctatctaagaaaaatcaaggcccgcaaaggcaaataaatccttgttttgtcttcacccatgtaataaaggtgtttattgtattgttcccaaaaaaaaaaaa

SEQ ID NO: 2346 - DNA, 4871 bp, Homo sapiens
  SIMILAR (852)..(3503): 1001254mologous to Homo sapiens germinal center kinase related protein kinase,accession number AF000145,Smith-Waterman Score=4728.
gctctttccagccagcgccgagcagatgggcatctctcgggacaactgggcacaagcccccgcaaaaccggggggccaagagaaagcccctaccagcaagaagcgaaaagtatgagtttgggccgcccagctgcccaacaccaagattttggccccccgccgcatccaacacagtcccgtgtgccggggaggttaacaagtaaataccgtgcccctaaggtttgaccgtggggaatttctcttggggggcaaagagtgttgtactcgtaaaacaagggatcatcgatgttgtctacaatgccatctaataaccgagctgggttcggtacccaagacccctggttgaaagaatttgcatccgtgctcatcgacgagcaacacccgtacccgacagtgggtacgaagtcccacttatgcgcttgcccctgggcccgcaaagaaagggagccaagcttgactccttgaggaaagaagagatttttaaaccaaaaaccgatctaaaataaattcagaagaaatatgattgaaaaggaaaaagaattgccaaaattcagccagtcttcctgggaggagcagtttccagcagggcaaagcttctttgcgttgcatcgctttcaaagcccgggacagtgttggccgagcaagatggctatatgactagagggcacagagttaggagttactatcttaggaaaatcaaggcgcgacagagcaagataaatacatagttatgtctatcacccatgtaataaaggtgtttattgttttgttcccaccaaaaaaaaaaaaaaaaaaaaaaaaaaaaaaaaaaaaaaaaaaaaaaaaaaaaaaaaaaaaaaaaaaaaaaaaccatggcgcaggaggacttcgagctgattcagcgcatcggcagcggcacctacggcgacgtctacaaggcacggaatgttaacactggtgaattagcagcaattaaagtaataaaattggaaccaggagaagactttgcagttgtgcagcaagaaattattatgatgaaagactgtaaacacccaaatattgttgcttattttggaagctatctcaggcgagataagctttggatttgcatggagttttgtggaggtggttctttacaggatatttatcacgtaactggacctctgtcagaactgcaaattgcatatgttagcagagaaacactgcagggattatattatcttcacagtaaaggaaaaatgcacagagatataaagggagctaacattctattaacggataatggtcatgtgaaattggctgattttggagtatctgcacagataacagctacaattgccaaacggaagtctttcattggcacaccatattggatggctccagaagttgcagctgttgagaggaaggggggttacaatcaactctgtgatctctgggcagtgggaatcactgccatagaacttgcagagcttcagcctcctatgtttgacttacacccaatgagagcattatttctaatgacaaaaagcaattttcagcctcctaaactaaaggataaaatgaaatggtcaaatagttttcatcactttgtgaaaatggcacttaccaaaaatccgaaaaaaagacctactgctgaaaaattattacagcatccttttgtaacacaacatttgacacggtctttggcaatcgagctgttggataaagtaaataatccagatcattccacttaccatgatttcgatgatgatgatcctgagcctcttgttgctgtaccacatagaattcactcaacaagtagaaacgtgagagaagaaaaaacacgctcagagataacctttggccaagtgaaatttgatccacccttaagaaaggagacagaaccacatcatgaacttcccgacagtgatggttttttggacagttcagaagaaatatactacactgcaagatctaatctggatctgcaactggaatatggacaaggacaccaaggtggttactttttaggtgcagacaagagtcttctcaagtctgttgaagaagaattgcatcagcgaggacacgtcgcacatttagaagatgatgaaggagatgatgatgaatctaaacactcaactctgaaagcaaaaattccacctcctttgccaccaaagcctaagtctatcttcataccacaggaaatgcattctactgaggatgaaaatcaaggaacaatcaagagatgtcccatgtcagggagcccagcaaagccatcccaagttccacctagaccaccacctcccagattacccccacacaaacctgttgccttaggaaatggaatgagctccttccagttaaatggtgaacgagatggctcattatgtcaacaacagaatgaacatagaggcacaaacctttcaagaaaagaaaagaaagatgtaccaaagcctattagtaatggtcttcctccaacacctaaagtgcatatgggtgcatgtttttcaaaagtttttaatgggtgtcccttgaaaattcactgtgcatcatcatggataaacccagatacaagagatcagtacttgatatttggtgccgaagaagggatttataccctcaatcttaatgaacttcatgaaacatcaatggaacagctattccctcgaaggtgtacatggttgtatgtaatgaacaattgcttgctatcaatatctggtaaagcttctcagctttattcccataatttaccagggctttttgattatgcaagacaaatgcaaaagttacctgttgctattccagcacacaaactccctgacagaatactgccaaggaaattttctgtatcagcaaaaatccctgaaaccaaatggtgccagaagtgttgtgttgtaagaaatccttacacgggccataaatacctatgtggagcacttcagactagcattgttctattagaatgggttgaaccaatgcagaaatttatgttaattaagcacatagattttcctataccatgtccacttagaatgtttgaaatgctggtagttcctgaacaggagtaccctttagtttgtgttggtgtcagtagaggtagagacttcaaccaagtggttcgatttgagacggtcaatccaaattctacctcttcatggtttacagaatcagataccccacagacaaatgttactcatgtaacccaactggagagagataccatccttgtatgcttggactgttgtataaaaatagtaaatctccaaggaagattaaaatctagcaggaaattgtcatcagaactcacctttgatttccagattgaatcaatagtgtgcctacaagacagtgtgctagctttctggaaacatggaatgcaaggtagaagttttagatctaatgaggtaacacaagaaatttcagatagcacaagaattttcaggctgcttggatctgacagggtcgtggttttggaaagtaggccaactgataaccccacagcaaatagcaatttgtacatcctggcgggtcatgaaaacagttactgagaattgttgtgctttgacagttaactctagaaagaaagaacactaccactgcaacattaatggatgcttgaagctgtacaaaagctgcagtaacctgtcttcagttactttgtaatttattgtggcatgagataagatggggaaaattttgttttatgtggtatggatatatttagcatattgaaccacacaagtgcttaattcattgttatgtaatctttgtacatataggcagtattttttctgtgaaacttcatattgctgaagacatacactaagaatttatgtagataatgtacttttatgagatgtacaagtaagtgtcttatctgtacagatgtaaatgttgatgaaaatgcaattggggttaatattttaagaattctttagtatattcttgggtgtggctatattacaaaatgggatgctggcaatgaaacaatacatttaacactattgtatttttattatatgtaatttagtaatatgaatataaatcttgtaacttttaaaattgtaatggaggctgtaatcattttataatctttttaattttaatgcaagtacactggtgtttatatttgcacaaagtattgatatgtgatgtattaagtcacaaaagtaagctgtgacattgtctataagcatttggctccacaaatgtatttggattgttttctatgtgaagcaaaccaattataattaaccacatgttgtagtaactggtctttttatatttaagcagaatcctgtaagattgcttgtctttgcttaaaaacaatacctttgaacatttttgaatcacagaatagcggtaccatgatagaatactgcaattgtggtcagaattacagtatgcacaaagaattaattagcattattaaagagtcctcactaaacatttcatatgatcacactgaagaactgtaacattccatagagtgaagtggttcaaatttctcttggaatttttacttttgttggccttattttatgatccttttcatatttcttttgacttagagtattaatacatggccaaaataatttagttactacctcatacaaacaatataatggttactacacatcacaggaacttagttttggtttaagtcatttttgattgcttttttccaatggaatatgtatataccaggttttagcaaaatgcacacttttggctctttttggtatatgttctttatattttaatgtgagtatatacactaagaacaaactaaattgtgatttatgatcttcatttattttaatgataatggttttaaaatatgttcctgattgtacatattgtaaaataaacatgttttttaacaaaaaaaaaaaagaaaaaaaaaaaaaaaa

SEQ ID NO: 2347 - DNA, 479 bp, Homo sapiens
  SIMILAR (83)..(283): 691254mologous to Homo sapiens prostaglandin D2 synthase,accession number M98539,Smith-Waterman Score=220.
  misc_feature (1)...(479): n = a,t,c or g
nggccctgcacggaatggtngatcaacctgacttccaccttcctcaggaaaaaccagtgtgagacccgaaccatgcaggagaatggctactcatcacacgctgtggatgggactggccctgctgggggtgctgggcgacctgcaggcagcaccggagcccaggtctccgtgcagcccaacttccagcaggacaagttcctggggcgctggttcagcngcgcctcgctccaactcgagctggctccgggagaagaaggcggcgttgtccatgtgcaagtccctcggctcctacaagctaccggagtccccactgngcaagcacctactccgtgtcagtggtggagaccgactacgaccagtacgcgctgctgtacagccaagggcagcaagggcctnggaagggactttccgcatggccaacctctacaagccgaacccagacccccagggctgagttaaaggagnaattnaacgctttt

SEQ ID NO: 2348 - DNA, 1102 bp, Homo sapiens
  SIMILAR (846)..(872): 881254mologous to Homo sapiens prostaglandin D2 synthase,accession number M98539,Smith-Waterman Score=47.
  misc_feature (1)...(1102): n = a,t,c or g
gggataccgcgccggaattcccgggtcgagctggctccgggagaagaaggcggcgttgtccatgttcaagtctgttttggcccctgccacggatggtggcctcaacctgagctccaccttcctcaggaaaaaccagtgtgagacccgaaccatgctgctgcagcccgcggggtccctcggctcctacagctaccggagtccccgtgagtggggcctccaccggccccctgggcccagcctgggggcgacacttgccgggacgactctgggccagccccctgccgcggagatccatggggtgggaggtgatggctgccccaccagcgtcagaggcaaaggccaggcctgggcgtgactacccatgcacaagtgttagggacagagagacccttcctccagggggttggatcctctctggagcccaccattgtcttgtcaggccccttccctgccctctggagttttccccacataagcagccccccaaggcccctccatatgcctcctcccaattctcctccccaggacccaggggtttcctcactcccacctggggaatggctcccacggggaaacctcttcacttccggttctggcagcgacttctgcggctgcaccaggaatcctggttttctgagcctggctcccccagattctggtttggggacagggttcacaggctgtgcaggcgagagcagggcactggctggagagcagccgggtgggggagcatcccgggccagccgaggggctgagtgcccccaaagcccacaggtgcaccccttccctgaagcagaggtgaggtttggggggctgagtccccgacagggttgtctcttgggttcccagactggggcagcacctactccgtgttcagtggtggagaccgattacgaccagtaacgcgctgcttgttacagccaggggcagcaaggggccttgngaagngaatttccgcattggccaaccttttacaagccgaaacccagaacccccagggntgagtttaaaggagaatttaaccnntttttnnaangnccagggtttcacagaggattacctttttcttcttncccaaaccgtaaatncattaacggaacat

SEQ ID NO: 2349 - DNA, 792 bp, Homo sapiens
  SIMILAR (566)..(670): 801254mologous to Equus caballus prostaglandin D2 synthase,accession number AJ133469,Smith-Waterman Score=151.
ccagtgcggtggaattccctccctcgctctcccacaccactggcaccaggccccggacacccattctcctgcagcaggagaatggctacttcattcacacgctgtggatgggactggccctgctgggggtgctgggcgacctgtcagggcagcaccggaggcccaggtctccgtgtcagcccaacttccagcaggacaagttcctggggcgctggttcaagcgcggccctcgcctccaactcgagctggctccgggagaagaaggcggcgttgtccatgtgcaagtctgtggtggcccctgccacgggatggtggccttcaacctgacctccaccttccttcaggaaaaaaccagtgttgagacccgaaccatgcttgctgcagccccgcggggttccctcggcttccttacagcttaccggagttccccactgggggcaggcacctactccgtgtcagtggtggagaccgactacgaccagtacgcgctgctgtacagccagggcaagcaagggccctggcgaggacttccgcatggccaccctctacagccgaacccagaccccccagggctgagttaaaggagaaattcaccgccttctgcaaggcccagggcttcacagaggataccattgtcttcctgccccaaaccgataagtgcatgacggaacaataggactccccagggctgaagctgggatgccggccagccaggtgacccccacgctctggatgtctctgctctgttccttccccgagcccctgccccggctccccgccaaagcaaccctg

SEQ ID NO: 2350 - DNA, 1644 bp, Homo sapiens
  SIMILAR (237)..(509): 501254mologous to synthetic construct calmodulin mutant SYNCAM17,accession number AF084445,Smith-Waterman Score=159.
cttttctttgtttgtaacttatctgtaaaaggtttctccctactgtcaaaaaaatatgcatgtatagtaattaggacttcattcctccatgttttcttcccttatcttactgtcattgtcctaaaaccttattttagaaaattgatcaagtaacatgttgcatgtggcttactctggatatatgtaagcccttctgcacatctaaacttagatggaactataacaaccaagggaatttgggaactgtaaatgagatcctcttgggcagtaatcccactgaagcggagttacaggacatgattaatgaagtgatgtctgatggtaatggcacaattgacttcccctgaatttctgacaatgatggcaagaaaaatgaaaagacacagacagtgaaggaaggaaattaggaggaagcattcccgtgtgtttggattaagggtgggcaatggcttatatttagttgcttgcaggaactttcgccatgtggatggacaaaccttgggaggaggaagtttaccagattgaagaagtttgatggaaatgatccaggggaagccagatattggatgggtgatggtccaagtaaactatggaagagttttggtaccaattgattgaccagccaagttgaagaccctgttacagaatgtgttaaatttccttgtacaaaattgtttatttgccttttctttgtttgtaacttatctgtaaaaggtttctcccctactgtcaaaaaaaaaatatgcatgtatagtaatttaggacttcattcctccatgttttccttccctaatcttactgtcattgtccctaaaacccctattttaagaaaatggatcaagttaaccatgttgccatgtggccttacctctgggatatatccctaagcccctttctgcaacattctaaactttagatgggagttgggtcaaaatgaggggaaacatctggggttatgcctttttttaaagtagttttcctttagggaactgtcagcatgttgttgttgaaagtgtggagttgtaactctgcgtggacctatggacagtcgactatggacactcaacaatatgtactttaaaagttggcactattgccaaaacggtgtgtattatccagtgtactacgtacactatttcttttgtactgctggtccctgtaccaagaaacatttttctttatatgtgttaccttgctttttaaactttgtttagccacttacttaaaagatctgcttatggcacaatttgcctcaaaatccattccaagttggtatatttggttttccaataaaaaaattactttttaggcccggcctgaccaaaaaaaatttatattaataaaagggggggcctttttaaagattccttgggggggccaaattttacgggggatggcaaggtattatttttttccttttggggggcggttttaaaacctacttgggattttttggaaagagacctttattcttggggggagccatattggcccaaccaccctacaagattaaaacgctctagggaaaataaaaatttttaaggggtaaagggggaaaaacaacctcaatttccttgctgttgaaaagttttttttccgggttttaatttaaaaaaattttttccccgggggggggttggtttt

SEQ ID NO: 2351 - DNA, 905 bp, Homo sapiens
  SIMILAR (269)..(511): 951254mologous to Homo sapiens FRG1,accession number AF146191,Smith-Waterman Score=415.
gggtcgacccacgcgtccgctcgtcctgagccggcttcagcctctccgcgcagaagtctcccggagccgacttctgagagtcgagtactcctatgtgaagactaccaagctcgtgttcaagggaaccaaggcgaagagagctaagaagtgacagaatcaggatttaaaatctggaagtgtggctctacaatctgctttgaactttaacataatatgtacaaagcctgaagcaaattctcagcgctgtatttaagagagcatagcaattaagaagaaaaagaacaaagataagaaaagaaaaagagaagaagatgaagaaacccagcttgatattgttggaatctggtggacagtaacaaactttggtgaaatttcaggaaccatagccattgaaatggataagggaacctatatacatgcactcgacaatggtctttttaccctgggagctccacacaaagaagttgatgagggccctagtcctccagagcagtttacggcctgtcaaattatctgattccagaatcgccctgaagtctggctatggaaaatatcttggtataaattcagatggacttgttgttgggcgttcagatgcaattggaccaagagaacaatgggaaccagtctttaaaattggggaaaatggctttgtcgacctcaaatagctgctttattaggatacagtgaagcagaggacatagaagcaaaaagtaaaacagcaggagaagaagaaatgatcaaggctctcctaatctctgtcagaccttcacctttatgaccttgccttatctaccagaacacagatccctcttactaaagattagatcctgtgctgaaagagaaaccaagaaaaaagatgacattccagaagaagacaaaggaaatataaaacaatgtgaaat

SEQ ID NO: 2352 - DNA, 1449 bp, Homo sapiens
  SIMILAR (1123)..(1446): 801254mologous to Mus musculus Dream/calsenilin,accession number AF274050,Smith-Waterman Score=479.
atggagctggagcaacttatgactctcatctctgctgcacgagaatatgagatagagttcatctatgcgatctcacctggattggatatcactttttctaaccccaaggaagtatccacattgaaacgtaaattggaccagactctgacatccagccatctcaatattccagagaagaggatgagtgtgaagggtggtggcgattttaaacaaggtgatcaggaagaccttgtggataacttcgggtctgagcacactccatcaggcccctctcttggcaatagtggaactggctgcagcccctgggcctcagcagagtcagagaaggaagtcagaggaatggccacagggacagccagaaatcagaagtggcttggtgtgagggactgtgcgtctcctttaatgggcggggccggaactggccgagggtccccggctttgtgcgtgtcgggggcggagtttgaagaaggctcttacagcatggccgccggctgtgagctctccggccacacccgctccttcacctttaaggtagaggaagaggatgatgcggagcacgtgctggcactaaccatgctctgcctcaccgagggagccaaagacgagtgtaatgtggtagaagttgtggcccggaaccatgaccatcaggagatcgcagtccctgtggccaacctcaagctgtcctgccaacccatgctcagtctggatgacttccagctccaaccacctgtaaccttccgcctgaagtcgggctctggccctgtgcggatcactgggcggcaccagattggccaccctccagggcccactaaaaaagcgctgaagcagcgattcctcaagctgctgccgtgctgcgggccccaagccctgccctcagtcagtgaaagcaagtgcctctcatgtgcttccgggggcggggctcgatgtgtgcacagcgtggacgatgaatttgaattgtccaccgtgtgtcaccggcctgagggtctggagcagctgcaggagcaaaccaaattcacgcgcaaggagttgcaggtcctgtaccggggcttcaagaacgaatgtcccagcggaattgtcaatgaggagaacttcaagcagatttactcccagttctttctcaaggaggactttgtggctggtttgtccgtgattcttcggggaactgtagatgacaggcttaattgggccttcaacctgtatgaccttaacaaggacggctgcatcaccaaggaggaaatgcttgacatcatgaagtccatctatgacatgatgggcaagtacacgtaccctgcactccgggaggaggccccaagggaacacgtggagagcttcttccagaagatggacagaaacaaggatggtgtggtgaccattgaggaattcattgagtcttgtcaaaaggatgagaacatcatgaggtccatgcagctctttgacaatgtcatctag

SEQ ID NO: 2353 - DNA, 3567 bp, Homo sapiens
  SIMILAR (1264)..(2898): 1001254mologous to Homo sapiens meningioma-expressed antigen 5,accession number AF036144,Smith-Waterman Score=2839.
atgaacctggaagggctggagatggttgctgtgctcgtggtcctcgctctgtttgtcaaggtcctggagcagtttggcctctttgagcctgtctccttggaaggccaccctccagggcccactaaaaaagcgctgaagcagcgattcctcaagctgctgccgtgctgcgggccccaagccctgccctcagtcagtgaaagcaagtgcctctcatgtgcttccgggggcggggctcgatgtgtgcacagcgtggacgatgaatttgaattgtccaccgtgtgtcaccggcctgagggtctggagcagctgcaggagcaaaccaaattcacgcgcaaggagttgcaggtcctgtaccggggcttcaagaacgaatgtcccagcggaattgtcaatgaggagaacttcaagcagatttactcccagttctttcctcaaggagactccagcacctatgccacttttctcttcaatgcctttgacaccaaccatgatggctcggtcagttttgaggactttgtggctggtttgtccgtgattcttcggggaactgtagatgacaggcttaattgggccttcaacctgtatgaccttaacaaggacggctgcatcaccaaggaggaaatgcttgacatcatgaagtccatctatgacatgatgggcaagtacacgtaccctgcactccgggaggaggccccaagggaacacgtggagagcttcttccagaagatggacagaaacaaggatggtgtggtgaccattgaggaattcattgagtcttgtcaaaagggaacgagaggtcacagcctcgctctccgcttaggcttctggcgccccagcttaaagccgaggctgcggctgacaaagggctcgcgccggtgccgccgcccttctcatccgggcattcgggtccctgcggagagggagggggaagggcagagggggaggggaaggagccggaggggcgcacacttggagctgaagccctctccagggctccgggccggtgccccaacggacagaggtcgaggaggacccgcagaggtggcagcggccgggggcaggaggatggtgcagaaggagagtcaagcgacgttggaggagcgggagagcgagctcagctccaaccctgccgcctctgcgggggcatcgctggagccgccggcagctccggcacccggagaagacaaccccgccggggctgggggagcggcggtggccggggctgcaggaggggctcggcggttcctctgcggtgtggtggaagagcaacttatgactctcatctctgctgcacgagaatatgagatagagttcatctatgcgatctcacctggattggatatcactttttctaaccccaaggaagtatccacattgaaacgtaaattggaccaggtttctcagtttgggtgcagatcatttgctttgctttttgatgatatagaccataatatgtgtgcagcagacaaagaggtattcagttcttttgctcatgcccaagtctccatcacaaatgaaatctatcagtacctaggagagccagaaactttcctcttctgtcccacagaatactgtggcactttctgttatccaaatgtgtctcagtctccatatttaaggactgtgggtgaaaagcttctacctggaattgaagtgctttggacaggtcccaaagttgtttctaaagaaattccagtagagtccatcgaagaggtttctaagattattaagagagctccagtaatctgggataacattcatgctaatgattatgatcagaagagactgtttctgggcccgtacaaaggaagatccacagaactcatcccacggttaaaaggagtcctcactaatccaaattgtgaatttgaagccaactacgttgctatccacacccttgccacctggtacaaatcaaacatgaatggagtgagaaaagatgtagtgatgactgacagtgaagatagtactgtgtccatccagataaaattagaaaatgaaggcagtgatgaagatattgaaactgatgtactctatagtccacagatggctctaaagctagcattaacagaatggttgcaagagtttggtgtgcctcatcaatacagcagtaggcaagttgcacacagtggagctaaagcaagtgtagttgatgggactcctttagttgcagcaccctctttaaatgccacaaccgtagtaacaacagtttatcaggagcccattatgagccagggagcagccttgagtggtgagcctactactctgaccaaggaagaagaaaagaaacagcctgatgaagaacccatggacatggtggtggaaaaacaagaagaaacggaccacaagaatgacaatcaaatactgagtgaaattgttgaagcgaaaatggcagaggaattgaaaccaatggacactgataaagagagcatagctgaatcaaaatccccagagatgtccatgcaagaagattgtattagtgacattgcccccatgcaaactgatgaacagacaaacaaggagcagtttgtgccaggtccaaatgaaaagcctttgtacactgcggaaccagtgaccctggaggatttgcagttacttgctgatctattctaccttccttacgagcatggacccaaaggagcacagatgttacgggaatttcaatggcttcgagcaaatagtagtgttgtcagtgtcaattgcaaaggaaaagactctgaaaaaattgaagaatggcggtcacgagcagccaagtttgaagagatgtgtggactagtgatgggaatgttcactcggctctccaattgtgccaacaggacaattctttatgacatgtactcctatgtttgggatatcaagagtataatgtctatggtgaagtcttttgtacagtggttagaagatgaagatggcatatgtggttatgccttgggcactgtagatgtgaccccctttattaaaaaatgtaaaatttcctggatccccttcatgcaggagaagtataccaagccaaatggtgacaaggaactctctgaggctgaggactgtgcgtctcctttaatgggcggggccggaactggccgagggtccccggctttgtgcgtgtcgggggcggagtttgaagaaggctcttacagcatggccgccggctgtgagctctccggccacacccgctccttcacctttaaggtagaggaagaggatgatgcggagcacgtgctggcactaaccatgctctgcctcaccgagggagccaaagacgagtgtaatgtggtagaagttgtggcccggaaccatgaccatcaggagatcgcagtccctgtggccaacctcaagctgtcctgccaacccatgctcagtctggatgacttccagctccaaccacctgtaaccttccgcctgaagtcgggctctggccctgtgcggatcactgggcggcaccagattgttacgatgagcaatgatgtttctgaggaggagagcgaggaagaggaagaggacagtgatgaggaagaagttgagctgtgccccatccttcctgccaaaaagcaggggggcaggccctag

SEQ ID NO: 2354 - DNA, 672 bp, Homo sapiens
  SIMILAR (343)..(540): 1001254mologous to Homo sapiens Human carbohydrate-associated protein CRBAP-2,accession number AAY79506,Smith-Waterman Score= 329.
aagatggacagaaacaaggatggtgtggtgaccattgaggaattcattgagtcttgtcaaaagggaacgagaggtcacagcctcgctctccgcttaggcttctggcgccccagcttaaagccgaggctgcggctgacaaagggctcgcgccggtgccgccgcccttctcatccgggcattcgggtccctgcggagagggagggggaagggcagagggggaggggaaggagccggaggggcgcacacttggagctgaagccctctccagggctccgggccggtgccccaacggacagaggtcgaggaggacccgcagaggtggcagcggccgggggcaggaggatggtgcagaaggagagtcaagcgacgttggaggagcgggagagcgagctcagctccaaccctgccgcctctgcgggggcatcgctggagccgccggcagctccggcacccggagaagacaaccccgccggggctgggggagcggcggtggccggggctgcaggaggggctcggcggttcctctgcggtgtggtggaagagcaacttatgactctcatctctgctgcacgagaatatgagatagagttcatctatgcgatctcacctggattggatatcactttttctaaccccaaggaagtatccacattgaaacgtaaattggaccag

SEQ ID NO: 2355 - DNA, 2417 bp, Homo sapiens
  SIMILAR (506)..(2413): 1001254mologous to Bos taurus polyadenylate-binding protein 1,accession number AJ401269,Smith-Waterman Score=3278.
ccccttctccccggcggttagtgctgagagtgcggagtgtgtgctccgggctcggaacacacatttattattaaaaaatccaaaaaaaatctaaaaaaatcttttaaaaaaccccaaaaaaatttacaaaaaatccgcgtctcccccgccggagacttttattttttttcttcctcttttataaaataacccggtgaagcagccgagaccgacccgcccgcccgcggccccgcagcagctccaagaaggaaccaagagaccgaggccttcccgctgcccggacccgacaccgccaccctcgctccccgccggcagccggcagccagcggcagtggatcgaccccgttctgcggccgttgagtagttttcaattccggttgatttttgtccctctgcgcttgctccccgctcccctccccccggctccggcccccagccccggcactcgctctcctcctctcacggaaaggtcgcggcctgtggccctgcgggcagccgtgccgagatgaaccccagtgcccccagctaccccatggcctcgctctacgtgggggacctccaccccgacgtgaccgaggcgatgctctacgagaagttcagcccggccgggcccatcctctccatccgggtctgcagggacatgatcacccgccgctccttgggctacgcgtatgtgaacttccagcagccggcggacgcggagcgtgctttggacaccatgaattttgatgttataaagggcaagccagtacgcatcatgtggtctcagcgtgatccatcacttcgcaaaagtggagtaggcaacatattcattaaaaatctggacaaatccattgataataaagcactgtatgatacattttctgcttttggtaacatcctttcatgtaaggtggtttgtgatgaaaatggttccaagggctatggatttgtacactttgagacgcaggaagcagctgaaagagctattgaaaaaatgaatggaatgctcctaaatgatcgcaaagtatttgttggacgatttaagtctcgtaaagaacgagaagctgaacttggagctagggcaaaagaattcaccaatgtttacatcaagaattttggagaagacatggatgatgagcgccttaaggatctctttggcaagtttgggcctgccttaagtgtgaaagtaatgactgatgaaagtggaaaatccaaaggatttggatttgtaagctttgaaaggcatgaagatgcacagaaagctgtggatgagatgaacggaaaggagctcaatggaaaacaaatttatgttggtcgagctcagaaaaaggtggaacggcagacggaacttaagcgcaaatttgaacagatgaaacaagataggatcaccagataccagggtgttaatctttatgtgaaaaatcttgatgatggtattgatgatgaacgtctccggaaagagttttctccatttggtacaatcactagtgcaaaggttatgatggagggtggtcgcagcaaagggtttggttttgtatgtttctcctccccagaagaagccactaaagcagttacagaaatgaacggtagaattgtggccacaaagccattgtatgtagctttagctcagcgcaaagaagagcgccaggctcacctcactaaccagtatatgcagagaatggcaagtgtacgagctgttcccaaccctgtaatcaacccctaccagccagcacctccttcaggttacttcatggcagctatcccacagactcagaaccgtgctgcatactatcctcctagccaaattgctcaactaagaccaagtcctcgctggactgctcagggtgccagacctcatccattccaaaatatgcccggtgctatccgcccagctgctcctagaccaccatttagtactatgagaccagcttcttcacaggttccacgagtcatgtcaacacagcgtgttgctaacacatcaacacagacaatgggtccacgtcctgcagctgcagccgctgcagctactcctgctgtccgcaccgttccacagtataaatatgctgcaggagttcgcaatcctcagcaacatcttaatgcacagccacaagttacaatgcaacagcctgctgttcatgtacaaggtcaggaacctttgactgcttccatgttggcatctgcccctcctcaagagcaaaagcaaatgttgggtgaacggctgtttcctcttattcaagccatgcaccctactcttgctggtaaaatcactggcatgttgttggagattgataattcagaacttcttcatatgctcgagtctccagagtcactccgttctaaggttgatgaagctgtagctgtactacaagcccaccaagctaaagaggctgcccagaaagcagttaacagtgccaccggtgttccaactgtttaaa

SEQ ID NO: 2356 - DNA, 5395 bp, Homo sapiens
  SIMILAR (1579)..(2469): 991254mologous to Homo sapiens meningioma-expressed antigen 5,accession number AF036144,Smith-Waterman Score=1515.
tccctctgcgcttgccccccgctcccctccccccggctccggccccagccccggcactcgctctcctcctctcacggaaaggtcgcggcctgtcgctgcggcgagccgtgccgagatgaaccccagtgcccccagctaccccatggcctcgctctacgtgggggacctccaccccgacgtgaccgaggcgatgctctacgggaaacagcggaagacctaagattatcaggagggcagcagaggcagagaacgaggacaggacccttggccgtcttcttccagggaacgagaggtcacagcctcgctctccgcttaggcttctggcgccccagcttaaagccgaggctgcggttgacaaagggctcgcgcgggtgccgccgcccttctcatccgggcattcgggtccctgcggagagggagggggaagggcagagggggaggggaaggagccggaggggcgcacacttggagctgaagcccttttcagggcttccgggccggtgcccccaacggacagaaggtcgaggaggacccgcagaggtggcagcggccgggggcaggaggatggtgcagaaggagagtcaagcgacgttggaggagcgggagagcgagctcagctccaaccctgccgcctctgcgggggcatcgctggagccgccggcagctccggcacccggagaagacaaccccgccggggctgggggagcggcggtggccggggctgcaggaggggctcggcggttcctctgcggtgtggtggaaggattttatggaagaccttgggttatggaacagagaaaagaactctttagaaggctccagaaatgggaattaaatacatacttgtatgccccaaaagatgactacaaacataggatgttttggcgagagatgtattcagtggaggaagctgagcaacttatgactctcatctctgctgcacgagaatatgagatagagttcatctatgcgatctcacctggattggatatcactttttctaaccccaaggaagtatccacattgaaacgtaaattggaccaggtttctcagtttgggtgcagatcatttgctttgctttttgatgatatagaccataatatgtgtgcagcagacaaagaggtattcagttcttttgctcatgcccaagtgctccatcacaaatgaaatctatcagtacctaggagagccagaaactttcctcttctgtcccacagaatactgtggcactttctgttatccaaatgtgtctcagtctccatatttaaggactgtgggtgaaaagcttctacctggaattgaagtgctttggacaggtcccaaagttgtttctaaagaaattccagtagagtccatcgaagaggtttctaagattattaagagagctccagtaatctgggataacattcatgctaatgattatgatcagaagagactgtttctgggcccgtacaaaggaagatccacagagggtcatcccacggttaaaaggagtcctcactaatccaaattgtgaatttgaagccaactacgttgctatccacacccttgccacctggtacaaatcaaacatgaatgggagtgagaaaagatgtagtgatgactgacagtgaagatagtactgtgtccatccagataaaattagaaaatgaaggcagtgatgaagatattgaaactgatgtactctatagtccacagatggctctaaagctagcattaacagaatggttgcaagagtttggtgtgcctcatcaatacagcagtaggcaagttgcacacagtggagctaaagcaagtgtagttgatgggactcctttagttgcagcaccctctttaaatgccacaaccgtagtaacaacagtttatcaggagcccattatgagccagggagcagccttgagtggtgagcctactactctgaccaaggaagaagaaaagaaacagcctgatgaagaacccatggacatggtggtggaaaaacaagaagaaacggaccacaagaatgacaatcaaatactgagtgaaattgttgaagcgaaaatggcagaggaattgaaaccaatggacactgataaagagagcatagctgaatcaaaatccccagagatgtccatgcaagaagattgtattagtgacattgcccccatgcaaactgatgaacagacaaacaaggagcagtttgtgccaggtccaaatgaaaagcctttgtacactgcggaaccagtgaccctggaggatttgcagttacttgctgatctattctaccttccttacgagcatggacccaaaggagcacagatgttacgggaatttcaatggcttcgagcaaatagtagtgttgtcagtgtcaattgcaaaggaaaagactctgaaaaaattgaagaatggcggtcacgagcagccaagtttgaagagatgtgtggactagtgatgggaatgttcactcggctctccaattgtgcgcggcaggacaattctttatgacatgtactcctatgtttgggatatcaagagtataatgtctatggtgaagtcttttgtacagtggttagggtgtcgtagtcattcttcagcacaattcttaattggagaccaagaaccctgggcctttagaggtggtctagcaggagagttccagcgtttgctgccaattgatggggcaaatgatctcttttttcagccacctccactgactcctacctccaaagtttatactatcagaccttattttcctaaggatgaggcatccgtgtacaagatttgcagagaaatgtatgacgatggagtgggtttaccctttcaaagtcagcctgatcttattggagacaagttagtaggagggctgctttccctcagcctggattactgctttgtcctagaagatgaagatggcatatgtggttatgccttgggcactgtagatgtgaccccctttattaaaaaatgtaaaatttcctggatccccttcatgcaggagaagtataccaagccaaatggtgacaaggaactctctgaggctgagaaaataatgttgagtttccatgaagaacaggaagtactgccagaaacttttccttgctaatttcccttctctgataaagatggacattcacaaaaaagtaactgacccaagtgtggccaaaagcatgatggcttgcctcctgtcttcactgaaggctaaatggctcccggggagctttctgtgaagtgagaccagaatgataaaagaattctggaattttacagcaagttaggatgttttgaaattggcaaaaatgggaaggatttccaaaggatgtggttatacttggtcggagcctgtgacatttgttgacactgtgaactgtccaaaagtctcttaactgcaccttgtgaatggtagttgaggtcttcatacagttcagcctctagaatggtaacaaatcagccaattggattcgaaacaaagaagactatgtaaatactcacccatcacactttgagactactcactggtgggaaagaatatagtattgcagcaaatcctgtatgaaagagagatgtgggcttcctttttgagtcttgtgttaggtgctgagaccttttacatgggcttatacagggagagagtcttccaataaatgtagtccagcactattttctgcatccagtgtgggttgccgtttctccacctgagagtaatcaagataacatctgtcatcttccttggtttattgagtgaaatgcctctcagtcttaggggacatggcagagatgaaagaaagaaagagtgggtttcagaagtgtcagggtggagtgattccaagtgggatggttgtggcattagtttaagctgaataaataatttcaatttggggcaggttattctgctttttgtaaagccgtggccaattgtctcctgtaatgactgttggttcaggcatgttgtactttgtagggacaaatgtgcatttggtttgtggcaaaagcctacaaattgacaaacttgtaaatttcctttgtatataaactagctgtaaccctgactatcctttgtgtttactgtttttgtaaatttttttcctctataaatgaaagggtgttggttcagaatggcactttgaataatgtaaaccagtgaaaagtggattttctttacttttgtctttgggtttggggttgtttttgttctttttgaagttttattatttttaaagtggcctcccacctaggcgtaggccatggaccatttggggtacgagagcctaattttggtagggacttaatctgttgaaaagtgccagttacttctggaaattaacctcaatattagggcagcatgagaaatgatggatttgacatgtcaggtagggctcagggactgattggtcccaatttgccctcaggtcagttgtttaatctcaagacctgttactactgattttattaaatcagagtctttaattcttgcatgtttgtatctaatttctgaacgaatgagcacactttaaccagttatttacagttacctttttcctttaaccggattgtgaaagcttcatgtattttaatttagattctgtgtttttaagggttctgagcatgaagctggcagatagtcggcaggactcattttttcatcatggctggctgatttctccatagattgataacagtattttgttatcttgcttctctgtagttttgcatcagctggtttaactttggagcctgagtgaggggagaggggtaaagagagagaaagaaacttaagttttctttcacagaactccaccattgtgggcctttgagagacccctaaaccattggacctagtggtacctaagtgacttccaaccaaaagcctttgagtatgccactaaatacggtgagaagaaaggagagaaggtttttacggttagaaacctttaaccgatagaaggatatggtatgttgtaaagctggaacccaagggttgcatttttgagggcttgagatgaagggaaagacttcttaccagatagtaaagacagctgagtttcccctcaagttttctcggtcttaacactagtggacaattctagcatttttgtttggaggatttcagagttaacctcatggaattcagggattttttagcaagtttgcttttgggttttatcttggcttttaagtaatccatgttggctggtctggttcacagggtgctgttgaaacaaatgccctggtcttgctttcatcgactctaggatcgatgaagtgctatgctatttcctggttatgaatattaaggttggaattacatttttattgattgtttggatcagagctcagttcctgtagaaaacgaactgtaaaagaccatgcaagaggcaaaataaaacttgaagtgaatgctaaaaaaaaaaaaaaaaaa

SEQ ID NO: 2357 - DNA, 654 bp, Homo sapiens; identical to SEQ ID NO: 244
  SIMILAR (24)..(449): 1001254mologous to Homo sapiens alpha globin,accession number V00488,Smith-Waterman Score=733.
  misc_feature (1)...(654): n = a,t,c or g

SEQ ID NO: 2358 - DNA, 708 bp, Homo sapiens
  SIMILAR (59)..(478): 521254mologous to Homo sapiens Protein sequence of the di- alpha haemoglobin gene contained in pSS1,accession number AAW54282,Smith-Waterman Score=250.
  misc_feature (1)...(708): n = a,t,c or g
atcgagaccatattccatgtggnggaattccacagactcagagagaacccacccatggttgctgtctcctgccgacaagaccaccgtcaagggcccgcctggggtaaggtcggcgcgcacgctggcgagtatggcttcggaggccctggagaggatgttcctgtccttccccaccaccaagacctacttcccgcacttcgacctgagccacgggttttgcccaggtttaagggccacgggaaagaaggtggccgacgcgctgaccaaacgccgtggcgcaccgttggacgacatgcccaacgcgcttgttcggcccttgaagcgacctgcacgcgcacaagctttcgggtgggacccggttcaactttcaagctcctaaagccactggcctgcttggttgaccctgggcccggcccaccttccccggccgagtttcacccctggcggttgcaaggcttccttgggacaaagtttcctgggcttcttgttgaagcaccgttgcttgaaccttccaaattaccgttaaagcttggaagccttcgggttggccatgctttctttgcccctttgggcctttcccccagcccctcctcccctttcctgcacccgtacccccgtggtcttttgaataaaattttgaattgggggggcaaaaaaaaaaaaaaaaaaaagatctttnaatttaagggggcggaaagtttatttcaa

SEQ ID NO: 2359 - DNA, 486 bp, Homo sapiens
  misc_feature (1)...(486): n = a,t,c or g
ntgatcattttctatctgaaactcttgacaatattatcattttctatctggtttcaatctcacaattttcttctaagtttgtacattttgcccttagctttttgtttcctagcttgtcttttttcttatgctgtcttcctagattcactgaatccacttctgtgtagcacctgggtcagctgtcaattaatgctagtcctcaggatttaaaaaataatcttaactcaaagtccaatgcaaaaacattaagttggtaattactcttgatcttgaattacttccgttacgaaagtccttcacatttttcaaactaagttactatatataaggccttccaaaatcgtccccctcttccaaaagccttctgccttagttaattttaaattacaccagtccttttagtagctttatgcgaacgcgtgggtcggcccntaanttccnaagcngttgcncatcgnctgcaggtnctcaatttnnagngagctn

SEQ ID NO: 2360 - DNA, 420 bp, Homo sapiens
  misc_feature (1)...(420): n = a,t,c or g
taattcggggctctgtagtcctttctctcaattttcttttaaatacattttttactccatgaagaagcttcatctcaacctccgtcatgttttagaaaccttttatcttttccttcctcatgctactcttgtaagtcttcatattttctcttaaaatcttaagctattaaaattacgttaaaaacttaacgctaagcaatatcttagcaacctattgactatattttttaagtagttgtattaatctctatctttcaaagagaaaaaaacttatctgcgacgaaatcgtcgacccgggaaatctnnnnnnnnnnnnnnnnnnnncgagcctaggctagctctagaccacacgtgtgggggcccgagctctcgcccgcnnnnnnnnnnnnnnnnnnnnnnnnnnnngcgcaatgtcacgag

SEQ ID NO: 2361 - DNA, 1880 bp, Homo sapiens
  misc_feature (1)...(1880): n = a,t,c or g
gttattatattagaaaataaataaaaggttaccataagtaagttccagaaaaacaacatattgccgacctcacggatttttaccaaccactcgctttccctgtggccttggcacactggcatgctggtctaggatcctctacgcacaacgcctgctcgcctcctccgtgtggttgccaagccaagccgcctgctaccttcatcaccaaattgcactcgctccttcctggaatccttttttcctkyagcttcaccaccdaaaatcgttagcgctccttccttcttcctagcttccttcaccaaattcggcactggcwtcctggactcttttcctatcttcaccacgaactgctgcttgctcgcttgctcctcagtcctagcttcatcaaacactggttcctggaatcctgtctgctgctgtcttcctagattcactgaatccacttctgtgtagcacctgggtcaagctgtcaattaatgctaagtcctcaggatttaaaaaataatcttaactcaaagtcccaatggcaaaaaacattaagttggtaattactcttggatcttgaattacttccgttacgaaagtccttcacatttttcaaactaagctactatatttaaggccttccaaattcttctaactcttccaaaagccttctgccttaggttttttttaaattacaccagtccttttagtagctttttgatgtgatttttaaccaacttccccttctagcttcaagtattcttcctaaattggttcttggtctacgtaaacaccctcatcttctcaagctttaccttcctaacttctgcaccaccagaaattaaattgcatgggcttttaaaataaattggttaccaataattttcctcattttttcagtgctattttatccaatttttggctttatatttttctatcttctatacttctccaatacttgtcttagcttgtttttccattttctatctgaaactcttgacaatattttcattttctatcttgtttctatcttccaattttcttctaagtttgtacattttgccattagctttatgtttcctagcttgtcttttttcttctgcttcatactttccaggtttaaatttatctttttttcttctaaaaagtatgtttttatctttctaatttccctatccttcactattctttttcttcgccttcccgtaacttctgtcttcccagttttccaacttcaaaacttctatctttctccaaattggtttcatccttaccactccccaattaatctttccatttttcgtctgcgtttagtaaatgcggttaacaaggctttaaatgacggcaattctcccctgcggtcatgggatttccaaggtcctttttaatccaccttccggtttaatctcctttttaaaagatcggccttcaaaatattttaaatccccctacaacttttaaaactaaactttaagctgtttaagtcacccttcattttaatcctaaaagcattgccccttcctatgggtattaattcggggctcttgtagtcctttcgtctcaattttcttttaaatacattttttactccatgaagaagcttcatctcaacctccgtcatgttttagaaaccttttatcttttccttcctcatgctactcttctaagtcttcatatttttctcttaaaatcttaagctattaaaattaccgttaaaaacttaacgctaagcaatatcttagtaacctattgactatattttttaagtagttgtattaatcctctatctttcaaagagaaaaaaaacttattctgcggtttcctcaaacgacagcaaaacacctcagcagaagcccctgcgcctggccggacgcgtgggtcgngccgggtcctac

SEQ ID NO: 2362 - DNA, 480 bp, Homo sapiens
  SIMILAR (480)..(436): 661254mologous to Homo sapiens Human secreted protein encoded by gene 44 clone HTDAD22,accession number AAY02693,Smith-Waterman Score=52.
ggacctcatctgagatgcctatcatgtcctgccctgactgactgtagttcatgtgtgcagctgtctgcctgtgctgtgaattccaagaggacaggcttcatctgggtgctgagcagggcttggagaggatgagggtatgggaggcggagtgttaaagtgcgtgcatgggccaggtgcactggtttttcccccaaaaccccaaacccctgggtaaattcccaacactttgggaggctgaggtgggcagatcacctgaggtcaggagttcgagaccagcctggccaacatggtgaaactctgtctctactaaaaatacaaaaactacctgggtgtggtggcaggtgcctgtaattccagctatttgggaggctgaggcaagagaattgaattgcttgaacccaggaggcggaggttgcagtgagctgagatcgcaccactgcactccagcctgggtgacagagcaagactctgtctcaaaaa

SEQ ID NO: 2363 - DNA, 450 bp, Homo sapiens
  SIMILAR (11)..(70): 1001254mologous to Mus musculus putative,accession number AK002939,Smith-Waterman Score=116.
tgagagcaagatgggtcaccagcagttgtactggagccacccgcgaaaattcggccagggttctcgctcttggtgagaaatagtttgtgattttggggaagcgttgccgtggagcgctaggctgcttaaaatctcaagtagaggaggccacgggcggcacgagggagcacgccgactgggagtcgctggtgccgccattacaggcctgtactgtggcttgggagtcccgggatgcgggtagtagccgtctgagtgcggagtcttgtaatttctatgacctgcaaaaccgctgtctcttttcttacaagtcgtgtctgttcaaaccggcacggtctgatccggaaatatggcctcaatatgtgccgccagtgtttccgtcagtacgcgaaggatatcgggttcattaagttggactaaatgctcttccttcagaggattatccggggcatc

SEQ ID NO: 2364 - DNA, 577 bp, Homo sapiens
  SIMILAR (251)..(394): 591254mologous to Drosophila subobscura ribosomal protein,accession number M21333,Smith-Waterman Score=142.
gttgcactgctgagagcaagatgggtcaccagcagctgtactggagccacccgcgaaaattcggccagggttctcgctcttgtcgtgtctgttcaaaccggcacggtctgatccggaaatatggcctcaatatgtgccgccagtgtttccgtcagtacgcgaaggatatcggtttcattaagaaagacctgagctgtcttccttggcactgcctatggaggtgacacccatctcctccatcatggccatcctgagaccgctcgcgaagcccaagatcatcaaaaagagcaccaagttcactgggaaccagtcagactgatatgtcaaaattaagggtaactggtggaaacacagaggtattgacaacagggttcatagaaggtttgagggccagatctatgcccaacattggttatgggagaaacaaaaagacaaagcacatactgcccagtggcttctggaagttcctggtccacaacgttaaggagctggaagtactgctggtgagcaacaaatcttactgtgttgagatcactcatgatgtttcttccaagaactgcaaagccatcttggaaag

SEQ ID NO: 2365 - DNA, 662 bp, Homo sapiens
  SIMILAR (292)..(423): 701254mologous to Mus musculus putative,accession number AK002939,Smith-Waterman Score=143.
aagattaaaaacagaaacaaaaaccgaacagtgtgaacagtgcaccctgaggtctccctggggtcccttgtacccctcaggagcctgtggatgaccctgtgcaaacagttgggtggaagactgtgtcttcctgtgtgtttggatgagtaccagaactttctgcgtctgtttttcaccctacccaatgcagtgcttacctaaaaaatgcgttgaatagagcttcttgcttttacctcgttgcactgctgagaagcaaagatggggtcaccaagcagctgtactggagccaccccgcgaaaattcgggcagggtttctcgctctttgtcgtgtctgttcaaacaaccggcacggtcttgatccggaaatatggcctcaatatgtgccgccagtgtttccgtcagtacgcgaaggatatcaggtttcatttaagttggactaaatgctcttccttcagaggattatccggggcatctacttcaatgaaaaaaccatggattaattcttttgtatatataattatacattttgaaaaagccactgaaaaaaaaagaaaaaaaaatgaaattaagagggggcccttttgttttaaggggcccctttaaaccccgtgaaaaaccctgggggggtcttttaatgccgcacccttttgtggttgcccccc

SEQ ID NO: 2366 - DNA, 624 bp, Homo sapiens
  SIMILAR (51)..(491): 1001254mologous to Homo sapiens delta globin,accession number V00505,Smith-Waterman Score=774.
acactttcttctgacataacagtgttcactagcaacctcaaacagacaccatggtgcatctgactcctgaggagaagactgctgtcaatgccctgtggggcaaagtgaacgtggatgcagttggtggtgaggccctgggcaggttactggtggtctacccttggacccagaggttctttgagtcctttggggatctgtcctctcctgatgctgttatgggcaaccctaaggtgaaggctcatggcaagaaggtgctaggtgcctttagtgatggcctggctcacctggacaacctcaagggcactttttctcagctgagtgagctgcactgtgacaagctgcacgtggatcctgagaacttcaggctcttgggcaatgtgctggtgtgtgtgctggcccgcaactttggcaaggaattcaccccacaaatgcaggctgcctatcagaaggtggtggctggtgtggctaatgccttggctcacaagtaccattgagatcctggactgtttcctgataaccataagaagaccctatttccctagattctattttctgaacttgggaacacaatgcctacttcaagggtatggcttctgcctaataaagaatgttcagctcaacttc

SEQ ID NO: 2367 - DNA, 680 bp, Homo sapiens
  SIMILAR (299)..(454): 461254mologous to Homo sapiens mutant beta-globin,accession number AY013301,Smith-Waterman Score=82.
ccactgaagcgctcagatggctgtaacgacggccgacccacgcgtccgcccacgcgtccggacacaactgtgttcactagcaacctcaaacagacacgcatggtgcatctgactcctgaggagaagtctgccgttactgccctgtggggcaaggtgaacgtggatgaagttggtggtgaggccctgggcaggctgctggtggtctacccttggacccagaggttctttgagtcctttggggatctgtccactcctgatgctgttatgggcaaccctaaggtgaaggctcattcgcaagaaagggctccgcggggcctttagtgatggcctggctcacctgggacaacctcaagggcacctttgccacactgaagtgagcttgcactgtgacaaagctgcaccgtggatccctgaagaacttcaggctccttgggcaacgtgcttggtctgtgttgcttggcccatcacttttggcaaaagaatttcaaccccaccagttgcaggcttgcctaatcaagaaaattggttggcttggtgttggctaaatgcccttggccccacaagtaatcacttaagcctcgctttccttgctggtccaatttccaattaaaaggttcctttggttccctaagtccaaatacttaactggggggatattattgaaagggccttgagaatct

SEQ ID NO: 2368 - DNA, 779 bp, Homo sapiens
  SIMILAR (169)..(531): 451254mologous to Homo sapiens hemoglobin beta chain,accession number AF117710,Smith-Waterman Score=165.
ccactgaagcgctcagatggctgtaacgacggccgacccacgcgtccgcccacgcgtccggacacaactgtgttcactagcatcgctcatacagacactattggtgcacctgactcactgaggagaagtctgccgttactgccctgtggggcaaggtgaacgtggatgaaagttggtggtaaggccctgggcaggctgctggtggtctacccttggacccagaggttcctttgagtcctttggggatctgtccactcctgatgctgttatgggcaaccctaaggtgaaggctcattcgcaagaaagtgctcggtggcctttagtggtgggcctggctgcacctgggacaacctcaagggcacctttgctcacactgaggtgagcttgcactgtgacaaagctgcaccgtggatccctgaagaacttcaggctccttgggcaacgtgcttggtctgttgttgctgggcccattcacttttggcaaaagaatttcaaccccaccagttgcaggcttgcctaatcaagaaaattggttggcttggtgttggctaaatgcccttggccccacaagtaatcacttaagcctcgctttccttgctggtccaatttccaattaaaaggttcctttggttccctaagtccaactactaaactggggggatattattgaaagggccttgagcatcttggattttgcctaataaaaaacatttattttcatcgcatacaagaataaaacaagcgcggccgattaagaggatacttcaggggcgcaagat

SEQ ID NO: 2369 - DNA, 463 bp, Homo sapiens
  SIMILAR (219)..(329): 1001254mologous to Homo sapiens diphosphoinositol polyphosphate phosphohydrolase,accession number AF062529,Smith- Waterman Score=183.
gcggccgcggcgggccagcggcggagccgtgtagcggagaagctccccctccctgcttcccttggccgagccgggggcgcgcgcgcacgcggccgtccagagcgggctccccacccctcgactcctgcgacccgcaccgcacccccacccgggcccggaggatgatgaagctcaagtcgaaccagacccgcacctacgacggcgacggctacaagaagcaggcatcatattttgaaacattgaggcaaggctactcagccaacaatggcaccccagtcgtggccaccacatactcggtttctgctcagagctcgatgtcaggcatcagatgactgaagacttcctgtaagagaaatggaaattggaaactagactgaagtgcaaatcttccctctcaccctggctctttccacttctcacaggcctcctctttcaaataaggcatggtgggcagcaaagaaag

SEQ ID NO: 2370 - DNA, 1309 bp, Homo sapiens
  SIMILAR (430)..(645): 831254mologous to Homo sapiens diphosphoinositol polyphosphate phosphohydrolase,accession number AF062529,Smith- Waterman Score=315.
gcggccgcggcgggccagcggcggagccgtgtagcggagaagctccccctccctgcttcccttggccgagcgcgggggcgcgcgcgcacgcggccgtccagagcgggctccccacccctcgactcctgcgacccgcaccgcacccccaccctgggcccggaggatgatgaagctcaagtcgaaccagacccgcacctacgacggcgacggctacaagaagcgggccgcatgcctgtgtttccgcagcgagagcgaggagggaggtgctactcgtgagcaagtagtcgcccatccagacagatggattgtcccctggaaggaaggcatggaagcccgaaggaaggaagccaagtgtggcaagcaagttcgtgaagtctgtgaaggaaggcttggagtaaaagggacatttgggaagattagttggaattttttgagaaccaggagaggaagcacaaggacgtatgtctaatgtgctcattgtcactgaaagtgctggaagactgggaagattcagttaacattggaaggaagagggaatggtttaaaatagaagacgccataaaagtgctgcagtatcacaaacccgtgcaggcatcatattttgaaacattgaggcaaggctactcagccaacaatggcacccccagtcgtgggccaccacatactcggtttctggcttcagagcttcgatgttcagggcattcagatggacttgaaggactttcctgttaaggaggaaatgggaaattgggaaaactagactgaagtgcaaaatcttccctctcaccctggctcttttccacttctcacaggcctcctctttcaaataaggcatggtgggcagcaaagaaagggtgtaattgaaaaatgttgcctgtttgggtgttaaagtgaatggggctttttccttcctgtttttattgagggtgggggttgggtgtgtaatttgtaagtacttttgtgcatgatctgtccctccctcttcccacccctgcagtcctctgaagagaggccaacagccttccccctgcccttgggattccgaagtggttcctggtttgtccctaatccctggcgccctggcaaaaccggttttcctttggatttttaattttttttttttattaaaagataccagtatgaggatgaaaacttcccaataatttgtcctataatgtgctgtacagttcagtagagtggttcactttcactgcagtataacaattgatctacacattatatatcggacatataatatgtaaataaatgacttctagaaagagaaatttgtttaatttttcaaggtttt

SEQ ID NO: 2371 - DNA, 429 bp, Homo sapiens
  SIMILAR (244)..(426): 1001254mologous to Homo sapiens 13kD differentiation- associated protein,accession number U34343,Smith-Waterman Score= 324.
catagaagaattcagctagtaactgatggagttgaggcttgaacccaagcaacaaaatagttccagggctacgtttttaaccgtccttccactatgctgtactgcctcttcataactgtttgggttttttcccctctttaaggcatcgttggcttcacagtatgactgatgatcctccaacaacaaaaccacttactgctcgtaaattcatttggacgaaccataaattcaacgtgactggcaccccagaacaatatgtaccttattctaccactagaaagaagattcaggagtggatcccaccttcaacaccttacaagtaaagacaatgaagaacagttgaaacatgcaaaatatggagcttttcatgtaattactcttttactgtttaccattcactataattcacaattaaaattgtgtgactaa

SEQ ID NO: 2372 - DNA, 484 bp, Homo sapiens
  SIMILAR (198)..(377): 1001254mologous to Homo sapiens 13kDa differentiation- associated protein,accession number AF112208,Smith-Waterman Score= 351.
cggacgcgtgggcggggccagcgaggcaagatggagttagtgcaggtcctgaaacgcgggctgcagcagatcaccggccacggcggtctccgaggctatctacgggtttttttcaggacaaatgatgcgaaggttggtacattagtgggggaagacaaatatggaaacaaatactatgaagacaacaagcaattttttggcatcgttggcttcacagtatgactgatgatcctccaacaacaaaaccacttactgctcgtaaattcatttggacgaaccataaattcaacgtgactggcaccccagaacaatatgtaccttattctaccactagaaagaagattcaggagtggatcccaccttcaacaccttacaagtaaagacaatgaagaacagttgaaacatgcaaaatatggagcttttcatgtaattactcttttactgtttaccattcactataattcacaattaaaattgtgtgact

SEQ ID NO: 2373 - DNA, 801 bp, Homo sapiens
  SIMILAR (353)..(493): 721254mologous to Homo sapiens Human myelin oligodendrocyte glycoprotein gene,accession number AAZ29204,Smith-Waterman Score= 163.
ggcacgagagaacttgtagtttgcatagtatccgacagatgtcaccgtatttaccttgaaaatttaaaatattttgcagcatccttgtgaatttgatgtgatacccccaaggcaccctgagcacacagtttgggaacccattgcccttggaatattaatcatagttaccctcccagagagtgaaattttggataattaaaaaaatttcttttttcttgagatggagttttggtcttgttgcccaggctagagtgcaatggcgtgatctcggctcaccgcagactccgcctcccgctttcaagctattctcccgcctcatcctcccaagtagctggggattacagggcatgcaccaccacggccggctaaattttgtatttttagtaggagacggggtttctccatgttgggtcaggctggtctcgaattcccgacctcaggtgatcagcccgccttggcctcccaaagtgctgggattacaggtgtgagccactgcccccagctgaagaagtcaatcttacacgaaactccgaaaggacttactggggtcacttcctaaatctgaacaacttaggttatgggcacgccacgtgtggtcctttcccagctgtcagtgttctcccggctgaaatagactttagcatttttggatgcaacacaacttcctagcctggaaaagccatattctcaacaattattgtgtaaatttaagaggtacagttgtaataataacccttgtccctatgcctcctacctttgcacagccatttctttggcatagaatgtccttctctgccttga

SEQ ID NO: 2374 - DNA, 220 bp, Homo sapiens
  SIMILAR (185)..(60): 711254mologous to Homo sapiens Human secreted protein, SEQ ID NO: 7678,accession number AAG03597,Smith-Waterman Score=147.
aattggtgggttcttggtctcactgacttcaagaatgaagccgcagaccctcacggagtgaagctgcagaccttcacggtgagtgttacagctcttaaggtagcacgtctggagttgtttgttcctcccggtgggctcgtggtcttgctgggctcaggagtgaagctgcagatcttcgcagtgagtattacagctcataaaagcagcgtggacccaaaga

SEQ ID NO: 2375 - DNA, 962 bp, Homo sapiens
  SIMILAR (591)..(770): 491254mologous to Homo sapiens 13kD differentiation- associated protein,accession number U34343,Smith-Waterman Score= 130.
  misc_feature (1)...(962): n = a,t,c or g
gtgcagccatattattttgatgacatgagctgtcctatgtacctaaccatcatttctaatgtttgcttattgtatataattcacaaatttccaaaaggatctagggtggttttaaaaaaatacttatgtggagacatagaattcaagtatgattgctacaaatgtgttttttccccagtctcaagaggaacaccttcttttctgaataccctgtacatctgggaacacactttcctatcctgtctgctactccctctgtggggagctggcagggaagcaaggattctctccctgtgggaaaggcctgagccccacccacagcagtgaatcatctcactccttgctgcgggttgctgcttaaagtttgccacacacctcctggagcttaccttcacgaattcacccagggtgttattcctccaatagctctcttatataagatcccaaaaagtcttttcttaataaaaaggttgtcttctttggatattatgcatctatgctttaaaaaaaaaagtttttcctttttnaaagggttcatcttcccaccccaggccggtcaccgatggggttgtatatactacctgaaatgaatggcaaaaacacatttttgggatgtggatggaagcatggtgcctcctgaatggcatcgttggcttcacatgtatgactgatgatcctccaacaacaaaaccacttactgctccgtaaatttcatttgggacggaaccattaaatttcaacgtggactggggcaccccaggaacaatatgttaccttattctaccactagaaaagaagattcaggagtggatcccaccttcaacaccttacaagtaaagacaatgaagaacagttgaaacatgcaaaatatggagcttttcatgtaattactcttttactgtttaccattcactataattcacaattaaaattgtgtgactaaacaaaaaaaaaaaaaaaaa

SEQ ID NO: 2376 - DNA, 787 bp, Homo sapiens
  SIMILAR (435)..(58): 431254mologous to Homo sapiens PRO2987,accession number AF116719,Smith-Waterman Score=155.
  misc_feature (1)...(787): n = a,t,c or g
aattttgccctcgaggccaagaattcggcgagggcaataagctcctacgtccagacgcccatgggtcatttcaccagaggaggaccaaggcttactatcacaagcctgtggggcaaaggtgaatgtggaaagatgctggaggagaaacccctgggaaaggctccctggttgtctaccccatggaccccagaggttctttgacagctttggcaacctgtcctctgccttttgcccatcatggccaacccccaaagtcaaggcacatggcaaagaaggtgctgactttccttgggagatgcccataaaagcacctgggatgatctcaaggggcaccttttgcccaagcctgaagtgaactgcactgttgacaagcctgcaatgtgggatcctgagaacttcaaagctcctggggaaatgttgctggtgacccgttttgggcaatccctttttcggcaaaagaatttcacccctgaaggttgcagggcttccctgggcaagaaagatgggtgactggaagtggccaatggccctgttccttccagattaccactgaagcctcttggcccatgaattcagaagctttcaaggataaggcttttattcttgcaagcaattacaaataataaatctatttctgctaagagatcaccaaannnnnatnntnnnnnnncccccggattttttatttagcgggccgcacctttttccccttttagggggggtaaatttatattgggccttgggccggggttttcaaaagcggggggannnnnnnnnnaaagagccc

SEQ ID NO: 2377 - DNA, 654 bp, Homo sapiens; identical to SEQ ID NO: 244
  SIMILAR (24)..(449): 1001254mologous to Homo sapiens alpha globin,accession number V00488,Smith-Waterman Score=733.
  misc_feature (1)...(654): n = a,t,c or g

SEQ ID NO: 2378 - DNA, 656 bp, Homo sapiens
  SIMILAR (42)..(188): 631254mologous to Pongo pygmaeus alpha-2 globin,accession number M12429,Smith-Waterman Score=154.
actcttctggtcccacaagactcagagagaacccacccatggttgctgtctcctgccgacaaagaccaacgtcaaggccggcttggggtaaggtcggcgcgcacgctgtgcgcagtatgtgtgcggaggccctggagaggatgttcctgtccttccccaccaccaagacctacttcccgcacttcgaacctgagccacggtttctgcccaggttaaaggggccacgggcaagaaggtggccgacgcgctgaccaaacgccgtggcgcaccgttggacgacatgcccaacgcgcttgttcggcccttgaagcgaccttgcacgcgcacaagctttcgggtgggacccggttcaacttcaaagctcctaaagccactggcctgcttggttgaccctggcccggcccaccttccccggccgagttcaacccctggcggttgcaacgtcttccctgggacaaagtttcctgggctttttgttgaagcaccgttgcttgaaccttccaaattaccgttaaagcttggaagccttcggttggccattgtttttttgcccctttggggcttccccccagcccctcctcccctttcctgcacccgtacccccgtggtctttgaaataaagtcttgagtgggcggcaaaaaaaaaaaaaaaaaaa

SEQ ID NO: 2379 - DNA, 1484 bp, Homo sapiens
  SIMILAR (945)..(853): 801254mologous to Homo sapiens PRO2852,accession number AF130079,Smith-Waterman Score=142.
gattactagttagcaaatgagggggtaaatattccagtggatacaagcttggactcttttcttgaagctttctttctatcagaagcatttgctgatattgctgacattgaaacattaaaagaaaatttgagaagcaatgggcatcctgaagctgcaagtatttctcattgtgctctctgttgcattgaaccatctgaaagctacacccattgaaagtcatcaggtggaaaagcggaaatgcaacactgccacatgtgcaacgcagcgcctggcaaattttttaggttcactccagcaacaacttgggtggcattctctcatctaccaacgtgggatccaatacatatggcaagaggaatgcagtagaggttttaaagagagagccactgaattacttgcccctttagaggacaatgtaactctatagttattgttttatgttctagtgatttcctggtataatttaacagtgcccttttcatctccagtgtgaatatatggtctgtgtgtctgatgtttgttgctaggacatataccttctcaaaagattgttttatatgtagtactaactaaggtcccataataaaaagatagtatcttttaaaatgaaatgtttttgctatagatttgtattttaaaacataagaacgtcattttgggacctatatctcagtggcacaggtttaagaacgaaggagaaaaaggtagtttgaaccttggtaaattgtaaacagctaataatgaagttattcttgacatgagaaaatcagtaattgggaccaggcgcggtggtttttgcctgtaatcccagcactttgagaggcagaggtgggcggataacttgaggtcagggagttggagaccagcctgaccaacatggtgaaaccctgtctctactaaaaatacaaaaattagccgggggtggtgacatgtgcctgtaattcccagttaactcaggaggctaagggcagggagattcgcttaaacccaggaggcggaggttgcagtgagccgagattgcaccactgcaactccagcctgggtgacaagagtgagactctgtctcaaaaaaaagaaagaaaattagtaattgtaagtacccctgataagcaaattagtaattgtcaatacccctgttaagcaattcctttttgcagtatatttctgaaatgacagaatgctgttttaaaaacaaagaaataaaatcctgctcctgactcggtcaaaatattttttaaagtctattgtttgttgtgcttgctgggtactaagaggctatttaaaagtataaaactgctttgtatccatgagggtttcattgtgtgttagcagcagtgagcttctattaaatgtatatgtcatttattttgtttaagtggctttcagcaaacctcagtcatattcttatgcagggtattgcgaaacaacttgtgttctattaatcgtgtcttcaattaaaagaccacagacttctggaaaaaaaa

SEQ ID NO: 2380 - DNA, 2401 bp, Homo sapiens
  SIMILAR (263)..(832): 641254mologous to Pan troglodytes angiotensinogen,accession number AF188487,Smith-Waterman Score=514.
  misc_feature (1)...(2401): n = a,t,c or g
cggcacgagactggaagaggtcccagcgtgagtgtcgcttgctggcatctgtccttctggccagcctgtggtctggccaagtgatgtaaccctcctctccagcctgtgcacaggcagcctgggaacagctccatccccacccctcagctataaatagggcatcgtgacccggccaggggaagaagctgccgttgttctgggtactacagcagaatggtatgcgagaagctagcaccccagtctgagatggcttctgccggttgtgagcctgagggccaccatcctctgcctcctggcctgggctggcctggctgcaggtgaccgggtgtacatacaccccttccacctcgtcatccacaatgagagtacctgtgagcagctggcagaggccaatgccgggaagcccaaagaccccaccttcatacctgctccaattcaggccaagacatcccctgtggatgaaaaggccctacaggaccagctggtgctagtcgctgcaaaacttgacaccgaagacaagttgagggccgcaatggttcgggatgctggccaacttttttggggtttccgtattatatgggcatgcacagtgaggctatggggcgtgggtccatgggggccaccgtcctctccccaacggctgtctttggcaccctggcctctctctatctgggagccttggaccacacagctgacaggctacaggcaatcctgggtgttccttggaaggacaagaactgcacctcccggctggatgcgcacaaggtcctgtctgccctggcaggctgtaacaggcctgctagtggccccaggcagggctgataagcaggccccagctgctggctgtccacggtggtgggcgtgttcacagccccaggcctgcacctgaagcagccgtttgtgcagggcctggctctctatacccctgtggtcctcccacgctctctggacttcacagaactggatgttgctgctgagactattgatcaggctcatgcaggctgtgacaggatggaagactggctgctccctgacgggagccaaggcggacagcaccctggctttcaacacctacgtccacttccaagggaagatgaagggcttctccctgctggccgagccccagggagttctgggtggacaacagcacctcagtgtctgttcccatgctctctgggcatgggcaccttccagcactggagtgacatccagggacaacttctcggtgactcaagtgcccttcactgatatgcgcctttctgctgctgatccagcctcactatgcctctgacctgggacaaggttgagggtctcactttccagcaaaacttccttcaactggatgaggaaactgttttccccggaccatccacctgaccatgccccaactggtgctgcaaggatcttatggacctgcaggacctgcttcgcccaggctcgagctgcccgccatttttgcacaccgagctgaacctgggaagaatttnaggcaattgaccgcatcagggtgggggaggtgttgaacagcatttttttttgagcttgaagcggatgagagagagcccacagagtctacccaacagcttaacaagccttgaggtcttggagggtacccttgacccgcccattccctgtttgctgtgtatgaatcaaggcgccactgcccttgcactttcctggggccgcgtgggcaaacccgcttgagcacagcattgagggccaggggccccagaaacacagtgcctgggcaaggcctcctgccccctggccttttgaggcaaaaggcccagcagccagataaccaacccgggacaaaatcagcggatgtgtcancccccaagtctccccacccttttccttcctaatgagtcgacttttgagcctggaaagccagcccgtttctccttgggtctaagtgtgcctgcatggaagtgagcaagtagaaagcctgcagcggcacaaatgcacctccccagttttgctggggtttatttttagagaaatggggggtgggggaggcaaagaacccagtgtttagccgcggggacctactgttcccaaaaagaattcccaacccgacccagcttgtttgtgaaacaaaaaaagtgttccccttttcaagtttgagaacaaaaattggggttttaaaattaaagtataccattttttgcatttgcttcggtttgtatttagtgtcttgaatgtaagaacatgacctccgtgtagtgtctgtaataccttagttttttccacagatgcttgtgatttttgaacaatacgtgaaagatgcaagcacctgaatttctgtttgaatgcgggaaccttagctggttatttctcccttgtgttagtaataaacgtcttgccacaataagcctccaaaaaaaaaaaaaaagaaaaa

SEQ ID NO: 2381 - DNA, 419 bp, Homo sapiens
  misc_feature (1)...(419): n = a,t,c or g
aaggttttcttttatttaaaagatcattcacaaaataccatatccatagatttactttctgtcatatagctgaatgtgttaagtgtttggaattccattcttacatttaaaagtcaactggattgcccagcagtttagatgcatgtgttttgttctttatcttatccacattgaagatgtaagtaggtcatctgaaagcatcgggtttgattacaccacataatgcatgtctttctgaagttaagtgttggtgttacacaaatggttcttatctcagaagcagagaagctgacaggtnnnnnnnnnnnnnnnnnnnnnnnnnnnnnnnnnnnnnnnnnnnnnnnnnnnnnnnnnnnnnnnnnnnnnnnnnnnnnnnnnnnnnnnnnncaggcaggcaggcacgcaggcaagcagggagg

SEQ ID NO: 2382 - DNA, 2649 bp, Homo sapiens
  SIMILAR (39)..(110): 1001254mologous to Homo sapiens wbscr1,accession number AF045555,Smith-Waterman Score=129.
  misc_feature (1)...(2649): n = a,t,c or g
ggcacgaggcctcgtgccgctcggagcggagacggcaaatggcggacttcgacacctacgacgatcgggcctacagcagcttcggcggcggcagagggtcccgcggcagtcgctggtggccatggttcccgtagccagaaggagttgcccacagagcccccctacacagcatacgtaggaaatctaccgtttcaatacggttcagggcgacatagatgctatctttaaggatctcagcataaggagtgtacggctagtcagagacaaagacacagataaatttaaaggattctgctatgtagaattcgatgaagtggattcccttaaaggaagccttgacatacgataggtgcactgttgggcgatcggtcacttccgtgtggacattgcagaaggcagaaaacaagataaaggtggcttttggattccagaaaaggtggaccagatgacagaaggcttcagggatgacttcttagggggcaggggagtttgtcccgcccaggcgaccggcgaacaggtccccccatgggcagccgccttcagagatggccctcccctccgtggattccaacatggatttcagagaacccacagaagaggaaagagcacagaggaccacgactccagctttaaaacctcgaacagtcgcgacgcccctcaatcaagtagccaatcccaactcttcttatcttccgggggtgccaggcctagagaggaagtcgttcaaaaggagcaagaatgagcctgcggttgggagggaatggggcgtggggggttagagcaggaccacagcctggtgagtccccgggcagccgtcctgcagccgccactcctgcgcctgccattggcctcctcacagcggaaacacagcttgtgagtgcatgtcagctgttaacaagtggtttttagtacattctgggctttgctgtatctatctagtgcctgtttgtgcgtttttttctttcttccgctgcttccccattttccttctgtcctttttctcctgctccttgttttcccagcaagcacatggggttcctcggaggaagcaagaggtggcccgcccgtgggggggcgtttggggctgcggtgctgcgtcatttttcctttgctttctctttactttagacactggcccaactccaggcgttttcctttcaattccctcagtgcttctcttctgacctgcatgttgaagttctgtaattgctggggcttccaacaaaaaccagagtcactgacagaagggaacagcagagaccttgttggtattcagctgtgatggatatagagaatcagaggcaccttgttttcacaactaggataaaaactatctgccgggtcctttccattcctatttagagggagtcctgggctccatgaccccctccccgagtgggactgtccaagcagataggctcacaccgagaaacaagtgaggctgaaaaggggggggctaatggaagaaccggtagggaagtccaccggagaagatgcagttgaattgctttgcatgcattcacacgtgtgtgtgtcccaagctagttcactccttttcgccgtgcgtgggtggaggctggcctctctggctgggtgcagtgaatggccagcgggtttcttttctgctgggccaaggcgctttgggggtggagggggtggtgctggtgctgcacttgggctgactgcggcgctgacgcagccgtttccccccatacctgttgcctgtgtgttgtgtggatctgttcctagtataggcaacataatgagatactgtgcttcccacctccccttcagttcagagccaaaatgggtctagaatctggcactttactcatttcctttgataaattgtactaatgcaagaactggtcaaggaaccttcagatagcagtaagaggactgcagctgtctaaggtctgcggccacatcttgggggacacactggactgttcccatgtgcagggttcagcagttatgttgggaagttgctaggggttaaggcttttggagcttgaacgcctgcgttgtgaacagattgaaaaatccttcagtaccccaagtccccagtctgtcctatggggagcagtttgggggcggcccggccagccaggaagcctgggaaagaggcccctcngccaggtgatggccagggcccaggcgtngccctgggggcaccccagccgggaatgtgccttagtatttgggtcacccagccgtcatcccctgggcttttccctacttgtgtcttggttacaaggcctcaagcaatcccacagaactctctctcccttccttccaacctgtcagcttctctgcttctgagataagaaccatttgtgtaacaccaacacttaacttcaagaaagacatgcattatgtggtgtaatacaaaccccctgctttcagatggcctacttacatctttcaatgtggataagataaagaacaaaacacgatgcatctaaactgctgggcaatccagttgacttttaaaatgtaagaatggaattccaaacacttaacacattcagctatatgacagaaagtaaatctatggatatggtattttgtgaatgatcttttaaataaaaagaaaaccttacgtaataaaaaaaaaaaaaaaaaaaaaattggcggccgcaagcttat

SEQ ID NO: 2383 - DNA, 861 bp, Homo sapiens
  SIMILAR (188)..(415): 291254mologous to Homo sapiens ras interactor,accession number L36463,Smith-Waterman Score=44.
atggtgcccagcgaggggctgtggagaggcctgcgggaaatgctggatcagagcaaccagtggggaggcaccgcgctggtggtgcctgccttcgaaatccgaagagcccgccgcatgcccatgaacaaaaacgagctggtgcagctctaccaggttggcgaggtgcggcccttctattatgggttgtgcaccccctgccaggcacccaccaactattcccgctgggtcaacctgccggaagagagcttgctgcggcccgcctacgtgtacttccaggcgcgactggccggggccggcaacagcacagccaggatcctgagcaccaaccacacgggtcccgaggatgccttcaacttcaacaattgggtgacgctgctgtcccagctgcccctgctgctcttcaccctcctcaactccttcctgtaccagtgcgtcccggagacgatggcgaaactgaggcctagagaggagcgcatcctttctgaagcccctcaatggttgctagggcatggggaggggtcactgcctaaagcaaggactgtacctgaagcttcttcctctcaccatgtccccacaggggagggcgcgggtgccgacgagttcctgcctctgctgagcctcgtcttggcccactgtgaccttcctgagctgctgctggaggccgagtacatgtcggagctgctggagcccagcctgcttactggagagggtggctactacctgaccagcctctctgccagcctggccctgctgagtggcctgggtcaggcccacaccctcccactgagccccgtgcaggagctacggcgctccctcagcctctgggagcagcgccgcctgcctgccacccactgcttccag

SEQ ID NO: 2384 - DNA, 2079 bp, Homo sapiens
  SIMILAR (4)..(1053): 991254mologous to Homo sapiens i-beta-1,3-N- acetylglucosaminyltransferase; poly-N-acetyllactosamine extension enzyme i-antigen; iGnT,accession number AF029893,Smith-Waterman Score=1842.
atggtcaaggcgcagctccgcaccgcgctggcctctggaggcgtcctggacgctagcggcgattaccgcgtctacaggggcctgctgaagaccaccatggaccccaacgatgtgatcctggccacgcacgccagcgtggacaacctgctgcacctgtcgggtctgctggagcgctgggagggcccgctgtccgtgtcggtgttcgcggccaccaaggaggaggcgcagctggccacggtgctggcctacgcgctgagcagccactgccccgacatgcgcgccagggtcgccatgcacctcgtgtgcccctcgcgttacgaggcagccgtgcccgacccccgggagccgggggagtttgccctgctgcggtcctgccaggaggtctttgacaagctagccagggtggcccagcccgggattaattatgcgctgggcaccaatgtctcctaccccaataacctgctgaggaatctggctcgtgagggggccaactatgccctggtgatcgatgtggacatggtgcccagcgaggggctgtggagaggcctgcgggaaatgctggatcagagcaaccagtggggaggcaccgcgctggtggtgcctgccttcgaaatccgaagagcccgccgcatgcccatgaacaaaaacgagctggtgcagctctaccaggttggcgaggtgcggcccttctattatgggttgtgcaccccctgccaggcacccaccaactattcccgctgggtcaacctgccggaagagagcttgctgcggcccgcctacgtggtaccttggcaggacccctgggagccattctatgtggcaggaggcaaggtgcccaccttcgacgagcgctttcggcagtacggcttcaaccgaatcagccaggcctgcgagctgcatgtggcggggtttgattttgaggtcctgaacgaaggtttcttggttcataagggcttcaaagaagcgttgaagttccatccccaaaaggaggctgaaaatcagcacaataagatcctatatcgccagttcaaacaggagttgaaggccaactggctccgttactctcctgagctgggggtggggggatcggggccggcttctccccttgcacgccgtggggagatggccgcggacgaagggcaccgtctgcaaagcactgaaccatcagggccttccctgcaggccgaaggcctgcgcgaatgtcggccagttactatggagaccggcccgcggtatcccagcatgcctcgggaccaaactgtccaactagtccagatgcctgtccagcctccaagcaaagacacagaagagatggaagcagagggtgattctgctgctgagatgaatggggaggaggaagagagtgaggaggagcggagcggcagccagacagagtcagaagaggagagctccgagatggatgatgaggactatgagcgacgccgcagcgagtgtgtcagtgagatgctggacctagagaagcagttctcggagctaaaggagaagttgttcagggaacgactgagtcagctgcggttgcggctggaggaagtgggggctgagagagcccctgaatacacggagccccttggggggctgcagcggagcctcaagattcgcattcaggtggcagggatctacaagggcttctgtctggatgtgatcaggaataagtacgaatgtgagctgcagggagccaaacagcacctggagagtgagaagctgctgctctatgacacgctgcagggggagctgcaggagcggatccagaggctggaggaggaccgccagagcctggacctcagctctggcccatacatcgtgtacatgcttcaagagatcgacatcctggaggactggacagccatcaaaaagccagggggaccctcagagcagctggcactgcacccaggattctcgtcttcctcctgcagacaggcggacccacaggcccctcagggtctgcccagccaggctcctgtggtgctgctgggccctcccactccatctggcactggcctggactcctcctctgccctcctcgaggcctgcacagctgtggccgtggagctgacctga

SEQ ID NO: 2385 - DNA, 809 bp, Homo sapiens
  SIMILAR (143)..(105): 921254mologous to Homo sapiens Human secreted protein, SEQ ID NO: 7115,accession number AAG03034,Smith-Waterman Score=70.
gagtgaagctgcagaccttcgtggtgagtgttacagctcttaaggcggcacgtctggagttgttcattcctcctggtgggttcgtggtctcgctggcttcaggagtgaagctgcagacctttgcggtgagtgttacagctcataaaggcagtgtggacccaaagactagacataaaggttctccaagtccccaccagactcaggagcccagctggctgcacccagtggatcccgcaccggggctgcaggtggagctgcctgccagtcccgcgccgtgcgcccgcactcctcagcccttgggtggtcaatgggactgggtgccatggagcagggggcggtgctcgtcggggaggcttgggccacgcagcagcccacggtggggggcaggctcaggcatggcgggctgcaggtcccgagccctgccccacggggaggcagctaaggcccagcgaaaagtcacagcagctgctggcccaggtgctaagcacctcactgcctggggctggcagggccagctggccactccgagtgtggggcctgccgagcccacacacacccagaactcgcactggcccgcaagcgccgtgtgcagccccagttcccgcctgcgcctctccctccacacctacccgcaagctgagggagccggctccggccttggccagcccaggaaggggctcccacagtgcagcagcaggctgaagggctcctcaagtgctgccaaagtgggagcccaggcagaggaggtgccgagagcgagcgaggcctgcgagggctgccagcacgctgtcacctctcataagtattaa

SEQ ID NO: 2386 - DNA, 2097 bp, Homo sapiens
  SIMILAR (795)..(923): 901254mologous to Mus musculus Similar to i-beta-1,3-N- acetylglucosaminyltransferase,accession number BC002191,Smith- Waterman Score=212.
  misc_feature (1)...(2097): n = a,t,c or g
gcggtaaatccgggcttgcggccgctggcgtagtctgatggccggtgtggtcgttgctgcgcgccccgagccccgagagccatgcatatgtccttcgccatctctggtgcgccttctaccagctgctgctggccgcgctcatgctggtggcgatgctgcagctgctctacctgtcgctgctgtccggactgcacgggcaggaggagcaagaccaatattttgagttctttcccccgtccccacggtccgtggaccagtgtcaaggcgcacgtccgcaccgcgctggcctctggaggcgtcctggacgttagcggcgatttaccgcgttctacaggggcctgctgaagaccaccatgggaccccaacgatgtgatcctgggccacgcacgccagcgtggaacaaacctgcttgcacctgttcgggtctgctgggagcgctggggaggggcccgctgttccgtgttcggtgttcgcggccaaccaaggaggagggcgcagctggccacggtgctggcctacgcgctgagcagccactgccccgacatgcccgccaggggtcgccatgcacctcgtgtgcccctcgcgttacgaggcagccgtgcccgacccccgggagccgggggagtttgccctgctgcggtcctgccaggaggtctttgacaagctagccagggtggcccagcccgggattaattatgcgctgggcaccaatgtctcctaccccaataacctgctgaggaatctggctcgtgagggggccaactatgccctggtgatcgatgtggacatggtgcccaactgaggggctgtggagaggcctgcgggaaatgctggatcagagcaaccagtggggaggcaccgcgctggtggtgcctgccttcgaaatccgaagagcccgccgcatgcccatgaacaaaaacgaggctggtgcagctctaccaggttggcgaggtgcggcccttctattatgggttgtgcaccccctgccaggcacccaccaactattcccgctggtttaacctgccggaagagagcttgctgcggcccgcctacgtggtaccttggcaggacccctgggagccattctacgtggcaggaggcaaggtgcccaactttcgacggagcggttttcggcagtacggcttcaaccgaatcagccaggcctgcgagctgcatgtgggcgggtttgattttgaggtccttaaacgaaggtttcttggttcataagggcttcaaagaagcgttgaagttccatccccaaaaggaggctgaaaatcagcacaataagatcctatatcgccagttcaaacaggagtttgaaggccaagtaccccaactcttccccgacggttgttgagcccttccctcccctaatctggagaagtcagcctcttggctcctcaggccaccatttaggcctggcctgactggggtaagaaatgtcgctccactttaccagaggtagctgtggtgttgaaacactgggacttgggatatggggtgctgggatcgattcctaagctttaccactaactaggctgttgtgggccttgagtaaatcccgttacctcttctgaggccttcggttacccctgtctgtaaaaaaagggagggtgaggaataccttaccttcacgggaactgttggggaggcttcagatggagatggctatatgtggaaaacattcctgtcaaaccttccgtacaaatgtgaagtattaaatattatcgcaagtattcattgttgttattaattattgttattattaaccaatccttgggtgggtagtaggagagcaaaaagtatgaaatgggatggagctaagaagtctgaatactttangtacttaatgaaatggactttttggaaagaaatcagatgaaggcataaaaatttagttcttagcncttcttgaacagaagcctaaaattcctggttctctcagggcttcgccttcaagggttctggaggagggaagggtctgcaggttccattgggtgacagcctgagatctgtcccttcaacgggcttgggctgggtatgtgcctaccgatgacaactgtgtaaataaatgcgtgttcacacccacaaaaaaaa

SEQ ID NO: 2387 - DNA, 441 bp, Homo sapiens
  SIMILAR (190)..(441): 941254mologous to Homo sapiens 9804,accession number U66711,Smith-Waterman Score=411.
  misc_feature (1)...(441): n = a,t,c or g
tgacgtcccgtttgctggtggaaccacgcgnnnnnnnnnnnnnnnnnnnnnnnnnnnnnnnnnnnnnnnnnnnnnnnnnnnnnnnnnnnnnnnnnnnnnnnnnnnnnnnnnnnnnnnnnnnnnnnnnnnnnnnnnnggacaggctgctttggtttgtgacctccaggcaggacggccatcctctccagaatgaagatcttcttgccagtgctgctggctgcccttctgggtgtggagcgagccagctcgctgatgtgcttctcctgcttgaaccagaagagcaatctgtactgcctgaagccgaccatctgctccgaccaggacaactactgcgtgactgtgtctgctagtgccggcattgtgaatctcgtgacatttggccacagcctgagcaagacctgtttcccgggctgccccattccagaaagcggcaatgttggt

SEQ ID NO: 2388 - DNA, 1229 bp, Homo sapiens
  SIMILAR (128)..(523): 491254mologous to Homo sapiens Human stem cell antigen 2,accession number AAW24847,Smith-Waterman Score=178.
  misc_feature (1)...(1229): n = a,t,c or g
agtcattttcccgggtcgacgatttcgtggagctcggccaggctggctggtacctgcgtccgcccggcgagcaggacaggctgctttggtttgtgacctccagggnaggacggccatcctctccagaatgaagatcttcttgccagtgctgctggctgcccttctgggtgtggagcgagccagctcgctgagtgtgcttctcctgcttgaaccagaagagcaatctgtacttgcctgaagccgaccatctgctccgaccagggacaactacttgcgtgactgtgtctgctagttgccggcattggggaatctcgtgacatttgggccacagcctggagcaagacctgtttcccctgccttgccccattcccagaagggcgttcaatgttgggtgtgggcttccatggggcattcagctttttgccagagctttctggtggcaattttcagttgcgggccgatggcgggcttgcggggcaagcgttcacccctgctgggtgcccgggcttgctgcttgagccttgctggccgggccctgctggcggtttgggcccctggaccgcccagaaccctgttcccccgatcccccagctcaggaaggaaagcccagccctttctggatcccacagtgtatgggagcccctgactcctcacgtgcgctgatctgtgcccttggtcccaggtcagggccnaccccctgcacctccacctgccccagcccctgcctctgccccaagtggcgcangcgtgccctcactttctcggggtggatgatgtgaccttcccttgggggaactccggaaaagggaacaagggttcccctggaaaccttacggtcccaaacatcaaggaccaaagtccccatggaacatgctgaacagggtcccccagggaanaccgtgtcaagtagggatgtgtgccctggctgtgtacgtgggttgtgcagtgcacgtgaagagcacgtggcggcttctgggggcccatgtttggggaggggaggtgtgccagcagccctggagagcctcagtccctgtagccccctgccctggcacaagctgcatgcacttcaagggcagcctttgggggttggggtttctgccacttccgggtctaggccctgccccaaatccagccatgtcctgccccagcccacccccacattggaagccctcctgcttgctttggtgcctcaaataaatacagatgtcccccaaaaaaaaaaaaaaaaa

SEQ ID NO: 2389 - DNA, 579 bp, Homo sapiens
  SIMILAR (400)..(525): 971254mologous to Mus musculus putative,accession number AK002355,Smith-Waterman Score=213.
gctggaagatcctgaaatgaaacttaagatttcaaggtcaaatatctgcaactttgttctcattacctattgggcgcagcttctctttaaaggcttgaattgagaaaagaggggttctgctgggtggcaccttcttgctcttacctgctggtgccttcctttcccactacaggtaaagtccatggttccctggcccgtgctggaaaagtgagagttcagactcctaaggtgagtgagagtattagtggtcatggtgttaggactttttttcctttcacagctaaaccaagtccctgggctcttactcggtttgccttctccctccctggagatgagcctgagggaagggatgctaggtgtggaagacaggaaccagggcctgattaaccttcccttctccaggtggccaaacaggagaagaagaagaagaagacaggtcgggctaagcggcggatgcagtacaaccggcgctttgtcaacgttgtgcccacctttggcaagaagaagggccccaatgccaactcttaagtcttttgtaattctggctttctctaataaaaaagccacttagttcagtca

SEQ ID NO: 2390 - DNA, 2646 bp, Homo sapiens
  SIMILAR (1015)..(1128): 891254mologous to Homo sapiens SEB4B,accession number X75315,Smith-Waterman Score=175.
aggatccttaattaaattaatccccccccccccctcccccgttctttctcgactccatctttcgcggtaagctgggaccgccggtttagttcgccaataatgcagcctctttgttccgcgtcccaggagcttacacactcttcgagggtgaccggccaggaaacgggtcgccccagatcaaaggctcatgtagcctcaacatggagggcatttcccccggaagatcaagtcgtgctcctggcaggcgcgccccctggaggatgaggccactctgggccagtgcggggtggaggcccttactaccctggaagtaaccaggcccgcatgcttggaggtaaagtccatggttccctggcccgtgctggaaaaagtgagaggtcagactcctaaggtggccaaacacggagagaagaagaagaagaagacaggtcgggctaagcggcggatgcagtacaaccggcgctttgtcaacgttgtgcccacctttggcaagaagaagggcaccacgttcaccaagatcttcgtgggcggcctgccgtaccacactaccgacgcctcgctcaggaagtacttcgagggcttcggcgacatcgaggaggccgtggtcatcaccgaccgccagacgggcaagtcccgcggctacggcttcgtgaccatggccgaccgggcggcagctgagagggcttgcaaagaccctaaccccatcatcgacggccgcaaggccaacgtgaacctggcatatctgggcgccaagccttggtgtctccagacgggctttgccattggcgtgcagcagctgcaccccaccttgatccagcggacttacgggctgaccccgaactacatgtacccaccagccatcgtgcaggccaccgtggtgatcccagccgcccctgtcccgtcgctgtcctcgccctacattgagtacacgccggccagcccggcctacgcccagtacccaccggccacctatgaccagtacccatacagccgcctcgcctgccacggatgcgcagcttcgtgggctacagctaccctgccgccgtgccccaagccctctcagccgcagcacccgcgggcaccactttcctgcagtaccaggcgccgcatgtgcagcctgacaggatgcattgaggggcgtatctgccccgaggactgtggcattgtcacctttacagctgacagagctgccaggtcattgagggctcgtgcaacagccccggttagactttcatggaggtgccaccagcacccgtgacctccgaagaccgctcgggcattccgcctgcgccctgggacagcggagagacggcttctctttaatctaggtcccattgtgtcttgagggaggacttttaagaatgactgagaactatttaaagacggcaatcccaggttccttgcacaccatgggcagcctctccttgcaccttctcctgcctctccacactccaggttccctcaggcttgtgtccccactgctgcatcggggcggggtgtcacagaccctctgcagcccctggctgccctggactgtgcagagatgcctgactccagggaaacctgaaagcaagaagttaatggactgtttattgtaacttgatcctcccgagctgtgagcgcagtctgaggtgtgaggacacggcctcctgttggagtcccattttctccatcagggcacgtgggcggcttcctcaagcccggaggagcttcccaggcgcacaggggccgccggttaacagggggccgcccgcaaaaggccccttttccagttcatagcactgaagttgcaactttttttttgtaattgttttgctactaagataatttcagaagttcagtctattttttcaagcggatactgccgccaccaagaatccaaaacctatttttgacttgggagagacttgcttttgttggttccgcccgtggagacgacgatagtgtttctgtataataaagtgtctgccggctcgcgggccaggatcctctcggtgggatgggcaccacagacaggaggcccctcaggcccgtgcgggccactgtctgctgccgcctgccggggtggcagagtgagttgtctcaggaccccgtcactgcgacgttgacactcctctcccttcccttcctccccaactccccaaacactgtggaaggggagaaggaagtgatccacagcattcaggccacttggggtctagaccatggtggtgccagcctggggggggcagtggccctcagctctgcccgctggagcggttgagtgcagaagggtgcgcctcttcccctctacccccgcaccacctgctgtgtgccagcctgagacggttcctgcctgtcttgggggttggtggagggtggaggcagtttttcccacccgtggcagggctgctaatggggcatccagggcctgtgggggtctggaggaggggacatgaggtgagaggtatcctggccgagggcggggggctgcgggggatcctcctccggacctacctcagggagctgagcgtgcaggcgctccagggcaggcctgggacagagtcaaggctcagagaataaaggtagctaatctcatcataatatttttattagaatgttctgatgataaaaataaaacttgttttctttaaagaaaaaaaaaaa

SEQ ID NO: 2391 - DNA, 461 bp, Homo sapiens
  SIMILAR (333)..(461): 1001254mologous to Homo sapiens histone acetyltransferase,accession number AF140360,Smith-Waterman Score= 222.
gacgctgagaggcaggaggcactagggatcgtccgcaggattgggactgatacagaggccgccacggagcccgccggagccaccgttcctgctgctgccgccgctgcccgaatcggaaccgtcgggccgcagccgccggcaatgccgcgaaggaagaggaatgcaggcagtagttcagatggaaccgaagattccgatttttctacagatctcgagcacacagacagttcagaaagtgatggcacatcccgacgatctgctcgagtcacccgctcctcagccaggctaagccagagttcttcaaggatttccaggtcctgttcgaaatctggcagtcttttggcactgaggagcctgcttactctaccagaagagtgacccgtagtcagcagcagcctaccccagtgacaccgaaaaaataccctcttcggcagactcgttcatctggttcagaaactgag

SEQ ID NO: 2392 - DNA, 465 bp, Homo sapiens
  SIMILAR (1)..(417): 891254mologous to Homo sapiens C/EBP-induced protein,accession number AF123073,Smith-Waterman Score=650.
gtggccccagaaaagtcagtgtgtaggcctcagccacttcaggtccggcgtacattctccctggacaccatcctcagctcctaccttctgggccagtggccacgagatgctgatggggccttcacctgctgcaccaatgacaaggccacccagacgcccctgtcctggcaagagctagaaggtgagcgtgccagttcctgtgcacacaagcgctcagcatcctggggcagcacagaccaccgaaaagagatttccaagttgaagcaacaactgcagaggacgaagctgagccgcagtgggaaagagaaggagcgaggttcaccactcctaggggaccacgcagtgcggggagcacttgagggcgtcccctcccagcttcccctcagggtcccctgtcttgcgactcagcccctgcttgcacaggagcctggaagggctcaaccaagagctggaggaggtatttgt

SEQ ID NO: 2393 - DNA, 2322 bp, Homo sapiens
  SIMILAR (124)..(696): 961254mologous to Homo sapiens UGTrel1,accession number D87989,Smith-Waterman Score=948.
ggacacccagcctttcttgaagatggcagcccatctccagtccttgcctttgctgcctcccctcgacctaatcatagctacatcttcaaacgggagcccccagaaggctgtgagaaagtgcgtgtgtttgaagaagccacaacaagaggaaagtatggggaaggagccaagcaggagacgttcacctttgccttaactttggtcttcattcaatgtgtgatcaatgctgtgtttgccaagatcttgatccagttttttgacactgccagggtggatcgtacccggagctggctctatgctgcctgttctatctcctatctgggtgccatggtctccagcaattcagcactacagtttgtcaactacccaactcaggtccttggtaaatcctgcaagccaatcccagtcatgctccttggggtgaccctcttgaagaagaagtacccgttggccaagtacctgtgtgtgctgttaattgtggctggagtggcccttttcatgtacaaacccaagaaagttgttgggatagaagaacacacagtcggctatggagagctactcttgctattatcgctgaccctggatggactgactggtgtttcccaggaccacatgcgggctcattaccaaacaggctccaaccacatgatgctgaacatcaacctttggtcgacattgctgctgggaatggctgttagttgcccagaccaagggcctgaattagttccaagatgcccttttgttcaagcccttgagaaaccttcctggaaaaacctgcaccagcaggatttgtttgctacttgttactggcacaatgaaggagagtcgtgtgtcagttgtcatgggaagacactcagtagtaaaacacagggaggaatcctgttcactggggagctctgggagttcttgagctttgctgaaaggtaccctgccatcatctataacatcctgctctttgggctgaccagtgccctgggtcagagcttcatctttatgacggttgtgtattttggtcccctgacctgctccatcatcactacaactcgaaagttcttcacaattttggcctctgtgatcctcttcgccaatcccatcagccccatgcagtgggtgggcactgtgcttgtgttcctggggtccacccagataatcttggataatctcaagatccttaatacatctgcaaaaacgttactatacaagacgcccctgtcctggcaagagctagaaggtgagcgtgccagttcctgtgcacacaagcgctcagcatcctggggcagcacagaccaccgaaaagagatttccaagttgaagcaacaactgcagaggacgaagctgagccgcagtgggaaagagaaggagcgaggttcaccactcctaggggaccacgcagtgcggggagcactgagggcgtcccctcccagcttcccctcagggtcccctgtcttgcgactcagcccctgcctgcacaggagcctggaagggctcaaccaagagctggaggaggtatttgtgaaggagcagggagaagaggagctgctgaggatccttgatatccctgatgggcaccgggccccagctcctccccagagtggcagctgtgatcatcccctcctcctcctggagcctggcaaccttgccagctctccttccatgtccttggcatctccccagccttgtggcctggccagtcatgaggaacatcggggtgccgccgaggagctggcatccacccccaacgacaaagcctcctctccaggacacccagcctttcttgaagatggcagcccatctccagtccttgcctttgctgcctcccctcgacctaatcatagctacatcttcaaacgggagcccccagaaggctgtgagaaagtgcgtgtgtttgaagaagccacgcaccaacggagagacagcttcgatataagggaaaaagtggctgaactcaggaagaaaagaaattctggactgagcaaagaacagaaagagaaatatatggaacacagacagacctatgggaacacacgggaacctcttttagaaaacctgacaagcgagtatgacttggatcttttccgaagagcacaagcccgggcttcagaggatttggagaagttaaggctgcaaggccaaatcacagagggaagcaacatgattaaaacaattgcttttggccgctatgagcttgatacctggtatcattctccatatcctgaagaatatgcacggctgggacgtctctatatgtgtgaattctgtttaaaatatatgaagagccaaacgatactccgccggcacatggatggatctggcagtctttga

SEQ ID NO: 2394 - DNA, 1617 bp, Homo sapiens
  SIMILAR (661)..(834): 1001254mologous to Homo sapiens C/EBP-induced protein,accession number AF123073,Smith-Waterman Score=311.
atggctctcccggctgcctgcctcagccccactgcgagactcacacagccccccaacccccgaggccgctgcttatctgctgtacggggcggggaccggccccctcatcctagagctgtcattggactgcggaaacccagaccttccaccccagccaatccacagcttagccttccctttcctgaggatgattggtcgatgagcctagcgatccaagccaagaccccaccctcacaccgcccccttcggttttccaacatcccaggggctgctgattggcctgtacagaagagggctggttctccagcgccaccaatgagaagacgcagaataggggagcgtcacacccagtcccagaacgctccagacgctgagaggcaggaggcactagggatcgtccgcaggattgggactgatacagaggccgccacggagcccgccggagccaccgttcctgctgctgccgccgctgcccgaatcggaaccgtcgggccgcagccgccggcaatgccgcgaaggaaggctgcttcaaattcttttaggacagtggtggatatgagtgaagacggggcaggcaggccacatctcttagaagaggaaggtgattgccacgtctccttcctccatgctgatggcaaggcgtgcgggctgtgttctcttgcagccagcgtcccatgctcggtggccccagaaaagtcagtgtgtaggcctcagccacttcaggtccggcgtacattctccctggacaccatcctcagctcctaccttctgggccagtggccacgagatgctgatggggccttcacctgctgcaccaatgacaaggccacccaggcctatgtgactgtctctaggagacagtgctcagtgtctcctgccacacgcgtcctggtgccaggtggctggacacccagcctttcttgaagatggcagcccatctccagtccttgcctttgctgcctcccctcgacctaatcatagctacatcttcaaacgggagcccccagaaggctgtgagaaagtgcgtgtgtttgaagaagccacgtctccagggtcctgaccgggcctttcctgacttcctgtcctgacaaggaacaaagtccattttcaacccgactggctcagccttctgccccgtcaacctgatgaagcccctcttccccggcatgggcttcatcttccgtaactgcccctcaaacccggggatctcctcttcccccggccagccccaggccaccacctcggaaggatccggaagcctccaaggcctccccactgccattcgagccatggcagtggcaccccaccttcagatgagcctgtgcttttccagagctccctgatggtctgagggtcccaccccatgccccactttaccatagagaccagtgccttggtggcaggtccctccccaggtcccctgagatggggtatggaggggcccttccctctcggccttcgagcactttctttcacttactgtgtcaaagccctggggtcctcttttttgatgggcaccggcccctctgaacgtgatgggaactggccttctccaatagtagctgggcagctcacaattcacacctgtgtaactggcaaaatcctcaattgggtgga

SEQ ID NO: 2395 - DNA, 498 bp, Homo sapiens
  SIMILAR (53)..(496): 891254mologous to Homo sapiens Amino acid sequence of a human phosphorylation effector PHSP-16,accession number AAY68784,Smith- Waterman Score=662.
  misc_feature (1)...(498): n = a,t,c or g
tgggtggcccaggggnnnattgaaattgatccactatccgngaggcggaattctagaggagttggagagaaggcgcaaagaagaagaggagaggagacgggcagaagaagaaaagaggagagttgaaagagaacaggagtgccgatggcgggagatggaggagcaccggcaggcagagaggctccagaggcagttgcaacaagaacaagcatatctcctgtctctacagcatgaccataggaggccgcacccgcagcactcgcagcagccgccaccaccgcagcaggaaaggagcaagccaagcttccatgctcccgagcccaaagcccactacgagcctgctgaccgagcgcgagaggttcctgtgagaacaacatctcgctcccctgttctgtcccgtcgagattccccactgcagggcagtgggcagcagaatagccaggcaggacagagaaactccaccagtattgagcccaggcttctgtgggagagagtgga

SEQ ID NO: 2396 - DNA, 504 bp, Homo sapiens
  SIMILAR (369)..(500): 701254mologous to Homo sapiens Human secreted protein, SEQ ID NO: 7678,accession number AAG03597,Smith-Waterman Score=150.
cagcgctgcgctcgatttctcgccgggccttagctgccttcccgccgggcatggctcgggacctgcagcccgccatgcctgagcctcccacccactccatgggctcctgtgcggccggagcctccctgaggagcaccaccccctgctccatggcgcccagtcccatcgaccacccaagggctgaggagtgcgagcgcacagcgtgggactggcaggcagctccacctgcagcccgggtgtgggatccactaggtgaagccagccgggcttctgagttgcgaagacctacagcttcactcctgaagccagcgagaccacgagcccccctgggaggaacgaacaactccagacgtgctgcattaagagctttaacactcagggcgaaggtctgcagcttctctcctgaagccagtgagagcacgagcccaccaggaggaatgaacaagtccagacgtgctgccttaagagctgtaacactcactgtgaaggtctgcagcttcactc

SEQ ID NO: 2397 - DNA, 392 bp, Homo sapiens
  SIMILAR (1)..(123): 1001254mologous to Homo sapiens NIK,accession number AB013385,Smith-Waterman Score=205.
tccggggaacgcttcagagtgagatcatcatccaagtctgaaggctctccatctcagcgcctggaaaatgcagtgaaaaaacctgaagataaaaaggaagttttcagacccctcaagcctgctgtaaggattgtgcaggatcagttttacttatttcagacttgaatgagatctttctattaaaaatatgtggttgagaggcctgcagtcttttctgcgagggcccctcacagatttgaggaattataaggaatgacctaaaccccagacatacttgttcccttccattggtatcgtctgctttccctgtataaagtctcaagtgagtaaaaccttttttctgttgttccagccatacacttggtgtacagtcagccttacaaaattatgca

SEQ ID NO: 2398 - DNA, 438 bp, Homo sapiens
  SIMILAR (32)..(436): 911254mologous to Homo sapiens NIK,accession number AB013385,Smith-Waterman Score=602.
ggcacgagcggcacgagtttttctccataggtcatctctgaatttgagcaatggtgaaacggaatctgtgaaaaccatgattgtccatgatgatgtagaaagtgagccggccatgaccccatccaaggagggcactctaatcgtccgccagactcagtccgctagtagcacactccagaaacacaaatcttcctcctcctttacaccttttatagaccccagattactacagatttctccatctagcggaacaacagtgacatctgtggtgggattttcctgtgatgggatgagaccagaagccataaggcaagatcctacccggaaaggctcagtggtcaatgtgaatcctaccaacattaggccacagagtgaccccccggaaattcgtaaatccggaaagggttaactttaaattttgggggctggcttatgggg

SEQ ID NO: 2399 - DNA, 1558 bp, Homo sapiens
  SIMILAR (653)..(787): 881254mologous to Homo sapiens NIK,accession number AB013385,Smith-Waterman Score=195.
ttcgagcagtggaagatgtacggccttctcacaaagtaacggactactcctcatccagtgaggagtcggggacgacggatgaggaggacgacgatgtggagcaggaaggggctgacgagtccacctcaggaccagaggacaccagagcagcgtcagtccccggtctcttttagagcggatgagagtattctctcagagcctgctttccactgggacctagttgttcctagactattccgtgaccccatgagcacttactatgtagttctcgtggattcagcagcaggtcgccttgtgtttccccttctcttcgttggtgtgtgcatatgtcagtgcttcccccagcaccccaggcgtgtactttattttttccttttgatttgaggatatatgaaaccaggtttttatttttgtttggtataactactttaattagtcataattattcattctaagtttttgctcacaaacaaatggcactggaaagaaattctttgttaaagggagaaagctaagcagttgcttttttggaggaggctttatatcggcagcctcatctcatgttttgattttgagaaggcgaaaagcctaaacaggatctccttgactccagagattaaggcctttcacgtctggattttttctccataggtcatctctgaatttgagcaatggtgaaacggaatctgtgaaaaccatgattgtccatgatgatgtagaaagtgagccgggcatgaccccatccaaggagggcactctaatcgtccgccaggtacccgtgtcttctctgttgtcagaggctgagcttctcctgtggtcattaacccacttgctcattcactcactcatgctgtttctccatcatcatctgttttcatgttaacaagtcccagagggtcaagtgtcgagtgtcgggggctagggaggcaggtgtgtactgcatgcccagaaggtagcgagtagtctccaccccacatcgctgctcctctgcatgtctgcggcagccctcattcaagcaccgcgctgagtctcacagtctatgtctgagcgggagagaagcccacagggagtccttaaacaggctcacagagtgaggaagccaggtctggagtctggcagagccagccaccatggctctgcagagccacgctgggctctgagtgtctgcagtgccacagtgggagcgggtgaggcaggcaggacgagcctcatcacaggcccagagactcggagagcagaagggttcgggaggtttctcttctatgttccaaaatgttagttttctcacttgttgaataattaaatgtgtgccacccagatatgctcagtttggatcactaagctttataactgtctgttcatttcttagcttagacttaattaaagtgatacgcttctcatttaaatagaacagggcacctatttagtattttggactttgccctaagtgtgtttcatgctatggcaatgcattcggatggaaagtaggaagaatgtggaaaagaccaggattcagagaatccacaggtactttctggagctttgcaaagaaagattt

SEQ ID NO: 2400 - DNA, 4979 bp, Homo sapiens
  SIMILAR (1001)..(2995): 691254mologous to Homo sapiens nik-like; similar to U88984 (PID:g1872546),accession number AC005035,Smith-Waterman Score=2179.
acggaggacatcagcagtgtctcgaggccttcttttcatgtctttcgttcagccactcctgcagcctccagtccacctcctcacagcacgcgtgcgtgtccctgggtacttgcagatagatggagtaaagattaaggaacacaatggcaagttaatgaactgttttaagaccaaaatgacttactacagctttatgaaatgtgtaggcctccctgcacaactgaccattggtttcagtggcccaagcagggaaactggcagtgaccctcgagcagcaaggaggggagaggaccctcagtccaaggacagaggagatggactgtctgaacaaaccgaggctcagagaagtggagtgcattgcccgaggtcacagttagtgggagagctggccgggcagtcccctcgcactatccctgcggctctccgtgtctgcctttacctcctatgcatcacgtcctataatcacacttcaaaggatgagtcctctaaggatgaagaggaagaaatcaaactggagataaatatgctaaagaaatactctcatcacagaaacattgcaacatattatggtgctttcatcaaaaagagccctccaggacatgatgaccaactctggcttgttatggagttctgtggggctgggtccattacagaccttgtgaagaacaccaaagggaacacactcaaagaagactggatcgcttacatctccagagaaatcctgaggggactggcacatcttcacattcatcatgtgattcaccgggatatcaagggccagaatgtgttgctgactgagaatgcagaggtgaaacttgaccaccaccaccatccaattgggtgggatgcagaagtcactgaaaaatcagcagaagttccaagtgctttaggttctctgaaagcactgaaggttgtggttcattcaaaaggccctctgctggtcactgttggagaagctggggaggcagccagatccaggcctcacagaagcttccagactgttgactttggtgtgagtgctcagctggacaggactgtggggcggagaaatacgttcataggcactccctactggatggctcctgaggtcatcgcctgtgatgagaacccagatgccacctatgattacagaagtgatctttggtcttgtggcattacagccattgagatggcagaaggtgctccccctctctgtgacatgcatccaatgagagcactgtttctcattcccagaaaccctcctccccggctgaagtcaaaaaaatggtcgaagaagttttttagttttatagaagggtgcctggtgaagaattacatgcagcggccctctacagagcagcttttgaaacatccttttataagggatcagccaaatgaaaggcaagttagaatccagcttaaggatcatatagatcgtaccaggaagaagagaggcgagaaagatgaaactgagtatgagtacagtgggagtgaggaagaagaggaggaagtgcctgaacaggaaggagagccaagttccattgtgaacgtgcctggtgagtctactcttcgccgagatttcctgagactgcagcaggagaacaaggaacgttccgaggctcttcggagacaacagttactacaggagcaacagctccgggagcaggaagaatataaaaggcaactgctggcagagagacagaagcggattgagcagcagaaagaacagaggcgacggctagaagagaagctgctggaggatgtgttccagcaaagtaagaaagaagatgacaaggattcccgggaagtttgtggacagaaatataggatgactggaaaacagtcagtctccaaaaataaagaaagaatacctgatttcttcaactgtgttgaaaggagtgttatgcaacaaaggagagagcgggaagctagaaggcagcaggaacgtgaacagcgaaggagagaacaagaagaaaagaggcgtctagaggagttggagagaaggcgcaaagaagaagaggagaggagacgggcagaagaagaaaagaggagagttgaaagagaacaggagtatatcaggcgacagctagaagaggagcagcggcacttggaagtccttcagcagcagctgctccaggagcaggccatgttactggagtgccgatggcgggagatggaggagcaccggcaggcagagaggctccagaggcagttgcaacaagaacaagcatatctcctgtctctacagcatgaccataggaggccgcacccgcagcactcgcagcagccgccaccaccgcagcaggaaaggagcaagccaagcttccatgctcccgagcccaaagcccactacgagcctgctgaccgagcgcgagaggtggaagatagatttaggaaaactaaccacagctcccctgaagcccagtctaagcagacaggcagagtattggagccaccagtgccttcccgatcagagtctttttccaatggcaactccgagtctgtgcatcccgccctgcagagaccagcggagccacaggacccatgtccaccttcccgcagtgaggtgctcagtcagagctctgactctaagtcagaggcgcctgaccctacccaaaaggcttggtctagatcagacagtgacgaggtgcctccaagggttcctgtgagaacaacatctcgctcccctgttctgtcccgtcgagattccccactgcagggcagtgggcagcagaatagccaggcaggacagagaaactccaccagcagtattgagcccaggcttctgtgggagagagtggagaagctggtgcccagacctggcagtggcagctcctcagggtccagcaactcaggatcccagcccgggtctcaccctgggtctcagagtggctccggggaacgcttcagagtgagatcatcatccaagtctgaaggctctccatctcagcgcctggaaaatgcagtgaaaaaacctgaagataaaaaggaagttttcagacccctcaagcctgctggcgaagtggatctgaccgcactggccaaagagcttcgagcagtggaagatgtacggccacctcacaaagtaacggactactcctcatccagtgaggagtcggggacgacggtatgaggaggacgacgatgtggagcaggaaggggctgacgagtccacctcaggaccagaggacaccagagcagcgtcatctctgaatttgagcaatggtgaaacggaatctgtgaaaaccatgattgtccatgatgatgtagaaagtgagccggccatgaccccatccaaggagggcactctaatcgtccgccagagtacagttgaccaaaagcgtgccagccatcatgagagcaatggctttgccggtcgcattcacctcttgccagatctcttacagcaaagccattcctcctccacttcctccacctcctcctccccatcctccagccagccgacacccaccatgtccccacagacaccccaggacaagctcactgctaatgagactcagtccgctagtagcacactccagaaacacaaatcttcctcctcctttacaccttttatagaccccagattactacagatttctccatctagcggaacaacagtgacatctgtggtgggattttcctgtgatgggatgagaccagaagccataaggcaagatcctacccggaaaggctcagtggtcaatgtgaatcctaccaacactaggccacagagtgacaccccggagattcgtaaatacaagaagaggtttaactctgagattctgtgtgctgccttatggggagtgaatttgctagtgggtacagagagtggcctgatgctgctggacagaagtggccaagggaaggtctatcctcttatcaaccgaagacgatttcaacaaatggacgtacttgagggcttgaatgtcttggtgacaatatctggcaaaaaggataagttacgtgtctactatttgtcctggttaagaaataaaatacttcacaatgatccagaagttgagaagaagcagggatggacaaccgtaggggatttggaaggatgtgtacattataaagttgtaaaatatgaaagaatcaaatttctggtgattgctttgaagagttctgtggaagtctatgcgtgggcaccaaagccatatcacaaatttatggcctttaagtcatttggagaattggtacataagccattactggtggatctcactgttgaggaaggccagaggttgaaagtgatctatggatcctgtgctggattccatgctgttgatgtggattcaggatcagtctatgacatttatctaccaacacatatccagtgtagcatcaaaccccatgcaatcatcatcctccccaatacagatggaatggagcttctggtgtgctatgaagatgagggggtttatgtaaacacatatggaaggatcaccaaggatgtagttctacagtggggagagatgcctacatcagtagcatatattcgatccaatcagacaatgggctggggagagaaggccatagagatccgatctgtggaaactggtcacttggatggtgtgttcatgcacaaaagggctcaaagactaaaattcttgtgtgaacgcaatgacaaggtgttctttgcctctgttcggtctggtggcagcagtcagctccagaattccttgtctctgaatgactctgtcttgtgggtgtctgacagtggcgacgatgaacatgccgttggttttattggcagtgggcacaaggaggcttttcataagatgaaacatgccacagtgaacacactcgtgtacatatcaagagaagaaggaaaggcacaggtggagaacagtaaaaggcctggtaggcatgatcgccgtcgggcaaatctggggccatgctctcagtgttggcacctcgccttagtctccagggctgcccgtgctgcatcatcatcaattaggcatattaataaaccacttcgtgtttcatcctag

SEQ ID NO: 2401 - DNA, 505 bp, Homo sapiens
  SIMILAR (272)..(505): 431254mologous to Homo sapiens Human myelin oligodendrocyte glycoprotein gene,accession number AAZ29204,Smith-Waterman Score= 133.
ttgtgacctagcctcccaaagagtaaaattcaagtaaaagaacagctgtcaattgataataagatgtatcatgtaagaagatatataaattggcggggcacagtggctcacgcctataatcccagcactttcggaggccaaggcaagaagatcgcttgagcttaagagtttcagaccagcctgggcaacacagtgagaccctgtctcaaaaaaaaaagaaaaaaaaagaaaaaaaaaaaaaggccaggcgcagtggctcacgcctgtaatcccaacactttgggaggccgaggtgggcggatcacctgaggtcaggagttcgagaccagcctgaccaacatggtgaaaccccatctctactaaaaatacataaattccccgggcatggtggtgtgcgcctgaggcaggagaatcgctggaacccgggaggcagaggctgcagtgagctgagatcgcaccactgcactccagtctgggtgacagagaaagactctgtctcaaaaaa

SEQ ID NO: 2402 - DNA, 1791 bp, Homo sapiens
  SIMILAR (67)..(1098): 991254mologous to Homo sapiens vacuolar protein sorting protein 11,accession number AF308800,Smith-Waterman Score=1820.
atgcctgtaatcccagctactcaggaggctgaggcagaagaatcgctcgatcctgggaggcggaggttgcgaaccattggaaagttggagccatcctacgtgatccgcaagtttctggatgcccagcgcattcacaacctgactgcctacctgcagaccctgcaccgacaatccctggccaatgccgaccataccaccctgctcctcaactgctataccaagctcaaggacagctcgaagctggaggagttcatcaagaaaaagagtgagagtgaagtccactttgatgtggagacagccatcaaggtcctccggcaggctggctactactcccatgccctgtatctggcggagaaccatgcacatcatgagtggtacctgaagatccagctagaagacattaagaattatcaggaagcccttcgatacatcggcaagctgccttttgagcaggcagagagcaacatgaagcgctacggcaagatcctcatgcaccacataccagagcagacaactcagttgctgaagggactttgtactgattatcggcccagcctcgaaggccgcagcgatagggaggccccaggctgcagggccaactctgaggagttcatccccatctttgccaataacccgcgagagctgaaagccttcctagagcacatgagtgaagtgcagccagactcaccccaggggatctacgacacactccttgagctgcgactgcagaactgggcccacgagaaggatccacaggtcaaagagaagcttcacgcagaggccatttccctgctgaagagtggtcgcttctgtgacgtctttgacaaggccctggtcctgtgccagatgcacgacttccaggatggtgtcctttacctttatgagcaggggaagctgttccagcagatcatgcactaccacatgcagcacgagcagtaccggcaggtcatcagcgtgtgtgagcgccatggggagcaggacccctccttgtgggagcaggccctcagctacttcgctcgcaaggaggaggactgcaaggagtatgtggcagctgtcctcaagcatatcgagaacaagaacctcatgccacctcttctaggtacttgggaagacagatgggatgagctgcgggtgcggcggtaccgagaggagaccacccgtatccgccaggagatccaagagctcaaggccagtcctaagattttccaaaagaccaagtgcagcatctgtaacagtgccttggagttgccctcagtccacttcctgtgtggccactccttccaccaacactgctttgagagttactcggaaagtgatgctgactgccccacctgcctccctgaaaaccggaaggtcatggatatgatccgggcccaggaacagaaacgagatctccatgatcaattccagcatcagccgcctaaggacgacaagaagaagaaggacgctggaaagtcggccaagaaagacaaagacccagtgaacaaatccgggggcaaggccaaaaagaagaagtggtccaaaggcaaagttcgggacaagctcaataacttagtcttgtttgacaaagctacctatgataaactctgtaaggaagttcccaactataaacttataaccccagctgtggtctctgagagactgaagattcgaggctccctggccagggcagcccttcaggagctccttagtaaaggacttatcaaactggtttcaaagcacagagctcaagtaatttacaccagaaataccaagggtggagatgctccagctgctggtgaagatgcatga

SEQ ID NO: 2403 - DNA, 460 bp, Homo sapiens
  SIMILAR (12)..(107): 931254mologous to Mus musculus putative,accession number AK012696,Smith-Waterman Score=153.
  misc_feature (1)...(460): n = a,t,c or g
cccacgcgtacgaaggacttatcaaactggtttcaaagcacagagctcaagtaatttacaccagagataccaagggtggagatgctccagctgctggtgaagatgcatgaataggtccaaccagctgtacatttggaaaaataaaactttattaaatcagaacnnnnnnnnnnnnnnnnnnnnnnnnngaaaaaaaaatnnnnnnnnnnnnnnnnnnnnnnnnnnnntaaaaatatnnnnnnnnnnnnnnnntntnnnnnnnnnnncttttaaaaatatcccggggggggccaaaatattcggggggagggaaataaannnnnnnnnnnnnnnggggggtttaaataatcctcccggggggtgtttgggaaaacaaccttttttnnnnnnnnnnaaagcagtcccccctccctcacaaatacttgttttcctaaaagaataaaaaggtttgtggggaggt

SEQ ID NO: 2404 - DNA, 423 bp, Homo sapiens
cagtctaattcaggggtaaatgagttaggtatgtaaggaaaaaaggaggatgagttaagttctaaggccaaggtgaaaggagcccccttttagatttccaacaggaaaagtctgaaatctcagcacaagaatgatcaaagatgcacagtttggtaagttgtttttctgggcagggtggggaaaatgtaagttgttgacctgtgttagaattaactataacacgaagaattaaagagtgggccctattacctattgacatttcgtgactgttttctccatttctgggcccttgtatccaaaaggtagcccttaattttatgtaaacctctgcacccacttgaaaggcactaagcaaaagaaatatttgtcttgttaataaaaatagaaatatcaaaatcccatatcctaaaaaaaaaaaaaaaa

SEQ ID NO: 2405 - DNA, 499 bp, Homo sapiens
  SIMILAR (493)..(305): 771254mologous to Homo sapiens Human secreted protein, SEQ ID NO: 7867,accession number AAG03786,Smith-Waterman Score=270.
  misc_feature (1)...(499): n = a,t,c or g
gagaagacgacagaagggcagggatattctccagaacagaacctaggatgcttggtgcaatcatccctccccacccagaatcagcttcagttccaaatttgaatgtttccggtttattttagaaaaaaatggctttttccctttttgtccctctcctccagaagattccccaagtacacagcactgaataagaatgaatgaatctggccaggtgcggtggctcactcctgtaatctcagcattttgggaggcagaggcaggcagatcccntgaggtcaggggttcgagatcagcctggccaacatggcaaaatcacatctctactaaaaatacaaaaattagccaggcgtggtggtgcatgcctgtagtcccagctactcaggaggctgaggcaggagaatcgcttgaacccaggaggcggaggttgcagtgagccgagatcatgccattgcactccagcctgggagacagagcaagactctatctcaaaaataaaaaa

SEQ ID NO: 2406 - DNA, 1179 bp, Homo sapiens; identical to SEQ ID NO: 2195
  SIMILAR (733)..(1155): 921254mologous to Homo sapiens hydroxymethylbilane synthase,accession number M95623,Smith-Waterman Score=627.

SEQ ID NO: 2407 - DNA, 3411 bp, Homo sapiens
  SIMILAR (766)..(1581): 541254mologous to Arabidopsis thaliana putative protein,accession number AL391146,Smith-Waterman Score=761.
atgagtgaagcccccagattcttcgttggaccagaagatacagaaataaatcctggaaattatcgacatttcttccaccatgcagatgaagacgatgaggaggaagatgattctccaccagaaaggcagattgtggttggaatatgttccatggcaaagaaatccaaatccaaaccaatgaaggaaattcttgaacggatctccttatttaaatatatcacagtagtagtatttgaagaggaggttattttgaatgaaccagtggaaaactggcctttatgtgattgtcttatttctttccattctaaaggatttccactggacaaagcggttgcctatgcaaaactcaggaatccatttgtaatcaatgacttgaatatgcagtatctcatacaagataggagagaagtatatagtattcttcaagctgaaggtattttacttcctcgttatgctattttgaaccgtgacccaaataatcccaaaggagtgaagctgcagaccttcgcggtgagtgttacagctcttaaggtagcgcgtctggagttgttcgttcctcccggtgggctcttggtcttgctgggctcaggtgtgaagctgcagatcttcgcgggctgcaggtggagctgcctgccagtcacgcgccgtgtgctcgcactcctcagcccttgggtggtcgatgggactgggcgccgtggagcagggggtggtgctcgttggggaggctcgggccgcacaggagcccatggagtggaatgtaatctgattgaaggggaagatcatgtagaagtaaatggggaagtttttcaaaagccatttgtagaaaagccagtcagtgcagaagatcacaatgtttacatttattacccaacttctgctggtggtggaagtcaaagactctttagaaagattggcagtagaagtagtgtttattctccagaaagcaatgtacgaaaaacaggctcatatatatatgaagagtttatgcccacagatggtactgatgttaaggtttatacagtgggtccagattatgcccatgctgaagctcgaaaatctccagcacttgatggcaaggtggaacgagacagtgaaggaaaagaagtaagataccctgttattctcaatgcacgagagaaattaattgcttggaaagtctgccttgcttttaagcaaacagtttgtggctttgatttgttacgggccaatggacagtcctatgtctgtgatgtcaatggcttcagttttgtgaaaaattccatgaagtattatgatgactgtgcaaaaatacttggaaatattgtaatgcgagaacttgctccacaatttcatattccatggtcaatacccttagaagctgaagatatcccaattgtaccaactacatctggaactatgatggaacttagatgtgtcatagctgttatacgtcatggggatcgaacaccaaaacaaaaaatgaaaatggaagaagtgctagatattgcacgacagcttcttatggagctagggcaaaataatgattctgaaattgaagaaaacaagccaaaacttgaacaacttaagactgtattagagatgtatggtcatttttctggaataaatcgtaaggttcagttgacctatctccctcatggttgtcctaaaacatctagtgaagaggaggacagccgaagagaagaaccatctttacttttggttctaaaatggggaggtgaattaactcctgcaggcagggtccaggctgaagaacttggaagagccttcaggtgtatgtatcctggaggtcaaggagattatgcaggatttcctggttgtggtttacttagattacatagcacctacagacatgacctcaaaatatatgcctctgatgaaggacgagtccagatgactgcagctgcttttgcaaaggggcttttagctttggaaggagagcttacacccattcttgttcaaatggtgaaaagtgcaaatatgaacggtcttttggatagtgatagtgactctctgagcagttgtcagcaacgtgtgaaggcaaggcttcatgaaatacttcagaaagacagagattttactgctgaagattatgaaaagcttactccatctggaagcatttctcttatcaaatcaatgcatttaattaaaaaccctgtgaagacctgtgataaagtttattccttaattcagagtttgacttctcaaatcagacatcgaatggaagatcctaaatcatcagatattcagctttaccatagtgaaacattggagcttatgctacgtagatggtccaagttagagaaagactttaaaacaaagaatggaagatatgatattagtaaaatccctgacatatatgactgtataaaatatgatgtccagcataatggttccttgaaattagaaaacacaatggaattatataggctttcgaaggcattagcagatattgttatccctcaggaatatggtataactaaagctgaaaaactggagattgccaaaggctactgtactcctctggttagaaaaattcgctcagaccttcagaggacacaagatgatgacactgtaaataaacttcatcctgtgtattctagaggtgttctgtctcctgaacgtcatgttcgtactagattatattttaccagtgaaagtcatgtacattctttgctgtctattcttcgctatggtgccttatgcaatgaatcaaaggatgaacagtggaaacgagctatggattatttaaacgttgtcaatgagctcaactacatgactcagattgttatcatgctttatgaggatcctaataaggatctttcctcagaagaacgctttcatgttgaattacactttagtccgggagccaaaggttgtgaagaagacaaaaatttgccatctggctatggatatagaccagcttccagagagaatgaaggcaggagaccttttaaaattgataatgatgatgaaccacatacttctaaaagagatgaagttgatcgagctgtgatattgtttaaaccaatggtatcagagccaattcatatacacaggaagtctccacttccaagatctaggaagacggctacaaatgatgttgtatctgaaaatgctaattacctgagaacaccaagaactcttgtggaacagaagcagaatcctactgtagcctctacagctttacgttccagtccaataatgagaaaaaaagtatctttaaatacgtatacacctgcaaagatcctcccaacaccaccagctaccttaaagagcactaaagcaagcagcaaaccagctacaagtggaccttctagtgcagttgttcctaatacctcatctcggaaaaagaatataactagcaaaacagaaacgcatgaacacaaaaaaaacactgggaaaaagaaatga

SEQ ID NO: 2408 - DNA, 495 bp, Homo sapiens
  SIMILAR (278)..(373): 1001254mologous to Mus musculus putative,accession number AK012696,Smith-Waterman Score=169.
atcttgacgaggctgcggtgtctgctgctattctccgagcttcgcaatggtaagcttcaggggtgtgaagtcgccggcgttcttgggtttgaggactcagtggggagagccttcggcgggagcgctccttggcctgccggcctcggttgcagggcgggcgcggttattgcttggcccatgtgctctggtggtggagtttgcgggggctgggggcgcagtattaggggactttggcgctatttgaggacctggttgcattcccgctgccctcctacagccgcctaaggacgacaagaagaagaaggacgctggaaagtcggccaagaaagacaaagacccagtgaacaaatccgggggcaaggccaaaaagaaggtagaaataagacctctctgaaagagactaggggtaactctctcgtaaccctctagtaatagggaacttggataagtaagtggttttcaggtgtagaattctagaggcaaaatgggagagtt

SEQ ID NO: 2409 - DNA, 1420 bp, Homo sapiens
  SIMILAR (1393)..(821): 871254mologous to Homo sapiens vacuolar protein sorting protein 11,accession number AF308800,Smith-Waterman Score=848.
  misc_feature (1)...(1420): n = a,t,c or g
gttgtgtctggggccggattatacccatgccttccggtttcaggnaggcaggtggggcagtcagcatcactttccgagtaactctcaaagcagtgttggtggaaggagtggccacacaggaagtggactgagggcaactccaaggcactgttacagatgctgcacttggtcttttggaaaatcttaggactggccttgagctcttggatctcctggcggatacgggtggtctcctctcggtaccgccgcacccgcagctcatcctgtgcaatctgctggctctgtttctgtagtttttggaccaggtagtccctgatgacggagagtgtggctgtggagttgtgggccagggtctgcaccactagaagaggtggcatgaggttcttgttctcgatatgcttgaggacagctgccacatactccttgcagtcctcctccttgcgagcgaagtagctgagggcctgctcccacaaggaggggtcctgctccccatggcgctcacacacgctgatgacctgccggtactgctcgtgctgcatgtggtagtgcatgatctgctggaacagcttcccctgctcataaaggtaaaggacaccatcctggaagtcgtgcatctggcacaggaccagggccttgtcaaagacgtcgcagaagcgaccactcttcagcagggaaatggcctctgcgtgaagcttctctttgacctgtggatccttctcgtgggcccagttctgcagtcgcagctcaaggagtgtgtcgtagatcccctggggtgagtctggctgcacttcactcatgtgctctaggaaggctttcagctctcgcggggtttattggcaaagatggggatgaaactcctcagagttggccctgcaagcctggggcctccctatcgctgcggccttcgaggctgggccgataatcaagtacaaagtcccttcagcaactgagttgtctgctctggtatgtggtgcatgaggatcttgccgtagcgcttcatgttgctctctgcctgctcaaaaggcagcttgccgatgtatcgaagggcttcctgataattcttaatgtcttctagctggatcttcaggtaccactcatgatgtgcatggttctccgccagatacagggcatgggagtagtagccagcctgccggaggaccttgatggctgtctccacatcaaagtggacttcactctcactctttttcttgatgaactcctccagcttcgagctgtccttgagcttggtatagcagttgaggagcagggtggtatggtcggcattggccagggattgtcggtgcagggtctgcaggtaggcagtcaggttgtgaatgcgctgggcatccagaaacttgcggatcacgtaggatggctccaactttccaatggttgtgggattacaggcatgtgtcaccat

SEQ ID NO: 2410 - DNA, 861 bp, Homo sapiens
  SIMILAR (409)..(744): 411254mologous to Mus musculus putative,accession number AK012696,Smith-Waterman Score=165.
aacaccgacacgtttttggccttcaaacaggggccgagccccactagatcagttaaaaataacacagcaggcacagcggcagacacttcgcacaacagacccattttcatgatcctaatgggaaaaagaacgagtggtgacgggaagataaactctcacattttgactctagaaatctacacctgaaaaaccacttactatacaagttacctattactagagggttacgagagagttacccctagtctctttcagagaggtcttatttctaccttctttttggccttgcccccggatttgttcactgggtctttgtctttcttggccgactttccagcgtccttcttcttcttgtcgtccttaggcggcattgcgaagctcggagaatagcagcagacaccgcagcctcgtcaagatgtcggacaaaaaagccaaagacccagtgaacataatccggggggcaagggccaaaaaggaagaattggtccaaaggcaaaagttccgggacaagcttcaataactttagtcttgtttgacaaagctacctatgataaactctgtaaggaagttcccaactatacacctaataaccccagctgtgggctctgagagacttgaagattcgaggctccctgggccagggcaagccctttcaggagctccttagttaaaggatttattccaaactggttttcaaagcacagagcttcaagttattttacaccaggaattaccaagggtggaagatgctcccagcttgctgggtgaagattgcatgaataggtccaacccacctgtacatttggaaaaataaaactttattaaatcaaaaaaaaaaaaaaaaaaaaaaaaaatttcatt

SEQ ID NO: 2411 - DNA, 800 bp, Homo sapiens
  SIMILAR (372)..(106): 551254mologous to Homo sapiens PRO2898,accession number AF116717,Smith-Waterman Score=138.
  misc_feature (1)...(800): n = a,t,c or g
aattttgccctcgaggccaagaattcggcgagggcaataagctcctagtcccagacgcccatggggtcatttcacagaggaggaccaaggctactatcaaaaaacctgtggggcaaaggtgaaatgtggaaagatgctggaggaaaaaacccctgggaaaggctcccctggttgtcctaccccatgggaccccagaggttctttgaccagcttttggcaaacctgtccctctgccctctgcccatcatgggcaaccccccaaaagtcaaaggcacatggccaagaaaggtgctgacttcccttgggagatgcccataaaagcacctgggatgatctcaaggggcaccttttgcccaagcctgaagtgaacttgcactgttgacaagcctgcaatgtgggatcctgagaacttcaaagctcctggggaaatgttgctggtgacccgttttgggcaatcccattttcggcaaaagaatttcacccctggaggttgcagggcttcctggggcagaaagatgggtgacttggagttggccagtgcccttgttccttccagataccactgaagctcaattgcccatgaatgcagagcttttcaaggataaggcttttattcttgcaagcaattacaaataataaatctatttctgctaagagatcaccaaannnnnatnntnnnnnnncccccggattttttatttagcgggccgcacctttttccccttttagggggggtaaatttatattgggccttgggccggggttttcaaaagcggggggannnnnnnnnnaaagagccc

SEQ ID NO: 2412 - DNA, 592 bp, Homo sapiens
gggctctgtgtgtctggatgcgccttaggttccaagacaattgcccaataccttgtaggtcaagggcccagggcccccccacagcaaggttgagggacccctttccagtagggctgtcccaagccccactcaatgggccaggtttctggcccacttttgttaatagcacatggatcaatattagtaaccccatccaagattgacctgtgaaaagaggttccaggggaatctccctcagtgccagttacttagtgatgtgttacccaggatgcagcaggtgtgtgcaggtatcttgctctctaggcctgtgtgtgtgtgtaagtgtgtgtgtatatgggtgtgggtgtgtttgtgtgtggtggttgtggggggggtgttggaggttctatttcatttaaaaatgtattcatttccctggccccaccccaaagtttgtctgtggtgttatagtggtaactgcagttcctcctttggaatgtagactgtatatgtttaataactccccttctctatccttgctcaaaatgtgggataacgcgatgactgtgaccctggttggaaattaaacttgttttatgcaaaaaaaaaaaaa

SEQ ID NO: 2413 - DNA, 405 bp, Homo sapiens
tgcacacacatgctgcatcctgggtaacacatcactaatattgatccatctgctatcaacaaaagtggccaggaaacctggccccatggagtggggcttgggacagccctactgggaaggggtccatcagccatgctgtggggggccctgggccctgaccttagcaggttatgggcagctgtctcggagctcagggcgcagccagcacacacaggagcccacaggacagccacgtcttcacagaaactacagaagtcaggacccaggcgaggacctcaggaacaagtgccccctgcagacagagagacgcagtagcaacagcttctgaacaactacataataatgcggggagaatcctgaagaccactgcatcccacaagcactgacacccacttcaggatttta

SEQ ID NO: 2414 - DNA, 488 bp, Homo sapiens
  SIMILAR (128)..(295): 1001254mologous to Homo sapiens ADP-ribosylation factor 3,accession number M74493,Smith-Waterman Score=275.
  misc_feature (1)...(488): n = a,t,c or g
gcggccgcagcggcgcagctgatagcaggaacaggatcaagtcttccataccagggaccaggccaaaaccagactgccactgcccctacttgggccccactgtccccagaaagcagctgctgtgatcatgggcaatatctttggaaaccttctcaagagcctgattgggaagaaggagatgcgcatcctgatggtgggcctggatgccgcaggaaagaccaccatcctatacaagctgaaactcggggagatcgtcaccaccatccctaccattgggttcaatgtggagacagtggttgctgtcctcttggcatctgagtcctttccctgtccccacaagcccttctactccctgtttgcctttcctttgccaccctctccctgttttacatggaaattgcacgggcctctctgtgtntgcgtgcatgtgtgcgcctgtatatacatgtatagagagatatatntgtgggggcccgggggaagcgcgg

SEQ ID NO: 2415 - DNA, 3567 bp, Homo sapiens
  SIMILAR (643)..(1008): 1001254mologous to Homo sapiens ALR,accession number AF010403,Smith-Waterman Score=635.
  misc_feature (1)...(3567): n = a,t,c or g
atgtccaaccccnccgaacccagcagccaatcgaagcccggcaaggagcagggtgaaggggccacggtctttccttccccttgtcaaaagcggctgtcgagcagtcgccttttacaccagcccgacgggggccgcgggggcgaagctgagggcgggaggccgggggactccacactggaggagcgcactttccgcatcttggggctcccggcccccgaagtaaacctgcgggacgcccccacgcagccaggtagcccagagcaccaagccttaggcccagcagcttcgggagcccagggcagagccgaggggtcggaagtggcggtggtccagcggcgcgccggccggggctgggcgcggaccccagggccatacgccggggccctgcgagaagccgtgtccggtatccgccgccacacagcccctgactcggacacggacgaagctgaggagctcagcgtccatagcggctcctctgatggaagcgacacagaagccccgggcgcctcctggcggaatgagaggaccctgcccgaggttggaaacagttcgccagaggaagatgggaagacagcggaactgagcgacagtgtcggggagatcctagatgtcataagccaaaccgaggaggtcctcttcggggacaagagcagccttgtggggttgcccccaagcaagctgagtggccccatcctggggccagggtccttccctagcgatgaccgactctcccggccacctccaccagccacgccttcctctatggatgtgaacagccggcaactggtaggaggctcccaagctttctatcagcgagcaccctatcctgggtccctgcccttacagcagcaacagcaacaactgtggcagcaacaacaggcaacagcagcaacctccatgcgatttgccatgtcagctcgctttccatcaactcctggacctgaacttggccgccaagccctaggttccccgttggcgggaatttccacccgtctgccaggccctggctgcaactgtgctgaaagctgctgcttcttctgcagctccttcttctcatgctccaacaggtcctcaatgagcaggggtaactcgctggctaccagtgagctctccatcttgtctagctcatccccagatgctgcaggtccaccaggcaaggtcaaagccccactctcgagctcaaacttttccagcagggaggatcctcctgggccactcagtgggctgggggtcagcagtttctgtgaagacgtggctgtcctgtgggctcctgtgtgtgctggctgcgccctgagctccgagacagctgcccataacctgctaaggaaacctgggaatgactctaagatgttggtttgtgagacgtgtgacaaaggataccatactttctgcctaaaaccacccatggaggaactgcctgctcactcttggaagtgcaaggcgtgccgggtgtgccgggcctgtggggcgggctcagcagaactgaatcccaactcggagtggtttgagaactactctctctgtcaccgctgtcacaaagcccagggaggtcagactatccgctccgttgctgagcagcataccccgcctcgcatgctgaggctattcctccagtctcgttctccaggtgaatgcatgcaggctgtggagcctcttcacagaggacgattggagcaggcagccgatgaaggctttgactgtgtctcctgccagccctacgtggtaaagcctgtggcgcctgttgcacctccagagctggtgcccatgaaggtgaaagagccagcattttctgagagcctgctccacgccaaacttgtcgggtatacagagctaaatcagctaaatcacctccagcagctcatggtccagcaggggattccacaagcggatgcagtggtgcagtatgacgtggagctgattgcactaatccgagccaactactggctaaagctggtgaagggcattttgcctctgaaagaaaaaatggccaagacgcccctgtccgatgagaagcagctgcttctgtttcagcagaagttgctggcagaggaggagatggccaaaaagaaggagaggctcctcagccagttcttgaagaataacctgagtaacccgccgacaccaccctcgtcgctgccccccaccccacccccatcggtgcagcagaagatggtgaatggcgtcaccccatctgaagagctgggggagcaccccaaggatgctgcctctgcccgggatagtgaaagggcactgagggagactagacgcttttcgactgcaggaactggatttcgtctcctcttccacaatgcccatgcaaacagtagagcctggttactgccggcacctttggatcctcggccaattctctgcttcgcctacacttggcgtgcggtgtaccagcctccccgcgtcaccatggaaacaggagcctctgcatccatcccagagctgatctgtgaagctatgagaagaatctggagctcgtcgcccgcgctggacggctgcgagctgctctgctgcggcaggggccaccgcacgcgcacgcagcgcgtcaccgagcgctgcaactgcaccttccactggtgctgccacgtcagctgccgcaactgcacgcacacgcgcgtactgcacgagtgtctgggtattgtgaacgtagcctcctccacgaacctgcttacagactccaagagtctgcaactggtactcgagcccagtctgcagctgttgagccgcaaacagcggcgtctgatacgccaaaatccggggatcctgcacagcgtgagtggggggctgcagagtgccgtgcgcgagtgcaagtggcagttccggaatcgccgctggaactgtcccactgctccagggccccactcttcggcaagatcgtcaaccgagccccagcactgtggaacttattatctcccaccctctcacagcttgtttgatgctgtctcttcattaattcggaacaagatccacaggctgccagttattgacccagaatcaggcaatactttgtacatcctcacccacaagcgcattctgaagttcctcaaattgtttaaagcagctgctgtgatcatgggcaatatctttggaaaccttctcaagagcctgattgggaagaaggagatgcgcatcctgatggtgggcctggatgccgcaggaaagaccaccatcctatacaagctgaaactcggggagatcgtcaccaccatccctaccattgatgaagaaaataaagagagaagacaagcaattttacaagaaacatgcaactggccccataccctgaacagcaccagcatgtctaaggcatatcagagcaccttcacaggcgagaccaacaccccctacagcaagcagtttgtgcactccaagtcatctcagtaccggcggctgcgcaccgaatggaagaacaacgtgtacctggctcgctcccgtatccagggcctggggctctatgcagccaaggacctagaaaagcacacaatggttatcgagtacattggcaccatcattcggaacgaggtggccaaccggcgggagaaaatctacgaagagcag

SEQ ID NO: 2416 - DNA, 15722 bp, Homo sapiens
  SIMILAR (10221)..(9832): 281254mologous to Takifugu rubripes All-1 related protein,accession number AF056116,Smith-Waterman Score=79.
ttagttcatccatttccgacaattccaggctccacagtggcaggggatcttgtgctgatcgtcctcaaaatcaaactgatagtcataggttagctcctctcctttggggattcgccggctggagatgatgatgattttgtcctctttgtcaaatgtcacgacttcggccacacagttaggggcacaggaatggttaatgtacctggcagggccgccggtcaacgtagcatcaatcacatgttcattgtttattcggaacatgtagatgcctcgattctgctcttcgtagattttctcccgccggttggccacctcgttccgaatgatggtgccaatgtactcgataaccattgtgtgcttttctaggtccttggctgcatagagccccaggccctggatacgggagcgagccaggtacacgttgttcttccattcggtgcgcagccgccggtactgagatgacttggagtgcacaaactgcttgctgtagggggtgttggtctcgcctgtgaaggtgctctgatatgccttagacatgctggtgctgttcagggtatggggccgtttgtagtgtgtgaggattttaggctctgatcgggcacagccagtggggttgatcatgagtggcagctccataagggggtggcgcccatagcggaataaatagttttgacagctctccaccccgggcagtgattcagctatgcgaagcacggcatgcaccgtcagcccaaagagctcctcgcccttcagatactcagggaagagtcgcagcatgtcagcctcttttctcatggcagccacaggctcaatgatgcgattccacacggcctggggagaggcgtcagtgaagaccaggtcctccaggccctgctcgatgactttgattacaaactccggccgcccgttgttctcaccaatagaacagcgatagcagcagcgacgattgttggtgcggaggctccaatagatgcgcgtggcctcgtagcccacgggatagagggcagtggcactatgaaagtcagccatctggtgaggcagcagctgtccgatggcgtggaacacaaggccccccacacggaacatgtgcagccgttctccccgctgaatgatgctagcgatttgcttcacctcgtcccgctcaatgtagacccgccggaagacagcaaaagagctcagctcttgctcacagggccccttgatcttatgcattggacacagcatggtcttgtccttgaagaacatgcacttggcacggatggcacaagcaaaatggtagacattggggcaacgcatgcgattgcagctgctggtggcaccagttcgctggcacagggagcacttggttagcagtcctcggtgcagggcaacctccacattcatcagtgccccgccctgggtctcatacacctccgtggaccaaagggcacagttgaggtgcacccacaggtccaggtccaggttcagcagacgggcaggcccatcagtggccccgtcaccctcctcatgacagaaacagcagcgacgcatgtctcgcggtaccttgtcaggtcgcaaggctgtgccaagctgctccataaactctgccacttcccgctcatcctcctgccgcccactgcccttctggatggtcagcagcagccgaagccgcttccagcgcactcctttccatttcttgaggcgaggaggacgggaatcttcaccttcttcagggggccgggcacggggcttgggtcgggctgattcaggggatgaggccagtggcagaggtgaggggacgggtggctcagccaagggttcggtgggaagttcaaccaagggctcagtagggggactggcaggagaaggtgccaagggggaagggggcggggagggttcttcaggaggtggggccgagagctgtcgcacatccagattggagacattgtaggtatagctgtgctgagtgggtggctctggggcggggctctcctgtttcaggaggctcaagatgtctagttggctcttcagggtatagccaggcaacactgcatcaaactgcttcagccaatcagggccagtgtctgggctcttgccttccagacccttttccttcccaccaggaccctcagcttcccccttctttggctcagtgcctgcccgggcggggctctctgggaacagcacctcataggagttggggatcttcatgctcagcagctccgccactgccaccatcacgccattcaggttcttggctgcagcagcagagactgtgagcatgactgacacctcacttcctttgcccttttcccaagttgtgacaggcagctttccagggacctccaggccaagggccccataaggtttggtatctgggaagactgggatgctggcccgaggaatgagggggatgacaggggagagggcccggtcctcttgctcccaccggcctgagcccagatgagggaaacgaggggcctcctcccccaagatgctctcaggggatgaagctggcacaatgctgtcaggagaatcgctatcctcatcactctccatcctgacatcctcagtctgattgtgagggggtgtaggcaaggcagccagcaggtctagactcttcacctctgaagtatccctcagtgccctttcactatcccgggcagaggcagcatccttggggtgctcccccagctcttcagatggggtgacgccattcaccatcttctgctgcaccgatgggggtggggtggggggcagcgacgagggtggtgtcggcgggttactcaggttattcttggtaagcagctgggaatagtagtcagggccagtgggcagcgccccacttccaaaggcccccctcagctggctctgcccattgactgggcagccactgccaaagggggcaaagaggctaaaattggcggtgatagcaggctccgttaggggcagcagggacagctcctgtttcagctgtttcagcaaggcctcgctggccctgaccccgtcctccttccgcagcttctttcgggagctcaccaacctgtcgcttgccttctgtacccgcttgggcttcggtgtcaaaggcttccttgctgctgcatcctccttgttgctgggggtaccctgtagtttctgctccagcccagccagcttgctgtcaatgtgcccgttgatctcagctcgcagcccctcggacccccgcccagtgctgagttgcacattctttgcccggagtagcttctgcaagagcagatgcccagcttctgagcgagggcctgccagcaggaggtggttgctggttcctggtgcccctattggctccccattggcctccctcttcactgactgggctcccagggcacatggctcttcccgaggttcctgcttgatgctgagttgggatgcctcaggcaccacctgtccattcacctggtccagatgcccaggtaccaggctgctctgctctggcttctgggtttctgctaggttgtctgggggatcccaaggtcccagacccttgctaaacaaggtatctgcaagctgggcagcagcaggtgagaccctcccaggaggcggctccaaggttggcccctgaggtttgggggtccctggatgggtgggagggagctgggcctcagtgggaagctgggagctgggggaaggtaattgtgaaggtctctttggctcttgagggctggatggtggaggtgtgggatggacagggccaaggactggtcctgtagataaggctcctggtggggcagggagccggggtgggccctgaggtcgaggccctgcccctagctcctggagggggcctgtctgtggtccagggaagcccccaagttgaggttggcagcccaggaggccctggaggggagaggtctgggtcccaggctcctggtagggtggggtctggcgtactgcctgactctgctgcagctgccgctgcatgaggagtgcctgtagctgctgctgctgctgaggacttaagtgccgcagctgtgggtttttggccaggactccttggagctgtgctcgaagctgacccaccgtaggcatgattccaaccccaggcagaccctgcccagactggaggacaggtcctggtttgggaggttgtggccctgtattattttgcatgggccgctctagcatgggctgttgggggcccagaaggttctgggtcatggacccaggctgatcccctaaggaaacagagggctgagccagcaggtggggcacagatgaggcctcagaagatgatccactgcctagctgcccatggcttcctccacctgctgtgtggagcaggctaacttgctgctgctgttgtcctggaagcctcagaggtggctgcagctgcagagagctgggctgaggctggggctggggttggacaagcaggagttgtgagtccccagagagtgagggctttacctctcctggttcagtggccattgactcaggggtagttcctattgctaacggccctccctgatgtgtagagggcccctcagtggcctctgaagaaacggctgggtctacggtgttttgttccttgcccgtcaggaggagggttggacccagggctccagggctagaaaagtgttgaagaggctttgctggcatgccagggccaagtgccacttgctgctgctgttgttgctgaggagacagtaaagttcgactctggtttaaaaggcccatctgctgctgttgctgctgctgttgaaactgctgctgttgttgttgctgttgctgttgtagctgctgttgctgctgttgaagctgttgctgctgctgttgttgaagctgctgctgctgttgctgctgttgaagctgttgctgctgaagttgctgttgctgttgtagctgctgctgctgctgctgctgaagttgctgttgctgttgcagctgctgctgctgctgaagctgctgtaaagagcccatgggctgagcgctcagtttgggctgcccactgtgtgacatcagactctgctgaagatgggacagccctgccatggacccttgctgttggtgctgttgttgctgctgctgctgctgggctgtgaccagcctgtgtcccataaggccctgaccctgctgtgccagctggggggaactgagcacccgggactgggtcataagcacctgtctgtgagggccctgggggcccaaagctccagggtgctgctgctgcaacacagccacctgggcagggcccagcatgccctggggcccctggggtggttgaggggacagctgctggaccaggaggccttggtggctgctgggaggcataaggccctggggcttgggacccagagcttggtttgtctgtactccaggaccctgctgctgttgctgctggattgccacctgtcctagaaggtgctgctgctgctgttgctgctgctgctgctgctgcagtttctgggccagctgcatacgttgctgctgcagctgcagctgcctttcctgtaaaagccttgaatcaggtccgaggcttcgaagagcaaggttgccagggaagaagccccctgaagggccagccagggatccagccccaccagaatgttgctgttgctgctgttgggccagagctgtattaaggaaggggccaccaggctgtccaggtagtgccatacccccaggggtcaggcgaagacctccggcttgcccacccggaggcccctgtggtggctgcagcccatggccagggagcagctgaccagggagcttggtgagcagccggggactctgggaagggctgagagccagcacagctgagtgctgttgctgttgttgctgctgctgctgctgttgttgctgctgcttgttccgatattctgccatgagattagtgtgctccttctgctgtttccggacctgatccagttgtttctggatcttgctctgctgctctgtaaccagcttgagcttctcagcatcagcttctgggaactcacggccagcttttttggcagtgcgctgcttggcacacagagccttccgggacttgcggtgtacaccaatctgctcctctagcaccttcagctgcatctgtaggagctgctgggtatggaacagccactcctcatactgccgctggtcagcttcatcaggtgccaccccaatgctgccctgagccatcactttcttgatgcctttcaaagccaccatcttggcctttgcaatgggatcaatgatatcttctgcagcaaatttgtccaggtctgtatctgggaagaagctgtttgccagctgctgctgcattgccaattgctgcggcttcatgcacatggaaggtggcatggtgcccatgggcttctgtgatagcactggctgtgagctctgctggggtaccaagcctgcctgccctccatgctgcccacttagcatatgcccttgattggacaccatagccatggatggagccaggcgttgctggagggcatgagctggtggctgggtgggcatcagtggctggggcaaacctggctgtcgggcacctgcaagacccagggaaagctgctgttgggacccagccaaactgggagaagagccctcatgtggcaaagacatggcctgggcagggcctggtgcagacagtagggaatgctgctgctgctgttgctgctgctgctgggcaggctgcaactgtgctgaaagctgctgcttcttctgcagctccttcttctcatgctccaacaggtcctcaatgagcaggggtaactcgctggctaccagtgagctctccatcttgtctagctcatccccagatgctgcaggtccaccaggcaaggtcaaagccccactctcgagctcaaacttttccagcagggaggatcctcctgggccactcagtgggctgggggtcagcaggtgagctggtggtcctcccgtggccccaaaggaggccttctcagctgtgtgcccactgctagaaaatggccctgtgcccatccgggtatcccggctgcccatcatgctctgtcctggctttagccccaggccaagggaattggcagcaggtgcgggctctaccttgggggtagcaatggtgaattggcaaggagaagggtggcgtccaccctcctccaccttgggcttcacctcagggagcacagatgccaggcggggttcagaggcatcagcagcagggggagggcgctcctcagggcccaagggtcctggctccaccccccgcagcagggcctcccgttcagccttctcattagccgattctaccagcctcaggtgctcattgaagatatccttcttgtccccagtgtccagctcaggatcagtatatgccagcaggtcaaactcgtctccattgagcaggtcatccaagtgggggtcattggtctccaggttttctaaggtgccaagttcatcatcacccttggccacatccacacccagacccaggtgagcaagctcttcatcatcctctagggccttgtgggcatcaaaatcgtcatccagctcgggatcctcacagggcaacttcccagcttccagggccagaggattggggcggccaagctcagtgctcgacgggggccggttgaccagctccaaaccagttggcagggtaggacccttggtgtggggtgttggatgaagactgttgttcaattcaggggccggtggggctgagggtttctgtgggggaagacctgataccgccaggccccgaagcccttcaggagccagtcggtgggggtcctcacttacagggtaaaaacggggtctctgaggtgggccctgaccaggaaacggagtgcccccaggtcccagtcctttctgtacattgtgccgcagctcaatgaactgggcaggaccagctggaccaggcactggctcaccagggcctggcagacgggtggaaattcccgccaacggggaacctagggcttggcggccaagttcaggtccaggagttgatggaaagcgagctgacatggcaaatcgcatggaggttgctgctgttgcctgttgttgctgccacagttgttgctgttgctgctgtaagggcagggacccaggatagggtgctcgctgatagaaagcttgggagcctcctaccagttgccggctgttcacatccatagaggaaggcgtggctggtggaggtggccgggagagtcggtcatcgctagggaaggaccctggccccaggatggggccactcagcttgcttgggggcaaccccacaaggctgctcttgtcctgtgtcccagcaaagggggtctggcctcgactcagctgctcaaaggcagggctgctgggctcagcaccccagctgcctggaggccccactgctcctgcagctgctgcagctgtttccttctcctgccgcagggtgttgcgctggatctgctgccgaatcagcagctctcgtagtcgctggcgctgccgttgcttctccagctctgtttggctaaggccggacatgcctgggtcctgggtacctgggagttcagctgtcgccaaagagctacccattccagtccctgggtcttctcgcttttcgacaggagaggtgatgcctgatcgctgtgaggctccatgggacaggtaggggagggatccgtcgggtgcaggtggtggcagaaccgacggagggcgtagtggggacagcccatagctctcccctgtggacccgctgctgggccccagggggctgcccgatgggtggaagttccctgtggctactgtgtagtttgtgctttgaggcttgcccaaggtggggccgggcccaaaatggctgttgatcccatggggtggcgggagaccaggctgagggacagggggctttagggaaggctcccctactgcctgagggaaagtgaaacgcatgggagagggggtgcccacaaatgcacccgtcccaggggaccggacaaaattggggggctgcccacttgggaccttggcatggagctcacctgctggccccgcgggcagggctgctgggaaccccccagcccccagcgaagtgtgggctagagacccagccttaaaggcaacttcagggggctggggtcggggtggcttatgcaatggggcaaatgggtcacgggactgagggcgtgagggtgggcgagaataagggtcaggggactggaagcgaggggtaacgggtgatgggcaaaaagcttcagcagacagaggccggggtgtcagtggagactgggagctggactgggactgaggactggcaggcactcgggagaaagggtcggagggcagtgagcgagggggcagagcacagcagctctcagggggcggaggttggggccgaggagtcaatgggggctgagcatatgggtcagtgtaggagccagggcgaaagatgtctgggtgacttggaggagaaggtgccaaagcctgggcagggggtggctcctggggccttaggcccaagcccgggctctggggctctacctgagatgcccgaggggtcaggggggctttgaagacatcaggtgtctttaactccaggccacccaggtgggtgcctgaggagggtgagtcaacaaagcccaggtttgggggcccatagctaggagaggatgccccaagctcttccttcttcacctctagggccttccgggactccccaaaaggtgggggcgagagcaggggctcggaagctttgcctccccctaccccagggctctcaggcacagccaagttatccagcgaggggcagcggggtttgaggaatgggtcaggtgtggagggctggtgtctgggggtgccaggtggggtagtgtggaattcccctggctggccagccccaggacgagatgaggcgcccagcatcgggggctgcgcaggggcccccgtaggactaggataggggggataggtgggcggtgccgtggggaagcggggctccaggggataggcaggggccagtccaaaggggtcctgcgaaggcacttgggcgggcacctggggtgggagcttgaggaagagctcaccaggcgagtcagggccaggcaccgagcccgccggcggcttcaggaacccgtccgcagaggtagacaagccggcgggggtagtggggctgccaatgaaaatggtgggggcagcagcggggggcgggctgcccagtgcccctggctgcgggggaatgcggagatgtagggccggtcggtcagtcttacgggctatgtcgcccaccttggtctgcttgttgatctggctctcagcctgcttctgcaccttgttgatgcggtgagctgcccggttatctttggccttttgcaggtagggggctttgtcagctgctggaacctttctccagagcttcatgatttgtttgcaacggcttgaccagtctgggtagtcttgcttgagattaggaaaattaatgttggcatagagcacaggtgagatggtggacagctggcccaactcctcatccttctcccagcgctgaagactccgctggttataggagagtccgtcgccctcaccctccgtggtgggggttgtgggggtggagggcgtggtgccacctgagcccgtccaggggctgtcgggctcaccgggttccgggctaaagaagcccccgcgctccctagaatccaggaacggggactggcagaggcctgggtaggagtccattgggctgctggagggcagattgcccaaagggagtccaccttgaagaaagggcctctgcagtggcgtacggctgccttctaggccaggggttccacaacccagatgctgttctcgttcagagcccagaacatccttgaagagctgctgcaggtccttggattccatcttgggcagttcttctgtggaaatcctgtctaagtcagagctaagcatcccttcacctggggtgcctggcttctcagggtcactgggcactggggatgccttcacgcccccatcctcaggtcctggtgtatcggctttgccctcgaggccacgggattcttcatctgcaatatctggaccatcatctcctttctgcgatgtggggagttccttcctttctgagcctccatctcccttggcttttggggtccctagtccaaagcttggccggcccaccccaactgcaaaaagggccttacggctcaggtccagcagctccttcccaaagaaggcttcctgcaagtaagcagggaacatgtcctccagtttgctcttcttgcgccctcgccgctgttgcttcttcttctcatccccttcagctaagctctgctccacggcgccctctgcaggcaggtcagcaggtatcaccgtctcaccctcgtcgggctgcccatccccactcaacacctccgcctgtgcagcaggcccctttttcgtgcgtgtgtgggatttccgctgtcgcaccatgaaaccaccaatgccaggccgatatggtttacgcttgcgttttttgctttcctcggtctcctctttgccaggctccacatcagggctgacggggccctccagtttaatttcgcactccatgtgctccacaccaccttcacccttgagcagctcatcggtgtccaggtccccatccttcttgtcatcagggccaagggcatctgagggctcagaaccctccaatcctgcctcgcctgggaggccaagccgtcctcgccgttggcgccgcttgtgcagtggtgacatggtcaggttacgcagcaaggccatgccagtttctgtcagccacacaccttcgaagcgaaagtactggggctctggctctttcaccttcatgggcaccagctctggaggtgcaacaggcgccacaggctttaccacgtagggctggcaggagacacagtcaaagccttcatcggctgcctgctccacatcgtcctctgtgaagaggctctcacagcctgcatgcatccaccgttcacagtggcggcactggattagtaggtcctcttctacgtaaggagcatgacagatagggcaggtcaccaggctggcacagggcccacagtgtgtgtaactattctgccattcacagtggaagccaggggaagcagccccacactgcatacaggacacacaccacttgcacttccagccgcccttggggacggtgagcagtggggggtccaggcagtatgtgtggtagctaatatcacagtcatcacagagcagcaggcgtgaggggtcggaggcctggccacacacctcacacacaatacactccacacaacgccagcccttgagcagcatcaccttggtgatcttgctgttgacacagtaagggtgatagcactgagagcactgcattaggacaaatttgtctgtgttggagaagagaaccacggtattctgcatggtgtcatcatcttcttcctcctcctccttactgggagagctatcaatgtcagcaactaccagagtctcaatggaagaagcagttgactttagccgggcccgtcctctaccacgtcctccatgggctcctccacgaggccggcgtcttcctgggaaactgctgctgcgaccctgtttgatgcgggaacgggctggggagctgcgccgccgccccttctccccctcagctttgcctccgctgatagctgtcccagcatcgcacaatagtgagtcatcagtctctggcagtgagtcagtacagagccgtagggagccctcatctcgggctggactaacatccgtagagacccccaactccatggacagggagccacccccctccgggtctggagagcccaggaggggctctgagccaggaaaactggcactggcatcaccctggctcagattagagatctcgttaacgatgtcggatttgatgagagtgggtggtgtgggggccaccggtgcacgtggctcttcctgttcttcacatggtgagccctgccctgctgtctgcttgcattcggggtagacctccataggggtcacaggggccagctcctcggggtccaggagcacaggggagcctttaagttcactagccaaactgccaggggtctgtccaggctctggctgtgaacccggagcatcaatcccatccagaggggctgtgtcttcccctaggccagagaagtcatccagggctggggcagggctgggggcggggcaggaaaggtcccccattggggaagggagaggactggtggcactgggttccaaggctgggcattcaggttctgaaactttctcagtctccatctcgtgcagctcagcctcatctgagacccccactaccttccctatgggactcaacggggagggaacggacagtggtagggcaggaggagagcactgggaaggaggggagttttggggaaccagggaatgctgaaggagtggcgaacactgaggaggaaggggctccatcaggatgggagaagccggccccactggggagcctggagatgggggaaggatcataggggggacaggctcagggtcagtgcagttagcttctggtggagggctgatgggtgtctccaggatgggggcagccaacggtgactcagggtcactgtcccctttggcaccaaaggggtactctaactcccccaaaggagacagggccggtggggccgcagctgtgatgatgggtgagagtggaggaggaaggggatctggtggcatcagctgaggcgacaaggatggctccccagatggggacaacggcagctcctcgggcagaggggacagaggtggttccccaggctcagacagggctggctctccaagcaagggagataaggatggttccccagggggagggaacaagggcagctcctcaggtgcagggcattggcctggctcctcagggggcttttcaggccgaggggacaggggtggcttctcaagctcaggggacagatgcgattcctcaggccggggggacaggcatggctcctcagactggggggacaggtgtgattcctcaggttggggggacaagcatggctcctcaggcacaggagacaggtgcggctcctcagtctggggggacaggtgcaattcctcaggctgaggggacagatgtggtccctcagcctggggggacaagtgtggctcctcaggcacagcgcataggcatggctcctcaggctggggggacaggtgtggctcctcagcctgcggagataggtgtggctcctcaggccggggggacaggtgcggctcctcaggccggggtgacaggtgcggcccctcggaccgggggcagagttgcggctcctcaggtagtggcaacaggggtgactcctccagcggcagggacatgagcgagtcctccggtggtggggaagcaggtgagtcctcaggtggtggggatgtgggggagtcctcaggtggtggggagaggcgtgaagcctcaggtggaggggacgtgggagactcctcaggcggtggggacaagggagattcctcaggcggtggagacaggcgtgacaccacaggcaggggggataggcgcgatacctcaggtgggggggacataggtgattcttcaggtggtggggacataggcgagtcctcaggtggtggggacaggcgtgatgcctcaggtggtggggaaaggggagactcctcaggtggaggggacagaggagactcttcaaatggtgggaacagacgagatgcctccggtggtggagacatgggtgactcttcaggtggaggggacatgggtgactcctcaggtggtggagacaggcgagatgcttcaggtggcggggaagtgggcaattcctcaggtggcggggacaaaggagattcttcaaatggtggggacaggggcgatgcttcaggtggtggggatagaggcgtctcaagtgcaggagatgggggtgactcttccggtggagacaagggcgactcctccagtggagaaaaaggtgatgattcaggtgggggagacagaggagactcttcaggcggcggagagaggggcgattcctccagcggccgggacaggtgcaatgcctcaggaagtggggatgcgggcaattcctcaggtggtggtgacaggcgtgatgcctcaggtggtggggacgtgggtgattcctcaggtggtggggacaggggtgactcctcaggtgggggcagcagtggcatctcctcgtttaggggggcctccaactggggctcaagttggacccctgctttccctagtggtttggcttcacattgcaggggccctggttccttgggttgcatagaggtcacgtgcccaccctttggctgcccttggcatgcaacgtacagagcatcgggctcgtcagtgggggtatcgccaggctctgggggtgaaaatctgctacacaccggggtatgctgctcagcaacggagcggatagtctgacctccctgggctttgtgacagcggtgacagagagagtagttctcaaaccactccgagttgggattcagttctgctgagcccgccccacaggcccggcacacccggcacgccttgcacttccaagagtgagcaggcagttcctccatgggtggttttaggcagaaagtatggtatcctttgtcacacgtctcacaaaccaacatcttagagtcattcccaggtttcctgcaggcttggcacactttgcattcagggcactgccagccagcacgtttgcgggcagtcagagcagtgtccaggcaggccccgtgatagtgatgcccacagctggtacagaagaacaggtcacacaactcccctggcccctcacacactgcacagcgagcctcct

SEQ ID NO: 2417 - DNA, 760 bp, Homo sapiens
  SIMILAR (305)..(751): 751254mologous to Rattus norvegicus dendrin,accession number X96589,Smith-Waterman Score=561.
ggagcgcgggggcttctttagcccggaacccggtgagcccgacagcccctggacgggctcaggtggcaccacgccctccacccccacaacccccaccacggagggtgagggcgacggactctcctataaccagcggagtcttcagcgctgggagaaggatgaggagttgggccagctgtccaccatctcacctgtgctctatgccaacattaattttcctaatctcaagcaagactacccagactggtcaagccgttgcaaacaaatcatgaagctctggagaaaggttccagcagctgacaaagccccctacctgccaggtagcccagagcaccaagccttaggcccagcagcttcgggagcccagggcagagccgagggttcggaagtggcggtggtccagcggcgcgccggccggggctgggcgcggaccccagggccctacgccggggccctgcgagaagccgtgtcccgtatccgccgccacacagcccctgactcggacacggacgaagctgaggagctcagcgtccatagcggctcctctgatggaagcgacacagaagccccgggcgcctcctggcggaatgagaggaccctgcccgaggttggaaacagttcgccagaggaagatgggaagacagcggaactgagcgacagtgtcggggagatcctagatgtcataagccaaaccgaggaggtcctcttcgggcccccccccatcagagggacccaacagggaaatagaaagaggcagtga

SEQ ID NO: 2418 - DNA, 804 bp, Homo sapiens
  SIMILAR (227)..(355): 761254mologous to Homo sapiens Human secreted protein, SEQ ID NO: 7678,accession number AAG03597,Smith-Waterman Score=155.
tcagctttcagggaggtttggagggagaggcgtgggcgggaaccggggctgcgcccggtgcttgcgggccagcgcgagttccgggtgggcgtaggctccgcggaccccgcactcgcccggccggccccaccggccccgggcagtgaggggcttagcacctgggccagcagctgctgtgctcaatttctcaccgggccttagctgccttcccgcagcagggctcgggaccgcgaaggtctgcagcttcactcctgaagccagcgagaccacgagcccaccgggaggaacgaacaactccagacgcgccgccttaagagctgtaacactcaccgcgaaggtctgcagcttcactctgtccccaggctccagaagtatcaccacaaggctctcaggtgccagctctctcagggaattcccctcagcggctgctgcttccaacgtagggacatagagccttggatcccagatcacaactctcaagggctgtgctagcccagagctctggggtgagtgggagtaggctgagtccttggcggatgcactgcagctggtctcatcacatgggtactggccaggagcttcctccagggtattctcactagaagctggcttccccaggaatccaacctcctctggaaagccctccttaatgcccctgatgaaatcatcatctctttttggttgtactccattccttgcgcttatcttcccattgtctgactgtactgtgactgacttctgtgaatcctcctggcccacaggactgagagttcctcgagagtaggaatggattgtagcagacat

SEQ ID NO: 2419 - DNA, 2225 bp, Homo sapiens
  SIMILAR (3)..(41): 611254mologous to Rattus norvegicus dendrin,accession number X96589,Smith-Waterman Score=48.
atgctggatggcccactgttctccgaggggcctgacagcccccgggagctccaggatgaggagtctggcagctgcctctgggtgcagaagtccaagctattggtgatagaagtgaagactatttcctgtcattatagtcgccgcgccccttctcgacagcccatggacttccaggccagccactgggctcgcgggttccagaaccgcacgtgtgggccgcgcccgggatccccacagccgccgccccgccggccctgggcctccagggtgctgcaggaggcgaccaactggcgggcggggcccctggccgaggtccgagctcgggagcaagagaaaaggaaagcggcgtcgcaggagcgggaggccaaggagaccgagcgaaaaaggcgcaaggctggtggggcccgacggagccccccgggtcgaccccgcccggagccccgcaacgcccctcgggtggcccagctggcagggctccctgctcccttgcggccggagcgcctggcgcctgtggggcgagcgccccgtccatccgcgcagccgcagagcgacccagggtcggcgtgggcggggccctggggaggtcggcggcccgggcccccaagctacgaggctcacctgctgctgagaggttctgccgggaccgccccacgacgccgctgggaccggccgccaccctacgtggctccaccttcttacgaaggcccccataggaccttggggactaagagaggccccgggaactctcaggtgcccacttcatcagccccagctgcgactccagccaggacagacggagggcgcacaaagaagaggctggatcctcggatctaccgggacgtcctcggggcttggggtctccgacaggggcaaggtctcttggggggatccccaggctgtggagcggccagagcaaggccagagcccggcaagggggtcgtggagaaaagcctggggctggctgctgctgacctgaacagtggtagcgacagccatccccaagccaaagctacagggagcgcaggcaccgagatagctcctgcggggtctgcaactgcggctccctgtgccccgcatcccgctcccagatccaggcaccacctcaagggctcgagggaagggaaagaaggagaacagatctggtttcccaaatgctggattccctcccctaaaaagcagccgccccgccatagccagacactccccagaccctgggctcccggaggcaccggatggagagaatctctgggtcttggagagggggcaggaccggagaccctggagggttggaaggcgacccgccgtgcccacaccttgccccgcagttcccagggcctgtcccgtggggaaggcgtctttgtcattgacgccacgtgcgtagtgatacgatcccaatatgttccaaccccccgaacccagcaggtgcagcttttgccctctggggtgacacgcgtggtgggggattcccccagccaatcgaagcccggcaaggaggagggtgaaggggccacggtctttccttccccttgtcaaaagcggctgtcgagcagtcgccttttacaccagcccggcgggggccgcgggggcgaagctgagggcgggaggccgggggactccacactggaggagcgcactttccgcatcttggggctcccggcccccgaagtaaacctgcgggacgcccccacgcagccaggtagcccagagcaccaagccttaggcccagcagcttcgggagcccagggcagagccgaggggtcggaagtggcggtggtccagcggcgcgccggccggggctgggcgcggaccccagggccctacgccggggccctgcgagaagccgtgtcccgtatccgccgccacacagcccctgactcggacacggacgaagctgaggagctcagcgtccatagcggctcctctgatggaagcgacacagaagccccgggcgcctcctggcggaatgagaggaccctgcccgaggttggaaacagttcgccagaggaagatgggaagacagcggaactgagcgacagtgtcggggagatcctagatgtcataagccaaaccgaggaggtcctcttcggggacaagagcagccttgtggggttgcccccaagcaagctgagtggccccatcctggggccagggtccttccctagcgatgaccgactctcccggccacctccaccagccacgccttcctctatggatgtgaacagccg

SEQ ID NO: 2420 - DNA, 15973 bp, Homo sapiens
  SIMILAR (15708)..(15971): 631254mologous to Homo sapiens ALR,accession number AF010404,Smith-Waterman Score=261.
ttagttcatccatttccgacaattccaggctccacagtggcaggggatctcgtgctgatcgtcctcaaaatcaaactgatagtcataggttagctcctctcctttggggattcgccggctggagatgatgatgattttgtcctctttgtcaaatgtcacgacttcggccacacagttaggggcacaggaatggttaatgtacctggcagggccgccggtcaacgtagcatcaatcacatgttcattgtttattcggaacatgtagatgcctcgattctgctcttcgtagattttctcccgccggttggccacctcgttccgaatgatggtgccaatgtactcgataaccattgtgtgcttttctaggtccttggctgcatagagccccaggccctggatacgggagcgagccaggtacacgttgttcttccattcggtgcgcagccgccggtactgagatgacttggagtgcacaaactgcttgctgtagggggtgttggtctcgcctgtgaaggtgctctgatatgccttagacatgctggtgctgttcagggtatggggccgtttgtagtgtgtgaggattttaggctctgatcgggcacagccagtggggttgatcatgagtggcagctccataagggggtggcgcccatagcggaataaatagttttgacagctctccaccccgggcagtgattcagctatgcgaagcacggcatgcaccgtcagcccaaagagctcctcgcccttcagatactcagggaagagtcgcagcatgtcagcctcttttctcatggcagccacaggctcaatgatgcgattccacacggcctggggagaggcgtcagtgaagaccaggtcctccaggccctgctcgatgactttgattacaaactccggccgcccgttgttctcaccaatagaacagcgatagcagcagcgacgattgttggtgcggaggctccaatagatgcgcgtggcctcgtagcccacgggatagagggcagtggcactatgaaagtcagccatctggtgaggcagcagctgtccgatggcgtggaacacaagcccccccacacggaacatgtgcagccgttctccccgctgaatgatgctagcgatttgcttcacctcgtcccgctcaatgtagacccgccggaagacagcaaaagagctcagctcttgctcacagggccccttgatcttatgcattggacacagcatggtcttgtccttgaagaacatgcacttggcgcggatggcacaaccaaaatggtagacattggggcaacgcatgcgattgcagctgctggtggcaccagttcgctggcacagggagcacttggttagcagtcctcggtgcagggcaacctccacattcatcagtgctccgccctgggtctcatacacctccgtggaccaaagggcacagttgaggtgcacccacaggtccaggtccaggttcagcagacgggcaggcccatcagtggccccgtcaccctcctcatgacagaaacagcagcgacgcatgtctcgcggtaccttgtcaggtcgcaaggctgtgccaagctgctccataaactctgccacttcccgctcatcctcctgccgtccactgcccttctggatggtcagcagcagccgaagccgcttccagcgcactcctttccatttcttgaggcgaggaggacgggtatcttcaccttcttcagggggccgggcacggggcttgggtcgggctgattcaggggatgaggccagtggcagaggtgaggggacgggtggctcagccaagggttcggtgggaagttcaaccaagggctcagtagggggactggcaggagaaggtgccaagggggaagggggcggggagggttcttcaggaggtggggccgagagctgtcgcacatccagattggagacattgtaggtatacctgtgctgagtgggtggctctggggcggggctctcctgtttcaggaggctcaagatgtctagttgcctcttcagggtatagccagccaacactgcatcaaactgcttcagccaatcagggccagtgtctgggctcttgccttccagacccttttccttcccaccaggaccctcagcttcccccttctttggctcagtgcctccccgggcggggctctctgggaacagcacctcataggagttggggatcttcatgctcagcagctccgccactgccaccatcacgccattcaggttcttgtctgcagcagcagagactgtgagcatgactgacacctcacttcctttgcccttttcccaagttgtgacaggcagctttccagggacctccaggccaagggccccataaggtttggtatctgggaagactgggatgctgtcccgaggaatgagggggatgacaggggagagggcccggtcctcttgctcccaccggcctgagcccagatgagggaaacgaggggcctcctcccccaagatgctctcaggggatgaagctggcacaatgctgtcaggagaatcgctatcctcatcactctccatcctgacatcctcagtctgattgtgagggggtgtaggcaaggcagccagcaggtctagactcttcacctctgaagtatccctcagtgccctttcactatcccgggcagaggcagcatccttggggtgctcccccagctcttcagatggggtgacgccattcaccatcttctgctgcaccgatgggggtggggtggggggcagcgacgagggtggtgtcggcgggttactcaggttattcttggtaagcagctgggaatagtagtcagggccagtgggcagcgccccacttccaaaggcccccctcagctggctctgcccattgactgggcagccactgccaaagggggcaaagaggctaaaattggcggtgatagcaggctccgttaggggcagcagggacagctcctgtttcagctgtttcagcaaggcctcgctggccctgacgccgtcctccttccgcagcttctttcgggagctcaccaacctgtcgcttgccttctgtacccgcttgggcttcggtgtcaaaggcttccttgctgctgcatcctccttgttgctgggggtaccctgtagtttctgctccagcccagccagcttgctgtcaatgtgcccgttgatctcagctcgcagcccctcggacccctgcccagtgctgagttgcacattctttgcccggagtagcttctgcaagagcagatgcccagcttctgagcgagggcctgccagcaggaggtggttgctggttcctggtgcccctattggctccccattggcctccctcttcactgactgggctcccagggcacatggctcttcccgaggttcctgcttgatgctgagttgggatgcctcaggcaccacctgtccattcacctggtccagatgcccaggtaccaggctgctctgctctggcttctgggtttctgctaggttgtctgggggatcccaaggtcccagacccttgctaaacaaggtatctgcaagctgggcagcagcaggtgagaccctcccaggaggcggctccaaggttggcccctgaggtttgggggtccctggatgggtgggagggagctgggcctcagtgggaagctgggagctgggggaaggtaattgtgaaggtctctttggctcttgagggctggatggtggaggtgtgggatggacagggccaaggactggtcctgtagataaggctcctggtggggcagggagccggggtgggccctgaggtcgaggccctgcccctagctcctggagggggcctgtctgtggtccagggaagcccccaagttgaggttggcagcccaggaggccctggaggggagaggtctgggtcccaggctcctggtagggtggggtctggcgtactgcctgactctgctgcagctgccgctgcatgaggagtgcctgtagctgctgctgctgctgaggacttaagtgccgcagctgtgggtttttggccaggactccttggagctgtgctcgaagctgacccaccgtaggcatgattccaaccccaggcagaccctgcccagactggaggacaggtcctggtttgggaggttgtggccctgtattattttgcatgggccgctctagcatgggctgttgggggcccagaaggttctgggtcatggacccaggctgatcccctaaggaaacagagggctgagccagcaggtggggcacagatgaggcctcagaagatgatccactgcctagctgcccatggcttcctccacctgctgtgtggagcaggctaacttgctgctgctgttgtcctggaagcctcagaggtggctgcagctgcagagagctgggctgaggctggggctggggttggacaagcaggagttgtgagtccccagagagtgagggctttacctctcctggttcagtggccattgactcaggggtagttcctattgctaacggccctccctgatgtgtagagggcccctcagtggcctctgaagaaacggctgggtctacggtgttttgttccttgcccgtcaggaggagggttggacccagggctccagggctagaaaagtgttgaagaggctttgctggcatgccagggccaagtgccacttgctgctgctgttgttgctgaggggacagtaaagttcgactctggtttaaaaggcccatctgctgctgttgctgctgctgttgaaactgctgctgttgttgttgctgttgctgttgtagctgctgttgctgctgttgaagctgttgctgctgctgttgttgaagctgctgctgctgttgctgctgttgaagctgttgctgctgaagttgctgttgctgttgtagctgctgctgctgctgctgctgaagttgctgttgctgttgcagctgctgctgctgctgaagctgctgtaaagagcccatgggctgagcgctcagtttgggctgcccactgtgtgacatcagactttgctgaagatgggacagccctgccatggacccttgctgttggtgctgttgttgctgctgctgctgctgggctgtgaccagcctgtgtcccataaggccctgaccctgctgtgccagctggggggaactgagcacccgggactgggtcataagcacctgtctgtgagggccctgggggcccaaagctccagggtgctgctgctgcaacacagccacctgggcagggcccagcatgccctggggcccctggggtggttgaggggacagctgctggaccaggaggccttggtggctgctgggaggcataaggccctggggcttgggacccagagcttggtttgtctgtactccaggaccctgctgctgttgctgctggattgccacctgtcctagaaggtgctgctgctgctgttgctgctgctgctgctgctgcagtttctgggccagctgcatacgttgctgctgcagctgcagctgcctttcctgtaaaagccttgaatcaggtccgaggcttcgaagagcaaggttgccagggaagaagccccctgaagggccagccagggatccagccccaccagaatgttgctgttgctgctgttgggccagagctgtattaaggaaggggccaccaggctgtccaggtagtgccatacccccaggggtcaggcgaagacctccggcttgcccacccggaggcccctgtggtggctgcagcccatggccagggagcagctgaccagggagcttggtgagcagccggggactctgggaagggctgagagccagcacagctgagtgctgttgctgttgttgctgctgctgctgctgttgttgctgctgcttgttccgatattctgccatgagattagtgtgctccttctgctgtttccggacctgatccagttgtttctggatcttgctctgctgctctgtaaccagcttgagcttctcagcatcagcttctgggaactcacggccagcttttttggcagtgcgctgcttggcacacagagccttccgggacttgcggtgtacaccaatctgctcctctagcaccttcagctgcatctgtaggagctgctgggtatggaacagccactcctcatactgccgctggtcagcttcattgatcactccctgagcaaaagtgggcgggttgggacgaggctgggagggatcaccagcactccgctcctggccactcccagctgccacatggttctgcagatcactgctaggtccccccgagagcctctgggctagcagagacacttgctgtctgttcataccaggtgccaccccaatgctgccctgagccatcactttcttgatgcctttcaaagccaccatcttggcctttgcaatgggaccaatgatatcttctgcagcaaatttgtccaggtctgtatctgggaagaagctgtttgccagctgctgctgcattgccaattgctgcggcttcatgcacatggaaggtggcatggtgcccatgggcttctgtgatagcactggctgtgagctctgctggggtaccaagcctgcctgccctccatgctgcccacttagcatatgcccttgattggacaccatagccatggatggagccaggcgttgctggagggcatgagctggtggctgggtgggcatcagtggctggggcaaacctggctgtcgggcaactgcaagacccagggaaagctgctgttgggacccagccaaactgggagaagagccctcatgtggcaaagacatggcctgggcagggcctggtgcaggcagtagggaatgctgctgctgctgttgctgctgctgctgggcaggctgcaactgtgctgaaagctgctgcttcttctgcagctccttcttctcatgctccaacaggtcctcaatgagcaggggtaactcgctggctaccagtgagctctccatcttgtctagctcatccccagatgctgcaggtccaccaggcaaggtcaaagccccactctcgagctcaaacttttccagcagggaggatcctcctgggccactcagtgggctgggggtcagcaggtgagctggtggccctcccgtggccccaaaggaggccttctcagctgtgtgcccactgctagaaaatggccctgtgcccatccgggtatcccggctgcccatcatgctctgtcctggctttagccccaggccaagggaattggcagcaggtgcgggctctaccttgggggtagcaatggtgaattggcaaggagaagggtggcgtccaccctcctccaccttgggcttcacctcagggagcacagatgccaggcggggttcagaggcatcagcagcagggggagggcgctcctcagggcccaagggtcctggctccaccccccgcagcagggcctcccgttcagcctcctcattagccgattctaccagcctcaggtgctcattgaagatatccttcttgtccccagtgtccagctcaggatcagtatatgccagcaggtcaaactcgtctccattgagcaggtcatccaagtgggggtcattggtctccaggttttctaaggtgccaagttcatcatcacccttggccacatccacacccagacccaggtgagcaagctcttcatcatcctctagggccttgtgggcatcaaaatcgtcatccagctcgggatcctcacagggcaacttcccagcttccagggccagaggattggggcggccaagctcagtgctcgacgggggccggttgaccagctccaaaccagttggcagggtaggacccttggtgtggggtgttggatgaagactgttgttcaattcaggggccggtggggctgagggtttctgtgggggaagacctgataccgccaggccccgaagcccttcaggagccagtcggtgggggtcctcacttacagggtaaaaacggggtctctgaggtgggccctgaccaggaaacggagtgcccccaggtcccagtcctttctgtacattgtgccgcagctcaatgaactgggcaggaccagctggaccaggcactggctcaccagggcctggcagacgggtggaaattcccgccaacggggaacctagggcttggcggccaagttcaggtccaggagttgatggaaagcgagctgacatggcaaatcgcatggaggttgctgctgttgcctgttgttgctgccacagttgttgctgttgctgctgtaagggcagggacccaggatagggtgctcgctgatagaaagcttgggagcctcctaccagttgccggctgttcacatccatagaggaaggcgtggctggtggaggtggccgggagagtcggtcatcgctagggaaggaccctggccccaggatggggccactcagcttgcttgggggcaaccccacaaggctgctcttgtcctgtgtcccagcaaagggggtctggcctcgactcagctgctcaaaggcagggctgctgggctcagcaccccagctgcctggaggccccactgctcccgcagctgctgcagctgtttccttctcctgccgcagggtgttgcgctggatctgctgccgaatcagcagctctcgtagccgctggcgctgccgttgcttctccagctctgtttggctaaggccggacatgcctgggtcctgggtacctgggagttcagctgtcgccaaagagctacccattccagtccctgggtcttctcgcttttcgacaggagaggtgatgcctgatcgctgtgaggctccatgggacaggtaggggagggatccgtcgggtgcaggtggtggcagaaccgacggagggcgtagtggggacagcccatagctctcccctgtggacccgctgctgggccccagggggctgcccgatgggtggaagttccctgtggctactgtgtagtttgtgctttgaggcttgcccaaggtggggccgggcccaaaatggctgttgatcccatggggtggcgggagaccaggctgagggacagggggctttagggaaggctcccctactgcctgagggaaagtgaaacgcatgggagagggggtgcccacaaatgcacccgtcccaggggaccggacaaaattggggggctgcccacttgggaccttggcatggagctcacctgctggccccgcgggcagggctgctgggaaccccccagcccccagcgaagtgtgggctagagacccagccttaaaggcaacttcagggggctggggtcggggtggcttatgcaatggggcaaatgggtcacgggactgagggcgtgagggtgggcgagaataagggtcaggggactggaagcgaggggtaacgggtgatgggcaaaaagcttcagcagacagaggccggggtgtcagtggagactgggagctggactgggactgaggactgacaggcactcgggagaaagggtcggagggcagtgagcgagggggcagagcacagcagctctcagggggcggaggttggggccgaggagtcaatgggggctgagcatatgggtcagtgtaggagccagggcgaaagatgtctgggtgacttggaggagaaggtgccaaagcctgggcagggggtggctcctggggccttaggcccaagcccgggctctggggctctacctgagatgcccgaggggtcaggggggctttgaagacatcaggtgtctttaactccaggccacccaggtgggtgcctgaggagggtgagtcaacaaagcccaggtttgggggcccatagctaggagaggatgccccaagctcttccttcttcacctctagggccttccgggactccccaaaaggtgggggcgagagcaggggctcggaagctttgcctccccctaccccagggctctcaggcacagccaagttatccagcgaggggcagcggggtttgaggaacgggtcaggtgtggagggctggtgtctgggggtgccaggtggggtagtgtggaattcccctggctggccagccccaggacgagatgaggcgcccagcatcgggggctgcgcaggggcccccgtaggactaggataggggggataggtgggcggtgccgtggggaagcggggctccaggggataggcaggggccagtccaaaggggtcctgcgaaggcgcttgggcgggcacctggggtgggagcttgaggaagagctcaccaggcgagtcagggccaggcaccgagcccgccggcggcttcaggaacccgtccgcagaggtagacaagccggcgggggtagtggggctgccaatgaaaatggtgggggcagcagcggggggcgggctgcccagtgcccctggctgcgggggaatgcggagatgtagggccggtcggtcagtcttacgggctatgtcgcccaccttggtctgcttgttgatctggctctcagcctgcttctgcaccttgttgatgcggtgagctgcccggttatctttggccttttgcaggtagggggctttgtcagctgctggaacctttctccagagcttcatgatttgtttgcaacggcttgaccagtctgggtagtcttgcttgagattaggaaaattaatgttggcatagagcacaggcgagatggtggacagctggcccaactcctcatccttctcccagcgctgaagactccgctggttataggagagtccgtcgccctcaccctccgtggtgggggttgtgggggtggagggcgtggtgccacctgagcccgtccaggggctgtcgggctcaccgggttccgggctaaagaagcccccgcgctccctagaatccaggaacggggactggcagaggcctgggtaggagtccattgggctgctggagggcagattgcccaaagggagtccaccttgaagaaagggcctctgcagtggcgtacggctgccttctaggccaggggttccacaacccagatgctgttctcgttcagagcccagaacatccttgaagagctgctgcaggtccttggattccatcttgggcagttcttctgtggaaatcctgtctaagtcagagctaagcatcccttcacctggggtgcctggcttctcagggtcactgggcactggggatgccttcacgcccccatcctcaggtcctggtgtatcggctttgccctcgaggccacgggattcttcatctgcaatatctggaccatcatctcctttctgcgatgtggggagttccttcctttctgagcctccatctcccttggcttttggggtccctagtccaaagcttggccggcccaccccaactgcaaaaagggccttacggctcaggtccagcagctccttcccaaagaaggcttcctgcaagtaagcagggaacatgccctccagtttgctcctcttgcgccctcgccgctgttgcttcttcttctcatccccttcagctaagctctgctccacggcgccctctgcaggcaggtcagcaggtatcacctcgtcgggctgcccatccccactcaacacctccgcctgtgcagcaggcccctttttcgtgcgtgtgtgggatttccgctgtcgcaccatgaaaccaccaatgccaggccgatatggtttacgcttgcgttttttgctttcctcggtctcctctttgccaggctccacatcagggctgacggggccctccagtttaatttcgcactccatgtgctccacaccaccttcacccttgagcagctcatcggtgtccaggtccccatccttcttgtcatcagggccaagggcatctgagggctcagaaccctccaatcctgcctcgcctgggaggccaagccgtcctcgccgttggcgccgcttgtgcagtggtgacatggtcaggttacgcagcaaggccatgccagtttctgtcagccacacgccttcgaagcgaaagtactggggctctggctctttcaccttcatgggcaccagctctggaggtgcaacaggcgccacaggctttaccacgtagggctggcaggagacacagtcaaagccttcatcgggtgcgtggtccacatcgtcctctgtgaagaggctctcacagcctgcatgcatccaccgttcacagtggcggcactggattagtaggtcctcttctacgtaaggagcatgacagatagggcaggtcaccaggctggcacagggcccacagtgtgtgtaactattctgccattcacagtggaagccaggggaagcagccccacactgcatacaggacacacaccacttgcacttccagccgcccttggggacggtgagcagtggggggtccaggcagtatgtgtggtagctaatatcacagtcatcacagagcagcaggcgtgaggggtcggaggcctggccacacacctcacacacaatacactccacacaacgccagcccttgagcagcatcaccttggtgatcttgctgttgacacagtaagggtgatagcactgagagcactgcgaacaggcaaggaggtggccctctgccccccggccaaagctgccacataccacacacatgtcctgcattaggacaaatttgtctgtgttggagaagagaaccacggtattctgcatggtgtcatcatcttcttcctcctcctccttactgggagagctatcaatgtcagcaactaccagagtctcaatggaagaagcagttgactttagccgggcccgtcctctaccacgccctccatgggctcctccacgaggccggcgtcttcctgggaaactgctgctgcgaccctgtttgatgcgggaacgggctggggagctgcgccgccgccccttctccccctcagctttgcctccgctgatagctgtcccagcatcgcacaatagtgagtcatcagtctctggcagtgagtcagtacagagccgtagggagccctcatctcgggctggactaacatccgtagagacccccaactccatggacagggagccacccccctccgggtctggagagcccaggaggggctctgagccaggaaaactggcactggcatcaccctggctcagattagagatctcgttaacgatgtcggatttgatgagagtgggtggtgtgggggccaccggtgcacgtggctcttcctgttcttcacatggtgagccccgccctgctgtctgcttgcattcggggtagacctccataggggtcacaggggccagctcctcggggtccaggagcacaggggagcctttaagttcactagccaaactgccaggggtctgtccaggctctggctgtgaacccggagcatcaatcccatccagaggggctgtgtcttcccctaggccagagaagtcatccagggctggggcagggctgggggcggggcaggaaaggtcccccattggggaagggagaggactggtggcactgggttccaaggctgggcattcaggttctgaaactttctcagtctccatctcgtgcagctcagcctcatctgagacccccactaccttccctatgggactcaacggggagggaacggacagtggtagggcaggaggagagcactgggaaggaggggagttttggggaaccagggaatgctgaaggagtggcgaacactgaggaggaaggggctccatcaggatgggagaagccggccccactggggagcctggagatgggggaaggatcataggggggacaggctcagggtcagtgcagttagcttctggtggagggctgatgggtgtctccaggatgggggcagccaacggtgactcagggtcactgtcccctttggcaccaaaggggtactctaactcccccaaaggagacagggccggtggggccgcagctgtgataatgggtgagagtggaggaggaaggggatctggtggcatcagctgaggcgacaaggatggctccccagatggggacaacggcagctcccccagtgcgaaccatagcaatattggcataggtgccaatctgtagctcttccagagacttggacatgaactctggcttggggaactcagtgatcagacgcatgagattatccaaaacctgccggttctgaatctttatcctcaccagccagcttctggctgtccatccctctctccgactgggcagggccctctcggagagacccctcagtgccctttcactatcccgggcagaggcagcatccttggggtgctcccccagctcttcagatggggtgacgccattcaccatcttctgctgcaccgatgggggtggggtgggggagcacgaccagggtggtgtcggcgggttactcaagttatttattgcagaaaatatggccattttcagaccttggcagcaaccatgagtttctgtgctggtcgtaggcttatgagcagcgaaatcttttttcagcttcagcatcagcatcgcagagacagctcctgctgccctgcttcgtttttctctgtgtgagttttgaccgtggttgactttataggcttgaagttgaaaatcagtagcacacctcccccctgtatctgggaagaagctgtttgccagctgctgctgcattgccaattgctgcggcttcatgcacatggaaggtggcatggtgcccatgggcttctgtgatagcactggctgtgagctctgctggagtaccaagcctgcctgccctccatgctgcccacttagcatatgccctgggatgctggcccgaggaatgagggggatgacaggggagagggcccggtcctcttgctcccaccggcctgagcccagatgagggaaacgaggggcctcctcccccaagatgctctcaggggatgaagctggcacaatgctgtcaggagaatcgctatcctcatcactctccatcctgacatcctcagtctgattgtgagggggtgtaggcaaggcagccagcaggtctagactcttcacctctgaagtatcttgggcaagcctcaaagcacaaactacacagtagccacagggaacttccacccatcgggcagcccccttcaagaactggctgaggagcctctccttctttttggccatctcctcctctgccagcaacttctgctgaaacagaagcagctgcttctcatcggacaggggcgtcttggccattttttctttcttgatgacattgtccttacagtccaccactcgttcaaatgtttggctgaagatctcaatgtccttatgaagttctctggtcttgacttccccgaagacaatcctccactgtgtggtaatcttattaaggttcagagcacggttgagttcctccttggccaccttgtccccaactgcaaaaagggccttacggctcaggtccagcagctccttcccaaagaaggcttcctgcaagtaagcagggaacatgtcctccagtttgctcttcttgcgccctcgccgctgttgcttcttcttctcatccccttcagctaagctctgctccacggcgccctctgcaggcaggtcagcaggtatcactgggtagtcttgcttgagattaggaaaattaatgttggcatagagcacaggtgagatggtggacagctggcccaactcctcatccttctcccagcgctgaagactccgctggttataggagagtccgtcgccctcaccctccgtggtgggggttgtgggggtggagggcgtggtgccacctgagcccgtccaggggctgtcgggctcaccgggttccgggctaaagaagcccccgcgctccctggggcgcaggggcagagagtcacagggcgcagggatgccaagtcccaccccagacaaactgcctagagccccaggccactgccctgaatcatcacctttttctccactggaggagtcgcccttgtctccaccggaagagtcacccccatctcctgcacttgagacgcctctatccccaccacctggagcatcgcccctgtccccaccatttgaagaatctcctttgtccccgccacctgaggaattgcccacttccccgccacctgaagcatctcgcctgtctccaccacctgaagagtcacccat

SEQ ID NO: 2421 - DNA, 619 bp, Homo sapiens
  SIMILAR (61)..(537): 941254mologous to Homo sapiens 5'-AMP-activated protein kinase, gamma-1 subunit,accession number U42412,Smith-Waterman Score=753.
ttcccgtgtcgacccacgcgtccgcctaaagcgaggaaaccaagccgggcgcctcttgcaatggagacggtcatttcttctgatagctccccagctgtggaaaatgagcatcctcaagagaccccagaatccaacaatagcgtgtatacttccttcatgaagtctcatcgctgctatgacctgattcccacaagctccaaattggttgtatttgatacgtccctgcaggtgaagaaagctttttttgctttggtgactaacggtgtacgagctgcccctttatgggatagtaagaagcaaagttttgtgggcatgctgaccatcactgatttcatcaatatcctgcaccgctactataaatcagccttggtacagatctatgagctagaagaacacaagatagaaacttggagagaggtgtatctccaggactcctttaaaccgcttgtctgcatttctcctaatgccagcttgtttgatgctgtctcttcattaaattcgggaacaagatccacaagcctggcagttattgaccccagaatccaggcaatactttgtaccatcctcaacccacaagcgcattctggaagttcctcaaaattgtttaacactggaggtt

SEQ ID NO: 2422 - DNA, 15789 bp, Homo sapiens
  SIMILAR (15789)..(4): 1001254mologous to Homo sapiens ALR,accession number AF010403,Smith-Waterman Score=28049.
ttagttcatccatttccgacaattccaggctccacagtggcaggggatctcgtgctgatcgtcctcaaaatcaaactgatagtcataggttagctcctctcctttggggattcgccggctggagatgatgatgattttgtcctctttgtcaaatgtcacgacttcggccacacagttaggggcacaggaatggttaatgtacctggcagggccgccggtcaacgtagcatcaatcacatgttcattgtttattcggaacatgtagatgcctcgattctgctcttcgtagattttctcccgccggttggccacctcgttccgaatgatggtgccaatgtactcgataaccattgtgtgcttttctaggtccttggctgcatagagccccaggccctggatacgggagcgagccaggtacacgttgttcttccattcggtgcgcagccgccggtactgagatgacttggagtgcacaaactgcttgctgtagggggtgttggtctcgcctgtgaaggtgctctgatatgccttagacatgctggtgctgttcagggtatggggccgtttgtagtgtgtgaggattttaggctctgatcgggcacagccagtggggttgatcatgagtggcagctccataagggggtggcgcccatagcggaataaatagttttgacagctctccaccccgggcagtgattcagctatgcgaagcacggcatgcaccgtcagcccaaagagctcctcgcccttcagatactcagggaagagtcgcagcatgtcagcctcttttctcatggcagccacaggctcaatgatgcgattccacacggcctggggagaggcgtcagtgaagaccaggtcctccaggccctgctcgatgactttgattacaaactccggccgcccgttgttctcaccaatagaacagcgatagcagcagcgacgattgttggtgcggaggctccaatagatgcgcgtggcctcgtagcccacgggatagagggcagtggcactatgaaagtcagccatctggtgaggcagcagctgtccgatggcgtggaacacaagcccccccacacggaacatgtgcagccgttctccccgctgaatgatgctagcgatttgcttcacctcgtcccgctcaatgtagacccgccggaagacagcaaaagagctcagctcttgctcacagggccccttgatcttatgcattggacacagcatggtcttgtccttgaagaacatgcacttggcgcggatggcacaaccaaaatggtagacattggggcaacgcatgcgattgcagctgctggtggcaccagttcgctggcacagggagcacttggttagcagtcctcggtgcagggcaacctccacattcatcagtgctccgccctgggtctcatacacctccgtggaccaaagggcacagttgaggtgcacccacaggtccaggtccaggttcagcagacgggcaggcccatcagtggccccgtcaccctcctcatgacagaaacagcagcgacgcatgtctcgcggtaccttgtcaggtcgcaaggctgtgccaagctgctccataaactctgccacttcccgctcatcctcctgccgtccactgcccttctggatggtcagcagcagccgaagccgcttccagcgcactcctttccatttcttgaggcgaggaggacgggtatcttcaccttcttcagggggccgggcacggggcttgggtcgggctgattcaggggatgaggccagtggcagaggtgaggggacgggtggctcagccaagggttcggtgggaagttcaaccaagggctcagtagggggactggcaggagaaggtgccaagggggaagggggcggggagggttcttcaggaggtggggccgagagctgtcgcacatccagattggagacattgtaggtatacctgtgctgagtgggtggctctggggcggggctctcctgtttcaggaggctcaagatgtctagttgcctcttcagggtatagccagccaacactgcatcaaactgcttcagccaatcagggccagtgtctgggctcttgccttccagacccttttccttcccaccaggaccctcagcttcccccttctttggctcagtgcctccccgggcggggctctctgggaacagcacctcataggagttggggatcttcatgctcagcagctccgccactgccaccatcacgccattcaggttcttgtctgcagcagcagagactgtgagcatgactgacacctcacttcctttgcccttttcccaagttgtgacaggcagctttccagggacctccaggccaagggccccataaggtttggtatctgggaagactgggatgctgtcccgaggaatgagggggatgacaggggagagggcccggtcctcttgctcccaccggcctgagcccagatgagggaaacgaggggcctcctcccccaagatgctctcaggggatgaagctggcacaatgctgtcaggagaatcgctatcctcatcactctccatcctgacatcctcagtctgattgtgagggggtgtaggcaaggcagccagcaggtctagactcttcacctctgaagtatccctcagtgccctttcactatcccgggcagaggcagcatccttggggtgctcccccagctcttcagatggggtgacgccattcaccatcttctgctgcaccgatgggggtggggtggggggcagcgacgagggtggtgtcggcgggttactcaggttattcttggtaagcagctgggaatagtagtcagggccagtgggcagcgccccacttccaaaggcccccctcagctggctctgcccattgactgggcagccactgccaaagggggcaaagaggctaaaattggcggtgatagcaggctccgttaggggcagcagggacagctcctgtttcagctgtttcagcaaggcctcgctggccctgacgccgtcctccttccgcagcttctttcgggagctcaccaacctgtcgcttgccttctgtacccgcttgggcttcggtgtcaaaggcttccttgctgctgcatcctccttgttgctgggggtaccctgtagtttctgctccagcccagccagcttgctgtcaatgtgcccgttgatctcagctcgcagcccctcggacccctgcccagtgctgagttgcacattctttgcccggagtagcttctgcaagagcagatgcccagcttctgagcgagggcctgccagcaggaggtggttgctggttcctggtgcccctattggctccccattggcctccctcttcactgactgggctcccagggcacatggctcttcccgaggttcctgcttgatgctgagttgggatgcctcaggcaccacctgtccattcacctggtccagatgcccaggtaccaggctgctctgctctggcttctgggtttctgctaggttgtctgggggatcccaaggtcccagacccttgctaaacaaggtatctgcaagctgggcagcagcaggtgagaccctcccaggaggcggctccaaggttggcccctgaggtttgggggtccctggatgggtgggagggagctgggcctcagtgggaagctgggagctgggggaaggtaattgtgaaggtctctttggctcttgagggctggatggtggaggtgtgggatggacagggccaaggactggtcctgtagataaggctcctggtggggcagggagccggggtgggccctgaggtcgaggccctgcccctagctcctggagggggcctgtctgtggtccagggaagcccccaagttgaggttggcagcccaggaggccctggaggggagaggtctgggtcccaggctcctggtagggtggggtctggcgtactgcctgactctgctgcagctgccgctgcatgaggagtgcctgtagctgctgctgctgctgaggacttaagtgccgcagctgtgggtttttggccaggactccttggagctgtgctcgaagctgacccaccgtaggcatgattccaaccccaggcagaccctgcccagactggaggacaggtcctggtttgggaggttgtggccctgtattattttgcatgggccgctctagcatgggctgttgggggcccagaaggttctgggtcatggacccaggctgatcccctaaggaaacagagggctgagccagcaggtggggcacagatgaggcctcagaagatgatccactgcctagctgcccatggcttcctccacctgctgtgtggagcaggctaacttgctgctgctgttgtcctggaagcctcagaggtggctgcagctgcagagagctgggctgaggctggggctggggttggacaagcaggagttgtgagtccccagagagtgagggctttacctctcctggttcagtggccattgactcaggggtagttcctattgctaacggccctccctgatgtgtagagggcccctcagtggcctctgaagaaacggctgggtctacggtgttttgttccttgcccgtcaggaggagggttggacccagggctccagggctagaaaagtgttgaagaggctttgctggcatgccagggccaagtgccacttgctgctgctgttgttgctgaggggacagtaaagttcgactctggtttaaaaggcccatctgctgctgttgctgctgctgttgaaactgctgctgttgttgttgctgttgctgttgtagctgctgttgctgctgttgaagctgttgctgctgctgttgttgaagctgctgctgctgttgctgctgttgaagctgttgctgctgaagttgctgttgctgttgtagctgctgctgctgctgctgctgaagttgctgttgctgttgcagctgctgctgctgctgaagctgctgtaaagagcccatgggctgagcgctcagtttgggctgcccactgtgtgacatcagactttgctgaagatgggacagccctgccatggacccttgctgttggtgctgttgttgctgctgctgctgctgggctgtgaccagcctgtgtcccataaggccctgaccctgctgtgccagctggggggaactgagcacccgggactgggtcataagcacctgtctgtgagggccctgggggcccaaagctccagggtgctgctgctgcaacacagccacctgggcagggcccagcatgccctggggcccctggggtggttgaggggacagctgctggaccaggaggccttggtggctgctgggaggcataaggccctggggcttgggacccagagcttggtttgtctgtactccaggaccctgctgctgttgctgctggattgccacctgtcctagaaggtgctgctgctgctgttgctgctgctgctgctgctgcagtttctgggccagctgcatacgttgctgctgcagctgcagctgcctttcctgtaaaagccttgaatcaggtccgaggcttcgaagagcaaggttgccagggaagaagccccctgaagggccagccagggatccagccccaccagaatgttgctgttgctgctgttgggccagagctgtattaaggaaggggccaccaggctgtccaggtagtgccatacccccaggggtcaggcgaagacctccggcttgcccacccggaggcccctgtggtggctgcagcccatggccagggagcagctgaccagggagcttggtgagcagccggggactctgggaagggctgagagccagcacagctgagtgctgttgctgttgttgctgctgctgctgctgttgttgctgctgcttgttccgatattctgccatgagattagtgtgctccttctgctgtttccggacctgatccagttgtttctggatcttgctctgctgctctgtaaccagcttgagcttctcagcatcagcttctgggaactcacggccagcttttttggcagtgcgctgcttggcacacagagccttccgggacttgcggtgtacaccaatctgctcctctagcaccttcagctgcatctgtaggagctgctgggtatggaacagccactcctcatactgccgctggtcagcttcattgatcactccctgagcaaaagtgggcgggttgggacgaggctgggagggatcaccagcactccgctcctggccactcccagctgccacatggttctgcagatcactgctaggtccccccgagagcctctgggctagcagagacacttgctgtctgttcataccaggtgccaccccaatgctgccctgagccatcactttcttgatgcctttcaaagccaccatcttggcctttgcaatgggaccaatgatatcttctgcagcaaatttgtccaggtctgtatctgggaagaagctgtttgccagctgctgctgcattgccaattgctgcggcttcatgcacatggaaggtggcatggtgcccatgggcttctgtgatagcactggctgtgagctctgctggggtaccaagcctgcctgccctccatgctgcccacttagcatatgcccttgattggacaccatagccatggatggagccaggcgttgctggagggcatgagctggtggctgggtgggcatcagtggctggggcaaacctggctgtcgggcaactgcaagacccagggaaagctgctgttgggacccagccaaactgggagaagagccctcatgtggcaaagacatggcctgggcagggcctggtgcaggcagtagggaatgctgctgctgctgttgctgctgctgctgggcaggctgcaactgtgctgaaagctgctgcttcttctgcagctccttcttctcatgctccaacaggtcctcaatgagcaggggtaactcgctggctaccagtgagctctccatcttgtctagctcatccccagatgctgcaggtccaccaggcaaggtcaaagccccactctcgagctcaaacttttccagcagggaggatcctcctgggccactcagtgggctgggggtcagcaggtgagctggtggccctcccgtggccccaaaggaggccttctcagctgtgtgcccactgctagaaaatggccctgtgcccatccgggtatcccggctgcccatcatgctctgtcctggctttagccccaggccaagggaattggcagcaggtgcgggctctaccttgggggtagcaatggtgaattggcaaggagaagggtggcgtccaccctcctccaccttgggcttcacctcagggagcacagatgccaggcggggttcagaggcatcagcagcagggggagggcgctcctcagggcccaagggtcctggctccaccccccgcagcagggcctcccgttcagcctcctcattagccgattctaccagcctcaggtgctcattgaagatatccttcttgtccccagtgtccagctcaggatcagtatatgccagcaggtcaaactcgtctccattgagcaggtcatccaagtgggggtcattggtctccaggttttctaaggtgccaagttcatcatcacccttggccacatccacacccagacccaggtgagcaagctcttcatcatcctctagggccttgtgggcatcaaaatcgtcatccagctcgggatcctcacagggcaacttcccagcttccagggccagaggattggggcggccaagctcagtgctcgacgggggccggttgaccagctccaaaccagttggcagggtaggacccttggtgtggggtgttggatgaagactgttgttcaattcaggggccggtggggctgagggtttctgtgggggaagacctgataccgccaggccccgaagcccttcaggagccagtcggtgggggtcctcacttacagggtaaaaacggggtctctgaggtgggccctgaccaggaaacggagtgcccccaggtcccagtcctttctgtacattgtgccgcagctcaatgaactgggcaggaccagctggaccaggcactggctcaccagggcctggcagacgggtggaaattcccgccaacggggaacctagggcttggcggccaagttcaggtccaggagttgatggaaagcgagctgacatggcaaatcgcatggaggttgctgctgttgcctgttgttgctgccacagttgttgctgttgctgctgtaagggcagggacccaggatagggtgctcgctgatagaaagcttgggagcctcctaccagttgccggctgttcacatccatagaggaaggcgtggctggtggaggtggccgggagagtcggtcatcgctagggaaggaccctggccccaggatggggccactcagcttgcttgggggcaaccccacaaggctgctcttgtcctgtgtcccagcaaagggggtctggcctcgactcagctgctcaaaggcagggctgctgggctcagcaccccagctgcctggaggccccactgctcccgcagctgctgcagctgtttccttctcctgccgcagggtgttgcgctggatctgctgccgaatcagcagctctcgtagccgctggcgctgccgttgcttctccagctctgtttggctaaggccggacatgcctgggtcctgggtacctgggagttcagctgtcgccaaagagctacccattccagtccctgggtcttctcgcttttcgacaggagaggtgatgcctgatcgctgtgaggctccatgggacaggtaggggagggatccgtcgggtgcaggtggtggcagaaccgacggagggcgtagtggggacagcccatagctctcccctgtggacccgctgctgggccccagggggctgcccgatgggtggaagttccctgtggctactgtgtagtttgtgctttgaggcttgcccaaggtggggccgggcccaaaatggctgttgatcccatggggtggcgggagaccaggctgagggacagggggctttagggaaggctcccctactgcctgagggaaagtgaaacgcatgggagagggggtgcccacaaatgcacccgtcccaggggaccggacaaaattggggggctgcccacttgggaccttggcatggagctcacctgctggccccgcgggcagggctgctgggaaccccccagcccccagcgaagtgtgggctagagacccagccttaaaggcaacttcagggggctggggtcggggtggcttatgcaatggggcaaatgggtcacgggactgagggcgtgagggtgggcgagaataagggtcaggggactggaagcgaggggtaacgggtgatgggcaaaaagcttcagcagacagaggccggggtgtcagtggagactgggagctggactgggactgaggactgacaggcactcgggagaaagggtcggagggcagtgagcgagggggcagagcacagcagctctcagggggcggaggttggggccgaggagtcaatgggggctgagcatatgggtcagtgtaggagccagggcgaaagatgtctgggtgacttggaggagaaggtgccaaagcctgggcagggggtggctcctggggccttaggcccaagcccgggctctggggctctacctgagatgcccgaggggtcaggggggctttgaagacatcaggtgtctttaactccaggccacccaggtgggtgcctgaggagggtgagtcaacaaagcccaggtttgggggcccatagctaggagaggatgccccaagctcttccttcttcacctctagggccttccgggactccccaaaaggtgggggcgagagcaggggctcggaagctttgcctccccctaccccagggctctcaggcacagccaagttatccagcgaggggcagcggggtttgaggaacgggtcaggtgtggagggctggtgtctgggggtgccaggtggggtagtgtggaattcccctggctggccagccccaggacgagatgaggcgcccagcatcgggggctgcgcaggggcccccgtaggactaggataggggggataggtgggcggtgccgtggggaagcggggctccaggggataggcaggggccagtccaaaggggtcctgcgaaggcgcttgggcgggcacctggggtgggagcttgaggaagagctcaccaggcgagtcagggccaggcaccgagcccgccggcggcttcaggaacccgtccgcagaggtagacaagccggcgggggtagtggggctgccaatgaaaatggtgggggcagcagcggggggcgggctgcccagtgcccctggctgcgggggaatgcggagatgtagggccggtcggtcagtcttacgggctatgtcgcccaccttggtctgcttgttgatctggctctcagcctgcttctgcaccttgttgatgcggtgagctgcccggttatctttggccttttgcaggtagggggctttgtcagctgctggaacctttctccagagcttcatgatttgtttgcaacggcttgaccagtctgggtagtcttgcttgagattaggaaaattaatgttggcatagagcacaggcgagatggtggacagctggcccaactcctcatccttctcccagcgctgaagactccgctggttataggagagtccgtcgccctcaccctccgtggtgggggttgtgggggtggagggcgtggtgccacctgagcccgtccaggggctgtcgggctcaccgggttccgggctaaagaagcccccgcgctccctagaatccaggaacggggactggcagaggcctgggtaggagtccattgggctgctggagggcagattgcccaaagggagtccaccttgaagaaagggcctctgcagtggcgtacggctgccttctaggccaggggttccacaacccagatgctgttctcgttcagagcccagaacatccttgaagagctgctgcaggtccttggattccatcttgggcagttcttctgtggaaatcctgtctaagtcagagctaagcatcccttcacctggggtgcctggcttctcagggtcactgggcactggggatgccttcacgcccccatcctcaggtcctggtgtatcggctttgccctcgaggccacgggattcttcatctgcaatatctggaccatcatctcctttctgcgatgtggggagttccttcctttctgagcctccatctcccttggcttttggggtccctagtccaaagcttggccggcccaccccaactgcaaaaagggccttacggctcaggtccagcagctccttcccaaagaaggcttcctgcaagtaagcagggaacatgccctccagtttgctcctcttgcgccctcgccgctgttgcttcttcttctcatccccttcagctaagctctgctccacggcgccctctgcaggcaggtcagcaggtatcacctcgtcgggctgcccatccccactcaacacctccgcctgtgcagcaggcccctttttcgtgcgtgtgtgggatttccgctgtcgcaccatgaaaccaccaatgccaggccgatatggtttacgcttgcgttttttgctttcctcggtctcctctttgccaggctccacatcagggctgacggggccctccagtttaatttcgcactccatgtgctccacaccaccttcacccttgagcagctcatcggtgtccaggtccccatccttcttgtcatcagggccaagggcatctgagggctcagaaccctccaatcctgcctcgcctgggaggccaagccgtcctcgccgttggcgccgcttgtgcagtggtgacatggtcaggttacgcagcaaggccatgccagtttctgtcagccacacgccttcgaagcgaaagtactggggctctggctctttcaccttcatgggcaccagctctggaggtgcaacaggcgccacaggctttaccacgtagggctggcaggagacacagtcaaagccttcatcgggtgcgtggtccacatcgtcctctgtgaagaggctctcacagcctgcatgcatccaccgttcacagtggcggcactggattagtaggtcctcttctacgtaaggagcatgacagatagggcaggtcaccaggctggcacagggcccacagtgtgtgtaactattctgccattcacagtggaagccaggggaagcagccccacactgcatacaggacacacaccacttgcacttccagccgcccttggggacggtgagcagtggggggtccaggcagtatgtgtggtagctaatatcacagtcatcacagagcagcaggcgtgaggggtcggaggcctggccacacacctcacacacaatacactccacacaacgccagcccttgagcagcatcaccttggtgatcttgctgttgacacagtaagggtgatagcactgagagcactgcgaacaggcaaggaggtggccctctgccccccggccaaagctgccacataccacacacatgtcctgcattaggacaaatttgtctgtgttggagaagagaaccacggtattctgcatggtgtcatcatcttcttcctcctcctccttactgggagagctatcaatgtcagcaactaccagagtctcaatggaagaagcagttgactttagccgggcccgtcctctaccacgccctccatgggctcctccacgaggccggcgtcttcctgggaaactgctgctgcgaccctgtttgatgcgggaacgggctggggagctgcgccgccgccccttctccccctcagctttgcctccgctgatagctgtcccagcatcgcacaatagtgagtcatcagtctctggcagtgagtcagtacagagccgtagggagccctcatctcgggctggactaacatccgtagagacccccaactccatggacagggagccacccccctccgggtctggagagcccaggaggggctctgagccaggaaaactggcactggcatcaccctggctcagattagagatctcgttaacgatgtcggatttgatgagagtgggtggtgtgggggccaccggtgcacgtggctcttcctgttcttcacatggtgagccccgccctgctgtctgcttgcattcggggtagacctccataggggtcacaggggccagctcctcggggtccaggagcacaggggagcctttaagttcactagccaaactgccaggggtctgtccaggctctggctgtgaacccggagcatcaatcccatccagaggggctgtgtcttcccctaggccagagaagtcatccagggctggggcagggctgggggcggggcaggaaaggtcccccattggggaagggagaggactggtggcactgggttccaaggctgggcattcaggttctgaaactttctcagtctccatctcgtgcagctcagcctcatctgagacccccactaccttccctatgggactcaacggggagggaacggacagtggtagggcaggaggagagcactgggaaggaggggagttttggggaaccagggaatgctgaaggagtggcgaacactgaggaggaaggggctccatcaggatgggagaagccggccccactggggagcctggagatgggggaaggatcataggggggacaggctcagggtcagtgcagttagcttctggtggagggctgatgggtgtctccaggatgggggcagccaacggtgactcagggtcactgtcccctttggcaccaaaggggtactctaactcccccaaaggagacagggccggtggggacaagggagattcctcaggcggtggagacaggcgtgacaccacaggcaggggggataggcgcgatacctcaggtgggggggacataggtgattcttcaggtggtggggacataggcgagtcctcaggtggtggggacaggcgtgatgcctcaggtggtggggaaaggggagactcctcaggtggaggggacagaggagactcttcaaatggtgggaacagacgagatgcctccggtggtggagacatgggtgactcttcaggtggaggggacatgggtgactcctcaggtggtggagacaggcgagatgcttcaggtggcggggaagtgggcaattcctcaggtggcggggacaaaggagattcttcaaatggtggggacaggggcgatgcttcaggtggtggggatagaggcgtctcaagtgcaggagatgggggtgactcttccggtggagacaagggcgactcctccagtggagaaaaaggtgatgattcaggtgggggagacagaggagactcctcaggcggcggagagaggggcgattcctccagcggccgggacaggtgcaatgcctcaggaagtggggatgcgggcaattcctcaggtggtggcgacaggcgtgatgcctcaggtggtggggacgtgggtgattcctcaggtggtggggacaggggtgactcctcaggtgggggcagcagtggcatctcctcgtttaggggggcctccaactggggctcaagttggacccctgctttccctagtggtttggcttcacattgcaggggccctggttccttgggttgcatagaggtcacgtgcccaccctttggctgcccttggcatgcaacgtacagagcatcgggctcgtcagtgggggtatcgccaggctctgggggtgaaaatctgctacacaccggggtatgctgctcagcaacggagcggatagtctgacctccctgggctttgtgacagcggtgacagagagagtagttctcaaaccactccgagttgggattcagttctgctgagcccgccccacaggcccggcacacccggcacgccttgcacttccaagagtgagcaggcagttcctccatgggtggttttaggcagaaagtatggtatcctttgtcacacgtctcgcaaaccaacatcttagagtcattcccaggtttcctgcaggcttggcacactttgcattcagggcactgccagccagcacgtttgcgggcagtcagagcagtgtccaggcaggccccgtgatagtgatgcccacagctggtacagaagaacaggtcacacagctcccctggcccctcacacactgcacagcgagcctcctccagatatgcagccccctcactgtgctctgggcatagcagctgcagtgttttcatggataggaaggaaccgctggcagtcgcgcaggggaagtggtaaagccgtggacatccaggtgagcggcaagggatggaggcaccgagcctggtgcagtgggagcagcgctgtgagatccctgagaagatggccttgtccacaccacatagttgtgggccctcctgcccccatacgcctgccgaccatgcagcacaccaatggtgagcccagcaggaccctccaggttctcctaggtgggcaggtgtaaggccctcagggaaaccaatctgtgataggtcctcactgggcagcactgcctcattgggccctgggctccccccaggggacaccactggacaccggggccaatcaaatggcaactcaaagcgccgtagctcccgctgcccgtgtagagcgggctccccgcagttacagagagcacaacgccgcaccggacccccactgcagtcctgaggagtctcctgaagcctgggactcccagaactaaggacagagacctctcccacatgtgggttgggcaggtctgactcagtggcacttgggtcctcagaggctgcaggtccatcagctgccggttgtgaatctttatcctcaccagccaggttctggctgtccat

SEQ ID NO: 2423 - DNA, 4016 bp, Homo sapiens
  SIMILAR (623)..(1189): 561254mologous to Homo sapiens ADP-ribosylation factor 3,accession number M74493,Smith-Waterman Score=407.
  misc_feature (1)...(4016): n = a,t,c or g
tcatttcatcttccatcgctgataccctttcttccagttgatcgcatcagctcctgaggcttctgcattcttcccgtagttctcgaaaaaggctttcagctccgtcagctcctttaagcaattctctgtattggttattctagttatacattcgtctaaatttttttcaaagtttttaacttctttgcctttggtttgaatttcctcctgtagctcgtagtttgagcatctgaagccttctactctcaactcgtcaaagtcattctccatccagcttcgttccatgncgcgcagctttcgcgcgatcggggaggtgggaagtatccggggctggggtggggggtacgccgcacagctccagtcgccgtcgcggcttccggtgctaggtggagggaagaaaggagggagccggggagtgggccagggcagcagccgggctgaagtcggcttggggagccagagggagcggagcggaacctgcggtgcagaggcggcggccgcagcggcgcagctgatagcaggaacaggatcaagtcttccataccagggaccaggccaaaaccagactgctattgctcctacttgtgccccactgtccccatgtaaagcagctgctgtgatcatgggcaatatctttggaaaccttctcaagagcctgattgggaagaaggagatgcgcatcctgatggtgggcctggatgccgcaggaaagaccaccatcctatacaagctgaaactgggggagatcgtcaccaccatccctaccattgggttcaatgtggagacagtggagtataagaacatcagctttacagtgtggggatgtggggtggccagggacaaggattcgacccctcttggagacacttacttccagaacaacccaagggtttgatattttgtggtccgacagcaatggatcggggagcgagtaaatgaggccccgggaagagctgattgaagaatgctggcgcggagaccagcctccgggatgctgtactccttgtctttggccaaacaaacaggatctgccctaatgctatgaacgctgctggggatccaagacaaactggggcgtgcattcccttcgtcaccgtaactggtacattccaggcaacctgtgccaccagggggaaccgggctgtacgaaggcctgcactggctggcaaattcggttcccaaacaggaagtcgaaagccggacggccctaacaaagcactccacctctcccctgacatacctactgtcaccctgcccccagttcttacccttactctccatgcaaggtttggcaagggcctggggtatcatgtccacattgcccagcagaaccctgcctcccctgacctccctccccttttcctgtccacctatatgaccaatccctaattgctgtcctgatgatgagtcattccaatttactggatttaaaacaaaaagttgttacggtttcatggggtggcccctctctctctctcaccctctgggttgtcgggaggtcgagtggggtattctctttgtttggcagaggttgctgtcctcttggcatctgagtcctttccctgtccccacaagcccttctactccctgtttgcctttcctttgccaccctctccctggttttacatggaaattgcacgggcctctctgtgtttgcgtgcatgtgtgcgcctggtatatacatgtataagagagatatatttgtgggggccggggggagcggggagggggtggagtgaagctcagggcttgcagccaggacactgcccactggagcctgtcatctgccccttccgtgttggtgagattaagggaagaaggtgggagggcattagtcaagccggactgccccagtctttgactggttaccctcctctctgcaggtaggtttttctggatgataggacagatgatggattcttcaccacccattttccttgtactcttctctccacccttcttagggctggaggatggcatttatcttctagatgactgttcccaaggagatgccactctgctctgccttactgttgggaaggagagaggaacccactcactcttatcagcttagagtgttcaactgatccttccccaccatcttcagatctgttcctctggagcttgactgaggggtgggaatgacaagtccatggtgtgtgttatggaactcagggcattgggggaagggaggcgaaggcctgaggttttccatcttcattctcttttgttattaggagaaggtgaggcatgggccaatcccattcctgccttccagtgccccaccacccttctgatcttaggggttggatgggtcatctgtccttggtcagaattttctcaccctagtactcctactggcctgaccagggctgactgggtattctaatgaggagctgggaagtggggtgacatagctgaccttagtatcaacccccgctcttctccaactcttgttttctagtccaggatatgctaaaggacgaagattttctattgtttccaggccctcagaccatccttgctgtcccttcaccctccatgcctctgccatcctcactcacttctcataaatggatctgggggttagagtggaggaaataaaatcctgaaagtggttgtcagtgcttgtgggatgcagtgggtcttcagggattctccccgcattattaatgtaagttggttcagaaagctgttgctactgcgtctctctgtctgcaaggggggcaacttgttcctgaaggtcctcgcctgggtcctgacttctgtagtttctgtgaagacgtggctgtcctgtgggctcctgtgtgtgctggctgcgcctggaggtccgagacaggctggccataagctgctaaggtcagggcccagggccctccaacaagcaatggctgaagggaccccttgcccagtaagggctgtcccaagccccactccatgggggccaaggtttcctggccacttttgttgatagcagatggatcaatattagtaaccccatccaagattgaactgtgaaagagaggttccagggggtaatctccctcagtgccagttaacttagtgatgtgttacccaggatgcagcaggtgtgtgcaggtatcttgctctctaggcctgtgtgtgtgtgtgagtgtgtgtgtatatgggtgtgggtgtgtttgtgtgtggtggttgtggggggggtgttggaggttctatttcatttaaaaatgtattcattttccctgggccccacagatgcttccctccatactttttatttgctctgtttcctcagatttattttgtcttgccccattgcctctccttccttgaactctttccttttcaatctcaactcattcacctgctgttgctcatttgccctttttccattgtattttttcctacttaggattttccactctatctttgtggttcatgaggactttgcctcttctcctgcctcattccctggactttctctagtttagatgtccagtcctaaaataggttttcctcacttcagggcctcacccctcaccttgtttttttgggggctccaaggaaccaatctggggctggaaaatgttagggaggttgccttggttgctgccccagatctgtcccagccagggggcaagttaagtgaatcttgggtagtaatccctgggctggctaagcccttgggcaagggggtgggtcctttctacattcccattcacttaacagctcttttgggattgggtgtttcattccatttctgcccactccctctccatctccgtctctggtaggtttaaattttatgctttccctgattccagctttctgcttcctgaggactcccgctcccccccaccccaaagtttgtctgtggtgttatagtggtaactgcagttcctcctctggaatgtagactggtatatgtttaataactcaccttctctatccttgctcaaaatgtgggataacgcgatgactgtgaccctgggttggaaattaaacttggttttatgcagctttaaaaaaaa

SEQ ID NO: 2424 - DNA, 617 bp, Homo sapiens
gtttcacctttagaatgagaacaggtcagcctctcgcggtagaaaaacccaaaaatgggtgacggccctgcctcaataccttccgcgttcctcctggctctaaacgcaaatgccaaagaatgactcttcctggaggagaaaggaggccaggcagccgtctcctatgttctaggagccccgacccgcagtcaccaacgccggcacccccaggcgggtcctgctgacctcttgcccacagctttgtccacattcaggggcaaagtacaacaaccaaatccaatgcaaagttaagtgacgacagagaactcgggtggacagacacaatgcggaaaacaagacagaattcaagtaccgaggcacccagccaggcgcggcccgccgggctcacagtatctgtcacacctccggtccctcctggacctctccatgcaacccagctgcctcctgggcccatccccttggggaagaggaaggcagggcaggagaggcggctagatcccaggcccaccacctgccaggcggcagctccaacacggtccagtcccttctgtcctcctcaaaaggtgtggagataacgtagctctgtaatagattctatataggatatgcctcgtgcc

SEQ ID NO: 2425 - DNA, 853 bp, Homo sapiens
tcaccatatcttccattatcagaaaggcccggaaaccgccaggacctcttgaataattacaccccccgctcttcaccccttagaagcagcgggcgcacacgaatgtacaaaggaaaaaacgtccgcccggggaattcttcctgagcgaggtggcccgaggacgcttccttcttccaggtctggccgccgcctgagtccactcccagtgcttgcaagattccaagttctcacctcttaaagaaaaccacccccgtagattcccatcatacactccttttttttaaaaaagttggtttcctccattcaggattctgttccttaggtttttttccttctgaagtgtttcacgagagcccgggagctgcctgctgcggccccgtctgtttgtttcagcttctgggtctgagtcatggccgggtggaggcacagccttctccactggccggagtcagtgccaggtccttgccctttgtggaaagtcacaggtcacacgaggggccccgtgtcctgcctgtctgaagccaatgctgtctggttgcgccatttttgtgcttttatgtttaattttatgagggccacgggtctgtgttcgactcagcctcagggacgactctgacctcttggccacagaggactcacttgcccacaccgagggcgaccccgtcacagcctcaagtcactcccaagccccctccttgtctgtgcatccgggggcagctctggagggggtttgctggggaactggcgccatcgccgggactccagaaccgcagaagcctccccagctcacgtggaacccccctcccacccaccgccacaataaagatcgcccccacctccaaaaaaaaaaaaa

SEQ ID NO: 2426 - DNA, 1420 bp, Homo sapiens
  SIMILAR (713)..(1162): 921254mologous to Homo sapiens collagenase stimulatory factor,accession number L10240,Smith-Waterman Score=705.
atggcggctgcgctgttcgtgctgctgggattcgcgctgctgggcacccacggagcctccggggctggtgaggagcgggcgaggaaacagccctgtgggaagtcgaggttccaaggtcacagtgagggggccctggccacccgattcagcgcaggaaataccggcttcgtccaggcgccgctgtcccagcagaggtgggtggggggcagtgtggagctgcactgcgaggccgtgggcagcccggtgcccgagatccagtggtggtttgaagggcagggtcccaacgacacctgctcccagctctgggacggcgcccggctggaccgcgtccacatccacgccacctaccaccagcacgcggccagcaccatctccatcgacacgctcgtggaggaggacacgggcacttacgagtgccgggccagcaacgacccggatcgcaaccacctgacccgggcgcccagggtcaagtgggtccgcgcccaggcagtcgtgctagtcctggaacccggcacagtcttcactaccgtagaagaccttggctccaagatactcctcacctgctccttgaatgacagcgccacagaggtcacagggcaccgctggctgaaggggggcgtggtgctgaaggaggacgcgctgcccggccagaaaacggagttcaaggtggactccgacgaccagtggggagagtactcctgcgtcttcctccccgagcccatgggcacggccaacatccagctccacgggcctcccaaaagtgaaggctgtgaagtcgtcagaacacatcaacgagggggagacggccatgctggtctgcaagtcagagtccgtgccacctgtcactgactgggcctggtacaagatcactgactctgaggacaaggccctcatgaacggctccgagagcaggttcttcgtgagttcctcgcagggccggtcagagctacacattgagaacctgaacatggaggccgaccccggccagtaccggtgcaacggcaccagctccaagggctccgaccaggccatcatcacgctccgcgtgcgcagccacctggccgccctctggcccttcctgggcatcgtggctgaggtgctggtgctggtcaccatcatcttcatctacgagaagcgccggaagcccgaggacgtcctggatgcactcagaagatgcacgtggccggggctgatgagctgccccgagccacccctgggggtcactgagggcagggctggcagcacagatgcccctgctcggggcctgagtggggccagtgctgacaggctgtcctctcgtcctctttttcatggcggcggtccttcttcagatgacgacgccggctctgcacccctgaagagcagcgggcagcaccagaatgacaaaggcaagaacgtccgccagaggaactcttcctga

SEQ ID NO: 2427 - DNA, 1712 bp, Homo sapiens
  SIMILAR (69)..(734): 411254mologous to Homo sapiens collagenase stimulatory factor,accession number L10240,Smith-Waterman Score=309.
tttcgtgccgcgggcggcggcggcagcggttggaggttgtacgcggattccggcgaggaataggaatcatggcggctgcgctgttcgtgctgctgggatctcgcgctgctgggcacccacggagcctccggggctgccggcacagtcttcactaccgtagaagaccttggctccaagatactcctcaccgtgctccttgaatgacagcgccacagaggtcacagggcaccgcgtggcctgaaggggggcgtggtgctgaaggaggacgcgctgcccggccagaaaaccggagttcaaggtggactccgaccgaccagtggggagagtactcctgcgtcttcctccccgagcccatgggcacggccaacatccagctccacgggcctcccagagttgaaggctgtgaagttcgtcagaacacatcaacgagggggagacggccatgctggtctgcaagttcagagttcgtgccaccttgtcactgactgggcctggtacaagattactgactctgaggacaaggccctcaatgaacggctccgaagagcaggttcttcgtgaattcctcgcaagggccggtcagagctacacattgagaacctgaacatggaggccggaccccggccaggaaccggtgcaacggcaccagctccaaagggctccgaccgaggccattacaattcctccgcgtgcgcagccacctggccgccctctggcccttcctgggcatcgtgggtggaggtgctggtgctggtcaccatcatcttcatctacgagaagcgccggaagcccgaggacgtcctggatgatgacgacgccggctctgcacccctgaagagcagcgggcagcaccagaatgacaaaggcaagaacgtccgccagaggaactcttcctgagggcaggtggcccgaggacgctccctgctccacagtctgcgccgccgccggagtccactcccagtgcttgcaagattccaaggttctcacctcttaaagaaaacccaccccgtaggaatcccatcatacacttccttctttgttaaaaaaagttgggttttctcccattcagcattctgtttccctagaattttctccttctgaaaatgttttcacgagaagcccgggaagcttgcttccctgcggcccccgtctggtggtttccagcctctgggtctgaagtcattggccgggttggggcgcaacagcctttctccactggccggaagtcagtgtccaggtcctttgccctttgtggaaagtcacaagctcacaggagggggccccgatgtcctgccttgtctgaaagccaaatgctgtctggttgcgccatttttgtgcttttaatgtttaattttatgatggccaccgggtctgtgttcgactcagccttcagggacgacttctgaccttcttggccacagaggactcaacttgcccacaccgagggcgaccccgtcacagcctcaaagtcactcccaagccccctccttgttcttgtgcatccgggggcagctctggagggggtttgctggggaactggcgccatcgccgggactccagataccgcagaagcctccccagctcacccctggaggacggccggctctctatagcaccaggggctcacgtgggaaccccccctcccacccaccgccacaataaagatcgcccccacctccaccctcaaaaaaaaaaaaaaaagggcggccgct

SEQ ID NO: 2428 - DNA, 1130 bp, Homo sapiens
  SIMILAR (975)..(4): 1001254mologous to Homo sapiens CGI-21 protein,accession number AF132955,Smith-Waterman Score=1710.
tcagacaagtattctctcagatccacatttgtaatagggaaattgacaactagttggattcttctcaacaaagaagttgttcttagtgaatatcttgatacaaaagattagatatggaggcaacttggtaagctggaagcgcttcagaaagttctccttgtaagtcttatattccttctcagtgatgccattgaacttagccaggatgttgaagagtggcacttggggaatgatgagctgctccttctcgtccttgtagaggggggcagtaggaaggtccagcgtcaggtacataaaagtggactccaccattgtctcctggtactcgtcattatggagcaactgctctttttcttctgctggcagatcaggatggggaagctttttagtgaagatcctcatggacccctggaaaacatcagtcacaatagtcttctttttcttctttgtgccccccagagctgagtgcagagcattcagaaaccaagacagaaagtcaacgccatctccttgtttggtgatctgaaaagtcttcttactgcaaagtacaactgcctgaagcatctcatggggagacacatgtgccttgaaatttcgagggttccagagctttctcatcagctctccaaaacgctggaccaacaagaacatgatatcccctggaggacgtttgatgttcttataattgtcttcttccagaaagtagttccggagaggaggaacattagatagagcctgaaggacagcgttggcataatcattggcctttatgttattcagtcccacaatacccggcaggtaagtggtaccatcatatgcccgggacaatttggcttgcttgtccaagtttgcaatttgctgctttgtgaaagtgggcttcaaacacatacgtgatatcctccaatgaggaatcgatgatctcatagttgtctggaaggcagtaaaacttgagggtgtggaggttgaggaaaacatggtggctaaactggacactgtgaatgtaggcgtgagacttcaaaccccggcctgtagggaagggtgaaaagcttgaaagtacttgccacacaccagacaggcataagcattgatgtgtgagagggagatagaacacagtttctcaaagtcaaagt

SEQ ID NO: 2429 - DNA, 644 bp, Homo sapiens
  SIMILAR (20)..(259): 961254mologous to Mus musculus putative,accession number AK009711,Smith-Waterman Score=411.
cccgtgcggtggaattcgaggagggaaggagatgaacgagattaagacccaattcaccacccgggaaggtctgtacaagctgctgccgcactcggagtacagccggcccaaccgggtgcccttcaactcgcagggatccaaccctgtccgcgtctccttcgtaaacctcaacgaccagtctggcaacggcgaccgcctctgcttcaatgtgggccgggagctgtacttctatatctacaagggggtccgcaagggctcattgtcatcctcaagccaggccagttctccaggtgaaactgtagtgtagcgacctcactgctgcgcagcacagtctcccgggacttggactcgagggagtgacgaggaggagctccgagctgcgcctgagccgtgccagccggcggacctcaggcggtggacgtcggcgatagccgtgtggacggtgaccggctcactctgcggcgccgtgctcccgctgctcacccaaagaagttgtttccattttaaaccggtcttttggggctgcagtaaaaaataagaaatggagttttcttgctttttactctaaaattcaatgtaattaaatttcatatatatataatatatacatatatacatagtgtaaaataaaatgtttcttggac

SEQ ID NO: 2430 - DNA, 734 bp, Homo sapiens
  SIMILAR (599)..(318): 961254mologous to Homo sapiens Similar to vesicle-associated membrane protein 8 (endobrevin),accession number BC001634,Smith- Waterman Score=461.
agggatactgaaaggtctttattacccactggccaccaacagtttcccagccacatgctggcgcctctaggtctctccagcccactctaaggacccaagaaatgcagccacagtccatctctcttttttctctccttccgggggaccaaggtaccttctggggcatacaacatggcagcagggcctcgggaagaggggtaggaggaccgagcagcattctctgtagaggaagacaggaaaggagaccctcttggcacacatttatggagggttgtccctgaagagaggggcaggtgggaaaggttccctgttacttaagagaaggcgccagtggcaaagagcacaatgaagaggatgatgataaaaacaatcccgcagataaggacaataatcttcacgttcttccaccagaattttcgagccaccttctgcgatgtcgtcttgaagtgctcagatgtggcttccagatcctctgtcttgttgcgaagatgttccaagttttccccccgggccaggatccgctccacattctgggtcataatattattaactccctccacctcactttgcaggttccgcacacgatcatttcctccacctacaactggcttaatccatgtctcagagcagcccaggccggtcagtaagtgaattcgcctagtcggcttcctcccagggtggccctcagttcacttcctgcttgctccaactttcagcctgcccggacgcgtggg

SEQ ID NO: 2431 - DNA, 843 bp, Homo sapiens
  SIMILAR (340)..(260): 601254mologous to Homo sapiens VAMP5,accession number AF054825,Smith-Waterman Score=62.
  misc_feature (1)...(843): n = a,t,c or g
tttttactgagctccaggtggggctggcccagcatggccagtacagcaggctgccctcaagggcaagtctgtggcatgacaggaaatgcaggggtgcacaatgttggggctgccctttggcactcactggggtgggtcaagggagagcaaaacaccaaaggtccttttggagaccagaatcggccagtgcaagccatttgggcttctcccttcaggaccagctgggtcaagttccccaggccctggaggcaaatgcctgcaatcctgggtccgtggggcacttactgcttgtcacttgctcgtgagggagaaagacgaccagcagcacaatcaggatgattgagcaggacaccaaccaccaccagccccacgcagatccggtaacgattgttctcccagcacttcttctgggccaggttctgtgtaagtcttgttgaaggttgagctaccattattncaggagtttggtcttgaacgctgctgcagttcggccagcttcacaccacgctccaggaccttgccgaagttgttacgcataatttccgtcacctcgttcgcctgctgctggcaccgctccaactctattcctgcctgctccagaatggcgtctacccaatcaatgcacagctgccctaaggtttcccactggccttctggggcatacaacatggcagcagggcctcgggaagaggggtaggaggaccgagcagcattctcagtggcaaagagcacaatgaagaggatgatgataaaaacaatcacgcagataaggacaatcatcttcacgttcttccaccagaattttcgagccaccttctgcgatgtcgtcttgaagtgctcaga

SEQ ID NO: 2432 - DNA, 4170 bp, Homo sapiens
  SIMILAR (2255)..(2521): 581254mologous to Rattus norvegicus s-adenosylmethionine synthetase,accession number X15734,Smith-Waterman Score=267.
tcagttcccaggccctgaggcaatgcctgcatcctgggtccgtggggcactactgctgtcactgctctgagggagaaagacgaccagcagcacaatcaggatgatgagcaggacaccaaccaccaccagccccacgcagatccggtaacggatgttctcccagcacttcttctgggccaggttctgtgtagtcttgttgaaggttgagctcgtgatatcctccaatgaggaatcgatgatctcatagttgtctggaaggcagtaaaacttgagggtgtggaggttgaggaaaacatggtggctaaactggacactgtgaatgtaggcgtgagacttcaaaccccggccttctggggcatacaacatggcagcagggcctcgggaagaggggtaggaggaccgagcagcattctcagtggcaaagagcacaatgaagaggatgatgataaaaccaatcacgcagataaggacaatcatcttcacgttcttccaccagaattttcgagccaccttctgcgatgtcgtcttgaagtgctcagactgaacaagaaccctccggcacagacctcctttaacaagggattttgccacccaacgagcagcataagcagctgaacggtcgaccttggtataatcctttcctgaaaaggcacctcctccatgagcaccccaaccgccataagtgtccacaatgattttgcgtccagtcaaaccagcatcaccctgaggcccaccaataacaaatctgccacttggctgtaggtggtagattgtatcctcatcaaggtatttcgcaggcacaactgctttgatgactttctcctttagggcatccctcatttcatcaagacaaacctcttcatcatgctgaacagatataacaattgtgtggactctgatgggaagcacagcacctcgatcctgcatatactgcacagtaacttgagttttagaatcagggcgtaaccaaggcaaagtgccattacggcgtagttctgccagtttggcatttagcttgtgtgccaagacaatggttaaaggcatacactcctcagtttcatcagtggcatagccaaacattaagccctggtctccagcaccaatgtcttcttcatttctgtcaagatgaacaccttgagcaatatctggtgactgttgctccaaggctaccagcacgttacaagtcttgtagtcaaaaccgcccgctgcttcgttcgctccgcgccgcccgcctgctacgagtagaacgctgtccgcagcttgcgcatttcgcagccgctgccgcctcgccgcctgctccttcgtaaggccacttccgcacaccgacaccaacatgaacggacagctcaacggcttccacgaggcgttcatcgaggagggcacattccttttcacctcagagtcggtcggggaaggccacccagataagattttgtgaccaaatcagtggatgctgtccttgatgcccaccttcagcaggatcctgatgccaaagtagcttgtgaaactgttgctaaaactggaatgatccttcttgctggggaaattacatccagagctgctgttgactaccagaaagtggttcgtgaagctgttaaacacattggatatgatgattcttccaaaggttttgactacaagacttgtaacgtgctggtagccttggagcaacagtcaccagatattgctcaaggtgttcatcttgacagaaatgaagaagacattggtgctggagaccagggcttaatgtttggctatgccactgatgaaactgaggagtgtatgcctttaaccattgtcttggcacacaagctaaatgccaaactggcagaactacgccgtaatggcactttgccttggttacgccctgattctaaaactcaagttactgtgcagtatatgcaggatcgaggtgctgtgcttcccatcagagtccacacaattgttatatctgttcagcatgatgaagaggtttgtcttgatgaaatgagggatgccctaaaggagaaagtcatcaaagcagttgtgcctgcgaaataccttgatgatgttacaatttaccacctacagccaagtggcagatttgttattggtgggcctcagggtgatgctggtttgactggacggaaaatcattgtggacacttatggcggttggggtgctcatggaggaggtgccttttcaggaaaggattataccaaggtcgaccgttcagctgcttatgctgctcgttgggtggcaaaatcccttgttaaaggaggtctgtgccggagggttcttgttcaggtctcttatgctattggagtttctcatccattatctatctccattttccattatggtacctctcagaaagagtgagagagagctattagagattgtgaagaagaatttcgatctccgccctggggtcattgtcagggatctggatctgaagaagccaatttatcagaggactgcagcctatggccactttggtagggacagcttcccatgggaagtgcccaaaaagcttaaatattgaaagtgttagccttttttccccagacttgttggcgtaggctacagagaagccttcaagctctgagggaaagggccctccttcctaaattttcctggcctctttcagctcctgaccaggtgcaggcactctagtccatgacatgaattttaacttttgtgggggacttgtaagttgggcttgctattctgtccctaggtgttttgttcaccattataatgaatttagtgagcataggtgatccatgtaactgcctaggaaacaacactgtagtaaataatggctttggaaattggaacctttgtgccctatcacccaacgctccaaagtcataattgcattgactttccccaccagatgctggaaaatgtccttgtgatgtgcacgtaaagtacttgtagttccacttatagcctctgtcctggcaatgccacatttcctgtcagcatgaatttgtaatgtcttgagctctattatgaatgtgaagccttccccttatcctccctgtaacttgatccatttctaattatgtaggctctttgtcaggggagtgttccctatccaatcaatcttggcatgtaacggcagttcccagttgggagctccagcctggacatcaaaaaaggcagttaccattaaaccatctccctggtgcttatgctcttaattgccacctctaacagcaccaaatcaaaatctctccactttcagctgtcttttggaggacgtacgtaataagggtttaattttagtaaaccaatcctatgcatggtttcagcactagccaaacctcaccaactcctagttctaggaaaaacagggcacttgggcagccttgtggatgttcatacagagaagtcacagggcagtacctgagggtctgtagggtggcacactttggtaccagataacttttttttttctttataagaaagcctgagtactccacactgcacaataactcctccccaggggttttaactttggtttaattttcaaaaccaggtcccaatggagctttcttgaacagctgggtgtagcttacagagaaacccagcttcctttcagaggagccagtgccttttggccggggagggaggaaatccctttcatacttgaaacgttttctaaattgcttatttaattgtattctgggggtatggcgtaaagtacagagaagcccatcaccctcagatgggcagcttttaaaaagattttttttttttttctctcaacacccatgattccctttaacaacatgtttcccagcattccccaggtaggcccaaggtgtcctacagaaaaaccttgggttagacctacagggggtctggctggtgttaacaaaagggagggcagagctggtgcggcctggcccatggaaaaagcctgacttgggtggtgtgggtacagagaagccagcttgtttacatggcttattccatgactggcttgccctaagcaagaaagtgcctttcaggatctattttttggaggtttattacgtatgtctggttctcaattcctaacagtttaatgaagatctaaataaaatggctagggtctaaaaaaaaaaaaaatcttttaaaagctgccatctgaggtgatggcttctctgtacttacgccataccccagaatacaataaat

SEQ ID NO: 2433 - DNA, 533 bp, Homo sapiens
  SIMILAR (346)..(444): 931254mologous to Homo sapiens CGI-07 protein,accession number AF132941,Smith-Waterman Score=161.
gctcgaccaaatgtgtggagattgccatagagtagaagctaaggatttctggaaggctgtgattcaagtgaggcaaaaggtaatgagagaagatgatgagtgagtcctacatcttatatttcgtctttgttaattataacttttccttctttctaaatccagggatagtctgggtccctgaagcattcacctttggaaatagatcattattacattttagataatctttagagattgttattgtttgaaaaatcagtatgctctatctgtagatagtatgtgtgtcctatacctataagtggcttttttgtggggcatttattgatcaaataatttatattttagactttgcataaaaaaactttctactatctggaacagttaattctgaaatatggaatgcatcagaatacacttcgtatcaaagagattcatggtgagttaaaactcaaaagcatttgaaattatgtcagatttttatttcaacatacctaagtaatcttatatttactgataatatctggattagtacc

SEQ ID NO: 2434 - DNA, 3245 bp, Homo sapiens
  SIMILAR (1133)..(1630): 781254mologous to Homo sapiens Human RNA metabolism protein (RMEP-1),accession number AAY72161,Smith-Waterman Score=623.
agatgactgaacagctcgagcctattttgatgcaggcctttatcaaatccacggctggtctggaggcgcgaaaacttaaggcatacagaacgatggaatatatggcaaaatccaccgaccgcagccctggacacatcttgtgctgtgagtgtggtgttccgataagtccaaatcctgccaatatttgtgtggcctgtttgcgaagtaaagaggacatcagccaaggtattccgaaacaagtctcgatttcgttctgcaaacaatgtcaaaggtattttcaaccaccaggaacttggatacagtgtgctttagaatccaggggaactttcttgctttggtgcttggaaaaaaatccaaagcccctctggagtaaggtacggcttgtagatgcagggctttgtttggactgagcctcatttttaagagacttaaagttaaactgactattcagaaagaggtgatgaatggtgctatccttcaacaagtgtttgtggtggattatgttgttcagtcccaaatgtgtggagatggccatgagagtgagaagctgaaggatttctggaaaggctgtgattcaagtgaggcaaaagactttgcataaaaaaactttctactatctggaacagttaattctgaaatatggaatgcatcagaatacacttcgtatcaaagagattcatgatggtctggatttttattattcctcaaaacaacatgctcagaagatggtcgaatttcttcagtgtacagttccctgtagatacaaagcatcacaaagactgatctctcaagatatccatagtaacacatacaattacaaaagcactttttctgtggaaattgttccaatatgcaaggataatgttgtctgtctgtctccaaaactggcacaaagcctgggaaatatgaaccagatttgtgtgtgtattcgagtaaccagtgccattcacctcattgatccaaacaccctacaagtggcagatattgatgggagcactttctggagtcaccctttcaatagtttatgtcatcccaaacagctagaggagtttattgtgatggaatgcagcatagtccaagatataaaacgtgctgcaggtgctgggaatgatatcaaaaaagcataccctcggggcaagtctggggtacagaaggacatctggaaatgaattacaggattaaacagtatttttgtcgtacttcatttggggacatcttgcttaaatcccggagacccgggtgttagggtttgatttggccaacttgtaacttaaatgatgagcatgtcaacaaaatgaactcagatagagttccagatgtggtattaatcaagaagagctatgaccggaccaaacgtcagcgtcgtagaaactggaaattgaaagagcttgcaagagagagagaaaacatggatacagatgatgaaaggcaataccaagattttcttgaagatcttgaagaagatgaggcaattcgaaaaaatgtcaacatttacagagattcagccatccctgtggaaagtgacaccgatgatgaaggagcacctcgaattagtctggctgagatgcttgaagaccttcatttttccccaggatgccccttggtgaaggaaggtgcatcaatgctgacataatgagatgttgtagactgtttccatacatgggcttaagaagttggacagagttaccttaagtgtctctactatctttgcctccagatttcaagaggagaaatttagttttaaacctgaataaacatgtttgttttcagtgctcactcaaaccactaaaacagatggatagctttgaggttttagataaggaaagattatggagaatgtagttgttattgatttttgggcaattttacatttgggaattttatccactgtggcttttttatatgaggcactgtagtattttccacatagtatagtactctgggatgttaaaagctcaaaaattgtgattccttgaacgttcactaaatcttcaagcaaaaacacatttttacattatttttacgttgattattttagtgaaagaccatatgaagaagcatttttaatattaacttgttacatactttgatccactttacatcatttttatgttgttgaggtagggaaattagggttcagtttatcactggacattcaggaggcaagtcaatcttttttatttcccttataaaattaactcttcaaaagctgttaaacagagagttatcttaatttttattgcagtaggaggaaatatatttaaaatatttgtagatttatagcaaatagagactcgttatttaaaggttaaataacaatttgttcttttgttgtttttgccagtttagggcagtagctgcttttgtcataaaatatcttcctaccacaatcaaaaagctgcttttaaaatttttgtttataaattgagaaggaattttcctcccctataagtttctgtcattgaacagattcacccattaaaaagaatattagaatcccagcatgaagataatggcctaataaaaatgaggtacatactttataaaaccattaatcagatttgaatgaggaatgcttcccacatccttgaaagaaaaactgtggcttacgttttgaagtattctgagaatgaagtattaagatccaatttctataagcaagatcagacttgttaagtatgccgcaagtaagagctaattcattcattccatgtgtgccactaaataaagagattgagcaagtgccactgtgtggaacatttttcttttttttaatattggactttccaattttgaaattatggataaagtcctaaattttctatagtggcttcttttctgtctgcatattttgttaaaattgtggatctaaaagccatatcctgtctttggtggtggccctggtaggaatggcttgtcctagttcttcaaaggtaagattgaccaaagcaagttctcattggtggtctgtgtttacatcttccgtgtcaagatattttaaagcatgaaaataaagccattcttgccctttttcgtgtgtttgaaatggtcgcattggtgtcatatttacatgagaaagtatcttacgcaattttccaaagtagaattgttaatgttatttaagtacttttataatcttcccactgaaaaatatagtttcccactaaccttaggaaacaaatatatcacgaaatacacaatataaactcaaaggggggtccctccataaaaacacctctaggcgc

SEQ ID NO: 2435 - DNA, 1373 bp, Homo sapiens
  SIMILAR (324)..(875): 811254mologous to Homo sapiens HSPC135,accession number AF161484,Smith-Waterman Score=713.
ctgggaagggagaatggcggcgcccgggctgcggctgggagcgggaagactctttgaaatgcctgcggtgctagagcgactgagccgctataatagcacgtcccaagcttttgctgaggtgctgcggctgccgaagcagcagggtggaggaagctgctgtacccgctgcaggaagtagagcggttcctcgccccctacgggaggcaagaccttcacctgcgtatctgtgacccaagcccggaggatatagccagtgtcggacaacatcttcacgggccactgaacggaaccgcatcgactacgtcagctccgccgttccgtatctgaccacgcccccggaccttccgcggccagaagtgtgtttttataggcatgaagcaatgtttggaaaatcatctctaatcaaggctttattttcactggcccctgaggttgaagtcagagtctccaaaaaaccaggacacacaaagaaaatgaattttttcaaagttggaaaacattttacagtggtggacatgccaggttatggctttagagcacctgaagattttgttgacatggtagagacctatctaaaagaacgaaggaacttgaagagaacatttttattagtggatagcgttgttggaattcaaaaaacagacaatattgccatagaaatgtgtgaagaatttgcattaccttatgtgattgtattaacaaaaattgacaaatcttccaagggacatcttttaaaacaagtgcttcatatccagaaatttgttaacatgaaaactcaaggatgttttcctcagttgtttcctgtaagtgctgtgaccttttctggaatccacctgttgagatgctttatagccagtgtaacaggaagtcttgactaatgggttcccggtttagctgaagattcaaaaaaaaaaaaaaaaagctttatgcctcccgggggtaaaacacctagaagaatttcaacattgttttaaatgttgtgcatctgtaacttcaggaggatcacttgagctttaaaacctgtgccttctcgaaacaagaatttgtgcctgaggtgaaaaaagtttgtaagttattgaattatggtgttcattagaccagctactagctgattcccctattttaacaaactgacaagagcacatccataaaatgaaaccctgttacaactatgtacagaagggtttgacgttttattgggcttttgtcttttaaagaatatgtctactatgggtattttttttttaaatgttaaaatgggctaggtaaaagggggctgcttttctgttaagcatcgataggtaagttgatggataaaagttactatgtaagcctatttttttgagtccttatttgaatattgaaaacattct

SEQ ID NO: 2436 - DNA, 466 bp, Homo sapiens
  SIMILAR (66)..(230): 1001254mologous to Homo sapiens NADPH:ubiquinone oxidoreductase subunit B13,accession number U64028,Smith-Waterman Score=302.
tggggagtgtgctgaagaagaccactggccttgtgggattggctgtgtgcaatactcctcacgaggaaccagatgttaaaaaattagaagaccaacttcaaggcggtcaattagaagaggtgattcttcaggctgaacatgaactaaatctggcaagaaaaatgagggaatggaaactatgggagccattagtggaagagcctcctgccgatcagtggaaatggccaatataattattaagtgactttggtgtgttcatgggaaactgatgtaattaaatattctgttatattaagagcgtgttcttattactgacattttgtaatcaagaaaagtgatatagaaaatatgtaggagactgttaaaattggtgattatggtaatatggtcatgtgaatcaatttttgatttataaagtactcacacaagttgtttcaaagatgatatttctgtgaacagagaggcc

SEQ ID NO: 2437 - DNA, 1050 bp, Homo sapiens
  SIMILAR (849)..(905): 681254mologous to Homo sapiens Human secreted protein, SEQ ID NO: 7115,accession number AAG03034,Smith-Waterman Score=72.
ttagaagtccccatgatctgctgtctgaaagctggacaccccaaacagccactggcatagctcaaaggccaaagagccaatggggtagatcccagtttgggtctgaagccctgagaaccagaaacaaggatagacccactgtcttggaattccagccagctgccagtagcagcattgcatctccctgggatgagctccgtgggggcagggcaggcgatctgcaatctttgctgtttgggtgaccttgtcagtccttccagccttccggctttggaaaggacaggcccacctccctggaacagaggtcccaaagggagaggcaggctgccatctttgctgtttcacagccttcactggtgatacctccaggtactggaaaatctgaggtgaatgcagacaggagcaggcccccagcatactgcagcaacctaggcagatactccgggcctgggcctccttcactggtgatacctccaggtactggaaaatctgaggtgaatgcagacaggagcgggcccccagcatactgcagcaaccatttcccctctgcattgccctagtagaggtcctccatgaggtctctgtccctgcagcagacttctgcctggacatgcaggcatttccatacatcctttgaaatccaggtggaggttcccaaatcttaactcttgccttttgtgcacctgcaggcccaacaccacgtggaagccatgtcttggggcttgcaccctctgaagcactgacctgagctgtacctttgcctcttctcaccacagcaggagtttttgggtccacactgcttttatgagctgtaacactcaccgcgaaggtctgcagcttcactcctgaagccagcgagaccacgagcccaccgggaggaaagaacaactccagacgctctgccttaagagctgtaacactcaccgggaaggtctgcagcttcactccagaaggaagaaactccgaacacatctgaacatcagaagggacagactccagacgcgccaccttaagagctgtaacactcaccgcgagggtccgcagcttcat

SEQ ID NO: 2438 - DNA, 1580 bp, Homo sapiens
  SIMILAR (156)..(452): 421254mologous to Homo sapiens NADPH:ubiquinone oxidoreductase subunit B13,accession number U64028,Smith-Waterman Score=130.
ggagctaagctgtttccagggtgacagagtggcgacctcggtggtcgattgagcaggtctgagaattgttcccaaagggttgtgcgtcaccgagtcgttggcgctgtcatggcgggtgtgctgaagaagaccactggcccttgtgggattggcctgtgtgcaatactcctcaccgagaggctaagaatattgtaccacaaagattccttgatgttcttgaggaaatccctaaaaaatgcagcatatagaaagtatacagaacagattacaaatgagaagctggctatggttaaagcggaaccagatgttaaaaaaattagaagaccaactttcaaggcggtcaattaagaagaggtgattctttcaggcttgaacatgaactaaatctggccaagaaaaaatgaggggaatggaaactaatgggagccattaagtggaatgagcctcctgcccgatcagttggaaatgggccaatataattattaagttgactttggtggtgttcatggggaaactggatgtaattaaaatattctgttatatttaagagcgtggtccttaatacctggcattttgtaatccaggaaaagtggttatagaaaatatgtaggagactgttaaaattggtgattatgggtaatatggtcatgtgaatcaatttttgatttataaagtactcacacaagttgtttcaaagatgatatttctgtgaacagagaggccatgggaagatttgaaaattattaaagaaaaattcctacagattttcaatgcagagaccataatcaaaaagtaaactttctttagtagtatgttcaatacatcatttaattttttaagttatcctgaagaaggaaaggtccttaattattatagtctaaacaaatttatagattactgtttgaagtaaataatacgagtgaatattttcaaatgtgataaaatagcacaagtggctggtgataaaatttgaaattatggttaacctcagctgtgatcttatgtatgtaaagtgaaatttaaatagataattataggttgattacaaaatccatagtgtcattttattttagtcattattgaattataccatttactctgttttcttatagtcttaattttattatattttgttgttactgtattatatttgaaaaccttcaaattagaatacattgtacagttaaagaaattgacttggtacttaaaagaaagatttcccattgcatacaggttattggagaaattttccttttgttgcatttgtggaagttagttttctggcccgtggcctttaattttcttaatcaacctaattacatcaggatagaggtagagtttctgtaaaagaagagacattaagagttcctgaaatttatatctggcataccgataggcttatattcaaaacatcttagtcatacgaccataaattaaaagtggagtcactaaatagtttgcagtacgtttctaatataagtgtaggtgggtatcaaaacaagacaaatgctgttcagggaaagaagttggcaagcttaaggttaaacaaaaataaaattacatgtgttttcgccttccta

SEQ ID NO: 2439 - DNA, 367 bp, Homo sapiens
  SIMILAR (44)..(175): 861254mologous to Homo sapiens FRG1,accession number AF146191,Smith-Waterman Score=187.
ttacgccggcttcagcctctctgcgcagaagtgtcccggagccatggccgagtaatcttatgcgaagtctaccaagcttgtgctcaagggaaccaagacgaagagtaagaagaaaaagagcaaagagaagaagagaaaaagagaagaagatgaagaaacccagtttgatatgttggaaccatagccattgaaatggatgagggaacctatatacatgcactcgacaatggtctttttaccctgggagctccacacaaagaaggggaaaatggctttgttggcctcaaatggctgctttattagatgcaatgaagcaggggacatagaagcaaaaagtaaaacagcaggagaagaagaaatgatcacg

SEQ ID NO: 2440 - DNA, 425 bp, Homo sapiens; identical to SEQ ID NO: 2307
  SIMILAR (123)..(188): 861254mologous to Homo sapiens FRG1,accession number AF146191,Smith-Waterman Score=92.

SEQ ID NO: 2441 - DNA, 531 bp, Homo sapiens
  SIMILAR (392)..(430): 761254mologous to Homo sapiens U6 snRNA-associated Sm-like protein LSm8,accession number AF182294,Smith-Waterman Score=47.
cgtgaacagtaacaaactttggtgaaatttcaggaaccatagccattgaaatggatgagggaacctatatacatgcactcgacaatggtctttttaccctgggagctccacacaaagaagaatcgccctgaaatctggctatggaaaatatcttggtataaattcagatgaacttgttgggcattcagatgcaattggaccaagagaacaatgggaacactgaaaggttttgaccagaccattaatttgattttggatgaaagccatgaacgagtattcagctcttcacagggggtagaacaagtggtactaggattatacattgtaagaggtgacaacgttgcagtcattggagaaatcgatgaagaaacagattctgcgcttgatttggggaatattcggagcagaacctttaaattctgtagcacactgaggaaaaactacatacttggacatctgtaaacctttgtacaggaactggattattcctgaggatgatatatggagtgtttatgagtgtgtcactggatt

SEQ ID NO: 2442 - DNA, 877 bp, Homo sapiens
  SIMILAR (682)..(744): 901254mologous to Homo sapiens FRG1,accession number AF146191,Smith-Waterman Score=103.
tgctgctccgggtcacatactcgtcctgagccggcttcagcctctctgcgcagaagtgtcccggagccatggccgagtaatcttatgcgaagtctaccaagcttgtgctcaagggaaccaagacgaagaggtgggtcctgcacctccggcgggagcctcctcagttcttttcggacgcactccacccccctcgaatccggtggaagccgtggcgcggagagccggctttgtggcctcccaggctttgccctggcccctgtccgggctggactgaggccggaccgcggttcctggcgcctgtgcagagaggggcagcctcccgcactgacgaccctggaaacaggatagacgggcgggtgacccgtggccccgtacccacgagtttcggtcctctgaggcatctctgcaggcctctgcctgtaagaagaaaaagagcaaagagaagaagagaaaaagagaagaagatgaagaaacccagtttgatatgtttggaatctggtgaacagtaacaaactttgatgaaatttcaggaaccatagccattgaaatggatgagggaacctatatacatgcactcgacaatggtctttttaccctgggaagctccacacaaagaagaatcgccctgaaatctggctatggaaaatatcttggtataaattcagatgaacttgttgttggcgttcagatgcaattggaccaagagaacaatgggaaccagtctttcaaaatggtgcctgtgcagcagtattcactgtgataggaagtgagaagcagtctgagtgttcattgctgagggaatcaagggcaaaatatcatggatgcactcatggacaaataagcagcagtttgaagcaacaccctagatggatgtaca

SEQ ID NO: 2443 - DNA, 1031 bp, Homo sapiens
  SIMILAR (373)..(702): 901254mologous to Homo sapiens FRG1,accession number AF146191,Smith-Waterman Score=514.
aattcgacagacgtacgctgtcagggagtgtttacttcgcctccacttctgttcctccccgccctggtgctgctccgggtcacatactcgtcctgagccggcttcagcctctctgcgcagaagtgtcccggagccatggccgagtaatcttatgcgaagtctaccaagcttgtgctcaagggaaccaagacgaagagtaagaagaaaaagagcaaagagaagaagagaaaaagagaagaagatgaagaaacccagtttgatatgttggaatctggtgaacagtaacaaactttgatgaaatttcaggaaccatagccattgaaatggatgagggaacctatatacatgcactcgacgatggtctttttaccctgggagctccacacaaagaaggggaaaatggctttgttggcctcaaatggctgctttattagatgcaatgaagcaggggacatagaagcaaaaagtaaaacagcaggagaagaagaaatgatcaagattagatcctgtgctgaaagagaaaccaagaaaaaagatgactttttagaagaagacaaaggaaatgtcaaacaatgtgaaatcaattatgtaaagaaatttcagagcttccaagagcacaaacttaaaataagtaaagaagacagtaaaattcttaaaaaggctcagaaagatggatttttgcatgagacgcttctggacaggtagctatttatttacttattttcactatttttcagtagccaatagaaatggcatgtagaaaagctatattctcttaaattactgcagctttcacatttttgtctttatttataatttatgagtgtgggcaatattacctagagaggacatcatgagtttggggaaaagactgtcaaggaaagaatatctaaaaattataaccgattctaaggtatatactttaaggaaattcaggtttgactgtatctacttcataaatttatcattatctttttataactattagaaccagagttagaaagacgcagtttgcttatataaaaattatg

SEQ ID NO: 2444 - DNA, 1090 bp, Homo sapiens
  SIMILAR (192)..(977): 671254mologous to Homo sapiens FRG1,accession number AF146191,Smith-Waterman Score=798.
gaaacccggaagtggaactctgagccattcagcgtttgggtgaagacggaggcgggttctacagagacgtaggctgtcagggagtgtttatttcgcgtccgcttctgttcctccgcgcccctgtgctgccccgactcacatactcgtccagaaccggcctcagcctctccgcgcagaagttgcccggagccatggccgagtactcctatgtgaagtctaccaagctcgtgctcaagggaaccaagacgaagagtaagaagaaaaagagcaaagataagaaaagaaaaagagaagaagatgaagaaacccagcttgatattgttggaatctggtggacagtaacaaactttggtgaaatttcaggaaccatagccattgaaatgggataagggaacctatatacatgcactcgacaatgggtctttttaccctgggagctccacacaaagaaaagtgatgagggccctagtcctccagagcagtttacggcctgtcaaattatctgattccagaatcgcccttgaagtctggctatggcaaatatcttggtataattcgcgatggacttgttgttgggccgttcagatgccaattggaccaagagaacaatgggaaccagtctttaaaattggggaaaatggctttgtcgacctcaaatagctgctttattaggatacagtgaagcagaggacatagaagcaaaaagtaaaacagcaggagaagaagaaatgatcaagattagatcctgtgctgaaagagaaaccaagaaaaaagatgacattccagaagaagacaaaggaaatgtaaacaaatgtgaaatcaattatgtaaagaaatttcagagcttccaagaccacaaacttaaaataagtaaagaagacagtaaaattcttaaaaaggctcggaaagatggatttttgcatgagacgctttctggacaggagggcccaaattggaagccgaccagatactgcaagtgactggggatttttgtgtctgccttatctttttgtgttttttttttctgaataaaatattcagaggaaatgcttttacagaaaaaaaaaaaaaaaaaaaaaaactcgtgccg

SEQ ID NO: 2445 - DNA, 781 bp, Homo sapiens
  SIMILAR (119)..(607): 401254mologous to Homo sapiens beta-globin,accession number M34059,Smith-Waterman Score=162.
ccactgaagcgctcagatggctgtaacgacggccgacccacgcgtccgcccacgcgtccggacacaactgtgttcactagcaacctcaaacagacacgcatggtgcatctgactcactgaggagaagtctgccgttactgccctgtggggcaaggtgaacgtggatgaaagttggtggtaaggccctgggcaggctgctgggtggtctacccttgggacccagaggttctttgaagtcctttggggatctgtccactccctgatgctgttaatgggcaaccctaaggtgaaaggctcatggcaagaaagtgctcggtggcctttagtggtgggcctggctgcacctgggacaacctcaagggcacctttgctcacactgaagtgagcttgcactgtgacaaagctgcaccgtggatccctgaagaacttcaggctccttgggcaacgtgcttggtctgtgttgcttggcccattcacttttgggaaaagaatttcaaccccaccagttgcaggcttgcctaatcaagaaaattggttggcttggtgttggctaaatgcccttggccccacaagtaatcacttaagcctcgctttccttgctggtccaatttccaattaaaaggttcctttggttccctaagtccaactactaaactggggggatattattgaaagggccttgagcattttggattttgcctaataaaaaacatttattttcatcgcatacaagaataaaacaagcgcggccgattaagaggatacttcaggggcgcaagat

SEQ ID NO: 2446 - DNA, 2453 bp, Homo sapiens
  SIMILAR (311)..(508): 541254mologous to Mus musculus putative,accession number AK008983,Smith-Waterman Score=164.
tgggaagaaattcaagaacttaatgaagtcgcgagacatcggccacggtccacgttagttatgggaatccagcaagaaaacagacaaatcagagagttgcaacaagaaaacaaagaattacgtacatctctggaagaacatcagtcggccttggaacttataatgagcaagtaccgagaacaaatgtttagattgctaatggctagcaaaaaagatgatccgggtataataatgaagttaaaagagcagcactccaaggaactgcaagcacatgttgaccagataactgaaatggcagcagtaatgaggaaagccattgaaattgacgagcaacagggttgcaaggaacaagaacgaatatttcaacttgaacaagaaaacaaaggcttgagagagatccttcaaataactccgagaatcatttttgaacctaaggaaagatgatgcgtcggaaagtacttctttgtcagcattagtgaccaacagtgatttgagtctgaggaagagctgaagagtttctgagtctgtgagcttctttacatgggctccaaattggtcaaattaagtgaatgaatgaatgggaccagaaaattcaatcctttatttttttctctgtaaatatgtacagtgcacgggctatgagatagcaacaaaaaatgcataggtaatggtcatagactttattccaaaacataattggaaaatagaaactgagccattgccaaatggtaaagaaatgaaaagttttcacagtgactactgaatataccaagagcttttggcagtactgctggctttctgggtgattaattaggtaaacttgaatattcccagtaaatgtttgagaatgcataaaattataccaatttaaaaatataaatttttgccactgttttgtgaacggaggatttgtacgctaaatttcatccttatttggcgtcaaagttgatgcaaagtttatgtaccatgagacttctagtgattgcctactttcacatttatttaaatttttgtgaaagaaaatacagttttaaaggctataggaatgtgttatatgtaccttaaacagataatttaattttagcaatttatcataactgatacttagctaacaattgtccataacttgtttaagtgtaagaaataccatttcaggaatgaaaaagaaggaatactactttctaagaaagaagatcttataatagacatatttagtaggttaaactactcctttgaaagaataagttttggttcaaagtcaataatgaagacgagatttgtttttctcttctctggctgatttttaaggatattatgtagttcatttagttaacagaattgaaatgtttgatatggcaagataggtatggtaatttcaaagtgaattgggaattcctctggctcatagaacccttttttttttcctttaagtattcttgagatacaaaaaaaaaaagtaaatacaatttcaaaaaaaaaagttccggatctgtttttaagctccatctggtcctcataacctgcaagatttttcttaaaacctttcagctgaaagtgggggtaaaggtggagtaatctgtggatttgtttctgttgtcttttaaaatgtcaaatatataatatgtaatttttttaaaaaccaccagatacagaaatgtgctttaacatcagttgaaacctaaattttcttatgttgtggtgattgtattaaaaagggataaaagaagagtgtcaaacatggttaaatatattgtactcatttatgttgaatacgtattaaaattaagacaagtggaaaattatactttgagtatataatttgttaaatattactttatatggtaattttatgtataatttcatatattggtaaaattcaaaactacacttgagaatttttttatcttaagtttggggtgaatggggtggatgagactgattgaatagaaaagggctaatggcccaaacattatatagatttctttttttcagtcagaggccttatttgatattttataaataaatgacagtttttatttttaaactttttattgtttttgggaaagtattccttaatttaatgacacattcattcagatacttcttatccctgctaataaaggaaatctatttcaagctacaccattgagattaagtctgaggcagttcattgaggcagctctactataaaagcttacttgataaataattatttttgtaaacaagttgggttaacttattcttcgtctttttgcttggatatgaatttaaggtcttcatgtttaaagacatttactttgttatttagtgacacatttccatcctatttttttttttttttttggttgttgttaaacagaaccttaagtttatgtttgaggtatgtactgcataggaacctattttattattaaagatgaatgattaaaattggaaaaaaaaaaaaaaaaaaa

SEQ ID NO: 2447 - DNA, 926 bp, Homo sapiens
  SIMILAR (793)..(909): 971254mologous to Mus musculus putative,accession number AK008983,Smith-Waterman Score=190.
ttttgtctgtctctttcactagactgtaagcttcttcagatcaggggacatgtcttgacagtctttgtattcctgttgtttagcatagtactggcacatcataggtgtgcaagataagaaaatgagattggaagaatttatgctacttcgtgcgcctaacaaatgtggatgtctgtattatactgatactatattttcaatagttagcaaagaaggccatttaatattttaatactgaaaagcagaattgtgctcattttattcaatacttaccatataccatacactagatagtaggtggatgtaaagatgcagttcctgctctcaaagaggattatgacctagaaaaggttacagattggattgagataactttataggcctgaacaatacagaaaagatttctaaagcattgaagacttcagggaggaaaagagattgaatgcgtcggcaatttttatcattcccgttactttgaacaatagtgtatgtaagtgcaaaaaaaaagaaaaagttgctgatcattgtggtgagaggaatgtaaaatatgagtatttttcttgctgctaggtttagttatattgtgctgcttattcttaattctagtcctaacaaatttgatttcaaaagcacatctgtggtcaaccaacttcattgttaatatttgttttattcatattaagtgacaatgtaagaatattcatgttaagtggtactgcagattttataaaaaggagaggatccaaaaataaaaaagtattttgctgatttccaactcccatccctctttttcaggaactgcaagcacatgttgaccagataactgaaatggcagcagtaatgaggaaagccattgaaattgacgagcaacagggttgcaaggaacaagaacgaatatttcaacttgaagtaagttttacattgct

SEQ ID NO: 2448 - DNA, 2069 bp, Homo sapiens
  SIMILAR (158)..(433): 1001254mologous to Homo sapiens MOK protein kinase,accession number AB022694,Smith-Waterman Score=482.
gactggtgctggagttttgagtccacagataaaatgtgtctccttcgtctctactagagaggaaaaagaactggaattggaagaacagggagactgaagggtagcaagagaggctggagaagagagtgaaaagaccgcttacctgatttgaaattgtctgcagcccctctttcctggagtaaatgaactggaccaaatctcaaaaatccacgatgtcatcggcacacccgctcagaagatcctcaccaagttcaaacagtcgagagctatgaattttgattttccttttaaaaagggatcaggaatacctctactaacaaccaatttgtccccacaatgcctctccctcctgcacgcaatggtggcctatgatcccgatgagagaatcgccgcccaccaggccctgcagcacccctacttccaagaacagagaacccagaacggaagcgaggatgaaggcctcagccgtcctcctccccattcaaacacgttcatccctcaaccctctgctgagcacctgcatgctgcccggccgcagtgtcacccttcttgtgtgagcctaccctcatccacccacctcaccctcctgaccttaaagaagacaccgggcagaagcacaggggagcccagtcacaccccacactggcgggggcaggccttgcagggagaagcagtaagcagccatctccatcagccatttccatctggcactcagacgtgcacgtcttcgtgtgacaggcggcagcagtgcgaccgtgacctcccatctgctctgctgtccccacacctgcggtgcagccagcctgccacaaggcagctagagtccagctagacccacccctggcacggccgacctcttcctggcttcttctgggcctaatccccgtgcattctccaacgccagaagtgtaagaaagtgcaaggcaacaagtgagaagagcaaacccaaatcgtaccagggaagctagtctttccagggcacctgagtgagggcatgaccagccttgacgctgcctcgctaccatctgcccagggcctgctgaatgcttgagtccatggtgacagtggtgggaacagttacgaggcagttagattttggaagtcatgttggcccacttggctacagagcagtcttaggaacagcaccataaaaataaagacttattcctgacacacatgcatctagagtaaactggggcgtatctgacagcgttagtacagtgatggccaaatgcaaactgcattccagaaccagcgaagggtgacagactgggctgaggcagagctaggactaaccatctcgagtgatgccatctcggggccaacaaaagttttggacacggctggatcatctgaccaaactgctcaaatctttacacaattattgtcctggtattaaactttcacctgccacttccaacaaacaggagacagaataaggagatgaccaggaagatggctggattaagaattctagacttggccgggtgcggtggctcacacctgtaatcctagcatcttgggaggctgaggcaggaggatcgcttgagcccagagtttgagaccagcctaggcaacataaggagaccccatctctacaaaatatcaaaaaattacccaggtatggtggcacacacgtgtgattccagctactcgggaggctgagatgggaggatcacttgaacccaggaggttggggctacaatgagctatgatcgcaccacttcattccagcctggatgacagaagactcactccatagttcatggccccgtgatccagagtccctgctggcgccttcgagtggggcaggctgagaactcaagctgtaactaatgtctcctccgaagaaaactaaaccgagggctgagctgatgtgaagttttccgtggctgcattcatacaaatggtgaaaatgtagcatacctcccctcaaaagcctgaaagtaaagacatgcccccaatttaatgtgatgaattagagaaataggtttcagacacttcatggtttaaagtctcacaaaaataaagctttagaaggaaaaaaaaaaacacaacaaaaaaaaaaa

SEQ ID NO: 2449 - DNA, 1017 bp, Homo sapiens
  SIMILAR (1)..(765): 641254mologous to Homo sapiens Humanised anti-IL-8 6G4.2.5V11 light chain and STII leader peptide,accession number AAY29453,Smith-Waterman Score=705.
atgaaaaagaatatcgcatttcttcttgcatctatgttcgttttttctattgctacaaacgcatacgctgatatccagatgacccagtccccgagctccctgtccgcctctgtgggcgatagggtcaccatcacctgcaggtcaagtcaaagcttagtacatggtataggtaacacgtatttacactggtatcaacagaaaccaggaaaagctccgaaactactgatttacaaagtatccaatcgattctctggagtcccttctcgcttctctggatccggttctgggacggatttcactctgaccatcagcggcctgcagcctgaagattttgcgacttactactgtcaacattatgatagtctcccctacacttttggccaggggaccaaacttgaagatcaaacgaactgtggctgcaccatctgtcttcatctttcccgcccatctgatgagcagttgaaaatctggaaactgccctctgatgctgtgcctgcctgaaataactttctaatccccagagaggccaaaaagtaccagtggaagggtggattaacgcccttccaaatgggggtaaactcccccaggagaggtgtcacaagagcaggactagacaaggaacagcaccctacagccctcagcagcacccctgacgctgagcaaaagcaggactacggaggaaacacaaactcttacggcctgcggaagttcacccattcaggggccttgaggttcggcccgttcacaaaggagctttcaacaggggggaggagtgtttaggagggggaggaagttgccccccaccttgtttccttcagtttcccaggcctggaccccttcccttccttttgggcttttgaccttttttttccacagggggaccttacccctatttgcggttcttccaggttcatctttcacctcacccccctcctagtcccttggctttaaattatgctaaatgttgggaggagaatgaataaataatttgtgaatcttttgcacctgtaaaaaaaa

SEQ ID NO: 2450 - DNA, 435 bp, Homo sapiens
  SIMILAR (2)..(163): 961254mologous to Homo sapiens Tob,accession number D38305,Smith-Waterman Score=272.
  misc_feature (1)...(435): n = a,t,c or g
aggtgacagcccccttaacctcagtcctttccagtacagtaatgcctttgatgggtttgcagcctatggaggcctcaatgagaagtcttttgtagatggcttgaattttagcttaaataacatgcagtattctaaccagcaattccagcctgttatggctaactaaaaaaaagaaaatgtatcgtacaagttaaaatgcacgggcccaagggggannnnnnnnnncacctccttgagaannnnnnnnnnnaagcttataggaaggaaacattcaagcttggttnnnnnnnnnntaataaaacatgcatcatttttcatttgccaaccaggcacaaaggtattttatactgactggttattttaaaggatactctcagatatggcctcttacagtatttaagatataccagggacatgggtgatttttttttatag

SEQ ID NO: 2451 - DNA, 1930 bp, Homo sapiens
  SIMILAR (330)..(1109): 461254mologous to Homo sapiens Human B-cell translocation gene-2 polypeptide,accession number AAW01097,Smith-Waterman Score= 432.
  misc_feature (1)...(1930): n = a,t,c or g
tttttttttttttttttggggggggagttgaaacctaattttgtggcgtagcagctatgcagcttgaaatccaagtagcactaaattttattatttcgtatttgtacaataagcttcccaggagacgtgtcaacatttttggtgaagaacttgaaagacttcttaagaagaaatatcgaagggcactggtatcctgaaaagccatacaaaggatcggggtttagaatgtatacacataggggagaaagtggacccagtgattgaacaagcatccaaagagagtggtttggacattgatgatgttcgtggcaatctgccacatggatcttgagtcgtttcggatcgacccatttgaggtttcttaccaaattggtgaaaagggaccagtgaaggtgctttacgtggatgataattaatgaaaatggatgtgaagttggataaggagatcaaaaacagctttaacccagaggccccaggtttttatgcccataagtgacccagcctcatcagtgtccagctctccatcgcctccttttggtcactctgcttgctgtaagccctaccttcatgccccggtccactcagcctttaacctttaccactggccacttttggctgccaccaagttccggctctaccaaaattgaagaatagtgggccggtagcagcaggtttgcacgtacttctcccatcaacctccggcttggaatgtggaatgacctcttggaaggcaggaaagccatctcttcctcaattgcactctctgtatgggcttggcttggggtagccagcagcagccacagcaacagcagcagccagcccagccgccaccgccaccaccaccaccacagcagcaacaacagcagaaagacctctgctctttctcctaatgcccaaggaatttatttttcctaatatgcagggtcaaggtagtagtacccaatggaatgttccccaggtgacagcccccttaacctcagtcctctccagtacagtaatgcctttgatgtgtttgctaacctatggaggcctcaatgagaaatcttttgtagatggcttgaatttttagcttaaataacatgcagtattctaaccagcaattccagccctgttatgggctaactaaaaaaaagaaaatgtatcgtaccaagttaaaatgcacgggcccaagggggattttttttttttcacctccttgagaattttttcttttttaaggcttatagttaagggttacattcaagcttggttaaaaaaataataataaaacatgcatcatttttcatttgccaaccaagcacaaagttattttatactgactgtatattttaaagtatactctcagatatggcctcttacagtatttaagatatagcaaggacatggctgatttttttttataaaaattgggcactaataagtggggtttattggtcttttctaattgtataatttaatttagtacaaagtttgtaaaatatcagaggatatatatatattgtttctacgaccatggtattgccatttatatctttttacctaccagtgatctgtgaccagccagccagccntccatgttgtattttttttactggaaattgtaaaatatcccatccttaaagacatccaactattcctaaaaattgtgtaacaggatattcctttagtggtgggatttaaaatgtacggatacttgctttttcaaaaaaatgtattttctgttaaaagtttaaagatttttggctatatattatggaagaaaaatgtaattgtaaatattaattttghtacctatattgtgcaatacttgaaaaaaacbsgmnataaaagtattttgagtcagtgtcttacatgttaagagggactgaaatagtttatattaagtttgtattaaaattctttagaattaaaaaaagaatgcctcctcgct

SEQ ID NO: 2452 - DNA, 1200 bp, Homo sapiens
  SIMILAR (313)..(444): 1001254mologous to Oryctolagus cuniculus H protein,accession number AF231451,Smith-Waterman Score=222.
atggaatactatgcaaccataaaaaagaacaaaatcatatcctttgcagcagcatggatgcagctggatgccattaccctaagcaaattaacacaaaaacggaaaaccaaataccgcatgttcttatttgtgtcagaaggccgtcctccatgggctgtggggagggagtcaggttggagacccccggtcccattttccagtgttctgctccttcgcgacccggggacgggtgttctgaaagatctgaacaatcaggaggttgatggggaacatgaggatggagctctccaggccaatcatcacctcctgccagatgagtttggtgctttggaaagtgtgaaagctgctagtgaactctattctcctttatcaggagaagtaactgaaattaatgaagctcttgcagaaaatccaggacttgtaaacaaatcttgttatgaagatgctcttacattttactttgacaagtattataaacacagaggcagtaatcctagtaatagtcttgcaaattttcatttcaaggcgctgacaattgctagcaaacaccatcagattgtgaaaatggacctgagaagtcggtatctggactctcttaaggctattgtttttaaacagtataatcagattgccacagtgctgcggctgcttcgagtcatggagcatgtgcagaccaccctcctgctgggaaaactgccaggggccttgacagcatgctgccaccccctccatctctgtgtacacaaacaggccaagtgtgttacgattgcctacagtattcagtacagtaacatgctgtacaggtttgtagcccaggagcaaaggctgtaccatacagccaaggtgaaggtcacagtgctggaagacaatgatccctttgctcagtaccactacctggtgacagtctacacaggacaccgacgaggggcagccacgtcctcaaaggtgactgtcaccctgtatggcctggatggagagagagagccccaccacctggctgatcccgacactccggtttttgagcgaggagcagtggatgccttcctcctctccaccctgttccccctgggagaactgcggagctccggctgtggcatgacaactcaggggaccgcccatcgtgcatcaacctgtgacgtgctcaaggtcacacagctggcaagtatggagcagggtctctgcattcttgaggcgaaatga

SEQ ID NO: 2453 - DNA, 1422 bp, Homo sapiens
  SIMILAR (161)..(616): 441254mologous to Homo sapiens H-protein,accession number M69175,Smith-Waterman Score=218.
ggctccctccggccgcgaactgcccctccccgccccgcctcccggcgcgggtggccgaggcgtagcgccgcgacccccgcacccctgcgaacatggcgctgcgagtggtgcggagcgtgcgggccctgctctgcaccctgcgcgcggtcccgttacccgcccgcgccctgcccgccgaggccctggcagctgggggtgggcgccgtccgtacgctgcgcactggaccccgctctgctctcggtgcgtaaattcacagagaaacaggaaagtggtaacaaccaagaaaaaagcatgaaccagttgggatcaggcaattttgcacagrgaagcgttgggagatgttgtttattgtagtctccctgaagttgggacaaaattgaacaaacaacgatgaagtttggtgctttggaaagtgtgaaagctgctagtgaactctattctcctttattcaggagaagtaactgaaattaattgaagctctttgcagaaaatccagggacttgtaaaacaaatttttgttatggaagatggttggctgatcaagatgacactgagtaaccccttcagaactagaatgaacttatgagtgaagaagcatatgagaaatacataaaaatctattgaggagtgaaaatggaactcctaaataaactagtatgaaataacgcaagccagcagagttgtcttaaattagtggtgggataggaagacttaggaataggaaacttttagtattacccgatggggggaaaaaaaaactactgttaacactgctaatgaaagaaaaatgccctttaactttctaaaatgataatagataaatataatatgcgtctttttcacaatatcctatgatttttagactagggctctagtgttcagaattcatggaaattatccatgaaattatccatgggtaaaaattagttacaaaaattacataattccaaaggataatgttggttattccttaagcccttatattatattggtaacctggcatgtatccatacctggatttgggatgaaatacttaatgatctttccgattggaaataactgggagtgaagaagtttttgttgcttgtacagtgtcagatgaagaacaacactatcttaattttgcaatacactgcatttgctggtgctgtttttatatagtgaagcaacaagctgtacagcaaaataataaaatactcacttcttcgttaatcatgtttgttttgatgttaatatttcatttagtaactctgctagtatttgtgaaagtgctaactttaacttacggaaagttactttttaaaaggaaatttaagccagaacaatgcaaagctccaagaaaatgttttctttagtcacaaatctggtttttcttaagccaagatctgtcaccttttaacataataaaaaataaatcacca

SEQ ID NO: 2454 - DNA, 933 bp, Homo sapiens
  misc_feature (1)...(933): n = a,t,c or g
gtgacccggaagtagaagtggcccttgcaggcaagagtgctggagggcggcagcggcgaccggagcggtaggagcagcaatttatccgtgtgcagccccaaactggaaagaagatgctaattaaagtgaagggtacctgcttctcccagtccctaacgtaggtcgcctccgagcacagccctaaaatcggggcctcccaagggctagactatgagcctttactggtggttgccaaggtgtggtatctcacccgtcctacaggaaccaaagcggggagtgtgttcagtcagtacctgccttttcttgagcctgggattctgggaccagcctcacttccttggctgaggcagacgctgaccggaaaggagattgagattgacattgaaccttacagacaaggtggagcgaatcaaggagcgtgtggaggagaaagaggggaatccccccaccaacagcagaggctccatctacaagtggcaaagcagatgaaatgatgagaagacagccagctggattaccaagattttaaggtgggttcagtccttccaaacanacncttgggggtgtttgggcttctgagaaggagggaaggtggtctttagggcagtgatggacccctccatttttacctcttttaccctgttcgcttcattaatgaggcatccatatatcctcctccactctctggggacaccataagccactggccccctccccctggattgccccagtaatgtattgtctactgggtgggagactgtgaaggatcccaagggattcagtattcctggcccagagggcccttgctgggctactgggtggttagtttgcagtcctgtgtgcttccctctcttatgactgtgtcctgggttggcaaataaaatatttcctggcctcctggaaaaaaaaaaaaaaaaaaaaaaaaagtcgacg

SEQ ID NO: 2455 - DNA, 503 bp, Homo sapiens
  SIMILAR (143)..(421): 1001254mologous to synthetic construct MRP-8,accession number A12022,Smith-Waterman Score=485.
gagcagccttcctgagagaggagagagaaagctcagggaggtctggagcaaagatactcctggaggtggggagtgaggcagggataaggaaggagagtatcctccagcaccttccagtgggtggggcaagtccgtgggcatcatgttgaccgagctggagaaagccttgaactctatcatcgacgtctaccacaagtactccctgataaaggggaatttccatgccgtctacagggatgacctgaagaaattgctagagaccgagtgtcctcagtatatcaggaaaaagggtgcagacgtctggttcaaagagttggatatcaacactgatggtgcagttaacttccaggagttcctcattctggtgataaagatgggcgtggcagcccacaaaaaaagccatgaagaaagccacaaagagtagctgagtttattcggccagaggctgggcccctggacatgtacctgcagaataataaagtcatcaatacctcaaaaaaaaa

SEQ ID NO: 2456 - DNA, 335 bp, Homo sapiens
ggcaagtccgtgggcatcatgttgaccgagctggagaaagccttgaactctatcatcgacgtctaccacaagtactccctgataaaggggaatttccatcaactgtgcagcaacatatactttaaaaagttttatgtcttctagatgaaacaacagggagttggtgggctactctgtgaaggctggttgggacctaacaggaaaatgatcattgtatttgggggaagcatcaggatcattaaggctggctggagaggaggtgcatgtagggggatgtttgtagatacatgttaggccttaaccgtggagggactgacaccatgctgaggcatttt

SEQ ID NO: 2457 - DNA, 968 bp, Homo sapiens
  SIMILAR (464)..(625): 881254mologous to Homo sapiens CFAg (AA 1-94),accession number Y00278,Smith-Waterman Score=247.
gttggccccgcactttgggcttctcttggggagggtcagggaagtggagaaagctcagggaggtctggagcaaagatactcctggaggtggggagtgaggcagggataaggaaggagagtatcctccagcaccttccagtgggtaagggcacattgtctcctaggctggacttttcttgagcagagggtggggtggtaaggaaagtctacgggccccgtgtgtgtgcacatgtctctgtgtgaatggaccctttcccttgccacacgtgtatccctatcatcccacccttcccaccagagccatagccatctgctggtttggttatttggagagagcaggccaggacaaggccttcgcttggggcatgaatcctctgcgtactgccctggccagatgcaaattccctgccatgggattccccaaaaggttctgtttttcaggtggggcaagtccgtgggcatcatgttgaccgagctggagaaagccttgaactctatcatcgacgtctaccacaagtactccctgataaaggggaatttccatgccgtctacagggatgacctgaagaaattgctagagaccgagtgtcctcagtatatcagggtgaggaggggcttggggtggcgggggctctctgcctggtcctggggctgccctgggccagcggtcctccctgccacccttcatagatggctatgcctcggctctctctgagatctttaaactctggcttcttcctcctcaatcttgacagaaaaagggtgcagacgtctggttcaaagagttggatatcaacactgatggtgcagttaacttccaggagttcctcattctggtgataaagatgggcgtggcagcccacaaaaaaagccatgaagaaagccacaaagagtagctgagttactgggcccagaggctgggcccctggacatgtacctgcagaataataaagtcatcaatacctcaa

SEQ ID NO: 2458 - DNA, 497 bp, Homo sapiens
  SIMILAR (92)..(382): 501254mologous to Homo sapiens CFAg (AA 1-94),accession number Y00278,Smith-Waterman Score=187.
tgttttgatatcagaatttctggagaacatttggatttccagaatctctttcacatcagctgtaatgtggggcaagttccgtgggcagtcattgttgacgcgagtctggaggaaagcgcttgaacatctatcatcagactgtctaccacaacgtactcccttgataaaggggaatttccaatgccgtctacaggggatgacctgaagaaattgctagagacccgagtgtcctcagtatatcaggaaaaagggtgcagacgtctggttcaaagagttggatatcaacactgatggtgcagttaacttccagggagttcctcattctggtgataaagatgggcgtggcagcccacaaaaaaaagccatgaaggaaagccacaaaggagttagcttgagtttactgggcccaaaaggctgggcccttgggggacatgttacctgcagaataattaaagtcatcaatacctcaaaaaaaaaaaaaaaagtcgacgcggccg

SEQ ID NO: 2459 - DNA, 456 bp, Homo sapiens
  SIMILAR (103)..(62): 781254mologous to Homo sapiens Human secreted protein, SEQ ID NO: 7141,accession number AAG03060,Smith-Waterman Score=61.
atgaagctgcggaccctcgcggtgagtgctacagctcttaaggtggcgcgtctggagtttgttccttttgatgttcggatgtgttcggagtttctttcttccggagtgaagctgcagaccttcgcggtgagtgttacagctcttaatgcactgcgtctggagttgttcgttcctcccggtgggctcatggtctcgctggcttcaggagtgaagctgcagatcttcacggtgagtgttacagctcataaaagcagtgtggacccaaagacccttgggtggtcgatgggactgggcgccgtggagcagggggcggcgctcatcggggaggcttgggccgcacaggagcccatggagggggtgggaggctcaggcatggcgggctgcaggtctcgagccctgccccgcggaaaggcagctaaggcccggcgagaaatcgagcgcagcgccgggcactga

SEQ ID NO: 2460 - DNA, 806 bp, Homo sapiens
ccactgaagcgctcagatggctgtaacgacggccgacccacgcgtccgcccacgcgtccggacacaactgtgttcactagcaacctcaaacagacacgcatggtgcatcttatctcctgaggagaagtctgccgttactgccctgtggggcaaggtgaacgtggatgaaagttggtggtaaggccctgggcaaggctgctgggtggtcctacccctgggacccccaaaaggtcctttgaagtcctttgggggaatctgtcccaactccctgaatgctggttaaatggggcaaaccccctaaaggtgaaaaggctcaatggcaaaagaaaaagtgctcgggtgccctttagtgaatggcccctggctcacctgggacaaccctcaaagggcaccctttgccccacactgaagtgaagctgcactgtgaacaagcttgcacgtgggatcctggagaactttcaggcgtcctggggcaacagtgcctggtctgttgttgctgggcccatcatcttttggcaaaagaatttcaaccccaccagtgcaaggttgccctattcagaaaattggttggcttggtgttggctaaatgcccttggccccacaagtatcacctaaagctcgctttcttgctgtccaatttctatttaaaggttcctttgttccctaagtccaactactaaactgggggatattatgaagggccttgagcatcttggattttgcctaataaaaaaaatttatttttcatcgcatacaagaataaaacaagcgcggccgattaagaggatacttcaggggcgcaagat

SEQ ID NO: 2461 - DNA, 637 bp, Homo sapiens; identical to SEQ ID NO: 490
  SIMILAR (47)..(412): 991254mologous to Homo sapiens gamma-G globin,accession number X55656,Smith-Waterman Score=637.
  misc_feature (1)...(637): n = a,t,c or g

SEQ ID NO: 2462 - DNA, 715 bp, Homo sapiens
  SIMILAR (49)..(507): 461254mologous to Homo sapiens gamma-globin,accession number M15386,Smith-Waterman Score=208.
  misc_feature (1)...(715): n = a,t,c or g
aattttgccctcgaggccaagaattcggcgagggcaataagctcctagtcccagacgcccatgggtcatttcacagaggaggaccaaggctactatcgacaagcctgtggggcaaaggtgaatgtggaaagatgctggaggagaaacccctgggaaggctccctggttgtctaccccatggaccccagaggttctttgaccagctttggcaacctgtcctctgcctctgccatccatgggcaacccccaaagtcaaggcacatggccaagaaggtgctgactttccttgggagatgccaacaaagcaccctggatgatctcaaagggcaccttttgcccaagcctgaagtgaactgcactgttgacaagcctgcaatgtgggatcctgagaacttcaaagctcctggggaaatgttgctggtgacccgttttgggcaatcccattttcggcaaaagaattcancccctggaggttgcaaggcttcctgggcagaaagatgggtgacttggagttggccagtgcccttgttccttccagataccactgaagcctcttggcccatgaattcagaagctttcaaggataaggcttttattcttgcaagcaattacaaataataaatctatttctgctaagagatcacacatgattttcttcagctcttttttttacatctttttaaatatatgagccacaaagggtttatattgagaa

SEQ ID NO: 2463 - DNA, 908 bp, Homo sapiens
  misc_feature (1)...(908): n = a,t,c or g
cccatggtttattctccagccgctggcatgccccacactgctcttctcaatcagactttacacctccctccggggaagcagccatgtccaggcactgtggtaactggagtagagggtaacatcaggatctttcagacatttgattttcagcctaaaaaggcacgcacatttggcagccttgttattttagcaataggcagagttttccttctatctagtttctttctacccataaagtcataatttggcaaattataaacatgatgtcagagtatacacgttcagtttaggcaggaccgaaaaatgagctatgggactttctgtcccttgccctgcccccacctgaagagagccatgtgtttctaggtcttccacgtgctgccctctcccctggatggagcccagagctatgtgtcctcctgtaggtgccatgaggggcagccgcagagacccggcctccagcagcctctcacctgaccacctggcacagctgcaaccaggggcgggtttcctcttttgctccgcccctgccctgagtgggtcctttccacccagaccttcaccacagggtcacttggcaactgctggctcctggctttgccaccagttcaggcccagccacaggcacctgctctgtgtggacccaggagaggggtagcttgggtgggcatcgcttgggaagattcaggaaagtctgtgggtgaagtagccagcgcnnnnnnnnnnnnnnnnnnnnnnnnnnnnnnnnnngcctcctgcaatggctccatgctggaccagcaacagctccacgccggctggacttcctcttacttgttttgtccccatgtgcacaggttcaggaggaaatgggctcagccttcccggttcttccaggaggctccactggctggggggctttgcagatg

SEQ ID NO: 2464 - DNA, 1365 bp, Homo sapiens
  SIMILAR (874)..(1362): 991254mologous to Homo sapiens MJD1 protein,accession number S75313,Smith-Waterman Score=813.
atggagaagtcacttctctttccctcgctgaccacttctgccgggaacgaccgggacagtcgcagccgaagcggcgggggcgagtcctcgggggagaccgggtcggagtcggggccccgtgctcccggagggccaatgacgccgccttccccagcccgaggctcgctcctttctcccgccctcacttgcctccccttcccaacccctaggcgaatccaggttcaagacgtagaaaagccgatgctgggtcagcagcgccagggactaccggccggcagaagccccacagtggcagccgccattttggagctggagactagcggcggagacgaggaggaaccagggcgagaccatctccggggggtgggcacggtgctgtcggaaggcgacggcggtcacgcctgcacgcctcgtctgtctggagcgaaattttattcagaaattattgctatcatggtgaacttacttcagattgtgcgggaccactgggttcatgttcttgtccctatgggatttgtcattggatgttatttagacagaaagagtgatgaacggctaactgccttccggaacaagagtatgttatttaaaagagatggctcctctggcagcagagagttccagttagcaagacaggatgcctgccagtgggcatacagctgggtaggaggaagcctgaggggcaagagaactgagcagcatccacagtggcaagaaggctcactttgtgctcaacattgcctgaataacttattgcaaggagaatattttagccctgtggaattatcctcaattgcacatcagctggatgaggaggagaggatgagaatggcagaaggaggagttactagtgaagattatcgcacgtttttacagtggtttaacttgaattctctcttgacgggtccagaattaatatcagatacatatcttgcacttttcttggctcaattacaacaggaaggttattctatatttgtcgttaagggtgatctgccagattgcgaagctgaccaactcctgcagatgattagggtccaacagatgcatcgaccaaaacttattggagaagaattagcacaactaaaagagcaaagagtccataaaacagacctggaacgagtgttagaagcaaatgatggctcaggaatgttagacgaagatgaggaggatttgcagagggctctggcactaagtcgccaagaaattgacatggaagatgaggaagcagatctccgcagggctattcagctaagtatgcaaggtagttccagaaacatatctcaagatatgacacagacatcaggtacaaatcttacttcagaagagcttcggaagagacgagaagcctactttgaaaagtaa

SEQ ID NO: 2465 - DNA, 915 bp, Homo sapiens
  SIMILAR (353)..(388): 1001254mologous to Homo sapiens CI-MNLL homolog gene,accession number AF054181,Smith-Waterman Score=66.
  misc_feature (1)...(915): n = a,t,c or g
tgcattgtgagaggttctaaatatgttttacacaagtaaaagtcctaaatgagagccaggtgcagtggtgtatgcctgtggtctcagcctctccagtagctgggataacagacgcgcaccaccacacccggctaatttttgtgcttttagtagaaatggggttttgccatgttgggcaggctggtccgaaattcctaatttcaaagttattggcccacctcagcatcccaaagtgctaggattacaggcatgaaccaccgcacctggcccagatgcaatttaaaagctatttcaaaaaaaaaacaaaaaaagcagttgtatttctgataattttttttttcttttagctatcatggtgaacttacttcagattgtgcgggaccactggggttcatgattcttgtccctatgggatttgtcattggatgttatttagacagaaagagtgatgaacggctaactgccttccggaacaagagtatgttatttaaaagctttccacacagggaattgcaacccagtgaagaagttacctggaagtaaagactggctagattatcgaatgttcacattttaaagttccgaagagaaataatatacatgaagaatctgccnnnnnnnnnnnnnnggggcggccgttttaaaggatccttgggggggcccaagtttacccgtgcatgcaacgtaatagttttttccttatagggaggccgattaaaaacctacctgggaatttttggaaagaacctttattttgggggggggacatattgggccaacctccctacaaaaatttaaagcctttagggaaaataaaaatttttaaggggtaaaaggggtaaaacaacctccatatccttgctgttggaaagttttgtttcctgggtttgatttatgaaatttttttccccggga

SEQ ID NO: 2466 - DNA, 409 bp, Homo sapiens
  SIMILAR (209)..(352): 1001254mologous to Homo sapiens NADH-cytochrome b5 reductase isoform,accession number AF125533,Smith-Waterman Score=264.
cggacgcgtgggcgactgtgagccacaacaccaagaggttccgctttgccctgcccaccgcccaccacactctggggctgcctgtgggcaaacatatctacctctccacccgaattgatggcagcctggctgtgggctcctacttggttcggaggtcccgccggcctcaggtcactctcctggaccccagtgaaaagtacctgctacgactgccgacatgatccgggaacacctgcccgctccaggggatgatgtgctggtactgctttgtgggccacccccaatggtgcagctggcctgccatcccaacttggacaaactgggctactcacaaaagatgcgattcacctactgagcatcctccagcttccctggtgctgttcgctgcagttgttccccatcagtactc

SEQ ID NO: 2467 - DNA, 880 bp, Homo sapiens
  SIMILAR (643)..(720): 1001254mologous to Homo sapiens NADH-cytochrome b5 reductase isoform,accession number AF125533,Smith-Waterman Score=140.
tcggcttgtcaggtggtggaggaaaaggcgctccgtcatggggatccagacggtaagaccctcattcagtatcctccactgggggacccctccccatctggttctggccactcagctccggaccaggggctgtcgctgccgaccccgccccgcagggctctgggcccaccgtggatgctggggtcccgatcccgcacatccgggctcgggactccgccaggttacccctctgcccttggcatgcctccgcgctggagctcgggatcgccacccctgggacggtcaccacccaagccccgggctcttacccagcctggcggtcacgctgcctcctctacccacagagccccgtcctgctggcctccctgggggtggggctggtcactctgctcggcctggctgtgggctcctacttggttcggaggtcccgccggcctcaggtcactctcctggaccccagtgaaaagtacctgctacgactgctagacaagacggtaagttggggaagaaagggccagggtgaaggaggggaccagagtgctcctggcatgtagggtacagcacccacggtggttgggatgtccaagggacgtggcagcgccaggcgcgcttggtgaaacacttgtgtcctccaccctccagactgtgagccacaacaccaagaggttccgctttgccctgcccaccgcccaccacactctggggctgcctgtgggtaaggaaagtgtggaatgggctcctttccctgggtatcctcagaaggtgactcccctcctgggatctcatgaaacacgctgcttcaaccggtttgctccacacaccatttccccttcccccacttggctctgcatcctccaagctgtgaggtgccactgggccc

SEQ ID NO: 2468 - DNA, 623 bp, Homo sapiens
  SIMILAR (1)..(45): 601254mologous to Homo sapiens NADH-cytochrome b5 reductase isoform,accession number AF125533,Smith-Waterman Score=50.
ttggatacctaaaggttggggaatgtggtgaagtttcgggggccaaagcgggttgctctcttacactggaaaagggcattttaacattcagcccaacaagaaatctccaccagaaccccgagtggcgaagaaactgggaatgattgccggcgggacaggaatcaccccaatgctacagctgatccgggccatcctgaaagtccctgaagatccaacccagtgctttctgctttttgccacccagacagaaaaggatatcatcttgcgggaggacttagaggaactgcaggcccgctatcccaatcgctttaagctctggttcactctggatcatcccccaaaaggtatccttcccatttctggacatcccactatcccctcatcgtcaaaatcaaagccttgcccctttgtgaattctggcttcattgaaatcaaccttgcctcacactgccaactcggaagtctgagtgcacagacacagtgatctcctggtccctttcctttgggttcctgtttaccaggtgggtgacagggatggcggtgctgctaaggctcagcttgaggcaggctgagtatacccattcccagctgctgctaccacttgacactttctccagagcctt

SEQ ID NO: 2469 - DNA, 1706 bp, Homo sapiens
  SIMILAR (75)..(986): 741254mologous to Homo sapiens NADH-cytochrome b5 reductase isoform,accession number AF125533,Smith-Waterman Score=1082.
cccacgcgtgcgcccacgcgtccgcccacgcgtccggtcggcttgtcaggtgggggaggaaaaggcgctccgtcatggggatccagacgagccccgtcctgctggcctccctgggggtggggctggtcactctgctcggcctggctgcgggctcctacttggttcggaggtcccgccggcctcaggtcactctcctggaccccaatgaaaagtacctgctacgactgctaaacaagacgactgtgagccacaacaccaagaggttccggtttgccctgcccaccgcccaccacactctggggctgcctgtgggcaaacatatctacctctccacccgaattgatggaagggtgcggcatcaagccatacactcctgtcaccagtgatgaggatcaaggctatgtggatcttgtcatcaaggtctacctgaagggtgttgcaacccaaattttctgagggagtggaagatgtctcagtacctggatagcctgaaggttggggatgtgggtggagttttcgggggccaagcgggttgctcacttacactggaaaagggcattttaacattcagcccaacaagaaatctccaccagaacccccgagtggcgaagaaactgggaatgattgccggcgggacaggaatcaccccaatgctacagctgatccgggccatcctgaaagtccctgaagatccaacccagtgctttctgctttttgccaaccagacagaaaaggatatcatctttgcgggaggacttaagaggaacttgcaggcccgctatcccaatcgctttaagctctggttcactctggatcatcccccaaaagattgggcctacagcaagggctttgtgactgccgacatgatccgggaacacctgcccgctccaggggatgatgtgctggtactgctttgtgggccacccccaatggtgcagctggcctgccattcccaacttgggacaaactggggttacttcacaaaagatggcgatttcaccttattgagcatcctccagcttccctggtgctgttcgctgcagttgttccccatcagtactcaaggcactataagccttagattcctttcctcagagtttcaggttttttcaagttacatctaagaagctgaaatctgggatagtacctgcaaggaacaatattcctgtaagccaatggaaagagggccaaggctcagtcactccctttggatgggcctccctaaatctccccagtggcaaccaggtccaggagaggcccatggagcagtctcttccatggaagtaagaaggaagggagccatgtacggcttgggtccaagattggcttagttcccttgatagccatctttactctcacctcctttgtgtcctgtgatgaaagggaacagtctgtggcaatggggttttaccttaaactttcactgtttcaacctatggaggcaaattctgtattgtgtggagttttaagtttgagccttagccttactttccagaggtgggtcttatggagatggcgaagaacggaggaagagatttcttcagatctcaaaggagtctgaaatatcatatttctgtgtgtgtctctctcagcccctgcccaggctagagggaaacagctactgataatcgaaaactgctgtttgtggcaggaacccctggctgtgcaaactaacactggctgaggcccctgtgtgatattgaaaa

SEQ ID NO: 2470 - DNA, 1762 bp, Homo sapiens
  SIMILAR (1112)..(1264): 941254mologous to Xenopus laevis DMR-N9 protein,accession number AF170334,Smith-Waterman Score=246.
  misc_feature (1)...(1762): n = a,t,c or g
atggcgcctgaactgagtagtaaggaacaacctgggtcagagtggaagaaggcatgccagatggaggggaccgtgtgtgcaaaggcacaaagagacttgttggatggctttgaccaaaatgccgatgatgatatggacaatgaaatccaggccgaaatggtctcagatggagatgaggaacttgttgggaactggagcaaagaacccaccaccctgggcgctgccacaatggggctgggcacagagaagcagttgggcatggggtgggcaggcagaaaggggcccattgaggacctggagcccctgccccaggctgcctgcaagctccatgcagtggctcatactacatgggaggaggcagtgcagtgtgggagtctgcccaggagaaacagtaacttgctgctggagcagggtgtcctagaggagaccaggaatttgttacaagaacatggtggagaaattgatcttgaaaagaagaggtggctgggcacggtggctcacacttgtaatgccagcactttgggaggccgaggagtgaagctgcagaccttcacggtgagtattacagctcctaaggcagcacgtctggagttgttcgttcctcccggtgggctcgtggtcttgctggcttcaggagtgaagctgcaaatcttcgcggtgagtgttacagctcataaaagcagtgtggacccaaagacccttgggtggtcgatgggactgggcgccgtggagcaggaggtggtgctcgtcggggaggctccggccgcacaggaaccaatggagtgggtgggaggctcaggcatgggggctgcaggtcccggagccctgccccgcgggaaggcagctaaggcccggcgagaaatcgagcacagcgccggtctgtacaagctgctgccgcactcggagtacagccggcccaaccgggtgcccttcaactcgcagggatccaaccctgtccgcgtctccttcgtaaacctcaacgaccagtctggcaacggcgaccgcctctgcttcaatgtgggccgggagctgtacttctatatctacaagggggtccgcaagacaatcccatgaggttggtagaacagagattctcatctccgttttaactgaggctgctgacttgagtaaaccaatagataaaaggatatacaaaggaacacagcctacttgtcatgacttcaaccacctaacagccacagcagaaagtgtctctctcctagtgggcttttccgcaggccaagtccagcttatagacccaatcaaaaaagaaactagcaaactttttaatgaggaagcttttgaggggaggtatgctacatttttcaccatttgtatgaatgcagccacggaaaacttcacatcagctcagccctcggtttagttttcttcggaggagacattagttacagcttgagttctcagcctgccccactcgaaggcgccagcagggactctggatcacggggccatgaactatggagtgagtcttctagaaagagaaataataaaagacactaagacttgctgttctaaatgaaagaatcagaatggatgaattagacacatgcagagtgacctctgtattaaaataagatattagcatgttttaggtactttggtatttctgtcatcttaaagtgttgattgctaggtgctgtcagttatacaggaagccaaacccaggagggcccaaaacagctacaggaattccaccgcntgtccgagtgatctcaggggtttcaattnncngganaccccc

SEQ ID NO: 2471 - DNA, 2781 bp, Homo sapiens
  SIMILAR (124)..(663): 421254mologous to Homo sapiens transmembrane-type protein tyrosine phosphatase H,accession number AF275150,Smith-Waterman Score=299.
atgagactctttctcggaaaggaaaagaaaaagaaagaaagtgaaactacaggaatgggccaaaccctgaagaagtgtgcgtccagcaagaaaagtggcttggggttggacactggggacagttaccttttaagacggacagaggaggaggggcctgcccaggaaataacaagcagcagctggctccccaggggacatcccagtgaagacttcgctgaccacgtcaggaagaatgagagggacagcaactgtgttttgcagacaagtaccagcaacttccctggtgggccacagccagtctcagatggtggcttcggcttcagagacaacgccaagaaccgctacagaaatgtgctgccctatgactggtcccgggtgcccctgaagcccatccatgaggagcaggctctgactacatcaatgccagcttcatgcccggtctctggagccccaggagttcattgcaacccagggtcccctgccacagacagtgggtgcttctggcgcctggtgtgggaacagcagagccacaccctggtcatgctgccaactgcatggaggccggccggcccatctgctggttcacatttggggccaaagcagaccccacagacctggtgcggcgtgggtcgcacaggaaccctcattgccctggacgtcctgctccggcgctgcagtccgagggtctccttgggcccttcagctttgctcatacgtattcctgcatcagtgcatcctgcggttcctccaacagtcagcccggccccagccgagaaggaagtcccgtatgaggatgtcgaaaacctcatcacgagaacgtggccgccatccaggcccacaagttggagaaaagactccaggacccgccaccatgttcccggagcccccaaccccggggcctccatcgcccgacagcctcccgactccagtcgcatcagccacggcccagtgcccccctgggccctggccccatcgtgctggtctcaggcctcctcatcttcagctgctgtttctgtcttaccggaagagctgtcggaggcggacaggcaagaagagccaggcccaagccagaacccaccttactggctcatcctccctgtgtgtctagccctcaactggctctggggacccagagatggaacagaactagttgctattcccaagaactcccagtctgctgctggtgggcattctgcaagcaatggattggcagccttggatcttggtggctcctcggacccctatgtgcgggtcacctgctgccggacaaacggaggcggtacgagaccaaggtgcatcggcaacgctgaaccctcactttggggagaccttcgccttcaaggtcccctacgtggagctggggggcagggtgctggtcatggggtgtacgacttcgaccgcttctctcgcaatgacgccatcggggagaccatacgtcaaggtccacctgctgcagggcggcaaaaaggtgcggaagagaaaaccaccatcaagaagaacactctgaacccctattacaacgaagcttcagcttcgaggtgccctgtgaccaagtccagcccatccctgcactgctcctggggccaaataaatattcagcagctccgtggcctgggcccatgctccttgatgggggtgggcaagggctgggacccagaggaaacctcgtttccaggaatgggcgctcgcagggcgggtgatgaccacacctgcggctccggcagcggcttcggctccgtgtcctggtggggcctgtccccgggctggacctgcaggctgaaagcctcctgtggacccagactcccaggccgatacagtgcacagcaaccccggctagatgtgctgcttctgggctctgtggatggacggcacctgctgcggccctgtcccgagcgaagttctggcctcgcaggaggttcaacagcgaagcgagaccttcctggaagtgtgggggaacgcgctgtgcgcccgccagtggccgccttcgtgcgtgcccaggccgacctgctggccacctggtccccgagcccgaccgcctggaggaacagctgccctggctcacctccgcgccctcaaggtgccgccgcccggcctccatctgggatcgggtgccgcgggaataatggaagcgcacagtccaaaggaccgtggggagcgcgtggcagcgcgcgggtactggggggactcgccacggggcccttcgtggccttcggcatcgaagcggacgacgagagctcctgcggacgagcaacggccagccagtcaagacggccggggagatcactcaacacaactgacggagctgctccgcgacgtggccgcctgggggcgcgcgagagccacgggggggacctggaggagcagcagcacgcggagggaagcccggagccaggactccagcagccccgaccccggatctttcaccgtccacttcctgccgctcgattctgctcagactctccacacaagagctgctacaacggccgattccagctcctctatgtggcctgtgtgtcctcggggagtctcaagcagcccggagagactgacggtccctgggaccctgaaggtcacccgggcggccccctcatgaccctccaaacgcccctgtcctcgccctgcctcctgccattcccggctgagtctcagcatggcggatggaaaaaatctaagatctccgcctcgagaaaattgcagctgaagactctgctgctgcagattgcaaagcaagagctgagcgagaggcggaggagcggcgcggagagaaggggcgcgctctga

SEQ ID NO: 2472 - DNA, 409 bp, Homo sapiens
  SIMILAR (215)..(409): 981254mologous to Homo sapiens Recombinant modified human cardiac troponin I SEQ ID NO:5,accession number AAY91087,Smith- Waterman Score=323.
ctcaagcagcccggaggagactgacggtccctgggaccctgaaggtcacccgggcggccccggcactgagcctccaaacgcccctgtcctcgccctgcctcctgccattcccgggctgagactcagcatggcggatgggagcagcgatgcggttagggaacctcgccctgcaccaaccccaatcagacgccgctcctccaactaccgcgcttatgccacggagcggcgcggagagaaggggcgcgctctgagcacccgctgccagccgctggagttggccgggctgggcttcgcggagctgcaggacttgtgccgacagctccacgcccgtgtggacaaggtggatgaagagagatacgacatagaggcaaaagtcaccaagaacatcacggagattgcagatctgact

SEQ ID NO: 2473 - DNA, 490 bp, Homo sapiens
  SIMILAR (126)..(488): 871254mologous to Homo sapiens cardiac troponin I,accession number M64247,Smith-Waterman Score=494.
caagcagcccggaggagactgtcggtccctgggaccctgaaggtcacccgggcgggcccctcactgaccctccaaacgcccctgtcctcgccctgcctcctgccattcccggcctgagtctcatcatggcggatgggagcagcgatgcggtgagagcagcgggctaaggcgtggctgggacccccagggccagggctagggaacctcgccctgcaccagccccaatcagacgccgctcctccaactaccgcgcttatgccacggagccgcacgccaagaaaaaatctaagatctccgcctcgagaaaattgcagctgaagactctgctgctgcagattgcaaagcaagagctggagcgagaggcggaggagcggcgcggagagaaggggcgcgctctgagcacccgctgccagccgctggagttggccgggctgggcttcgcggagctgcaggacttgtgccgacagctccacgcccgtgtggacaaggt

SEQ ID NO: 2474 - DNA, 2616 bp, Homo sapiens
  SIMILAR (2080)..(2364): 1001254mologous to Homo sapiens Recombinant modified human cardiac troponin I SEQ ID NO:5,accession number AAY91087,Smith- Waterman Score=470.
atgacctacgaaccgcccgatacacaaacggacgacgtggaggtggtgcagggagatgcccccgcaaggggtctagtccctctggttccctgcctggctgtggtcgggctggctcaagtcctgggctgcgttcctggtctgcaggaccacgggttacctgtggctgttgatctcgctgctggtgtggtagttggggcactgcctccagctgtctacagggcgcaaagggtgccagtgcgcacaaatggccctgtgtgcctgtgccattcccatttgcaaagagatacccatgtggcaagaatctctgccacgacaacccacaagaccccccatgatgacaacgcacaaccacaacccaagggctacagtgtggtccacagacctgcagaggtcattgcctggttctgcagtcatacccactacgaggagacccaatcgcagagcagatctgggtccccggggctgcctagggctgcctacctgcaccctctctcattcctgcatagaccaggggccactgacacccaggccgatttagtgcactacgaggggtgcttgtctgtgacacgcacagaagccctggcagctgggaactgctactttgacccctgcatactgccccctgtctacgcccacattgaaccccattctcctgaccctggtggcggcctgagcggaggcactatccagattccactgctcaaagggtggccgttgctggtggttagcaagtgccctggtgcagggcacttgagggagacctgtgcaagtggtagccagggcagccgtccctgcccccacgactcaatgtccaccttcaagagggccagttgggcccttggtgtcccacggtcagctgcagccggtgctggtcgacctgggcttagtgggaaccagagcgtccctcgcctgctcatggctgttcttgggttgggactgtccttggggctgctttttaatgccgggataggaggcgctagccagattaccctgcatcaagggtggcagtggcgttgttacgcaagttccctggtggaggtggaagctgaagtgccttgtactctcctcactcacctgccaggacgtcttgtgcgattcaccctacactatgatcaatcagtcatcatcgtcaatcagttcagccagcgtggggagcgcgtggcagcgcgcgggtactggggggacatcgccacggggcccttcgtggccttcggcatcgaagcggacgacgagagcctcctgcggacgagcaacggccagccagtcaagacggccggggagatcactcaacacaacgtgacggagctgctccgcgacgtggccgcctgggggcgcgcgagagccaccgggggggacctggaggagcagcagcacgcggagggaagcccggagccaggactccagtctcagttgcctgatctgtacacagccccgaccccggaatctttcaccgtccacttcctgccgctcgattctgctcagactctccaccacaagagctgctacaacggccgattccagctcctctatgtggcctgtggtatggtccatcttctcatccctgagcttggggcctgtgtggcacccggagggaacttgattgtggaattagcccggtacctggtggacgtgcggcaggagcagctgcagggattcaacacccgggtcagggagctagctcaggcagctggatttgctccacagaccggggccaggccttcagagaccttcgcacgtttctgcaagtcccaggaatcagctctgggcaacactgtcccagctgtggaacccggaactccgccccttgacatcctggcccagcctcttgaagccagcaacccagcccttgagggcctgacccagcctctgcagggtgggaccccacactgtgagccctgccagctgccctctgagtctccaggttcactctcagagtgtcctcggggagtctcaagcagcccggaggagactgactggtccctgggaaccctgaaaggtcaccctgggcggccccctcactgaaccctccaaacgcccctgtcctcgtccctgcctcctgccattcccggcctgagtctcagcatggcggatgggagcagcgatgcggctagggaacctcgccctgcaccagccccaatcagacgccgctcctccaactaccgcgcttatgccacggagccgcacgccaagaaaaaatctaagatctccgcctcgagaaaattgcagctgaagactctgctgctgcagattgcaaagcaagagctggagcgagaggcggaggagcggcgcggagagaaggggcgcgctctgagcacccgctgccagccgctggagttggccgggctgggcttcgcggagctgcagcctgatcacacttggtttattgatggcagttccaccaggcctaatcgccacacaccagcaaaggcaggctatgctatagtatcttccacatctatcattgaggatactgctttgcctccctccactacctctcagcaagctgaactcattgccttaactcaggccctcactcttgcaaaaggactacgcgtcaatatttatactgactctaaatatgcctttcatattctgccccaccatgcagttatatag

SEQ ID NO: 2475 - DNA, 954 bp, Homo sapiens
  SIMILAR (165)..(806): 651254mologous to Homo sapiens Cardiac troponin I/cardiac troponin C fusion protien,accession number AAW41571,Smith-Waterman Score=615.
ggaattcccggtcgaccccgcgtccgagtctcaagcagcccggaggagactgacggtccctgggttctctgaaggtcacccgtgcggccccctcactgagcctccaaacgcccgggtcctcgccctgcctcctgccattcccggcctgagtctcagcatggcggaatgggagcagcgatgcggctagggaacctcgccctgcaccagccccaatcagacgccgctcctccaactaccgcgcttatgccacggagccgcacgccaagaaaaaatctaagatctcccgcctcgagaaaattgcagctgaagactctgctgctgcagattgcaaagcaagaagctggagcgagaggcggaggagcggcgcggaagagaaggggcgcgctctctagcaccccgctgtccagcccgctggagttggccgggcctgggcttcgcggacttgccaggactttgttgccgacagttccacgcccgtgtgggacaaggtggatgaagagagatacgacatagaggcaaaagtctccaagaacatcacggagattgcaaattttgacttcagaagatttttgaccttcgaagcaagtttaagcggcccacccttgcggagagtgaggatctctgcagatgccatgatgcaggcgctgctgggggcccgggctaaggagtccctggacctgcgggcccacctcaagcaggtgaagaaggaagaccccgagaaggaaaaccgggaggtgggagactggcgcaagaacatcgatgcactgagtggaatggagggccgcatgaaaaagtggagagagctgagccttcctgcctactgcccctgccctgaggagggccactgaggaataaagcttctctctgagctgaagaaaaaagaaaggggggggcggttaaaaagaataccatgaggagccaaggttaatcacgcctggaaacccaatacttttt

SEQ ID NO: 2476 - DNA, 2883 bp, Homo sapiens
  SIMILAR (602)..(631): 901254mologous to Escherichia coli K12 putative permease,accession number AE000463,Smith-Waterman Score=48.
atgagcaagatcaaaacgctactgcaatacagcccatccagcaccaactcccagccgtggcattttattgttggcagtaaagcgtttgttgaatcggtgcgggcagaacaccccgatgcccggcaccattgcgtggcgtgggtcgcgggtgcgccggatgattctcaacagctgggtttctctgacgacggggagccggcgggaacggcaggtaaaccgatgctcgcccagctaatgggcagcggcgtcggggaaattaccgctgtggtagtgcgctactacggcggcatattgcttggcaccggtgggttagtgaaagcgtatggcggcggcgtgaatcaggcgctgcgccagctaacgacccaacgcaagacgccattaaccgaatatactttgcaatgtgaatatcatcagttaaccggcattgaagcgttgctggggcagtgtgacggcaaaattatcaacagtgattatcaggcattcgttctgctgcgggtggcgcttccggcggcgaaagtggctgaattttccgcaaagctggcggattttagccgtggttcattgcatgcgccggccagactagcgtcgatatcagcaggatgtagattcccgacgcaagatcggtccaaaagcatgatgaactgctcctacggcgcaatggttcccgctatcaccaaaaaccccaacgaacgcgcctcactggcggcatggcgtcagggcggcgctacgctgggcctgctgctgtgcacggtgggattcgtgccagttatgaatcttatcgaaggtaatcagcaacttggctatatcttcgccgccacgctgttttcactgtttggcctgctgtttatgtggatctgctactcgggcgtgaaagagcgttatgtcgaaacccagcctgctaatccggcgcaaaagccgggcctgctgcaatctttccgcgcaattgcgggtaaccgcccgctgttcattctgtgcattgccaacctctgcactttaggggcgtttaacctcgccatccaggtctattacacccagtacgtgcttaacgatcccatcctgttgtcgtatatgggatttttcagcatgggctgtatttgcatcggcgtattcctgatgcctgcctcagtcagacgttttggcaagaagaaagtttatatcggcggcctgctgatttgggtgctgggcgatctgctcaactatttcttcggcggcggttcggtcagcttcgtggcgttctcctgcctggcgttctttggctcagcgtttgttaacagcctgaactgggcgctggtttccgacaccgtcgagtacggcgagtggcgcaccggcgtgcgttcggaaggaacggtctacaccggttttaccttctttcgcaaagtgtctcaggcgctggctggtttcttccccggctggatgctgacgcaaattggctatgtgccgaacgtcgcacaggctgaccacaccattgaagggttacgccagttgatcttcatctacccaagcgcactggcggtagtcaccattgtggcgatgggttgcttctacagcctgaacgagaagatgtatgtccgcattgtggaagagatagaagcccgtaaacgcacggcgtttcttccagcgccattggctttcaacgtaaacatttacgccgagtttgcgtccggctttttccagatattccgcagccatataggtgtgagcaatacccgccggacaggccgttacgcagacgatagttggcgcgttggaaaaagaggcagaaggttgcgtgcctcccttgtcatccagcgccgagagcaactcatcaggcgtcgtcgccgactgtatacgcgcccgaatctcatcatccgcaaggcgcgtggtggctcctgcgcctgcgccggctcctgcaagtgcaaaaagtgcaaatgcacctcctgcaagaagagtgagtgcggggccatctccaggaatctggggctgtggctaaggctacttgattctatagaaacagaaaaaggcaaacgcagccttttctacattttcagagtaactcccgtcagttgcgagcaaaaaagccgctacgctttagctatacgtgctaattcaagagaagagaccatggacaacgacaaaattgatcaacacagcgacgaaattgaagttgagagcgaagaaaaagagcgcggcaaaaaaatagaaatagatgaagaccgactcccctcccgggcgatggcaattcatgagcatatccgccaggatggtgaaaaagagctggacgcacgcatagcgctgggtgtcgagaatattatcgaaagctgcacggtcgttagccgccagggcaaagatgccgacatcatgatcatcggtggtatcccggacaaactgaaagacgataagcagatcgacctattggtgcaggcgaccgaaagctgggtgaaaacaccgatgcgccagaccccgttccccggcattgtgccggacgagagcgatcgcgcggcagaaacccggtcaacgctgacctcttccggtgcgatggcggcggtgattggcttccagtcgccgtataacgaccagcgcagcgtgattgcgctgttggcagatagcccacgcggttatgaaatgcttaacgatgcggtgaacgatagcggcaaacgcgccaccatgttcggttcggtcgcggtgatccgcgagtccggtatcaacagcctacgtgttggcgacgtttattacgtaggtcatctgccgtggttcgagcgcgtgtggtatgcgctggcaaaccatccgattctgctggcggtgctggcggctatcagtgtgatattgctggcatgggtactgtggcgtctgctgcgaattattagtcgtcgtcgtcttaacccggataacgagatctatgagtga

SEQ ID NO: 2477 - DNA, 5070 bp, Homo sapiens
  SIMILAR (61)..(5067): 971254mologous to Homo sapiens complement component C3,accession number K02765,Smith-Waterman Score=8309.
ctcctccccatcctctccctctgtccctctgtccctctgaccctgcactgtcccagcaccatgggacccacctcaggtcccagcctgctgctcctgctactaacccacctccccctggctctggggagtcccatgtactctatcatcacccccaacatcttgcggctggagagcgaggagaccatggtgctggaggcccacgacgcgcaaggggatgttccagtcactgttactgtccacgacttcccaggcaaaaaactagtgctgtccagtgagaagactgtgctgacccctgccaccaaccacatgggcaacgtcaccttcacgatcccagccaacagggagttcaagtcagaaaaggggcgcaacaagttcgtgaccgtgcaggccaccttcgggacccaagtggtggagaaggtggtgctggtcagcctgcagagcgggtacctcttcatccagacagacaagaccatctacacccctggctccacagttctctatcggatcttcaccgtcaaccacaagctgctacccgtgggccggacggtcatggtcaacattgagaacccggaaggcatcccggtcaagcaggactccttgtcttctcagaaccagcttggcgtcttgcccttgtcttgggacattccggaactcgtcaacatgggccagtggaagatccgagcctactatgaaaactcaccacagcaggtcttctccactgagtttgaggtgaaggagtacgtgctgcccagtttcgaggtcatagtggagcctacagagaaattctactacatctataacgagaagggcctggaggtcaccatcaccgccaggttcctctacgggaagaaagtggagggaactgcctttgtcatcttcgggatccaggatggcgaacagaggatttccctgcctgaatccctcaagcgcattccgattgaggatggctcgggggaggttgtgctgagccggaaggtactgctggacggggtgcagaacctccgagcagaagacctggtggggaagtctttgtacgtgtctgccaccgtcatcttgcactcaggcagtgacatggtgcaggcagagcgcagcgggatccccatcgtgacctctccctaccagatccacttcaccaagacacccaagtacttcaaaccaggaatgccctttgacctcatggtgttcgtgacgaaccctgatggctctccagcctaccgagtccccgtggcagtccagggcgaggacactgtgcagtctctaacccagggagatggcgtggccaaactcagcatcaacacacaccccagccagaagcccttgagcatcacggtgcgcacgaagaagcaggagctctcggaggcagagcaggctaccaggaccatgcaggctctgccctacagcaccgtgggcaactccaacaattacctgcatctctcagtgctacgtacagagctcagacccggggagaccctcaacgtcaacttcctcctgcgaatggaccgcgcccacgaggccaagatccgctactacacctacctgatcatgaacaagggcaggctgttgaaggcgggacgccaggtgcgagagcccggccaggacctggtggtgctgcccctgtccatcaccaccgacttcatcccttccttccgcctggtggcgtactacacgctgatcggtgccagcggccagagggaggtggtggccgactccgtgtgggtggacgtcaaggactcctgcgtgggctcgctggtggtaaaaagcggccagtcagaagaccggcagcctgtacctgggcagcagatgaccctgaagatagagggtgaccacggggcccgggtggtactggtggccgtggacaagggcgtgttcgtgctgaataagaagaacaaactgacgcagagtaagatctgggacgtggtggagaaggcagacatcggctgcaccccgggcagtgggaaggattacgccggtgtcttctccgacgcagggctgaccttcacgagcagcagtggccagcagaccgcccagagggcagaacttcagtgcccgcagccagccgcccgccgacgccgttccgtgcagctcacggagaagcgaatggacaaagtcggcaagtaccccaaggagctgcgcaagtgctgcgaggacggcatgcgggagaaccccatgaggttctcgtgccagcgccggacccgtttcatctccctgggcgaggcgtgcaagaaggtcttcctggactgctgcaactacatcacagagctgcggcggcagcacgcgcgggccagccacctgggcctggccaggagtaacctggatgaggacatcattgcagaagagaacatcgtttcccgaagtgagttcccagagagctggctgtggaacgttgaggacttgaaagagccaccgaaaaatggaatctctacgaagctcatgaatatatttttgaaagactccatcaccacgtgggagattctggctgtcagcatgtcggacaagaaagggatctgtgtggcagaccccttcgaggtcacagtaatgcaggacttcttcatcgacctgcggctaccctactctgttgttcgaaacgagcaggtggaaatccgagccgttctctacaattaccggcagaaccaagagctcaaggtgagggtggaactactccacaatccagccttctgcagcctggccaccaccaagaggcgtcaccagcagaccgtaaccatcccccccaagtcctcgttgtccgttccatatgtcatcgtgccgctaaagaccggcctgcaggaagtggaagtcaaggctgccgtctaccatcatttcatcagtgacggtgtcaggaagtccctgaaggtcgtgccggaaggaatcagaatgaacaaaactgtggctgttcgcaccctggatccagaacgcctgggccgtgaaggagtgcagaaagaggacatcccacctgcagacctcagtgaccaagtcccggacaccgagtctgagaccagaattctcctgcaagggaccccagtggcccagatgacagaggatgccgtcgacgcggaacggctgaagcacctcattgtgaccccctcgggctgcggggaacagaacatgatcggcatgacgcccacggtcatcgctgtgcattacctggatgaaacggagcagtgggagaagttcggcctagagaagcggcagggggccttggagctcatcaagaaggggtacacccagcagctggccttcagacaacccagctctgcctttgcggccttcgtgaaacgggcacccagcacctggctgaccgcctacgtggtcaaggtcttctctctggctgtcaacctcatcgccatcgactcccaagtcctctgcggggctgttaaatggctgatcctggagaagcagaagcccgacggggtcttccaggaggatgcgcccgtgatacaccaagaaatgattggtggattacggaacaacaacgagaaagacatggccctcacggcctttgttctcatctcgctgcaggaggctaaagatatttgcgaggagcaggtcaacagcctgccaggcagcatcactaaagcaggagacttccttgaagccaactacatgaacctacagagatcctacactgtggccattgctggctatgctctggcccagatgggcaggctgaaggggcctcttcttaacaaatttctgaccacagccaaagataagaaccgctgggaggaccctggtaagcagctctacaacgtggaggccacatcctatgccctcttggccctactgcagctaaaagactttgactttgtgcctcccgtcgtgcgttggctcaatgaacagagatactacggtggtggctatggctctacccaggccaccttcatggtgttccaagccttggctcaataccaaaaggacgcccctgaccaccaggaactgaaccttgatgtgtccctccaactgcccagccgcagctccaagatcacccaccgtatccactgggaatctgccagcctcctgcgatcagaagagaccaaggaaaatgagggtttcacagtcacagctgaaggaaaaggccaaggcaccttgtcggtggtgacaatgtaccatgctaaggccaaagatcaactcacctgtaataaattcgacctcaaggtcaccataaaaccagcaccggaaacagaaaagaggccttcaggattgccaaggaacactatggatccttgagatctgtaccagggtaccgggggagaccagggatggccactatgtctatattgggacatatccatggatggactgggctttgctccaggacacaggttgaccttgaaggcagctgggccaatggtgttgacagatacatctccaagtatgagcttggacaaagccttctccgataggaacaccctcatcatctacctggacaaggtctcacactctgaggatgactgtctagctttcaaagttcaccaatactttaatgtagagcttatccagcctggagcagtcaaggtctacgcctattacaacctggaggaaagctgtacccggttctaccatccggaaaaggaggatggaaagctgaacaagctctgccgtgatgaactgtgccgctgtgctgaggagaattgcttcatacaaaagtcggatgacaaggtcaccctggaagaacggctggacaaggcctgtgagccaggagtggactatgtgtacaagaaccgactggtcaaggttcaactgtccaatgactttgacgagtacatcatggccattgagcagaccatcaagtcaggctcggatgaggtgcaggttggacagcagcgcacgttcatcagccccatcaagtgcagagaagccctgaagctggaggagaagaaacactacctcatgtggggtctctcctccgatttctggggagagaagcccaacctcagctacatcatcgggaaggacacttgggtggagcactggcctgaggaggacgaatgccaagacgaagagaaccagaaacaatgccaggacctcggcgccttcaccgagagcatggttgtctttgggtgccccaactga

SEQ ID NO: 2478 - DNA, 1295 bp, Homo sapiens
  SIMILAR (397)..(435): 841254mologous to Homo sapiens metallothionein-IG,accession number J03910,Smith-Waterman Score=66.
  misc_feature (1)...(1295): n = a,t,c or g
ctgaaggaaaaggccaaggcaccttgtcggtggtgacaatgtaccatgctaaggccaaagatcaactcacctgtaataaattcgacctctgcctcccaggttcaagacagaaagtcgaagtcttcctggggccatgtctgcagcctgggactttcctttggagtagaaataggagggtgcttggttttcccagcatgaatggagaggacatggggcttctcttcctctgctctgagtgggaaaggagctctgagggctggctctgcaacagagaagggggaagtggacactcaattgaaccccactgctgtaccttcctgcatctcactcaccgttcactggctttttctcttctagcaggtgtctcctgcacctgcgccagctcctgcaagtgcaaagaagtgcaaatgcacctcctgcaagaagagtgagtgcggggccatctccaggaatctggggctgtggcttaaggttgggagggaacccaaggctgtccctgaagtgcgtgcttctggggaaccggccttcctttgtccctgtaggttgtcactgcctgtctagtcttctgcaactttccagggcttatgtgaagtggggcagctttctccaaaggaagacccgattctcaatgtccaaccaagttgtctcctgacaaaaaaccatgcccatcatgaactaaagggtccctctggggctgggagggatggagacaggcctctgttggggcagggagttcctctggatcgagtctgcctctgaccctctcaatctcctttcctcccccaggctgctgctcctgttgccccctgtgggctgtgcccaagtgtgccccagggctggcatctgcaaaggggcatcggagaagtgcagctgctgcgcctggatgtcgggacagccctgctcccaacgtacaaatagagttgacccgtaaaatccagggatttttgtgtttttttgctaacaatctttgaacccctttggctaacattccttttttttctgtggaaatatgtggaataattaatttaaacacttaagacttgnnnnnnnnnnnnnnnnntataatggggcgccccttttaaagaacccttggggggcccaaatttaacccgggctgggaaggctatagcttttcccttatagggggggttttaaaaagctagtggggaattttgggaaaaaaccctttcttgtgtgggggagcatattggaccaccctcccctccgaattttaacgccccagggcaaaataaaatttttaagggggaagggggtaaaccaacccgctattcccg

SEQ ID NO: 2479 - DNA, 1972 bp, Homo sapiens
  SIMILAR (1224)..(1580): 851254mologous to Homo sapiens C4-sterol methyl oxidase homolog,accession number U93162,Smith-Waterman Score=521.
ggtccaaccagccgctccgccgtgaagctttcccagaaacccccaaaggcctccgccagggtattccgggggagccggagaatggggacagatcccatttcttttcatttgacgtgaccgctgtcatgatactttacaaagaatcgcaggctctcactgggaatctgccgggaccgcagttgccaaggcgactccgcgctgcagggcgaggcggccatccgtctgtgcccgccccctcacgccgtggcgcgctctcacgcttccccgcctccgggcgctccgcggtgccgaccattggctggctctgcaggtctcactatcctcactccatccgcggagccaatggctgggaccgccaggagctcgttcgcgcgagtcacacgatgtcggcaactgcacagaccaatcaccgcgccgagaaggcggggcgggagctctcgcaggccaataacgacaggacgggccgcctggcccacccggctccacccccaagccaggcgaggcaggttccgaggttggaacacctggcgagtcctcggtgtcggtggccggcagtcatctcgcggccgttcagatcgtggcattgcatcttagaaataaggtttaggaagggcaagcttggaggcagggcaagtccagaaaatgaaggagctggtgaaatccgtgttaaagtgccaaaggacagagactggctgacagctaaacttcaaggtgacttacttacagttagccaaactgcaaagttggaggacatggtccttcagactgccaagtccactcaagactttctgacaccaacggcaaggagttacagcccaactacaaagctaaaagggaaagtcaacacaaaatctcccacacttctgacaccaaccgcaagaggaagacattacctactcggagcaccaattgcctcatggagatgtcatacgtcgactatacgttatcatacggtcgtagtcatgtctatgacactgacggaatctgagcatcaggctggttcggtagatatgtctgcaaatgattatgctcattattcaggcgctagtggagataatgaaatgtgtgttgtaattgcatgtccaacgccacttttcctgagtccacgggcctggaaaccatgtgatgctgggtccaaagtgaagaattgggggatagagaacgggaatcttgttcacacagttctctccagtacccagcatggtgacccagaacatgtacatgctccatttggaatggaagctgaatatgcacatcctttggagactctaattcttggaactggatttttcattggaatcgtgcttttgtgtgatcatgtaattcttctttgggcatgggtgaccattcgtttattagaaactattgatgtccatagtggttatgatattcctctcaaccctttaaatctgatccctttctatgctggttctcggcatcatgatttccaccacatggaacttcattgggaaactatggcttccaacattttacacggtggggattggaattttttgggaacagactctcagtataatgcctataatgaaaagaggaagaagtttgagaaaaagactgaataaatatctcacgtaaaccttcctgaaagataaacgttttcctgaattcagaaactagtagctaacattgcttctggagagcagaaataagcatgtcttctggctactaagtgataagaagaacattaacaacctttaattaccttcctagtggggaactttttctactttacctacaagttctatatatgtaggaaatgaataaatatatatttaaggtacagttttccatgagggaagtttttaaaaggccatgttccctaagcttcccaggaagggttttggggtactaggaggtatttaatctatgggcttttctcccagtaaaaccatagggcctgaagtttgacattgggtctttaaatcttttagatatatactggtcatttcag

SEQ ID NO: 2480 - DNA, 3239 bp, Homo sapiens
  SIMILAR (351)..(668): 901254mologous to Homo sapiens Amino acid sequence of a human transmembrane protein,accession number AAB18993,Smith-Waterman Score=471.
cggacgcgtgggcgaaatgagccaggggcgtggaaaatatgacttctatattggcctgggattggctatgagctccagcattttcattggaggaagtttcattttgaaaaaaaagggcctccttcgacttgccaggaaaggctctatgagagcaggtcaaggtggccatgcatatcttaaggaatggttgtggcgggctggactgctgtcaatgggagctggtgaggtggccaacttcgctgcgtatgcggttgcaccagccactctagtgactccactaggagctctcagcgtgctagtaagggccattctttcttcatactttctcaatgaaagacttaatcttcatgggaaaattgggtgtttgctaagtattttaggatctacttgttatggtcattcatgctccaaaggaagaggagattgagactttaaatgaaatgtctcacaagctaggtgatccaggttttgtggtctttgcaacccttgtggtcattgtggccttgatattaatcttcgtggtgggtcctcgccatggacagacaaacattcttgtgtacataacaatctgctctgtaatcggcgcgttttcagtctcctgtgtgaagggcctgggcattgctatcaaggagctgtttgcagggaagcctgtgctgcggcatcccctgggcttggattctgctgctgagcctcatcgtctgtgtgagcacacagattaattacctaaatagggccctgggatatattcaacacttccattgtgactccaatatattatgtattctttacaacatcagttttaacttgttcagctattctttttaagggagtgggcaaggatatgcccgttggacgatgtccattggtactttgaagtggcttctttacaatcattgtggggggatattcttgttgcatgcctttaaagacgtcagctttagcctaagcaaagtctggcctgtgtcttttccgaaaaagacgaggaaagcaatgaatggcaatctctctaatatgtatgaagttccttaataataatgaagaaagcttaacctgtgggaatcgaacaacacactgggtgaaaaatgtctcccgaaggaaatgggaaatctgacagctttttaaggaaaggtggaattaaaagggttaatctgtggattgttatggaagtgaatttggaatatcatccaggaatgtgtctggaaaaaacattgtccctcaaataatgttcttttaaaggcaatctttttaaagatttcactaatttggacccaagaaaattacttttcttgtatttaaacaaacaatggtagctcacctaaaatgacctcagcacatgacgatttctattaacattttattgttgtagaagtattttacattttcatcccttctccaaaagccgaatgcactaatgacagttttaagtctatgaaaatgctttattttttcattggtgatgaaagtctgaaatgtgcatttcgtcatccccactccatcaatccctgaccatgtaaggcttttttattttaaaaaaaacagagttatcccaatacattatcctgtgatttacccttaccctacaaaagtggctccctgtttgtttggatgaatgattggttttatttttgaaaatatttattaagggaaaactaaagttactggaatgaagggaaccctcttccttacaaaaacaaaaaaaagggcaagaaatcaccccccaaggaacgatttcctcagggttgagatgatcacccgtgaatccggctttcctctgaggcattcgatgggccttagcacctccatccaagcccagcacatcctggcctggctggttgcagcctgggctgggggttattctttcagttacccttaagtccccatggatgcctgggaacccttgattaaccgtttttacatcagccccttgtaccttttcagtatattttcataatgaagttatattgtcatttaagactttgaaccagctcctgggaaatagaagacctagggttgtttcttaaaagtttagccccatgttaataaataaaaaagttggaaatgaagttcttattctaaaagtctggaatgcttaggaacaaacttaacatgtttataggaatatgggtctctttgtaccaagtactttggcttaaggagctcctttggggccactacatattttgggtttctaggaaaatgtttgtttgtttatggaggagtcggtgggaaaactgcaaacatatgcagaaaaggtagaataataaaaaaggtctaatgaactccattcagctttgaacctatccactcataacccattgactggccctttaaaaaaaagtattggcagaattaatttcccacctaggtgatgggaagaaagtgttcgcctgttcccagccctgtggctcctggcctggaggttaccccagtggtgcgccagcgccaagccatcaacttccccgagggcctccccgtgccaatggtgctggtatcccatgcagctcaccactggctgcgtggaaactccctttttttccaactttattattggccttctaaggagctgttttagatgttttttctaactgcctcctcccaatgccattttaatactacagatgtactacatatctgtttatatactgtacctacatctgtgctttgtacataaaagaaccagttttctcccccttgaggacagagactcatttgaacatgcataggttaataaataataataaattcttatttaacattttgtagcacttgagattgtcttatacctaaggtattacatatttggtatataattaagccttataaaacttggtaattgattaagttttaccataatttttcatcctattctgtagtttctaagataagcacagctaccacctctaaatctgcagcagaatgctggccccagggttattaattcacattaccaaaagcatttttagggaactttttataaagaaagaataattgtttgttaggcttcatgtcacttgagtgagtttggcagtgtaacaggatggttcgtacacttactacttttctgtgccgtgcatcatatgcttctggacagtttccaaaggcctccggaaaagtaggcgaggcctgctttttatggcaacttggcatccatagaaaattttaaaattggtgaaggttgcaatactccaaataatgtaaaatgactgccaggctacaatataaagtgagttcagttaatc

SEQ ID NO: 2481 - DNA, 9234 bp, Homo sapiens
  SIMILAR (3192)..(3629): 481254mologous to Homo sapiens Human myelin oligodendrocyte glycoprotein gene,accession number AAZ29204,Smith-Waterman Score= 223.
atgggtgccccgacgttgccccctgcctggcagccctttctcaaggaccaccgcatctctacattcaagaactggcccttcttggagggctgcgcctgcaccccggagcgggtgagactgcccggcctcctggggtcccccacgcccgccttgccctgtccctagcgaggccactgtgactgggcctcgggggtacaagccgccctcccctccccgtcctgtccccagcgaggccactgtggctgggccccttgggtccaggccggcctcccctccctgctttgtccccatcgaggcctttgtggctgggcctcggggttccgggctgccacgtccactcacgagctgtgctgtcccttgcagatggccgaggctggcttcatccactgccccactgagaacgagccagacttggcccagtgtttcttctgcttcaaggagctggaaggctgggagccagatgacgaccccatgtaagtcttctctggccagcctcgatgggctttgttttgaactgagttgtcaaaagatttgagttgcaaagacacttagtatgggagggttgctttccaccctcattgcttcttaaacagctgttgtgaacggatacctctctatatgctggtgccttggtgatgcttacaacctaattaaatctcatttgaccaaaatgccttggggtggacgtaagatgcctgatgcctttcatgttcaacagaatacatcagcagaccctgttgttgtgaactcccaggaatgtccaagtgctttttttgagattttttaaaaaacagtttaattgaaatataacctacacagcacaaaaattaccctttgaaagtgtgcacttcacactttcggaggctgaggcgggcggatcacctgaggtcaggagttcaagacctgcctggccaacttggcgaaaccccgtctctactaaaaatacaaaaattagccgggcatggtagcgcacgcccgtaatcccagctactcgggaggctaaggcaggagaatcgcttgaacctgggaggcggaggttgcagtgagccgagattgtgccaatgcactccagcctcggcgacagagcgagactccgtcataaaaataaaaaattgaaaaaaaaaaaagaaagaaagcatatacttcagtgttgttctggatttttttcttcaagatgcctagttaatgacaatgaaattctgtactcggatggtatctgtctttccacactgtaatgccatattcttttctcacctttttttctgtcggattcagttgcttccacagctttaatttttttcccctggagaatcaccccagttgtttttctttttggccagaagagagtagctgttttttttcttagtatgtttgctatggtggttatactgcatccccgtaatcactgggaaaagatcagtggtattcttcttgaaaatgaataagtgttatgatattttcagattagagttacaactggctgtctttttggactttgtgtggccatgttttcattgtaatgcagttctggtaacggtgatagtcagttatacagggagactcccctagcagaaaatgagagtgtgagctagggggtcccttggggaacccggggcaataatgcccttctctgcccttaatccttacagtgggccgggcacggtggcttacgcctgtaataccagcactttgggaggccgaggcgggcggatcacgaggtcaggagatcgagaccatcttggctaatacggtgaaaccccgtctccactaaaaatacaaaaaattagccgggcgtggtggtgggcgcctgtagtcccagctactcgggaggctgaggcaggagaatggcgtgaacccaggaggcggagcttgcagtgagccgagattgcaccactgcactccagcctgggcgacagaatgagactccgtctcaaaaaaaaaaaaaaaagaaaaaaatctttacagtggattacataacaattccagtgaaatgaaattacttcaaacagttccttgagaatgttggagggatttgacatgtaattcctttggacatataccatgtaacacttttccaactaattgctaaggaagtccagataaaatagatacattagccacacagatgtggggggagatgtccacagggagagagaaggtgctaagaggtgccatatgggaatgtggcttgggcaaagcactgatgccatcaacttcagacttgacgtcttactcctgaggcagagcagggtgtgcctgtggagggcgtggggaggtggcccgtggggagtggactgccgctttaatcccttcagctgcctttccgctgttgttttgatttttctagagaggaacataaaaagcattcgtccggttgcgctttcctttctgtcaagaagcagtttgaagaattaacccttggtgaatttttgaaactggacagagaaagagccaagaacaaaattgtatgtattgggaataagaactgctcaaaccctgttcaatgtctttagcactaaactacctagtccctcaaagggactctgtgttttcctcaggaagcattttttttttttttctgagatagagtttcactcttgttgcccaggctggagtgcaatggtgcaatcttggctcactgcaacctctgcctctcgggttcaagtgattctcctgcctcagcctcccaagtaactgggattacagggaagtgccaccacacccagctaatttttgtatttttagtagagatggggtttcaccacattgcccaggctggtcttgaactcctgacctcgtgattcgcccaccttggcctcccaaagtgctgggattacaggcgtgaaccaccacgcctggcttttttttttttgttctgagacacagtttcactctgttacccaggctggagtagggtggcctgatctcggatcactgcaacctccgcctcctgggctcaagtgatttgcctgcttcagcctcccaagtagccgagattacaggcatgtgccaccacacccaggtaatttttgtatttttggtagagacgaggtttcaccatgttggccaggctggttttgaactcctgacctcaggtgatccacccgcctcagcctcccaaagtgctgagattataggtgtgagccaccacacctggcctcaggaagtatttttatttttaaatttatttatttatttgagatggagtcttgctctgtcgcccaggctagagtgcagcgacgggatctcggctcactgcaagctccgccccccaggttcaagccattctcctgcctcagcctcccgagtagctgggactacaggcgcccgccaccacacccggctaatttttttgtatttttagtagagacgggttttcaccgtgttagccaggagggtcttgatctcctgacctcgtgatctgcctgcctcggcctcccaaagtgctgggattacaggtgtgagccaccacacccggctatttttatttttttgagacagggactcactctgtcacctgggctgcagtgcagtggtacaccatagctcactgcagcctcgaactcctgagctcaagtgatcctcccacctcatcctcacaagtaattgggactacaggtgcaccccaccatgcccacctaatttatttatttatttatttatttattttcatagagatgagggttccctgtgttgtccaggctggtcttgaactcctgagctcacgggatccttttgcctgggcctcccaaagtgctgagattacaggcatgagccaccgtgcccagctaggaatcatttttaaagcccctaggatgtctgtgtgattttaaagctcctggagtgtggccggtataagtatataccggtataagtaaatcccacattttgtgtcagtatttactagaaacttagtcatttatctgaagttgaaatgtaactgggctttatttatttatttatttatttatttatttttaatttttttttttgagacgagtctcactttgtcacccaggctggagtgcagtggcacgatctcggctcactgcaacctctgcctcccggggtcaagcgattctcctgccttagcctcccgagtagctgggactacaggcacgcaccaccatgcctggctaatttttgtatttttagtagacggggtttcaccatgctggccaagctggtctcaaactcctgaccttgtgatctgcccgctttagcctcccagagtgctgggattacaggcatgagccaccatgcgtggtctttttaaaattttttgattttttttttttttgagacagagccttgctctgtcgcccaggctggagtgcagtggcacgatctcagctcactacaagctccgcctcccgggttcacgccattcttctgcctcagcctcctgagtagctgggactacaggtgcccaccaccacgcctggctaattttttttggtatttttattagagacaaggtttcatcatgttggccaggctggtctcaaactcctgacctcaagtgatctgcctgcctcggcctcccaaagcgctgagattacaggtgtgatctactgcgccaggcctgggcgtcatatattcttatttgctaagtctggcagccccacacagaataagtactgggggattccatatccttgtagcaaagccctgggtggagagtcaggagatgttgtagttctgtctctgccacttgcagactttgagtttaagccagtcgtgctcatgctttccttgctaaatagaggttagaccccctatcccatggtttctcaggttgcttttcagcttgaaaattgtattcctttgtagagatcagcgtaaaataattctgtccttatatgtggctttattttaatttgagacagagtgtcactcagtcgcccaggctggagtgtggtggtgcgatcttggctcactgcgacctccacctcccaggttcaagcgattctcgtgcctcaggctcccaagtagctgagattataggtgtgtgccaccaggcccagctaacttttgtatttttagtagagacagggttttgccatgttggctaagctggtctcgaactcctggcctcaagtgatctgcccgccttggcatcccaaagtgctgggattacaggtgtgaaccaccacacctggcctcaatatagtggcttttaagtgctaaggactgagattgtgttttgtcaggaagaggccagttgtgggtgaagcatgctgtgagagagcttgtcacctggttgaggttgtgggagctgcagcgtgggaactggaaagtgggctggggatcatctttttccaggtcaggggtcagccagcttttctgcagcgtgccatagaccatctcttagccctcgtgggtcagagtctctgttgcatattgtcttttgttgtttttcacaaccttttagaaacataaaaagcattcttagcccgtgggctggacaaaaaaaggccatgacgggctgtatggatttggcccagcaggcccttgcttgccaagccctgttttagacaaggagcagcttgtgtgcctggaaccatcatgggcacaggggaggagcagagtggatgtggaggtgtgagctggaaaccaggtcccagagcgctgagaaagacagagggtttttgcccttgcaagtagagcaactgaaatctgacaccatccagttccagaaagccctgaagtgctggtggacgctgcggggtgctccgctctagggttacagggatgaagatgcagtctggtagggggagtccactcacctgttggaagatgtgattaagaaaagtagactttcagggccgggcatggtggctcacgcctgtaatcccagcactttgggaggccgaggcgggtggatcacgaggtcaggagatcgagaccatcctggctaacatggtgaaaccccgtctttactaaaaatacaaaaaattagctgggcgtggtggcgggcgcctgtagtcccagctactcgggaggctgaggcaggagaatggcgtgaacctgggaggtggagcttgctgtgagccgagatcgcgccactgcactccagcctgggcgacagagcgagactccgtctcaaaaaaaaaaaaaaaagtaggctttcatgatgtgtgagctgaaggcgcagtaggcagaagtagaggcctcagtccctgcaggagacccctcggtctctatctcctgatagtcagacccagccacactggaaagaggggagacattacagcctgcgagaaaagtagggagatttaaaaactgcttggcttttattttgaactgttttttttgtttgtttgttttccccaattcagaatacagaatacttttatggatttgtttttattactttaattttgaaacaatataatcttttttttgttgtttttttgagacagggtcttactctgtcacccaggctgagtgcagtggtgtgatcttggctcacctcagcctcgaccccctgggctcaaatgattctcccacctcagcttcccaagtagctgggaccacaggtgcgtgtgttgcgctatacaaatcctgaagacaaggatgctgttgctggtgatgctggggattcccaagatcccagatttgatggcaggatgcccctgtctgctgccttgccagggtgccaggagggcgctgctgtggaagctgaggcccggccatccagggcgatgcattgggcgctgattcttgttcctgctgctgcctcggtgcttagcttttgaaacaatgaaataaattagaaccagtgtgaaaatcgatcagggaataaatttaatgtggaaataaactgaacaacttagttcttcataagagtttacttggtaaatacttgtgatgaggacaaaacgaagcactagaaggagaggcgagttgtagacctgggtggcaggagtgttttgtttgttttctttggcagggtcttgctctgttgctcaggctggagtacagtggcacaatcacagctcactatagcctcgacctcctggactcaagcaatcctcctgcctcagcctcccagtagctgggactacaggcgcatgccaccatgcctggctaattttaaatttttttttttctcttttttgagatggaatctcactctgtcgcccaggctggagtgcagtggcgtgatctcggctgacggcaagctccgcctcccaggttcactccattcgcctgcctcagcctcccaagtagctgggactacaggcgctgggattacaaacccaaacccaaagtgctgggattacaggcgtgagccactgcacccggcctgttttgtctttcaatagcaagagttgtgtttgcttcgcccctacctttagtggaaaaatgtataaaatggagatattgacctccacattggggtggttaaattatagcatgtatgcaaaggagcttcgctaatttaaggcttttttgaaagagaagaaactgaataatccatgtgtgtatatatattttaaaagccatggtcatctttccatatcagtaaagctgaggctccctgggactgcagagttgtccatcacagtccattataagtgcgctgctgggccaggtgcagtggcttgtgcctgaatcccagcactttgggaggccaaggcaggaggattcattgagcccaggagttttgaggcgagcctgggcaatgtggccagacctcatctcttcaaaaaatacacaaaaaattagccaggcatggtggcacgtgcctgtagtctcagctactcaggaggctgaggtgggaggatcactttgagccttgcaggtcaaagctgcagtaagccatgatcttgccactgcattccagcctggatgacagagcgagaccctgtctctaaaaaaaaaaaaaaccaaacggtgcactgttttcttttttcttatcaatttattatttttaaattaaattttcttttaataatttataaattataaatttatattaaaaaatgacaaatttttattacttatacatgaggtaaaacttaggatatataaagtacatattgaaaagtaattttttggctggcacagtggctcacacctgtaatcccagcactttgggaggccgtggcgggcagatcacatgagatcatgagttcgagaccaacctgaccaacatggagagaccccatctctactaaaaatacaaaattagccggggtggtggcgcatgcctgtaatcccagctactcgggaggctgaggcaggagaatctcttgaacccgggaggcagaggttgcggtgagccaagatcgtgcctttgcacaccagcctaggcaacaagagcgaaagtccgtctcaaaaaaaaagtaattttttttaagttaacctctgtcagcaaacaaatttaacccaataaaggtctttgttttttaatgtagtagaggagttagggtttataaaaaatatggtagggaagggggtccctggatttgctaatgtgattgtcatttgccccttaggagagagctctgttagcagaatgaaaaaattggaagccagattcagggagggactggaagcaaaagaatttctgttcgaggaagagcctgatgtttgccagggtctgtttaactggacatgaagaggaaggctctggactttcctccaggagtttcaggagaaaggtagggcagtggttaagagcagagctctgcctagactagctggggtgcctagactagctggggtgcccagactagctggggtgcctagactagctgggtactttgagtggctccttcagcctggacctcggtttcctcacctgtatagtagagatatgggagcacccagcgcaggatcactgtgaacataaatcagttaatggaggaagcaggtagagtggtgctgggtgcataccaagcactccgtcagtgtttcctgttattcgatgattaggaggcagcttaaactagagggagttgagctgaatcaggatgtttgtcccaggtagctgggaatctgcctagcccagtgcccagtttatttaggtgctctctcagtgttccctgattgttttttcctttgtcatcttatctacaggatgtgactgggaagctctggtttcagtgtcatgtgtctattctttatttccaggcaaaggaaaccaacaataagaagaaagaatttgaggaaactgcgaagaaagtgcgccgtgccatcgagcagctggctgccatggattga

SEQ ID NO: 2482 - DNA, 1851 bp, Homo sapiens
  SIMILAR (1)..(501): 521254mologous to Mus musculus putative,accession number AK011989,Smith-Waterman Score=452.
atggagtccgtactccggacccatcggcccacctggcaagactgccaacagctccttttaactctctttacctctgaggagagggagcgtatccgaaaagaggccagaaagcacttccttgcatcagccggtaggcctgaggaggaaggtagagacctccttgaggaggcctttccctctacccggcctaactgggacccaaattcctcaagtggaaggacagctttggacaattttcaccggtatctcctcatgggtattaagggagcctctcggaaacccataaacttgtctaaggcgactgaagtcgtccaggttcccgaagagtcactaggagcgtttttagagtgcctccaggaggcttaccggatttacaccccttttgacccagcgtcccctgaaaatagccgtgctcttaatttggcatttgtggctcaggcagccccagatgtgaggagaaaactccaaaaactggagggatttgctgggataaatatcagagtgaaactgcagaccttcgcggtgagtgttacagctcttaaggcagcgcgtctggagttgttcattgcgcgcctggagttgttcgttcctcccagtgggcttgtggtctcgctggcttcaggagtgaagctgcagacctttgcggtgagtgttatagctcataaaagcagtgtggacccaaagagtgaacagtagcaagatttattgcaaagagtgaaagaacaaagcttccacagtgtggaaggggaccccactagatacaaaggttctccacgtccccaccagactcaggagcccagctggcttcacctagtggatcccgcaccagagctgcaggtggagctgcctgccagtcctggtgccgtgcgcctgcactcctcagcccttgggtggtcgatgggactgggcgccgtggagcagggggtggcggtcgtcggggaggctctggccgcacaggagctcatggagtgggtgggaggctcaggcatggcgggctgcaggtcccgagccctgccccgcgggaaggcagctaaggcccggccaacaccctttggtcacatgaataaaagtcaagccctttctttgctcattgctcagcctctgggtattaatctgctgagctggtggccacctaaatacaatcgtcctgttcccctcattggtctctccggtctcctgattccagccacattttgcctgggggagacccgtgactccaggcatgctatcaggacaacttcaacccgaggggagatcagctctcccgcaacctggtgccgctctctgacagcacaacagaacctaaggggctacaggatgattcaaggaacagtgtgctacaggacctcgggtatacctagtaatatgacccaggatgcaagagtggctcgcaaatttggaagaaacctacaccccaaccaacccaggacacaaaagtggcttgctaagtcagttaagaaacgaaaccgggagtggggagagtggtcctctttcagtattggatggccggccgaaggaactatagatggggaaataattggctgtgtatttaaggtggtgactgaggtcggaggacagcctggacttccaggccaatttccttatattgactcacggctgaatataattcaaactcgacctgtatggctagagccctgcctggcagcttattgcagaacactggtagctcgagctgagccaaaagtgaaagagaattcagctttactgtcagctacaaacagaaaggaaaaaccacaagaaaaaccagttttgcaggaaccaccagcggaaatagaaacccctctcccctatgcaccaatctatccacctttaccaagcctggcccaatag

SEQ ID NO: 2483 - DNA, 533 bp, Homo sapiens; identical to SEQ ID NO: 935
  SIMILAR (322)..(456): 911254mologous to Homo sapiens BCL7C,accession number AJ223980,Smith-Waterman Score=225.

SEQ ID NO: 2484 - DNA, 870 bp, Homo sapiens
  SIMILAR (259)..(783): 451254mologous to Homo sapiens BCL7C,accession number AJ223980,Smith-Waterman Score=269.
ctcccggttcgacgatttcgtggcgcccgggcctggcgcggagcctgagcccgccggacgggaggcggccccgccgcgggctcggccccggccccagccccgccagcatggccggccggactgtacgggccgagacccggagccgggccaaggatgacatcaagaaggtgatggcgaccatcgagaaggtccggagatgggagaagcgatgggtgactgtggccgccactccctttcggatcctcaattgggttgcaagtggtggatccccaggaggaggagcgaagcgcgggcaggtggcggggcagagagatcccgtgggccgggaacgtcggggcaggggcgccagtcccgatgggggtgggccctcttcatcctgctggatcttaaatgatgagaacagcaaccagaggtttccacttcggaagggttccttgcaaaggggcacagaggcccagtcctgggggcacccccaaagcccaaccggccttgtgtcaccttgccggaccccccagaagggggtccctgcacgagggctcagccccccacgggttgggccaagaagagagatcccccgggggcataactgtttggcagcaccgacgaaccccccaatgctgaccaaggaggagcctgttccagaactgctggaagctgaggcccccgaagcttagccctgtctttgagccagtgccacctgtccctgaggcagcccagggtgacacagaggacttcgggagtgccccccccactcaagcgcatctgcccaaatgcccctgacccctgagaagccggcctgcctgtcctgttcgcccaggggcccctttgcgctttttacaaataaagacccttttgtaaaaaaaaaaaaaa

SEQ ID NO: 2485 - DNA, 442 bp, Homo sapiens
  SIMILAR (1)..(87): 961254mologous to Homo sapiens Human nucleic acid-binding protein, NuABP-24,accession number AAB21020,Smith-Waterman Score= 150.
gattgtgtcagaaaacagctcaaaaaagagaggcccatcatcctggatccggccgaccccaccctcaacgtggcagaagggtactggttgggtctggggatctatggcatccaagacagtgacactctcatcctctcgaagaagaaaggagaggctctgtttccagccagttagttttctctgggagacttctctgtacatttctgccatgtactccagaactcatcctgtcaatcactctgtcccattgtctactgggaaggtcccaggtcttcaccagttttacaatgagttatcccaggccagacgtggtagctcacacctgtaatcccagaactttgggaggccgaggtgggaggagcgcttgagccgaggagttcaagaccagcctgggtatcatagggagaccccgtctctacaaaataaaaaataattcactggg

SEQ ID NO: 2486 - DNA, 5501 bp, Homo sapiens
  SIMILAR (1041)..(1244): 971254mologous to Homo sapiens hepatic nuclear factor 1- alpha,accession number U72618,Smith-Waterman Score=353.
  misc_feature (1)...(5501): n = a,t,c or g
atggtttctaaactgagccagctgcagacggagctcctggcggccctgctcgagtcagggctgagcaaagaggcactgatccaggcactgggtgagccggggccctacctcctggctggagaaggccccctggacaagggggagtcctgcggcggcggtcgaggggagctggctgagctgcccaatgggctgggggagactcggggctccgaggacgagacggacgacgatggggaagacttcacgccacccatcctcaaagagctggagaacctcagccctgaggaggcggcccaccagaaagccgtggtggagacccttctgcagtaaggagccctgccccgtccccgctcccaggagagcctagaggggcccccctcagctcctaacgagccccccttctgagttgagtccccatgaccttcagcctttagcctagttgctgggaagggggacagggcccatgagagcccaggggtccttgcttggaggtttgagcctccagcccctgaactgctcctctgcagagtcccaaatcccatgagcccaggcctttagcccagtccttgggcnagggggacatttcccagggggtccaagatgggagaaaaagcagtgaattcacaactcaaatgccncacccacccatccatccatccgtccatccacccattcatccattcatccattcacccatccatccatccacatatcttcatctgtgttgtgtgtctgtgtatccatgtttctaaacctttatctgttccagtgtctgtatccataggcctgtgtccacgtttgtcatgtgtgtgcgtcnacaagtctctgtcctcatgaccatgtgtctgtgtccctgtgtcctggcataaatgaccatacctcaccgtccctgagtctatgtgtaggcccctgggctccataactgctttcatgcacagtccccaccctcagagttgacaaggttccagcacccaggaccgcagccccacctatggggagagacagcccttgctgagcagatcccgtccttgccctctcccagggaggacccgtggcgtgtggcgaagatggtcaagtcctacctgcagcagcacaacatcccacagcgggaggtggtcgataccactggcctcaaccagtcccacctgtcccaacacctcaacaagggcactcccatgaagacgcagaagcgggccgccctgtacacctggtacgtccgcaagcagcgagaggtggcgcagcgtaagtaatgaccctaccccgcatcttccctgggagggcccaggactctcccctaactcataggtgggggctggaagcttcaccatccccattacacagacaggtagatggaaaggaagtcagtgggattcaacctgcatttattacctattctgcgccaggcactctgtgggacgggagtanacttggtcctgaacatccaaagatgaatgaaatgggtccctgctttctttttctttttttagatancgtgactctggaaaaatatgtaagctctctgagcctcagcttcttcatctgtacaatggggatagtaaatgtgccaaatcagaacaaatgctaatgcttacctgcagtcttgtactgagaaggatggtgagatcatatcttgggttggtaggaaagcattcagggattgattagtgatgtttgccttgaacacaggttaagaaagtgatggcatgtgtgctgtgtgtttgtcatcagtagattagatgatttctaagttctagctgtaagctcctctggttcagcgccatggcaatgagaaagaatcaagggcaaggtcaggggaatggacgagggaaggtgagagtggccagtaccccactcacggctttctgtgcctgcagagttcacccatgcagggcagggagggctgattgaagagcccacaggtgatgagctaccaaccaagaaggggcggaggaaccgtttcaagtggggcccagcatcccagcagatcctgttccaggcctatgagaggcagaagaaccctagcaaggaggagcgagaggtacaacggcgggcgggaaacagtgctggtttggtctgggctgcggcaaggccaggggaaggggaaggtgactctaggtcctgtaaaaggctgtccagttgccgagaactcctgatattggcttagcctggcccagaaaattgagaatacttgaacctaagcccattcctcgcagcccccctgcaccntggacaccaagcaaccccttccatggatgctcacccaattcgattctctctacaatcctatggctcttttgctcactttatgaatggagagactgaggtcagacagactgtcaattgcccaaggtcacacagcagacctggcattggaacccagatctgccagcctcaaaccctccggcagagntcagcttctcagaaccctccccttcatgcccaggacagggttcctctgagcctggcctggaggctcatgggtggctatttctgcagggcggaatgcatccagagaggggtgtccccatcacaggcacaggggctgggctccaacctcgtcacggaggtgcgtgtctacaactggtttgccaaccggcgcaaagaagaagccttccggcacaagctggccatggacacgtacagcgggccccccccagggccaggcccgggacctgcgctgcccgctcacagctcccctggcctgcctccacctgccctctcccccagtaaggtccacggtaagtggtatgtggggacaagggacacgtgggaaggtgggagggttggggaggactgtcccattgacagcagtcacctaaacctctttgcacgtcagtttggttccattcngcagctgacccagggattggcaaaaggtagaaacaaaggcagatttgctggctgcataaaggcagacaggcagatggcctaagcaaaccaatggagtttgaagtgctgagggctgtggaggcaggggagggcagggaagtggggtgctgaggcaggacactgcttccctctccaggtgtgcgctatggacagcctgcgaccagtgagactgcagaagtaccctcaagcagcggcggtcccttagtgacagtgtctacacccctccaccaagtgtcccccacgggcctggagcccagccacagcctgctgagtacagaagccaagctggtgagtgtccttgcttgtaaggaaaacccaacctcatctttccttggcagggagattctggagcagtccctagggaggccctgtggggaccccggccccccggacacagcttggcttcccctcgtaggtctcagcagctgggggccccctcccccctgtcagcaccctgacagcactgcacagcttggagcagacatccccaggcctcaaccagcagccccagaacctcatcatggcctcacttcctggggtcatgaccatcgggcctggtgagcctgcctccctgggtcctacgttcaccaacacaggtgcctccaccctggtcatcggtaagctggtggggatgggtgggcacctgggtgggaggctcatggggcaaccgcanaatccaggagctggaaaagccactgggactcattcattcattcattcattcatacaacatgtntaggagaggggagcagagaactgaccccatggcctttgcactgctgtggtaccccagggctccagggaaccgcagtttgacaacttttgaacaagtcaccgcttgcttttcccattagcttagacaaagagctaaaggctcagagagggggaatgacttgccagagccacttaaattagtggcaggtcccagtggagggctgtttcctgaccaccttgccccttcttccaaaccacgggctctgggaaggagaggtggtgcccttgggaggtcttgggcaggggtgggatataactggggggcccagctgattccctccccttccactccaggcctggcctccacgcaggcacagagtgtgccggtcatcaacagcatgggcagcagcctgaccaccctgcagcccgtccagttctcccagccgctgcacccctcctaccagcagccgctcatgccacctgtgcagagccatgtgacccagaaccccttcatggccaccatggctcagctgcagagcccccacggtgagcaccctgtgccccacacagcaggagatgatgatagaggttggctgtcaatggatgcaggggaaaggggtgcctggcaggcattgcagtctgcatgtgtctctgggacaagtgtgtttccgtgattgagggtgtctgcaggccagtgtgttcccatgtgaatgcacgtatctgtgtgtgtgcacgactgcttgtgtgagcagatccctagtgcgtgtctgggtgtgtatcggttgtgcatgcatttgtgtgcatgcctgtgtttctctgaaactcttagggccatatgaatttctaaaatctattcaganccagttttgaaaatcagccttggatctccaactgctgcccagtctggctgttcagcaggccccatgcccccctttccccagtcttgaggcctgggactagggctgtcaggcacgtttgccacgtctgcccctctctcccctgcggccagccctctacagccacaagcccgaggtggcccagtacacccacacgggcctgctcccgcagactatgctcatcaccgacaccaccaacctgagcgccctggccagcctcacgcccaccaagcaggtaaggtccaggcctgctggccctccctcggcctgtgacagagcccctcacccccacatcccccgggctcaggaggctgctctgctcccccaggtcttcacctcagacactgaggcctccagtgagtccgggcttcacacgccggcatctcaggccaccaccctccacgtccccagccaggaccctgccggcatccagcacctgcagccggcccaccggctcagcgccagccccacaggtgagaggccctggctccaccccctcccttactgtccctgcccccttccatgttggtcccaccccttctgttgctgtccgtcactgtggggctgtgcatgcagcaggcctagggctgctgtgaggaagcactggcaggcgtggaagggtggggtggcttccatgaantccagtgttcacagtaagatgtactcaggccagtccatgggcggccgtggaccctggctgggaggctccctttgttaagaaccgagggtagaggtgtgactttggggttcctgttatgtgctgtgatccaggaggtgtggccctgcctccccatcctgagtacccctagggacaggcaggtggggtgggtgtgggtgcctggtgggtggctagcagccttgtttgcctctgcagtgtcctccagcagcctggtgctgtaccagagctcagactccagcaatggccagagccacctgctgccatccaaccacagcgtcatcgagaccttcatctccacccagatggcctcttcctcccagtaa

SEQ ID NO: 2487 - DNA, 2309 bp, Homo sapiens
  SIMILAR (197)..(1696): 1001254mologous to Homo sapiens Hepatocyte nuclear factor 1,accession number X71346,Smith-Waterman Score=2599.
ggggccctgattcacgggccgctggggcagggttgggggttgggggtgcccacagggttggctagtggggttttgggggggcagtgggtgcaaggagtttggtttgtgtctgccggccggcaggcaaacgcaaccacgcggtgggggaggcggctagcgtggtggacggcccgcgtggccctgtggcagccgagccatggtttctaaactgagccagctgcagacggagctcctggcggccctgctcgagtcagggctgagcaaagaggcactgatccaggcactgggtgagccggggccctacctcctggctggagaaggccccctggacaagggggagtcctgcggcggcggtcgaggggagctggctgagctgcccaatgggctgggggagactcggggctccgaggacgagacggacgacgatggggaagacttcacgccacccatcctcaaagagctggagaacctcagccctgaggaggcggcccaccagaaagccgtggtggagacccttctgcaggaggacccgtggcgtgtggcgaagatggtcaagtcctacctgcagcagcacaacatcccacagcgggaggtggtcgataccactggcctcaaccagtcccacctgtcccaacacctcaacaagggcactcccatgaagacgcagaagcgggccgccctgtacacctggtacgtccgcaagcagcgagaggtggcgcagcagttcacccatgcagggcagggagggctgattgaagagcccacaggtgatgagctaccaaccaagaaggggcggaggaaccgtttcaagtggggcccagcatcccagcagatcctgttccaggcctatgagaggcagaagaaccctagcaaggaggagcgagagacgctagtggaggagtgcaatagggcggaatgcatccagagaggggtgtccccatcacaggcacaggggctgggctccaacctcgtcacggaggtgcgtgtctacaactggtttgccaaccggcgcaaagaagaagccttccggcacaagctggccatggacacgtacagcgggccccccccagggccaggcccgggacctgcgctgcccgctcacagctcccctggcctgcctccacctgccctctcccccagtaaggtccacggtgtgcgctatggacagcctgcgaccagtgagactgcagaagtaccctcaagcagcggcggtcccttagtgacagtgtctacacccctccaccaagtgtcccccacgggcctggagcccagccacagcctgctgagtacagaagccaagctggtctcagcagctgggggccccctcccccctgtcagcaccctgacagcactgcacagcttggagcagacatccccaggcctcaaccagcagccccagaacctcatcatggcctcacttcctggggtcatgaccatcgggcctggtgagcctgcctccctgggtcctacgttcaccaacacaggtgcctccaccctggtcatcggcctggcctccacgcaggcacagagtgtgccggtcatcaacagcatgggcagcagcctgaccaccctgcagcccgtccagttctcccagccgctgcacccctcctaccagcagccgctcatgccacctgtgcagagccatgtgacccagagccccttcatggccaccatggctcagctgcagagcccccacggtgagcaccctgtgccccacacagcaggagatgatgatagaggttggctgtcaatggatgcaggggaaaggggtgcctggcaggcattgcagtctgcatgtgtctctgggacaagtgtttttccgtgattgagggtgtctgcaggccagtgtgttcccatgtgaatgcacgtatctgtgtgtgtgcacgactgcttgtgtgagcagatccctagtcgtgtctgggtgtgtatcggttgtgcatgcatttgtgtgcatcctgtgtttctctgaaactcttagggccatatgaatttctaaaatctattcagattttagaaaggtaatctggggccaggcgtggtggctcatgcctgtaatcccagcactttggaaggccgaggtgggcagatcacttgaggtcaggagttcaagaccagcctggccaacacggtgaaaccccgtctctactaaaagtacaaaaattagccaggcgtggagcacgtgcctgtagtcccagctacttgggaggctgaggcagaatcgcttgaacctgggaggcggaggttgcagtgagctgagatttggccactgcactgcactccagcctgggcaacagagtgagtactctgcc

SEQ ID NO: 2488 - DNA, 2983 bp, Homo sapiens
  SIMILAR (992)..(1444): 991254mologous to Homo sapiens Hepatocyte nuclear factor 1,accession number X71346,Smith-Waterman Score=782.
gtggggttttgggggggcagtgggtgcaaggagtttggtttgtgtctgccggccggcaggcaaacgcaaccacgcggtgggggaggcggctagcgtggtggacggcccgcgtggccctgtggcagccgagccatggtttctaaactgagccagctgcagacggagctcctggcggccctgctcgagtcagggctgagcaaagaggcactgatccaggcactgggtgagccggggccctacctcctggctggagaaggccccctggacaagggggagtcctgcggcggcggtcgaggggagctggctgagctgcccaatgggctgggggagactcggggctccgaggacgagacggacgacgatggggaagacttcacgccacccatcctcaaagagctggagaacctcagccctgaggaggcggcccaccagaaagccgtggtggagacccttctgcaggaggacccgtggcgtgtggcgaagatggtcaagtcctacctgcagcagcacaacatcccacagcgggaggtggtcgataccactggcctcaaccagtcccacctgtcccaacacctcaacaagggcactcccatgaagacgcagaagcgggccgccctgtacacctggtacgtccgcaagcagcgagaggtggcgcagcagttcacccatgcagggcagggagggctgattgaagagcccacaggtgatgagctaccaaccaagaaggggcggaggaaccgtttcaagtggggcccagcatcccagcagatcctgttccaggcctatgagaggcagaagaaccctagcaaggaggagcgagagacgctagtggaggagtgcaatagggcggaatgcatccagagaggggtgtccccatcacaggcacaggggctgggctccaacctcgtcacggaggtgcgtgtctacaactggtttgccaaccggcgcaaagaagaagccttccggcacaagctggccatggacacgtacagcgggcccccccccagggccaggcccgggacctgcgctgcccgctcacagctcccctggcctgcctccacctgccctctcccccagtaaggtccacggtgtgcgctatggacagcctgcgaccagtgagactgcagaagtaccctcaagcagcggcggtcccttagtgacagtgtctacacccctccaccaagtgtcccccacgggcctggagcccagccacagcctgctgagtacagaagccaagctggtctcagcagctgggggccccctcccccctgtcagcaccctgacagcactgcacagcttggagcagacatccccaggcctcaaccagcagccccagaacctcatcatggcctcacttcctggggtcatgaccatcgggcctggtgagcctgcctccctgggtcctacgttcaccaacacaggtgcctccaccctggtcatcggtaagctggtggggatgggtgggcacctgggtgggaggctcatggggcaaccgcagaatccaggagctggaagagccactgggactcattcattcattcattcattcatacaacatgtatttatccagtgcctactctggaccagtcactgtgctacatcagtgatacctgggtgaaccaaacagaccaaaatctcagcaactcaagcagggaggcaggcactaagcataatacatcaattctgtggtacctcagaaggtgaagggtctatgggcaaattacagcagggtaagggagactgatgttttctaagtttttgttttatgaagaaaaattaagcccagaaagcccttatttgcaggtacaattatgcagaagcccagtacataagatagataaggagctgctaggagaggggagcagagaactgaccccatggcctttgcactgctgtggaaccccagggctccagggaaccgcagtttgacaacttttgaacaagtcaccgcctgcctctcccactagcctagacaaagagctaaaggctcagagagggggaatgacttgccagagccacttaaattagtggcaggtcccagtggagggctgtttcctgaccaccctgccccctcctccaaaccacgggctctgggaaggagaggtggtgttgggaggtcttaaacaggggtgggatataactggggggcccagctgattccctccccttccactccaggcctggcctccacgcaggcacagagtgtgccggtcatcaacagcatgggcagcagcctgaccacctgcagcccgtccagttctcccagccgctgcacccctcctaccagcagccgctcatgccacctgtgcagagccatgtgacccagagccccttcatggccaccatggctcagctgcagagcccccacggtgagcaccctgtgccccacacagcaggagatgatgatagaggttggctgtcaatggatgcaggggaaaggggtgcctggcaggcattgcagtctgcatgtgtctctgggacaagtgtttttccgtgattgagggtgtctgcaggccagtgtgttcccatgtgaatgcacgtatctgtgtgtgtgcacgactgcttgtgtgagcagatccctagtgcgtgtctgggtgtgtatcggttgtgcatgcatttgtgtgcatgcctgtgtttctctgaaactcttagggccatatgaatttctaaaatctattcagattttagaaaggtaatctggggccaggcgtggtggctcatgcctgtaatcccagcactttggaaggccgaggtgggcagatcacttgaggtcaggagttcaagaccagcctggccaacacggtgaaaccccgtctctactaaaagtacaaaaattagccaggcgtggagcacgtgcctgtagtcccagctacttgggaggctgaggcagaatcgcttgaacctgggaggcggaggttgcagtgagctgagatttggccactgcactgcactccagcctgggcaacagagtgagtactctgcc

SEQ ID NO: 2489 - DNA, 2402 bp, Homo sapiens
  SIMILAR (610)..(831): 1001254mologous to Homo sapiens 2'-5' oligoadenylate synthetase (p59OAS),accession number AJ225089,Smith-Waterman Score= 387.
  misc_feature (1)...(2402): n = a,t,c or g
atgatgctgaaaggaaaagctcattgtagcattttggattttggatttttggatttgcagtgttcaaccaattcggctgctgagttcatcagaagctgggaggacccgtggcgtgtggcgaagatggtcaagtcctacctgcagcagcacaacatcccacagcgggaggtggtcgataccactggcctcaaccagtcccacctgtcccaacacctcaacaagggcactcccatgaagtcgcagaagcgggccgccctgtacacctggtacgtccgcaagcagcgagaggtggcgcagccccacatcccctaccccatccctgagaacagcactggcacagaatggctgattgagctgacttggctggacccaactcacgcaaagaatgatcaggaacacagaactgattctccagtaaattatgggaaaaagaaaggaaaggagaacaagaatttgaagccaccccctgaggtctatgtgagcctgatcaaggcctgcggtggtcctggaaatttctgcccatccttcagcgagctgcagagaaatttcgtgaaacatcggccaactaagctgaagagcctcctgcgcctggtgaaacactggtaccagcagtggctgcagccccaccgggagtggaaggaagaggtgctagacgctgtgcggaccgtggaggagtttctgaggcaggagcatttccaggggaagcgtgggctggaccaggatgtgcgggtgctgaaggtagtcaaggtgggctccttcgggaatggcacggttctcaggagcaccagagaggtggagctggtggcgtttctgagctgtttccacagctttccaggaggcagccaagcatcacaaagatgttctgaggctgatatggaaaaccatgtggcaaagccaggacctgctggacctcgggctcgaggacctgaggatggagcagagagtccccgatgctcttgtcttcaccatccagaccagggggactgcggagccccatcacggtcaccattgtgcctgcctacagagccctggggccttctcttcccaactcccagccaccccctgaggtctatgtgagcctgatcaaggcctgcggtggtcctggaaatttctgcccatccttcagcgagctgcagagaaatttcgtgaaacatcggccaactaagctgaagagcctcctgcgcctggtgaaacactggtaccagcagtatgtgaaagccaggtcccccagagccaatctgccccctctctatgctcttgaacttctaaccatctatgcctgggaaatgggtactgaagaagacgagaatttcatgttggacgaaggcttcaccactgtgatggacctgctcctggagtatgaagtcatctgtatctactggaccaagtactacacactccacaatgcaatcattgaggattgtgtcagaaaacagctcaaaaaagagaggcccatcatcctggatccggccgaccccaccctcaacgtggcagaagggtacagatgggacatcgttgctcagagggcctcccagtgcctgaaacaggactgttgctatgacaacagggagaaccccatctccagctggaacgtgaagagggcacgagacatccacttgacagtggagcagaggggtttacccagatttcaacctcatcgtgaacccttatgagcccataaggaaggttaaagagaaaatccggaggaccaggggctactctggcctgcagcgtctgtccttccaggttcctggcagtgagaggcaggcttctcagcagcaggtggctccttagccaaatatgggatcttctcccacactcacatctatctgctggagaccatcccttccgaagatccaggtcttcgtgaagaatcctgatggtgggaagctacgcctatgccattcaacccccaacagcttcatcctgggtctgaagcagcagattgaagacccancaggggcttcctaaaaaggcagcagcagctggaattcccaaggccaaagtcctgcaaggactggttggggtctggggattttatggcatccaagacaagtgacactctcaatcctctcggaagaagaaaggagaggctctgtttccagccagttagttttctctgggagacttcttctgtacatttctgccatgtactccagaacttcatcctgtctatcactctgtcccattgtctactgggaaggtcccaggtcttcaccagttttacaatgagttatcccaggccagacgtggtagctcacacctgtaatcccagaactttgggaggccgaggtgggaggagcgcttgagccgaggagttcaagaccagcctgggtatcatagggagaccccgtctctacaaaataaaaaaataattcactgggaaaaaaaaaaaaaaaaaa

SEQ ID NO: 2490 - DNA, 442 bp, Homo sapiens
  SIMILAR (126)..(212): 961254mologous to Homo sapiens dTDP-D-glucose 4,6- dehydratase,accession number AJ006068,Smith-Waterman Score=160.
tttcgtctctggctgctctgttaacgtgtcccgcgagcgaggtgcgttgcaaaaggtcgcggcggaacttccctgcgcttttcagaccatactctttacggtactaggcactgctgagctgggagatgtcggcggcgtgttgggaggaaccgtggggtcttcccggcggctttgcgaagcgggtcctggtgaccggcggtgctggtttcatgtaggtaatggcgccgctagccaagcagtggctccccagaaacccctaccttttcccgcagctctgcttgccctagtgcatcacatatgattgtctctttagtggaagattatccaaactatatgatcataaatctagacaagctggattactgtgcaagcttgaagaatcttgaaaccatttctaacaaacagaactacaaatttatacagggtgacatatgtgattctc

SEQ ID NO: 2491 - DNA, 1925 bp, Homo sapiens
  SIMILAR (504)..(671): 981254mologous to Homo sapiens bA124B17.2 (DTDP-D-glucose 4,6 -dehydratase),accession number AL139318,Smith-Waterman Score=280.
tccgtaagctgcctctggctgctctgttaacgtgtcccgcgagcgaggcgcgtacgcaaaaggtcgcggcggaacttccctgcgcttttcagaccatactctttacggtactaggcactgctgagctgggagatgtcggcggcgtgttgggaggaaccggtggggtcttcccggcggctttgcgaagcgggtcctggtgaccggcggtgctggtttcatgtagtgcatcacatatgattgtctctttagtggaagattatccaaactatatgatcataaatctagacaagctggattactgtgcaagcttgaagaatcttgaaaccatttctaacaaacagaactacaaatttatacagggtgacatatgtgattctcactttgtgaaacttgctttttgaaacagagaaaatagatatagtactacattttgccgcacaaacacatgtagatctttcatttcgtacgtgcccttggagttttacccatgttaatgttttatgggcactcacgttttggtaagtgctgctcatgaagccagagtggagaagtttatttatgtcagcacagatgaagtatatggtggcagtcttgataaggaatttgatgaatcttcacccaaacaacctacaaatccttatgcatcatctaaagcagctgctgaaatgttttgtacagtcttactgggaacaatataagtttccagttgtcatcacaagaagcagtaatgtttatggaccacatcaatatccagaaaaggttattccaaaatttatatctttgctacagcacaacaggaaatgttgcattcatgggtcagggcttcaaacaagaaacttcctttatgctactgatgttgtagaagcatttctcactgtcctcaaaaaagggaaaccaggtgaaatttataacatcggaaccaattttgaaatgtcagttgtccagcttgccaaagaactaatacaactgatcaaagagaccaattcagagtctgaaatggaaaattgggttgattatgttaatgatagacccaccaatgacatgagatacccaatgaagtcagaaaaaatacatggcttacgatggagacctaaagtgccttggaaagaaggaataaagaaaacaattgaatggtacagagagaattttcacaactggaagaatgtggaaaaggcattagaaccctttccggtataatcaccatttatatagtccgagacagttgtcaaagaagaaagttatcctacctcgccaagtggtatgaaattaagtgaccaaatgaagtgcactcttttcttttggaattagattcatgactttctgtataaaattcaaatgcagaatggcctcaatctttgggagagtttcagtactggcatagaatttaaatgtcaaaattctttctgaaaccctttctcctaggaaactagggaaataataggtgtaggaagactctccctaagggtagccagggaaggaagtctcctgatttcggacaaccatgagggggtagtgggtgctaggggagaagggcaaccttcactggttttgaactcagtgcctaagaaagtctctgaaatgttcgtttttaggcaatatagggatgtcttaggccctaattcaccatttcttttttaagatctgatatgctatcattgccttaataatggaacaaaatagaagcatatctaacactttttaaattgataattttgtaaaattgattacgttgaatgctttttaagagaagtgtgtaaagtttttatattttcacaatttatcatgtttactgtttaaaatgattgtatttataaaattgtcaatatcttaatgtatttaatgtagaatattgcttttttaaaataatgtttttattttgctgtagaaaaataaaaaaaaatttgattatatatttttaatccttc

SEQ ID NO: 2492 - DNA, 1252 bp, Homo sapiens
ggcaatgataaaaacacttaatgtattctgacatgagtgctctaatagcctccttctcctcatttttaaactgcatacattactttcaaaataggtatagatattctgtcccgccttttgagctattagcctgttcctgtttccctttgtcacctaagcaaggctttttctgagaaggtagtgaatggtttcaaatgttgcatactataagaataatcattgggtaactgttgtttagaccaacacttagaaatactatatttgtgccttttcatttttaattttaatgtgtgttgatatttggagcacaaataatgaaggtgccataatagtggcttgccgaatgttacctccttgaatagtcatgtgtcattgtcttgaattggtaattggagaaccctgccatgaaatatgtggatccgtgtgtgtgtgtgtgtatgccgccgtgtgtgtcctgtgtgtttgtgtacatacctgtatttgctttggggcttgtgtgtggtatgttaccaaagagtgaatttctggaaatagaaatcagttaaatgttgaaagttcaggttagcagaaatatttcatttaaatatgctttactttggaggacaattgattaacagagggaaatgataattttcaaaaatgtgatcaatttactgcatgatgaaatgtgaaaacagtgcctttttaggacatcaattataataaaattgttttaaaatattaacaaagatctcaaaaagttgtcatgaacattattcatttatttttaaactggatctaaataagagcttagatggccaaaattagaattaataatatacccatttaaattttgttcataaatttaaaatcttaatcagaattctttataaaatgtgggtcatagatatgacccagtgttactaaaatagaacaaggattgtgaaaatccagctcaacatacttaagtatacttggcttagagccaagtatacttgaagaggtgaattattctgacttggacatgcatgctctttgatggataaaataaaaatattcaatttattcttacaaaagaaggtgggtgggtgagtgggttcgttttagtgttctcagattataaagacagctataaagacagcactttccgcacacaaagtgtattttacaaaccttttttatacaaattaatgagctctactttatttaagtgttcatggaatgatgtaaattttaggtccagttgaacaaatattgagtgcctatcatatgc

SEQ ID NO: 2493 - DNA, 1097 bp, Homo sapiens
aaatattttaaatatttctgaactttttgttgagatgtatggtcttatcttggtactgaattagaaataaagtttggaagtaaattttgtcagtacctagttcccaaacaaagctaaatacttgcacagatgaatatccccccccatgaaataccagagagaacccaaaatttacttttgctagtaaatcaattaaattgatttttatttaatgacgaaaccattcattggcagattaatgaggaccagacgcttgtccaatttagttgacacatttgcttttttattttttagaatatagtctacatctggattaaaaaaagttttaaataaatttaagacatacaacaacagtggaaaccccttccatccattcctatgttacaacacgaatagaatgtccagttggttcccatttcggttaagtcccactttcctcataataatgttattattttcactgagtggcaagctacgtaacaaactggcgaaatgccagcttataccacactggggtgggggtgggcaccggagtggcaccgaaagggatggggtgggggtgccataggactactatacagtgtaacagaaaatcattaataaagtagtaccgattaccggcagacagtgctgttttgtgcgcttatcaccattggaatcgctgaagtttcagagcaaggaggagattcgaaatacttcacacagggccaatgttacaaaaagaaatagtgcaaacaggaaaactgatgcaatcctagcaacgcctgggcctccaccggcccaaccgcatggtgcgcgggaggatacgcgccccgccttccccagcacccagctccgggctgctttcccaagtgtggcaacccagcgccgcggccctggtatggccccttctcgggccctctcctccgaaaagaacagaaaagaaaccccaggaaaggcacaggctgaatgcagggcgtcagcccagtcccattcccaccaacatagaatgcaggccccctcccaggaggttccttgggccctcccatctccggccaccattttcttgtctctcacacgtggccccctcctccacgcagccccaccgcgcctcctgc

SEQ ID NO: 2494 - DNA, 2025 bp, Homo sapiens
  SIMILAR (445)..(1368): 561254mologous to Homo sapiens transactivator,accession number M29039,Smith-Waterman Score=682.
  misc_feature (1)...(2025): n = a,t,c or g
agcggccgctcgcgatctagaactagggccagcctcggagccagcagggagctgggagctgggggaaacgacgccaggaaagctatcgcgccagagagggcgacgggggctcgggaagcctgacagggcttttgcgcacagctgccggctggctgctacccgcccgcgccagcccccgagaacgcgcgaccaggcacccagtccggtcaccgcagcggagagctcgccgctcgctgcagcgaggcccggagcggccccgcagggaccctccccagaccgcctgggccgcccggatgtgcactaaaatggaacagcccttctaccacgacgactcatacacagctacgggatacggccgggcccctggtggcctctctctacacgactacaaactcctgaaaccgagcctggcggtcaacctggccgacccctaccggagtctcaaagcgcctggggctcgcggacccggccccagagggcggcggtggcggcagctacttttcttgtcagggctcggacaccgggccgtctctcaagctcgcctcttcggagctggaaacgcctgattgtccccaacagcaaaacggcggatcacgacgacgcctacacccccccggacagtacttttacccccgcgggggtggcagcggtggaggtgcagggggcgcatggggcggcgtcaccgaggagcaggagggcttcgccgacggctttgtcaaagccctggacgatctgcacaagatgaaccacgtgacaccccccaacgtgtccctgggcgctaccggggggcccccgcatgggcccggcgtatacgtagcgcgagcccggagccaccgtcccgtttacaccaacctcagcagctactccccagcctctgcgtcctcgggaggcgccggggctgccgtcgggaccgggagctcgtacgccgacgaccaccatcagctacctcccacacgcgccgcccttcgccggtggccacccggcgcagctgggcttgggccgcggcgcctccaccttcaaggaggaaccgcagaccgtgccggaggcgcgcagccggtgacgccacgccgccggtgtcccccatcaacatggaaagaccaagagccccttcaaagttggagcccagcgggctgcggaaccggctggccggccaccaaagtgccggaaagcggaagcctgaagcgcttcgcgcgcctggaggacaaagttgaagacgctcaaggccggagaacgcggggcctgtcgaagtacccccgggcctccctccgggaagcaggttggcccaggctcaaaccagaaaggtcattgacccacgcgtcagcaacggcttgtccagcttgctgtttggggtccaggggacacgcctttttgaacgtcccctgccccctttagggacccccccttcgcttgggacgggctggccacacgcatcccacactggggtcccagggaaccaggccggtgggcaccccacccccgggaccctaggggcgccggcaaacccacactggactccggcccctccctaccctgcgccccagtcccttcccacctcgacggtttacaagcccccccttcccactttttttttgtatggttttttttcctgctggaaacaaacctcgattccatattgaaatataatatatttgtgtatttaacagggaggggaatagggtgtgcgatcgtgggcggagctggcccccccgccttggtactgcaagcccgcggggacattgggaaaggggacccccgccccctgccctcccctctctgctctcgtactgtgggaaaagaaacacgcacttagtctctaaagcagtctattttaagacgtgtttgtgtttgtgtctgtttgttctttttattcacatctatttaagtaaaaaaaaaaaattggtttttnnnnnnnnnnnnnnnnnnnnnnnngggggggccccttttaaagaacccttggggggccccagtttaccccgggatggcaacgtaaaacctctccccttatggggggccgaataaaacccg

SEQ ID NO: 2495 - DNA, 5918 bp, Homo sapiens
  SIMILAR (178)..(324): 911254mologous to Homo sapiens Nuclear transport protein clone hfb341 protein sequence,accession number AAY86214,Smith- Waterman Score=229.
attcgaagaccactagaccagcgcggtggaattcctctaaggaaaaaacctttggaagacttagtctgtaaactcgcagatataagtattaattatgtcaatgaacgaaagtcagagcaacatctaaggtttctttctactctgcttgactccttttcttcaagccgagtatttaaaatgctacttggtgatgaaaaacagagtattgtccaagccaaacctcttgaaatagccaagcttgtacaaaaaaatcctgcggtgcagtttttataccagaaactgataggttggctaaatgaagatcaaaaggaaggattttggtttcctggtggacattttgtacagtgctctccggtgctgtgacaatgatatggaaagaaaaaaagtcttggatgatctaaccaaggtggacttgaaatggaattctcttcttaagattattgaaaaggcatgtcctagttcagataaacatgctttagtaactccttggctcaaaggcgatatccttggtgagaaattggtcaacttggcagattgtctttgtaatgaggacttggaatccagggtatcttcagaatctcacttctcagaaagatggactcttctaagcttggtattatcccaacatgttaaaaatgattacttgattggagacgtatatgttgaaagaatcattgttagacttcatgaaactttattcaaaacaaagaaattatcagaagctgaaagcagtgactcatcagtgtcttttatctgtgatgtggcctataactatttcagctcagcgaaaggatgcttgctaatgccatcatctgaagatttattattaactctctttcagttatgtgctcagagcaaagaaaaaacacatttgccagattttcttatctgtaaactgaaaaatacttggctctctggtgtaaatttattggttcatcaaactgacagttcatataaagagagtaccttcctacatttgtctgctctgtggctgaagaaccaagttcaggcttcatctttggatatcaacagtctccaagtcctcttgtctgctgttgatgatttgctaaatacacttctagagagtgaagattcttatcttatgggagtttatattggaagtgtaatgccgaacgacagtgaatgggaaaagatgaggcagtctcttcctatgcagtggttacatagacctcttttagagggaagattgagtttgaattatgaatgtttcaaaacagattttaaggaacaggacataaagacacttcccagccatttgtgtacttcagcattattgagcaaaatggtcttaattgcactgagaaaggaaacagtcttagaaaataatgagcttgagaaaataattgcagaactgctttattcactgcagtggtgtgaagaattagataacccacctatttttctaattggattttgtgaaatacttcaaaaaatgaatattacgtatgataacttacgtgtacttggtaatacgtcgggccttttgcagctgttatttaacaggtccagagaacatggcacactgtggtctcttattattgctaagttgatcctttcccgaagcatttcatctgatgaagtaaaaccacattataagagaaaagaaagtttttttccactaactgaaggcaatttgcataccattcaaagtctatgtccatttttgtcaaaagaagaaaagaaagaatttagtgctcaatgtatacctgctcttttgggctggactaagaaagatctttgcagcactaatggaggttttggacatcttgccattttcaattcttgtctgcaaaccaaaagtatagatgatggagagctattacatggaatattaaaaatcataatatcctggaagaaagagcatgaagatatttttcttttcagttgtaatctatcagaagcaagtccagaggtactgggtgtaaatatagaaataatccggtttctttccctgtttctgaaatactgctcatcccctttggcagagagtgagtgggacttcatcatgtgctccatgttggcttggttggagacaacaagtgagaatcaggcattgtattctattccacttgtgcaactgtttgcctgtgtcagctgtgatttggcctgtgacctcagtgctttctttgattccacaactctggataccattggcaatcttcctgtaaatctaatcagtgaatggaaagaatttttttcccaaggcatccacagtttgcttttacctattttggtgactgttacaggagaaaacaaagatgtgtctgaaacatcctttcagaatgcaatgctgaaacccatgtgtgaaacattaacgtatatctcaaaggaacagctattgagtcacaaacttcctgcaagattagttgctgaccaaaaaacaaacttaccagaatatctccagactttgttaaatacattggccccattactcctcttcagagctaggcctgtgcaaattgctgtttatcatatgctatacaaattgatgcctgaattaccacagtatgatcaggataatctaaagtcatacggagatgaagaagaagagccagccttgtcaccaccagcagcactgatgtctcttcttagcattcaagaggacttactagaaaatgttttggggtgtattcctgttggacagatagttactattaaaccactgagtgaagacttctgttatgttctgggataccttctcacttggaaattaatactaactttcttcaaagctgcatcatcacagcttcgggctttgtattccatgtatcttcggaaaacaaagagtttgaataaattgctctatcacctgttcaggcttatgccagaaaatccaacctatgcagagacagcagttgaggtcccaaataaggaccctaaaacattctttactgaggagctccagctgagtattagagaaacaacaatgcttccataccacattccacacttggcttgttcagtctatcatatgacattaaaagacttgcctgccatggttaggttgtggtggaatagcagtgagaagcgtgttttcaatattgtggatagatttacaagcaagtatgtcagcagtgttctttcttttcaagaaatatcttctgtacaaacaagtacacaactatttaatggcatgacggttaaagctcgagctactactcgagaggtaatggctacttatactattgaggacatagttattgaacttataatacaactgccttcaaattatccactgggttcaataatagtagaaagtgggaaaagagtaggagtagctgttcagcagtggcggaactggatgctgcagttaagcacttacctcacccatcagaatggaagtattatggaaggcttagctttatggaaaaataaccgtagacaaacgttttgagggtgttgaagattgcatgatctgtttcccagtcattcacggtttcaactattcccttcccaaaaaagcctgtaagaacatgccagaaaaaattcccattcagccctgcttgtacaaatggtttacatctagcaacaaatccacttgtccactgtgtcgtgagacgtttttctgagatttttttcactggaagggatccctgaagtacatcaaacaaaggcattggatttggatccgtctgaaagtgtggatgtggggaagccagtgagcattacttttaaataggaccttctctggaaaattattttggttaatgtaataatcctaaaatcaggtttacttaactttagattgctttgtaaatgtttggaaactttcttttacaaaagaatattacatatttgagagaaaatatttctattaatggtttaatttctttgtatatttaaaaataaatatgaaaaacccctaaattacagaattggaatttgtgaaaagattgcacaactatattattgataaacccattccgtttgttgatctgtgttttagaatagtccaagtgaagcaaaacgaactgagagagctgatttacatctatagatattttaagccttatttattagttatgacaataaattagtattctgatatttgtagattattttaatgataaaaatgacactaagctattaatacggcttgtcttaagatatctggaggcatgctctgaaatcctatataaaagagtttaaactgaactttaaggtgcctccatttatcaagggttatgaaactcagaaaattaaattcttgatgctgacctttttgcttgtgggagaattatttctatatattagtgaaatttgaattgtaaacttgtcagtgaatttatcactctgagcgagtctctagagggtgagaatttgagagaaatagtaatttgattatttcattcatgaagcggagtggtagttatccttctattgagagggaagaaataaatgagtattactgaaacttaaagatcagtggaaaaaaaaaacatttaaaaatgttgtaggagactttcaattttggaagcaaactgagctattcttaccagccaaagttatactaaataagagacttgggggagcaaatgtttttcagccttcagaaatgaaagttaaggattttagcactaggtaaaattcagtataataggctgaagtggagtaagtgaaaacctgccttttgccactcttaaaaattgtgcccaaaatataaaagtgtggaactttagaacttggaataattttattgcagtcttccattacatggaaatagcatatctaatatctaggttacttgagagaccagctaatcatctctgttgcacatgtttaattggcaaaaagcaattcatgataaataaaattactgctttccatctactgggtaaaatgactattgaaatagtatgaatgtggtcagaggattatagttgagagtgaagtactatgtgtgagttatagatctctcgaattatatttatagatgcagtgtcctgcccagttttgtttgcctcctacattttactgtaaaatatttattgtcttctagccttgagcctctgagggtcagtaagtgaagtacagatagcaaaattttactacctcgttaacccttttcttaaaatattctctatctttctatgtctctttctgacatagtaatcccaaaggattgtgttactccccgtgaaagttattacttttcctttaaaaatggttttataataagactgtttaaaacctttccagtattggtacatcttggcttctggcccaaaccccaagcagaaaagaaaatggaataatggagcattgtttttccacattagtattagggcatcagatttcttggtgaaacactataattaagtagttataattaaataactgttcttcatacttagacttctaaatacatttctttaagactgtaaagtataattgtaaggcttgttaactgttttatatactaaagaaaaagctttacaagataagactgtaattcagaataccacattaaagttttatctgtacagcgttgacaactctaactaaaaggattacagcccttaaaattttagcttaaggacattttaaaattgcatgagattagaaaaattattaatttaaaacccccaaagtaaattgcaaattttaaaatttatttttgactcttttatcacatgctcccaatgtatgtacataagtgtctgtggcttaaataatatgttgttatttgatacattttttgtggtgcaagtaattaatgttattatttgattgttataccatatgtgcccattaaaattctttttaattaaaaatatttcaaatatgcagaaaaataataatataaatgcccttgtacccttcacatactattttgccatatttgcttctgatttttaaataaataaaatgttactcttttgtaaaaaaaaaaaaaa

SEQ ID NO: 2496 - DNA, 939 bp, Homo sapiens
  SIMILAR (583)..(744): 1001254mologous to Homo sapiens calcium-binding transporter,accession number AF123303,Smith-Waterman Score=280.
ttagacatccgtgagagacaatgccctccatggcccagtttccaggcagagagaagcagctctgggctgaccgccaaggctccggcccgagagggtctttaagtggagtaaccagtcttcaagaccccgctcccaagccaccgacgcgctcacgctgcagccctggacctgctgggggcctcttcctccgacccgcatgctgacagcgggactggcaactgggcagaggtcgaccccgggtccgcacagcacctcccgagacccagctcgcagctccctcacttcctgctctctggaggcgggcccggccagtgccgccgaggccagcgcggcgagctcctccccagcagcggcgggacggccacaccctgcgcgccgcgcgggctcgggtggggtctccgctcctgcgccctgcgcgccgcagccgcacccccgacggcgccccaaacgctgttgcgccgcgcgccccgcccagcccggcctcgcgctggtcccggtctcgccccgcagccctcgatctcccgtgacttcctcggccaggccgcctgcgcctctgggaccatgttgcgctggctgcgggacttcgtgctgcccaccgcggcctgccaggacgcggagcagccgacgcgctacgagaccctcttccaggcactggaccgcaatggggacggagtggtggacatcggcgagctgcaggaggggctcaggaacctgggcatccctctgggccaggacgccgaggaggtgggtcgccgccggggcgccgcctgagcgtagggagggctgcgggcgctggggacactgcgaggaccgaggagggcggcggcttgaggcgttgccaggagaggaaggaggaactgtggcgcccagcgctccggtggcttcagaaactcgggcgtggggccgcgaccggcgaccccggtaacagaagtgggtcat

SEQ ID NO: 2497 - DNA, 3380 bp, Homo sapiens
  SIMILAR (88)..(951): 901254mologous to Oryctolagus cuniculus peroxisomal Ca- dependent solute carrier,accession number AF004161,Smith-Waterman Score=1354.
cgggacgcgcgccggtattccggaacgacaccgcacccctcgatctcccgtgacttactcggccaggccgtctgtgcctctgggaccatgttgcgctggctgcgggacttcgtgctgcccaccgcggcctgccaggacgcggagcagccgacgcgctacgagaccctcttccaggcactggaccgcaatggggacggagtggtggacatcggcgagctgcaggaggggctcaagaacctgggcatccctctgggccaggacgccgaggagaaaatttttactactggagatgtcaacaaagatgggaagctggattttgaagaatttatgaagcaccttaaagaccatgagaagaaaatgaaattggcatttaagagcttagacaaaaataatgatggaaaaattgaggcttcagaaattgtccagcctctccagacactgggtctgactatttctgaacaacaagcagagttgattcttcaaagcattgatgttgatgggacaatgacagtggactggaatgaatggagagactacttcttatttaatcctgttacagacattgaggaaattatccgtttctggaaacattctacaggaattgacataggggatagcttaactattccagatgaattcacggaagacgaaaaaaaatccggacaatggtggaggcagcttttggcaggaggcattgctggtgctgtctctcgaacaagcactgcccctttggaccgtctgaaaatcatgatgcaggttcacggttcaaaatcagacaaaatgaacatatttggtggctttcgacagatggtaaaagaaggaggtatccgctcgctttggaggggaaatggtacaaacgtcatcaaaattgctcctgagacagctgttaaattctgggcatatgaacaggttatgaaaaccaggctggctgtaggcaaaactgggcagtactctggaatatatgattgtgccaagaagattttgaaacatgaaggcttgggagctttttacaaaggctatgttcccaatttattaggtatcataccttatgcaggcatagatcttgctgtgtatgagctcttgaagtcctattggctggataattttgcaaaagattctgtaaaccctggagtcatggtgttgctgggatgcggtgccttatccagcacctgtggtcagctggccagctacccattggctttggtgagaactcgcatgcaggctcaagccagtgttagaaggttccccacagctgaatatggttggcctctttcgacgaattatttccaaagaaggaataccaggactttacagaggcatcaccccaaacttcatgaaggggctccctgctgtaggcatcagttatgtggtttatgaaaatatgaagcaaactttaggagtaacccagaaatgatgttgcattttttgctttagcctgataattgaaactttcaacaatctctggagtgactttttctcctcgaattgaaacaagtctatggcaaaagaagctgcattttttttcacaaaagggaagatggtaacaatggtcacttcaaacttttgggctaaattatatgtacacagaaatgttcaaaatcatagttttaatgtgttttgaaaaggccacacaattatactttatcttttcttaataatcctgcaaatctctgccctggaatccgaaatctgaaaatgtactggcttgaacaaaatttgttttgtgtgttaggagttattaaatccatttaatctttatttcggggtgggtttacggtttatgccagttcctttatatttaaatttcttgttttatatattttgaatgtctttatagatttctttaaatttccttatagaaccattaatagaaaatcattacatttaaaatataccttacagcaaaagcatccaaataagtatagggtttatgtccttatttttctttcagctgaatacgaatgaacacagtggtggaatttctgaagggaagtgatgaaattatatttatttcagtgggcacttttccattttaccactgtaccattatttggttcctggagttatacactacgttttcagtatattactgttaaattaccaacacacggcattctatttgaaagattccgcttatcctgccattgctttgaaaagcagcaggaaacgaaatcctttgacttgtatcagcttctgcagagcatctattgtttcctttgtcctttgtttcctaccttttgaatcagattccgttttagtcaggaagacttcttgggaccattcttagtaacctgaaatttcttttttaattgcatgaagtggattgatcatgagcaaatgatgtgcttatttctccctcactgttgaatatctttgaacttgctgttttcaatatgggcagcacaaaggtgagagatacatattaatagtagtatgtattactcttatacattagatacctatatttaaatgaaaggcccaatttgtaaacatatacattcatattctctcttgccccaagttttagggaacatgttagggatatagggagacttaatttattaattaatgaggaggcatttttttattttactaaagccatttttatagtcaactatcttttcttatttgtgtgactagaacttagaaaaattatttactagttgaagttattatcagtttttaatttagttcttaaactcatttcacttctaataatttctgttataaatctccagcattttaatgaaaatctaatgatgtaataggcattttctttatttgaacctacctcttttattttctgaaccaaagagaaagatggactggtgtttgtgaaacatttttaaaaatgtagtttcatttatattagttatgtttgataaatgtctcagtatttttataatatgataagcccgggattcctacttttagggttatttgtacttttgagtaatatataaagtgacaatattaaggtacatgatcagctctttcgtatttttactcgtaaaaattatgggaaatgaataattttggcctaacaacctttgaaatttccaaaccttcctggaaaatatgaaaatattcattgttccattatggaatttaaaattgtaagggtatggaatgtggatttgtctgtacatcttgtatcttttccaaaaaatgattctgtatcttttggaaaaaagccgagagttgaagatagtatatttctggtagtactgaatatttacttacagtttctatcaaaaatatatatttgtttctaaaattacttgttttccagtttttattttttttagagaaaattcttaagtctcagtttcctaattgaaaaaaaaaaattataaataaagcaaaaattgtatcctaaa

SEQ ID NO: 2498 - DNA, 513 bp, Homo sapiens
  SIMILAR (1)..(222): 971254mologous to Homo sapiens DIF-2 protein,accession number Y14551,Smith-Waterman Score=370.
gccaaaaggcttctctttctgctgctcaccatcgtcttctgccagatcctgatgcctcaagagggtgtgccggcgcccctgcctccagaggacgcccctaacgccgcatccctggcgccaacccctgtgtcccccgtcctcgagccctttaatctgacttcggagccctcggactacgctctggacctcagcactttcctccagcaacacccggccgccttctaactgtgggggaggacgtcccggctgggatgaagtctggtggtgggtcgtaagtttaggaggtgactgcatcctccagcatctcaactccgtctgtctactgtgtgagacttcggcggaccattaggaatgagatccgtgagatccttccatcttcttgaagtcgcctttagggtggctgcgaggtagagggttgggggttggtgggctgtcacggagcgactgtcgagatcgcctagtatgttctgtgaacacaaataaaattgatttactgtcaaaaaaaaaaaaaaa

SEQ ID NO: 2499 - DNA, 1607 bp, Homo sapiens
  SIMILAR (63)..(500): 421254mologous to Homo sapiens DIF-2 protein,accession number Y14551,Smith-Waterman Score=223.
  misc_feature (1)...(1607): n = a,t,c or g
ttcccgcgtcgacccacgcgtccgacactccgctcggctcaccatgtgtcactctcgtatgctgtcacccgaccatgaccatcctgcaggccccgaccccggccccctccaccatcccgggaccccggcggggctccggtcgctgagatcttcaccttcgaccctctcccggagcccgcagcggacccatgccgggcgccccagcgcctctcgcgggcaccgaaagcgcagccgcagggttctctaccctcgagtggtccggcgccagctgccaagtcgaggaaccgaacccaagccaaaaggcttctctttctgcttgctcaccatcgtcttctgccagatcctgatggctgaagagggtgtgccggcgcccctgcctccaagaggacgcccctaaacgccgcatccctgggcgcccaccccttgtgtcccccgtcctcgagccctttaatctgacttcggagcccttggaactacgcttcttggaacttaagcactttcctccagcaacacgccggccgccttctaactgtgactccccgcactccccaaaaagaatccgaaaaaccacaaagaaacaccaggcgtacctggttgcgcgagagcgtatccccaactgggacttccgaggcaacttgaactcagaacactacagcggagacgccacccggtgcttgaggcgggaccgaggcgcacagagaccgaggcgcatagagaccgaggcacagcccagctgggggctaaggcccggtgggaaggagagcgtcgttaatttatttcctaattgccccctaaataaatatttatatgtatttaatgaacgtcctcctaaggtgatggagattgtgtaccgtaatattttatttttaactttatgccaagggtgtgagatgttcccctctgcctgtaaaatgcaaggtctccttgggtatttaattgagcctttgttgggactggtggaagcaaggacacctgtgaactgcggcaaaagtaggcagaagaaatggggaaggactcgggtgggggaggacgtccccggctgggatgaagtctggtggtgggtcgtaagtttaggaggtgactgcatcctccagcattctcaactccgtctgtctactgtgtgagacttcggcggacccattaggaatgagatccgtgagatccttccatcttcttgaagtcgcctttagggtggctgcgaggtagagggttaggggtttggtgggctgtcccggagcgactgtcgagatcccctagtatgttttgtgacaccccaataaaattgatttactgtcnnnnnnnnnnnnngggggcggccgttttaaaggatcccttggggggccccaattttacccggggggtccaggattttatttttttctttttaggggggcatttaatcgcctcgctgggaattttgggaaagaaccctttttttgggggggggacttattggcccaacctccctacagaatttaaaggctttagggaaaatataaatttttaaagggtatagggggtaaaactacctgcatatcctggctgctgaaaagttttgcttcctgggtttgttttataaaaattttttccccgggacctggggttta

SEQ ID NO: 2500 - DNA, 2349 bp, Homo sapiens
  SIMILAR (1)..(1656): 1001254mologous to Homo sapiens heparan glucosaminyl N- deacetylase/N-sulfotransferase-2,accession number AF042084,Smith- Waterman Score=2970.
atgggcttcctggcttattatgtgtccaccagccctaaggccaaggaacccttgcccctgcccttgggagactgcagcagcggtggggcagctggtcctggccctgcacggcctccagttccacctcggccccccaggcctccagagacagctcgaactgaacccgtggtccttgtgtttgtggagagtgcatactcacagctggggcaggaaattgtggccatcctggagtctagtcgttttcgttatagcactgagttggcacctggccgaggggacatgcccacattgactgataatacccatggccgctatgtcttggtcatttatgagaacctgctcaagtatgtcaacctggatgcctggagtcgggaactgctagaccggtactgcgtggagtatggtgtgggcatcattggctttttccgagcccacgagcacagcctactgagcgcccagctcaagggctttcccctttttttacactcaaacttggggctccgggactaccaagtgaatccttctgccccgctactgcatctcacacgccccagccgcctagaaccagggccactgcctggtgatgactggaccatcttccaatccaatcatagtacatatgaaccagtgcttcttgccagccttcggccagctgagcccgcagtgccaggaccagttcttcgtcgggcccggcttcccactgtggtacaggacctggggcttcatgatggcatccagcgggtgctctttggacatggcctttccttctggctccacaaacttatcttcgttgatgctgttgcatacctcactggcaagcgcctctgcctggaccttgaccgctacatcttggtagacatcgatgacatctttgtgggcaaggaagggacccgcatgaaggtggctgatgttgaggctctgttgaccacccagaacaaactcaggaccttagttcccaacttcaccttcaacttgggcttctcgggcaagttctatcatactgggacagaggaggaggatgcaggggacgacatgctgctgaagcaccgcaaagagttctggtggttcccccacatgtggagccacatgcagccacacctgttccacaatcgctccgtgctggctgaccagatgaggctcaacaaacagtttgctctggagcatgggattcccacggacctggggtatgctgtggccccccaccactcgggtgtgtaccccatccacacgcagctctatgaggcctggaaatccgtgtggggcatccaggtgaccagcactgaggagtatccccatctccgccctgcccgctaccgccgtggcttcattcacaatggcattatggtgctgccccggcagacatgtggcctcttcactcacacaatcttctataatgagtatcctggaggctctcgtgaactagaccggagcatccgaggtggagagctctttctgacagtgctgcttaatccgatcagcatctttatgacccatctgtccaattatggaaatgaccggctgggcctatacacctttgagagcttggtgcgcttcctccagtgttggacacggctgcgcctacagacccttcctcctgtcccacttgcacagaagtactttgaacttttccctcaggagcgaagccccctttggcagcaagccatcatcaccgacatctccgtgatgcaagtcgcctctggaggggcagatccgggggaccttcagtcacaagaagacccaccttcctgccctcctacccacccgcccctgctcatgctccggcttccgctccggggccgtcctgactccgactgctcaccgcccttctcccggcgccgctccccgacgcgaactgactgctttgtgtgccgccctgtatgccccttccccttcattgtcccgcctggccgcgctccatcccgcatggcagaagtgctgctcctgctcctgctcctttcgctgcccagtgctgctgccaaaatccagggctatcccagctgcccgggaccccagttgagccgggatattttgtcttctggagatggctggtgggcaggcctcagtggtcatcatagggtctgcgggggtcctggggtgcaggagccacaaaccactgtggtacacaacgctacagatgggatcaagtacatccaccaccgcttgattcacctgactcctgcggactacgacgactttgtgaatgcgatccggagtgcccgcagcgccttctgcctgacgcccatgggcatgatgcagttcaacgacatcctacagaacctcaagcgcagcaaacagaccaaggagctgtggcagcgggtctcactcgagatggccaccttctccccctga

SEQ ID NO: 2501 - DNA, 657 bp, Homo sapiens
  SIMILAR (471)..(352): 821254mologous to Mus musculus putative,accession number AK003263,Smith-Waterman Score=185.
tctctttagttctatttcacacaataatgtctacttgagcagcaatttacatttttcaaaatgattttcccattcattacttcatctgacactcacaacattctttaaggtggtattggttagcctcattttacgtacagtaactcgaaagttcagagcaatgaataaatccgtcaaagatcacacagccttcaaaaactgtaaccttttccccacttttggcggtgaaataatataccttcccaaaatgaatgaaagggcctttccctaagcaaaaaggcaggggagaatcattacttctatctcccccattcttttcctgagaaagcacccccaggagccatcggtcacctgagccctcgcggcacaatcgaggaagccctggatctcttttctgcacgcatcgtcgcggaattcattgtgcttccagcaagccatcatccccgacatctccgtgatgcaagtcgcctctggaggggcagatccgggggaccttcagtcacaagaagacccaccttcctgccctcctacccacccgcccctgctcatgctccggcttccgctccggggccgtcctgactccgactgctcaccgcccttctcccggcgccgctccccgacgcggttagctagaatgagaggtttattgggcttcag

SEQ ID NO: 2502 - DNA, 573 bp, Homo sapiens
  SIMILAR (299)..(204): 711254mologous to Mus musculus putative,accession number AK003263,Smith-Waterman Score=110.
ttttttttttttctgttcagaggattttatttcaagataaatcataacttctccccatactatgattccaaagggtgaaaaaagtgttttgcctcttctaccctccaaagagggcatggcaatgccaatgctctctaaaatgcctctgcatagttgtcagaagctatatttcagtcattgaaaatacttgtccattttcagctgaggtaaggtttgttaggaaacctctgtaacaacttattcaatttatttggaagtaaactcccagactatcccagggtctcctgaattgatctcatctactcgggcttcatgagccctcgcggcacaatcgagcaagccctggatctcttttctgcacgcatcgtcgcggaattcattctgcttccagcaagccatcatcaccgacatctccgtgatgcaagtcgcctcgcccttctcccggcgccgctccccgacgcggttagctagaatgagcaggtttattgggcttcagcacaggcttccgcgggttcccaaaccgcgccagacgaccccgcaggctgggtgtcgccatagcgcaccaagctcccg

SEQ ID NO: 2503 - DNA, 931 bp, Homo sapiens
  SIMILAR (1)..(459): 981254mologous to Homo sapiens MY18_HUMAN,accession number AC005624,Smith-Waterman Score=768.
atgacgctggaagagctcgtggcgtgcgacaacgcggcgcagaagatgcagacggtgaccgccgcggtggaggagcttttggtggccgctcagcgccaggatcgcctcacagtgggggtgtacgagtcggccaagttgatgaatgtggacccagacagcgtggtcctctgcctcttggccattgacgaggaggaggaggatgacatcgccctgcaaatccacttcacgctcatccagtccttctgctgtgacaacgacatcaacatcgtgcgggtgtcgggcatgcagcgcctggcgcagctcctgggagagccggccgagacccagggcaccaccgaggcccgagacctgcattgtctcctggtcacgaaccctcacacggacgcctggaagagccacggcttggtggaggtggccagctactgcgaagaaagccggggcaacaaccacacaacccccccaaaacaacccaacccacgaggaccatcgggggcagagtcgttggagactgaagaggaagaggaggaggagaaggggagtgagcggccgcccccagggcggagatccaggagctggcggccgccgatccgatggagaaggggggacccaggccagcaggagacaggacccccgaagctgaggccttgggatggagcagaagccggagtggcggggcacgctgccgccttccccatcacggagggtccagactgtccactcgggggtggacaattaagagaccggtttattacgaaacctggccgccgtgccaccactgttactggctgtgcaggagccaaccccaagctctgggcacatatggaggcatttcagcgggagggggtgctggctgcagcccctgaccgcctaggcggccaccgcagcccaaggtccggatcggtcaagggggcacctggtaccacacagcgag

SEQ ID NO: 2504 - DNA, 1238 bp, Homo sapiens
tttttttttttttttttttgacactattaaaggtaatgctaaggtgcatggaaggttggcattgcttatatttgtaattctgctcccaataagctccaggtttcttacctggacaatataaaacagtaaataccatgctgactgcccagttcaatacactgggctttaaacaaaaggaaaaaataaatcaggagctgtgagtcctcattctgtctgctgctttttagctgtgattcaggcaagtgactagacgcctctggatcagcctcctgtcctctacaaccagatcttttctacacagttctaaactactgcaccaccaggatttgcagagtggccaatgacagttcacaaaggcggaggtgccgtgtctgctaagcttctaagccacatggaagtgcttcagccaacaaatccatgaacattactgtggtccactttcaacacagaaaaatgactagagcttttatgaaacaaaaaagctgcttatctcaggttcagaaacccttgattccaaagaccaatacagaattaacaagtacaatcattatttccaaactttacattatactatacacctcaaattctcatcgggtctttcatctgctacacaataaaagctctcttggtctaaaggaaatggctgaggagagcggcctgtatctccaccgcccctgatggcaccatcagggcagctgcttgcaattcacgtgtggtctgaggtaaaaagcgtttcctcatgctttttatcatgccagcaaggccacgtcctaacctcgcccggttcttctttcccccagtgccaacctgcccaatgctatttaattccatgctcttcagaaaagtatacaaatggctggcaggcccaattccaccttcgctgggaatccagtcctcacaagcccaggttcctaatctgggcctatttccagctccaaatacagcggtgatgcacaagtctgtttttccagccctaacttgttcccaagcttcagaccagtcactgggtgtatccagtcacctcccaacatctccccaggggccgagaagggctgtggccttcagcccatccctgtacactctttccttaccccttccacattttctcctgtctcccccatctagaggagtcacaggagcacccacccggaaacccactccatgtcccactcctctcagtcaagtccccaagcgccatcagcgctgcctcctagcatctcactcccactctctccttt

SEQ ID NO: 2505 - DNA, 757 bp, Homo sapiens
  SIMILAR (452)..(571): 951254mologous to Homo sapiens MY18_HUMAN,accession number AC005624,Smith-Waterman Score=213.
gacccagacagcgtggtcctctgcctcttggccattgacgaggaggaggaggatgacatcgccctgcaaatccacttcacgctcatccagtccttctgctgtgacaacgacatcaccatcgtgcgggtgtcgggcatgcagcgcctggcgcagctcctgggagagccggccgagacccagggcaccaccgaggcccgagacctgcattgtctcctggtcacggtgagtcgggcctctgccctgccccgctacgcccgggcaccctgggccggtgtttgtcaacaaagtcgggctgactggtcctgcacagctcagcgctcagccacgtttggcatgtcccgtgggcagccgggctggggcctcctcacccaggaagctattttgagcctgacctgttttccccacacaggggccccgggagagggaggctccactaaaccccttcttttccctcctacagaaccctcacacggacgcctggaagagccacggcttggtggaggtggccagctactgcgaagaaagccggggcaacaaccagtgggtcccctacatctctcttcaggaacgctgaggcccttcccagcagcagaatctgttgagttgctgccacaaacaaaaaatacaataaatatttgaacccccctcccccccagcacaacccccccaaaacaacccaacccacgaggaccatcgggggcagagtcgttggagactgaagaggaagaggaggaggagaaggggagtgagcggacgc

SEQ ID NO: 2506 - DNA, 1497 bp, Homo sapiens
  SIMILAR (599)..(796): 481254mologous to Homo sapiens negative growth-regulatory protein MyD118,accession number AF090950,Smith-Waterman Score=133.
cccacgcgtccggcgtcggactaccgttggtttccgcaacttcctggattatcctcgccaaggactttgcaatatatttttccgccttttctggaaggatttcgctgcttcccgaaggtcttggacgagcgctctagctctgtgggaaggttttgggctctctggctcggattttgcaatttctccctggggactgccgtggagccgcatccactgtggattataatctgcaacatgacgctgggaagagctcgtgggcgtgcgacaacgcgggcgcagaagtaagtagccggggctgccgccgcctgaggatgcagacggtgaccgccgcggtgggagggagcttttggtgggccgctcagcgccaaggaatcgcctcacaagtgggggtgtacgaagtcggccaaagtttgatgaatgttggacccaagacaagcgtggtccttctgcctctttggccatttgacgaaggaaggaaggaaggatgacattcgccctgcaaaattccactttcacgcttcatccagtccttctgcttgtgaacaacgaacatcaaacatcgttgccgggttgtcggggccattgccaaggccttggcgcaagcttccttgggagagcccggcccgagaccccagggcacccaccgagggcccgagacctgcattgtcttcccttcctacagaacccttcacacggacgccttggaagagccacggcttggtggaggtggccagctactgcgaagaaagccggggcaacaaaccagtgggtcccctacatctctcttcaggaacgctgaggcccttcccagcagcagaatctgttgagttgctgccacaaacaaaaaatacaataaatatttgaacccccctcccccccagcacaacccccccaaaacaacccaacccacgaggaccatcgggggcagagtcgttggagactgaagaggaagaggaggaggagaaggggagtgagcggccgcccccagggcggagatcccgggagcttgcggccccccgatccgatggagaaggggggaccccaggccagtcaggagacaggaccccccgaagctgaggcccttgggatggagcagaagcccggagtggcggcggcacgctgccgcctttccccattcacggagggtccaagacttgtcccactcggggggtggagtgagactgactccaagcccccaccctcccttaggactggagctgggcttttgcattacgagagactttggttgaacttggttggtccttgatctgcacccctcgacaagaccacactttgggacttgggagctggggctgaagttgctctgtacccattgaactcccaagtttgcgaattatagagacaatctattttgttacttgcacttgttattccgaaccactgagagcgagatggggaagcatagatattctatatttttatttctactattgaagggccttgtaataaatttctaaagcctctataaaaaaaaaa

SEQ ID NO: 2507 - DNA, 682 bp, Homo sapiens
  misc_feature (1)...(682): n = a,t,c or g
ggcacgagacgtgcacccactgcctcttcccttctcgcttgggaactctagtctcgccctcgggatgcaaatgagaccccaactgctcctgagccgctgcaggtgtctccctgcaacctgcgccagctcctgcaagtgcaaagagtgcaaatgcacctccatgcaagaaagaagagctgctgctccctgaatccctgtgggctggtgcccaagtgtgccccacgggcttgcatctgcaaaagagggcatcggagaagtgccagcttgctgcgcctgatgactgggacagccctgctcccaacgtacaaatagagtgacccgtaaaatccagggatttttttgttttttgctacaatcttgaccccctttggctacattccttttttttctgtggaaatatgtggaataataattaaaacacttagacttgnnnnnnnnnnnnnnnnntataatggggcgccccttttaaagaacccttggggggcccaaatttaacccgggctgggaaggctatagcttttcccttatagggggggttttaaaaagctagtggggaattttgggaaaaaaccctttcttgtgtgggggagcatattggaccaccctcccctccgaattttaacgccccagggcaaaataaaatttttaagggggaagggggtaaaccaacccgctattcccg

SEQ ID NO: 2508 - DNA, 1118 bp, Homo sapiens
  SIMILAR (33)..(236): 411254mologous to Homo sapiens Human secreted protein, SEQ ID NO: 7871,accession number AAG03790,Smith-Waterman Score=124.
gtttccagaaacattactttttattcaaaagaaaatatagttacttttaaaatttttttttgagacagggtctcactctttcatccaggttggagtgcagtggtgtgatcatgactcacttgatctcccaggctcaggtgatccttcctctcatctaagtagctgggactgcaggtatgcatgaccacacctggctaattttttgtatttttagtaagaagatggagtctcactgtgttgctcaggctggtcttcaactcctgggcaaaagtgatcctccaccttggcctcccaaagggctggggattacaggtgtaagttgctgagtccagcctacagttacatttttaacatacaaataagctgcagttcaactttgatagatataggggaggtttgttctaagaagtggtaaagctggtcacaatttaataaaagtgacttcagttaatagcaatttgaacagtagcttagtggtcctttgagaacagtctagttgattcccctgtgtaagcaactctgtggggatgagggctcttttaaaaatgtttaagccacaagatatatgagaaggttttaaaaatctggcgctaattataaaaatgctactgacaaagtctctgagatccagtaatagagtcataatgacctctttttaatatacataaagaattagggattaaaagccactttgtgaggaaagctgtatctacattggccattaataagtttgttagagcaatttctagcataattgctatgctaaagaatttgtggccagttctaatagcattgttagtgaataaaatgtactgttatcataaactggagatatgattcaagcatgggaattaattgtaattacatacactacgtttaaatgttaagttaaaaccagcccttcaactttagtccaaacttagtttgttaaattaattaatgaattttaaggggggattttctgacttggctaattaattgaatagttatatgattgaaagttacagttttcatatctgagaatagacttgcttcagtgctaaggaggtatagcagtgtttttactaggcatatcattagtcataacttctgtagatattccattgaataaaagtatc

SEQ ID NO: 2509 - DNA, 978 bp, Homo sapiens
  SIMILAR (970)..(818): 621254mologous to Homo sapiens Human breast cancer related protein BCRB2,accession number AAW48351,Smith-Waterman Score=147.
atcctgcacccatgttatgtgactctcccaaatgtgccttacatgttgtgccatactggggctcaatatatcacattcgacattgttacatattgctgggttaaacacccaggtgatgtaactttttttttctgggactgcgtgcaggggaccttgtgacataactcaatgtccatcaccatactgatgttactctcttctcctgcctgatctctgctcacagagaaattgtgacacatcactggcctagcatctaggtgatgtgactctcctctttttttcaggctctgcatatttggggtattgtgacatatttgctgaactcaacaccctaagggatgagaagtctcctacctgtgcccttcctacaggggacattgtgacatgtctctgcattcctcatccaggagatgtgactctccttttctgcctacaccctgcctacacagaaagttgtggcatattgctgtggtcagcaaccagatgatatatttctcctgcctgggtctttattacaggaaagatgattgacatattactgggcccagcatccagatgatgtgactctcttcttctgttggtccttgcttacgagggaaactgtagcatattgctacacccaacacctagcttatgtgattcttcttttaggtttgcccttcagggaacattgtgacatattgctgggccctgcactgataatttgtgactcttctgcctgtgatttgcccacttggggcattgtgacatattgctgggtttaacactcaggtgatgtaacttttatgcctaggccttgcttacaggaggcattttgaaatgtctttgtggctgggcatggtggctcatgtctgtaatcccagcgcttggggaggccgaggtgggcagatcacaaagtcaggagttcgagaccagcctggtcaacatggtgaaaacctgtctctactaaaacaaaacaaaacaaaacaaaacataaca

SEQ ID NO: 2510 - DNA, 407 bp, Homo sapiens
  SIMILAR (62)..(382): 971254mologous to Homo sapiens salivary proline-rich protein precursor,accession number K03205,Smith-Waterman Score=570.
gctgcgagaagacgacagaagggggcacagagttgggagtgactccagagcctcctgcaagatgctgttgattctgctgtcagtggccttgctggccctgagctcagctcagaacttaaatgaagatgtcagccaggaagaatctccctccctaatagcaggaaatccacaaggaccatccccacaaggaggcaacaagccccaaggccccccacctcctccaggaaagccacaaggaccacccccacaaggaggcaacaaacctcaaggtcccccacctccaggaaagccacaaggaccacccccacaaggggacaagtcccgaagtccccgatctcctccaggaaaaccacaaggacctccacaggggcagtctcctcagtaatctaggattcaatgacaggaag

SEQ ID NO: 2511 - DNA, 1088 bp, Homo sapiens
  SIMILAR (538)..(1014): 751254mologous to Homo sapiens IMPACT,accession number AF208694,Smith-Waterman Score=613.
accgcgccttccggttcgacgataccatggcaggcggcggctgcagggcaggtccaggggccacatgttctgatggggacgcagggagcgaccagaggcagaatgaggaaattgaagcaatggcagccatttatggcgaggagtggtgtgtcattgatgactgtgccaaaatattttgtattagaattagcgacgatatagatgaccccacatggacactttgcttgcacgtgatgctgccgaatgaatacccatgtacagctccacctatctaccagttgaatgctccttggcttaaagggcaagaacgtgcggatttatcaaatagccttgaggaaatatatattcagaatatcgctgaaagtattctttacctgtgggtggagaaaataagagatgttcttatacaaaaatctcagatgacagaaccaggcccagatgtaaagaagaaaactgaagaggaagatgttgaatgtgaagatgatctcattttagcatgtcagccggaaagttcgcttaaagcattggattttgatagtcagtgaagctcggacagaagtagaagtagaagaattacctccgattgatcatggcattcctattacagaccgaagaagtacttttcaggcacacttggctccagtggtttgtcccaaacaggtgaaaatgggtctttccaaattgtatgagaataagaaaatagctagtgccacccacaacatctatgcctacagaatatattgtgaggataaacagaccttcttacaggattgtgaggatgatggggaaacagtagctggtgggcgtcttcttcatctcatggagattttgagtgtgaaagatgtcatgggggtacgggcgcgctggtatgtggggatggggctaggaccagatcgctttaaacatatcaacaactgtgtgcagaaacatactagtggaaaagaactacacaagttcactggaggagtcatctaaggctttgggaaagaacaaaaaagtaagaaaagacaagaagaggaatgaacattaatacctgaaactataggaaaggttaattgtgcctggtgggggtatacattccgggggct

SEQ ID NO: 2512 - DNA, 444 bp, Homo sapiens
  SIMILAR (134)..(280): 731254mologous to Homo sapiens Human myelin oligodendrocyte glycoprotein gene,accession number AAZ29204,Smith-Waterman Score= 163.
ttgcaattatcaattgactttatttcctttcatatggtaacaccagcagtgtatcgatatttgtaaataaaatacgtcataaaaaaatttaaccttattacctattatcagttaggttataccatcctgaataaaaaatatttgggccgggcatggtggctcacgcctgtaatcccagcactttgggagaccgaggggggcgattcacgaggtcaggagattgagaccttcccggccaacacggtgaaaccccgtctctaccaaaaatacaaaaacaaaattagccaggcgtggtggcaggcacctgcagtcccagctgcttgggaagctgaggtgggagaatggcgtgaacccaggaggcgtctgtaacagtttcctggtattttcaaccaggttctaagaacaaattgattttttgaagtggtgacatctagtcacattaaa

SEQ ID NO: 2513 - DNA, 471 bp, Homo sapiens
  misc_feature (1)...(471): n = a,t,c or g
ttgctagtattttgctgtaatgacacagttaacaaagagaaaagaaacaattctgtaaaggtttctgctttgcttttggcttcgtcaaaaactatttctacaaattttggggagaggaggtgattctgaatgtattcaagttagtggtnnnnnnnnnnnnnnnnnnnnnnnnnnnnnnnnnnnnnnnnnnnnnnnnnnnnnnnnnnnnnnnnnnnnnnnnnnnnnnnnnnnnnnnnnnnnnnnnnnnnnnnnnnnnnnnnnnnnnnnnnnnnnnnnnnnnnnnnnnnnnnnnnnnnnnnnaagggtggggtggggtgggagtccacacacctccaannnnnnnnnnnnnnnnnnnnnnnnnnnnnnnnnnnnnnnnnnnnnnnnnnnnnnnnnnnnnnnnnnnnnnnnggccngttctctnaantnaancgncttcnnntggaaacttnnttttaaaagncggccgcctcn

SEQ ID NO: 2514 - DNA, 1601 bp, Homo sapiens
  SIMILAR (1036)..(1236): 521254mologous to Homo sapiens Human secreted protein sequence encoded by gene 112 SEQ ID NO:282,accession number AAB56188,Smith-Waterman Score=120.
agtgttgtccagcctggtctcaaactcctgatcctcaagtgatcctcccacctcagcctttcaaagtgctggtaattacaggtgtgagccactctgcctgggcctaccactaacttgaatacattcagaatcacctcctctccccaaaatttgtagaaatagtttttgaggaagccaaaagcaaagcagaaacctttacagtattgtttcttttctctttgttaactgtgtcattacagcaaaatactagcagtctgcctaaacatgttcattgtacatttctcaggctatcaatgaatggaggtttttaaaaagttgaatatttgtctgaacattttatttcaaagttcaaaaaaaacagaggctgcaaaattcattttataatggctattttgtgacgataaaatgtagttcatgtttttttgtagccctgggcccaaatattctttgtaaagaaaaatcgctgcagcaaaaactgttactgtgtttattatatttgtagaagtattagaaaaatattctattttttattcagtgctgcgtaattacccatggtagccaaccctacaaaagacaggttttcacaaattgaggtggaggtgggcggttcagtatctgccactggacttgattataaactgtatttgaatatcagtggtattatcttttaagttgtcagcaagttaccaaggtattcattaaagaacttgtaatatcaaattactatttattcataacaattgatttgatgctaataataattttctttaaactctaccattcattatgtggtaactgtattgaacttactttatttggattttattttaatgtgactagatgtcaccacttcaaaaaatcaatttgttcttagaacctggttgaaaataccaggaaactgttacagacgccatttttttttttttgagacggagtcttgctctgttgcccaggctggagtgcagtggcacaatctcagctcactgcaagctccgcctcctgggttcacgccattctcccacctcagcttccccaagcagctgggacctacaggtaccctgcccaccacgcctggcctaattttgtttttgtatttttagtagagacggggtttcacccgtgttagcccaggaaggtctcaatctccctgacctcaggtgaccagcgccgcctccgcctcccaaagtgctgggattaacaggtgtgagccacccatgcccggcccaaatattttttattcaggatggtataacctaactgataataggtaataaggttaaatttttttatgacgtattttatttacaaatatcatacactgctggtgttaccatatgaaaggaaataaagtcaattgataattgcctcatttttattgcccttatttcattttccgttgttcatagtaacaggctttgtttctgacatagaaaataacacaatctctttataaactgccataaatttgttcgaatggagtttataatgtgtatcaacagataggaatttgaggcctttgtttgagaagcttttgtaggaaaagaagcaactgagctggggaatgaagaatcatggcagaaggtaaaagaaacaaaaacaaa

SEQ ID NO: 2515 - DNA, 290 bp, Homo sapiens
tttggcggattatcggaatacctctgttactggggtattcgctggtttgttctagagtgcttttggcctgcttttggcctggttccgatttttggccgcgaagcaggcgaaaaacgtcgcacttgactgtggaggcgtttcccgtctggtcatatttgtatcctggcgaaacccccaggttgcacccacgagcgcacaccagaaccgtcccagccgcaatccggtatccagaccgccaaacacccaacgggttgcgaggcgcaaacactatgcactcgcagatggataca

SEQ ID NO: 2516 - DNA, 996 bp, Homo sapiens
  SIMILAR (34)..(435): 931254mologous to Mus musculus putative,accession number AK016495,Smith-Waterman Score=654.
atggtcactgaggagcatcgtctcatatgcctggcctacatccagatcacgtatgtggaaccgtactttgatacctacgagctcaaggaccgggtgacctactttgaccgcaactatgggcttcgcacattcctgttctgcacgccgttcacgccggatgggcgcgcacacggggagctgcccgagcaacacaagcgtaagacgctggtcagcaccgaccacgccttcccctacatcaagactcgcatccgtgtgtgccaccgggaggagacggtgctgacgccagtggaggtggccatcgaggacatgcagaagaagacacgggagctggcctttgccaccgagcaggacccaccagatgctaagatgctacagatggtgcttcagggctctgtagggcccaccgtgaaccaggcacggctggtggaagtgagcttgcaagctagcaagctggacgtcacatgtgagtgcttttggcctgcttttggcctggttccgatttttggccgcgaagcaggcgaaaaacctatggcaccgccccccagtcgtgctactctttttacgtcgcacttgactgtggaggcgtttcccgtctggtcatatttgtatcctggcgaaacccccaggttgcacccacgagcgcacaccagaaccgtcccagccgcaatccggtatccagaccgccaaacacccaacgggttgcgaggcgcaaacactatgcactcgcagatggatacactgaacggagatggacgaacgcaccttgcagggcagagagctcgttccccccgaactgcccgtccgcagcgccaataccggattcatacgacaagtgaccttcccggattggttcgtaaatacgcctcaggctgctgcctcaggatctggtattgctgtgcgtggatagagcgggcgctgtctctacaagttggggggggggtcttcggggatccattgtctgaaggacaggcagagtgcgatcacggttcgacgtga

SEQ ID NO: 2517 - DNA, 763 bp, Homo sapiens
  SIMILAR (348)..(620): 971254mologous to Homo sapiens salivary proline-rich protein precursor,accession number K03204,Smith-Waterman Score=520.
gagtgactccagagcctcctgcaagatgctgttgattctgctgtcagtggccttgctggccctgagctcagctcagaacttaaatgaagatgtcagccaggaagaatctccctccctaatagcaggaaatccacaaggaccatccccacaaggaggcaacaagccccaaggccccccacctcctccaggaaagccacaaggaccacccccacaaggaggcaacaaacctcaaggtcccccacctccaggaaagccacaaggaccacccccacaaggggacaagtcccgaagtccccgatctcctccaggaaaaccacaaggaccacccccacagaggaggatagctccaaggaccacccccacgcggaggtatcaaacctcaaggtcccccacctccaggaaagccacaaggaccacccgcacaaggaggcagcaagtcccaaagtgcccgagctcctccaggaaagccacaaggaccaccccaacaagaaggcaacaatcctcaaggtcccccacctccagcaggaggcaatccccagcagcctcaggcacctcctgctggacagccccagggaccaccacgccctcctcaagggggcagaccttccagacctccccagtgacagcctccccagtcatctaggattcaatgacaggaagtgaataagaagatgagagtgattcaaatgattcaaattccatgacattggaaaaaggtcatcatagctctaacttcaatataccaataaaataatcagcttgc

SEQ ID NO: 2518 - DNA, 3117 bp, Homo sapiens
  SIMILAR (1141)..(2049): 921254mologous to Escherichia coli yjdB,accession number U14003,Smith-Waterman Score=1413.
atgttgcagcaggatagtaatgatgacactaaagatgtttcactgtttgatgcggaagaggagacgactaatagaccaagaaaagtcaaaatcagacatccagtagcatcgtttttccacttattctttcgagtcagtgcaatcatcgtctgtcttctctgtgaattgctcagcagcagctttattacctgtatgagtaaaaagtggttggcggtggttatcgtgggtgtggtgctacaaggtgccaacctgtatggttacctcaggtgtaaggggcaggaggtgagagaaacatttgcagagccatccctgcaggctactcagatgaagttgaaaagagcccgactagcagatgatctgaatgaaaagattgctcaaagacctggtcctatggagctggtagagaaaaacatccttcctgtggactccagtgttaaagaagcaattataggcaagactctaaaaatttactatttgggtgctccagctgaggctgcaacaaaggaggacgagagaacaactagtggaccagggcatcatgccacgaattaccacttcctcttgaaattcgacttctatctttcttggttacacttcgtccataaagatgctattctttcgggtcaccctcttgttcggcttctttccactcgtgtgcttcgggggcctaatgatgtgtttcacggggtgtcatccgtggacagtgttttggccattttcgtccttgccgaacctatgggcagtttatctgccagcttagagaaccaactagaagctttcttggatggaactttaccctcagccaatgaaattcctccactacaaagcagcagtgaagacagagagcccttctctctgatcgaggacctccagaatgatctgctgagtcactcaggtatgctggaccattcacactcacccatggagacttccgagacccagtttgctgcaggttttcgcctgcttcgcagccaaaatcggaaaccaggccaaaagcagcccaaaggcactctagaacagaccagcgaatacccaggtaacagaggtattccgataatccgccaaagtttggttttccgtgtatcagtgacaggtactacagtcaacttctgtgatgctagcaccaatcataacagggtttttaaggtgttgcaggcgctgccgctggattcgctgcataacgtactggttttcttgtcgatgccggtcgtcgctttcagcgtgattaatattgtcctgacactaagctctttcttatggcttaatcgaccactggcctgcctgtttattctggcgcggctgcaccaatatttcataatgacttacggcatcgtcatcgaccgctcgatgattgccaatattattgataccactccggcagaaagttatgcgctgatgacaccgccaatgtcatcaacgctgggattcagcggcgtgcttgctgcgctgattgcctgctggatacaaatcaaacctgccacctcgcgtctgcgcagtgttcttttccgtggagccaatattctggtttctgtactactgattttgctggtcgccgcactgttttataaagactacgcctcgttgttccgcaataacaaagagctggtgaaatccttaagcccctctaacagcattgttgccagctggtcatggtactcccatcagcgactggcaaatctgccgctggtgcgaattggtgaagacgcgcaccgcaacccgttaatgcagaacgaacaacgtaaaaatttgaccatcctgatggtcggcgcaacctcgcgggcggagaacttctccctcaacggctacccgcgtgaaactaacccgcggctggcgaaagataacgtggtctatttccctaataccgcatcttgcggcacggcaacggcagtttcagtaccgtgcatgttctcggatatgccgcgtgagcactacaaagaagagctggcacagcaccaggaaggcgtcgcccggatatcattcagcgagcgggcatcaacagtgctgtggaatgacaacgatggcggctgtaaaggtgcctgcgaccgcgttggctgtctgaatctggtgtatattggcgaagcctgcaatgaccatttggcaaaaaaacccccaaagggccagcgtgaaaagcatcttcccggcgctacaacggagtatgccggtgtctcttatcagaccgtttcccgcgtggtgaaccaggccagccacgtttctgcgaaaacgcgggaaaaagtggaagcggcgatggcggagctgaattacattcccaaccgcgtggcacaacaactggcgggcaaacagtcgttgctgattggcgttgccacctccagtctggccctgcacgcgccgtcgcaaattgtcgcggcgattaaatctcgcgccgatcaactgggtgccagcgtggtggtgtcgatggtagaacgaagcggcgtcgaagcctgtaaagcggcggtgcacaatcttctcgcgcaacgcgtcagtgggctgatcattaactatccgctggatgaccaggatgccattgctgtggaagctgcctgcactaatgttccggcgttatttcttgatgtctctgaccagacacccatcaacagtattattttctcccatgaagacggtacgcgactgggcgtggagcatctggtcgcattgggtcaccagcaaatcgcgctgttagcgggcccattaagttctgtctcggcgcgtctgcgtctggctggctggcataaatatctcactcgcaatcaaattcagccgatagcggaacgggaaggcgactggagtgccatgtccggttttcaacaaaccatgcaaatgctgaatgagggcatcgttcccactgcgatgctggttgcacatttccgtctgcgcgtctgcgccgtcgtcacttctccctcgctgtctccgtcgctcgcgcctgtgccctccgttgccgccgctgttctcctcgtctccttgtccccggtaaaaaccaagcctgtagtggagcacaagtatgccggtgggcaatgtcttgtacatatccaagcattgatgaacgaggatactgagaagcaccaggtgcattattctacgccgaagtgtgggcggcatgcacaatggtcagacgcgtactga

SEQ ID NO: 2519 - DNA, 1440 bp, Homo sapiens
  misc_feature (1)...(1440): n = a,t,c or g
tcacgtccagtctttctctgtcaggtaaatcggggaggtacatagtttttctacgccgctctgtaggaattcaaagtccgagtgctgtagcgacggtacgccttcttctagccggttctgatcgtcgttttgccgctggatctgctggatgcgctgtactatcccgggctgaaagaagctaggagccgggttgttgctaccgaatccgccggtcagcctttcgactgcgtgcaggaagtataggaaatcgtgataagccggttgcgtggccagataccggtagcggtgacaataccgaggtttactttcgcgctcatcaggcaggaatccttccagatactgttctagcgggccctgctcaaagggtggcagtttctggaggtactccagtggactggtgaacgtgtcctgccaggccttcttgtcgtctgcccgacacatcatttttatcttttttaatgcccagactctctgcttttgatcgaggctagccatgttgttcaacgagttgcacaggtgtacacccccaacaacttgtccctcgtggagcgtgcccaggcaacctgccagggcttctgtgagtgtcacagacacttcttcttcttcttcttcttcttttaatgcctgtttaagcaagttccctgatggctgctggaagctgccagggctcctgtgagtgtcacagacacctttttcttgcttctgcacggccaggaggagctctccagatgacactgcatcactggtggcagtggccggttgtagcctctgtcgccctcgagagctctgtgctgtctccagcagaccttgctgggcttgtgaaggctcatactgcagagggtcatcgtcctggaccgggtgtgcttccagctgccacctcaaccctggaacttgagtaggggtaccacatgtgacgtccagtctgctagctatggtacccccttccggtaatgctgcaggggcgcccacaggattggaagggttgcccagctttgatttcaggtaggcaaacaagnccgccttggtacagtaggcgctggggtacttgtacagtacttgtgtctggtagtggtacgaaacgctagtaagttcttgtaggtaagctcgctggaacaccggccgcaagggaggtgtggcataacggcatagtcgggatccgtgcacgttaacgattactaggatttggcggattatcggaatacctctgttactggggtattcgctggtttgttctagagtgcttttggcctgcttttggcctggttccgatttttggccgcgaagcaggcgaaaaaccttgcagggcagagagctcgttcccccgaactgcccgtccggagcgccaataccggattcatacgacagtgacttcccggatgtctcgtaatacgcctcaggctgctgcctcaggatctggtatccttcgtgaagatgcggcat

SEQ ID NO: 2520 - DNA, 3243 bp, Homo sapiens
  SIMILAR (2691)..(1912): 921254mologous to Escherichia coli 4-aminobutyrate aminotransferase (EC 2.6.1.19) (Gamma-amino-N-butyrate transaminase) (GABA transaminase) (Glutamate:succinic semialdehyde transaminase),Smith-Waterman Score=1218.
ttagtcgactctaaggatcccccggactttccagcagtcgagcattaaccagaaatcctcaccgcatttttcacgcatatccgcgaccatagcggcatctttgcggatccccgcatcgccatcatgtggcccccagtgcgtcggcattttgccaccgataaagcccatcatcttttgccagatccggacgcgcacagagccagatcgacacaagaaatcgtattcatcaccaggccaccagagccggagtaatacagggtggcactgagcatttgatcgtggatcagttctgatatcactgacacatttaccctcaatgaaacggttaagatgtttttcgacaataaaacagcccatttcaccggctgtcgaaacggcgaatccggtctggccgttttctgcttcgacttcaacaaccaacgtgccaagaacgttaatgccaaatgactggcgtgactgctcgtaatcgcggtatttactcatcggggtggcaatatgatcgtctatccagtgattcgccccctggtcgtgataatcaccgccgccagcgcctttttctgctgtcgcaccgccagtaaaccaggcgcgaacctgtttaatttttggtagggtcatgatgttctccattgttatgagggtgaaatatgcgctggcgcaggcaatggccttgcccgccagataatcacggtattcttcattgatttgtaagcgggtaccgaccaccgagatcgcagcggtaagctcgttattggcgttaaacaccggcgcagcgacacaacggacatcggcgtaatcttcgccgttgtcatagctccagccctgacggcgaatacgcgccagttcttcgtgaagttgcagcccttcgataatactttgctgtaccgctgcaggttgccaggcaagcaggcatttacctattccggagcgataaagcgaaaggctttttccttcatgggacgacacgctgatagtggctgatgactccactatataaatggaatggtaccgagctgattgacctacgcgcagagttggcttcgctaccggcagcggcagacgctgctcaataataccgccaccgaggcacacttcaccgttatagaagacggcagactggcccggtgtcacggcggcaaccggttcatcgaaaatcacttcaatgcgatcatcgtccagcgccttgacggtgcaagggatatcggtctggcgatagcgggtttttaccgtgcaacgcatagtgccggtgaatggttcgcgatcgacccagtgcaactgctgggcaatcaacccgacagacatcagccgcgggtgttcatggccctgagcgacaaccaggaatgtttgttttcgacgtctttgtccaccacataccacggttcttcggtaccttctttggttgccaccgatacccagacctttacgcaatttcatcgccatcgacggtaatgataatgcccggttgcgtccgggagataacggtcccaggaactcgcggaatttacgttcgccaatgaagcaaatgccggtagagtcttttttcttcgcggtgaccagaccaagatcttcagcaatcttacgcacctgcggtttttccagttcgccgaccgggaacaggctttgcgcaatctgctcatggctgagcgtataaaggaagtagctctggtctttattgctgtccagaccacgcagcaggcggctcttgccatcgacatcggcccgacgtacgtaatgaccggtagcgatataatcggcacctaaatcttcggcggcaaattcgaggaaggctttaaatttgatctctttgttgcacagaatatccggattcggcgtgcgaccggctttatattcggcaggaacagttcgaagacgttgtcccagtactcggcagcaaagtaacggtgtgcagttcatgccgagagccgggtccaggatcgtctttaaatccggcttatcggcgtaatgatccatggcaaacagcttaccggtacgcgcaaagccgctttgcacttcatcagcaatcatcacaataccgtgctcgtcgcacaggcggcgaatagcggcaaccagctcttttggcgcaacgttgaaaccgccctcgccctgcaccggttcgaaaataatcgccgccacctgcttcgcttcgatgtctgatttaaacaagcgttcgatggcgtcgagggagtcctgtgttgaaatgccgtgtaaatctgacggataaggtacgtgatacaccgaaccagggaacgggccgaagccgattttgtacggcgcaacttttccggtcagcgccatggtcatatacgtacgaccgtgaaagccgccgctaaacgcaatcacgccagggcgtccggtatgggcgcgagcaattttcaccgcgttttccaccgcttccgcaccggtggtgaagaacgcggttttggcctgcccgctcaccggggcaagggcgttgattttctccgccagggtgacgtagctttcatacggcacaatctgatacgcggtgtgggtaaactgttgcagttgctgctccaccgccgcgaccagatcagggtggcgatgtccggtattcagcaccgcaatgcctgcggcgaaatcgatgtactcgttgccctcaacatccttcagcgtggcgttttcagccgagccgcgcccatcgcggtaaacggcacacgcagcgtgcgcccgccggggaacgggtaatgcggcagattggcgaaggcatcgaaacgttcggcgtcgccgcgcagcagttcggcaatcaaacgtccggctagatgagtacaggtcacgccgtggccgctgtagcctcaggaggtcgttttcaaaccccacggctcggagagaacacaggcccttggtgaccacagtgttgagggaaccgggcaggggctctgccaggagccacgctgttgatcctggcagggtttctgccgagcgcacaccagaaccgtcccagccgcaatccggtatccagaccgccaaacacccaacgggttgcgaggcgcaaacactatgcactcgcagatggatacactgaacggagatggacgaacgcaccttaagcaactccaccacggtttctgcaaatccaaccacatacatagcaactgcaacagcgttggcaaaggcgaagattagaccaattgcaccaccaaattctggccctagacttctagatattaaataatatgctcctcctgcttccaacagcagtttcctcaaaaacaagggcaacatcgccat

SEQ ID NO: 2521 - DNA, 4632 bp, Homo sapiens
  SIMILAR (1759)..(1995): 771254mologous to Mus musculus putative,accession number AK008385,Smith-Waterman Score=344.
atgaagaaccctaatcatggacttggtacgatggtttatcaagtcccgttttcttttacaaacttccccttcactgcctgtctcttatctgaggcctggtacagaaattcagaccgctatttatccaagtacctccttaaggtagtcttaaggctcaagccagctcagaaacggcagaaagacttgctttcttgggttaaaggagggcgattacagggtttggcggccagctcgtgtgaggagaaaggcgggtcgaggtcaggctcccctgagctacttcctggtccgatcggactcgccttcggacacccgaaacacccccggcccggctccctcgccctttgccctgtctcctcccctctcagtgacccaccaccactgagcccgtgtgcgttaccatacccttccactgctgtgaacctctgtgaacgcaatatacacgtacaatcagcatgcacccccatcaatcgatccggcagtaaagcacgagaaacggagaacgacgcaaaatcatgcacaaacataaaaaacaaaaaaccagaaatatatagaagtaataacgacagcgcaccaaccagccacgccagagaggatggctacacgagacgctgggcaagagaccgaagacacaacgcgcagagacccaacacgacccgccagagcaaaacacacgcgagtgggaccgaggaggacatcagctcgcaagcggacacagagcacacaaccagcaagagagacacgacagagagcggagatcgagcagcatcagagaagcctaccacgacagagcgacggaagcgcaagagcgcagagacacagcgacgacggacgcaccaccgcgctcaccacacagctcgagaagacgatgaagaccgacacagcagaccacgacacgactacacacgcgcgcacacagccagagccgcaccagaagaactcggaccagccgaaagagcacgcagtgaaggcccagacgacacgaaaccacgaacagagaacaacgaagtcagtagcgagcagacgacgaagactcgcagcaacacaacaaggatagcgacactacagcgtgcacacgacaacgcacacagtcgcggacaagcgcagccgcgaaatatagacagcacacagcaatcggcatacagcacgaagcacggggcaaagacgcactcgagacagacagtacaactcagaacacaaccgacgcaagccaacaagacacgcgaagcacagcagagcgacgagaagaacaggccagaagagaagactcaaatcaagcaaagacaaggaggcgacgacaccacagcgaagacgaggaaccgacacgagctagcagagggcgaggaggtacgagagacgagacgtgacacggacgagaagcacgatcgcgaagaccgagacagcatactggagagagccgcgcacacgagccaccacgagccgatacacagaagcgcgaacagtagcagagagactacgcgcataccgcacggccaagacagtcgacgcagtacgaacgcacaacaagaacagacaggagaccagcacagacgagcacagcagcggagacaaggacggagagctcgactaacggacagcaataaaaatgctttgtacaaaataaaaggacacagaaaagcaaagaaatgcctactgaacagaatacataaacacatcacaactatcatcaacccatttgaaggaaaaagtcaagcacacgcaattaatccatatgcgaagcaggagcaagctggaagacaatttgggcatcactgtctagtacaaccaatgcctgcaggaagatgtcagatacaccatgttgaagatcctgcatcagtatatgatgaagctatggaactaattgtcaaacttgcaaatcatgggctgattcatggagattttaatgaatttaatctcattttggatgaaagtgaccatatcaccatgattgattttccacagatggtttcaacttctcatcccaatgctgagtggtacggaggccactggagaattctcaaggaggccatggcatgtgcctctgaaagagaggggctgacgcagggcaccaacttgaatgaggaaagtccggctgcattgggcccagtcagaagctgccagaatgacccaagcaaggcacagggaggcccaagggaagtctatcaaactaacagcagacttctcagcagaaatcctacaagccagaagagactggggggggatcctctagatcgacctacagctacctggaccaagcagcgtcaggcccagatacccatattcagaaatacatctgactctggggacagtgattccttaagggacgtgggcctcttcttagtcacttcttcacgaacgatcctggatgcaaatgaagaatttaagtccatgtcgggcaccatccagctgggccggaagcttatcacaaaatacaatcgccgggagctgacggacaagcttctcatcttccttgcgctagccctgtttcttgctacggtcctctatattgtgaaaaagcggctctttccatttttttgcctgcaggttggatggaacacagtgccccacttttctgcaagtagctggcttgtaaagggtgaacagagccatgggaggaaggtctggcattgggatgccgccctggggacatacgaaccgcctccttccaccattgtgcactatgggaggccgctgctgcgtggagcacttaaagtccagcctccaggaccggatgcccctcctgtctcccgctcccatcgtgcccttaaatgccagatctggtggagggaagagagaagagcgataagggcgcacaaccgcaaccacgcactcagtcacgcagcgcacggacgaacggcagcggcgtgcggatactgcactcactttggcggattatcggaatacctctgttactggggtattcgctggtttgttctagagtgcttttggcctgcttttggcctggttccgatttttggccgcgaagcaggcgaaaaacctatggcaccgccccccagtcgtgctactctttttacgtcgcacttgactgtggaggcgtttcccgtctggtcatatttgtatcctggcgaaacccccaggttgcacccacgagcgcacaccagaaccgtcccagccgcaatccggtatccagaccgccaaacacccaacgggttgcgaggcgcaaacactatgcactcgcagatggatacactgaacggagatggacggacgcaccttgcagggcagagagctcgttccccccgaactgcccgttgtagcgccaataccggattcatatcgtggatgcttccgtttgtgggccgtgaagtcccagcggtgtgagggaaaagaacgagggccactcagcgcgtgcgcccgcgcgtgcggggcgctgctgttcgtcggctgcgtcggcgtgtcgtgaggctgtgtcggcgactggtggggggtgaggcgtcgcgtcgccgcgtgcgtgtcgtgtggccgtgtggcatgtgacgacaggcaatactgcttatattgcttgactgcgcctgggttaacagtaggagctgatgaacgtatagagatatgaatgccataccggatgctaaggcgatatagagtgctacgacggagcgagccgtagatatgcgcgacagaggctggatttggcccgacgtagccagaaagacggcgactatgacgcgtagggagccaggggagccggggatgtgaaattgcggatttggtggttgtgggtgccttgcacttgactaacttgactttacttgccatcgtataagctgcctgatttttcagtgggcggttgtccatttgtatcagatcatccaacgaagaagcatacccgttgtccatttgtatcagatcatccatacgaagagcatacccgttgtcgatttgtatcacaacatccatacgaagatccataccgttgtccatttgtaacagaacatcgatgcgtagatgctcacgcgtagcgaattgatggacgcgggagccggtgtaaaagtgtacaaccacccgtacagggtagcatggtttaacaccgggatgcacacctcgaattttgcccgatagcggtagcggagttgaaacgtttgcttgatttgaagtacccagagagtttgggccgtgagggatgactactagagggcgtgtgactgtgtcagacaaagaactgcttagaatgtggagctgggcgtaaccggttggtttgggacattggtggccggcgtaccgaaggcggggacacctgtcagagtgttgaccggagtagaagcccgcctgcttacagccgcctgctttcagtctaactactactgccatcgtatagcgccgatttacacccacgctcgtgcacccgtgtatcgcaaccgtaacacgcaagtacgggacgcctttaactaggggccggagtgccgtaagaaaggggcagctacatatacgccggaatacccggtcttgcgggaaatgatatacggcctgggtgctttttgggggcaccgaaacgcccgtgtgtgacgtggatcttaacatgttgatagagacatccatgaaaaaggttgggcgtggccccggggaccaggcgacactgactagtgcggcgccccgcttgtccatgaatgtatgcat

SEQ ID NO: 2522 - DNA, 1440 bp, Homo sapiens
  SIMILAR (786)..(190): 401254mologous to Schizosaccharomyces pombe putative Trp-Asp repeat protein,accession number AL034382,Smith-Waterman Score=397.
ttacttgtctgccttactagagtgggtagcaggttcgtcttccccttgactgcaatccaacttgccattacacagctttgatatttccaaagtgacccattggccagagttgctaaacagctctgaacctccctcaggggctgagtctggagttgcgggatctcttgggcccccacctaaggaactagcactcaaaccccctgctgacaccagaagacctccagaggggaaaagtaggacactctccactggctgcccatgctcaacggagagaacactctcactcgttcgtgcatcaaacatcttcacagtatgatcatatgatcctgttataaagagatccggattaagtttgctagcacatccacacctcacataatcagagtgttctttaaatgtcaaaatttctttggagtttggaatatcccataatttaactgtataatcatcagccccagagaccacgtgatatttgtcagctgtaaaatctactgtatgaactgcttttgtatggccttcaaactgcctgaggggagccctcccacttatatcaaaaagttgaactccaccatcttcactgccagccacaagcaatctaccatcttgtcgaaaagtagcacagtatgctgtgtctttaaatcgagaaaaggtttttataggttcttgggagtatcggccataaatgtgaattcttgaggaagctgtgacagcataattatatggaggctgaggagaaaagtctacttttgaaactgcaccaaattccttaatctgaacaggggtctgagggagcctcgtaagcaaaggcaaagatggaaatgtgtccattgccttggagagttgctgattactccgggaactaacaacggtggacaggaaagggtgtaatcgcagagaagaacctaggtcgaagcttaattgaggggaacttgagccggttaaagaatttggccactctcctatatagcccgaaagtttcagttgcattgctgcggaacgttttttagccagaaggcgaaagaagaaatcggaagtgacgtcgcggccaaaacaagcccgggcttggaggcctgtactgaagctggcctcagatgggaaggcccgactcgctgtctgctgtcgtcggtggtcgcgagaccttgcactctcaccgggtcggcctccagcccctgtgcccgggatccgctcgccgcggatgagcgagagtttcttcctgggacttttcgggcacagctggccggtggcgacagaacggactttctttcctgcaagagtctcccctccagcgggagacagcgggctcctgtctcgggacgctgggacacctgtcgcctgtgaggcatcatttattttcatagcaccttcctctccttgtagaataattccaggatcaggaagaaacgaggggctcctgttattagcatccacaggaactagcat

SEQ ID NO: 2523 - DNA, 766 bp, Homo sapiens
tgcttagcgtcgtgcgctcgcgtatacatatgggggtgggggtgggggtggggtgcccagttcgctatcggaatcaggatgaccatgagctacaaattacacacgggaacaagattctatgtggaattgtgtgcgataagggcgcacaaccgcaaccacgcactcagtcacgcagcgcacggacgaacggcagcggcgtgcggatactgcactcactttggcggattatcggaatacctctgttactggggtattcgctggtttgttctagagtgcttttggcctgcttttggcctggttccgatttttggccgcgaagcaggcgaaaaacctatggcaccgtcccccagtcgtgctactctttttacgtcgcacttgactgtggaggcgtttcccgtctggtcatatttgtatcctggcgaaacccccaggttgcacccacgagcgcacaccagaaccgtcccaggcggaatccggtatccagaccgccaaacacccaacgggttgcgaggcgcaaacactatgcacctcgcagatggatacactgaacggagatggacgatcgcaccttgcagggcagagagctcgttccctccgaactgcccgtccgcagcgccaataccggattcatacgacaagtgactttccggattgtctgtcaatacgctcaggctgttgctcaggatttggtaatgtgtcgtggataatggcggagattttgataagttgggaggcatctcaccctcttccccgctcatgcttctaa

SEQ ID NO: 2524 - DNA, 3797 bp, Homo sapiens
  SIMILAR (2511)..(2564): 381254mologous to Escherichia coli similar to melibiose carrier protein,accession number L10328,Smith-Waterman Score=41.
  misc_feature (1)...(3797): n = a,t,c or g
atggtttacaaaatgcgttatcggtctcagcacccctatagcatcaaggaaaagcagatgaagagtgaagtgttgtccgttaaagagaaaattggttatggcatgggagacgccgccagccacattattttcgataacgtaatgttatatatgatgttcttttataccgatatttttggcattcctgccggttttgtcggaaccatgtttttggtcgctcgtgcactggatgcgatttccgatccttgcatggggttgttggccgatcgaacgcgctctcgctggggtaaatttcgtccgtgggtactgtttggcgcactgccattcgggatcgtctgtgtactggcctatagcacgccagatctcagtatgaacggcaaaatgatctatgcagcaattacttacaccctacttaccttactttataccgtcgtcaatatcccttactgcgcattgggtggtgtaatcaccaatgacccgactcagcgtatctcgctgcaatcctggcgttttgtgctggcgaccgcgggaggcatgctttctactgttctgatgatgccactggttaatttaattggcggtgataataaaccactcggtttccagggcgatttaagcccgatgttctctacacctgaagagatcgcccgacctggaccgtacgaaaacgacgttcacgtagtgggcgcatcctcactggctgccggtcataaaacgctgatcccggaactggtacgaagcgctgaacaacacatggggacgcgaagatatctgcgtggtcgacgggtggcagtcattccgccgacaggattacgccttcctgcaagagcgcggcagtggcggcgatttatggtccagcacactcgcccaggccatgacgctggtggaaaggcgtcaccgcgtcatcaggcactaagtacgcagctgcttgatgccattatgccgtactgcggtaacaccctgcgactgggcgttaccggcacccccggcgcggggaaaagtacctttcttgaggcctttggcatgttgttgattcgagagggattaaaggtcgcggttattgcggtcgatcccagcagcccggtcactggcggtagcattctcggggataaaacccgcatgaatgacctggcgcgtgccgaagcggcgtttattcgcccggtaccatcctccggtcatctgggcggtgccagtcagcgagcgcgggaattaatgctgttatgcgaagcagcgggttatgacgtagtgattgtcgaaacggttggcgtcgggcagtcggaaacagaagtcgcccgcatggtggactgttttatctcgttgcaaattgccggtggcggcgatgatctgcagggcattaaaaaagggctgatggaagtggctgatctgatcgttatcaacaaagacgatggcgataaccataccaatgtcgccattgcccggcatatgtcgagagtgccctgcatattctgcgacgaccgcctatgcatcgtgttcctagaaaccctaaggtcaacctgcttcctggaaccgctatggccaatctgctgtcctaggaccgcaatggccacgctgggtcctaggaaccgctatggctttgatccattggctgtttcctcggggacccggtcttgttccttgggggttcctcgggcacaccgcttcgcccttgcgggttctcgggacccaggctatacgcacaagcgcgttcttgccatattccaagcctttaacgcgttcccggaaccaccggccaacacgccggaagatccggcaggtctctctctactgccatcaggccacacgtctgctcgagagcctggcctctgtctcccaatcaactcgctttgccctattgttcagtctctctggccctcatcactgcgctctacccaaccgctcacaccccttcccagctgcccctcccaggcccatcaccctggcagcgtggctccgtgcggtgcagcctggtacccggcggggcacacgcacaggaagctgcctggcgtgttctcgcagcgcccgaggtcacacggcggcggcacgcggtggcactcgtccacatctgtaggcacagaccaggcggctgggactggggcagacagccccgggagaagcgacgcaaggaggcaggggtcagcagggaagcgggcagcgggaccaagcttgggccagagccaggatggggacccggccaggaccagccggcagcaggggcacagtgcagcagcaggcaatcgtggcagggcagggtttggtcagcgccacagggcagaaaggcagcagctttggggaccaagctcacgggaaggtggggtaggggctagagaagaacaggagcagtttggggataggggctctggtgtggcagggttggaatcggggtcgcggtcaggagattggttgccgcagtttgcaggacagtggccgcggctgcgggaggcagtcagtcagcgcagggctcacgcagcgcacggacgaacggcagcggcgtgcggatactgcactcactttggcggattatcggaatacctctgttactggggtattcgctggtttgttctagagtgcttttggcctgcttttggcctggttccgatttttgggcgccgaagcaggcgaaaaacctatggcaccgtcccccagtcgtgctaactctttttacgtcgcacttgactgtggaggcgtttcccgtctggtcatatttgtatcctggcgaaacccccaggttgcacccacgagcgcacaccagaaccgtcccagccgcaatccggtatccagaccgccaaacacccaacgggttgcgaggcgcaaacactatgcactcgcagatggatacactgaacggagatggacgaacgcaccttgcagggcagagagctcgttccccccgaactgtccgtccggagcgccaataccggattcatacgacaagtgaccttcccggaatgtctcgtcaataccgctcaggctgctgcctaggattctgtcaggtgttgttgcccgatgacaacggtaaattgcagccgttaacacatccgcaaggaatgacgccgtgggacgatgccatcgcgcagtggagttttgataaaggcctgcctgcgggcgcgggcaccgacacgttacccggtgtaccgtaccangattttgccgctaaaaagcggcgagaaaacctacgggctggtgaaatcttaacgctcgatctggcaagcgaaggatcaccccacgcccgccaggccagcgagatccgtcagcatgtgctgaacactacccgactggtgaataatctactggatatggcgcgaattcagtccggcggctttaatttgaagaaagagtggttaacgctggaagaagtagtcggcagcgcgctgcaaatgctggaaccgggtttatcgtcgcccatcaatctttctctgccagaaccgctgaccttaatccacgttgacgggccactctttgaacgggtgctgattaatctgctggagaacgcggtgaaatatgcgggtgcgcaggccgaaattggtatcgatgcccacgttgagggcgaaaatctacaactggatgtctgggataacggccccggtcttccgccaggccaggagcagacgatatttgataagtttgctcgcgggaataaagagtcggcagtaccgggggtagggcttggactggcaatttgtcgggcgatagtggatgtacacgggggcactattaccgcgtcaaccgaccggaaggtggtgcctgttttcgtgttacacttcccccagcaaatggccctgaacttgaaaatttcctga

SEQ ID NO: 2525 - DNA, 1488 bp, Homo sapiens
  SIMILAR (816)..(454): 971254mologous to Escherichia coli similar to,accession number D90889,Smith-Waterman Score=603.
atggtgggggctgagttcaccggtggtcagcatcgatgccatctggaggataaagtgcgggaatgtttcatccagcttccggcattcgatgtcactgaacttgccggtgatgctggcccggtcagccagataatgcagtcggttgccttcctgcaccagacgggctcccaggcgcagtgtaatctcccgctgcaggcccctggtagggttgctcattacagttctccactattgtcagttcagggtgatgctcatcaggcaggtatagggcccattgcggtcctggcggcgttcggcgtataccgcgaggactccggcgatatccggaacgtccctgccggtgtaatgacagacgctaccgtgccactggtatttgccggtgcagtagcgaaagattcgggactcaggatgctggcggtatatcgtcattgccctgcgtttactgataattttcataccgtgttctgcgaacgaatagatttgcctgccaccaacaatcagatggtcagggacacggatatcaacgagctgaagcgcctgcaccagacgctgcgttatagtcttatctgcctggctgggagtagtgtcgccggaggggtggttatgcgccagtatcactgctgctgcattgaaatacagggcgcgtttgaccacctcacggggatgtacctcggtactgctaatagaaccggcaaacagggtttcgtgggcaatcaactggttctgctggttcagatacagcatcataaattcttcacgctccagccccgccattttcagcttcagccagtcacgagcagcctgagtggagcgataagggcgcacaaccgcaaccacgcactcagtcacgcagcgcacggacgaacggcagcggcgtgcggatactgcactcactttggcggattatcggaatacctctgttactggggtattcgctggtttgttctagagtgcttttggcctgcttttggcctggttccgatttttggccgcgaagcaggcgaaaaacctatggcaccgccccccagtcgtgctactctttttacgtcgcacttgactgtggaggcgtttcccgtctggtcatatttgtatcctggcgaaacccccaggttgcacccacgagcgcacaccagaaccgtcccagccgcaatccggtatccagaccgccaaacacccaacgggttgcgaggcgcaaacactatgcactcgcagatggatacactgaacggagatggacgaacgcaccttgcagggcagagagctcgttccccccgaactgcccgttcgcagcgccaataccggattcatacgacaagtgacctttccggattgtctcgtaaatacggcttaggcttctgcctcaggattccggttatgcccattgcctgggatcgccgctcatcctataccccagttcgctatcggaatcaggatgaccatgagctacaaattacacacgggaacaagattactatgtggaattgtgtg

SEQ ID NO: 2526 - DNA, 1417 bp, Homo sapiens
atgcaggacaatggcacgggcaaagatttcatgatgaagacaccgaaagcgattgcaacaaaagcaaaaattgataaatgcgatctgattaaagagcttcagtacagcaaaagaagctatcaacagacgataagggcgcacaaccgcaaccacgcactcagtcacgcagcgcacggacgaacggcagcggcgtgcggatactgcactcactttggcggattatcggaatacctctgttactggggtattcgctggtttgttctagagtgcttttggcctgcttttggcctggttccgatttttggccgcgaagcaggcgaaaaacctatggcaccgccccccagtcgtgctactctttttacgtcgcacttgactgtggaggcgtttcccgtctggtcatatttgtatcctggcgaaacccccagggttgcacccacgagcgcacaccagaaccgtcccagccgcaaacccggtatccagaccgccaaacacccaacgggttgcgaggcgcaaacactatgcactcgcagatggatacactgaacggagatgcgacgaacgcaccttgcagggcagagagctcgttccccccggaactgcccgtcccgcaagtgcccaataccggattcatacgacaagtgaccttccgggattgtttcgtcaatacgcctcaggctgctgcctcaggattctggtaatgctgtgcgtggatagactcggcggagcatccgtgaacaagttgaggaggccattcatcggcatctcatgttgttctgatacggatacagcgcacagcagttgcctgaatccaaggtttcgtgaggatgacagtaccggttttttctcgaggatcgcaagtgaatcctgggttttaacatccagtttttacaggggaattcgcaagtctcatttttcaacccaaatccactacaatcaactgttcatttcatttggctttaacaactctttcacctgtaagccacaacttgcagcatattttcttctcaatttcaccagcaaagccaggcaatgcagggcccaacagcctgcagcaaccactggaacacagcctgtggttgcacatgccttccggcaattcaccccaagtccaaggttcagcaataacacccagggtcgcaacaaaatcattcctgtaaggccacataaccttgtggccaatgtaaggattactacgacatccaaatcaccctcacatgggccagcctttgctatttctggaacatgtttcataaaccccacgggtactatggacgagagtggggaaaacaacgttcagtggggttatcttctagcgttcacgcgtatgtgttgggcacactcgcacgcgctgacagcggtctcctgtcaacagaggggcacaacagacagaccacaaccagacagttgtcgcagctaa

SEQ ID NO: 2527 - DNA, 1780 bp, Homo sapiens
  SIMILAR (833)..(913): 1001254mologous to Homo sapiens ankyrin-repeat family A protein 2,accession number AF314032,Smith-Waterman Score=140.
gagtaggaggtgtgaccggagggcgaaattggggcttcttctgctctgtgtgacccagaaccgtcaactgaaatgaccctgtctgtgtagtactccggcaggatgggcctcggagcgtaaaggcggcaaaaacaaaaatattaaaaaaaaggagagagggacaaaaaaaagaaaacccgaaagtttcagctgcattgctgcggaacgttttttagccagaaggcgaaaagaagaaatcggaagtgacgtcgcggccaaaacaagccccggcttggaggcctgtactgaagctggcctcagataggaaggcccgactcgctgtctgctgtcgtcggtggtcgcgagactctgccactctcaccgggtcggcctccagcccctgtgcccgggatccgctcgccgcggatggagcgaagagtttcttcctggggacttttcgggcacagcttggccggtggggacagaacggactttctttcctgcaagagtctcccctccagcgggagacagcgggctcctgtctcgggacgctgggacacctgtcgcctatttttaaatatccagattccaagaacacactggatactgctcttacaaaaccaagaggaaatcatgaagaaatgttttagttattgaaactacagttgaaatcatggatacatcaaacaaatcctggatattggagcccagcttatcgtggaaagaagtgtccccagcacttattagcctaacttgggcatgccagacattaaaatagaacatccactggacccaaattcagaagaagggtcagctcagggtgttgccatgggaatgaaattcatattgcctaaaccgatttgatatgaatgtgtgttctcgatttgtgaagtccttaaatgaagaagatagtaaaaatattcaagatcaggtttttcgcctgcttcgcggccaaaaatcggaaccaggccaaaagcaggccaaaagcactctagaacaaaccagcgaataccccagtaacagaggtattccgataatccgccaaacgataagggcgcacaaccgcaaccacgcactcagtcacgcagcgcacggacgaacggcagcggcgtgcggatactgcactcactttggcggattatcggaatacctctgttactggggtattcgctggtttgttctagagtgcttttggcctgcttttggcctggttccgatttttggccgcgaagcaggcgaaaaacctatggcaccgccccccagtcgtgctactctttttacgtcgcacttgactgtggaggcgtttcccgtctggtcatatttgtatcctggcgaaacccccaggttgcacccacgagcgcacaccagaaccgtcccagccgcaatccggtatccagaccgccaaacacccaacgggttgcgaggcgcaaacactatgcactcgcagatggatacactgaacggagatggacgaacgcaccttgcagggcagagagccgttccccccgaactgcccgtgggaagcgcaataccggatcatacgaaagtgacctgccggatgttcgtaaaaagcccaggtgcgcttagaatccggaagcgtgctggtagatgcgagctcgttaccattgagagcattatggactcattgttcgaaggaaagggcagattcgatccaatttgtgggcaatacggttttcccggtcggggaagaagtgccttacctttagccactccccatcactcacattaccacctgagctgcacctcctgtcagatcagtggcagcattagattctcatag

SEQ ID NO: 2528 - DNA, 479 bp, Homo sapiens
  misc_feature (1)...(479): n = a,t,c or g
aggaagtgcgggntnnnnnnccatgagacatgagtacgtgcggnggaactcgcaccacgtaaggggccggcctcgctgcgctgattcgtcgagcccatccggcgacagaggacagccagaagcccagccagccccagactccagtgcaccagagcacgcacaggagcctgggcgcgctgctgtgaaacgtcctgacctgtgatcacacatgacaagacgcccctaagtcacctgcttcattagacggtttccaggttttctcccaggtgacgctgttagcgcctcagctggcggtgacagccggcccagcgtggcgccaccacacaccgcagagctgtccaggcacagctccgtccccagcgctcatggtgttgaaactgtctgtcatgcaccacggtgtctgtgtccacacagtaataaacggtttactgtccgcnnnnnnnnnnnnnnnnnnngcggccgttcaagtttagagggcc

SEQ ID NO: 2529 - DNA, 600 bp, Homo sapiens
  SIMILAR (148)..(375): 1001254mologous to Sus scrofa protein kinase inhibitor alpha,accession number AF132737,Smith-Waterman Score=371.
ggctgctgctggcaggtggggcgcgggccggcgcgagctgacccagcactcggcgggcgcggcgggactgcggcccgtggcggcgtgcgcggggacctgcgctgactaggtccggggaagtccctgctatgtggatatttggtagcaatgactgatgtggaaactacatatgcagattttattgcttcaggaagaacaggtagaagaaatgcaatacatgatatcctggtttcctctgcaagtggcaacagcaatgaattagccttgaaattagcaggtcttgatatcaacaagacagaaggtgaagaagatgcacaacgaagttctacagaacaaagtggggaagcccagggagaagcagcaaaatctgaaagctaacaccccactttgaccctcgaccacacctgaaaatgtctcaaatctccaggagtatctggaatgcatttgtttccatgagtgaaaagaggaaaaagaaaatggctgtgctgcattgcaggaacctgctcattatcatgttaaaaatgaaggcagaagctgtggctgcaggcagacttttccctacctctgtcattagccaatggttgaaatcattggggcttg

SEQ ID NO: 2530 - DNA, 385 bp, Homo sapiens
tatatatatatatatctattatgtgggagaagtcctccacttgagaataaaacaaatttgacagattgaattccagtctgtgcaaacaccaaacagactgaattcaggtgatattcccattaatggatattttcaaatgtctctataataaagcaatggagtcttgatgaatctgttagacttaatcacctcctcgtcatacaatgagcaaggggaaaggctgtgttttgaaaaaagggtgttctatcctgtgtgcgccgccacagtatggaaacctaaaatgaaaagccagcccttttaaaaatgagtggtataaaaattcccagtcctgtacatcattttgtttttcataagcaatcagagaagggggcagtctgagcatata

SEQ ID NO: 2531 - DNA, 3496 bp, Homo sapiens
  SIMILAR (569)..(691): 871254mologous to Sus scrofa protein kinase inhibitor alpha,accession number AF132737,Smith-Waterman Score=177.
gaattccgcgctttgcagagaaagcccccctggctcttctctctcaatccataatccagcgatgctgcagctgtaaaagcattaatagaaaatcaatccacaacctcgcggggcagcgatcgtcgagcgccgtttccaggctgccttccctggggtcgggagcggccccgctccccccgtggctggcgcgaaatgtggtgatccgtcccggggcggggatgacttcatgcagccggagctccgcggcgggagcggaggctgctgctggcaggtggggcgcgggccggcgcgagctgaccgagcactcggcgggcgcggcgggactgcggcccgtggcggcgtgcgcggggacctgcgctgactaggtccggggaagtttcctgactttctgagaagccctggtttccccaaagaagtgacttttctgatagaaatctgaaggtcatctccaagaaaaaagagatctagtatagtcaatgaattaaagacaagaaggtttccaatcagtccctgctatgtggatatttggtagcaatgactgatgtggaaactacatatgcagattttattgcttcaggcaagaacaggtagaagaaatgcaatacatgatatcctggtttcctctgcaagtggcaacagcaatgaattagccttgaaattagcaggtcttgatatcaacaagacaagagggtgaagaagatgcacaacgaagtttctacagaacaaagtggggaagcccagggagaagcagcaaaatctgaaagcttaacaccccacttttgaccttcgaccacacctgaaaatgtctcaaatctccaggagtatctaggaatgcattcgcttccatgagtgaaaagagggaaaaaggaaaatgggctgtgctgcattggcagggaacctgcttcatttttcatgtttaaaaatgaggggcagaggctgtggctgcagggcagacttttccctacctctgtcattagcaatggttgaaatcatgtggcttgtgtttgggcgtcatttttgtatggatcctttcacttgatcatatgacgaaatgcttatagagagtagctccgacctaggatgatgattcttcctgtaggcatctggcccctcacaatgtcagagggtttaattgtgtctaattgcgaagggttgattgaaccccagagtttaaatatctctggctcaaagtgttcacccacgtaaaaggaaagatccaggaaaggcactgttttttaggctttacgtattctgtgtgttactgctcgtgttattttacactgttttggtaattgtaccaatatatatggctcagcactggcccccttctctggattgcttatgagaaacaaaaatgatgtacattactggtgaatttttataccactcatttttaaaaagggctggtcctttcatttaagttttccatactggtgggtgggtgtacacaggatagaacacccttttttaaaacacagtctttccccttgctcattgtatgttgatgagttgattaagtctaacagattcatcaagactccattgctttattatagagacatttgaaaatatccattaatggtgaatatcacctgaattcaatctgtcaaatttgttttattctcaagtggagaacttctcccacataatatatatatatatatatatattttaatttatgagaattttggccaattggaaaggtagaaaagaaaagccaagatcatactaaggactggaaatattttgttttatggaatcaaatttctcccaatgctgtatgatactatttaaatttggaggacaacttattttcactaagactgaaatcaggtggagaaagtaatctccttgcaatccatgtggacaccccaatcacaaaaagtaaagcccccggtgttgtgttttccatgtcttttttcagcccctctcagatcccaaatgttattatgcactttttaatgtttgtaaacttttacctaataattagtgtgaattgcattctgatacaataatgattatcattagaagctaacaaaattctcattaatactgtgtttgatggcctctgctgtgttttaacatcgtgcttcttatatggaaagtttttgtgagctgtgtaatccctctggtcagtattatgaaatcatttgtcagtggtaataaataaggaaccagtaatatgccaatggttcatgaattactggacaaatagcagacaatgggagtcccttttactataacgatcctacttagctgcccttgagggcttagataccttgccacgtgaagtaggtagagcagcatttcaataggtaatttgtgtggttgtgccagaaactcagcccttctatgtaattacatacaggataaaaggtaagtcttgcttcacttctccttctacaggggcatttcaacttgactgggaataagggcatggttgcatttagtactcaatcagatattactagaaaaaaaattaataatgtgagcctttccgagagcagaacgaggaaagattaaattttagaatgcttccttctgtctaatccatcaggggccaaaatgcccagtaaaattcaaacacatcacctattaatagacttacaagtgagaaaagaggttcctagggttattttaggcaatccctggtaaactgtttaaaccatcaaacccctacagtcagttttcagtatcctcatttaatattttaataggtttcttgtgaatttaaacttctcttctttcttaaggttgtgaaattccaaactgattttatgtgattttgaaaagtttagaaccagtgctgagtctatgtggagggtttatattcctatgtgatatactgttattaatgcatgtggtgccatgcttgtctttaaatatataaatagtgctaaaattgcaaagtcatatggagctttgggatttagtttgacttcttactactgctttgtctgctatattcaaacccaaagggcattcccaagctagggagataaaaattaattttctaaaatgtccacatcctatacattttgcttattcatggcatctttcaaattttattttagtttcctttatttgccaagaatacatatgggatttgaatttttaaggagagaaggaaagggtagggaaaccaggggccttgggtttaggtaacagggcattggatgtctatttaaccaactatttcttacggctaatgggctttgcagctcctattctcccatttgatcctcaaacaattctattagagtggtatttttatccaatttcacagattaaaatataaggcacttcaataaaatataacctttaggaagcttaaaaagctagtaaggtgatggaactgagggtttgaacccatgtttgtcaccaagggagctttccgggggcacatgttcataaattagagccaactgcagagctgttaggggaacttttagagatgaacttcttcagcctccatattttacagaaggaaactgaa

SEQ ID NO: 2532 - DNA, 650 bp, Homo sapiens
cacccttccgctgacgcgtgggggaatacgacgggtacgaggctggcccggcaccctgtcccccgagagcctcactctgccaacaggaccagaccaggggcctccttcctgtacccaggcgataccggcccctcgcaagccccacccatgcccttggcctcagggtcccaaaaaactgggggagctaccagggctctgccttcagggaagccccacagctgggcaccccccttgccccccccaggaaaccggggcgcaaggcggggcaccggcctcaccctggttctcccaaaacaacgctgcctgcggtctgatttgcttttgtcctccccagcccagaattttcctttgtataaacagtaactcctagttcaggaagcaatatcatttcagggtctaaagaaagggacgtgtcatctggccgagggcagttcagtctcactgcagagcccgcagcccgctgcgcagctcggcccctcccgcgccgcacgggcagctgaaggccgctgttttctaatatttgtattctaatttaattgtttttaaaaaatgcaaataaaaaaggtcgaggtgaagccaaaaaaaaaaaaaaaaaaaaaaaaaaaaaaaaaaaaaaaaaaaaaactcagactagttctcgtgccgaattc

SEQ ID NO: 2533 - DNA, 1853 bp, Homo sapiens
  SIMILAR (207)..(758): 411254mologous to Mus musculus putative,accession number AK011431,Smith-Waterman Score=233.
gaggccgggagggtttccctaaaagctgcggaaccgatgataacctcggacgaccccgcgtccgcccacgcgtccgcccacgcgtccggtcgttcgttgggcggtgctggtttttcgctcgttgactgggggtctttcttcggccacggaaaccggcccggcggccgaaaaagtggcctaaaactttcggcggtgggtgaaagaaaatggcccgaaccaagcagactgctcgtaagtccaccggtgggaaagccccccggcaaacagctggccagccacgaaagccgccaggaaaagcgctccttctaccggcggggtgaagaagcctcatcgctacaggcccggggaccgtggcgcttcgagagattcgtcgtttatcagaagtcgaccgaacctgctcatcccggaagctgcccttccagaggtttggtgagggagatcgcggcaggattttcaaaaaccgccctgagggtttcagagcgcacgcattcggtgcgcttgcaggaggctagcaaagcggtacctggtgggtctgttcgaagataaacaacctgtgttgccatccacgctaagagagtcaccattcatgccccaaagaccatccagtttggctcgccgggatacgggggagaagagagctttaagtgaaggcagtttttatggcgttttgttagtaaaattcttgttaaaatactttggtttaatttgttgaatttttttgttaagaaattgtttataatattgtttgcatttgtacttaaagtgcattccatctttccacttcagggatggaatgcaaaagtgacttgttcacagacctccagtgatgtgagcacttgttgctcaggagtgacaagttgctaatatgcagaagggatgggtgatacttcttgcttctcatgatgcatgtttctggtagggttaataacttgttgggtagctattaaggtactagagttgataaatgtgtacagggttccttttgcaataaaactcggttatgacttgatccaagtgtttaacaattggggctgttaagtctgaccatacatcactgtgatagaatgtgggctttttcaagggtgaagatacaagtcttaaccacagtgtaacttacagtttccctttaaaaaaaaaaaaaagtaaacctggcagctatagaatacactatgtgcatttataatagctattttatatattgtaggtatcaaacatttttaaaataaatggttttacattccacaagtgggtggggagtcttggtcattaaggtgtgtgtaatttaggagtccagttgggttttccttctgactgcacttggtcctcataggtagtaaaatgctatgcgccatttataccctggcataagtcctcattctacccaccatgttaacccctctagctgataatgccaaacactaaactggggggattttattttataggggctctagaaaaaaccgagttaattcacaccagcatcatcttaactaacattctgaactaagttagttgcagcttttcattgtgttgtgtgggttggtctccataactaggttgagtttttcctcctctgctgagggaaaccagtaccgaagttcctttttccttggtggcatttggtattataaaaacttgggtgtgggggagggagccaccaaactcccagcccactggaccctctgccaaattaagatgggtgttgggttaggttacatctggttactgtcctgggaaaaatcatttttatagagatggccttccaagtggttttaaaatttactgaagtttttaggtcaattatgtatgttgactaaatttacaaataaacttgtttatccaactaaaaaaaa

SEQ ID NO: 2534 - DNA, 1188 bp, Homo sapiens
  misc_feature (1)...(1188): n = a,t,c or g
aattcgctggcaatctcccanaaagtccagcaatttgaaagtcaaatccacagaaagaccatcttccataacaaaaggaagcactttttttaggttgacacttgcaagcaggagttccaattattttcgcggttatcaatttcatgtaattgcaatgttacccaaaagtttcttgatttgttttaaacgggctgaataacaatttcttttcaagaagaaaaacctaaacagaaatattcacaggggatgctgaaaagggtcaataatgctagtcatttcaattctcacacataaaggaaacgctgatggtctttggctactcctccagaacttttcctgtggaagtcaccaaccccctatcttaggcttcttcatcttccaacaaatttcctgccgaactagtgggccgctctcgcttctctgctttgctcctccggaaagggacacggggtcacccagatttcagcgagtttgccctcgactctgacgaaaaggaatgcattgccagcaacttttaagtccgctttttaaaaggcctgtggaaccaatccagacttttcctttgcattaaagtttttggctgagctgagactaagggggccgtaggtgacattggaagaagtcagggcattagaggctcgcgggagccaccttgggggaaggggagaccccttgacagcaagggagggatttgaatgggaggctccgtggccaaagttggggccgggatccggaataaggggcggcttggggctgagggaagctgtcggggcgcggcacgggcagcttactccggggcgacgctcttccacgccttcagaaaacggggtgtcccaaagctgggggaaacagaccacccgcagtgtcccaaagccggggcggggctgtaagggacgaaggacttctcgcggcccagacagcggaaggcgggccccgtgtagaggaggcccggccgcctcagctgccccaagcccgggggtctctgcccgagacaccccctcccccggccccggacgctgacaccaccaccgccctcaggcagtcacatctcgccgagctccgccgagggacccagccgccccccgccggtaggggccgtggacagcggaggggctcctcagccgcaggacccgggaaccggctccggctccagcgctgctcaggcacagacaccaaaccccgcggccg

SEQ ID NO: 2535 - DNA, 476 bp, Homo sapiens
  SIMILAR (2)..(256): 981254mologous to Homo sapiens gp330 precursor,accession number U33837,Smith-Waterman Score=521.
tgcctgtgtccccaagacttgcccttcatcatatttccactgtgacaacggaaactgcatccacagggcatggctctgtgatcgggacaatgactgcggggatatgagtgatgagaaggactgccctactcagccctttcgctgtcctagttggcaatggcagtgtcttggccataacatctgtgtgaatctgagtgtagtgtgtgatggcatctttgactgccccaatgggacagatgagtccccactttgcagtaagtttcctgaccacagtttactggccataaactcattctgaacagtagcctggtgtgcatcaccattgtcacagtcactgtgtagctttgtaggaaggatttcagttcctctatgagttcacatctgtgtagggggtaaccataattgaattcaaatacatcaccattggataattttctgattaaatcctttgtacttggtaaaaaaaaaaaaaaaaa

SEQ ID NO: 2536 - DNA, 1131 bp, Homo sapiens
  SIMILAR (244)..(876): 1001254mologous to Homo sapiens gp330 precursor,accession number U33837,Smith-Waterman Score=1125.
atgccaatagaaaatgtgagtggtacagaaattggctggagggcccagagagggactatcccactgcagtgtggtggcagagatgatagtgtaaatgagggtgagtggccagctgacacgtggacgagaggtattgagaggatgcctaggctctgctgtcacctggcagagccacttccagttgctgggtattcaggttattcattctgtcaggacctaactgctgttctcacccgctttccagtgcccaacctttgcaaacagatctgcagccacctctgccttctgagacctggaggatacagctgtgcctgtccccaaggctccagctttatagaggggagcaccactgagtgtgatgcagccatcgaactgcctatcaacctgccccccccatgcaggtgcatgcacggaggaaattgctattttgatgagactgacctccccaaatgcaagtgtcctagcggctacaccggaaaatattgtgaaatggcgttttcaaaaggcatctctccaggaacaaccgcagtagctgtgctgttgacaatcctcttgatcgtcgtaattggagctctggcaattgcaggattcttccactatagaaggaccggctcccttttgcctgctctgcccaagctgccaagcttaagcagtctcgtcaagccctctgaaaatgggaatggggtgaccttcagatcaggggcagatcttaacatggatattggagtgtctggttttggacctgagactgctattgacaggtcaatggcaatgagtgaagactttgtcatggaaatggggaagcagcccataatatttgaaaacccaatgtactcagccagagacagtgctgtcaaagtggttcagccaatccagggaaggaagcatagtgagtggtccatgctgcagctgccctatctgcaggaacaggaccaacccaaggacataagacctgaaaacaatcagaatcctgttctgttgcacagtggtggaggtttggcagccatgccgggctgctggccaagaacctttcattttgagtggtgtcagagcaagagaggtctgagtcccttcaggggcctgggaaacacagtgcctgaagcaccacagcttctctacaaatacttgtga

SEQ ID NO: 2537 - DNA, 1305 bp, Homo sapiens
  SIMILAR (127)..(627): 951254mologous to Homo sapiens gp330 precursor,accession number U33837,Smith-Waterman Score=967.
atgctccttcagacagcaactgttgactataatataagatacaaagggagaattgtcatgaggacactgctgaaaaacactgtgatagttctcctaccttacaagggttcagggaagctctatggagaaagtagcactgaactgaatgttgaagtattaaactgtactgcttctcaattcaagtgtgccagtggggataaatgtattggcgtcacaaatcgttgtgatggtgtttttgattgcagtgacaactcggatgaagcaggctgtccaaccaggcctcctggtatgtgccactcagatgaatttcagtgccaagaagatggtatctgcatcccgaacttctgggaatgtgatgggcatccagactgcctctatggatctgatgagcacaatgcctgtgtccccaagacttgcccttcatcatatttccactgtgacaacggaaactgcatccacagggcatggctctgtgatcgggacaatgactgcggggatatgagtgatgagaaggactgccctactcagccctttcgctgtcctagttggcaatggcagtgtcttggccataacatctgtgtgaatctgagtgtagtgtgtgatggcatctttgactgccccaatggacagatgagtccccactttgcactggttgcggcggcggttgactggctatcgcaggattcaaagtggctgcaggattcgcacatagtacctgacgtaaaactgtgtgtcgtagccagtgcctaccggcaatcgtatcagtctctgggtaacgatatttcgctaggctatcgatgtcaaccgaagttcagtaggtcaatagaccctactggcaaagctgttcaaactgcggatatccggctatctgctagagctacgctatggttaggcggttcgatagaggagagtccggttctgtgttcgactctccgactgctgctgcggcggcttccgccaccccttacctggaccagtccgaacagaccgactcaaccctgtaccgcgcaaacacagaccaaccagagcgtcggaatcgccgcacctagtgcaatacgcgttatttatccagagtcggttgtactcaacgctgttatttatttaccaggagacccagaagtatccgggttgcccagggccttcaaaaggcgttttagtgtcgaagtacggctcgattgtggaaccttcaaactcctattagtttattgtactcatccgggcgatataaaagtgaatacgtgtaaaactggtgcattggttgcatttaggtgttttttaccaggtaatctccgaagtaaaccttag

SEQ ID NO: 2538 - DNA, 2277 bp, Homo sapiens
  SIMILAR (236)..(304): 391254mologous to Homo sapiens glycoprotein 330,accession number U04441,Smith-Waterman Score=40.
atgggcaaggttcctatgaggtctgaaaagccagctcatgaagtcagggccagtacaatttcaaccacccctgacctttctagcattgaatccttcttttccagggggcctgaaagcaccaaccacacatccatcaaaggtcgtcctctgacagctgagctcaagaataaaactaacagagcagaggaaaagataaagaaagaagaattggcgattagtggggtagacgaagatgatgggggaaaggggatcaaggacactggtgatcttgtcgaaatggttgacctggcatttaggtgtgaccggcacaatgactgtggtgactatagcgacgagaggggctgcttataccagacttgccaacagaatcagtttacctgtcagaacgggcgctgcattagtaaaaccttcgtctgtgatgaggataatgactgtggagacggatctgatgagctgatgcacctgtgccacaccccagaacccacgtgtccacctcacgagttcaagtgtgacaatgggcgctgcatcgagatgatgaaactctgcaaccacctagatgactgtttggacaacagcgatgagaaaggctgtggtgaattcattttcagagcaagttctcctggtgcaattctgattctcatcgtagccgtcagtacaatccacatcgccatcacagacccaagactggggaatgcacttcctgtccggagaattgtacagccccagtacagttggactcccctaaccctaaaactgtgggcaagtcgtgtcagcaattgtcagggcctactctctgcagccaaaactcaccacacagtccagttctccatcctgatggctcttcctaaaggtcatcttttctctgcaagactcactggcaaatgtgttgctcaagtcattgttgaagggtttttcgcgggccgagacaaatttgtctgcgtattgaacgtcgccttcgtaccgtaccagtttgtactgtcgcttgttaggaccggaacagcttccaaatctacagtcggtttttaccgaaataacatctcagtcataaccggatttctaatcggctttctttgccagtcttctgcgctggatttagagacttttacagtagtctctcacttttacttcggcattaatgaatgccatgacccttcaatcagtggctgcgatcacaactgcacagacaccttaaccagtttctattgttcctgtcgtcctggttacaagctcatgtctgacaagcggacttgtgttgatattgatgaatgcacagagatgccttttgtctgtagccagaagtgtgagaatgtaataggctcctacatctgtaagtgtgccccaggctacctccgagaaccagatggaaagacctgccggcaaaacagtaacatcgaaccctatctcatttttagcaaccgttactatttgagaaatttaactatagatggctatttttactccctcatcttggaaggactggacaatgttgtggcattagattttgaccgagtagagaagagattgtattggattgatacacagaggcaagtcattgagagaatgtttctgaataagacaaacaaggagacaatcataaaccacagactaccagctgcagaaagtctggctgtagactgggtttccagtgctctgaaaggtgggtttgttcatccctatgaatggaggttcccagcacttcactttgctggtggactgagtgatcaagtggttatacttgatttcaaattccgtcccttgttgaaagaggcggtggggtttgccagtattctggtttggtggaaagagggagatgagttgggagatgatggggcattgattggtggaggggctctgtggctgttgccattgatggtagatgcgctggttttggtgaccagtgagcatggctgtgtttgggtggagtggtcaactaaaaaaagagtattgaacatccctctagccatgatgcttctgagagatgtctgtcccccttttcaggtatatacatatagtcaaaatgataagaaaatttatatatttatgtatgcagtgggtaaaactcaaaaacttaaccatacagttaagtttagaaaggctactgtggctgaccaagcaaagcaacctatgttcacttataaagatggaggtcacattgttaccctagagctggctcgagccaaagaacaagattccataagtctctgtggaactagcctaacaccagcaactgccacccatgatgcagggtcatctggctctcgtcgagacctgcattaa

SEQ ID NO: 2539 - DNA, 711 bp, Homo sapiens
  SIMILAR (493)..(654): 811254mologous to Homo sapiens Similar to Ena-VASP like protein,accession number AF131766,Smith-Waterman Score=212.
atgagtgttaggtgtccccactgctggatgaacacgtccactgttcgagcactgccacagacctattacacgggcaggaagatcctagtacctccccctctccggggacccgagcagccagccagccacctaactcctcagatttttgcctggtgtcttgatttgccaggatgcataggttcctggctgatgaacgtgatcaatacccctgccctgtttgcttcttccaacagcccaggcccagtcatggaacttgaggcacagggtgccatggtggaggctgggaaggggaaggcaaccagagtgggcaaaacgagggccctggagcagacacggcagcaaggggagcctgcagcgctcccagcggactccgccacgtcctgctggtggagcaaaggcgggctgccatgttatgacttcaaggggaacgtgtaccaccacccctctgtttggaaacttttcaaagaagtagtccacgagaactaccttgaaagagcaaaaccagccaggatgaagcctgctgggagcgtgaatgacatggccctggatgccttcgacttggaccggatgaagcaggagatcctagaggaggtggtgagagagctccacaaggtgaaggaggagatcatcgacgaggacagccagaagcccagccagccccagactccagtgcaccagagcacgcacaggagcctgggcgcgctgctgtga

SEQ ID NO: 2540 - DNA, 2973 bp, Homo sapiens
  SIMILAR (1123)..(2139): 771254mologous to Homo sapiens gp330 precursor,accession number U33837,Smith-Waterman Score=1340.
atggagaaacaaagcatcaatcagcagcttccgtatcctgatcagctccccacacagtgctctccactaacaggtcttaatgaatatccgctgagcggtgtcagcattccagatgaaagctgggacaggaagtccaagcattcagcagccatgaccctgaggcaggttcatcagaggcatcaaaacaatctgtttcttgatcacaataccaatgttgaggaatacagcgcccagatgcgcattggaactcactgctgctgcacgtcatctgagagtctgctgttacttgtggcaagtcagaacaaaattattgccgacagtgtcacctcccaggtccacaatatctattcattggtcgagaatggttcttacattgtagctgttgattttgattcaattagtggtcgtatcttttggtctgatgcaactcagggtaaaacctggagtgcgtttcaaaatggaacggacagaagagtggtatttgacagtagcatcatcttgactgaaactattgcaatagattgggtaggtcgtaatctttactggacagactatgctctggaaacaattgaagtctccaaaattgatgggagccacaggactgtgctgattagtaaaaacctaacaaatccaagaggactagcattagatcccagaatgaaactgctctacttcatggactcctatcttgattacatggacttttgtgattataatggacaccatcggagacaggtgatagccagtgatttgggatttgaggttggacctaaactcctggcactaccacctcagctggtgctaacagagagttccacatgcaggcctggagactggcctgccagtccattggagccaccaccaacatcaatgcatactgcctgtgacccagagaatcaccttacctctgctactgctatcacctatgccatgtcagctgtccaaggacgaaacgcactgcatgtggatgtggatgtgtcctctggctttatttattggtgtgattttagcagctcagtggcatctgataatgcgatccgtagaattaaaccagatggatcttctctgatgaacattgtgacacatggaataggagaaaatggagtccggggtattgcagtggattgggtagcagagacaaagattgagcgttctttccttgactgtaccaatcgaacagtgcttgtgtcagagggcattgtcacaccacggggcttggcagtggaccgaagtgatggctacgtttattgggttgatgattctttagatataattgcaaggattcgtatcaatggagagaactctgaagtgattcgttatggcagtcgttacccaactccttatggcatcactgtttttgaaaattctatcatatgggtagataggaatttgaaaaagatcttccaagccagcaaggaaccagagaacacagagccacccacagtgataagagacaatatcaactggctaagagatgtgaccatctttgacaagcaagtccagccccggtcaccagcagaggtcaacaacaacccttgcttggaaaacaatggtgggtgctctcatctctgctttgctctgcctggattgcacaccccaaaatgtgactgtgcctttgggaccctgcaaagtgatggcaagaattgtgccatttcaacagaaaatttcctcatctttgccttgtctaattccttgagaagcttacacttggaccctgaaaaccatagcccacctttccaaacaataaatgtggaaagaactgtcatgtctctagactatgacagtgtaagtgatagaatctacttcacacaaaatttagcctctggagttggacagatttcctatgccaccctgtcttcaggcatccatactccaactgtcattgcttcagaattacaaatgaaattactcaacttacattctgcaggccctaggcagaggattgaacgcagcactctgacgggcgtggatcgtgaagtcattgtcaatgcagccgttcatgcttttggcttgactctctatggccagtatatttactggactgacttgtacacacaaagaatttaccgagctaacaaatatgacgggtcaggtcagattgcaatgaccacaaatttgctctcccagcccaggggaatcaacactgttgtgaagaaccagaaacaacagtgtaacaatccttgtgaacagtttaatgggggctgcagcatatctgtgcaccagaagtggaagaacttcctgtctgtgaggtttagcaaacatgggtggtttattagtgtaagtaaggacttaatgaagaatgatcaacctttcttaataactgtaaggcaacatataatttttggaatctcccttaatcctgaggtgaagagcaatgatgctatggtccccatagcagggatacagaatggtttagatgttgaatttgatgatgctgagcaatacatctattgggttgaaaatccaggtgaaattcacagagtgaagacagatggcaccaacaggacagtatttgcttctatatctatggtggggccttctatgaacctggccttagattggatttcaagaaacctttattctaccaatcctagaactcagtcaatcgaggttttgacactccacggagatatcagatacagaaaaacattgattgccaatgatgggacagctcttggagttggctttccaattggcataactgttgatcctgctcgtgggatatgcatatcaactgtgacaacaaattcttgtaaagcggagacaaattttgagacaacagaagctgttatggaaggtgaagggacacaacacgttggtggcaatggcaatgctgggtgcgttggagtaggtggaggagacgctgcttctcaaaccaaaagcacgaacacctacattgttatcttagattctggttactgcctaaataacccccttggactcctatctcggaaaaactatttgttgtcataa

SEQ ID NO: 2541 - DNA, 3564 bp, Homo sapiens
  SIMILAR (301)..(690): 1001254mologous to Homo sapiens Human parathyroid calcium sensor protein,accession number AAW43314,Smith-Waterman Score=689.
atgaaggcagaaatcaagatgttctttgaaaccaacgagaacaaagacaccacataccagaatctctgggacgcattcaaagcagtgtgtagagggaaatttatagcactaaatgcctacaagagaaagcaggaaagatccaaaattgacaccctaacatcacaattaaaagaactagaaaagcaagagcaaacacattcaaaagctagcagaaggcaagaaataactaaaatcagagcagaactgaaggaaatagaggcacaaaaaacccttcaaaaaatcaatgaatccaggagctggaagctgtactggtcagaccaaggaactgacagtggggttcctgccaagatcgccagtgctaacatggatggcacatctgtgaaaactctctttactgggaacctcgaacacctggagtgtgtcactcttgacatcgaagagcagaaactctactgggcagtcactggaagaggagtgattgaaagaggaaacgtggatggaacagatcgaatgatcctggtacaccagctttcccacccctggggaattgcagtccatgattctttcctttattatactgatgaacagtatgaggtcattgaaagagttgataaggccactggggccaacaaaatagtcttgagagataatgttccaaatctgaggggtcttcaagtttatcacagacgcataacagagccatccccaactagcctaagactattaagattgggcactatatcaaggacaagcccacatgtagcagcgaaccaagtggtatttgccacatccaggacagatgtagatagcaataagccagaggctcaacgaggatctaggaggctcactgatttagaaggaggaaataatgagattgattggtcaattagttgtgattgtatttatccttccagccaagtttttgacctgtctgcgaagatagaggggaaggtggacaagaggacctgctgcccctcaagttttcccaagggttatgggcccatagccaagaacagccaagtgtatgaatctagttctgccaacacggattctgtggctgttgttggtggagtttgttttgccctgtggtcttcccgggtagcaggtttaaggcgggtccaacgcgaagaaacacaactcgaggaacctttttacaccaacccttgcaaaggaacaaaccaagattcccgggagcgcattggccttaacgaagaaacaagtactcttatccttagaagtggttatctgcgccctgtagcgctaaggttcactcagcagcagctcgagagtgaggcagctgccacacgctttcctgatggtcatactgccaggctactatgttcgaatgcaaaaaccatgtttgtatcccgccatattggaaatgtgatggcgatgatgactgtggcgatggttcagatgaagaacttcacctgtgcttggatgttccctgtaattcaccaaaccgtttccggtgtgacaacaatcgctgcatttatagtcatgaggtgtgcaatggtgtggatgactgtggagatggaactgatgagacagaggagcactcactgcagaaataccaaaggaagttatgagtgtgtctgtgctgatggcttcacgtctatgagtgaccgccctggaaaacgatgtgcagctgagggtagctctcctttgttgctactgcctgacaatgtccgaattcgaaaatataatctctcatctgagaggttctcagagtatcttcaagatgaggaatatatccaagctgttgattatgattgggatcccaaggacataggcctcaattctaataacaacaaaaggtctcagatctcctctcatcattctgagtgttctgctgaggatctcttctcgttacacctaacttatacaatagggaagaacaaaagtcagagtgttgctcttgtccttgtcttcgaccttggccaatccattcaaataacagatcaagatgctgcgttccttgaggataaagcctctacctgtaaaagagaactaagtatcggggatgatgattcctacttacgcccaatcgatggccaagccattgggccatccaagagtagtgtttattacaggcaagagtgtgatgggcaaaatgactgtggagataactcagatgaggaaaactgtgctccccgggagtgcacagagagcgagtttcgatgtgtcaatcagcagtgcattccctcgcgatggatctgtgaccattacaacgactgtggggacaactcagatgaacgggactgtgagatgaggacctgccatcctgaatattttcagtgtacaagtggacattgtgtacacagtgaactgaaatgcgatggatccgctgactgtttggatgcgtctgatgaagctgattgtcgcaatccatacaccttcacctggtatcggctctctgccctgggaccaggggtttgtccagccggcttttctgattctacgttcccatacactaaaaatgcttcccgaaattccaaattaaaagtccgcttctcctcaacacatctccaaattatgcttcagggcataaaaatcacccactacaaggtgacaaaatggaatctcttcaaacgaaaatctaaacaaactaccaactttgaaaatccaatctatgcacagatggagaacgagcaaaaggaaagtgttgctgcgacaccacctccatcaccttcgctccctgctaagcctaagcctccttcgagaagagacccaactccaacctattctgcaacagaagacacttttaaagacaccgcaaatcttgttaaagaagactctgaaggccacgagagagctcatgcatgtcatttcttggaattcagtgttgacttcttctctccagataactgttgcccctggtgctttgctaaagaagtgctgtatgttctctgtgcaggtgcattcctatctggtggaaatgtgatggacagaaagactgctcagatggctctgatgaactggccctttgcccgcagcgcttctgccgactgggacagttccagtgcagtgacggcaactgcaccagcccgcagactttatgcaatgctcaccaaaattgccctgatgggtctgatgaagaccgtcttctttgtgtgcgccaacaaacgttgcatcccagaatcctggcagtgtgacacatttaacgactgtgaggataactcagatgaagacagttcccactgtgccagcaggacctgccggccgggccagtttcggtgtgctaatggccgctgcatcccgcaggcctggaagtgtgatgtggataatgattgtggagaccactcggatgagcccattgaagaatgcatgagctctgcccatctctgtgacaacttcacagaattcagctgcaaaacaaattaccgctgcatcccaaagtgggccgtgtgcaatggtgtagatgactgcagggacaacagtgatgagcaaggctgtggtgccaaggggtctggctctgcagataccacctggacactgttggctgtggaggcagctgtacagaaagctttggaagggctcaggtttgcgggagtgttctgctga

SEQ ID NO: 2542 - DNA, 10728 bp, Homo sapiens
  SIMILAR (2434)..(7266): 761254mologous to Homo sapiens Human placental calcium sensor protein,accession number AAR97209,Smith-Waterman Score=6522.
atggcgggcgcccctcccccagcctcgttgccgccttgcagtttgatctcagactgctgtgctagcaatcagcgagattccgtgggcgtaggaccctccgagccaggtgtgggatatagtctcgtggtgcgccgtttcttaagccggtctgaaaagcgcaatattcgggtgggagtgacccgattttccagggaactccctgaccccttgcgcttcccagagcatttattttttactgactggagactgggtgccattattcgagtcaggaaagcagatggtggagaaatgacagttatccgaagtggcattgcttacatactgcatttgaaatcgtatgatgtcaacatccagactggttctaacgcctgtaatcaacccacgcatcctaacggtgactgcagccacttctgcttcccggtgccaaatttccagcgagtgtgtgggtgcccttatggaatgaggctggcttccaatcacttgacatgcgagggggacccaaccaatgaaccacccacagagcagtgtggcttattttccttcccctgtaaaaatggcagatgtgtgcccaattactatctctgtgatggagtcgatgattgtcatgataacagtgatgagcaactatgtggcacacttaataatacctgttcatcttcggcgttcacctgtggccatggggagtgcattcctgcacactggcgctgtgacaaacgcaacgactgtgtggatggcagtgatgagcacaactgccccaacccaacgcaacctgcttcctgccttgacacccaatacacctgtgataatcaccagtgtatctcaaagaactgggtctgtgacacagacaatgattgtggggatggatctgatgaaaagaactgcatattaaactgtactgcttctcaattcaagtgtgccagtggggataaatgtattggcgtcacaaatcgttgtgatggtgtttttgattgcagtgacaactcggatgaagcaggctgtccaaccaggcctcctggtatgtgccactcagatgaatttcagtgccaagaagatggtatctgcatcccgaacttctgggaatgtgatgggcatccagactgcctctatggatctgatgagcacaatgcctgtgtccccaagacttgcccttcatcatatttccactgtgacaacggaaactgcatccacagggcatggctctgtgatcgggacaatgactgcggggatatgagtgatgagaaggactgccctactcagccctttcgctgtcctagttggcaatggcagtgtcttggccataacatctgtgtgaatctgagtgtagtgtgtgatggcatctttgactgccccaatgggacagatgagtccccactttgcaatgggaacagctgctcagatttcaatggtggttgtactcacgagtgtgttcaagagccctttggggctaaatgcctatgtccattgggattcttacttgccaatgattctaagacctgtgaagacatagatgaatgtgatattctaggctcttgtagccagcactgttacaatatgagaggttctttccggtgctcgtgtgatacaggctacatgttagaaagtgatgggaggacttgcaaagttacagcatctgagagtctgctgttacttgtggcaagtcagaacaaaattattgccgacagtgtcacctcccaggtccacaatatctattcattggtcgagaatggttcttacattgtagctgttgattttgattcaattagtggtcgtatcttttggtctgatgcaactcagggtaaaacctggagtgcgtttcaaaatggaacggacagaagagtggtatttgacagtagcatcatcttgactgaaactattgcaatagattgggtaggtcgtaatctttactggacagactatgctctggaaacaattgaagtctccaaaattgatgggagccacaggactgtgctgattagtaaaaacctaacaaatccaagaggactagcattagatcccagaatgaatgagcatctactgttctggtctgactggggccaccaccctcgcatcgagcgagccagcatggacggcagcatgcgcactgtcattgtccaggacaagatcttctggccctgcggcttaactattgactaccccaacagactgctctacttcatggactcctatcttgattacatggacttttgtgattataatggacaccatcggagacaggtgatagccagtgatttgattatacggcacccctatgccctaactctctttgaagactctgtgtactggactgaccgtgctactcgtcgggttatgcgagccaacaagtggcatggagggaaccagtcagttgtaatgtataatattcaatggccccttgggattgttgcggttcatccttcgaaacaaccaaattatgatcaacctttcttaataactgtaaggcaacatataatttttggaatctcccttaatcctgaggtgaagagcaatgatgctatggtccccatagcagggatacagaatggtttagatgttgaatttgatgatgctgagcaatacatctattgggttgaaaatccaggtgaaattcacagagtgaagacagatggcaccaacaggacagtatttgcttctatatctatggtggggccttctatgaacctggccttagattggatttcaagaaacctttattctaccaatcctagaactcagtcaatcgaggttttgacactccacggagatatcagatacagaaaaacattgattgccaatgatgggacagctcttggagttggctttccaattggcataactgttgatcctgctcgtgggaagctgtactggtcagaccaaggaactgacagtggggttcctgccaagatcgccagtgctaacatggatggcacatctgtgaaaactctctttactgggaacctcgaacacctggagtgtgtcactcttgacatcgaagagcagaaactctactgggcagtcactggaagaggagtgattgaaagaggaaacgtggatggaacagatcgaatgatcctggtacaccagctttcccacccctggggaattgcagtccatgattctttcctttattatactgatgaacagtatgaggtcattgaaagagttgataaggccactggggccaacaaaatagtcttgagagataatgttccaaatctgaggggtcttcaagtttatcacagacgcaatgccgccgaatcctcaaatggctgtagcaacaacatgaatgcctgtcagcagatttgcctgcctgtaccaggaggattgttttcctgcgcctgtgccactggatttaaactcaatcctgataatcggtcctgctctccatataactctttcattgttgtttcaatgctgtctgcaatcagaggctttagcttggaattgtcagatcattcagaaaccatggtgccggtggcaggccaaggacgaaacgcactgcatgtggatgtggatgtgtcctctggctttatttattggtgtgattttagcagctcagtggcatctgataatgcgatccgtagaattaaaccagatggatcttctctgatgaacattgtgacacatggaataggagaaaatggagtccggggtattgcagtggattgggtagcaggaaatctttatttcaccaatgcctttgtttctgaaacactgatagaagttctgcggatcaatactacttaccgccgtgttcttcttaaagtcacagtggacatgcctaggcatattgttgtagatcccaagaacagatacctcttctgggctgactatgggcagagaccaaagattgagcgttctttccttgactgtaccaatcgaacagtgcttgtgtcagagggcattgtcacaccacggggcttggcagtggaccgaagtgatggctacgtttattgggttgatgattctttagatataattgcaaggattcgtatcaatggagagaactctgaagtgattcgttatggcagtcgttacccaactccttatggcatcactgtttttgaaaattctatcatatgggtagataggaatttgaaaaagatcttccaagccagcaaggaaccagagaacacagagccacccacagtgataagagacaatatcaactggctaagagatgtgaccatctttgacaagcaagtccagccccggtcaccagcagaggtcaacaacaacccttgcttggaaaacaatggtgggtgctctcatctctgctttgctctgcctggattgcacaccccaaaatgtgactgtgcctttgggaccctgcaaagtgatggcaagaattgtgccatttcaacagaaaatttcctcatctttgccttgtctaattccttgagaagcttacacttggaccctgaaaaccatagcccacctttccaaacaataaatgtggaaagaactgtcatgtctctagactatgacagtgtaagtgatagaatctacttcacacaaaatttagcctctggagttggacagatttcctatgccaccctgtcttcagggatccatactccaactgtcattgcttcaggtatagggactgctgatggcattgcctttgactggattactagaagaatttattacagtgactacctcaaccagatgattaattccatggctgaagatgggtctaaccgcactgtgatagcccgcgttccaaaaccaagagcaattgtgttagatccctgccaagggtacctgtactgggctgactgggatacacatgccaaaatcgagagagccacattgggaggaaacttccgcgtacccattgtgaacagcagtctggtcatgcccagtgggctgactctggactatgaagaggaccttctctactgggtggatgctagtctgcagaggattgaacgcagcactctgacgggcgtggatcgtgaagtcattgtcaatgcagccgttcatgcttttggcttgactctctatggccagtatatttactggactgacttgtacacacaaagaatttaccgagctaacaaatatgacgggtcaggtcagattgcaatgaccacaaatttgctctcccagcccaggggaatcaacactgttgtgaagaaccagaaacaacagtgtaacaatccttgtgaacagtttaatgggggctgcagccatatctgtgcaccaggtccaaatggtgccgagtgccagtgtccacatgagggcaactggtatttggccaacaacaggaagcactgcattgtggacaatggtgaacgatgtggtgcatcttccttcacctgctccaatgggcgctgcatctcggaagagtggaagtgtgataatgacaacgactgtggggatggcagtgatgagatggaaagtgtctgtgcacttcacacctgctcaccgacagccttcacctgtgccaatgggcgatgtgtccaatactcttaccgctgtgattactacaatgactgtggtgatggcagtgatgaggcagggtgcctgttcagggactgcaatgccaccacggagtttatgtgcaataacagaaggtgcatacctcgtgagtttatctgcaatggtgtagacaactgccatgataataacacttcagatgagaaaaattgccccactcacacgtgcagcagcagtgagttccaatgcgcatctgggcgctgtattcctcaacattggtattgtgatcaagaaacagattgttttgatgcctctgatgaacctgcctcttgtggtcactctgagcgaacatgcctagctgatgagttcaagtgtgatggtgggaggtgcatcccaagcgaatggatctgtgacggtgataatgactgtggggatatgagtgacgaggataaaaggcaccagtgtcagaatcaaaactgctcggattccgagtttctctgtgtaaatgacagacctccggacaggaggtgcattccccagtcttgggtctgtgatggcgatgtggattgtactgacggctacgatgagaatcagaattgcaccaggagaacttgctctgaaaatgaattcacctgtggttacggactgtgtatcccaaagatattcaggtgtgaccggcacaatgactgtggtgactatagcgacgagaggggctgcttataccagacttgccaacagaatcagtttacctgtcagaacgggcgctgcattagtaaaaccttcgtctgtgatgaggataatgactgtggagacggatctgatgagctgatgcacctgtgccacaccccagaacccacgtgtccacctcacgagttcaagtgtgacaatgggcgctgcatcgagatgatgaaactctgcaaccacctagatgactgtttggacaacagcgatgagaaaggctgtggcattaatgaatgccatgacccttcaatcagtggctgcgatcacaactgcacagacaccttaaccagtttctattgttcctgtcgtcctggttacaagctcatgtctgacaagcggacttgtgttgatattgatgaatgcacagagatgccttttgtctgtagccagaagtgtgagaatgtaataggctcctacatctgtaagtgtgccccaggctacctccgagaaccagatggaaagacctgccggcaaaacagtaacatcgaaccctatctcatttttagcaaccgttactatttgagaaatttaactatagatggctatttttactccctcatcttggaaggactggacaatgttgtggcattagattttgaccgagtagagaagagattgtattggattgatacacagaggcaagtcattgagagaatgtttctgaataagacaaacaaggagacaatcataaaccacagactaccagctgcagaaagtctggctgtagactgggtttccaggtacctctactgggcagactggggtcaccgcgcatacattgggagagtaggcatggatggaaccaacaagtctgtgataatctccaccaagttagagtggcctaatggcatcaccattgattacaccaatgatctactctactgggcagatgcccacctgggttacatagagtactctgatttggagggccaccatcgacacacggtgtatgatggggcactgcctcaccctttcgctattaccatttttgaagacactatttattggacagattggaatacaaggacagtggaaaagggaaacaaatatgatggatcaaatagacagacactggtgaacacaacacacagaccatttgacatccatgtgtaccatccatataggcagcccattgtgagcaatccctgtggtaccaacaatggtggctgttctcatctctgcctcatcaagccaggaggaaaagggttcacttgcgagtgtccagatgacttccgcacccttcagctgagtggcagcacctactgcatgcccatgtgctccagcacccagttcctgtgcgctaacaatgaaaatgcctctctagcccgtggacagacattgaccttcaaggctccaagggatgggagttttctaggccacgagagagctcatgcatgtcatttcttggaattcagtgttgacttcttctctccagataactgttgcccctggtgctttgctaaagaagtgctgtatgttctctgtgcaggtgcattcctatctggtggaaatgtgatggacagaaagactgctcagatggctctgatgaactggccctttgcccgcagcgcttctgccgactgggacagttccagtgcagtgacggcaactgcaccagcccgcagactttatgcaatgctcaccaaaattgccctgatgggtctgatgaagaccgtcttctttgtgtgcgccaacaaacgttgcatcccagaatcctggcagtgtgacacatttaacgactgtgaggataactcagatgaagacagttcccactgtgccagcaggacctgccggccgggccagtttcggtgtgctaatggccgctgcatcccgcaggcctggaagtgtgatgtggataatgattgtggagaccactcggatgagcccattgaagaatgcatgagctctgcccatctctgtgacaacttcacagaattcagctgcaaaacaaattaccgctgcatcccaaagtgggccgtgtgcaatggtgtagatgactgcagggacaacagtgatgagcaaggctgtgaggagaggacatgccatcctgtgggggatttccgctgtaaaaatcaccactgcatccctcttcgttggcagtgtgatgggcaaaatgactgtggagataactcagatgaggaaaactgtgctccccgggagtgcacagagagcgagtttcgatgtgtcaatcagcagtgcattccctcgcgatggatctgtgaccattacaacgactgtggggacaactcagatgaacgggactgtgagatgaggacctgccatcctgaatattttcagtgtacaagtggacattgtgtacacagtgaactgaaatgcgatggatccgctgactgtttggatgcgtctgatgaagctgattgtcccacacgctttcctgatggtgcatactgccaggctactatgttcgaatgcaaaaaccatgtttgtatcccgccatattggaaatgtgatggcgatgatgactgtggcgatggttcagatgaagaacttcacctgtgcttggatgttccctgtaattcaccaaaccgtttccggtgtgacaacaatcgctgcatttatagtcatgaggtgtgcaatggtgtggatgactgtggagatggaactgatgagacagaggagcactgtagaaaaccgacccctaaaccttgtacagaatatgaatataagtgtggcaatgggcattgcattccacatgacaatgtgtgtgatgatgccgatgactgtggtgactggtccgatgaactgggttgcaatatcaatgaatgtgaacaatttgggacttgtccccagcactgcagaaataccaaaggaagttatgagtgtgtctgtgctgatggcttcacgtctatgagtgaccgccctggaaaacgatgtgcagctgagggtagctctcctttgttgctactgcctgacaatgtccgaattcgaaaatataatctctcatctgagaggttctcagagtatcttcaagatgaggaatatatccaagctgttgattatgattgggatcccaaggacataggcctcagtgttgtgtattacactgtgcgaggggagggctctaggtttggtgctatcaaacgtgcctacatccccaactttgaatccggccgcaataatcttgtgcaggaagttgacctgaaactgaaatacgtaatgcagccagatggaatagcagtggactgggttggaaggcatatttactggtcagatgtcaagaataaacgcattgaggtggctaaacttgatggaaggtacagaaagtggctgatttccactgacctggaccaaccagctgctattgctgtgaatcccaaactagggcttatgttctggactgactggggaaaggaacctaaaatcgagtctgcctggatgaatggagaggaccgcaacatcctggttttcgaggaccttggttggccaactggcctttctatcgattatttgaacaatgaccgaatctactggagtgacttcaaggaggacgttattgaaaccataaaatatgatgggactgataggagagtcattgcaaaggaagtgcccaacctttgcaaacagatctgcagccacctctgccttctgagacctggaggatacagctgtgcctgtccccaaggctccagctttatagaggggagcaccactgagtgtgatgcagccatcgaactgcctatcaacctgccccccccatgcaggtgcatgcacggaggaaattgctattttgatgagactgacctccccaaatgcaagtgtcctagcggctacaccggaaaatattgtgaaatggcgttttcaaaaggcatctctccaggaacaaccgcagtagctgtgctgttgacaatcctcttgatcgtcgtaattggagctctggcaattgcaggattcttccactatagaaggaccggctcccttttgcctgctctgcccaagctgccaagcttaagcagtctcgtcaagccctctgaaaatgggaatggggtgaccttcagatcaggggcagatcttaacatggatattggagtgtctggttttggacctgagactgctattgacaggtcaatggcaatgagtgaagactttgtcatggaaatggggaagcagcccataatatttgaaaacccaatgtactcagccagagacagtgctgtcaaagtggttcagccaatccaggtgactgtatctgaaaatgtggataataagaattatggaagtcccataaacccttctgagatagttccagagacaaacccaacttcaccagctgctgatggaactcaggtgacaaaatggaatctcttcaaacgaaaatctaaacaaactaccaactttgaaaatccaatctatgcacagatggagaacgagcaaaaggaaagtgttgctgcgacaccacctccatcaccttcgctccctgctaagcctaagcctccttcgagaagagacccaactccaacctattctgcaacagaagacacttttaaagacaccgcaaatcttgttaaagaagactctgaagtatag

SEQ ID NO: 2543 - DNA, 14738 bp, Homo sapiens
  SIMILAR (120)..(14030): 981254mologous to Homo sapiens Human parathyroid calcium sensor protein,accession number AAR97211,Smith-Waterman Score= 25635.
tttcgtggcggaggtgcagacctaaaggagcgttcgctagcagaggcgctgccggtgcggtgtgctacgcgcgcccacctcccggggaaggaacggcgaggccggggaccatcgcggagatggatcgcgggccggcagcagtggcgtgcacgctgctcctggctctcgtcgcctgcctagccccggccagtggccaagaatgtgacagtgcgcattttcgctgtggaagtgggcattgcatccctgcagactggaggtgtgatgggaccaaagactgttcagatgacgcggatgaaattggctgcgctgttgtgacctgccagcagggctatttcaagtgccagagtgagggacaatgcatccccagctcctgggtgtgtgaccaagatcaagactgtgatgatggctcagatgaacgtcaagattgctcacaaagtacatgctcaagtcatcagataacatgctccaatggtcagtgtatcccaagtgaatacaggtgcgaccacgtcagagactgccccgatggagctgatgagaatgactgccagtacccaacatgtgagcagcttacttgtgacaatggggcctgctataacaccagtcagaagtgtgattggaaagttgattgcagggactcctcagatgaaatcaactgcactgagatatgcttgcacaatgagttttcatgtggcaatggagagtgtatccctcgtgcttatgtctgtgaccatgacaatgattgccaagacggcagtgatgaacatgcttgcaactatccgacctgcggtggttaccagttcacttgccccagtggccgatgcatttatcaaaactgggtttgtgatggagaagatgactgtaaagataatggagatgaagatggatgtgaaagcggtcctcatgatgttcataaatgttccccaagagaatggtcttgcccagagtcgggacgatgcatctccatttataaagtttgtgatgggattttagattgcccaggaagagaagatgaaaacaacactagtaccggaaaatactgtagtatgactctgtgctctgccttgaactgccagtaccagtgccatgagacgccgtatggaggagcgtgtttttgtcccccaggttatatcatcaaccacaatgacagccgtacctgtgttgagtttgatgattgccagatatggggaatttgtgaccagaagtgtgaaagccgacctggccgtcacctgtgccactgtgaagaagggtatatcttggagcgtggacagtattgcaaagctaatgattcctttggcgaggcctccattatcttctccaatggtcgggatttgttaattggtgatattcatggaaggagcttccggatcctagtggagtctcagaatcgtggagtggccgtgggtgtggctttccactatcacctgcaaagagttttttggacagacaccgtgcaaaataaggttttttcagttgacattaatggtttaaatatccaagaggttctcaatgtttctgttgaaaccccagagaacctggctgtggactgggttaataataaaatctatctagtggaaaccaaggtcaaccgcatagatatggtaaatttggatggaagctatcgggttacccttataactgaaaacttggggcatcctagaggaattgccgtggacccaactgttggttatttatttttctcagattgggagagcctttctggggaacctaagctggaaagggcattcatggatggcagcaaccgtaaagacttggtgaaaacaaagctgggatggcctgctggggtaactctggatatgatatcgaagcgtgtttactgggttgactctcggtttgattacattgaaactgtaacttatgatggaattcaaaggaagactgtagttcatggaggctccctcattcctcatccctttggagtaagcttatttgaaggtcaggtgttctttacagattggacaaagatggccgtgctgaaggcaaacaagttcacagagaccaacccacaagtgtactaccaggcttccctgaggccctatggagtgactgtttaccattccctcagacagccctatgctaccaatccgtgtaaagataacaatgggggctgtgagcaggtctgtgttctcagccacagaacagataatgatggtttgggtttccgttgcaagtgcacattcggcttccaactggatacagatgagcgccactgcattgctgttcagaatttcctcattttttcatcccaagttgctattcgtgggatcccgttcaccttgtctacccaggaagatgtcatggttccagtttcggggaatccttctttctttgtcgggattgattttgacgcccaggacagcactatctttttttcagatatgtcaaaacacatgatttttaagcaaaagattgatggcacaggaagagaaattctcgcagctaacagggtggaaaatgttgaaagtttggcttttgattggatttcaaagaatctctattggacagactctcattacaagagtatcagtgtcatgaggctagctgataaaacgagacgcacagtagttcagtatttaaataacccacggtcggtggtagttcatccttttgccgggtatctattcttcactgattggttccgtcctgctaaaattatgagagcatggagtgacggatctcacctcttgcctgtaataaacactactcttggatggcccaatggcttggccatcgattgggctgcttcacgattgtactgggtagatgcctattttgataaaattgagcacagcacctttgatggtttagacagaagaagactgggccatatagagcagatgacacatccgtttggacttgccatctttggagagcatttattttttactgactggagactgggtgccattattcgagtcaggaaagcagatggtggagaaatgacagttatccgaagtggcattgcttacatactgcatttgaaatcgtatgatgtcaacatccagactggttctaacgcctgtaatcaacccacgcatcctaacggtgactgcagccacttctgcttcccggtgccaaatttccagcgagtgtgtgggtgcccttatggaatgaggctggcttccaatcacttgacatgcgagggggacccaaccaatgaaccacccacggagcagtgtggcttattttccttcccctgtaaaaatggcagatgtgtgcccaattactatctctgtgatggagtcgatgattgtcatgataacagtgatgagcaactatgtggcacacttaataatacctgttcatcttcggcgttcacctgtggccatggggagtgcattcctgcacactggcgctgtgacaaacgcaacgactgtgtggatggcagtgatgagcacaactgccccacccacgcacctgcttcctgccttgacacccaatacacctgtgataatcaccagtgtatctcaaagaactgggtctgtgacacagacaatgattgtggggatggatctgatgaaaagaactgcaattcgacagagacatgccaacctagtcagtttaattgccccaatcatcgatgtattgacctatcgtttgtctgtgatggtgacaaggattgtgttgatggatctgatgaggttggttgtgtattaaactgtactgcttctcaattcaagtgtgccagtggggataaatgtattggcgtcacaaatcgttgtgatggtgtttttgattgcagtgacaactcggatgaagcgggctgtccaaccaggcctcctggtatgtgccactcagatgaatttcagtgccaagaagatggtatctgcatcccgaacttctgggaatgtgatgggcatccagactgcctctatggatctgatgagcacaatgcctgtgtccccaagacttgcccttcatcatatttccactgtgacaacggaaactgcatccacagggcatggctctgtgatcgggacaatgactgcggggatatgagtgatgagaaggactgccctactcagccctttcgctgtcctagttggcaatggcagtgtcttggccataacatctgtgtgaatctgagtgtagtgtgtgatggcatctttgactgccccaatgggacagatgagtccccactttgcaatgggaacagctgctcagatttcaatggtggttgtactcacgagtgtgttcaagagccctttggggctaaatgcctatgtccattgggattcttacttgccaatgattctaagacctgtgaagacatagatgaatgtgatattctaggctcttgtagccagcactgttacaatatgagaggttctttccggtgctcgtgtgatacaggctacatgttagaaagtgatgggaggacttgcaaagttacagcatctgagagtctgctgttacttgtggcaagtcagaacaaaattattgccgacagtgtcacctcccaggtccacaatatctattcattggtcgagaatggttcttacattgtagctgttgattttgattcaattagtggtcgtatcttttggtctgatgcaactcagggtaaaacctggagtgcgtttcaaaatggaacggacagaagagtggtatttgacagtagcatcatcttgactgaaactattgcaatagattgggtaggtcgtaatctttactggacagactatgctctggaaacaattgaagtctccaaaattgatgggagccacaggactgtgctgattagtaaaaacctaacaaatccaagaggactagcattagatcccagaatgaatgagcatctactgttctggtctgactggggccaccaccctcgcatcgagcgagccagcatggacggcagcatgcgcactgtcattgtccaggacaagatcttctggccctgcggcttaactattgactaccccaacagactgctctacttcatggactcctatcttgattacatggacttttgcgattataatggacaccatcggagacaggtgatagccagtgatttgattatacggcacccctatgccctaactctctttgaagactctgtgtactggactgaccgtgctactcgtcgggttatgcgagccaacaagtggcatggagggaaccagtcagttgtaatgtataatattcaatggccccttgggattgttgcggttcatccttcgaaacaaccaaattccgtgaatccatgtgccttttcccgctgcagccatctctgcctgctttcctcacaggggcctcatttttactcctgtgtttgtccttcaggatggagtctgtctcctgatctcctgaattgcttgagagatgatcaacctttcttaataactgtaaggcaacatataatttttggaatctcccttaatcctgaggtgaagagcaatgatgctatggtccccatagcagggatacagaatggtttagatgttgaatttgatgatgctgagcaatacatctattgggttgaaaatccaggtgaaattcacagagtgaagacagatggcaccaacaggacagtatttgcttctatatctatggtggggccttctatgaacctggccttagattggatttcaagaaacctttattctaccaatcctagaactcagtcaatcgaggttttgacactccacggagatatcagatacagaaaaacattgattgccaatgatgggacagctcttggagttggctttccaattggcataactgttgatcctgctcgtgggaagctgtactggtcagaccaaggaactgacagtggggttcctgccaagatcgccagtgctaacatggatggcacatctgtgaaaactctctttactgggaacctcgaacacctggagtgtgtcactcttgacatcgaagagcagaaactctactgggcagtcactggaagaggagtgattgaaagaggaaacgtggatggaacagatcggatgatcctggtacaccagctttcccacccctggggaattgcagtccatgattctttcctttattatactgatgaacagtatgaggtcattgaaagagttgataaggccactggggccaacaaaatagtcttgagagataatgttccaaatctgaggggtcttcaagtttatcacagacgcaatgccgccgaatcctcaaatggctgtagcaacaacatgaatgcctgtcagcagatttgcctgcctgtaccaggaggattgttttcctgcgcctgtgccactggatttaaactcaatcctgataatcggtcctgctctccatataactctttcattgttgtttcaatgctgtctgcaatcagaggctttagcttggaattgtcagatcattcagaaaccatggtgccggtggcaggccaaggacgaaacgcactgcatgtggatgtggatgtgtcctctggctttatttattggtgtgattttagcagctcagtggcatctgataatgcgatccgtagaattaaaccagatggatcttctctgatgaacattgtgacacatggaataggagaaaatggagtccggggtattgcagtggattgggtagcaggaaatctttatttcaccaatgcctttgtttctgaaacactgatagaagttctgcggatcaatactacttaccgccgtgttcttcttaaagtcacagtggacatgcctaggcatattgttgtagatcccaagaacagatacctcttctgggctgactatgggcagagaccaaagattgagcgttctttccttgactgtaccaatcgaacagtgcttgtgtcagagggcattgtcacaccacggggcttggcagtggaccgaagtgatggctacgtttattgggttgatgattctttagatataattgcaaggattcgtatcaatggagagaactctgaagtgattcgttatggcagtcgttacccaactccttatggcatcactgtttttgaaaattctatcatatgggtagataggaatttgaaaaagatcttccaagccagcaaggaaccagagaacacagagccacccacagtgataagagacaatatcaactggctaagagatgtgaccatctttgacaagcaagtccagccccggtcaccagcagaggtcaacaacaacccttgcttggaaaacaatggtgggtgctctcatctctgctttgctctgcctggattgcacaccccaaaatgtgactgtgcctttgggaccctgcaaagtgatggcaagaattgtgccatttcaacagaaaatttcctcatctttgccttgtctaattccttgagaagcttacacttggaccctgaaaaccatagcccacctttccaaacaataaatgtggaaagaactgtcatgtctctagactatgacagtgtaagtgatagaatctacttcacacaaaatttagcctctggagttggacagatttcctatgccaccctgtcttcagggatccatactccaactgtcattgcttcaggtatagggactgctgatggcattgcctttgactggattactagaagaatttattacagtgactacctcaaccagatgattaattccatggctgaagatgggtctaaccgcactgtgatagcccgcgttccaaaaccaagagcaattgtgttagatccctgccaagggtacctgtactgggctgactgggatacacatgccaaaatcgagagagccacattgggaggaaacttccgggtacccattgtgaacagcagtctggtcatgcccagtgggctgactctggactatgaagaggaccttctctactgggtggatgctagtctgcagaggattgaacgcagcactctgacgggcgtggatcgtgaagtcattgtcaatgcagccgttcatgcttttggcttgactctctatggccagtatatttactggactgacttgtacacacaaagaatttaccgagctaacaaatatgacgggtcaggtcagattgcaatgaccacaaatttgctctcccagcccaggggaatcaacactgttgtgaagaaccagaaacaacagtgtaacaatccttgtgaacagtttaatgggggctgcagccatatctgtgcaccaggtccaaatggtgccgagtgccagtgtccacatgagggcaactggtatttggccaacaacaggaagcactgcattgtggacaatggtgaacgatgtggtgcatcttccttcacctgctccaatgggcgctgcatctcggaagagtggaagtgtgataatgacaacgactgtggggatggcagtgatgagatggaaagtgtctgtgcacttcacacctgctcaccgacagccttcacctgtgccaatgggcgatgtgtccaatactcttaccgctgtgattactacaatgactgtggtgatggcagtgatgaggcagggtgcctgttcagggactgcaatgccaccacggagtttatgtgcaataacagaaggtgcatacctcgtgagtttatctgcaatggtgtagacaactgccatgataataacacttcagatgagaaaaattgccctgatcgcacttgccagtctggatacacaaaatgtcataattcaaatatttgtattcctcgcgtttatttgtgtgacggagacaatgactgtggagataacagtgatgaaaaccctacttattgcaccactcacacatgcagcagcagtgagttccaatgcgcatctgggcgctgtattccccaaacatttggtatttgtgatcaagaaacagattgttttgatgcctctgatgaaccctcctcttgtggtcactctgagcgaacatgcctatctgatgagttcaagtgtgatggtgggaggtgcatcccaaacgaatggatctgtgacggtgataatgactgtggggatatgagtgacgaggataaaaggcaccagtgtcagaatcaaaactgctcggattccgagtttccctgtgtaaatgacagacctccggacaggaggtgcattccccagtcttggccccctgatggcgatgtggattgtactgacggccacgatgagattcagaattgcaccaggagaacttgctctgaaaatgaattcacctgtggttacggactgtgtatcccaaagatattcaggtgtgaccggcacaatgactgtggtgactatagcgacgagaggggctgcttataccagacttgccaacagaatcagtttacctgtcagaacgggcgctgcattagtaaaaccttcgtctgtgatgaggataatgactgtggagacggatctgatgagctgatgcacctgtgccacaccccagaacccacgtgtccacctcacgagttcaagtgtgacaatgggcgctgcatcgagatgatgaaactctgcaaccacctagatgactgtttggacaacagcgatgagaaaggctgtggcattaatgaatgccatgacccttcaatcagtggctgcgatcacaactgcacagacaccttaaccagtttctattgttcctgtcgtcctggttacaagctcatgtctgacaagcggacttgtgttgatattgatgaatgcacagagatgccttttgtctgtagccagaagtgtgagaatgtaataggctcctacatctgtaagtgtgccccaggctacctccgagaaccagatggaaagacctgccggcaaaacagtaacatcgaaccctatctcatttttagcaaccgttactatttgcgaaatttaactatagatggctatttttactccctcatcttggaaggactggacaatgttgtggcattagattttgaccgagtagagaagagattgtattggattgatacacagaggcaagtcattgagagaatgtttctgaataagacaaacaaggagacaatcataaaccacagactaccagctgcagaaagtctggctgtagactgggtttccagaaagctctactggttggatgcccgcctggatggcctctttgtctctgacctcaatggtggacaccgccgcatgctggcccagcactgtgtggatgccaacaacaccttctgctttgataatcccagaggacttgcccttcaccctcaatatgggtacctctactgggcagactggggtcaccgcgcatacattgggagagtaggcatggatggaaccaacaagtctgtgataatctccaccaagttagagtggcctaatggcatcaccattgattacaccaatgatctactctactgggcagatgcccacctgggttacatagagtactctgatttggagggccaccatcgacacacggtgtatgatggggcactgcctcaccctttcgctattaccatttttgaagacactatttattggacagattggaatacaaggacagtggaaaagggaaacaaatatgatggatcaaatagacagacactggtgaacacaacccacagaccatttgacatccatgtgtaccatccatataggcagcccattgtgagcaatccctgtggtaccaacaatggtggctgttctcatctctgcctcatcaagccaggaggaaaagggttcacttgcgagtgtccagatgacttccgcacccttcaactgagtggcagcacctactgcatgcccatgtgctccagcacccagttcctgtgcgctaacaatgaaaagtgcattcctatctggtggaaatgtgatggacagaaagactgctcagatggctctgatgaactggccctttgcccgcagcgcttctgccgactgggacagttccagtgcagtgacggcaactgcaccagcccgcagactttatgcaatgctcaccaaaattgccctgatgggtctgatgaagaccgtcttctttgtgagaatcaccactgtgactccaatgaatggcagtgcgccaacaaacgttgcatcccagaatcctggcagtgtgacagttttaacgactgtgaggataactcagatgaagacagttcccactgtgccagcaggacctgccggccgggccagtttcggtgtgctaatggccgctgcatcccgcaggcctggaagtgtgatgtggataatgattgtggagaccactcggatgagcccattgaagaatgcatgagctctgcccatctctgtgacaacttcacagaattcagctgcaaaacaaattaccgctgcatcccaaagtgggccgtgtgcaatggtgtagatgactgcagggacaacagtgatgagcaaggctgtgaggagaggacatgccatcctgtgggggatttccgctgtaaaaatcaccactgcatccctcttcgttggaagtgtgatgggcaaaatgactgtggagataactcagatgaggaaaactgcgctccccgggagtgcacagagagcgagtttcgatgtgtcaatcagcagtgcattccctcgcgatggatctgtgaccattacaacgacttgtggggggacaactcagatgaacgggactgtgagatgaggacctgccatcctgaatattttcagtgtacaagtggacatcgtgtacacagtgaactgaaatgcgatggatccgctgactgtttggatgcgtctgatgaagctgattgtcccacacgctttcctgatggtgcatactgccaggctactatgttcgaatgcaaaaaccatgtttgtatcccgccatattggaaatgtgatggcgatgatgactgtggcgatggttcagatgaagaacttcacctgtgcttggatgttccctgtaattcaccaaaccgtttccggtgtgacaacaatcgctgcatttatagtcatgaggtgtgcaatggtgtggatgactgtggagatggaactgatgagacagaggagcactgtagaaaaccgacccctaaaccttgtacagaatatgaatataagtgtggcaatgggcattgcattccacatgacaatgtgtgtgatgatgccgatgactgtggtgactggtccgatgaactgggttgcaataaaggaaaagaaagaacatgtgctgaaaatatatgcgagcaaaattgtacccaattaaatgaaggaggatttatctgctcctgtacagctgggttcgaaaccaatgtttttgacagaacctcctgtctagatatcaatgaatgtgaacaatttgggacttgtccccagcactgcagaaataccaaaggaagttatgagtgtgtctgtgctgatggcttcacgtctatgagtgaccgccctggaaaacgatgtgcagctgagggtagctctcctttgttgctactgcctgacaatgtccgaattcgaaaatataatctctcatctgagaggttctcagagtatcttcaagatgaggaatatatccaagctgttgattatgattgggatcccgaggacataggcctcagtgttgtgtattacactgtgcgaggggagggctctaggtttggtgctatcaaacgtgcctacatccccaactttgaatccggccgcaataatcttgtgcaggaagttgacctgaaactgaaatacgtaatgcagccagatggaatagcagtggactgggttggaaggcatatttactggtcagatgtcaagaataaacgcattgaggtggctaaacttgatggaaggtacagaaagtggctgatttccactgacctggaccaaccagctgctattgctgtgaatcccaaactagggcttatgttctggactgactggggaaaggaacctaaactcgagtctgcctggatgaatggagaggaccccaacatcctggttttcgaggaccttggttggccaactggcctttctatcgattatttgaacaatgaccgaatctactggagtgacttcaaggaggacgttattgaaaccataaaatatgatgggactgataggagagtcattgcaaaggaagcaatgaacccttacagcctggacatctttgaagaccagttatactggatatctaaggaaaagggagaagtatggaaacaaaataaatttgggcaaggaaagaaagagaaaacgctggtagtgaacccttggctcactcaagttcgaatctttcatcaactcagatacaataagtcagtgcccaacctttgcaaacagatctgcagccacctctgccttctgagacctggaggatacagctgtgcctgtccccaaggctccagctttatagaggggagcaccactgagtgtgatgcagccatcgaactgcctatcaacctgccccccccatgcaggtgcatgcacggaggaaattgctattttgatgagactgacctccccaaatgcaagtgtcctagcggctacaccggaaaatattgtgaaatggcgttttcaaaaggcatctctccaggaacaaccgcagtagctgtgctgttgacaatcctcttgatcgtcgtaattggagctctggcaattgcaggattcttccactatagaaggaccggctcccttttgcctgctctgcccaagctgccaagcttaagcagtctcgtcaagccctctgaaaatgggaatggggtgaccttcagatcaggggcagatcttaacatggatattggagtgtctggttttggacctgagactgctattgacaggtcaatggcaatgagtgaagactttgtcatggaaatggggaagcagcccataatatttgaaaacccaatgtactcagccagagacagtgctgtcaaagtggttcagccaatccaggtgactgtatctgaaaatgtggataataagaattatggaagtcccataaacccttctgaggatagttccagagacaaacccaacttcaccagctgctgatggacctcaggtgccaaaatgggaatctcttcaaacgaaaatctaaacaaactgaccaactttggaaaatccattctatggcacagatgggagaacgagtcaaaagggaaagtgttgctggcgacaccaccctccatcaaccttcgctccctgctaagccctaagcctccttcgagaagagacccaaactccaacctattctgcaacagaagacacttttaaagacaccgcaaatcttgttaaagaagactctgaagtatagctataccagctatttagggaataattagaaacacacttttgcacatatattttttacaaacagatgaaaaaagttaacattcagtactttatgaaaaaaatatatttttccctgtttgcctatagttggaggtatcctgtgtgtcttttttttacttatgccgtctcatatttttacaaataattatcacaatgtactatatgtatatctttgcactgaagttgtctgaaggtaatactataaatatattgtatatttgtaaattttggaaagattatcctgttactgaatttgctaataaagctgtctgctgatttggttggtgatcattatagtaaatgatccaacaagaaaaggaattgactggggacctttagccgtgtctaaagaagaggcaccactcatatttcctataaaattatctaggaaaggaatccaggccccgctcttgggtccatttttacacattagcacttaattaatgttcaatattacatgtccaatttgattaatggctatgttgataggggccactatgtgttgtataggacatctgggacttgactgtaggactcctcagataatacagaggtagggaaaaggcatttcagtttgggcccttctgtgtgtta

SEQ ID NO: 2544 - DNA, 475 bp, Homo sapiens
gtggcaggatttttattgccaataacatatttttggggctgccttttttacacatccagatggtccctctaactgggctttctctaattttgtgatgttctgtcattgtctcccaaagtgctgggattacaggggtgagtccccgcgcccggctcattttaaaatttttgtagatcagtgtactgttgtaaaaaaaaaaaaaataagaaaaataaaaaataaatttttgtagtgataggatcccactgaggccagagaatggggtctggagacaaaggagcattcacttcagcctctgactggtggcaggccaagtctttatttacatagggtgtaaccaaataggaaacctctaaaggggtacttaaaccccagattttctacacagggcacttgcttgagcctcatcccgctttctggaatgtacttttgcttcaataaatctgtgcttttgttccttcaaaaaaaaaaaaaa

SEQ ID NO: 2545 - DNA, 449 bp, Homo sapiens
  SIMILAR (2)..(448): 951254mologous to Homo sapiens Human cytoskeleton associated protein 6 (CYSKP-6),accession number AAY91951,Smith-Waterman Score= 720.
gtcatctgtccgtgcggtggaattcccagaagacgcatctggaggctccagtcccagtgggacctcaaagtccgatgccaaccgggcaagcagcgggggtggcggaggaggcctcatggaggaaatgaacaaactgctggccaagaggagaaaagcagcctcccagtcagacaagccagccgagaagaaggaagatgaaagccaaatggaagatcctagtacctccccctctccggggacccgagcagccagccagccacctaactcctcagaggctggccggaagccctgggagcggagcaactcggtggagaagcctgtgtcctcgattctgtccaggatgaagcctgctgggagcgtgaatgacatggccctggatgccttcgacttggaccggatgaagcaggagatcctagaggaggtggtgagagagctccacaaggtgaagg

SEQ ID NO: 2546 - DNA, 6844 bp, Homo sapiens
  SIMILAR (302)..(925): 951254mologous to Homo sapiens basic fibroblast growth factor (ctg start codon); putative,accession number J04513,Smith-Waterman Score=1045.
cggccccagaaaacccgagcgagtagggggcggcgcgcaggagggaggagaactgggggcgcgggaggctggtgggtgtcgggggtggagatgtagaagatgtgacgccgcggcccggcgggtgccagattagcggacggctgcccgcggttgcaacgggatcccgggcgctgcagcttgggaggcggctctccccaggcggcgtccgcggagacacccatccgtgaaccccaggtcccgggccgccggctcgccgcgcaccaggggccggcggacagaagagcggccgagcggctcgaggctgggggaccgcgggcgcggccgcgcgctgccgggcgggaggctggggggccggggccggggccgtgccccggagcgggtcggaggccggggccggggccgggggacggcggctccccgcgcggctccagcggctcggggatcccggccgggccccgcagggaccatggcagccgggagcatcaccacgctgcccgccttgcccgaggatggcggcagcggcgccttcccgcccggccacttcaaggaccccaagcggctgtactgcaaaaacgggggcttcttcctgcgcatccaccccgacggccgagttgacggggtccgggagaagagcgaccctcacatcaagctacaacttcaagcagaagagagaggagttgtgtctatcaaaggagttgtgtgcttaaccgttacctggctatgaaaggaagatggaagattactggcttctaaatgtgttacggatgagtgtttcttttttgaacgattggaatctaataactacaatacttaccggtcaaggaaatacaccagttggtatgtggcattgaaacgaactgggcagtataaacttggatccaaaacaggacctgggcagaaagctatactttttcttccaatgtctggctaagagctgattttaatgggccacatctaatctcatttcacatgaaagaagaagtatattttagaaatttgttaatgagagtaaaagacaataaatgtgtatagctcagtttggataattggtcaaacaattttttatccagtagtaaaatatgtaaccattgtcccagtaaagaaaaataacaaaagttgtaaaatgtatattctcccttttatattgcatctgctgttacccagtgaagcttacctagagcaatgatctttttcacgcatttgctttattcgaaaagaggcttttaaaatgtgtattgtttagaaacaaaatttcttctatggaaatcatcatatacattagaaaatcacagtcgagatgtttaatcaactccaaaatgtccactatttcttatgtcattcgttagtctacatgtttctaaacatataaatgtgaatttaatcaattcctttcatagttttataattctctggcagttccttatgatagaggttataaaacaagccctgtgtaaaactgctggaaagtcttccacagtcaggtcaattttggtcaaaccctttctctgtacccatacagcatcagccttagcaactctgctggtgatgggagttgtattttccagtcttcgccaggacattgaagatccatccactcacatcttaagcattcttcctggcaaaaatttatggtgaatgaatatggctttaggcggcagatgatatacatatctgacttcccaaaagctacaggaaattgtgtgctgttgccgaatactcaggacggacctgaattctgattttataccagtctcttcaaaaccttctcgaaccgctgtgtctcctacgtaaaaaaagagatgtacaaatcaataataattacacttttagaaactgtatcatcaaagattttcagttaaagtagcattatgtaaaggctcaaaacattaccctaacaaagtaaagttttcaatacaaattctttgccttgtggatatcaagaaatcccaaaatattttcttaccactgtaaattcaagaagcttttgaaatgctgaatatttctttggctgctacttggaggcttatctacctgtacatttttggggtcagctctttttaacttcttgctgctgtttttcccaaaaggtaaaaatatagattgaaaagttaaaacattttgcatggctgcagttcctttgtttcttgagataagattccaaagaacttagatttatttcttcaacaccgaaatgctggaggtgtttgatcagttttcaagaaacttggaatataaataattttataattcaacaaaggttttcacattttataaggttgatttttcaattaaatgcaaatttatgtggcaggatttttattgccattaacatatttttgtggctgctttttctacacatccagatggtccctctaactgggctttctctaattttgtgatgttctgtcattgtctcccaaagtatttaggagaagccctttaaaaagctgccttcctctaccactttgctggaaagcttcacaattgtcacagacaaagatttttgttccaatactcgttttgcctctatttttcttgtttgtcaaatagtaaatgatatttgcccttgcagtaattctactggtgaaaaacatgcaaagaagaggaagtcacagaaacatgtctcaattcccatgtgctgtgactgtagactgtcttaccatagactgtcttacccatcccctggatatgctcttgttttttccctctaatagctatggaaagatgcatagaaagagtataatgttttaaaacataaggcattcatctgccatttttcaaattacatggtgagcttcccttccaattgagatttgcccataggttaaacatggttagaaacaactgaaagcataaaagaaaaatctaggccgggtgcagtggctcatgcccatattccctgcactttgggaggccaaagcaggaggatcgcttgagcccaggagttcaagaccaacctggtgaaaccccgtctctacaaaaaaacacaaaaaatagccaggcatggtggcgtgtacatgtggtctcagatacttgggaggctgaggtgggagggttgatcacttgaggctgagaggtcaaggttacagtgagccataatcgtgccactgcagtccagcctaggcaacagagtgagactttgtctcaagaaaaagagaaattttccttaataagaaaagtaatttttactctgatgtgcaatacatttgttattaaatttattatttaagatggtagcactagtcttaaattgtataaaatatcccctaacatgtttaaatgtccatttttattcattatgctttgaaaaataattatggggaaatacatgtttgttattaaatttattattaaagatagtagcactagtcttaaatttgatataacatctcctaacttgtttaaatgtccatttttattctttatgtttgaaaataaattatggggatcctatttagctcttagtaccactaatcaaaagttccggcatgtagctcatgatctatgctgtttctatgtcgtggaagcaccggatgggggtagtgagcaaatctgccctgctcagcagtcaccatagcagctgactgaaaatcagcactgcctgagtagttttggatcagtttaactggaatcccctaactgactgaaaattgaatggccaaataagtgcttttgtcccccagagtatgcgggagacccttccaacctcaagatggatatttcttccgcaaggatttccaagatgaattgaaatttttaatcaagatagtgtgctttattctgttgtattttttattattttaatatactgtaagccaaactgaaataacatttgctgttttataggtttgaagaacataggaaaaactaagaggttttgtttttatttttgctgatgaagagatatgtttaaatactgttgtattgttttgtttagttacaggacaataatgaaatggagtttatatttgttatttctattttgttatatttaataatagaattagattgaaataaaatataatgggaaataatctgcagaatgtgggtttcctggtgtttcctctgactctagtgcactgatgatctctgataaggctcagctgctttatagttctctggctaatgcagcagatactcttcctgccagtggtaatacgattttttaagaaggcagtttgtcaattttaatcttgtggatacctttatactcttagggtattattttatacaaaagccttgaggattgcattctattttctatatgaccctcttgatatttaaaaaacactatggataacaattcttcatttacctagtattatgaaagaatgaaggagttcaaacaaatgtgtttcccagttaactagggtttactgtttgagccaatataaatgtttaactgtttgtgatggcagtattcctaaagtacattgcatgttttcctaaatacagagtttaaataatttcagtaattcttagatgattcagcttcatcattaagaatatcttttgttttatggttgagttagaaatgccttcatatagacatagtctttcagacctctactgtcagttttcatttctagctgctttcagggttttatgaattttcaggcaaagctttaatttatactaagcttagggaagtatggctaatgccaacggcagtttttttcttcttaattccacatgactgaggcatatatgatctctgggtaggtgagttgttgtgacaaccacaagcactttttttttttttaaagaaaaaaaggtagtgaatttttaatcatctggactttaagaaggattctggagtatacttaggcctgaaattatatatatttggcttggaaatgtgtttttcttcaattacatctacaagtaagtacagctgaaattcagaggacccataagagttcacatgaaaaaaatcaattcatttgaaaaggcaagatgcaggagagaggaagccttgcaaacctgcagactgctttttgcccaatatagattgggtaaggctgcaaaacataagcttaattagctcacatgctctgctctcacgtggcaccagtggatagtgtgagagaattaggctgtagaacaaatggccttctctttcagcattcacaccactacaaaatcatcttttatatcaacagaagaataagcataaactaagcaaaaggtcaataagtacctgaaaccaagattggctagagatatatcttaatgcaatccattttctgatggattgttaccgagttggctatataatgtatgtatgggtattttgatttgtgtaaaagttttaaaaatcaagctttaaggtacatgggacatttttaaataaaatattttaaagacattttaggaaaattgccttaaatatcattggttggccaaaatagaataggggacatgcatattaagggaaaaggtcatggagaaataatattggtatcaaacaaatacattgatttgtcatgatacacactgaatttgatccaatagtttaaggaataggtaggaaaatttggtttctatttttcgatttcctgtaaatcagtgacataaataattcttagcttattttatatttccttgtcttaaatactgagctcagtaagttgtgttaggggattatttctcagttgagactttcttatatgacattttacgtatgttttgacttcctgactattaaaaataaatagtagatacaattttcataaagtgaagaattatataatcactgctttataactgactttattatatttatttcaaagttcatttaaaggctactattcatcctctgtgatggaatggtcaggaatttgttttctcatagtttaattccaacaacaatattagtccgtatccaaaataacctttaaatggctaaactttactggatgtatatccaaagcttctcattctcagacagattaatccagaagcagtcataaacagaagaataggtggtatgttcctaatgatattatttctactaatggaataaactggtaatattagaaattatgctgctaattatatcagctctgagggtaatttctgaaatgttcggactccagtcggaaccaaattggaaaatttaaatttttattcttagctataaagcaagaaagtaaacacattaatttcctcaacatttttaagccaattaaaaatataaaagatacacaccaatatctttcttcaggctctgacaggcctcctggaaacttccacatatttttcaacgccagtataaagtcagaaaataaagttaacataactttcactaacacacacatatgtagatttcacaaaatccacctataattggtcaaagtggttgagaatatattttttagtaattgcatgcaaaatttttctagcttcccatcccttctcccctcgtttccttctttttttgggggggagctggtaactgatggaaaatcttttccccaccttttctcttcaggaaatataagtggttttgtttggttaacgtgataccattctgtatggaatgaaacattggaggggaaacatctacttgaattttcttgtaattctaaaatattttgctgctagttaactatgaacagatagaagaatcttacagatgctgctataaataagtagaaaatataaatttcatcactaaaatatgctattttaaaatctatttcctatattgtatttctaatcagatgtattactctttattatttctattgtatgtgttaatgattttatgtaaaaatgtaattgcgttttcatgagtagtatgaataaaattgattagtttgtgttttcttgtcaaaaaaaa

SEQ ID NO: 2547 - DNA, 2607 bp, Homo sapiens
  SIMILAR (1)..(2604): 1001254mologous to Homo sapiens ALG-2 interacting protein 1,accession number AF151793,Smith-Waterman Score=4479.
atggcgacattcatctcggtgcagctgaaaaagacctcagaggtggacctggccaagccgctggtgaagttcatccagcagacttacccaagcggcggggaagagcaggcccagtactgccgcgcggcggaggagctcagcaagctgcgccgcgccgcagtcggtcgtccgctggacaagcacgagggcgcgctcgagacgctcctgagatattatgatcagatttgttctattgaacccaaattcccattttctgaaaatcagatctgcttgacatttacctggaaggatgctttcgataaaggttcactttttggaggctctgtaaaactggctcttgcaagcttaggatatgaaaagagctgtgtgttgttcaattgtgcagccttagctagccaaattgcagcagaacagaacctggataatgatgaaggattgaaaatcgctgctaaacattaccagtttgctagtggtgcctttttacatattaaagagacggttttatctgccttaagtcgagagccgaccgtggacatatctccagatactgttgggaccctcagtcttattatgctggcacaggctcaagaagtattttttttaaaagccacaagagataaaatgaaagatgccatcatagctaaattggctaatcaggctgcagattattttggtgatgctttcaaacagtgtcaatacaaagatactctccccaaggaggtgttccctgtcttggctgcaaagcactgtatcatgcaggccaatgctgagtaccatcagtctatcctggcaaaacagcagaagaaatttggagaagaaattgcaaggttacagcatgcagcagaactgattaaaacagtggcatctcgctatgatgaatatgttaatgtgaaggatttttctgacaaaatcaatcgtgcccttactgcagcaaagaaggataatgacttcatttatcatgatcgagttccagaccttaaagatctagatcctattggcaaagccacacttgtgaaatctaccccggtcaatgtacccatcagtcagaaatttactgatctgtttgagaagatggttcccgtgtcagtacagcagtctttggctgcctataatcagaggaaagccgatttggttaacagatcaattgctcagatgagagaagccaccactttggcaaatggggtgctagcttcccttaatcttccagcagcaattgaagatgtgtctggagacactgtacctcagtctatattgactaaatccagatctgtgattgaacagggaggcatccagactgttgatcagttgattaaagaactgcctgaattactgcaacgaaatagagaaatcctagatgagtcattaaggttgttggatgaagaagaagcaaccgataatgatttaagagcaaaatttaaggaacgttggcaaaggacaccatccaatgaactgtataagcctttaagagcagagggaaccaacttcagaacagttttagataaagctgtgcaggcagatggacaagtgaaagaatgttaccagtctcatcgtgacaccatcgtgcttttgtgtaagccagagcctgagctgaatgctgccatcccttctgctaatccagcaaagaccatgcagggcagtgaggttgtaaatgtcttaaaatccttattgtcaaatcttgatgaagtaaagaaggaaagagagggtctggagaatgacttgaaatctgtgaattttgacatgacaagcaagtttttgacagccctggctcaagatggtgtgataaatgaagaagctctttctgttactgaactagatcgagtctatggaggtcttacaactaaagtccaagaatctctaaagaaacaggaggggcttcttaaaaatattcaggtctcacatcaggaattttcgaaaatgaaacaatctaataatgaagctaacttaagagaagaagttttgaagaatttagctactgcatatgacaactttgttgaacttgtagctaatttgaaggaaggcacaaagttttacaatgagttgactgaaatcctggtcaggttccagaacaaatgcagtgatatagtttttgcacggaagacagaaagagatgaactcttaaaggacttgcaacaaagcattgccagagaacctagtgctccttcaattcctacacctgcgtatcagtccttaccagcaggaggacatgcaccaactcctccaactccagcgccaagaaccatgccgcctactaagccccagcccccagccaggcctccaccacctgtgcttccagcaaatcgagctccttctgctactgctccatctccagtgggggctgggactgctgcgccagctccatcacaaacgcctggctcagctcctcctccacaggcgcagggaccaccctatcccacctatccaggatatcctgggtattgccaaatgcccatgcccatgggctataatccttatgcgtatggccagtataatatgccatatccaccagtgtatcaccagagtcctggacaggctccatacccgggaccccagcagccttcataccccttccctcagcccccacagcagtcttactatccacagcagtaa

SEQ ID NO: 2548 - DNA, 1606 bp, Homo sapiens
  SIMILAR (555)..(671): 921254mologous to Homo sapiens Human secreted protein clone cw691_11 protein sequence SEQ ID NO:60,accession number AAY53027,Smith-Waterman Score=218.
  misc_feature (1)...(1606): n = a,t,c or g
attatgggttgcactttcttaaaggttaatctctgtggtaatttcttaattttaaaaatccaaacatttgactaccttttaagatgtgctctaaattttacttagtaagtacatgttgtctgccaaatattagaactttataagttgtaaatttatgtatatcacagtgaatattgaatattnnnnnnnnnnnnnnnnnnnngatgactagttttgccacgttaaaatgaagggtctccattttttttctttctttaatactcgaatatttattcttattttcttcagtatttatttttggatagtattaaacacttggtactcttttgttttaattaataacaggataggaatgcttttctctgacaagtgccttgaaacagtttttttcactccactgttctttaatagactaaaaaatagaaatgactttcatgaaaaacgtagttctagaatgattattgttttattttttagtatttgatttaccaatcaagattttttctgttttcttctatcaggtattgccaaatgcccatgcccatgggctatgtaatccttatgcgtatggccagtataatatgccatatccaccagtgtatcaccagagtcctggacaggctccatacccggggacccagcagccttcataccccttcccctcagcccccacagcagtcttactatccacagcagtaatatgtctgctcagcagctcagctgattcagatcagagggaaagaaataccaaccctgcaataagtgtacctaaactctacgcctctggttaatgtaatgtactctcctggactggaatgccagtgtataatttctgtcttaccagctaggaagctgtggccccagttccacatttggattacacatgtgagatttgctgctgttgcagtgataaacactaaggtataataggatttgaaattggcattacagttccataaaaattgaaaatggagaaatttaaacctggcaagtggaaacatttggaaaacgattatactttctacataagacatggttgggacgatcgagatacttacaaaagatgggttaagtatgggatactagagaaaattaagttttctttctctttggtttattgatttggtttaatttccattatgctatttttgcataatcaaggcactgtaaatcttataattttaaaataaattacttaagaacagttgtcattgttatgttttgttattgattctcattactgtctaattttttttctggtattagtctcattttgtatgtatataagttaaacagatactgtttttaagtgcatgaatagtacaagttattatcaaggatgttttacagggaaatcaaaagaatattatcatactttatctttcgtatgctgattagtaaacgatttttgacatttattttagaaagtcctataatgtggaagaaacaaacagttgctaccaaagattcttcaaataaacatacaaataaatgtgtatatttaatgttttattgttagcttctccagaaaattgatgcaaattctggtaataattcttgcattttttccccataacctggttaaaataaatacgccattggcaat

SEQ ID NO: 2549 - DNA, 429 bp, Homo sapiens
  SIMILAR (39)..(191): 981254mologous to Homo sapiens BCL2/adenovirus E1B 19kD- interacting protein 3,accession number U15174,Smith-Waterman Score= 250.
acagaggacacatcagctgacacgtttcttcccgcctcagggagttcctctttaaacacccgaagcgcacggccaccctcagcatgaggaacacgagcgtcatgaagaaagggggcatattctctgcagaatttctgaaagttttccttccatctctgctgctctctcatttgctggccatcggattggggtaggtgatgtgactgtgtgactcctgtcatggcatgtcgtggggcgattctgggttgcagtgatttattcgtaacctgtttcctgaagtccagatcatcagttacagcttggtgcattttcacaaacacccacgtagtcactgttcaggtccagaaaccaccagcctgcagcccccaaaggccccagcacattctcccatgtcccgtccggccagggaaggcgtaatcatggtcaagc

SEQ ID NO: 2550 - DNA, 1939 bp, Homo sapiens
  SIMILAR (128)..(730): 521254mologous to Homo sapiens E1B 19K/Bcl-2-binding protein Nip3,accession number AF002697,Smith-Waterman Score=399.
  misc_feature (1)...(1939): n = a,t,c or g
ggctccgctcagtccgggagcgcagctgggccgcggcgctccgacctccgctttcccaccgcccgcagctgaagcacatcccgcagcccggcgcggactccgatcgccgcagttgccctctggcgccatgtcgcaaaacggagcgcccgggatgcaggaggagagcctgcagggctcctgggtagaactgcacttcagcaataatgggaacgggggcagcgttccagcctcggtttctatttataatggagacatggaaaaaatactgctggacgcacagcatgagtctggacggagtagctccaagagcttctcactgtgacagcccaccttgcttcgcagacaccacaagataccaacagagctttttgaaacagatacccataggcattgggagagaaaaacagctcacagttttgagggaagatgatattgaaagaaggaaagaagttgaaagcatcttgaggaaaaactcagattggatatgggattggtcaagttcggccggaaaaatattccccccaaaggagttcctctttaaaacacccggaagccgcacggccaccctcagcatgaggaaacacgagcgttctgaagaaagggggcatattctctgcagaattttctgaaagttttccttccattctctgctgccctctcaattgcgtggcccatcggattggggatctatattgggaaggcgtccgaccaaccttccaccagcacctttggatggaaggaacctgggagtcttgacttggttcgttagttggatttacttcttgagcttgcaaccatagcttcactggaaggagctgttagatccctgggggtggccaccgtcacttgtgtttatttgttctgttaaatgctgcgttcctaatttagtaaaataaaagaatagacactaaaatcatgttgatctataattacacctatgggattcaataagcatgtcagactggattaatgtctactgtgaaaatttgggtagtaaatttttcatttgaaattagaaataaaatatctgaatataaataattttaatatactagtccatgatgtgtgttgtattttaaaaattatctgcaaccttaattcaggctgaagtactttatatttcaaaagaatgaataaccattgataataaaatcgctacctttaaagggggttggtcccaaaataaatattgggggccttatatatccacacctattggtagaaaaggtattatttaaatttaaaagggatgccaggttgtcctacctaaagaaagatttatatataactatgcctaattgttccataatcaacagaaacccaagatagagcctacaaactcagcctgtacagttccgtacactaaactcttccttgcttttgcattataaggaattaagtctccgattattaggtgatcaccctggatgatcagttttcctgctgaaggcacctactcgagtatcttttcctctttatcactctgcattggtgaatttaatcctctcctttgtggttccacttttgtgtgcctttaaaatcagctttattctaagcaaatctgtgtctactttaaaaaactggaaatggaaaaaaaaataaatctttgccaaatccttcaggnnnnnnnnnnnnnnggggcggccgctttaaaggatccctgggggggcccaaatttaacccgggcttgcaacgtaaaaacttttttccttatagggggccgaataaaaagctacctgggaatttttgggaaagaacccttcttttgggggggggacatattgggccaacctccttacagaaattaaaggctttagggaaaatataaacttttaaagggaaaagggggtaaaacaacctgcataggctggctgctggaaagtttggcttacggagtttgatttaggaaaattttatccccgggggcttgggtttaact

SEQ ID NO: 2551 - DNA, 4222 bp, Homo sapiens
  SIMILAR (2387)..(3598): 971254mologous to Homo sapiens dJ927M24.2 (KIAA1219),accession number AL049868,Smith-Waterman Score=1999.
atgttaaatattgttcaagattcagcacttttggaagccattggttgccagatggagatgggtggtggagaaaataacctgaagagtcatagtcgcaccaatagtggtattagttcagcaagtggtggaagcacggagcccacgactcccgatagtgagagacctgctcaagctctcttaagagattatgctcttaatacagattcagctgctgggctcctgattcgcagcattcatctcgtcacccaaagactcaactcccagtggcgccaagacatgagcatatcactggcagctctagagctcctctctggccttgcaaaggtaaaagtgatggttgactcaggagaccggaagcgagccatcagttctgtgtgcacctacattgtttatcagtgtagtcggccagctcctttacactccagggatctgcactccatgatagtggcagcttttcagtgtctctgtgtctggctgacagagcaccctgatatgcttgatgaaaaggactgccttaaggaagtactggagattgtggaactgggtatctcaggaagtaagtccaagaacaatgagcaagaggtcaagtacaaaggagataaggagccaaaccctgcatctatgagggtaaaggatgctgctgaagccaccctaacatgtcttgtgaatgagaccactttgattaaatactccaggctgccaaccataaacaagcatagtttccggtactttgtcttggataacagtgtcatcctggcaatgctggaacaacctcttggaaatgagcagattataagccatctcacaatatgtgattatcactgcgacccaaactatccacaagtacattttttttttctgatggtaattggcatcagccagtatgtaaaagaagcatgttctcagacccttattgctgggaaggggaaggaaagtgaaggttacagaatctgtgggtataaactttttgtacctgaacctcgcccagttcctaaaaatgacgttggatttaaatattctgtgaaacatcggccatttcctgaagaggtggacaagattccttttgtgaaagcagatctcagcattccagatttgcatgaaatagtcactgaagaattagaagagagacacgaaaaattaaggagtggcatggcccagcagattgcttatgaaatacaccttgagcaacagagtgaggaggaattgcagaagagaagttttcctgacccagttacggattgcaagcccccgcctcctgcccaggaattccaaacagcccgcctttttctctcacactttggatttttgtccttagaagcactgaaggaacctgcaaatagtcgtctacctcctcaccttattgcacttgattccacgatacctggattttttgatgacattgggtatctggatctcttgccatgtcgtccttttgacacagtttttattttctatatgaagccaggtcagaaaacgaaccaagagattttaaagaatgtggagtcttccagaactgttcagccacatttcctagaatttttgctttcccttggctggtcagtagatgtgggcagacaccctggttggactgggcatgtttctaccagttggtctattaattgttgtgatgatgggtgaaggatctcaacaagaagaagtgatttcctctgaagatattggagctagcattttcaatggacagaagaaggtgctgtattatgctgatgcccttacagaaattgcttttgtggttccttctcctgtggagtccttaactgattcattggaaagtaacatctcggaccaagatagtgattcaaatatggatcttatgccaggaattctgaaacagccatccctgacacttgagcttttccccaatcatacagacaatcttaattcctcacagaggaacgagcatgctttcctatccatttccagaaaacaatggaaatgccttccctgtgagtcctcctggatggcaaagccccctgcccaggcccacacttgcatcctagtgaggaccaaagcaggccctgggccaggggaggcagctgtcctggtggattccaggcagtgggaagcagaggacagggagagatcctcccagcgattgctacgctttacatatggtccttcatttcctgcatttaaagttcccgatgaagatgccagtctgatccctccagaaatggataatgagtgtgttgcacagacatggtttcgctttttacacatgttaaggaacgcgttccctgtggtagatgccgcacttgttctcttgcctgttactgcagccaggctgatgatctttctcttgggattttgtcacattctgtggggactggaggttgccttgctcctctctgtgcccagcactgactgtaatcctgtggatttgagtaacccagctattataagctctactcccaaatttcaggaacagttcttgaatgtgagcggaatgccgcaagaattgaatcagtatccctgccttaaacatctgcctcaaatattttttcgtgccatgcgtggaatcagctgtctggtggatgcattcttaggtatttctagaccccgatcagacagtgctcccccaacacccgtgaatagattaagtatgcctcaaagtgctgctgtcagtaccacccccccacataaccggaggcaccgggctgttactgtgaataaggccaccatgaagacaagcacagtaagagtttacatcaccattgttatgctatataaggttagtactgctcatgcctctaaagttcagcaccagacgtcctccacctctcctctgtcaagtccaaatcagactagttcagaaccccggccactgcctgcccctcggagaccaaaggttaacagcatcttgaatctctttggatcatggttatttgatgcagcatttgttcactgtaaacttcataatgggataaacagagacagcagcatgactgccattacaacacaagctagcatggagtttcgacggaaagggtcacaaatgtccacagacaccatggtttccaatcctatgtttgatgcaagtgaatttcctgataactatgaagcaggaagagctgaggcttgtgggacactgtgtaggattttttgtagcaagaagactggagaagagattctgccagcttatttatccagattttacatgcttttaattcaaggtttgcagataaatgattatgtgtgccatcctgtcttggccagcgttattctaaactctcctcctttgttctgctgtgacttgaaagggattgatgttgtggttccttactttatttcagctcttgaaaccattttgcctgacagagaactctcaaaattcaaaagctatgtaaatccaacagaattgcgaagatcctccattaatatcctgctttctttgttgcccctccctcatcattttggcacagtcaaatctgaggtggtcctggaaggaaagtttagtaacgatgacagctcttcttatgataaaccaataacttttctgtccctgaagttgagacttgtgaatatattaataggtgccttgcaaactgaaacggaccccaacaacacccaaatgatattagaaaactttcccctctcagagctgatgacagagatcagtactggtgtggaaactactgcaaatagtagcacttcactgagatctacaactcttgaaaaagaagttcctgtcatcttcatccaccctttaaacactggattattccggataaaaattcaaggagccactggaaaatttaatatggtcatccctcttgtggatgggatgattgtcagcaggcgagctcttggctttctggtgaggcagactgtaattaacatttgtagaagaaagagactggaaagtgactcctacagtcccccccatgtccgccggaaacagaaaatcaccgacattgtcaacaagtaccggaacaagcagctggagccagagttttatacttcacttttccaggagggcatcttggagccagatgagtgccttcaggcctggatcacacatagtggagtgaatggaccacttgaaacaatcatgagaaccattgtggccatgcctctgccaagagctgctgacgtgtgccctctgaactgtgcctgggagctgcctaccttgcactgtgtgttctgcctgctctgcccacgcacaacaggacctccagctgggcctagtggccagagacgctga

SEQ ID NO: 2552 - DNA, 2759 bp, Homo sapiens
  SIMILAR (15)..(683): 611254mologous to Homo sapiens dJ927M24.2 (KIAA1219),accession number AL049868,Smith-Waterman Score=625.
cccacgcgtccgatagtttccggtactttgtcttggataacagtgtcatcctggcaatgctggaacaacctcttggaaatgagcagaatgattttttcccctctgtcactgtgctggtccggggaatgtctggaagacttgcttgggcacaacagctttgtcttttacccagaggagcaaaagcaaatcagaagctttttgtacctgaacctcgcccagttcctaaaaatgacgttggatttaaatattctgtgaaacatcggccatttcctgaagaggtggacaagattccttttgtgaaagcagatctcagcattccagatttgcatgaaatagtcactgaagaattagaagagagacaccgaaaatataaggaagtggcatggcccagcagattgcttatgaaatacaccttgagcaacagagtgaggaggaattgcagaagagaagttttcctgacccagttacggattgcaagcccccgcctcctgcccaggaattccaaacagcccgcctttttctctcacactttggatttttgtccttagaagcactgaaggaacctgcaaatagtcgtctacctcctcaccttattgcacttgattccacgatacctggattttttgatgacattgggtatctggatctcttgccatgtcgtccttttgacacagtttttattttctatatgaagccaggtcagaaaacgaaccaagagattttaaagaatgtggagtcttccagaactgttcagccacatttcctagaatttttgctttcccttggctggtcagtagatgtgggcagacaccctggttggactgggcatgtttctaccagttggtctattaattgttgtgatgatggtgaaggatctcaacaagaagaagtgatttcctctgaagatattggagctagcattttcaatggacagaagaaggtgctgtattatgctgatgcccttacagaaattgcttttgtggttccttctcctgtggagtccttaactgattcattggaaagtaacatctcggaccaagatagtgattcaaatatggatcttatgccaggaattctgaaacagccatccctgacacttgagcttttccccaatcatacagacaatcttaattcctcacagaggctcagtcccagttccagaatgaggaagctgcctcagggtcgccctgttcctccccttggacctgagacaaggagtttctggtagtctgggtggaacgctatgatgatatagaaaactttcccctctcagagctgatgacagagatcagtactggtgtggaaactactgcaaatagtagcacttcactgagatctacaactcttgaaaaagaagttcttgtcatcttcatccaccctttaaacactggattattccggataaaaattcaaggagccactggaaaatttaatatggtcatccctcttgtggatgggatgattgtcagcaggcgagctcttggctttctggtgaggcagactgtaattaacatttgtagaagaaagagactggaaagtgactcctacagtcccccccatgtccgccggaaacagaaaatcaccgacattgtcaacaagtaccggaacaagcagctggagccagagttttatacttcacttttccaggaggttggactcaagaactgcagttcttagaccactgaatttctaagactgttgaactccagtttgggaactataacacagcagaacagtttgataggtgatcactgtaaaaataaaagcaaatcactcccaagagcttactgtttaatcaccagaatagaagaaacacattataacccatttgatagaagactttgggctatctagtgaaatgggctcccagacacaatcatactccgtgctgataatgatgatatacattttagccataaactttcttttaaaagtgacaattttagttaaacataagccttttgaggagaaaggcttttatgcatctcagttaaacaccgtgcattgggtagtatcaacaaatttgcaatatagaagttgaagatagttttttacctcactttttaggaggttgtattcaaaattaaaatctcagaatcctaccaggacatttaaaggactcatgttgatagcatggaggagaaggaaagaagtcacagccttctactcagttgtaggtcttcttgtcatccagctgtcacactgacaaaaagaaaagatgatacatgtttttttgctcagataagaagcctgacattaaaagatgtcatatttttttctccacatttcaaaaaagtggtccttctcatcactgcacagatctgtttgaaagcctcagtttttgagtgacccaggaacagatcagaaatggagcatggccttgtcctttaatggggatgcaaataaagtttgtggggttaaaagttataagacagcagtgataccccactctttccattattgtccagcggggtgacataatgacaggttaaatatttgtgattcattgattaaatattatttaaagaaatgtaaattcacaataagggttgaaaattatttggtttcatccattgtctcttatttcaggaccaagcagcaaactgcagtagtttgtgaaggattctaatatggggttcaggaatagcctctcaacgctactaattcagatctctcccagagaactactggatttcctcataattgacaacagccatttctaacagtacccacgcgtccggactagttctagatcgcga

SEQ ID NO: 2553 - DNA, 807 bp, Homo sapiens
  SIMILAR (306)..(112): 731254mologous to Homo sapiens transcription initiation factor IA protein,accession number AJ272050,Smith-Waterman Score= 252.
tcacacgcgtttgccgggagatgcggccgcttcgccctctgcagtcaagatgctgggcgcgtcgaggactgggtaagattcaggccgcttccttctgtgcgtctgggaccaaagctcaggaccgctcttagaggagcagattgaaaggatgtggggcaaagctctcttcagcacacagggatcaaaggggaagaaggtgtccagtgggtttgtgcaggtctgcactgagtctcctccagtggtactcctaatgactggcagcatctggcgattgttcctctcaatgatggtgtagcagaagacgaggctggtacttactccttggattccataactattggcggtcctcaactttcctcgtgaggtgtactccaagttgtcccggtggttgctgtccccgttacgggatttatcctgtccgtagttgccccaggttgccaggtggtgtgtcccggtacgggagtatccactccggtagtggtgctcatggagtccgtcgtggtccccttggttaacctcggttactcctcgtctgtatgtggccctcatgtaagccgtggtgtgtcccgtagtaggaaaacagccgtagtgactccagtagccgtggtgtgtccgtagtaggataacaagccgtagtgactcagtagcgtggtgtgtcccgtagtatgggaaacacgacgtagtggactctagtagcgtggttgtcccgtagtaggaaaccaagcgtattgactcagtagccgtggtgtcccgtaagtaggaaacagcgtagtgaccagtagcgtggttgtccgtagtaggaaacat

SEQ ID NO: 2554 - DNA, 2423 bp, Homo sapiens
  SIMILAR (1)..(684): 671254mologous to Homo sapiens RRN3,accession number AF227156,Smith-Waterman Score=714.
gatcttttggttaactggctgcacatataccttaataaccaggattcgggaacaaaggcattctgcgatgttgctctccatggaccattttactcagcctgccaagctgtgttctacacctttgtttttagacacaagcagcttttgagcggaaacctgaaagaaggtttgcagtatcttcagagtctgaattttgagtggatagtgatgagccagctaaatcccctgaagatatggcttgccctcagtggttaacttttttgctgcaatcacaaataagtaccagctcgtcttctgctacaccatcatcgagaggaacaatcgccagatgctgccagtcattaggagtaccactggaggagactcagtgcagacctgcacaaacccactggacaccttcttcccctttggatccctgtgtgctgaagaggtcaaagaaattccattgatcctattttatccaggtatggggaagacatgagtgctgaagagctacaggagttcaagaaacccatgaaaaaggacatagtggaagatgaagatgatgactttctgaaaggcgaagtgccccagaatgataccgtgattgggatcacaccaagctcctttgacacgcatttccgaagtccttcaagtagtgtgggctccccacccgtgttgtacactgcaacccagtcccctctgacggcagaaatttgcgactgagatgtgacatttgggattccccatcacttgtcatgccctcagcacccagcttgtgccattgggcattgatggcattgaactaaagcgagtgcctgcctcggctgtggcaacttccaggttcgactgaatcaagcatctgaagactgggtttttttgttgatgttgctccccttaccgaccaaatgaagactatcatgtgcaatcttttacagaggggttgatgatacatttggaaggatttgcttggtcaatatgaacattttttggggtaacagctttttgacacaattactgggcaaattctaatataggcagcagactgttttacgggttgctgttttaacatgggtttttgtcagatccatggtcttaggacttgactgatgagctttcagtgaagaatcctctaagataaaacttctatttaaagactttaactaggaaagtgtttattttgggctacattgttcaccttctgctgtattggtatttgtctgttggggatttcaaggggagtgtaggagaagacagaagggaaagctgaggagctgggcccgacatggtctgggacacagagttggagctggcactgaagatctccaagggacttcagagaccaataaaagcccatagggaagagagagaggatatagggaaacacgaatcccgatgtgtaatatactttggcacagcgaaaaaatggattttaaaagacaaaaatgggaggtcccgggtagatgttatttcacacagactgaaagtgagttcgggcttgtgtaaaacacatgagattggatttgaccccttggctctcaagtgtccccttagatctagaactgctccttggtggccattagatcgagtcagttttgatctgcatcacttagttattgggaatttctttgttggaaacaggaaaatttttttagattatttggtgtacggttttgctcacaacaataggtggaagttgctagtgcagtcttggtcagatggctgtgtgcatcgcacattcggcttggtgaaatccttctctaaagcctctttttgtatttttataactaaacagaggaagtcttcagaagacctcgctttaaaaccaaatttgtgcaaacactgctagagtcattttgaagctcaagcattttcactttgtttcttacatgtgtacttttttgtttacttgtgaaaatggccatctttaagcatatttattttctgccactttatttaaaggcaagcaatattttcctggatcataaatattttgtaatgaaaatacttcctcttttcccagggctttgtatgcacttgtataattaccattgatggcaatgtagagtttgaatttccagtctgtaaataccttttttggaaaatagaaatttttattgcctttaaagtttttggatatgggtggttttccttttccgggtttggtggaaagtaatttgagaacttttaaggttgtctttttaactgctgggcaaaatgttgattttttaatattagataaaacgagtaaacgaaattccccagaaattagtagtaagtggggtctttgtgggttgggaagtagttttaatgtagaaagacatttacatataagtctgtttaatttcaaaggagtttgtgaaaaaaaaatccatggtgaaaatgaaacaatgacatggttaatctggaacttacgttcttataccaataaaaggtacctcaat

SEQ ID NO: 2555 - DNA, 416 bp, Homo sapiens
  SIMILAR (62)..(244): 931254mologous to Homo sapiens DD96,accession number U21049,Smith-Waterman Score=285.
ctgctgcagccatgtcggccctcagcctcctcattctgggcctgctcacggcagtgccacctgccagctgtcagcaagggagcctgcacacatgatcctgaccgtcggaaacaaggcagatggagtcctggtgggaacagatggaaggtactcttcgatggcggccagtttcaggtccagtgagcatgagaatgcctatgagaatgtgcccgaggaggaaggcaaggtccgcagcaccccgatgtaaccttctctgtggctccaaccccaagactcccaggcacatgggatggatgtccagtgctaccacccaagccccctccttctttgtgtggaatctgcaatagtgggctgactccctccagccccatgccggccctacccgcccttgaagtatagccagccaaggttggagc

SEQ ID NO: 2556 - DNA, 2358 bp, Homo sapiens; identical to SEQ ID NO: 1550
  SIMILAR (940)..(2355): 991254mologous to Cloning vector pBACe3.6 levansucrase,accession number U80929,Smith-Waterman Score=2471.

SEQ ID NO: 2557 - DNA, 930 bp, Homo sapiens
  SIMILAR (177)..(527): 711254mologous to Homo sapiens DD96,accession number U21049,Smith-Waterman Score=358.
tgcgtggaattcttcttcgagactcctccctccctcgccttgctccttcctagctcctctcctttagggttatactgagcccaggctgatttcaggcggacacggatagactccacagcagctccaggagcccagacaccggcggccagaagcaaggctaggagctgctgcagccaatgtcggccctcagcctcctcattctgggcctgctcacggcagtgccacctgccagctgtcagcaaggcctggggaaccttcagccctggatgcagggccttatcgcggcggccgcgttcctggtcctcgttgcaatcgcctttgcagtcaaccacttctggggtgccaaggaggagccggaagccctgcacacatgatcctgaccgtcggaaacaaaggcagatggagtcctggtgggaacacgatggaaaggtactcttcgatggcggccagtttcaggtccagtgagcatgagaatgcctattgagaatgtgcccgaggaggaaggcaaggtccgcagcaccccgatgtaaccttctctgtggctccaaccccaagactcccaggcacatgggatggatgtccagtgctacccccccaagccccctccttctttgtgtggaatctgcaatagtgggctgactcccctccagccccattgccggccctacccgcaccttgaagtatatccagccaaggttgaagctcataccgtgtctaggttggggctcggctgcggacctggagtcgcctgctcagctgacaatagccttatggagaggacagacagctgagcacctccgatcctgctcacacgtccttccccataactatggaaatggccctaatttctgggaactaaagactttccgtatttctggggctgaggctcagcaacagcccctcaggcttccagtgagtccccatcttaaa

SEQ ID NO: 2558 - DNA, 409 bp, Homo sapiens
  SIMILAR (249)..(401): 1001254mologous to Homo sapiens dJ167A19.1 (novel protein),accession number AL031427,Smith-Waterman Score=272.
  misc_feature (1)...(409): n = a,t,c or g
ngcaatgcagccacttctctgacagcaaacccagatgccaccacagtaaacattgaggatcctggtgaaaccccaaaacatcagccaggatccccaagaggctcaggaagagaagaagatgatgagttactgggaaatgatgactctgacaaaactgaggtacagtgtcaggcaatgacagctcagaggtaaatgacacatggcctcttccttggtgggggaaacaggcaaacagaccattactttccttacttgctggacagaagaaaagctcccccttctggacatttgaatactaccaaacattctttgatgtggacacctaccaggtctttgacagaattaaaggatctcttttgccaatacccgggaaaaactttgtgaggttatatatccgcagcattgtatt

SEQ ID NO: 2559 - DNA, 518 bp, Homo sapiens
  SIMILAR (147)..(176): 1001254mologous to Homo sapiens dJ167A19.1 (novel protein),accession number AL031427,Smith-Waterman Score=49.
attgattcccagtcgacccacgcgaacgaccgaaaccggcgcggagcaactgaggcccgagccttctcgggacccggttgacgcctaaccccgcgagaaccctgcaaattttcttcctcataattgggagaagactcactggccgaatggcagcagtagatgacttgcaatttgaagttacttgctggacagaagaaaagctcccccttctggacatttgaatactaccaaacattctttgatgtggacacctaccaggtctttgacagaattaaaggatctcttttgccaatacccgggaaaaactttgtgaggttatatatccgcagcaatccagatctctatggccccttttggatatgtgccacgttggtctttgccatagcaattagtgggaatctttccaacttcttgatccatctgggagagaagacgtaccattatgtgcccgaattccgaaaagtgtccatagcagctaccatcatctatgcctatgcctggctggttcctcttgcacg

SEQ ID NO: 2560 - DNA, 393 bp, Homo sapiens
aaactttttaaagcatcatctttcttccaacactaagctctacttttagcatcaaaattagactcaagcctcaagatttagggaattggtggcagcagactgctctggtgttgggagttatatctctaaacatacatgaatatccttttctacaatgtagctctttcctgtcggggtgggggcgtgctttatcttgaaagtttcccgttttgtttttcagttctcttttgttttttggagcatggttctttgggaagtggcatccactgcaggaaagcagaatgagcagagccagcagaactgatggagtggcacaaattcccagtgtctggatggtgccacactggcgcctaatcaccccgttaacaagcagaattaaattgtgctcagccg

SEQ ID NO: 2561 - DNA, 537 bp, Homo sapiens
  SIMILAR (10)..(321): 741254mologous to Homo sapiens dJ167A19.1 (novel protein),accession number AL031427,Smith-Waterman Score=362.
ggcacgaggtgtctatggatattccctcttcatttatatccccaccgcaatactgtggattatcccccacaaagctgttcgttggaattctagtccagaattgccctgggcatctcaggatctctcttggcaatgacattttggccagctgttcgtgaggataaccgacgcgttgcattggccacaattgtgacaattgtgttgctccatatgctgctttctgtgggctgcttggcatgcttttttgatgcgccagagatggaccatctcccaacaactacaggtactccaaaccaaacagttgctgcagccaagtccagctaatgaggaaattctcttttgttttttggagcatggttctttgggaagtggcgtccactgcagcaaagcagaatgagcagagccagcagaactgatggagtggcacaaattctcagtgtctggatggtgccactctggcgcctaatcacccgtttaacaagcagaaattaaatgttgctcagcaaaaaaaaaaataaaaaaaaaaaaaagtcgacg

SEQ ID NO: 2562 - DNA, 1908 bp, Homo sapiens
  SIMILAR (1143)..(1277): 1001254mologous to Homo sapiens dJ167A19.1 (novel protein),accession number AL031427,Smith-Waterman Score=228.
  misc_feature (1)...(1908): n = a,t,c or g
ggcacgagctgggctggaccgaaaccggcgcggagcaactgaggcccgagccttgtcgggacccgggggacgcctaaccccgcgagatgaggaaactgaggccgcgaggagcgcgcacacagcagagaagcagcagaatcgggaatcaaacccagctctgtctgaccccagagcctgtgcctttaaccactggctaggctgaactgcctttgttcttcactgtccccatcacctctttcaaacctcagcctgtccttcctcatcggtacatctctaggctgcacctgctctcttaaacattcacacaaaccctgccaaattttcttcctcataattgggagaagactcactggccgaatggcagcagtagatgacttgcaatttgaagaatttggcaatgcagccacttctctgacagcaaacccagatgccaccacagtaaacattggaggatcctggtgaaaccccaaaacatcagccaggatccccaagaggctcaggaagagaagaagatgatgagttactgggaaatgatgactctgacaaaactgagttacttgctggacagaagaaaagctcccccttctggacatttgaatactaccaaacattctttgatgtggacacctaccaggtctttgacagaattaaaggatctcttttgccaatacccgggaaaaactttgtgaggttatatatccgcagcaatccagatctctatggccccttttggatatgtgccacgttggtctttgccatagcaattagtgggaatctttccaacttcttgatccatctgggagagaagacgtaccattatgtgcccgaattccgaaaagtgtccatagcagctaccatcatctatgcctatgcctggctggttcctcttgcactctggggtttcctcatgtggagaaacagcaaagttatgaacatcgtctcctattcatttctggagattgtgtgtgtctatggatattccctcttcatttatatccccaccgcaatactgtggattatcccccagaaagctgttcgttggattctagtcatgattgccctgggcatctcaggatctctcttggcaatgacattttggccagctgttcgtgaggataaccgacgcgttgcattggcccttaattgtgacaattgtgttgctccatatgctgctttctgtgggctgcttggcatacttttttgatgcaccagagatggaccatctcccaacaactacagctactccaaaccaaacagttgctgcagccaagtccagctaatgaggaaagactcacttggaggataccctctccttggctggaagtttttccttgacttctccagttctcttttgttttttggagcatggttctttgggaagtggcatccactgcaggaaagcagaatgagcagagccagcagaactgatggagtggcacaaattcccagtgtctgggatggtgcccanactggcgcctaatcacccgtttaacaagccagaaattaaatgttgctcagcaccatgtgtctttcagctcttcccttttcaccccatggatgatccattgcgagcaatgcgctgaattggactgaaatgcccggggaataggttaggcatgcctcagtgccgtcccttgcccaccacagtcaaatgacatgcttcactgtgggacctttaaaccctgaaatagaaccatggaaaattttgatgtcctctctttgaattatgtacagactacctgggggatcctcttctctccaaatgttagccatcctgaagtagccgaacagtagaaactttggtggggattaaccgggagcttgaaaatttgtctttggtaacctgatactggacagctgaactgaatggctgcaaaataaatacctcacatgaaaaaaaaaaaaaaa

SEQ ID NO: 2563 - DNA, 1936 bp, Homo sapiens
  SIMILAR (197)..(544): 421254mologous to Homo sapiens SH3 domain binding glutamic acid-rich-like protein,accession number AF042081,Smith-Waterman Score=133.
gcagcgcttagagagctcggtggaagctgctaaaggcggaggcggggctctggcgagttctccttccaccttcccccacccttctctgccaaccgctgtttcagcccctagctggattccagccattgctgcagctgctccacagcccttttcaggacccaaacaaccgcagccgctgttcccaggatggtgatccgtgtatatattgcatcttccctctggctctacagcgattgagggaagagacaacaagatgtgcttggtttcctagaagccaacaaaataggatttggaagaaaagatattgcagccaatggagagaatcggaagtggatgagagaaaatgtacctgaaaatagtcgaccaggcacaggtttaccccctgccacctcagattttcaatgaaagccagtatcgcgggggactatggatgccttctttggaaggccagaggaaaataattgcagtgtattgccttcttaggggtttgacagccccacctggggtttcaaaggggaggcaggaaggtgccaagccaaaggcaggccaagccttgaccctttaagcactgtggttttaagcttcctgaaaaatgagtctccattgctttttataaaatagcagaattagctttgcttcaaaaagaaataggcttaaatgttgaaaataatagaattagttgggttttcacatgcaaacattcaaaatgaatacaaaattaaaatttggaacatttatgggtggatttatgggtggaggagaatgggggatattaacataaaattatattaataagtagatatccgtagaaatagtgttgttacctgccaagccatcctggtatacaccaaatgattttacaaagaaaacacccttccctccttctgccattactatggcaacttaagtgtatctgcagctctacattaaaaaggagaaagagaaataacctgtctctcattcctaagttgcctcattaattttcatgaacaagaatatgtacctttttgatgctatattactgcgattaaaaacgttcttgcaggtaatgtttatgatatggtaaacggtctaattgcttatcgcaattatcacattcccattcatttgtacatgaaacttctacatattgaaccacagatcttatgagcttactagatgtatcctttcattgcacatttcagtgatcagaatacatattcttttacacgcacaaaagcaatacattcattcacatggacaagttccttgattaactacacagctatgatggaatgatatatccaagttcccttgcctcagtgaaatatggcatatgtatatcatgaaagtgggatgccaagtaagcttaaaatggcattctctagcaaagagattagacttttaaataactcttataaaacaggttggcgatcatttcccaagattggtttcccttgagtttttgctaaaaccaaatccttagtagttttgcccgtttaaaaaacctcacaatccgtaaatgctactatctcctaagatatcttacctttttatttcagtttagccatgtattggtatggagtgtattaggtcttaagccaggtggagaatctttttcttatgcctctaattccagcaaaaagtagaagtatccaaataaaaagggcaacttttaaaatattaagccctgaagacttcctaaaaagacaagaaacatggccctaaataacccaacatagatttacatagtaagtttcacactaccttattaccaaaagcaaacacctcttactttaaactacattatcatgtatatctattgtatgctggtctttactttttgccaaaatcaacatataatgaagagatgcctttgtttcatgagattcaaacttgatgctatgctttaaaataaacttagtacttttagaaacataaaaaaaaaaaaaaaaaa

SEQ ID NO: 2564 - DNA, 390 bp, Homo sapiens
  misc_feature (1)...(390): n = a,t,c or g
tttttttttttttttttccacgaatactatcaattttattgataacacatactactttcagcacacagaagcatattttctagttattgttaaatagtagataaggcaggttgttccctaaagtgctcagttatcattcagtgggttatttgccgttgatccttttctgccatttcttgttggcgaattgtattctgtgctgcttgatgcattttctctagtttttccagagtcanagattttaagggtaaaagtttgggtttacacagcaccattgtcattatatcttccacaaacagtggcccttgctttggaagaacttcccggaacattgacttcacttctgccatatagatgcatcccttcccagacggctcagctgttgccccc

SEQ ID NO: 2565 - DNA, 2825 bp, Homo sapiens
  SIMILAR (1014)..(1208): 481254mologous to Homo sapiens Human secreted protein, SEQ ID NO: 7492,accession number AAG03411,Smith-Waterman Score=136.
  misc_feature (1)...(2825): n = a,t,c or g
aagggatgcatcttttcttctgtatgcttgagtcaagaactctaagtcatcttggtaataccgggttggatgcttaaagctgcagcaaaaagaccagaactttcaggaaaaaacactatatcccacaactcagatatggcaggagttgaggccatggtcccggaaagttcttccaaagcaagagaagggatctcaatgtgttgcctaggctggtctcaaacccctgggctcaaacaaacaatccaacccctttggcatcccaaagtgctgggataacagggccactgtttgtggaagatataatgacaatggtgctgtgtaaacccaaacttttacccttaaaatctctgactcctggaaaaacctagagaaaatgcatcaagcagcacagaatacaattcggccaacaagaaatggcagaaaaggatcaacggcaaataacccacttgaatgataactgagcactttagggaacaaccctgccttatcctactatttaacaataacttagaaaatatgccttcctgtggtgctgaaagatagtatgtggttatccataaaattgatagtattcatagaaattccaaaatatccaagattgatgaaatttgtattgtgaatgtaaacactctgggtttgtttgaacattaaccagtttaaactatggancccaagttttatggggtttaagtcatgtttttagaattgcaaattaaattatttgttcaccattcctattgctatcttttatagataacattcttgggatcttttatagcattcttgggcacaagggattaaatacaacttttatatacagaggatctttacatgtttattaaatctggaatttgaagatacattccaatcttgcataaagtgtttgttgggcttttacattacggtaattaaaaaacaaaattttttaaccaattttatgtgccatgtcacgtttaatgctatcttgtgtgaccagatcccaccagtaatgacaaaactgtcttaaacctcattttttttttttttttgagacaagagtttcactcttgttgcccaaacgagaggcaatgggcaccatctcgactcactgcaacctctgcctcccagggtttcaaggcaattctcctgcctcagcctcccaaggtaggctgggggattacacggcatggggccaccatgccggggggtacttttgtatttttaataggggacaggggttttcttcatgttgggtcaagctggtcatggaactcccaacctcaagtgatccggcccacctcggccctccccaaagtgctgggggttacagggcatggaggccaccgtgcccagcccttaaatcctcatttttaagaaaccctcacctattctgtagtcagctaagcttttaattacattaattttaaggcacttgagaataaaatgactgcatttattcatccaagtgttcaaacaatttaaaaacctaaaaagggtaacccatataataaagccggagggtaaatatgggccctggataaagccccatgaggtaaaatatggaacacctaaactttggttttaattcctaacagacctatatcctaaaccctgtaagccagtatacctccctaacagtacccctcataaattcctgaatataattccttgtttgcctgcagtcaatatttggccagtttaaattagcacagacgttgaaggccctgcctgagttattaggctatgtaaaagaggttaaaaatatgatcattctttattgttaattggtaatatttatctcatacattaggtaaatgtcaagctttgggtctctggagtataactttttgtaacattagccattatttggtaacagaatttaaggatgatggaatgatggaaggtattacatatttctaaaacttaattaagctctaggtcagataacaatgggagtaaaggggtccctgcattttttttccccagtgtaatcttaatttactattgtatttttcacttaaaattttgtagggaaaaaaagttttcaagggaacactaagattaaattgactaggttcaaatatgcttccttatgagattcaaaatttactgtgtgaaattaaagtttaagagacctaaaaaaatgtactcccaataaagaatcaatactcgcttcacatgttttattttggtgtacattcttctagaaccaggttcatttttccagttttgtagaaaaatagatgttccagccaccttttacttaactgtcctagtcttttaaagacccaatcagtatgttccccggaaagatgaataagtctcatgactaattttttaaaaattctttaagacaaagaaataactttcttttttttactccaaaagcacagtatctcaacagcagcagcccaacatggggttttagccagccttaactttccccccctaaataaagcctttgtataaacccagtgattttcctacaaaaaacactgtccttgaaagaaaggagtggcagtccagacatcaatgcaaaacttgggaatggattaggataataaaccatgggcactttacaaaagggtagcttattagaatattccactttagaagaggggtacttttctggtccctcccttgccccctcggaaaaacccaaaaaaaaggaaaaacatttccctttaaaaattccccttaaatgtaggtttataaaatgtcagaaatgccttgtacccaaaacaagtgcttaaaaaaaaaaaaaaaaaaacttgtggctaacaactcttanaattcngatatatatttttataacatctaagacggcagagttcttanattccgta

SEQ ID NO: 2566 - DNA, 629 bp, Homo sapiens
ccccctactgccaccagcccttcccggctgccacgccctggcccccagctcttatatccctgtggccattcgtgccctcgaacccccatctccataccacggtcaactaaaaatgcagagcataccaggccactccccaacctagaagcttctttctcagcagccctttggacgtggattctccccaggccccccgtcattgcactgggctcccagccccctccctgagttcacctccatggtcctgccccactctcttctcttggttctttgaggcatcaggtgtttgccaccactggacttctgtcatcgctgcctccaactcttcccccatctttccggagctcccccacccccatccccttcgaatctcagcttggctgtttcctccttggagagatcactcccaggaccccctctgcaggggtgccacatcacctgttctgaattcttaagagcacccctgctctcagaactccttatttatttgacttgtttgtatccctgaactagaatgtaagctccatgagggcaaggccttcctctgtctcgtttccctgctgtatccccagtgcctggaatagtgcttggtgtgtagcaggcactcaataaactgtggaaagaataaa

SEQ ID NO: 2567 - DNA, 1821 bp, Homo sapiens
  SIMILAR (1319)..(1495): 451254mologous to Homo sapiens neuronal thread protein AD7c- NTP,accession number AF010144,Smith-Waterman Score=99.
  misc_feature (1)...(1821): n = a,t,c or g
tttttttttttttttttggggacagtaaaccgttttattactagtagtcggacacaagacacccgtggtgcatgacagacagtttcaacacccatgagcgctggggacggagctgtgcctggaccagctctgcggtagtgtggtggcgccacgcttgggccggctgtcaccgcccagctgaggcccttaacagcgtccacctggggagaaaaccttggaaaccgtcttaattgaagcaggtgacttaggggcgtctcttagaaacccaaacgaaatgtaccttaaataagcaaatataaaacacaaataaagacgagcagaccctggtgttccggtgtcaaggcaaaattttaaaaaaaacccaggaagttgcaacttgggtttccttcaactgtcaatgtgtgaatcaacaaggttcaaggaacgtttcaacaagcagcgggccccaaggctcctgtgcgtggctctgggtgcactgggagtcttggggcttggctggggcttctggctgtccttctgtcgccgggatgggcctcgacgaatcagcgcagccgcggcccggcccccntacgtggtgctgatcccactcagctcctgcctgatggcgttcgatgatctcctccttcaccttgtggagctctctcaccacctcctctaggatctcctgcttcattcgggtccaagtcgaaggcaatcccagggcccatgtcattcacgctccccagcaggcttcatcctgggagagaaagggcctgtgggtgccctggctggagacaggtgtgggggaaagctggctgtgcagaagccccgctcaggctgggcccacctgctcccctcgctccatagaggctgcttgcttcagactctggccacctcagactgcctgagaagggtttaacgcccgtctccacctcaagaggtctccatggataccgtgactgtatttccccaacccaaaagccaaggctggctggggtcacaaaaaaacttgctttctgatcagagagcttttatgcagaggtggcaacttaagtgcaaacatcgcaacccacccgttgcctcccctggaaagaaacacagtattgaacagcctcctcctcagggtgggagctcatgctcccaggttgagcttggggctcggggaagcagcagcggcggcaggaggcacaatgtgaagttgcagagttcacaccggcctggaggcgcgctcctgacacaccagcgcccctggtgctggagcctgctcgggcatagcacacctcccccaagaaacatcctcccatgtggtgtcgctttttttttttcagacagagttttgctcttgttccccagattggagtgcaatggcgcaatcttggctcactgcaacctctgcctcccaggttcaaagcaattctcctaccctcagcctccccccagtagctggcattaccaggcatgtgcccatttttgtattttcagctaacttttgtattttcaacaaaagatggggtttcaaccatgttggccaagcttggtcttgaactcctgacctcacgagatccacccacctgggccttcccagagtgctgggattatgggcgtgagccactgcacctggctggttttgctctttcaaggtagttctcgtggactacttctttgaaaagtttccaaactaaggtaaccgatttgaattttatttttacttatttgagacagggtctcactctgtcaaccaggctggagtacagaggcgtatcatgcctcactgcagcctcaacctccccaggctcaagtgagcctcccgagtagctgggactacagacatgtgcccttttt

SEQ ID NO: 2568 - DNA, 2271 bp, Homo sapiens
  SIMILAR (57)..(296): 1001254mologous to Homo sapiens signal transducer CD24,accession number M58664,Smith-Waterman Score=382.
cggttctccaagcacccagcatcctgctagacgcgccgcgcaccgacggaggggacatgggcagagcaatggtggccaggctggggctggggctgctgctgctggcactgctcctacccacgcagatttattccagtgaaacaacaactggaacttcaagtaactcctcccagagtacttccaactctgggttggccccaaatccaactaatgccaccaccaaggcggctggtggtgccctgcagtcaacagccagtctcttcgtggtctcactctctcttctgcatctctactcttaagagactcaggccaagaaacgtcttctaaatttccccatcttctaaacccaatccaaatggcgtctggaagtccaatgtggcaaggaaaaacaggtcttcatcgaatctactaattccacaccttttattgacacagaaaatgttgagaatcccaaatttgattgatttgaagaacatgtgagaggtttgactagatgatgaatgccaatattaaatctgctggagtttcatgtacaagatgaaggagaggcaacatccaaaatagttaagacatgatttccttgaatgtggcttgagaaatatggacacttaatactaccttgaaaataagaatagaaataaaggatgggattgtggaatggagattcagttttcattggttcattaattctataaggccataaaacaggtaatataaaaagcttccatgattctatttatatgtacatgagaaggaacttccaggtgttactgtaattcctcaacgtattgtttcgacagcactaatttaatgccgatatactctagatgaagttttacattgttgagctattgctgttctcttgggaactgaactcactttcctcctgaggctttggatttgacattgcatttgaccttttatgtagtaattgacatgtgccagggcaatgatgaatgagaatctacccccagatccaagcatcctgagcaactcttgattatccatattgagtcaaatggtaggcatttcctatcacctgtttccattcaacaagagcactacattcatttagctaaacggattccaaagagtagaattgcattgaccacgactaatttcaaaatgctttttattattattattttttagacagtctcactttgtcgcccaggccggagtgcagtggtgcgatctcagatcagtgtaccatttgcctcccgggctcaagcgattctcctgcctcagcctcccaagtagctgggattacaggcacctgccaccatgcccggctaatttttgtaattttagtagagacagggtttcaccatgttgcccaggctggtttcgaactcctgacctcaggtgatccacccgcctcggcctccccaaagtggtgggagtacacgctgtagcccccgggccccgaccatccaaaagcgttttaatcctgccaatggtgtgaaactctttcaaaattcacaaaaaaggcctggtttggaggccaaaatttcaaatctttgagaattaagaagggcaaaaaagtaaaaggagtccaaaactataaatcaagtatttggggaagtgaagactggaagctaatttgcattaaattcacaaacttttatactctttctggtatatacattttttttctttaaaaaacaactatggatcagaatagtccacatttggaacacttttttggttatcagtcaatatttttaggatagttagaacccctggtcctaaagccctaaaaagtggggcttggattctgcagttaaatctttttacaaactgccctcgacacaccataaaccttttttaaaaataggacactcccccgaaagtcttttgttcggcatggtcaacacactggatggcttagatgttcccagtaatcctaatatggcccacagtagtccttgatgacccaaagtccttttttttccatctttaggaaaacctccatgggaacaaacagatcgaacagttttgaagcctactgtgtgtgtgaatgaacactcttttgctttattccagaatgctgtacatcctattttggattgtatattgtgtttgtgtatttaccgctttgattccatagtaacttcttatggaattgatttgcattgaacaccaactggtaaataaaaagaaatgggctgaaagagaacccttctttaaatatatcaaagggggcgcccttataaagatacttaaggggcccacgtttatcccgcaagccaatcatagttttctccttaa

SEQ ID NO: 2569 - DNA, 408 bp, Homo sapiens
ggaagatcgatgagttctgagtgtcgggctgcccactggtgacaccgggatcgggctgagcaggaaaacatcaccggctccagttgccctgatccattctcacagcctgaaacaagctcacccgtagcttacgcttggaagcaggactgggaacatccacgctatttattatcgaggagttttaaagtactgtaactttatatgcttaggattcatgctgagatatcaattggtttccccttctttttaaaatacgtccagttcttacccagttaacatgaagaaaccactgtctctagaagaaagcttgttttgcagtattagtgaatcactgaatagcttaagtatgactatctaagttataagttaggctttagtggggtgtaaatagattttctgacccttctg

SEQ ID NO: 2570 - DNA, 1068 bp, Homo sapiens
  SIMILAR (319)..(993): 991254mologous to Homo sapiens testis-specific chromodomain Y -like protein,accession number AF081258,Smith-Waterman Score=1159.
atgggatctgtgcccttaataaagaggcccaagagagcttctttgtcccttccaccacatgaggtttccaatgctaatgatgatgacccactggagagtgagaaatttaacccaaacaagttgacgtacattcttgccgtccactccactgctctgggaaattctcccctggcccttccattaaagccacccatcctaccggctgtgaagtgtacccgcattgtggttgtgatgtgcatttccccgatggctaatgatgttgagcgtctttccgtgtgctttactggtcatttgtgtatcttcttcggagaaatgtctattcaggttgaaaggattgttgacaaaaggaaaaataaaaaagggaagacagagtatttggttcggtggaaaggctatgacagcgaggacgacacttgggagccggaacagcacctcgtgaactgtgaggaatacatccacgacttcaacagacgccacacggagaagcagaaggagagcacattgaccagaacaaacaggacctctcccaacaatgctaggaaacaaatctccagatccaccaacagcaacttttctaagacctctcctaaggcactcgtgattgggaaagaccacgaatccaaaaacagccagctgtttgctgccagccagaagttcaggaagaacacagctccatctctctccagccggaagaacatggacctagcgaagtcaggtatcaagatcctcgtgcctaaaagccccgttaagagcaggaccgcagtggacggctttcagagcgagagccctgagaaactggaccccgtcgagcagggtcaggaggacacagtggcacccgaagtggcagcggaaaagccggtcggagctttattgggccccggtgccgagagggccaggatggggagcaggcccaggatacacccactagtgcctcaggtgcccggccctgtgactgcagccatggccacaggcttagctgttaacgggaaaggtgagtgtctagggagctgctcaggctccgtggtgatcccagagggctcgggtccttctctagagatcaggccttga

SEQ ID NO: 2571 - DNA, 3502 bp, Homo sapiens
  SIMILAR (132)..(1736): 761254mologous to Homo sapiens testis-specific chromodomain Y -like protein,accession number AF081258,Smith-Waterman Score=1986.
  misc_feature (1)...(3502): n = a,t,c or g
ggagagaggacctatttctacctaaggacattcccggaaggcaatgggtttcaaacaatatcctgaagagactcatctcggggaactaagcaggtggtaatcagagaacacagagcccccggaagaattttatggcatttcaggcaagccacaggccagcctggggaaaaagcaggaagaaaaactggcaatacgagggcccaacccaaaagttattcctgaagagaaacaacgtgtcagcaccagatgggccttcagaccccagcatctccgcgagcagtgagcaaagcggggcacagcagcctcccggtttacaggttgaaaggattgttgacaaaaggaaaaataaaaaagggaagacagagtatttggttcggtggaaaggctatgacagcgaggacgacacttgggagccggaacagcacctcgtgaactgtgaggaatacatccacgacttcaacagacgccacacggagaagcagaaggagagcacattgaccagaacaaacaggacctctcccaacaatgctaggaaacaaatctccagatccaccaacagcaacttttctaagacctctcctaaggcactcgtgattgggaaagaccacgaatccaaaaacagccagctgtttgctgccagccagaagttcaggaagaacacagctccatctctctccagccggaagaacatggacctagcgaagtcaggtatcaagatcctcgtgcctaaaagccccgttaagagcaggaccgcagtggacggctttcagagcgagagccctgagaaactggaccccgtcgagcagggtcaggaggacacagtggcacccgaagtggcagcggaaaagccggtcggagctttattgggccccggtgccgagagggccaggatggggagcaggcccaggatacacccactagtgcctcaggtgcccggccctgtgactgcagccatggccacaggcttagctgttaacgggaaaggtacatctccgttcatggatgcattaacagccaatgggacaaccaacatacagacatctgttacaggagtgactgccagcaaaaggaaatttattgacgacagaagagaccagccttttgacaagcgattgcgtttcagcgtgaggcaaacagaaagtgcctacagatacagagatattgtggtcaggaagcaggatggcttcacccacatcttgttatccacaaagtcctcagagaataactcactaaatccaagaggtattgagagaagtccaaagtgctctgagcacggccgctgccaatgacagcaaagtgggtactgccaagggcggtgggaagcgtcttttggttgtggacttaactttaattattttaaaccacgttctgccaaatgccaggaaaagagaaagcattaaaatggcagaagctatcagaaacttcgtgaatactttcattcaatttaagaagcccattattgtagcagtcaatggcccagccattggatctaggagcatctatattgcctctttgcgatgtggtttgggctaatgaaaaggcttggtttcaaacaccctataccaccttcggaacagagtcaagagggttgttctcccgttatgtttcccaagataatgggaggaagcatctgcatactagatgccgtgttaggtgaccggaacttgacagcgcaaggaggcgtgtggcaagggcctggtctccagggtgttttggcccgggacgtcacccaggaaagtgatggttcgcattaaggagcttgcctcgtgcaatccagttgtgcttgaggaatccaaagccctcgtgcgctgcaacatgaagatggagctggagcaggccaacgagagggagtgtgaggtgctgaagaaaatctgggggctcggcccagggggatgggactcgcatgttaaaagtactttgcagagggaagatcgaatgagttctgagttttcgggctgcccactggtgacaccgggatcgggctgagcaggagaacatcaccggctccagttcccctgatccattctcacagcctgaaacaaagctcaccccgtagctttacgcttggaagcaggactgggaacatccacgcctatttattatcgaggagttttaaagtactgtaactttaaaataaataactacaaaaggcttctttgtccaaaacgtcattattttatacttatatacacgcaggtgtaaaagtataaaggtgagcactagactgctcttagaagctctaatttttgttttctttggctagtactgtataaaaaacagaattgtgttttattggttttgggatgacagaaaagtctgggaataaatgtttgttttcctcatttcttccttctaggaacacaggaatctaaagggggtattagccagcctcgcctccctggccccacgtagagacaacagagtgatgtgagggcgttggctttttctccaagaaggtacagatacctcagattcggggaaactcaaaatccaaaagacttaggcttctagggataaatacttctgatgaaaaatccgctgaggagcataccccaaaccagacatatgcttaggattcatgctgagatatcaattggtttccccttctttttaaaatacgtccagttcttacccagttaacatgaagaaaccactgtctctagaagaaagcttgttttgcagtattagtgaatcactgaatagcttaagtatgactatctaagttataagttagtctttagtgggttttaaatagtttttctgacccttctgaaaaataactacataagtgcttcttgttgctgggtgagaaatactactttatagacagttttggttttctgtttgcaggtatggattgatgtatttcaccaaaataaaatatttttatgtttataaagtgtaatttttaggttcacttagaatatattttatttaataagttaaaattcttttggcacactattaaatgcaaaaactcctttcaaaacaaaaaagaactaccttatattccaaccatttaatgttcttggccctctgcttttatgtctataccaatattactgagttcagtatgggtgtcccaagagtgccctgtgtggggataggacatgtgccactccttcccaggagtgggtacctnattcccagactcccagatgccctattattagttaggcttctgagcttgcaatcatattgaatgtatgaagagcgaaaatcaaattcttatttttgtacaggttttgaaggtttataccttagaactgacccaccctccccgggccacgcggagagctgtacagtgtgtaaatctgccctttatcttggattgattggtacgagtattttgctattttgtgggacctaccttttcgttcaagtaagttttgaacctatatataaactgtacaatcctgtaaaagtttttatagaataaatattcagctgtgaaaactggttaaataaaactaatatttcttaacaaaaaaaaaaaaaaaaa

SEQ ID NO: 2572 - DNA, 572 bp, Homo sapiens
  SIMILAR (2)..(22): 1001254mologous to Homo sapiens delta-6 fatty acid desaturase,accession number AF134404,Smith-Waterman Score=47.
ctggtgtctgcagcatgacctggccatgcctccatcttcaagaagtcctggtggaaccacgtggcccagaagttcgtgatggggcagctaaaggcttctccgcccactggtggaacttccgccacttccagcaccacgccaagcccaacatcttccacaaagacccagacgtgacggtggcgcccgtcttcctcctgggggagtcatccgtcgagtatggcaagaagaaacgcagatacctaccctacaaccagcagcacctgtacttcttcctgatcggcccgccgctgctcaccctggtgaactttgaagtggaaaatctggcgtacatgctggtgtgcatgcagtgggcggtgagtggggttgcccaggaccccgggcatacggctgccgtggcaggaggtggtgcctcgggggacagtacctgcccatgaaggcaaacagggtgcacatgatttgctctgggccgccagcttctatgcccgcttcttcttatcctacctccccttctacggcgtccctggggtgctgctcttctttgttgctgtcaggtatggcagggagtggcgagg

SEQ ID NO: 2573 - DNA, 502 bp, Homo sapiens
tttttacatctgaatgtattttaatataaaaataacagctttcccccaattctcgctctaggaaaatgtgctatgctcaccttccctctacccctgtcccatcaggcccagagccaaggccatagggctgctgaatacacatgtgaggggagatccccattccctgtgggttcccttccctgggggcaggcagcgatgcgggctggagggtgggttgggagaacagctgaatgctcattctctggaatggaatctagaccgggttgacgggtgtcgggtaggggagctggagggcagccaaggccaagtccaggcatgagcctgggtgggcctgtccctcctgcacccagttctccattgctgcctcctgctgggcgctgcaacccaaggacagagaggacgtggaacctgcccacccgatcttgggcctgatattgggcagtggagccagaaatgtcaacaatctgctaggaagccctgtgccaggcgctctaaagggctg

SEQ ID NO: 2574 - DNA, 1516 bp, Homo sapiens
  SIMILAR (845)..(1165): 611254mologous to Homo sapiens BC269730_1,accession number AC004770,Smith-Waterman Score=314.
agacccctagtccagtgtggcggaattcgtgagggtgtcttcccaggaggagatgctgggtctactctgtcaggcatctgtgtccctggcagggtctttcccaacacaccctgcatgacaccttcgtcactaaaatcagcctcgtgagctggcagggcaaggaccctgttcctttactcagctgagaaaaccagagagggtggtggcctgtcctgggctctgaggcaaatcaggcagaagggttggatgcctgaggtcctcctcccacccaccaggcctccagacctccgggcacctggagacctctcggtatcgcctctgccctcctctgcaggatttgctctgggccgccagcttctatgcccgcttcttcttatcctacctccccttttatcggcgtttcctggggtgctgctcttctttgttgctgtcaggtatggcagggagtggcgaggtcacacacaggcgacaggtgacccccactgcagccccccaccagagcttcccttttcccgtctgcagaatggggccagtggtactgcctccctggcttgctggtggaatcacataaacacaagcgtggcaggagcccagggtcggtgggtttagggagcgtggcctggcttgtaagtggcccggtgggtgtcggagctgctctggactcagcctcacagtggacactgctccattcagattctttaaacactggcaagggggcgatggccacaatcctattgtacagataaggaagtcaaggccacttggggacagctgctctccagcctccactcagggtgcctaagtggtgagctggacctagggcagtgcccgagcctccccacagggtcctggaaagccactggttcgtgtggatcacacagatgaaccacatccccaaggagatcggccacgagaagcaccgggactgggtcagctctcagctggcagccacctgcaacgtggagccctcacgttttcaccaactggttcagcgggcacctcaacttccagatcgagcaccacctcttccccaggatgccgagacacaacctacagcccggttgccccgcttgttcaagtcgctgtgtgccaaagcacggcctcagctacgaaagtgaagcccttccttcaccgcgctggtggacatcgtcaggtccctgaagaaagtctggtgacatcgtgctggacgcctacctccatcagtgaaggcaacacccaggcgggcagagaagggctcagggcaccagcaaccaagccgagcccccggcgggatcgaataccccccacccctccactgaccagcctgggggtgccctgcctgccctcctggtactgttgtcttcccctcggccccctcacatgtgtattcagcagccctatggccttggctctgggcctgatgggacaggggtagagggaaggtgagcatagacacattttcctagagcgagaattgggggaaagctgttatttttatattaaaatacattcagatgtaaaaaaaaaaaaaaaaaaa

SEQ ID NO: 2575 - DNA, 2071 bp, Homo sapiens
  SIMILAR (81)..(545): 481254mologous to Homo sapiens Glyoxalase,accession number AAR33912,Smith-Waterman Score=285.
tcctccgttccttgggtcccgtcgtctgtgagtactgcagtgcagccatggctgtttctcgcagccttcgtccggcggccgtcacggacgaggccgcgtcgagttgctgctccgacgcggaccccagtaccaaggattttctattgcagcagaccatgcgtacgagtgaaggatcctaagaagtcactggatttttatacgtagagttcttggaatgaccgctaatccaaaaatgtgattttcccattatggaagttttcactctacttcttggcttatgaggataaaaatgacatccctaaaggaaaaagatgaaaaaaatagcctgggcggttttccagaaaagctacacttgagctgacacaacaatttggggcactgaaggatgatgcgacccagagttaccacaatggcaattcagaccctcgaggattcggtcatattggaattgctgttcctggatgtatacagtgcttgtaaaaaggtttgaagaactgggagtcaaatttgtgaagaaacctgatgatggtaaaatgaaaggcctgggcatttattcaagatcctgatggctactggattgaaattttgaatcctaacaaaatggcaaccttaatgtagtgctgtgagaattctcctttgagatttcagaagaaaggaaacaatgtgattcaagatatttacataccagaagcatctaggactgatggattcactgtcccgattcaaattaatctcaagtccatttccccttcctatttcagctgttccttttcacctaacggttcaggtcattctggttttcaagcaggtgctttatctcatgtccttgaaatatagttgtgtaactttattttttaggtaataattagaacagttcccttcagaggctgcatttgccttcttctgccacctaaatattacttcccttcaaatctgcctttgaatcatcatttttaaaaaaaaattaacatgtttttgttgtagttatcttctggggtttcaattcctcagaaacaacttttttcacaacggaaaggaaagaacactagtgttctttcagtaaagtacaaagtgtttattttacaaaagagtaggtactcttgagagcaattcaaaatcatgcctgacaaggatactgatagaaaaagtgatttcttcttaattaataaaagtacatttaaaaggtcaaaggacctaaccttattttatttgggaaagggggaggaggaaggaaatggatatgggtaccccagaccactgggctaaggctgcaactttattctcatttaaaactcccagcttgtcatgtgagaaagaaagcaaggctagggcatgtgaaatcactttcatggaccccctcctggatccccagagggcatcaatccagctcaactcaaagatttccataatcattttttagtaatttagattgtgcctcaaagttgtaggtacctcaccaatacccccactgggtttccctgttgtaaaaaccttgcagtgaggttgaccaattgtgcttcttggcctctggggctggaggtaccgtggtgaggggagtaaacacatagaagtctttagtaccaaaactgctctaggggacacctgggtgattccttacgccaagctgatgttttaatatttctcaataaagagtcttcccctatcccaaaggtcttccatgatgcccagtagcccatataatggtaaattatgttccagtgataacttagttatcagaaatccagctcagtggtcttccccgcccatgattcacactttgatgagtttttcaaaaatcaaaggtgattttgaaaatctctaatggctcagaaaataaaaacatcccggtttgtggatgactatatttagatttccccagactcctagtggaagacctttggaaaaggccatgccaaccgtgcttggtactgctagaagcactttatgtatcctttttagagagtgaaatggattttatgtgagtgctttaaacaaatagcaatacttatagacatgaaataaaatgaaacttcaaataagactatgtttaatttgaaaaaaaaaaaaaaaa

SEQ ID NO: 2576 - DNA, 522 bp, Homo sapiens
  SIMILAR (128)..(400): 831254mologous to Homo sapiens A28-RGS14p,accession number U70426,Smith-Waterman Score=385.
cagacactggatcagatgtgggtacaagcccagagctgaaaagctagtgatcaactcaggagcccccacttcctgatgcagcatccgatgctctttccaatgcccagcctgccgttggccctccctcagccatgcccaccctcttccccaactcaccctgtgtgtgtcctcattcccgcaggtcaacattgaccatgagacccgcgagctgacgaggatgaacctgcagactgccacagccacatgctttgatgcggctcaggggaagacacgtaccctgatggagagggactcctacccacgcttcctgaagtcgcctgcttaccgggacctggctgcccaagcctcagccgcctctgccactctgtccagctgcagcctggacgagccctcacacacctgagtctccatggcagtgaggaagccagccgggaagagaggttgagtcacccatccccgaggtggctgcccctgtgtgggaggcaggttctgcaaagcaagtgcaagaggacaaaaaaaaaa

SEQ ID NO: 2577 - DNA, 2447 bp, Homo sapiens
  SIMILAR (722)..(751): 701254mologous to Homo sapiens regulator of G-protein signaling-16,accession number AF009356,Smith-Waterman Score=41.
cgcttgcaggctgctaaacccaaccgcagttgactagcacctgctaccgcgcctttgcttcctggcgcacgcggagcctcctggagcctgccaccatcctgcctactacgtgctgccctgcgcccgcagccatgtgccgcaccctggccgccttccccaccacctgcctggagagagccaaagagttcaagacacttttgggaatctttcctcacaaatccagagctgggcttcgatactgggagtactggcaagttcgaatggggcagtaaacacagcaaaggggatttgaaaacttctcagaaagatgtgctggggtggagagagtcgttcggacctgctgctgagcagtaaaaatggaagtggctgccttccacgctttcctgaagacagagttcagtgaggagaacctggagttactggctgggcctgtgaggagttcaagaagatcccgatcagctaccaagctggcctccagggcacacccagatctttgaggagttcatttgcagtgaggcccctaaagaggtcaacattgaccatgagacccgcgagctgacgaggatgaacctgcagactgccacagccacatgctttgatgcggctcaggggaagacacgtaccctgatggagaaggactcccttacccacgcttcctgaagtcgcctgcttaccgggacctgggctgcccaagcctcagccgcctctgccactctgtccagctgcagccctggacgagccctcacacacctgagtctccacggcagtgagggaagccagccgggaagagaggttgagtcacccatccccgaggtggctgcccctgtgtgggaggcaggttctgcaaagcaagtagcaagaggacaaaaaaaaaaaaaaaaaaaaaaaaaatgcgctccagcagcctgttttgggaagcagcagtctctccttcagatactgtgggactcatgctggagaggagccgcccacttccaggacctgtgaataagggctaatgatgagggttggtggggctctctgtggggcaaaaaggtggtatgggggttagcactggctctcgttctcaccggagaaggaagtgttctagtgtggtttaagaaacatgtggataaagggaaccatgaaaatgagaggaggaaagacatccagatcagctgttttgcctgttgctcagttgactctgattgcatcctgttttcctaattcccagactgttctgggcacggaagggaccctggatgtggagtctttccctttggccctcctcactggcctctgggctagcccagagttccttagcttgtacctcgtaacactccttgtgtgtctgtccagccttgcagtcatgtcaaggccagcaagctgatgtgactcttgccccatgcgagatatttatacctcaaacactggcctgtgagccctttccaagtcagtggagagccctgaaaggaggctcacttgaatccagctcagtgctctgggtggccccctgcaggtggcccctgaccctgcgttgcagcagggtccacctgtgagcaggcccgccctggggcctcttcctggatgtgccctctctgagttctgtgctgtctcttggaggcagggcccaggagaacaaagtgtggaggcctcggggagtggcttttccagctctcatgccccgcagtgtggaacaaggcagaaaaggatcctaggaaataagtctcttggcggtccctgagagtcctgctgaaatccagccagtgttttttgtggtatgagaacaggcaaaaagagatgccccgagatagaaggggagccttgtgtttctttcctgcagacgtgagatgaacactggagtgggcagaggtggcccaggaccatggcacccttagagtgcagaagctggggggagaggctgcttcgaagggcaggactggggataatcagaacctgcctgtcacctcagggcatcactgaacaaacatttcctgatgggaactcctgcggcagagcccaggctggggaagtgaactacccagggcagcccctttgtggcccaggataatcaacactgttctctctgtaccatgagctcctccaggagattatttaagtgtattgtatcattggttttctgtgattgtcataacattgtttttgttattgttggtgctgttgttatttattattgtaatttcagtttgcctctactggagaatctcagcaggggtttcagcctgactgtctccctttctctaccagactctacctctgaatgtgctgggaacctcttggagcctgtcaggaactcctcactgtttaaatatttatttattgtgacaaatggagctggtttcctagatatgaatgatgtttgcaatccccattttcctgtttcagcatgttatattcttataaaataaaagcaaaagtcaaatatgaaaaaaaaaaaaaaaaaaaaa

SEQ ID NO: 2578 - DNA, 901 bp, Homo sapiens
  SIMILAR (9)..(167): 631254mologous to Homo sapiens Human myelin oligodendrocyte glycoprotein gene,accession number AAZ29204,Smith-Waterman Score= 165.
tcgatacgacttttttttttttttttttttttttttttttgtgacggagtctcgctctgtcacccaggctagagtgcaatggcgctatctcggctcactgcaagctccgcctcccaggttcacgccattctcctgcctcagcctcccgagcagctgggactacaggcgcccaccaccgcgcccggctaattttttttgtatttttagtagagacggggtttcaccgtgttagccaggatggtctcgaactcctgacctcgtgatccacccgcctcagcctcccaaagtgctgggattacaggcgtgacagccgcacccagccgagcctgctctttcaaactggccagaggcagagcctgtcctggctgggactgggcagaggaactaactggaacctctcacactcggcgtgtccacccaggacaggccttgtggggctgggactggaggcggtgcagctgtgggtcaagatcatggcagacatgactgcagcgctgccccgctgtgcttcgggggtggctggcctgcctcacggcccaggaggagcaaattgggccctatgtttcagtttctccaccagtcatccctggggcagcttgctgctttattgatgttttaagatgaaagatttcagataaagatgtgttcaaggccgggcgcggtgctcagccaaaaacattttcttttcttttgagaaagagtctcaccctgtcacccaggctagagtgcaatggtgtgatctcagctcactgcaacttctgcctcccaggttcaagtgattctcttgcttcagcctcccgagtaggacaatcacttgaacctggaacacggaggttgcagtgagctgagactgtgccactgcactccagcctgtgcaacagagcaagactctgactcaaaa

SEQ ID NO: 2579 - DNA, 608 bp, Homo sapiens
  SIMILAR (595)..(290): 561254mologous to Homo sapiens Human secreted protein, SEQ ID NO: 6953,accession number AAG02872,Smith-Waterman Score=239.
  misc_feature (1)...(608): n = a,t,c or g
gcgctcagaaatagggcttgaggctcaagcagaaactgaagctctcattcaaatgaagatgctctctctaccgcacgatcggcagtgagaaaaggaggatgaaaatccttctcatcacaaagagcttgaaggaacccacgtccccagattagcaaccctagagttcatctgctcaggccgggaaaatgtgtaagcttcccttggatcagctcccaggcctcacagcacgggagcagtgacccagtaaggaaacgtccactgctgtgcctttcctgttggaaattgttccgaaaaatacagtgaaactggcccaggccccagtagctcatgccctgtaatcccaggcactttgaaaggctgaggcaggcagatcatttgaggtcaggagttcccagaccagccctggtccaacatggtgaaaccctgtctgtactaaaaatacaaaaattaggcgggcatggtagcacgtgtctgtaatcccagctcctcaggaggctgaggcagaagaatctcttgagcctgggaggcagaggttgcagtaagctgagatcacatcattgcactccagcctgggtgacagagncaagactctgtctcaaaaaaaaaaa

SEQ ID NO: 2580 - DNA, 446 bp, Homo sapiens
  SIMILAR (66)..(131): 681254mologous to Homo sapiens gro protein,accession number J03561,Smith-Waterman Score=80.
  misc_feature (1)...(446): n = a,t,c or g
tacaccaatcgaaccgccctcgganaccccgggtcgacccacgcgtccgcggacgcgtgggttcaccccaagaacatttaagtgtgaacgcgttgtcccccggaccccactgcgcccaaaccgaagtcatgtaagtcccgccccgcgctgcctctgccaccggcggggtcccagaccctcctgctgccccaaccctgtccccagcctgacctcctgcctcacgagattcccttccctctgcagagccacactcaagaatgggcggaaagcttgcctcaatcctgcatcccccatagttaagaaaatcatcgaaaagatgctgaacagtgacaaatccaactgaccagaagggaggaggaagctcactggtggctgttcctgaaggaggccctgcccttataggaacagaagaggaaagagagacacagctgcagaggccacctgga

SEQ ID NO: 2581 - DNA, 1413 bp, Homo sapiens
  SIMILAR (412)..(738): 1001254mologous to Homo sapiens ENA-78 prepeptide,accession number U12709,Smith-Waterman Score=544.
atggcccgcgccacgctctccgccgcccccagcaatccccggctcctgcgggtggcgctgctgctcctgctcctggtggccgccagccggcgcgcagcaggagcgtccgtggtcactgaactgcgctgccagtgcttgcagacactgcagggaattcacctcaagaacatccaaagtgtgaatagccacactcaagaatgggaagaaagcttgtctcaaccccgcatcccccatggttcagaaaatcatcgaaaagatactgaacaatccctaatgggcttcagacctgaaaaatgcaatgtctggtttgggcactttgggcctgtaagccttcttggtgaagagcagaaactttgcagtaacaccttcattcaggaacccgcgaccgctcgcagcgctctcttgaccactatgagcctcctgtccagccgcgcggcccgtgtccccggtccttcgagctccttgtgcgcgctgttggtgctgctgctgctgctgacgcagccagggcccatcgccagcgctggtcctgccgctgctgtgttgagagagctgcgttgcgtttgtttacagaccacgcagggagttcatcccaaaatgatcagtaatctgcaagtgttcgccataggcccacagtgctccaaggtggaagtggtagcctccctgaagaacgggaaggaaatttgtcttgatccagaagccccttttctaaagaaagtcatccagaaaattttggacgggcctatccggggagtgaatcctctcagctgcaagtctgggacgggacttcatcctactagagccctagctgattgcttgatagttctttggtttacaccacagttgacatccataacaggaatgtctgacttaaagattcatttgttactggtcaatgcatctaacattgagttttacggaaaacccctgatacttaatgacagagagaagtattctctgacttttctgagtgagtcaaataccactatggaagtaggttatgaaatagatttagagagttatgagcagaacttttttaaaagggaaatagaatggaatagaaaattttcctcccacactgatttacctgctacacaaaattattcttactgggcttatgtgccttttcctccacttattcgacctctcacctggatagatgctcctgcagaaatctacactaacgatagtgtgtggatgcctggagccacagatgactgttgccctgctcaaccaggagaaggcactgcatttaatgttaccatgggttataaataccctcctctgtgccttggacatgcacctggttgtatccatctagaaactcaagtctgggctgcttatcttccggagatatcagctacagaggaaccgggatatttgatctctggcctctccctttctcctttaaaataa

SEQ ID NO: 2582 - DNA, 1007 bp, Homo sapiens
  SIMILAR (469)..(693): 981254mologous to Homo sapiens cytokine gro-beta,accession number M57731,Smith-Waterman Score=366.
atgtcttccagagaagtaactccccccggtaaggatgtagcgcggtccctacgtgggtctaagggatctgacccacgacgcactgcactgggttcacgaagcgcctcctcgcaggcggttatctcggtatctctgagagcggcgggctctcgctcccgctccagggattcggggcagaaagagaacatcccacagttggcgggagttacgcaagacagtcagacccggacgtcactcgtgagtgccccgacccccctccaccccagaggcggggccatcgccttccttccgaactcgggatcgatctggagctccgggaatttccctggcccgggactccgggctttccagccccaaccatgcataaaaggggttcgccgttctcggagagccacagagcccgggccacaggcagctccttgccagctctcctcctcgcacagccgctcgaaccgcctgctgagccccatggcccgcgccacgctctccgccgcccccagcaatccccggctcctgcgggtggcgctgctgctcctgctcctggtggccgccagccggcgcgcagcaggagcgcccctggccactgaactgcgctgccagtgcttgcagaccctgcagggaattcacctcaagaacatccaaagtgtgaaggtgaagtcccccggaccccactgcgcccaaaccgaagtcatgtaagtctcgcccatcgctgccgctgccactgctggggtccccgactctcccgctgccccaaaccctgtcctcagcccgacctcctgtctcacgagattcccttctctctgcagagccacactcaagaatgggcagaaagcttgtctcaaccccgcatcgcccatggttaagaaaatcatcgaaaagatgctgaaaaagtaagttataatttccatgtacacaggcgactggagctgttggtcagaaatactggcgtctgccccctaaaaagtaaatcaggaaaacccagggttagctgcaggactgaaaaaatt

SEQ ID NO: 2583 - DNA, 1147 bp, Homo sapiens
  SIMILAR (82)..(357): 891254mologous to Homo sapiens gro protein,accession number J03561,Smith-Waterman Score=396.
gccacagagcccgggccgcaggcacctcctcgccagctcttccgctcctctcacagccgccagacccgcctgctgagccccatggcccgcgctgctctctccgccgcccccagcaatccccggctcctgcgagtggcactgctgctcctgctcctggtagccgctggccggcgcgcagcaggagcgtccgtggccactgaactgcgctgccagtgcttgcagaccctgcagggaattcaccccaagaacatccaaagtgtgaacgtgaagtcccccggaccccactgcgcccaaaacgaagttcataagcacactcaagaaatgggcggaaaggcttgcctcaatcctagcatcccccataattaagaaaatcatcgaaaagatgctgaacagtgacaaatccaactgaccagaagggaggaggaagctcactggtggctgatcctgaaggaggccctgcccttataggatctgaagaggaaagagagacacagcttgcagagggccaccctgatttgtgcctaattgtgtttgagcaccgcttaagagaagtcttctatttatttatttattcattaagtttttgaagattctatgttaatattttaggtgtaaaataattaagggtatgattaactctacctgcacactgtcctatttatattcattctttttgaaatgtcaacccccaagttagttcaatctggattcatatttaatttgaaggtagaatgttttccaaatgttctccagtcattatgttaatatttctgaggagcctgcaacatgcccagccactgtgatagaggctggcggatccaaagcaaatggccaatgagatcattgtgaaggcaggggaatgtatgtgcacatctgttttgtaactgtttagatggaatgtcagttgttatttattgaaatggatttcacagtgttgtggtcaacattttctcatgttgaaaccttttaagaacctaaaatggttctaaatatccccttggacattttatgtctttcttgtaaggcatactgccttgtttaaatggtagttttacagtgtttctggcttagaacaaaggggcttaattattgatgttttcatagagaatataaaaataaagcacttatagaaaagaggaaaaaaagg

SEQ ID NO: 2584 - DNA, 1479 bp, Homo sapiens
  SIMILAR (165)..(209): 731254mologous to Homo sapiens lysosomal-associated protein transmembrane 4 alpha,accession number BC003158,Smith-Waterman Score=57.
  misc_feature (1)...(1479): n = a,t,c or g
gcggcacgaggtgaagacgcgtcgttgggttttggaaggcccgtgaaaacagccgtttgaagtttggcctgcgggtggagaacgtttgtcaggggcccggcccaagaaggaggcccgcctgttacgatggtgtcccatgagtttcaagcggaaccgcagtgacccggttctacagcacccggtgctgcgggctgttgccatgtccgcaccgggacgatcatcctggggacctggtacatggtagtaaacctattgatggcaattttgctgactgtggaagtgactcatccaaactccatgccaagctgtcaacattcagtatgaaagtcatccggtaattactattccgtctgagagaatggctgataatgcctgtttttcttttttgccgtctctgttcttaaggtttataatccagttccaatgctggtttatgggagcaatttcctttatccaagtggggttggctggattccattcttctggttaccgactttttgacttcgtcctcagtttgcctggttgctattagttctctcacctatttgccaagaatcaaagaatatctgggatcaactacctgattttgcccgacaaagatgacctctgngcccttggactccaagctgcctcctgttcattgttcttgtgttctttgccttattcatcatttttaaggcttatctaattaactgtgtttggaactgctataaatacatcaacaaccgaaacggtgcccggagattgctgtgtaccctgcctttgaagcacctcctcaagtacgttttgccaacctatgaaatgggccgtgaaaaatggcctgaaaaagaaccacaccctcccttacttacctggcctgaaggaaattctggcctttggacaataaatccctgataccaggctttttggtttggtttatggttaacagaatggctggcaatttcagggggtctttcaaaacttggtttggatataaaatatggttgtcctttggttttaaagcaatttattttccaaaacactaagggagcctttttggacatctggttaaacggtctttttgttttttttgttaaagtcttttacattttaataggtttttggaagacaatctaggttaaagcaagagcaaagtggccattgtttggcctttgaattgggcgggtgggaaggggaaagagggtacttggccacatagtttccctttttaactgcactttctttatataatcggttggcattttggttacttgctacccctgagtactttcaggaagactgacttaaatattcggggtgagtaagtagttggggtataagatctgaacttttcatctgcaaaggcaagaaaaatatttgacattgtgacttgactgtggaagatgatgcgttgcatgtttgctagtttgtatatgtttccatctttgtgataagatgatttaataaatctctttaaatactaaaaaaaaaaaaaaaaaa

SEQ ID NO: 2585 - DNA, 559 bp, Homo sapiens
  SIMILAR (246)..(287): 781254mologous to Homo sapiens COP9 signalosome subunit 1 CSN1,accession number U51205,Smith-Waterman Score=47.
  misc_feature (1)...(559): n = a,t,c or g
gggaccgcgcgctctgagtacagcttcccgggagcggccaggtcctccagggcaccgagaaagccggccagaacggcgcgccactatcccggccgcagcgatgtctgacggcgccccggaactgacggtctggtacgcagggggctcggggcaacggggctttaaacgtcatcgcgggcgcgacgctgagggacagtctggggtttggctgtccggacggtgcagcggcgaggccgccgcganagatgccagtggcggtgatggcggaaagcgctttagtttcaaaaagttgctggatcagtgcgagaaccaggagctcgaggcccctggaggaattgctacacccccagtgtatggtcagcttctagctttatatttgctccataatgacaaagaatctggcagagagatttccctgggatctatacaaccatcaacgctcaccagtggtctgagacggtccagccaattatggaagcacttagagatgcaacaaggagacgcgcctttgccctggtctctcaagcgtatacttcaatcatcgccgatgattttgcag

SEQ ID NO: 2586 - DNA, 507 bp, Homo sapiens
  SIMILAR (2)..(247): 1001254mologous to Homo sapiens COP9 signalosome subunit 1 CSN1,accession number U51205,Smith-Waterman Score=419.
aatcatcgccgatgattttgcagcctttgttggacttcctgtagaagaggctgtgaaaggcatattagaacaaggatggcaagctgattccaccacaagaatggttctgcccagaaagccagttgcaggggccctggatgtttcctttaacaagtttattcccttatcagagcctgctccagttcccccaatacccaatgaacagcagttagccagactgacggattatgtggctttccttgaaaactgatttatcactctgagttcaagattcatcttcagaatcctgtatactgacaaacgtagaaatttgaggaaatgggaattcaagaagtcagaggatcaggagagtgatcaagagaatgacagtgccagtttttttaacttccaggtattaagtacaaattgtatccatggttattttttaaaagcagattagagtcaatccaaatattcattaataggggattgtttgaataaccagcagtgtagactaaaaaaaaaaaa

SEQ ID NO: 2587 - DNA, 218 bp, Homo sapiens
tccggggatcgggtcgaggggagaagaaaaaggggtgctcgggagcagcccccggctacctcccctggaggcacagagggcgggggccttggcgaatggctttcttgctggccacttgcggaggtttggattcaggatttgttcctagtgtccaagattttgataagaaacttacagaagctgatgcttacctacaaatcttgattgaacaattaaag

SEQ ID NO: 2588 - DNA, 445 bp, Homo sapiens
tttgaagaattcagttaaatatttattgaacaaatgcagagtaaatgaactaagggctgttataaccttaagttacaacaaacaacttcaaatattcagagggctgtcacacagagaatgaaagacttgctcagtatttctccaaagggcagaacttgaattatatctcaataaagctgctgttaaaacaaaaacaaaacaaaacaaacaaacaaaaaaaaacaatgaagcagtggcagcataggctcaaagtccttgaaaaggcaagagagatggggacacaatcataagtgattttgcctttgacaggaaggacctttcctgtactataataggaagaatgggaaggtggatgaattttaggtgagtacagagtactgtcttggcaaacatgtgtttctcatctttcaccttcattaaagtgaacctttaatgcaaattcacc

SEQ ID NO: 2589 - DNA, 2094 bp, Homo sapiens
  SIMILAR (469)..(921): 471254mologous to Homo sapiens COP9 signalosome subunit 1 CSN1,accession number U51205,Smith-Waterman Score=210.
  misc_feature (1)...(2094): n = a,t,c or g
agcggccgcgcgctctgagtacagcttcccgcggagccggccaggtcctccagggcaccgagaaagccggccagaacggcggcgccctatcccggccgcagcgatgtctgacggcgccccggaactgacggtctggtacgcaggggcgctcggcggcaacggcggctttaaacgtcatcgcgggcgcgacgcctgagggacagtctggggtttggctgtccggacggtgcagcggcgaggcccggccgcgaagatgccagtggcggtgatggcggaaagcgccttttagtttcaaaaagttgctggatcagtgcgagaaccaggagctcgaggccccgtggaggaattgctcacccccaaggtgtatggtcagcttctagctttatatttgctccataatgacatgaataaatgcgagatatctttggaaaagaataccacctgctataaaatctgcaaattctgaacttggggggaatttggtcagtaggacaaagaatctggcaagagagatttccctgggatctatacaaccatcaaccgctcaccagtggtctgagaccggtccagccaatttatgggaagcactttagagatgcaaccagggagaccgcgcctttgcccctggtctcctccaagcggtatactttcaatccatccgcccgatgatttttgcagcctttgttgggacttcctgtaggaagaggctgtgaaaggcatattaggaacaaggatgggcaagcttgattccaccacaaggaatggttcttgcccaggaaagccagtttgcagggggccctgggatgttttcccttttaacaagtttatttccctttattcagagccttgctccagtttcccccaatacccaatgaacagcagttagccagactgacggattatgtggctttccttgaaaactgatttatcactctgagttcaagattcatcttcagaatcctgtatactggacaaacgtaggaaatgttaaagtttgttattttccaatttattgggatgggctttaagcacctncaggcattcctttactatggtggataaaaatacatatagaatataagatatactatatacattttgtccataaacggttatgctgaatagttgttgaaacagttctcattttgtagtatttaataatctggatggagcctgtcagtattacagttagttttctagtgactcgataaaataagatttcctgtttcatgtagaatagtgtttgtcaactgtcttttctctgtcccagcacatgccgtactcttatatgtaccattggttgataaattataatgattcatttggactggaagaaagattgtccccaggcaccagtatctgaatcactgggggattatgattcacccctctttgggagaacatgctctcttttcacccccccacctcctgagagccactaaatgtaagatacagaaacatagctgaggaacaaatagaccattttcccatactaaaacccagtttgttaaactttagattttttccccaataggtggggagtatatcccattggctggccaagtgggagggccttgcccatgaaaatgccaacttatttaaggccatttatgagacatattaacttgtgctgtcgccttttaagaaggagaaaacttaagtgtggaatgccattatatggggcaaagaagactatgaagatacatgatacacttttgtacaactatccctgcagcccgntgggttgccttatatttatcgcttggctcaagttctgccctttggagaaatactgagcaagtctctcattctctgtgtgacagccctctgaatatttgaagttgtttgttgtaacttaaggttataacagcccttagttcatttactctgcatttgttcaataaatatttaactgaattcttcaattatttcatctaagatagtttctggaaatttcactctcgatctttctgtggacacaatctattttgtcattgtgtctatatgaatctcttaagtagaaatgagttgtatggtgaatctgtgtagtgataattatataatttatttattttgaaaaaaaaaaaaaaaaaa

SEQ ID NO: 2590 - DNA, 354 bp, Homo sapiens
  SIMILAR (72)..(353): 771254mologous to Mus musculus putative,accession number AK013297,Smith-Waterman Score=429.
ggcacgaggtgtattcagggggcgacgatggccttctgaggggctgggacaccagggtacccggcaaatttctcttcaccagcaaaagctatgatgaacacatcctactgtgggacacacgaaacatgaagcagccgttggcagatacgcctgtgcagggtggggtatggagaatcaagtggcaccctttccaccaccacctgctcctggccgcctgcatgcacagtggctttaagatcctcaactgccaaaaggcaatggaggagaggcaggaggcgacggtcctgacatctcacacattgcccgactcgctggtgtatggagccgactggtcctggctgctcttccgttctc

SEQ ID NO: 2591 - DNA, 443 bp, Homo sapiens
tccagtgtggtggaattcggagcctgcacaggcatctcgacagcatctaggagcgcaaggatggcatgggggtgtgaaagggagggagaccatgccccaagatcaagcctgtgggaaagttgtcctgcaagtgtgaggagtgtgagctccagtgtccccaggtcttctcggggcccctagcaggggtttcagtgttaggtggaggtgtgactcagtgactgatgtacttcattcgcataggttgtaaatgagggaacgatgacttccctgcaggagaggaaaagtcttttgggggttctggggcggctacttccctttgatggagtttcttcttctccagtagaagagccacgtgctggagccattgtccagcctttgccctggaggagcagtgtctgggctttgtccctagattggtccactgggaaaactggaagggccgg

SEQ ID NO: 2592 - DNA, 537 bp, Homo sapiens
  SIMILAR (111)..(191): 881254mologous to Homo sapiens Unknown (protein for IMAGE:3502107),accession number BC003123,Smith-Waterman Score=137.
ccggggagcttcctcacagacagtcaccccggggagcttcctcacagacatcaacggcctaactgagaacactcatttcctgtcatctagtggtgttgatgcttctctttctccacacagggggcgacgatggccttctgaggggctgggacaccagggtacccggcaaatttctcttcaccagcaaaaggtaacctcccaagggccagcactcggtgcccacaccagcccccgcgttccctgggtcaccagccctcccgttccctgggtgggtctgtgtgctggacactggttcagaagccgcctctgcttgcagacacaccatgggtgtgtgcagcatccagagcagccctcatcgggagcacatcctggccacgggaaggtgagtccccaggaggctctcgggcccttctcgtctctttcgctgtccccggggggctcctgggcccttcttccctctttcgctgcctttcctcctggcaccattgcagcatttcgtctgccagtgcttcgccggagtgtaggtatatgggtttg

SEQ ID NO: 2593 - DNA, 387 bp, Homo sapiens
  SIMILAR (4)..(126): 801254mologous to Mus musculus putative,accession number AK013297,Smith-Waterman Score=191.
gggttggcaaatacgcctgggcagggcggggtatggagaatcaaggggcacccttttcaccaccacctgctcctggccgcctgcatgcacagtggctttaagatcctcaactgccaaaaggccatgggctgtggctctctgagggcttagactctggccttattaccttttcctaagctgtagaagaggtcctgctggcccgagtggacgtgttgagcgattgctggatgaaagactagcggaggtcctgcctgccctgtgacgctacctcccaagggacagtaacggcctccccaggggcttcctcccgagggtcgccccacacatgctgcttcgaggggcccctgtggctgtctctgaacattcagcatcttcactcctcctcgg

SEQ ID NO: 2594 - DNA, 1822 bp, Homo sapiens
  SIMILAR (432)..(689): 701254mologous to Mus musculus putative,accession number AK013297,Smith-Waterman Score=311.
tcagaacgcctgataaccgcttcgattcccggtcgaccacgcgtccgacaactgctccgcctggtggaatctgaggtcagtgacttgcacttgttctgtggggcagaagggacctgaatagagagggttggggaggaggctgtgctgatacagacatttttctaaaacgatctctcttcaatggtgagctatatataaacgttctaagataatgtggagtctatttttaagtcgtattgcgttctacatccaactccaagaggaagtcacctcatgtgtcaccagcagaagggctgaagtgacaggatgttcattgacctgtcagtggatctgaaagttctctaatgagagcctggacaagcattcttaggttgatgctggtgcccaaagtatctttgatcatcctgggtttagatgccatttcttactgattattggaaaagcactagaagagccacgtgctggagccattgtccagccttgccctggaggagcagtgtctggctttgtccctagattggtccactgggaaaactggaagggccggggaccagcccttgaagatcatcagcagtgactccacagggcagctccacctcctgatggtgaatgagacgaggcccaggctgcagaaagtggcctcatggcaggcacatcaattcgaggcctggattgctgctttcaattaccctggcwtccagaaattgtgtattcagggggcgacgatggccttctgaggggctgggacaccagggtacccggcacatttctcttcaccagcacaagacacaccatgggtgtgtggcaagcatccagagcaagccctcatcgggagcacatccttggccacgggaaagctatgatgagacacatcctactgtgggacacacgaaacatgaagcagccgttggcagatacgcctgtgcagggtggggtatggagaatcaagtggcaccctttccaccaccacctgctcctggccgcctgcatgcacagtggctttaagatcctcaactgccaaaaggcaatggaggagaggcaggaggcgacggtcctgacatctcacacattgcccgactcgctggtgtatggagccgactggtcctggctgctcttccgttctctgcagcgggcccccctcgtggtcctttcctagcaacctaggaaccaaagacggcagacctgaagggtgcaagcgagttgccaacaccctgtcatgaatgcagagaggataacgatggggagggccatgccagaccccagagtggaatgaagccactcacagagggcatgaggaagaatggcacctggctgcaggctacagcagccaccacacgtgactgtggcgtgaacccagaagaagcagactcagccttcagcctcctggccacctgctcccttcctatgacccatgcgctcccccctctgggaagtgggaggggaactgagcttgaaatccatgaagcccccttccccacaaggaaaacccaggagggagactgccgagtgagtgccccgggacccaccctcatccagagatgccttactgcagccctgcacggtgcctgtgccactgatggaatcccacagtgtagtcagaaaagctgttgacttcctcttaaatcagcttccctgctggggcccctgaaagtggactgggtgattctgtctggcagagagtggggaaaagacgcggtttccagcttgcagatttgttaagtttctcaggcagattttgactttcagcctttcatacttgttctaagcaactaattgtattaaaggaagttttttgaaaaaaaaaaagtcggacgcggccgga

SEQ ID NO: 2595 - DNA, 438 bp, Homo sapiens
  misc_feature (1)...(438): n = a,t,c or g
aaaagacccggggaggttatttttttaaccggatcccctttttttttaaaaaaaacagctattttttcctaaccgattcaagcaggcctttcccttttaaaaacagctggaaaaaaaggtcctgaggggtccccccccgttttttattccccccttaaccctggggcggnnnnnnnnnnnncccccttggtttaaccattttttcccgttttccccgtgaacccccttttttgggggtagggcctacgcctcnnnnnnnnnnnnnnnggcttgcctgaccccttacagaggacttaatgcaatgcctattcgggcaataaatgaatacttgatgcattcatacaggcaagaatcccagcatcccagagaagctctgtctgcgctgcaaaaccatggctgcagacatcagggaagctggtgcagtcgaacgcgtgggtc

SEQ ID NO: 2596 - DNA, 671 bp, Homo sapiens
  SIMILAR (364)..(639): 711254mologous to Homo sapiens Src-like adapter protein,accession number D89077,Smith-Waterman Score=325.
ttgctgcgaatggagaacatctcaggcagccctgatgctccaccgtccttgcagagagaagcttgctcagagtggttactgaaaacaggaacctgcccttctgcaagccctgtgccttcctcgttcctagcagaggaagtatgcggccagtttagcaactgcagttcttctgtgtagcatgggctgcttctccacaaccgcgagaggcccggctgcctgtttattctggagcagcagcagttgacagacggagaggcagtgactctgcacccagcaatccctctgcagacagctcccacaggagtcatgcccagtgtgtgaaggctctgggcatcaccagcggccccagggaaaaagaaagaaatgggaaacagcatgaaatccacccctgcgcctgccgagaggcccctgcccaacccggaaggactggatagcgacttccttgccgtgctaagtgactacccgtctcctgacatcaaccccccgatattccgccgaggggagaaactgcgtgtgatttctgatgaaaggggctggtggaaagcctatttctcttagcactggtcgagagagttacatacctgcaatatgtgtggccagaagttaccatggctggctgttaagagggcccggccaaaaacatggccgaggagctgctgcagctgccagac

SEQ ID NO: 2597 - DNA, 3411 bp, Homo sapiens
  SIMILAR (738)..(1577): 711254mologous to Homo sapiens Src-like adapter protein,accession number D89077,Smith-Waterman Score=932.
  misc_feature (1)...(3411): n = a,t,c or g
ctgtgtccatttgaaggctaaagaaactgcagctcagaccagttcagcaactctcctacatcgtgtggctaaagctaagaattgtgacccatttttctgaatccaggtccccgcgatgccctgggttcagaccctaacaccctcccgtccctgagtgctggggatttaaggcagcagtgcctcctttcaggaaatcacacacacactggaaactcctgcatacttctcttactataatctgtcaccaaagactggatattcctgtgctggggctcgtgccagcgcctcgggctgccaggtgctgctttccaactcccacatgggctgccctccccctactgctacccacagggcccccactccacctgctcccagacgaggccaactcctggccaagcttaggggcacagcggaggcgctctgtttctgatttttctcgccttccttggagatgcctgtgcttggaagggaaggcagaacattgcatcttggaacaaatctgcttttgatcatgcaaatgaatgcctggataatgtaggcagactgtcaatttcaccagttagaaagaaagagaaaagggggagaaattccccatgacagcgactgatgaagaatttcaatagaaagctgctacttcagaaaataagatcatttgctgcgaatggagaacatctcaggcagccctgatgctccaccggctctgggcatcaccagcggccccagggaaaaagaaagaaatgggaaacagcatgaaatccacccctgcgcctgccgagaggcccctgcccaacccggagggactggatagcgacttccttgccgtgctaagtgactacccgtctcctgacatcagccccccgatattccgccgaggggagaaactgcgtgtgatttctgatgaagggggctggtggaaagctatttctctttagcactggtcgagagagttacatccctggggatatgtgtggccagagtttaaccatgggctgggctgtttgagggcctgggcagagacaaggccgaggagctgctgcagctgccagacacaaaggtcggctccttcatgattcagagagagtgagaccaagaaagggttttactcactgtcggtgagacacaggcaggtaaaggcnttaccgcattttccgtctgcccaacaactggtactacatttccccgaggctcaccttccagtgcctgggaggacctgggtgaaccactattctgaggtggctgatggcctgtgctgtgtgctcaccacgccctgccttgacacaaagcacggcttgccccagcagttgagggcctgcagctcacctgtcaccttgcgtcagaagactgtggactggaggagagtgtccagactgcaggaggaccccgagggaacagagaacccgcttggggtagtcgagtcccttttcagctatggccttcgagagagcattgcctcttacctgtccctgaccagtgaggacatctcctcctttgatcgaaagaagaaaagcatctccctgatgtatggtggcagcaagagaaagagctcattcttctcatcacccccttactttgaggactagccaagaacagacacaatggttcatgcccataaggaacagaagttccaactattgcctgggatcttgcgaaaagcgaggttccctgatccctgggagcctcacgtattttagaagccaagagaagccacatggagactcaaattcgcatcttctctatccacatcatgaccaaaggaacccctccctggtgactgatcacggctgaggcatcacgaaacattggatcatgacatgtccggcgaagcttgggaacagcccagcatgtatgtatgcacacattgtgtgtgtgggaaggacacagccactctcacaagaaagggcaccacgactgctctccaaggaactggacctgtccagacagttacactccaaggtcattggagagaacttctgtatgggcaagcctgagagggagaggaaacaaaagctgtgtcctggcagaaggtctgggtttgccaaaaagggtgccccctgaaatggaaactacttttaaactaaatcccattagggaccttcttggtaatgctttccctctcttttttaaaaggaacttcgtgaacacctaaaacatttagccccaaaggaccttccttagcccttcaattgggagaatacctttggtctgctccctgcacccaaagcccatatgggtggaagtcaagttggcctccctggttctgcagagggcccagaagaatgagagagaggaagactgctggcagggaaatcgaggaggcgagactagaactgcaccagcttccctgatgtctgcagccatggctttgcagcgcagacagagcttctctgggatgctgggattcttgcctgtatgaatgcatcaagtattcatttattgcccgaataggcattgcattaagtcctctgtaaggtgtccaggcaagccaaaaaaaaaaaaaaaagatgcgtaaatcctaacccccaacagaggtgttcacagtgtagacagggaaaaaatgtataaacaaatgtgtaaaaagagaaatcagctcatggcttaggatggaattagagacaggtgagggacactcaggagctcattttccagctgctcttcagagtggaagggctggctggatcgggtaggtaagaatagctggattttttagaaaagaaatggatacagtctaaagaattaactcacccggtactttattctaagaagggtctggcatccatatgaggaaaaatgctcagctccaggaaagatggggagtccaagtggattaatgatgtcatgcataattttaagagacaagggagaaaacacaatgtatagccagagaaggagaagctcccattccaaatcctactaggaagagagtgggctgcagatgaatctgtgactcatgtttccctgtttcaaagggatcctggggaaggaggggaacatgcttgcagtatctctccctgtctgtctgctcacataagcattccgtccatctgagctcatcgtgctactggtatgtgtatgtgcagttacacagttttctgtatcatagattctagtgtgtttatacaaggagacatctgtggtttccccaaccgttccaaaaggctatttcaaaggaaccagccaacgtatgagaaatgaatgtaacactgtggacattgacttcccgcataaggcagggtgaccccctgaactccagatgtttgcacagtatcttatgtgttgttttccgttgtgacgaatgtgattggaacatttggggagcacccagagggatttttcagtgggaagcattacactttgctaaatcatgtatttattcctgattaaaacaaacctaataaatatttaacccttggc

SEQ ID NO: 2598 - DNA, 1979 bp, Homo sapiens
  SIMILAR (527)..(664): 231254mologous to Caenorhabditis elegans Contains similarity to Pfam domain: PF00169 (PH), Score=20.6, E-value=1.9e-05, N= 1,accession number AF000195,Smith-Waterman Score=66.
atggagctaagcgtatctcctcctcccctcactccatcaacccccacgcgacacaactttccggaagtaagcaaaatccgttatcaaggtgaaactccggggaccaggctccacagctgccataaactggatggcacgttagaagccgtccggggatcgggtcgaggggagaagaaaaaggggtgctcgggagcagcccccggctacctcccctggaggcacagagggcgggggccttggcgaatggctttcttgctggccacttgcggagtgagtagaccccgagggtctgggagaggggccggcccctacccctgagtccccggggtcccggccgccaggccggagcgcgaatgtcgtgctcaccctgcctccttcccgccgccccctgggggtttggattcaggatttgttcctagtgtccaagattttgataagaaacttacagaagctgatgcttacctacaaatcttgattgaacaattaaagcttttttgatgacaagcttcaaaactgcaaagaagatgaacagagaaagaaaattgaaactctcaaagagacaacaaatagcatggtagaatcaattaaacactgcattgtgttgctgcagattgccaaagaccagagtaatgcggagaagcacgcagatggaatgataagtactattaaatcctgtagatgcaatataccagcctagtcccttggaacctgtgatcaggcacaatgccttcccagactgccttacctccagaacccgctcagttgtgtaagtcagagcagcgtccatctttcctaacaagttggacctgtgttaagctaccttgggacatcatcagactccaacacccaaatagtaccaggcagtgggaacttcaccaacctagcagcaagtctgactccttcccaagccatgtcaactttgtctccaaatacagtcccagagttctcttactccaggcagtgaaggatgaattttatgatgctgatggaattccatcaaagtgggctcatccccaaagcgcttaatagattcttctggatctgcctcagtcctgacacacagcagctcgggaaatagtctaaaacgcccagataccacagaatcacttaattcttccttgtccaatggaacaagtgatgctgacctgtttgattcacatgatgacagagatgatgatgcggaggcagggtctgtggaggagcacaagagcgttatcatgcatctcttgtcgcaggttagacttggaatggatcttactaaggtagttcttccaacgtttattcttgaaagaagatctcttttagaaatgtatgcagacttttttgcacatccggacctgtttgtgagcattagtgaccagaaggatcccaaggatcgaatggttcaggttgtgaaatggtacctctcagcctttcatgcgggaaggaaaggatcagttgccaaaaagccatacaatcccattttgggcgagatttttcagtgtcattggacattaccaaatgatactgaagagaacacaggaactagtttcagaaggaccagttcccggggtttccaaaaacagtgtaacatttgtgggctgagcaggtttcccatcatccacccattttcagcctttttatgctggagtgttttaacaagaagatacaattcaatgctcatatctgggaccaaatcaaaattccttgggatgtcaattggggtgcacaacatagggcagggctgtgtctcatgtctagactatgatgaacattacattctcacattccccaatggctatggaaggtctatcctcacagtgccctgggtggaattaggaggagaatgcaatattaattgttccaaaacaggctatagtgcaaatatcatcttccacactaaacccttctatgggggcaagaagcacagaattactgccgagatattttctccaaatgacaagaagtctttttgctcaattgaaggggaatggaatggt

SEQ ID NO: 2599 - DNA, 688 bp, Homo sapiens
  SIMILAR (44)..(583): 451254mologous to Homo sapiens ribosomal protein L18,accession number L11566,Smith-Waterman Score=220.
gcaggaaggcgccatcatggtgagtggaccatccgccatacaaaaggaccgaaaaggttcgggcgcaaaggagcccaaagagccaggatatctaccttggggctgttggtcaagttatacaggttttctggcccagaagaacccaactccaacattcaaaccagggttgtgttgaaggaggttgtttatgagtcgcaccaaaccggcccgcctctgtcccctttcccggatgatccgggaagatgaagctttcctggccgggaaaaaaaaaaacccggccgtggttgtgggaccccaaaaactaataatgtgcggggttcagaaggggaccccaaaactgaaagtatgtgccctgggcggtacacaagccgggccccacaaacgcatccctcagggcgagggggcaaagatccatcactttcgaccagctggccctggactccccctaaggggctgtggcactgtcctgcttttccggtccttccaaagggccgagaggtgtaccggcatttcggcaaggccccagggaacccggcacagccacaccaaaccctacgtccgctccaagggccggaagttcgaggcgtgccagaggcccgacgggccagccgaggctacaaaaaactaaccctggatcctactctcttatataaaaagatttttgctgacagtgaaaaaaaaaaaaaaa

SEQ ID NO: 2600 - DNA, 463 bp, Homo sapiens
tattataaatcatttaatattcttgaagttaacaactgataaactcatttaggcaaacattttggatttaatgatctaaagctcacagatgcatgccacatctagctaaaagtacataaaaagcgcacctctggaaataacagccctccctctggctgaatgcagcggcagggcaggggtctgcacaggcctgacctggtgttgctggagcgcggcatcccctcctgggtgctgctccgaaaggcaggctgggaggtgcttgctggggtgttccatggcagcgctgccaaccaagtctgggtctctaaaagccaccctcagtttataccaactgatcaggaaataggtggtgacagggccttgaagggtacatgccggcttcccttaagttgattagatgggaaaccaaacaccgtctttcaagtgtgaggctgtgccatgctccctcagggaggaggggcgc

SEQ ID NO: 2601 - DNA, 2471 bp, Homo sapiens
  SIMILAR (311)..(484): 661254mologous to Homo sapiens death-associated protein,accession number BC002726,Smith-Waterman Score=203.
  misc_feature (1)...(2471): n = a,t,c or g
gcggccgcgcccccgttaacggcagtggcactcacccggctcgcgcggccccggcgccccacgcgcgcgcgtcgttctcccgcccgctcgctccccggcgctcacacctgagctcactcgcgcacgcccgcccggcccgagaaccgcgccgccgcctcggccccgcggaagccccgccgcgccatgtcttcgcctcccgaagggaaactagagactaaagctggacacccgcccgccgtgaaagctggtggaatgcgaattgtgcagaaacacccacatacaggagacaccaaagaagagaaagacaaggatgaccaggaatgggaaagccccagtccacctaaacccactgtgttcatctctggggtcatcgcccggggtgacaaagatttccccccggcggctgcgcaggtgggctcaccagaagccgcatgcctccatggacaagcatccttccccaagaacccagcacatccagcagccacgcaagtgagcctggagtccaccagcctgccccatggccccggctctgctgcacttggtatttccctgacagagagaaccagcagtttcgcccaaatcctactctgctgggaaatctaaggcaaaaccaagtgctctgtcctttgccttacatttccatatttaaaactagaaacagctccagcccaaaccttgtttatggggagtctggttggatgtcatttgaggatcattgtgcccctagaggtgccattagcagaatttgccaagatccgagaaaaattttagctttagttctatttcagcagtcacctgacgtccttgtctatggtcttaaaaacaagaaggcacacatttgagaagatgagattaaggttaggagaaaacctcaggtcattgcatgctttttagtatgggccaataaaatcttaacaccctgtgggagagtaagaactaagggaatgagtttgggcggcccctcataaaggaccttagaggcagggaacagcaatgccaaatttccctctctcgtgagatgggggatcctgtgcaggctgatgaggcacccatgaagaaaagccgaaaaagcatgcatcttaggaaatagccccttcaattccagggagttcaacattgccaaagaatgaggctgggagacaggtagctccgagggaggacttctgggcatgagatcttcggcacggccaagccccagcattcgccttcagccccaggaccaggcttccacccgggagattccaagccaagggcttgccttttcagggagttcacctccttgaggccattttcaggagtttttgggaagttgacccacgggaccagggtgggaggaatagacttcttagtttcatttttggggacattttgaggccagaggatttgaaagctttggaaagaccagataagaaacctgccctttgtctccctagggacatgagacaccacattccatttgtgctagaaaaacctatccactgatgagtctaactgttccaaacggcttcccacctgggtgttgcacagctgcctgtgttccatttgttcacttggggtggcattcaggttgttcctccgatttttaggatgagtttcctgtctagagatgtcctagtctgctcacttggctggtggcagntatgtgtaccctgcgtctcttcgaaaagccagaggcgttcacgcgagtcatgacgaaactccagaacagtgcttgtggagggcctgactgtcctgctcacccacagccgatctgctgcaggtcagcaactgtgtcgtgagcagctgccaaccaccagcctttctgggtgctgttctccagttcacgtctgccagctgggagaagggcagaaggcagaccttggtcagaccccagcgccccctccctccctgagggagctatggcacagccttcacactttgaaagaacggtgtttggttttccatcttaattcaacttaaggggaagccgggcatgttaccctttcaaggccccttttcaaccaacctattttcctggattcagttgggtataaaacctgagggtggccttttaagaagaccccaagacttgggttggccaggggctgcccatggaaacaccccccagcaagcaccctccccagccctgccctttcgggagcagcacccaaggaagggaatgccggcgctcccagcaacaccccaggtcaggccctgtgcagacccccctgccccgccgcctgccagaaatcccagaagcatcccttaatgccttcctcagtccttcagccagaaggaaaggcttgttaatttccagaagttgcgctttttaaggtacttttaagctagatttggcatgcatcttgtgagctttagattcattaaatccaaaatgttttgcctaaatgagtttatcagttgttaacttcaagaataataaatgatttataataaagctcctgcatttctctccaaaaaaaaaaaaaaaaaaa

SEQ ID NO: 2602 - DNA, 2740 bp, Homo sapiens
  SIMILAR (621)..(887): 511254mologous to Homo sapiens nucleoside-triphosphate-- adenylate kinase,accession number X60673,Smith-Waterman Score=197.
  misc_feature (1)...(2740): n = a,t,c or g
tcggcacgagggtaggtgtagcgtggcgctcagtccgcctgctactcggtcccggcgctgggctgaggggaggggttgtcttaaaagtctctccttccccctgtaggggcggccggcgagtcccagtgagagcggagggtgccagaggtagggggccgagaaacaaagttcccggggcttcctccggggccgcggtcggggctgcgcgtttgaccgcccccctcctcgcgaaggcaatggcttccaaactcctgcgcgcggtcatcctttggcccgcccgggttgggcaaaggggcccctgtgtgccagaggatcgcccagaactttggtctccaagcatctctccaagcggccacttcttgcgggagaacatcaaggccaagcaccgaagttggtgagatggcaaatcaagtatatagagaaaaagtctttttggttccagaccatgtgatcacacgcctaatgatgtccgagttggagaacaggcgtggccagcactggctccttgaatggttttcctaggacattaggacaagccgaagccctggacaaaatctgtgaagttgatctagtgatcagtttgaatattccatttgaaacacttaaagatggtctcaatgcgccgttggattcacccctcctagcgggaagggtatataacctgggacttcaatccacctcatgtacatggtattgatgacgtcactggtgaaccattagtccagcaggaggatgataaaccccgaagcagttgctgcccaggctaagacagtacaaagacgtggcaaagccagtcattgaacttatacaagagcccgaggagtgctccaccaattttccggaaccgagaccgaacaaaatgtggcccatacgtttacgacacttttctcaaacaagatcacacctattcagtccaaagaaagcatattgaccctggcccaatgggaagaaccatggaatgatgtgggtcattcattccaatagtgtggtgtagtaattggtgctgttgtccaaatttagaagcctagctgaggtagccttgcagcatcttttctagttgaaatggtgaactgataggaaaacaaatgagtagaaagagttcatgaagaggccctcctctgcctttcaaaaggctggtcacctacacatgtttaaggtgtctctgcacatgtctcaagcccatcacaagaaagcaagtacagtgtggatttcaaatggtgtgtaacttccagctccagctgggtttttgacagctgttgctgtgggtaatatttttgacatgtgatgggtgatagtcttctggttctccccattccccacaaagggctgtttgaaccacaggcaccagaaaagcctgaggattgaatcctgagggctctagcccaggctttgtccccaggcttttctgggtttgtgcccctcctggtaaccagtgaaattgaagctactttactcatagtgggttgtttctctggtcttgagtgactgtgtccacagttcatttttttccggtaggaataactccttttcctacatcccacgcttcaatagagtctctccttttcagacatcttaggatgaaagaatttggctttttttttttctttttttttttggacatctgttttcactctttaggcttttaaacaatagttattgcttttatccctctcagattctaataactgagagcgatggggctatattgaatctctgtatgcactgagaactgagctatgaagaggatcttattaaactgctggtctgactttatggattgacactgttcctttcttttattgtgaaaaaaaaaaaaaaaaccctgaaagtcttggggaaccccctaaagtcttttggggaatcctcaaaaagcatggggaagttaagtatttagctacataaatgttgtaagattcatatcttatgtatagaagtaataagaccatttggaattactggactaattgaatagttaaggtttcctattcgggacaataaaatggtattttgaaagtgctgctaactattgatgctgacagtggtttcactcctatgagtgacccaaacatattataaatatgtggtcaaagggcaaattcgcggcacggnccnacttttgggtgggttgagcagaatgttgtactagctgtgcctggactgagtataacagctttatgattatgagaaccccaattctttatttttttcttctgttccaaagattcctcctatggcctggccataaagtctagaattagatcctaatattttgtcattcattataacatatcaataaaccatttgttaaaagatttgcctgggtttccagacttgggtgggccaccttggaataattcttgctgtcttctgggggagggatgatggaaatttattcctggctgccttaaaaatatggatcccttcttcacccctcatggactgtcccccagtgagtgtcctttactattcttgggggagtgactcctgtgctaacttttgcatactggcgagacgatgcgaggcctattctaccactttactgttgttctctcccctctcccactcatttatcgttccccctccatctcatgtctactcaacctgtcatccgcctccttccgcttcctcttcgcgctcgcatcttcttctcccctgcctctcctctgtgcgcgtccttctcctcctgttcccctcccatctcccctattcgccgtcgttctcctcctctagcctcgactcc

SEQ ID NO: 2603 - DNA, 445 bp, Homo sapiens
  SIMILAR (22)..(444): 981254mologous to Mus musculus putative,accession number AK002597,Smith-Waterman Score=719.
  misc_feature (1)...(445): n = a,t,c or g
actactttagtgcgngnnctttattttaggcgcaggaagttccagctctgcgccgatctatgcacgcagatgctggagaagtccccttatgaccaggcagcttggatcttaaaagcaagagcgctaacagaaatggtatacatagatgaaattgatgtagatcaggaaggaattgcagaaatgatgctggatgaaaatgctatagctcaagttccacgccctggaacgtctttgaaactccctggaactaatcagacaggagggcctagccaggccgttaggccaatcacacaagctggaagacccattacaggtttcctcaggcccagcacgcagagtggaaggccaggcactatggaacaggctatcagaacacccagaaccgcctacacagcccgccctatcaccagctcctccggaagatttgtcaggctgggaacggctt

SEQ ID NO: 2604 - DNA, 622 bp, Homo sapiens
  SIMILAR (1)..(195): 961254mologous to Mus musculus putative,accession number AK002597,Smith-Waterman Score=322.
caggcagcttggatcttaaaagcaagagcgctaacagaaatggtatacatagatgaaattgatgtagatcaggaaggaattgcagaaatgatgctggatgaaaatgctatagctcaagttccacgccctggaacgtctttgaaactccctggaactaatcagacaggagggcctagccaggccgttaggccaatcatcacattctgaaaaacccattacagggttcctcaggcccagcacgcagagtggaaggccaggcactatggaacaggctatcagaacacccagaaccgcctacacagcccgtcctatcaccagctcctccggaagattcgtcaggctgggaacggcttccatgcttacaagtcctgatggaccattcataaattaatctaggctgaatttaacaaagtattcccagaaacctaagatggcaaaggctttgcctgagtatatctttcatcatgaaaatgatgttaagactgctttggagctggctgccctctccacagaacattctcagtacaaggactggtggtggaaagtacagattgaaaaacgttactacaggttgggaatgtatcgtgaagcagaaaaacagcttatatcagccatgaagcag

SEQ ID NO: 2605 - DNA, 2292 bp, Homo sapiens
  SIMILAR (808)..(1650): 781254mologous to Mus musculus putative,accession number AK002597,Smith-Waterman Score=1101.
atgaaggcagagatttgcaagtcaaggactgtcaaggactggcacaaccaccagaagctaggagaagggaataaaactgattctcccccacaaccctcggaaggaactaacactgccaacactttgatcttggacttctggcctctagaaatgattgcatgctgttgggaaacttttcctcagcggctgactgcagagctgtttatgaaccccacacacagatggcatggttacaagaaccagagtgtaggcgcgctgcgggcacctctcggacaaggccccagccgtcgcgggttgccgggcagagtcggacgccgccagctcttcactccacgcccacctctctcctggagcgctgggccttcgctggccgcaccggcagccatgagctcggagatggagccgctgctcctggcctggagctattttaggcgcaggaagttccagctctgcgccgatctatgcacgcagatgctggagaagtccccttatgaccaggaaccagatcctgaattgccagtgcatcaggcagcttggatcttaaaagcaagagcgctaacagaaatggtatacatagatgaaattgatgtagatcaggaaggaattgcagaaatgatgctggatgaaaatgctatagctcaagttccacgccaatcacacaagctggaagacccattacaggtttcctcaggcccagcacgcagagtggaaggccaggcactatggaacaggctatcagaacacccagaaccgcctacacagcccgccctatcaccagctcctccggaagatttgtcaggctgggaacggttgggaatgtatcgtgaagcagaaaaacagtttaaatcagccctgaagcagcaggaaatggtagatacatttctgtacttggcaaaagtttatgtctcattggatcaacctgtgactgctttaaatcttttcaaacaaggcttagataagtttccaggagaagtaaccctgctctgtggaattgcaagaatctatgaggaaatgaacaatatgtcatcagcagcagaatattacaaagaagttttgaaacaagacaatactcatgtggaagccatcgcatgcattggaagcaaccacttctattctgatcagccagaaatagctctccggttttacaggcggctgctgcagatgggcatttataacggccagctttttaacaatctggggctgtgttgcttctatgcccagcagtatgatatgactctgacctcatttgaacgtgccctttctttggctgaaaatgaagaagaggcagctgatgtctggtacaacttgggacatgtagctgtgggaataggagatacaaatttggcccatcagtgcttcaggctggctctggtcaacaacaacaaccacgccgaggcctacaacaacctggctgtgctgggagatgcggaaggggccacgttgaacaggcaagggcactattacaaactgcatcatccattagcaccccatatgtatgaaccgcatttttaattttgcaacaatctctgataagattggagatctgcagagaagctatgttgctgcacataagtctaaatcaacatatatcagaccatgcggacatcacaacatttaattaaacaattaaggcagcattttgctatgctctgattgttccttagaccacatatgttcttatgaagcagcattatgcaaggggaaaaaagcactatgtctgtgtacgtattacactatatacatacatacacagacatagggtaatacgtatattttaacaaacctgtccttgatattagttaaggtgacacataagggtgaccccagaatgtgtaatgccaaatttcatagtaatagtaactttataaaataatattataaaatacgggatttaaacctttctaaatagatcctgaaactgtctctcacattatatagtagatgtttgtttaataaatgtttaccaaaacattttggtgaatttcctcaatgttttataaatgtacattttttaagtccttaagctgactcttagccatcatgtagcttaaggagtctgaaatctgccattaaaactgcacctttaagccaggtgtggtagcatgtgcctatagtcccgagctacttgggaggtggaggtgggaggattataaatagagactttccttaagactttaaaaatgtatttaaaactattttttattaaatactttgtgatttcctacttaagctttaaaataaatcattgtgtaaacaccaaaaaaaaaaaaaaaaaaaaaaagggcggccgct

SEQ ID NO: 2606 - DNA, 749 bp, Homo sapiens
  SIMILAR (112)..(621): 451254mologous to Homo sapiens Human nucleic acid-binding protein, NuABP-10,accession number AAB21006,Smith-Waterman Score= 300.
  misc_feature (1)...(749): n = a,t,c or g
atccctcaccctgaaaatgcatgccnagcacgtgttgtttccaggagctggtaaccctttgaggatgtaagctgtgtaccttccatcccggaaggaagtgggaaanccgtttgggaacccctgcctcagagggacccctcctatagagttgtgatgctgggagaattacggggaattgtgttcctcactgggatcgtgagccccaggactgaaaatgatcaagaaatttctgaagacacaagatcacatggggtccctactgggaagatttcaaaaggatatttctcagggtctcaagtttaaagaagcctatgaacgagaagtcagtctgaaaaggccgctggggaactcccctggagaaagactgaacaggaaaatgccagattttggtcaagtgacagttgaggagaagctaacccccaggggagagagaagcgagaaatataatgattttgggaacagcttcactgtgaattccaaccttatctcacatcagagactccccgtgggagaacaagaccccataagtgtgatgaatgtagcaagagctttaatcgaacttcagaccttattcaacatcagagaatccacactggggaaaagccctatgaatgtaatgaagtgtgggaaggccttcagccagagctcacaccttattcagcatcagagaatccacactggggaaaaaccttatgaatgtagtgattgggggaaaaccttcagctgtagctctgacctcattctgcatc

SEQ ID NO: 2607 - DNA, 177 bp, Homo sapiens
  SIMILAR (1)..(174): 1001254mologous to Homo sapiens SH2 domain protein 1A isoform C,accession number AF100540,Smith-Waterman Score=300.
atggacgcagtggctgtgtatcatggcaaaatcagcagggaaaccggcgagaagctcctgcttgccactgggctggatggcagctatttgctgagggacagcgagagcgtgccaggcgtgtactgcctatgtgtgctacagcacctggggtacataaaagatatttccggaaaataa

SEQ ID NO: 2608 - DNA, 189 bp, Homo sapiens
  SIMILAR (1)..(186): 1001254mologous to Homo sapiens SH2 domain protein 1A isoform F,accession number AF100543,Smith-Waterman Score=315.
atggacgcagtggctgtgtatcatggcaaaatcagcagggaaaccggcgagaagctcctgcttgccactgggctggatggcagctatttgctgagggacagcgagagcgtgccaggcgtgtactgcctatgtgtgctcatttcagaagccagatcaaggcattgtaatacctctgcagtatccagttga

SEQ ID NO: 2609 - DNA, 4512 bp, Homo sapiens
  SIMILAR (3941)..(330): 761254mologous to Homo sapiens dJ1052M9.3 (mouse DOC4 LIKE protein),accession number AL022718,Smith-Waterman Score=4541.
cctgcccaagagtccaccaggccatggacgcagtggctgtgtatcatggcaaaatcagcagggaaaccggcgagaagctcctgcttgccactgggctggatggcagctatttgctgagggacagcgagagcgtgccaggcgtgtactgcctatgtgtgctgtgagtatgatacggtggacccctgtctatggtatcttgttatggcagcctgaacagaccaatacagattttggtactgagaggaggagtattgctgtaacaaatacctaaaaatgtggaagtggccttagaactaggtaatgagtagaggctggaggagttttaaggtgtatggctcaacagacaaaacaaaatacccatcgtaaccttgtacccgcccagtgctcaaaagctgctgcttttccccttctgtccatgccctaatcccctcttccccctcttgcagccttctttgttccttagtccaggcctgggccactgcgcgctgtctggcaatctccaacacgtgattcttttcctcttcgacagttgtcccataccggatgttgaagcacagggctccatgctggagctgaatatctgcaaaccgtctagtcctcccattcaacacagaagtcatctgggacacagtgacattgacaccattctccagaatccgcctccccccagtgttaccgatgagcaccaggtcttcctccagagacccaagcttaatgaagtagtgagtgtccctcccctctatggtaaaatgtaggttttccaggtaatgggcattattgagaatggcagcaagccgcctgctatcttcattggctactcctataatatcagctgttactatgccatccttgatggcaaattttatacctttcccaaaaacagaagggacagcagcaaaccttggttgcttccctccttcaaggcaccgtccatcattgtatcggggagtcataggtagttggtccaaggaaatgaaattcctgagctgtttctggagttcacactgaatgcccaggatagtctaggaaagagaggcacagagcagatgcagcatggagttagacatctgtcagatacttggtgattgttctaattcaggtttgggaaatccaggtagtacattgtgtaattggaaaccaaatagctccaaccaacttctgatgtctgtgagacacaatattaaaaaaagaaaatgaaaaatcccatactttataagctttgttgaaaacttgaatggtttaggaaggaggttcaactgtttccatatgtgatgattaggcgttgtccatctgccagcaacaacatcataatccctttgccccaggtgcactaatttagtaaggaaatcatagagtcctccatgaaaaccaataatgacctgaaagtcagggtaagtgtcatgatagatatcgccataaggtgtgtatagtatctcctttatgacctgacctcggctgctgaacacagctagtggggtacctgtattatcacaggctacataatattcttcaccactgcttaactccatggcaataaggtgaccttggagatcataatacagagatgtaatctccgagcttgtgtggttgtacaaatgagtaactcttatggggttggtaaggtctgcataaaagaactgaaggtgctgccctaggctggacttactcgcgacacgtcgcccaagcccatcatagtaatactgcacagtccagccagaagccttattgtaggctttctgcagcaggccattagaattatattcaaaaatatcatttcccctctgcctcagaaagccatcttcatccattttatactgaatttctcctaatctggtgatgcggtctcggaggtcatatcggagaggagtaagacgagcactcttcccatggcttaagaggttgatgtttccattcagatcgtaactataacgccactgggttttgtcatttacagaaacagtctgaagttgcccatcagcatcgtattcatagaagtaccttgttatattggcatctactcctacccttatgtcacatattaccatgcggcccacattatcatattgaatggtcatccagtaggcaattgcctttaggatttcatattggacttcaatgacttgtccattggcactgaagattttggtgtgtttcatcactgtagtagttatgacctgatttaaatcgtaattaattacactgaattttccaaactgctctgttctgccagagacatcaacatatcggtaaagatctataggcaaaggggtttcattgattacagcttgcatgcttgtgactcggaaattgttgtagctgtagtcgaaccgtgcattcacaaggccttcttcactgaatctgaaaatctggcgtccaataagaggtcctgcaggaaccaaaacaaaaacagtaagaagctaggcgatcaatgtggaagagtcagaaaggtctagagaagactcttcatatgttaatgtgacctgagtggtatcatagagaacctcagaaagccttgcttgcttggtgtacttgtataagactctgcgccctgtccccagatgcagggtctgtagcaatcggccatctcgactatagtcttggataaaagaagtgctactgtccggtggggtgtagatgttccggtagtagcccactgaaagcatggtttgtaagctgtgacgcaccatgctaggcatggtgactgagagcagacaatctggttggtcatactcaaagatgtaacgccgctggctgtgtaggagaagcatcacagactgaaacgagacaaaggcagaatagcatattatggacaactaaagttgaggcgactaaagaaaatactggtcatattccattttttcattccacgttcctctttgaataaacgtcaccaatcccgaaggtgaatatgtgatgttcacttcattatatctgcttacaggagaccacagaatgggtcgcccagtctggtcataaagaattcgaagggtgaattttcgatggtcatcatagatctttcctgtgcgggttatatgatcaaaatctatggagagtaggtttctgttgtgggcctatgagaaagagatatgaaatacattttaagcacagccttgttcccctcattagagcactgacaataggtttgcattgtgctctccgggcaatgagatgttgcatttgcccagggtagggttgactgcccctgccaggatgtggggctctgagctgaggccgatctccatcccgctggcaaaagtgacacgcagggaaccatctggattcacccgataggtactttgagtattttctgtagacagaagagcaaaggaggaagagggggaaggaagggaagagcaggaagcagaaaagagacaagagtgtctggtgtcaccacctaacaacagaatgaggtcttaatgacagggcagagagaaagcaatttctctttgtgcacttgtcctggaagtatctagctccacttttgtcagcttctccaggtcactgtggaagctgctgacctctccagtgggaaacgttgcattggtcaggtgtccctcggggtcatacctgaggaatgtaaccaatcccagctttgaagcgtctcggcagtgataacaggactttgcaaaataaatcattaaggccagattatagccttgggctgacactcttttcaggactccattgctgcttatagtcagccagtatacttgtccgccaggcaccacaagccatagcggcattccgcctgcatcacggcgaatgtgcactgaattgccattgctgctggtaatcgcgcccaagtcaccttcagaattgtaggtgaagttataaacatagtcccttgttatcaagttcagggtgtgtaggtgggttccatttacagtgaactggtacagttcctgatcagcgggtgaagcaatctcataaatgttcatgtcattcaggtgggcttggttcctgctgatggtacgaattcgaacatttccgaggtctgccacatagagggttccatcaggcgacactgctaaggaggaaggggctttcatctttgcatctttggcatagccaccatcacctgtgggagaaagacttgattttaacaattggcatcataagcatttacatgaacataccacagacatgatctccccattggtggttacttgctgaatgcggtttactttcctctcgtctgtttcagctatgaagagcagcccgctgtgggagacactgatggccctcgctgactctagagtggagtgaattgctaccttgctgaccaggaaatgatcgatgcctggcacctggcagtgaatggggcgtcctgcgatgatccgaacacgcctgttctcagaaatttgcagcacaatgttgttatccaagacatacaatgaattgtccataggatttactgcaaggtctgttggccactctaatcgcacctgtgaaacgaacagaacacataccattaggttaccatgtctttccatggacagttttaacttgaaa

SEQ ID NO: 2610 - DNA, 483 bp, Homo sapiens
  SIMILAR (55)..(255): 1001254mologous to Homo sapiens SH2D1A,accession number AL023657,Smith-Waterman Score=354.
ggcatctcccttgcacagttctcctcctcggcctgcccaagagtccaccaggccatggacgcagtggctgtgtatcatggcaaaatcagcagggaaaccggcgagaagctcctgcttgccactgggctggatggcagctatttgctgagggacagcgagagcgtgccaggcgtgtactgcctatgtgtgctgtatcacggttacatttatacataccgagtgtcccagacagaaacaggttcttggagtgctgagcatttcagaagccagatcaaggcattgtaatacctctgcagtatccagttgagaagaagtcctcagctagaagtacacaaggtactacagggataagagaagatcctgatgtctgcctgaaagccccatgaagaaaaataaaacaccttgtactttattttctataatttaaatatatgctaagtcttatatattgtagataatacagttcggtgagctacaaatgca

SEQ ID NO: 2611 - DNA, 2481 bp, Homo sapiens
  SIMILAR (433)..(675): 561254mologous to Homo sapiens SH2D1A,accession number AL023657,Smith-Waterman Score=204.
aaatccttcttccaatgttcctcccctctctgtatgaaccctgtgttggggggcagaagatggaagcccttggcaagctcgatcgaaccaagctactaaattgctgagctcgttttaactgaagtgtgagaaggaggtttaaggcaagtagacaacatcctgttgttggggtgcttctctcttttttttgcacatctggctgaactgggagtcaggtggttgacttgtgcctggctgcagtagcagcggcatctcccttgcacagttctcctcctcggcctgcccaagagtccaccaggccatggacgcagtggcttgtgtatcatggcaaaatcagcagggaaaccggcgagaagctcctgcttgccactgggctggatggcagctatttgctgagggacagcgagagcgtgccaggcgtgtactgcctatgtgtgctgtatcacggttacattttatacataccgagtgtcccagacagaaacaggttcttggagtgctgagacagcacctgggggtacataaaagatatttccggaaaatgaaaaaatctcattttcagcattttcagaagcaagatcaaaggcattgtaatacctctgcagtaatccagttgagaagaagtcctcagctagaagtacacaaggtactacagggataagagaagatcctgaaggtctgcctgaacgccccattaataaaaatatcaccccttcgccctttattttctatcactttcaatatatgctaagtcttatatattgtagatacatacagtttggtgagctacaaatgcatttctaaagccattgtagtcctgtaatggaagcatctagcatgtcgtcaaagctgaaatggacttttgtacatagtgaggagctttgaaacgaggattgggaaaaagtaattccgtaggttattttcagttattacatttacaaatgggaaacaaaaggataatgaatactttataaaggattaatgcccattcttgcctaatataaataaaaataatcctcagtttttgtgaaaagctccatttttagtgaaatattattttatagctactaattttaaaatgtcttgcttgattgtatggtgggaagttggctggtgtcccttgtctttgccaagttctccactagctatggtgtcataggctcttttgggatttttgaagctgtatactgtgtgctaaaacaagcactaaacaaagagtgaaggatttatgtttaattctgaaagcaaccttcttgcctagtgttctgatattggacagtaaaatccacagaccaacctggagttgaaaatcttataatttaaaatatgctctaaacatgtttatcgtatttgatgctacaggatttgaaattgtattacaaatccaatgaaatgagtttttcttttcatttacctctgccccagttgtttctactacatggaagacctcattttgaagggaaatttcagcagctgcagctcatgagtaactgatttgtaacaagcctccttttaaagtaaccctacaaaaccactggaaagtttatggttgtattatttttaaaaaaaattccaagtgattgaaacctacacgagatacagaattttatgcggcattttcttctcacatttatatttttgtgattttgtgattgattatatgtcactttgctacagggctcacagaattcattcactcaacaaacataatagggcgctgagggcatagaagtaaaaacacctggtccctgctctcagttcactgtcttgttggacgagaaaagaaacaataacgataaaagacagtgaaagaaaataacgataaaagacagtgaaagaaaataacaataaaagacaaggaaaaaataacaatgaaagttgataagtacatgataagcgaggttccccgtgtgtaggtagatctggtctttagaggcagatagataggtcagtgcaaatactctggtccatgggccatatgaaaaaggctaaacttcactgtaaaaataataactgggaattctggattgtgtatgggtgttggtgaacttggttttaattagtgaactgctgagagacagagctattctccatgtactggcaagacctgatttctgagcatttaatatggatgccgcgggagtacaaaagtggagtgtggcctgagtaatgcattatgggtggcttaccatttcttgaggtaaaagcatcacatgaacttgtaaaggaatttaaaaatcctactttcataataagttgcataggtttaataatttttaattatatggcttgagtttaaattgtaataggcgtaactaattttaactctataatgtgttcattctggaataatcctaaacatatgaattatgtttgcatgttcacttccaagagcctttttttgaaaaaaagctttttttgaatcatcaagtctttcacatttaaataaagtgtttgaaagctttatttacctaaaaaaaa

SEQ ID NO: 2612 - DNA, 1123 bp, Homo sapiens
  SIMILAR (34)..(174): 801254mologous to Homo sapiens beta 2-microglobulin,accession number S82297,Smith-Waterman Score=171.
acagcattcgggccgagatgtctcgctccgtaggccttagctgtgctcgcgctactctctctttctggcctggaggctatccagcgtactccaaagattcaggtttacatcacgtcatccagcagagaatggaaagtcaaatttcctgaattgctatgtgtctgggtttcatccaccccgacattgaagttgacttactgaagaatgaaagagagatttgaaaaaagtgggagcattcagacttgtcctttcagcaaaggactggtcttttctatctcttgtaatacactgaatttcaccccccactgaaaaaagatggagtatgccctgcccgtgtgaacccatgtgattttgtcccaggccaaagatagtttaagtgggatcgagacatgtaaagcagcatcatggggggtttgagaatgcccagtttgggttgggtggaattccaaaattctgcttgcttgcctttttaatattgatatgctttaacacttttccactttatgcaccaaaatgtaggggttataataatgttaaccatgggccatgatcctctttaataattctactttgaagtgctgtctcccatgtttgatgtatctgagcaggttgctccaccaggtagcttctaggagggctggcaacctaaaaggtggggagccagagaattctcttatccaacatccaacatcttggtcagatttggacctcttcaatctcttgcccctcaaagcctgtttagatagttaagcgggccataagttaactttccaattttacatactctgcttagaaatttggggggaaaatttagaaaatataattgacaggatttattggaaatttgttataatgaatgaaacattttgtcatataagatttcatatttacttcttatacatttgataaagtaaggcatggttgcggttaatctggtttatttttgatccacaagttaaataaatcataaaacttgaaggaaaaaaatggaaaataggtaatcacaaaagaaaaaaatggtcgcgtttccacaatccctatgtaactttccttaatacaattttgaacccccttaaagggcactgggttctccggggtagtccctcgccctaaaaaatcgcgc

SEQ ID NO: 2613 - DNA, 404 bp, Homo sapiens
  SIMILAR (337)..(2): 1001254mologous to Homo sapiens unnamed protein product,accession number AX088208,Smith-Waterman Score=581.
ccacagtgagtgactcggtggggctggaggaacccagggtgacccagagggggctctggagcgggtccctaacatctgaaaaagtcctcccagggaactcggagctggaacttccaggcagcttcgggggtgacatttgtatccggccagccgagcggggaaaggagaccttgtgtcctggcaacagggagagccgggactgggatggccacagctcagcctccaggtgaggagcccagggccctgctcgagctgtgacctccacggtcacggagtcctcggaaaaagagaagttgagcttgttcccctggtagaagatgccggagacgctcactctgaaccccgtgcacccgaagaccaccgcctgcaggaagccccccatgcctgtcaggaagttcacagcg

SEQ ID NO: 2614 - DNA, 587 bp, Homo sapiens
  SIMILAR (53)..(340): 371254mologous to Lactococcus lactis subsp. lactis maltosephosphorylase,accession number AE006398,Smith-Waterman Score =164.
  misc_feature (1)...(587): n = a,t,c or g
aaggccccattgggctgtatgaccttagtccagtgcggtggaattcgctggtggctgggacgtggtcagggctgtggccgagttttggtgcagtcgtgttgagtggagccccagggaggaaaagtaccacctgaggggagtcatgtcccccgacgagtaccactcaggggtcaacaactctgtgtacaccaacgtcctggtccagaacagcctgcgctttgctgctgccctggcccaggacctgggtcttcccatccccagccagtggctggcggtggctgacaagatcaaggtaccctttgacgtggagcagaacttccacccggagttcgatgggtatgagcctggagaggtggtgaagcaggcagacgtcgtgctcctgggatacccagtccccttctccctgagtcctgatgttcgcaggaaaaatctggagatttacgaggctgtgacgtccccccagggccccgccatgacctggagcatgtttgctgtgggctggatggagctgaaggacgcagtgcgggcccggngcctcctggacaggagctttgccaacatggctgaacccttcaaggtgtggacgg

SEQ ID NO: 2615 - DNA, 6648 bp, Homo sapiens
  SIMILAR (2318)..(2713): 661254mologous to Rattus norvegicus vasopressin receptor,accession number M85183,Smith-Waterman Score=457.
  misc_feature (1)...(6648): n = a,t,c or g
atggaccagccagaggccccctgctccagcacggggccgcgcctcgcggtggcccgcgagctgctcctggctgcgctggaggaactgagccaagagcagctgaagcgcttccgccacaagctgcgcgacgtgggcccggacggacgcagcatcccgtgggggcggctggagcgcgcggacgccgtggacctcgcggagcagctggcccagttctacggcccggagcctgccctggaggtggcccgcaagaccctcaagagggcggacgcgcgcgacgtggcggcgcagctccaggagcggcggctgcagcggctcgggctcggctccgggacgctgctctccgtgtccgagtacaagaagaagtaccgggagcacgtgctgcagctgcacgctcgggtgaaggagaggaacgcccgctccgtgaagatcaccaagcgcttcaccaagctgctcatcgcgcccgagagcgccgccccggaggaggcgctggggcccgcggaagagcctgagccggggcgcgcgcggcgctcggacacgcacactttcaaccgcctcttccgccgcgacgaggagggccggcggccgctgaccgtggtgctgcagggcccggcgggcatcggcaagaccatggcggccaaaaagatcctgtacgactgggcggcgggcaagctgtaccagggccaggtggacttcgccttcttcatgccctgcggcgagctgctggagaggccgggcacgcgcagcctggctgacctgatcctggaccagtgccccgaccgcggcgcgccggtgccgcagatgctggcccagccgcagcggctgctcttcatcctggacggcgcggacgagctgccggcgctggggggccccgaggccgcgccctgcacagaccccttcgaggcggcgagcggcgcgcgggtgctaggcgggctgctgagcaaggcgctgctgcccacggccctcctgctggtgaccacgcgcgccgccgcccccgggaggctgcagggccgcctgtgttccccgcagtgcgccgaggtgcgcggcttctccgacaaggacaagaagaagtatttctacaagttcttccgggatgagaggagggccgagcgcgcctaccgcttcgtgaaggagaacgagacgctgttcgcgctgtgcttcgtgcccttcgtgtgctggatcgtgtgcaccgtgctgcgccagcagctggagctcggtcgggacctgtcgcgcacgtccaagaccaccacgtcagtgtacctgcttttcatcaccagcgttctgagctcggctccggtagccgacgggccccggttgcagggcgacctgcgcaatctgtgccgcctggcccgcgagggcgtcctcggacgcagggcgcagtttgccgagaaggaactggagcaactggagcttcgtggctccaaagtgcagacgctgtttctcagcaaaaaggagctgccgggcgtgctggagacagaggtcacctaccagttcatcgaccagagcttccaggagttcctcgcggcactgtcctacctgctggaggacggcggggtgcccaggaccgcggctggcggcgttgggacactcctgcgtggggacgcccagccgcacagccacttggtgctcaccacgcgcttcctcttcggactgctgagcgcggagcggatgcgcgacatcgagcgccacttcggctgcatggtttcagagcgtgtgaagcaggaggccctgcggtgggtgcagggacagggacagggctgccccggagtggcaccagaggtgaccgagggggccaaagggctcgaggacaccgaagagccagaggaggaggaggagggagaggagcccaactacccactggagttgctgtactgcctgtacgagacgcaggaggacgcgtttgtgcgccaagccctgtgccggttcccggagctggcgctgcagcgagtgcgcttctgccgcatggacgtggctgttctgagctactgcgtgaggtgctgccctgctggacaggcactgcggctgatcagctgcagattggttgctgcgcaggagaagaagaagaagagcctggggaagcggctccaggccaggcctgggtggcggcagctggctggggacccaactggctccagaagtaccctttcgaccaccctgctgtgacatctgccccacacctccaccagaccctcggctcctccagggcaaggcttttgccagagttcctttgaatatagctccaattcagcccctgcccaggggcttggcatctgttgagaggatgaatgtcacggtgttggcaggggctgggcctggggacccaaagacccatgcaatgactgacccactgtgccatctgagcagcctcacgctgtcccactgcaaactccctgacgcggtctgccgagacctttctgaggccctgagggcagcccccgcactgacggagctgggcctcctccacaacaggctcagtgaggcaggactgcgtatgctgagtgagggcctagcctggccgcagtgcagggtgcagacggtcagggtacagctgcctgacccccagcgagggctccagtacctggtgggtatgcttcggcagagccctgccctgaccaccctggatctcagcggctgccaactgcccgcccccatggtgacctacctgtgtgcagtcctgcagcaccagggatgcggcctgcagaccctcagcctctcgcttccttctgacccgaccccgagttctttctccggacggtgtcgagaacccgggcgccggctggggctggagtctcgctggcctcggagcgcccccgagccctcgggcagacagcgaggcgaggacccaggtggaggcggccgggggcgcgggcggagggaggaggcgcgggagggaacccccggcccgcgggccccacccacagccgccccgggacgcagctcggggtccaggctcgagctttgctcactcagggcgcttcgtgcagggaacgccaggcccccggacgcgacccacgcggccgctgccagcggggaccgaggggagccggggccgcggccgcgagtccacgtcccgcccccgggcccggcccagcgaccgcccccgccgcccagggaccgcccccgcctcccagcgaccgcccgggccctcggggcggggaccgcggaccttcctggtggcgcggcagccgggcggctcctccttcctcccggccctggcgtggagcagagggacacaggttcccacgctggcgcccggcgaccgggtggggctgcggccgctcaggcccagcagctccatggaggacgccggcgaggaccccaccacgtttgctgcccactctctgcccagtgacccccgtctcttggccactgtgaccaacgcatacctgggcacacgagtgtttcacgacacgctgcacgtgagcggcgtgtacaatggggctggcggggacacgcaccgggccatgctgcccagccccctcaacgtccggctggaggcccctgcagggatgggggagcagctgaccgagaccttcgccctggacaccaacacaggctcctttcttcacaccctggagggcccccgcttccgggcctcccagtgcatctatgcgcatcgcacgctgccccacgtgctggctttccgagtgtccatcgcccgcctggccccggggagcgggcccatcacgctgctcctgcggtcagccttctccccagaaagcccagacctggacctgcatcagggtcctgacttccagggagcccggtacctgtatggccacaccctcacccctgagcagcccggggggccacagcaagaggtacacatgctgtggacaccagcacccccagacctgacccttggggaaggtgaggaggctaggacgtgggacttcctgacagcagtgggcggcagccaggctgaggctcaggcctgcctcactgaggccctgcagctgcaggccaggggagctctgtatacggctcacgcacaggcctgggcccagctctgggtagaatgtggcttggacgtggtggggcccctgcagctgcgccaggccctgcgtggctccctctactacctgctcagtgccctgccccagcccaaggccccaggatacatctgccatggcctcagtcctgggggcctctccaatgggagccgtgaggaatgctactggggccacgtcttctgggaccaggacctctggatgttcccgagtatcctgatgttccacccagaagccgccagggccatcctggagtaccgcatccgcacgctggacggggccctggagaacgcccagaacctgggctaccagggagccaagtttgcctgggagagtgcagactccggcctagaggtttgccctgaggacatttacggagtccaggaggtccacgtcaacggggccgtggtgttggccttcgagctgtactaccataccacccaggacctgcagctatttcgagaggctggtggctgggacgtggtcagggctgtggccgagttttggtgcagtcgtgttgagtggagccccagggaggaaaagtaccacctgaggggagtcatgtcccccgacgagtaccattcaggggtcaacaactctgtgtacaccaacgtcctggtccagaacagcctgcgctttgctgctgccctggcccaggacctgggtcttcccatccccagccagtggctggcggtggctgacaagatcaaggtaccctttgacgtggagcagaacttccacccggagttcgatgggtatgagcctgaccctcgagtctgtcctggaacaccttccagtcagcggcacctccctgtaggagaggtggtgaagcaggcagacgtcgtgctcctgggatacccagtccccttctccctgagtcctgatgttcgcaggaaaaatctggagatttacgaggctgtgacgtccccccagggccccgccatgacctggagcatgtttgctgtgggctggatggagctgaaggacgcagtgcgggcccggggcctccgtggacaggagctttgccaacatggctgaacccttcaaggtgtgggacggagaatgcagacgggtcaggcgctgtgaacttcctgacaggcatggggggcttcctgcaggcggtggtcttcgggtgcacggggttcagggtcacccgagcgggtgtgacctttgaccctgtgtgtctgtcggggatcttcaaaaggaagcgtttccggattcttcaaccaggggaacaagctcaacttctctttttccaaggactccgtgaccgtggaggttacgagcccgagcagggccctgtgctcctcacctggaggctgagctgtggccatcccagtcccggctctccctgttgccaggacacaaggtctcctttccccgctcggctggccggatacaaatgtcacccccgaagctgcctggaagttccagctccgagttccctgggaggactttttcagatgttagggacccgctccagagccccctctgggtcaccctgggttcctccaagccccaccgaggtcactcactgtggaccctgcctctgaataatcaggaacggtggcttcagagacgtctcttgggccttccctctggccacgtctgcacccacccctgnctgggcaccctcctagcctgccatccctcacctgcagccaggctctcagggaaggtccatgctgcttggcctgagttcaaggctttctgcctgtagcctgggactcccgtggacccccgtgggcaggtggcttccccgtggcatctccacaccgcctctgcctgcccctgtggactgatgctatcgcgcaccgtcccacgaccccaccccgagctcctgaagccggggtctgagcctgcatcacctctgggcctcttcatcccccactctcctgagagcagtggtcacagcggccggccgttcttgctgagaaggcagagaggcaggctcaggcctcagcgtgggacagcagggataaggggcacgaaggacggggactcggccccttcagaattcctcaggactctcaggtgcagctttgccaaaaaggaacttttcatgtcatgncagttgaggggacttagtctcaatccccaggctcctcttgaactctgggcaaactttaatcaggttgggcagcctctgctacagcgtggagtgggatggctctcttccctcagccacgcccgctttgtaaggacagaggtgggggagtgggaagtgggaagtcacccagagaacaggagagggatttgagggcgagacccccagcgctctccacggaccagccagagggactggagcccaggtgtgcatgggttcaaggccctggccctgccccagcctctgtcttgggagctcagcccccagggtcggtcgtcagcaagtttcccaagaacaagatgtgatggcatctgctgctgaaaccctgatgaggaccagcgccccctgcaacgctgtcaagcctgaggaattaaaagctttggtgctgggaagagcattattcctctgaggagccgctgtgcttccttctgaagcgatggccgtgccccgggtcccatttctcctttcacttgagtcgggaagcacagcaactttaacgtcgcgcccagcaacatggctcccctcgcaaaaaaa

SEQ ID NO: 2616 - DNA, 384 bp, Homo sapiens
  misc_feature (1)...(384): n = a,t,c or g
ataagggatatttgacctatatctaattatataataagaaaaatgtattttcnnnnnnnnnnnnnnggaaagggggttcacttttgggggccccccgggtggaagggcccaattttggtttaataaaannnnnnnnnnnntaagaaaagggaattccctgccctaccccccccgggaggggggaataacgggctgggcccccctgcccgggaaaatttggttttttaaaaaaaaagggggttcccccttgggggcaaaaggggcttgaacccccgaccccaggggaannnnnnnnnntaacctcccaaagggggtggaataacggggggggccccccgccccggcaaaaaaaggtctttttctctacaaaaaatcttataaaaa

SEQ ID NO: 2617 - DNA, 439 bp, Homo sapiens
  SIMILAR (1)..(72): 1001254mologous to Homo sapiens dJ434O14.3.3 (novel protein) (isoform 3),accession number AL022398,Smith-Waterman Score=133.
cagctatacacctgtacccagaaatactccccttggggaatgaaaaaagtactactggagatggaagaccagaattagacaacctcagtgacgagtatctctcctgcctgcgtaagctgcagcactgtcgagaagagctgaaccagagccagcagctgcctcccagaaggcaatgtgggcgatggctcccagtgctgatggtggtgattgctgcagcactggcagtgttcctggccaataaagacaacctgatgatctgaataatttgtgacaactgccttgggtgaaaatcagaagcaagcaactcagcgaaaaactcagaaggtttgggtacattacagcttgggttttccaactgacttaggatttctgactttttattaatttcttaacctactgtaaataaacttcacctggcccggaaaaaaaaaaaaaaaaa

SEQ ID NO: 2618 - DNA, 429 bp, Homo sapiens
  SIMILAR (21)..(428): 551254mologous to Homo sapiens dJ434O14.3.3 (novel protein) (isoform 3),accession number AL022398,Smith-Waterman Score=361.
cggacgcgtgggcggacgcgtgggcggacgcgtgggcgctgaggatccaacagagagagcagctccagagagctcgactgcagcagttcttcaggaggaggaacctggagctagaggagaagggcaaagcgcagcatccccaggccagggagcaagggccctccaggcggccaggacaggtgactgtcctcaaggaacccttgtcttgtgccagaaggatttcttctcccagagagcaggtgacaggcaccagctctgaagtctttccagcccagcatcctcctccctcaggcatctgcagggatctgtctgaccacctctcctcacaggctgggggccttcctccacaggacactcccatcaagaagccacccaaacaccaccgtggtactcagacaaaggcagaaggaccaacaattaagaacgatg

SEQ ID NO: 2619 - DNA, 859 bp, Homo sapiens
  SIMILAR (1)..(87): 631254mologous to Homo sapiens dJ434O14.3.1 (putative protein) (isoform 1),accession number AL022398,Smith-Waterman Score =91.
gccctgggcaaacagaagtgtgaagagtggaggagcaagtataggctctaaaggagactgaggaacctgggggcccagcacagggaggctggagagccaactccacgtgcttcagtccaaactgcagggagcagatagcagggacttacagatgaatcaggccctgcgatctttgcaaaatgagcaccagcaactgcaggccaagattgaatgcctgcaagcggacagagacctgtgcagcttgtatacacaggacctacaagatcaactaaaaaggtcagaggcagagaaactcaccctggtgaccagagtacagcagttgcagggtttgcttcagaatcaatccttacagcttcaagaacaggagaaactcttaacaaagaaaggtcagcgaatttattaccacaaattctaagatattgctctttctcttacctgcctagaggcagcgggatggactacatgacctcctggagtcccagccagttctgggagttctgttaagtccgggatgtgtgggagctttttaaggactgatcattggctctgaggacacttcaactagttagccttctatcttgagatcaggctttgcccgtgtggagtccaaagtccttccctaacgaagtggagcctgagggtacagggaaggagaaagactgggatctcagagaccagctgcaaaagaagactttgcagctccaggccaaggaaaaggagtgcagagaactgcattcagaattagacaacctcagtgacgagtatctctcctgcctgcgtaagctgcagcactgtcgagaagagctgaaccagagccagcagctgcctcccagaaggcaatgtgggcgatggctcccag

SEQ ID NO: 2620 - DNA, 2298 bp, Homo sapiens
  SIMILAR (1936)..(2016): 851254mologous to Homo sapiens dJ434O14.3.3 (novel protein) (isoform 3),accession number AL022398,Smith-Waterman Score=106.
  misc_feature (1)...(2298): n = a,t,c or g
cccacgcgtccgcagagagcaagagagaggaactggggtttgcgaaccttgtggctttgtctgtttcctgtttcagcaaggctgctgtgcaaaaagaaagacggtaccaagaagggacgtgttaatggggcccagacctatggattgaaagcgtgtgctttacccatctgctgtcttgctccatcttgagaccatagccaagatctgtccaggactggaatgctttcccgagtggcttgagttggagcctgggactacgagcagccttattgaggtacaattcatgtgcttgtgggtttggatggcacaatctgtgtctgggctaaggaaagcagacttggcaccaacattatacctgacagatccatgcatctattgcaggaacttgtaagccaagcgcaacaggtgcttggaggtcatcatgatcagcccagaccccaggccctcccctggcttggcccggggggctgagagctatgaggccaagtgtgagcgcaggcaagagatccgggaaagccgccgctgccgtcccaatgtgaccacttgccgccaggtggggaagacgctgaggatccagcagagagagcagctccagagagctcgactgcagcagttcttcaggaggaggaacctggagctagaggagaagggcaaagcgcagcatccccaggccagggagcaagggccctccaggcggccaggacaggtgacaggcaccagctctgaagtctttccagcccagcatcctcctccctcaggcatctgcagggatctgtctgaccacctctcctcacaggctgggggccttcctccacaggacactcccatcaagaagccacccaaacaccaccgtggtactcagacaaaggcagaaggaccaacaattaagaacgatgccagtcagcaaaccaattacggagttgcagttctggataaggaaatcatccagctttctgattacctcaaagaggccctacaaagggagctggtcctaaaacagaaaatggtgattctccaagacctactgtccactctgattcaggcctctgacagctcttggaagggacagcttaatgaagacaaactgaaggggaaactgagatccttagaaaaccagctatacacctgtacccagaaatactccccttggggaatgaaaaaagtactactggagatggaagaccagaaaaacagctatgagcagaaggccaaggagtcactgcagaaagtgctggaggagaaaatgaatgcagagcagcaactacagagcacacagcgatccctggccctggcagagcagaagtgtgaagagtggaggagccagtatgaggctctgaaggaggactggaggacccttgggacccagcacagggagctggagagccaactccacgtgcttcagtccaaactgcagggagcagatagcagggacttacagatgaaccaggccctgcgatttttggaaaatgagcaccagcaactgcaggccaagattgaatgcctgcaaggggacagagacctgtgcagcttggatacccaggacctacaagatcaactaaaaaggtcagaggcagagaaactcaccctggtgaccagagtacagcagttgcagggtttgcttcaaaatcaatccttacagcttcaagaacaggagaaactcttaacaaagaaagatcaggctttgcccgtgtggagtccaaagtccttccctaacgaagtggagcctgagggtacagggaaggagaaagactgggatctcagagaccagctgcaaaagaagactttgcagctccaggccaaggaaaaggagtgcagagaactgcattcagaattagacaacctcagtgacgagtatctctcctgcctgcgtaagctgcagcactgtcgagaagagctgaaccagagccagcagctgcctcccagaaggccaatgtgggcaaaggcctcccagtgctaatggtggtgattgctccagcactggcagtgttcctggccaataaaaacaacctgatgatttgaataatttgtgacaactgccttgggtgaaaatcaaaagcaagcaactcagcgaaaaactcaaaaggtttgggtacattacagcttgggttttccaactgacttaggatttctgactttttattaatttcttaacctactgtaaataaacttcacctgaccagattgttnnnnnnnnnnnnnnnnnnnngggcggccgttttaaaggatccttgggggggcccaagtttacccgggcttgcaaggtaatagttttttccttatagggggccgaattataac

SEQ ID NO: 2621 - DNA, 413 bp, Homo sapiens; identical to SEQ ID NO: 1065
  SIMILAR (38)..(217): 751254mologous to Homo sapiens T-cell receptor beta,accession number M14157,Smith-Waterman Score=197.

SEQ ID NO: 2622 - DNA, 589 bp, Homo sapiens
  SIMILAR (341)..(478): 911254mologous to Homo sapiens T-cell receptor beta,accession number M12510,Smith-Waterman Score=198.
atcacagtgaccacttcgctggcactggagcagcatgatggagacagatccagggctatcaaaggaggctgactttgtactatctgatatgcatgtgtttgtggcctgtgagtctgtgatgtaaggctcaatgtccttacaaagcagcattctctcatccatttttcttcccctgttttctttcagactgtggcttcacctccggtaagagaggctctcctttttctctctatctttcgccgtctctgctctcgaaccagggcatggagaatccacggacacaggggcgtgagggaggccagagccacctgtgcacaggtgcctacatgctctgttcttgtcaacagagtcttaccaagcaggggtcctgtctgccaccatcctctatgagatcttgctagggaaggccaccttgtatgccgcgctggtcagtgccctcgtgctgatggccatggtcaagagaaaggattccagaggctagctccaaaaccatcccaggtcattcttcatcctcacccaggattctgctgtacctgctcccaatctgtgttcctaaaagtgattatcactctgcttctcatctcctact

SEQ ID NO: 2623 - DNA, 1212 bp, Homo sapiens
  SIMILAR (31)..(840): 811254mologous to Homo sapiens T-cell receptor precursor,accession number M15564,Smith-Waterman Score=1099.
gtaaagctcccatcctgccctgaccctgccatgggcaccagcctcctctgctggatggccctgtgtctcctgggggcagatcacgcagatactggagtctcccagaaccccagacacaacatcacaaagaggggacagaatgtaactttcaggtgtgatccaatttctgaacacaaccgcctttattggtaccgacagaccctggggcagggcccagagtttctgacttacttccagaatgaagctcaactagaaaaatcaaggctgctcagtgatcggttctctgcagagaggcctaagggatctttctccaccttggagatccagcgcacagagcagggggactcggccatgtatctctgtgccagcagcttagcagggttgaatcagccccagcattttggtgatgggactcgactctccatcctagaggacctgaacaaggtgttcccacccgaggtcgctgtgtttgagccatcagaagcagagatctcccacacccaaaaggccacactggtgtgcctggccacagggtatcttccctgaccacgtggagctgagctggtgggtgaatgggaaggaggtgcacagtggggtcagcacggacccgcagcccctcaaggagcagcccgccctcaatgactccagatactgcctgagcagccgcctgagggtctcggccaccttctgggcagaacccccgcaaccaatttccgttgccaagtccagttctacgggctctcggagaatgacgagtggacccaggatagggccaaacccgtcacccagatcgtcagcgccgaggcctggggtagagcagactgtggctttacctcggtgttcttaccagcaaggggtcctgtcttgccaccatcctctatgagatcctgctagggaaggccaccctgtatgctgtgctggtcagcgcccttgtgttgatggccatggtcaagagaaaggatttctgaaggcagccctggaagtggagttaggagcttctaacccgtcatgggtttcaatacacattcttcttttgccagcgcttctgaagagctgctctcacctctctgcatcccaatagatatccccctatgtgcatgcacacctgcacactcacggctgaaatctccctaacccagggggaccttagcatgcctaagtgactaaaccaataaaaatgttctggtctggcctgaaaaaaaaaaaaaaaaa

SEQ ID NO: 2624 - DNA, 1883 bp, Homo sapiens
  SIMILAR (338)..(1009): 601254mologous to Homo sapiens T-cell receptor beta chain,accession number M12886,Smith-Waterman Score=620.
accttttgtagaccatagtacatgcggtggaattccggggagaggccatcacttgaagatgctgagtcttctgctccttctcctgggactaggtatgagccttgtcttttgaggagtctggggttaatgttaacactgggtggaaagactttctctccagagagtctgaagccaccagacagaagatgaaggggatatgttagattaaagaaccataacagagtaattgttggcacaataaaaaggaggcagttccctggggtcctttgggagctgaggtggtattggagaaataaagcagagaccttcctgcctggggagatgtctggaccccagcttgtcggtcctcatgaatatctctctggaactaggctctgtgttcagtgctgtcatctctcaaaagccaagcagggatatctgtcaccgtggaacctccctgacaatccagggtcaagtcgatagccaagtcaccatgatgttctggtaccgtcagcaacctggacagagcctgacactgatcgcaactgcaaatcagggctctgaggccacatatgagagtggatttgtcattgacaagtttcccatcagccgcccaaacctaacattctcaactctgactgtgagcaacatgagccctgaagacagcagcatatatctctgcagcgttgaagagcaaggttttgtggggggagcagagacccagtacttcggcgccaggcacgcggctcctggtgctcgaggacctgaaaaacgtgttcccacccgaggtcgcctgctgtttgagccatcagaagcagagatctcccacacccaaaaggccacactggtgtgcctggccatatgcttctacctcgaccacgtggagctgagctggtgggtgaatgggaaggaggcgcacagtggggtcagcacagacccgcagcccctcaaggagcagcccgccctcaatgactccagatactgcctgagcagccgcctgagggtctcggccaactttctggcagaacccccgcaaccacttccgctgtcaagtccagttctacgggctctcggagaatgacgagtggacccaggatagggccaaacctgtcacccagatcgtcagcgccgaggcctggggtagagcagactgtggcttcacctccggtaaagtcttaccagcaaggggtcctgtctgccaccatcctctatgagatcttgctagggaaggccaccttgtatgccgtgctggtcagtgccctcgtgctgatggccatggtcaagagaaaggattccagaggctagctccaaaaccatcccaggtcattcttcatcctcaacccaggattctcctgtacctgctcccagatctgtgttcctaaaagtgattctcactctgcttctcatctcctgcttacattgaatacttctctcttttttctgtttccctgaagattgagctcccaacccccaagtacgaaataggctaaaccgaataaaaaattgtgtgttgggcctggttgcatttcaggagtgtctgtggagttctgctcatcactgacctatcttctgatttagggaaagcagcattcccttggacatctgaagtgacagccctctttctctccacccaatgctgctttctcctgttcatcctgatggaagtcctcaaacaccatttccatacccaggcattctgggtccccactggagggttagtctgaagggcaatggctgggctttggaaaaccagcaagatgaggacagagaggaaggcacacagcaaaccataagcccttacccagtgcaggacagaggatgcgggcagacctatgggttacaatgtctggtcatttcccaattccagattaaactgtcacctgttaaaaaaaaaaaaaaaaaaa

SEQ ID NO: 2625 - DNA, 286 bp, Homo sapiens
  SIMILAR (178)..(285): 1001254mologous to Mus musculus putative,accession number AK003588,Smith-Waterman Score=167.
  misc_feature (1)...(286): n = a,t,c or g
ctcacaacgctgccgccgcgctccgtgggcaactcctactactgctgggctgggctgggctgggctgggctgcgccagagctcgcctgcacagatcagctccggagaggggaaaaccacgctcctcggaccaagcctcgggagctaagtntttctgaaagatctatccagcactccgatggccagcaacaacaccgccagcatagcacaagccaggaagctggtagagcagcttaagatggaagccaatatcgacaggataaaggtgtccaaggcagctgcagatt

SEQ ID NO: 2626 - DNA, 423 bp, Homo sapiens
  SIMILAR (61)..(177): 1001254mologous to Mus musculus putative,accession number AK003588,Smith-Waterman Score=180.
cagtgagcctcaggctttaggaactgaggagtgtttctgaaagatctatccagcactccgatggccagcaacaacaccgccagcatagcacaagccaggaagctggtagagcagcttaagatggaagccaatatcgacaggataaaggtgtccaaggcagctgcagatttgatggcctgaagagcctccgggctcctgggacattgatgtagagtttttagtgaagtgggcacctttctagtccacggcatttgaagagagcgaggagaaccattctggaaactctaggctatgcatgtttaaagatctggtcccctttatgagaatgcaagccgatccacatcctgacttaagagatctgattctgacgaactgcctggaggaggggaatatataaaaataaaattggtgtcacttcttaaa

SEQ ID NO: 2627 - DNA, 4174 bp, Homo sapiens
  SIMILAR (4102)..(2909): 1001254mologous to Homo sapiens beta-1,4- galactosyltransferase,accession number D29805,Smith-Waterman Score= 2107.
gcggccgccctttttttttttttttttttttttttttacaaagatagggtcatttattcacgttatattatttaattttaaagtgttaaaatacagtgtctgttttgaacaccaagatcagacacagccccctagcacaatgggtaaatacacacatttgcatacaacaggaaatcaaaaatacacagcacaacaggtctctggggacatgaaagccggtcatcctgggctatgcagagccccccgcccctgggcagttcagcagaggaccctgtccagggctgaaggccaggcacagcatctcctttacttgtccttgtgccacctctgcccttctctgatctattcccaaagggccagattcacacaggggtcaccagcatggtacccccaaaacccccagcaaaccagaaaagggcacggcacatggacaactttcgcggtacataactccccaggaaaaggaaattgctcccctgaaccccccagccctgaaatcccccagtaaggaaaacagggacccgcgggatctcacgggaccagggcaaacatcccgggccctaactgttgcccctggctgtgcccttgggccccaggtggagcccatgaaagcactacgtcggcaaatggggggagcagtatttccccttggttcctaagaatgaacccacatacttgacatgaatgagaaggtaaccaaaaaaaaaaaaaaaaaacaaaaaaaaacaacaagaaaaggtagagtttggttttaagagtaaaataacacagaagttaccactcagggcatttgtctgatttcttttaaggcactttggaaaagtcaggatctgcgggacagaaagagaggctttcattcttcttatttcccacaactccctctcaatgcagtcatttctagttttaataatatccttggtatagagtggggaactgacagagaaaatactttttgcatgagtcacagctgctctctgcaatagaaaataatttttaaccaatacaaagccttctggaaaaagaaccaagttagcatctgagatgcgcaaagcagtaaaggcacagataagactggggccaggcaccagctcagcctccacactgagggctggtacccaggagggcagtggtttggggtccgccacgagcacaaggctcaaccctgggattaggcagctgagtcttggaacctgagcccaggctggcacctggacaaaggcgctcagtggtaggagtgtcttgtgtcatctcatcccaggtggctcaatagctcccaacagaggtgggtttgtgacagacagacctgtgtgtgagcctcaactgtggtgtgagcacctgtgaaaacctgaggtggaacaggaggctttaggaccgaagttcttgggagggagttggggtgtgggtgcggctgaacttctttctagatcactaattaaaaggcacattcatgctggggaatggatagtctgtttgaccctgagtgccacagtcaagttttaggggacaggcaagaggcaaaggaacaaaaagggagacgaaggaaggaatgagaaaggcaggggaaaagaggaaggaggaagaactggtaacaaagggtgggccacggagtgtggctagcagagcctctgagggaggtggcccccaccagaacagaggctccctctgcctggggaggtgcaaagggctggtaaacaacctgactgctgttatttacaaccccccagcctaggggcctgaggggtcagtctaaggaggctgaggctccctccgccctgcccacctggggagggttggggaagtggagagttctgcacagtaggtgcagaggcttctgtctcccaggtatcctccccgaggtctggcaggataatgctgaccgggaggccttacctgccaaggggccagagggtgattttgctcttgagaaaacctggcctgccagctaaatcataggcctatttgtggccactacagcatatatttatttttctccctaaaaaatgctcaatacccctccccatatttaaaacaccagaataaaaatacttaggaaattcaagtttacatagcatgccaagaaaaataaattgtcatgacttaacattaaacagctatgcaaatttggatcaacacaaaatcaagctagatcataattagaactcgatctgttctttctttaaaatactacaaacctactatttaaaaaaaaacacaacaactttacattcagaaatcagacaatctggagataggccactgaatgcgagaaacccaaggcttttgctctgatgctagagttgccctggaatccacacacataggcaaaaggtccagggctcaagttttaaatccttttgctaagaaaagacatatgacacattgattgcagtggttgcataccactgaaagaagggggtggggggaggacgtaacattaagaatggttgaaattttgtgtttttctgttaaattacaactaccaaaaagatgacaccaatccaattttagcagcactctccgaattttcgcgaataagaaaaccataatttaaagaaaaattctaacctatttcacgacaatttagcaattctatcaccgggaatgtgttccacggccaccaaattttgggatgtctacagttctgactcttgggtgacactgcgaacacatcaagaaacccgcaaaggcataaacaccttgcagagctaagaattcacatgccgagccaagttgggggcaaaatatcccacctgtcctggtcatctggaaagccatctgaatgatgagccaaggggagctgtcactcagactggtaaaaatgagagggaccagcccagcagattggcagagacacacagcagaggtccctggctaatttcaggtctcttatccgtgtaccaaaacgctagctcggtgtcccgatgtccactgtgatttgggtatacaatgggtatctctgtacatccagcacctggtaggtgagtgagttcaaaccatcagagagcattgtctcctttgtgtgtgcaattcggtcaaacctctgaggattgggttcatttttcttgtctcttgagtggcggatcatgcgacacgtcccgaccacagcatttgggcgagatatagacatgcctctaaaaactaatctgttaaaaatgtcatcatcttctcctccccagccccaataattattaggaaatccattgatggttagaaactgttgtttacttgaagcagagacacctccaaaatactgaacataaggtaggctgaatccaaacttatccattgcaacggaaatgtgccgtggctgtgaaaaacacctgtacgcattatgatcattcattggaatgaggtccacgtcactaaacacaaagcaggtgtagtcatagtccttcaaggcttcttgaaagccaacattgaggagcttagcacgattgaatatagtgtctcccgcctggttgataacatagatgccatagtccagctgctggcgctgcaggactgggtgcaaataatatagccagtacttgaggtgctcctgccggttgcggaatggaatgatgatggccaccttgtgaggagagacgcagtccctgggggcatagcggccgcccatcttcacatttgggttctgctttgccacgagctccaggtccacaggcatgttaaactcaatcagcatggggcccacaagcagcggggactcctcagggcaggcgggcagcgacagtgcggtggtgtggggcactgggaccgaggtcaagttgctagcggggccagggccagaatccacgactgggctggagtcgccacccgggcgcggctgggaggaggcgcctagaggaggcggcggccgggcccctccggtccggaggtccccggaggactgcccgatggcggcggcactgttcgacccgccctgcagcggtgtggagactccgaccagttggggcaggcggctcaggtcgcggccagccaggtagtaaacgagggtgacgccaaggtgcagagcgcagacggccacgagcaggcggcaggcccgctgtagggacgcgcctggcatcgcggcgctccggctcaggagcggctcccgaagcctcatcttcccgccgccgctttaagaagggtgtgggctacaggaggggaggcgacccgcccgcggcgccgcaggcgc

SEQ ID NO: 2628 - DNA, 3305 bp, Homo sapiens
  SIMILAR (510)..(653): 751254mologous to Mus musculus putative,accession number AK003588,Smith-Waterman Score=165.
cagaagggggattaaagtcaaatcactgtcagcagcccaggagcagacaaaaccaccagagtaagccctgaaatggaaatgagagggaaaagaagcaagccgctaacagctaccaagaagaggaggaagtgggagatgcgctgcttcctgtagaaagaacgttgattgaagacaaagctgggtggggactagtccctgggctgcagccgctgctacacatactcacaacgctgccgccgcgctccgtgggcaactcctactactgctgggctgggctgggctgggctgggctgcgccggagctcgcctgcacagatcagctccggagaggggaaaaccacgctcctcggaccaagcctcgggagctaagccagatctgccagtgagccctcaggcttaaggaactggagcagtgtttctgaaggatctatccagcactccggatgcccagcatcaacaccgccagcatagcacaagccaggaagctggtagagcagctttttatgttttgccaatatcgacaggataaaggtgtccaaggcagctgctgatttgatggcctactgtgaagcacatgccaaggaaagacccccctcctgacccctgttccgggcttcagaaaacccgtttaaggaagaagaagtttttctgtgcccatcctttaagtctttgagaggggcctgaaagagcctccgggctcctgggacattgatgtagagtttttagtgaagtgggcacctttctagtccacgggcatttgaagagagcgaggagaaccattcttggaaactcttaggctatgcatgtttaaagatctggtcccctttatgagaatgcaagcccatccccctttctgacttaaaagaacagattttgccgaactgcctggaggaggggaatatataaaaataaaattggtgtcacttcttttctgctatcccccagcccccccccccccaaaatcctcatgtttcttgtttcataatttgaaaaaataacaattaaaacatgacagctgtactgaggtaagatatgtgtggaccttccttgggaaggaatattgtctttagaataccctttgataaagctgagctgtcccgtgtagatgcaattcggtttaatggcattgatgtatagtcactgtgcctttctttttctttcttccttctcctctacccctccttccacccctccccattagagtagtgtggagataaggctggactggtctatcagattgaactccaagaatgatcacacaaaatgttttagggagatgttccccgtggtgtatcctcatggtaacaacggcaaaaaatgccggttgtctttgttctcttttcactattcctaacatgtgtacatgatagctttgattctgcaagtaaaagtaaatcctgtgttgtgactggtgctttcatatatttgtgacaatttttgagtaatattgcatgaaaatgtccctatgttacatccatttcagaagttttgttgttttactctaaagctgggaaaggaaatgagagggaaaagaccccggagagggaagaaaatctcagtattttgaaaattgagattacttcagagccttagccacacctaaaatacctcctagttaatagtggtataaatgcctcttcaatacgttttccagaatccaaagcattttggtttatccagggacccaggggcagcacagctgttcaccaagcaggagagttaaggattcaccatgagctggggaaatgcttttgccatgagtattgaggcaaattccctctttccctgaatcatgggacattctaggatttaaaaggaacatttttttgtgctcttaacaagaaaaccatggcccttcctttgttcaagtatcagaagaaataaacccacagcttccagagaaggtgaccattcttagaacttccagctattcactctccagggagaaggacctcaaaatcggcactctttgggcggcaggtgcggtccccacggccggctctacgaggaagagttctggctcttttgttccactgagatggtcttggtttttcacttaacaaattttttaatggaatcctttgtttttgttctccatcttgtttgttagagtctctcggcctttatttacaaattccttgcaactagagcgctccttccccaagatatggtagtgagagtaatttttcattgtagctgtagtctccatcagtaacagcaggccctgggaagacttgatcacctttttctgtgtcattttcagtcaaatgagggcctctcttacatcttgtttgctttcaaatccccaaatatcatctccatctcccaattaattttattggctctttcctctctattcgctttctcctgttttttttttttaaaaaaaagcatgaaaaaggaagagaaaaagtttgatatgccaaggacagattttgaaacagacttggtaaatgttttccttagctccttcatgggcatgctggtgaaagaataaatacatccaattaaagctcatgctkggggtcggggagaagaggatactgaaacatttgtgaaatgtatgaatgcgacttctgtaaccagatacttctgttcttctgttcaaattgtggggtttttgttacagttaggacgcccatgaagatttaggggtgaaaaaaacagcagagtatttattaaactacagcattgtacaattagcttagtaacactatggaataagctaaaacatatcttatgtttttacatgggccacaacatgaattgagtatgtggtcacatgaaaacacggatgaatgaataaaacactctttggtggtgactgaggcatcattagaaggcccagacgatttccactattcacagcatttccttttctcagaaggactctttatcatttccatgtaaatctagatctttggagcaatttaagatggaagtacaatttctagggagcattttaaaggaaaatgttttggctttttcataattttatgtcttacagtatggaattataatacgaaaatcttttatatgagttttggcttcttggtatttgtacttattcaggggaaaaagtctttcgattacttatgcctctatagagcttaatttcttgagaaattcaacagtcattttcaccagcataattttatcttaaggaataactaataggaaaagtcagcttaattatttaaggccctagcttctacatataatatattcgataggaaatgaaaatctcccgtggaattaactaataagtagtaacaataaacttcatatttagaatgcaaagtctac

SEQ ID NO: 2629 - DNA, 374 bp, Homo sapiens
  SIMILAR (2)..(253): 911254mologous to Homo sapiens SAG splice variant,accession number AF312226,Smith-Waterman Score=402.
ggaaacctgcgccctggcctctcactccgggagctcaggctccaagtcgggaggcgacaagatgttctccctcaagaagtggaacgcggtggccatgtggagctgggacgtggagtgcgatacgtgcgccatctgcagggtccaggtgatggatgagggaattggagttcgtaattggtccgaggccctgaacctaatatatgccagtgaaatgggatttgacttagatatgggttcacaaacatcgctgtcccctctggctcactggcttctcaacaaccttggctggatgaaccttggtaagcaactattggaaggataccaaggagtttattttaaaagaactttttaagtggcctaggggaaaaaggaag

SEQ ID NO: 2630 - DNA, 989 bp, Homo sapiens
  SIMILAR (433)..(600): 961254mologous to Homo sapiens zinc RING finger protein SAG,accession number AF092878,Smith-Waterman Score=326.
gccgacgtggaagacggagaggaaacctgcgccctggcctctcactccgggagctcaggctccaagtcgggaggcgacaagatgttctccctcaagaagtggaacgcggtggccatgtggagctgggacgtggagtgcgatacgtgcgccatctgcagggtccaggtgatggatgagggaattggagttcgtaattggtccgaggccctgaacctaataaatgccagtgaaatgggatttgactgtagatctggctccacagccctcgctgtcccctctgtctcactggcttctcaccagccttgtctggatgaccatcggtagcaacctattggaagcatacaaagcagtttattttagaggaactctcaagtgtcttagggtagaaagtaaaaagttgcttcttatgagttgctaaaggaaggcttctgtgtcaatgcctgtcttagatgtcaagctgaaaacaaacaagaggactgtgttgtggtctggggagaatgtaatcattccttccacaactgctgcatgtccctgtgggtgaaacagaacaatcgctgccctctctgccagcaggactgggtggtccaaagaatcggcaaatgagagtggttagaaggcttcttagcgcagttgttcagagccctggtggatcttgtaatccagtgccctacaaaggctagaacactacaggggatgaattcttcaaagccttggtttagcattttgtcagttttatcttcagaaattctctgcgattaagaagataatttattaaaggtggtccttcctacctctgtggtgtgtgtcgcgcacacagcttagaagtgctataaaaaaggaaagagctccaaattgaatcacctttataatttacccatttctatacaacaggcagtggaagcagtttcagagaactttttgcatgcttatggttgatcagttaaaaaagaatgttacagtaacaaataaagtgcagtttaaaacccaaa

SEQ ID NO: 2631 - DNA, 1096 bp, Homo sapiens
  SIMILAR (83)..(427): 751254mologous to Homo sapiens zinc RING finger protein SAG,accession number AF092878,Smith-Waterman Score=445.
gtcgggcggctccacagagcccttaggcctttccgcctttcccaagccaacgtcttccgccgtcggctccgtcggcgccgccatggccgacgtggaagacggagaggaaacctgcgccctggcctctcactccgggagctcaggctccaagtcgggaggcgacaagatgttctccctcaagaagtggaacgcggtggccatgtggagctgggacgtggagtgcgatacgtgcgccatctgcagggtccaggtgatggatgcctgttttagatgtcaagctgaaaacaaacaagaggacttttttgtggtcttgggagaatgtaatcatttccttccacaactgctgccatgtcccctgtgggtcgaaacagaacaatcgctgccctctctgccaagcaggactgggtggtcccaaagaatcggcaaatgaagagtggttagaaggcttcttagcgccagttgttcagagcccctggtggaatcttgtaatccagttgccctacaaaaggctaagaacactacaaggggatgaattcttcaaatagggagccgatggatctgttggtcctttggcgactcatgaaagccttggtttagcattttgtcagttttatcgttcagaaatctctctgcgattaaggaagataatttattaaaggtgggtcccttccctaccttcctgtgggtgtgtgtccgcgcacacagccttagaagtgctataaaaaaggaaagagctcccaaattgaatcacctttataatttacccatttctatacaacaggcagtggaagcagtttcagagaactttttgcatgcttatgggttgatcgagttaaaaaagaatgttacagtaacaaataaagtgcagtttaaaacccaactcttactcttaatttgttcctaatacgtatttttggcagggagagggaacggtccatgaaatctttatgtgatataaggattttaagtttgatccaatgaacacggtaaataagcttaaacttttcagcatgaggaagtatgtatgcctttagttgacctgctcatgtgtaactgaggaatgtttgtcatgtatgattgcctttcaattactatt

SEQ ID NO: 2632 - DNA, 412 bp, Homo sapiens
  SIMILAR (24)..(293): 1001254mologous to Homo sapiens dJ908M14.1.3 (ribosomal protein S21, isoform 3),accession number AL121832,Smith-Waterman Score=478.
agcaggcgcagcccagcctcgaaatgcagaacgacgccggcgagttcgtggacctgtacgtgccgcggaaatgctccgctagcaatcgcatcatcggtgccaaggaccacgcatccatccagatgaacgtggccgaggttgacaaggtcacaggcaggtttaatggccagtttaaaacttatgctatctgcggggccattcgtaggatggtgagtgtttccctgggctttgctcatcacttcgggacatcgtggactttaccgtgcgcattggagtgtgtgatggtgcctgagcagatctgctggcagagtagtttgagccagctggactgggctggccgcctgccgcttcttgagggtggaagaggggtgctctgagaagacactcaggcagcagactctgcctctcactg

SEQ ID NO: 2633 - DNA, 462 bp, Homo sapiens
  SIMILAR (53)..(229): 1001254mologous to Homo sapiens ribosomal protein S21,accession number L04483,Smith-Waterman Score=307.
actactaaattcgcggccgcgtcgacggcagcaggcgcagcccagcctcgaaatgcagaacgacgccggcgagttcgtggacctgtacgtgccgcggaaatgctccgctagcaatcgcatcatcggtgccaaggaccacgcatccatccagatgaacgtggccgaggttgacaaggtcacaggcaggtttaatggccagtttaaaacttatgctatctgcggggccattccgtaggatgggtgagtcacatgattcctttctccgaatggcaaaggccgatggcatcgtctcaaagtaaggttgggggctcacatttgggcagagtgagtggactaggactgctccagaggcgtggtcttaacgttgtccttttcccctggttctaggaacttttggacttggagagaatcacagattgtggaatatttgtcataaataaataatgaaaaacctaaaaaaaa

SEQ ID NO: 2634 - DNA, 535 bp, Homo sapiens
  SIMILAR (265)..(318): 661254mologous to Homo sapiens ribosomal protein S21,accession number AB007157,Smith-Waterman Score=60.
  misc_feature (1)...(535): n = a,t,c or g
cgccgatatctctgccgggtgactagctgcttcctttctctctcgcgcgcggtgtggtggccagctaggcgcagcccagccttcgaaatgcagaacggacgccggcgcagttcgtcggacctgtaccgtgcccgcgggaaattgtccgctagcaatcgcatcatcgggtgccaaggaccacgcatccatccagatgaaccgtggccgaggttgacaaggtcacaggcaggtttaatggccagtttaaaacttatgctatctgcggggccattccgtaggatgggtgagtcagatgattccattctcccgattggccaaggccgatggcatcgtcttcaaagaactttttgactggagagaaatcacagatgtgggaatattttgtcataaataaataaataatgaaaacctaaaaaaaagggggggcccgggtaccccaatttcgcccttttagttgagtccgtatttacaatttcactgggccgtcgtttttacaaccgtcgttgantggggaaaacccnggggggtttacccc

SEQ ID NO: 2635 - DNA, 415 bp, Homo sapiens
  SIMILAR (303)..(413): 811254mologous to Homo sapiens Similar to RIKEN cDNA 5430416A05 gene,accession number BC006104,Smith-Waterman Score=157.
tttcgtgacattgtgaatgagaatggtgaaggtgaaatacaagatgaggaggaggatggttatgatgatgatgatgatgactggcactgggatgaaggagtcgtaaaactcgccatgggttatggctggaatggaggaagcaacccacaggcaaatcgacagacctccgacagcagttcagccaaaatgtctactccagcagacaaggtcttacggaaatttgagaataaaattaatttagataagctaaatgttactgattccgtcatatataaagccaccgaaaagtttacacaaaaggaatcaaatatgtgttggatcccacaacaagaatgattttattcaagatgttgactagaggaatcataacagatattgatggctgcattagcacaggaagagaagctaatgtatt

SEQ ID NO: 2636 - DNA, 2523 bp, Homo sapiens
  SIMILAR (455)..(967): 981254mologous to Homo sapiens Similar to RIKEN cDNA 5430416A05 gene,accession number BC006104,Smith-Waterman Score=860.
tttcgtggtggcacgagtggtggatctgttggtcccgttttcccgtcgcacgtggtggccactgttggcttctgaatggtttgcgaggcggatatccacgccaaggcctttggatcggccgtgggtacatccgtctgagccgttcctttccatcgcagagcggcggcctccggcggcgctctccagtcatggactaccggggggcttctcatgagccgggtggtccccgggcaattcgacgacgcggactcctctgacagtgaaaacagagacttgaagacagtcaaagagaaggatgacattctgtttgaagaccttcaagacaatgtgaatgagaatggtgaaggtgaaatagaagatgaggaaggaaggagggttatgatgatgatgatgatgactgggactgggatgaaggagttggaaaactcgccaagggttatgtctggaattggaaggaagcaacccacaggcaaatcgacagacctccgacagcagttcagccaaaatgtctactccagcagacaaggtcttacggaaatttgagaataaaattaatttagataagctaaatgttactgattccgtcataaataaagtcaccgaaaagtctagacaaaaggaagcagatatgtatcgcatcaaagataaggcagacagagcaactgtagaacaggtgttggatcccagaacaagaatgattttattcaagatggtgactagaggaatcataacagagataaatggctgcattagcacaggaaaagaagctaatggataccatgctagcacagcaaatggagagagcagagcaatcaaaatttataaaacttctattttggtgttcaaagatcgggataaatatgtaagtggagaattcagatttcgtcatggctattgtagaggaaaccctaggaaaatggtgaaaacttgggcagaaaaagaaatgaggaacttaatcaggctaaaccacagcagagataccattgtccagaaccaataatgctaagaaggcatggtcttgccatgagtttcatcggtaaagatgacatgcctgccaccaattttggaaaaatgttccagttatcagaatccaaggctcgggagttgtacctgcaggtcattcagtacatgagaagaatgtatcaggatgccagacttgtccatgcagatctcagtgaatttaacatgcatgtaccacggtggaggcgtagtatatcattgaccgtgtctcagtccgtggagcacgaccacccacatgccttggagttcttgagaaaggattgcgccaacgtcaatgatttctttatgaggcacagtgttgctgtcatgactgtgcgggagctctttgaatttgtcacagatcccatcccattacaccatgagaaccatggatgcttatctctcaaaggccatggaaatagcatctcaaaggaccaaggaaagaacggtcttagccaagatcatgtggatgaagaggtgtttaagcgaagcatatattcctaggaaccttgaatgaagtgaaaaattatgagagggatatggacataattatgaaattgaaggaagaggacatggccatgaatgcccaacaagataatattctataccagactgttacaggattgaagaaagatttgtcaggagttcagaaggtccctgcactcctagaaaatcaagtggaggaaaggacttgttctgattcagaagatattggaagctctgagtgctctgacacagactctgaagagcagggagaccatgcccgccccaagaaacacaccacggaccctgacattgataaaaaagaaagaaaaaaagatggtcaaggaagcccagagagagaaaagaaaaaacaaaattcctaaacatgtgaaaaaaagaaaggagaagacagccaagacgaaaaaaggcaaatagaatgagaaccatattatgtacagtcattttcctcagttccttttctcgcctgaactcttaagctgcatctggaagatggcttattggttttaaccagattgtcatcgtggcactgtctgtgaagacggattcaaatgttttcatgtaactatgtaaaaagctctaagctctagagtctagatccagtcactgactctgtctggtgttgacagaggatttatttaagctattattttaataaagaactttgtacatttttatttttatatttttttctcttacaaatatgtttttggaagcatgataaatgtttaaatgtagtcaacatctgtaactcttacatgagtgtccagaggcactcatgggaaaattggttttgctttctttgtacacaccagagacccatctgaggtcatctgattataaggccatgtttatataaagggaatttcacccacagttcagctggctgttgattttcactgcaactctgcctttgtgtgtattggcgatcatttgtaatgctcttacacttcgtctttaatgttctttttggagttaggacctctcagttcataaagttttttacaattcaaaaaaaaaaaa

SEQ ID NO: 2637 - DNA, 1137 bp, Homo sapiens
  SIMILAR (271)..(1080): 581254mologous to Mus musculus putative,accession number AK006236,Smith-Waterman Score=771.
aaataacagaatttcagaacaaaagattagagggcagaaatgctgtatgtgctgatagagtcagagagggcccggatcaagaaactgcaggaagagaaaactagaaacctagaatcgtctagaaaactagaacctacaatcgtctcagaacacaaaggaggcttgaggactgagcagactgacatagatgtacttggacaacacctcaccaaggagcatgtctcttcccactcacaatccccaatacgagattcacagtggttcacgctgagtccacaggaaaaattggcctggggtacatcatctaaagatcctaggattgctgcaggtcagcagtctccactggaaaaaaagatcttgaatctaggtggtgtgcatacaacagcagcaagacagttgataatgcagaaatatcaggaggagtgtgaaatactctgtagggagcaagctgtttctcttgactactggcttgccaaagcagagtcttattataataaaataatagtggaaatgatgaaagaagagacaggcaatgaaatctagaaaaaaatggaggagaaaacaacccagagcgtagaaggactaaaacagtactgtttggtacctgagagagagatgaaacacatagaaaggcacatacatcaaacaggaaaggctggagaatttaagaacaaaccatttagacaagtactacaaccccccaatgaaacaaaattaccaaaaattatgccagaagggcatggcatccagaacgcacagagaagaaagcaggtaaatgagagggaacagatgcagactaaggatcaccaggaacgcatgattcgagggagagaacttgcagaacaaagactcaaggagagaatcttgagaagaagccagagccagctacttacatatgagaagcatgagagagtaaaagagataaaggagtttgaaagagttattgcgtatcttcttttccaaccatgcagtagaagtcggattaaagtgagtattcttatggataagtctcagaatggagagaaggtgaatacaattgtgaaaccatatcaaagaaaattcttggcaatgccaccctttttaagaagtcaaataggaaaaataagagattaaagtttcaatgctgttatgataaaa

SEQ ID NO: 2638 - DNA, 1100 bp, Homo sapiens
  misc_feature (1)...(1100): n = a,t,c or g
tctagtgtggtggaattcgccgccgccgcgcgcgcgntacgctctccaacgccagacgccgcctctcgctcgcagtgctccagccgaaggagaaggggggtaagtaaggaggtctctgtaacatatgatcgtacaaaagcagactggcccgcaaatcggaccggtggtaaagcacccaaggaagccaactggcttacaaaaagcccgcttcgcaagagtgcggccctctacttggagggttgaagaaacctcatcgttacagggcctggtactgtggcgctccgtgaaattagacggttatcagaagtccactgaacgtcatgattcgcaaacattcgcttccagcgatctagtgcgagaaattgctcaggacttttaaaacagatctgcgcttccaggagcgcagtaatcaggtggctttgcaggatggcaagtgagggcctatctggtttggccttttttgaaagacaccaacctagtgtgcttatccatgcccaaacgtgtaccaattatgcccaaaagacattccagctcagcacgccggcatcacgtggagaacgtgctttaaggatccactcatggatggggaaacatttcatttctcaaaaaaaaaaaaaaaaaatttctcttcttcctgttattggtagttctgaacgttagatatttttttttccatggggtcaaaaggtacctaagtatatgattgcgagtggaaaaataggggacagaaatacaggtattggcagtttttccattttcattggggggggaatttttaatataaattgcggagacgtaaagcattaatgcaagttaaaatgtttcagtgaacaagtttcagcggttcacctttataataattataaataaacctgttaaatttttctggccaaggccagcatttggaatttttttaaaacaagtaaatttcttattgatggcaactaaatggtgtttgtagcatttttatcatacagtagattccatccattcactatacttttctaactgagttgtcctacatgcaagtacatgtttttaatgttgtctgtcttctgtgctgttcctgtaagtttgctattaaaatacattaaactata

SEQ ID NO: 2639 - DNA, 484 bp, Homo sapiens
  SIMILAR (197)..(424): 751254mologous to Homo sapiens HSPC214,accession number AF151048,Smith-Waterman Score=328.
  misc_feature (1)...(484): n = a,t,c or g
tggggnggaagggggnnnnccattgattggcatcggcattcggcacgagagggagtcgggccgcgactgtggtcgtttttataccttcccgcgcggacgccggcgctgccaacggaagggcgggtagggcnnnnnnnnnnnnnnnnnnnnnnnnnnnnnccatttgagatctttgaagatatcctcaacgtgaggcaaggtgcccggcgacgactgcccgctggtgtggggccagtgctcccactgcttccacatgcattgcatcctcaagtggctgcacgcacagcaggtgcagcagcactgccccatgtgccgccaggaatggaagttcaaggagtgaggcccgacctggctctcgctggaggggcatcctgagactccttcctcatgctggcgccgatggctgctggggacagcgccccttgagctgcaacaaggtggaaacaagggctggagctgcgtttgttttgccatcactatgttn

SEQ ID NO: 2640 - DNA, 838 bp, Homo sapiens
  SIMILAR (337)..(633): 421254mologous to Homo sapiens HSPC214,accession number AF151048,Smith-Waterman Score=116.
  misc_feature (1)...(838): n = a,t,c or g
tttgccccgccttgangaattcggcacgaggagactcggcgggcgctgttgagggagtcgggccgcgactgtggtcgtttttataccttcccgcgcggacgccggcgcttgccaacggaagggcgggtagggcgagacggagtttcgtcatgttggccaggcccatttgagatctcgtaagatatcctcaacgtgaggctctgctgccatgaaggtgaagattaagtgctggaacggcgtggcccacttggctctgggtggccaacgatgagaactgtggcatctgcaggatggcatttaacggatgctgccctggctgtgaatgttccccttccatgctgtctgagcggccccgactgcaaggtgccccggcgacggactgccccgctgggtgtgggggcccagtgcttcccacttgcttccaacatgcattgcatcctcaagttggcttgcacgcacagcaggtgcagcaagcacttgccccaatgttgccgccaagaattggaaagttcaaggagtgaggcccgacgctggctctcgcttggaggggcatcctgaagactccttcctcattctgggcgccgatggctgcttggggacaagcgcccctgaacttgcaacaaggtggacacatagggctggaacttgcgtttgttttgccatcactatgtttgacactttttatccaataagtgaaaactcattaaaactactcaaatcttgctggaggcctctgggtgcctgtgttctcagcatatagatgtggtctcggtgtgttttgatatgaaaactctcatgaataaacatctccgtgaaacgccaaaaaaaaaaaaaaaaa

SEQ ID NO: 2641 - DNA, 6523 bp, Homo sapiens
  SIMILAR (271)..(1974): 941254mologous to Homo sapiens bA234K24.1.1 (Erythrocyte membrane protein band 4.1-like 1 protein (KIAA0338), isoform 1),accession number AL121895,Smith-Waterman Score=2820.
atgctcagaaagaggaagtggctgggtgtggtggctcacgcctgtaatcccagcactttggggggccaaggccacccagataaacagccacaggtgagaaggctgctgagtgcccctggaagcagaatagctgggcaatgggtccttgactctctgaaatctcctcatttactgctgaaaggggaaaatgacaagaatagtttatcccagaaagcatttctctacgttgctcatgttttggatgagtctgagagaggcgtgctggtcaccatgacaacagagacaggccccgactctgaggtgaagaaagctcaggaggaggccccgcagcagcccgaggctgctgccgctgtgaccacccctgtgacccctgcaggccacggccacccagaggccaactccaatgagaagcatccatcccagcaggacacgcggcctgctgaacagagcctagacatggaggagaaggactacagtgaggccgatggcctttcggagaggaccacgcccagcaaggcccagaaatcgccccagaagattgccaagaaatacaagagtgccatctgccgggtcactctgcttgatgcctcggagtatgagtgtgaggtggagaaacatggccggggccaggtgctgtttgacctggtctgtgaacacctcaacctcctagagaaggactacttcggcctgaccttctgtgatgctgacagccagaagaactggctggacccctccaaggagatcaagaagcagatccggagtgagtggcttgttgtgtttggggaggtgggtagcccctggaattttgccttcacagtcaagttctacccgcctgatcctgcccagctgacagaagacatcacaagatactacctgtgcctgcagctgcgggcagacatcatcacgggccggctgccatgctcctttgtcacgcatgccctactgggctcctacgctgtgcaggctgagctgggtgactatgatgctgaggagcatgtgggcaactatgtcagcgagctccgcttcgcccctaaccagacccgggagctggaggagaggatcatggagctgcataagacatatagggggatgaccccgggagaagcagaaatccacttcttagagaatgccaagaagctttccatgtacggagtagacctgcaccatgccaaggactctgagggcatcgacatcatgttaggcgtttgtgccaatggcctgctcatctaccgggaccggctgagaatcaaccgctttgcctggcccaagatcctcaagatctcctacaagaggagtaacttctatatcaagatccggcctggggagtatgagcaatttgagagcacaattggctttaagctcccaaaccaccggtcagccaagagactgtggaaggtctgcatcgagcatcatacattcttccggctggtgtcccctgagcccccacccaagggcttcctggtgatgggctccaagttccggtacagtgggaggacccaggcacagactcgccaggccagcgccctcattgaccggcctgcacccttctttgagcgttcttccagcaaacggtacaccatgtcccgcagccttgatggagcagagttctcccgcccagcctcggtcagcgagaaccatgatgcagggcctgacggtgacaagcgggatgaggatggcgagtctggggggcaacggtcagaggctgaggagggagaggtcaggactccaaccaagatcaaggagctaaagttcttagacaagccagaagatgtcttgctgaagcaccaggccagcatcaatgagctcaaaaggaccctgaaggagcccaacagcaaactcatccaccgggatcgagactgggaacgggagcgcaggctgccctcctcccccgcctccccctcccccaagggcacccctgagaaagccaatgagtcccagaggacccaggacatctctcagcgggacttggtacctgagcctggagcagccgcaggcttggaagtgttcactcagaaaagcctcgcagcatctcctgagggttcagagcattgggtatttatagaaagagagtacactaggccagaagagctcggtctcctaaaagtgaccaccatgcagcaggaagaaaggcaggcaggccttgctggtatccttgccaacggcagactctccaaggtagacgttctggtggacaagttcaaagtggaagtggccacagaagaaatggtgggaaacagaagagcaaacacccagcaacaaggaaaaatgattgcaagtcctgaagactttgagtcagtgggggaggaaggcccctggatcagggaaagcccaggaggggctgccctggcttccggccgcacattggcagaaaagctcctcgagggctctgagctcagggcagacaccagagaggcaaccatcaggaaccgctgcatgtcagatggtcagccggagggccagacagagctgaggaaggggctggaggagcctcacacttgtgggagacccactgctccagggaccaggccagcagaggtggacgtcctctctccagcctccgacaagggaggactccagtcgtttctattggatccagcccacgcagaagccagagctgagttgagcaatgaaactgatacttcctttgcagagaggagcttctatttaaattatgaagaaaaagactcagaagaccaagtcctccctccacccctggaggagagaaaagggcgcctggatgcccctcccggaggtgagcccaggccgacgctgaattccttagacctgagggtttctgctgctgcttccagcaggagcaaggacgaagcccacatgacttccccaaaggaaggggcagggacccccaagaaccatggaggacctggtgacctgaagggatctcccgcaggacagacgtttgctgaaggctgggaagatgcccagtggggagtggaaggagagtttccccacctgacagccagcgcagcccgagaggaagggacccccgtgagtggagatttgctgggaaaggctgaggaaagtcccacagaggaactgaagaagcaccctcctcacagaggacagggcgtgcatcccgacccccaggcctgcgcccttcctcgggccatccctctgaatgtcaggaagccagtcaaaccagacagaggcaacttcccacccaaagagaggggagtggttcccacccagaaaggaggggctgagctgaaggaccgcgaggcttcagcatttcttcacatggaggtgatcattcccctgccagcctcccctggtcattctgaggacctggcagctctggaggaagcttctccaagcccaacctcccatgggtcaggggagccttcggagctcagggagccctttcttagacatgtccatctttcgaaagccagcccagagcccaaggaccaagtagggtttgtggtgtcccctgccacaggaggtgagcgcaggcctcctcccatcaccagcagaaagcccagagtagtccctgaagaagctgaggggcgcatacctctggggtttgggttcccttcagggaagcgaagggagatgacctctttccaggctggggaccaagagggctccctagaagatattagcaagacctcagtggccaacaaaattcggatatttgagacccacggagctgaaactcgccgaatgagtgagggtgaagcaaggtcccttccaaatgacgtatcttcagaggcacccgtgggacaagcagagcagcagcggagtacgctctcagacctgggcttcgcccaactccagcccccaggggactttgccagccccaaagccacacattccacagtgatacctctggctaccagacacttcagggaggacacttctgcatcctaccaggaagcacacacggaactagagcccgtgtcccccaattcaggctgtgaaaccacgctggcagaagctactggaactggggtaactggccgcaacaaatccggagatgcggtcagggaagagaagcgctccaccaacttagcagccaacacccctgggaagggggggcgcctgagatttgccagcccctcgggccctcagagagcagggctgagggagggctccgaggagaaagtcaaaccaccacgtccccgggccccagagagtgacacaggcgatgaggaccaggaccaggagagggacacggtgttcctgaaggacaaccacctggccattgagcgcaagtgctccagcatcacggtcagctctacgtctagcctggaggctgaggtggacttcacggtcattggtgactaccatggcagcgccttcgaagacttctcccgcagcctgcctgagctcgaccgggacaaaagcgactcggacactgagggcctgctgttctcccgggatctcaacaagggggcccccagccaggatgatgagtctgggggcattgaggacagcccggatcgaggggcctgctccaccccggatatgccccagtttgagcccgtgaaaacagaaaccatgactgtcagcagtctggccattagaaagaagattgagccggaggccgtactgcagaccagagtctccgctatggataacacccaggttgatgggagtgcctcagtggggagggagttcatagcaaccactccctccatcaccacggagaccatatcgaccaccatggagaacagtctcaagtccgggaagggggcagctgccatgatcccaggcccacagacggtggccacggaaatccgttctctttctccgatcatcgggaaagatgtcctcaccagcacctacggcgccactgcggaaaccctctcaacctccaccaccacccatgtcaccaaaactgtgaaaggagggttttctgagacaaggatcgagaagcgaatcatcattactggggatgaagatgtcgatcaagaccaggccctggctttggccatcaaggaggccaaactgcagcatcctgatatgctggtaaccaaagctgtcgtatacagagaaacagacccatccccagaggagagggacaagaagccacagaagctaaaacgagaaactaagaataacaaaaggcaaccttgcatccggcggaacctgcaggcacgggccattcttcccgcgacccagggctctgccggaccgcttcccccgtcgctccagtcagacgccaaagctggagaacttccggtgcgtttccgctgtaccggaacgtggggcgaggcgctgttcatcaaagaaaaagggttcttttggtcacccaccactggccccatggctgccgtgcagatggatcctgagctagccaagcgcctcttctttgaaggggccactgtggtcatcctgaacatgcccaagggaacagagtttgggattgactataactcctgggaggtcgggcccaagttccggggcgtgaagatgatccctccaggcatccacttcctccactacagctctgtggacaaggctaatccgaaggaagtaggccctcgtatgggtttcttccttaagcctgcaccagcgggggctgacagtgctgcgctggagcacactcagggaagaaggttagacctgtccccagccccagagtctgaggtggaggccatgagggccaacctccaggagctggaccagttcctggggccttacccatatgccaccctgaagaagtggaccatcactcaccaacttcatcagcgaagccacagtggagaagctacagcccgagaatcgacagatctgtgccttttccgatgtgctacctgtgctctccatgaagcacaccaaggaccgcgtggggcagaatctaccccgctgtggcattgagtgcaaaagctaccaagagggcctggcccggctaccagagatgaagcccagagccgggacagagatccgcttctcagagctgcccacgcagatgttcccagagggtgccacgccagctgagataaccaagcacagcatggacctgagctatgccctggagactgtgctcaacaagcagttccccagcagcccccaggatgtgcttggtgaactccagtttgcttttgtgtgcttcctgctggggaatgtgtacgaggcatttgagcattggaagcggctcctgaacctcctgtgccggtcagaagcagccatgatgaagcaccacaccctctacatcaacctcatctccatcctgtaccaccagcttggtgagatccccgctgacttcttcgtagacattgtctcccaagacaacttcctcaccagcaccttacagaaaggattcttgattgacatcagtgaagacttcatcgaggtcctgtttctcagaggtacagaacgcttttctaaagccaacctactgttggatgagtccctcattgccgtggatgccaccctgagaaagaaagctgaaaagttccaagctcacctgaccaagaagttccggtgggactttgctgcggaacctgaggactgtgccccggtggtggtggagctccctgagggcatcgagatgggctaa

SEQ ID NO: 2642 - DNA, 2478 bp, Homo sapiens
  SIMILAR (76)..(945): 981254mologous to Homo sapiens bA234K24.2 (A novel protein (CGI-23, DKFZP564N1363)),accession number AL121895,Smith-Waterman Score=1499.
  misc_feature (1)...(2478): n = a,t,c or g
ggctgtaccggaacgtggggcgaggcgctgttcatcaaagaaaaagggttcttttggtcacccgccactggccccatggctgccgtgcagatggatcctgagctagccaagcgcctcttctttgaaggggccactgtggtcatcctgaacatgcccaagggaacagagtttgggattgactataactcctgggaggtcgggcccaagctccggggcgtgaagatgatccctccaggcatccacttcctccactacagctctgtggacaaggctaatccgaaggaagtaggccctcgtatgggtttcttccttagcctgcaccagcgggggctgacagtgctgcgctggagcacactcagggaagaggtagacctgtccccagccccagagtctgaggtggaggccatgagggccaacctccaggagctggaccagttcctggggccttacccatatgccaccctgaagaagtggatctcactcaccaacttcatcagcgaagccacagtgaagaagctacagcccgagaatcgacagatctgtgccttttccgatgtgctacctgtgctctccatgaagcacaccaaggaccgcgtggggcagaatctaccccgctgtggcattgagtgcaaaagctaccaagagggcctggcccggctaccagagatgaagcccagagccgggacagagatccgcttctcagagctgcccacgcagatgttcccagagggtgccacgccagctgagataaccaagcacagcatggacctgagctatgccctggagactgtgcacaacaagcagttccccagcagcccccaggatgtgcttggtgaactccagtttgcttttgtgtgcttcctgctggggaatgtgtacgaggcatttgagcattggaagcggctcctgaacctcctgtgccggtcagaagcagccatgaagaaaacgccacgcgcctgtggatcaacctcatatccatcctgcaccaccagctgggtgagatccccgctgacttcttcgtagacattgtctcccaacacaacttcctcaccagcaccttacaggttttcttttcctctgcctgcagcattgccgtggatgccaccctgagaaagaaagctgaaaagttccaagctcacctgaccaagaagttccggtgggactttgctgaggaacctgaggactgtgccccggtggtggaggagctccctgagggcatcgagatgggctaactcggggagcgctctcagctgcgaggggccccttcccacagggctgcagtcctggcctctccatttacttcttcccatcctgggacctgccagggcagcaatcttttccaggtcctgcaaagatggagccagaattccctttttcactgattaaatatatttctttcatttgccaaagaggctgttacccatcctgaaagggcacatttgtggggtttccccatcagccaggccttggtgctaacctggctgaatttcacacaggctcttacacacacacgctcctaaggagacatcttgcctacacggcaaccatattttcctttggaatgagaaggaatttgaaccaaaagtccaagaaagaactgattgcttgttccataaggagcttaggaaacaaagaaaccctggattgcccagggggtcttgagaagttggttggtgactttttttgcggttaaatgaagggtgatggggagatcagcccgtaattgccgcctgcctcttgctaaataggagcagaggacttggcctgcagctccttgggaccactttgattgggaagagagtttcaagggaggcagctggattcaatctagcaggtggtcagcttcagttttcttccattcgaaatcccatttcttcctgttccagaggcccagtgggtcatctcccaagggtgggtgttggaccctgggccttcagaggccttgcttggtgctgtcacctccgacctgtttccattccgaggcctcacccagaagtgggnaccctccccttcctcaccagagccaccgtgactgtttctgatgacctgggagagtcaacaacaaccagaaaggttttcgccccagaagcaggcttcttaaggcctttacgaagttttgtgccttccaagtgctgaagaagaacctggtcaagcctaaatcttcccaggtcccgctttggagcttgtcaagtcaccggagtaatgagctcctggttccttcgggagttccttcgtgcctgtgtggtcagggtttcctctctagacaagtacacaggcccctgccaccctgacatcaaactgttgtactatgatcacagtccctgtgccatccttttccaagactggggctcacaccatgtttttgaatgagaatccctgctggttgagacttttgcttccacttgtttccttggagatgtttttccaagagcataatgtacattaaagtcttcgagttgagacaaaaaaaaaaaaaaa

SEQ ID NO: 2643 - DNA, 483 bp, Homo sapiens
tttcaagttatataaattatttattaaattccttcctgttttagagaatggaggtgttgtccaagttggagaattgttaccttgcaagatttgtggaagaacattctttccagtagcattagtgagtagactgattttgtacctttatggttttacagatctgtaattgttcaataattctggtcaattctcatgggaagaatttacgtggaatagtttttgaagagttaatgggtacctattctttgttcaagggtcttgatttcaagctatgcccattcttccaaaatggtgttctttccttccgaagttatggtcttccagaacctcttcctgtaaaaggtttaaaaggtattgcctcatttttacgagaccttgttgctggagggttggggaagtccaggaggcataaggtgctagactcctggcgaggggccttctgtgcaaatctccttggttgggttagggcttcaccccaggggc

SEQ ID NO: 2644 - DNA, 1450 bp, Homo sapiens
  SIMILAR (74)..(172): 841254mologous to Homo sapiens CGI-62 protein,accession number AF151820,Smith-Waterman Score=150.
tttcgttacagccagagctgggcggtggcgggcgctggtgaaggagtctcgctgagctcgaggaggtggcgcgatggagggactggaagagaatggaggtgttgtccaagttggagaattgttaccttgcaagatttgtggaagaacatttctttccagtagcattaaaaaaacatggacccatttgccagaagactgcaactaaaaaacggaagacttttgattcaagcagacagagagctgaaggaactgatattccaacagtaaaacctctcaaaccgaggccagaaccaccaaagaaaccatctaattggagaaggaaacatgaagaattcattgctaccataagagcagctaaaggccttgatcaggccctcaaagagggttggcaaactttcctcctcctcctccaaccttctttatgatcctggatttataattcaatggtcccatattggtcagaggaagattccaatggaaaatgcagctgatagacatataaatttctgtaaagaacaggcagcacgtattagtaataaaaggagattttctacagataccaaaggaaaaccaacttctcggacacaggtgtataagccacccgcacttaaaaagtcaaattctcctggaactgcatcatcaggatcttcacgagtaccgcagccaagtggcgctggccaaaactgttgtaggtgtcccttccagggtaaagtgtcttcaagtagcagctctttggggaaaccaaacttcagaccttgtctccctctcataaagggatagcagcccctcatgcaggagctaatgtcaaaccccgaaattccacaccacctagttttgcaaagaaatccttgccccaggtgtgcttacaaacaaaaagaaaaacttatactgagagctacatagccaggccagatggggactgtgcatcttcccttaatggtggaaatattaaaggcattgaaggacattcccctggaaactttccaaaatttctgccatgagtgtgggactaaataccctgtagaatgggccaaattttgctgtgaatgtggcattcgaagaatgattctatgaatagaatctcaaaaaaaaaaaaaaaagccaagttcagagtttatgattattgctgcttggacagctagagcacatcctctagttagtttgtgctaaaaatactcgaaataccatttccagttaattttgaagtgtaatcttttggctatataatgtgtgtatgtttatatgtgtacatatactgtatataataaatatctgataccccagactgtgtcattcaaggaaatattcacttatctgtcagaaaataatttcaaatggaacaattaatttaggtgttacttttctgttgttgttaaagcacgttaagtacatttccacaaactctcatactctagtgcttagcccttcaagctttaggataagtataact

SEQ ID NO: 2645 - DNA, 555 bp, Homo sapiens
atgctgtatgtgctgatagagtcagagagggcccggatcaagaaactgcaggaagagaaaactagaaacctagaatcgtctagaaaactagaacctacaatcgtctcagaacacaaaggaggcttgaggactgagcagactgacatagatgtacttggacaacacctcaccaaggagcatgtctcttcccactcacaatccccaatacgagattcacagtggttcacgctgagtccacaggaaaagtatgcttgttcatatgaaaggaaagatcctcttattaaaagagcattcattattttctaccataggaatgcagtggtttcccatgggggaaatggccctgctgtagtcctccctattagcagatttgttctgacacctcctacatttgaatctaccttgccttttttatcttccagattggcctggggtacatcatctaaagatcctaggattgctgcaggtcagcagtctccactggaaaaaaagatcttggtaagtaaattatcttcacatcatacagtttggaactacacagagaaggaatcttag

SEQ ID NO: 2646 - DNA, 1323 bp, Homo sapiens
  SIMILAR (1323)..(997): 451254mologous to Mus musculus Gag polyprotein,accession number Y12713,Smith-Waterman Score=268.
tcagttatatgacttcttgagaaccctgtagcccacttgtctacatttgcttccatatgccactgttccaaactttcccacattttcctgtctttttctaagccctccaaactgttccaacctctgcctgttacccagttccaaagtcacttccacattttcaggtatcttttcagcaatgccccacactactttgctccagttcccaataagtttctcatttccatctgagacctcattagcctggccttcattttccatatcactatcagcattctggtcacaactattcaacaactgtctaggaagtgccaaactttcctgtcttcttctgagccctccaaactgttctaacctctgcctcttatccagctccaaagcttcttctacattttcaagtatcaccaccagactagagtctctactacgaggcttatcacaggatgtgtcagggaagtataaaacttgagctagatacagagtgccgattggtgtatttacaatccctgagctagacataaaggtcctccacgtccccaccagagcagctagatacagagtgtccattggtgcactcacaaaccttgagctaaacacagggtgctgattggtgtatttacaatccctgagccagatataaagactctccacgtccccaccagactcaggagcccagctggcttcacctagtggatcccacaccggggctgcaggtggagctgcctgccagtcccggtgccgtgcgcccgcactcctcagcccttgggtggtggatgggactgggcgcggacccaccagacccactgtaagttggatctgagctaaaactccattaattacctgacatccatgagcctctactttaactggaggactgcaacgacattttgggtcccctggaatcaatgtcagctcagagccagtgttcagtagtccccaaaatgtctgatcaattccctttctccatagcacagttaccctgggaaaaggccacaggtctccttgcttttgatggttgagtgctgccacttggtccctgccatcttgggatccaattactcccattgtatttaaatgttgtagttgagtgactgtggttcccaccgttagatctgacatacagagaagagcaattacagggctcttcaaagatgcaggttctgccctcacaaatctattttgcaagacattggtcaaggctatatcttctagattctccaagctgggatgagtaggcctaaagtgactaatccactccaccatcacaatctccctaagtctttgaatcccttcctctacattaacccaagggagatcaggcat

SEQ ID NO: 2647 - DNA, 1296 bp, Homo sapiens
  SIMILAR (424)..(453): 801254mologous to Homo sapiens Human secreted protein, SEQ ID NO: 7083,accession number AAG03002,Smith-Waterman Score=45.
ttacagagagtggcttgagtgggcaacccgtgggcagtcatggtcccgtgtatcttcccaccggcactgctgggaccagagtgtgggtgacagaacaaaaggattccgtccaaatgtgttagcaggcctcttcaggtaggctgtgctgcgctcgatttctccccgggccttagctgccttcccgccgggcagggctcgggacctgcagcccgccatgcctgagcctcccacccgcttcacgggctcctgtgccgcccgagcctctccaatgagcgccaccccctgctccatggcgcccagtcccatcgaccacccaagggctgaggagtgcaggctcccggcgcgggactggcaggcagctccacctgcagcccctgtgcgggatccactgggtgaagccagctgggctcctgagttctttgggtccacactgcttttatgagctgtaacactcaccgcgaaggtctgcagcttctctcctgaagccagcgagaccacgaacacaccagaaggaagaaactccgagcacatcaattccggacgcagtagtattgtccacgggcatccacaagtgagggagaaggcagcatattgaatatactgtctgtggttggtagtgttgtccacgggcatccacaagttagggagaaggtagtgagaggtgacagcgtgccggcagccctcggtcgccttcagcacctccttggccttggcgctcactctggccctgcttgaggagcccttcagcctgctgctgcactgtgagagcccccttctgggctgggccagcagctgcggagggtgtgctgggtcccccagcagtgctggccctgctggcattgtgctcaaattctcgctgggcctcagctgcctccctgcagggtagggctcgggacctgcagcctgccatacctgagcctcccccctgcggtgggctccttcatggcccgagcgtccctgatgagcgccgccccctgctcgatggctagggtcccctcgaccacccaagggctcctcagccgcactcctcagtgcgggcagatggcgcaggactggcaggcagctccacctgcctccccagtgcaggatccactggaagaagccagctgggctcctgagtctagtggggacttggagaacttttatgtctagcgcaaaggtctgcagcttctctcctgagaccagtgagaccacgaactcaccggaaggaatgaacaactccagacgcgtcacttgaagagctgtaacacttaccgcgaaggtctgcagcttcactcctgaagccagcgagaccat

SEQ ID NO: 2648 - DNA, 503 bp, Homo sapiens
ctgtccagagtccaaggttcctgccacaaaccggaaagcaaagaggaccacacagcactctgaaaaggccgcggtggtttggagctgtttgctcgagttttctctaaattgtgcccctggactgtcagaactgtcagcggctgacggccggtcccgcgcaacttcaaggttcccgggctgccaaccgcaggaaagcgctggtgtcgccaagcagttccgtagcagggaagatggttttgcagaggaaatggggtatttccttctagggtggtggcggcttttctttttattcccccacccgcttaggatgacgcatagggcatctccacagagttttggccacttgcatcctagagcttgatgcttttcctgagatacgcgcccttggtgggtggtagtttctgcatctggtctcacccactccagttcttcctcacctccatcaaggtgaactttgtagaaacactcttctgcttccagtccttcaaagacattttttagcc

SEQ ID NO: 2649 - DNA, 579 bp, Homo sapiens
  SIMILAR (270)..(4): 601254mologous to Homo sapiens hypothetical protein,accession number AL162044,Smith-Waterman Score=236.
ctattgagaggtgacagcgtgctggcagtcctcacagccctcgctcactctcagcgcctcctctgcctgggcttccactttggcggcacttgaggagcccttcagcccgccgctgcacagtgagagccccttcctgggctggccaaggccggagctgggtccctcagctgctccgtgcgcccctgtgccgccggagcctccccaacgagtgccaccccctgctccatagcgcccagtcccatcgaccacccaagggctgaggagtgtgggcgcatggtgcaggactggcaggcagctccacctgcaccccggtgtgggatccactgggtgaagccagctgggctcctgagtctgcttatgagcatggtcataagaattaatatgattgtcaaactcctggtgtttgtgatactgcttgtcacataattcacagtaaaagtttgcctttacatcttccagggcctttgctgtggacttcttttctgcaaaatccttcatggcagcccctctcatcacaggcccaaagacctttggcatcactgtgacctggatgtgagacatgaggtcaaaggagatcat

SEQ ID NO: 2650 - DNA, 3138 bp, Homo sapiens
  SIMILAR (3138)..(2014): 971254mologous to Homo sapiens putative p150,accession number U93563,Smith-Waterman Score=1951.
tcattttccctccaccttttcctccttgtcttccttctccttattcttctcttcatccttttcctcctccccttcatcttcttcctcttcatctttattatcaacatggtgagtgttacagttcttaagggagcgcgtctggagtttgttccttctgatgttcggatgtgttcggagtttcttccttctggtgggttcgtggtctagctggctcaggagtgaagctgccgactttcgcgcttgagctagatacagagtgcccattggtgtatttacaatccctgagctagacataaaggttctccaaggccccaccagactcaggagcccagctggcttcacccagtggatctcgcacgggggctgcaggtggagctgcctggcagtcccgcgccctgcgcctgcactcctcagcccttgggtggtcgatgggactgggtgccgtggagcaaggggtggcgctcgtggaggaggctcgggggcacaggagcccacggaggggttgggaggctcaggcatggcgggctgcaggtcccgagccctgccccacgggaaggcagctaaggcccagcgagaaatccagcgcagtgccggtgggctggcactgctgggggacccagtacactctccgcagccattggcccgggtgctaagtccctcattgcctggagccaacagggccggccggctgctctgagtgcagggcccgccaagcccacgaccacctggaactctagctggcccgcaagcacggcacacagccctggttcctgctcgggcctctccctccacacctcccactaaccaaggtatccaggttccgtcatcacaacggactaggaggctggcctgatccacggagaggaaggaagagcgtggcagcccacccccctccgcaaagggacagtcaaagtactttgttaaacaggtcctgttccctctgccacccaactggacgagaccctccaacaggggttgtaagataccctgtacaggaacaatcctgctggcatcaggttggtgcccctcgaggtcagagatcccagaaaaaggagcaggcacctgcctttgctgttctccagcctcctcaagtaatatctctgggcttgggagcaaaccagatgaatagtgcctgaagtgaacccctagcaaattgcagcagcccattgatgattttttttcgctataccacaatatatcaataacattgtatccgggaggaaggcttggtgccatgttgcaactgtgtctgttgtaattgttctgccgaatctggaatttcctgaacaacccaaaacagccagaggcagagtctctcagagaagcatctaagtcgcctagaccagggtgcttgggcaatgacatggaaatgtcctctttccaagcagagaagacagagtcccctccatatgaccagagaccacaggattgtagaggcttgtaacacaagggcaacaggcactcaaaacggaaagctctatgtctctttaagaatgcaatggttctgagccttgttgctaggctagctgtgtttccaggcaagctcattagagcatatcttggttctgcacatctcagggtggggtgctcatttcttttctctcccaatgcacgaagcattgccaaagctctacagcagtggtccctgatcttttcagcaccagggactggtttcacggaagacaatttttccatggatggctgtcgggggatggttttgggatgattcaagcacattacatttatcgtacactttatttctattattgttacattgaaatatataatgaaataatcatacaactcatcataatgtcgaatcagtgggagccctgagcttgttttcctgcaactagatggtcccatagtccaggagggaagcagatgaaggaattcatggtgaaattgcagagtggtaattgcttggataggatacagtgggttctgtgggggatcatggaggaacagccagatgggggaagtgacatccaaaccgaaacttgaaacagggctgttgtttcctgactttttaatgattgccattctaactggtgtgagatggtatctcattgtggttttgatttgcatttctctgatggccagtgatgatgagcattttttcatgtgttttttggctgcataaatgtcttcttttgagaagtgtctgttcatgtccttcgcccactttttgatggggttgtttgtttttttcttgtaaatttgtttgagttcattgtagattctggatattagccctttgtcagatgagtaggttgtgaaaattttctcccattttgtaggttgcctgttcactctgatggtagtttcttttgctgtgcagaagctctttagtttaattagatcccatttgtcaattttgtcttttgttgccattgcttttggtgttttggacatgaagtccttgcccatgcctatgtcctgaatggtaatgcctaggttttcttctagggtttttatggttttaggtctaacgtttaagtctttaatccatctcgaattgatttttgtataaggtgtaaggaagggatccagtttcagctttctacatacggctagccagttttcccaacaccatttattaaataggaaatcctttccccattgcttgtttttctcaggtttgtcaaagatcagatagttgtagatatgtggcgttatttctgagggctctgttctgttgcattgatctatatctctgttttggtaccagtaccatgctgtttcggttactgtagccttgtagtatagtttgaagtcaggtagtgtgatgcctccagctttgttcttttggcttaggattgccttggcaatgcaggctcttttttggttccatatgaactttaaagtagttttttccaattctttgaagaaagtcattggtagctttatggggatggcattgaatctgtaaattaccttgggcagtatggccattttcacgatattgattcttcctacccatgagcatggaatgttcttccatttgtttgtatcctcttttatttccttgagcagtggtttgtagttctccttgaagaggtccttcacatcccttgtaagttggattcctaggtattttattctctttgaagcaattgtgaatgggagttcactcat

SEQ ID NO: 2651 - DNA, 663 bp, Homo sapiens
  SIMILAR (300)..(154): 871254mologous to Homo sapiens Human secreted protein, SEQ ID NO: 7102,accession number AAG03021,Smith-Waterman Score=223.
ctactgagggaacatcatgttgatgtatcttcttactggtgatggcattgtgtccggaattggtgggttcttggtctcactgactttaagaatgaagccgcggaccctcgtggtgagtgctacagttcttaaaggcggcgtgtccagagtttgttccttctgatgttcggatgtgttcgtagtttcttccttctggtgggttcgtggtctcgctggctcaggagtgaagctgcagcccttcgcagtgagtgttacagctcttaagggcgcgcgtctggagttgttcgctccccccggtgggtttgcgatctcgctggcttcaggggtgaagctgcagaccttcacggcgtatgttacagcagactcaggagcccagctggcttcacccagtggatccagcaccagggcagcaggtggagctgcctgccagtcccgcgccgtgcgcctgcactcctcagcccttgggtggtcgatgggactgggcgcctccgcagccattggcctgggttctaagcccctcattgcccggagccggcagcgccgactggctgctccaagtgcggggcccgccaagcccacgcccacccggaactccagctggcccgccagcaccgtgcgcagccctggttccagctcgcgtctctccctccacactcccctcat

SEQ ID NO: 2652 - DNA, 444 bp, Homo sapiens
  SIMILAR (270)..(64): 591254mologous to Homo sapiens unnamed protein product,accession number AX088212,Smith-Waterman Score=212.
  misc_feature (1)...(444): n = a,t,c or g
atggcagcaaaaagaaattccattaacatagcagaatcttggaaagatctagaagttggaggaccagctaccaaggaaganctcaggagcccagctggcttcacccagtggatccgcaccggggctgcaggtggagctgcctgccagttccgtgccgtgcgcccagcactcctcagcccttgggtggtcgatgggactgggcgccgtggagcagggggcggcgcttatcggggaggctcgggccgcacaggagcccacggaacagggggaggctcaggcatggcgggctgcaggtcccgagccgtgcctcgcaggaaggcagctaagacccgaccttgtgaggtacagaagaggcaacataatgtgaactatctctttccagttgtggaaaccaaagcccagacagttaagtggtttgtccttgctgttaagacaataagctga

SEQ ID NO: 2653 - DNA, 1026 bp, Homo sapiens
  SIMILAR (381)..(704): 381254mologous to Hylobates moloch dopamine receptor D4,accession number AB032918,Smith-Waterman Score=139.
ctagacataaaggttctccaaggccccaccagactcagtagcccagctggcttcacccggtggatcccgcacctgggctgcaggtggagctgcctgccagtcccgccgcatgcgcctgcactcctcagcccttgggtggttgatgggactgggcgcagtggagcagggggtggcgctcgtcgaggaggctcgggccgcacaggagcccacggagggggtgggaggctcaggcatggcgggctgcaggtcccgagccctgccccgcgggaaggcagctaaggcccggtgagaaatcgagcgcagcgcctgtaggctggcactgttgggggacccggtacaccctccgcagccgctggcccgggtgctaagcccctcattgccctgggcgacagggccggccggctgctccgagtgcgggcccgccaagcccacgcccacccggaactccagctggcccgcaagcgccgtgcgcagccccggttcccgctcgcgcctctcccccgacacctccctgcaagctgagggagccggctccggccttggccagcccagaacggggctcccacagtgcagcggtgggctgaagggctcctcaagtgccgccaaagtgggagcccaggcagaggaggtgcggagagcgagcgagggctgtgaggactgccggcacgctgtcacctcagcctccagcatctccggggcacaggtgatggatactcctgagttcagagaagctctagctccacaactcaaagctcctgtccacaccggcattccgctgtgctctctcccctgtgccctgatgtagaagatcctttcttctaagttcccattttctttcctgccttcatatgtctgtacatcatctttcccctgaacccatccatccattatttctacttcctcaagctcttcccattcagttcctacaaactgaatgcgtatatacccttgcctgaagactggtcctcctctactggggatgttggtcctcttcaggcgagtgtgagcttcaggagggacacccat

SEQ ID NO: 2654 - DNA, 1524 bp, Homo sapiens
  SIMILAR (1037)..(1168): 701254mologous to Homo sapiens Human secreted protein, SEQ ID NO: 7678,accession number AAG03597,Smith-Waterman Score=156.
ctagcatttgtgtcgttgtcctgaaacatgatactgtgtcacagacatccagggctggtcagtagctgagctcccacttgcttctgaagctctctgaggagtcgtgctgccattagatactggagtctgaagccagagttctggagctgagaggtccaagatcaaggcatcagcagatttggttgtttggatagcgctgctctcagtcgcattgctgcgtcccacagtggggagggatgctgtgtcctcacctgcagacttaatcccacatggaagccgccaagggttatggcttgcacctttaggagcagcatcctgagctacacctttgctccagttcccaatgaattctttgtatctatctgagaccttatcagtgtggcctttactatccatatttctatcaacattttggtgacaacaacttaacaattctctaagaagtaccaaactttccctcatcttcctgtcttcttctgagcctccaaattcttctaagctctgctcattacccagttccaaagccactttcacaccttcaggaatctttatagcaatgccccactcttctgtatcagttttctgtctgtccatttttgttgctataaaggaatatctgaggagtcctgaaggttgttcaggaagcataatgttggcatctggatctggtgagggcctcaggaagtttataatcatggtggaaggagaaggggagccagtatatgttatggcggcgctgcgctcgatttctcgccgggccttagctgccttcccgcagggcaggggttgggacctgcagtccgccatgcttgagcccccgcccaccccgtgggctcctgtgcggcccgagcctccccgacgagcaccgccccctgctccacggcgcccaatcccatcgaccacccaagggctgaggagtgcgtgcgtcacggcgcgggactggcaggcagctccacctgcagccctggtgcgggatccactgggtgaagccagctgggctcctgagttctttgggtccacactgcctttatgagctgtaacactcaccgggaaggtctgcagcttcactcctgaagccagcgagaccacgaacccaccgggaggaacgaacaactccagacgcgcctccttaagagctgcaacactcaccgtgaaggtccgcagcttcactccgcgagggtccgcggcttcattcttcaagtcagtgagaccgagaacccaccaattccggacacaatatagtccaaggatgtcaaaaatacgtgattgcagtagaagttgttcatttattagttttctggcttcgtggagaattatctgccttctctgagtattgatttcattgtgcgcatggtgaagatatcgcctgttctggcccctgccttcttcttgaaagacagtcataaagttaccctctgatccaactctctgtgtcacatcttgcacctggagtccttcaattgtctgttctcctccaatgtgcttacaagtgaaatcaatgggcttctttacactttcctgcat

SEQ ID NO: 2655 - DNA, 5052 bp, Homo sapiens
  SIMILAR (28)..(531): 571254mologous to Mus musculus putative,accession number AK006236,Smith-Waterman Score=471.
atggaggagaaaacaacccagagcgtagaaggactaaaacagtactgtttggtacctgagagagagatgaaacacatagaaaggcacatacatcaaacaggaaaggctggagaatttaagaacaaaccatttagacaagtactacaaccccccaatgaaacaaaattaccaaaaattatgccagaagggcatggcatccagaacgcacagagaagaaagcaggtaaatgagagggaacagatgcagactaaggatcaccaggaacgcatgattcgagggagagaacttgcagaacaaagactcaaggagagaatcttgagaagaagccagagccagctacttacatatgagaagcatgagagagtaaaagagataaaggagtttgaaagagttattgcgtatcttcttttccaaccatgcagtagaagtcggattaaagtgagtattcttatggataagtctcagaatggagagaaggtgaatacaattgtgaaaccatatcaaagaaaattcttggcaatgccaccctttttaagaagtcaaataggaaaaataagagattaaagtttcaatgctgttatgataaaatcatatctcttaagtgaacccttttttttttcaaatgctcgttctctccagggttcagtgaatattcccatttgtatcagatacagatagatagttctgcacttgaaaattagcttaacttttttagttgacttgcatttgttcaagttgcatatcctttctagtgttcagtgtcctcatctttaaaatggcaataatatttgatggcatttatggaaggactgttttttttgtgaagtgtaggtatgtattagttgtttcataaatgttagtttccccacttggaaagaccggggttgggcaatggtggtgaataaagaattgttctaatctacttctcttattctccctgttcccagccctccaaggttattttgatgagattgctatagtttagtatatggtctttaatatcataccttcatcagataactactagccagcccctaaaagtgtaacttgctctgtacaatttatttgaatgagaaacttaattttgagagcctcctacatgctaggcattatgttagttactgaaggtgaataaagagaagtctctgcccttgaataattttcaactaatggcatagatcactctataaacagataatgtagtaaataaaggttacaatagaaaggtacagggtgctttacaaaggacggattctaacctggcccaggtgagcagggtgaaaaggaggaaggttagggaagggagtattatagtctgtcatgtttcttccagctttttttgtcacttcctatcacccacttaagcaagaccttcctaatgcttggatccactcagggataatcaaactcagcctttctcaaactcatgtttttggcactcattgataaatcagaaagcaaatttataaatttagtgagaattacagttgtcaagcagaatgaaatttgtgttttctagtcagtttattttcttcccagataccagaaagttgggaaagcaggggttcagagttggtaagcagagaagcaaataaatggaaatagatgccctcaggaatattatgcttaagttgtgataattctgatgcccaccttgctttactagcagaacaccctttaccctggatactgctaggtcagccactgatacaaatgttctgtgtctgtgctcctcagtacagtagcccttgctacacgtggctgttgaggcatttaaaatgtggctggtgcagctgtggaatggaatgtttaattgaatttcatttaaatttaaattgccacatgtggcaagtgactaccctgttgcacagtgtagcactggataaacataacttctgtgttctagattccagtcccaccattagctttctgtttttgacagtgtttgctggtatgataggtcactgttcattttacattactatcagtttagtttcctttgcatttcagaggctccctaatcccttaaagagatttaaaaatcaatgtagaccacttctgtgtgaaaataagatgactgaatttgctttgattggaattaggaactgacctctctttgctagttctggaatttggccaggatgcacatcaaaatctcattcctaccctcctgatttgcctcatggaaacttcgttgctgtgtctgttctctggtcctctattgctatgtctcagctttagattctatgttttgcatagaaatggatcatcagaatgcaacaggcagaagacttagaagtgcaaatcagtagggtaatgacaagccctttgagctgagtgggactgaaaagtaacctaacatataacctattagtaattgtttaccatgaaggttttcagtgctggacacataaattgctgagttcaactgccctctttcccctccaaatctagcataaaagcaactggtgctctcagggcaatttcacacctaatacggctaagaataaaagtctatgtttcaggaactcagtttgtccaaacctgcatccatcatctacctcaaattatatccaccttttcatttctttgcactgtgtctgcttaaatcttgagtcacacttaatgttttttttttggtcttttttctttttaatgtgaaatagaatatacaatacacaaatgaaaatgtatatttagaagaacaataataaatgtccaggtgcctgttgctcagactgagaaatggaacattactacatcccaggagcctcgtatgctctcattcatatctctctcccctgcagccagaggcaaccactatcctgaattttgtataactgtcacctagcttttatagattttactgtctgtgtatccctaacagttgcttatttatagcctttatataaatagaattatactgtatatgactgactacttttgctcattattatttttggattcatccatgttgatgtgtgacactgtagttcatttccatgacatgaatatgccacaacttaattatatattctgttgatgtcatttagttgtttccagtttttgttttatttttcttttaaaaatgatacttagataaacattaacatgtttaatcttatgttctggtgactgtgtactagatatatgtatgatatataaattgtggtacatttatttgacaggcctgatcttgaagcctgttagatttctgttcctttgtggcattatgcctgtaagcctgttctgtagagtctggcacatgttagcctcttaatagatatttgttgaaagaaaggacatttgttaactgctggagacaggcccaaaatacataaatagctgataacagaccactttagctttttactcatcttgtccaggtacaatcatagtcaacctctgtttatgcttatatttcagttgaggtactaaaatatttgtttacttagttggttttcagtgagcttccagtacaggatttgtttctctttctgtcacttttcccaaaactttcactccactgccttctagaaaagatcacccacatgtcatctcctcaaggcacctgcagcacgaaagttttatttctgaacaaaagggtccccagagaaggagacaaggagtctcctttcagtacgaggttgctggagtccctagagggtcaaaggctgtgtaataacagttccttcttgtctgctggacaaaagcttctgagccctcaagcaccctgtgacttagttctgatagagtactgagtttggaaatggcagagtggggacccaaaacaaatcttccaattccaaattcagttttatccaccttttcaaataagattaaaaaatgttaatgtctgttgatttgtgtgtgttgaaccactcttgtatccctgggatgaatcccaattaattgtggtatatttttgatatgttgttggattcagtttgctaaaattttgttcaggatttttgtgtatattttcactaggaagattggcctgtaattttctttttttttgtattcttctctgcttttggtatcagggcaatgcaggcttcataaaatgagttaagaataattccttcctcttcagttttttttaaatattttgagaagtattggtattaatttttctttgtatgtatggtagaatttgacaggaaagccatctggtcctgggcttttctttattgagacacttttaattactgattcagtcttattactcattgttggtctgttcaagttttctatttgttcctggtgaaatgtctacaaaaataacaaaaattagctgggtgtggtggcatgtgcatgtagtcccagctacttagggggctgaggcaggaggatcgcttgaacctcaggaggttaaggctgcagtgagctggtattgcgccactgtgttgcagcctgggtgacaaagtgagaccctatctcaaaaataaaaaaaattcatatggaaccacaaaagagccccatccaatagttaagctatagtaatagctttgtaactgttatagtagaaaccaaatcatcatggtaccggcctaaaacagacacatagaccaatggaaagaatagagaacccagaaataatttcatatacttacagccaactgactttcaacaaaggcaccaagaaaggacacccttttcaataaatggtgctgggaaaactggatatccatatgcagaagattgcagctaggctcatatctcttaccatattaaaaaatcaaccaaaaatggattaaaggcttaaatgatagatccgaaactatgaaactactaaaagagaatataggggaaatgctcaagaacattggtctaggcaaagattttatggttaagacatcaaaagcataggcaacaacaacaaaaaataggcaggtgggactatattaaactaaaaatctgcacagcaaagaaaacaacagagtgaagagaccaactgtagatgggaacaatattttcaaattatccaacaggggactaatatccagagtgtacaaggaacacaattcaacagtaaaaaaaaaaaaaaaa

SEQ ID NO: 2656 - DNA, 972 bp, Homo sapiens
  SIMILAR (7)..(279): 781254mologous to Oryctolagus cuniculus cyclophilin 18,accession number AF139893,Smith-Waterman Score=362.
tcacccatgatcaaccccaccatgttcttcgacatcgccgtcgatggtgagcccttgaggtgtgtctcctttgagccttttgcagacaagtttccaaagacagcagaaaactttcatgctctgagcattggagagaaaggatttggttataagggttcctgctttcagataattattccagggtttatgtgtcagggtggtgacttcacacgccataatggcactggtagcaagtccatccaagttattccttgccccaaagaaaaccacctgcagaagatacctcatctgtcgcaggcagcctacagcatattctcgaacgtactggtctggatagttgaaatccagaagctctagggcctcccgggggggcagtttaggccaaatctgaagcagcgcctgaagcactgcactgtgggagccactttctgggctagccaaggccggagccggctccctcagcttgcaaagaggtgtggaggcaggcgctggcgggaacctggtctgtccgtggcgcttgcgggctagcgcgagttccgggtgggcgtggcctcggcagacccggcattcggagcagctggccggccctgcccgcaggggcaatgaggggcttagcacaccggccagtggctgcggagggtgtactgggttccccagcagtgccagcccaccggcgttgcgctcgatttctcgcccggccttagctgccttcccgcggggcagggctcgggacctgcagcccgccatgcctgagcctcccaccccctccgtgggctcctgtgcggcaagcggagcctcccagacgagcgccgccccctgctccctggcgcccagtcccatcgaccacccaagggctgaggagtgcgggcacacggcacgggactgccaggcagctccacctgcagcaccggtgcaggatccactgggtggaagccacctgggctcctgagtcgcgagggtccgcggcttcat

SEQ ID NO: 2657 - DNA, 993 bp, Homo sapiens
  SIMILAR (297)..(4): 591254mologous to Homo sapiens PRO2221,accession number AF116695,Smith-Waterman Score=290.
tcatgctgtgtttttcatctctatcaggtcatttatgtttttctttaaactggttatactagttagcaattcctctaaacttttttcaacgttcttagtttccttgcattgggttagaacatgctcctttagctcagaggagtttgttattacccactttctgaagcctacttctgtcaattcatcaaactcattctctgtccagttttgttcccttgctggtgaggagttgtgatcctttggaggagaagaggcattctggtttttggaattttcagcttttctgcactggtttttccttatcttcatggatttatctacctttggtctttgctgttgttgacctttggatggggtttctgtgtggacatcctttttgttgatattgatgctattcctttctgtttgttttcctttgacttcaagaatgaagccgcggacactcgcggtgagtgttacagttcttaaaggcggcgtgtccggagtttgttccttctgatgttcggatgtgttcagagtttcttccttctggtgggtcggtggtctcgctggctcaggagtgaagccgcagaccttcacagtgagtgttacagctcttaaggcaggacgtctggagttgtttgttcctcctggtgagctcgtggtctcgctggcttcaggagtgaagctgcagaccagactcaggagccctgctggcttcacccagtggatcccgcacgggggctgcaggtggagctgcctgccagtcccgcgccctgcgcctgcactccgcagcccttgggtggtcgatgggactgggcgccttggagcagggggcggtgctcgtaggcgaggctccagccgcacaggagcccacggggttgggggaggctcaggcatggcgagctgcaggtcccgagcctgcccaggccgctggggccagccggcggctccgagtgcggggtccgcggagcccacgcccaccgggaactcgcgctgctggcctgcaagcat

SEQ ID NO: 2658 - DNA, 599 bp, Homo sapiens
  SIMILAR (597)..(373): 721254mologous to Mus musculus Pro-Pol-dUTPase polyprotein,accession number Y12713,Smith-Waterman Score=266.
caccaccagactagagtctctactacgaggcttatcacaggatgtgtcagggaagtataaaacttgagctagatacagagtgccgattggtgtatttacaatccctgagctagacataaaggtcctccacgtccccaccagagcagctagatacagagtgtccattggtgcactcacaaaccttgagctaaacacagggtgctgattggtgtatttacaatccctgagccagatataaagactctccacgtccccaccagactcaggagcccagctggcttcacctagtggatcccacaccggggctgcaggtggagctgcctgccagtcccggtgccgtgcgcccgcactcctcagcccttgggtggtggatgggactgggcgcggacccaccagacccactgtaagttggatctgagctaaaactccattaattacctgacatccatgagcctctactttaactggaggactgcaacgacattttgggtcccctggaatcaatgtcagctcagagccagtgttcagtagtccccaaaatgtctgatcaattccctttctccatagcacagttaccctgggaaaaggccacaggtctc

SEQ ID NO: 2659 - DNA, 1021 bp, Homo sapiens
  SIMILAR (831)..(568): 641254mologous to Homo sapiens unnamed protein product,accession number AX088212,Smith-Waterman Score=312.
ttaggtaggaagacactttgaagaacttgacaagctatataggcatgatgtgttgagtcctatctgttctttccaggggacgtagacaggttgaggttggaatgggccatagtcaggaaccaattcatgagtaggcaacaccaccaagaagcagaatcgaaacacaaagtcagagtcacaaagagtgatggcttgggcaaatggagattcaaaatcatgtgccaaaaatccagatggagttgtgtgggcagcattctgctgcagcggtgtctctgctaaaggccggtggcagagcccttcaagaatgaagccgcggaccctcgtggtgagtgttacagttcttaaaggaagcgtgtccagagtttgttccttctgatgttcggatgtgttcggagtttcttccttctggtgggttcgtggtctcgctggcttcaggagtgaagccacatcctgctgattgatccattttacagacagcagagtggtctgttttgacagggcactgattggtgcatttacaagccctgagctagacacaaaggttctccaagtccccaccagagtagctagatacagagtgtcgattggtgcattcacaaacccagactcaggagcccagctggcttcacccagtggttcccgcactggggccgcaggtggagctgcctgccagtcccgctccacgagcctgcactcctcagcccttgggtggtcgatgggactgggcgccgtgaagcagggggcggagcttgtcggggaggctccggccgcgcaggagcccgtgaagcgggtgggaggctcaggcatggcgggctgcaggtcccgagccctgcccggcgggaaggcagctaaggcccggggagaaatcgagcgcagcacagcctacctgaagaggcctgctaacacatttggacggaatccttttgttctgtcacccacactctggtcccagcagtgccggtgggaagatacacgggaccatgactgcccacgggttgcccactcaagccactctctgtaa

SEQ ID NO: 2660 - DNA, 801 bp, Homo sapiens
  SIMILAR (46)..(609): 621254mologous to Homo sapiens hypothetical protein,accession number AL162044,Smith-Waterman Score=546.
ctagatataaagactccccacatccccaccagactcaggagtccagctggcttcacctagtggatcccgcaccgggactgcaggtggagctgcctgccagtcctgcgccgtgcgctcgcattcctcagcccttgggtggtcgatgggactgggcgcagtggagtagggggtggtgctcctaggggaggctcgggccgcacaggagcccatggagtgggtgggaggctcaggcatggcgggctgcaggtcccgagccctgccccgcgggaaggcagccaaggcccagcgagaaatcgagcacagtgccggtgggccggcactgctgggggactcagtacaccctccgcagccactggcccgggtgctaagtcccccattgcccggggccagcagggcttgctggctgctccgagtgcggggcccaccaagcccacgcccacccggaactccagctggcccgcaagcgccgcacgcagccccggttcccgctcgtgcctctccctccacacctcccttggtccacttgacaaacgatgttctaagagtgaaggtcaagtgggcctttttctttacactccacaagtagctcaaaacattccacactgcagtctttgtcagatttggtccgtggcttcctgatacaggattttgctcttctttgagtttccagttttcttttttaatttccctggatactcttccatatagaaagggagtcatctgtttattggaggcattggatgatctgctgtttttcttggttgagacttggtaccaccaagaagcagtcagtgccctcat

SEQ ID NO: 2661 - DNA, 2217 bp, Homo sapiens
  SIMILAR (964)..(1740): 991254mologous to Homo sapiens monocarboxylate transporter homologue MCT6,accession number U79745,Smith-Waterman Score=1324.
ttgggggtttattctcttcccttctaacttgacagggtcttgctctgtcattcaggcaagagtgcagtagtgtgatcacttcttactgccgcctcaagcttccagcctcaactcaagcaatcctcccacctcagccacccaagtggctgggactacagattaagaatgacccaaaataaattaaagctttgttccaaagccaatgtgtatactgaagtgcctgatggaggatggggctgggcggtagctgtttcatttttcttcgttgaagtcttcacctacggcatcatcaagacatttggtgtcttctttaatgacttaatggacagttttaatgaatccaatagcaggatctcatggataatctcaatctgtgtgtttgtcttaacattttcagctcccctcgccacagtcctgagcaatcgtcatcggacaccgtctggtagtggatgttgggggggctacttgtcagcaccgggatggtggccgcctccttctcacaagaggtttctcatatgtacgtcgccatcggcatcatctctggtctgggatactgctttagttttctcccaactgtaaccatcctatcacaatattttggcacccgacgttccatagtcactgcagttgccttccacacggagaatgtttcgctgtgtttgctttcgcaccagcaatcatggctctgaaggagcgcattggctggagatacagcctcctcttcgtggggcctactacagttaaacattgtcatcttcggagcactgctcagacccatctttatcagaggaccagcgtcaccgaaaatagtcatccaggaaaatcggaaagaagcgcagtatatgcttgaaaatgagaaaacacgaacctcaatagactccattgactcaggagtagaactaactacctcacctaaaaatgtgcctactcacactaacctggaactggagccgaaggccgacattgcagcaggtcctggtgaagaccagccccaggccaagcgaaaagaaagccccgctattagacttctccattttgaaagagaaaagttttatttgttatgcattatttggtctctttgcaacactgggattctttgcaccttccttgtacatcattcctctgggcattagtctgggcattgaccaggaccgcgctgcttttttattatctacgatggccattgcagaagttttcggaaggatcggagctggttttgtcctcaacagggagcccattcgtaagatttacattgagctcatctgcgtcatcttattgactgtgtctctgtttgcctttacttttgctactgaattctggggtctaatgtcatgcagcatattttttgggtttatggttggaacaataggaggactcacattccactgcttgctgaagatgatgtcgtgggcattgcagaagatgtcttctgcagctggggtctacatcttcattcagagcatagcaggactggctggaccgccccttgcaggtttgttggtggaccaaagtaagatctacagcagggccttctactcctgcgcagctggcatggccctggctgctgtgtgcctcgccctggtgagaccgtgtaagatgggactgtgccagcgtcatcactcaggtgaaacaaaggtagtgagccatcgtgggaagactttacaggacatacctgaagactttctggaaatggatcttgcaaaaaatgagcacagagttcacgtgcaaatggagccggtatgacacactttcttacaacaacagccactgtgttggctggagagggatggggtgggcccaacggggacacaaggaggcagaggagctaacccctctactccactttcaaaactacattttaaagggaatgtgtatgtgaagagcactaccaacatcgcttttgttttgttttgttttgttttaagctttttttttttgcttgtttttaaagccaaaacaaaaaacaaccaagcactcttccatatataaatctggctgtattcagtagcaatacaagagatatgtagaaagactctttggttcacattccgatattaaaatagtgacatgaactggcaaagtggttttaaaagctttcacgtgggataaatgattttctttttttcttttctttcttcctatggtcttgtctgaataaactactctcctgaataaaacaacatccaacccaggtcattgaaatgaaattggccagtc

SEQ ID NO: 2662 - DNA, 2475 bp, Homo sapiens
  SIMILAR (1036)..(2280): 851254mologous to Homo sapiens monocarboxylate transporter homologue MCT6,accession number U79745,Smith-Waterman Score=1722.
ggatttgtcttcttgctgctgctggctcccttatctaggttagagttccacaagagcagagggctaaaaaatgtctttgaaggactggaagcagaagagtgtttctacaaagttcaccttgatggaggtgaggaagaactggagtgggtgagaccagatgcagaaactaccacccaccaagggcgcgtatctcaggaaaagcatcaagctctaggatgcaagtggccaaaactctgtggagatgccctatgcgtcatcctaagcgcgcccagtcccatcgaccacccaaaggctgaggagtgcaggcgcagggcgcgggactggcaggcagctccacctgcagcgccggtgcgggatccactgggtgaagccagctgggctcctgagtctgggcagcagatgaaagaagcagctgagttaggagtctcttgcatgggtccagatctggagaaattaacgctctacgaggttaaattacgcctacaaggttgcaaagctgctcagcggccccttggctgtacactactggccatacaaggcaccctgtaccaacgaatcttctccccacttacacaaccagaacttgtcaacggcaaaggatggcatttaactcaggagagcctatcccaaaatggctctcttgagtttctgacatcagaaccacattctccgaaccccaatgaaggcagcagccggcgccaaagtctgcatacgaatgcaaataacatggcctttgcttccgagcagtttccaaatttgccctcgggatcgggaagccggggatttcccggcagagcgcgggtcctccacctggactgtcagaactgtcagcggctgacggccggtcccgcgcaacttcaaggttcccgggctgccaaccgcaggaaagcgctggtgtcgccaagcagttccgtagcaagggaagatggttttgcagaggaaatggtcttcacctacggcatcatcaagacatttggtgtcttctttaatgacttaatggacagttttaatgaatccaatagcaggatctcatggataatctcaatctgtgtgtttgtcttaacattttcagctcccctcgccacagtcctgagcaatcgtttcggacaccgtctggtagtgatgttgggggggctacttgtcagcaccgggatggtggccgcctccttctcacaagaggtttctcatatgtacgtcgccatcggcatcatctctgcaatcatggctctgaaggagcgcattggctggagatacagcctcctcttcgtgggcctactacagttaaacattgtcatcttcggagcactgctcagacccatctttatcagaggaccagcgtcaccgaaaatagtcatccaggaaaatcggaaagaagcgcagtatatgcttgaaaatgagaaaacacgaacctcaatagactccattgactcaggagtagaactaactacctcacctaaaaatgtgcctactcacactaacctggaactggagccgaaggccgacatgcagcaggtcctggtgaagaccagccccaggccaagcgaaaagaaagccccgctattagacttctccattttgaaagagaaaagttttatttgttatgcattatttggtctctttgcaacactgggattctttgcaccttccttgtacatcattcctctgggcattagtctgggcattgaccaggaccgcgctgcttttttattatctacgatggccattgcagaagttttcggaaggatcggagctggttttgtcctcaacagggagcccattcgtaagatttacattgagctcatctgcgtcatcttattgactgtgtctctgtttgcctttacttttgctactgaattctggggtctaatgtcatgcagcatattttttgggtttatggttggaacaataggagggactcacattccactgcttgctgaggatgatgtcgtgggcattgagaagatgtcttctgcagctggggtctacatcttcattcagagcatagcaggactggctggaccgccccttgcaggtttgttggtggaccaaagtaagatctacagcagggccttctactcctgcgcagctggcatggccctggctgctgtgtgcctcgccctggtgagaccgtgtaagatgggactgtgccagcatcatcactcaggtgaaacaaaggtagtgagccatcgtgggaagactttacaggacatacctgaagactttctggaaatggatcttgcaaaaaatgagcacagagttcacgtgcaaatggagccggtggtgcgccggcggttcgcagctgctgggcccgccggcctgggcgcagccggggacagcgacgcgtttcctgcccgggaagggcccgagcgcagggccggctatagcggtcccgcagctgcctgcttcgattttagcactgctgctcccaagagggagcaacgcggccctctgtccctcgtagggcttgaaatgtaa

SEQ ID NO: 2663 - DNA, 3664 bp, Homo sapiens
  SIMILAR (1607)..(2545): 671254mologous to multiple sclerosis associated retrovirus polyprotein,accession number AF009668,Smith-Waterman Score=1069.
tcagtgccacagcagtaccgagctgctgcttgatctcacacccctctgcatctcacacatcattgtccctctgcgtgcagttggtgatctctcctgctctcctttaattaactgccaggcagctgccttcccacctctctggtgttgtctcctttccagatgcctctggcagtcagattggggcccatgattcatttggggcaatgaaaacttgtggtacttccaagtagaagcatcaagagcaggcatgtctcctccatctctcctttccttgtgaaagcgacctggttggtgcaggcattggatgggagaggccatgtgatccacactgtatttgccagcaatggatacaaaccaagaagaaatccctgatttactcgctcttggcacctctgcctggtcttccactttggcggcacttgaggagcctttcagcctaccgctgcactgtgggagcccctttctgggctggtcaaggcctgagctggctccctcagcttgcagggaggtgtggagggagaagcctgagtgggaactggggctgcgcacggtgcttgcgggccagtgcgagttccgggtgggcgtgggctcgggggactccactaggagcagctggcctcccctgctggccccgggcaatgaggggcttagcacccgggccagcagctgcggaggatgtactgggtcccccagcagagccggcccaccagtgctgtgctcaatttcttgccaggccttagctgccttcccacggggcagggctcggggcctgcagcccgccatgcctgagcctccccctcgcctccgtgggctcctgtgcagcccggagcctccccgactagtgccaccccctgctccagggcacccagtcccactgaccacccaagggctgaggagtacgggcacaaagcaccgggactggcaggcagctccacctgcagccccggtgcgggatccactgggtgaagccagctgggctcctgagtctgctaatctggtggggaagtggagaacctttgtgtctagctcagggactgcaaacgcaccaatcagcaccctgtcaaagcagaccactgggctctaccaatcggcaggatgtgggtggggccagaatttgggggctaaataccgggcacctgtcggccagttaaaagcgactagcacggccgccagactaaagacacgggtgtcaggctttctgggaaagggctctctaacaacccctgactcttcagagttgggaccgttggatcccacagaccacacttcccaacttacatggacggtcttgcctcaggggtttagggatagccctcatctgtttggtcaggctctggcccaagatctaggccacttctcaagtccaggcactctgatccttcaatatgtggatgatttacttttagctaccagtttggaagccttgtgccagaaagctactctagatctcttgaactttctagctaatcaagggtacaaggtgtctaggttgaaggcccagctttgcctacagcagcgagatagccaggcccctctatactctaatcaaggaaacccagagggcaaatactcatctagttgtatcggaaccagaggcagtaatcccttcgaaaccttaaagcaggccctagtacacgctccagctttaagccttcccataggacagaacttctctttatacatcacagagagagccgggatagctcttggagaccttactcagacttgtgggacaaccccacaaccagtggcatacttaagtaaggaaattgatgtagtagcaaaaggctggcctcactgtttaagagtagttgcagcagtggccatcttagtgtcagaggctatcaaaataatgcaaggaaaggatctcactgtctggactactcatgatgtaaatggcatactaggtgccaaaggaagtttatggctatcagacaaccacctactaagataccaggcactactccttgagggactggtgcttcaaatatgcacttgcgtggccctcaacactgccacttttctcccagaggatggggaaccaattgagcatgactgccaacaaattatagtccagacttacgccacccgagatgatctcttggaagtccccttaactaatcctgaccttaatctatataccgatggaagttcagttgtggagaatgggatacgaagggcaggttatgcaatagttagtgatgtaactatacttgaaagtaagcctcttgtcccagggacaagtgcccagttagcagaactagtggcacttacccgagccttagaactgggaaagggaaaaataataaatgtgtatacagatagcaagtatgcttatctaatcctacatgcccatgctgcaatatggaaagaatgggagttcttaacctctgggaacccccacggatgccacagggaagttatggagttattgcacatggtgcaggaaacaaaagaggtgggagtcttacactaccaaagccatcagaatgggaaggagaggggagaacagcagcgtaagcagctggcagaggcctcagctgccttcctctggggcagggctctggacttgcagcccaccatgcctgagcctcctatcccctccatgggctcctgtgcggcccgagcctccccaacgagtgccagccctgctccacggcgcccagtcccatcgaccacccaaaggctgaggagtgcaggtgcatggcacgggactggcaggcagctccacctgcagccccggtgctggatcaactgggtgaagccatctgggctcctgagtctggtggggcctcggagaacctttatgtctagctcagggattgtaaatacaccagttggcactctatctgtagctcaagctaatctggtggggacatggagaacctttgtgtctagctcagggattgaaaacgcaccaatcagcgccctctcagaccactgggctctaccaatcagcaggatgtggagctgtattccaattttcgctgctcttaaaattttttttaatatcattgcttcccaattgactcacaataacgcagacatagggactgctggagactgtgaccttaaacagttaaagatgtctgcatatacgacatcatgtttgatgggggtgcagggcggtttgccgctgccaccctcggcaccatctctgaactgcccgcttttccggaggagcggaaaagttggaagccgaaaagacaggcgcccggagccctggtctaggtatcaggtgatccggagccctagtcggtgcccactaagaacaccccttctcccatcgggggttcggaggagtgttaagcctgcgggtctgccagtccctaaggcggaactgaaagcgaagatcagccaagagcacagtcggaggcggcagagacggtggcggcctgacctggctctttcgcccctcggagaaccggatcacaactcctcacaagcaagggaacaaaactggatggagaatgagtttgatgaattgacagaagtgggcttcagaacgtgggtaatagcaaattcctctgagctaaagaagcatgttctaacccaatgccaggaagctaagaaccttgaagaaaggttagatgaatttctaactagaataaccagattagagaagaacataaatgacctgatggagctgaaaaacacagcatga

SEQ ID NO: 2664 - DNA, 3555 bp, Homo sapiens
  SIMILAR (1)..(1071): 1001254mologous to Methylomonas aminofaciens transposase,accession number AB026428,Smith-Waterman Score=1893.
atgtgcgaactcgatattttacacgactctctttaccaattctgccccgaattacacttaaaacgactcaacagcttaacgttggcttgccacgcattacttgactgtaaaactctcactcttaccgaacttggccgtaacctgccaaccaaagcgagaacaaaacataacatcaaacgaatcgaccgattgttaggtaatcgtcacctccacaaagagcgactcgctgtataccgttggcatgctagctttatctgttcgggcaatacgatgcccattgtacttgttgactggtctgatattcgtgagcaaaaacgacttatggtattgcgagcttcagtcgcactacacggtcgttctgttactctttatgagaaagcgttcccgctttcagagcaatgttcaaagaaagctcatgaccaatttctagccgaccttgcgagcattctaccgagtaacaccacaccgctcattgtcagtgatgctggctttaaagtgccatggtataaatccgttgagaagctgggttggtactggttaagtcgagtaagaggaaaagtacaatatgcagacctaggagcggaaaactggaaacctatcagcaacttacatgatatgtcatctagtcactcaaagactttaggctataagaggctgactaaaagcaatccaatctcatgccaaattctattgtataaatctcgctctaaaggccgaaaaaatcagcgctcgacacggactcattgtcaccacccgtcacctaaaatctactcagcgtcggcaaaggagccatgggttctagcaactaacttacctgttgaaattcgaacacccaaacaacttgttaatatctattcgaagcgaatgcagattgaagaaaccttccgagacttgaaaagtcctgcctacggactaggcctacgccatagccgaacgagcagctcagagcgttttgatatcatgctgctaatcgccctgatgcttcaactaacatgttggcttgcgggcgttcatgctcagaaacaaggttgggacaagcacttccaggctaacacagtcagaaatcgaaacaaggaagttgaagtcaatgatctctcaggtctcatctcagatgtggtgatgtcaccaattcccctgacatcccttctatgtgggaaccctgatgaaatccgcagctttccctcactgtgtccagaatgcactgaaggcccaattgacctggtctttgtgatcgatggatccaagagtcttggagaagagaattttgaggtcgtgaagcagtttgtcactggaattatagattccttgacaatttcccccaaagccgctcgagtggggctgctccagtattccacacaggtccacacagagttcactctgagaaacttcaactcagccaaagacatgaaaaaagccgtggcccacatgaaatacatgggaaagggctctatgactgggctggccctgaaacacatgtttgagagaagttttacccaaggagaaggggccaggcccctttccacaagggtgcccagagcagccattgtgttcaccgacggacgggctcaggatgacgtctccgagtgggccagtaaagccaaggccaatggtatcactatgtatgctgttggggtaggaaaagccattgaggaggaactacaagagattgcctctgagcccacaaacaagcatctcttctatgccgaagacttcagcacaatggatgagataagtgaaaaactcaagaaaggcatctgtgaagggatcaactactgtgcactgaacaaaccgggctgtgagcatgagtgcgtcaacatggaggagagctactactgccgctgccaccgtggctacactctggaccccaatggcaaaacctgcagccgagtggaccactgtgcacagcaggaccatggctgtgagcagctgtgtctgaacacggaggattccttcgtctgccagtgctcagaaggcttcctcatcaacgaggacctcaagacctgctcccgggtggattactgcctgctgagtgaccatggttgtgaatactcctgtgtcaacatggacagatcctttgcctgtcagtgtcctgagggacacgtcgccgcagcgatgggaagacgtgtgcaatcagtcctgggagaagaggatgctcctgagaaacgctttgccctgctttctgaccccggtgatctcacagcacatgaattggactcttgtgctctgggggaccacggttgtgaacattcgtgtgtaagcagtgaagattcgtttgtgtgccagtgctttgaaggttatatactccgtgaagatggaaaaacctgcagaaggaaagatgtctgccaagctatagaccatggctgtgaacacatttgtgtgaacagtgacgactcatacacgtgcgagtgcttggagggattccggctcgctgaggatgggaaacgctgccgaaagagttcctgtgagaacaagcgggcagacctggttttcatcattgacagctctcgcagtgtcaacacccatgactatgcaaaggtcaaggagttcatcgtggacatcttgcaattcttggacattggtcctgatgtcacccgagtgggcctgctccaatatggcagcactgtcaagaatgagttctccctcaagaccttcaagaggaagtccgaggtggagcgtgctgtcaagaggatgcggcatctgtccacgggcaccatgactgggctggccatccagtatgccctgaacatcgcattctcagaagcagagggggcccggcccctgagggagaatgtgccacgggtcataatgatcgtgacagatgggagacctcaggactccgtggccgaggtggctgctaaggcacgggacacgggcatcctaatctttgccattggtgtgggccaggtagacttcaacaccttgaagtccattgggagtgagccccatgaggaccatgtcttccttgtggccaatttcagccagattgagacgctgacctccgtgttccagaagaagttgtgcaccattctagctagcggtaccaatagcaaccggcagctgccctccgcttttgctccgccccttctgcttgcgatctgtttccgcttccggtcccgcagttccggctctgctcgaagagctttgcattgtgggaagtctttcctttctcgttccccggccatcttagcggctgctgttggcaggaagatggtggccgcaaagaagacgaaaaagtcgctggagtcgatcaactctaggctccaactcgttatgaaaagtgggaagtacgtcctggggtacaagcagactctgaagatgatcagacaaggcaaagcgaaattggtcattctcgctaacaactgcccagctttgaggaaatctgaaatagagtactatgctatgttggctaaaactggtgtccatcactacagtggcaataatattgaactgggcacagcatgcggaaaatactacagagtgtgcacactggctatcattgatccaggtgactctgacatcattagaagcatgccagaacagactggtgaaaagtaa

SEQ ID NO: 2665 - DNA, 773 bp, Homo sapiens
  SIMILAR (375)..(413): 921254mologous to Mus musculus putative,accession number AK002988,Smith-Waterman Score=51.
agggattgagccttgacggctgtggaattcggcacgagcggccatcttagcggctgctgttggttgggggccgtcccgctcctaaggcaggaagatggtggccgcaaagaagacggtgagtgaggcgggccaggcccggaagacgattcacgtggagagatgtcttggccagggcgggcagatgtgagcccacgggggtgacagcatgcctgctggcaatttggaggggcccagaaggaatcacagtggccctctcaatgacttggggtcctcgacttcggaagtttaaggggctcggcttcaaaaagctgggtccggttttgaggcggttgcaggcgaggcccttaggtccgtatttaatgtttgctttgtagaagaagtcgctgctgtcgatcaactctaggctccaacttcgttatgaaaagtgggaagtacgttcttggggtacaagcagactctgaagatgatcagacaaggcaaagcgaaattggtcattctcgctaacaactgcccagctttgagtggcaataatattgaactgggcacagcatgcggaaaatactacagagtgtgcacactggctatcattgatccaggtgactctgacatcattaggaagcatgccagaacagactggtgaaaagtaaaccttttcacctacaaaatttcacctgcaaaccttaaacctgcaaaattttcctttaataaaatttgcttgttttaaaaaaaaaaaaaaaaaagtcgacgcggccgcgaatttagtagtagtaggc

SEQ ID NO: 2666 - DNA, 366 bp, Homo sapiens
  SIMILAR (156)..(365): 371254mologous to Peromyscus leucopus reverse transcriptase,accession number U70932,Smith-Waterman Score=113.
aagaaacaaatctttctggaactaataagcatctatagcagagttgcaggatacaaaacatacacaaaagtcagttgctttcctatataacagcaataaacaattgaatttataaattaaaacacaatgccatttatattagcttgcaaaaatagaaacatttacctttaaacttgacaaaataggtacaagagatatatgagggaaactatgacacatttatgaaataaatcgaagatataaacaaagaaatatttcaagttcatgagtaaaaacgctttattaagatgccaattcttcccaatttgatctatagatacaatgcattcccagtcaaaatctcagaaagttacttggtggatatca

SEQ ID NO: 2667 - DNA, 620 bp, Homo sapiens
gctctgaggaattcggcacgagtaccgaccgaggtttacgcagcgcggggagctttgcgggttgccatttgtaactccggatcctaaaattcctgtcctgttctctgtctcttctaggttgggggccgtccccgtctctaaggcaggaagatggtggccgcaaaagaagacgaaaaaagtcgctggagtcgatcaaccttaggctccaactcgttatggaaaagtgggaaattacttcctgggggtacaagccagactctgaagatgattcagacaaggcaaagcgaaatgtggtcattctcgctaacaactgggcccagctttgaggaaatctgaaaatagagtactattgctatgtttggcttaaaactgggtgtcccatccacttacagtgggcaataatatttgaacttggggccacagcattgcgggaaaattacttacagagtgttgcacactgggctattcattgatccagggtgactcttgacatcctttaggaaggcatgcccggaacagacttgttgaaaagttaaacccttttcacctacaaattttcacctggcaaacctttaaacctgcaaaattttcctttaataaaatttgcttgttttaaaaac

SEQ ID NO: 2668 - DNA, 2580 bp, Homo sapiens
  SIMILAR (43)..(1176): 931254mologous to Homo sapiens putative p150,accession number U93564,Smith-Waterman Score=1909.
atgggctcccaccatctggttgtcgtgctcattgaaagtccacagacagagagccaaatcgtgagtgattcacatgcttcaaagagaataaaatacctaggaatccaccttacaagggacgtgaaggacctcttcaaggagaactacaaaccactgctcaatgaaataaaagaggatacaaacaaatggaagaacattccatgctcatgggtaggaagaatcaatatcatgaaaatggccatactgcccaaggtagtttatagattcaatgccatccccatcaagctaccaatgactttcttcacagaattggaaaaaactactttaaagttcatatggaaccaaaaaacagcccacatcgccaagtcaatcctaagacaaaagaacaaagctggaggcatcatgctacctgacttcaaactatactacaaggctacagtaaccaaaacagcatggtactggtaccaaaacagagatatagatcaatggaacagaacagagccctcagaaataatgccacatatctacaactatctgatctttgacaaacctgagaaaaacaagcaatggggaaaggattccctatttaataaatggtgctgggaaaactggctagccatatgtagaaagctgaaactggatcccttccttacaccttatacaaaaatcaattcaagatggattaaagacttaaacgttagacctaaaaccataaaaaccctagaagaaaacctaggcattaccattcaacacataggcacgggcaaggacttcatgtctaaaacaccaaaagcaatggcaacaaaagccaaaactgacaaatgggatctaattaaactaaagagcttctgcacagcaaaagaaactaccatcagagtgaacaggcaacctacaaaatgggagaaaatttttgcaacctactcatctgacaaagggctaatatccagaatctacaatgaactccaacaaatttacaagaaaaaaacaaacaaccccatcaaaaagtgggtgaaggatatgaacagacacttctcaaaagaagacatttatgcagccaaaaaacacatgaaaaaatgctcaccatcactggccatcagagaaatgcaaatcaaaaccacaatgagatatcatctcacaccagttagaatggcaatcattaaaaagtcaggaaacaacagcaaactcccgtttgagccgagcaggaacaaacgcgttatgcctgaaccttgtgcacatacaattctttcttctcttgcacggcccgcttccaaaatgcattcaccgccactctccatggaaccttcagcgggccctgggggcagccagaattttccaaacgaggaagctgaggatcggcccagaaccctgaattttgaggggagtgagacttgggccctcacaggcccagacgcgagatatttcaactacacccgggaggcgcggggtgaaaactccctggtgtcgggcgggtgcaggcccctcgcggccggtcgcgccagagcttccacctcagggtgggcggccaagcgcgtgggcacgctgcagggagggccgctcacctgggcaatgccggcgcccatcagcccgccgccgatgaccgtcacgtgcttgacgattatcttcttggccgaggccgaggcggtggacgaggaggacacggaacgcatgaactgcctggtgacgaaggccatggtgtggcagcggcggcgacagcgaggagacccgggcagggaagacgcgcgaggcgggcagccgcggaaagccagactctgggggcggggacctacgcggccctgcagcccgcgcgcccccggcgtccccgtgacgccacaaggcgggggcggggcctcgagtcccgctctgcccattggccctggctgtaacgtcccagcgttgagcgggtatacacgcgcgggctcgcagctgtcagcagccggagcccgagtgagcgcgggcttgagacctgctgagcagcgggacctggcggctggcgttctgtggcatgccctctcccgtgaagagcaggctaaatattatgaattagcacggaaagaaagacagctacatatgcagctttatccaggctggtctgcaagagacaattataagagaggtatactgtcatgtcacagattgtaccatgaacacacagatgaatgtgatgtggaagtacaggcaggtggtcaacaaagagctttttccagagagcttgcccctcctgttgctgcagttgttcttccagccacatgtactctgaagatgggatcacaatcagtgtctccataccagaaaaggctctgtaactttttggtcatgggagagctctttcctctgccctctcctttgcagttcctagaccaggtcattaaaacaccaatgaccagccagaagacatttgaatctttggtagactttagcaaagccctaggaaagcatcctgtttcttgcaaggttgctgcagcaactggtcacacagtagtgttggtagaccagacagaggacatcctggcaaaatccaaaaagggaattgaggaaagccttaggaaagtggcaaagaagaagtttgcagaaaaccctaag

SEQ ID NO: 2669 - DNA, 1389 bp, Homo sapiens
  SIMILAR (817)..(1101): 1001254mologous to Homo sapiens lymphoid enhancer binding factor-1,accession number AF198532,Smith-Waterman Score=518.
gctccagttactgaaaacaatgggtctccttttggctcccagaatgaattattcccagagccttgtttccttctcgataaaacagaaatcttaacacctaacttaggtatggctttaggattaaatgactgtcaaggggcagtaacttgtgaaatcagaggaagcctgcagatttttgggctgaggaatcttgactgtgatgatgatgtgccacatatccgcagttcaaataaagtgcccgtggtgcagccatcccatgcggtccatcctctcacccccctcatcacttacagtgacgagcacttttctccaggatcacacccgtcacacatcccatcagatgtcaactccaaacaaggcatgtccagacatcctccagctcctgatatccctactttttatcccttgtctccgggtggtgttggacagatcaccccacctcttggctggttttttaatgaacaacttatatttttcaaaaatgaatttagacgcattgaatatctaccgttacttgtaagtgggcaagtgaggcaaggtcagcctgtatatcccatcacgggtggattcaggcaaccctacccatcctcactgtcagtcgacacttccatgtccaggtgtcagagagagtcccgggtaggagctctgcgctgtgccccggccggaccagccacaccatcgggcgatggactcagcctccttggaaagcgttgcctccaaacaaattcatggccgcctgactgtgggatgggaactgtccggaaagcggacattacaagaagagtttgtttgattcaaaatatgccgggggtggggttttcccatcatatgattcccggtcctcctggtccccacacaactggcatccctcatccagctattgtaacacctcaggtcaaacaggaacatccccacactgacagtgacctaatgcacgtgaagcctcagcatgaacagagaaaggagcaggagccaaaaagacctcacattaagaagcctctgaatgcttttatgttatacatgaaagaaatgagagcgaatgtcgttgctgagtgtactctaaaagaaagtgcagctatcaaccagattcttggcagaaggcgtgaccagtatttgtcattgtgcctccccccccgccacatcattcatatgtctataattgtcatcgagatgtggcatgtcagcgggactccagtgttctctgctccccgtcttcacacagtcactcagcttctctctggccagttctgctcagcaggaggtcgtttgatcaaagccctgggaaaggtcagacattcctggagtggtgacactcagccggctgcaagagctgcccttacagaaccttgtactgcagaagctgtagctcaaatggagaggcttttctag

SEQ ID NO: 2670 - DNA, 2669 bp, Homo sapiens
  SIMILAR (971)..(1417): 741254mologous to Gallus gallus transcription factor LEF- 1,accession number AF064462,Smith-Waterman Score=554.
gcggccgccgggcattcgggcgccgcggcagctgcatccggctgccggccggcggcccgacgcgtcagcccgcccccgcttccgcccgactgtcctgctgcacgaccccttccaactctcctttcctcccccacccttgagttacccctctgtctttcctgctgttgcgcgggtgctcccacagcggagcggagattacagagccgccgggatgccccaactctccggaggaggtggcggcggcgggggggacccggaactctgcgccacggacgagatgatccccttcaaggacgagggcgatcctcaggagggaaaagatcttcgccgagatcgtcaatcccgaagaggaaggcgatttagctgacatcaagtcttccttggtgaacgagtctgaaatcatcccggccagcaacggacacgaggtggccagacaagcacaaacctctcaggagccctaccacgacaaggccagagaacaccccgatgacggaaagcatccagatggaggcctctacaacaagggaccctcctactcgagttattccgggtacataatgatgccaaatatgaataacgacccatacatgtcaaatggatctctttctccacccatcccgagaacatcaaataaagtgcccgtggtgcagccatcccatgcggtccatcctctcacccccctcatcacttacagtgacgagcacttttctccaggatcacacccgtcacacatcccatcagatgtcaactccaaacaaggcatgtccagacatcctccagctcctgatatccctactttttatcccttgtctccgggtggggttggacagatcaccccacctcttggctggcaaggtcagcctgtatatcccatcacgggtggattcaggcaaccctacccatcctcactgtcaggcgacacttccatgtccaggttttcccatcctaatgattccgggtcctcctggtcccccacacaattggcatcccttcatccagctattgtaaccacctcaggtccaaacaggaccatccccaccactgccagtgacctaatgcacgtgaagcctcagcctgaacatgagaaaggagcaggagccaaaaagaccccccactaagaaggcccttgaatgcttttatgttatacatgaaagaaatgagagcgaatgtcgttgctgagtgtactctaaaagaaagtgcagctatcaaccagattcttggcagaaggtggcatgccctctcccgtgaagagcaggctaaatattatgaattagcacggaaagaaagacagctacatatgcagctttatccaggctggtctgcaagagacaattatggtaagaaaaagaagaggaagagagagaaactacaggaatctgcatcaggtacaggtccaagaatgacagctgcctacatctgaaacatggtggaaaacgaagctcattcccaacgtgcaaagccaaggcagcgaccccaggacctcttctggagatggaagcttgttgaaaacccagactgtctccacggcctgcccagtcgaccccaaaggaacactgacatcaattttaccctgaggtcactgctagagacgctgatccataaagacaatcactgccaacccctctttcgtctactgcaagagccaagttccaaaataaagcataaaaaggttttttaaaagggaaatgtaaaagcacatgagaatgctagcaggctgtggggcagctgagcagcttttctccccccatatctgcgtgcacttcccagagcatcttgcatccaaacctgtaaccttgcggcaaaggacggtaacttggctgcatttgcctgtcatgtgcaactgggagccagcaaccagcacatccatcagcaccccagtggaggagttcatggaagagttccctctttgtttctgcttcatttttctttcttttcttttctcctaaaagcttttatttaacagtgcaaaaggatcgtttttttttgcttttttaaacttgaatttttttaatttacactttttagttttaattttcttgtatattttgctagctatgagcttttaaataaaattgaaagttctggaaaagtttgaaataatgacataaaaagaagccttctttttctgagacagcttgtctggtaagtggcttctctgtgaattgcctgtaacacatagtggcttctccgcccttgtaaggtgttccagtagagctaaataaatgtaatagccaaacccactctgttggtagcaattggcagccctaatttcagtttattttttcttctgttttcttcttttctttttttaaaacagtaaaccttacacagatgcgttcagcagactggtttgcagtgaattttcatttcttttccttatcacccccttgttgtaaaaagcccagcacttgaattgttattactttcaaatcttctgtatttgtatctgtttttattagccaattagtgggattttatgccagttgttaaaatgagcattgacgcacctgttattttttttttttttaaatagcaaggcacagcctttgccccaaacttgtcatcttaacgtttgtcattccagtttgagttaacgtgctgatgctatttttttaaaagaagctttgtaataaaacatttttaaaaattgtcaaaaaaaaaaaaaaaaa

SEQ ID NO: 2671 - DNA, 882 bp, Homo sapiens
  SIMILAR (62)..(184): 531254mologous to Homo sapiens X-linked retinopathy protein {C-terminal, clone XEH.8c},accession number S58722,Smith-Waterman Score=99.
tagagactgggtttcatcatgttggtcgggctggtctccaactcctgacctcaggtgatccacctgccccgccccccaaagtgctagagtgcaatggtgcaatctcagctcactgcaacctccaccccccacccccacaccccgttcaagtaattctcctgcctcagcctcccaaatagctggggattacaggtgtccgccaccacacccagctaatttttgttatttttagtaggagatgggggttttcactgtgttgggtcagggtgggtctccaactgttggccctcagggtggaggccactgtggccccaccttttcctggggtttcataaggatctggaagtggtgggattccttgtttttgctagtatctcatttaggagttggagatgggaccttaaaaactcatctgttttaactcacttttttaaataggatggagttaaacttaatttacttaaggatgtacagttagagccgggaacttcaaccattattcactccccatgccctgtttcccccccacttcgaaattaaatgcggttagcatcatatagttcattttccccctccatgctgctgtgtgattccttgactttggggtatggagtttttccatcccttcaggcaggggttctgtcagttcatggtatagtgattcagtgttaaaatgggtggtgtctccagctttgctgtgcacatttccaaccttgtcaaattaatagtcctgagcaaggcaagaaaaagaggtaataacatacccattttcttttatgaatataagcttataatattttttcatgtgctatttttactgagcaaattgtatgtctcacatgttaacacaataaatatcttgacaattttaaaaaaaaaaaa

SEQ ID NO: 2672 - DNA, 485 bp, Homo sapiens
  misc_feature (1)...(485): n = a,t,c or g
ggacagcaggccccttgacagcccctcccacaggatgtgggctctgaggcntaaaccatttccagcacacacttctttggcctaagggcttctctctcaggacctctaatttgaccacaaccaacctgggcttcagccacatcagtgggcactggagctggggtgcacatggggcctgctcaccttgcccacacatctccagccagccagggccctgcccagcttcaatttacagacctgactctcctcaccttcccccctgctgtccagagctgaacatagacttgcacttggatgtcacctggagtgtcacatgggagtgttatggcagcatcataccaaggcctactgttgcacatggggccaaaaccagtaaacagccaccttcttggaaagggaatgcaaaggctttgggggtgatggaaaagaccttttacaaatgataccaatttaaaaaccctccaacgggcataggtgggaaaaaa

SEQ ID NO: 2673 - DNA, 1894 bp, Homo sapiens
  SIMILAR (564)..(1019): 871254mologous to Homo sapiens Apoptosis related protein encoded by gene 1 clone HLDOK36,accession number AAB15551,Smith- Waterman Score=657.
ccatccacttggtatgcgatggagcatggcgactcaacacgcaggatgtgtgtcacagcggtgcggacttttccccatgacggttggttgctcacaagggaacatattgtggtcgttgtaataccaccacgacctatgatggttaacatctgcagggcagttgtccttacccaacaaacattcctggagcctcagcaaatgcaggcccagtgctgggtgctgagtctacaagaacatgtcaaactagccctcttctcaaggagctcacagtctgtaggtacagcctcattgggagtgattcagtgcagtacaattagtgctaaagcccggggatactacctgggctgtggcaagactgaggtcagggaaggcttccagagagaggatatttggcagaggctggtgtgtacagaatttgtggcagacaaagcaggcatgaggatgggacacataggggagcccaagttattgaacagaggagaaagtggctcccagcagctctgggcttccaacccatcatcttacagctctgtggcaagagagtacctgactcccagtagagccagcacaggtcagccgcaagcctcccgggcctggtcaggacccctgcgcatccgcagtgtggctcagacatccggctccgggttcgagcagagtactgcgagcatgggccagccttggagcagggcgtggcatcccggcggccccaggcgctggcgcggcagctggacgtgtttgggcaggccaccgcagtgctgcgctcaagggacctgggctctgtggtttgtgacatcaagttctcagagctctcctatctggacgccttctggggcgactacctgagtggcgccctgctgcaggccctgcggggcgtgttcctgactgaggccctgcgagaggctgtgggccgggaggctgttcgcctgctggtcagtgtggatgaggctgactatgaggctggccggcgccgcctgttgctgatggaggaggaaggggggcggcgcccgacagaggcctcctgatccaggactggcaggattgatcccacctccaagtctccgggccaccttctcctgggaggacgaccatctctacccctagaggactgtcactctagcatctttgaggactgcgacaggaccgggacagcaggccccttgacagcccctcccacaggatgtgggctctgaggcctaaaccatttccagctgagtttccttcccagactcctcctacccccaggtgtgcccccttagcctccggaggcgggggctgggcctgtatctcagaagggaggggcacagctacacactcaccaaaggcccccctgcacattgtatctctgatcttgggctgtctgcactgtcacaggtgcacacactcgctcatgctcacactggccctgctgagatctttccttggccttttgccctggcctgcttcccagcacacacttttttggcctaaggggttttctctcaaggagccctttaatttggccccccacccaacttgggcttcagccacatcagtgggcactggaagctggggtgcaacatggggcctgctcaccttgccccacacatctcccagcccagccagggccctgcccagcttcaatttacagacctgactctcctcaccttcccccctgctgtcccagagctgaacatagacttgcacttggatgtcaccctggagtgtcacatgggagtgttatggcagcatcataccaaggcctactgttgcacatggggccaaaaccagtaaacagccaccttcttggaaagggaatgcaaaggctttgggggtgatggaaaagacctttttacaaatgataccaattaaactgccctgggaaagggcattaggtgggcaaaaaaaaaaaaaaaaa

SEQ ID NO: 2674 - DNA, 702 bp, Homo sapiens
  SIMILAR (3)..(50): 1001254mologous to Homo sapiens synaptogyrin 2,accession number AJ002308,Smith-Waterman Score=95.
  misc_feature (1)...(702): n = a,t,c or g
agcagatgtactgcgtgttcaaccgcaacgaggatgcctgccgctatggagtgcatcggggtgctggccttcctggcctcggctttcttcttggtggtcgacgcgtatttcccccagatcagcaacgccactgaccgcaagtacctggtcattggtgacctgctcttctcagggtgtgctggcctccctggcctaccagcgctacaaggctggcgtggacgacttcatccagaattacgttgaccccactccggaccccaacactgcctacgcctcctacccaggtgcatctgtggacaactaccaacagccacccttcacccagaacgcggagaccaccgagggctaccagccgccccctgtgtactgagcggcggttangtgggaagggggacagagagggccctcccctctgccctggactttcccatgagcctcctggaactgccagcccctctctttcacctgttccatcctgtgcagctgacacacagctaaggagctcatagcctggnggggtggcagacacaccccaagtgctgtgccagacggtcagtcagcgtnaatctncagggactttaggaagggttttantagtgttttcctggttttaataccttagccgctgaatggtagaacagnagtgccatgtgtatgaaatgctanttccccggcggtaancttggacgtattntggttttg

SEQ ID NO: 2675 - DNA, 1359 bp, Homo sapiens
  SIMILAR (535)..(867): 961254mologous to Homo sapiens synaptogyrin 2,accession number AJ002308,Smith-Waterman Score=570.
atggggcgggggcgcggggacctgcagcccagcgggctcggacgacctcggacccccgccgctccacgggcaggaagggagcccggagcggcgcgggtgcgcattgatcgtggtgcggatgcagccgctgcggcgcggccccggcttctctgcgagcccgtgcccgggccgggctgtcgggaactcggcccggctccacttgctcgcgcttactggaaacgtgctcccgagcggcgcaaggctcggcggctggagcccggggcggcccttggccgagggcagggccgagccaggtgctcgggcgccccaggctgccgcgccctgctgggccacactgggcgcgtgccacccccggggacccgtcccgtcctgagggcgcccagggcctcccagcgccgctctccccaggctgttgtcaaaggaatgaagctgggctttgcacagggtggcgggcaccaggcttcatccggcagttcagggtccagcaacgagctaggcggccaccagccctaccaggtcctcccctcccggcaggtcttcgccttgatcgtgttctcctgcatctatggtgagggctacagcaatgcccacgagtctaagcagatgtactgcgtgttcaaccgcaacgaggatgcctgccgctatggcagtgccatcggggtgctggccttcctggcctcggccttcttcttggtggtcgacgcgtatttcccccagatcagcaacgccactgaccgcaagtacctggtcattggtgacctgctcttctcagctctctggaccttcctgtggtttgaaggtttctgcttcctcaacaaccagtgggcagtcaacaaaccgaaggacgtgctggtgggggccgactctggctctgaaccaccaaagaggggcagcaaagtaaatcccggggcccgacgactctcctctggctgtccttcggatcggcctgaactgatccgcccacgatgtagaatacgagcagaagcacgaaacagcacctcacgaaagcacatacagcgcaacatacacgagagacgaagaactcacgacacaccagaacaacaaaagaagaacacagcaacaacaggaacagcacagcgattcaatttgcctcaatttaactgcccccttataggcccccccctagccttaaggggaagtcctctgcacgaaattggcataagaacctccaaggggttcttcagctccctactcaatggaaatcactttgaatacctctctacactgacgggggaactgccttggtctcggaactgcatcggatatgggcggaacccgttgtaccattatatgcctaccggacgactacaaaggcgaatagaacagaggagcacatga

SEQ ID NO: 2676 - DNA, 1775 bp, Homo sapiens
  SIMILAR (282)..(443): 941254mologous to Homo sapiens synaptogyrin 2,accession number AJ002310,Smith-Waterman Score=277.
gcggcggcggcagcggcggcgacggcgacatggagagcggggcctacggcgcggccaaggcgggcggctccttcgacctgcggcgcttcctgacgcagccgcaggtggtggcgcgcgccgtggtccttggtcttcgccttgatcgtgttctcctgcatctatggtgagggctacagcaatgcccacgagtctaagcagatgtactgcgtgttcaaccgcaacgaggatgcctgccgctatggcagtgccattcggggtgctggccttcctggcctcggcctttcttcttggtggtcgacgcgtatttcccccagatcagcaacgccactgaccgcaagtacctggtcattggtgacctgctcttctcagctctctggaccttcctgtggtttgttggtttctgcttcctcaccaaccagtgggcagtcaccaaactcgaagaccgtgctggtgggggccgactctgtgagggcagccatcaccttcagcttcttttccatcttctcctggggtgtgctggcctccctgggctaaccagcgctacaaggctggcgtggacgacttcatccagaattacgttgaccccactccggaccccaacactgcctacgcctcctacccaggtgcatctgtggacaactaccaacagccaccctttcacccagaacgcggagaccaccgagggctaccagccgccccctgtgtaattgaggcgggcggttaggttggggaagggggacagagagggccctcccctctgccctgggactttcccatgagcctcctgggaacttgccagcccctctctttcacctgttccatcctgtgcagcttgacacacagctaaggagcctcatagcctgggcgggggctggcagagccacaccccaagtgcctgtgcccagagggcttcagtcagccgctcactcctccagggcacttttaggaaagggtttttagctagtgtttttcctcgcttttaatgacctcagccccgcctgcagtggctagaagccagcaggtgcccatgtgctactgacaagtgccttaagcttccccccggccccgggtcaaggcccgtgggaacccgctattattctgcgttctctgcccaaaaaaaatccgtgggggccccaatcaaaacctgcccctgtggcaagcgggagccagaccccaggctctttgtgtccctcacctaaaggtttgccttcccctgtgccccactggctgtatgattctggggggccacccaccctagtgccgggtggccttctgggctggccttcccgttggtgttgatgtgcgggtgcttggtgctcattggcacttcctccttgctcccacccctggcagcagggaaaggggctttgccctgacaacacccagctttatgtaaatattctgcatgttgttacttaggaaagcctgggagagggcaggggtggccccactggcctcccaagactctgtctgtgcccgagtgtattataaaaatcgtgggggagatgcccggccctgggatgctgtttggagacggaataaatgttttctcattcagtctccagtcattggttgagccacagcctaggggttggaggaagactccactgtgggtacacccttaggggctggctttatggaacttgtagtttgaacaaggcagtggcaatccgccccctccagcctgcctggctggcccccttccctctgtctggggtcgcattccacacaagcctttcatcaacatcttaaaatagtaactgtgaaaaaaaaaa

SEQ ID NO: 2677 - DNA, 534 bp, Homo sapiens; identical to SEQ ID NO: 1
  SIMILAR (38)..(421): 1001254mologous to Homo sapiens alpha globin,accession number V00489,Smith-Waterman Score=657.

SEQ ID NO: 2678 - DNA, 875 bp, Homo sapiens
  SIMILAR (255)..(554): 711254mologous to Homo sapiens PRO2550,accession number AF130089,Smith-Waterman Score=332.
gtaaacaaaactttccaacagccagcatatggaggtagttttaccccctttaccccttaaaaattttttttttccctaaagcctttaatttttgtagggaggttggcccaatatgtcccccccccaaaagaaaggtcctttcccaaaattcccaagtaggtttttatacggccccccataaggaaaaaaattttaccttgccagcccgggttaaatttggcccccccaagggttctttaaaacggccccccctttttttttttttttgagatggagttttcgctcttgttgcccaggctggagtgcaatggcgcaatctcagctcaccgcaacctccgcctcccgggctcaagcgattctcccgcctcagcaggaggattactgtaatcccaggtagctgggattacacgcctgcgccaccacgactagctaattttgtacttttggtagagatgcgatttcaccgtgttggctaggctggtctcgaactcctgacctcaggtgatccaccctcctcagcctcccaaggtgctgggattacaggcatgagccacagtgccggacattatgggaaaattttttgagggactaaactaatctccacaagtagcaatgcatttaggaaatatatttaaaggggaaaaaaagactcatagtttcactcagtcatgttcataatttttagtatttgggttttttagcatgtaatttgtgtacatagttttggtttttgtaaacttgcataggggttttctggtacaaactggaaaacctgctagacaaattctgaaacatctgtaatgcttgtaggtagttgttgtaacactatgcccacacataatcactttccatattgctgcatagtctttgtaacc

SEQ ID NO: 2679 - DNA, 506 bp, Homo sapiens
  SIMILAR (70)..(246): 541254mologous to Homo sapiens Human cytokine/steroid receptor protein,accession number AAW71362,Smith-Waterman Score= 128.
  misc_feature (1)...(506): n = a,t,c or g
cgcatactcatggccatcaacggcaaggtgttcgatgtgaccaaaggccgcaaattctacgggcccgtcaagtatcatcacgtgggcaaactgctganggngggggaggagcccacntgtgtactcagatgaggaagaaccaaaagatgagagtgcccggaaaaatgattaaagcattcagtggaagtatatctatttttgtattttgcaaaatcatttgtaacagtccactctgtctttaaaacatagtgattacaatatttagaaagttttgagcacttgctataaagttttttaattaacatcactagtgacactaataanattaacttcttagaatgcatgatgtgtttgtgtgtcacaaatccagaaagtgaactgcagtgctgtaatacacatgttaatactgtttttccttccatctgtagttagtaccaggatgaatttaaatggtgttttttccngagagaccaggaagacctggggtaattncccaaaccaggtng

SEQ ID NO: 2680 - DNA, 818 bp, Homo sapiens
  SIMILAR (30)..(251): 831254mologous to Homo sapiens putative progesterone binding protein,accession number Y12711,Smith-Waterman Score=328.
  misc_feature (1)...(818): n = a,t,c or g
tgctctcgctgcaggaattcggcacgagctttgctggaagagatgcatccaggggccttgccacattttgcctggataaggaagcactgaaggatgagtacgatgacctttctgacctcactgctgcccagcaggagactctgagtgactgggagtctcagttcactttcaagtgctgaaggagggggaggagcccacttgtgtactcagatgaggaagaaccaaaagatgagagtgcccggaaaaatgattaaagcattcagtggaagtatatctatttttgtattttgcaaaatcatttgtaacagtccactctgtctttaaaacatagtgattacaatatttagaaagttttgagcacttgctataagttttttaattaacatcactagtgacactaataaaattaacttcttagaatgcatgatgtgtttgtgtgtcacaaatccagaaagtgaactgcagtgctgtaatacacatgttaatactgtttttcttctatctgtagttagtacaggatgaatttaaatgtgtttttcctgagagacaaggaagacttgggtatttcccaaaacaggtaaaaatcttaaatgtgcaccaagagcaaaggatcaacttttagtcatgatgttctgtaaagacaacaaatccctttttttttctcaattgacttaactgcatgatttctgttttatctacctctaaaggcaaatctggcaggtgttcccaaaggactttggggnatggggattaggccgctgtcccggtaaccaaaatggaaatcttccaaaacaggaggctcaggctggccaaaaagg

SEQ ID NO: 2681 - DNA, 2118 bp, Homo sapiens
  SIMILAR (93)..(698): 491254mologous to Homo sapiens Human hSMBP1 protein,accession number AAY08469,Smith-Waterman Score=366.
accccgcgcgccactcgctcgctcagagggaggagaaagtggcgagttccggatccctgcctagcgcggcccaacctttactctcagagatcatggctgccgaggatgtggtggcgactggcgccgacccaagcgatactggagagcggcgggctgctgcatgagattttcacgtcgccgctcaacctgctgctgcttggcctcatgcatcttcctgctctacaagatcgtgcgcggggaccagccggcggccaagcggcgacagcgacgacgacgagccgccccctctgccccgcctcaagcggcgcgacttcaccccccgccgaagctgcggcgcttcgacggcgtccaggaccccgcgccatactcatgggccatcaacggcaaggtgttcgatgtgacccaaaggcccgcaaatttcttacggggcccgaggggccgtatggggtctttgctggaagaaaatgcatccaaggggccctgcccacatttttgctggataaggaagcccctgaaggatgagtaacgatgaccctttctgacctcacttgctgcccagcaggaagactctgagtgactgggagtctcagttcactttcaagtatcatcacgtgggcaaactgctgaaggagggggaggagcccactgtgtactcagatgaggaagaaccaaaagatgagagtgcccggaaaaatgattaaagcatttcagtggaagtatatctatttttgtatttttgcaaaatcatttgtaacagtccactctgtctttaaaacatagtgattacaatatttagaaagttttgagcacttgctataagttttttaattaacatcactagtgacactaattaaaattaacttcttagaatgaaaaagaaaaaaaaaagggcggccgctctagaggatccctcgagggkcccaagckkacgcgtgcatgcgacgtcacatgatgtgtttgtgtgtcacaaatccagaaagtgaactgcagtgctgtaatacacatgttaatactgtttttcttctatctgtagttagtacaggatgaatttaaatgtgtttttcctgagagacaaggaagacttgggtatttcccaaaacaggtaaaaatcttaaatgtgcaccaagagcaaaggatcaacttttagtcatgatgttctgtaaagacaacaaatccctttttttttctcaattgacttaacctgcatgatttctgttttatctacctctaaagcaaatctgcagtgttccaaagactttggtatggattaagcgctgtccagtaacaaaatgaaatctcaaaacagagctcagctgcaaaaaagcatattttctggtggtttctggactgcactgttgtccttgccctcacatagacactcaggacacccttcacaaacacagtagtctatagttagggttaaaatagggatctggaaccttcaaaaggaaaggctttgggaaaaaaagaggtgggtgggcttaaaaacctaaatatatgatgaagattgtaggactgtctccccaggcccccatgtttcatggtggggccaatggttatttgggttattttactccaattggttacccctcaatttgaaatgagggagggaccatacagcaatgggaaacaggtgtttggctctccctaagaagcccttccatgcacaccccccctgaaccaacgaggaaaccagtacagtcgcctagtccaagtggtttttttaaaggtaaagttatattccataaggtaaccagttattctggttgttaataaaacttataccccactccaaaaagtagtagtcaagtgtcctaggtctttgattattgctcttttgggtaaacactaagtcttaagtagactatacgagttgtatgaatttgtaaaagtatatgaacacctagtgagatttcaaacttgtaattgtggttaaatagtcattgtattttcttgtgaactgtgttttatgattttacctcaaatcagaaaacaaaatgatgtgctttggtcgagttaataaaaatggttttacccacaaaaaaaacaaaaaaggggccgcgtttatagagtgcccttgggggggcccaaatttacgcgggcttgcaaggttttttt

SEQ ID NO: 2682 - DNA, 733 bp, Homo sapiens
  SIMILAR (18)..(674): 421254mologous to Homo sapiens 23 kD highly basic protein,accession number X56932,Smith-Waterman Score=244.
ccaagcggctgccgaagatggcggaggtgcaggtcctggtgctttgatggtcgagcccattcttccctgggcccgcctggccggccatcgtggctaaaccaggtactgctgggccggaaaggtggtggtcgtaccgctgtgaaggcatcaaacatttctggcaattttctacaggaaacaagttgaagtaccttggctttcctccgccaagcggaatgaacaccaacccttcccgaaggcccctaccacttcgggggcccccagccgcattcttctggccggaaccgtgcgaggtatgcatgccccacaaaaccaaagcggaggccaaggccgcctctggaccgtcttcaaggtgtttgacggcatccccaccgccctacggacaagaaaaaagcgggatggtggttcctggctgccctcaaggtcgtgcgttttgaagcctacaagaaagttttgcctaatctgggggcgcctgggctcccgaggttgggctggaagtaccaggcagtgacagccaccctggaagaagaagaggaaaagagaaaagccaagattccactaccggaagaaagaaaacagcatcatgaggctaccggaaacaggcccgagaagaaacgtggagaaagaaaattgacaaatacacagaggtcctcaagacccacggactcctggtctgagcccaataaagactgttaattcctcaaaaaaaaaaaaaaaaaaaagggcggccgct

SEQ ID NO: 2683 - DNA, 450 bp, Homo sapiens
  SIMILAR (135)..(314): 1001254mologous to Homo sapiens Protein Enriched in Diabetes,accession number Y13736,Smith-Waterman Score=309.
  misc_feature (1)...(450): n = a,t,c or g
tttcgtgaagagnnnnnnnnnnnnnnnnnnnnnnnnnnnnnnnttgcgggagccgaggaggaggttccggacgctgcttaggaaccggggactcaggaatgcccgcgccctgagcgctcagctccagaggcgtcatggctgagtacgggaccctcctacaagacctgaccaacaacatcacccttgaagatctagaacagctcaagtcggcctgcaaggaagacatccccagcgaaaagagtgaggagatcactactggcagtgcctggtttagcttcctggagagccacaacaagctggacaaagacaacctcttccactcagttgttcctactcagactgttgcactctaaacctagggaggttgaagaatgagacccttaggttttaacacgaatcctgacaccaccatctatagggtcccaacttggttattgtaggcaaccttcn

SEQ ID NO: 2684 - DNA, 407 bp, Homo sapiens
  SIMILAR (122)..(340): 1001254mologous to Homo sapiens Protein Enriched in Diabetes,accession number Y13736,Smith-Waterman Score=367.
  misc_feature (1)...(407): n = a,t,c or g
tttcgtcggcggcagaannnnnnnnnnnnnnnnnnnnnnnngccgaggaggaggttccggacgctgcttaggaaccggggactcaggagtgcccgcgccctgagcgctcagctccagaggcgacaacctctcctacattgagcacatctttgagatctcccgccgtcctgacctactcactatggtggttgactacagaacccgtgtgctgaagatctctgaggaggatgagctggacaccaagctaacccgtatccccagtgccaagaagtacaaagacattatccggcagccctctgaggaagagatcatcaaattggctcccccaccgaagaaggcctgagcaagggggaggaagaggaggaaggttggaccttcatcagaccactcccttcccccatcctgcn

SEQ ID NO: 2685 - DNA, 447 bp, Homo sapiens
  SIMILAR (447)..(226): 851254mologous to Homo sapiens Human mammary transforming protein,accession number AAW17838,Smith-Waterman Score=319.
gcaatacaatcaatcacctttattccgggttagaacaaggccgtgcacactgcagacagaagagcacaagataggggcaatctcacagcaatataaggagtggccagaggggcagggcacgctaggctgggctaggagttaagagtactgtctaaccagtctggcttcttccttcttccagcagccagccctcccctcccattaaagttttactcccacatcctaaaagctcctaacttgaactttgtctaaatagtctctgagactgcatgtgaatttaatgttttttgaaaaagccttcttttttgtttggactatgtagcaatttgattctgccactcccttcactgtggcattcccctcccacccccgctctggcctagacaataagttaatgctagacaccacaaaaaagggcagacatggcagtgcagttttaatatacat

SEQ ID NO: 2686 - DNA, 455 bp, Homo sapiens
  SIMILAR (234)..(344): 941254mologous to Homo sapiens Human mammary transforming protein,accession number AAW17838,Smith-Waterman Score=184.
  misc_feature (1)...(455): n = a,t,c or g
ntctgatatcctgcgaacctcagagaatcttcgaancgacccacgcgtccgcccacgcgtccggacttacttaggaaacccttctttactagatatcctggccccctgggcttgtgaacacctcctagccacgtcactacagtacagtgagtgaccccagcctcctgcctaccccaagatgcccctccccaccctgaccgtgctaactgggggtacatatatattctacatatatgtatattaaaactgcactgccatgtctgcccttttttgtggggtctagcattaacttattgtctaggccaaagcgggggtgggaggggaatgccacagtgaagggagtggcagaatcaaattgctacatagtccaaacaaannnnnnnnnnnnnnnnnnnnnnnnnnnnnnnnnannntattaaaaattccccttaggcggcgcctttttttttgtgttg

SEQ ID NO: 2687 - DNA, 942 bp, Homo sapiens
  SIMILAR (925)..(749): 711254mologous to Homo sapiens Human secreted protein, SEQ ID NO: 7870,accession number AAG03789,Smith-Waterman Score=196.
  misc_feature (1)...(942): n = a,t,c or g
tttttggattaaacaaccatttattatggggcaaactgcaagcaagcactttgaacacatggatttttcggaagaaaggtgacaagaaaatcagagaaaacatcattgcatttttagggggaaaactacaaatttctaatttagctgcagaaaatataattagagaacacaaataaaatgtactagtgaatatatgcttctctagacccaaacaaaaactatttgcaacgtaattaaaacaggttaagtgctgtgaaaaatagaaacatggtgacatagaagagcctgacgggggaacctaaccgagtcctgagagtgtaagccagcttccccaaggaagtgacacttcaaccgagatctgaaggacagcagtctataaatgaagtagagaaaggcagtgctgagggcagagggcacctgcatgggcagaggctgggagcaagatgagtacagcgtgccccaagtaatcaggaagtgccagtggctggagtgcagagacagcagcgcagttttagctagagatgagagtaagggaggcaagggctggatcatcctgtctcctgtaggccacagcaagatgtttggtctttatggcagaggaaaagcatttattgaagtgacattttaaaaaattactgatggccgggcgcnagtgtcacgcctgtaatccccagcattttgggaggccgaggcaggtggatcacctgaggtcaggagtttgagaccagcctggccaacatggtgaaaccccgtctctactaaaaaatacaaaaattagctgggcatggtggcgtgcacctgtaatcctagctactcaggaggctgaggcaggagaatcgcttgaacctgggaggtggtggttgcagtgagccaagatcacaccattgcactccagcctgggtgacagagtgagactctgtctcaagaaggaaaaaaaaaaag

SEQ ID NO: 2688 - DNA, 2475 bp, Homo sapiens
  SIMILAR (207)..(512): 931254mologous to Homo sapiens Protein Enriched in Diabetes,accession number Y13736,Smith-Waterman Score=481.
tttcgtggcggcggcagaagcggcggcggcggcggcgggagccgaggaggaggttccggacgctgccttaggaaccggggactcaggagtgcccgcgccctgagcgctcagctccagaggcgtcatggctgagtacgggaccctcctgcaagacctgaccaacaacatcacccttgaagatctagaacagctcaagtcggccttcaaagaaggacatccccagcgaaaagagtgaggagatcactactggcagtgcctggtttagcttcctggagagccacaacaagctggacaaagacaacctctcctacattgagcacatctttgagatctcccgccgtcctgacctactcactatggtggttgactacagaacccgtgtgctgaagatctctgaggaggatgagctggacaccaagctaacccgtatccccagtgccaagaagtacaaagacattattcggctgccctctgaggaagagatcatcaaattgggctcccccaccgaagaaggcctgagcaaggtgggaagattatgaagaaggttggaccttcatcagaggcagtggcttcccccatcctccaggagaagggggcaaaggcaacccaccatctacccacttactaacctgggtcctaacccccttactgtgcgcgtgtgtgtgcgtgtgcgcacgctctggctgtttgtctatatgtctagctcatctagttcctcttcttaaggggatgggggtcaggggctaggggagggggctgagtttccccactttaggaggaggtgggggctatttctatgcaaatagaaatcagcacattcctcctacttccctttcctccactccccccatatctttaaaaggggggaagcagaaagggacctgcattttcctacattgaggagctgacataggggtaaggtatgggagaggtaggtggatccagggaaaagcagtggggacggaaggcaaagagaccactcaacccccacctggaaggggcaaagaaaagccagagttccatgtttgtactcctgtgctggactgtttcctgagtaccagcaggtccctttttgtctctcatgggcctagcataggtatgagccagggatcctttcctggtccctaagatcaaaccccatggagcagccagcgttagatgcccccacccacctgtactctggagagactgtgctgggaaccatgtaccactgagcctgagatggggatgagtgcagagagagggagagccccctcttccactcagttgttcctactcagactgttgcactctaaaccttagggaggttgaaagaattgagacccttaggttttaacaacgaatcctgacaacaccatctattagggtcccaaattggttattgtaggcaaccttccctcttttcttggtgaagaacatcccaagccatgaaagaagttaactacagtgttttcctttgcaccgatccccaccccagttcaatcccggaagggacttacttaggaaacccttctttactagatatcctgggccccctgggcttgtgaacacctcctagccacatcactacagtacagtgagtgaccccagcctcctgcctaccccaagatgcccctccccaccctgaccgtgctaactgtgtgtacatattatattcttacatatatgtattatttaaaactgcactgccatgtctgcccttttttgtggtgtctagcattaacttattgtctagggccagagcgggggtggaaggggaaatgccacaagtaaagggagtgggcagaatcaaattgctaccatagtccaaagcaaaaaagaagggctttttcaaaaaacattaaattcacatgcagtctcagagactatttagacaaagttccaagttaggagcttttaggatgtgggagtaaacctttaatgggaggggagggctggctgctggaagagggaagaagcccagactggttagaccagtactcttaaactcctagccccagcctaagcgtgccctgccccttctggccactggttgcagacaccctgcccttaacaccacacaccctcctaggactccccacagttttgcccttaaaaggacccttcccccaagtctcccctttcccctgtcctggcttctccccttaagaagagagagatacttacttgtagaattgggtggggggaaatgagcatgaactgtccttccatttgggatatgttacattagagttagaagagagaataaggagccttttcttaaggaaagaaatgggagaagagagacagggttctttttcagcagagtctagtagtttctctgtaaggcaaaataatcctaaaaaagactaacctgcccacccactccttatattgctgtgagattgcccctatcttgtgctcttctgtctgcagtgtgcacggccttgttctaacccgggaataaacggtgattgattgtattgccgcggatcc

SEQ ID NO: 2689 - DNA, 857 bp, Homo sapiens
tttttagacgaggtttcaccgtgttgccaaggcttggaccgagggatccaccggccctcggctcccaaaagtgcggggatgacaggcgcgactaccgcgccaggaccccccctttccccttcccccgcttgtcttcccgacagacagtttcacggcagagcgtttggctggcgtgcttaaactcattctaaatagaaatttgggacgtcagcttctggcctcacggactctgagccgaggagtcccctggttctgtctatcacaggaccttacacgttaaggaggaggaaaaatcgtaacgttcaaagtcagtcattttgtgatacagaaattacacggattcacccaaaaacacaagaaagcaagtctttttagaaatgcctttagccctggtgtccgtgccaagtgattcttttcggtttggaccttgactgagaggattcccagtcggtctctcgtctctggacggaagttccagatgatccgatgggttggggacttagggctgcgtcccccccaggagccctggtcgattagttgtggggaatcgccttgcagggcgcggtgacccactgtgctgtgggagcctccatccttccccccaccccctccccaggggatcccaattcattccgggctgacacgctcactggcaggcgtcgggcatcacctagcggtctctgttactctgaaaacggaggcctcacagaggaagggagcaccaggccgcctgcgcacagcctggggcaactgtgtcttctccaccgcccccgcccccacctccaagttcctccctcccttgttgcctaggaaatcgccactttgacgaccgggtctgattgacctttgatcaggca

SEQ ID NO: 2690 - DNA, 449 bp, Homo sapiens
actagttctagatcgcgatctagaacctagcccacgcgtccggggtcttttgatttttgttagcctcccaattttcagggctgctttcttagttgtttttaaaatactactttcagagcatcaggctctcatttcccacattgctttgagtaccagtgctatttctcccttgttggcttttattctaatcatagtcattagagatgacttcatgatgagtctggagatgataaaatggaaatctttcccttccatttaaagtattaggaattctttattttaacttttaaaaataacatctttatttacaggtacaacagaatatctcgggaatggactcagaagtatgccatgtgatgctaccttaaagtcagaataacctgcattatagctggaataaactttaaattactgttaaaaaaaaaaaaaaaaaaaaaaaaaaaaaaaaa

SEQ ID NO: 2691 - DNA, 1872 bp, Homo sapiens
  SIMILAR (1471)..(1869): 981254mologous to Homo sapiens Transmembrane domain containing protein clone HP01512,accession number AAY32923,Smith- Waterman Score=681.
atgcaaaggggaagttactaccaaaccgacgagaatggcccagagctgggggctgccaggcggttcctgggcccctctcagcaccagaagaaggcgggcgcaggctcgccgcgggtcggccgcacgccatacctggatcaggccctgctggaacaaggcgctgtgcacgcagccagggaccgccccgggcagctccagcgagccgttcccattgcagatgctccagttgccacgcaagctgtaactgagctccgcggcggtggtgcctgcacgcacagcgcgagcagcaggagcaggtggaggcgcatcttgagatcccgcgccaccgagatgtggagagatcgaaaggcagcgctgcaagggaccggcggtgaagccactcaccccctcggaagtagccgaggctttagaaagttaactataaaacagtctcaggcaggtccttcaggaggtattccagaagaaggcattgttatcacaggagatgacagctccaggtgtgttattgcacttgaagaccttacagtggaacaagatgtggagtctccaacgttcagttgcttctctgctcgctgctcagccacttgtgttgctctgccagctgaagtcttctatgggcacaggataggagcatggcaggccaaaaaggtccggccaaaactcttgattatcccggcggcggggcaggattgtctcgtctcacaccagctctgccagacacaggcgccttttgcaaaaacggagcagatcagcactcgcacaggccccgaagagcccctgatgaatccagccgtccacacccacgcgtacagaggggccggggcctccctcaagctgcggcctcggcctcctccccgcgcggcagctggtgcctccccggccctacgggcgtcacgcgcacgacacagccacaagatgtccgctctgacggaactactgccagctgccacgtccgcccctccccctcctcctgcctcttcaccgccgcggatcagtccgccaacgccgccgtcccgagcacaagaccgatgtgaggccgaagccagacggcttgcttcccacatattcctagactattcatctgtgaagagtccctcagtattctggatagggaaaaacagaagtgagccttttgggcggcaacacgcaaggctagggaagctgggcactcacttgactcttactttccttcctgggagaactcatgggccaaaagggcctctcttggcactgaactctgctgccttggaggagaaggatcatctacagacgttaaaggcccaagaggagggccaccttcacacgagattccgaggagggcctcgctacccgccagttcccgcgcctcggcagtccgccgcgagcgccgaggccgccagtgcccgccggccgcttccgctcccggcgcaggcgcggcagcttggccagagcggagggggctcgggagaggagtggacgccgctggccaggatggtgctggagagcgtggcccgtatcgtgaaggtgcagctccctgcatatctgaagcggctcccagtccctgaaagcattaccgggttcgctaggctcacagaatggcttcggttattgcctttccttggtgtactcgcacttcttggctaccttgcagttcgtccattcctcccgaagaagaaacaacagaaggatagcttgattaatcttaaaatacaaaaggaaaatccgaaagtagtgaatgaaataaacattgaagatttgtgtcttactaaagcagcttattgtaggtgttggcgttctaaaacgtttcctgcctgcgatggttcacataataaacacaatgaattgacaggagataatgtgggtccactaatactgaagaagaaagaagtataa

SEQ ID NO: 2692 - DNA, 561 bp, Homo sapiens
  SIMILAR (436)..(561): 1001254mologous to Mus musculus putative,accession number AK004001,Smith-Waterman Score=229.
ggcggtggcgtcaggggtgacacagaatagctcgctgcgaggatagcaatacacatcaaggctcccttcctttatttccttcctcttcctttctagaggccgggaagttaaacttgtagccaccacctccgctcttcccggtcaccctcgcccccacttcgggccgaaagcacggtacagaggctgttggtggctttgccacgccaccccacccaccccggatcgcggctgtcttaagggacctggattcatcaggggctcttcggggcctgtgcgagtgctgatctgctccgtttttgcaaaaggcgcctgtgtctggcagagctggtgtgagacgagacaatcctgccccgccgccgggataatcaagagttttggccggacctttgagcatacaccgagagaagtgaggaagccagacgacaagcacacactatggcgctgaaacggattaataaggaacttagtgatttggcccgtgaccctccagcacaatgttctgcaggtccagttggggatgatatgtttcattggcaagccacaattatgggacctaatgat

SEQ ID NO: 2693 - DNA, 1987 bp, Homo sapiens
  SIMILAR (404)..(787): 481254mologous to Mus musculus putative,accession number AK004001,Smith-Waterman Score=245.
  misc_feature (1)...(1987): n = a,t,c or g
cgatgcttctctgagcctaagggtttccgccactcgttcaccctccccccagctcatgatcctcctccctcgcccgcccttctggtccaatctccgatctgtttagtaagaaggtgctgttccgagaaggagaaggaaaagggcttgacacgtattcactcggccccggacgtgggaagcaagccgtctggcttcggcctcacatcggtcctgtgctcgggacggcggcgttggcggactgattcgcggcggtgaagaaggcgcctgtgtctggcagagctggtgtgagatcgatgacaatcctgccccgccgccgggataatcaagagttttggccggacctttgagcgtacaccgagagagtgaggagccagacgacaagcacacactatggcgctgaaacaggattaataaggaacttagtgatttggcccgtgaccctccagcacaatgttctgcaaggtccagttgggggatgatatgtttcatttggaaagccacaattaatggggacctaatggacaagcccatattcaagggcggtgtattctttttgacaattcatttttcctacagactaccccttcaaaacaccttaaggttgcattttacaacaagaatttatcatccaaatattaacagtaatgggcagcatttgtctcgatattctaagatcacagtggtcgcctgctttaacaatttctaaagttcttttatccattttgttcactgctattgtgatccaaacccaggatggaccccctagtgccagaggattgcacgggttctataaaacagacagagataagtacaacagaatatctcgggaatggactcagaagtatgccatgtgatgctaccttaaagtcagaataacctgcattataggctggggataaacttttaaattactgttccttttttgattttcttaatccggctgctcccctatcaggacctcatcttttttaattttattttttgtttacctccctccattcattcacatggctcatctgagaagacttaagttcttccagctttggacaataactgcttttagaaacctgtaaagtagttacaagagaaccagttgcccaagactccagaatttttaaaaaaaaaaatggagccatgtggtattatgtggccaatggtcttcacatcataacttgggttatgaggactaaaacccattcctcactggctcttaacatggctggaaggaaattcatctgaggggggagggagatggatgctccagttgtcacatccaaaggataccagcattattcctagcagcatcccattcttgtttaagccttcccactgttagagatttgaggttacatggatatgctttatgcctcataactggatgtggctggagaattgggtattgaaatttatagcatcagcagaacagaaaatgtgaatgtattttatgcatgtcaataaaggaatgacctgttcttgttctacagagaatgggaaattggaagtcaaacaccctttgtattccaaaatagggtctcaaacatttttgtaattttcatttaaattggttaaggaggccttggaagctattagttaatctatcttcccaatacactgtttaatataggcactggaataaatgatgccaagttgtcaatgggatgagtgatccactaataggctctgcttaggtaattggatttatttttctttcaattaaagttgccattaaaccaatgagttagctgccctggattaatccagtatgggggaaaccatctttttgttaaatgccaagcctggttttttgtatatacccgttggggatttgcctcattgtttgacatccaatggatgatggtaagttcgaaagagtgaatattttgccatggtccagttaaagtgcacagtctgttacagggtgacacattgcctgaccngatttatgcagnattaataagcnatttgggatagtgtagccttaatgtgc

SEQ ID NO: 2694 - DNA, 2424 bp, Homo sapiens
  SIMILAR (1220)..(1477): 431254mologous to Homo sapiens DKFZP586N0721 protein,accession number BC000414,Smith-Waterman Score=144.
  misc_feature (1)...(2424): n = a,t,c or g
gacccacgcgttcggatctgaaggctacttctaggagcaagaagtttgtgttttgtgcttttccaaaggatacttccttgggcctttttctttattgactagaccaccagaggaggatgggtgggattgtaggcaaacccacctgtggcatcactgaaaataaatttgatcatacctaagaggttaggaaatggtgccattcccaccttatagtgctacataggtgctttgggcgtatgtaacattagtgtcctttcttgaagccacaagctagttttcttagttttaaaatcctggtggatgaatggcatttgtatattaaaacacttttttaaaggacagttgaaaagggcaagaggaaaccagggcagttctagaggagtgctggtgactggatagcagttttaagtggcgttcacctagtcaacacgaccgcgtgtgttgcccctgccctgggctccccgccatgacatcttcaccttgcagcttgtgctgagactgacccaagtgcagctagcactgggacacagatccttgtcttcagcaccttccaaggagccaacttttattccctttcctctctcccctccccacctcgcttcttcccaatttagtaacttagatgcttccagcacatacgtaggtagctaccccagccggtttggattacaggcctgtgctgggaacatcatctcagtttgtccaccttcctggcaggctgtagacctgacattttgagacaagcctagagtcaggagcagggactttgactcttagggaagaggcacacatgaggggcaaggctgctgggcagacgtctccagttgtccttatgttgtctgtgttgtatttttttttttttattgaccatgggtgattatttttttaaaccatcggtaatatactgaagtgagctatagcacatatcatgtgctntaagtttgtgtatttttctccatctccccttggcttcctagagtttggacatattccaggtctaaatgcttttactcaagactacagaaaggtttgaagtaagtgtgtgcatggcatgcacgtatgtaaagtaatctggggaagaagcaaagatctgtttcattcttagcctcaggcctcatgagggtctccacagggccggagctcaggttacaccactccttcgtccttacaggagatgtagggagaagaatctgcaggctgcttgtaggactgttcaccaagggggataccagcagcaagagagttgcacccgtttagccctggacccctgtttcttactgtgtgacttggctagaagttgggagttcccccaaaataaaccgtgtcccccattttaccagaacccaaacctcaacacagcgaagctgtactgtctttgtgtggcaaagatgttcccttgtaggcccctttcaggtaaccgtcttcacaatggtattttcatcacagtttaaggagcatcagccgcttctcaagtgggtagggaaagcagaaaaacgttacgcaagaggacatggatccaaaatgatgatgaagcatctcccatggggaggtgatggtggggagatgatgggctaaacaggcaaccttttcaaaaacacagctatcatagaaaagaaacttgcctcatgtaaactggattgagaaattctcagtgattctgcaatggatttttttttaatgcagaagtaatgtatactctagtattctggcgtttttatatttatgtaataatttcttaaaaccattcagacagataactatttaatttttttttaagaaaggtggaaaggtctctcgctcccaaggacagtggctggaagagttggggcacagccagttctgaatgttggtggagggtgtagtggctttttggctcagcatccagaaacaccaaaccaggctggcttaaacaagtggccggcgtgtaaaaaacagacagctctgagtcaaatctggggcccttcccacaaggggccccctgaacccaagccccccactccccttgcttaggggtgaaaagcattaccagagagatgggagcccatcctatccccaagaagcccttcacctcacccttcacctgcctgcctgttgccaactcgggctgttctgggactctgatgtgtgtggaagggatgggggaatagaacattgactgtgtttgattaccttcactatttcgggccagcctggaccttttnaattaactttgttaaaaagcatgtatgtatttatagtgttttagatttttctaacttttatatcttaaaagcaagagcaccctgtttaagcattggtacccctattgttaaagatattgtgtcctctcattccctctctatcctcttgtaagtgcccttctaataaacttttcatggaaaagctcctgtgccaggagctcagtctgaaaaaaaaaaaaaaaaa

SEQ ID NO: 2695 - DNA, 415 bp, Homo sapiens
  SIMILAR (153)..(19): 951254mologous to Homo sapiens bA6J24.4 (A novel protein similar to cell division cycle control protein 37(CDC37)),accession number AL136231,Smith-Waterman Score=249.
agaacgcaggccccctctcacctgggcgccgccgtctggcagctgcgggcagcggggagaactggggaacacgtcgaagtcactctcttcctcagcctcaccctcggcccgagggaggctccagggtcccggaggcggccacggttgttccatgtccggctgctccgggtcctacaaccgcccttggccctacaactgccactgccaacagacttggcgtgaatggaacctgctgcgccgagccagaagcccagccgggggtccgggccgttacccagaatccctctactggccgcgacgccgctgcacacccggcgacagcctgggcctcgccaccggcggacggcggaagaaatagtcggcgcgctcttcggcactgcaaacctaaccgctaatggcgctgtgggtggagaaa

SEQ ID NO: 2696 - DNA, 861 bp, Homo sapiens
  SIMILAR (439)..(840): 961254mologous to Homo sapiens bA6J24.4 (A novel protein similar to cell division cycle control protein 37(CDC37)),accession number AL136231,Smith-Waterman Score=663.
atgcagaatctgaagctagacagccttttactaaaagccacagacctaataagggagcagccacatttgaatccagcggttccccatctacagcaaaaagaaaggctacctgggttgtcagacaaggcggcagcgccattagcggttaggtttgcagtgccgaagagctgcaagaaaacggggcttgaaacaggaatacaattgcagatccacccactacacgcaaagggcccgggacgcgcctccacagccccgccccaaccggaagtgacgcaccgcgccgactatttcttccgccgtccgccggtggcgaggcccaggctgtcgccggcaggttccattcacgccaagtctgttggcagtggcagttgtagggccaagggcggttgtaggacccggagcagccggacatggaacaaccgtggccgcctccgggaccctggagcctccctcgggccgaggatgtatagccatggaattgaattggcttgccaaaagcagaaagagtttgtgaagagctctgtggcgtgcaaatggaatcttgctgaagctcaacagaaacttggtagcttagcactgcataattctgagtccttggatcaggagcatgccaaagcacaaacagcagtatcagaactgaggcaacgggaagaagagtggcgacagaaagaagaagctctagtacaaagagagaagatgtgtctgtggagcacggatgccattagcaaggatgtttttaataagagttttattaatcaagataaaagaaaagacacagaagatgaagataaatcagaatcatttatgcaaaaatatgagcaaaaaatcagacattttggttttggatatgatgctttataa

SEQ ID NO: 2697 - DNA, 2773 bp, Homo sapiens
  SIMILAR (445)..(1167): 931254mologous to Homo sapiens bA6J24.4 (A novel protein similar to cell division cycle control protein 37(CDC37)),accession number AL136231,Smith-Waterman Score=1173.
cgggtgtgcagcggcgtcgcggccagtagagggattctgggtaacggcccggacccccggctgggcttctggctcggcgcagcaggttccattcacgccaagtctgttggcagtggcagttgtagggccaagggcggttgtaggacccggagcagccggacatggaacaaccgtggccgcctccgggaccctggagcctccctcgggccgagggtgaggctgaggaagagagtgacttcgacgtgttccccagttctccccgctgcccgcagctgccaggcggcggcgcccagatgtatagccatggaattgaattggcttgccaaaagcagaaagagtttgtgaagagctctgtggcgtgcaaatggaatcttgctgaagctcaacagaaacttggtagcttagcactgcataattctgagtccttggatcaggagcatgccaaagcacaaaccagcagtatcagaactgagggcaacgggaagaagaattggcgacagaaagaagaagctcttagtacaaagagagaagatgtgtctgtggagcacggatgccattagcaaggatgtttttaataagagttttattaatcaagataaaagaaaagacacagaagatgaagataaatcagaatcatttatgcaaaaatatgagcaaaaaatcagacattttggtatgttgagtcgatgggatgatagccagagatttttgtctgaccatccataccttgtatgtgaagaaactgctaaatatcttattttatggtgttttcacctggaagctgagaagaaaggggctttaatggaacaaatagcacatcaagctgttgtaatgcagtttattatggaaatggccaaaaactgtaatgtggatccaagagggtgttttcgtttattttttcagaaagcgaaagcagaggaagaaggttattttgaagcattcaaaaatgaacttgaagctttcaagtcaagagtaagactttattctcaatcacaaagttttcaacctatgacagttcagaatcatgttccccattctggtgttggatctataggtttattagaatccttaccacagaatccagattatcttcagtattctatcagtacagctctctgcagcttaaactcggtggtacataaagaagatgatgaacccaaaatgatgggacactgtataatttgggttaagactgctgaggccaagtgctattttgttacaggaaagggaggaacttgggctattttcttggacacttttatgggggtgctggcactttatttttgttcggtttttgatgggagggaaagagtactgaaatgttttgtaaattttttttaatgtgctgctaggttttttgttttgttttgttctgaagagaagagtggtaccatatgttgcaggaagtcaaactggactttttggtggctactaaatttgcttttaatcttattgttctcaattttggaatcaagtatgaaaatctgcacaaatgcaatgtttacaagaactggttgattctgggaggcatctgctacagtctctttttatatggatatgtacatgtcctattctacaaaaatgattaaagataaaaacatacttgtatccccctgcttctttaaatgtcccacttggtgtttcatcacattaaaagcaataaatcagtagttggtaatgtactttactaaataagttggggggtacaatttttaaaagtcttaactcttaaatacttgactttcggcaccatcagttaaatccttgactataatacaaatttgatatatacattacatttaccctcaaattattctcaaaactatattccttagaatttgattttaccctgctgactttaagagttataataatatcaaatgtgatgagctaatatagattttctttttaaataagaataacttcaagctcactctttcttaacatagtctgggatctctcagggagtaagttttaaaaggaatactaatggcttgtaagaacaaacaggaataataatccggattttttaaatttgttagttattttactcatggtgccttttaatttttgttattttgggtttattttttgatgtagccttttaaaaaagggagtcttaaaaatgatttttttttaagggcaagaggaaatcttgtaggtgctaactgccttgagctgccaattacctaatttttgagaatttggtgactcttattggtaatgatggcatttacaacatttggcatttcccctttttcagctcagttaccatagaatacttccaagctttactacttcctcatgtaagtcatttcagttatgccaggatatttgatgattttgtttatggtagaattaggtaacaaagcccaattatgcctaccccttattattgaaggattaatccttatgaccttaacataagcctttggttatatttgggtgtagtctttggcctaagtaccccattaaggctagtagcaaacacttggaaggtgggctaactgggactgggaatacgtgtctcaacttgagaaaccaaatagtgcgaagggactcagggtggccagacctgtgaccttggcctcatttgtatcttgttttcgctgaggtgatcagacacttagtaccctagaaatggactggaattattgaatcttcttctgtaacatcacaatcttcctggttttcagaataaacgtttttgtgcttttgatataaatatatactctataataaaatgtttgactaatttaaaaaaaaaaaaaaa

SEQ ID NO: 2698 - DNA, 2325 bp, Homo sapiens
  SIMILAR (436)..(2322): 991254mologous to Homo sapiens bile salt-stimulated lipase,accession number A31800,Smith-Waterman Score=3385.
atgcaccacgggaagagggagctgctgcccaagatggacaggaggtggcactggggcagacagctgcttctcaacaggctgggcgccgtgtacacagaaggtgggttcgtggaaggcgtcaataagaagctcggcctcctgggtgactctgtggacatcttcaagggcatccccttcgcagctcccaccaaggccctggaaaatcctcagccacatcctggctggcaagggaccctgaaggccaagaacttcaagaagagatgcctgcaggccaccatcacccaggacagcacctacggggatgaagactgcctgtacctcaacatttgggtgccccagggcaggaagcaaggcacctgctgcacagggacaggggaccggctggagacagggccaggcggggcgtctggggtcaccagccgctcccccatctcagtctcccgggacctgcccgttatgatctggatctatggaggcgccttcctcatggggtccggccatggggccaacttcctcaacaactacctgtatgacggcgaggagatcgccacacgcggaaacgtcatcgtggtcaccttcaactaccgtgtcggcccccttgggttcctcagcactggggacgccaatctgccaggtaactatggccttcgggatcagcacatggccattgcttgggtgaagaggaatatcgcggccttcgggggggaccccaacaacatcacgctcttcggggagtctgctggaggtgccagcgtctctctgcagaccctctccccctacaacaagggcctcatccggcgagccatcagccagagcggcgtggccctgagtccctgggtcatccagaaaaacccactcttctgggccaaaaaggtggctgagaaggtgggttgccctgtgggtgatgccgccaggatggcccagtgtctgaaggttactgatccccgagccctgacgctggcctataaggtgccgctggcaggcctggagtaccccatgctgcactatgtgggcttcgtccctgtcattgatggagacttcatccccgctgacccgatcaacctgtacgccaacgccgccgacatcgactatatagcaggcaccaacaacatggacggccacatcttcgccagcatcgacatgcctgccatcaacaagggcaacaagaaagtcacggaggaggacttctacaagctggtcagtgagttcacaatcaccaaggggctcagaggcgccaagacgacctttgatgtctacaccgagtcctgggcccaggacccatcccaggagaataagaagaagactgtggtggactttgagaccgatgtcctcttcctggtgcccaccgagattgccctagcccagcacagagccaatgccaagagtgccaagacctacgcctacctgttttcccatccctctcggatgcccgtctaccccaaatgggtgggggccgaccatgcagatgacattcagtacgttttcgggaagcccttcgccacccccacgggctaccggccccaagacaggacagtctctaaggccatgatcgcctactggaccaactttgccaaaacaggggaccccaacatgggcgactcggctgtgcccacacactgggaaccctacactacggaaaacagcggctacctggagatcaccaagaagatgggcagcagctccatgaagcggagcctgagaaccaacttcctgcgctactggaccctcacctatctggcgctgcccacagtgaccgaccaggaggccacccctgtgccccccacaggggactccgaggccactcctgtgccccccacgggtgactccgagaccgcccccgtgccgcccacgggtgactccggggccccccccgtgccgcccacgggtgactccggggccccccccgtgccgcccacgggtgactccggggccccccccgtgccgcccacgggtgactccggggccccccccgtgccgcccacgggtgactccggggccccccccgtgccgcccacgggtgactccggggccccccccgtgccgcccacgggtgactccggcgccccccccgtgccgcccacgggtgacgccgggcccccccccgtgccgcccacgggtgactccggcgccccccccgtgccgcccacgggtgactccggggccccccccgtgacccccacgggtgactccgagaccgcccccgtgccgcccacgggtgactccggggccccccctgtgccccccacgggtgactctgaggctgcccctgtgccccccacagatgactccaaggaagctcagatgcctgcagtcattaggttttag

SEQ ID NO: 2699 - DNA, 420 bp, Homo sapiens
  SIMILAR (1)..(102): 761254mologous to Homo sapiens ancient ubiquitous protein AUP1 isoform,accession number AF100754,Smith-Waterman Score=132.
gtcctcatttccaaccatgtgacacctttcgaccacaacatagtcaatttgcttaccacctgtagcaccgtggcttcgtcctgttcatcgccaactaggggaagcgaatgaggagtttgcactccgtgtacaacagctggtggccaaggaattgggccagacagggacacggctcactccagctgacaaagcagagcacatgaagcgacaaagacaccccagattgcgcccccagtcagcccagtcttctttccctccctcccctggtccttctcctgatgtgcaactggcaactctggctcagagagtcaaggaagttttgccccatgtgccattgggtgtcatccagagagacctggccaagactggctgtgtagacttgactatcactaatctgcttgagggggccgtagctttcat

SEQ ID NO: 2700 - DNA, 421 bp, Homo sapiens
  SIMILAR (20)..(235): 1001254mologous to Homo sapiens AUP1 homolog,accession number AF100746,Smith-Waterman Score=368.
  misc_feature (1)...(421): n = a,t,c or g
ttgcgattcggacgagnnnctcgggatccacgtcttcctggtcagctgcgcgctgccagacagcgtccttcgcagattcgtagtgcggaccatgtgtgcggtgctagggctcgtggcccggcaggaggactccggactccgggatcacagtgtcagggtcctcatttccaaccatgtgacacctttcgaccacaacatagtcaatttgcttaccacctgtagcacccctctactcaagagattctgtgcttccacgaggcttccccccactcctctgctgctattccctgaggaagaggccaccaatggccgggaggggctcctgcgcttcagttcctggccattttctatccaagatgtggtacaacctcttaccctgcaagttcagagacccctggtctctgtgacggtgtcagatgcc

SEQ ID NO: 2701 - DNA, 503 bp, Homo sapiens
  SIMILAR (1)..(258): 1001254mologous to Homo sapiens ancient ubiquitous 46 kDa protein AUP1,accession number AF100753,Smith-Waterman Score=436.
ttgcgcccccagtcagcccagtcttctttccctccctcccctggtccttctcctgatgtgcaactggcaactctggctcagagagtcaaggaagttttgccccatgtgccattgggtgtcatccagagagacctggccaagactggctgtgtagacttgactatcactaatctgcttgagggggccgtagctttcatgcctgaagacatcaccaagggaactcagtccctacccacagcctctgcctccaagtttcccggcaggagagcctgcaggagcgcaagcaagcactatatgaatacgcaagaaggagattcacagagagacgagcccaggaggcttactgagctcaaaggaacaggattgcacccagagccgcaggacggagacttggggcagcccttaaccaaattacaacaggcttgatgggttggttgttaaaagggaaaggttgaggctccccaaagtcacatttaaatcacaggtttcaattaaaggcaaaa

SEQ ID NO: 2702 - DNA, 525 bp, Homo sapiens
  SIMILAR (162)..(383): 1001254mologous to Homo sapiens ancient ubiquitous 46 kDa protein AUP1,accession number AF100753,Smith-Waterman Score=380.
aactgtagacattagtccgtgcggtggaattctgaggagtttgcactccgtgtacaacaggtggtcgggtgcacagacagggtggaggcggggtccctgcttaggaggagagggaggaaagcttgagatcttgacacttccagtcttccaattctccctagctggtggccaaggaattgggccagacagggacacggctcactccagctgacaaagcagagcacatgaagcgacaaagacaccccagattgcgcccccagtcagcccagtcttctttccctccctcccctggtccttctcctgatgtgcaactggcaactctggctcagagagtcaaggaagttttgccccatgtgccattgggtgtcatccagagagacctgggtatgggaaagggtggccccacactgggagatgggcacagggaggaaaagtgggttgtgaaggaagaaagtaagtagggagtggactcccttctcttttctccccagccaagactggctgtgtagacttgactatcactaa

SEQ ID NO: 2703 - DNA, 699 bp, Homo sapiens
  SIMILAR (697)..(368): 741254mologous to Mus musculus putative,accession number AK010062,Smith-Waterman Score=419.
cataggcctagacactcggaatgctgctcggatcctaggattgtaaacctgttgcccgtccctcaaccaaggccaagacagatcagagtgggccatttctgtctttactaccccaccgctatctctctctctcactcacacttcggagctccagtcctgagtcgatgacatgttggatggaagggagggagaaggagaagtcagccagccagtgagtgaccacaacctttcgggcatccatgtcctcatacacagcctgaacggctcgtccacagtctgggtgaaggggcagtactcgtggtggaagcccttggagaagcaaggactctacctccctggtcaaggattcacagcacagggaaatttcctcctcactgggcaggaacactagcacatctcctggaagctccttccgacacaattcaagcactgcttggcaggcagcttccacccgatcaggtgggatggtgtcccagtagatgggggaaggtctctcaccaggctctctgggtatatgcacaataggaggattgccccagaaagctcggagcttaagttcaagggctgggtcagtaaccacaaccactctgaggtcccccggaagtttttccagcctggcatcttgcagtagcccctggagtgaatctgatgccaccgaccgctcctgagcctcatctagtaccagcacgccccaagctc

SEQ ID NO: 2704 - DNA, 3566 bp, Homo sapiens
  SIMILAR (31)..(1203): 751254mologous to Homo sapiens ancient ubiquitous protein AUP1 isoform,accession number AF100754,Smith-Waterman Score=1359.
tttcgtccgggcgctcctgaagcagcagttatggagctttcctcatggccggggccggagcggctctttgactcgcaccggcttccgggtgactgcttcctactgctcgtgctgctgctctacgcgccagtcgggttctgcctcctcgtcctgcgcctctttctcgggatccacgtcttcctggtcagctgcgcgctgccagacagcgtccttcgcagattcgtagtgcggaccatgtgtgcggtgctagggctcgtggcccggcaggaggactccggactccgggatcacagtgtcagggtcctcatttccaaccatgtgacacctttcgaccacaacatagtcaatttgcttaccacctgtagcaccgtgagtgagagcgaggccgatagcgccacggtgcggttccctggggcccagctgaaggcccccctgtccccactcgcgttccccatggaggatactgaggccttacccctaaccccgatcctctacccaacatgtcagtttttttttttcattttcctcaatatttttcttcttgctttctcttctcctggttcccagcctctactcaataagtccccccaagcttttgtgttgctggtctcggggcttcatggagatgaatgggcggggggaagttggttgaagtcactcaagagattctgtgcttccacgaggcttccccccactcctctgctgctattccctgagaaaaaggccaccaatggccgggaggggctcctgcgcttcagttcctggccattttctatccaagatgtggtacaacctcttaccctgcaagttcagagacccctggtctctgtggtgagtgtgtgttgaacagggaatctctggggcttgaaggggaaatttcccatccctggccctggcttaggcctcatctcatgccctcccctcagacggtgtcagatgcctcctgggtctcagaactgctgtggtcacttttcgtccctttcacggtgtatcaactggtggccaaggaattgggccagacagggacacggctcactccagcctgacaaagcagagcacatgaagcgacaaagacaccccagattgcgcccccagtcagcccagtcttctttccctccctcccctggtccttctcctgatgtgcaaactgggcaactctggctcagagagtcaaggaagttttgccccatgtggcccattgggtgtcatccagagagacctgggtatgggaaagggtggccccacactgggagatgggcacagggaggaaaagtgggttgtgaaggaagaaaccaagactggctgtgtagacttgactatcactaatctgcttgagggggccgtagctttcatgcctgaagacatcaccaagggaactcagtccctacccacagcctctgcctccaagtttcccagctctggcccggtgacccctcagccaacagccctaacatttgccaagtcttcctgggcccggcaggagagcctgcaggagcgcaagcaagcactatatgaatacgcaagaaggactttcccacaggttactaggtctcacataatttctactgcccttgaggacccctgcctaagtaagatttctactacctgccaacggggtaatagtctcaggtcctgccagagagccaccatgacctctcagcctctcaggctagcagaagagtatggcccaagtcctggggagtctgaactggctgtgaacccctttgatgggcttcccttctcttcccgctactatgagctgctgaagcagcgccaagccttgcccatctgggctgctcgctttaccttcttggagcagttggagagtaaccccactggagtggtgctggtgtctggggagcctggttctggcaagagcacccagatccctcagtggtgtgcagagtttgcgctggccagagggttccagaaaggacaggttactgttactcagccctaccctcttgcagcccggagcctggctctgcgggttgctgatgagatggacctgaccctgggtcatgaggttggatacagcatcccccaggaggactgcacggggcccaacaccctgctcaggttctgctgggacaggctgcttctgcaggaggtggcctcgacccgaggcccgggaaagttggggcgtgctggtactagatgaggcttttgagcggtcggtggcatcagattcactccaggggctactgcaagatgccaggctggaaaaacttccgggggacctcagagtggttgtggttactgacccagcccttgaacctaagctccgagctttctggggcaatcctcctattgtgcatatacccagagagcctggtgagagaccttcccccatctactgggacaccatcccacctgatcgggtggaagctgcctgccaagcagtgcttgaattgtgtcggaaggagcttccaggagatgtgctagtgttcctgcccagtgaggaggaaatttccctgtgctgtgaatccttgtccagggaggtagagtccttgcttctccaagggcttccaccacgagtactgccccttcacccagactgtggacgagccgttcaggctgtgtatgaggacatggatgcccgaaaggttgtggtcactcactggctggctgacttctccttctccctcccttccatccaacatgtcatcgactcaggactggagctccgaagtgtctttttcccctcaggatcctgcctctgcctgtatcctaagtccttcttagaactagaagctccaccattgccacaacccagggtgtgtgaggagaatctgagctccctggtgttactactaaaaaggagacagattgcagagccaggggagtgtcacttcctggaccagcctgctccagaagcactgatgcaagccctggaagatttagactatctggcagccctggatgatgatggggacctgtcagatctgggtgtcatactatcagaattccctctggcccctgagctggccaaagccctgctggcctcatgcgagtttgactgtgtggacgagatgctcaccctggctgccatgctcacagctgcccctgggtttacccgtcctccactcagtgcagaagaagctgccctgcgtcgggccctggaacacacggatggtgaccacagttctctgatccaggtgtatgaagcctttatacaaagtggagcagatgaggcttggtgccaggctcgaggtctgaattgggcagcattgtgccaagcccataaacttcggggagaactcctagaactcatgcaacgaattgaacttcccttgtccctaccagcctttggctctgagcagaatcgcagagaccttcagaaagcactggtgtcaggatactttctcaaggtggccagagacacagacgggactggaaattaccttctcctaacccataagcatgtggcccagctctcctcatactgctgctaccgaagccgcagagctcctgccagacccccaccatgggtgctctaccacaatttcaccatatccaaagacaactgcctttccattgtttctgagattcaaccacagatgtga

SEQ ID NO: 2705 - DNA, 9761 bp, Homo sapiens
  SIMILAR (8483)..(8686): 971254mologous to Homo sapiens carboxyl ester lipase,accession number M94579,Smith-Waterman Score=369.
atgctcaccatggggcgcctgcaactggttgtgttgggcctcacctgctgctgggcagtggcgagtgccgcgaaggtaagagcccagcagaggggcaggtcctgctgctctctcgctcaatcagatctggaaacttcgggccaggctgagaaagagccccagcacagccccgccagcagatccccgggcactcacgctcatttcatatggggacaggtgcccaggtagaacacaggatgcccaaattccatttgaatttcagataaactgccaagaactgctgtgtaagtaatgtccccatgcaaatattttgaaacaaaattttcttatgggccgggcgcaagtggctcacacctgcaatcccaccaggtttgggaggccgaggtgggtggatcacttgaggtcaggagttggagaccagcctggccaaacatggtgaaaccccgtctctactaaaaatacaaatattaatcgggcgtggtggtgggtgcctgtaatcccagctactcgggaggctgaggcaggagaaccgcttgaagctgggaggtggagattgcggtgagctgagatcacgctactgcactccagcctgggtgacagggcgagactctgtctcaaaaaatagaaaaagaaaaaaatgaaacatactaaaaaacaattcactgtttacctgaaattcaaatgtaactgggcctcttgaatttacatttgctaatcctggtgattccacctaccaacctctctgttgttcccattttacagaaggggaaacgggcccaggggcagggagtgtggagagcaggcagacgggtggagagaagcaggcaggcagtttgcccagcatggcacagctgctgcctcctattcctgtgcaggaagctgaaagccgggctactccacacccgggtccgggtccctccagaaagagagccggcaggcaggagctctctcgaggcatccataaattctaccctctctgcctgtgaaggagaagccacagaaaccccaagccccacaggaagccggtgtcggtgcccggcccagtccctgcccccagcaggagtcacacaggggaccccagatcccaaccacgctgttctgctgcctgcggtgtctcaggccctggggactcctgtctccacctctgctgcctgctctccacactccctggccctgggaccgggaggtttgggcagtggtcttgggctcctgactcaaaggagaggtcaccttcttcttgggcgagctcttcttggggtgctgagaggccttcggcaggtcatcacgacccctccccatttccccaccctgaggccctctggccagtctcaattgcacagggatcacgccactggcacaaggagacacagatgcctcgcaggggatgcccacgatgcctgcatgtgttgcttctggttcctttcctccagttccaaccgccgcactctcccacaccagtgtgacagggggcccatcaccctagacttcagagggctgctgggaccctggctgggcctgggggtgtagggccaccctgcccttccccacctggaacctggcacaggtgacagccagcaagcaatgacctggtcccaccatgcaccacgggaagagggagctgctgcccaagatggacaggaggtggcactggggcagacagctgcttctcaacagggtgacttcaagcccaaaagctgcccagcctcagttccgtcagggacagagggtggatgagcaccaacctccaggcccctcgtgggggtggacagcttggtgcacagaggccattttcatggcacagggaagcgtggcgggggtgggaggtgtggtccctagggggttctttaccagcagggggctcaggaactgtggggacttgggcatggggccatcgactttgtgcccagccagctaggccctgtgcagggagatgggaggagggaaaagcaggccccacccctcagaaaggaggaaggttggtgtgaaacatcccgggtacactgagcattgggtacactcctcccgggagctggacaggcctcccatgtgatggcaaacaggccgacaggagacacggctgttgctcgtcttccacatggggaaactgaggatcggagtcaaagctgggcggccatagccagaacccaaacctccatcccacctcttggccggcttccctagtgggaacactggttgaaccagtttcctctaagattctgggagcaggacacccccagggataaggagaggaacaggaatcctaaagccctgagcattgcagggcagggggtgctgcctgggtctcctgtgcagagctgtcctgctttgaagctgtctttgcctctgggcacgcggagtcggcttgccttgccccctccggattcaggccgatggggcttgagcccccctgaccctgcccgtgtctccctcgcagctgggcgccgtgtacacagaaggtgggttcgtggaaggcgtcaataagaagctcggcctcctgggtgactctgtggacatcttcaagggcatccccttcgcagctcccaccaaggccctggaaaatcctcagccacatcctggctggcaaggtgggagtgggtggtgccggactggccctgcggcggggcgggtgagggcggctgccttcctcatgccaactcctgccacctgcagggaccctgaaggccaagaacttcaagaagagatgcctgcaggccaccatcacccaggacagcacctacggggatgaagactgcctgtacctcaacatttgggtgccccagggcaggaagcaaggtctgcctcccctctactccccaagggaccctcccatgcagccactgccccgggtctactcctggcttgagtctgggggctgcaaagctgaacttccatgaaatcccacagaggcggggaggggagcgcccactgccgttgcccagcctggggcagggcagcgccttggagcacctccctgtcttggccccaggcacctgctgcacagggacaggggaccggctggagacagggccaggcggggcgtctggggtcaccagccgctcccccatctcagtctcccgggacctgcccgttatgatctggatctatggaggcgccttcctcatggggtccggccatggggccaacttcctcaacaactacctgtatgacggcgaggagatcgccacacgcggaaacgtcatcgtggtcaccttcaactaccgtgtcggcccccttgggttcctcagcactggggacgccaatctgccaggtgcgtgggtgccttcggccctgaggtggggcgaccagcatgctgagcccagcagggagattttcctcagcacccctcaccccaaacaaccagtggcggttcacagaaagacccggaagctggagtagaatcatgagatgcaggaggcccttggtagctgtagtaaaataaaagatgctgcagaggccgggagagatggctcacgcctgtaatcccagcactttaggaggcccacacaggtgggtcacttgagcgcagaagttcaagaccagcctgaaaatcactgggagacccccatctctacacaaaaattaaaaattagctggggactgggcgcggcggctcacctctgtaatcccagcacgttgggagcccaaggtgggtagatcacctgaggtcaggagtttgagaccagcctgactaaaatggagaaacctcttctctactaaaaatacaaaattagccaggcgtggtggcgcttgcctgtaatcccagctactcgggaggctgaggcaggagaatcgcttgaactcaggaggcggaggttgcggtgagccgagatcatgccactgcactccagcctggagaacaagagtaaaactctgtctcaaaaaaaaaaaaaaaaaaaaaatagccaggcgtggtatctcatgcctctgtcctcagctacctgggaggcagaggtggaaggatcgcttgagcccaggggttcaaagctgcagtgagccgtggtcgtgccactgcactccagcctgggcgacagagtgaggccccatctcaaaaataagaggctgtgggacagacagacaggcagacaggctgaggctcagagagaaaccaggagagcagagctgagtgagagacagagaacaataccttgaggcagagacagctgtggacacagaagtggcaggacacagacaggagggactggggcaggggcaggagaggtgcatgggcctgaccatcctgcccccgacaaacaccaccccctccagcaccacaccaacccaacctcctggggacccaccccatacagcaccgcacccgactcagcctcctgggacccacccactccagcaaccaacgtgacctagtctcctgggacccaccccctccagcaccctacccgacccagcttcttagggacccaccatttgccaactgggctctgccatggccccaactctgttgagggcatttccaccccacctatgctgatctcccctcctggaggccaggcctgggccactggtctctagcaccccctcccctgccctgcccccaggtaactatggccttcgggatcagcacatggccattgcttgggtgaagaggaatatcgcggccttcgggggggaccccaacaacatcacgctcttcggggagtctgctggaggtgccagcgtctctctgcaggtctcgggatccctgtggggagggcctgccccacaggttgagaggaagctcaaacgggaaggggagggtgggaggaggagcgtggagctggggctgtggtgctggggtgtccttgtcccagcgtggggtgggcagagtggggagcggccttggtgacgggatttctgggtcccgtagaccctctccccctacaacaagggcctcatccggcgagccatcagccagagcggcgtggccctgagtccctgggtcatccagaaaaacccactcttctgggccaaaaaggtaaacggaggagggcagggctgggcggggtgggggctgtccacatttccgttctttatcctggaccccatccttgccttcaaatggttctgagccctgagctccggcctcacctacctgctggccttggttctgcccccaggtggctgagaaggtgggttgccctgtgggtgatgccgccaggatggcccagtgtctgaaggttactgatccccgagccctgacgctggcctataaggtgccgctggcaggcctggagtgtgagtagctgctcgggttggcccatggggtctcgaggtgggggttgaggggggtactgccagggagtactccggaggagagaggaaggtgccagagctgcggtcttgtcctgtcaccaactagctggtgtctcccctcgaaggccccagctgtaagggagagggggtgccgtttcttctttttttttgagatggagtctcactgttgcccaggctggagtgcagtgtcacgatctcagctcactgcaacctccacctcctgggttcaagtgattctctgactcaacctcccatgtagctgggactacaggcacatgccaccatgcccagataatttttctgtgtgtttagtagggatggagtttcatcgtgttagctaggatgatctcggtcttgggacctcatgatctgcccacctcggcctcccaaagtgctggaattacaggcgtgagccactgtgcccggccccttctttattcttatctcccatgagttacagactcccctttgagaagctgatgaacatttggggccccctcccccacctcatgcattcatatgcagtcatttgcatataattttagggagactcatagacctcagaccaagagcctttgtgctagatgaccgttcattcattcgttcattcattcagcaaacatttactgaaccgtagcactggggcccagcctccagctccactattctgtaccccgggaaggcctggggacccattccacaaacacctctgcatgtcagccttaccagcttgctacgctaaggctgtccctcactcattcttctatggcaacatgccatgaagccaagtcatctgcacgtttacctgacatgagctcaactgcacgggctggacaagcccaaacaaagcaacccccacggccccgctagaagcaaaacctgctgtgctgggcccagtgacagccaggccccgcctgcctcagcagccactgggtcctctaggggcccgtccaggggtctggagtacaatgcagacctcccaccatttttggctgatggactggaacccagccctgagagagggagctccttctccatcagttccctcagtggcttctaagtttcctccttcctgcttcaggcccagcaaagagagagaggagagggaggggctgccgctgaagaggacagatctggccctagacagtgactctcagcctggggacgtgtggcagggcctggagacatctgtgattgtcacagctggggagggggtgctcctggcacctcgtgggtcgaggccggggatgctctaaacatcctacagggcacaggatgcccctgatggtgcagaatcaaccctgccccaagtgtccatagatcagagaagggaggacatagccaattccagccctgagaggcaaggggcggctcaggggaaactgggaggtacaagaacctgctaacctgctggctctcccacccagaccccatgctgcactatgtgggcttcgtccctgtcattgatggagacttcatccccgctgacccgatcaacctgtacgccaacgccgccgacatcgactatatagcaggcaccaacaacatggacggccacatcttcgccagcatcgacatgcctgccatcaacaagggcaacaagaaagtcacggagtaagcagggggcacaggactcaggggcgacccgtgcgggagggccgccgggaaagcactggcgagggggccagcctggaggaggaaggcattgagtggaggactgggagtgaggaagttagcaccggtcggggtgagtatgcacacaccttcctgttggcacaggctgagtgtcagtgcctacttgattcccccagggaggacttctacaagctggtcagtgagttcacaatcaccaaggggctcagaggcgccaagacgacctttgatgtctacaccgagtcctgggcccaggacccatcccaggagaataagaagaagactgtggtggactttgagaccgatgtcctcttcctggtgcccaccgagattgccctagcccagcacagagccaatgccaagtgaggatctgggcagcgggtggctcctgggggccttcctggggtgctgcaccttccagccgaggcctcgctgtgggtggctctcaggtgtctgggttgtctgggaaagtggtgcttgagtccccacctgtgcctgcctgatccactttgctgaggcctggcaagacttgagggcctctttttacctcccagcctacagggctttacaaaccctatgatcctctgccctgctcagccctgcaccccatggtccttcccactggagagttcttgagctaccttccatcccccatgctgtgtgcactgagagaacactggacaatagtttctatccactgactcttatgggcctcaactttgcccataatttcagcccaccaccacattaaaaatcttcatgtaataatagccaattataataaaaaataaggccagacacagtagctcatgcctgtaatcccagcacattgggaggtcaaggtgggaggatcacttgaggtcaggagtctgagactagtctggccaacatggcaaaaccccatctctactaaaaatacaaaaattatccaggcatggtggtgcatgcctataatcctagctactcaggaggctgaggtagcagaattgattgacccagggaggtggaggttgcagtgagccgagattacgccactgcactccagcaggggcaacagagtgagactgtgtctcgaataaataagtaaataaataataaaaataaaaaataagttaggaatacgaaaaagataggaagataaaagtatacctagaagtctaggatgaaagctttgcagcaactaagcagtacatttagctgtgagcctcctttcagtcaaggcaaaaagggaaacagttgagggcctataccttgtccaatctaattgaagaatgcacattcacttggagagcaaaatatttcttgatactgaattctagaaggaaggtgcctcacaatgttttgtggaggtgaagtataaattcagctgaaattgtggaacccatgaatccatgaatttggttctcagctttcccttccctgggtgtaagaagccccatctcttcatgtgaattccccagacacttccctgcccactgcccgggacctccctccaagtccggtctctgggctgatcggtccccagtgagcaccctgcctacttgggtggtctctcccctccaggagtgccaagacctacgcctacctgttttcccatccctctcggatgcccgtctaccccaaatgggtgggggccgaccatgcagatgacattcagtacgttttcgggaagcccttcgccacccccacgggctaccggccccaagacaggacagtctctaaggccatgatcgcctactggaccaactttgccaaaacagggtaagacgtgggttgagtgcagggcggagggccacagccgagaagggcctcccaccacgaggccttgttccctcatttgccagtggagggactttgggcaagtcacttaacctccccctgcatcggaatccatgtgtgtttgaggatgagagttactggcagagccccaagcccatgcacgtgcacagccagtgcccagtatgcagtgaggggcatggtgcccagggccagctcagagggcggggatggctcaggcgtgcaggtggagagcagggcttcagccccctgggagtccccagcccctgcacagcctcttctcactctgcagggaccccaacatgggcgactcggctgtgcccacacactgggaaccctacactacggaaaacagcggctacctggagatcaccaagaagatgggcagcagctccatgaagcggagcctgagaaccaacttcctgcgctactggaccctcacctatctggcgctgcccacagtgaccgaccaggaggccacccctgtgccccccacaggggactccgaggccactcccgtgccccccacgggtgactccgagaccgcccccgtgccgcccacgggtgactccggggccccccccgtgccgcccacgggtgactccggggccccccccgtgccgcccacgggtgactccggggccccccccgtgccgcccacgggtgactccggggccccccccgtgccgcccacgggtgactccggggccccccccgtgccgcccacgggtgactccggggccccccccgtgccgcccacgggtgactccggcgccccccccgtgccgcccacgggtgacgccgggcccccccccgtgccgcccacgggtgactccggcgccccccccgtgccgcccacgggtgactccggggccccccccgtgacccccacgggtgactccgagaccgcccccgtgccgcccacgggtgactccggggccccccctgtgccccccacgggtgactctgaggctgcccctgtgccccccacagatgactccaaggaagctcagatgcctgcagtcattaggttttagcgt

SEQ ID NO: 2706 - DNA, 575 bp, Homo sapiens
  misc_feature (1)...(575): n = a,t,c or g
ctcagaagctgcttgctctgcccncaggacaggagcttgacggatgaagtgcagccagccacncaggtgccatttccagtctgacttccagaaatgtgcaccatgtcctagagcacagacccattggctggagcctcctgggagggttcaaaccatcagctctatgagaaatgcccagaaaggctttgccgactccatccgtctgtggaggctgcctgcctccggggtgggatgggtggtttctcctgagggtgcaggggatccttctcatctcctggaccctccagggcactctgctccctattccccagctcctaggcagctgagccgggtcccttaggggaggtgaccaggagctttggtgcagggagctcttggtggggcaaagggctggacccctgccaggtctgtggacatggttatatgcccgggagaggggggtgcagggccccagggatggcccccaatcccacctctgtttattctgtaaactgcaacctataaataacctttagcattcctattgtaacaaaattaatttttatgaaataaattatatttcatagtctaataaa

SEQ ID NO: 2707 - DNA, 3022 bp, Homo sapiens
gattatttggataagtcctttttaagaaaaaaaaaagaaaatgaaaaacaacacaaaaaaaatagaaaactcttttcttgagtgtggatgagaatgggcacgctcacacttctggccaggagtgaatgtgccttgtgtgtgtgtgtgtgtgtacatgtacgcgtgtgcattgaggagagagagactgaacagagagtactttgctgctaacgaatccatcttggactaaattctgacaaggcctcagtttccccagttgtgcagggagtaggtcagacagggttttcactgtctagatttagctggttagattttcctctaaaatcttaagcagatgctgaatccataaagccaaggagtgctgagggctggagtgggtgggccctccctcccacagccccagggagatacatctggactcctgggaatctggattaagaaagttgggatgaaagaggaggactgctcaggccagttgtgagccagggagaatgttccagtctggttttggtctggtggctcctagaaagggatgtggcccagaagtgggactcaaacagagagatgaagtaggggaggggagtcctccacgggcatctctctcctggcggctggatagctttaccctagggtggggccagccctgacaccctcatcccctcctcagcccagcagcctctagagcagcgtggtgctctcttgatggccaggaatccagaatctgcccttccccaaccttggtttctccttctgtaaagcagagtgatggctgagaagtcctctctagctgcagaagcctgagcttcccggtgtcagtcagctctgcaacgtgggagccttggaggcgggtggcctggctgtgcttcatatgcccaggagtggagaaggaggctgagaagctggtttcccagctctgatctccacaggcacctcctataaccctcctctcacccaccccgctacggtctgagagatctgaaataacctttcccagtgggcagggttgccagggttgaggggacagcacataccacccccacccaacctgttcgaggggccctgcatggcacgggatgagtccctgccctgtgcagctgcctggcagtggctgggacaaggatcttgcagccagcacagaggcctcttcaaaggcctctccctcttggcactccaggcaaggcaggtgcccgcttccccaacacctccaggcagtgaccctagggcatgccccagcaggtctccgagcagccactgggacccgtctcagcacatcctggcctttgaaagtctgatatcctgagaggagggcaggttttagggccgcagttccagccagcgtccccagcctggcttccctgccatggactcagtagctcgtggggcttcttaccacccaccagccccgctggggtgcggcctggctgtgggcaaaggaggacttgcctggagatttgagagaagattccttctaccagggctgctgaggggccaggcctgcatcaggggctaggctctggctgggcccggaggctgagactaaggctttcgaccctggtgcctccatgtggatgctgcctcagacaaaggcagtgagccttccctgccaaagtgcccatcccatgggctcggcctcactggtcactgttagcccatgaacacgtgtgggcctcggtcacgtggctttgagggcagtctgaccaggctagaccacacgtgccgtgacagggggtgccattcccctcgcaggctctaatgtgcccacatgtagcctggcagtccaaagaccaagaatcaacttgcaaatctgccattaaactgctgtgcgacttcaggcatatcactgccttctctgggcttcagtgtccttttcatacctagaagtctgcggtctgaggctctttgggttcagacacactgttctaggcttctgtaggggaccttgtgatctgccgtgcccctcctccctgttcttttctgtcctccccaccccaccctcagaagctgcttgctctgcccccaggacaggagcttgacggatgaagtgcagccagccacccaggtgccatttccagtctgacttccagaaatgtgcaccatgtcctagagcacagacccattggctggagcctcctgggagggttcaaaccatcagctctatgagaaatgcccagaaaggctttgccgactccatccgtctgtggaggctgcctgcctccggggtgggatgggtggtttctcctccaattcagacccaagaggtagcccccgagggcatgtacctggtgggaagcagctcaggtacccttgggggttgcagggcccttacgcaggtatttctctctctctcctctctggggtgcgtgtgtgcgtgcgcgtgtgcgtgcctatgcttttctctgtgggcacatcaggatgtttcctcgtagagcatgtgcaacgtgtcccaacctgaagcgagcgtgtgtgtgtgctcctctgcgtcccaggtttggaacgtctagggtttggtgtgcctgtcttctgccctcccctgagcccacagggtcagtcaatgtaatcttctacgtgcctctcccttctggccttctctcaacaagtgcccccggctccagagcttcaggggtaggggttctccttgagggtgcaaggggatccttctcatctccctggaccctcccagggcacttctggtccctattccccagctccttaggcagctgagccggtgtcccttagggaaaggtgaccaggaagctttggtgcagggagctcttggttggggacaaagggcttggacccctgcacagtgttctgtggacaatggttaatatgcccgggaagaggggggtgacagggcccacagggtatggcccccaatttcccacctctgtttattctgtaaactgcaacctatttaaataacctttagcattcctatttgtaacaaaattaatttttatgaaataaattatatttcctagtctaataaaatccgggttgcatttaaaaaaaaaaaaaaaaa

SEQ ID NO: 2708 - DNA, 10615 bp, Homo sapiens
  SIMILAR (6313)..(8235): 761254mologous to Homo sapiens collagen type VI, alpha 3 chain,accession number X52022,Smith-Waterman Score=2424.
cagtttggagctcagtcttccaccaaaggccgttcagttctcctgggctccagcctcctgcaaggactgcaagagttttcctccgcagctctgagtctccacttttttggtggagaaaggctgcaaaaagaaaaagagacgcagtgagtgggaaaagtatgcatcctattcaaacctaattgaatcgaggagcccagggacacacgccttcaggtttgctcaggggttcatatttggtgcttagacaaattcaaaatgaggaaacatcggcacttgcccttagtggccgtcttttgcctctttctctcaggctttcctacaactcatgcccagcagcagcaagcagatgtcaaaaatggtgcggctgctgatataatatttctagtggattcctcttggaccattggagaggaacatttccaacttgttcgagagtttctatatgatgttgtaaaatccttagctgtgggagaaaatgatttccattttgctctggtccagttcaacggaaacccacataccgagttcctgttaaatacgtatcgtactaaacaagaagtcctttctcatatttccaacatgtcttatattgggggaaccaatcagactggaaaaggattagaatacataatggcaaagccacctcaccaaggctgctggaagccgggccggtgacggagtccctcaggttatcgtagtgttaactgatggacactcgaaggatggccttgctctgccctcagcggaacttaagtctgctgatgttaacgtgtttgcaattggagttgaggatgcagatgaaggagcgttaaaagaaatagcaagtgaaccgctcaatatgcatatgttcaacctagagaattttacctcacttcatgacatagtaggaaacttagtgtcctgtgtgcattcatccgtgagtccagaaagggctggggacacggaaacccttaaagacatcacagcacaagactctgctgacattattttccttattgatggatcaaacaacaccggaagtgtcaatttcgcagtcattctcgacttccttgtaaatctccttgagaaactcccaattggaactcagcagatccgagtgggggtggtccagtttagcgatgagcccagaaccatgttttccttggacacctactccaccaaggcccaggttctgggtgcagtgaaagccctcgggtttgctggtggggagttggccaatatcggcctcgcccttgatttcgtggtggagaaccacttcacccgggcagggggcagccgcgtggaggaaggggttccccaggtgctggtcctcataagtgccgggccttctagtgacgagattcgctacggggtggtagcactgaagcaggctagcgtgttctcattcggccttggagcccaggccgcctccagggcagagcttcagcacatagctaccgatgacaacttggtgtttactgtcccggaattccgtagctttggggacctccaggagaaattactgccgtacattgttggcgtggcccaaaggcacattgtcttgaaaccgccaaccattgtcacacaagtcattgaagtcaacaagagagacatagtcttcctggtggatggctcatctgcactgggactggccaacttcaatgccatccgagacttcattgctaaagtcatccagaggctggaaatcggacaggatcttatccaggtggcagtggcccagtatgcagacactgtgaggcctgaattttatttcaatacccatccaacaaaaagggaagtcataaccgctgtgcggaaaatgaagcccctggacggctcggccctgtacacgggctctgctctagactttgttcgtaacaacctattcacgagttcagccggctaccgggctgccgaggggattcctaagcttttggtgctgatcacaggtggtaagtccctagatgaaatcagccagcctgcccaggagctgaagagaagcagcataatggcctttgccattgggaacaagggtgccgatcaggctgagctggaagagatcgctttcgactcctccctggtgttcatcccagctgagttccgagccgccccattgcaaggcatgctgcctggcttgctggcacctctcaggaccctctctggaacccctgaagttcactcaaacaaaagagatatcatctttcttttggatggatcagccaacgttggaaaaaccaatttcccttatgtgcgcgactttgtaatgaacctagttaacagccttgatattggaaatgacaatattcgtgttggtttagtgcaatttagtgacactcctgtaacggagttctctttaaacacataccagaccaagtcagatatccttggtcatctgaggcagctgcagctccagggaggttcgggcctgaacacaggctcagccctaagctatgtctatgccaaccacttcacggaagctggcggcagcaggatccgtgaacacgtgccgcagctcctgcttctgctcacagctgggcagtctgaggactcctatttgcaagctgccaacgccttgacacgcgcgggcatcctgactttttgtgtgggagctagccaggcgaataaggcagagcttgagcagattgcttttaacccaagcctggtgtatctcatggatgatttcagctccctgccagctttgcctcagcagctgattcagcccctaaccacatatgttagtggaggtgtggaggaagtaccactcgctcagccagagagcaagcgagacattctgttcctctttgacggctcagccaatcttgtgggccagttccctgttgtccgtgactttctctacaagattatcgatgagctcaatgtgaagccagaggggacccgaattgcggtggctcagtacagcgatgatgtcaaggtggagtcccgttttgatgagcaccagagtaagcctgagatcctgaatcttgtgaagagaatgaagatcaagacgggcaaagccctcaacctgggctacgcgctggactatgcacagaggtacatttttgtgaagtctgctggcagccggatcgaggatggagtgcttcagttcctggtgctgctggtcgcaggaaggtcatctgaccgtgtggatgggccagcaagtaacctgaagcagagtggggttgtgcctttcatcttccaagccaagaacgcagaccctgctgagttagagcagatcgtgctgtctccagcgtttatcctggctgcagagtcgcttcccaagattggagatcttcatccacagatagtgaatctcttaaaatcagtgcacaacggagcaccagcaccagtttcaggtgaaaaggacgtggtgtttctgcttgatggctctgagggcgtcaggagcggcttccctctgttgaaagagtttgtccagagagtggtggaaagcctggatgtgggccaggaccgggtccgcgtggccgtggtgcagtacagcgaccggaccaggcccgagttctacctgaattcatacatgaacaagcaggacgtcgtcaacgctgtccgccagctgaccctgctgggagggccgacccccaacaccggggccgccctggagtttgtcctgaggaacatcctggtcagctctgcgggaagcaggataacagaaggtgtgccccagctgctgatcgtcctcacggccgacaggtctggggatgatgtgcggaacccctccgtggtcgtgaagaggggtggggctgtgcccattggcattggcatcgggaacgctgacatcacagagatgcagaccatctccttcatcccggactttgccgtggccattcccacctttcgccagctggggaccgtccaacaggtcatctctgagagggtgacccagctcacccgcgaggagctgagcaggctgcagccggtgttgcagcctctaccgagcccaggtgttggtggcaagagggacgtggtctttctcatcgatgggtcccaaagtgccgggcctgagttccagtacgttcgcaccctcatagagaggctggttgactacctggacgtgggctttgacaccacccgggtggctgtcatccagttcagcgatgaccccaaggcggagttcctgctgaacgcccattccagcaaggatgaagtgcagaacgcggtgcagcggctgaggcccaagggagggcggcagatcaacgtgggcaatgccctggagtacgtgtccaggaacatcttcaagaggcccctggggagccgcattgaagagggcgtcccacagttcctggtcctcatctcgtctggaaagtctgacgatgaggtggtcgtcccggcggtggagctcaagcagtttggcgtggcccctttcacgatcgccaggaacgcagaccaggaggagctggtgaagatctcgctgagccccgaatatgtgttctcggtgagcaccttccgggagctgcccagcctggagcagaaactgctgacgcccatcacgaccctgacctcagagcagatccagaagctcttagccagcactcgctatccacctccagcagttgagagtgatgctgcagacattgtctttctgatcgacagctctgagggagttaggccagatggctttgcacatattcgagattttgttagcaggattgttcgaagactcaacatcggccccagtaaagtgagagttggggtcgtgcagttcagcaatgatgtcttcccagaattctatctgaaaacctacagatcccaggccccggtgctggacgccatacggcgcctgaggctcagaggggggtccccactgaacactggcaaggctctcgaatttgtggcaagaaacctctttgttaagtctgcggggagtcgcatagaagacggggtgccccaacacctggtcctggtcctgggtggaaaatcccaggacgatgtgtccaggttcgcccaggtgatccgttcctcgggcattgtgagtttaggggtaggagaccggaacatcgacagaacagagctgcagaccatcaccaatgaccccagactggtcttcacagtgcgagagttcagagagcttcccaacatagaagaaagaatcatgaactcgtttggaccctccgcagccactcctgcacctccaggggtggacacccctcctccttcacggccagagaagaagaaagcagacattgtgttcctgttggatggttccatcaacttcaggagggacagtttccaggaagtgcttcgttttgtgtctgaaatagtggacacagtttatgaagatggcgactccatccaagtggggcttgtccagtacaactctgaccccactgacgaattcttcctgaaggacttctctaccaagaggcagattattgacgccatcaacaaagtggtctacaaagggggaagacacgccaacactaaggtgggccttgagcacctgcgggtaaaccactttgtgcctgaggcaggcagccgcctggaccagcgggtccctcagattgcctttgtgatcacgggaggaaagtcggtggaagatgcacaggatgtgagcctggccctcacccagaggggggtcaaagtgtttgctgttggagtgaggaatatcgactcggaggaggttggaaagatagcgtccaacagcgccacagcgttccgcgtgggcaacgtccaggagctgtccgaactgagcgagcaagttttggaaactttgcatgatgcgatgcatgaaaccctttgccctggtgtaactgatgctgccaaagcttgtaatctggatgtgattctggggtttgatggttctagagaccagaatgtttttgtggcccagaagggcttcgagtccaaggtggacgccatcttgaacagaatcagccagatgcacagggtcagctgcagcggtggccgctcgcccaccgtgcgtgtgtcagtggtggccaacacgcccttcggcaccggaggaggcctttgactttgacgagtaccagccagagatgctcgagaagttccggaacatgcgcaggccagcacccctaccgtcctcacggaggacaccctgaaggtctacctgaacaagttcagacagtcctcgccggacagcgtgaaggtggtcattcattttactgatggagcagacggagatctggctgatttacacagagcatctgagaacctccgccaagaaggagtccgtgccttgatcctggtgggccttgaacgagtggtcaacttggagcggctaatgcatctggagtttgggcgagggtttatgtatgacaggcccctgaggcttaacctggttggccctgggttaatgaccaagcggaccagcttgacaacattgccgagaaagcttgctgtggggttccctgcaagtgctctgggcagaggggagaccgcgggcccatcggcagcatcgggccaaagggtattcctggagaagacggctaccgaggctatcctggtgatgagggtggaccccggtgagcgtggtccgcctggtgtgaacggcactcaaggtttccagggctgcccgggccagagaggagtaaagggctctcggggattcccaggagagaagggcgaagtaggagaaattggactggatggtctggatggtgaagatggagacaaaggattgcctggttcttctggagagaaagggaatcctggaagaaggggtgataaaggacctcgaggagagaacggagaaagaggagatgttgtgattctagggggacccggtttatcttatgacaagacagccaggagagaggacccggaggagaaaccggtgacctcggccccatgggtgtcccagggagagatggagtacctggaggacctggagaaactgggaagaatggtggctttggccgaaggggaccccccggagctaagggcaacaagggcggtcctggccagccgggctttgagggagagcaggggaccagaggtgcacagggcccagctggtcctgctggtcctccagggctgataggagaacaaggcatttctggacctcggggaagcggaggtgccgctggtgctcctggagaacgaggcagaaccggtccactgggaagaaagggtgagccccggagagccaggaccaaaaggaggaatcgggaaccggggccctcgtggggagacgggagatgacgggagagacggagttggcagtgaaggacgcagaggcaaaaaaaggagaaagaggattccctggatacccaggaccaaagggtaacccaggtgaacctgggctaaatggaacaacaggacccaaaggcatcagaggccgaaggggaaattcgggacctccagggatagttggacagaaggggagaccctggctacccaggaccagctggtcccaagggcaacaggggcgactccatcgatcaatgtgccctcatccaaagcatcaaagataaatgcccttgctgttacgggcccctggagtgccccgtcttcccaacagaactagcctttgctttagacacctctgagggagtcaaccaagacactttcggccggatgcgagatgtggtcttgagtattgtgaatgacctgaccattgctgagagcaactgcccacggggggctcgggtggctgtggtcacctacaacaacgaggtgaccacggagatccggtttgctgactccaagaggaagtcggtcctcctggacaagattaagaaccttcaggtggctctgacatccaaacagcagagtctggagactgccatgtcgtttgtggccaggaacacatttaagcgtgtgaggaacggattcctaatgaggaaagtggctgttttcttcagcaacacacccacaagagcatccccacagctcagagaggctgtgctcaaactctcagatgcggggatcacccccttgttccttacaaggcaggaagaccggcagctcatcaacgctttgcagatcaataacacagcagtggggcatgcgcttgtcctgcctgcagggagagacctcacagacttcctggagaatgtcctcacgtgtcatgtttgcttggacatctgcaacatcgacccatcctgtggatttggcagttggaggccttccttcagggacaggagagcggcagggagtgatgtggacatcgacatggctttcatcttagacagcgctgagaccaccaccctgttccagttcaatgagatgaagaagtacatagcgtacctggtcagacaactggacatgagcccagatcccaaagggctcccagcacttcgccagagtggcagttgtgcagcacgcgccctctgagtccgtggacaatgccagcatgccacctgtgaaggtggaattctccctgactgactatggctccaaggagaagctggtggacttcctcagcaggggaatgacacagttgcagggaaccagggccttaggcagtgccattgaatacaccatagagaatgtctttgaaagtgccccaaacccacgggacctgaaaattgtggtcctgatgctgacgggcgaggtgccggagcagcagctggaggaggcccagagagtcatcctgcaggccaaatgcaagggctacttcttcgtggtcctgggcattggcaggaaggtgaacatcaaggaggtatacaccttcgccagtgagccaaacgacgtcttcttcaaattagtgggacaagtccaccgagctcaacgaggagcctttgatgcgcttcgggaggctgttgccgtccttcgtcagcagtgaaaatgctttttacttgtccccagatatcaggaaacagtgtgattgggttccaaggggaccaacccacaaagaaccttgtgaagtttggtcacaaacaagtaaatgttcccgaataacgttacttcaagtcctacatccaacccaagtgacgacaacgaaagccggtgactacgacgaagccggtgaccaccacaacaaagcctgtaaccaccacaacaaagcctgtgactattataaatcatctcatttgtgaagccagccgctgcaaaagcccggcccctgcgaaacctgtggcttgccaagcctgtggccacaaagacggccactgttagacccccagtggcggtgaagccagcaacggcagcgaagcctgtagcaagcaaagccagcagctgtaagaccccccgctgctgctgctgcaaaaccagtggcgaccaagcctgaggtccctaggccacaggcagccaaaccagctgccaccaagccagccaccactaagcccatggttaagatgtcccgtgaagtccaggtgtttgagataacagagaacagcgccaaactccactgggagaggcctgagccccccggtccttatttttatgacctcaccgtcacctcagcccatgatcagtccctggttctgaagcagaacctcacggtcacggaccgcgtcattggaggcctgctcgctgggcagacataccatgtggctgtggtctgctacctgaggtctcaggtcaaagccatctaccacggaagtttcagtacaaagaaatctcagcccccacctccacagccatgcaaggtcagcttctaagttcaaccatcaatctaatggtgatgcacagaaccaattggctctcactgaaacagatatatgcaagttgccgaaagacgaaggaactttgcaagggatttcatattaaaatggtactatgatccaaacaccgaaaagctgtgcaaagattctggtatggaggttgtggtggaaacgaaaacaaatttggatcacagaaagaatgtgaaaaggtttgcgctcctgtgctcgccaaacccggagtcatcagtgtgatgggaacctaagcgtgggtggccaacatcatatacctcttgaagaagaaggagtcagccatcgccaacttgtctctgtagaagctccgggtgtagattcccttgcactgtatcatttcatgctttgatttacactcgaactcgggagggaacatcctgctgcatgacctatcagtatggtgctaatgtgtctgtggaccctcgctctctgtctccaggcagttctctcgaatacctttgaatgttgtgtaacagttagcccactgctggtgtttatgtgaacatttcctatcaatccaaattccctctggagtttcatgttatgccctgttgcaggcaaactgtaaatgtctaaaaagagaatgcaagaggggcacgggctacatctatatactttttgcttggttcaattttttttccctttttagttaagccatgactttagatgggaaagcctgtgtatctgtggagaaacaagagaccaactttttcattccctgcccccaatttcccagactaagatttcaagctaattttctttttctgaagcctctaacaaatgatctagttcagaaggaagcaaaatcccttaatctatgtgcaccgttggggaccaatgccttaattaaagaatttaaaaaagttgtaatagagaatatttttggcattcctctcaatgttgtgtgtttttttttttttttgtgtgctggagggaggggatttaattttaattttaaaatgtttaggaaatttatccaaagaaactttttaataaagtatattgaaagttaaaaaaaaaaaaaaaaa

SEQ ID NO: 2709 - DNA, 805 bp, Homo sapiens
tttttttttttttttaagcacagcaataaagttttaatggaatagctttggcccaggcagaggcagttcccagatgtctcaggacgcgtgtgaaccccaagaagttgggggcgttatctgggcccttgggatccattcccctgggtataaagtgttggtacgtggctccaggcctggcccactcagcctcccccaggaaggcttctcaagtggagaaggttcttggcctcagaactcacggcgctgctgctcacgctgaccccccactagatgcagatcggtgtagaaaggcctgccagggcagggcatgagggccccaagctggaagcagcccagaaatccttttaccagaggacaactccctaatccgctgggcaggggcggggtgtcacacgcaggattccgcgacgactgtcactgcctcctgggcgcccctctgtgcgggagcggggagggaagaggatggaacgccctgtgtctgcctcgggcgcagtgcgaggcccaagctggtctttgggcggcccttgcgcacctctgcagcgctgcgacctggtgcctgtatcccccacggcctcctctgctacccacgagagccggttgattttcggccgggctcagggagggcgtggcctccgcgttccccatccccctccaggacccacgcccttctcggagcgcaccagggtcagagccgggatggtccccgatcccccagcgcccccacgcctggtgaccttgggtcgggcgtcccctcacctgacgctcccgcggcgagcggctcccccgccgtgcaggtggcggccgc

SEQ ID NO: 2710 - DNA, 494 bp, Homo sapiens
  SIMILAR (317)..(285): 1001254mologous to Homo sapiens Human heat shock protein homologue 2 (HSPHH-2) protein sequence,accession number AAY32859,Smith-Waterman Score=55.
ttttttgattaaatgttctttatttgatgcttttgtgtgcacaacactataaggagttgcccaattcaccaagtcagcccgttcacacccttagttaaggtggccattaaggggccagggggtggcaatcagtaagctgcctcctgcctaactctctttctccaaccattctctataggctccagcgtagttgcgagccctgtggagacaaagaagcgtgagagactgacaggaatgacaggcagtccccatcacctcccaggttagagccacacctccccgtacccagtgtatccaagactccgggccagctgcgtgggcctggaggccccgcttgcccatctgacagaagaaaacgagatgctcatcttccagctttggcttctcagcagaatataaagcctggaaggcagctggctccatctgcagagcactctccaactcggacactggaggagtggagagggtagaagggaaagccagcaatttggcac

SEQ ID NO: 2711 - DNA, 548 bp, Homo sapiens
  SIMILAR (103)..(237): 731254mologous to Homo sapiens Human myelin oligodendrocyte glycoprotein gene,accession number AAZ29204,Smith-Waterman Score= 158.
ccctggtgatttaggcttgttttgtcgcccaggctggagggcattggtgcaatcttggctcattgaaacctgtgcctcctgggttcaaacgattctcctgcctcagctacccgagtagctgggattacaggcacccgccaccatgccccgctaatttttgtatttttagtagagatggggtttcgccatgttggccaggctggtcacaaactcctgatctcgggtgatccgcccgcctagcctcccaaagtgctgggattacaggcgtgagccaccgcgcctggccgccttgtccaatttctaaggtcttggacaggtacccaccccactgaaacaggcaacacttctttctttactggacacatccccttctctcccagccatattttttcttttctttttttgagacaggttctcgctctgtcacccaggctgaagtacagtgtggtgatcactgctcactacacccttgacctactgggctcaagggatcctcccgcttcagcctcccgattaggaactacaaggacgcgccaccattcccgcta

SEQ ID NO: 2712 - DNA, 1243 bp, Homo sapiens
  SIMILAR (255)..(392): 911254mologous to Homo sapiens Human heat shock protein homologue 2 (HSPHH-2) protein sequence,accession number AAY32859,Smith-Waterman Score=202.
tttcgtgggcgggccagggccgcactccggagactcgcggttgctacgcgcaccatggctggaggtacctgcgggggattcctggggccgcggttctcttggtcctctgggttgaggcgtggcagggagtggggtggcggagcgaaggggcgtggctgaggggtcttcgtgcacaccctaccgggaggggcgctgccaggtgaggggatgccatggcggccgtgactcctaggccccctcttcctgaaggctgtcgcgccccttcctcagcgcccacggtctcgcttcctgaactccgttcactcctagcctccggacgggcccggctcttcgacgtgcgctctcgcgaggaggcggcagctgggaccatcccaggggcgctcaacatcccgggtatagggtggagaggggacgcccaggtggtggaatagagaccgttcaggaggttctttgccaatgggacctcatttaggatggaatggggaaggcactgattatgggggtcctgcattcccgggagccagccctcagcttccgtaggaaggactgatggggggcggatcttggcatcggaactggcccatccagtttgagaagacagcaggcggagaggagaggggcagaccagcttctcttgacctccccaaatctggacgcctgagggggcatcccgccccgcctcctcacagcttagggagtggcttgcattcaaaagttgtcggtttctgttccttgaaattggggtgggggtaggggatggttatcatatgttgtttgggggcccccaggacccagcccttccaggcccagcttccgaacctgagtgccaaattgctggctttcccttctaccctctccactcctccagtgtccgagttggagagtgctctgcagatggagccagcctgccttccaggctttatattctgctgagaagccaaagctggaagatgagcatctcgttttcttctgtcagatgggcaagcggggcctccaggccacgcagctggcccggagtcttggatacactggggctcgcaactacgctggagcctatagagaatggttggagaaagagagttaggcaggaggcagcttactgattgccaccccctggccccttaatggccaccttaacctaagggtgtgaacgggctgacttggtgaattgggcaactccttataagtgttgtgcacacaaaagcatcaaataaagaacatttaatcaaaaaaaaaaaaaaaa

SEQ ID NO: 2713 - DNA, 851 bp, Homo sapiens
  SIMILAR (457)..(735): 541254mologous to Homo sapiens Homolog of rat Zymogen granule membrane protein,accession number AC002301,Smith-Waterman Score= 217.
ccggaaggactggggacacctgggatgttcaggagaatagaaatggccagatgtgtgttagtggagaaaagaagtgacacatagaccaggcacctggggtctaatatcttgagctggtcccgactccttctgcaacttctctgtctgtcctagttccaccagcactgcttggatactggtgctggcacagttccttctgtcaccaactttgctccccagccccagaatgttgacagtcgctctcctagcccttctctgtgcctcagcctctggcaatgccattcaggccaggtcttcctcctatagtggagagtatggaagtggtggtggaaagcgattctctcattctggcaaccagttggacggccccatcaccgccctccgggtccgagtcaacacatactacatcgtaggtcttcaggtgcgctatggcaaggtgtggagcgactatgtgggtggtcgcaacggagacctggaggagatctttctgcaccctggggaatcagtgatccaggtttctgggaagtacaagtggtacctgaaggaagctgggtatttggtaccaaccaagggccccctttttgtcttttgggaaaagcaaggggcccaagtttcaatgccgtccccttgcaccccaacaccgtcgtccgcttcatcagtggccggtctggttctctcatcgatgccattggcctgcactggggatgttttacccacactagctgcagcagatgctgagcctcctctccttggcaaggggcactgtgatgaggagtaagaactcccttatctctaacccccatccaaatggctcaatgaaaaaataggatgggtcatacaaggtttcaaaa

SEQ ID NO: 2714 - DNA, 1818 bp, Homo sapiens
  SIMILAR (1107)..(133): 991254mologous to Homo sapiens G protein-coupled receptor,accession number U34806,Smith-Waterman Score=1684.
tcagccccactgctccagaaggtacacgccataagctttggcaatgcccgtgtggtatttagtctgagaaccaggggtgcactggatctgcagagcagactcttcatacgcatctccaactatcagaggtgggatggattgggacctcttcctcctcctggcaaaatcttctgcatgaatgaaggtggagagagccttagtgaggtgactatctgatgtctcagtgctactcccaaagtcatagtttttcaggcaagggcacaagcagtggacaatggcccggcggatgtagctgtcgaagatatagtaaatgaaagggttgacacagctgttggcaaatgccaagggtccactcacctccataccaagctgaagaatagctgagggtaaatagtgttcttgccgcaacccagagacaatggccaggaacttgaaagtattgaagggcagccaggagacaagaaaggctgccacgacaataaagatgatctttatagatttcttcagctttttgttgtgctttcctgattgctggtaatgggcacacagcttccttgcaatgcaacagtagcaggtcacaatgctcaacaaagggacaaaaaaggtgaaaattaaggccaccagggaccatatgagtttaattggagttgcctttttctctgcacagtatggcttatcatcaatcagcgtgagctccctggacagaagagtaggcaaccccagcaggcaggagataaaccagatgctggcacagactacatatgcacagtctgtccttctgaatttcctggatacgactggccacacaatggccaggtagcggtcaacactcatgcaagtgagcaggaggacactgcagtgcatattgacggagatcatgtaggagctccctttgcacaggaaggagcccgtcctccacagtcctagagatgcttctttatccacccagagaggcaatgtgacaagaaaaatgaagtcagaggcagccagattgatgataaagatgtcgatcagtcttcggctgccgggtttgaaatgcaacgctcccatgagaacaaggttccccagcactccagtcaggaacacagctgtgtaaaagacattcaaggagccaatgtgggagttctgccagctgctaagtatgtctatgccattatgcattctggcactgacttttactggcagaccacagtgacattttgggtaccctggaatcaatgtcagctcagagccagtgtccagtagtctccaaaatgtctgatcatttcccttttcccaatgcacagttaccctggtaaaaggctgtaagtctccttgcctttgacagtttagtgctgccacctgccccctgccaccttgggatccaattattctcattgtatttaaattttgtagttgagggactgtggttcccactgttagatctgacataaagaaaagagcaattacagggatcttcaaagatgcaggtgctgctctcgcaaacctattttgcaaggcattggtcaagggtatatcttctggaccctcccagcagcgatgagtaggtctaaagcgactaatccactccaccatcctaatctccctaagcctttccattccttcctctacattaacccaagggggatcaggcacttccagcttactcacagtgggccatcttttaatccatacttcagctaacaaagcaaataagcctttagaacctcttttaactccctgagcttttgtgagtttaggtttgatgtgctttggggctttgatcggactttgtgcttgcatttgccgaagcttatatcccaccattgccacgggcat

SEQ ID NO: 2715 - DNA, 2130 bp, Homo sapiens
  SIMILAR (282)..(854): 521254mologous to Homo sapiens putative membrane protein,accession number AJ270952,Smith-Waterman Score=382.
cgcggggagagtagggtgctgtggtctgagctagagggtgaagctggcggagcaggaggatgggcgagcagtctgaatgccagaatggataaccgttttgctacagcatttgtaattgcttgtgtgcttagcctcatttccaccatctacatggaaggactccattggcacagacttctggtatgaatatcgaagtccaggtcaagaaaattccagtgatttgaataaaagcatctgggatgaattcattagtgatgaggcagatgatgcgacttataatgaatgcactttttccgatacaatggcacagtggggtttttgagacgggtgtattcaccatacccaaaaacattgcattgggtattagcccaccacgaaaggacagagtcatttgatgtggtcacaaaaatgtgtgagtttcacacttaactgagcagttcatggagaaattttgttgatcccggaaaaccaccaatagccggggattggatctccttaggacctatcttttggcgttgccagttccttttaccttttggtgagtttagggtttgatgtgctttggggggctttgatcggactttgtgccttgcatttgccgaagcttatatcccagcattgccacgggcattctccatctccttgcaggtctgtgtacactgggctcagtaagttgttatgttgctggaattgaactactccaccagaaactagagctccctgacaatgtatccggtgaatttgggatggtccttctgcctggcttgtgtctctgctcccttacagttcatgggcttctgctctcttcatctgggctgctcacaccaaccggaaagaagtacaccttaatgaagggcatatcgtgtgggcatgagcaagaaacctgcctgcttttaacaattgccatttttaatttttttaaaataatactggtattttccccacctctcaattgtttttaatttttatttgtggatataccattttattatgaaaatcatattttatttatacaccattcaccactaaataccccccttaataccactaaaatttatgtggtttactttaagcgatgccatctttcaaataaactaatctaggtctagacagaaagaaatggatagagacttgacacaaatttatgaaagaaaattgggagtaggaatgtgaccgaaaacaagttgtgctaaatgtctgtttagacttttcagtaaaactaaagtaacctgtatctgttcaactagaaaactctatatttagtttctttggggaaacctctcatcgtcaaaactttatgttcactttgctgttgtaggatagccagtcaaccaggcagtattaggtgctgttttcaaagatttaaggctctattaaattggggaaattatctagggtgccattttcccctaagcattggacacataggcttcatctgagggtgagatatggccgctgtttgtatctgcactgtgtctgtctacaaaaagtgaaaaatacagtgtttacttgaaattttaactttgtaactgcaagaattccagttcagccgggcggggattagtattatttttaactctcccgtaagatttttcagtaccaccaaattggttttggattttttttccttcctcctcacataccaggggttaattaaaagtgtgctttctttttaccattatattacagttacaaggtaaaattcctcaactgcgcatttatttattccagcgccagtgactataaagaacgtttcacccataatggacccctcccagagcctgggaaaccctacccacaagatcctaaagttcctggcctgtcccattaacctcccaactatgggtctttatttcttgtgggtaatatgatgtgccctttcccttgccctaaatcccttccctggtgtgtatcaacattatttaatgtcttctaattcagtcattttgtttataagtatgtctatgaaacattggaactttaaaaaaacttatttatttattccactaactgtaggcaattggacagattaaaaaaatgttaacctccataatttctataccataacctcaatgtcttttttaaaaaataaaattaaaaatgaaaagagactcaattgtaaaaaaaaaa

SEQ ID NO: 2716 - DNA, 924 bp, Homo sapiens
  SIMILAR (440)..(508): 1001254mologous to Mus musculus putative,accession number AK002241,Smith-Waterman Score=115.
ggcggactatgtccgaagcaaggatttccgggactacctcatgaggtgacgagcgccgcaggccgaacccctcaactctggcccctgggccttcagcagctcctcctacatgagcaggcccagtgcccacatcagctccttgattgtctcccgagtgggcagcagcagcaccagcttccagggtggcctgggtgccggcatgggtctgccactgcactccagcctggctaacctgtatgtggatttttatagaggttttattcataactgccaaaatttggaagcaaacaagatgtcctttggtaggtgaatggcaaaataaattgtggtacacctggttccaactacacaacgttctggaaaaggcaaaattatggagctagtcgaaagatcggtggttgcaagggttgaggtggggcacagaggatttttagagaggggtcttcccattgctgccatcaatgatatgaaaaagtctccagagattatcagtgggcggatgacatttggtaagaatgcagatttggataattgggccttgtcggccagcccaggtggaagcctgcagtgcaccagggaccaggagcagatactgcaggtgattcgagcaggaacaggccctgataaaaaccaaggcaacagtttggttcagtggacttttctggtactcccgaggagagaatatggagagatagaggccagtaaggtcattcctgctggccaaaacttggccaataggacacacccaaatgagacttcagtttggaagtgtcacaaggaagcaggctctctgtggaacatcccttttgccggtctacctgcagcttctgtgatggagaagcggtggttctttccagcagcagaagtccaggcattaactgggggacagcagcagtgagggcaggttcagtcccacagcatgga

SEQ ID NO: 2717 - DNA, 1667 bp, Homo sapiens
  SIMILAR (825)..(1100): 651254mologous to Mus musculus putative,accession number AK002241,Smith-Waterman Score=231.
aggataactaaaaggggtgtttagccaacaagatgtggttcctttcagatttgaaaatattatttccaaattctaaattaatgaaacaatttttcatctttaatgaacaaaagccacaagccttattttatttcagcctctaaaattaaattgattgtggctgctgtcaaacacagacgacttcactttgggtatccttgggatgagtgtagttgtgggaatgaaaaacttattgggttcatttctttaatattaatataagtttttgctattatgtcaaaagtactttcccaaccttaaatttccttagtgtctggggtccctgggcattgatttcccaagttattttatcttagaatagctcatatgagctgaaaaacaatttattctcttattaagcttctttcttcagaaaagtacccaatttagggtctgcattttaagaattattaacaaatatcttcataaaaatttgggaaaaggagtgtggatagatttaaacataaaaatatggagaatagttctaacagggtttgaattatattaacaatgtattgtgtaagaagtgaatcttatttttatttttaaatgttctaaataggacaatcagagatgacttggttgtagtgtgggaaaccagtagggaccttggggaagctgccaaaccctttctagctctggggctcagctgttaaggaactgctggtttcctacaggaacacttgggacattccattacctaaatgttaaccatcaattaacccagtaaacctgcaagatggaaacgaagatttgttctcacgagtttcacgtgattatttaaacacttctggggcccagtagccaactggggtcttcccattgctgccatcaatgatatgaaaaagtctccaggagattattcagtggggcggatgacattttgccctctgtttgctattcttttgacattcatggagattttgccttacaaggtacagccttcgggaacttgggcttcttgttttgcatgccacggaacaaatgaagttaggcccagcttcatccagggggaggggcggcttattccaaacacgaggatggacttaaaacgggcatctggcattaaccaatggggaaaagggaagaacaaggtctttgaaggggacagcctttgcccaggttgctgctgagttcacagattttcattattaattaggcttccctaagggaaaatacactggaatgctatttttacctaacccattctattttttaataggaaatagctggagagtttcctaaaccccaactcttctggctggccttaccaagtaattaaaatattttaccttccttttcccataaagagttagcttcaaaatatggcaattaatttaaatacctttcctgatggatgggttttatcctgcagtaatatgtatatccaccctattagaatttcccttaatgaaaaactgaagagaacaaaatttgtaacccactagcacttaaggtactcctgattccttaacattgtctttaatgaccacaagacaaccaacagctggccacgtacttaaaattttgtccccactgtttaaaaatgttacctgtgtatttccatgcagtgtatatattgagatgctgtaacttaatgtcaataaatgatttaaatatttgttaaa

SEQ ID NO: 2718 - DNA, 369 bp, Homo sapiens
  SIMILAR (235)..(369): 1001254mologous to Homo sapiens RNA helicase,accession number AF183422,Smith-Waterman Score=236.
cccaccccctgacccgtgctagtttggtatctatgcctgtagctttgctttggggcatcatctgaatctcatactgcacggcctttcagatctggcttcctgcactcaatgtcatgcacgtctcttagtgccgtgttcccttaatgctgagtcatgctccattgtatggatggaccacatgactgatttgcctcctgtccttagtcctctcagcctccaactctccttcctgcaggcattgatgttgaacaagtgtctgtcgtcatcaactttgatcttcccgtggacaaggacgggaatcctgacaatgagacctacctgcaccggatcgggcgcacgggccgctttggcaagaggggcctggcagtg

SEQ ID NO: 2719 - DNA, 451 bp, Homo sapiens
  SIMILAR (108)..(167): 951254mologous to Homo sapiens DEAD Box Protein 5,accession number AJ237946,Smith-Waterman Score=94.
cttgtagtggggctggagcagagcctgccgcgaacccccggagcccacgatccctcgtgccatccctcgaatccaccagcacgagcgtcccacccgcgcctgggaccatggccactgactcatgggccctggcggtggacgagcaggaagctgcggctgagtcggtgctgttgtcaagaccaatgccaatgcagagaagacagatgaagaagagaaagaggacagagctgcccagtccttactcaacaagctgatcagaagcaaccttgttgataacacaaaccaagtggaagtcctgcagcgggatccaaactcccctctgtactcggggaagtcttttgaagagcttcggctgaaaccacagcttctccaaggagtctatgccatgggtttcaatcagccatccaagatacaagagaacgcattgccactgatgcttgctgagccgtat

SEQ ID NO: 2720 - DNA, 471 bp, Homo sapiens
tggttcccggtcccgatttctgcagagcctgccgcgaacctctggagcccacgattcctcgtgccatccctcgaatgcaccagcacgagcgtcccacccgcgcctgggaccatggccactgactcatgggccctggcggtggacgagcaggaagctgcggctgagtcggtgagttggcttcagccctaaaagggtcaggggactagttctggtcggagacttggtccctgggaaagaatgtttcccaggttgattaaaggctggatggggtggcggggaggatagggatggagcctggaccctgagctggctttgtttacgcagccgcctccgcgttacgtaagcgcaggtgagtgctcctatcggtaaagcgctcagctgcctgtctgtcttcctggaaccaggaagaatcatagattgcacccatcaccctagattgtgttttggttgtttttaattgaaatagagaca

SEQ ID NO: 2721 - DNA, 701 bp, Homo sapiens; identical to SEQ ID NO: 1900
  SIMILAR (44)..(223): 751254mologous to Homo sapiens DEAD Box Protein 5,accession number AJ237946,Smith-Waterman Score=220.

SEQ ID NO: 2722 - DNA, 934 bp, Homo sapiens
  SIMILAR (299)..(913): 351254mologous to Homo sapiens unnamed protein product,accession number AK023399,Smith-Waterman Score=254.
cattgccaagcaatatcaagatgctattcgagcacaccgagcaggacggaaagtcaactttgctgaattgcctgttcctccaggtaagtggggcatggcctaggggctctgtgaggaggtggtccctgggcaagaagggaatgggggacagccagtgattcccacttctcatgcgtctgcctcccctctgtggagccatccatcccagccatgccccagcagagccatgccccagacagggccccgggtagctttgtgcttctctgaggctgctccctgcccctcccatgctgtctctctcccacaggatttccccccatccctggcctggagtccactatgggtgttgaggaggacgcagtggcagcgacattggcagctgcagagaaactggcctctgcagaggattcagccccgggtgtataaagacgagtacgagcctcttgggcacctgcagggtgagcccccagcacaggccccagtggccaagaaacctgcacggcccacagtcccttcatcccagcgcctgcctgagcccagggcctcaagttctaaggagtcaccgagtccatctgtgcgggagcagctggcactgctggaggcacggaaactgcagtatcagcgggcagccctgcaggccaagcgcagccaggacctggagcaggccaaagcctatctgcgggtagccaaatggcttgaggctcagatcatccaggcccgatctggcagacctgttgatctgtccaaggtgccttcgcccttgacggatgaggagggtgacttcatcctcatccaccatgaggacctgcgactctcccagaaggcggaggaggtgtatgcccagctgcaaaaaatgcttctggagcaacaagagaagtgcctgctgttctccaagcagttcatgcaccaggggcaacgtggctgagaccacccg

SEQ ID NO: 2723 - DNA, 2616 bp, Homo sapiens
  SIMILAR (550)..(798): 1001254mologous to Homo sapiens beta-galactoside alpha-2,3- sialyltransferase,accession number X96667,Smith-Waterman Score=465.
atgcccagccagactcgcaaaacagctagttggctggcagcagagctctcaaaagaaggccaccaggtggctctgctgagtggggagatgatggtggagcagagggctgcggtgattgagcgcttccgagagggcaaagagaaggttttggtgaccaccaacgtgtgtgcccgcggagtgaagctgcagaccttcacggtgagagttacagctcttaaggtagtgcgtcgggagttgttggttcctctcggtgggctcctagtcttgctagcgtcaagactagaagctgtagacctttgcgcctatgtctccagcggcagctacagctacatgacctcctcagccagtgagttcctgctcagcctcacactccccggggctcctggggcccagattgtgcactcccaggtggaggagcagcagcttctggcggccgggagctctgtggtcagctgcctgcttgaggcctgtccactgggtcctgggaacgttctgcagcactgccacctgctagtgaagcctgaacgtgtgggcacattggggctaggcatggccacgctcccctacctggactcaggggccctggatgggacgcaccgggtgaagctggtgcccggctatgccggcctgcagcgcctcagcaaggagaggctctcgggcaagagctgtgcctgtcgccgctgcatgggcgatgccggtgcctccgactggtttgacagccactttgacggtaacatttcccccgtctggacccgagagaacatggatcttccaccggacgtccagaggtggtggatgggttttttttttgtccccagaatgaagcccaagggtagttcatggtccacggcaccttcaatttcgtgggctaaagtactcttcctgcttcagcttcttaagaagttgggatacaggatgaatcaggcgccaaccgtgggctttgagcaggatgttggcagccgaaccacccaccatttcatgtaccctgagagtgccaagaacctgcccgccaacgtcagcttcgtgctggtgcccttcaaggtcctggaccttctgtggatcgccagcgccttgtccacggggcagatccgattcagctgcatacaaggcctctcaggctctgtgttcaagaaacgtagctgcccctccatttgtggccacaaagccagcagggaatggaacgagcatattgcagtaaggacattattctggagacagggggcaggcacatatctcaacgtgccctggagtgaattcttcaagaggacaggtgttcgggccattattaattatcccacacaagggccatccttgaaagaggataccggtgtgttagcagcaaacaccaacagcagaggttatcatgttatcaagagcatgtccaagtctgtgctcgccctcactctgcacacaaagatgctatgcagacaaggtgaccggatgctgcagccccagttcaagtcacacaacaccaatgaggtgctggagaagctgttccagatagtgcctggcgagaacccctaccgcttccgggaccccccaccatgccggcgctgtgccgtggtggggaactcgggcaacctgcggggctctggctatgggcaggacgtggacgggcacaacttcatcatgaggcttcctttttgtttgcaagggacattagtagaatatggaatctcccctgccctcccacagaatctgattgcccagtctcagtctggcactggtaaaacagctgcctttgtcttagccatgctcagccgagtggagccttcagacagatacccccagtgtctgtgcctctccccaacatatgagctggcgcttcaaacaggaaaagtgattgagcagatgggcaaattttacccagaactgaagcttgcctatgccgttcgaggcaataaatcagggtattggggtcctatgttcacattacccagtcggattttgcctcttccaagcacccttgggcctgtgagcaccagatcagttggagaggaagccttaacaagggaatgtcagagccagaagtgtgtctcagctgccaggacttcacgaatggagctcacggcggtatcgacaaaatcgtacaatatacgaatatccgattatcatccaatattccatatatcacgaattcgcactatacgcagattcacgctatctcgatattcaccatttctcgagattccacaattcccgaatctccacttacacacgattccgatgtatgcagtgctacgaatacacagagtcaccatatgggtatcagcaattaccaaatacagatatcccaattatctcaatccgaatgaatggattcccatattccacacgtccagattaagattaccaaatacgctatatacctatccagtgcacatagcagtatccaattcgccattcgtatcacattttcttaaaccaagtacggtacacatccggtttgcagaccctaatagcctatcaccattgtcgtttactatcccatttcgacattccaatacatttcgaattccattgcccaataacaaacaattccaggtgaccatttcggttccagtctcggaatccggagcaatgacctccttgcatttggagcgcaatttccagtaa

SEQ ID NO: 2724 - DNA, 564 bp, Homo sapiens
  SIMILAR (14)..(253): 731254mologous to Mus musculus RNA helicase,accession number L25125,Smith-Waterman Score=274.
gtctgtgcagcagcagagcgagaagttcaaggccttgtgtaacttaccgggcccatcaccatggctcaagccatgatcttctgccatactcgcaaaacagctaggttggctggcagcagagctctcaaaagaaggccaccaggtggctctgctgagtggggagatgatggtggagcagagggctgcggtgattgagcgcttccgagagggcaaagagaaggttttggtgaccaccaacgtgtgtgcccgcggtgagcagaggacgtgtcccacctggtctgccaggctcggggtcccaggcccaattagagccagaaatccttgtatacagggaagtcggatggtctcagggagatgggtggggttggtgacactattcctttctaggagagactgtttggatttccctgaggtggtaagaactcacacatgccaggtgcggtggctcatgcctgcaatcccaaggcaggaaaattgcttgaaccctggagacagaggttgcagtgagccgagaatgtgctatagcactccatcctgggtgacagagtgagactctgtctccaa

SEQ ID NO: 2725 - DNA, 2442 bp, Homo sapiens
  SIMILAR (1139)..(1531): 511254mologous to Homo sapiens Protein regulating gene expression PRGE-9,accession number AAY58616,Smith-Waterman Score= 244.
tgtcgtggggctggagcagagcctgccgcgaacccccgtagcccacgatccctcgtgccatccctcgaatacaccagcacgagcgtcccacccgcgcctgggaccatggccactgactcatgggcccatggcggtggacgagcaggaagctgcggctgagtcgttgagcaacttgcatcttaaggaagagaaaatcaaaccagataccaatggtgcctgttgtcaagaccaatgccaatgcagagaagacagatgaagaagagaaagaggacagagctgcccagtccttactcaacaagctgatcagaagcaaccttgttgataacacaaaccaagtggaagtcctgcagcgggatccaaactcccctctgtactcggtgaagtcttttgaagagctttggcttgaaaccacagctttcccaaggagtctatgcgatgggtttcaatcgtccatccaagatacaagagaacgcattgccactgatgcttgctgagcccccacagaacttaattgcccaatctcagtctggtactggtaaaaccagcctgcctttggtcttagcccatgctcagccggagttgagcccatcagaccagataccccccagtgtctgtgcctcttcccaacattatgaagctgggggcttcaaacaaggaaaagtgattgagcagatgggcaaattttacccagaactgaagcttgcctatgccgttcgaggcaataaattggaaagaggccagaagatcagtgagcagattgtcattggcacccctgggacctggggttgaactggtggcttccagctcaagttcattgatcccaagaaaatcaaggtgtttgttctggatgaggctgatgtcatgatagccactcagggccaccaagatcagagcatccgcatccagaggatgctgcccaggaactgccagatgctgcttttctccgccacctttgaagactctgtgtggaagtttgcccagaaagtggtcccagacccaaacgttatcaaactgaagcgtgaggaagagaccctggacaccatcaagcagtactatgtcctgtgcagcagcagagacgagaagttccaggccttgtgtaacctctacggggccatcaccattgctcaagccatgatctttttgccatactcgcaaaacagctagttggctggcagcagagctcgtcaaaagaaggccaccaggtggtcatgctgagtggggagatgatggtggaacagagggctgcagtgattgagcgcttccgagagggcaaagagaaggttttggtgacccacccaacttgtgttcccgcggcattgatgttgaccaagtgtctgtcgtcatcaactttgatcttcccgtggacaaggaccgggaatcctgacaatgagaccttacctgcacccggatcgggcgcacggcccgctttggcaagaaggggcctggcaagtgaacatggtggacagcaaagcacagcatgaacatccttgaacagaatccagggagcatttttaataagaagatagaaagatttggacacagatgatttggacgagattgaggaaaattagccaacttgagaagctccaccagccacttgatgccagccgctgggactttcccttgcacagggagacaagtgcatttaggggcacaggccccggacattcaccccaagggacaacggcagaagtagagagaaactacctaccttcactttcaaatttatgtttgggacttgacaaaaataggtgcaaattgatggggggcattagaagaaaaattttgcattttgggaaaattgggtcctttcccccacttttttaaagccacattcccccatctttataataatctggtcaacaagtggtaagtcgctgggccccccaggacccccctccctgattttgggccaaggcatcgtggaacccagctcccagccccctgaaagaaacgatagatgtgcaggttgtgcggaagaggctgagtggaaaatggtgtgagcccccaccgctgtgcatcgaatgagggaagtggcagcagagaggccagagctgccccctctctgtctcttcaatggacccttcacaagtggtttctcctggccctggggtggtcttccttctcctgaaatccagagactttcttgctcatcccttctccctttcacttctgttctctgctgcagaaagcagacttgcatatccctgatgagcagctcggctgacttttgtaaactttcagatttggagagaaacacgaaagtctggaatcctgaccccttgagagagagtgatctgggcgagggccgatgaaggggctgggcctggtcttgccttctcttctctcggttgctccctctgcctaggcccctggtactcagtcacggcagccaggagaccccaggtgagtttctgagcgcatacgtagttggttcttacg

SEQ ID NO: 2726 - DNA, 422 bp, Homo sapiens
  SIMILAR (21)..(422): 871254mologous to Homo sapiens microfibril-associated glycoprotein-2 MAGP-2,accession number U37283,Smith-Waterman Score= 635.
  misc_feature (1)...(422): n = a,t,c or g
agcagaacaccatagacaatatgtcgctcttgggacccaaggtgctgctgtttcttgctgcattcatcatcacctctgactggatacccctgggggtcaatagtcaacgaggagacgatgtgactcaagcgactccagaaacattcacagaagatcctaatctggtgaatgatcccgctacagatgaaacagttttggctgttttggctgatattgcaccttccacagatgacttggagtgctgggatgagaaatttacctgcacaaggctctactctgtgcatcggccggntaaacaatgcattcatcagttatgcttcaccagnttacgacgtatgtacatcgtcaacaaggaaatctgctcttgtcttggctggaaggaacacgaagctatgaaagaagaactttgccggtcgaaggcn

SEQ ID NO: 2727 - DNA, 435 bp, Homo sapiens
  SIMILAR (314)..(433): 951254mologous to Homo sapiens microfibril-associated glycoprotein-2 MAGP-2,accession number U37283,Smith-Waterman Score= 220.
caagcatgagccaccgtgcccagcctattttatatttcataacggacaattctagaaagactttattcctagaagtgctctcagagattattttatccacttctacttccaagtagggaagcgccaaaacttcatttagtcaattccctcttgctgtgtttttggtggacggaaaggatgtagcccaatttataatgattctctgtagagattactctgtatttttttcctactctatctatccttcccaattccttcaatccttcatttatgctgcttctatttggacctccttatttttttgtattgggcttcctcagagtgctgggatgagaaatttacctgcacaaggctctactctgtgcatcggccggttaaacaatgcattcatcagttatgcttcaccagtttacgacgtatgtacatcgtcaacaa

SEQ ID NO: 2728 - DNA, 1938 bp, Homo sapiens
  SIMILAR (216)..(722): 451254mologous to Homo sapiens microfibril-associated glycoprotein-2 MAGP-2,accession number U37283,Smith-Waterman Score= 225.
attccagcctcattgtaacacacattctacgcctagcctggctttcttgctctccctcatctcattgtttcagccggaggccaaatctgaagtcctttccagggagtggctctgttcatggttaggcgccagccaaagtaagaacagcgcaagaggacagagacacattcagcagccaaaggactcggtggaaagagcagaacaccatagacaatatggcgctcttgggacccaaggggctgctgtttcttgctgcattcatcatcaccctctgactggatacccctgggggtctaatagtcaaccgaggagacgatgtgactcaaggcgactccagaaacattcacagaagatccctaatctggtgaatgatccccgctacagatgaaacagttttggctgttttggctgatattgcaccttccacagatgacttgggcctccctcagtgaaaaaaataccactgcaagagtgctggggatgagaaatttaccctgcacaaggctctactcctgtgcatccggcccggttaaccaaatgcatttcattcagttatgctttcacccagttttacggccgtatgtacatcgtccaaccaagggagatcttgctcctccgtcttggtctgtaagggaacaccgaagcctatgaaagatgagctttgcccgtcagatggctggtctgccccccctaggaagactcccgtcgcccccaattacttcccgacttccctccctgtgaaaatgtggatttgcagagacccaatggtctgtgatcaattgaaaaagaggaaagaagaaaaaatgtatgggtgagaggaaggaggatctccttcttctccaaccattgacagctaacccttagacagtatttcttaaaccaatccttttgcaatggtccagcttttacccctactctctactttttcacccaaactgataacatttatctcattttctagcacttaaaatacaaagtctatattattgcataattttgctgcttctcaatatcatagacacagtgaatagatgatgactatatggcttatatacaaacattctatgtacaatttcaagggagactaaactttaggctaataatctttactattgaatctgtctgatatagatcttagggttgaagaagctatctttgtctatttgggctaaccatagaatttcatttattttcctcacaatattttcctagaccaactccccatcattcacgtgttcctctttactcttactttaactattttgctggcttgcccgaaaatttgcctggcaagtcttccttataagacacatcatggtaagttttgtagtcctgtaagattctgcaacacaggtcaagaattatacaatcctactagcaatatataaggacccaaaatgtcttctgctaagctcagaggctggggctaaagcatgaggactatgccagctatagaacttggactcataattcgctatccaatttttcatgcagttgtctagtcgggaagtaaggttggaaactaagtctcatttactgattcgtttatgggtagtaccgggatgaacccacccaccacaaagccaaattggacaacttaatgtgaaatcataccattggttgacgtttccttgagttgctacttcgttcatcttcacaacttaacaagtgcacggtcgaattattgtgcaagtggcttttggatatcctgattggggcctaagaagggcattcagacttgaattttaataggcagacagaaaagtttgcctaatagttaatacgaaagagtgaaagaaacacaatattcagacaacccacattcttatcctggctctagcagtaaccacgtagccttggataagccattttccttcattaggtcctggtttaatttcctcatctttaaaatgagaaggttaaatttatcttagtact

SEQ ID NO: 2729 - DNA, 457 bp, Homo sapiens
agaagtgagagcccaaaatgggtcttcttacctctctggtacattctgtgctcttctctggtctgacatccgcccaggttcatccagaaaaagatggaaatgatttgaacaggataagctagggtgaggattagacacgatgagttcagctggagacactcatggtagagtctggaggtctctttgggggatcacttccaaaagtgcagatttttagaaaaacgagaaaggttctggaaagggatgttttccttctgctcaatggcagtttcaggtttcctagctgccggggcaggcctgaagcctcggtcaggaggcattgagtctttcactctccacggaggtcttggactgagaacttcaagttccaaagggatgaggtgtcggcttcgcccttaggagcctggagggctctgaccaaggagaagggcggagcccagccactggaaggtttgtt

SEQ ID NO: 2730 - DNA, 426 bp, Homo sapiens
  SIMILAR (3)..(161): 1001254mologous to Homo sapiens Similar to insulin induced gene 1,accession number BC001880,Smith-Waterman Score=264.
  misc_feature (1)...(426): n = a,t,c or g
gcagcccctaccccaacacctggcatcatcgcctgttgcagaggagcctcgtgctnttctcggttggggtggtcctagccctggtgctcaacctgctgcagatccagaggaatgtcactctcttccccgaggaggtgatcgccaccatcttttcctccgccatggtgggtccctccctgcatgcgggacancanntggtatacatccccagatttctctatattcgttcttggctcccttgtatatttttctcaggaggcgtcacggtggggaacataggacgacagttagctatgggtgttcctgaaaagcccatagtgattgagtcttcaaaaccacngattcttgagagcnaaggaagatttttggaagaaaatctgganttggtggattatgncaaaggattatcctttttccttaagtaat

SEQ ID NO: 2731 - DNA, 436 bp, Homo sapiens
  SIMILAR (98)..(307): 1001254mologous to Rattus norvegicus growth response protein,accession number L13619,Smith-Waterman Score=370.
  misc_feature (1)...(436): n = a,t,c or g
gactcctcctttccncngccccgcctccgttcggagagccggcgggcgngcgcctctcggccaggaagcgcctcttggacgcgtgtnaccgatgcccagaagtggccttgggctggggatcaccatagcttttctagctacgctgatcacgcagtttctcgtgtataatggtgtctatcagtatacatccccagatttcctctatattcgttcttggctcccttgtatatttttctcaggaggcgtcacggtggggaacataggacgacagttagctatgggtgttcctgaaaagccccatagtgattnagtcttcaaaaccaccgattctgagagcaaggaagattttggaagaaaatctgactgtggattatgacaaagattatctttttttcttaagtaatctatttagatcgggctgactgtacaaatgact

SEQ ID NO: 2732 - DNA, 474 bp, Homo sapiens
  SIMILAR (337)..(363): 1001254mologous to Homo sapiens insulin induced protein 1,accession number U96876,Smith-Waterman Score=52.
cggacgcgtgggcggacgcgtggggctgtccttgactttagcagccctatctttgggcctttggtggacatttgatcgttccagaagtggccttgggctggggatcaccatagcttttctagctacgctgatcacgcagtttctcgggtataatggtgtctatcagtatacatccccagatttcctctatattcgttcttggctcccttgtatatttttctcaggaggcgtcacggtggggaacataggacgacagttagctatgctgatacccttctgtgaggagttgaatttgaagaccacttggctgtttcacaaaaccagaagtaattacagggtgttcctgaaaagccccatagtgattgagtcttcaaaaccaccgattctgagagcaaggaagattttggaagaaaatctgactgtggattatgaccaagattatcttttttcttaaggaaaccatttaaaaccggg

SEQ ID NO: 2733 - DNA, 2817 bp, Homo sapiens
  SIMILAR (573)..(965): 881254mologous to Homo sapiens Similar to insulin induced gene 1,accession number BC001880,Smith-Waterman Score=609.
gcggccgcctcaccagaccgcgtgcggacgggctcgcgggcggggcggggcaagctcaggccacgcccctgggcggtgcgcgcgggcggtgggtaggccgggcaggctcacgtgatgcgggccccgcggcccgccatataaacccgcgcgcccgccaggcgctgcggccgtcccgggccgtgactcctcctttcccccgccccgcctccgttcggagagccggcgggcgggcgcctctcggccaggtacgcggccggctgggataggggtcgcgggcgggctttggtcgcgcagcagccggtcctccccggaggtaggcgggcgcgggccctgttgggtctttgggacgcgggtcccgctggggccggggatgctcctctctgtgagcgcgggtcccgtccgccgctggccccgggcgggcgcacgggggtctaacttggggggggcggcgctgccgcctggcccgggtgccggggttcgcgtcccgcggggccttcctcgctctttgtctcttctgagtgaacttgatgacccccttcttccaggaagcgcctcttggacgcgtgtgaccgatgcccagattgcacgaccacttctggagctgctcctgtgcgcacagcgcgaggcgccgaggccccccgcgagccatcgccgcggggctggcggccaaggttggggagatgatcatcgttttcgtgtccgggccctccctgatggcggtcctcagtgcctcggacgctgaccccgcgcccaggggccgaagtgctgtgaagagcggcccctatcccggcagtccttaccccaacacctggcatcatagcctgatgcaaaagagcctcgtgctcttctcggttggggaggtcctagccctggtgctcaacctgctgcagatccagaggaatgtcactctcttccccgaggaggtgatcgccaccatcttttcctccgcctggtgggtccctccctcgctgcgggacagcacctgctgatgttggcctactgtacccctgtatcgacagtcacctcggagaaccccacaaatttaaggagagaatgggccaagtgtcaatgcgctgcatagcagtttttgttggcattaaccacgccagtgctaaattggattttgccaataatgtccagctgtccttgactttagcagccctatctttgggcctttggtggacatttgatcgttccagaagtggccttgggctggggaatcaccatagcttttctagctacgctgaatcacgcagtttctcgtgtataatggtgtctatcagtatacatccccagatttcctctatattcgttcttggctcccttgtaatatttttctcaggaagcgtcacgggtggggaacataggaccgacagttaggctatggggtgttcctggaaaagccccatagtgattgagtcttcaaaaccacccgattctgagaggcaagggaagattttgggaaggaaaatcttgactgtgggattatgacaaaagattatccttttttcttaaagtaatcgtatttagatcggggctgactgtacaaatggactcccggggaaaaaactcgtcacctatctagaaaagtcaagaataggggaggtgggagaatgatgactttaccctggaagtcttcccttggactgcccgcactggcgcctgtctgttgccctgggagcattctgcccaggctacgtggggtttcagggcaggtgggcagctttcccaagtattcgattttcattcatgtggattaaaacaagttgccatatttcaaagccttgaactaagactcaattaccaacccgcagttttgtgtcagtgcccaaaggaggtaggttgatgggtgcttaacaaacatgaagtatgggtgtaatagggattaatatttatccaaaagatttttaaaaaatagggctgtgtttaaaaaaaaaaaccaaaaccaggaaaagcagcagtgattatagagaggtcacactctaagtggggtcgcggcgtggccacgctttcacggtcacgctcgtccgtcctgcagtggcgtgtttacatggtcacacggtgtgtgtatccaccagtgggtcaactgcttgtcattcctcccgtgggcagtttgtgtaggacaatcttactggggcaaaagggcaatgaaaagtcttgggctcccacactgcgatatattggaattcccacctcaagtttatgaagtttatttccgaaaatccattagtcatctaagaatgaatacctggtctgccatgtatttcaatccttagtgagccaaaattgttttgtttggttactacagaatagagatgactggttttttgccacagccccatggaattttggcaatctgtgattgccttgtaaaaaaggagagtgtcatatggcactgtcatttaaacgtgtggtgtttctagtcaatgatattggtgagcacaatgtattcatttaatggcatagaccataccagacctaatttgcaagtattgggtcttcaaacttcaagtgcaatgtattatgaaaaccaatctgagccttgtatctcttaaatatttattccttctaacgtgtgagatgtcccgagagaagggttctccattcatttcagtgctgcctggaggaaactcggcaatgatttctttccagtttgtgaagttcctttcgtgttacaccctccactggaaccctcaaccttcgaaatactccagttttgggggttggggccatttacttataaatttaccgccgggtttttggaatctacatgtcttgggggcgggctcaaattcttcgaaagtggttggattaaaa

SEQ ID NO: 2734 - DNA, 506 bp, Homo sapiens
  SIMILAR (20)..(334): 1001254mologous to Homo sapiens putative anion transporter 1,accession number AF279265,Smith-Waterman Score=541.
agcatgtctggctccccagcaggtgagctcaggagataagatggaagatgcaacagccaatggtcaagaagactccaaggccccagatgggtccacactgaaggccctgggcctgcctcagccagacttccacagcctcatcctggacctgggtgccctctcctttgtggacactgtgtgcctcaagagcctgaagaatattttccatgacttccgggagattgaggtggaggtgtacatggcggcctgccacagccctgtggtcagccagcttgaggctgggcacttcttcgatgcatccatcaccaagaagcatctctttgcctctgtccatgtacacacacacaactcagggaaggaggtcctgggactccaagttcagcgctccaggtctgggacagggcctgcatgcagtcaggctggcagtggcgcggtacagggagggaactggtgcatattttagcctcaggaataaagatttgtctgctcaaaaaaaaaaaaaaaaa

SEQ ID NO: 2735 - DNA, 12436 bp, Homo sapiens
  SIMILAR (173)..(7942): 991254mologous to Homo sapiens protocadherin Flamingo 1,accession number AF231023,Smith-Waterman Score=13615.
gatttcacacagtaccccctcccagagctatgagaacgctcatgggcaccaaaatttcagaccaaaatccgggacacggttcagaactagtggtcaggaagggggaacaagagatctggaaggacagaaaaaggctgggagacggagctgggacagcgccctagaaggagggagccaggaggagctggggggcggtgggcaccagggctgggacccaggcttagctgccactacggggccaagggcgcatatcggtggcggagccttagctctttgtccggagtcttccggggtccgggaggatggggggcctggcctgggggtcagggagcctatcttcgtggggctccgagggagaaggcaaagcgcccggaatagtcgagggccccctgagcagccgaatgaggagctggggattgaacacggcgtccagccattgggcagccgcgaacgagagacaggacagggaccagggtctgtgttatactggcgcccagaggtctcctcttgcgggcggacaggacctttgcaaagaggtagtctgtcaccaggggctctgtcctcaggggtcccgggctcggggaacagctcgcccctcccttcagactttttgattcggcaccacggtcccaagccggtgtcctcccagcggaacgctgggacaggctcccgcaaaagagtgggcaccgcgcgctgctgtggggaattatgggcaacagggagcaagggtcagggcgagagagccacgacatccggagcagaaaggacagccccccggcggaactgtcttccaggggcctcgggatctggccccgagctggattcagcaccacgcacggcgaggacagctcctgcatcaggttcagcaccccgcgagtctcggacagctcccgagccggcgcccaagcgcatgcgctcccggggtctcttccgctgccgcttcctcccgcagcgccccgggccgcgtcccccgggactcccggcccgtcctgaagccaggaaagtaacctcggcgaaccgggcacgctttcgtcgcgccgcaaaccgccacccgcagtttccgcagtacaactaccagacgctggtgccggagaatgaggcagcaggcaccgcggtgctacgcgtggttgctcaggacccggacgccggcgaggccgggcgcctagtctactcgctggcggcactcatgaacagccgctcgctggagctgttcagcatcgacccgcagagcggccttatccgtacggcggcagctctggaccgcgagagcatggagcgtcactacctgcgtgtgaccgcgcaggaccacgggtcgccgcgcctctcggccaccacgatggtggccgtgacagtagccgaccgcaacgaccactcgccggtttttgagcaagcgcagtaccgggagacccttcgcgagaatgtggaggagggctaccctatcctgcagctgcgtgccactgacggcgacgcgccccccaacgccaacctgcgctaccgcttcgtggggccgccagctgcgcgcgctgcagctgccgccgccttcgagattgatccacgctccggcctcatcagcaccagcggccgagtggaccgcgagcacatggaaagctatgagctggtggtggaagccagcgaccagggccaggaacccgggccgcgctcggccactgtgcgcgtacacataactgtgctagacgagaacgacaatgctcctcagttcagcgagaagcgctacgtggcgcaggtgcgcgaggatgtgcgcccccacacagtcgtgctgcgcgtcacggccactgaccgggacaaggacgccaacggattggtgcactacaacatcatcagtggcaatagccgtggacactttgccatcgacagcctcactggcgagatccaggtggtggcacctctggacttcgaggcagagagagagtatgccttgcgcatcagggcgcaggatgctggccggccaccgctgtccaacaacacgggcctggccagcatccaggtggtggacatcaatgaccacattcctatttttgtcagcacgcccttccaagtttctgtcttggaaaatgctcccttgggtcactcagtcatccacattcaggcagtcgatgcagaccatggggagaatgccagattggagtactccctaactggtgtggcacctgatactccttttgtgataaacagcgccactggctgggtctctgtgagtggtcccctggaccgtgagtctgtggagcattacttctttggtgtggaggctcgagaccatggctcacccccactctctgcctcagccagtgtcaccgtgactgtgctggacgttaatgacaatcggcctgagttcacaatgaaggagtaccacctacgactgaatgaggatgcagctgtgggcaccagtgtggtcagcgtgaccgcagtagaccgtgatgccaacagtgccatcagctaccagatcacaggcggcaacacccggaatcgctttgccatcagcacccaggggggtgtgggtctggtgactctggctctgccactggactacaagcaggaacgctacttcaagctggtactaactgcatctgaccgtgcccttcatgatcactgctatgtgcacatcaacatcacagatgccaacactcatcggccggtctttcaaagtgcccactactcagtgagtgtgaatgaagatcggccaatgggtagcaccatagtggtcatcagtgcctctgatgatgacgtgggtgagaatgctcgtatcacctatctcctggaggacaacctgccccagttccgcattgatgcagactcaggagccattacattacaggccccattagactatgaggaccaggtgacctacaccctggctatcacagctcgggacaatggcatcccacagaaggcagacactacttatgtggaggtgatggtcaatgacgtgaatgacaatgctccacaatttgtggcctcccactatacagggctggtctctgaggatgccccacctttcaccagtgtcctgcagatctcagccactgaccgggatgctcatgccaatggccgggtccagtacactttccagaatggtgaagatggggatggagattttaccattgagcccacctctggaattgtccgtacagtaaggcggctagaccgggaggcagtatcagtgtatgagttgactgcctacgcagtggacagaggtgtgcccccactccggactccagtcagtatccaggtgatggtgcaggatgtgaacgacaatgcacctgtcttcccagctgaggagtttgaggtgcgggtgaaagagaatagcattgtgggctcagtggtggcccagatcactgcagtggaccctgacgaaggccccaatgcccatataatgtaccagatcgtggaggggaacatccctgagctgttccaaatggacatcttctctggagaactgacggcactcattgacctagactatgaggctcgccaagaatatgtgattgtggtgcaggccacatctgctcctttggtcagccgggccactgtgcacgtccgcctggttgaccagaatgacaacagccctgtgctcaacaacttccagatcctcttcaacaactatgtatccaaccgttcagacaccttcccgtcgggcattattgggcgcatcccagcttatgaccccgatgtctccgaccacctcttctactcctttgagcgtggcaatgagctgcagctgctggtagtcaaccagaccagtggggagctgcgactcagccgaaagctagacaataaccgcccactggtggcctccatgttggtgactgtcacagatggcctgcacagcgtgacggcgcagtgtgtgctgcgcgtggtcatcatcacggaggagttgctggccaacagcctgaccgtgcgccttgagaacatgtggcaggagcgcttcctgtcaccgctgctgggccgcttcctcgagggcgtggctgcggtgctcgctacgcccgctgaggacgtcttcatcttcaacatccagaacgacacagacgtagggggcaccgtgctcaatgtgagtttctcggcgctagctccacgtggggccggggcgggcgctgcagggccctggttcagctccgaggagctgcaggagcagttgtacgtgcgccgggcggcgctggcggctcgctccctgctcgacgtactgcccttcgacgacaacgtgtgcctgcgagagccctgtgagaactacatgaaatgcgtgtccgtgctccgctttgactcgtccgcgcccttcctggcctcggcctccacgctgttccgacccatccagcccatcgctggcctgcgctgccgctgcccgcccggattcacgggagacttttgcgagaccgagctcgacctctgctactccaacccatgtcgcaacggcggagcctgcgcgcggcgcgagggaggctacacgtgcgtctgccgcccgcgcttcaccggagaggactgcgagctggacaccgaggccggccgctgcgtgccgggcgtctgccgcaacgggggcacctgcaccgacgcgcccaacggcggctttcgctgccagtgcccggcaggcggcgccttcgagggcccgcgctgcgaggtggctgcgcgctccttcccgcccagttcgttcgtcatgtttcgcggcctgcggcagcgattccaccttacgctgtccctctcgttcgcgacagtgcagcagagcgggctgctcttctacaacgggcgcctgaacgagaagcacgacttcctggccctggaactcgtggctggccaagtgcggctcacatattccacgggtgaatccaacaccgtggtcagccccacagttccagggggcttgagtgacgggcaatggcatacagtgcatctgagatactacaacaagccccggacagatgccctagggggtgcacagggcccctccaaggacaaggtggctgtgctaagcgtggatgattgtgatgtggccgtggctctgcagtttggtgctgagattggcaactactcatgcgcggctgctggtgtgcaaacaagctccaagaagtccctggacctgacgggccctcttcttctgggaggtgtccccaacctccccgagaacttccccgtatcccataaggacttcatcggctgtatgcgggacctgcacattgatggccgccgagtggacatggcggcttttgtcgcaaataatggcaccatggcaggctgccaagccaagctacacttttgtgactcaggcccctgcaagaacagtggcttctgctcggagcgctggggcagcttcagctgcgactgccctgtgggcttcggcggcaaagactgtcagcttactatggcccatccccaccatttccgtggcaacggcacactgagctggaactttggaagtgacatggctgtgtctgtgccatggtacctggggctggcatttcggacacgggcaacgcagggggtcctgatgcaagtgcaggctgggccacacagcacgctcctttgccagctagatcgggggttactgtctgtgacagtgaccaggggctcgggccgtgcttcccatctccttctggaccaggtgactgtcagtgatggccggtggcacgatctgcggctggagttgcaggaggaaccaggtggccggcggggccaccatgtccttatggtctcactggactttagcctcttccaggacaccatggcggtggggagtgagctgcagggcctgaaggtaaagcagctccacgtgggaggcctgccccccggcagtgcagaggaggctcctcagggtctggttggctgcatccagggggtgtggctcggctccacaccctctggctccccggccctgctaccccccagccaccgagtgaatgcggagcctggctgtgttgtgaccaacgcctgtgcctctgggccctgcccacctcacgcagactgccgggacctctggcagaccttttcttgcacctgccagccaggttactacggcccaggctgtgtggatgcctgcctcctgaacccctgtcagaaccagggatcatgccggcacctgccaggagccccccatggctatacctgtgactgtgtgggtggctatttcgggcaccactgtgagcacaggatggaccagcagtgcccacggggctggtgggggagcccaacctgtggcccctgcaactgtgatgttcacaaaggttttgatcccaactgcaacaagacaaatgggcagtgtcactgcaaggagttccactaccgaccgcggggcagtgactcttgcctcccatgtgactgctaccctgtgggctccacctcgcgctcatgtgcaccccacagcgggcagtgcccctgtcgcccaggagcccttggccgccagtgcaacagctgtgacagtcccttcgcagaggtgacagccagcggctgccgggtgctctatgatgcctgccctaagtccctgagatctggtgtgtggtggccccagacaaagtttggcgtcctggccacagtgccctgtccccggggggccctgggtgctgctgtgcggctgtgtgatgaggcccagggttggctggagcccgacctcttcaactgtacctcccctgcctttcgagagctcagtctgctgctggatggcctagagctgaacaagacggcactggataccatggaggccaagaagctggctcagcggctacgggaggtgactggccacactgaccactattttagccaagatgttcgagtcactgcccgcctgctggcccacctgctggccttcgagagccatcagcagggcttcgggctgacagccacacaggatgcccacttcaatgagaatctgctgtgggccggctctgcactgcttgccccagagacaggggacttgtgggcggcgctggggcagcgggcccctgggggctccccaggcagcgcgggactggtgaggcacctggaggagtatgcagccacactcgcaaggaatatggaactcacatacctgaatcccatggggctggtgacgcctaatatcatgctcagcattgaccgcatggagcaccccagttctccccggggggcccgtcgctaccctcgctaccatagcaacctctttcgaggccaggatgcctgggatcctcacacccatgtgctgctgccttcccagtccccacggccatccccatctgaagttctgcccacaagcagcagcatagaaaactccaccacctcaagtgtggtccccccaccagccccgccagagccagagcctgggatctccattatcattctcctcgtttaccgcaccttagggggactgctccctgcccagttccaggcagaacgccgaggtgccaggcttcctcagaaccccgtcatgaactccccggtggtcagcgtggctgtgttccacggacgcaacttcctaaggggaatcctggagtcccccatcagcctagagtttcgcctgctacagacagcgaatcggagcaaggcgatctgtgtgcagtgggacccacctggcctggcggagcagcatggtgtgtggacagcacgggactgcgagctggtgcacaggaatgggtcccacgcacggtgtcgctgcagccggacagggacctttggggtcctcatggatgcctctccccgtgagaggctggagggcgacctggagctgctggctgtgttcacccacgtggtcgtggctgtgtctgtggctgcgctggtgctgactgcagccatcctgctgagcctgcgcagcctcaagtccaatgtgcgtgggatccatgccaatgtggcagccgccctgggggtggcagagctcctcttcctgctggggattcacaggacccacaatcaggtgcaggatcagggccagggaacttgtgtcctgatgaccctactggcccaggaggcctggggccaaaactcagggtcagagctggtgtgcactgcagtcgccatcctcctgcactacttcttcctcagcaccttcgcgtggctcttcgtgcaggggctgcacctctaccgcatgcaggttgagccacgcaacgtggaccgcggcgccatgcgcttctaccatgccctgggctggggcgtccctgctgtgctgctgggccttgctgtgggcctggaccctgagggctatgggaaccctgacttctgctggatctcagtccacgagcccctcatctggagctttgctggccctgttgtcctggtcatagtgatgaacgggaccatgtttctcctcgctgcccgcacatcctgctccacagggcagagggaggccaagaagacctctgcactcaggacccttcgcagctccttcctgctgcttctgctggtcagtgcctcctggctctttgggctcctggcagtcaaccacagcatcctagccttccactacctccatgctggactctgcggcctccagggcctggcggtgctgctgctcttctgtgtcctaaatgcagatgctcgggctgcctggatgccagcctgtctgggcaggaaggcagcgcctgaggaggcaaggccagcacctgggctgggacctggggcctacaacaacacggctctctttgaggagagtggcctcatccgcatcactctgggcgcctccaccgtctcctctgtgagcagtgcccgctccggccggacccaggaccaggacagccagcggggccgcagctacctcagggacaatgtcctggttcgacatggctcagccgctgaccacactgaccacagcctccaggctcatgctggccccactgacctggacgtggccatgttccatcgagatgctggcgcagactccgactctgacagtgacctgtccttggaggaggagaggagtctctccattccatcttcagaaagcgaggacaatggccggacgcgggggcgcttccaacggccactctgccgagcagcccagagtgagaggctcctcacccaccccaaagatgtggatggcaatgacctcctgtcctactggccagccctgggggagtgcgaggcagccccctgtgctctgcagacttggggctctgaaaggcgcctggggctggacaccagcaaggatgcagctaacaacaaccagccagacccggccctgaccagtggggatgagacttctctgggccgggcccagcgccagaggaaaggcatcctgaagaaccggttgcaatacccactggtgccacagacccgaggtgcccctgagctgtcctggtgccgtgcagccaccttgggccaccgtgcagtgccagctgcctcttacggtcgcatctatgctggcgggggcacgggcagcctttcacagccagccagccgctactcttctagagaacagctggacctgctcctccggcggcaactgagccgtgagcgactagaggaagcccctgcccctgttctacgtcccctgagccggccagggtcccaggaatgcatggatgctgcaccaggccgactggagcccaaagatcggggcagcaccctgccacggaggcagccacctcgggactaccctggcgccatggctggccgcttcgggtcacgggatgcgctcgacttaggggcacctcgagagtggttgagcacgctgcctccgccccgccgcacccgggaccttgacccacagcccccacctctgcccctgtctccccagcggcaactctcaagggaccccctcttgccatcccggccgctggactctctgtctaggagctcgaactctcgggagcagctggaccaggtgcctagccggcacccctcacgagaagcccttgggccactcccgcagctgctcagagctagggaggactcggtcagtggccccagccatggcccctccacagaacagttggacattctttcctccatccttgcctctttcaactcctcggccctctcctctgtgcaatcttcaagcacacccttgggccctcacaccactgccacaccttctgccacagcctctgtgcttgggccctccacgccacgttctgccacgtctcacagcatctcggagctgtcgccagactcagaaccgagggacacacaggcactgctgtctgcaacacaagcaatggacctgcggaggcgagactaccacatggaacggccgctgctgaaccaggagcatttggaggagctggggcgctggggctcagcacctaggacccaccagtggcggacctggttgcagtgctcccgtgctcgggcctatgcccttctgctccaacacctcccggttttggtctggttaccccggtatcctgtgcgtgactggctcctgggtgacctgttatccggcctgagtgtggccatcatgcagcttccgcagggcttggcctacgccctcctggctggattgccccccgtgtttggcctctatagctccttctaccctgtcttcatctacttcctgtttggcacttcccggcacatctccgtggagagcctctgtgtcccgggaccagtagacacagggacctttgctgtcatgtctgtgatggtgggcagtgtgacagaatccctggccccgcaggccttgaacgactccatgatcaatgagacagccagagatgctgcccgggtacaggtggcctccacactcagtgtcctggttggcctcttccaggtggggctgggcctgatccacttcggcttcgtggtcacctacctgtcagaacctcttgtccgaggctataccacagctgcagctgtgcaggtcttcgtctcacagctcaagtatgtgtttggcctccatctgagcagccactctgggccactgtccctcatctatacagtgctggaggtctgctggaagctgccccagagcaaggttggcaccgtggtcactgcagctgtggctggggtggtgctcgtggtggtgaagctgttgaatgacaagctgcagcagcagctgcccatgccgatacccggggagctgctcacgctcatcggggccacaggcatctcctatggcatgggtctaaagcacagatttgaggtagatgtcgtgggcaacatccctgcagggctggtgcccccagtggcccccaacacccagctgttctcaaagctcgtgggcagcgccttcaccatcgctgtggttgggtttgccattgccatctcactggggaagatcttcgccctgaggcacggctaccgggtggacagcaaccaggagctggtggccctgggcctcagtaaccttatcggaggcatcttccagtgcttccccgtgagttgctctatgtctcggagcctggtacaggagagcaccgggggcaactcgcaggttgctggagccatctcttcccttttcatcctcctcatcattgtcaaacttggggaactcttccatgacctgcccaaggcggtcctggcagccatcatcattgtgaacctgaagggcatgctgaggcagctcagcgacatgcgctccctctggaaggccaatcgggcggatctgcttatctggctggtgaccttcacggccaccatcttgctgaacctggaccttggcttggtggttgcggtcatcttctccctgctgctcgtggtggtccggacacagatgccccactactctgtcctggggcaggtgccagacacggatatttacagagatgtggcagagtactcagaggccaaggaagtccggggggtgaaggtcttccgctcctcggccaccgtgtactttgccaatgctgagttctacagtgatgcgctgaagcagaggtgtggtgtggatgtcgacttcctcatctcccagaagaagaaactgctcaagaagcaggagcagctgaagctgaagcaactgcagaaagaggagaagcttcggaaacaggcagggccccttttgtctgcatgtctggctccccagcaggtgagctcaggagataagatggaagatgcaacagccaatggtcaagaagactccaaggccccagatgggtccacactgaaggccctgggcctgcctcagccagacttccacagcctcatcctggacctgggtgccctctcctttgtggacactgtgtgcctcaagagcctgaagaatattttccatgacttccgggagattgaggtggaggtgtacatggcggcctgccacagccctgtggtcagccagcttgaggctgggcacttcttcgatgcatccatcaccaagaagcatctctttgcctctgtccatgatgctgtcacctttgccctccaacacccgaggcctgtccccgacagccctgtttcgccctcactcgctgtctcctcagatgtgaaacagttggaaccagagctgcttctcaggaataatttgctctcaggaatacccgagaaggtacagggcagcgtgggtgccaatgggcagtccctggaggatacagagtga

SEQ ID NO: 2736 - DNA, 1037 bp, Homo sapiens
  SIMILAR (3)..(746): 871254mologous to Homo sapiens putative anion transporter 1,accession number AF279265,Smith-Waterman Score=1059.
actactctgtcctggggcaggtgccagacacggatatttacagagatgtggcagagtactcagaggccaaggaagtccggggggtgaaggtcttccgctcctcggccaccgtgtactttgccaatgctgagttctacagtgatgcgctgaagcagaggtgtggtgtggatgtcgacttgctcatctcccagaagaagaaactgctcaagaagcaggagcagctgaagctgaagcaactgcagaaagaggagaagcttcggaaacaggctgcctcccccaagggcgcctcagtttccattaatgtcaacaccagccttgaagacatgaggagcaacaacgttgaggactgcaagatgatgcaggtgagctcaggagataagatggaagatgcaacagccaatggtcaagaagactccaaggccccagatgggtccacactgaaggccctgggcctgcctcagccagacttccacagcctcatcctggacctgggtgccctctcctttgtggacactgtgtgcctcaggagcctgaagaatattttccatgacttccgggagattgaggtggaggtgtacatggcggcctgccacagccctgtggtcagcccagcttgaggctgggcacttcttcgatgcatcccatcaccaagaagcatcttctttgcctctgtcccatgatgctgtcaacctttgccctcccaacacccgaggcctgtccccgacagcccttgttcggtcaccaaaactctgaacatgctacatcctgcccaatgactgcacctctggaggtgcagggcacccttgagaagcccctcacccctaggccgcctcccaggtgctaccccaggagtcccctcccatgtacacactacacaactcagggaaggaggtcctgggactccaagttcagcgctccaggtctgggacagggcctgcatgcagtcaggctggcagtggcgcggtacagggagggaactggtgcatattttagcctcaggaataaagatttagtcagctcaaaaaaaaaaaaaaaaa

SEQ ID NO: 2737 - DNA, 419 bp, Homo sapiens
  SIMILAR (91)..(225): 1001254mologous to Mus musculus putative,accession number AK010679,Smith-Waterman Score=217.
aacgccagatcagaaaagggagctcaggtaccttccagagagtgagacccagcgcccttgtctcgcacccagtaggctttcatccccgccatggcggagctgatccagaagaagctacagggagaagtggagaaatatcaacagctacagaaggacttaagtaaatccatgtcggggaggcagaaacttgaagcacaactaacagaaaataatatcgtgaaagaggtgagggactgggatttgtggggcgaggagggacctgtactagccatggttctgatcacatatgtcccatccctccatcaggaactggccctgctggatgggtccaacgtggtctttaaacttctgggtccggtgctagtcaaacaggagctgggggaggctcgggccacagtagggaagaggctggactatat

SEQ ID NO: 2738 - DNA, 370 bp, Homo sapiens
ctgctggcgaaagagccaacaaaacgctgggtgctgccaccgtgacaccgactttaggaccccggcctcggatggagaaaggagggtacggagccaccacataacttcctaatgtcttcaaatagcgaaagtgctagccggaaactgccggctgggtttacctattggtgctcgtgtgggactagcagattcgagaaaccagcgggactggaacctagtacacttcggcctctcaaagtgctgggattatagaagtgagccaccacgctcggcaaatgtttcaattttattcacaaaagtatactttacccaattgttgtaaactataaatattaatgtttaaaataaaatttttcttgactcaaaaaaa

SEQ ID NO: 2739 - DNA, 474 bp, Homo sapiens
  SIMILAR (86)..(220): 1001254mologous to Homo sapiens HKE2,accession number Z97184,Smith-Waterman Score=217.
cagatcagaaaagggagctcaggttcttttcagagagtgagacccagcgcccttgtctcgcacccagtaggctttcatccccgccatggcggagctgatccagaagaagctacagggagaagtggagaaatatcaacagctacagaaggacttaagtaaatccatgtcggggaggcagaaacttgaagcacaactaacagaaaataatatcgtgaaagagtaagcgatacgaatcccagcttcgggatcttgagcggcagtcagagcaacagagggagacccttgctcagctgcagcaggagttccagcgggcccaggcagcaaaggcaggggctcctggcaaggcctgaccccatggtggggggaggggaggggaggggagggaatgattcatctctattaactatacttgtagctaataaaatgaaaaaacaccttggtgcagaatgaacaactggactgcgttttatgatg

SEQ ID NO: 2740 - DNA, 1293 bp, Homo sapiens
  SIMILAR (1066)..(1191): 1001254mologous to Homo sapiens HKE2,accession number Z97184,Smith-Waterman Score=205.
gcttggggtcttgcgtttcgccaccatctcctggggacagggtggagcgatatcgggaacgggggaggttgcggtgccctcagcggtacctctcaagagtgctatcatttccgtaggccagatcagaaaagggagctcaggtaccttgcagagagtgagacccagcgcccttgtctcgcacccagtaggctttcatccccgccatggcggagctgatccagaagaagctacagggagaagtggagaattatcaacagctacagaagggtaagggaacagggtcggtatggtctcgcccaatgcacttacaacccaaagccattaccgagataaggtttgttgccccatctgggccctcgcgtgcagagacttccccgcctcagtctcagtactcttgcctgtggactcacccgcggcccccatccttttctgcttcctcagatccatatccacctgactaggattgtggggataggtggcacatttgatgtttctaaattgcctttcctctcatccccagacttaagtaaatccatgtcggggaggcagaaacttgaagcacaactaacagaatataatatcgcgaaagaggtgagggactgggatttgtggggcgaggagggacctgtactagccatggttctgatcacatatgtcccatccctccatcaggaactggccctgctggatgggtccaacgtggtctttaaacttctgggtccggtgctagtcaaacaggagctgggggaggctcgggccacagtagggaagaggctggactatatcacagctgaaatgtgagtttttattccaccaccgtgtgctgcaccctgtgatgcaagtgaaccattggagtagaggtgttgaaccattgcagaacagctctccatagtggcccctagtcctccagttcctccaaccctttccttccctttttaaccccccttcttctccctcccctggatctcaaggttttccacctatctctttcttgcgtttagcactctccatagtgagtcctactaatttctccctttctgcttgtctcccttgtctctccttagtaagcgatacgaatcccagcttcgggatcttgagcggcagtcagagcaacagagggagacccttgctcagctgcagcaggagttccagcgggcccaggcagcaaaggcaggggctcctggcaaggcctgacctccatggtggggggaggggaggggaggggagggaatgaggcagctctaggatctatactgtagctaataaaatgtaaaaacacctggcaaaaaaaaa

SEQ ID NO: 2741 - DNA, 710 bp, Homo sapiens
  SIMILAR (241)..(615): 911254mologous to Homo sapiens HKE2,accession number Z97184,Smith-Waterman Score=534.
tggaggaccgggtcgagccacgcgtccggcgtttcgcccaccatcttctggggacagggtggagtccatatccgggacgggggggaggtggcggtgcccctcagggctacctctcaagagtgctatcatttccgcaggccagatcagaaaagggagctcaggtaccttccagagagtgagacccagcgcccttgtctcgcacccagtaggctttcatccccgccatggcggagctgatccaagaaaaagctacagggagaagtggagaaatatcaacagctacagaaggacttaagtaaatccatgtcggggaggcagaaacttgaagcacaactaacagaaaataatatcgtgaaagaggaactggccctgcttggatggttccaacgtgggtctttaaactctctgggtccggtgctagtcaaacaggagctgggggaggctcgggccacagtagggaagaggctggactatatcacagctgaaattaagcgatacgaatcccagcttcgggatcttgagcggcagtcagagcaacagagggagacccttgctcagctgcagcaggagttccagcgggcccaggcagcaaaggcaggggctcctggcaaggcctgaccccatggtgggggcagcccaagggaggcgagggaatgaggcagctctaggatctatactgtagctaataaaatgtaaaaacacctgaaaaa

SEQ ID NO: 2742 - DNA, 717 bp, Homo sapiens
atggggctcgtggggaggggaaaacgtatggggctggggtcgctctggaggccggggactcggactcgggtagccgcggaggcctttctcaccatcgcgccaaactctcttcgctacagcagctgccgacaccgccgccgttacacgagcttaactacaacgccgctaacagccaatcctcgcgagaggagccgccggaagtcgtcgaaagtgcaacgcaaaagagccttttggatcatagaggcacagtcacttccggcagctagagcagctactgactctgtttcagccatcttcgataaaggcaaaaaggtgggtttcactgtgctccgccgccgccgcctagcgcgcatcggatcggatttctcttcctggaacctgaccgtgtctgtgtcggcatttggcactcaacgccagtctggagctatccgtgcagtgtgtgtccgtgatttatctgcgcgcctggcccgcgctccctgggaccagctgttccatccgcttccgctcctttcggagttggcgtttggggtgaccggctcattttcaggccagggagatgccggccgggccccaggggaccgcctcctcccggcaggcaggccacgtcgtgtctacttgtttccaggcttgtgccaagtgaaggacccaggaatgctgcgactctggcttcagcaccggcatctgtctgtcagctgggcccagcccaagtatccctga

SEQ ID NO: 2743 - DNA, 900 bp, Homo sapiens
aggattggctgttagcggcgttgtagttaagctcgtgtaacggcggcggtgtcggcagctgctgtagcgaagagagtttggcgcgatggctttgactgctcaggttattacagtctcacgaccattttgctggtacagcctaccaagaggcccagaaggcagaacttatgctgactacgaatctggtaaatgaatgcatggaagggtgtttgtaaaatgtatgaagaacatctgaaaacgaatgaatccccaacggtccctccatccacataataccacaagtcagttgtttgatttcatcgatggatctggcagacctcagctgcctggtttaccgagcttgatacccagacatacccagccttataaccaaagactggattaaagacgaagatcctacggtgctcctttcgtcgggcaaggcccaacaggctcgggaaataattgtcgttggaagccactgggggggttggggtggggcttgggacacaggtgtgtaacagcgtgcctgttagtggaagttttgtattcatagtaaatccctgtttcccactttgttatactctagccaagattgactgtagttagatgaaatgtgaggttcttgttcaatcgggaaacccccgttacctcctcctttttctttcctcctttctattttttcttttttaccttaaacatcttttatgatgatttagatggaagttgttcttcgtcgacttaatgttggttccagtccttcaactgttcatatctactttataacattcacatactaacccttctggggttcaagatggggtggggggtggaaatgcagttttagccatgtcctcaagataaagtaattggtaaaaataaataaatggtcctttagttataaaaaaaaaaaaaaaaaaa

SEQ ID NO: 2744 - DNA, 389 bp, Homo sapiens
  SIMILAR (1)..(132): 1001254mologous to Homo sapiens ribosomal protein,accession number Z26876,Smith-Waterman Score=223.
  misc_feature (1)...(389): n = a,t,c or g
aaaaataaggacaacgtgaagtttaaagttcgatgcagcagatacctttacaccctggtcatcactgacaaagagaaggcagagaaactgaagcagtccctgccccccggtttggcagtgaaggaactgaaatgaaccagacacactgattggaactgtattatattaaaatactaaaaatcctaagtgtctttcgtctttgcggatgggaaagggaaaaatgctacctcgtagtggcttctgatgggaacaggacgcgggttctgttgctgccttcctgggncannnnnnnnnnnnnnnnnnnnnnnnnaaaacggagctttgttttggggttaatctggaacccaaggggggcaatataagttaattaccccctccgcctcgggggt

SEQ ID NO: 2745 - DNA, 648 bp, Homo sapiens
  misc_feature (1)...(648): n = a,t,c or g
gggtgagaaaggtaatctggggcaatccactgccaggtgaaatctggggaccccaggtccgcgtggagggtgtcggggaggagaaggggagtgcgatggggccgatatttcgggggagagcgggaaaacggggttcgctgccagcccccgcgccgtgttaacgccgaggactgtttcccgcaggtcctggtccgcgccaagagcccagccgcgcctcgtcgcccatgccttcggaaagattgaggaacatcaaggaccttcctgctcacagtcccgacgaaaggatgccaaatctagtcaagatcaagaaaaataaggacaacgtcgaagtttaaagttccgatgcagcagatacctattacacccgtggtcatcacctgacaaagagaaggcagagaaactgtaagcagtccctgcccccccggtttggcaagtgaaggaacctgaaatgaaccacgacacacctgattggaacctgtattatacttaaaatacctaaaaatcctaagtgtctttcgtctttgcggatgggaaagggaaaaatgctacctcgtagtggcttctgatgggaacaggacgcgggttctgttgctgccttcctgtgtctttnnnnnnnnnnnnnnnnnctttttttaaaacgggtcttgt

SEQ ID NO: 2746 - DNA, 799 bp, Homo sapiens
atgagggccctcactggggtgtctctgcatggggaagcaggagtctgttccttttggccggctgctgaacctagggaggcagcgtgggatggagttggcaaacatcctgcaagtccacgacccatgaagagccgctatggtaccactagcagtgctaggacccagaaactagcgaaactgtttaggagaagctgcgggctggacgccaccagcggtgctgccacggaggtcaatcctgctttgacaaatcggctaccagagcgctgccgccaccgagaaaatggaggcaccgaggaacaagatgtgccgcgaccaagagaactcggcttggcgaaatggcggtgctgggaccctaagagtgacgccagccggaggagttcccaaggacaacatccattttggcggaaccaacggtgttgtcacgcagaaaatgtcgaccctcggaaaagagaggttctgcgaccgagaaattcggtgcaacaagtgctgtgacagaaaaccccccgctcggcgctgctggcgaaagagccaacaaaacgctgggtgctgccaccgtgacaccgactttaggaccccggcctcggatggagaaaggaggcgaagtcatactgagggccccatcaaccgatcccttgcgatgcgcatgggaaaaggaggcagtatagggaccgagaatcgggcggattgggctggccctggttgtaaggtctgtgaaagctgtagccagtccttcatctttgtgtatatggctcccatcaccgcatctggcatatggaaggatatcaacacatgcttgtga

SEQ ID NO: 2747 - DNA, 229 bp, Homo sapiens
gccatgtaattggaagtggaatatctctgctctcaattgataattaggaatcttcttagatcagccttacaggtgaagaattgtggcacctgctcaggagcacatcactcggcattgcctcccctccaatgcatgaggtcccatttcttgaggttgatggagacaggactaaaacccaggtcttccctttaaccaacctccgacgtgcgtgttaaccgcggtgacagca

SEQ ID NO: 2748 - DNA, 794 bp, Homo sapiens
acaatggctatggaatgaaagatgcagagaaacactgctttaaagagtatgtagagagttacagagtttagggatgcagtagcgtgaacacttctgagtttaccaggatttaacctcatggccccatcttaaaatcttgcggggctgcaaacctggagtaaaatctgttcaggggaagctcaatatgcttttcttacaagttcattgggtgatatgtctggagttttccctttttgcaactgacttggatttgtcggaatttcttcccagcacctacaggctgaactaaacccagtatccagtacatttctgggctgataaatggacatcattttgggaaggcatttgttgcttttttgcttgtttttgccttgcttttggttttgggatatgcgtgcaactccctggtatggacgttgtctagacctgttgtaggaggaaaaaaagttctttctctttatttcttcccttgtagagccaacacttagatctttatgtttctgaaatgtagttgagtgtctttttaaagatgctcttcctcaattatcagcagatcgttttttggctagcagcattctcttaggagaccttggggtggaggaggtctcacttttctgtcagcaatcttacaggtgaagaattgtggcacctgctcaggagcacatcgctcggcattgcctcccctccaatccatgaggtcccatttcttgaggttgatggagacaggactaaaacccaggtcttccctttaaccaacctccacgtgcgtgcccacgcgtccgcccacgcgtccg

SEQ ID NO: 2749 - DNA, 2712 bp, Homo sapiens
  SIMILAR (1191)..(1481): 641254mologous to Homo sapiens Amino acid sequence of human mannose binding protein (hMBP) as encoded byliver cDNA,accession number AAP94680,Smith-Waterman Score=282.
cgccagaaagtagagaggtatttagcactctgccagggccaacgtagtaagaaatttccagagaaaatgcttacccaggcaagcctgtgtaaaacaccaaggggaagcaaactccagttaattctgggctgggttggtgactaaggttgaggttgatctgaggttgagaccttcctctttggatcaccagctttcagctcagggcctgccaatgagtttaaatgatagttaacaggtcctggaggggaatcagctgcccagatcaaagatgggattcaggtggcagatggacccgaagaggacatggagagaaagaggaagaggaagctcctacagacacctgggtttccactcattctcattccctaagctaacaggcataagccagctggcaatgcacggtcccatttgttctcactgccacggaaagcatgtttatagtcttccatgtttatagtcttccagcagcaacgccaggtgtctaggcacagatgaacccctccttaggatccccactgctcatcatagtgcctacctttgttaaagtactagtcacgcaggttcacaaggaatgtttacttttccaaatccccagctagaggccagggtgggtcatctatttctatatagcctgcacccagattgtaggacagagggcatgctcggtaaatatgtgttcattaactgagattaaccttccctgagttttctcacaccaaggtgaggaccatgtccctgtttccatcactccctctccttctcctgagtatggtggcagcgtcttactcagaaactgtgacctgtgaggatgcccaaaagacctgccctgcagtgattgcctgtagctctccaggcatcaacggcttcccaggcaaagatgggcgtgatggcaccaagggagaaaagggggaaccaggccaagggctcagaggcttacagggcccccctggaaagttggggcctccaggaaatccagggccttctgggtcaccaggaccaaagggccaaaaaggagaccctggaaaaagtccggatggtgatagtagcccaggctgcctcagaaagaaaagctctgcaaacagaaatggcacgtatcaaaaagtggctgaccttctctctgggcaaacaagttgggaacaagttcttcctgaccaatggtgaaataatgacctttgaaaaagtgaaggccttgtgtgtcaagttccaggcctctgtggccacccccaggaatggctgcagagaatggagccattcagaatctcatcaaggaggaagccttcctgggcatgcctgatgagaagacagaagggcagtttgtggatctgacaggaaatagactgaccctacacaaactggaacgagggtgaaccccaacaatgctggttcctgatgaagattgtgtattgcctactgaaaaatgggccagtggaatgactccccttgcttccacctcccatctggccgtctgtgagttccctatctgaagggtcatatcactcaggccctccttgtctttttactgcaacccacaggcccacagtatgcttgaaaagataaattatatcaatttcctcatatccagtattgttccttttgtgggcaatcactaaaaatgatcactaacagcaccaacaaagcaataatagtagtagtagtagttagcagcagcagtagtagtcatgctaattatataatatttttaatatatactatgaggccctatcttttgcatcctacaattaattatctagtttaattaatctgtaatgctttcgatagtgttaacttgctgcagtatgaaaataagacggatttatttttccatttacaacaaacacctgtgctctgttgagccttcctttctgtttgggtagagggctcccctaatgacatcaccacagtttaataccacagctttttaccaagtttcaggtattaagaaaatctatttttgtaactttctctatgaactctgttttctttctaatgagatattaaaccatgtaaagaacataaataacaaatctcaagcaaacagcttcacaaattctcacacacatacatacctatatactcactttctagattaagatatgggacatttttgactccctagaagccccgttataactcctcctagtactaactcctaggaaaatactattctgacctccatgactgcacagtaatttcgtctgtttataaacattgtatagttggaatcatattgtgtgtaatgttgtatgtcttgcttactcagaattaagtctgtgagattcattcatgtcatgtgtacaaaagtttcatccttttcattgccatgtagggttcccttatattaatattcctcagtggcatccattctattgttaataggcacttaagtggcttccaatttttggccatgagggaagagaacccacggaacattcctggggacttgtcttttgggtgggacatgggtgcactaaatttccactacctatccaggagtggaactggtagaggatgaggaaagcatgtattcagctttagtagatattaccagttttcctaagtgattgtatgaatttatgctcctaccggcaatgtgtggcagtcctagatgctctatgtgcttgtaaaaagtcaatgttttcagttctcttgattttcattattcctgtggatgtaaagtgatatttccccatggttttaatctgtatttcccca

SEQ ID NO: 2750 - DNA, 949 bp, Homo sapiens
  SIMILAR (439)..(690): 1001254mologous to Homo sapiens unnamed protein product,accession number AK025622,Smith-Waterman Score=457.
cttgtgacatggggctgtcctgggccaagacaggctgatcaactatgccaccaatggtgccaagttcctgaagcggcacatgtttgatgtggccagtggccgcctgatgcggacctgctacaccggccctggggggactgtggagcacaggttgggggctgggtagacacgtagggcccgtctccccaacgcgtccccagcctacctctggcctacttctcccgctccatgtggactccagtcctggctctgcagggtgcttgctgtgagtttgtagattccgtgggcccatttactcatctgggaagtgggctgatggcacctgcctaagagggttcatctggagggttaagtgaacaaatgcgtgaaagggcctcctctgggaaaggccctctctcctgaggctctccccagcccctcccctaatgcctgtcccccagcaacccaccctgctggggcttcctggaggactacgccttcgtggtgcggggcctgctggacctgtatgaggcctcacaggagagtgcgtggctcgagtgggctctgcggctgcaggacacacaggacaggctcttttgggactcccagggtggcggctacttctgcagtgaggctgagctgggggctggcctgcccctgcgtctgaaggacgaccaggatggagcagagcccagcgccaattccgtcagcccacaacctgctcaagtgcccatcactgatccctgtgaattacgaaaactactacatccatgactgccccaacccccttgggatggggcagaaggtgaagcatcccaactgactagagactcaggccatgcagggccctatagaacctgtggccatccctgagcaccctgccaccaggtgacctcggccatactcactgccccccttgggcacccactcaccctagaataaacttaacagtgtcacataaaaaaaaaaa

SEQ ID NO: 2751 - DNA, 558 bp, Homo sapiens
  SIMILAR (37)..(375): 411254mologous to Halobacterium sp. NRC-1 Vng1303c,accession number AE005053,Smith-Waterman Score=211.
  misc_feature (1)...(558): n = a,t,c or g
aaattaagagcccactaggccagcgcggnggaattcgtccctcactctgagaagatgctctatgaccaggcacagctcgctgtggcctatttgtatgccttccagctctctggtgatgaattctactctgacgtggccaaaggcatcctgcagtacgtggctcggagcctgagccaccggtccggaggcttctatagcgcagaagatgcagactcgcccccagagcggggccagcggcccaaagagggcgcctactatgtgtggacggtcaaagaggttcagcagctcctcccggagcctgtgttgggtgccaccgagccgctgacctcaggccagctcctcatgaagcactactgcctcacagaggctggtaacatcagccccagtcaggaccccaagggggagacttgcagggccagaatgttgcttgaccgtccggtacttcgctgggagctgactgctgcccgttttggtttggatgttggaaggccgtgcggaccttgctcaatacagggctggagaagctcttccaggcccggaagcatcggcccaagccgc

SEQ ID NO: 2752 - DNA, 575 bp, Homo sapiens
  SIMILAR (3)..(143): 971254mologous to Homo sapiens unnamed protein product,accession number AK025622,Smith-Waterman Score=232.
acaagtgtgtgtgcctattgaccgccttttccgagcgcatgcgtcgtgtcccggtggcgttgcccgagatggtccgcgccctctcagcccagcagcagaccctcaagcagatcgtgatctgtggagaccgtcaggccaaagaacaccaaaggccctggtgcagtgcgtccactctgtctacattcctaacaaggtgctgattctggctgatggggacccctcgagcttcctgtcccgccagctgcctttcctgagtaccctccgacggttggaagaccaggccactgcatatgtgtgtgagaatcaagcctgctcagtgcccatcactgatccctgcgaattacgaaaactactacatccattgacatgcccataccccttggggtggggcagaaggtgaagcatcccaactgactagagactcaggccctgcagggccctatagaacctgtggccatccctgagcaccctgccaccaggtgacctcggccatactcaactgcccctccttgggcacccactcaccctagaataaacttaacaggtgtcccgtggtaaaaaaaaaaaaaaaaaaa

SEQ ID NO: 2753 - DNA, 3612 bp, Homo sapiens
  SIMILAR (155)..(529): 581254mologous to Halobacterium sp. NRC-1 Vng1303c,accession number AE005053,Smith-Waterman Score=395.
aaacgtagcagccatgctgggcgcgcgggcctggttggtccgtgttcttctgctgccccgcgccggtgcaggcctcgccgcgagccgcaggggtagctcctcccgggacaaggaccgaagtgcgacggtcagtagttcagtgcccatgcctgctggagggaaaggaagccatccttcatctacaccccagagggtccccaaccgcctgatccacgagaagtcaccatacctcctacaacatgcctacaatcctgtggactggtacccctggggacaggaagccttcgacaaggccaggaaggaaaacaagccgattttcctctcagtcgggtactccacctgccactggtgccacatgatggaagaggagtccttccagaatgaggagattggccgcctgctcagtgaggactttgtgagtgtgaaggtagaccgtgaggagcggcctgacgtggacaaggtgtacatgacgttcgtgcaggccaccagcagcggcgggggctggcccatgaatgtgtggctgactcccaaccttccagccctgtgtcgggggcacctatttccctcctgaggatggcttgacccgagtcggcttccgcacagtgttgctgagaatacgagaacagtggaaacagaacaagaacaccctgctagaaaatagccagcgtgtcaccactgccctgctggcccgatcagagatcagcgtgggtgaccgccagctgccgccctctgccgccaccgtgaacaatcgctgcttccagcagctggatgagggctatgatgaggaatacggtggcttcgctgaggcccccaagtttcccacgccggtgatcctgagcttcctgttctcctactggctcagccatcgactgactcaggatggctctcgggcccagcagatggccttgcataccctgaaaatgatggctaacgggggcatccgggaccatgtggggcagggctttcaccgctactccacagaccgccagtggcacgtccctcactttgagaagatgctctatgaccaggcacagctcgctgtggcctattcgcaggccttccagctctctggtgatgaattctactctgacgtggccaaaggcatcctgcagtacgtggctcggagcctgagccaccggtccggaggcttctatagcgcagaagatgcagactcgcccccagagcggggccagcggcccaaagagggcgcctactatgtgtggacggtcaaagaggttcagcagctcctcccggagcctgtgttgggtgccaccgagccgctgacctcaggccagctcctcatgaagcactacggcctcacagaggctggtaacatcagccccagtcaggcgtgtgagctcgcagacaaaggccattctcctcaggaccccaagggggagctgcagggccagaatgtgctgaccgtccggtactcgctggagctgactgctgcccgctttggcttggatgtggaggccgtgcggaccttgctcaattcagggctggagaagctcttccaggcccggaagcatcggcccaagccgcacctggacagcaagatgctggctgcctggaatggcttgatggtgtcaggctatgctgtgactggggctgtcctggggccaagacaggctgatcaactatgccaccaatggtgccaagttcctgaagcggcacatgtttgatgtggccagtggccgccttgatgcggacctgctacaccggccctggggggactgtggagcacagcaaccccaccctgctggggcttcctggaggactacgccttcgtggtgcggggcctgctggacctgtatgaggcctcacaggagagtgcgtggctcgagtgggctctgcggctgcaggacacacaggacaggctcttttgggactcccagggtggcggctacttctgcagtgaggctgagctggggggctggcctgcccctgcgtctgaaggacgcccaggatgaagcagagcccagcgccaattccgtgtcagcccacaacctgctccggctgcatggcttcacgggccacaaggactggatggacaagtgtgtgtgcctattgaccgccttttccgagcgcatgcgtcgtgtcccggtggcgttgcccgagatggtccgcgccctctcagcccagcagcagaccctcaagcagatcgtgatctgtggagaccgtcaggccaaggacaccaaggccctgggtgcagtgcgtccactctgtctacattcctaacaaggtgctgattctggctgatgggggacccctcgagcttcctgttcccgccagctgcctttccttgagttaccctccgacggttgggaaggaccaggccactgcatatgtgtcccctcctggggatccgggctctgcggtccagcgcgacctgcctggggccacgtgttcaagcacgaagcccctgcgtggagtccacgcccttcaaaaggtccctaggggcaaagggatgaagcccaggagcgtcaatgcccgcccagagctgagctccgtcctccggctgctgcccaaatcaggggtcgtggacaaaggatgcctggggcctgcggccctacgccaggaccccgcgccgaatactctgattcttcgggctccctccaagggagtcccaaagaccccaatggccaataggaaagttgcttatggaaccacagagaacagtcccgtgacattcgcgccacttccctggaggacactgtggagcagaaggcagaaagcgtgggcagaattatgcctcacacggaggcgcggatcatgaacatggaggcagggacgctggcaaagctgaacacgccctggggagctgtgcatgacgagggtactgacgtcatgctgggctactggggtgagcctcagaagacagaggaagcagtggatcaggacaagtggtattggacaggagatgtcgccacaatgaatgagcagggcttctgcaagatctgtgggccgctctaaggatatgatcatcccggggtggttgagaacatcttaccccgcagagcttcgaggacttcttttcacacacacccccgaaggtgccaggaagtgcatgtgtgtgggagtgaaggacgatcggatgggggaagagatttgtgcctgcattcggctgaaggacggggaggagaccacggtgggaggagataaatagctttctgcaaagggaagatctcttcactttcaagattcccgaagttacattcgtgtttgttcacaaactaccccccttcaccattttcagggaaagatccagaaattcaaacttcgagagcagatggaacgacatctaaatctgtgaataaagcaagcaggcctgtccctggccgggttggctttgactctctcctgtcagaatgcaacctgggctttatgcaccttagatgtccccagcaacccagtttctgagccaaggcacatcaaatgtcaaggaattgactgaacgaactaagagctcctggatgggtccgggaactcgcctgggcacaaggtgccaaaacggcaggcagcctgcccaggccctccctcctgtccatcccccacattcccctgtctgtccttgtgatttggacataaagagcttctgttttctttggc

SEQ ID NO: 2754 - DNA, 418 bp, Homo sapiens
  SIMILAR (124)..(261): 861254mologous to Homo sapiens beta-amyloid binding protein precursor,accession number AF353990,Smith-Waterman Score=195.
atgaaacacattttactgggaacgaagttggttttttcaagcccatatcttgccgaaatgtaaatggctattcctacaaagtggcagtcgcattgtctctttttcttggatggttgggagcagatcgattttaccttggataccctgctttggattgttggaccttcagatggaagtagttacattatagattactatggaaccagacttacaagactgagtattactaatgaaacatttagaaaaacgcaattatatccataaatattttttaaaagaaacagatttgagcctccttgattttaatagagaacttctagtgtatggatttaaagatttctctttttcattcatataccattttatgagttctgtataattttttgtggtttttgttttgttgagttaaagtatatta

SEQ ID NO: 2755 - DNA, 341 bp, Homo sapiens
  misc_feature (1)...(341): n = a,t,c or g
tcccaaaattcccaggtaggttataattcggccccctataaggaaaaaactattaccttgccagcccgggtaaacttgggcccccccaaggatcctttaaaacggcccccccnnnnnnnnnnnnnnnnnggggttttaccagttttatttctagactttcatgtttgtctttttgtcttctgctggaaacatgccggttacatgttggtgctgggaagcgccgcggtgcaaccagaaatgcacagacccagccgcccgccgcccagaccctcagacttgcgcgtcacaggacagactccgctgtgccccgtgcacttgccaccagcctttggcctctcgat

SEQ ID NO: 2756 - DNA, 415 bp, Homo sapiens
  misc_feature (1)...(415): n = a,t,c or g
aaaatgtgttttcagaggaaatcttattttcatattcagactttgtattgcccactcatttgtataagtgcgcttcggtacagcacgggtcctgctcccgcgatgtggaagtgtcacacggcacctgtacaaaaagactggctaacccctcttcctattaccttgatctcttcccccaacttcctaacacttattaatttatgaaactgtttttctcagcgcagttttgttttgtgtgtccattggattacaaactttattaaaaaatataaaacacnnnnnnnnnnnnnnggggcggccgttttaaaggatccttgggggggccaaagtttacgcgggcttgcaaggtaatagttttttccttatagggggccgaattaaaagctacctggggatttttgagaaggacccttag

SEQ ID NO: 2757 - DNA, 1678 bp, Homo sapiens
  SIMILAR (401)..(505): 1001254mologous to Homo sapiens Human secreted protein, SEQ ID NO: 5955,accession number AAG01874,Smith-Waterman Score=209.
ggaattcccgggtcgaccctcggaaaagagaggttctgcgaccgagaaattcggtgcaacaagtgctgtgacagaaaaccccccgctcggcgctgctggcgaaagagccaacaaaacgctgggtgctgccaccgtgacaccgactttaggaccccggcctcggatggagaaaggagggtacggagccaccacataacttcctaatgtcttcaaatagcgaaagtgctagccggaaactgccggctgggtttacctattggtgctcgtgtgggactagcagattcgagaaaccagcgggactggaacctagtacacttcggcagttgagaaatgacttaccaggacaaatactgcttctggctcgatggtgctgcccatgaacatccgccggctctgagaaacgagctgcactgtcagtgagaaaccgtgggcactgagaaacgagcggactgcaactgataactgcccacccagtgccactacgacaaagtgctgctggcactactcccaccctccgtcctcaaatcagtcccctcccgcctaagaagacctttatttttcctagcgaagtcatactgagggccccatcaaccgatcccttgcgatgcgcatgggaaaaggaggcagtatagggaccgagaatcgggcggattgggctggccctggtaacaaaagccatccgggtcgccaaccgtcttccactgcaagaaacaaaccttccagtggctgggctccgcccttctccttggtcagagccctccaggctcctaagggcgaagccgacacctcatccctttggaacttgaagttctcagtccaagacctccgtggagagtgaaagactcaatgcctcctgaccgaggcttcaggcctgccccggcagctaggtacctctccaggggatggaactctgtgggaactgctatttaattctgatggttaactctgtcagatggccttgatatatgggaataatcgttgcaggagggtaggggaaataagaatcgcaagactctagcacaggacgtgtggattgatggtgaggcctttgctccctctccccttgaaatcctcaaagggcagttcccgatttctatcacctttgaaattcatccctgatgtcttctccatctttgggaagtgcaatgcaatttcaagctcttgaatcttccctctcccacatttgtcaaatatactgacgctacaaactcctttcttacaggaaacctgaaactgccattgagcagaaggaaaacatccctttccagaacctttctcgtttttctaaaaatctgcacttttggaagtgatcccccaaagagacctccagactctaccatgagtgtctccagctgaactcatcgtgtctaatcctcaccctagcttatcctgttcaaatcatttccatctttttctggatgaacctgggcggatgtcagaccagagaagagcacagaatgtaccagagatggggtttcaccatgttggccaggatgtctcaatctctcgacctcgtgatcggcctgcctcagcctctcaaagtgctaggattatagaagtgagccaccacgctcggcaaatgtttcaattttattcacaaaagtatactttacccaattgttgtaaactataaatattaatgtttaaaataaaatttttcttgactcaaaaacaaaac

SEQ ID NO: 2758 - DNA, 502 bp, Homo sapiens
  misc_feature (1)...(502): n = a,t,c or g
caaatattattggtaggngntnntnntnnntccccactttttcaaccagcaagggtatggaggttnnnnnnnnnnnnnnnnnnnnnnnnnnnnnnnnnnnnnnnnnnnnnnnnnnnnnnnnnnnnnnnnnnnnnnnnnnnnnnnnnnnnnnnnnnnnnnnnnnnnnnnnnnnnnnnnnnncaggtaggttattattcggccccctataaggaaaaaactatttcgttgcctgcccgggtaaacttgggcccccccaaggatcctttaaaacgggcgccccnnnnnnnnnnnnnnnnncaaaattacaaaaggaaatttatttcaaaagcataaggggacatttacatttaaacaagatgataaacaggtgtcttgcaaaagaaaaaaatccatggcattaagtttttcattcaaattcggaagcaaaaataacctaagttgtgcactattgccttaggaaagggaaggggaagggtgagggataagggaacagtcaactcag

SEQ ID NO: 2759 - DNA, 764 bp, Homo sapiens
  SIMILAR (1)..(249): 1001254mologous to Homo sapiens beta-amyloid binding protein precursor,accession number AF353990,Smith-Waterman Score=445.
aatgaaacacattttactgggaacgaagttggttttttcaagcccatatcttgccgaaatgtaaatggctattcctacaaagtggcagtcgcattgtctctttttcttggatggttgggagcagatcgattttaccttggataccctgctttgggtttgttaaagttttgcactgtagggttttgtggaattgggagcctaattgatttcattcttatttcaatgcagattgttggaccttcagatggaaggtaggttacattatagattactatggaacccaggacttaccaggactggggtattactaatggaaaccatttaggaaaaacggcaattatatcccataaataattttttaaaaggaaccagatttggagcctccttggattttaataggagaacttcctagtgtatggatttaaagatttctctttttcattcatataccattttatgagttctgtataatcttttgtggtttttgtcttgttgagttaaagtatattattgtgagatttatttaataggacttcctttgaaagctgtataatagtgtttctcgggcttctgtctctatgagagatagcttattactctgatactctttaatcttttacaaacggcaagttgccacttgtcgatttttgtttctgaaaaataaaagtataacttaattcacaaaaaattatacagaactcgtaaaatggtatatgaatgaaaaagagaaatctttaaatccatacactagaagttctctatta

SEQ ID NO: 2760 - DNA, 1441 bp, Homo sapiens
  misc_feature (1)...(1441): n = a,t,c or g
aaaattttcattaatcaaactccgtaaagaaaactttccaacagcaaggatatgcaggttggtttaccccctataccctttaaaaatttttattttccctaaagccttaaatttctgtagggaggttgggccaatttgtcccccccccaaaaaaagggtccttccccaaaattcccaaggtggcttttaatcggccccccttaaggaaaaaaataataccttcccagcccgcgttaaattggggccccccaagggtcccttaaaacggccccccccnnnnnnnnnnnnnnngtgaataagttatacttttatttttcagaaacaaaaatgacaagtggcaacttgcctgttgtaaaagattaaagagtatcagagtaataagctatctctcatagagacagaagcccgagaaacactattatacagctttcaaaggaagtcctattaaataaatctcacaataatatactttaactcaacaaaacaaaaaccacaaaaaattatacagaactcataaaatggtatatgaatgaaaaagagaaatctttaaatccatacactagaagttctctattaaaatcaaggaggctcaaatccctaaaacaggaaagaaggaataccgttaaaacacaatattttttaagagtcccaatggagggttattggcagatggtacattttaaccatttccatttgcctccatggtatttttttctcattcttggagcacttctggtataatggtagagagattacatgaatgataatgccagatactggccttctcaatgggcctttcaggttttaagtttcaaatctgaatctggaatcccacctaaatgtttacataataggctaccaagaatgagattcctcttaaaattacatttgcttaatttttacacactatggtttagaaacaatctacttttgaaagagacacaatttacagtatgaataataaaagttacatgaaactacacaatccttctcataaaataggagaaacaatttccaaaacaaaaatgcctaatacaaaatgatacagttgactggagctggggtaggatgggaggaagagaacaaccatgtgacagaatgtatggaagacctagattctagtttcagttttgcactaattagttgcgtatcttactctcaacttccttaggtcttgatttttttcctggtaagaagaggtagatggatctctaagctttattctaattttaaggctcaatgacttacagtttataagatttggaaaaccttttggacaatcagttgaataaattccttacatcttgagggtgtgtcactgttcaatcccatgacaataactacaaggcatatccataattttactgttagaaaagaaaaaaatccacctaaagggcaaaagtatacttcatatcctgtttctgttctacaagacagaaag

SEQ ID NO: 2761 - DNA, 577 bp, Homo sapiens
cggacgcgtggggtcggattcatgtcaacgacaacaacagggggacacaaaaaggcggcggcttagctcctacccctggcggcggaggcagcggtggcggaggcgacggcacctcctccaggcggaagccgcagtttctcaggcagcggcagcgcccccggcaggcgcggaggcggtggcgcgcaaccagatttgcctgaagacctggataatctccatttttgtcatggactgttaaaacgtttgaagttccaattctggtcttgatttcccagttaaagatgttcttcacccggaatgcagtctttcctgttggtaaaataagacaacccatcaacattgcctgtttgtctgcttttgaatctcttaaggatggatgtttgtaagatgttgcttaataccagcctggaaatccccgtgcccatgtgtggatttgaaaatgacgttcaaatgtgcaagttctgttaaatacaaagagaacctctatgggtaacttttgtgttgaagaagtcatttgtcaaccatggtaaaacttgcaaacccactttatacagagtggattcttgaagctatacag

SEQ ID NO: 2762 - DNA, 1745 bp, Homo sapiens
tcaggttttaaatacttacagctttattaggagaaggctgtggtcacctcagcagccagctcccttgtatacacagtatacacagcccagccagcacccaggtccttccatcctttctgcagtacatggagtgcaaaagaaccaaacacaacggctggggagggagggtctaccaatgagtgtcagtgtcttagtgctttccgggagccaactgcccaggcttagggacactcaaatcccctcaaaactgtccatccagctccctgcccagacccccactcccagcatgtcgaggttcatatgagagtgtttgggccagactcctccaatcagtgcacgcgattgggcagaggaggctaagggaatcctggagcccaaagctgtattgggtccatccccctcaagaagttgttggagctttcagaacgttcctcttccttgtgtagacatgagataccgctgtaactttactccatcaccagaaacctgtgccttgagtctagtctctgctcagccctcgagagcatggttggattaaggaaatagtcaaaggcaagcaagacaaactccctaggttgtcttggtcatgcgtcttttaaaaagggaaagaagaaaagccacctcaacagataaaagcaccgaggcctggcttgtgtcaggagccagagaggttgtccttccttgaaatggtttgtaaagtgactgatggcaaaagctgctctcctctactggaggccagcctcctaccgatggcacctctgttgccacccacccaatccccctgccctcccgccacagaccccatgccgccctctcatacaagaaaaagggagtgcaccaagcacagggcgcagtgctgtcgtcagctatcaaggatctgcttctgcctggtaccctggtcctttttgtccctttagccccacagtggtcactggcacagaggggttcctgttcacttagttcttcaggggtgactgcagccctgcctcagagactggcaccccctctgcccccgcatgaactctgtccaaggtttccagcccagcgttagaccggatgagaacatcatcgcagaggcttggctggctggctggctggcttgtggattctgactattagggaaacccacataaaagaacggaactcttctctcccaggaagacacatgctttgatcttagctccagaaaattctccactgaggacctggattcatcacctacactcagaagcagaatatcccatgtacacagtggggcatctgaaccttcaagaaacaccctgcttagccaaagaagctgtgaccccaaaatatctccccacttggagctagagaaaatgcctgtttctattttcctgacatgtctataagacagacaggtctccagcagttcatactagtggctgccaggccccctgggtcagtcattgattcttggtgcctcctgaaacctactcccaaggagtctgaagaggccctgtcttcggctttggagccccaacagggggctgggctgtggggagcaggaagccacgcaccacaccctcatttctgtggctggacagctcgctctccaaagactgagtgtggtggaaggaccaggtcaccactgtcctaggggagggatacggctgggttcccagaggcgcataatctgaggtagcaaacagtggagaagctaaggcctaggatgcaccgtgacgtgcccagggcagacagcagtagtcggtcgcgtgggtagttcc

SEQ ID NO: 2763 - DNA, 1245 bp, Homo sapiens
  SIMILAR (285)..(401): 971254mologous to Homo sapiens early response precursor polypeptide (aa-21 to 77),accession number X02530,Smith-Waterman Score=185.
ctttgcagataaatatggcacactagccccacgttttctgagacattcctcaattgcttagacatattctgagcctacagcagaggaacctccagtctcagcaccatgaatcaaactgccattctgatttgctgccttatctttctgactctaagtggcattcaaggagtacctctctctagaactgtacgctgtacctgcatcagcattagtaatcaacctgttaatccaaggtctttagaaaaacttgaaattattcctgcaagccaatttttgtccacgtggttgagatcattgctacaatgaaaaagaagggtgagaagagatgtctgaatccagaatcgaaggccatcaagaatttactgaaagcagttagcaaggaaaggtctaaaagatctccttaaaaccagaggggagcaaaatcgatgcagtgcttccaaggatggaccacacagaggctgcctctcccatcacttccctacatggagtatatgtcaagccataattgttcttagtttgcagttacactaaaaggtgaccaatcatggtcaccaaatcagcctgctactactcctgtaggaaggttaatgttcatcatcctaagctattcagtaataactctaccctggcacctataatgtaagctctactggagggtgctatggttcttagtggatggttctgacccctgcttcaaatatttcccctcacctttcccatcttccaagggtactaaggaatctttctgctttggggtttatcagaattctcagaatctcaaataactataaggtatgcaatcaaatctggttttttaaagaatgctccttaccttcaggggactccaagtcccatcttcccaaggggcccaaatttcttcaagtgcctccttccatacaattccaaacacatacaggaaggtagaaatatctgaaaatgtatgtgtaagtattcttatttaatgaaagactgtacaaagtagaagtcttagatgtatatatttcctatattgttttcagtgtacatggaataacatgtaattaagtactatgtatcaatgagtaacaggaaaattttaaaaatacagatagatatatgctctgcatgttacataagataaatgtgctgaatggttttcaaaataaaaatgaggtactctcctggaaatattaagaaagactatctaaatgttgaaagatcaaaaggttaataaagtcattataactaaaaaaaaaaaaaaaaaaa

SEQ ID NO: 2764 - DNA, 497 bp, Homo sapiens
  SIMILAR (250)..(495): 981254mologous to Mus musculus putative,accession number AK003141,Smith-Waterman Score=452.
  misc_feature (1)...(497): n = a,t,c or g
gctcgccggggctgcggccgcccgaggctgccctgaggatctgtgtttggtgaaaaggagccaaattcacctgcagggcaggcggctctagcagcttcagaagcctggtgccctggcgacactggacctgccttggcttctttgatcccaaccccacccccgatttctgctctgctgactggggaagtcatcgtgccacccagaacctgagtgcgggcctctcagagctccttcatcgggactttgaacatgtcggggatcgccctcagcagactcgcccaggagaggaaagcatggaggaaagaccacccatttggtttcgtggctgtcccaacaaaaaatcccgatggcacgatgaacctcatgaactgggagtgcgccattccgggaaagaaagggactccgtgggaaggaggcttgtttaaactacggatgcttttcaaagatgattatccatcttcgncaccaaaatgtaaattcgaaccaccattatttca

SEQ ID NO: 2765 - DNA, 648 bp, Homo sapiens
  SIMILAR (47)..(427): 511254mologous to Homo sapiens alpha globin,accession number V00488,Smith-Waterman Score=247.
ccccgactcttctggtccccacagactcagagagaacccacccatggttgctgtctcctgccgacaaagaccaacgtcaaggccggcttggggtaaggtcggcgcgcacgctgtgcgcagtatgtgtgcggaggccctggagaggatgttcctgtccttccccaccaccaagacctacttcccgcacttcgacctgagccacggtttctgcccaggtttaagggccacgggcaagaaggtggccgacgcgctgaccaacgccgtggcgcacgtgggacgacatgcccaacgtcgctgtccgccctgagcgacctgcacgcgcacaagctttcgggtgggacccggttcaactttcaagctcctaaagccacttgccttgctggtggaccctgggccggcccacttccccgtccgagtttcaacccctggcggttgcaacgtcttccctggggacaaagtttcctgggcttcttgttgaagcaccgttgctgaccttccaaatacccgttaagcttggaagcctcgggtgggccatgcttcttggccccttgggcctccccccagcccctcctcccctttcctgcacccgtacccccgtggtctttgaaataaagtcttgagtgggcggcaaaaaaaaaaaaaaaaaaa

SEQ ID NO: 2766 - DNA, 1254 bp, Homo sapiens
  SIMILAR (698)..(1057): 741254mologous to Homo sapiens Human signal peptide containing protein HSPP-130 SEQ ID NO:130,accession number AAY87353,Smith-Waterman Score=415.
atgaccttggaggccacacacctgctgttgagagttctgctggtgctcctggcctcaggcgggtccttattccaaagccccccagtcaagtccatcatcctgggtgtggcagtgaccgttgtgctgctgctgctgctgcttgccctcctcatcaaccggtacctccagaaagcccgaggaagagctaggaaaccctatactgaagatgtttctgttgacaaaaagactgaaacgtgggagtgggccagaggtgagggtgaatcttaccatgtttatgatgacgtccaaaaggagaagaccactgataggatgatcaggagttcaagcatgtgtgtgcacaaaataaacaccagtgtgagcatgtgtgcacaggagacacccaacagttccaagaaggctaaacttgggcagaaaattccagttcaagggaaagacgagatcttgcacaaggcactctgcttctgcccttggctggggaagggtggcatggagcctctccggctgctcatcttactctttgtcacagagctgtccggagcccacaacaccacagtgttccagggcgtggcgggccagtccctgcaggtgtcttgcccctatgactccatgaagcactgggggaggcgcaaggcctggtgccgccagctgggagagaagggcccatgccagcgtgtggtcagcacgcacaacttgtgggctgctgtccttcctgaggaggtggaattgggaacacagccattcacagacgataccctggggtggcactctcaccattacgctgcggaatctacaaccccatgatgcgggtctctaccagtgccagagcctccatggcagtgaggctgacaccctcaggaaggtcctggtggaggtgctggcagaccccctggatcaccgggatgctggagatctctggttccccggggagtctgagagcttcgaggatgcccatgtggagcacagcatctccagggctgagagacacgtgaaggaagatgatgggaggaaaagcccaggagaagtcccaccagggaccagcccagcctgcatacttgccacttggccaccaggactccttgttctgctctggcaagagactactctgcctgaacacttgcttctcctgggaccctgggaagcagggacttggtttgaggggagttggggaggttgtaagaacaccttgacaatttcttgaatattttggacattttaaacacttacaaataaatccaagactgtcatatttaaaaa

SEQ ID NO: 2767 - DNA, 871 bp, Homo sapiens
  SIMILAR (247)..(537): 891254mologous to Mus musculus putative,accession number AK003141,Smith-Waterman Score=483.
ggtgaaaaggagccaaattcacctgcagggcaggcggctctagcagcttcagaagcctggtgccctggcgacactggacctgccttggcttctttgatcccaaccccacccccgatttctgctctgctgactggggaagtcatcgtgccacccagaacctgagtgcgggcctctcagagctccttcgtccgtgggtctgccggggactgggccttgtctccctaacgagtgccagggactttgaacatgtcggggatcgccctcagcagactcgcccaggagaggaaagcatggaggaaagaccacccatttggtttcgtggctgtcccaacaaaaaatcccgatggcacgatgaacctcatgaactgggagtgcgccattccaggaaagaaagggactccgtgggaaggaggcttgtttaaactacggatgcttttcaaagatgagtatccatcttcgccaccaaaatgtaaattcggaccaccattatttcccccgaattgtgttacctcgggggccagttgccttttccttcttagaggaggacaaggactggaggccagccatcacaatcaaacagatcctattaggaatacaggaacttctaaatgaaccaaatatccaagacccagctcaagcagaggcctacacgatttactgccaaaacagagtggagtacgagaaaagggtccgagcacaagccaagaagtttgctccctcctgccgctcctctctagaaccttctagaacctgggctgtgctgcttttgagcctcagaccccaggtcagcatctcggttctgcgccacttcctttgtgtttatatggcgttttgtctgtgttgctgtttagagtaaataaactgtttatat

SEQ ID NO: 2768 - DNA, 3628 bp, Homo sapiens
  SIMILAR (856)..(1317): 361254mologous to Mesocricetus auratus ubiquitin conjugating enzyme,accession number AF004814,Smith-Waterman Score=158.
ggatgggaagcgagcatggtgagtcctcaagtcgcagctgggcctgctccacgtgggagtggagggtggaggaacgtgtggagtttcggagtccagcccagtgcggagacagccttgaaaccgtggttggcgggcgctccactccgctctgggctcgaaccctgcctgaccatagctgtgccccccactttctccctgtctggcccctggctccccgccccctcacttagaggagggcacggggaagggcaaacggtccagagggcgggcggcctgcgggctcctctgcatcatgtgaggagggcgtggggaaggacatcccggtggggcccggtctggggctgcctccagcccgggctgcctgtcttggacttagtcgtggacctggaggccagtgcccggctggcccctgtcaccctctcgctgtgacgccagcgcctgctgactggaggacccaggttccttcgcctgctttttctcaggctgccctgaggatctgtgtttggtgaaaaggagccaaattcacctgcagggcaggcggctctagcagcttcagaagcctggtgccctggcgacactggacctgccttggcttctttgatcccaaccccacccccgatttctgctctgctgactggggaagtcatcgtgccacccagaacctgagtgcgggcctctcagagctccttcgtccgtgggtctgccggggactgggccttgtctccctaacgagtgccaggtgaggctgcggcggctccgacgcaggtggagctgctgacctggcccctttctgcggctgcgagggactttgaacatgtcaggggatcgccctcagcagactcgcccaggagtatgaaagcatggaaggaaagaccacccatttggttaataatgctgtcccaacaaaaaatcccgatggcacgatgaacctcatggaactgggagtgcgccattccaggaaagaaagggactccgtgggataggaggcttgtttaaactacggatgcttttcaaagatgattatccatcattcgccaccaaaaatgtaaattcgaacccaccattattttcaccccgaattgtgtacccttcgggggccaagtgtgcctgtccatctttagaggaaggaccaacggacttggaggccaagcccattcacaattcaaaccagattcctattaaggaattacaggaactttcttaaatggaacccaaatatcccaagaccccagcttccaagcagaggccttacacgatttactggccaaaacagagttggagttacgagaaaagggtcccgagcaccaagccaaggaagttttgcgcccctcataagcagcgaccttgtggcaatcgtcagaaggaaagggattggtttggccaagaacttgtttacaacattttttgcaaatctaaagtttgctcccatacaatgactagtcacctggggggggttgggcgggcgccatcttcccattgcccgccgcggggtgtgcggtctcggattcggctgaattgcccggtttccatacaagggtcttctttccttcggtgcttttgtatttttggattgttatgtaaaactcggctttttattttaatattgatgtccagtatttcaactgctgtaaaattataaacttttatacttgggtaagtctcccccaggggcggagttcctcgcttctgggatgcaggcatgcttctcacccgtgcagagctgcacttgggcctcagctgggctgtatgggaaatggcaccctcccttcctgccgctcctctctaagaaccttctagaacctgggctgtgctggcttttgagcctcagaccccagggcagcatctccggttctgcgccacttcctttgtgtttatatggcgttttgctctgtgttgctgtttagagtaaataaatctgtttatataaaggttttggttgcattattatcattgaaagtgagaggaggcggcctcccagtgcccggccctccccacccacctgcagccccaccgcgggccaggaccaggctctccatctgcttcggatgcacgcaggctgtgaggctctgtcttgccctggatctttgtaaacagggctgtgtacaaagtgctgctgaggtttctgtgctccccgcatctgcgggctgtagagcgctgggcagctaagatctgcataggtcgggattggcatcgagaccctggcaactgcaccggtgccagctgtcttgggggccacaaggccaggtccagaccagggctgggggctgcctgaggactcctatccgggcagcctgctggcgggggttcccctcttcagtggccaggtcacagggatggagctgcgctgtgcatagggtgccacctcaggtgtctgtcccttgtgtcctcaggaggcagccttgctaccacccgtggcaaacgccaggtgctttttctgggagagcccacagccgtggccctccagggcttccccgacccttagcgccaggtagagggccctgggcagcctgtgtctggaattcttcgtcctgaggccacctgagtgtggtctgtcctggggaggctgtgcgcctcagcagccgtcctgacgctgagccctctgcaaaggttgggccggccaggcctcttggggctgcctgagccactgcaggaagtggcctggctgggaagttgggtgccggtcacctcccagcaggaaggcacagtggacagagatgggaagccctgggggacacagcccggtgctcccagccctccaacctctggctcccaacccagtctccccatcctagcgagcttggccctcctcagtttcgtttcaagccttggggctggagctggccctgctgccctggcaccccccggtggctggagctgggtccccgtggcccaagtgcagggtcccaagagggcagggcggggctccccaaaggagcaaagaatgcagggagggcggtccagggccctgggaaggggagctcggcaccctccaggtccgtgtgggactccagccgctgttggctgggaatcgaagttagaggtgacttccaaaggccccccgagccggcagtgccccccaccacccctccagcgactctgcggtgccagtgccttgttggcttttccggctacgcaccctgccagtcactgagctctcggtctgacgtctgatgtttgtggtttgtttataaccacggggccttacctggggaattccagctgggtttgaatattttgtagcccgctccccagaatgtcttattttgtaatgactgaactacatttagtaatagttacacatgtatatggttaatacatatgggaaattcaatatattttgtagttaacgtattcctgaagtaaccggatgtttctccgccaatccgtagtgacttcagctaaccgaaatgttcttttgtaagtaccatggtcctccggcctaaccgaaggaccgtgaaccttgtaaagaggagagctcctgaaaccgtggtcacctttgtttaagtggaagggaaagtgtgttcctgggccatgaggtgcctccggaattaggtaaaagaattgtggggcaatgggatttaaccactggtatctaagaaatcccaccaattaaagcatttgcacagac

SEQ ID NO: 2769 - DNA, 407 bp, Homo sapiens
  SIMILAR (114)..(1): 871254mologous to Homo sapiens multispanning nuclear envelope membrane protein nurim,accession number AF143676,Smith-Waterman Score=170.
  misc_feature (1)...(407): n = a,t,c or g
nacacacactgggtggcgcaggtgggagaagagtctgagagcccggggagacttcagggccagaggctcgcccagccncagcacatggtagtatacctgcaaggccagggcctcatacctgcaaggccagggcagtgcaggccacatacagtgacctctgaaggaccccaaagtaccgggatgtccatgccttcactctttcagctgccatgaggctgtgctgcccaacaaatagaagcaggagccccagatcccatgccaggggggcaaggatgctgcggtcctgcagggcagccagccatccctggcgggcatccggaccaccagactccgggatccctccaagaagtggccgaagggaggtaaagcgcacgaactccactccggtgccaaaggccaggacgaaa

SEQ ID NO: 2770 - DNA, 1444 bp, Homo sapiens
  SIMILAR (19)..(168): 1001254mologous to Homo sapiens Amino acid sequence of novel polypeptide PRO1112,accession number AAY93694,Smith-Waterman Score= 255.
acccctccatttctcgccatggcccctgcactgctcctgatccctgctgccctcgcctctttcatcctggcctttggcaccggagtggagttcgtgcgctttacctcccttcggccacttcttggagggatcccggagtctggtggtccggatgcccgccagggatgggctggctgccctgcaggaccgcagcatccttgcccccctggcatgggatctggggctcctgcttctatttgttgggcagcacagcctcatggcagctgaaagagtgaaggcatggacatcccggtactttggggtccttcagaggtcactgtatgtggcctgcactgccctggccttgcagctggtgatgcggtactgggagcccatacccaaaggccctgtgttgtgggaggctcgggctgagccatgggccacctgggtgccgctcctctgctttgtgctccatgtcatctcctggctcctcatctttagcaatcttcctcgtctttgactatgctgagctcatgggcctcaaacaggtatactaccatgtgctggggctgggcgagcctctggccctgaagtctccccgggctctcagactcttctcccacctgcgccacccagtgtgtgtggagctgctgacagtgctgtgggtggtgcctaccctgggcacggaccgtctcctccttgctttcctccttaccctctacctgggcctggctcacgggcttgatcagcaagacctccgctacctccggggcccagctacaaagaaaactccacctgctctctcggccccaggatggggaggcagagtgaggagctcactctggttacaagccctgttcttcctctcccactgaattctaaatccttaacatccagggcctggctgcttcatgccagaggcccaaatccatggactgaaggagatgccccttctactacttgagactttattctctgggtccagctccataccctaaattctgagtttcagccactgaactccaaggtccacttctcaccagcaaggaagagtggggtatggaagtcatctgtcccttcactgtttagagcatgacactcttcccctcaacagcctccctgagaaggaaaggatctgccctgaccactcccctggcactgttacttgcctctgcgcctcaaggggtcccctttttgcacggctggtttccactccaagaaggtggaccagggtctgcaagttcaacggtcatagctgtccctccaggccccaaccttgcctcaccactcccggccctagtctctgcacctcctttaggccctgcctctgggctcagaccccaacctagtcaaggggattctcctgctcttaactcgatgacttggggctccctgctctcccgaggaagatgctctgcaggaaaataaaagtcagcctttttttacataaaaaaaaaaaaaaaaa

SEQ ID NO: 2771 - DNA, 2191 bp, Homo sapiens
  SIMILAR (1539)..(1724): 961254mologous to Homo sapiens FGFR signalling adaptor SNT- 2,accession number AF036718,Smith-Waterman Score=317.
ccgagctccgggcgggcggcggctgctgcagcgggacccgggagcggggcccggcgccgcccgggccgcggggcgatgtgagccccaggtgtatcccagagggatccgggtgacttctctgcagactgtttgccatgacagcccaccaaggacggggggaataaagtgggaacccttccccatgcccctcccacggtcagctccccgatggcctgggtgagggcaggctggctgctctgacaccatggggagctgctgcagctgcctgaacagagacagcgttccagacaaccaccccaccaagttcaaggtgacaaatgtggatgatgagggggtggagctgggctctggggtgatggagctgacgcagagtgagctggtgctgcacctgcatcggcgtgaggccgtccgctggccttatctctgcttgcggcgctatggctacgactccaacctcttctcctttgagagtggccgtcgatgtcagacaggccatggaatatttgcatttaagtgttcccgggctgaggaaatcttcaacctccttcaggatctgatgcagtgcaacagcatcaatgtgatggaagagcctgtcatcatcacccgcaatagccaccccgctgagcttgacctccctcgagccccccagccacccaattgctctagggtacaatgtcttccagcttttccaatggctgccctggagagggcccacgattctcagctccccagcggctctcgacaagcagcctgcggcacccctcgcttggggaagagtccacccatgccctcattgctcctgatgagcagtcccacacctatgtcaacacaccggccagtgaagatgaccaccgcaggggccgccactgcctgcagcccctgcctgagggtcaggcacccttcctcccgcaggcccggggacctgaccaacgggacccacaggtgttcttgcagccaggccaggtgaagtttgtgttgggcccgacccctgctcggcggcacatggtgaagtgccagggcctctgtcccagcctgcatgaccccccacaccacaataataacaatgaggccccttctgagtgtccagcccagcccaagtgcacctacgagaacgtcaccggggggctgtggcgaggggctggctggagactgagcccagaggagccgggctggaatggccttgcccaccgccgggccgccctgctgcactatgagaacctgcccccactgccccctgtgtgggaaagccaagcccagcagctgggaggggaggctggggatgatggggactcgagggatgggctcacaccctcttccaatggcttccctgatggtgaggaggacgagaccccactgcagaagcccaccagcacccgggccgccatccgcagccacggcagctttcctgtgccactgacccgccgccgcggctccccaagggtcttcaactttgatttccgccggccggggcccgagcccccaaggcagcttaactacatccaggatgaagctaaagggctggggtggagaccgccctaaggggccccgagaacccctcgagcccccaagcccccatgcccaccacccaccctgcccgaagctcagactcctacgccgtgattgacctcaaaaagaccgtggccatgtccaacctgcagagagctctgccccgagacgatggcaccgccaggaaaacccggcacaacagcaccgacctgcctctgtagggacttcccggtcctcaccaccctctgccccaccatgatccagcctctgcctcacactcctgtcctctgaacccaccctccccaagggttcagggttgctttgcagaaggcatggaggtgggaccagatgcttccctgtgctggctggagtccccagagatatcagccaccgagtctcctggtctgtctccaggctgggaagagaaggggtgaccaggcgaggagggagccgagacgtcaactgtgaagggttcctgtgattgcgtttagcgccctcccgttctgtccatttgtcttgtctgccgactgtccgtgtgtgttttttttggttggaattttgaaacattttgtacctgttgattttatttatcagtttatttttctatttattgttttaaatgtaatttaacatatttattattaatataattatttttaaattctgaaaaaaaaaaaaaaaaaaa

SEQ ID NO: 2772 - DNA, 2149 bp, Homo sapiens
  SIMILAR (1725)..(1642): 1001254mologous to Homo sapiens Human secreted protein, SEQ ID NO: 8009,accession number AAG03928,Smith-Waterman Score=150.
ccactgttattggtaattttttaataggaacactttccattaatgcttgaaaactacgaactacattttattttatatcttgtcaaattagttggagaatatctattgtaaagcctgtcagcaacatctctaacattactttgtcaggatccacctgctctatgctgcccactataggaaatgcaatatggtaataagaaatgtaatagaaggttactttatgtacaatctcataaaaaacaatctctgactcatacttggatgctaaatgtggtgtttttgcaagagatacagactgattagtggcaatcaaatttattaactgtaaaggacatcaataaaaacaaacaggaccaaaaattgtattttggggatccacatgccaggagtagcgcggcagaggatggagaggggaacttaacgattgaggcgcaccctgcaaaaagctgcacttctgccctagaaattaaataaggagggtcaaaatcaacataaactaaaccctttttcaaagtcatgtaaacacaaatgattggctgcaactgggaaaaccaacattgaaaataaatgattccgtgtgatgcatatcagatttcaaccaaacctttcctttaaaccttttaacgttactcttaccaggcaaataccggtaatagcttacttctgtcttaatttttctaaccaccgggaaaattgaaacataagtaatctgataaacatcaagttttacgttgatgcttttgaccacagggtatatacagtgttaagaatttaaattctatccatcagatatactttaggactccattttgaagatagcctcttctacagaaaagaaatttttaaaagtcaattctccagtttctcatcacatcttaatttttttaaaaaggcttttaaacactagtatcactcccaagtctttagcctttgatacttgctctgaaaacacactatcgtatgtttgtgtatgtacacacacacacacaacagtgacttaaaagtggcaaccgcctcttgaaaagtaaaaatatgtcatccctccattctgcccttaaatgagaaataaagacaatagatttgcccactgcagactgggataccagaaaagacgttctaagtctcgcctgagacaatattaacctgctatcttaagtcccaacttggatgacttaaatttcagtgtacgtgcctccgttcccactcttgccccatcagctccatcagcatcgtcatccccggctcggatcccggccgcgacccgccagggccgccggagtccgcgaataccgcccgctcccagcaacgaagcttcccccgctcccggccgaccgcgagttcctggagcagcagcctccaaggttcccaaagcccacgattcaggcgagcggtgccgaccgggccgtggactgtggcattttaaaactacagaagtctcactgcacgactggcgcggccgaggtggcccaggagaccctccaagagattctggtcagctgccgggagcgtggaagagcaaccaaagccaccaaaggcgccgcggccaagtccccggagcagtcacctcagctttccgttctccctctagctacaattactccacaggcttacggcgcttccttcgagaaaatgaaaaacctaaaaacgcgtagaggtggtagaagtcgttggcattttccgtttaatgtgatcccccaggctccatcccttaagtggggtttccaaacatcggatgcatcctcagcagaggttttccatgttgacagatctctcgcctcccacaaaatggggccggggaggcggccgcggtctcctctatgggcgccgccattttggaatccccggcactgacggttacgtaaggggctgtgcgcaagtgcggcgtttagggaatccgcacagcccgggccacgcagctccgaggcccacatctccacttcccctaagaggaccgatgggggaagggacagctgaccgggtcttcctcgcagcagcctcacccctagtcttccgcggccggcgagcttctccacctccccgggccgggtctccgcccctcacaggcttccgagacactcactggccctgggttgtcaggatcttcctagccacaaccttattccgaccccacttaagagacaaactttag

SEQ ID NO: 2773 - DNA, 422 bp, Homo sapiens
  misc_feature (1)...(422): n = a,t,c or g
nnnnnnnnnnnnnnnnnnnnnnnnnnnnnnnnnnnnnnnnnnnnnnnnnnnnnnnnnnnnnnnnnnnnnnnnnnnnnnnnnnnnnnnnnnnnnnnnnnnnnnnnnnnnnnnnnnnnnnnnnnnnnnnnnagtcttcctaaaaagaagaatccagacctacatggctttgttggtaaattctatcaaacatttaaggaaaaaataccaannnnnnnnnnnnnnaacaaatttcacaagacatttatgaggccagcattaccttgatcccaaaccagaccaagactttaggaaaaaagaaaactgtagctcagtatccctcattatttttccagaaataattaacaaaatattagaaaattgaatctagcagggaataaaaacataactaattggattatcccagttgcaaagttgatttagca

SEQ ID NO: 2774 - DNA, 423 bp, Homo sapiens
  SIMILAR (242)..(289): 1001254mologous to Homo sapiens NADH-ubiquinone oxidoreductase subunit B14.5B homolog,accession number AF070652,Smith-Waterman Score=89.
ccggggtagtggtcgtcgtggttttccttgtagttcgtggtctgagaccaggcctcaagtggaaacggcgtcaccatgatcgcacggcggaacccagataccttacggtttctgccggatgaggcccggagcctgcccccgcccaagctgaccgacccgcggctcctctacatcggcttcttgggctactgctccggcctgattgataacgtgaatccggcggaggccgatcgcgacggctgataagaaaacatatggtgaaatttttgaaaaattccatccaatacgttgaagtcttcaaaatgcttgctccagtttcactgatacctgctgtttctgaatttgatggaacatgtttcttatgacagttgaagcttatgctaatctgtatgttgacaccttgtaattaaaatacgtaccatg

SEQ ID NO: 2775 - DNA, 554 bp, Homo sapiens
  SIMILAR (225)..(290): 771254mologous to Homo sapiens Human secreted protein, SEQ ID NO: 7253,accession number AAG03172,Smith-Waterman Score=90.
  misc_feature (1)...(554): n = a,t,c or g
gaactataaacctattatttattgcagaactaataaaaaatccaaagccttgtatttgtacatctttattatttctaaagcactgtcctcaaccctaattccagttttcacaattggtactcaagaaaatagagacagaaatcatttgattttgcccagaaacccatctgcttatatttataaggccacctaatttgaaatcacatatagaccaggcgcggttgctcacgcctgtaattccaacaccttggaagcccaaggcaggtggatcacaaggtcaagagatcgaagaccatcttggccaacatgggtgaaaccccgtctctacttaaaaacacaaaaatcagctgggatttacagggcatgagccaccgcatcgggccaggacaagcatttgataagccataaaaagtaacctnattccagttaggtacagtcttttgcttctaattgcaccaagctccactgtagacagtattagctcctgagtccattttctccaggataacccacctaagagcaaagacaacttggcaacataagatttctgtttt

SEQ ID NO: 2776 - DNA, 1951 bp, Homo sapiens
  SIMILAR (635)..(838): 601254mologous to Homo sapiens NADH-ubiquinone oxidoreductase subunit B14.5B homolog,accession number AF070652,Smith-Waterman Score=161.
agattttatggaatttcaattaattacgtttataaaaactacgcatcatgcccatttgtgggtattggatgaaaagataaatctttccagaaggggcaggggagggagaggcaattctggttggggaagttgggagaaaagaaaatcagtatctcctagtcttcgcccagtttggctcgtttggggtactcctcgaccccgcgttaccaggcccgtgaatcccactcccaccagagaattagcgcgggcggacagagcaaagtgaaacttagtagcccggaacttcgcgtgccgggttcccgcagcaacacgtaccgggaagcgtttgggcgctgcaccgcgcatgcgccgttgcccgtgagtccggcgcgcagaggaggaggagaaagctgaccgcttaggcccgggtagtggtcgtcgtggttttccttgtagttcgtggtctgagaccaggcctcaagtggaaacggcgtcaccatgatcgcacggcggaacccagaacccttacggtttctgccggatgaggcccggagcctgcccccgcccaagctgaccgacccgcggctcctctacatcggcttcttgggctactgctccggcctgattgataacgtgatccggcggaggccgatccgcgacggctggttttgcattcgccagcttctatatattaacggccttttttttttgctgggatattatcttgtaaaaacgtgaagactacctgtatgctgtgagggaccgagaaatgtttgggatatatggaaatttacatccagaggattttttcctgaaggaagataaggaaaacatatggtgaaatttttttgaaaaattcccatccacatacgttgaaagttcttcaaaaatgcttggctcccagttttcattgattacctgctgttttctgaatttgatgggaacatggtttctttatgacagtttgaaagcttatgcctaatctgtatgtttgacaccttgtaattaaaaatacgtaccatgagtactctgactctttattgttgtaagaaaaatagttcatcattcagagaatgggtcagtttccatttcacccatctgaaagattttaaggtgagggttggattctagtttaggagttaggcagactaccccaatctgggcccactgccaataaagtctcattggaacacagccatgctcatttgtttacatgttgtttatggcgactgccatgcatgcaagagcagaattgagtagttgtgatagagacctatggcctgcaaagccataattaatatgtagccctttcagaaaaggtttgcctgccccatgtcctagtgcaaagtgaatttagagtgagccagattatggaggattctgtgactcttgccaaataattttgacttcatcctgtaggtattaagtcattaaggcgttttaaatcatacagtcagggttgtatttctgagctgtctataatgaatgatatagaaggtggtttcgaaggaggagactccagacaaggaaaacagaaatcttatgttgccaagttgtctttgctcttaggtgggttatcctggagaaaatggactcaggagctaatactgtctacagtggagcttggtgcaattagaagcaaaagactgtacctaactggaatgaggttactttttatggcttatcaaatgcttgaccttgtgatccacctgccttggccttccaaagtgttggaattacaggcgtgagccaccgcgcctggtctatatgtgatttcaaattaggtggccttataaatataagcagatggtttctgggcaaaatcaaatgatttctgtctctattttcttgagtaccaattgtaaaaactgaaattaggttgaggaaagtgctttagaaataataaagatgtacaaatacaaggctttggattttttattagttctgcaataaataataggtttatagttca

SEQ ID NO: 2777 - DNA, 1309 bp, Homo sapiens
  SIMILAR (355)..(765): 451254mologous to Homo sapiens proteoglycan I precursor,accession number J04599,Smith-Waterman Score=185.
tgaacaacaggatctccaagatccattagaagtttttcaccccactgtggaagctgcggaggctttacatatccaagaaccacctggaggagagccctcccaacctacccagctccctggtggagctccgaatacacgaccaccgcatccgcaaggtgccctatggagtgtttagcgggctccggaacaagaactgcatcaagatgggcggcaacccactggataacagtggcttcgaacctgcagccttggatggcctgaagctcaactacctgcgcatctcataggccaagctgactggccttcccaaagacctccctgagaccctgaatgaactccacctagaccacaacaaaatccagggccatcgaactggaggacctgcttcgctactccaagctgtacaggctgggcctaggccacaacccagatcaggatgatcgaaaacgggaagcctgagcttcctggcccaccctccggggaggttccattgggacaacaacaagttgggccaggggttgccttcagggttcccaggacctcaagctcctccaggtggtcttatcttgcactccaacaacattcaccaaagtggggtgttcaacgaatttctgttcccatggggtttcgggggtgaagcggggccttattacaacgggcattcagcctcttcaacaaccccgtgccctactgggaggtgcaagccggccactttccgccgtcgtcactgaccgcctggccatccagtttgggcaactacaaaaagtagaggcatgctgcagccaccgcggggcctcagtgggggtctctggggaacacagccagacatcctgatggggaggcagagccaggaagctaagccagggcccagctggcgtccaacccagccccccaccttcgggtcccttgaccccagcttcgattgccccattcaccgccttttccctgggttcccaagggttgcaggtggacgcaaaggccggaaggcatgacatgttacgcttgggctcatgagctacgccctgctctccctccacagccacccagaggcaccccatgaagcttttttctcgttcactccccagcctgccctgctcaggccttgcccccaaacctgtactgtcccggaggaggttgggaggtggaggcccagcatcccgcgcagatgacaccggttttcctagaagcccctcacccccactggcccactggtggctaggtctccccttatccttctggtccagcgcaaggaggggctgcttctgaggtcggtggctgtctttccattaaagaaacaccgtgcaacgtg

SEQ ID NO: 2778 - DNA, 951 bp, Homo sapiens
  SIMILAR (1)..(717): 991254mologous to Homo sapiens EGF-like module-containing mucin-like receptor EMR3,accession number AF239764,Smith-Waterman Score=1233.
atggataagaaagatcaagtgtatctgaactctcaggttgtgagtgctgctattggacccaaaaggaacgtgtctctctccaagtctgtgacgctgactttccagcacgtgaagatgacccccagtaccaaaaaggtcttctgtgtctactggaagagcacagggcagggcagccagtggtccagggatggctgcttcctgatacacgtgaacaagagtcacaccatgtgtaattgcagtcacctgtccagcttcgctgtcctgatggccctgaccagccaggaggaggatcccgtgctgactgtcatcacctacgtggggctgagcgtctctctgctgtgcctcctcctggcggccctcacttttctcctgtgtaaagccatccggaacaccagcacctcactgcatctgcagctctcgctctgcctcttcctggcccacctcctcttcctcgtggggattgatcgaactgaacccaaggtgctgtgctccatcatcgccggtgctttgcactatctctacctggccgccttcacctggatgctgctggagggtgtgcacctcttcctcactgcacggaacctgacagtggtcaactactcaagcatcaatagactcatgaagtggatcatgttcccagtcggctatggcgttcccgctgtgactgtggccatttctgcagcctcctggcctcacctttatggaactgctgatcggatgctggctttcaaagcaacagctcagctcttcatcctgggctgcacatggtgtctgggcttgctacaggtgggtccagctgcccaggtcatggcctacctcttcaccatcatcaacagcctccaaggcttcttcatcttcttggtctactgcctcctcagccagcaggccaaacacaaattcacgcccatggaagttcccaggcagaatcaccgatgcttacagcagaattaa

SEQ ID NO: 2779 - DNA, 2034 bp, Homo sapiens
  SIMILAR (1166)..(1846): 921254mologous to Homo sapiens Human EGPCR polypeptide,accession number AAY59300,Smith-Waterman Score=1058.
tggttggcttacggcacagtagagagcttccagggctggctggcgtgggatacccgtaccacagaaatgcagggaccattgcttcttccaggcctctgctttctgctgagcctctttggagctgtgactcaaaaaaccaaaacttcctgtgctaagtgccccccaaatgcttcctgtgtcaataacactcactgcacctgcaaccatggatatacttctggatctgggcagaaactattcacattccccttggagacatgtaacgacattaatgaatgtacaccaccctatagtgtatattgtggatttaacgctgtgtgttacaatgtcgaaggaagtttctactgtcaatgtgtcccaggatatagactgcattctgggaatgaacaattcagtaattccaatgagaacacctgtcaggacaccacctcctcaaagacaacccagggcaggaaagagctgcaaaagattgtggacaaatttgagtcacttctcaccaatcagactttatggagaacagaagggagacaagaaatctcatccacagctaccactattctccgggatgtggaatcgaaagttctagaaactgccttgaaagatccagaacaaaaagtcctgaaaatccaaaacgatagtgtgagctattgaaactcaagcgattacagacaattgctctgaagaaagaaagacattcaacttgaacgtccaaatgaactcaatggacatccgttgcagtgacatcatccagggagacacacaaggtcccagtgtcattgcctttatctcatattcttctcttggaaacatcataaatgcaactttttttgaagagatggataagaaagatcaagtgtatctgaactctcaggttgtgagtgctgctattggacccaaaaggaacgtgtctctctccaagtctgtgacgctgactttccagcacgtgaagatgacccccagtaccaaaaaggtcttctgtgtctactggaagagcacaggggcaggggcagccagtggtccagggatggctgcttcctgatacacgtgaacaagagtcacaccatgtgtaattgcagtcacctgtccagcttcgctgtcctgatggccctgaccagccaggaggaggatcccgtgctgactgtcatcacctacgtggggctgagcgtctctctgctgtgcctcctcgctggcggccctcacttttctcctgtgtaaagccatccagaacaccagcacctcactgcatctgcagctctcgctctgcctcttcctggcccacctcctcttcctcgtggcaattgatcaaaccggacacaaggtgctgtgctccatcatcgccggtaccttgcactatctctacctggccaccttgacctggatgctgctggaggccctgtacctcttcctcactgcacggaacctgacggtggtcaactactcaagcatcaacagattcatgaagaagctcatgttccctgtgggctacggagtcccagctgtgacagtggccatttctgcagcctccaggcctcacctttatggaactgctgatcgatgctggctccacctggaccagggattcatgtggagtttccttggcccagtctgtgccattttctctgcgaatttagtattgtttatcttggtcttttggattttgaaaagaaaactttcctccctcaatagtgaagtgtcaaccatccagaacacaaggatgctggctttcaaagcaacagctcagctcttcatcctgggctgcacatggtgtctgggcttgctacaggtgggtccagctgcccaggtcatggcctacctcttcaccatcatcaacagcctccaaggcttccttcatcttccttggtctactgcctccctcagcccagcaggtccagaaacaatatcaaaagtggtttagagagatcgtaaaatcaaaatctgagtctgagacatacacactttccagcaagatgggtcctgactcaaaacccagtgagggggatgtttttcccaggacaagtgaagagaaaatattaa

SEQ ID NO: 2780 - DNA, 1328 bp, Homo sapiens
  SIMILAR (11)..(334): 391254mologous to Homo sapiens Human myelin oligodendrocyte glycoprotein gene,accession number AAZ29204,Smith-Waterman Score= 113.
ttttttttttttttttttgtgagacaggatcttgctctgtcacccagactggagtgcaatggcatcatcttcgctcactgcaacctctgcctcccggactcaagcgatcctccccacctcagccttccaagtagctaggactacaggcaggaactactacgcccagctaattttcgtatttttttgtagagacggagttcgccatgttgaccagggctggtcttaacctccttagctcaagagggccactggcctcagcctcccaaagtgttggggattacagacaacagccaccatgcccagctaattttttgtatttttgggagagacaggggtttcactgtggttgcccagagtggtctcagactcctgagttcaagcgatccgcctgcctcccaaagtgctgggattacaggggtgagccaccacacccagttccttctgcactttgaagctggcccacctgccaactggattgaacaccatggcaggggaggcagtgtttctactgtccataacaaaagggggcacctactgcaagtatcttgcgccaggccttggtgggaggcataattccatctcattgctgcaagcaagttaatggagatgttaataaaaacactacattaatgaaaatgctgaggctagaacctattctgtgcctgtaagacaaaacaattggggtgagatttctgatatccattctttagttcctttgggcctaagtaaagcaaacttacaacctgggacacaacttattttttcccaggttgtaagaggacagagaccctcctggtaaaggaagcaaattgcctgaaatgctgatgggtcctgttacttctctgtcccttcacctctggacattcactttttgcttccggtagtaaggcccatcatgtccctcaccttctcccaattgctccttcctaaggtcctctggattcctaaaaccccaagtcttccccttgtgaagaggccagaccgggcaagtagaaaaggtctaggactgaacatcagacttgggtcccagttcctagttctactgctaaacatgtgaccttcattaagtcatttaatatttctaaatctgttttctgacctgaaataggaaagccttccctggctaccttgcagaattgctataaggatgtgaaagcactttgaaaaagtataagtggtagagaaatatgtgtgtataattatatgtttacaaaaagatatatcaaatgacaaaattttagaaatagagaatatatctgtgttaccaggagctagagatggggaagggggttgtgggaggagaaaattgctataaaattgctataaaa

SEQ ID NO: 2781 - DNA, 5898 bp, Homo sapiens
  SIMILAR (175)..(3582): 961254mologous to Homo sapiens ATM-like; similar to AL022373 (PID:g3036812),accession number AC004991,Smith-Waterman Score=5558.
atggcgtttgttgcaacacagggggccacggtggttgaccagaccactttgatgaaaaagtaccttcagtttgtggcagctctcacagatgtgaatacacaacatatcatccctcgattccttacatttctccaagatggagaagttcagtttcttcaggagaaaccagcacagcaactgcggaagctcgtacttgaaataattcatagaataccaaccaacgaacatcttcgtcctcacacaaaaaatgttttgtctgtgatgtttcgctttttagagacggaaaatgaagaaaatgttcttatttgtctaagaataattattgagctacacaaacagttcaggccaccgatcacacaagaaaaccgctactttgagaaccctcaagtgatccccgagaacacagtgcctcccccagaaatggttggtatgataacaacgattgctgtgaaagtcaacccggagcgtgaggacagtgagactcgaacactctacaaactgaacatccacaatgttgttgctgagtttgtgcccttgatcatgaacaccattgccattcaggtgtctgcacaagcgaggcaacataagctttacaacaaggagttgtatgctgacttcattgctgctcagattaaaacattgtcatttttagcttacattatcaggatttaccaggagttggtgactaagtattctcagcagatggtgaaaggaatgctccagttactttcaaattgtccagcagagactgcacacctcagaaaggagcttctgattgctgccaaacacatcctcaccacagagctgagaaaccagttcattccttgcatggacaagctgtttgatgaatccatactaattggctcaggatatactgccagagagactctaaggcccctcgcctacagcacgctggccgacctcgtgcaccatgtccgccagcacctgcccctcagcgacctctccctcgccgtccagctcttcgccaagaacatcgacgatgagtccctgcccagcagcatccagaccatgtcctgcaagctcctgctgaacctggtggactgcatccgttccaagagcgagcaggagagtggcaatgggagagacgtcctgatgcggatgctggaggttttcgttctcaaattccacacaattgctcggtaccagctctctgccatttttaagaagtgtaagcctcagtcagaacttggagccgtggaagcagctctgcctggggtgcccactgcccctgcagctcctggccctgctccctccccagcccctgtccctgccccacctccacccccgcccccacccccacctgccacccctgtgaccccggcccccgtgcctcccttcgagaagcaaggagaaaaggacaaggaagacaagcagacattccaagtcacagactgtcgaagtttggtcaaaaccttggtgtgtggtgtcaagacaatcacgtggggcataacatcatgcaaagcacctggtgaagctcagttcattcccaacaagcagttacaacccaaagagacacagatttacatcaaacttgtgaaatatgcaatgcaagctttagatatttatcaggtccagatagcaggaaatggacagacatacatccgtgtggccaactgccagactgtgagaatgaaagaggagaaggaggtattggagcatttcgctggtgtgttcacaatgatgaaccccttaacgttcaaagaaatcttccaaactacggtcccttatatggtggagagaatctcaaaaaattatgctcttcagattgttgccaattccttcttggcaaatcctactacctctgctctgtttgctacgattctggtggaatatctccttgatcgcctgccagaaatgggctccaacgtggagctctccaacctgtacctcaagctgttcaagctggtctttggctctgtctccctctttgcagctgaaaatgaacaaatgctgaagcctcacttgcacaagattgtgaacagctctatggagctcgcgcagactgccaaggaaccctacaactacttcttgctgctacgggcgctgtttcgctctattggtggagggctgaacatgcttcagagtggcctgcacaagcagcacatgaaggacctctttgtggagctgtgtctcaccgtccctgtgcggctgagctcgcttttgccgtacctgcccatgcttatggatcccttggtgtctgcactcaatgggtctcagacattggtcagccaaggcctcaggacgctggagctgtgtgtggacaacctgcagcccgacttcctctacgaccacatccagccggtgcgcgcagagctcatgcaggctctgtggcgcaccttacgcaaccctgctgacagcatctcccacgtggcctaccgtgtgctcggtaagtttggcggcagtaacaggaagatgctgaaggagtcgcagaagctgcactacgttgtgaccgaggttcagggccccagcatcactgtggagttttccgactgcaaagcttctctccagctccccatggagaaggccattgaaactgctctggactgcctgaaaagcgccaacactgagccctactaccggaggcaggcgtgggaagtgatcaaatgcttcctggtggccatgatgagcctggaggacaacaagcacgcactctaccagctcctggcacaccccaactttacagaaaagaccatccccaatgttatcatctcacatcgctacaaagcccaggacactccagcccggaagacttttgagcaggccctgacaggcgccttcatgtctgctgtcattaaggacctgcggcccagcgccctgccctttgtcgccagcttgatccgccactatacgatggtggcagtcgcccagcagtgtggccctttcttgctgccttgctaccaggtgggcagccagcccagcacagccatgtttcacagtgaagaaaatggctcgaaaggaatggatcctttggttctcattgatgcaattgctatttgtatggcatatgaagaaaaggagctttgcaaaatcggggaggtggccctagctgtgatatttgatgttgcaagtatcatcctgggctccaaggagagggcctgccagctgcccctgttttcttacatcgtggagcgcctgtgtgcatgttgttatgaacaggcgtggtatgcaaagctggggggtgtggtgtctattaagtttctcatggagcggctgcctctcacttgggttctccagaaccagcagacattcctgaaagcacttctctttgtcatgatggacttaactggagaggtttccaatggggcagtcgctatggcaaagaccacgctggagcagcttctgatgcggtgcgcaacgcctttaaaagacgaggagagagccgaagagatcgtggccgcccaggaaaagtctttccaccatgtgacacacgacttggttcgagaagtcacctctccaaactccactgtgaggaagcaggccatgcattcgctgcaggtgttggcccaggtcactgggaagagtgtcacggtgatcatggaaccccacaaagaggtcctgcaggatatggtcccccctaagaagcacctgctccgacaccagcctgccaacgcacagattggcctgatggaggggaacacgttctgtaccacgttgcagcccaggctcttcacaatggaccttaacgtggtggagcataaggtgttctacacagagtccagggagaaaatcatcgctgcactcttcaaagccctgaattccaccaatagtgagctccaagaggccggagaagcctgtatgagaaagtttttagaaggtgctaccatagaagtcgatcaaatccacacacatatgcgacctttgctgatgatgctgggagattaccggagcttgacgctgaatgttgtgaatcgcctgacttcggtcacgaggctcttcccaaattccttcaatgataaattttgtgatcagatgatgcaacatctgcgcaagtggatggaagtggtggtgatcacccacaaagggggccagaggagcgacggaaacgaaatgaagatttgctcagcaattataaacctttttcatctgatcccggctgctcctcagacactggtgaagcctttgctagaggttgtcatgaaaacggagcgggcgatgctgatcgaggcggggagtccattccgagagcccctgatcaagttcctgactcgacatccctcgcagacagtggagctgttcatgatggaagccacactgaacgatccccagtggagcagaatgtttatgagttttttaaaacacaaagacgccagacctctgcgggatgtgctggctgccaaccccaacaggttcatcaccctgctgctgccggggggtgcccagacggctgtgcgccccggttcgcccagcaccagcaccatgcgcctggacctccagttccaggccatcaagatcataagcattatagtgaaaaacgatgactcctggctggccagccagcactctctggtgagccagttgcgacgtgtgtgggtgagtgagaacttccaagagaggcaccgcaaggagaacatggcagccaccaactggaaggagcccaagctgctggcctactgcctgctgaactactgcaaaaggaattacggagatatagaattgctgttccagctgctccgagcctttactggtcgttttctctgcaacatgacattcttaaaagagtatatggaggaagagattcccaaaaattacagcatcgctcagaaacgtgccctgttctttcgctttgtagacttcaacgaccccaacttcggagatgaattaaaagctaaagttctgcagcatatcttgaatcctgctttcttgtacagctttgagaagggggaaggagagcagctcttgggacctcccaatccagaaggagataacccagaaagcatcaccagtgtgtttattaccaaggtcctggaccccgagaagcaggcggacatgctggactcgctgcggatctacctgctgcagtacgccacgctgctggtggagcacgccccccaccacatccatgacaacaacaagaaccgcaacagcaagctgcgccgcctcatgaccttcgcctggccctgcctgctctccaaggcctgcgtggacccagcctgcaagtacagcggacacttgctcctggcgcacattatcgccaaattcgccatacacaagaagatcgtcctgcaggtttttcatagtctcctcaaggctcacgcaatggaagctcgagcgatcgtcagacaggcgatggccattctgaccccggcggtgccggccaggatggaggacgggcaccagatgctgacccactggacccggaagatcattgtggaggaggggcacaccgtcccgcagctggtccacattctgcacctgatagtgcaacacttcaaggtgtactacccggtacggcaccacttggtgcagcacatggtgagcgccatgcagaggctgggcttcacgcccagtgtcaccatcgagcagaggcggctggccgtggacctgtctgaagtcgtcatcaagtgggagctgcagaggatcaaggaccagcagaaatcagtcagtaaaaccaagcgcctgtgtgtttttaagccggattcagatatggacccaaattccagtggagaaggagtcaattctgtctcatcctccattaagagaggcctgtccgtggattctgcccaggaagtgaaacgctttaggacggccaccggagccatcagtgcagtctttgggaggagccagtcgctacctggagcagactctctcctcgccaagcccattgacaagcagcacacagacactgtggtgaacttccttatccgcgtggcctgtcag

SEQ ID NO: 2782 - DNA, 333 bp, Homo sapiens
  SIMILAR (1)..(333): 881254mologous to Homo sapiens TRRAP protein,accession number AF076974,Smith-Waterman Score=457.
gtgtactacccggtacggcaccacttggtgcagcacatggtgagcgccatgcagaggctgggcttcacgcccagtgtcaccatcgagcagaggcggctggccgtggacctgtctgaagtcgtcatcaagtgggagctgcagaggatcaaggaccagcagaaatcagtcagtaaaaccaagcgcctgtgtgtttttaagccggattcagatatggacccaaattccagtggagaaggagtcaattctgtctcatcctccattaagagaggcctgtccgtggattctgcccaggaagtgaaacgctttaggacggccaccggagccatcagtgca

SEQ ID NO: 2783 - DNA, 5701 bp, Homo sapiens
  SIMILAR (1544)..(3622): 931254mologous to Homo sapiens TRRAP protein,accession number AF076974,Smith-Waterman Score=3453.
gttaatgacaacaccaacacagcggggtcccctggggaggtgctctctcgccggtgtgtgaaccttctgaagactgcgttgcggccagacatgtggcccaagtccgaactcaagctgcagtggttcgacaagctgctgatgactgtggagcagccaaaccaagtgaactatgggaatatctgcacgggcctagaagtgctgagcttcctgctaactgtcctccagtccccagccatcctcagtagcttcaaacctctgcagcgtggaattgccgcctgcatgacatgtggaaacaccaaggtgttgcgagccgtccacagccttctctcgcgcctgatgagcattttcccaacagagccgagtacttccagtgtggcctccaaatatgaagagctggagtgcctctacgcagccgtcggaaaggtcatctatgaagggctcaccaactacgagaaggccaccaatgccaatccctcccagctcttcggtgatcagggcagctgggtcactctggccccagggacccttatgatcctcaagtctgcctgcagcaacaaccccagctacatagacaggctgatctccgtctttatgcgctccctgcagaagatggtccgggagcatttaaaccctcaggcagcgtcaggaagcaccgaagccacctcaggtacaagcgagctggtgatgctgagtctggagctggtgaagacgcgcctggcagtgatgagcatggagatgcggaagaacttcatccaggccatcctgacatccctcatcgaaaaatcaccagatgccaaaatcctccgggctgtggtcaaaatcgtggaagaatgggtcaagaataactccccaatggcagccaatcagacacctacactccgggagaagtccattttgcttgtgaagatgatgacttacatagaaaaacgctttccggaagaccttgaattaaatgcccagtttttagatcttgttaactatgtctacagggatgagaccctctctggcagcgagctgacggcgaaacttgagcctgcctttctctctgggctgcgctgtgcccagccactcatcagggcaaagtttttcgaggtttttgacaactccatgaaacgtcgtgtctacgagcgcttgctctatgtgacctgttcgcagaactgggaagccatggggaaccacttctggatcaagcagtgcattgaggttaccagtgctgtgcaggtagttctcgtccatttacctggagtgaatgaaaccaggtcaccacgtactatgtctcctgagacagctgggacagaaggtggattagttctctttgatgagaagaagggactgcttctggccgtgtgtgagaagagcacccccattggcaccagctgccaaggagccatgctcccgtccatcaccaacgtcatcaacctggccgatagccacgaccgtgccgccttcgccatggtcacacatgtcaagcaggagccccgggagcgggagaacagcgagtccaaagaggaggatgtagagatagacatcgaactagctcctggggatcagaccagcacgcccaaaaccaaagaactttcagaaaagggacattggaaaccagctgcacatgctaaccaacaggcacgacaagtttctggacactctccgagaggtgaagactggagcgctgctcagcgctttcgttcagctgtgccacatttccacgacgcttgcagagaagacgtgggtccagcttttccccagattgtggaagatcctctctgacagacagcagcatgcactcgcgggtgagataagtccatttctgtgcagcggcagtcaccaggtgcagcgggactgccagcccagcgcgctgaactgctttgtggaagccatgtcccagtgcgtgccgccaatccccatccgaccctgcgtcctgaagtacctggggaagacacacaacctctggttccggtccacgctgatgttggagcaccaggcttttgaaaagggtctgagtcttcagattaagccgaagcaaacaacggagttttatgagcaggagagcatcaccccgccgcagcaggagatactggattcccttgcggagctttactccctgttacaagaggaagatatgtgggctggtctgtggcagaagcggtgcaagtactcggagacagcgactgcgattgcttacgagcagcacgggttctttgagcaggcacaagaatcctatgaaaaggcaatggataaagccaaaaaagaacatgagaggagtaacgcctcccctgctattttccctgaataccagctctgggaagaccactggattcgatgctccaaggaattgaaccagtgggaagccctgacggagtacggtcagtccaaaggccacatcaacccctacctcgtcctggagtgcgcctggcgggtgtccaactggactgccatgaaggaggcgctggtgcaggtggaagtgagctgtccgaaggagatggcctggaaggtgaacatgtaccgcggatacctggccatctgccaccccgaggagcagcagctcagcttcatcgagcgcctggtggagatggccagcagcctggccatccgcgagtggcggcggctgccccacgtagtgtcccacgtgcacacgcctctcctacagagtctcttatgctggtcccatcaggcagcccagcaaatcatcgaactccaggaagctgcacaaatcaacgcaggcttacagccaaccaacctgggaaggaacaacagcctgcacgacatgaagacggtggtgaagacctggaggaaccgactgcccatcgtgtctgacgacttgtcccactggagcagcatcttcatgtggaggcagcatcattaccaggcgattgtaactgcctatgagaatagctctcagcatgatcccagttcaaataacgctatgcttggggttcatgcatcagcttcagcgatcatccagtatggaaaaatcgcccggaaacaaggactggtcaatgtagctctggatatattaagtcggattcatactattccaactgttcctatcgtggattgcttccagaagattcgacagcaagttaaatgctacctccagctggcaggcgtcatgggcaaaaacgagtgcatgcaggtgcggacaggacacttgaagaatgaggccaggtccgaggaggcaaacaaagccttctctgcagctgtgcagatgcacgatgtgctggtgaaagcctgggccatgtggggcgactacctggagaacatctttgtgaaggagcggcagctgcacctgggcgtgtctgccatcacctgctacctgcacgcctgccggcatcagaacgagagcaaatcgaggaaatacttagccaaggtgctgtggcttttgagttttgatgatgacaaaaacactttggcagatgccgtcgacaagtactgcattggtgtgccacccatccagtggctggcctggatcccacagctgctcacctgcctggttggctcggagggaaagctgctcttgaacctcattagccaggttggacgcgtgtatccccaagcggtctactttcccatccggaccctgtacctgaccctgaaaatagaacagcgggaacgctacaagagcgcgctccgagccctggcgtctgtcggttttgcgctgacactggcgttgtgtgtgttgctctcagattctggacagcagcagccaagttcagtgggtaaccagtcccattctgcatcagatccagggcccataagagcaacagcacccatgtggcgctgcagccgaatcatgcacatgcagcgagagctccaccccacccttctgtcttccctggaaggcatcgtcgatcagatggtctggttcagagaaaattggcatgaagaggttctcaggcagctccaacagggcctggcgaaatgttactccgtggcgtttgagaaaagtggagcggtgtccgatgctaaaatcaccccccacactctcaattttgtgaagaagttggtgagcacgtttggggtgggcctggagaatgtgtccaacgtctcgaccatgttctccagcgcagcctctgagtctctggcccggcgggcgcaggccactgcacaagaccctgtctttcagaagctgaaaggccagttcacgacgggccacactctgcgcactccagccttggggccagccctggtctgggttcagcatgccactgccgccgtctccagcactcgccagccggcgtcacttgggcaactgaccaacaagtggggcaggccgcagcctagctctctgccccagcgctgggatcagagggcgctgtgtgggcctggcccctgctttgctgcagttttggttgggttcgtcctgacctccagtcgccctgattttgacttcagcgttccaggatccatgaagcttcataatcttatttctaagttgaaaaagtggatcaaaatcttggaggccaagaccaagcaactccccaaattcttcctcatagaggaaaagtgccggttcttgagcaatttctcggcacagacagctgaagtgggaaattcctgggggagtttctgcatgccaaagccaacggcattattacatcaagattgcacggttcatgccccgggtagagattgtgcagaagcacaacaccgcagcccgtcggctgtacatccggggacacaatggcaagatctacccatacctcgtcatgaacgacgcctgccttcacagagttcacggcgagaggagcgtgtgttgcagctgctgcgttctgctggaacccctgtttgggagaagagaaaggagaccaccaagaggcacttgtttttcacagtgccccgggttgtggcagtttccccacagatgcgcctcgtggaggacaacccctcttcactttcccttgtggagatctacaagcagcgctgcgccaagaagggcatcgagcatgacaaccccatctcccgttactatgaccggctggctacggtgcaggcgcggggaacccaagccagccaccaggtcctccgcgacatcctcaaggaggttcagagtaacatggtgccgcgcagcatgctcaaggagtgggcgctgcacaccttccccaatgccacggactactggacgttccggaagatgttcaccatccagctggctctgataggcttcgcggaattcgtcctgcatttaaatagactcaaccccgagatgttacagatcgctcaggacactggcaaactgaatgttgcctactttcgatttgacataaacgacgcgactggagacctggatgccaaccgtcctgtcccatttcgactcacgcccaacatttctgagtttctgaccaccatcggggtctccggcccgttgacagcgtccatgattgcggtcgcccggtgcttcgcccagccaaactttaaggtggatggcattctgaaaacggttctccgggacgagatcattgcttggcacaaaaaaacacaagaggacacgtcctctcctctctcggccgccgggcagccagagaacatggacagccagcaactggtgtccctggttcagaaagccgtcaccgccatcatgacccgcctgcacaacctcgcccagttcgaaggcggggaaagcaaggtgaacaccctggtggccgcggcaaacagcctggacaatctgtgccgcatggaccccgcctggcacccctggctgtga

SEQ ID NO: 2784 - DNA, 928 bp, Homo sapiens
  SIMILAR (355)..(462): 831254mologous to Mus musculus putative,accession number AK018420,Smith-Waterman Score=146.
ccttggctcagaactgccctgattccctcaagagccaccagaggaccccaagaaggtttttctcggttactccaagacccaagtgtccaagtctccgatcctaggagaacagtccctgggtcagcagccaggggccggtcaataagcatggggacaagtggcttctggccagggctgcggcacctgtccagaaacacatgttctgttcctcctcctcatgcatttccagcctgtcaaccctcccggactctgcggctcccttcagccccccttgcaagttcatggcttgtccctccaagacccccgcttccactgccctttcgaccagtcctcccttctggtctcttctttcccagtctttcctctctctctctctctctctctctctctctttctgtgtgtgtgtgtgtgtgtgtgtgtgtgtgtgtgtgtgtgtgtgtcttgtgcttcctcaaaacctttctggcttcttgaaacttggtggcctgttccctcccaatctctcccgaaaccctgtcgcctgtccctttaaactccaaaaccctctggccttcttgccttgagcttgggacttgctttcttgtcttgtccgggccttgcaaccccaagccccttgcccacaaaaccccaagggacagcgggtcctccccagccttgcccttgctcaggccttgccccccaaaccttgtacttgtcccggaggaggttgggaggttggaggcccagcatcccggcgcagatgacaccaatcaaccggccagagtcccagacaccggttttcctagaagcccctcacccccactggcccactggtggctaggtctccccttatccttctggtccagcgcaaggaggggctgcttctgaggtcggtggctgtctttccattaaagaaacaccgtgcaacgtgaaaaaaaaaaaaaaaaaa

SEQ ID NO: 2785 - DNA, 12646 bp, Homo sapiens
  SIMILAR (190)..(10482): 991254mologous to Homo sapiens TRRAP protein,accession number AF076974,Smith-Waterman Score=17694.
  misc_feature (1)...(12646): n = a,t,c or g
acatttcgtccgagaggtcgggtgggacgttgggggcctgtttttccggaggcgccccccggccaacctggcaccttcgggcctctacgccggcactggactcgttaggcccggcgcggggagcgaaggctggttgaactcatggacccgatacttttctctggagaagcaaaccagcccaaaagaaaaatggcgtttgttgcaacacagggggccacggaggttgaccagaccactttgatgaaaaagtaccttcagtttgtggcagctctcacagatgtgaatacacctgatgaaacaaagttgaaaatgatgcacgaagttagtgaaaattttgagaatggcacgtcatctcctcagtattctacattcctagaacatatcatccctcgagtccttacatttctccaagatggagaagttcagtttcttcaggagaaaccagcacagcaactgcggaagctcgtacttgaaataattcatagaataccaaccaacgaacatcttcgtcctcacacaaaaaatgttttgtctgtgatgtttcgctttttagagacggaaaatgaagaaaatgttcttatttgtctaagaataattattgagctacacaaacagttcaggccaccgatcacacaagaaattcatcattttctggattttgtgaaacagatttacaaggagcttccaaaagtagtgaaccgctactttgagaaccctcaagtgatccccgagaacacagtgcctcccccagaaatggttggtatgataacaacgattgctgtgaaagtcaacccggagcgtgaggacagtgagactcgaacacattccatcattccgaggggatcactttctctgaaagtgttggcagaattgcccattattgttgttttaatgtatcagctctacaaactgaacatccacaatgttgttgctgagtttgtgcccttgatcatgaacaccattgccattcaggtgtctgcacaagcgaggcaacataagctttacaacaaggagttgtatgctgacttcattgctgctcagattaaaacattgtcatttttagcttacattatcaggatttaccaggagttggtgactaagtattctcagcagatggtgaaaggaatgctccagttactttcaaattgtccagcagagactgcacacctcagaaaggagcttctgattgctgccaaacacatcctcaccacagagctgagaaaccagttcattccttgcatggacaagctgtttgatgaatccatactaattggctcaggatatactgccagagagactctaaggcccctcgcctacagcacgctggccgacctcgtgcaccatgtccgccagcacctgcccctcagcgacctctccctcgccgtccagctcttcgccaagaacatcgacgatgagtccctgcccagcagcatccagaccatgtcctgcaagctcctgctgaacctggtggactgcatccgttccaagagcgagcaggagagtggcaatgggagagacgtcctgatgcggatgctggaggttttcgttctcaaattccacacaattgctcggtaccagctctctgccatttttaagaagtgtaagcctcagtcagaacttggagccgtggaagcagctctgcctggggtgcccactgcccctgcagctcctggccctgctccctccccagcccctgtccctgccccacctccacccccgcccccacccccacctgccacccctgtgaccccggcccccgtgcctcccttcgagaagcaaggagaaaaggacaaggaagacaagcagacattccaagtcacagactgtcgaagtttggtcaaaaccttggtgtgtggtgtcaagacaatcacgtggggcataacatcatgcaaagcacctggtgaagctcagttcattcccaacaagcagttacaacccaaagagacacagatttacatcaaacttgtgaaatatgcaatgcaagctttagatatttatcaggtccagatagcaggaaatggacagacatacatccgtgtggccaactgccagactgtgagaatgaaagaggagaaggaggtattggagcatttcgctggtgtgttcacaatgatgaaccccttaacgttcaaagaaatcttccaaactacggtcccttatatggtggagagaatctcaaaaaattatgctcttcagattgttgccaattccttcttggcaaatcctactacctctgctctgtttgctacgattctggtggaatatctccttgatcgcctgccagaaatgggctccaacgtggagctctccaacctgtacctcaagctgttcaagctggtctttggctctgtctccctctttgcagctgaaaatgaacaaatgctgaagcctcacttgcacaagattgtgaacagctctatggagctcgcgcagactgccaaggaaccctacaactacttcttgctgctacgggcgctgtttcgctctattggtggaggtagccacgatctcttgtatcaggagttcttgcctctccttccaaacctcctgcaagggctgaacatgcttcagagtggcctgcacaagcagcacatgaaggacctctttgtggagctgtgtctcaccgtccctgtgcggctgagctcgcttttgccgtacctgcccatgcttatggatcccttggtgtctgcactcaatgggtctcagacattggtcagccaaggcctcaggacgctggagctgtgtgtggacaacctgcagcccgacttcctctacgaccacatccagccggtgcgcgcagagcttatgcaggctctgtggcgcaccttacgcaaccctgctgacagcatctcccacgtggcctaccgtgtgctcggtaagtttggcggcagtaacaggaagatgctgaaggagtcgcagaagctgcactacgttgtgaccgaggttcagggccccagcatcactgtggagttttccgactgcaaagcttctctccagctccccatggagaaggccattgaaactgctctggactgcctgaaaagcgccaacactgagccctactaccggaggcaggcgtgggaagtgatcaaatgcttcctggtggccatgatgagcctggaggacaacaagcacgcactctaccagctcctggcacaccccaactttacagaaaagaccatccccaatgttatcatctcacatcgctacaaagcccaggacactccagcccggaagacttttgagcaggccctgacaggcgccttcatgtctgctgtcattaaggacctgcggcccagcgccctgccctttgtcgccagcttgatccgccactatacgatggtggcagtcgcccagcagtgtggccctttcttgctgccttgctaccaggtgggcagccagcccagcacagccatgtttcacagtgaagaaaatggctcgaaaggaatggatcctttggttctcattgatgcaattgctatttgtatggcatatgaagaaaaggagctttgcaaaatcggggaggtggccctagctgtgatatttgatgttgcaagtatcatcctgggctccaaggagagggcctgccagctgcccctgttttcttacatcgtggagcgcctgtgtgcatgttgttatgaacaggcgtggtatgcaaagctggggggtgtggtgtctattaagtttctcatggagcggctgcctctcacttgggttctccagaaccagcagacattcctgaaagcacttctctttgtcatgatggacttaactggagaggtttccaatggggcagtcgctatggcaaagaccacgctggagcagcttctgatgcggtgcgcaacgcctttaaaagacgaggagagagccgaagagatcgtggccgcccaggaaaagtctttccaccatgtgacacacgacttggttcgagaagtcacctctccaaactccactgtgaggaagcaggccatgcattcgctgcaggtgttggcccaggtcactgggaagagtgtcacggtgatcatggaaccccacaaagaggtcctgcaggatatggtcccccctaagaagcacctgctccgacaccagcctgccaacgcacagattggcctgatggaggggaacacgttctgtaccacgttgcagcccaggctcttcacaatggaccttaacgtggtggagcataaggtgttctacacagagctgttgaatttgtgtgaggctgaagattcagctttaacaaagctgccctgttataaaagccttccgtcactcgtacctttacgaattgcggcattaaatgcacttgctgcctgcaattaccttcctcagtccagggagaaaatcatcgctgcactcttcaaagccctgaattccaccaatagtgagctccaagaggccggagaagcctgtatgagaaagtttttagaaggtgctaccatagaagtcgatcaaatccacacacatatgcgacctttgctgatgatgctgggagattaccggagcttgacgctgaatgttgtgaatcgcctgacttcggtcacgaggctcttcccaaattccttcaatgataaattttgtgatcagatgatgcaacatctgcgcaagtggatggaagtggtggtgatcacccacaaagggggccagaggagcgacggaaacgaaatgaagatttgctcagcaattataaacctttttcatctgatcccggctgctcctcagacactggtgaagcctttgctagaggttgtcatgaaaacggagcgggcgatgctgatcgaggcggggagtccattccgagagcccctgatcaagttcctgactcgacatccctcgcagacagtggagctgttcatgatggaagccacactgaacgatccccagtggagcagaatgtttatgagttttttaaaacacaaagacgccagacctctgcgggatgtgctggctgccaaccccaacaggttcatcaccctgctgctgccggggggtgcccagacggctgtgcgccccggttcgcccagcaccagcaccatgcgcctggacctccagttccaggccatcaagatcataagcattatagtgaaaaacgatgactcctggctggccagccagcactctctggtgagccagttgcgacgtgtgtgggtgagtgagaacttccaagagaggcaccgcaaggagaacatggcagccaccaactggaaggagcccaagctgctggcctactgcctgctgaactactgcaaaaggaattacggagatatagaattgctgttccagctgctccgagcctttactggtcgttttctctgcaacatgacattcttaaaagagtatatggaggaagagattcccaaaaattacagcatcgctcagaaacgtgccctgttctttcgctttgtagacttcaacgaccccaacttcggagatgaattaaaagctaaagttctgcagcatatcttgaatcctgctttcttgtacagctttgagaagggggaaggagagcagctcttgggacctcccaatccagaaggagataacccagaaagcatcaccagtgtgtttattaccaaggtcctggaccccgagaagcaggcggacatgctggactcgctgcggatctacctgctgcagtacgccacgctgctggtggagcacgccccccaccacatccatgacaacaacaagaaccgcaacagcaagctgcgccgcctcatgaccttcgcctggccctgcctgctctccaaggcctgcgtggacccagcctgcaagtacagcggacacttgctcctggcgcacattatcgccaaattcgccatacacaagaagatcgtcctgcaggtttttcatagtctcctcaaggctcacgcaatggaagctcgagcgatcgtcagacaggcgatggccattctgaccccggcggtgccggccaggatggaggacgggcaccagatgctgacccactggacccggaagatcattgtggaggaggggcacaccgtcccgcagctggtccacattctgcacctgatagtgcaacacttcaaggtgtactacccggtacggcaccacttggtgcagcacatggtgagcgccatgcagaggctgggcttcacgcccagtgtcaccatcgagcagaggcggctggccgtggacctgtctgaagtcgtcatcaagtgggagctgcagaggatcaaggaccagcagccggattcagatatggacccaaattccagtggagaaggagtcaattctgtctcatcctccattaagagaggcctgtccgtggattctgcccaggaagtgaaacgctttaggacggccaccggagccatcagtgcagtctttgggaggagccagtcgctacctggagcagactctctcctcgccaagcccattgacaagcagcacacagacactgtggtgaacttccttatccgcgtggcctgtcaggttaatgacaacaccaacacagcggggtcccctggggaggtgctctctcgccggtgtgtgaaccttctgaagactgcgttgcggccagacatgtggcccaagtccgaactcaagctgcagtggttcgacaagctgctgatgactgtggagcagccaaaccaagtgaactatgggaatatctgcacgggcctagaagtgctgagcttcctgctaactgtcctccagtccccagccatcctcagtagcttcaaacctctgcagcgtggaattgccgcctgcatgacatgtggaaacaccaaggtgttgcgagccgtccacagccttctctcgcgcctgatgagcattttcccaacagagccgagtacttccagtgtggcctccaaatatgaagagctggagtgcctctacgcagccgtcggaaaggtcatctatgaagggctcaccaactacgagaaggccaccaatgccaatccctcccagctcttcgggacccttatgatcctcaagtctgcctgcagcaacaaccccagctacatagacaggctgatctccgtctttatgcgctccctgcagaagatggtccgggagcatttaaaccctcaggcagcgtcaggaagcaccgaagccacctcaggtacaagcgagctggtgatgctgagtctggagctggtgaagacgcgcctggcagtgatgagcatggagatgcggaagaacttcatccaggccatcctgacatccctcatcgaaaaatcaccagatgccaaaatcctccgggctgtggtcaaaatcgtggaagaatgggtcaagaataactccccaatggcagccaatcagacacctacactccgggagaagtccattttgcttgtgaagatgatgacttacatagaaaaacgctttccggaagaccttgaattaaatgcccagtttttagatcttgttaactatgtctacagggatgagaccctctctggcagcgagctgacggcgaaacttgagcctgcctttctctctgggctgcgctgtgcccagccactcatcagggcaaagtttttcgaggtttttgacaactccatgaaacgtcgtgtctacgagcgcttgctctatgtgacctgttcgcagaactgggaagccatggggaaccacttctggatcaagcagtgcattgagctgcttctggccgtgtgtgagaagagcacccccattggcaccagctgccaaggagccatgctcccgtccatcaccaacgtcatcaacctggccgatagccacgaccgtgccgccttcgccatggtcacacatgtcaagcaggagccccgggagcgggagaacagcgagtccaaagaggaggatgtagagatagacatcgaactagctcctggggatcagaccagcacgcccaaaaccaaagaactttcagaaaaggacattggaaaccagctgcacatgctaaccaacaggcacgacaagtttctggacactctccgagaggtgaagactggagcgctgctcagcgctttcgttcagctgtgccacatttccacgacgctggcagagaagacgtgggtccagcttttccccagattgtggaagatcctctctgacagacagcagcatgcactcgcgggtgagataagtccatttctgtgcagcggcagtcaccaggtgcagcgggactgccagcccagcgcgctgaactgctttgtggaagccatgtcccagtgcgtgccgccaatccccatccgaccctgcgtcctgaagtacctggggaagacacacaacctctggttccggtccacgctgatgttggagcaccaggcttttgaaaagggtctgagtcttcagattaagccgaagcaaacaacggagttttatgagcaggagagcatcaccccgccgcagcaggagatactggattcccttgcggagctttactccctgttacaagaggaagatatgtgggctggtctgtggcagaagcggtgcaagtactcggagacagcgactgcgattgcttacgagcagcacgggttctttgagcaggcacaagaatcctatgaaaaggcaatggataaagccaaaaaagaacatgagaggagtaacgcctcccctgctattttccctgaataccagctctgggaagaccactggattcgatgctccaaggaattgaaccagtgggaagccctgacggagtacggtcagtccaaaggccacatcaacccctacctcgtcctggagtgcgcctggcgggtgtccaactggactgccatgaaggaggcgctggtgcaggtggaagtgagctgtccgaaggagatggcctggaaggtgaacatgtaccgcggatacctggccatctgccaccccgaggagcagcagctcagcttcatcgagcgcctggtggagatggccagcagcctggccatccgcgagtggcggcggctgccccacgtagtgtcccacgtgcacacgcctctcctacaggcagcccagcaaatcatcgaactccaggaagctgcacaaatcaacgcaggcttacagccaaccaacctgggaaggaacaacagcctgcacgacatgaagacggtggtgaagacctggaggaaccgactgcccatcgtgtctgacgacttgtcccactggagcagcatcttcatgtggaggcagcatcattaccaggcgattgtaactgcctatgagaatagctctcagcatgatcccagttcaaataacgctatgcttggggttcatgcatcagcttcagcgatcatccagtatggaaaaatcgcccggaaacaaggactggtcaatgtagctctggatatattaagtcggattcatactattccaactgttcctatcgtggattgcttccagaagattcgacagcaagttaaatgctacctccagctggcaggcgtcatgggcaaaaacgagtgcatgcagggccttgaagttattgaatctacaaatttaaaatacttcacaaaagagatgacagccgaattttatgcactgaagggaatgttcttggctcagatcaacaagtccgaggaggcaaacaaagccttctctgcagctgtgcagatgcacgatgtgctggtgaaagcctgggccatgtggggcgactacctggagaacatctttgtgaaggagcggcagctgcacctgggcgtgtctgccatcacctgctacctgcacgcctgccggcatcagaacgagagcaaatcgaggaaatacttagccaaggtgctgtggcttttgagttttgatgatgacaaaaacactttggcagatgccgtcgacaagtactgcattggtgtgccacccatccagtggctggcctggatcccacagctgctcacctgcctggttggctcggagggaaagctgctcttgaacctcattagccaggttggacgcgtgtatccccaagcggtctactttcccatccggaccctgtacctgaccctgaaaatagaacagcgggaacgctacaagagcgatccagggcccataagagcaacagcacccatgtggcgctgcagccgaatcatgcacatgcagcgagagctccaccccacccttctgtcttccctggaaggcatcgtcgatcagatggtctggttcagagaaaattggcatgaagaggttctcaggcagctccaacagggcctggcgaaatgttactccgtggcgtttgagaaaagtggagcggtgtccgatgctaaaatcaccccccacactctcaattttgtgaagaagttggtgagcacgtttggggtgggcctggagaatgtgtccaacgtctcgaccatgttctccagcgcagcctctgagtctctggcccggcgggcgcaggccactgcacaagaccctgtctttcagaagctgaaaggccagttcacgacggattttgacttcagcgttccaggatccatgaagcttcataatcttatttctaagttgaaaaagtggatcaaaatcttggaggccaagaccaagcaactccccttattcttcctctatagaggaatattgccggttcttgagcaatttctcgtcacagacagctgaagtggatattcctggggagtttctgatgcctaatgcctacgcattattacatcaagattgcacggttcatgccccgggtagagattgtgcagaagcacatattccgcagcccggcggctgttacatccggggacacaatgggcaagatctacccataccttcgttcatggaacgacgccttgccttcacagagttcacgggcgaggagggagcgtgttgtttggcagctgctgcgcctgctgtaccccttcttggagaagattaaggagaccaccaagaggcacttgtttttcacagtgccccgggttgtggcagtttccccacagatgcgcctcgtggaggacaacccctcttcactttcccttgtggagatctacaagcagcgctgcgccaagaagggcatcgagcatgacaaccccatctcccgttactatgaccggctggctacggtgcaggcgcggggaacccaagccagccaccaggtcctccgcgacatcctcaaggaggttcagagtaacatggtgccgcgcagcatgctcaaggagtgggcgctgcacaccttccccaatgccacggactactggacgttccggaagatgttcaccatccagctggctctgataggcttcgcggaattcgtcctgcatttaaatagactcaaccccgagatgttacagatcgctcaggacactggcaaactgaatgttgcctactttcgatttgacataaacgacgcgactggagacctggatgccaaccgtcctgtcccatttcgactcacgcccaacatttctgagtttctgaccaccatcggggtctccggcccgttgacagcgtccatgattgcggtcgcccggtgcttcgcccagccaaactttaaggtggatggcattctgaaaacggttctccgggacgagatcattgcttggcacaaaaaaacacaagaggacacgtcctctcctctctcggccgccgggcagccagagaacatggacagccagcaactggtgtccctggttcagaaagccgtcaccgccatcatgacccgcctgcacaacctcgcccagttcgaaggcggggaaagcaaggtgaacaccctggtggccgcggcaaacagcctgggacaatctgtgccgcatggaccccgcctggcacccctgggcttgtgactgtggccgccacggcacgcgggaatgtgaagggcgctccgggctctgagcccgcagcttttacgacttctccctgcgtcgttccttatattcacagaagccccattagttttcactgggttgcggttattttcctggtagtttgcgtgtaagaaagggagaatatagttttagaggaagctgaactatgacgatgctgggcgaacggtttgggaaatggcagagctgaaacttattccaagctttcaaaataatcttttaagaagccaggattctccggtcctggaatttctgagtgagtcctttttttatggtgtcctccctctgtgaatgtacaggcggaactgtaccgaacagctcccttccatccatttttaactctttcggaaataacacctcacaagcagcttcgtgcttttggtacaagacctttgtaacaagtgtacagaaaactccattttggtttgagaaaccagggagttgatggaacccatcatgctggtttttctctgagcacaaagttttaggctgtacacagccagccttgggaatctcgttgagcgttcggcgtggatccacggggccaggccaccctgcgggagcgccacacgcatccacttcggattcagcgggtgaagacagacctctgagagtctgcaggcggctcctgtgctttttatttctgggctcttcggatgtcttctaggacatttactatcactgcacctgaagaaaaaatcacttttaccttcctaatttaaaaagacaaaacagaaatgtacgttccttcgctagctttagtctttctgttcccatttttataaatctgagcattgataatgttctatctaaatttgtacagtgtgattttttttttagaataatattttataaagggaaaaaaaaaaaaaaggtgcggccnagcttatccctnaggggggtaa

SEQ ID NO: 2786 - DNA, 12638 bp, Homo sapiens
  SIMILAR (130)..(11706): 1001254mologous to Homo sapiens PCAF-associated factor 400,accession number AF110377,Smith-Waterman Score=19967.
  misc_feature (1)...(12638): n = a,t,c or g
cgagggctcggctgggggtcgccggggtcgcgggccgggcctgcaggagccgggccgccgaggtcggggctggttgaactcatggacctgatacttttctcttgagaagcaaaccagcccaaaagaaaaatggcgtttgttgcaacacagggggccacggtggttgaccagaccactttgatgaaaaagtaccttcagtttgtggcagctctcacagatgtgaatacacctgatgaaacaaagttgaaaatgatgcaagaagttagtgaaaattttgagaatgtcacgtcatctcctcagtattctacattcctagaacatatcatccctcgattccttacatttctccaagatggagaagttcagtttcttcaggagaaaccagcacagcaactgcggaagctcgtacttgaaataattcatagaataccaaccaacgaacatcttcgtcctcacacaaaaaatgttttgtctgtgatgtttcgctttttagagacggaaaatgaagaaaatgttcttatttgtctaagaataattattgagctacacaaacagttcaggccaccgatcacacaagaaattcatcattttctggattttgtgaaacagatttacaaggagcttccaaaagtagtgaaccgctactttgagaaccctcaagtgatccccgagaacacagtgcctcccccagaaatggttggtatgataacaacgattgctgtgaaagtcaacccggagcgtgaggacagtgagactcgaacacattccatcattccgaggggatcactttctctgaaagtgttggcagaattgcccattattgttgttttaatgtatcagctctacaaactgaacatccacaatgttgttgctgagtttgtgcccttgatcatgaacaccattgccattcaggtgtctgcacaagcgaggcaacataagctttacaacaaggagttgtatgctgacttcattgctgctcagattaaaacattgtcatttttagcttacattatcaggatttaccaggagttggtgactaagtattctcagcagatggtgaaaggaatgctccagttactttcaaattgtccagcagagactgcacacctcagaaaggagcttctgattgctgccaaacacatcctcaccacagagctgagaaaccagttcattccttgcatggacaagctgtttgatgaatccatactaattggctcaggatatactgccagagagactctaaggcccctcgcctacagcacgctggccgacctcgtgcaccatgtccgccagcacctgcccctcagcgacctctccctcgccgtccagctcttcgccaagaacatcgacgatgagtccctgcccagcagcatccagaccatgtcctgcaagctcctgctgaacctggtggactgcatccgttccaagagcgagcaggagagtggcaatgggagagacgtcctgatgcggatgctggaggttttcgttctcaaattccacacaattgctcggtaccagctctctgccatttttaagaagtgtaagcctcagtcagaacttggagccgtggaagcagctctgcctggggtgcccactgcccctgcagctcctggccctgctccctccccagcccctgtccctgccccacctccacccccgcccccacccccacctgccacccctgtgaccccggcccccgtgcctcccttcgagaagcaaggagaaaaggacaaggaagacaagcagacattccaagtcacagactgtcgaagtttggtcaaaaccttggtgtgtggtgtcaagacaatcacgtggggcataacatcatgcaaagcacctggtgaagctcagttcattcccaacaagcagttacaacccaaagagacacagatttacatcaaacttgtgaaatatgcaatgcaagctttagatatttatcaggtccagatagcaggaaatggacagacatacatccgtgtggccaactgccagactgtgagaatgaaagaggagaaggaggtattggagcatttcgctggtgtgttcacaatgatgaaccccttaacgttcaaagaaatcttccaaactacggtcccttatatggtggacagaatctcaaaaaattatgctcttcagattgttgccaattccttcttggcaaatcctactacctctgctctgtttgctacgattctggtggaatatctccttgatcgcctgccagaaatgggctccaacgtggagctctccaacctgtacctcaagctgttcaagctggtctttggctctgtctccctctttgcagctgaaaatgaacaaatgctgaagcctcacttgcacaagattgtgaacagctctatggagctcgcgcagactgccaaggaaccctacaactacttcttgctgctacgggcgctgtttcgctctattggtggaggtagccacgatctcttgtatcaggagttcttgcctctccttccaaacctcctgcaagggctgaacatgcttcagagtggcctgcacaagcagcacatgaaggacctctttgtggagctgtgtctcaccgtccctgtgcggctgagctcgcttttgccgtacctgcccatgcttatggatcccttggtgtctgcactcaatgggtctcagacattggtcagccaaggcctcaggacgctggagctgtgtgtggacaacctgcagcccgacttcctctacgaccacatccagccggtgcgcgcagagctcatgcaggctctgtggcgcaccttacgcaaccctgctgacagcatctcccacgtggcctaccgtgtgctcggtaagtttggcggcagtaacaggaagatgctgaaggagtcgcagaagctgcactacgttgtgaccgaggttcagggccccagcatcactgtggagttttccgactgcaaagcttctctccagctccccatggagaaggccattgaaactgctctggactgcctgaaaagcgccaacactgagccctactaccggaggcaggcgtgggaagtgatcaaatgcttcctggtggccatgatgagcctggaggacaacaagcacgcactctaccagctcctggcacaccccaactttacagaaaagaccatccccaatgttatcatctcacatcgctacaaagcccaggacactccagcccggaagacttttgagcaggccctgacaggcgccttcatgtctgctgtcattaaggacctgcggcccagcgccctgccctttgtcgccagcttgatccgccactatacgatggtggcagtcgcccagcagtgtggccctttcttgctgccttgctaccaggtgggcagccagcccagcacagccatgtttcacagtgaagaaaatggctcgaaaggaatggatcctttggttctcattgatgcaattgctatttgtatggcatatgaagaaaaggagctttgcaaaatcggggaggtggccctagctgtgatatttgatgttgcaagtatcatcctgggctccaaggagagggcctgccagctgcccctgttttcttacatcgtggagcgcctgtgtgcatgttgttatgaacaggcgtggtatgcaaagctggggggtgtggtgtctattaagtttctcatggagcggctgcctctcacttgggttctccagaaccagcagacattcctgaaagcacttctctttgtcatgatggacttaactggagaggtttccaatggggcagtcgctatggcaaagaccacgctggagcagcttctgatgcggtgcgcaacgcctttaaaagacgaggagagagccgaagagatcgtggccgcccaggaaaagtctttccaccatgtgacacacgacttggttcgagaagtcacctctccaaactccactgtgaggaagcaggccatgcattcgctgcaggtgttggcccaggtcactgggaagagtgtcacggtgatcatggaaccccacaaagaggtcctgcaggatatggtcccccctaagaagcacctgctccgacaccagcctgccaacgcacagattggcctgatggaggggaacacgttctgtaccacgttgcagcccaggctcttcacaatggaccttaacgtggtggagcataaggtgttctacacagagctgttgaatttgtgtgaggctgaagattcagctttaacaaagctgccctgttataaaagccttccgtcactcgtacctttacgaattgcggcattaaatgcacttgctgcctgcaattaccttcctcagtccagggagaaaatcatcgctgcactcttcaaagccctgaattccaccaatagtgagctccaagaggccggagaagcctgtatgagaaagtttttagaaggtgctaccatagaagtcgatcaaatccacacacatatgcgacctttgctgatgatgctgggagattaccggagcttgacgctgaatgttgtgaatcgcctgacttcggtcacgaggctcttcccaaattccttcaatgataaattttgtgatcagatgatgcaacatctgcgcaagtggatggaagtggtggtgatcacccacaaagggggccagaggagcgacggaaacgaaagcatttccgagtgcgggagatgtcccttgtctccattctgtcagtttgaggaaatgaagatttgctcagcaattataaacctttttcatctgatcccggctgctcctcagacactggtgaagcctttgctagaggttgtcatgaaaacggagcgggcgatgctgatcgaggcggggagtccattccgagagcccctgatcaagttcctgactcgacatccctcgcagacagtggagctgttcatgatggaagccacactgaacgatccccagtggagcagaatgtttatgagttttttaaaacacaaagacgccagacctctgcgggatgtgctggctgccaaccccaacaggttcatcaccctgctgctgccggggggtgcccagacggctgtgcgccccggttcgcccagcaccagcaccatgcgcctggacctccagttccaggccatcaagatcataagcattatagtgaaaaacgatgactcctggctggccagccagcactctctggtgagccagttgcgacgtgtgtgggtgagtgagaacttccaagagaggcaccgcaaggagaacatggcagccaccaactggaaggagcccaagctgctggcctactgcctgctgaactactgcaaaaggaattacggagatatagaattgctgttccagctgctccgagcctttactggtcgttttctctgcaacatgacattcttaaaagagtatatggaggaagagattcccaaaaattacagcatcgctcagaaacgtgccctgttctttcgctttgtagacttcaacgaccccaacttcggagatgaattaaaagctaaagttctgcagcatatcttgaatcctgctttcttgtacagctttgagaagggggaaggagagcagctcttgggacctcccaatccagaaggagataacccagaaagcatcaccagtgtgtttattaccaaggtcctggaccccgagaagcaggcggacatgctggactcgctgcggatctacctgctgcagtacgccacgctgctggtggagcacgccccccaccacatccatgacaacaacaagaaccgcaacagcaagctgcgccgcctcatgaccttcgcctggccctgcctgctctccaaggcctgcgtggacccagcctgcaagtacagcggacacttgctcctggcgcacattatcgccaaattcgccatacacaagaagatcgtcctgcaggtttttcatagtctcctcaaggctcacgcaatggaagctcgagcgatcgtcagacaggcgatggccattctgaccccggcggtgccggccaggatggaggacgggcaccagatgctgacccactggacccggaagatcattgtggaggaggggcacaccgtcccgcagctggtccacattctgcacctgatagtgcaacacttcaaggtgtactacccggtacggcaccacttggtgcagcacatggtgagcgccatgcagaggctgggcttcacgcccagtgtcaccatcgagcagaggcggctggccgtggacctgtctgaagtcgtcatcaagtgggagctgcagaggatcaaggaccagcagccggattcagatatggacccaaattccagtggagaaggagtcaattctgtctcatcctccattaagagaggcctgtccgtggattctgcccaggaagtgaaacgctttaggacggccaccggagccatcagtgcagtctttgggaggagccagtcgctacctggagcagactctctcctcgccaagcccattgacaagcagcacacagacactgtggtgaacttccttatccgcgtggcctgtcaggttaatgacaacaccaacacagcggggtcccctggggaggtgctctctcgccggtgtgtgaaccttctgaagactgcgttgcggccagacatgtggcccaagtccgaactcaagctgcagtggttcgacaagctgctgatgactgtggagcagccaaaccaagtgaactatgggaatatctgcacgggcctagaagtgctgagcttcctgctaactgtcctccagtccccagccatcctcagtagcttcaaacctctgcagcgtggaattgccgcctgcatgacatgtggaaacaccaaggtgttgcgagccgtccacagccttctctcgcgcctgatgagcattttcccaacagagccgagtacttccagtgtggcctccaaatatgaagagctggagtgcctctacgcagccgtcggaaaggtcatctatgaagggctcaccaactacgagaaggccaccaatgccaatccctcccagctcttcgggacccttatgatcctcaagtctgcctgcagcaacaaccccagctacatagacaggctgatctccgtctttatgcgctccctgcagaagatggtccgggagcatttaaaccctcaggcagcgtcaggaagcaccgaagccacctcaggtacaagcgagctggtgatgctgagtctggagctggtgaagacgcgcctggcagtgatgagcatggagatgcggaagaacttcatccaggccatcctgacatccctcatcgaaaaatcaccagatgccaaaatcctccgggctgtggtcaaaatcgtggaagaatgggtcaagaataactccccaatggcagccaatcagacacctacactccgggagaagtccattttgcttgtgaagatgatgacttacatagaaaaacgctttccggaagaccttgaattaaatgcccagtttttagatcttgttaactatgtctacagggatgagaccctctctggcagcgagctgacggcgaaacttgagcctgcctttctctctgggctgcgctgtgcccagccactcatcagggcaaagtttttcgaggtttttgacaactccatgaaacgtcgtgtctacgagcgcttgctctatgtgacctgttcgcagaactgggaagccatggggaaccacttctggatcaagcagtgcattgagctgcttctggccgtgtgtgagaagagcacccccattggcaccagctgccaaggagccatgctcccgtccatcaccaacgtcatcaacctggccgatagccacgaccgtgccgccttcgccatggtcacacatgtcaagcaggagccccgggagcgggagaacagcgagtccaaagaggaggatgtagagatagacatcgaactagctcctggggatcagaccagcacgcccaaaaccaaagaactttcagaaaaggacattggaaaccagctgcacatgctaaccaacaggcacgacaagtttctggacactctccgagaggtgaagactggagcgctgctcagcgctttcgttcagctgtgccacatttccacgacgctggcagagaagacgtgggtccagcttttccccagattgtggaagatcctctctgacagacagcagcatgcactcgcgggtgagataagtccatttctgtgcagcggcagtcaccaggtgcagcgggactgccagcccagcgcgctgaactgctttgtggaagccatgtcccagtgcgtgccgccaatccccatccgaccctgcgtcctgaagtacctggggaagacacacaacctctggttccggtccacgctgatgttggagcaccaggcttttgaaaagggtctgagtcttcagattaagccgaagcaaacaacggagttttatgagcaggagagcatcaccccgccgcagcaggagatactggattcccttgcggagctttactccctgttacaagaggaagatatgtgggctggtctgtggcagaagcggtgcaagtactcggagacagcgactgcgattgcttacgagcagcacgggttctttgagcaggcacaagaatcctatgaaaaggcaatggataaagccaaaaaagaacatgagaggagtaacgcctcccctgctattttccctgaataccagctctgggaagaccactggattcgatgctccaaggaattgaaccagtgggaagccctgacggagtacggtcagtccaaaggccacatcaacccctacctcgtcctggagtgcgcctggcgggtgtccaactggactgccatgaaggaggcgctggtgcaggtggaagtgagctgtccgaaggagatggcctggaaggtgaacatgtaccgcggatacctggccatctgccaccccgaggagcagcagctcagcttcatcgagcgcctggtggagatggccagcagcctggccatccgcgagtggcggcggctgccccacgtagtgtcccacgtgcacacgcctctcctacaggcagcccagcaaatcatcgaactccaggaagctgcacaaatcaacgcaggcttacagccaaccaacctgggaaggaacaacagcctgcacgacatgaagacggtggtgaagacctggaggaaccgactgcccatcgtgtctgacgacttgtcccactggagcagcatcttcatgtggaggcagcatcattaccagggtaaaccgacctggtccggcatgcattcatcatcgattgtaactgcctatgagaatagctctcagcatgatcccagttcaaataacgctatgcttggggttcatgcatcagcttcagcgatcatccagtatggaaaaatcgcccggaaacaaggactggtcaatgtagctctggatatattaagtcggattcatactattccaactgttcctatcgtggattgcttccagaagattcgacagcaagttaaatgctacctccagctggcaggcgtcatgggcaaaaacgagtgcatgcagggccttgaagttattgaatctacaaatttaaaatacttcacaaaagagatgacagccgaattttatgcactgaagggaatgttcttggctcagatcaacaagtccgaggaggcaaacaaagccttctctgcagctgtgcagatgcacgatgtgctggtgaaagcctgggccatgtggggcgactacctggagaacatctttgtgaaggagcggcagctgcacctgggcgtgtctgccatcacctgctacctgcacgcctgccggcatcagaacgagagcaaatcgaggaaatacttagccaaggtgctgtggcttttgagttttgatgatgacaaaaacactttggcagatgccgtcgacaagtactgcattggtgtgccacccatccagtggctggcctggatcccacagctgctcacctgcctggttggctcggagggaaagctgctcttgaacctcattagccaggttggacgcgtgtatccccaagcggtctactttcccatccggaccctgtacctgaccctgaaaatagaacagcgggaacgctacaagagcgatccagggcccataagagcaacagcacccatgtggcgctgcagccgaatcatgcacatgcagcgagagctccaccccacccttctgtcttccctggaaggcatcgtcgatcagatggtctggttcagagaaaattggcatgaagaggttctcaggcagctccaacagggcctggcgaaatgttactccgtggcgtttgagaaaagtggagcggtgtccgatgctaaaatcaccccccacactctcaattttgtgaagaagttggtgagcacgtttggggtgggcctggagaatgtgtccaacgtctcgaccatgttctccagcgcagcctctgagtctctggcccggcgggcgcaggccactgcacaagaccctgtctttcagaagctgaaaggccagttcacgacggattttgacttcagcgttccaggatccatgaagcttcataatcttatttctaagttgaaaaagtggatcaaaatcttggaggccaagaccaagcaactccccaaattcttcctcatagaggaaaagtgccggttcttgagcaatttctcggcacagacagctgaagtggaaattcctggggagtttctgatgccaaagccaacgcattattacatcaagattgcacggttcatgccccgggtagagattgtgcagaagcacaacaccgcagcccggcggctgtacatccggggacacaatggcaagatctacccatacctcgtcatgaacgacgcctgcctcacagagtcacggcgagaggagcgtgtgttgcagctgctgcgtctgctgaacccctgtttggagaagagaaaggagaccaccaagaggcacttgtttttcacagtgccccgggttgtggcagtttccccacagatgcgcctcgtggaggacaacccctcttcactttcccttgtggagatctacaagcagcgctgcgccaagaagggcatcgagcatgacaaccccatctcccgttactatgaccggctggctacggtgcaggcgcggggaacccaagccagccaccaggtcctccgcgacatcctcaaggaggttcagagtaacatggtgccgcgcagcatgctcaaggagtgggcgctgcacaccttccccaatgccacggactactggacgttccggaagatgttcaccatccagctggctctgataggcttcgcggaattcgtcctgcatttaaatagactcaaccccgagatgttacagatcgctcaggacactggcaaactgaatgttgcctactttcgatttgacataaacgacgcgactggagacctggatgccaaccgtcctgtcccatttcgactcacgcccaacatttctgagtttctgaccaccatcggggtctccggcccgttgacagcgtccatgattgcggtcgcccggtgcttcgcccagccaaactttaaggtggatggcattctgaaaacggttctccgggacgagatcattgcttggcacaaaaaaacacaagaggacacgtcctctcctctctcggccgccgggcagccagagaacatggacagccagcaactggtgtccctggttcagaaagccgtcaccgccatcatgacccgcctgcacaacctcgcccagttcgaaggcggggaaagcaaggtgaacaccctggtggccgcggcaaacagcctggacaatctgtgccgcatggaccccgcctggcacccctggctgtgactgtggccaccacggccacccggaatgtgaagggcgctccgggctctgagcccgcagcttttacgacttctccctgcctcgttccttatattcacagaagccccatagtttcactgggttgcggttattttcctggtagtttgcgtgtaagaaagggagaatatagttttagaggaagctgaactatgacgatgctgggcgaagcggttggaaatggcagagctgaaacttattccaagctttcaaaataatcttttaagaagccaggattctccggtctggaatttctgagtgagtcctttttttatggtgtcctccctctgtgaatgtacaggcggaactgtacgaacagctccccttccatccatttttaactctttcggaaataacacctcacagcagcttcgtgcttttgtacagacctttgtaaacaagtgtacagaaaactcattttgtttgagaaaacagggagttgatgaacccccatcatgctggtttttcctctgagcacaaaagttttaaggctgtacacagcccagcccttggggaatcctcgttgagcgttcgggcgtggatcccacggggccccaggcccacctgcgggagcgcccacacgcattccacttcgggattcagtggggtgaaggacagaactctgagagtctgcaggcnggctcctgtgcctttttatttctggctcttcgggatgtcttctagacatttactatcactgcacctgaagaaaaaatcacttttaccttcctaatttaaaaagacaaaacagaaatgtacgttccttcgctagctttagtcttttctgttcccatttttataaatctgagcattgataatgttctatctaaatttgtacagtgtgattttttatttttagaataaatattttataaacggaaaaaaaaaaaaaaaaa

SEQ ID NO: 2787 - DNA, 688 bp, Homo sapiens
  SIMILAR (68)..(565): 401254mologous to Sus scrofa ribosomal protein,accession number AB000911,Smith-Waterman Score=138.
ccgcagattcgagcgtcgacccatgcgtccgcacgaggtctacacgccgccgcttgtgctgcagccactgtctctagtgagtccctggaaaagttcccagcatatttttccgagtactcaacacccaacatcgattgggcggcggaaaaatagccctttgcccatcactgcccatttaagggtgtgggcccgaagatatgctcatgtggtgttgaggaaagcagacattgacctcaccaaagagggcgggagaactcacatgaggatgaaggtggaacgtgtgatcaccaatctatgcagaatccacgccagtacaaagatcccaagactgggttctttgaacaagacaagaaggatgtaaaggattggaaaataacagccagggtcctagcccaatgggtctggacaacaagctcccgtgaaagacctggaagccgacttgaagaaagattccgggcccataagaagggcttgccgtcactttcttgggggcctttcgtgttccgagggccaagcacacccaagacccacttggcccgccgttggccggcaccgtggggcctccgctggggccaggaggtgacgaacagtggccggctctccccaggcaaggaggcgatgtaggcccggagcccagagggccgcatcgggcgtgcccgaggcaggtctgggcccaacacctggccgg

SEQ ID NO: 2788 - DNA, 1476 bp, Homo sapiens
cctgaggaattcggccgaggaagagagagcaggcggcatccgaggacgcggacaagggtcccaaagagccgctggaatacggcaaggccaaactgagcttccagagctgtgagtgcgggaaggccttccagcggcacgaccacctggctcggcaccgcagccacctttcacctgaaggacaaagcccggcccttccagtgccggtactgcgtcaagagcttcacgcagaactatgacctcctccgccacgagcgcctgcacatgaagcgccgttccaagcaggctctgaactcctactgagcctctccgcctggggcggcctcaccctggctggtgctgccccctcaccttggtactgatcagcgcccccacccaggacataccttccccaggatagagagcacacctccctcctgtccttgctctcaggtagtgagcgttcgggtggtgccatgggagcactctccctcccccaggtaatgaaagagtggccaagtgagtgttctgtttctgctgtgccaaaaaacgggggggatgtgccatcaccaggttggacatgccaggtgttctgcgtcttagagacccttggcccatgctccccaagctcggggagtaaaactgggctatcccccgtcagggcggcaccctggtcaccagccaaacctcagtatactccctcccctccttccctgtctgaacgctaggatctgctcctgaagctccaggatgcctgcacttccactgagaagctgctggcggatgttggactagaggaaagaagaaggcagggtgggactgatgggctcagtggggagcagggccaggcacactgagccagacatgtcatgtctgagccccagattcgtggccatcaggtaggcaggagcacccctgcagatccaagatgatcaggcaggcccttttgggctggcctgctgtggcaggggtctgcagagctccttcttgaggtttggaaacagtcgtcatacctgttgattttcctggggggccaatcactagggatctggagctcaccaaaaacaaagcttacattttaatttgtgttgcacacctaccccataatgtctttataccccaaagatccttggtaaatgcttgtgggttggaagcggagttgtcatcgtttaaaaggcacttaagtcccttcttccaatctgtcctgtctagggaatgtgggagctctgcccccagtgaggggttctcctgtctgggtgagccaagctccagaacagaaccttggcctgacaacacacttggatagatacattaggttgggagtgctggtgttgttccaaacactggctggcttacaacaacaggagtgtattccctgacagctctgggaggtgcacgtccaagatcagggtgtcctcatatttggtgccttgcgacagctgcgaaggagaaacgcgttattgccttgctagcaggtgccatctcttgctgtagcggaat

SEQ ID NO: 2789 - DNA, 403 bp, Homo sapiens
  SIMILAR (240)..(401): 1001254mologous to Homo sapiens S100A6 cDNA,accession number AX038700,Smith-Waterman Score=270.
aggaagcaggggtgaccgccgcagtcctcctcctgctccccttgccgagtcacgtgtcacgaagagcaaactgagcaaactgagctgcgcagatgaggggagactcgtcaccaggcgtgcagtgggcactgctgggctcccccatcccgtcctaacccggaacagccccgggcaggaggcgtggaaagtcgagggggtaaaccgcgaatgtgcgttgtctccaagcccagccctcagccatggcatgccccctggatcaggccattggcctcctcgtggccatcttccacaagtactccggcagggagggtgacaagcacaccctgagcaagaaggagctgaaggagctgatccagaaggagctcaccattggctcgaagctgcaggatgctgaaattgcaag

SEQ ID NO: 2790 - DNA, 423 bp, Homo sapiens
  SIMILAR (255)..(422): 981254mologous to Homo sapiens S100A6 cDNA,accession number AX038700,Smith-Waterman Score=273.
  misc_feature (1)...(423): n = a,t,c or g
gctgggctcccccatcccgtcctaacccggaacagccccgggcaggaggcgtggaaagtcgagggggtaaaccgcgaatggccagctgccctcacgctgggggtccagccatcccctgcccagttcagccgctggatccagactggggccatctgtggcgctcccccgctggagggatagtcaggagcagcagtgctgtgccagctccaagcccagccctcagccatggcatgccccctggatcaggccattggctcctcgtggccatcttccacaagtactccggcagggagggtgacaagcacaccctgagcaagaaggagctgaaggagctgatccagaaggagctcaccattggctcgaagctgcaggatgctgaaattgcaaggntgatggaagacttggaccggaacaaggaccagg

SEQ ID NO: 2791 - DNA, 1102 bp, Homo sapiens
ccgggtcgacccacgcgtccggtcgcatttggccgcctccctacttttgagttctctccaggagccctggatactttccagggccagctgccctcacgctgggggtccagccatcccctgcccagttcagccgctggatccagactggggccatctgtggcgctcccccgctggagggatagtcaggagcagcagtgctgtgccaggcaggccttgggctaagggatcgcaatggggtgtgctcttttggggtgcggaagggagtgccctgggtgtgtcattgccaccatgtgtggccctgtgaagctgtgtttaagctgcctttgcacgctccattcccctcccctgcccagccatactcctcaacttctggatcccctgaaggacagttctcagctgtgcccaaagctactgttcctatatgcttcttagaatccttaagccacctctcttgccttggccctagtgtgctctctccttccccttcaagccctgggctgtctcctgatgccattgtgtgtggcctgagactgggtggttccaaaggaggcggggctagtgcaggcagcattattggggtgtgtgggtgagaagttcttgttaccatggcactgactaggccctctgctgccagctccaagccacagccctcaagcccatggcaatgccccctggattccagccattggcctccctccgtggcccatcttcccacaagttactccggcagggagcggtgacaagcacaccctgagcaaagagggagctgaaggagctgattcagaaaggagctcccccattggcttcgaagctgcaggatgcttgaaattgcaaggcttgatggaagaccttggaccggaacaaggaccagggaggtgaactttccaaggaagtatgtcacctttcctgggggggcctttgcttttgaatctacaattgaaggccttaaaagggttgaaaaataaattagggaagatggagacaccctcttgggggtcctctcttgagtcaaattccagtgggtgggtaatttgttacaataaatttttttttgtggtcaaatttaaaaaaaaaaaaaaaaaagaaaaaaaatcgcggccgc

SEQ ID NO: 2792 - DNA, 1712 bp, Homo sapiens
  SIMILAR (231)..(434): 611254mologous to Homo sapiens ADP-ribosylation factor 4,accession number M36341,Smith-Waterman Score=172.
aaggctagagccggagctgccgcgccagtcgcctagcaggtcctctaccggcttattcctgtgccggatcttcatcggcacaggggccactgagacgtttctgcctccctctttcttcctccgctctttctcttccctctcgtttagtttgcctgggagcttgaaaggagaaagcacggggtcgccccaaaccccttctgcttctgcccatcacaagtgccactaccgccatgggcctcactatctcctccctcttctcccgactatttggcaagaagcagatgcgcattttgatggttggattggatggctgctggcaaagccaaccattctgtataaacttgaagttaggggagatagtcaccaccattccttaccattggttttggtgtaataaacaataggatataggaacatttgttttcacagtatggggatgttgggtggtccagatagaattaggcctctctggaagcattacttccagaaataccccagggtcttatttttgtggtaggatagcaacgatcgtgaaagaattcaggaagtagcagatgagctgcacaaaatgcttctggtagatgaattgagagatcccagtgctgctactttttgcaaacaaacaggactttgccaaatgctatgggccatcagtgaaatgacagataaactatggcttcagtctcttcgtaacagaacatggtatgttcaagccacttgtgcaacacaaggaactggtctgtatgaaggacttgactggctgtcaaatgagctttcaaaacaattaaatgaaattggatatctaacccaaggaccatggtttggataaaattgggtcctaggcttgttaccacaaaattagtttgggatcttgggttattaaacagtatctgggactggtttgggcagaatattaaacttattttgttgccaattattgtttaccgagtataatgttgctatttagcaagtgtgcttggattttaaagaaattctccttgggaaaaaagtatcctcttttaattttacttccccataagcgtaaatgcctggacatagctcttgtgcaacccttaaaataaattgtttttgagtgttttttgagcccctagacaaataatgtttttaaagttatcccccttgctactttactgaatacctttatcatttcctgagaacagtttgctaatttaaaaaatgtaggcattcccatttggtatttatttctccgcgccttgcccaaaaagatttcctaaatactgccttgtacccagcccagagaaagatcccaaaaacactacctcagctctcttggcactgaggaaatttttcccccttacattggactcctgggcctacatccagccaaacttaaccttgggtggggtttggatttgatagcccaattagttctgtggctgggttgcaaagaattgatatttagatggtttttaatactcgagcagattgtcttccttttatattgtgtcttttttatgtgtgcatgttgcttttgttatcgagcctgattttttgctcgagtatatgatagttctgctgatgttttggtttattggggcagacatatccttcattaagagtttttgggaaaactcatcaaattcagatgaatacattttcttcaataacccgatttggatattattccataataaaactgataaaatacgtaaaaaaaaaaaaaaaaaact

SEQ ID NO: 2793 - DNA, 1754 bp, Homo sapiens
  SIMILAR (818)..(1516): 891254mologous to Homo sapiens L-kynurenine/alpha- aminoadipate aminotransferase,accession number AF097994,Smith- Waterman Score=1045.
cttgcgggccgcaggagcgacgtgcggcgtggactttgccgggctcgccacacagccccagacccgtttaggaccgggagaccgaacgcagcgtccagccggggagtttcggcggcgttctccgggcaccgcgcgcgggaagccagacgcagcggggggacacatctcgcggtggcgtgtgccagagtgaggagttagcaggcaggacttgacgaggctctttggtttttctagtcctcaaccactgaagaagaagcttgatgcttggctgtcagaagacatgaattacgcacggttcatcacggcagcgagcgcacgcagaaacccttctcccatccggaccatgactgacatattgagcagaggaccaaaatcgatgatctccttggctggtggcttaccaaatccaaacatgtttccttttaagactgccgtaatcactgtagaaaatggaaagaccatccaatttggagaagagatgatgaagagagcactttcagtattctccgagtgctggaattccagagcttttgtcctgggctaaaacagttacaaataaaattgcataatcctcctaccatccattacccacccagtcaaggacaaatggatctatgtgtcacatctggcagccaacaaggtctttgtaaggtgtttgaaatgatcattaatcctggagataatgtcctcctagatgaacctgcttattcaggaactcttcaaagtctgcacccactgggctgcaacattattaatgttgccagtgatgaaagtgggattgttccagattccctaagagacatactttccagatgggaaaccagaagatgcaaagaatccccagaaaaacacccccaaatttctttattattgtttccaaatgggcaacaaccctactggaaactcattaaccagtgaacgcaaaaaggaaatctatgagcttgcaagaaaatatgatttcctcataatagaagatgatccttactattttctccagtttaacaagttcagggtaccaacatttctttccatggatgttgatggacgtgtcatcagagctgactctttttcaaaaatcatttcctctgggttgagaataggatttttaactggtccaaaacccttaatagagagagttattttacacatacaagtttcaacattgcaccccagcacttttaaccagctcatgatatcacagcttctacacgaatggggagaagaaggtttcatggctcatgtagacagggttattgatttctatagtaaccagaaggatgcaatactggcagctgcagacaagtggttaactggtttggcagaatggcatgttcctgctgctggaatgtttttatggattaaagttaaaggcattaatgatgtaaaaagaactgattgaaagaaaaaggccgttaaagatgggggtattaaatgctcccctggaaatgctttcctacgtcgaatagctcagctccctagcccttacttgagagcatccttctcttcagcttctcccagaacagatggatgtggccttcccaggtattagcacaacttataaaagaatctttatgaagaaattaaactaggttgggcatggtggctcacacctataatcccagcactttgggaggcagaggagggaggatcacttgaacccaggaattcaaggctgcagtaagctacgatcacaccactgcactctggcctgcatgcactctggcctgcatggcagaacaagaccctgtctctaa

SEQ ID NO: 2794 - DNA, 649 bp, Homo sapiens
  SIMILAR (80)..(598): 551254mologous to Homo sapiens Human PRO1244 protein sequence SEQ ID NO:193,accession number AAB24423,Smith-Waterman Score=382.
gccgatttgcctgttctcacgccccaccctcagacctagccggagcaaagtttcacttatagaagggagaggagcgaacatggcagcgcgttggcggttttggtgtgtctctgtgaccatggtggtggcgctgctcatcgtttgcgacgttccctcagcctctgcccaaagaaagaaggagatggtgttatctgaaaaggttagtcagctgatggaatggactaacaaaagaccctgtaataagaatgaatggagacaagttccgtcgccttgtgaaagccccacccgagaaattactccgttatccgtcatgttcactgctcctccaacttgcatagacaagtgtgtcgtttgcaagcaagctgatgaagaattcccagatcctgggcaaactcctgggcgatactcccagtgcattcaccaacaaggatattttttttgccatgggtggaattttgatgaaggctctgaatgtatttccagatgctaaaacattgaatttcagctcccaactttccatcaactttcctgcaaaaggggaaacccaaacgggggtgatacatattgagttacaggtgcgggggttttttcagctgaggcagatttccccgtggatccgccgacaggactgatgtccaatattaggagt

SEQ ID NO: 2795 - DNA, 920 bp, Homo sapiens
  SIMILAR (50)..(286): 921254mologous to Homo sapiens G8 protein,accession number AJ249732,Smith-Waterman Score=383.
  misc_feature (1)...(920): n = a,t,c or g
aagatctttttttttttttttttgcgaagtgggctcgtgggttggcagtatgagagttgtaatggcccgactgttgagtgagggggagcagtgtatcccaacggcttgcgctgcctttgcgcagcagcccggcgggcggccacgtcgcggcctggctggggtaggagagggcggtccccagtgcagttgggtgaactaccgttgcacactggagtttctggtgtctttgcttggaactgacctagctcgtggcagggggaactcggctancgggccccacagcccctgctgactcaaaacaactgagttgtaagacgttcatcgccgtgttatccttgagtaaagaagcgggcttttgcaatgttgtccaaggctgggtctctacttcctggggctcaagcagtccctccgtgcctcagttcttcccaaagttgctggaatttacagggcaatgaacttctggaaagccccagcccaggggacaatgcacccttccacagagaattctgccacttaatctggagttgaaggtctaaaggttttggaaatcttcccccttcatggaagagaagctttggtatgggctgtccatgcttagacaggtgaattcctggcaactttgaaccttcaaggctggggagagggtgaaaaacccaggcctgttctccttccttgctatgggaattttggctgacacaatatcttcccgccctgggtgctggggcatatcctaaagaactttacaactttcctgtaataatcctgtgtgagcagctgtcaccttattnggggggaaaaatgcctgaaaattagggggcacttcaagtagatagcttctatcttcctatatttgtcttatatacaagtatttgcttttatcaaaataattccaataaagcgattttaaagtaaagaagaaa

SEQ ID NO: 2796 - DNA, 1053 bp, Homo sapiens
  SIMILAR (521)..(559): 761254mologous to Homo sapiens Human secreted protein, SEQ ID NO: 7871,accession number AAG03790,Smith-Waterman Score=61.
  misc_feature (1)...(1053): n = a,t,c or g
gagtgtattaaaggatgtttatttagaaaagaaaaattagctttgacaagagacacctgcacatttntgtagccaaggagatgtcagtnagagcagaaggtgaatccttcatggngactgancacaggtggccagctgtggcagcgacagtgaacacatgtcagtntcggcctgggggcagagtggttgaatgctttaagtctggtggagagcctgccttgctcagcccaggccaagagtaaccctcccatccccattacaaaccaccttttcaagttttttaggntttagttttttgtttttagcataaatggcggagtagcagcagcatctcaccaggagctttgtcgcattacattttgtattttgcttttttgagacggggtctcactctgttacccaggctggaatacagtggcacaatcacagctcactgtaggctctatctcctgggctcaggtgatcctcccaaactcagcctcccagggtagctgtggctccagggcgaactactgtatatagagacagggtttccctatgttgcccagggtggtctggtcttatagtcctggggctcaagcctcccagagtgctggggattacaggcatggggtcaccgcaaccaaggcccggcatttaatattttgaagttacccaaaatggatcatcatctgtgaaggcatccatgggtagcttcccaagcattttgcgggcccactggcccagtgcatccgaaaacacatttcagggaaacccgaggagttgttaagtttgcacatgtgtgggcctacagttgacttccatgtagtaacagggctgagcaagggcagggtctccaccagacttaaagcattcaaccactcctgcccccaggccgacactgacatgtgttcactgtcgctgccacagctggccacctgtgttcagtctccatggaaggattcaccttctgctctcactgacatctccttggctacacaaatgtgcaggtgtctcttgtcaaagctaatttttcttttctaaataaacatcctttaatacactccaaaaaaa

SEQ ID NO: 2797 - DNA, 641 bp, Homo sapiens
attgacactcttccctcctcccacctgccaccaggcctcaccaaagcccactgccatggggccatctgggccattcagagactggagtgagatttgggtgtggagggggaggcgccaaggtggaggagcttcccactccaggactgttgatgaaagggacagatttgaggaggaagtgggctctgaggctgcagggctggaagtccttgcccacttcccactctcctgccccaatctattttagtacttcccaggcaaataggcccctttgaggctcctgagtgccctcagatggtcaaaacccagttttcccctctggatgcctaaaccaggctgcatcggaggccaaggacccgggatcattcactgtgatacccttgccctccagagggtgcgctcagagacacgggcaagcatgcctcttgccttccctggagagaaagtgtgtgatttctctcccccctccttccccccaccagacctttgctgggcctaaaggtcttggccatggggacgccctcagtttagggatctggccacagactccctcctgtgaaccaacacagacacccaagcagagcaatcagttagtgaattgaatggaaataaacgctttagttataatatgaaaaaaaaaaaaa

SEQ ID NO: 2798 - DNA, 444 bp, Homo sapiens
  SIMILAR (14)..(442): 961254mologous to Homo sapiens Human secreted protein clone pt31_4 protein sequence SEQ ID NO:18,accession number AAY53006,Smith-Waterman Score=789.
cggacgcgtgggaggcaaacccaccacgagtagctcagaagcatgtcgcttctgtggttccaggagtggaacagagttatctgctgttggcagtgtttgttctgatgcagattgccaggaatacgctaagatagcctgtagtaagacgcatccttgtggccatccatgcgggggtgttaaaaacgaagagcactgtctgccctgtctacacggctgtgacaaaagtgccacaagcctgaagcaagacgccgatgacatgtgcatgatatgtttcaccgaagcgctctcggcactggattgtagtcacatattccacttacagtgctgtcggcgagtattagaaaatcgatggcttggcccaaggataacatttggatttatatcttgtcccatttgcaagaacaaaattaatcacatagtactaaaagacctacttgatccaat

SEQ ID NO: 2799 - DNA, 485 bp, Homo sapiens
  SIMILAR (276)..(482): 981254mologous to Homo sapiens protein associated with Myc,accession number AF075587,Smith-Waterman Score=354.
  misc_feature (1)...(485): n = a,t,c or g
atggccccnnaatagaatctgtancgccgcacnaccggnccggaattnnngttgcgacgatttcgtatgagcggccccagtagcggcgagggcggcgctttggggaggaggagaagaaggaggaggagaaggaggtcgctgtctttgtagtctccccggggtcactaccagctgctgctgtcaggccgggccctggccgaccgctaccggaggatttataccgctgcgctcaatgacagggaccaggggggcggcagcgctggacacccagcctccagtctgaaaacttagagaatacagtaatcataccagatatcaaactacatagcaatccttctgctttcaatatttactgtaatgtacgccattgcgttctggaatggcagaaaaaggaaatatcattggcagccgcatctaagaactctgtgcagagtggagaatcagatagtgatgaagaagaggaatccaaagagccccctatcaac

SEQ ID NO: 2800 - DNA, 398 bp, Homo sapiens
  SIMILAR (1)..(168): 981254mologous to Homo sapiens protein associated with Myc,accession number AF075587,Smith-Waterman Score=292.
aatccttctgctttcaatatttactgtaatgtacgccattgcgttctggaatggcagaaaaaggaaatatcattggcagccgcatctaaaaactctgtgcagagtggagaatcagatagtgatgaagaagaggaatccaaagagccccctatcaagcttccaaaggtaagccactgagttctattaatatttagatgtgtaacctgcaggtgttctgggctataatgcatatatacgcattgctaaaatactttgctttatgtaaaattgcacactaaaaataacacgggcttatggggcaaaaataggtttgggagccaggaaaaggggaaactctggcaactttattaactaaggtgctaacaaagtcaataattgataattcactgggaagcgca

SEQ ID NO: 2801 - DNA, 6573 bp, Homo sapiens
  SIMILAR (1384)..(1722): 941254mologous to Homo sapiens protein associated with Myc,accession number AF075587,Smith-Waterman Score=583.
gtgtgtgctcatattgtccaagctattcgcatggaagctaccagagtccgtgaagaatgggaacatgctatatcaagcaaagaaaatgccaattctcagccaaatgatgaagatgcctcctctgatgcctactgctttgagctgctctctatggttttagcactgagtggctctaacgttggccggcaatatctggctcaacagctaaccctgcttcaggatctcttctcgctgcttcacacagcctctcctagagtccagagacaggtaacctctttactaagaagagttttgcctgaagtaacccctagtcgtctggccagcatcataggagtgaaatccctccccccagcagatatcagtgatatcattcactcaacagagaaaggagactggaataagctgggtatcttggacatgtttctaggatgcattgccaaagcactcactgtacagctaaaagccaaaggaaccaccatcactggaacagctggtaccactgtgggcaaaggagttacaacagttactcttccgatgattttcaattccagttatctccgacgaggtgaaagtcattggtggatgaagggctcaacccctacccagatctcagagatcatcattaaacttatcaaggatatggcagcaggtcatctgtcagaagcttggtcccgagtgacaaaaaatgctattgcagaaaccatcattgccttgaccaagatggaagaagaatttaggtctccactctggcttgctctcgcatccctatgtgttcttgatcaggaccacgtagatcgtctctcctcggggagatggatgggaaaggatggacaacaaaaacaaatgcctatgtgtgataaccatgatgatggtgaaactgcagcaatcattttatgcaatgtctgtggaaatttatgtacagactgtgacagattccttcaccttcatcgaagaaccaaaactcatcaaagacaggtcttcaaagaagaagaagaagctataaaggttgaccttcatgaaggttgtggtagaaccaaattgttctggttgatggcactggcagattctaaaacaatgaaggcaatggtggaattccgagaacacacaggcaaacccaccacgagtagctcagaagcatgtcgcttctgtggttccaggagtggaacagagttatctgctgttggcagtgtttgttctgatgcagattgccaggaatacgctaagatagcctgtagtaagacgcatccttgtggccatccatgcgggggtgttaaaaacgaagagcactgtctgccctgtctacacggctgtgacaaaagtgccacaagcctgaagcaagacgccgatgacatgtgcatgatatgtttcaccgaagcgctctcggcagcaccagccattcagaacaaaattaatcacatagtactaaaagacctacttgatccaataaaagaactctatgaggatgtcagaagaaaagccttaatgagattggaatatgaaggtctgcataagagtgaagctatcacaactcctggtgtgaggttttataatgacccagctggctatgcaatgaatagatatgcatattatgtgtgctacaaatgcagaaaggcatattttggtggtgaagctcgctgcgatgctgaggctggacggggagatgattatgatcccagagagctcatttgtggtgcctgttctgatgtttccagggctcaggtttgggaatatttgcattaccagttgagcatcccaaatctgaaatccaaaatgctccaagcagctttgactgagcagtggaggcttgaggctttcaaatttgcaaagcctgagaagaacctgaagcgacatcagactaaaggacctgaaagaagagagcttcaggaaaaagagccagagccgcaaaggtggagccgcgttggcgccctccgcgggaccagcgcctcggatgcgggcggagcgcggggggccgcggctgcgggagcgcgaagcggggggccaggggcgcctcatgtgagagccgcgggacctgcagccgccgccgtccccggagcacggggtggtgtgtgggggaagccgcccccggcagcagcaaaaatagagtcgggtgtggtggtgcatgcagatactctggaggctgaggtggaaggattgcttgatctcaggaggtcgaggctgcagatgaaacgaggaggaagagatagtgaccgtaattcatcagaagaaggaactgcagagaaatccaagaaactgaggactacaaatgagcattctcagacttgtgattggggtaatctccttcaggacattattctccaagtatttaaatatttgcctcttcttgaccgggctcatgcttcacaagtttgccgcaactggaaccaggtatttcacatgcctgacttgtggagatgttttgaatttgaactgaatcagccagctacatcttatttgaaagctacccatccagagctgatcaaacagattattaaaagacattcaaaccatctacaatatgtcagcttcaaggtggacagcagcaaggaatcagctgaagcagcttgtgatatactatcgcaacttgtgaattgctctttaaaaacacttggacttatttcaactgctcgaccaagctttatggatttaccaaagtctcactttatctctgcactgacagttgtgttcgtaaactccaaatccctgtcttcgcttaagatagatgatactccagtagatgatccatctctcaaagtactagtggccaacaatagtgatacactcaagctgttgaaaatgagcagctgtcctcatgtctctccagcaggtatcctttgtgtggctgatcagtgtcacggcttaagagaactagccctgaactaccacttattgagtgatgagttgttacttgcattgtcttctgaaaaacatgttcgattagaacatttgcgcattgatgtagtcagtgagaatcctggacagacacacttccatactattcagaagagtagctgggatgctttcatcagacattcacccaaagtgaacttagtgatgtatttttttttatatgaagaagaatttgaccccttctttcgctatgaaatacctgccacccatctgtactttgggagatcagtaagcaaagatgtgcttggccgtgtgggaatgacatgccctagactggttgaactagtagtgtgtgcaaatggattacggccacttgatgaagagttaattcgcattgcagaacgttgcaaaaatttgtcagctattggactaggggaatgtgaagtctcatgtagtgcctttgttgagtttgtgaagatgtgtggtggccgcctatctcaattatccattatggaagaagtactaattcctgaccaaaagtatagtttggagcagattcactgggaagtgtccaagcatcttgcctctacatcagaaaaatcagagctgtcctctaaacacagcagatcgcttaaacctgatggacgtatgagccggactactgctgatcagaagaagccaaggggcacagaaagtttatctgctagtgaatccctcatcttaaaatctgatgctgcaaagttgaggtcagattcccacagtaggtcattatcccccaaccataacaccttgcagacattgaaatctgatgggaggatgccttctagctccagagctgaatccccaggaccaggttctcggttgtcatctcctaagccaaagactctcccagccaataggtctagcccatcgggtgctagttctccacgctcctcctcaccacatgataaaaatctacctcaaaaaagtactgctcctgttaagacaaagcttgatcctcctcgggaacgttctaaatcagactcttacacacttgatccagataccctccgcaagaagaaaatgcccctcacagaacctttgagaggacggtcaacgtcaccaaaaccaaaatcagtaccaaaggattctacagattcccctggatctgaaaatagagctccctctccccatgtggtacaggaaaacctccacagtgaggtggtcgaagtctgcacctcaagtactttaaaaacaaatagtctaacagacagcacctgcgatgacagcagtggatttaagggtgtgggatggaaggtttcaaataaagttcattttatcattggaaaagcaccactgaaagatgaacaggaaatgagagcatctcccaaaataagtcgaaaatgtgctaatagactcaccaggcccacactagaacaatcgagttttcttttcaaaggagatggatccaagcctttagagccagccaagcaagccatgtctccttctgtggccgaatgtgccagagctgtgtttgcttccttcctctggcatgaaggcatagtacatgatgcaatggcttgttcttctttcctaaagtttcatcctgaactttccaaagaacatgctcctataaggagtagtttaaatagccaacaacctacagaggaaaaagacaccaagttaaaaaatagacattcattagagatatcatctgcactgaatatgtttaatattgcaccccatggaccagatatatctaagatgggtagcatcaacaaaaacaaggtattgtctatgcttaaagaaccacctctgcatgaaaaatttcttaaaaagaaagagtgtgagaaagagaataagaagtccaaaaaggaaaaaaagaaaaaagaaaaggcagaagttaggcccaggggtaatttgtttggagagatggcccagctggcagtaggaggaccagagaaagataccatctgtgaactgtgtggggagtcacatccatacccggtgacctatcacatgagacaagctcacccaggttgtggccgatatgctggtggacaaggttacaatagcattgggcatttttgtggaggatgggctggtaactgtggtgatggtggcataggaggaagcacttggtatctggtatgtgatcgctgtagagaaaaatacctccgcgaaaaacaggctgctgcaagggagaaggctgcagagggaagagaaagcgcccccgtggcgcccccagggccgtgcagcccagacctagccccgcagccccacataccccagcacctccgaagctgcgtgcagagccgctcgctcccacctccggctgcacccgcgcgcccccttgcggcggattccgctctggcgcatagccccactggagcgctggcgcgttggcgatggggtcccaggaaaagagtggtgatggtgatggcagtcatcagcaaagagcatgtcaagcaaagcactgataccacaagaagaatgtccagttgcagcaatcacatagaaatgagacagggaggatgggcaggaaatcactcaggagtttctggagattttttggatgttcttgcagaaagagctggggttaagagaggacagtgctcatctgggggtcagccttcagttatcataatattccatcccccttccgtggtaggaacgttgggtagtgctgctgctgcatccaagtttttaggacttagctcgacaaagtgccgagaagctctggccattgctgtttcccatgctggggcacccatggccaatgctgccacccagaccaagcccctccacattggcaatgctgccaagcatgggatagaagctgcatttttggcaatgttgggtctccaaggaaacaagcaggtcttggacttggaggcaggatttggggccttttatgccaactattccccaaaagtccttccaagcatagcttcctacagttggctgctggaccagcaggacgtggcctttaagcgttttcctgcacatttatctacccactgggtggcagacgcagctgcatctgtgagaaagcaccttgtagcagagagagccctgcttccaactgactacattaagagaattgtgctcaggataccaaatgtccagtatgtaaacaggccctttccagtttcggagcatgaagcccgtcattcattccagtatgtggcctgtgccatgctgcttgatggtggcatcactgtcccctcattccatgaatgccagatcaacaggccacaggatggagccaccttcacagatcgctctgataccttctatgggcactggagaaaaccactgagccaggaggacctagaggaaaagttcagagccaatgcctccaagatgctgtcctgggacacagtggaaagccttataaagatagtcaaaaatctagaagacctagaagactgttctgtgttaactacacttctcaaaggaccctctccaccagagggcctggctgtggcacaagggcagagagacatcttggaggaccatcagctgcaaatggatgaatccttgttctggggaatgccaaattcgcatggaaaaagcctaaccaccctgaggcctacgagttatgcggaagcccaggattgccacagggaatggtcacatggctgcatggccagccttcagctcttcagccatcctagcccaggcaccagacatgagagtgaagacactgttgtggatatccagccaagccaagcctttagatag

SEQ ID NO: 2802 - DNA, 14917 bp, Homo sapiens
  SIMILAR (9984)..(13145): 861254mologous to Homo sapiens protein associated with Myc,accession number AF075587,Smith-Waterman Score=4487.
  misc_feature (1)...(14917): n = a,t,c or g
tcttggagcgttctcagtttctcaacagatcttcacttgctaggcagccagaagccggcggcagtggcggcaccgcctcctcctcacattcccggggtggcggggttagatgagcggccccagtcgcggcgccgggggcgctgttcatgccggttcccgacggctccgtggctgctgcggggctggggctggggctacccgccgcggactccccgggtcactaccagctgctgctgtcaggccgggccctggccgaccgctaccggaggatttataccgctgcgctcaatgacagggaccaggggggcggcagcgctggacacccagcctccaggaataagaaaattttaaataagaagaaattgaaaagaaaacagaagagcaaatcaaaagtgaagacaagaagcaagtctgaaaacttagagaatacagtaatcataccagatatcaaactacatagcaatccttctgctttcaatatttactgtaatgtacgccattgcgttctggaatggcagaaaaaggaaatatcattggcagccgcatctaagaactctgtgcagagtggagaatcagatagtgatgaagaagaggaatccaaagagccccctatcaagcttccaaagattattgaggttggcctttgtgaagtttttgaattgatcaaagagacacgattttctcatccatccctgtgtctcaggagtctccaagccctgctcaacgtgctgcagggccagcagccagaagtgctccagtctgagccacctgaggtcctagagtctctcttccagcttcttttggaaatcaccgttcgaagtactgggatgaatgacagcacaggacagtccttaacagcactttcctgtgcttgcctctttagtctggtggcttcttggggagaaacaggaaggacacttcaggccatctctgctatcctcaccaacaatggaagccatgcttgccaaactattcaggtgccaacaattctaaattcgctacagagaagtgtacaagcagttttggtgggaaaaattcaaattcaggactggtttagtaatggcattaagaaagcagctttaatgcacaagtggccattaaaagaaatatctgttgatgaagatgaccaatgtctacttcagaatgatggattttttctttatctattatgcaaggatggattatataaaataggctctggatacagtggaacagttaggggccatatatacaattctacatcccgtattagaaacagaaaagaaaaaaagtcttggttagggtatgctcagggttatttattatatagagatgtgaataaccacagcatgacagccataaggataagccctgaaacactggagcaagatggtactgtgatgttaccagattgccacactgaaggtcaaaatattttattcactgatggagaatatattaatcagatagctgcttcaagagatgatggctttgttgtcagaatatttgccacaagcactgaacctgttctacagcaagaattgcaacttaaactggctagaaaatgcttacatgcctgtcgtatctcattattcgatctggaaaaggacttgcatattataagtacaggatttgatgaggagtcagcaattcttggtgcaggacgagagtttgcgctaatgaaaacagcaaatggaaagatatattacactggcaaataccagagtcttggaatcaaacaaggtggtccttcagcaggaaaatgggttgagctaccaattacaaaatctccaaagatagtacacttctcagttggacacgatggctctcacgcccttttagttgcagaagatgggagcatattctttacaggatctgctagtaaaggagaagatggagaatcaattaagagcagacggcaatccaaaccttataaacctaaaaagataattaagatggaaggaaagatttgtggtatatacagcctgcaataatggaagtagttctgttatttctaaagatggagaactctacatgtttggaaaagatgccatttactctgatagttcaagtgtggtaactgatttgaagggccattttgtaactcaggtagctatgggcaaagctcacgcttgtgttttaatgaagaatggagaggtgtggacatttggtgtaaataataaaggacagtgtgaacgagatactggtgccatgaaccaaggtgggaaagggtttggagttgaaagtatggcatcagcaatggatgaagccctggaagaagagctagatgaaaaagatgagaagtatatgatgtgccctccaggcatgcacaaatggaagctggagcagtgcatggtttgcactgtctgtggagactgtacaggttatggagccagctgtgtcagtagtggacggccagacagagtccccggagggatctgtggttgtggttccggagaatctggttgtgctgtgtgtggatgttgcaaggcctgtgcaagagagttagatggtcaagaggcaagacaaagaggaattcttgatgcagtgaaagaaatgatacctttagatcttcttttagctgtcccagtgcccggggttaacattgaagaacaccttcagttacgacaagaagaaaaacggcaacgtgtaatcagaaggcacagattagaggaaggaagaggcccccttgtatttgctggtcctatttttatgaaccatcgagaacaggctctagccagactcagatcccatccagcacacgtaaagcataaacgggacaagcacaaagatggaagtggagaaagaggcgaaaaggatgcaagcaaaatcacaacataccctccaggctctgtgcgatttgactgtgagctccgggcagtccaagtcagctgtggatttcaccattcagtggttttaatggaaaatggagatgtctatacatttggttatgggcagcatgggcagctaggacatggagatgtcaactccaggggatgtcccactcttgttcaagcattgccaggccctagcacacaagtcactgcaggcagcaaccatacggcagtacttttaatggatggacaggtcttcacatttggaagtttttctaaaggacaactgggcagaccaattttggatgtgccatattggaatgcaaagccagctcccatgcctaacattggatcaaaatatggaagaaaagctacttggataggtgcaagtggggaccaaacttttttacgaattgatgaagcacttattaattctcatgtacttgctacatcagaaatttttgccagtaaacacataataggcttggtacctgcttctatatcagaacctcctccatttaaatgccttctgataaataaagtggatgggagttgtaaaacttttaatgactcagaacaagaggatctgcaaggatttggtgtgtgtcttgatcctgtatatgatgtaatttggaggtttcgaccaaatactagagagctgtggtgttacaatgcggtggttgctgatgccaggcttccctctgcagcagacatgcagtccagatgtagtatcctaagtcctgaacttgccttaccaacaggatcaagggccctcactacccgatctcatgcagctttgcacattttaggttgtcttgataccttggcagctatgcaggacttaaaaatgggtgttgcaagtacagaggaagagactcaagcagtaatgaaggtttattctaaagaagattatagtgtggtaaacaggtttgaaagtcatggaggaggctggggttattctgcccattcagtagaagctatacgtttcagtgccgacactgatattttacttggtggtcttggtctgtttggaggtagaggagaatatactgctaaaattaagctgtttgaattgggtcctgatggaggagatcatgaaactgatggtgaccttcttgcagagactgatgtattggcttatgactgtgctgctagagaaaaatatgcaatgatgtttgatgagcctgttctcctgcaagctgggtggtggtatgtggcatgggcccgagtgtcaggacccagcagtgactgtggatctcatggacaggcatctattaccacagatgatggggttgttttccagttcaagagttcaaagaaatcaaataatggtacagatgttaatgcgggtcagatacctcagttattatacagacttccaaccagtgatggcagtgcttcaaaaggcaaacagcaaaccagtgaacctgtacacattttaaagaggtcttttgcaagaactgtctcagtggaatgttttgagtcattgttgagtattcttcactggagctggaccaccttagtcttaggagttgaagaacttagaggattaaaaggattccagttcacagctacactcctagatttagagagactgcgctttgtgggtacctgttgtctgaggttattgcgtgtctatacctgtgaaatttacccagtgtcagctacaggaaaagcagttgtagaagaaactagcaaattagcagagtgtattggaaaaaccagaactttgttaagaaaaattttatcagaaccacttgatcactgcatggtgaaattggataatgatcctcaaggatatctcagtcaacccttgagtcttctagaagctgtccttcaggaatgtcataatactttcactgcctgctttcattctttctacccaactcctgccttacagtgggcttgcctttgtgatctgctgaattgtttggatcaggatatccaagaagcaaacttcaagacatcaagtagccgactccttgcagctgttatgtcagctctgtgtcacacgtctgttaagctgacttccatcttcccgattgcgtatgatggagaagtattactacgatcaattgttaaacaagttagtacagagaacgactcaacactagttcatcgttttccccttttggtggcacatatggaaaaactcagccagagtgaagagaatatctcagggatgacaagcttccgtgaagttctggagaaaatgctggtcattgttgtgctaccagtcaggaacagcctgaggagagaaaatgaactcttctcctcccacctcgtctctaacacctgtggattactggccagcattgtcagtgaactgacagcgtcagccctgggatctgaggttgatggacttaattctcttcactctgtaaaagctagtgctaaccgatttacaaaaacaagtcagggcagaagttggaacactgggaacgggtcccctgatgcaatctgtttttcagtagacaaacctggaatagttgtggttggtttctctgtctatggaggaggtggaattcatgaatatgaattagaggtgttggttgatgatagtgaacatgcaggagattcaactcattcccacagatggacatctctggaattagtgaaaggaacgtacacaacggatgactcacccagtgatatagctgagatcagacttgacaaagtggttcctttaaaggaaaatgttaaatatgctgtgcgcttgaggaactatggaagccgtacagccaatggagatggaggaatgaccacagttcagtgccctgatggtgtgacattcacattcagcacgtgcagcttgagcagtaacggcacaaaccaaaccagaggacagatcccacagatactctactataggagtgaatttgatggagatttacaatcccaacttctgagtaaagccaatgaagaagataaaaactgtagcagagcattgtctgttgtaagcactgtcgttcgagcctctaaggacctcctgcacagagctcttgctgtggatgctgatgacattccagaactgctgagttcttccagtctgttttccatgctgctcccccttattatagcctacataggaccagtagctgctgctattcccaaggtggctgtagaagtctttggccttgtccaacaattgcttccgtcagttgccattttgaatcagaagtatgcaccgcctgccttcaaccctaatcagtcgacagatagcaccacaggaaaccagcctgaacagggcctctctgcttgtacaacctccagtcactatgctgtcatagagagtgagcacccgtataaacctgcctgtgtgatgcattacaaggtgacattcccagaatgtgtgaggtggatgacaatcgaatttgaccctcagtgtggtactgcacagtcagaagatgtccttcgtttgttgattcctgtcagaactgttcagaattcaggatatggaccaaaattgacatctgttcatgaaaatcttaattcatggatagaattaaagaaattttcaggatcctctgggtggcctactatggttttggtgttgccaggaaatgaggcccttttttcattggagactgcatcagattatgtgaaagatgacaaagcttctttctatggttttatgtgttttgcaattggatatgaatttagccctggacctgatgagggagtcatccaattggaaaaagaattagccaatcttggtggggtttgtgcagcagctctgatgaagaaggacctagcacttcctattggtaatgaattagaagaagaccttgaaattcttgaggaggctgcattgcaggtgtgcaaaacccattctggaattcttggaaagggtctagctctttctcattcaccaactatattagaagcacttgagggaaatttaccactccaaatccaaagcaatgaacagtcttttctggatgattttattgcctgtgtcccaggatcaagtggtggaaggcttgcaaggtggcttcagccagattcatatgcggatcctcagaaaacatctttgatcctgaataaggatgatattcgttgtggttggcctaccaccataactgttcaaacaaaagaccagtatggggatgtggtacatgttcccaatatgaaggtggaagtgaaagctgtccctgtttctcagaaaaaaatgtctttacaacaagatcaagcaaagaaacctcaaaggattcctggcagtcctgcagtaacagctgcatcttctaatactgacatgacttatggagggctggcatcaccaaagctagatgtttcatatgaaccaatgatagtgaaggaagctcgatatattgccataacaatgatgaaggtttatgaaaattattcatttgaagaactacgttgttgcatcaccaactcctaagagacccagtgagaatatgctgatccgtgtcaataatgatgggacttattgtgcaaattggactccaggggctattggactctacactcttcatgttaccattgatggcattgaaatcgatgctggtctggaagtaaaagtaaaagacccaccaaaagggatgataccaccaggaactcagttggtcaaaccaaagtctgaacctcagcctaataaggttcgaaaatttgtggccaaggacagtgcggggcttcgcatcccgtagccacccttcccttcagaagtgagcagataggcactagtgaaaagtcaatggaaactatcacttttattgatgagatccataatgatgatgggtgtgtgggctgaggctgaatgatgagacaataaagaagtatgtccctaacatgaatggttacactgaagcctggtgcctctcttttaatcaacatcttggcaagagtcttctggtccctgttgacgaatctaaaactaatactgatgactttttcaaagacataaactcctgctgcccacaggaagcaacaatgcaagaacaagatatgccattcttgcgaggagggccaggcatgtacaaggtagtgaagacgggaccttcaggtcacaacatcagaagctgccctaaccttagaggtatcccaattggaatgttagttctgggaaacaaagtcaaagcagtgggagaggtaaccaattctgaagggacatgggtgcaactggatcagaacagcatggtagagttctgtgagagtgatgaaggagaggcatggtccttagctagagacagaggcggaaaccagtacctccgacatgaagatgaacaagctcttctggatcagaattctcaaactcctcctccaagccctttctcagtgcaagcttttaataaaggggcaagttgcagtgcccaaggatttgattatggactcggaaatagcaaaggtgatcgaggaaacatctcaacatcttctaaaccagcctctacatcaggaaaatcagagctgtcctctaaacacagcagatcgcttaaacctgatggacgtatgagccggactactgctgatcagaagaagccaaggggcacagaaagtttatctgctagtgaatccctcatcttaaaatctgatgctgcaaagttgaggtcagattcccacagtaggtcattatcccccaaccataacaccttgcagacattgaaatctgatgggaggatgccttctagctccagagctgaatccccaggaccaggttctcggttgtcatctcctaagccaaagactctcccagccaataggtctagcccatcgggtgctagttctccacgctcctcctcaccacatgataaaaatctacctcaaaaaagtactgctcctgttaagacaaagcttgatcctcctcgggaacgttctaaatcagactcttacacacttgatccagataccctccgcaagaagaaaatgcccctcacagaacctttgagaggacggtcaacgtcaccaaaaccaaaatcagtaccaaaggattctacagattcccctggatctgaaaatagagctccctctccccatgtggtacaggaaaacctccacagtgaggtggtcgaagtctgcacctcaagtactttaaaaacaaatagtctaacagacagcacctgcgatgacagcagtgaatttaagagtgtggatgaaggttcaaataaagttcattttagcattggaaaagcaccactgaaagatgaacaggaaatgagagcatctcccaaaataagtcgaaaatgtgctaatagacacaccaggcccaaaaaagaaaaatcgagttttcttttcaaaggagatggatccaagcctttagagccagccaagcaagccatgtctccttctgtggccgaatgtgccagagctgtgtttgcttccttcctctggcatgaaggcatagtacatgatgcaatggcttgttcttctttcctaaagtttcatcctgaactttccaaagaacatgctcctataaggagtagtttaaatagccaacaacctacagaagaaaaagaaaccaagttaaaaaatagacattcattagaaatatcatattcagtgcagatgatatttctaatgaatgtgtttaatattggcacccccatggacccagatatatcctaagatggggtagcatcaacaaaaacaaggtattgtcctatgccttaaggaacccacctctgcatgaaaaatgtgaggatgggaaaactgagacccacttttgaaatgtcccatgcataacacaatgaagtcctaagtctcctcttcccttaactttacaacatttagtggctttttgggaagacatctctttggctactatcaaagctgcttcccagaatatgatttttccaagtcctggttcctgtgcagttcttaaaaagaaagagtgtgagaaaggaaggaataagaagtccaaaaaggaaaaaaagaaaaaagaaaaggcagaagttaggcccaggggtaatttgtttggagagatggcccagctggcagtaggaggaccagagaaagataccatctgtgaactgtgtggggagtcacatccatacccggtgacctatcacatgagacaagctcacccaggttgtggccgatatgctggtggacaaggttacaatagcattgggcatttttgtggaggatgggctggtaactgtggtgatggtggcataggaggaagcacttggtatctggtatgtgatcgctgtagagaaaaatacctccgcgaaaaacaggctgctgcaagggagaaggtcaaacaatctaggagaaaaccaatgcaagtcaagacccctcgtgccttgcccaccatggaagctcaccaggtgattaaaagcccaatgccagtctttcctgctgtccctgagcagtgcagcagaaccgagcattctgtgttaccatcctgcaaagccattccaatctcagttgcccagtgtaaaagaaggcatttctgaggatcttcctgtgaaaatgccttgtctctacctgcagacattagctaggcatcatcatgaaaattttgtgggctatcaagatgacaatctattccaggatgaaatgagatatctacgttcaacatctgtacctgccccgtatatatcagtaactcctgatgcaagtcctaatgtatttgaagagccagagagcaatatgaagtctatgccaccaagtttagaaaccagtcccataactgatactgatcttgcaaagagaactgtcttccaaagatcatactcagttgttgcttccgaatatgataaacaacactccattttacctgcacgagttaaagctattcctagaagaagagttaacagtggagacactgaagttggttcttcccttttgagacatccgtctcctgagctttctcggctaatctcagcccacagctctctttctaaaggagaacgaaatttccagtggccagttttagcttttgttatacaacatcatgatctagaaggtcttgaaatagcaatgaaacaggccctaaggaaatctgcttgtcgagtttttgctatggaggctttcaactggcttctgtgtaatgtcatccaaaccacttctctccatgatattctgtggcattttgtggcatcactgactcctgcaccagtggaaccagaggaagaagaggatgaagaaaataaaacaagcaaagaaaattcagaacaagagaaagatacaagagtatgtgaacatccactctcagacatagtgattgccggggaacgtgctcatcctttaccacacacctttcaccgcttgctgcagaccatctcagaccttatgatgtctctccccagcggcagttcattacagcaaatggccctgaggtgctggagtctcaaattcaagcaatctgatcaccagttccttcatcagagcaacgtctttcatcacattaacaatattttgtcaaagtcagatgatggcgatagtgaagagagttttagcatcagtatacagtctggctttgaagctatgagtcaggaattatgcatagtaatgtgcttaaaggacttaaccagcattgttgacataaaaacttcaagccgacctgccatgattggcagtttgacagacggctccacagaaaccttttgggaatcaggagatgaagataaaaacaaaactaagaacatcaccatcaactgtgtaaaggggaatcattgccccgctatgtgtcctgtttcaccgtggacatttccccgagatcttggggaataaagttacctcaatgaccttcttaactggcaaagcagtacaagattttgtnccagaataaagcagggttgatctggattccaggcacattggctgggtaacaagtgaacttccaggaggggataatcacatcataaaaattgaattaaaaggcccagaaaatacactgagagttcgacaagtcaaagtcctgggctgggaaagatggtgaaagcacaaaaatagctggccagatttccagccagtgtggccccagccagagggaactgtgaagctggagactcctgccgagtattcagactgattacgtctcaagtatttggaaagctcatctctggagatgctgaacctacaccagaacaagaggaaaaagcactattgtcatcacctgaaggagaagaaaaagtatacaatgcaacatcagatgctgacctgaaagaacatatggttggaatcatattcagcaggagtaagctgactaacttacaaaaacaggtgtgtgctcatattgtccaagctattcgcatggaagctaccagagtccgtgaagaatgggaacatgctatatcaagcaaagaaaatgccaattctcagccaaatgatgaagatgcctcctctgatgcctactgctttgagctgctctctatggttttagcactgagtggctctaacgttggccggcaatatctggctcaacagctaaccctgcttcaggatctcttctcgctgcttcacacagcctctcctagagtccagagacaggtaacctctttactaagaagagttttgcctgaagtaacccctagtcgtctggccagcatcataggagtgaaatccctccccccagcagatatcagtgatatcattcactcaacagagaaaggagactggaataagctgggtatcttggacatgtttctaggatgcattgccaaagcactcactgtacagctaaaagccaaaggaaccaccatcactggaacagctggtaccactgtgggcaaaggagttacaacagttactcttccgatgattttcaattccagttatctccgacgaggtgaaagtcattggtggatgaagggctcaacccctacccagatctcagagatcatcattaaacttatcaaggatatggcagcaggtcatctgtcagaagcttggtcccgagtgacaaaaaatgctattgcagaaaccatcattgccttgaccaagatggaagaagaatttaggtctccagtgagatgtattgcaacaactagactctggcttgctctcgcatccctatgtgttcttgatcaggaccacgtagatcgtctctcctcggggagatggatgggaaaggatggacaacaaaaacaaatgcctatgtgtgataaccatgatgatggtgaaactgcagcaatcattttatgcaatgtctgtggaaatttatgtacagactgtgacagattccttcaccttcatcgaagaaccaaaactcatcaaagacaggtcttcaaagaagaagaagaagctataaaggttgaccttcatgaaggttgtggtaggaaccaaattgttctggttgatgggcactgggcagattcttaaaacaatggaagggcaatgggtgggatttcccaggaacacacagggcaaacccaccacgagtagctcaaaagcatgtcgcttctgtggttccaggagtggaacagagttatctgctgttggcagtgtttgttctgatgcacattgccaggaatacgctaagatagcctgtagtaagacgcatccttgtggccatccatgcgggggtgttaaaaacgaaaagcactgtctgccctgtctacacggctgtgacaaaagtgccacaagcctgaagcaagacgcccatgacatgtgcatgatatgtttcaccgaagcgctctcggcagcaccagccattcagctggattgtagtcacatattccacttacagtgctgtcggcgagtattagaaaatcgatggcttggcccaaggataacatttggatttatatcttgtcccatttgcaagaacaaaattaatcacatagtactaaaagacctacttgatccaataaaagaactctatgaggatgtcagaagaaaaggctttaatgagattggaatatgaaggtctgcataagagtgaagctatcacaactcctgggtggtgaggttttataatgacccagctggctatgcaatgaatagatatgcatattatgtgtgctacaaatgcagaaaggcatattttggtggtgaagctcgctgcgatgctgaggctggacggggagatgattatgatcccagagagctcatttgtggtgcctgttctgatgtttccagggctcagatgtgtcccaaacatgggcacagactttttgggaatataaatgtcgctactgctgttcagtggctgtttttttctgttttggaacaacacattttttgtaatgcttgtcatgatgattttcaaagaatgactagcattcctaaggaagaactaccacactgtcctggcaggtccaaaggcaaagcagttaagaaggaactgaatgtccactccatgttgttcatccacccacctgggaaagaggtttgctctgggatgtggagtgtgcagaaatgcccacacttttaagaccacgcagatcctttgtctacagagagaaaaattgccttcatcccccacggaggatggcggtgaagtttaaaacccctgctcaggataaggacgggaccatttttacatccatgaaaatgaacccattccacagtgcaagaaggatacccaaatacccatgtacataattccttgcctatgaaaagtttcccccattattttggtttatccttccttttgaacaaaatgacatcaaacttgtgaggtgtttgcatgtggccattaccgtcattggccctgtgaagcattggacatttatagataattgatataaaagaatcgccatgcccatggactaagaacgatgctggctttcaagcaaaaaaagaaaaataatcattgtttattgtatactgcctttttgtaatcctgtacaattgcatcacgggtggggataaaaagaggaatattctggtttatttcctagactgttatttaaaaaaaaaaaaaacattgtgttagggacagcatataaatgtaataagtatcacactgtatataaacatatcaatgtttgtcctgtataagaattactaaattacaaatgcaatttcatttaaacttctaggttaagtttgagcctgaaattttaatgaagtgcaataatgaggcacactcagtattgcacttcattatcttgcagctgtaaacatattggaatgtacatgtcaataaaaccactgtacatttttatacagtgataaagtctaaaaaaaaaaaaaaa

SEQ ID NO: 2803 - DNA, 840 bp, Homo sapiens
taagaaaaatgttgggaggttcaagatacgaaggctttcaattctgtataacagactttagcttaagtttctccgctctgaaataaattttcaataaaatattaacagtatgatatctaaaacaggtttactactgctcacatcaaagttacatcctctgaccaatccttaccttcctttaatgtcaaagaccaaatcatagacattaagctagagcttacctttcactgtcttctaaggcactgttctttatattctcaatgacataagatgctttacaagtatgaacaataatctgttatacacactaatggtatcctttcatttctttaaatctggaatgtagttccttgtgtggcatcttatttctaatgtagaaaaaacagctgttatcaagcacaaaattttaatctaaggataccatttagtactactaaattaataaatttattccacttttgaaatgacagccaaaaatccacctaattgattctcatttggcacgttcttctcaattctgttcactaaattaaaattactaaatttaaactgccaagagccatgatgttgtctgcacaagacaacattttccatcactttcagaaagttatatttggcatgttaaggaaaaaaaatataatcccacagcagcagctatttaaaataagacagccacaggattcatgcagaatattttaaatattcctgttgaacacaatgatttaattgattttttcttcacggatgatgctcccaaacatcctatatgcatccatggaaatttaaagatcctggaatagcgtcttccatgtgggacatcttaaaagatagtattttggc

SEQ ID NO: 2804 - DNA, 2483 bp, Homo sapiens
  SIMILAR (322)..(450): 551254mologous to Homo sapiens sialomucin CD164,accession number AF106518,Smith-Waterman Score=103.
gcggcgccgcaggggattgaggggttgactgagcgttgcgagccttagctttctcccgaacgccagcgctgaggacacgatgtcgcggctctcccgctcactgctttgggccgccacctgcctgggcgtgctctgcgtgctgtccgcggacaagaacacgacccagcacccgaacgtgacgactttagcgcccatctccaacgtaacctcggcgccggtgacgtccctcccgctggtcaccactccggcaccagaaacctgtgaaggtcgaaacagctgcgtttcctgttttaatgttagcgttgttaatactacctggcttttgggatagattgtaaagatgagagctattgttcacataactcaacaagttagtgatttgtcaagtggggaacacgacagacttctgttccgtttccacgggccactccagtgccaacagccaattcttacagctaaaacccacagttcaagccctccccttctacaacttccaagacagttactacatcagggtacaacaaataacactgtgaattcaaacctcacaacctgtgcgaaagtctacctttgatgcagccagtttcattggaggaattgtcctggtcttggaaataagatgccacacaaggaactacattccagatttaaagaaatgaaaggataccattagtgtgtataacagattattgttcatacttgtaaagcaccttatgtcattgagaatataaagaacagtgccttagaagacagtgaaaggtaagctctagcttaatgtctatgatttgttctttgacattaaggaaggtaaggattggtcagaggatgtaacttgatgtgagcagtagtaaacctgttttagatatcatactgttaatattttattgaaaatttatttcagagcggagaaacttaagctaaagtctgttatacagaattgaaagccttcgtatcttgaacctcccaacatttttcttatggctgttgaaaagtatagagctaaattgatttaattacactttcctttgtactttaaaaaaaagtatgctagcactattgtaccttgaaaggatttccaccaaactgtcttgagtagtgacttctttggtgaggcaagaaggatatacattattttagaatcatttactatttaaatgagacaatcatattattttagaatcatttattttaaatgagacaatcatttttaggttttaagataacagaagtgaccaatgtaatttcacaacacctaaaggattttttggttgatcaggattactgtagattttttaccggattggtcctggatgaatagactgtgctttttctttttctctcccttccttcttggtttcccatagtataataagcatgcatactttaacttctatagttttctcctttagagggtcgtcttcagttttagaggtttacttctccccttgcctttgactcattggactagtgcagaggctttaagtagtttaaaatgggcttttgcttttctaggtcattaacgttttttatttagtttctttagccaatagtggctgagtttcgcacttgattttcaatattttatagtaagaaatgacaaactgctttgtttcatttcaataaacaaactctgcatttaagataactatttaagggttgttaagatgaagcatttactgtttctttgttactcgttggtacagctgtttgttttacttgcacatttgtacatatacttaatgttttcaagtgccttaattgtttaaaatctctggcttcaaagtttcttggggaaaggtcggtttacctcacattttttgtgttccctatagtaatattctagggtacctcacaaaaatgtatttatggtgcccatggcctgttagtttttagtgagtgctgtaggattaattcgaaaataggcaaatttcccattccctcccaaaggtggcaaaaaattagcttaaactgatgttaattgccatttacctggggtatgaattcccctgacacacattccatgtccaccatatgtggcaaatttggtgaaaaccataaccaatttgaagctcctgcaatactttgagacactgctctaacaacaagcattaatataaaattagttagattttgcaagtctacaaatgagctcttgcaaacagaactcacagcctttttacttttttcccctaacctttagcaaatgtagtatcttgagcccattaatttttgggttttttttaaaatccagaaggtatatagaaaccttttcagattgtgtcatctgatttgttcttgcagatgttcttctatcaaataccttatttttaccttacagatatttggttgccacaggcagatactgctggtatttagacatttctatttcagttcattaaaaactgcaaaaccaatctgtatcatgtaccaaactgacttaaaataaatctacatgtttattgaattaaaaaaaaaaaaaaaaa

SEQ ID NO: 2805 - DNA, 766 bp, Homo sapiens
  SIMILAR (599)..(763): 781254mologous to Homo sapiens Human secreted protein, SEQ ID NO: 7871,accession number AAG03790,Smith-Waterman Score=209.
ttttttttttttttttttttgtgggttggtggggactgtttgtattttttttaataaaaataaagatgagagaaattatttggacaagatgttggcaaatcacttttacaggtgcttgtaaccttccaggagacttcagcttgactgtagaagatgcctgctgtagggcagttcacgttctggagtcgttcagcaccacctgcgaactctttgaccggaggaaggctgcctatacttcctgcttgctgggtctggaacagtcctggtttatgctgtttgtgctggcataaatagaatagcacggccttttattctcacaagtgactcagtttgacaataacttagtcacccttgctttggggcaggttagggtgagctttactgaatcaaagatttcaacaatatcatctaccttgaaagtctgtgaagcttggaggtcatataatcaaggtggctggccatgctgcctgctcagagctggtagagacagcagaggaaagcagctgagtactcctgagcttatttttccaacaccacagaacaacgttctctgaacaataaggtaaaagcatttctaggtaccctctgtacccttttgttattttttatttttattttttggagaccgagtcttgctctagtgcccaggctggagtgcaatggcgcaatcttggctcactgcaatctccgccttctgggttcaagcaattctcctgcctcagcctcctgagtagctgagactacaggtgagcgccaccacgcccag

SEQ ID NO: 2806 - DNA, 218 bp, Homo sapiens
  SIMILAR (1)..(96): 961254mologous to Homo sapiens CGI-16 protein,accession number AF132950,Smith-Waterman Score=162.
aaaaagggcttgagcccagaacaggacattaagttcagtggccatgttagctgggtcgggaagacatccatggaagtgaagatgcaaatgttccaggccggcatttgtaaatccactcatccctgaaagcccagaggaagaggagctctttagacaaggggaatgtacattaatttgtttataataaaataaatttgaaaagcacattaaaaaaaaaa

SEQ ID NO: 2807 - DNA, 2116 bp, Homo sapiens
  SIMILAR (297)..(1466): 651254mologous to Homo sapiens Human Hydrolase protein-16 (HYDRL-16),accession number AAY71118,Smith-Waterman Score=1105.
cacgcgtccgactaagcaaagacgcggagcggtacttctacatcatttatcgactcaccttcccttccccgactatcgcgcggggcccgtctctccagagagcgcaccgcatcctaacgcaacgaggcagccatcactgcgacccttacccttgggcaaagggcaacttactcctgcaacatgactgaatcaaggaccccaaaaccccaagaaacagggaaacttccacattcatgaaacaagctcatctatacatgcgaatcatgttcgagataagttgcgggagatagtaagaagcatccacaaactggagagaccatgtgaaggcaatggaagaaaggaaattacttcatagtttcttggctaaatcacaggatggactgcctcctaggagaatgaaggacagttatattgaagttctcttgcctttgggcagtgagcctgaattacgagagaaatatttgactgttcaaaacaccgtaagatttggcaggattcttgaggatcttgacagtttggggaggttcttattttgttacatgcacaacaaaatccactccgccaagatgtctcctttatcgatagttacagccctggtggataagattgatatgtgtaagaagagcttgagcccagaacaggacattaagttcagtggccatgttagctgggtcgggaagacatccatggaagtgaagatgcaaatgttccagttacatggtgatgaattttgtcctgttttggatgcaacatttgtaatggtggctcgtgattctgaaaataaagggccggcatttgtaaatccactcatccctgaaagcccagaggaagaggagctctttagacaaggggaattgaacaaggggagaagaattgccttcagctccacgtcgttacttgaaaatggcccccagcgctgaggagaggaccaccatacatgagatgtttctcagcacactgggatccaaagactataagttttcggagtcgagttttaccctctaatggcagtgtgggatgggagaattcaaaactgaaggagttttgggaaattttgcccacccctcagggagccggaacattttcaatcggatcttggtgggtttccttatgaggaaggcatatgaacttgcgtgggctactgcttgtagcgtttgggtgggtctcgaccgtttgtgggagcagtagatgaccatcatgtttccagaaccctgttgaggttggcctcattgctcttttctttcttcacaggtatgctttactcagaataattatattccaagtcagagtacaccagtgaagtggccctccccctgcaggagaagccagccatacaaccccacccaatgtccttccatttccaccggttccatgtcgggaaaaaagaaagtgccccattgggttttccccccaaaaacatatggagagtccccatgttgtaccttagatggggcagcgggcatttccaactcccatgagtggccccagcgacccttgagaaaggacctacccttgtggagcccctaagaacacccaccatttgttgaaaactagcactctaccccacagtgacgtggtatctgatgaagacctgatcgagtgtattgattttagtattgcttcgtgtcctccacacaggaggaggatgtattcagcctttaggatgatcagaaaagcagaaagagagagtggccggatggggctgaggggagaaagaattattaaacaataaatactttcaagacaattttaattgtgaacctaccatgttgcctcccatcttctgaaaaaacaaaaaaattataggcatgagccactgcacccggccggtggaaagcatttttaacaaaaaatttttaggccaggcacagtggtggctcatgcctgtaatcccagcactttgggagactgagatgggaggatcgcttgagaccagcctggggaacatagtgagaccctttctctacaaaaagttaaaaaattatctgagcatggtggtgtgcacctgtagtcccagttaggaggctgaggtgagtggattgcttgagtccgggagtttgagtctgcagtgagctatgatcatgccactgcactccagtctgggtgacagcaagac

SEQ ID NO: 2808 - DNA, 286 bp, Homo sapiens
  SIMILAR (2)..(82): 921254mologous to Homo sapiens endoplasmic reticulum alpha- mannosidase I,accession number AF145732,Smith-Waterman Score=124.
aactgccctgcagcggcactccgagcccagtaagctcacctttgtgggggagcttgcccacggccgcttcagtgccaagatgggacgctggctctgggcgtctaccacggcctgcccgccagccacatggagctggcccaggagctcatggagacttgttaccagatgaaccggcagatggagacggggctgagtcccgagatcgtgcacttcaacctttacccccagccgggccgtcgggacgtggaggtcaagccagcagacaggcacaacctgctgcggccag

SEQ ID NO: 2809 - DNA, 464 bp, Homo sapiens
  SIMILAR (7)..(261): 451254mologous to synthetic construct Human alpha1,2- mannosidase,accession number AX068404,Smith-Waterman Score=166.
cggcacgaggacttacctgagatttcgtcacggatgacacaaagacacatccagcggggaccacctcacctgcagattagacccccaagccaagacacgaatcatgactcacgattgctgaagcctgagcaggtctctgtgggccgaccagaggggggcttcgaggtggtccctggtactggggtgaccgagtggacagcccagggtgcagctctgcccgggctcgtgaagcctcaggtgtccccaatccaagggtctggaggggctgccgtgactccagaggcctgaggctccagggctggctctggtgtttacaagctggactcagggatcctcatggcccgccccgcagggggcttggagggctggacggcaagtccgtttagctcacgggcccctccagtggaatgggtcttttcggtggagataaaagttgatttgctcttgaaaaaaaaaaaaaaaaa

SEQ ID NO: 2810 - DNA, 437 bp, Homo sapiens
  SIMILAR (149)..(307): 321254mologous to Homo sapiens endoplasmic reticulum alpha- mannosidase I,accession number AF145732,Smith-Waterman Score=41.
  misc_feature (1)...(437): n = a,t,c or g
cggccgctcctggctttcaggctagaggaagagcagaagatgaggccagaaattgctgggttaaaaccagcaaatccacccgtcttaccagctcctcagaaggcggacaccgaccctgagaacttacctggtactggggtgaccgagtggacagcccagggtgcagctctgcccgggctcgtgaagcctcagatgtccccaatccaagggtctggaggggctgccgtgactccagaggcctgaggctccagggctggctctggtgtttacaagctggactcagggatcctcctggccgccccgcagggggcttggagggctggacggcaagtccgtctagctcacgggcccctccagtggaatgggtcttttcggtggagataaaagttgatttgctctaanaaaaaaaaaaaaaaaacgtttgcggcctcgtgccg

SEQ ID NO: 2811 - DNA, 2244 bp, Homo sapiens
  SIMILAR (2)..(694): 1001254mologous to synthetic construct Human alpha1,2- mannosidase,accession number AX068404,Smith-Waterman Score=1226.
gctggagttccgggagctctcccgtctcacaggggataagaagtttcaggaggcagtggagaaggtgacacagcacatccacggcctgtctgggaagaaggatgggctggtgcccatgttcatcaatacccacagtggcctcttcacccacctgggcgtattcacgctgggcgccagggccgacagctactatgagtacctgctgaagcagtggatccagggcgggaagcaggagacacagctgctggaagactacgtggaagccatcgagggtgtcagaacgcacctgctgcggcactccgagcccagtaagctcacctttgtgggggagcttgcccacggccgcttcagtgccaagatggaccacctggtgtgcttcctgccagggacgctggctctgggcgtctaccacggcctgcccgccagccacatggagctggcccaggagctcatggagacttgttaccagatgaaccggcagatggagacggggctgagtcccgagatcgtgcacttcaacctttacccccagccgggccgtcgggacgtggaggtcaagccagcagacaggcacaacctgctgcggccagagaccgtggagagcctgttctacctgtaccgcgtcacaggggaccgcaaataccaggactggggctgggagattctgcagagcttcagccgattcacacgggtgagcacctgtcctcgccccgcgtggtcacggccaccgggccacaggcacggctgggctgtggggctcaggttggctccgctcttggtggtggctgtgacctgggtccgggaggggcgggcttgccgcagcctcggggtggccacgctgcagcttgggggccctggcatccccatccccactgagcttcatggttgtgggacccagagtacttggaggggctgggcacccctcattttcatttctcagggcctgtctagggagggtctctgctgtgggcccagcatccccccagtttaggaggcacacgcacccatgactggggcaccatccccactgtggaccaggccctgttttaggtcacgccctccacgccagagtgtcacctcctggctctgctgtgatcttggcctgaggcccccgctgcctccgctcccaccgtctgccctgtgccctgtgccctgtgcggcaactgtgaggccccctgagcccaggttctgggggaggcggtttctgtcgtggtcacttgagggttgttggcatttccaggtgggctccggtggaaccacacggctcgcctgggggtggccatcatccaggcgccctccaccctgagcttgcgctgggggccacattcactatggggtggagagcgcttcggtgatgaggctgaggggggtgcagggtgccccccgtgtggtgacgaggccctggctgctgcacaggtcccctcgggtggctattcttccatcaacaatgtccaggatcctcagaagcccgagcctagggacaagatggagagcttcttcctgggggagacgctcaagtatctgttcttgctcttctccgatgacccaaacctgctcagcctggacgcctacgtgttcaacaccgaagcccaccctctgcctatctggacccctgcctagggtggatggctgctggtgtggggacttcgggtgggcagaggcaccttgctgggtctgtggcattttccaagggcccacgtagcaccggcaaccgccaagtggcccaggctctgaactggctctgggctcctcctcgtctctgctttaatcaggacaccgtgaggacaagtgaggccgtcagtcttggtgtgatgcggggtgggctgggccgctggagcctccgcctgcttcctcccagaagacacgaatcatgactcacgaattgctgaaaacctgaaacaggtcctctgtgggcccgaaccaaaggggggccttccaaggtggtcccctggtaactggggtgaaccgaagtggaacagcccagggtgcagctctgcccgggctccgtgaagcctcaggtgtccccaatcccaagggtctggaggggctgccgtgactccagaggcctgaggctccagggctggctctggtgtttacaagctggactcagggatcctcctggcccgccccgcagggggcttggagggctggacggcaagtccgtctagctcacgggcccctccaagtggaatgggtcttttcggtggagataaaagttgatttgctctaaaaaaaaaaaaaaaa

SEQ ID NO: 2812 - DNA, 2747 bp, Homo sapiens
  SIMILAR (1325)..(1393): 561254mologous to synthetic construct Human alpha1,2- mannosidase,accession number AX068404,Smith-Waterman Score=61.
tttcgtgttgacggcgctgcgatggctgcctgcgagggcaggagaagcggagctctcggttcctctcagtcggacttcctgacgccgccagtgggcggggccccttgggccgtcgccaccactgtagtcatgtacccaccgccgccgccgccgcctcatcgggacttcatctcggtgacgctgagctttggcgagagctatgacaacagcaagagttggcggcggcgctcgtgctggaagaaatggaagcaactgtcgagattgcagcggaatatgattctcttccctccttgcctttctgcttttctgtggactcctcttctacatcaacttggctgaccattggaaagctctggctttcaggctagaggaagagcagaagatgaggcccagaatttgctgggttaaaaccagcaaatccacccgtcttaccagctcctcagaaggcggacaccgaccctgagaacttacctgagatttcgtcacagaagacacaaagacacatccagcggggaccacctcacctgcagattagacccccaagccaaagacctgaaggatgggacccaggaggaggccacaaaaaggcaagaagcccctgtggatccccgcccggaaggagatcccgcagaggacagtcatcagctggaggggagcggtgatcgagcctgagcagggcaccgagctcccttcaagaagagcagaagtgcccaccaagcctcccctgccaccggccaggacacagggcacaccagtgcattctgaactatcgccagaagggcgtgattgacgttctcctgcatgcatggaaaggataccgcacagtttgcatggggccatgacgatctgaagcctgtgtccaggtccttcagtgagtggtttggcctcggtctcacactgatcgacgcgctggacaccatgtggatcttgggtctgaggaaagaatttgaggaagccaggaagtgggtgtcgaagaagttacactttgaaaaggacgtggacgtcaacctgtttgagagcacgatccgcatcctgggggggctcctgagtgcctaccacctgtctggggacagcctcttcctgaggaaagctgaggattttggaaatcggctaatgcctgccttcagaacaccatccaagattccttactcggatgtgaacatcggtactggagttgcccacccgccacggtggacctccgacagcactgtggccgaggtgaccagcattcagctggagttccgggagctctcccgtctcacaggggataagaagtttcaggaggcagtggagaaggtgacacagcacatccacggcctgtctgggaagaaggatggggctggtgcccttgtttcatcaattacccacagtgggcctcttcacccacctggggcgtattcacgctgggcgccagggccgacagctactatgagtacctgctgaagcagtggatccagggcgggaagcaggagacacagctgctggaagactacgtggaagccatcgagggtgtcagaacgcacctgctgcggcactccgagcccagtaagctcacctttgtgggggagcttgcccacggccgcttcagtgccaagatggaccacctggtgtgcttcctgccagggacgctggctctgggcgtctaccacggcctgcccgccagccacatggagctggcccaggagctcatggagacttgttaccagatgaaccggcagatggagacggggctgagtcccgagatcgtgcacttcaacctttacccccagccgggccgtcgggacgtggaggtcaagccagcagacaggcacaacctgctgcggccagagaccgtggagagcctgttctacctgtaccgcgtcacaggggaccgcaaataccaggactggggctgggagattctgcagagcttcagccgattcacacgggtcccctcgggtggctattcttccatcaacaatgtccaggatcctcagaagcccgagcctagggacaagatggagagcttcttcctgggggagacgctcaagtatctgttcttgctcttctccgatgacccaaacctgctcagcctggacgcctacgtgttcaacaccgaagcccaccctctgcctatctggacccctggcctagggtggatggctgctggtgtggggacttcgggtgggcagaggcaccttgctgggtctgtggcattttccaagggcccacgtaggcaccggcaaccgccaagtggcccagggtctgaactgggtctggggttcctcctcgtctctgctttaatcaggacaccgtgaggacaagtgaggccgtcagtcttggtgtgatgcggggtgggctgggccgctggagcctccgcctgcttcctccaagaagacacgaatcatgactcacgattgctgaagcctgagcaggtctctgtgggccgaccagaggggggcttcgaggtggtccctggtactggggtgaccgagtggacagcccagggtgcagctctgcccgggctcgtgaagcctcagatgtccccaatccaagggtctggaggggctgccgtgactccagaggcctgaggctccagggctggctctggtgtttacaagctggactcagggatcctcctggcaacgcccgcagggggcttgaagggctggacggcaagtccgtttagctcacgggcccctccagtggaatgggtcttttcggtggagataaaagttgatttgctcccaaaaaaaaaaaaaaaaaaa

SEQ ID NO: 2813 - DNA, 851 bp, Homo sapiens
  SIMILAR (252)..(296): 861254mologous to Homo sapiens PRO2550,accession number AF130089,Smith-Waterman Score=58.
atttttttttttttttttttgaaatggggtcttgctgtcgtccaggctgaagtgcagtggtgcgatctcagctcactgcagcctctgcctcctgggttcaagcaattctcccacctcagcctcccaagtagctgggattacaggggcacaccaccacacctgggctaatttttgcataattttttttaagtggagatggggtttcaccatgttggcccaggctggtctcgaactcttgacttcagatgatcccatctgccttggcctcccaaagtgctgggattacaggcgtgagcacttgcgcctagccgtcacatatctaaacaagcatgaaaggggttcatttttgtcttcttcttgcctgccgtcagcatggtggaaatggctctgcctatgctcatgcttctgggtgcccaaatgccttgcactgtgccatttcaaacactatggaaggaggaaacaagtaggccacacctcaaaataatgtgggctgttcaactgggcctaaataaacctaccacaaaccagtacttggcctttggtggggaaacattggattatgtgctcctcacgtagtagaaagcggtatcctgattagtctaacagttgtgttacgcctttagggccagtattgtcagcatttatttatttaaggaccctttgttatgatggggatatttttcatttgaaacttgtttcataaaaaatgttcaatgacattgatgactgatttggtacagatttttcatatagttttgtttaaaaaataattcacgcaaaatcttgaagtcatttttgctattgaaataaaccttaattaaaatatttcatcatcaaaaaaaaaaaaaaaa

SEQ ID NO: 2814 - DNA, 606 bp, Homo sapiens
  SIMILAR (526)..(2): 921254mologous to Homo sapiens exportin 5,accession number AF298880,Smith-Waterman Score=843.
  misc_feature (1)...(606): n = a,t,c or g
gtttcagggaggggtttaaaagctngcagtcaaactggtncagtgagtccttctgtatttcagggatttgctccattncagctcttatctccaggtacctggggcgcagtgcctcgtatatntggaaggccagatggaccagggaagccatgcacccgtcgtgctgcccgtgcatctgtaagcctttcagcacactggtgaaaagccacgtaactgcatctgcgagcagtgtccctgacagcacttgtttgaggagaggccagcagagctgtgaggttgtcctctggcaggacagagtatctttccaggccagggaattgaaggctgtaattaatagcgctgtacaaacatcctcatgcttcatcagacatttgcccaggtctgtaagctctgccatagctgagggggtgacctctgtggccatcatttcttcatcgtctccatctgctgggggagcactactgtggtcagcacccttctttgaaacacagcaaaccgcagttgctcctccagcatctcttgagactctgggttttcatctgcagcctcatcttctccacacagcaggctcctttggttgataacgttgccatttctgagaaagcc

SEQ ID NO: 2815 - DNA, 483 bp, Homo sapiens
  SIMILAR (333)..(365): 451254mologous to Homo sapiens exportin 5,accession number AF298880,Smith-Waterman Score=39.
aaaaaaatcgtagatcactagtccagggtggtggaacttcgaagctggagcgattctaagcctaggtgacacatggatcggctggacaggctgttaccagcatgctaactgtgagacacatgcttcataggggctactggtaccttactcacttatgttaagtgtgacatgcacatccctctggacagagtcactagaaatagcgtccttcagtggatcactgcgtgacattactcacttttgcataaaacgaagacccaaaggagaagaaagtggtcagagagagtctgattagggtcgctgctttccttgtccttccttttctgcactcctgtggaacttggccccctggttttctgcagtggagaagatgaggctgcagatgaaaacccagagtctcaagagatgctggaggagcaactggtgaggatgttaacccgagaagtcatggacctaatcacggtttgctgtgtttcaaagaag

SEQ ID NO: 2816 - DNA, 316 bp, Homo sapiens; identical to SEQ ID NO: 1350
  SIMILAR (165)..(278): 971254mologous to Homo sapiens exportin 5,accession number AF298880,Smith-Waterman Score=194.

SEQ ID NO: 2817 - DNA, 1187 bp, Homo sapiens
  SIMILAR (561)..(782): 971254mologous to Homo sapiens exportin 5,accession number AF298880,Smith-Waterman Score=360.
tcctagttaccgcctcgacgatttcgtgccgcggcccggtaccaacgggtggtctcgccgagggagctgtcgtgcctcgtggtcccgggactgcagtggtgtgcgctctcggcgcgtggcgctaggcatggcgatggatcaagtaaacgcgctgtgcgagcagctggtgaaagcggtgacggtcatgatggaccccaactccacccagcgctaccggctggaagccctcaagttttgtgaggagtttaaagaaaagtgtcctatctgtgtcccctgtggcttgaggttggctgagaaaacacaagttgccatcgtcagacattttggccttcagatcctggaacacgttgtcaagtttcggtggaacggcatgtctcgattggagaaggtgtattttgaagaacaatggtcctggaacctgattgccaaaggaccctttgaacattttggaagaggagaaccatattaaagatgctctgtctcgaattgtagtggaaatgatcaagcgagagtggccacagcattggcctgacatgctaatagaattggacactctttccaaacaagggaagacagatacttctcaggagtcaaaggcgcaagcaaactgtcgagtaggagttgcagcactgaatactctagcaggctatattgactgggtgtctatgagtcacatcactgctgaaaactgtaaactcctggagatactgtgtttgctgttgaatgaacaggaacttcagttgggagccgctgagtgtcttctcattgcagtcagcagaaaaacttgtcaggaggctgagggtgctgtacgtccctcgttgacaaagggagcctggaacggcggtggtgatggaacctcagagccaggggctgaggggtgggcctacagaagtcctcttcattcccctaatctgagggcagcagccctgtcccctgattcagggtgtgtctggcaagccctttgcagccttcttacctgcagctggatgctccagaatcagaagatgaaactctcctttgtgctggggtcctggagcatccagatggagaggggcaatgccctggtggtgctgcgcagcctgctctggccgggcctcaccttctaccatgctccccgcaccaagaactatggctacgtctacgtgggcactggcgagaagaacatggacttgcccttcatgctatag

SEQ ID NO: 2818 - DNA, 435 bp, Homo sapiens; identical to SEQ ID NO: 1352
  SIMILAR (237)..(422): 951254mologous to Homo sapiens exportin 5,accession number AF298880,Smith-Waterman Score=314.

SEQ ID NO: 2819 - DNA, 939 bp, Homo sapiens
  SIMILAR (427)..(936): 891254mologous to Homo sapiens exportin 5,accession number AF298880,Smith-Waterman Score=760.
atggcagagcctttcaccaaggctctggatatgcttgacgcggaaaaatctgctatattaggattacctcaacctctcttggaactcaatgactctcctgtcttcaaaaccgtcttggaaagaatgcagcgtttcttctctaccctctatgaaaactggaatgtccatgggttggacttttcatctagtgtacagagcactatgaagccctggtatcccccatcctcggacctcttttcacctacctccatatgtggagaagatgaggctgcagatgaaaacccagagtctcaagagatgctggaggagcaactggtgaggatgttaacccgagaagtcatggacctaatcacggtttgctgtgtttcaaagaagggtgctgaccacagtagtgctcccccagcagatggagacgatgaagaaatgatggccacagaggtcaccccctcagctatggcagagcttacagacctgggcaaatgtctgatgaagcatgaggtgctgtcagggacactgctcgcagatgcagttacgtggcttttcaccagtgtgctgaaaggcttacagatgcacgggcagcacgacgggtgcatggcttccctggtccatctggccttccagatatacgaggcactgcgccccaggtacctggagataagagctgtaatggagcaaatccctgaaatacagaaggactcactggaccagtttgactgcaagcttttaaacccctccctgcagaaagtggctgacaagcgccgaaaggaccaattcaaacgcctcattgctggttgcattgggaaacccttgggagagcagttccgaaaagaagttcacattaagaatcttccctcacttttcaaaaaaacaaagccaatgctggagacggaggtgctggacaatgatgggggtggcctggccaccatctttgaaccctga

SEQ ID NO: 2820 - DNA, 3573 bp, Homo sapiens
  SIMILAR (2266)..(3240): 661254mologous to Homo sapiens exportin 5,accession number AF298880,Smith-Waterman Score=935.
  misc_feature (1)...(3573): n = a,t,c or g
cgcgaattcccgggtcgacgatttcgtaagttgccatcgtcagacattttggccttcagatcctggaacacgttgtcaagtttcggtggaacggcatgtctcgattggagaaggtgtatctgaagaacagtgtcatggagctgattgcaaatggaacattgaacattttggaagaggagaaccatattaaagatgctctgtctcgaattgtagtggaaatgatcaagcgagagtggccacagcattggcctgacatgctaatagaattggacactctttccaaacaaggggaaacacagacagaattggtgatgtttatccttttgcgactggcagaggatgtagtgacttttcagacacttccccctcaaagaagaagggacatccagcaaacattaacccagaacatggaaaggatcttcagttttctgcttaacacacttcaagaaaatgtaaacaagtatcagcaagtgaagacagatacttctcaggagtcaaaggcgcaagcaaactgtcgagtaggagttgcagcactgaatactctagcaggctatattgactgggtgtctatgagtcacatcactgctgaaaactgtaaactcctggagatactgtgtttgctgttgaatgaacaggaacttcagttgggagccgctgagtgtcttctcattgcagtcagcagaaaaggcaagttggaagaccggaagcccttgatggtcttatttggagatgttgccatgcattatatactctccgccgcacagactgctgatggaggaggtttggtagaaaaacactacgtctttctgaagaggctctgtcaggtgttgtgtgcgctgggcaatcagctgtgtgcattgctgggtgcagattctgatgtagaaacaccatcaaactttggaaaatacctggaatcttttcttgctttcacaacccatccaagtcagtttctacgctcttcaactcagatgacttggggagccctcttcaggcatgaaatcctgtcccgtgatcctttgctattagcaataataccaaaatatcttcgtgcttccatgactaacttggtcaagatgggctttccttctaaaacagacagccctagctgtgaatattctcggtttgattttgatagcgatgaggacttcaatgctttcttcaactcctcccgagcacaacaaggagaggtgatgaggttggcatgtcgtttggatcccaaaactagcttccagatggctggggagtggctaaagtatcaactatcaacttttcttgatgctggttctgtgaattcttgttctgcagttggaactggagaaggaagcctctgttccgtcttctcaccttcattcgtgcagtgggaagccatgactctttttttggaaagtgttatcacccagatgtttcgaacactaaatagagaagaaattcctgttaatgatggaatagagctattgcagatggttctgaactttgataccaaggatcccctcatcctgtcctgcgtcgcttactaatgtctctgcactctttccatttggtcacctacagaccagagttcctgccccaggtcttctctaagctattttcatctgtcacttttgaaactgttgaagaaagtaaggcccccagaacccgggcagtgaggaatgtgaggaggcatgcttgttcctccatcatcaagatgtgtcgtgactacccccagcttgtgctgcccaattttgacatgctttataaccatgtgaagcaactcctctccaatgagctactcctgacacaaatggagaagtgtgccctcatggaagccctggttctcattagcacccaatttaagaactacgagcgtcagaaggtgttcctagaggagctgatggcaccagtggccagcatctggctttctcaagacatgcacagagtgcgtgtcagatgttaatgctttcgttgcgtatgtgggtacagatcagaagagctgtgacccaggcctggaggatcagtgtggcttaaaccgtgcacgaatgagcttttgtgtatacagcattctgggtgtggtgaaacgaacttgctggcccactgacctacaagaggccaaagctgggggatttgcggtgggttatacatccagtggaaatccaatcttccgtaacccctgcacagagcagattctgaaacttcttgacaatttgcttgcgcttataagaacccacaatacattatatgcaccagaaatgctagccaaaatggcagagcctttcaccaaggctctgggatatgcttgacgcggaaaaatctgctatattaggattacctcaacctctcttgggaactcaatgactctcctgtcttcaaaaccgtcttgggaaaggaatgcagcgtttctttcttcttaccctcttatggaaaactgttttcatatcctaggggaagggcagggcccttccatgcagcaagacttctatactgtggaggaccttgctacccagcttctcagctcagccttctgtcaacttgaacaatattcctgactaccgactcagacccatgcttcgggtctttgtaaagcctctggtgctcttctgtcccccagagcactatgaagccctggtatcccccatcctcggacctcttttcacctacctccatatgaggctttctcagaaatggcaagttatcaaccaaaggagcctgctgtgtggagaagatgaggctgcagatgaaaacccagagtctcaagagatgctggaggagcaactggtgaggatgttaacccgagaagtcatggacctaatcacggtttgctgtgtttcaaagaagggtgctgaccacagtagtgctcccccagcagatggagacgatgaagaaatgatggccacagaggtcaccccctcagctatggcagagcttacagacctgggcaaatgtctgatgaagcatgaggatgtttgtacagcgctattaattacagccttcaattccctggccttggaaagattactctgtcctgccagaggacaaccttcaaaagttctgcttgcctctccttcaaaccaagtgcttgtcagggacactgctcgcagatgcagttacgtggcttttcaccagtgtgctgaaaggcttacagatgcacggggcagcacggacggggtgcatggcttcccctggtccaatctggcccttccagatatatgaggcactgcgccccagggtaccctggagataagagctgtaatggagcaaatcccttgaaatacagaaggactcactggaccagtttgactgcaagcttttaaacccctccctgcagaaagtggctgacaagcgccgaaaggaccaattcaaacgcctcattgctggttgcattgggaaacccttgggagagcagttccgaaaagaagttcacattaagaatcttccctcacttttcaaaaaaacaaagccaatgctggagacggaggtgctggacacatgatgggggtggccctggccaccatctttgaaccctgaatcaagcttttgggcatccttcctcggcctttnttgtcatctcttcttttccctttgtagccgatctctagg

SEQ ID NO: 2821 - DNA, 365 bp, Homo sapiens
  misc_feature (1)...(365): n = a,t,c or g
ggcannnnnnnnnnnnnnnnnnnnnnnnnnnnnnnnnnnnnnnnnnnnnnnnnnnnnnnnnnnnnnnnnnnnccaaaacccctgatataactcctgggaaaagggatcaacggatattggatagataaaattattatacccacctttatgcaaatatatttgacacattggaggaaaggggaaaattcctggaaaacaaaatttatcaaaactggagcaaacaggaaaagctcaagggttttatgatctgctgaaaaaattgaattaataactttaaagccttctcacaaaaaaagcttcagggcgagggcctttactagggaattctttccaattttaacggaaaaaaatgaccccaacgttaa

SEQ ID NO: 2822 - DNA, 812 bp, Homo sapiens
ccactgaagcgctcagatggctgtaacgacggccgacccacgcgtccgcccacgcgtccggacacaactgtgttcactagcaacctcaaacagacacgcatggtgcatctgactcctgtggagagagtctgccgttactgccctgtggggccaaggtaaacctggatgaaagttggtggtaaggccctgggcaaggctgctgggtggtcctacccctgggacccccaaaaggtcctttgaaaccctttgggggaatctgtcccaactccctgaatgctggttaaatggggcaaaccccctaaaggtgaaaaggctcaatggcaaaagaaaaagtgctcgggtgccctttaagtgaatggccccggcctcaccccggacaaccctcaaagggcacctttggcccacactgaagtgaagctgcactgtgaacaagctgcaccgtggatccctgaagaacttcaggctccttgggcaacgtgcttggtctgtgttgcttggcccatcacttttgggaaaagaatttcaaccccaccagttgcaggcttgcctaatcaagaaaattggttggcttggtgttggctaaatgcccttggccccacaagtaatcacttaagcctcgctttccttgctggtccaatttccaattaaaaggtttcctttggttccctaagttccaactactaaactggggggatattattgaaagggccttgagcatcttggattttgcctaataaaaaacatttattttcatcgcatacaagaataaaacaagcgcggccgattaagaggatacttcaggggcgcaagat

SEQ ID NO: 2823 - DNA, 237 bp, Homo sapiens
atggagaccagcagcttaaggatcaccccagacctgctgaacgctagagctaccgaaagagaaagtcctaaggtggggccaataattggtgttttaccaagacctccaggtaccctggcatccatctgtggtggcctcgtgatgcttttgcctgaaatcacgggtattgccttgccagaaacagtggatgatgtagaaaaacttggcaggcattgtccaaaattcaatgcaccctaa

SEQ ID NO: 2824 - DNA, 4291 bp, Homo sapiens
  SIMILAR (28)..(681): 1001254mologous to Homo sapiens extraneuronal monoamine transporter,accession number AJ001417,Smith-Waterman Score=1162.
  misc_feature (1)...(4291): n = a,t,c or g
ctgcgggcggcgggcggcgggcgcaccatgccctccttcgacgaggcgctgcagcgggtgggcgagttcgggcgcttccagaggcgcgtgtttttgctgctgtgcctgacgggcgtcaccttcgccttcctcttcgtcggcgtggtcttcctgggcacgcagcccgaccactactggtgccgcgggccaagtgccgcggcgctggccgagcgctgcggctggagcccggaggaggagtggaaccgcacggcgcccgcctcccgcggcccagagccccccgagcgccgcggccgctgccagcgctacctcctggaggcggccaacgacagcgcctccgccactagcgctctcagctgcgcggacccactcgccgccttccccaaccgttcggctccccttgtgccgtgccgcggcggctggcgctacgcccaggcccactccaccatcgtcagcgagtttgaccttgtctgtgtcaatgcgtggatgctggacctcacccaagccatcctgaacctcggcttcctgactggagcattcaccttaggctatgcagcagacaggtatggcaggatcgtcatttacttgctatcctgccttggtgttggcgtcactggggttgtggtggcctttgcaccaaacttccctgtgtttgtgatcttccgcttcctgcaaggagtatttttttagtttgacgtggatgacttgctacgtgattgtgacagaaatagtaggttcgaaacaaaggaggattgtgggaatcgtgattcaaatgttctttacccttggaatcataattctccctggaattgcctacttcatccccaactggcaaggaatccagttagccatcacgctgcccagctttctcttcctcctttattactgggaggtccctgagtctccccgttggctgattactcggaagaaaggagataaagcattacagatcctgagacgcattgctaagtgcaatgggaaatacctctcatcaaattactcagagatcactgttacagatgaggaagctagtaatccatcctttttagatctggtgagaactccccaaatgaggaaatgcacacttattcttatgtttgcttggttcacaagcgcagtggtgtatcaaggacttgtcatgcgcctgggaattatagggggcaacctctatatagactttttcatctcgggcgtggtggaactgccaggagctctcttgatcttactaaccattgagcgccttggacgacgcctcccctttgcagcaagcaatatagtggcaggggtggcatgccttgtcactgcgttcttaccagaaggaatagcatggttgaggaccacagtggctacattgggaagactagggataaccatggcctttgaaattgtttatttggtaaattcagaattgtacccaacaacattacgaaatttcggagtttcgctctgttcaagtctgtgtgattttgggggaatcatagccccatttctgctctttcggctagcagccgtgtggctagaactacctctgatcatctttggtatcctggcatccatctgtggtggccttgtgatgcttttgcctgaaaccaagggtattgccttgccagagacagtggatgatgtagaaaaacttggcagtccacattcctgtaaatgtggcaggaataagaaaaccccagtttcccgctctcacctttgaggcccccgacaaagacagaaagaaggagctatccagggagctgatcctccttgcaaagctgtgccttgcaggagatgcacgtgtgcatttcagcttacattcatgccgcgctgtttgttaatactgtattaaaggaccttcaattctattccagagttatttttnattattaatgttgggatgagttaggatttgtaatgctgttgaagtttctgggaacacataatatgtagccagtttaacaaagaagctgtcaggtgcacagcccttcctgggtttttttcttgtgttccccctgtggcctctgacccccattaggcctaaagagagacaagagaagcccccccaaccctgattcctcatgacagctcccatcaaagaatgtgggatgtgcccgacccaaggatttgagaaagttgtacagaaatgtgttccatcaaatctggtcaagggacctaagctccctagctgacccattcattctgaagattgcatggaggatgaacatctgggaatcctgttaatgagaaggctgaatcacaggcacctggggccaaagggtgtgagcattcatgttctctgctcaccttggtttccgcacaccttcgcaatgtgaacaggtcaggagtccctcccgtccacctcctctgtaacaagctgggggttccagggcatgggttttagggccctgtttccagcaattaggaaccaatctggctggtacaatcttgaagggacttgggtcctgttaattacaaaatggatgctgtgggttctgagattatttgggacatttttggctctcctttagtggacacctagagccacagattcccttctttactaaacaaatcccatggattctgatttctgggtcttaggattttaaaagtgaagggatatttttcttatatttgtgagttcagttccgatggtgcccgtggtcaaaagcgaaaaacatggacaattcctaattcattcttagcactttgacatgtcttgggggaaaagcttacattttaatttaaaagaaagatcaattatatccatgcttaacaggatcagcaggagctttataaatgactttacagagactaataagggatttgatctttctttttttgttatcgaggcttttgaaatgtggaacttgtgtgttctgctttatatgttatattccaatatcttttcagatgcagtctatattttatgctgagttttaaaaaaggaaatacctttatgccaaacaggcaaaattgggtncccaaagggaaacattaaccatgaggaagagcatttttcctaaggagaacaggtgacaatatacacatgtgtgcctaatccgtaaaatgagcatccttagtctttaaaacacatcagaattgaatacgaataatctatttgtcgatgaaataaacacaactctttgaggatttgagactacattcaccctttattcacagtcacttgcagttttgcttttctctgcatttctctgctgtaagatgactgttgcattgttgaattgtattttgagtggatatttttgtttggtaacaatattttaaatggtaaaacgtgtgcctttgtcctttctcttccttctaaacatgtatctctcccacaggtcattctcctgtcaccgtgtgtactgcagactgtttcaaaaccgggcagggcanttaggcaatggggaaataaggtgggtcccacccttcaatatttgcttggtgttcatttacatgcttcttggcaccaatcctagactcacgtgtgcccccagaataacattcagactctcagttggtcttgtgttaacacatcccatggaaccggttccactccatccatatacagctctctgctccggtgtcccctgggctcaagtcaaggcagtcggtgacagatttcattcccaataacagaatcggttcgcatgactccccatgcatgttgcagctttgaaaaccattcatctcagtgtcaggaaataaagacagtaaaaaatgccatgtcaagccctcgttagctgatgaggtaaatgcgtggacaacttcctaggacttctcggctctgccctctgtgaccttgcagcctgctcaggtctttgtgcagctgttccttatcaaaaacagcacaaccccctcaatctgcccatttaaaaattggtggagtgaacaaagagcatgaaaatgttgaagaccacatccaaaatttactcaaatcaaagttaagtacagagtttatttttaacaaatgtcatagctatgtcaccttactacagaatccagcagtcagaaaataacacaaaaaatgccgaggtttggcgtagctggtagctggggacagtgtcttcgtttgattactgccagttatttccagcatgctaaatccctacccacgttccagcctctaggtgagtcagtgcgtcactctgtctcccgtccaattaattatttctcatcactccctcaatccaagtaacaaaccttgaaacacgaacatagacaccaggcttattggggcgtgcacagccaagaccccaagaagtgactccttgtaaaatgtatttgtccttctcaaagcaaacca

SEQ ID NO: 2825 - DNA, 370 bp, Homo sapiens
  SIMILAR (345)..(211): 571254mologous to Homo sapiens adaptor protein APPL,accession number AF169797,Smith-Waterman Score=142.
  misc_feature (1)...(370): n = a,t,c or g
natttactttcagttctcccagagataacctctctcagcccatacctgctccctctgttttgatcaaggaattctgtagcaggaagcacaatatcgaattgaatcggcgttccaggcgcgatcagctcctctgcttcaggtagactggctgttgctttgggaacaatcttgtcattttcattttccatctctgaatttttcaggttctggctcagggttgtcggtcaggtagatctgtctggagatgttgtttattgcacatatccactcttcattttcctttctgctctcagcctggaggattattcccctgaaacaaaagtgtttaagtaattaaaaacaaaacatgattctcatatgactgggaatt

SEQ ID NO: 2826 - DNA, 1913 bp, Homo sapiens
  SIMILAR (1536)..(1637): 641254mologous to Homo sapiens p40,accession number U93566,Smith-Waterman Score=108.
atcagggaagcacttaattacttagacacttttgtttcaggggaataatcctccaggctgagagcagaaaggaaaatgaagagtgttcttttttaatgtcctctacagtggatatgtgcaataaacaacatctccagacagatctacctgaccgacaaccctgaggcagtcgcgatcaagttgaatcaaaccgctctgcaagcagggactcccattacaagttttggaaaaaaacaagaaagctcatgccccagccagaacctgaaaaattcagagatggaaaatgaaaatgacaagattgttcccaaagcaacagccagtctacctgaagcagaggagctgatcgcgcctggaacgccgattcaattcgatattgtgcttcctgctacagaattccttgatcagaacagagggagcaggcgtaccaacccttttggtgaaactgaggatgaatcatttccagaagcagaagatcaacagcagcaggaagtaaatgagatcctgagtggaaaatgctgtcttccagattctcttttgcagcagatgtttatagttcggtttttgggatcaatggcagttaaaacagacagcactactgaagtgatttatgaagcgatgagacaagtattggctgctcgggctattcataacatcttccgcatgacagaatcccatctgatggtcaccagtcaatctttgagagcacctgggggaaggggtggctgtgggcgcagtttcagcagacttaaatgttcctgcctgccagctctcaagagagcagcaggtctcccagcacaacgcttgagctctgctaagggacagactgcctcctcaagtgagtccctgactctggtggttcctgacggggagacacctcccagcaggaatcgacagacacctcatacaggagagttccagctggcatctggtcaccagcatcaaagaccaaaggtagataaatccacaaagatgaggaaaaagcagcacagaaaggctgaaaattccaaaaaccagaatgcctctcctcctccaaaggatcacaactcattgccagcaagggaacaaaattggacggagaatgagtttgaagaatttacagaaagaggcttcagaagtgacagggagaatggaaccaagttagaaaacactcttcaggatattatccaggagaacttccacaacctagcaagacaagccaacattcaaattcaggaaatacagagaacaccacaaagatactcctcgagaagagcaaccccaagacacataatcatcagattcaccaaggttgaaatgaaggaaaaaatgttaagggcagccagagagaaaggtcaagtagttacccacaaagggaagtccatcagactaacagcggatctctcagcagaaaccctacaagtcagaagagagtgggggccaatattcaacaaccttaaagaaaagaattttcaacccagaatttcatatccagccaaactaagcttcataagcaaaggggaaataaaattcctttacagacaagcaaatgctgaaggatgttgtcaccaccaggcctgccttaacaagagctcctgaaggaagcactaaacatggaaaggaaaaaccagtaccagccactgcaaaaacataccaaaatgtaaaaaccatcagcactgttgaagaaactgcatcaactaacaggcaaaataaccagctaccatcataatgacaggatcacattcacacataacagtattaaccttaaatgtaaacaggctaaatgccccaattaaaagacacagactggcacattggataaagagtcaagacccatcagtttgctgtattcaggagacccatctcatgtgcagagacacacataggctcaaaataaagggatggaggaagatttaccaagcaaatggaaagcaaaa

SEQ ID NO: 2827 - DNA, 335 bp, Homo sapiens
aaatttaatcagaaccctctataagtagcaattaaaggagactttcacattttacagctcccttccccttatcattgaattaatccttatcagaaatttgggatagaaaggggcctttccttgaatgtcctataagctactctcttcaagttacttgatgggataatgaatggaatctggtgcttactgactccacacctatgttaagccaagcttctctttgtgtgtacaggtacaacagaatagctcgggaatggactcagaagtatgcgatgtaattaaagaaattattggataacctctacaaataaagataggggaactctgaaaaaaaa

SEQ ID NO: 2828 - DNA, 797 bp, Homo sapiens
  SIMILAR (148)..(210): 1001254mologous to Homo sapiens Human ORFX ORF2695 polypeptide sequence SEQ ID NO:5390,accession number AAB42931,Smith -Waterman Score=106.
ctgacaatatcagtaatctagttgcaaggaacttgtagttattatatttaaagtcatttcccatgaaatttatatttgaagttttctaattcttggttacgcactcaaatccccaaatggaaattcaattctgtctttttatttacagaatatactgatgataatgctctgattcctaagaattcttctgtaattgttagaagaatcccctattggaggtgttaaatcctacaagcaagacatatgttataagtcgaactgaaccagcgatgggcaactacaaaaggcagtatgtaaaaacacaatctcacactttttcctacacattgcttttacctttataatgtggcagtggaggtaaatcattttagaacttaatatcccaactgatcatagtacatattgtaaataaaatgtattttgatgacagctcagttgaatatggataatatgtggcatcacttgcacacttattttgtagaaatgggtaatttgtgcccgtaacactgtttcatattaaatatgatagcattatccctgtatgacactgtgttgtacagttaatgtatgatcctttttagatcgtttaggttttacactaaggaacatgatgacatgttctacatttgtctgtctatagttagtgtatgatcctttttagatcgtttaggttttacactaaggaacatgatgacatgttctacatttgtctgtctatagttagtattttgtatgtatgtacaggctgttgtgtgctttttgtttcttgcaataaaaaatgtttggagtgtaaaaaa

SEQ ID NO: 2829 - DNA, 2194 bp, Homo sapiens
  SIMILAR (16)..(270): 591254mologous to Homo sapiens UbcH5B,accession number U39317,Smith-Waterman Score=235.
  misc_feature (1)...(2194): n = a,t,c or g
cacccgcctcccaccatggctctgaagagaatccacaaggaattgaatgatctggcacgggaccctccagcacagtgttcagcaggtcctgttggagatgatatgttccattgggcaagcctacaataatggggccaaatgacagncccctatccagggtggagtatttttcttgacaattccatttccccaacagattacccccttcaaacccacctaaggttgcatttacaacaagaatttatcatcccaaatattaaccataatgggcagcatttgtcttgatattctacgatcacagtggtctccagcactaactatttcaaaagtactcttgtcccatctgttctctgttgtgtgatcccaatccagatgatcctttagtgcctgagattgctcggatctacaaaacaagatagagaaaacgtacaacagaatagctcggggaatggactcagaagtatgcgatgtaattaaagaaattattcggataacctctacaaataaagatacggggaactcttgaaagagaaagtccttttggatttccatttgacttgcttttctatggagcccacgcctcatcttcccctgtgcacatgtttacctgatacagcagtgctgccgtgttggtacatacttgggaaccaccaacctagaaatacttgtacttctggtaccaacattggcctcctaggcagagaagtgtgtgtgtgacaagccagttctacaggcattacctaggtgtgagacttaaaagcttttcttattgacttaaatttgggataacagcaaggtgtgaggggggtggtggggtatgggtgtgtgcttgggatggggaaagaaaaggctccactcacctataggagattatttttaagtggaatccatttaaactcaaaaccagttatgaaaggccaaggtgaagaagaacatgaagctgtgtcctgtattcattttattcccgaaggagcctacgtcttaagggtgaaaagttatgccccaacccagattaaaactctaccccaacatcctgccattttaaaggtctaaggtttaactggtcaaccatttaaatgggattgggagctattagtacatcaaagtgtgatgttgctttgttccccaactctttttacatcttccctacccccttcaaacctttggccttttcagcccttctttctctcttccatattctttggtttcgtatgtggtttcctcagttaatacataggctaatagctcttatttttccttatgtttttaaccgcttagggtctatttggatgtaaggggtgaaaattcatttgatggaaatacttggtggtatatttaaagaccccaattctgcctctggagcttggtactttcaagaatgattaatctgtggtaataaacatagattaatacagtcattacatataattttgtgtgaataggctttttcatttttaaaaagtttgtctaactgaaattagtggtggattttctcccacttctgaaatgttccatttatactgcgctgcattttaaggatcatgaaaccaattcccagttaccattgtaaaaaggatatcttacggagtaattttattgaacaagttagaggcataagcttaagagcatttcccatgaaacaacacatgcagcattcccaggaacttgattgttaaattcaataagaaatttgctttattaatgaaactaagctgcatttcatcaaaaccttgtgacattcccttggtacataggacataaaacacagaggcattgctatttggtaagttaagcttctgtgattgtaattataaaagagcaacattgaccaaacctgggaaacaagagcacagtcttgtttggagagtctacataattactttgcactaacatttgcaggatgttcacacaattttaaattgtactgtatgtggctttttgaagtcttcccttgaccctagtaaaatatagcttgaaacttgtaaacaactgtgtttgccagaaacatcattcatgtgaactaggcaagttaccttttttccccccttcttttcctaattgtaaactaggccaacctgaaagccatggctgatgctctagccatcaggttctttcaaatgcatctttacactcttgcccaaaagttaaggaataaatgtcccctgcttttggttttaaaaaaaaaaaaaaaaaa

SEQ ID NO: 2830 - DNA, 475 bp, Homo sapiens
  misc_feature (1)...(475): n = a,t,c or g
gctgcatgagcaantccgacgaggttgcctcaggtaacaaactacagaaagtgaaattgcagataaaggggattactgttcctttgctctaaaattggtgtttgggtgatcagaagcaggtagccaatgggaagagcacttctgagtgataactaaagcagcttggtggccttttcacattctccaatgttcaaacatattttccactttccattttctctttcacctcattttgcctctctatcccccatccctgcttatttcttaagcccattgatggcactcattaaattgtatttagggctaatgagtcattgttccttaatatcgttttcaatatgccacaccttataaaattgtaatcaaagatatctcactctgtcattgttaatctaagaataaaaacactgactttaatacggctttactaaagttcaacctttttaattagggaggccttctaggaattctggcg

SEQ ID NO: 2831 - DNA, 339 bp, Homo sapiens
atgggccgggcatggtggctcatgcctgtaatcccagcactttgggaggctgaggcgggtggatcacctgagagcccaagcttcctctgtgcccaacagccactttctagaaaccggcaacctctgtccccgtcatcgtctgtgtttgttcctccgcaaagcccgagcttcctctgtgcccagccacctacacagaacatcatgctggtcagccacattggtggtatcatgctgctcgagtctggtgagctggaagtagcaaatatctcagagaggagagatcaacccacactaactcaggacctcgcgaccttgttgaaatgtccagggatccagtga

SEQ ID NO: 2832 - DNA, 2358 bp, Homo sapiens; identical to SEQ ID NO: 1550
  SIMILAR (940)..(2355): 991254mologous to Cloning vector pBACe3.6 levansucrase,accession number U80929,Smith-Waterman Score=2471.

SEQ ID NO: 2833 - DNA, 1555 bp, Homo sapiens
  SIMILAR (1297)..(1013): 521254mologous to Homo sapiens Human secreted protein, SEQ ID NO: 7870,accession number AAG03789,Smith-Waterman Score=187.
  misc_feature (1)...(1555): n = a,t,c or g
gactttatttatatattaggtagatccatttattttttaaatacaagtataattttggaaggggtatttgacaaattcagcattaactgccaacttctatagacatgttttaacaaaaagcaaaacaaaacaaaacaaaaaaacaaaacaaggcatttactcttggccctttcagtacaggcgaaagtgttctattgcatcacaagtgctagtgatgcagtaacagatccaaggggcataatattaaatatggtttttttccaactgcgatttagttgaaaaataaccataatacaaacatatattaatggctatcaagacccagcagtgatctgcagaataccctagagggcctaccctaatttaggaagggttggaaaccttagttaaacccgtatttaaagtcagtggtttttaattcctaggatttaacaatgacagagtgagatatcctttgattaccaattttataaggtgtggttggggaattgagaggagacagatattgggggaagcctggccagtgtgtgcctgagttaagagttgggaatgtggctccaaattagtccaatattggattaggattattgttttagaaaattttaaatgtgcccctaaattgtggcatattgaaaacgatatttaaggaacaatggactcaattacccctaaatacaatttaatgagtgccatcaatgggcttaagaaataagcagggatgggggatagagaggccaaaatgaggtgaaagagaaaatggaaagtggaaaatatgtttgaacattggagaatgtgaaaaggccaccaaagaaactgctttagttatcactcagaagtgctcttcccattggctacctgcttctgatcacccaaacaccaattttagagcagaggagcagtaatcccctttatctgcaatttcactttctgtagtttgttacctgaggcaaccttgggccaaaaaatataatgtggaaaattccagaaataaacaattcatgttttaaatcataagccggccgggcatggtggcgcatgccctataatccccagcactttgggaggccgaggcgagtggatcacctgaggtcaggagttcaagaccagcctggccaaacatggtgaaacccccatctctactaaaaggtccaaaaattggctgggcatggtggcggacgcctgtaatccccagctacttgggaggctgagnccaggagaactgcttgaacccaggaggcagaggttgcaagtgagccaagatcgcaccactgcactccagcctgggcaagagtgagactccatctcaaaaaaaaaaaagaataaaataaaataaatcacaagccatcctggagtgatgaaatctcatgatctcctgctctgtcctgcctgggatgtgaatcacccctttgtcctgcttatccacactgtatactacctgccccttagtcacttagtagccgccttggttgtcagactgaaaaaacatagttgataaagggttcagtactatctgaggtttcaggcatccactaggggtcttggaatgtatctctta

SEQ ID NO: 2834 - DNA, 824 bp, Homo sapiens
  SIMILAR (285)..(157): 721254mologous to Homo sapiens PRO2550,accession number AF130089,Smith-Waterman Score=150.
  misc_feature (1)...(824): n = a,t,c or g
atgtnagaaaaaccnttagnttaaatacntagtgaaagtgttttcaattaancccccggatcaaccctagttcaagatgactgatgccacattaaaataggcaaatgtgcccaagtttccaggttttatttacttgaaataatatcacatctcctactgggcgcggtggcttatgcctgtaatcccagcactttgggaggttgagatgggcggattgcctgaggtcgggaattcaagaccagcctggacaacatggtgaaaccctctctctactaaaaatacaaataattagccaggagtggtggcacatgcctgcagtcccagctacttgcgaggctgaggcaggagaatcacttcagcctgggaggagaaggttgcagtgagccgagatcaggccactgcaccccagcctgggcgagagttgacactccgtcttaaaaacaaacgaacaaaaaaattccagtactttacacacaaaaagtcattggattttccaatttcctgggcactaggatgttacattgacaaaagcagacgtaaagcctgggatttggggacaatcaagggaatagttacaaacacattattcaaattcccaaaacaaagaatctcaggttgggaaattttcccttaatctattgggggacctacttatgtagggaaaaccattaggttaatactaggtgaagtgtttttcattattccaggatcaacctagttcagatgactgatgcacattaaataggcaaatgtgccaagtttcaggttttatttacttgaataatatcacatctctactgggcgcggtggcttatgctgactat

SEQ ID NO: 2835 - DNA, 361 bp, Homo sapiens
  SIMILAR (180)..(359): 981254mologous to Homo sapiens p75NTR-associated cell death executor; NADE,accession number AF187064,Smith-Waterman Score=325.
  misc_feature (1)...(361): n = a,t,c or g
cgtctggctaccagctccccgctgccctgagctcggcgggctggcattcggcccggtgaagggcggagcaggtctgcgaggctaagtgtctccgcggcgcacctcgcggcgagaatccggaggagaaggagactgcaaggataggcccagaaaaacaaccagnnnnnnnnnntctcatcatggcaaatattcaccaggaaaacgaagagatggagcagcctatgcagaatggagaggaagaccgccctttgggaggaggtgaaggccaccagcctgcaggaaatcgacggggacaggctcgccgacttgcccctaattttcgatgggccatacccaataggcagatccatgatgggatggc

SEQ ID NO: 2836 - DNA, 915 bp, Homo sapiens
  SIMILAR (467)..(826): 761254mologous to Homo sapiens Human ORFX ORF2695 polypeptide sequence SEQ ID NO:5390,accession number AAB42931,Smith-Waterman Score=440.
ccccaatccacggagagagagacccgccgggaggtgcggccgcgctattgggacccctgaccccgtgtgcgtcatgcggactcttaacgtgtggactgaccgctactgactgcaccgccaatccccccgtctctgccggccccttagcatgagcagtgggggaccgggccgggtgacattgtgcccgttggcggattctcgattttcccctcttccccgtcctcgtcctcctcctcccccatgaagtgattctgagtatcggggggtctctgggattattgttctgacgaacccctgcttgtggttggggggtatttaatctgaggccttaagggtccttcgttgtcttttgagtgttttgtgtgtgtacataatttttgctcttaaaagtttataaatatacgtatattgagagtgtccacgtctcctcgctgaaaccttagggaattcccttgggcaccatgtcctgtgttgcattataaattttcctctaaactcaacctatggatacccgtcaccctttgagggggctcccacatcctcccctctgcgaccttaaagaagcagatttatggggagagagaagctgaaagctgccgactgcgacctgcagatcaccaatgcgcagacgaaagaagaatatactgatgataatgctctgattcctaagaattcttctgtaattgttagaagaattcctattggaggtgttaaatctacaagcaagacatatgttataagtcgaactgaaccagcgatggcaactacaaaagcagtatgtaaaaacacaatctcacactttttctacacattgcttttacctttataatgtagcagtgaagtaaatcattttagaacttaatatccaactgatcatagtacatattgtaaataaaatgtatttggatgccagct

SEQ ID NO: 2837 - DNA, 1025 bp, Homo sapiens
ggagaggaccgagaagagtgacagggctgtgcgctctggggcacctcatgcagacgggagtagggaggctgttttttgcgcgtgcatatggcggtggcgggtggggggaagggggagatcctgctgcactggccgcccaagttggggggcgagctcggcggtgacgcgcggtcctcacgtgacccggagctgcagagctacgcagccttcgttgcagtcgtcactcgcatctggctaccagctccccgctgccctgagctcggcgcgctcggcattcggcccggggaaaagcggagcagggtctgcgacggctaagtgtctccagcggcgcacctcgcggcgagaatccggaggagaaggagactgcgaggataggcccaggaaaaacgaagaagatggagcaaccctatgccagaatggaagaggaagaccgcccctttggggaggaggtgaaggcccacccagccctgccaggaaaatcgaacggggaacaggctcggccgacttgccccctaaattttcgaatgggcccataccccaataggccagaatcaatggatggggatgggtggaagatggagatggatatgggaaaatattccatgggagggagatgaagagaaatccagaaggaaaactttaggggagctggcagtttgagggaatttgttcttgccgttattccttattggggggagctcttcttaattcaccatgacccatccatgaatgaaattttgcccttaatgcccttgactccctgcccatttatcatgagattaatactgtgattccccgctggtttcctttttgccttgccattttcctaaatatgcctttactgatcccggtttgctgtgaaccctatgttaatttccatgtgtcaagtgggtcttgtgttgccagcttccaatttgaagattgcctttgcaactcagttgtaagtttctgtcagcagtagttttcacccatttgctatggaaaaaatttaaaggctaattaaaggcaatttaaaaaggcaatcc

SEQ ID NO: 2838 - DNA, 2014 bp, Homo sapiens
  SIMILAR (89)..(499): 1001254mologous to Homo sapiens synaptogyrin 3,accession number AJ002309,Smith-Waterman Score=722.
gcggcagcggcagcggcctcgggcggggccggccggacggacaggcggacagaaggcgccaggggcgcgcgtcccgcccgggccggccatggagggcgcctccttcggcgcgggccgcgcaggggccgccctggaccccgtgagctttgcgcggcggccccagaccctgctccgggtcgcgtcctgggtgttctccatcgccgtcttcgggcccatcgtcaacgagggctacgtgaacaccgacagcggccccgagctgcgctgcgtgttcaacgggaacgcgggcgcctgccgcttcggcgtcgcgctgggcctcggagccttcctcgcctgcgccgccttcctgctgctcgatgtgcgcttccagcaaatcagcagcgtccgcgaccgccggcgcgcggtgttgctggaccttggcttctcaggactctggtccttcctgtggttcgtgggcttctgcttcctcaccaatcagtggcagcgcacggcgccagggccgtttcacgacgcacgcgggggacgcggcgcgggccgccatcgccttcaacttcttctccatcctcagctgggtggcgctcaccgtgaaggccctgcagcggttccgcctgggcaccgacatgtcactcttcgccaccgaacagctgagcaccggggcgagccaggcctaccccggctatccggtgggcagcggcgtggagggcaccgagacctaccagagcccgcccttcaccgagaccctggacaccagccccaaagggtaccaggtgcccgcctactatcggctggcaggcacagaccagggctccaaggccaccccaccaacgcaggccccagggtctccgggacctcccttgggtccttccagctcagtgccgcggacagagtaggtggccgctttgcgccatccggggccaagagggggtggacccgcgtgtctgggctgcccctggcgaagttcccccagtccctcagcacctgggcccagggactgagggtcctgagaaggggatagcactgcccaggacgtgtgtccttagcctggaatggactggggctggggaaggctttcccctcttgggccacacctgctcactctggggttgggggtccagctgccctctacgatcaggtgcaggggctgcccaggacaaagcgggggcaggggaaagacaccacccttcgccccaagactggggatcctggccactgttcccatcccatgtccctgtgggtagttgattgtcttcgtttctgtcatgggggggcgtcccgtccggagccactctccactttctctcacaggctgctagaacagcccagccctgtcagtgttgtgatcatgggccagtcttcgggtttcacctcctagtactccacaagctgctcctttctctgtggccccggcccctgcccaggtgtgggtggttctggccaggaaggcacaaggtagctgtgggccaagacaccagccctggtcctagcccttcagtaagaccttgccaggagaggagaaggatgcctgggtgccaggcaagacaaagcccctcagcaggagagaggcccagaggctccagctggccaccgtgccccacaagatggcccctgtgtggttccctttaccttggcttcctggcccagtcccctgcctctccaacctgcaccctgcttcctgggcccagtcccaggttggagtccctctggcatagctgacttacttcatgcattgcttcaaagctggctttttcacatttaagttcaacaccaaacgtggtttggccacattttcattcagacagacacctccctctgggagatgcagttgagtgacaaccttgttacattgtagcctagaccgaattctgtgtggatatttaagtgaacatgtttacaatttttgtatatatcactctctccctctcctgaaagaccagagattgtgtattttcagtgtcccatgttccgactgcaccttctttacaataaagactgtaactgagctgactgtgaaaaaaaa

SEQ ID NO: 2839 - DNA, 1947 bp, Homo sapiens
  SIMILAR (184)..(570): 641254mologous to Cloning vector pCMVLacI lac repressor,accession number U64448,Smith-Waterman Score=365.
atggctgatagaaccaaggaactggaaagtattccagacagtaggaatcgaggaagcatcatgggaaattctagggattttgccgatttcggaaccaccatcaaacaggattttcgcctgctggggcaaaccagcgtggaccgcttgctgcaactctctcagggccaggcggtgaagggcaatcagctgttgcccgtctcactggtgaaaagaaaaaccaccctggcgcccaatacgcaaaccgcctctccccgcgcgttggccgattcattaatgcagctggcacgacaggtttcccgactggaaagcgggcaggattttgccgatttcggaaccaccatcaaacaggattttcgcctgctggggcaaaccagcgtggaccgcttgctgcaactctctcagggccaggcggtgaagggcaatcagctgttgcccgtctcactggtgaaaagaaaaaccaccctggcgcccaatacgcaaaccgcctctccccgcgcgttggccgattcattaatgcagctggcacgacaggtttcccgactggaaagcgggcagtggactcttgttccaaattggaacaccactcaacccttatctggggatattcttttgatttataagggattttgccgatttcggaaccaccatcaaacaggattttcgcttgctggggcaaaccagcgtggaccgcttgctgcaactctctcagggccaggcggtgaagggcaatcagctgttgcccgtctcactggtgaaaagaaaaaccaccctggcgcccaatacgcaaaccgcctctccccgcgcgttggccgattcattaatgcagctggcacgacaggtttcccgactggaaagcgggcaggttatctgtcagaagggttggtaacaaagtggtaccgttccccacgactgctcctttcccccaataactacaccaaagccatcgacatgtgggccgccggctgcatcctggctgagatgcttacggggagaatgctctttgctgagcgggatagagcctctgcatcctccttgctcaccattgcttgcctgctattaacaaagcagccctcctctgtggcctaccagatggcccctcttcttctctatcttgtcctcccgtgccagcacctcatctcatctcccatcatcccccacactgaggctgttggcacctacgtcatggcctccctctccacaattggtcccacatcattctggctggattttgccgatttcggaaccaccatcaaacaggattttcgcctgctggggcaaaccagcgtggaccgcttgctgcaactctctcagggccaggcggtgaagggcaatcagctgttgcccgtctcactggtgaaaagaaaaaccaccctggcgcccaatacgcaaaccgcctctccccgcgcgttggccgattcattaatgcagctggcacgacaggtttcccgactggaaagcgggcaggattttgccgatttcggaaccaccatcaaacaggattttcgcctgctggggcaaaccagcgtggaccgcttgctgcaactctctcagggccaggcggtgaagggcaatcagctgttgcccgtctcactggtgaaaagaaaaaccaccctggcgcccaatacgcaaaccgcctctccccgcgcgttggccgattcattaatgcagctggcacgacaggtttcccgactggaaagcgggcagaattttgccgatttcggaaccaccatcaaacaggattttcgcctgctggggcaaaccagcgtggaccgcttgctgcaactctctcagggccaggcggtgaagggcaatcagctgttgcccgtctcactggtgaaaagaaaaaccaccctggcgcccaatacgcaaaccgcctctccccgcgcgttggccgattcattaatgcagctggcacgacaggtttcccgactggaaagcgggcagtga

SEQ ID NO: 2840 - DNA, 681 bp, Homo sapiens
  SIMILAR (16)..(519): 861254mologous to Homo sapiens 63kDa protein kinase,accession number X59727,Smith-Waterman Score=750.
atgggggtcgaaggcaggtaccctgtgagcctgtcgtcggacctggagtggcggcctgaccggtgccaggacgccagcgaggtacagcgcgacccgcgcgcgggttcggcgccactggctgaggacgtgcaggtggacccgcgcaaggactcgcacagcagctccgagcgcttcctagagcagtcgcactcgtccatggagcgcgccttcgaggccgactacgggcgctcctgcgactacaaggtggggtcgccgtcctacctggacaagctgctgtggcgcgacaacaagccgcaccactactcggagcccaagctcatcctggacctgtcgcactggaagcaggcggccggcgcgccccccacggccacggggctggcggacacgggggcgcgcgaggacgagccggccagcctctttctggagaatccgcaaggggtcaagagcacccaaggcggcccaaaacaccccagcccgcccgcccacgaccccgagcgccgcttggctgcctcgccccccggccgcccggcccgactttggcagactcttgctctgtcaccaagtggggccaggtatagtgacgggtaccgagctcgaattcgtaatcatggtcatagctgtttcctgtgtgaaattgttatccgctcacaattccacacaacatacgaggcggaagcataa

SEQ ID NO: 2841 - DNA, 4742 bp, Homo sapiens
  SIMILAR (948)..(1967): 961254mologous to Homo sapiens 63kDa protein kinase,accession number X59727,Smith-Waterman Score=1670.
  misc_feature (1)...(4742): n = a,t,c or g
gcggccgcagacaaagggcggctcgcgcccgggccgccacgctctcgggctctgcctcgggaaggagacttggtctgaaagatgccacattcctgcagcctctcttggtgcagtggaatacagtcttgggcgaggtggcgtggatgagctggtgaaagaggatgctgcccacatccaaaggctccagaggatcctggcctggcagctgagctcccctgcatttggaacctcaggcgtaacttggtgtagagctcatgaaaggtgcttgtgtttctccagcttttttcaccagtgccttaccagactgggctcaggttttggaatctaaggtgaagcctggtagaaacaggagaggtaagaaagaagcccctgggattgcctccagaattcatttgatggggattccctgcatactggcttgggaacacagaaagaggctgtgacacagctgagctttggagcatcttaaggagctccagctccagcaaaacaaactcttgcatttcagcccagaaagagcctcttgtaacaaagtattccaaaggggagagtttctgcatcttttactttgcagtccactatggtagaaaacttgacattccatagataatgatactgggttttctttccaagatgccagctttaaaagaaatatgagccattctaagctttaagaagggttcaggaaacacaggaattagtagacagccctcccaatgcaggttaagacgacagcctgcgcccccaactagcacagctcagcgagcatgaccatatgccattctcgtctccagagagctggtggcagtgacctcactaggagaaaacacatccctcagccgtgggacttgacagaatgaggtgcgcgagggaggccgctagccgagacttggcctttcctgactgcccctgtgttacctgggcagctccagatcactgagcccacaatggctgagaagggtgactgcatcgccagtgtctatgggtatgacctcggtgggcgctttgttgacttccaacccctgggcttcggtgtcaatggtttggtgctgtcggccgtggacagccgggcctgccggaaggtcgctgtgaagaagattgccctgagcgatgcccgcagcatgaagcacgcgctccgagagatcaagatcattcggcgcctggaccacgacaacatcgtcaaagtgtacgaggtgctcggtcccaagggcactgacctgcagggtgagctgttcaagttcagcgtggcgtacatcgtccaggagtacatggagaccgacctggcacgcctgctggagcagggcacgctggcagaagagcatgccaagctgttcatgtaccagctgctccgcgggctcaagtacatccactccgccaacgtgctgcacagggacctgaagcccgccaacatcttcatcagcacagaggacctcgtgctcaagattggggattttcgggttggccaaggaatcgttgaatcagccattactcccaacaagggttatctgtcagaagggttggtaacaaagtggtaccgttccccacgactgctcctttcccccaataactacaccaaagccatcgacatgtgggccgccggctgcatcctggctgagatgcttacggggagaatgctctttgctggggcccatgagctggagcagatgcaactcatcctggagaccatccctgtaatccgggaggaagacaaggacgagctgctcagggtgatgccttcctttgtcagcagcacctgggaggtgaagaggcctctgcgcaagctgctccctgaagtgaacagtgaagccatcgactttctggagaagatcctgacctttaaccccatggatcgcctaacagctgagatggggctgcaacacccctacatgagcccatactcgtgccctgaggacgagcccacctcacaacaccccttccgcattgaggatgagatcgacgacatcgtggctgatggccgctaaccagagccagctgtccaactgggacacgtgcagttccaggtaccctgtgagcctgtcgtcggacctggagtggcggcctgaccggtgccaggacgccagcgaggtacagcgcgacccgcgcgcgggttcggcgccactggctgagaacgtgcagaaggacccgcgcaaggactcgcacagcagctccgagcgcttcctagagcagtcgcactcgtccatggagcgcgccttcgaggccgactacgggcgctcctgcgactacaaggtggggtcgccgtcctacctggacaagctgctgtggcgcgacaacaagccgcaccactactcggagcccaagctcatcctggacctgtcgcactggaagcaggcggccggcgcgccccccacggccacgggggctggcggacacgggggcgcgcgaggacgagccggccagcctcttcctggaggatcgcgcagtgggtcaagagcacgcagggcggcccagagcacgcccnacccgcccgccgacgaccccgagcgccgcttgtctgcctcgccccccggccgcccggccccggtggacggcgggcgccagcccccagttcgacctggacgtgttcatctcccgcgccctgaagctctgcaccaagcccgaggacctgccggacaataaactgggcgacctcaatggtgcgtgcatccccgagcaccctggcgacctcgtgcagaccgaggccttctccaaagaaaggtggtgagggcggaggggccgctccaggccccacagagcaggagacccccagagaaagccggggctggcaggaggcggccgcctccgccctctctgctgccttggggttggcagaacacgtgaaggatccgaggagcgagaggaatgtccatttcttaaactgccttaataactagcctttaacctgtgggagcgggtttgaactggaccctggcttaggggttgatcactttcctagcaaaggggagaccacatgtggtgcacagggaagaaacggctttagacagcagtctgcgggccccacctgggtggcaggatgccgagaaatcttgcagaggtagctccgaaaccatctgggcccaactagccttcaacttgacagctgagggaaagggcaatttagggcccagaggaggcagagacactcgcttaagatcacaggcttagtgtgaggacgagcttgaaatcccagtctcctggcccccaggccagggttcttgtccaccatagaatgtcttcctctacttggggtcgttctggctttttgttagaaacttggtctgagatgtttcttccctgtccattaccattcgatgttcttttattcagagcaatgtttcttgtattctgaaactggaaactgaaccagtttgcctttctcctagtcaccaagcatactttcctggctccccaagtacttaaatgttctcatctgtcgcacccctgtatttgcctcacccctgcatggtcggaaatcttcgtttcaggtcagaacagcccgggggtctgtggggtaaaatcagcccttctcccagggcctgtgcacacaccccctcagcactccctatggcaatttcctgacacggaaagacacagccctctttccccactgggcgtcctaccccagtgaggttgaagggcaccaatttccaagaatccctccaacctccctgccaggcactcccccttcaccccacacccggcccccccaccctaaccacagcgcctctccagacctacctcgggacctaatgttctctacatgaactgctcatttggaggacagcagttaaggtcctgccatagagcaaatgtgttagggagagaaggttttcacatggggacccaacattcctttcattcaatacttttcctggagtttggatcatccatttaggccttggaacaaacagcagacccttacagagatgtgttgggagaggcacgttgtgaccttgggggcaaggaatccagaaaggtaggaagatatgaaaagagaggtgtcaacagcaagggctcttaggggtcaggcaccagcatggagacctcatgacaaaggaagggactcaaagcagcaatgcccctcatagtgtaggctaaggtgagtttggggcatgcaaacctgtgtgctcacccacagagcatggggtaatggtgtggagacacaggccctctgccgaagcgtggggtggggacactgacagcccctatctggtccccagggaacattctaccatttctgccactggtgttcagctccttctcttcccccaacactcccaaagatacccacaggaagttccagccagtttccaggtagaggattccaccagttggtcttgggctgcgttcacccctcacattcacagcaccctttaaatcctaatcaggcaaacctataaatttgtacgttggaaccctgcaacacatttggaaactttatatttaaaaaccggaattaatcaccacttgcccaaccttttaaatgggaaaatatgtaaataggaagtgtttgggttttgttttttcttttgagaaaaagaaatgtacacccactcctcatgtgccattttgtcctcagagggcggctttacttttttggtaaaggaacaagctgctggccttgaccaggagttcatatataactgttattacagaggaattgttataactactaatgtttttaaaaaatttattaaacattattaaacttgatcaggtcaggccaaataaagttttattggaac

SEQ ID NO: 2842 - DNA, 395 bp, Homo sapiens
  misc_feature (1)...(395): n = a,t,c or g
atccttactcagtgcggtggattccaacctactctggataaattttccagtagggcatctgaaattgctttggcaaaagcaaaacaggttatcaatacaccaaggacatcaagtagttttaatgcaactacagtgttgagtgcttttttactgggagaaaaatcctagcagaacctgctactctgggcgcattaggtagttttatgcaactatagtattaagagttttattggaagaaaaaacactgtcagagcttactgctccagaccttttttttaatagaagagactggtaaaaatgatgcaggggctgaatgaaagccagctctgctcnnnnnnnnnnnnnnnnnnnnnnnnnnnnnnnnnnnnnnnnnnnnnnnnnnnnnntcgctaggc

SEQ ID NO: 2843 - DNA, 5569 bp, Homo sapiens
  SIMILAR (754)..(1080): 921254mologous to Homo sapiens Human p56-1 protein,accession number AAW69249,Smith-Waterman Score=512.
  misc_feature (1)...(5569): n = a,t,c or g
aacactatacatgatacgatcgagctgtacctctctcgctgctgggtgtgctgtgctgtcagtgcgatcgcgagggcgcgagctgcgctccccaatataatcgtaggcgagaagggcggcgcgggaagtgctaggagcagcccgcgccgtgcggccgctgagtgcgcccagatcccacagccgcgacgcagtccagcggtgcaggccgagccagctcgcaggtcgcgctttcccccattcacacttcagggcgctttcagctctgcgattattggagccggaattggtggcacttcagcagcctattacctgcggcagaaatttgggaaagatgtgaagatagacctgtttgaaagagaagaggtcgggggccgcctggctaccatgatggtgcaggggcaagaatacgaggcaggaggttctgtcatccatcctttaaatctgcacatgaaacgttttgtcaaagacctgggtctctctgctgttcaggcctctgggtggcctactggggatatataatggagagactcttggtatttgaagagagcaactggttcataattaacgtgattaaattagtttggcgctatggatttcaatccctccgtatgcacatgtgggtagaggacgtggtagacaagttcatgaggatctaccgctaccagtctcatgactatgccttcagtagtgtcgaaaaattacttcatgctctaggaggagatgacttccttggaatgcttaatcgaacacttcttgaaaccttgccaaaagcccggctgttctgagaagctcctcaatgaaatgattggtcctgttatgagggtcaattatggccaaagcacggacatcaatgcctttgtgggggcggggtcactgtcctgttctgattctggcctttgggcagtagaaggtggcaataaacttgtttgctcagggcttctgcaggcatccaaaagcaatcttatatctggctcagtaatgtacatcgaggagaaaacaaagaccaagtacacaggaaatccaacaaagatgtatgaagtggtctaccaaattggaactgagactcgttcagacttctatggacatcgtcttggtggccactccgttgaatcgaaaaatgtcgaatattacttttctcaactttggatcctccaattggaggaatttccatcaatattatcaacatatagtgacaactttagttaagggggaattgaatacatctatctttagctctagacccatagataaatttggccttaatacagttttaaccactgataattcagatttgttcattaacagtattgggattgtgccctctgtgagagaaaaggaagatcctgagccatcaacagatggaacatatgtttggaagatcttttcccaagaaactcttactaaagcacaaattttaaagctctttctgtcctatgattatgctgtgaagaagccatggcttgcatatcctcactataagccccccnggagaaatgccccctcctatcattctcccatgatcgactttattaccctcaatggcatagagtgtgcagcaagtgcccatggagatgagtgccattgcagccccacaacgctgcactccttgcctatcaccgctggaacgggcacacagacatgattgatcagggatggcttatatgagaaacttaaaactgaactatgaagtgacacactcctttttcccctcctagttccaaatgactatcagtggcaaaaaagaacaaaatctgagcagagatgattttgaaccagatattttggccattatcattgtttaataaaagtaatccctgctggtcataggaaaacacacggttctaattaagtgtgaaggtatagctattgcacttatgccatctccaaaatttctttaagtattcttttcactatccattagggagtttttcttaaacttgtctgataataagaatcacctggagttaggaggtggtggttgcagtgagccaatctcaccattgcacttcagcctgagcaacacgagcaaaactccgtctcaaaagtaaataaaaataatcacctggagtttgttaaaccatatggattctcaggctcctctcttgaagattctgattcagtaggtctgggagtggcgccctggattttgatcaaaattgtagagcattttaaggtgagtacctgagggagaacttaaagacatcttagttggggagtagtccttttgaattttacagctagatataatcttcagtcagataaaatttatgggagctggtgtcttatgcctgactcttagtaatttcataccggtttgaagtacgtgtgcccatgcctaaagccttgactttcagaatgttgtcttttgattcttctgtcttgatttgattaggggtgaaatttagaagtcttagtaatgtaacttgaagatgttaaacaaaaatctcaagtaaaatgaaaagcaaatatgggctactgaattaagaaactggcattctagtattaaatcctcacttcaggagcttttaaaaatactgagacccccccataaccagagattcagattcaaagactgaggataggaccttagcattgtagctatttaaagtttctaatgtgcacccagggttgggaatcaccaatgtgggtgtgaaaatgcctacaaagggttttagtgccttagaagtcctaagaagcccaatctgtatcaaagcagatccattttgcaaggatctttcttttagaacttttctcaggtcttttaggaagaaactttaaaaggaaatctttggtaataagcacagacagcctaacagcagaggcaacttaaaataactccctgnagccagttggccactagaacagaatacttggaatgacacccaaagtttaacccaagtcccagccatatgtcccaaagagttaagtgtttccatttactgtagcattcctgggtgagaaattggttgctgaaatcttaagacaagtggtctcaacccttggctgcacattggaaatcacctgtagggttttaaagccatcccaaatgggtaatttaacaggccagcaaaacttccagaactagttcctgcatcctactgtgcaaagatcatgattaactgtcaagacactgggtagaacagaacaagccaaagattaagagttcaaaagtaaatgcaaccaatttaacatgtagtgttattaaaaaattacaaaggcctagaccagcctgggcaacatggtgaaacccccatctctacaaaaaatttttaaaaagttggccaggcatggtaatgcgcgcctgtggtcccagctgctcgggaggctgaggtgggaaggatcacttgagcctatgaagatcaaggcagcagtgaatccatgatcatgcccactgtactccagcctgggcaacagagaccatcttaaaaaaaaaaaatccttccattgaatagaaacttcaaagtccttcatcagatcatggcattagctactttagcaaaatagtgtaaactttggttctgagtaaaaatgacttcttccctaccacagttgtgaatgttaatatgctgataaaactgccaagatatatttgataggtaggggattaaactcatggtttgtcaaaagagtgtttttttctagttttattcttaacagatatgttgaggtattcatatttgtttccttttgtggttttaatgaagacaatttgtaaagtaatactgttatgtatatgctaaatgttggtaaatactaattaatttccatcatttgtagacttgttttgcaatgggatatatttttacttataataccaatttaggctgggcgcagtggctcacgcctgtaatcccagcactttgggaggccaaggcaaacggatcacgaggtcaggagatcaagaccatcctggccaacatggtgaaaccccatctctactgaattacacaaaaattggctggacatggtggcgcatgtctgtaatcccagctactgtaatctcagctacttgggaggctgaggcaggagaattgcctcaaccgggaggcggaggttgcagtgagccaagattcgcaccactgcactccagccttggcaacagagcgagactctgtctcagaaaaaaaaaaacaaaaaccagtttaggctgggtatggtggctcaccagcacttatgggaggctgaggcaggtggatctcttggaggtcgggagtttgagaccagcctggccaacatggtgaaaccctgtctttactaaaaatacaaaaaattagccgggcatggtggtgggtgcctgtaatcccagctacttgagaggctgaggcaggataatcccttgaacccaggaggcagaggttgcagtgagcagagattcgcaccattgcactccagcctgggcaacaagagtcaaactccatctcaaaaggaaaaaaaaaaaattaaaaatgttgctggtattacatcaaacctactctggataaattttccagtagggcatctgaaattgctttggcaaaagcaaaacaggttatcaatacaccaaggacatcaagtagttttaatgcaactacagtgttgagtgctttttttactggggagaaaaatccttgcagaacctgctactctgggcgcattaggtagttttatgcaactatagtattaagagttttattggaagaaaaaacacttgtcagagcttactgctccagaccttttttttttaatagaagagactggtaaaaatgatgccaggggctgaatgaaagcccactctgctcccagtggctctctgagttgagcatgcatcagttaccttaaggggcttgtttaaaacatccgctaggctccacccgtgtttattcaataagtttgttatgggatataaagaagatgcattttaattaaagttccccagtgatgctgctgttccactataggaaccacacttgaagaactagttctacaattcagctggtatgttgtaaaggagtccaagtccatggaaggagttataaagagtttgctgaaaaatggaggtaacagtggtatggggacttcacatcagttctccctaattggatggttagtttgatccctcttgttcttttgttgtaaacattttctataattagggaaatgcccatttaagagtgagagagggtatataccctaggagcccattgtgtttgggtgttttaccaaggaactttacccatactgggtgtgtagtccattctgtaccagtttaaaagtgattcacggatttgcaggctttttatccagatcacaaaaaaaatcagtctttaagcatttgcttggtaaggtttcttaagaataggttaaaaaatccaaccatctgtaatgtatcctctcgtttgagcttgtgggccatacaattcattaactagatgaaatacattgtggacagcatcctcactacccctctctactcactcacaaagaaccatgatacactggaatgtttttctctggaatcctctttctactcttgtattaaaatttttccccacttcatgattatattcaaaataaacgaactacatcatta

SEQ ID NO: 2844 - DNA, 378 bp, Homo sapiens
  misc_feature (1)...(378): n = a,t,c or g
ggcacgagccaaagcggaggatnnnnnnnnnnnnnnnnnnnnnnnnnnnnnnnnnnnnnnnnnnnnnnnnnnngggtgtacaaaagactcaaatatttactttattaaggagcatttccagagcgttaataatcatataaaaagatgcctaatatccttcctcatcagggtaatgtagcttaaaccacagcaagtcaccattatacacacccattagaatggcgaaaatttaaaaggctgagaatagcaaatgttgtcaagaatgtggagcagcagtaaccctcatgcattgatgatgagtgtagctgcctttaaaaagctggcactttctactcaagttaagtacatgcttgttttatgacctagcaattccattat

SEQ ID NO: 2845 - DNA, 397 bp, Homo sapiens
  misc_feature (1)...(397): n = a,t,c or g
aagcctttttcaaaaaaacccaaaccccctggttggttnnnnnnnnnnnggcaaagctttgccccagggccccccccctttattccccccccttgggggggccgggccggggggttcccagggccggggatggggccccccccggcccccctgggggaaccccnnnnnnnnnnaaaatcccaaaatttggccggccaaggggggggcccccttttcccccccttccgaaaagggttaggccgggggattttttttaccccnnnnnnnnnnntttccattaacccaaattnnnnnnnnnnnnnnnnatttggggggaaaaagtaaaccccccttccnnnnnnnnnnnnnnnngaatagacagggcacatcatggatgatgcaggggtgggggcctcag

SEQ ID NO: 2846 - DNA, 1557 bp, Homo sapiens
  SIMILAR (1351)..(1491): 281254mologous to Neurospora crassa related to nitrate reductase (NADPH),accession number AL353822,Smith-Waterman Score= 58.
ttcccgggtcgacgatttcgtcgcggagtattccaggcgcctgcaactaaacgtggccgggtctgtctgctatgtgccagcggggaaagtttccctgcttcttatcgtctgctttaacgccttaaatagcccgctgaaggctgcagcaggtgctaggtagcagcctcccggccctcgggaaaggcggggtggggaggcgagagcagcttatcctcctcgacctcccttcctggtgacggacgaacagttcccgtagaatttcgcttcaccgagtgaccttgagcccagggcgacggtcagcttgttaattcctggctgcaggaactttgtgagaattttaatgcatggaaaagctgtccatgttccaactgctgtacatcccaaagtctcagtgtaatagcaggaccaaaatattctgtcaatcagctgaccatatacttaatgactcctaaaatctcgtggacttctaagaaagcgccatggcctgtggctgctgttatgattcctgggttgttgcggtgctctgttggagccatccgtattgaggctgcgtcactgagattgacactcagcactttgcgccaccttactctaaccagcataatgaaatccaaaaggaaaactgatcacatggagagaactgcaagtgtccttcgacgggagactatagaaagctaatctaccacctgaaggggtgtcaagggctgagaaataaaggatcctcaccctttacctcaattgtgtcagcagctaaggtgtgtggagctgccagtgagtcaccgtcagtgaagagcctctgcttgcttgttgctgatcaagacttttcctttaaagctggccagtgggttgatttctttattccaggagtctctgtggttggtgggttttcaatatgctccagtcccagactgctagaacaagagagagtgatagaattggcagtgaaatatacgaaccaccctcctgccctctgggttcacaatacgtgtacacttgactgtgaagtggctgtgagagtgggtggagagttcttctttgaccctcagcctgcggatgcctctagaaacctcgtgttgattgcaggaggagtcggaattaaccctctgctttccatcctgcggcacgcagcagcatctcctcagagagcaggcaaacaaaagaaatggatatgagataggaacaattaaaactattctacagtgcaaaaaatacccagcggaactcctgtttaagaaaaatatccttgatttagtaaatgaatttcctgagaagattgcatgcagtttgcatgttacaaaaacagactacacaaatccaatgcggaactcaaagccatacatcacggaaggaagaataacggagaaggagataagagatcatatttcaaaagagactttgttctatatttgtggcccacctccaatgacagactttttctccaagcaactggaaaacaaccatgtacccaaagaacacatttgctttgaggaagtggtggtaggaggcagacaaaggcagaaaaaataaagaggtgagatctaaaaaaaaaaaaaaaaa

SEQ ID NO: 2847 - DNA, 756 bp, Homo sapiens
  SIMILAR (418)..(588): 791254mologous to Homo sapiens platelet factor 4,accession number M26167,Smith-Waterman Score=225.
atgagctccgcagccaggtcccgcctcacccgcgccacccgccaggagatgctgttcttggcgttgctgctcctgccagttgtggtcgccttcgccagaggtgagagcagaaaccaggctgggagggccagcagcggcgagggggagtccgggaagccctggggctgggaggaatcctctaggatcatgatcgcagctgctcttattgcgcgcgtgctgagtctgcgggtacagtgccaggcactgcacgtgcacctcgccacctgctcagcacaacctctgtctgagagaggtctgatttacggctaaggaaaagaaagctgaaggtagtggaaaaggtccctaaagtatctctggctactcaggagtcacaactcccacccctcctcctctcttactccctccctttccccctcagctgaagctgaagaagatggggacctgcagtgcctgtgtgtgaagaccacctcccaggtccgtcccaggcacatcaccagcctggaggtgatcaaggccggaccccactgccccactgcccaactcatgtgagtcctcgcactgcatcagttagtgctcccgctccgtgcctcctctgcccatccctcccccttctaatgccatttgcaaacccaaggactgaaagtcacgtctcttctcttttccctgccagagccacgctgaagaatgggaggaaaatttgcttggatctgcaagccctgctgtacaagaaaatcattaaggaacatttggagagtt

SEQ ID NO: 2848 - DNA, 534 bp, Homo sapiens
  SIMILAR (108)..(371): 551254mologous to Homo sapiens platelet factor 4,accession number M25897,Smith-Waterman Score=186.
ggcacgaggagacccagcccgagtttcccatcgcactgagcactgagatcctgctggaagctctgccgcagcatgagctccgcagccgggttctgcgcctcaacgccccgggctgctgttcctggggttgctgctcctgccacttgtggtcgcctttcgccagcgctgaagctgaagaagatggggacctgcagtgcctgtgtgtgaagaccacctcccaggtccgtcccaggcacatccaccagcctgggaggtgatcaaaggccggacccccactgccccacttgcccaacttgatagccacgctgaaagaatggaaggaaaatttggcttgggacctggcaagccccgctgttacaaggaaaataatttaaggaaactttttgggagagtttagctaattagctggcctacgtgtgtgcatttgctatatagcatacttcttttttccagtttcaatctaactgtgaaagaacttctgatatttgtgttatccttatgattttaaataaacaaaatgaaacaaaaaaaaaa

SEQ ID NO: 2849 - DNA, 193 bp, Homo sapiens
acaaaccacagcaaatttattactcaagatccagtgccacattatagcaccacccgaagccctcaccttccccctcccaacctggcccctagagtacacccaaaacagaaaaaaaaaaggaaaagtgggaggaaagggcactgcctgaggagtccgggagtctggtcatcccggggatgcacgcaggagcttc

SEQ ID NO: 2850 - DNA, 1085 bp, Homo sapiens
  SIMILAR (60)..(596): 521254mologous to Homo sapiens ADP-ribosylation factor,accession number M57567,Smith-Waterman Score=343.
tgtcggaattcccagcccgcaccccgcgtcggtgcccgcgcccctccccgggccccgccatgggcctcaccgtgtccgcgctcttttcgcggatcttcgggaagaagcagatgccgattctcatggttggcttggatgcggctggcaagattcacatattctgtacaaactgaagttgggggagattgtcaccaccatcccaaccataggcttcaatgtagaaacagtggaatataagaacatctgtttcacagtctgggacgtgggagggcagggacaagattcggcctctgtggcggcactacttccagaacactcagggcctcatctttgtggtggacagtaatgaccagggagcgggtccaagaatctgcttgattgaactccagaagatgctgcaggaggacgagctgcgggatgcagtgctgctggtattttccaaacaagcaagacatgcccaacgccatgccccgtgagcgagctgacttgacaagcttggggctacagcacttacgcagcccgcacgtggtatgtcccaggcccacctgttgcccacccaaggcacaggttttgttacgatggttttggactggcttttcccacgagcttttcaaagcgcttaaccagccatggggcaggcccctggatgcccgtaaatctcgctgcgtgcaatcccccacgatgagccagaactccccgactcctcgaggcaagtgccctttccctcccactttttccctcccccatagcccacaggcctctgcttctgctccttgttcctgcctgcatgttctctctgttgttggagccgtggagcccttgctctctgggcacagaggggtcccactcttcctgcctgctgggacctatggaaggggcttcgctgggccaaggcccccctcttccagaggaggagcagggatctgggtttcctttttttttttctgttttgggtgtactctagggggccaggttgggagggggaaggtgagggctttcgggtggtgctataatgtggcactggatcttgagtaataaatttgctgtggtttgtaaaaaaaaaaaaaaaaaaaaaaaaaaagggc

SEQ ID NO: 2851 - DNA, 2095 bp, Homo sapiens
  SIMILAR (1596)..(1868): 521254mologous to Homo sapiens Human secreted protein encoded by gene 44 clone HTDAD22,accession number AAY02693,Smith-Waterman Score=197.
  misc_feature (1)...(2095): n = a,t,c or g
tttttttttttttttttgctgtaaaaatcgtaagtttatttgttaaaaaaaatactgtatttgaaaagtaccttcccttctgggattttcaaataatttgtacactacattttattcatctacacattggaaatgagtaaactggtgaacatatagctttttatacatttaacacaaccagtgcaaattctcctgcctctgaagaaggcagcagaagccctttactcaggaaggttcttcaaattctaggcattactcccaactcctaggggaaattttcggggtggggtgcctatgggtggtataacccatctggattccctcaggggacagggacagggatttcaggcaaggggagctttaaaatattttaaggtaattgttcaacattccatgggtgactctccccaaaaaatctagtggtaggaaaataatctgtacttattcctctttctgcacacaaaggccctcatttaaatttgtgagcctgcttggggatccattacctagccattcagagatcctgtcaaatgcacagcagattggatactcaccatcccaaaggggttcctcccacctggatggggccaatctctagttgacagtgcccctcagagtgcaccatggagatggaatgtcccttccagagagacttttacacagggaaaagcatttgttggctgggctccaactctcatttggtacaaaaagctttacattcttttccctttttacattacattcttcaaagacttccgtgcttgcccagctggataacaactcaagctcctagtgtttactccttgcacagccccaaacccttggaaactcagcttcgttctatcagtgacatcccccattgtgggccgaggaaccacaaaaaccttaaaatacaggcttaaattcagcaagcgaagaacattccatattgaatgggcatgagatatgcctaatcagattgtgtgtgtgtgccgccgtttttttaaaaaaacagcccaattacaccgtatctagtcaaaatgaaccggaatcctaaagcaaccctgcctgggatgttcccacttagtcctaatgcctgttgccccactgtacgcccacagcacccggacagtgttcctttgggaccatcctctgggaaaatgcctctggaacatgcctcccttgatggaaaaccactaatttttgaaagaagtagatgtctggaggcaggtctggtgaataaactgaatagtactgccttggaccccnagctgaggggtggcagtaagcaatgaggatgggctataaagctgttaacgtggctaagggccatccttgggcaggcatttcagacacatctgtagagagggcagtagcatctccgataggccagctctgaaggaagcttaatgcttaatacagtcacactgcataaattagcttagaatgctctcttgggtaaaaaatattaatagtgtatatgcacttgaaaagcaaaattcctcaagaaaaaaagtttaatagcaaggagtttccatcagtcccggtctttgtgaggattaccacaacaaacacttaaaaggatacaacaggtacttattaaatgctgccttgccttttacctcttccttttttttttttttttgagatggagtctcgctctgctgcctatccttgaagtgcagtggtgtgatctcggctcactgcaacctccgccttccaggtttaggtgattctcttgcctcggcctcccgagtagctgggatggactacaggcacatgtcaccatgcccagctaattttttgtatttttagtagagacggggtttctgtgttagccaggacggtctggatctcctgatttcatgatccgcccgcctcggcctccctacctcttcctttacttaataaggaatgcggtctaaattttcagggtgccaagcccccaaactcctcttctagccttctgaattgtggtaataaaaccaggaaacaggtgatccagctgtgcgaaaacagacctcaaatgtatttccagactaaaaagccagacttgcagtgaaatcctatgttccaagtcatcagatcagtttaaggactagaagactagaatgac

SEQ ID NO: 2852 - DNA, 1194 bp, Homo sapiens
  SIMILAR (98)..(322): 501254mologous to Homo sapiens preproglucagon,accession number J04040,Smith-Waterman Score=149.
cggacgcgtgggacagagcacatcaaaagttcccaaagagggcttgctctctcttcacctgctctgttctacagcacactaccagaagacagcagaaatgaaaagcatttactttgtggctggattatttgtaatgctggtacaaggcagctggcaacgttcccttcaagacacagagggagaaatccagatcattctcagcttcccagggcagacccactcagtgatcctgatcagatgaacgaggacaagcgccattcacagggcacattcaccagtgactacagcaagtatcttggactccaggcgtgcccaagatttttttgcagtgggttgatgaataccaagaggaacaggaataacattgccaaacgtcacgatgaatttgagagacatgctgaagggacctttaccagtgatgtaagttcttatttggaaggccaagctgccaaggaattcattgcttggctggtgaaaggccgaggaaggcgagatttcccaggagagggtcgcccattgttgaagaacctggccggcagacatgctggatggttctttctctgatgagatgaacaccattcttgataatctgccccgccagggcactttataaactggttgactccgcaccaaaattcactgacagggaaataacctatatcacctattcagagatcatcttcacaaacatcaccctgctagcccacgtgggatgtttggaaatgtttaagtcctggtaaaattttaaggaggtgtatttctggaggccaacattggctttgcatgcaaataaataaattttctttttagtgttgggtaggccaaaaattacaaattggaataaagttttatcaaaattattgctaaaatatcagctttaaaatatgaaagtgctagattctgttattttcttcttattttggaatgaaggtaccccccaacctgtttacatttagcgataaaattaatttttctatgatataatttgtaaatgtaaaatattccgatctgacatatctgccattataataataggagaatagaaaaattggtaaccacagtggtgaaattggaaagagaacttttcttcctgaaacctttgttcttaaaaatactcagctttcaatgtatcaaagatacaattaaataaaattttcaagcttcaaaaaaaaaaaccaaaaagggcggccgctc

SEQ ID NO: 2853 - DNA, 273 bp, Homo sapiens
gccggggtggcagtggcggcagtggcagtggtggggagaagcccagcggccctgttccccgcagccgcctggacaccacaagagccccaggtctgcagtgtgcccctcagttgagtgggcagggccgggggtggtccagccctcgcccggcccccaccccagctgcccttgctattgtctgtgcttttgaagagtgttaaattatggaagcccctcaggttcctccctgtcccgcaggacctcttatttatactaaagttccctgttttctca

SEQ ID NO: 2854 - DNA, 386 bp, Homo sapiens
  SIMILAR (22)..(207): 911254mologous to Homo sapiens putative,accession number L19267,Smith-Waterman Score=293.
ggcgttttatccccacccgtcaagtccatggacctcaacaagccaattgacaagcggatttcgaagggcgcccagcccacctgccacgatttcaaccagttcactgctgccaccgagaccatctcgctgctggtgggcttctcagcgggtcaagtgcagtacctggatcccatcaaaaaggacaccagcaagctgttcaatgaggaggtgattgcagcccccagagcccccaatttctctgccttctcacctacccactatatgccattaggatgcagctgcctgcggaacagtgtaggcctgagaggggcaggaccagggagagatggagaatggggtgacagcagctaatgacagctgcctttactgtacccaggcctgtatcg

SEQ ID NO: 2855 - DNA, 203 bp, Homo sapiens
  SIMILAR (18)..(113): 1001254mologous to Mus musculus putative,accession number AK003062,Smith-Waterman Score=159.
cccacgcgtccgacaagatggcggataaggagaagaagaaaaaggagagcatcttggacttgtccaagtacatcgacaagacgatccgggtaaagttccagggaggccgcgaaggtgaggaggctcccgctgtcggtaccccctctttaaaaatttcaaataaacccagcaacagagatgatgaggacgcatgcggaagcacc

SEQ ID NO: 2856 - DNA, 483 bp, Homo sapiens; identical to SEQ ID NO: 1657
  SIMILAR (63)..(158): 871254mologous to Homo sapiens Human secreted protein, SEQ ID NO: 4473,accession number AAG00392,Smith-Waterman Score=147.

SEQ ID NO: 2857 - DNA, 677 bp, Homo sapiens
  SIMILAR (45)..(377): 711254mologous to Homo sapiens putative,accession number L19267,Smith-Waterman Score=375.
caacgtcccatttgacctaccaagcccattggacaacgggtctcaaaggggcaccagccccacccgccacggatttcacccagttccattgctgcccacgagaccatttcgcggctggtgggcttctcagcgggtcaagtgccagtacctggatctcatcaaaaagggaccccagcaagctgttcaatgaggagcggttgatcgacaagaccaaggtgacatatctgaagtggctgcctgagtcggagagcctgttcctggcatcacacgccagtggccacctgtacctgtacaacgtcagccacccctgcgcctcggccccgccccagtacagcctgctgaagcagggcgagggcttctctgtctatgctgccaagtacaatgacctcttcctctgaaacatcagtgttaccctcatccctgtccccagcatgtgactggtcactcctggggagacactccccgcccctgccacaagagccccaggtctgcagtgtgcccctcagttgagtgggcagggccgggggtggtccagccctcgcccggcccccaccccagctgcccttgctattgtctgtgcttttgaagagtgttaaattatggaagcccctcaggttcctccctgtcccgcaggacctcttatttatactaaagttccctgttttctcagcgaaaaa

SEQ ID NO: 2858 - DNA, 6910 bp, Homo sapiens
  SIMILAR (4009)..(5898): 951254mologous to Homo sapiens myotonin protein kinase, MtPK= thymopoietin homolog,accession number S72883,Smith-Waterman Score= 3124.
  misc_feature (1)...(6910): n = a,t,c or g
atggcggcgggcggcgcggagggcggctcgggccccggcgccgccatgggggactgcgcggagattaagtcgcaattccgcacgcgcgagggtttctacaagctactcccgggcgacggcgccgctcgcaggtcgggtccggcttccgcccagactccggtgccgcctcagccaccgcagcccccgcccggccctgcctccgcctccggtcccggcgctgcaggccccgcgtcgtccccgccgcccgcaggccccggacccgggcccgccctgcccgccgtgcgcctcagcctcgtgcgcctcggggagccggacagcgccggggccggggagccgcccgccacgcccgcggggctgggctcggggggagaccgcgtctgcttcaacttgggccgtgagctctatttctacccaggctgctgtcgtcgtgggagccaacggtggcatacaccattaactccttttctcccacccctcaagtccattgacctcaacaagccaattgacaagcggatctacaagggcacccagcccacctgccacgatttcaaccagttcactgctgccaccgagaccatctcgctgctggtgggcttctcagcgggtcaagtgcagtacctggatctcatcaaaaaggacaccagcaagctgttcaatgaggagcggttgatcgacaagaccaaggtgacatatctgaagtggctgcctgagtcggagagcctgttcctggcatcacacgccagtggccacctgtacctgtacaacgtcagccacccctgcgcctcggccccgccccagtacagcctgctgaagcaggtcatggggcttctctttctatgctgccaagagcaaggcaccccgcaacccgctggccaagtgggcggtgggtgaggggcccctcaacgagttcgccttctcgcccgatggccggcacctggcctgtgtgagccaggatggctgcctgcgcgtcttccacttcgactccatgctcctgcgtgggctcatgaagagctactttgggggcctgctgtgtgtgtgctggagccctgacggccgctacgtggtgacgggtggcgaagatgacctggtcaccgtgtggtccttcaccgagggccgcgtggtggctcgaggccatggccacaagtcctgggtcaacgctgtggcctttgactctctctacaccacaagggcagaggaggcggcgacagcagccggtgctgatggggagcggagcggcgaagaggaggaggaggagcccgaggctgcgggcacaggctcggccgggggcgccccactctctccactgcccaaggctggctccattacttaccgctttggctcggcgggccaggacacgcagttctgcctgtgggacctcactgaagacgtgctctacccgcacccgcccctggcccgcacccgcaccctccctggcacacctggcaccacgccaccggccgccagcagctcgaggggtggcgagcctggcccaggccccctgcctcgctcgctgtcccgctccaacagtctcccgcacccagctggcgggggcaaggcgggcggcccgggtgtggcggcagagcctggcacaccattcagcattggccgcttcgccacgctcacactgcaggagcggcgggaccggggggcagagaaggagcacaagcgctaccacagcctgggcaacatcagccggggtggcagtggcggcagtggcagtggtggggagaagcccagcggccctgttccccgcagccgcctggaccccgccaaggtgctgggcactgcgctgtgcccgcgcatccacgaggtgcccctgctggagccccttgtgtgcaagaagatcgcccaggagcggctcacagtcctcctgttcctggaggactgcatcatcactgcctgccaggagggcctcatctgcacctggccgcggccgggcaaggcgttcacagacgaggagaccgaggcccagacaggggaaggaagttggcccaggtcacccagcaagtcagtggtagagggcatctcctcccaaccaggcaactccccgagtggcacagtggtgtgaagccatggatatcgggccccccccaaccccatgcccccagcctcctagccataaccctccctgctgacctcacagatcaacgtattaacaagactaacccatgatggatggactgctccaagtccccccacctgcacaaaatttgggggccccccaagactgggcccggacaccggaaattgtaatagcccttgtgggcctcagccgttgtcccccacccacttgccaagtacaatggacctcttcctcttgaaacatcagtgtttaccctcatcccttgtccccaagcatgttgactgggtcactcctgggggagacactccccggcccctggccacaagagccccaggtctgcagtgtgcccctcagttgagtgggcagggccgcgggtggtccagccctcgcccggcccccaccccaggttgcccttgctattgtctgtggttttggaagagtgttaaaattatgggaaggcccttcaggtttcctccctgttcccgcaggacctgtttattttatactaaagttccctgtttttttcaggggggtttgttccccttcggaggagatggatgtaggaggacctgtgtgtgtaatttgttgggtttaagggagttccgtttttccccagaggaggagtgcaggcctgctcccagcccagcgcctcccaccccttttcatagcaggaaaagccggagcccagggagggaacggacctgcgagtcacacaactggtgacccacaccaagcggctgggagcagggaccctcttggggagaagagcatccttgcccgcagccagggcccctcatcaaagtcctcggtgttttttaaattatcagaactgcccaggaccacgttttccaaggccctgcccagctgggactcctcggtccttgcctcctagtttctcaggcctggccctctcaaggcccaggcacccccaggccggtttgaggcccccgacttcccactttggagaaccggtccaccctggaaaagaagagctcagattcctctgtgctctcggagccgcagggaggtgtgtcttcccgcgccaccctccaccccccgaaatgtttctgtttctaatcccagcctgggcaggaatgtggctccccggccaggggccaaggagctattttggggtctcgtttgcccagggagggcttggctccaccactttcctcccccagcctttgggcagcaggtcacccctgttcaggctctgagggtgccccctcctggtcctgtcctcaccaccccttccccacctcctgggaaaaaaaaaaaaaaaaaaaaaaaaaagctggtataaagcagagagcctgagggctaaatttaactgtccgagtcggaatccatctctcagtcacccaagaagctgccctggcctcccgtccccttcccaggcctcaacccctttctcccacccagccccaacccccagccctcaccccctagcccccagttctggagcttgtcgggagcaagggggtggttgctactgggtcactcagcctcaattggccctgtttcagcaatgggcaggttcttcttgaaattcatcacacctgtggcttcctctgtgctctacctttttattggggtgacagtgtgacagctgagattctccatgcattccccctactctagcactgaagggttctgaagggccctggaaggagggagcttggggggctggcttgtgaggggttaaggctgggaggcgggaggggggctggaccaaggggtggggagaaggggaggaggcctcggccggccgcagagagaagtggccagagaggcccagggggacagccagggacaggcagacatgcagccagggctccagggcctggacaggggctgccaggccctgtgacaggaggaccccgagcccccggcccggggaggggccatggtgctgcctgtccaacatgtcagccgaggtgcggctgaggcggctccagcagctggtgttggacccgggcttcctggggctggagcccctgctcgaccttctcctgggcgtccaccaggagctgggcgcctccgaactggcccaggacaagtacgtggccgacttcttgcagtgggcggagcccatcgtggtgaggcttaaggaggtccgactgcagagggacgacttcgagattctgaaggtgatcggacgcggggcgttcagcgaggtagcggtagtgaagatgaagcagacgggccaggtgtatgccatgaagatcatgaacaagtgggacatgctgaagaggggcgaggtgtcgtgcttccgtgaggagagggacgtgttggtgaatggggaccggcggtggatcacgcagctgcacttcgccttccaggatgagaactacctgtacctggtcatggagtattacgtgggcggggacctgctgacactgctgagcaagtttggggagcggattccggccgagatggcgcgcttctacctggcggagattgtcatggccatagactcggtgcaccggcttggctacgtgcacagggacatcaaacccgacaacatcctgctggaccgctgtggccacatccgcctggccgacttcggctcttgcctcaagctgcgggcagatggaacggtgcggtcgctggtggctgtgggcaccccagactacctgtcccccgagatcctgcaggctgtgggcggtgggcctgggacaggcagctacgggcccgagtgtgactggtgggcgctgggtgtattcgcctatgaaatgttctatgggcagacgcccttctacgcggattccacggcggagacctatggcaagatcgtccactacaaggagcacctctctctgccgctggtggacgaaggggtccctgaggaggctcgagacttcattcagcggttgctgtgtcccccggagacacggctgggccggggtggagcaggcgacttccggacacatcccttcttctttggcctcgactgggatggtctccgggacagcgtgcccccctttacaccggatttcgaaggtgccaccgacacatgcaacttcgacttggtggaggacgggctcactgccatggtgagcgggggcggggagacactgtcggacattcgggaaggtgcgccgctaggggtccacctgccttttgtgggctactcctactcctgcatggccctcagggacagtgaggtcccaggccccacacccatggaagtggaggccgagcagctgcttgagccacacgtgcaagcgcccagcctggagccctcggtgtccccacaggatgaaacagctgaagtggcagttccagcggctgtccctgcggcagaggctgaggccgaggtgacgctgcgggagctccaggaagccctggaggaggaggtgctcacccggcagagcctgagccgggagatggaggccatccgcacggacaaccagaacttcgccagtcaactacgcgaggcagaggctcggaaccgggacctagaggcacacgtccggcagttgcaggagcggatggagttgctgcaggcagagggagccacagctgtcacgggggtccccagtccccgggccacggatccaccttcccatctagatggccccccggccgtggctgtgggccagtgcccgctggttgggggccaggccccatgcaccgccgccacctgctgctccctgccagggtccctaggcctggcctatcggaggcgctttccctgctcctgttcgccgttgttctgtctcgtgccgccgccctgggctgcattgggttggtggcccacgccggccaactcaccgcagtctggcgcccgcccaggagccgcccgcgctccctgaaccctagaactgtcttcgactccggggccccgttggaagactgagtgcccggggcacggcacagaagccgcgcccaccgcctgccagttcacaaccgctccgagcgtgggtctccgcccagctccagtcctgtgatccgggcccgccccctagcggccggggagggaggggccgggtccgcggccggcgaacggggctcgaagggtccttgtagccgggaatgctgctgctgctgctgctgctgctgctgctgctggggggatcacagaccatttctttctttcggccaggctgaggccctgacgtggatgggcaaactgcaggcctgggaaggcagcaagccgggccgtccgtgttccatcctccacgcaccccacccccttcggttggttcgcaaaagtgaaaagctttcttgtgcatggacgccctgctttgggggagcgtctggcgcgatctctgccctgcttactcggggaaatttgcttttgccaaacccgcttttttcggggatccccgcgcccccctcctcacttgcgctgctctcggagccccagccggctccgcccgcttcggcggtttggatatttattgacctcgtcctccgactcgctgacaggctacaggacccccaacaaccccaatccacgttttggatgcactgagaccccgacattcctcggtatttattgtctgtccccacctaggacccccacccccgaccctcgcgaataaaaggccctccatctgcccnnnnnnnnnnnnnnnnngggggggccgttttaaagaacccttgggggggccaaggtttacgggggctggcaaggtaatagttttttccttatagggagccgtataataacctacctgggaattttggaaaagaacccttctttttggggggggacatattggaacaacctccctacagaaatttaaggctttagggaaaatataaacttttaaagggaaaagggggtaaaacaacctgcataggctggctgctggaaag

SEQ ID NO: 2859 - DNA, 1158 bp, Homo sapiens
  SIMILAR (604)..(1155): 1001254mologous to Homo sapiens octamer binding protein 3A,accession number Z11898,Smith-Waterman Score=978.
atgggcgggactacgctggcctggagcatggcacgtgattccgccggcctggttgccgggaatctggacctgagcgagaagcacgatccccggccgcccccgctcttgcatccccctggtcctactgctgtgcttgctggcgacggttcgttccggaacccagccctgggcaagccccttacgaagtctcaggctacctggatgaccaccctttcttatgatgctgcaaggagggcaggtggtggaggtgatgggccaggggggccggagccgggctgggttgatcctcggacctggctaagcttccaaggccctcctggagggccaggaatcgggccgggggttgggccaggctctgaggtgtgggggattcccccatgccccccgccgtatgagttctgtggggggatggcgtactgtgggccccaggttggagtggggctagtgccccaaggcggcttggagacctctcagcctgagggtgaagcaggagtcggggtggagagcaactccgatggggcctccccggagccctgcaccgtcacccctggtgccgtgaagctggagaaggagaagctggagcaaaacccggaggaggcaaggaaggtattcagccaaacgaccatctgccgctttgaggctctgcagcttagcttcaagaacatgtgtaagctgcggcccttgctgcagaagtgggtggaggaagctgacaacaatgaaaatcttcaggagatatgcaaagcagaaaccctcgtgcaggcccgaaagagaaagcgaaccagtatcgagaaccgagtgagaggcaacctggagaatttgttcctgcagtgcccgaaacccacactgcagcagatcagccacatcgcccagcagcttgggctcgagaaggatgtggtccgagtgtggttctgtaaccggcgccagaagggcaagcgatcaagcagcgactatgcacaacgagaggattttgaggctgctgggtctcctttctcagggggaccagtgtcctttcctctggccccagggccccattttggtaccccaggctatgggagccctcacttcactgcactgtactcctcggtccctttccctgagggggaagcctttccccctgtctctgtcaccactctgggctctcccatgcattcaaactga

SEQ ID NO: 2860 - DNA, 1734 bp, Homo sapiens
  SIMILAR (461)..(1441): 431254mologous to Homo sapiens octamer binding protein 3A,accession number Z11898,Smith-Waterman Score=567.
  misc_feature (1)...(1734): n = a,t,c or g
aaaaaaggactcaagattcatggggcctacactggaattccagatcgggcactgacacaatggacacattattcaacatttccaaatcttggcattcttatccacaaagtgaagataataattgtcaattcacaggtgattatgatttaaagagattacttttgaagagttcctaacacattcagtcaacatttaatgatgcttcaggcactgagttcattgctagtgagcgtatgacacacacagccatacggtcacagagctttcaatgaaaagtaacataattgctcatttcaccaggcccccggcttggggcgccttccttccccatggcgggacacctggcttcggatttcgccttttcgccccctccaggtggtggaggtgatgggccaggggggccggagccgggctgggttgatcctcggacctggctaagcttccacacgccctcctggagggccaggaatcgggccgggggttgggccaggctctgaggtgtgggggattcccccatgccccccagccgtatgagttctgtggggggatggcgtactgtgggccccaggttggagtggggctagtgccccaaggcggcttggagacctctcagcctgagggcgaagcaggagtcggggtggagagcaactccgaatggggcctccccggagcccgtgcaccgtcacccctggtgcccgtgaagctggagaaggagaagctggagcaaaacccggagaagttcccaggacatcaaagctctgcagaaagaactcgagcaatttgccaagcttcctgaagcagaagaggatcaccctgggatatacacaggccgatgtggggctcaccctgggggttctatttgggaaggtattcagccaaacgaccatctgccgctttgaggctctgcagcttagcttcaagaacatgtgtaagctgcggcccttgctgcagaagtgggtggaggaagctgacaacaatgaaaatcttcaggagatatgcaaagcagaaaccctcgtgcaggcccgaaagagaaagcgaaccagtatcgagaaccgagtgagaggcaacctggagaatttgttcctgcagtgccccgaaaccccacactggcagcagattcagccacatcgcccagcagcttgggctcaagaagcatgtagtccgagtggtccgagtgtggttctgtaacccggcgccagaagggcaaagcgatcaagcagcgactttgccacaacgagaggattttgaggctgctgggtctcctttcttcagggggacccagtgtcccttttccctcctgcccccagggccccattttggtaccccaggctatgggagccctcacttcactgccactgtactcctcggtcccttttccgtgagggggaagcctttccccctgtctctgtcaccattctggggctctcccatgcattcaaactgaggtgcctgcctgcccttctaggaaatgggggacagggggaggggaggagctaggggaaagagaacctgggagtttgtgccaggggctttttgggaatttaagttcttcatttcacttaagggaaggaatttngggaacacaaagggtgggggcaggggagtttggggcaactggttggagggaaggtgaagttcaatgatgctcttgattttaatcccacatcatgtatcacttttttcttaaataaagaagcttgggacacagtagatagacacacttaaaaaaaaaaa

SEQ ID NO: 2861 - DNA, 465 bp, Homo sapiens
tcggacaaacaagtcagcaccatgtggccctccgcaccacccagcatcactgggccctcggtcagcaccgcgtggccctccacactgtggaatattacttagccctgaaaaggaaggaaatggacacaggctgcaacgtggatggaacttgagtatattgtgctgagtggaataagccagtcacaggaggacatgcactgtatgatcccatttgtgtcaggtccctagagtcattgcattcatagggacggaggtaggatggtgcagcctggtgatgccaggggccggggaaggtgggaatggggagttggggttgaatgggtagtttcagttgcgcaaggtgaagagagttctcgggatggatggcggtgagggctgcacaacagcatccacgcacgtagtgccactgacctgcacactgaaaaatggttcaaacggcaagttttacgttatatttaccacaat

SEQ ID NO: 2862 - DNA, 1983 bp, Homo sapiens
  SIMILAR (285)..(100): 801254mologous to Homo sapiens mitogen-activated protein 6,accession number D87905,Smith-Waterman Score=252.
  misc_feature (1)...(1983): n = a,t,c or g
ttatatgcagacctttgccagctcctctggcataagtggctgggttccagtgactgctgttgctctctccacattggcttggtgtgtgcggatttctccatctggttcaacaggaagtatgtactgtttgcaggatgctattgagcactgtgaggtaaagtcaacaaactctgcagagaacttgtctgctgggagttgtggcgatggctcctctaccacctgtttgagctgctgaaatggagttccccatgaatcatagggaaatcgaaggatggccaactcaatggccatgtatggtttgcaacctgcatcaattgttttagcaacagagtccaccaagtagccactgattccaaaatcgcacatcttcacttgaccgagagcattgatgagtacattagaaggcttgacgtctctgtgaatgacagacagcttactatgtaaatgttctaatgcttttacaatagaaactgctattttccctaagatgtcctctggaattgtctggcctttatcaataacttgtttgtagaatttatctagtgatgtatccatgagctccatgcagatccacacatcaccctcccgaaacagtgcgccataaaaggtgacagtgaatggacagtccaccgtcctcatggaaatatccaaatccatcagtagccgtttctgttcctggctatttactgtggctcggatccgcctcctttttccacaaatggagacaattttctctcccaattctggtttcttgattttcagaggcaattctcgtcccagttccattataggctccaggtcatctgccttcacctcaaagttctgatttccaatagaaatgcaagccttggagtctaaatctcgaggtggtaatgtcaagctcgaccgatgcccctgagagccttcaacccagtcagctccttccggtgggcgcggggcatgactatcgtcgccgcacttatgactgtcttctttatcatgcaactcgtaggacaggtgccggcagcgctctgggtcattttcggcgaggaccgctttcgctggagcgcgacgatgatcggcctgtcgcttgcgntattcggaatcttgcacgccctcgctcaagccttcgtcactggtcccgccaccaaacgtttcggcgagaagcaggccattatcgccggcatggggccgaacgcgctgggctacgtcttgctggcgttcgcgacgcgagggctggatggccttccccattatgattcttctcgcttccggcggcatcgggatgcccgcgttgcaggccatgtggttagcagaatgaatcaccgatacgcgagcgaacgtgaagcgactgctgctgcaaaacgtctgcgacctgagcaacaacatgaatggtcttcggtttccgtgtttcgtaaagtcctgtggaacacctacatctgtattaacgaagcgctggcattgaccctgagtgatttttctctggtcccgccgcatccataccgccagttgtttaccctcacaacgttccagtaaccgggcatgttcatcatcagtaacccgtatcgtgagcatcctctctcgtttcatcggtatcattacccccatgaacagaaatccccgcttctggagaaactcaacgagctggacgcggatgaacaggcagacatctgtgaatcgcttcacgaccacgctgatgagctttaccgcagctgcctcgcgcgtttcggtgatgacggtgaaaacctctgacacatgcagctcccggagacggtcacagcttgtcaaataccatctttccatctcaacccaagttttatagtagtggctttcacagggatttgcctgtttgctccaatgtggaactggtctgaggttgttcaaatgcttcttttggaattttaaggccagggtttcgcttcttgccttattgagtttctttgctgtctggattctgaattctatatctgtcatttcggccatttcaatctggttaaagaccat

SEQ ID NO: 2863 - DNA, 1917 bp, Homo sapiens
  SIMILAR (940)..(1524): 881254mologous to synthetic construct beta- glucuronidase:neomycin phosphotransferase II fusion protein,accession number M26402,Smith-Waterman Score=877.
atgatcggcctgtcgcttgcggtattcggaatcttgcacgccctcgctcaagccttcgtcactggtcccgccaccaaacgtttcggcgagaagcaggccattatcgcgcatggcggccgacgcgctgggctacgtcttgctggcgttccgacgcgaggctggatggccttccccattatgattcttctcgcttccggcgcatcgggatgccgcgttgcaggccatgctgtccaggcagcactcagggcgcaagggctgctaaaggaagcggaacacgtagaaagccagtccgcagaaacggtgctgaccccggatgaatgtcagctactgggctatctggacaagggaaaacgcaagcgcaaagagaaagcaggtagcttgcagtgggcttacatggcgatagctagactgggcggttttatggacagcaagcgaaccggaattgccagctggggcgccctctgcgcaggggccgcggttctttttgtcaagaccgacctgtccggtgccctgaatgaactgcaggacgaggcagcgcggctatcgtggctggccacgacgggcgttccttgcgcagctgtgctcgacgttgtcactgaagcgggaagggactggctgctattgggcgaagtgccggggcaggatctcctgtcatctcaccttgctcctgccgagaaagtatccatcatggctgatgcaatgcggcggctgcatacgcttgatccggctacctgcccattcgaccaccaagcgaaacatcgcatcgagcgagcacgtactcggatggaagccggtcttaaggatctgatgcgcagggatcaagatctgatcaagagacaggatgaggatcgttcgcatgatgaacaagatgatgcacgcaggtctccggccgcttggtggagagcgtattcggctatagctgcgacaacagacaactcggggcgcccggttctttttgtcaagaccgacctgtccggtgccctgaatgaactgcaggacgaggcagcgcggctatcgtggctggccacgacgggcgttccttgcgcagctgtgctcgacgttgtcactgaagcgggaagggactggctgctattgggcgaagtgccggggcaggatctcctgtcatctcaccttgctcctgccgagaaagtatccatcatggctgatgcaatgcggcggctgcatacgcttgatccggctacctgcccattcgaccaccaagcgaaacatcgcatcgagcgagcacgtactcggatggaagccggtcttgtcgatcaggatgatctggacgaagagcatcaggggctcgcgccagccgaactgttcgccaggctcaaggcgcgcatgcccgacggcgaggatctcgtcgtgacccatggcgatgctgcttgccgaatatcatggtggaaaatggccgcttttctggattcatcgactgtggccggctgggacatagcgttggctacccgtgatattgctgaagagcttggcggcgaatgggctgaccgcttcctcgtgctttacgttcttctgagcgggactctggggttcgaaatgaccgaccaagcgacgcccaacctgccatcacgagatttcgattccaccgccgccttctatgaaaggttgggcttcggaatcgttttccgggacgccggctggatgatcctccagcgcggggatctcatgctggagttcttcgcccaccccgggctcgatcccctcgcgagttggttcagctgctgcctgaggctggacgacctcgcggagttctaccggcagtgcaaatccgtcggcatccaggaaaccagcagcggctatccgcgcatccatgcccccgaactgcaggagtggggaggcacgatggccgctttggtccggatctttgtgaaggaaccttacttctgtggtgtgacataa

SEQ ID NO: 2864 - DNA, 2040 bp, Homo sapiens
  SIMILAR (399)..(67): 421254mologous to Homo sapiens The human homolog of mouse Cux -2,accession number AB006631,Smith-Waterman Score=236.
tcacacagccaggtggtggtagagctgggctttgaacccagagcgcgtgtcctcagcccccagccctgatgccctggacctggcgtggtggccagcggggacgggccctcttgggcactcacctcgctgccgcacttggatggtcctgagcgccagtacattctgctcatccgacaggaactgcttcatcttgatgaagggctccttgcccttcaccgtgagcttgcgccagggcttgggccgggctaggatctcgctgaccgagccctgcgacagccccagcacgtaatgcccaaacacccgctgcccgatgttgtgtttcagcagctgctccttcacctggaaggcgatctctgccgtgtccagctgctcctcctctgccccgggccccgccgctccgcccccaccaccatccgcgggctcaggaccgcccagtggctcagggccaggggccggggtggcaggggctgtggggggcttggcgccatagaaggctggggggaacaccagcaggccgcccgcctctcccttgaaggcggctgggggcatcatcagtctctcccctgatgccaggctggggaagggggacagcgagaaagtccgagtgccgtcaggccccaagctggggcccagcaggggctgcccggggctgggagacagggggtcttctggccctggtggaggtgggagctgctgaggggaggggtaggactgctccgtgcccagtgaatccttgatggaatcgtcctctgatgggtcttcctcagggctggccaggaggctgggcttctccagaaggaatttctgcgtggggaagaaggcctcctttgcaataagcagtgagtcttcaggcttggccatgccctgggggaggctgcaggtgctggaggccagcttcatggctttcaggatgctcagctccgttttaatttcctcatagtcagactgggcctggagcttctcttccagcttttctatggcctcggacttggccgtgagctgccgctccaggtcggcgatctggttggcggatgcctcctccagctcctgcagtgagctctggaggtgctgcacgtccttcagcagccgcaggatctccctgtccttggaggccagcgcggcctccagccgagggcccgagcacagagtgaagttcaccttatcccagtcagctccttccggtgggcgcggggcatgactatcgtcgccgcacttatgactgtcttctttatcatgcaactcgtaggacaggtgccggcagcgctctgggtcattttcggcgaggaccgctttcgctggagcgcgacgatgatcggcctgtcgcttgcggtattcggaatcttgcacgccctcgctcaagccttcgtcactggtcccgccaccaaacgtttcggcgagaagcaggccattatcgccggcatggcggccgacgcgctgggctacgtcttgctggcgttcgcgacgcgaggctggatggccttccccattatgattcttctcgcttccggcggcatcgggatgcccgcgttgcaggccatgcaacccttggcagaacatatccatcgcgtccgccatctccagcagccgcacgcggcgcatctcgggcagcgttgggtcctggccacgggtgcgcatgatcgtgctcctgtcgttgaggacccggtggttagcagaatgaatcaccgatacgcgagcgaacgtgaagcgactgctgctgcaaaacgtctgcgacctgagcaacaacatgaatggtcttcggtttccgtgtttcgtaaagtgcttctggagaaactcaacgagctggacgcggatgaacaggcagacatctgtgaatcgcttcacgaccacgctgatgagctttaccgcagctgcctcgcgcgtttcggtgatgacggtgaaaacctctgacacatgcagctcccggagacggtcacagcttgtctccctgttgcagttctgcgctgtcacaaacgactctgctggtgtggctgtccctccgtctgctgtgggggcttcttgcagccagggaccgagttccat

SEQ ID NO: 2865 - DNA, 955 bp, Homo sapiens
  SIMILAR (338)..(952): 1001254mologous to Homo sapiens ribosomal protein S6 kinase 1,accession number L07597,Smith-Waterman Score=1075.
agaaagtaaagtgaagatagtattaaccacacccgcgctgatggtggcatagatgggctgttgaacacctgcatccttgaagattcctgttgagtaatagaacaccttgttagccaagatggtctccatctcccgacctcgtgatccacccgcctcggcctcccaaagtgctgggattacaggccctgcactgggtgctgaaggtgaacgggcattccacagacatagggttatgatcgttaccgaaggagcccctggtggcctgagctcagggcacctgagggatgcaatggacagtgaggctggaacagatgatggctgtgcctcccatgttagggttgtgcacagggacctgaagcccagcaacatcctgtatgtggacgagtccgggaatcccgagtgcctgcgcatctgtgactttggttttgccaaacagctgcgggctgagaatgggctcctcatgacaccttgctacacagccaactttgtggcgcctgaggtgctgaagcgccagggctacgatgaaggctgcgacatctggagcctgggcattctgctgtacaccatgctggcaggatatactccatttgccaacggtcccagtgacacaccagaggaaatcctaacccggatcggcagtgggaagtttaccctcagtgggggaaattggaacacagtttcagagacagccaaggacctggtgtccaagatgctacacgtggatccccaccagcgcctcacagctaagcaggttctgcagcatccatgggtcacccagaaagacaagcttccccaaagccagctgtcccaccaggacctacagcttgtgaagggagccatggctgccacgtactccgcactcaacagctccaagcccaccccccagctgaagcccatcgagtcatccatcctggcccagcggcgagtgaggaagttgccatccaccaccctgtga

SEQ ID NO: 2866 - DNA, 2931 bp, Homo sapiens
  SIMILAR (87)..(260): 911254mologous to synthetic construct tetracycline resistance,accession number V00083,Smith-Waterman Score=315.
atgacgatgtgggtactacattgcgcattcacctactttgtgagcgcatggtcgaagcatggatatgcgcatgctgtgactgccaagatcctctacgccggacgcatcgtggccggcatcaccggcgccacaggtgcggttgctggcgcctatatcgccgacatcaccgatggggaagatcgggctcgccacttcgggctcatgagcgcttgtttcggcgtgggtatggtggcaggccccgtggccgggggactgttgggcgccatctccttgcatgcaccattccttgcggcggcggtgctcaacggcctcaacctactactgggctgcttcctaatgcaggagtcgcataagggagagcgtcgaccgatgcccttgagagccttcaacccagtcagctccttccggtgggcgcggggcatgactatcgtcgccgcacttatgactgtcttctttatcatgcaactcgtaggacaggtgccggcagcgctctgggtcattttcggcgaggaccgctttcgctggagcgcgacgatgatcggcctgtcgcttgcggtattcggaatcttgcacgccctcgctcaagccttcgtcactggtcccgccaccaaacgtttcggcgagaagcaggccattatcgccggcatggcggccgacgcgctgggctacgtcttgctggcgttcgcgacgcgaggctggatggccttccccattatgattcttctcgcttccggcggcatcgggatgcccgcgttgcaggccatgctgtccaggcaggtagatgacgaccatcagggacagcttcaaggatcgctcgcggctcttaccagcctaacttcgatcattggaccgctgatcgtcacggcgatttatgccgcctcggcgagcacatggaacgggttggcatggattgcttttgcaaaaagcttcacgctgccgcaagcactcagggcgcaagggctgctaaaggaagcggaacacgtagaaagccagtccgcagaaacggtgctgaccccggatgaatgtcagctactgggctatctggacaagggaaaacgcaagcgcaaagagaaagcaggttctccggccgcttgggtggagaggctattcggctatgactgggcacaacagacaatcggctgctctgatgccgccgtgttccggctgtcagcgcaggggcgcccggttctttttgtcaagaccgacctgtccggtgccctgaatgaactgcaggacgaggcagcgcggctatcgtggctggccacgacgggcgttccttgcgcagctgtgctcgacgttgtcactgaagcgggaagggactggctgctattgggcgaagtgccggggcaggatctcctgtcatctcaccttgctcctgccgagaaagtatccatcatggctgatgcaatgcggcggctgcatacgcttgatccggctacctgcccattcgaccaccaagcgaaacatcgcatcgagcgagcacgtactcggatggaagccggtcttgtcgatcaggatgatctggacgaagagcatcaggggctcgcgccagccgaactgttcgccaggctcaaggcgcgcatgcccgacggcgaggatctcgtcgtgacccatggcgatgcctgcttgccgaatatcatggtggaaaatggccgcttttctggattcatcgactgtggccggctgggtgtggcggaccgctatcaggacatagcgttggctacccgtgatattgctgaagagcttggcggcgaatgggctgaccgcttcctcgtgctttacgttcttctgagcgggactctggggttcgaaatgaccgaccaagcgacgcccaacctgccatcacgagatttcgattccaccgccgccttctatgaaaggttgggcttcggaatcgttttccgggacgccggctggatgatcctccagcgcggggatctcatgctggagttcttcgcccaccccgggctcgatcccctcgcgagttggttcagctgctgcctgaggctggacgacctcgcggagttctaccggcagtgcaaatccgtcggcatccaggaaaccagcagcggctatccgcgcatccatgcccccgaactgcaggagtggggaggcacgatggccgctttggtccggatctttgtgaaggaaccttacttctgtgaaacgctggtgaaagtaaaagatgctgaagatcagttgggtgcacgagtgggttacatcgaactggatctcaacagcggtaagatccttgagagttttcgccccgaagaacgttttccaatgatgagcacttttaaagttctgctatgtggcgcggtattatcccgtgttgacgccgggcaagagcaactcggtcgccgcatacactattctcagaatgacttggttgagtactcaccagtcacagaaaagcatcttacggatggcatgacagtaagagaattatgcagtgctgccataaccatgagtgataacactgcggccaacttacttctgacaacgatcggaggaccgaaggagctaaccgcttttttgcacaacatgggggatcatgtaactcgccttgatcgttgggaaccggagctgaatgaagccataccaaacgacgagcgtgacaccacgatgcctgcagcaatggcaacaacgttgcgcaaactattaactggcgaactacttactctagcttcccggcaacaattaatagactggatggaggcggataaagttgcaggaccacttctgcgctcggcccttccggctggctggtttattgctgataaatctggagccggggggcggagcctatggaaaaacgccagcaacgcggcctttttacggttcctggccttttgctggccttttgctcacatgttctttcctgcgttatcccctgattctgtggataaccgtattaccgcctttgagtga

SEQ ID NO: 2867 - DNA, 3690 bp, Homo sapiens
  SIMILAR (3662)..(3688): 1001254mologous to Escherichia coli reading frame ?,accession number V00359,Smith-Waterman Score=47.
  misc_feature (1)...(3690): n = a,t,c or g
atgattgaaagtatactggaggctacacgtgggttaaatgcagatactacgcccttttaccttggggccaaaaaaggaagtttgggagctcagaaactggcaaacacatgctttaatgaaattgaaaaacaagctcaagctgcggataaaatgaaggagcaggaagacctggccaaggtggtatctaaagaagaatcaatttactttgacgagccagtggagttaaggagcagttctttctctagctgggatgacagttcagattcctattggaaaaaagagaccagcaaagatactgaaacagttctgaaaaccacaggctattcagacagacctactgctcgccgcaagccagattatgagccagttgaaaatacagatgaggcccagaagaagtttggcaatgtcaaggccatttcatcagatatgtattttggaagacaatcccaggctgattatgagaccagggcccgcctagagaggctgtcggcaagttcctccataagctcggctgatctgttcgaggagccgaggaagcagccagcagagaacaaagatccattaaatttttttgaccctgtgtggatgccaaaccaaccctggttcctggcacctcgtggtcattgtaaggtgcaccctggggacaggtgccggcagcgctctgggtcattttcggcgatggaccgctttcgctggagcgcgacgatgatcggcctgtcgcttgcggtattcggaatcttgcacgccctcgctcaagccttcgtcactggtcccgccaccaaacgtttcggcgagaagcaggccattatcgccggcatggcggccgacgcgctgggctacgtcttgctggcgttcgcgacgcgaggctggatggccttccccattatgattcttctcgcttccggcggcatcgggatgcccgcgttgcaggccatgctgtccaggcaggtagatgacgaccatcagggacagcttcaaggatcgctcgcggctcttaccagcctaacttcgatcattggaccgctgatcgtcacggcgatttatgccgcctcggcgagcacatggaacgggttggcatggattgtaggcgccgccctataccttgtctgcctccccgcgtttgcgtcgcggtgcatggagccgggccacctcgacctgaatggaagccggcggcacctcgctaacggattcaccactccaagaattggagccaatcaattcttgcggagaactgtgaatgcgcaaaccaacccttggcagaacatatccatcgcgtccgccatctccagcagccgcacgcggcgcatctcgggcagcgttgggtcctggccacgggtgcgcatgatcgtgctcctgtcgttgaggacccggctaggctggcggggttgccttactgcgaacgtgaagcgactgctgctgcaaaacgtctgcgacctgagcaacaacatgaatggtcttcggtttccgtgtttcgtaaagtctggaaacgcggaagtcagcgccctgcaccattatgttccggatctgcatcgcaggatgctgctggctaccctgtggaacacctacatctgtattaacgaagcgctggcattgaccctgagtgatttttctctggtcccgccgcatccataccgccagttgtttaccctcacaacgttccataaccgggcatgttcatcatcagtaacccgtatcgtgagcatcctctctcgtttcatcggtatcattacccccatgaacagaaatcccccttacacggaggcatcagtgaccaaacaggaaaaaaccgcccttaacatggcccgctttatcagaagccagacattatcgcttctggagaaactcaacgagctggacgcggatgaacaggcagacatctgtgaatcgcttcacgaccacgctgatgagctttaccgcagctgcctcgcgcgtttcggtgatgacggaaacagctatgacccatggatttacgccaagcttgcatgcctgcaggtcgaaggccgtggcggcggcacttttgcccatgaattgctcgctgtggagtacgcaggctggatttctcccgcgtttcggctgaaggtaaaccagacatttatcgactatcgaaccggaagattacaacctgctattccgcagagtctccctgaagctctccgtttggctgccgacctggcagagcaaaagcaacggctggagcaaaaaatgcttatggatgcacctaaagtcgaattnnntgaacgcgttgctaccgccagcggggttctaatcggcaactatgccaaagtgctcggcctgggccaaaactatctcttcacctggttgcgtgataacggaattctgatcgcaaccggtgaacgcaggaacgtccccaaacaagaatacatatctcgtgggtatttcacccttaaagaaaccgtgatcgatacaagcaatggaagcaggatttctttcacgactcgtataaccggcaaaggtcagcagtggctgatgaagcgattgcttgatgctggtgtgctggatgacgtggcaataaagaataagaagtcacaagttaaaaaaacaaaaagatcagtttccggcggtgccggaacaaccagcctcaaaaaattgacttcatggatcgctaaggcaaaagcaaaggctgacaatctgcggttatccaaaaaacgcactcaaaaacatgagttcaagcagaaagtagaggcggctgcgcggaaatatgcttacctgaagaacaagcgttcgcctgatattggcgggatatcaaacttcgataacctaccgcattgcatgacgatcctctacgccggacgcatcgtggccggcatcaccggcgccacaggtgcggttgctggcgcctatatcgccgacatcaccgatggggaagatcgggctcgccacttcgggctcatgagcgcttgtttcggcgtgggtgaccacgttggtcaagaaatcacagccgaagccattaaggttcttaaagctatttctgatgttcgttccaatgtcaagttcgatttcgaaaatcatttaattggtggtgctgctatcgacctgcaggggggggggggaaagccacgtgcgacaatctatcgattgtatgggaagcccgatgcgccagagttgtttctgaaacatggcaaaggtagcgttgccaatgatgttacagatgagatggtcagactaaactggctgacggaatttatgcctcttccgaccatcaagcattttatccgtactcctgatgatgcatggttactcaccactgcgatccccgggaaaacagcattccaggtattagaagaatatcctgattcaggtgaaaatattgttgatgcgctggcagtgttcctgcgccggttgcattcgattcctgtttgtaattgtccttttaacagcgatcgcgcgcaatcacgaatgaataacggtttggttgatgcgagtgattttgatgacgagcgtaatggctggcctgttgaacaagtctggaaagaaatgcataagcttttgccattctcaccggattcagtcgtcactcatggtgatttctcacttgataaccttatttttgacgaggggaaattaataggttgtattgatgttggacgagtcggaatcgcagaccgataccaggatcttgccatcctatggaactgcctcgaaacggctttttcaaaaatatggtattga

SEQ ID NO: 2868 - DNA, 3528 bp, Homo sapiens
  SIMILAR (844)..(1677): 991254mologous to enterobacteria phage P1 essential to replication protein,accession number X15639,Smith-Waterman Score= 1401.
atgaacatgaacatcaaaaaaattgtaaaacaagccacagttctgacttttacgactgcacttctggcaggaggagcgactcaagccttcgcgaaagaaaataaccaaaaagcatacaaagaaacgtacggcgtctctcatattacacgccatgatatgctgcagatccctaaacagcagcaaaacgaaaaataccaagtgcctcaattcgatcaatcaacgattaaaaatattgagtctgcaaaaggacttgatgtgtgggacagctggccgctgcaaaacgctgacggaacagtagctgaatacaacggctatcacgttgtgtttgctcttgcgggaagcccgaaagacgctgatgacacatcaatctacatgttttatcaaaaggtaaaccacacatttatcgactatcgaaccggaagattacaacctgctattccccagagtctccctgaagctctccgtttggctgccgacctggcagagcaaaagcaacggctggagcaaaaaatgcttatggatgcacctaaagtcgaattcgctgaacgcgttgctaccgccagaaaggttctaatcggcaactatgccaaagtgctcggcctgggccaaaactatctcttcacctggttgcgtgataacggaattctgatcgcaaccggtgaacgcaggaacgtccccaaacaagaatacatatctcgtgggtatttcacccttaaagaaaccgtgatcgatacaagcaatggaagcaggatttctttcacgactcgtataaccggcaaaggtcagcagtggctgatgaagcgattgcttgatgctgacgtagtaagaaccaccagcattgtaatgctggctaaagtcactttcctgagctgtataacgatgagcgattttactttttctggctatgaattggcctgctttgtaacacactccggtctatcccgtagcgccgggcatatcctgtcgcaatgtgcaaatctcgcggcaacaaccagtgaatacttcattcacaagcctcaccgcctgatcgcggcagaaactggttatagccaatcaaccgtcgttcgtgcattccgtgaagctgtaaacaaaggaattctgtctgtagagattgttatcggcgatcaccgtgaacgtcgcgctaacctgtaccggtttacaccatcctttttggccttcgcacaacaagccaaaaatgcgctgatagaaagcaaattaaagatctcttcagcggcaaccaaggttaaagctgttctcgctaagacattggctttatttaattttttatccacacccccatgtcaaaatgataccccctccccctgtcaggatgacgtggcaataaagaataagaagtcacaagttaaaaaaacaaaaagatcagtttccggcggtgccggaacaaccagcctcaaaaaattgacttcatggatcgctaaggcaaaagcaaaggctgacaatctgcggttatccaaaaaacgcactcaaaaacatgagttcaagcagaaagtagaggcggctgcgcggaaatatgcttacctgaagaacaagcgttcgcctgatattggcgggatatcaaacttcgataacctaccgcattgcatgacggtaaacgaagctcttaatgcggttttagccaaaaataaagataacgaacaatggggtgcggttgctggcgcctatatcgccgacatcaccgatggggaagatcgggctcgccacttcgggctcatgagcgcttgtttcggcgtgggtatggtggcaggccccgtggccgggggactgttgggcgccatctccttgcatgcaccattccttgcggcggcggtgctcaacggcctcaacctactactgggttgctttctaatgcaggagtcgcataagggagagcgtcgaggagaagaggaagacatgtcattcttttctacgttaaaaacagctttgtctttgaaggagaaacttgctgctactggtgttcttgttctgatttgcgcacttgttggtgctgggtttgcatgggaacgtcatcagctaaagcaagccatagagaaaattggcagtcttgatcaggctgttaaggaacgtgataagtcaataatggatcttaaccagaccattgagacgatgaacaaagcagagcaacattttcacagccaggaagtgaaaaatgaatcagaacaagccaagtatgctgacaggcaaatggaacgaaaagctgaagttcagaaacaactggttgcggcgggtaatgttcgccagcgtattcctgctgacactcagcggttgctccgggagtcgatcagcgaatttaacgccgacgccgacaaagggatttttatgtctgataaagtaacagtaaagcaaactatcaacaaagcgacttcaatctacaaaattgagcaaatcactgttggcaagccaggatctgaacaataccgtcgtgctttcgagcttgccgatcagcttggtttaaaacacccggattgcattgagcatgtatttccgacctatgctgatgagcaatgtactcatgttcttaccgaagaggattttttcagcactgaagaacgagaaggcgttgatcgctgcattggtgtgatttgttcttcggtaagtgatgagttattccctaatgtgcctgaatatggtggtattggataccaattcctgtacgagggcgatgagcttaaatgctatgaacatgacattgaaagtaaggcaaaagaactaacagttaattcaaacaacactgtgcagcctgtagcgttgatgcgcttgggggtattcgtgccgaagccatcaaagagcaaaggagaaagtaaagagattgatgccaccaaagcgttttcccagctggagatagctaaagccgagggttacgatgatattaaaatcaccggtcctcgactcgatatggatactgatttcaaaacgtggatcggtgtcatctacgcgttcagcaaatacggcttgtcctcaaacaccatccagttatcgtttcaggaattcgctaaagcctgtggtttcccctcaaaacgtctggatgcgaaactgcgtttaaccattcatgaatcacttggacgcttgcgtaacaagggtatcgcttttaagcgcggaaaagatgctaaaggcggctatcagactggtctgctgaaggtcgggcgttttgatgctgaccttgatctgatagagctggaggctgattcgaagttgtgggagctgttccagcttgattatcgcgttctgttgcaacaccacgccttgcgtgcccttccgaagaaagaagctgcacaagccatttacactttcatcgaaagccttccgcagaacccgttgccgctatcgttcgcgcgaatccgtgagcgcctggctttgcagtcagctgttggcgagcaaaaccgtatcattaagaaagcgatagaacagcttaaaacaatcggctatctcgactgttctattgagaagaaaggccgggaaagttttgtaatcgtccattctcgcaatccaaagctgaaactccccgaataa

SEQ ID NO: 2869 - DNA, 3945 bp, Homo sapiens
  SIMILAR (2851)..(3168): 951254mologous to enterobacteria phage P1 essential to replication protein,accession number X15639,Smith-Waterman Score= 493.
atgttgatgaaggcccacaagggggtcctaggggagcaggagaaggtaccaaggagactgatgaaggtcctcaagggggtcccaggagaacaggagaaggtgctctgggaagcaagggaggagggcgtttccagcaggtggacagggtcacccatgggctgtgagcagagagtttggatgggggatgagcaagccatggagcccctgggcttggccgatgggaagctttggaggaccttcatgggagcagctgatgccgaaaggaaagaaggccgggggatgaaggtggctccagcccctgctgtcgtgaagaagcaggaggccaagaaagtggtgaatcccctgtttgagaaaaggcctaagaattttggtgttggacaggacatccagcccaaaagagacctcacccgttttgtgaaatggccccgctatatcaagttgcagcatcagagagccttcctctataaacggctgaaagtgcctcctgcaattaaccagttcacccaggccctggaccgccaaactgctactcagctgcttgagctggcccacaagtacagaccagagacaaagcaagagaagaagcagaggctcttggcccaggccgaggagaaaactgctggcaaaggggacatctccactaagagactacctgtccttcaagcaggagttaactgggaagacaaaagtgctttggctaagctggtggaaggtataaggaccaattacaatgagagatacaatgagatccaccatcactggggaggcaatgtcctgggtcccgagtctgtggctcgcatcgccaagctcaaaaaggcagatgggagcttacgtctggactttactgtgtgcaaaaaggcatggatagtaagccaccctgtttcccagagaaaactgccccagcagaaaaggcagaacaggaagaagcggcaggaagttcaggcctggggctctggaccttgcctgagcctggtggtgggttcagagccagccacaggcgggagcagctgctccgagacgagtggttttggaaagagctgtaaagtgaaagaaacaaaccctcagccgatggcagcgaccccaacgctggagcaaggggaggcagttgctgcccacgccgaaatcccaccagcctgcagccacggacaggtgccggcagcgctctgggtcattttcggcgaggaccgctttcgctggagcgcgacgatgatcggcctgtcgcttgcggtattcggaatcttgcacgccctcgctcaagccttcgtcactggtcccgccaccaaacgtttcggcgagaagcaggccattatcgccggcatggcggccgacgcgctgggctacgtcttgctggcgttcgcgacgcgaggctggatggccttccccattatgattcttctcgcttccggcggcatcgggatgcccgcgttgcaggccatgctgtccaggcagcctaacttcgatcattggaccgctgatcgtcacggcgatttatgccgcctcggcgagcacatggaacgggttggcatggattgtaggcgccgccctataccttgtctgcctccccgcgttgcgtcgcggtgcatggagccgggccacctcgacctgaatggaagccggcggcacctcgctaacggattcaccactccaagaattggagccaatcaattcttgcggagaactgtgaatgcgcaaaccaacccttggcagaacatatccatcgcgtccgccatctccagcagccgcacgcggcgcatctcgggcagcgttgggtcctggccacggtctggaaacgcggaagtcagcgccctgcaccattatgttccggatctgcatcgcaggatgctgctggctaccctgtggaacacctacatctgtattaacgaagcgctggcattgaccctgagtgatttttctctggtcccgccgcatccataccgccagttgtttaccctcacaacgttccataaccgggcatgttcatcatcagtaacccgtatcgtgagcatcctctctcgtttcatcggtatcattacccccatgaacagaaatcccccttacacggaggcatcagtgaccaaacaggaaaaaaccgcccttaacatggcccgctttatcagaagccagacattaacgcttctggagaaactcaacgagctggacgcggatgaacaggcagacatctgtgaatcgcttcacgaccacgctgatgagctttaccgcagctgcctcgcgcgtttcggtgatgacggaaacagctatgaccatgattacgccaagcttgcatgcctgcaggtcgaaggccgtggcggcggcacttttgcccatgaattgctcgctgtggagtacgcaggctggatttctcccgcgtttcggctgaaggtaaaccagacatttatcgactatcgaaccggaagattacaacctgctattccgcagagtctccctgaagctctccgtttggctgccgacctggcagagcaaaagcaacggctggagcaaaaaatgcttatggatgcacctaaagtcgaattcgctgaacgcgttgctaccgccagcggggttctaatcggcaactatgccaaagtgctcggcctgggccaaaactatctcttcacctggttgcgtgataacggaattctgatcgcaaccggtgaacgcaggaacgtccccaaacaagaatacatatctcgtgggtatttcacccttaaagaaaccgtgatcgatacaagcaatggaagcaggatttctttcacgactcgtataaccggcaaaggtcagcagtggctgatgaagcgattgcttgatgcaagaaaccgtgatcgatacaagcaatggaagcaggatttctttcacgactcgtataaccggcaaagcgccgggcatatcctgtcgcaatgtgcaaatctcgcggcaacaaccagtgaatacttcattcacaagcctcaccgcctgatcgcggcagaaactggttatagccaatcaaccgtcgttcgtgcattccgtgaagctgtaaacaaaggaattctgtctgtagagattgttatcggcgatcaccgtgaacgtcgcgctaacctgtaccggtttacaccatcctttttggccttcgcacaacaagccaaaaatgcgctgatagaaagcaaattaaagatctcttcagcggcaaccaaggatgacgtggcaataaagaataagaagtcacaagttaaaaaaacaaaaagatcagtttccggcggtgccggaacaaccagcctcaaaaaattgacttcatggatcgctaaggcaaaagcaaaggctgacaatctgcggttatccaaaaaacgcactcaaaaacatgagttcaagcagaaagtagaggcggctgcgcggaaatatgcttacctgaagaacaagcgttcgcctgatattggcgggatatcaaacttcgataacctaccgcattgcatgacgatcctctacgccggacgcatcgtggccggcatcaccggcgccacaggtgcggttgctggcgcctatatcgccgacatcaccgatggggaagatcgggctcgccacttcgggctcatgagcgcttgtttcggcgtgggtatggtggcaggccccgtggccgggggactgttgggcgccatctccttgcatgcaccattccttgcggcggcggtgctcaacggcctcaacctactactgggctgcttcctaatgcaggagtcgcataagggagagcgtcgaggagaacttctaaagatcgtcgttttgccaggtgaccacgttggtcaagaaatcacagccgaagccattaaggttcttaaagctatttctgatgttcgttccaatgtcaagttcgatttcgaaaatcatttaattggtggtgctgctatcgacctgcaggggggggggggaaagccacgttgtgtctcaaaatctctgatgttacattgcacaagataa

SEQ ID NO: 2870 - DNA, 3285 bp, Homo sapiens
  SIMILAR (3279)..(1870): 1001254mologous to Cloning vector pBACe3.6 levansucrase,accession number U80929,Smith-Waterman Score=2472.
tcaaatgacctgaacaaattcaataatctgttcatttgctagagtctctccccgagactccattgatgggtgatttatcagagcagctggggcaggcgcaggggcattctctgcgtttgctttgaagccccgatgccaaagcacattatcaggtctgaaggtcattatttctacagaaaacaatggtttgtggttaataccacccctcccccagggtattaacggaacttggacatctgccccaacctgacaataactgaggggcaccaccctcatggcggcaaaagaaataggggccgcggtacttaatgggtgcttttggacgaagcagagcggcctaggcctgcaaggacgcacctgcgtcaccaccgccctatgcgtcagccgaatgtgtgcagcgtacgctgccccgccaacatcaagccgaaaaattcttgatgggaaaaggggcgaacaacaaggttcacggacaattggattctgggccaaaagggttttgggcccacccggggaaatcttaattggaaaaaacccctttcctttccggttttggccacagctaaattttttacaaacatccttttcaggacgaacgcgactggttcggcagttgggatcgtttgcatcggaagggtgcctcagacgaatgacactcgttgaagcgggattgcactttcgccgagcactgctgtgtgtgccaagagacaagaacacgcccagagcttgaacggaacggcgaacgaaatgcggaatgaacggaactattggttgcttttgaccgaagcaaccgtaataaccggggctttttccttcggttaagaatacaagaagcgggaaagctgaactgtacagtgttgtcagctctactagggtgagttggaccttgggtttgatgtttgtgttgatgtggacatgtggttcctttgctataagcttttcttttggaaacctttcccacgggtccaggccaagggaagtttttggcccacggccgaacaattcaagttccaaagaaattcttggtaatgggaaaatgggggccgacgaaccagcttccaggggaacaatttggaatccttcgggcaagaaggggtttttggccgccaccaccggtgggaaaatcttcatatcggaagaatcaacccttccttttccggttcctgggcccaaactttcaaattttttaaccaacctccaagtgggcttggccattcgggcggtaaccttcccttgggggcacccccaaaaagaaccacccatttggaaaggaaaccaaggggtggaagaaaatggccattcggattgaagggccgggcaacccgcctttgctggtggggaacaaccaaaccgctttgttggcccaacccgggctttccgggcccagcttgggggaatccgttttggcccattccggggaagggggggcccttcacgttgcggaactgtgaaacaaatttccgtttgggaagggggcccggtatattggcccacctttttccgggccaaaaaccaacattgggccttgttggtttgttggcccccgaaggagaggcacacagtgggaacaaatactttcccccaagaagagcctcttaaaaacccggggaaaaatgtgcccaaaaaaaccccgaaaattttgccccggggcaatttaaagggttccggatcaattctcatgtttgacagcttatcatcgataagtgccgggcctcttgcgggatatcgtccattccgacagcatcgccagtcactatggcgtgctgctagcgctatatgcgttgatgcaatttctatgcgcacccgttctcggagcactgtccgaccgctttggccgccgcccagtcctgctcgcttcgctacttggagccatgtcagctgtccttgctccaggatgctgtttttgacaacggatgttttattgcctttgatgttcattaagaagcttggcgcaaatgttgcctttttatcctcgaagaagcctctgtttgtcatgtagcttgtgataaccacattgttgcctttggcttgcggcactgcgaagtgagagtaagtgaatgtcacatcgtttggatcaagacccatttgcagcacaagccctgttttgttcagcggcttgtaagggccggttaaagagtttgatacataaccaagcatgtaaatatcgtttgagttaataccatcgatcgtcatttttgaaccgcgtgaatcagtgaacaagtaccatttgccgttcattttgaaaacattcgcgcgctcgatttcatcagttaccgtgtttgaagtgatcagcggcttcattacttttttcaatgtgtaatcattatttaactctatgataccgagggcgccgttcgctaactcagcatcgcgttttttagcgctctgctgaagcttctggctttctttacggaagaagttcgtgccgccgccgtagtacgctttgttaaataaagattcttcgccttggtatccgttttctgttcccgtgttggcttcgaatacaaggtatttatggcctttgtcttcaacgtagtgagggtctctcagcgtatggttgtcgccggatgtataattgccttcatcgataaactgctgaacgttctgatatgtttttccgtctccgtcaaaaatcgttttgtgatcttccactccgttgattttgagtgtgtcatcagattttgacacatttacctgcgctgttgtcaggctttgtttgccgtaatgtttaccggaatagtcagtgtagaataaacggatttttccgtcagatgtaaaggttgcagaaccggaccattcttgcgtctgatctttcaggatcggatcgttggcgtcgaacttatcgctgtctttaaagacacggcccgcgtttttccagctgtcgattgagttgtcgccgaccttttgataaaacatgtagattgatgtgtcatcagcgtctttcgggcttcccgcaagagcaaacacaacgtgatagccgttgtattcagctactgttccgtcagcgttttgcagcggccagctgtcccacacatcaagtccttttgcagactcaatatttttaatcgttgattgatcgaattgaggcacttggtatttttcgttttgctgctgtttagggatctgcagcatatcatggcgtgtaatatgagagacgccgtacgtttctttgtatgctttttggttattttctttcgcgaaggcttgagtcgctcctcctgccagaagtgcagtcgtaaaagtcagaactgtggcttgttttacaatttttttgatgttcatgttcat

SEQ ID NO: 2871 - DNA, 2379 bp, Homo sapiens
  SIMILAR (1108)..(1941): 991254mologous to enterobacteria phage P1 essential to replication protein,accession number X15639,Smith-Waterman Score= 1401.
atggctaaaatgaaaaatcagataatacctagtgttggtgagaagctggaacaacagaaaccctcctacgatgctcgagccttcgtcactggtcccgccaccaaacgtttcggcgagaagcaggccattatcgccggcatggcgaccgacgcgctgggctacgtcttgctggcgttcgcgacgcgaggctggatggccttccccattatgattcttctcgcttccggcggcatcgggatgcccgcgttgcaggccatgctgtccaggcagcctaacttcgatcattggaccgctgatcgtcacggcgatttatgccgcctcggcgagcacatggaacgggttggcatggattgtaggcgccgccctataccttgtctgcctccccgcgttgcgtcgcggtgcatggagccgggccacctcgacctgaatggaagccggcggcacctcgctaacggattcaccactccaagaattggagccaatcaattcttgcggagaactgtgaatgcgcaaaccaacccttggcagaacatatccatcgcgtccgccatctccagcagccgcacgcggcgcatctcgggcagcgttgggtcctggccacggtctggaaacgcggaagtcagcgccctgcaccattatgttccggatctgcatcgcaggatgctgctggctaccctgtggaacacctacatctgtattaacgaagcgctggcattgaccctgagtgatttttctctggtcccgccgcatccataccgccagttgtttaccctcacaacgttccaagaaaagcaacggctggagcaaaaaatgcttatggatgcacctaaagtcgaattcgctgaacgcgttgctaccgccagcggggttctaatcggcaactatgccaaagtgctcggcctgggccaaaactatctcttcacctggttgcgtgataacggaattctgatcgcaaccggtgaacgcaggaacgtccccaaacaagaatacatatctcgtgggtatttcacccttaaagaaaccgtgatcgatacaagcaatggaagcaggatttctttcacgactcgtataaccggcaaagacgtagtaagaaccaccagcattgtaatgctggctaaagtcactttcctgagctgtataacgatgagcgattttactttttctggctatgaattggcctgctttgtaacacactccggtctatcccgtagcgccgggcatatcctgtcgcaatgtgcaaatctcgcggcaacaaccagtgaatacttcattcacaagcctcaccgcctgatcgcggcagaaactggttatagccaatcaaccgtcgttcgtgcattccgtgaagctgtaaacaaaggaattctgtctgtagagattgttatcggcgatcaccgtgaacgtcgcgctaacctgtaccggtttacaccatcctttttggccttcgcacaacaagccaaaaatgcgctgatagaaagcaaattaaagatctcttcagcggcaaccaaggttaaagctgttctcgctaagacattggctttatttaattttttatccacacccccatgtcaaaatgataccccctccccctgtcaggatgacgtggcaataaagaataagaagtcacaagttaaaaaaacaaaaagatcagtttccggcggtgccggaacaaccagcctcaaaaaattgacttcatggatcgctaaggcaaaagcaaaggctgacaatctgcggttatccaaaaaacgcactcaaaaacatgagttcaagcagaaagtagaggcggctgcgcggaaatatgcttacctgaagaacaagcgttcgcctgatattggcgggatatcaaacttcgataacctaccgcattgcatgacggtaaacgaagctcttaatgcggttttagccaaaaataaagataacgaacaatggggtgcggttgctggcgcctatatcgccgacatcaccgatggggaagatcgggctcgccacttcgggctcatgagcgcttgtttcggcgtgggtatggtggcaggccccgtggccgggggactgttgggcgccatctccttgcatgcaccattccttgcggcggcggtgctcaacggcctcaacctactactgggctgcttcctaatgcaggagtcgcataagggagagcgtcgaggagaacttctaaagatcgtcgttttgccaggtgaccacgttggtcaagaaatcacagccgaagccattaaggttcttaaagctatttctgatgttcgttccaatgtcaagttcgatttcgaaaatcatttaattggtggtgctgctatcgacctgcaggggggggggggaaagccacgttgtgtctcaaaatctctgatgttacattgcacaagataa

SEQ ID NO: 2872 - DNA, 1632 bp, Homo sapiens
  SIMILAR (1)..(1170): 991254mologous to Salmonella typhimurium tetracycline resistance protein,accession number AF117344,Smith-Waterman Score= 1949.
atgaaatctaacaatgcgctcatcgtcatcctcggcaccgtcaccctggatgctgtaggcataggcttggttatgccggtactgccgggcctcttgcgggatatcgtccattccgacagcatcgccagtcactatggcgtgctgctagcgctatatgcgttgatgcaatttctatgcgcacccgttctcggagcactgtccgaccgctttggccgccgcccagtcctgctcgcttcgctacttggagccactatcgactacgcgatcatggcgaccacacccgtcctgtggatcctctacgccggacgcatcgtggccggcatcaccggcgccacaggtgcggttgctggcgcctatatcgccgacatcaccgatggggaagatcgggctcgccacttcgggctcatgagcgcttgtttcggcgtgggtatggtggcaggccccgtggccgggggactgttgggcgccatctccttgcatgcaccattccttgcggcggcggtgctcaacggcctcaacctactactgggctgcttcctaatgcaggagtcgcataagggagagcgtcgaccgatgcccttgagagccttcaacccagtcagctccttccggtgggcgcggggcatgactatcgtcgccgcacttatgactgtcttctttatcatgcaactcgtaggacaggtgccggcagcgctctgggtcattttcggcgaggaccgctttcgctggagcgcgacgatgatcggcctgtcgcttgcggtattcggaatcttgcacgccctcgctcaagccttcgtcactggtcccgccaccaaacgtttcggcgagaagcaggccattatcgccggcatggcggccgacgcgctgggctacgtcttgctggcgttcgcgacgcgaggctggatggccttccccattatgattcttctcgcttccggcggcatcgggatgcccgcgttgcaggccatgctgtccaggcaggtagatgacgaccatcagggacagcttcaaggatcgctcgcggctcttaccagcctaacttcgatcattggaccgctgatcgtcacggcgatttatgccgcctcggcgagcacatggaacgggttggcatggattgtaggcgccgccctataccttgtctgcctccccgcgttgcgtcgcgaacgctcggttgccgccgggcgttttttattggtgagaatcgcagcaacttgtcgcgccaatcgagccatgtcgtcgtcaacgaccccccattcaagaacagcaagcagcattgagaactttggaatccagtccctcttccacctgctgatctgcgacttatcaacgcccacagcttccgctgtcttctcagttccaagcattgcgattttgttaagcaacgcactctcgattcgtagagcctcgttgcgtttgtttgcacgaaccatatgtagctatatgcaaattgaaacaaaagagatggtgatctttctaagagatgatggaatctcccttcagtatcccgatggtcaatgcgctggatatgggatagatgggaatatgctgatttttatgggacagagttgcgaactgttcccaactaaaatcattttgcacgatcagcgcactacgaactttacccacaaatag

SEQ ID NO: 2873 - DNA, 2715 bp, Homo sapiens
  SIMILAR (2265)..(2390): 881254mologous to synthetic construct tetracycline resistance,accession number V00083,Smith-Waterman Score=220.
atgatgggacttcgaaatagctatgatgtaaaagaaaggttgaagcatcaagtaaggggtggtaaagcacccaaggctgtcaatagtgggaagctattgccatttccaaggctgaaggagctggcgggggtggaggggatgggtaactgttacctgggcagaacccagccaggaacaagaatgcaatggagccccatgaagctgtccgtagaacttagagcagggcagagaagccttctaagagaaagcaaaggaaaagagatcccagagcccaggtgtgcagctgttggaggaaaagagcctgaagcaaagccgccgaaagttcctcgaccgatgcccttgagagccttcaacccagtcagctccttccggtgggcgcggggcatgactatcgtcgccgcacttatgactgtcttctttatcatgcaactcgtaggacaggtgccggcagcgctctgggtcattttcggcgaggaccgctttcgctggagcgcgacgatgatcggcctgtcgcttgcggtattcggaatcttgcacgccctcgctcaagccttcgtcactggtcccgccaccaaacgtttcggcgagaagcaggccattatcgccggcatggcggccgacgcgctgggctacgtcttgctggcgttcgcgacgcgaggctggatggccttccccattatgattcttctcgcttccggcggcatcgggatgcccgcgttgcaggccatgctgtccaggcaggtagatgacgaccatcagggacagcttcaagggatcgctcgcggctcttaccagcctaacttcgatcattggaccgctgatcgtcacggcgattttatgccgcctcggcgagcacatggaacgggttggcatggatttaaccgggcatgttcatcatcagtaacccgtatcgtgagcatcctctctcgtttcatcggtatcattacccccatgaacagaaatcccccttacacggaggcatcagtgaccaaacaggaaaaaaccgcccttaacatggcccgctttatcagaagccagacattaacgcttctggagaaactcaacgagctggacgcggatgaacaggcagacatctgtgaatcgcttcacgaccacgctgatgagctttaccgcagctgcctcgcgcgtttcggtgatgacggaaacagctatgaccatgattacgccaagcttgcatgcctgcaggtcgaaggccgtggcggcggcacttttgcccatgaattgctcgctgtggagtacgcaggctggatttctcccgcgtttcggctgaaggtaaaccagacatttatcgactatcgaaccggaagattacaacctgctattccgcagagtctccctgaagctctccgtttggctgccgacctggcagagcaaaagcaacggctggagcaaaaaatgcttatggatgcacctaaagtcgaattcgctgaacgcgttgctaccgccagcggggttctaatcggcaactatgccaaagtgctcggcctgggccaaaactatctcttcacctggttgcgtgataacggaattctgatcgcaaccggtgaacgcaggaacgtccccaaacaagaatacatatctcgtgggtatttcacccttaaagaaaccgtgatcgatacaagcaatggaagcaggatttctttcacgactcgtataaccggcaaaggtcagcagtggctgatgaagcgattgcttgatgcaagaaaccgtgatcgatacaagcaatggaagcaggatttctttcacgactcgtataaccggcaaagcgccgggcatatcctgtcgcaatgtgcaaatctcgcggcaacaaccagtgaatacttcattcacaagcctcaccgcctgatcgcggcagaaactggttatagccaatcaaccgtcagattgttttcggcgatcaccgtgaacgtcgcgctaacctgtacccgtttacacccatcctttttggccttcgcacaacaagccaaaaatgcgctgattgaaagcaaattaaagatctcttcaacggcaaccaaggcaaaagcaaaggctgacaatctcgcgggtatccacggaagacgcactcaaaaacatgagttcaagcacaaagttgaggcggctgcgcggaaatatgcttacctgaagaacaagcgttcgcctgatattggcgggatatcaaacttcgataacctaccgcattgcatgacggtaaacgaagctcttaatgcgggtttagccaaaaataaagataacgaacaatggggtgcggttgctggcgcctatatcgccgacatcaccgatggggaagatcgggctcgccacttcgggctcatgagcgcttgtttcggcgtgggtatggtggcaggccccgtggccgggggactgttgggcgccatctccttgcatgcaccattccttgcggcggcggtgctcaacggcctcaacctactactgggctgcttcctaatgcaggagtcgcataagggagagcgtcgaggagaacttctaaagatcgtcgttttgccaggtgaccacgttggtcaagaaatcacagccgaagccattaaggttcttaaagctatttctgatgttcgttccaatgtcaagttcgatttcgaaaatcatttaattggtggtgctgctatcgacctgcaggggggggggggaaagccacgttgtgtctcaaaatctctgatgttacattgcacaagataa

SEQ ID NO: 2874 - DNA, 2637 bp, Homo sapiens
  SIMILAR (1543)..(1860): 951254mologous to enterobacteria phage P1 essential to replication protein,accession number X15639,Smith-Waterman Score= 493.
atgcccttgagagccttcaacccagtcagctccttccggtgggcgcggggcatgactatcgtcgccgcacttatgactgtcttctttatcatgcaactcgtaggacaggtgccggcagcgctctgggtcattttcggcgaggaccgctttcgctggagcgcgacgatgatcggcctgtcgcttgcggtattcggaatcttgcacgccctcgctcaagccttcgtcactggtcccgccaccaaacgtttcggcgagaagcaggccattatcgccggcatggcggccgacgcgctgggctacgtcttgctggcgttcgcgacgcgaggctggatggccttccccattatgattcttctcgcttccggcggcatcgggatgcccgcgttgcaggccatgctgtccaggcaggtagatgacgaccatcagggacagcttcaaggatcgctcgcggctcttaccagcctaacttcgatcattggaccgctgatcgtcacggcgatttatgccgcctcggcgagcacatggaacgggatgctgctggctaccctgtggaacacctacatctgtattaacgaagcgctggcattgaccctgagtgatttttctctggtcccgccgcatccataccgccagttgtttaccctcacaacgttccataaccgggcatgttcatcatcagtaacccgtatcgtgagcatcctctctcgtttcatcggtatcattacccccatgaacagaaatcccccttacacggaggcatcagtgaccaaacaggaaaaaaccgcccttaacatggcccgctttatcagaagccagacattaacgcttctggagaaactcaacgagctggacgcggatgaacaggcagacatctgtgaatcgcttcacgaccacgctgatgagctttaccgcagctgcctcgcgcgtttcggtgatgacggaaacagctatgaccatgattacgccaagcttgcatgcctgcaggtcgaaggccgtggcggcggcacttttgcccatgaattgctcgctgtggagtacgcaggctggatttctcccgcgtttcggctgaaggtaaaccagacatttatcgactatcgaaccggaagattacaacctgctattccgcagagtctccctgaagctctccgtttggctgccgacctggcagagcaaaagcaacggctggagcaaaaaatgcttatggatgcacctaaagtcgaattcgctgaacgcgttgctaccgccagcggggttctaatcggcaactatgccaaagtgctcggcctgggccaaaactatctcttcacctggttgcgtgataacggaattctgatcgcaaccggtgaacgcaggaacgtccccaaacaagaatacatatctcgtgggtatttcacccttaaagaaaccgtgatcgatacaagcaatggaagcaggatttctttcacgactcgtataaccggcaaaggtcagcagtggctgatgaagcgattgcttgatgcaagaaaccgtgatcgatacaagcaatggaagcaggatttctttcacgactcgtataaccggcaaagcgccgggcatatcctgtcgcaatgtgcaaatctcgcggcaacaaccagtgaatacttcattcacaagcctcaccgcctgatcgcggcagaaactggttatagccaatcaaccgtcgttcgtgcattccgtgaagctgtaaacaaaggaattctgtctgtagagattgttatcggcgatcaccgtgaacgtcgcgctaacctgtaccggtttacaccatcctttttggccttcgcacaacaagccaaaaatgcgctgatagaaagcaaattaaagatctcttcagcggcaaccaaggatgacgtggcaataaagaataagaagtcacaagttaaaaaaacaaaaagatcagtttccggcggtgccggaacaaccagcctcaaaaaattgacttcatggatcgctaaggcaaaagcaaaggctgacaatctgcggttatccaaaaaacgcactcaaaaacatgagttcaagcagaaagtagaggcggctgcgcggaaatatgcttacctgaagaacaagcgttcgcctgatattggcgggatatcaaacttcgataacctaccgcattgcatgacgatcctctacgccggacgcatcgtggccggcatcaccggcgccacaggtgcggttgctggcgcctatatcgccgacatcaccgatggggaagatcgggctcgccacttcgggctcatgagcgcttgtttcggcgtgggtatggtggcaggccccgtggccgggggactgttgggcgccatctccttgcatgcaccattccttgcggcggcggtgctcaacggcctcaacctactactgggctgcttcctaatgcaggagtcgcataagggagagcgtcgaggagaacttctaaagatcgtcgttttgccaggtgaccacgttggtcaagaaatcacagccgaagccattaaggttcttaaagctatttctgatgttcgttccaatgtcaagttcgatttcgaaaatcatttaattggtggtgctgctatcgacctgcaggggggggggggaaagccacgttgtgtctcaaaatctctgatgttacattgcacaagataa

SEQ ID NO: 2875 - DNA, 5091 bp, Homo sapiens
  SIMILAR (1346)..(2533): 991254mologous to Size marker plasmid pKF339 protein resposible for tetracycline resistance,accession number D45834,Smith-Waterman Score=1993.
gaattcttacacttagttaaattgctaattttatagattacaaaacttaggaaatcgatctggatgcagggaaacaaagtggtgctgggcaaaaaaggggatacagtggaactgacctgtacagcttcccagaagaagagcatacaattccactggaaaaactccaaccagataaagattctgggaaatcagggctccttcttaactaaaggtccatccaagctgaatgatcgcgctgactcaagaagaagcttgtgggaccaaggaaactttcccctgatcatcaagaatcttaagatagaagactcagatacttacatctgtgaagtggaggaccagaaggaggaggtgcaattgctagtgttcggattgactgccaactctgacacccacctgcttcaggggcagagcctgaccctgaccttggagagcccccctggtagtagcccctcagtgcaatgtaggagtccaaggggtaaaaacatacagggggggaagaccctctccgtgtctcagctggagctccaggatagtggcacctggacatgcactgtcttgcagaaccagaagaaggtggagttcaaaatagacatcgtcgtgctagctttccagaaggcctccagcatagtctataagaaagagggggaacaggtggagttctccttcccactcgcctttacagttgaaaagctgacgggcagtggcgagctgtggtggcaggcggagagggcttcctcctccaagtcttggatcacctttgacctgaagaacaaggaagtgtctgtaaaacgggttacccaggaccctaagctccagatgggcaagaagctcccgctccacctcaccctgccccaggccttgcctcagtatgctggctctggaaacctcaccctggcccttgaagcgaaaacaggaaagttgcatcaggaagtgaacctggtggtgatgagagccactcagctccagaaaaatttgacctgtgaggtgtggggacccacctcccctaagctgatgctgagtttgaaactggagaacaaggaggcaaaggtctcgaagcgggagaaggcggtgtgggtgctgaaccctgaggcggggatgtggcagtgtctgctgagtgactcgggacaggtcctgctggaatccaacatcaaggttctgcccacatggtcgaccccggtgcagccaatgtgagatcctgcagcccagcttggggaccctagaggtccccttttttattttgaattgggagatcccaattctcatgtttgacagcttatcatcgataagctagctttaatgcggtagtttatcacagttaaattgctaacgcagtcaggcaccgtgtatgaaatctaacaatgcgctcatcgtcatcctcggcaccgtcaccctggatgctgtaggcataggcttggttatgccggtactgccgggcctcttgcgggatatcgtccattccgacagcatcgccagtcactatggcgtgctgctagcgctatatgcgttgatgcaatttctatgcgcacccgttctcggagcactgtccgaccgctttggccgccgcccagtcctgctcgcttcgctacttggagccactatcgactacgcgatcatggcgaccacacccgtcctgtggattctctacgccggacgcatcgtggccggcatcaccggcgccacaggtgcggttgctggcgcctatatcgccgacatcaccgatggggaagatcgggctcgccacttcgggctcatgagcgcttgtttcggcgtgggtatggtggcaggccccgtggccgggggactgttgggcgccatctccttgcacgcaccattccttgcggcggcggtgctcaacggcctcaacctactactgggctgcttcctaatgcaggagtcgcataagggagagcgtcgtccgatgcccttgagagccttcaacccagtcagctccttccggtgggcgcggggcatgactatcgtcgccgcacttatgactgtcttctttatcatgcaactcgtaggacaggtgccggcagcgctctgggtcattttcggcgaggaccgctttcgctggagcgcgacgatgatcggcctgtcgcttgcggtattcggaatgttgcacgccctcgctcaagccttcgtcactggtcccgccaccaaacgtttcggcgagaagcaggccattatcgccggcatggcggccgacgcgctgggctacgtcttgctggcgttcgcgacgcgaggctggatggccttccccattatgattcttctcgcttccggcggcatcgggatgcccgcgttgcaggccatgctgtccaggcaggtagatgacgaccatcagggacagcttcaaggatcgctcgcggctcttaccagcctaacttcgatcactggaccgctgatcgtcacggcgatttatgccgcctcggcgagcacatggaacgggttggcatggattgtaggcgccgccctataccttgtctgcctccccgcgttgcgtcgcggtgcatggagccgggccacctcgacctgaatggaagccggcggcacctcgctaacggattcaccactccaagaattggagccaatcaattcttgcggagaactgtgaatgcgcaaaccaacccttggcagaacatatccatcgcgtccgccatctccagcagccgcacgcggcgcatctcgggggatgatcagctgcctcgcgcgtttcggtgatgacggtgaaaacctctgacacatgcagctcccggagacggtcacagcttgtctgtaagcggatgccgggagcagacaagcccgtcagggcgcgtgagcgggtgttggcgggtgtcggggcgcagccatgacccagtcacgtagcgatagcggagtgtatactggcttaactatgcggcatcagagcagattgtactgagagtgcaccatatgcggtgtgaaataccgcacagatgcgtaaggagaaaataccgcatcaggcgctcttccgcttcctcgctcactgactcgctgcgctcggtcgttcggctgcggcgagcggtatcagctcactcaaaggcggtaatacggttatccacagaatcaggggataacgcaggaaagaacatgtgagcaaaaggccagcaaaaggccaggaaccgtaaaaaggccgcgttgctggcgtttttccataggctccgcccccctgacgagcatcacaaaaatcgacgctcaagtcagaggtggcgaaacccgacaggactataaagataccaggcgtttccccctggaagctccctcgtgcgctctcctgttccgaccctgccgcttaccggatacctgtccgcctttctcccttcgggaagcgtggcgctttctcaatgctcacgctgtaggtatctcagttcggtgtaggtcgttcgctccaagctgggctgtgtgcacgaaccccccgttcagcccgaccgctgcgccttatccggtaactatcgtcttgagtccaacccggtaagacacgacttatcgccactggcagcagccactggtaacaggattagcagagcgaggtatgtaggcggtgctacagagttcttgaagtggtggcctaactacggctacactagaaggacagtatttggtatctgcgctctgctgaagccagttaccttcggaaaaagagttggtagctcttgatccggcaaacaaaccaccgctggtagcggtggtttttttgtttgcaagcagcagattacgcgcagaaaaaaaggatctcaagaagatcctttgatcttttctacggggtctgacgctcagtggaacgaaaactcacgttaagggattttggtcatgagattatcaaaaaggatcttcacctagatccttttcagatctcccgatctttagctgtcttggtttgcccaaagcgcattgcataatctttcagggttatgcgttgttccatacaacctccttagtacatgcaaccattatcaccgccagaggtaaaatagtcaacacgcacggtgttagatatttatcccttgcggtgatagatttaacgtatgagcacaaaaaagaaaccattaacacaagagcagcttgaggacgcacgtcgccttaaagcaatttatgaaaaaaagaaaaatgaacttggcttatcccaggaatctgtcgcagacaagatggggatggggcagtcaggcgttggtgctttatttaatggcatcaatgcattaaatgcttataacgccgcattgcttacaaaaattctcaaagttagcgttgaagaatttagcccttcaatcgccagagaaatctacgagatgtatgaagcggttagtatgcagccgtcacttagaagtgagtatgagtaccctgttttttctcatgttcaggcagggatgttctcacctaagcttagaacctttaccaaaggtgatgcggagagatgggtaagcacaaccaaaaaagccagtgattctgcattctggcttgaggttgaaggtaattccatgaccgcaccaacaggctccaagccaagctttcctgacggaatgttaattctcgttgaccctgagcaggctgttgagccaggtgatttctgcatagccagacttgggggtgatgagtttaccttcaagaaactaattagggatagcggtcaggtgtttttacaaccactaaacccacagtacccaatgatcccatgcaatgagagttgttccgttgtggggaaagttatcgctagtcagtggcctgaagagacgtttggctgatcggcaaggtgttctggtcggcgcatagctgataacaattgagcaagaatcttcatcggggctgcagcccacgatgcgtccggcgtagaggatctctcacctaccaaacaatgcccccctgcaaaaaataaattcatataaaaaacatacagataaccatctgcggtgataaattatctctggcggtgttgacataaataccactggcggtgatactgagcacatcagcaggacgcactgaccaccatgaaggtgacgctcttaaaattaagccctgaagaagggcagcattcaaagcagaaggctttggggtgtgtgatacgaaacgaagcat

SEQ ID NO: 2876 - DNA, 695 bp, Homo sapiens
  SIMILAR (145)..(264): 621254mologous to Homo sapiens Human secreted protein, SEQ ID NO: 7871,accession number AAG03790,Smith-Waterman Score=109.
ttggggtcttgcactgtcacccagactggggtgcagtggtgtggtcatagctcactgcggcctcaaactcaagctcaagcgatcctcttaccttgcctttcaaattgctgggattataagcatgagccactgcatctggcctatgtgacacaattctgttttttgtcttttttttttgggggggggggatggagtctcgctctgtcacccatgctggagtgcggtggcgtgatcttggctcaatgcaagctccgcctccttgggttcacgccattctcctgcctcagcctcccaagtagctgggaccacaggcacccgccaccatgcctggctaattttttgaatttttagtagagacgggatttcactgtcttagcccaggatggtctcgatctcctgacctcgtgatccgcccgcctcggcctcccaaagtgctgggattacaggcgtgagccaccgcgcccagcctatgtgatgcaattctgatgtcaactccctgatgttacctcaaatgccacaggttaaggccaccagtccccaataggctgccctcgctttagacacacctgcaggcttgggtgtcctcagaccacatgtacttctcaccaactggctgcaaatttggaggttcccaccatgccctcaagttcgataactcactaaaacaattcacagaatgcagaaaagcaacgaaa

SEQ ID NO: 2877 - DNA, 2100 bp, Homo sapiens
  SIMILAR (1844)..(2020): 321254mologous to Homo sapiens prepro-vWF (aa -22 to 1378),accession number X04146,Smith-Waterman Score=46.
atgagcgccgccccctgctccacggtgccaagtcccatcgaccacccaagggctgaggagtgtgggcacacagcgcgggactggcaggtagctccacctgcagcccagagccatgatgatgatgaggaggaggaggaggacgagaaggaggaggaggaggaggaggaggagttgttgttagctggctccccatattctcccactgtcccgtgttttccgctggagtgcccctgccttgagaatgggagccggcagaagcaggacaagcacacgccgggctttaagcacaagtttcaacacgcattctttttctccttccccctcgcaactataacccattccttttgggtagccgagcacagcttgaggttagaaggaaaacaaggtgcccagatatctccacacctccaagtgggacctggtctggtctggcagggctacctgtggcagaacagggaagctgggagcagcagagatagccacctaaacatgccatgtggtatggctgcaggtcattctcactctgggacactcttctctgaccagggcctgtgggagcagtgccagcttctgaagagcacctcggtgtttgcccgctgccaccctctggtggaccccgagccttttgtggccctgtgtgagaagactttgtgtgagtgtgctggggggctggagtgcgcctgccctgccctcctggagtacgcccggacctgtgcccaggagggaatggtgctgtacggctggaccgaccacagcgcgtgcagcccagtgtgccctgctggtatggagtataggcagtgtgtgtccccttgcgccaggacctgccagagcctgcacatcaatgaaatgtgtcaggagcgatgcgtggatggctgcagctgccctgagggacagctcctggatgaaggcctctgcgtggagagcaccgagtgtccctgcgtgcattccggaaagcgctaccctcccggcacctccctctctcgagactgcaacacctgcatttgccgaaacagccagtggatctgcagcaatgaagaatgtccagacagggagggccacaactcaaggcagcgagaagttgccctctctgcacaggttggctgcaaccacgtgaccccagctctggtttcaggacaggtgccggcagcgctctgggtcattttcggcgaggaccgctttcgctggagcgcgacgatgatcggcctgtcgcttgcggtattcggaatcttgcacgccctcgctcaagccttcgtcactggtcccgccaccaaacgtttcggcgagaagcaggccattatcgccggcatggcggccgacgcgctgggctacgtcttgctggcgttcgcgacgcgaggctggatggccttccccattatgattcttctcgcttccggcggcatcgggatgcccgcgttgcaggccatgctgtccaggcagcctaacttcgatcattggaccgctgatcgtcacggcgatttatgccgcctcggcgagcacatggaacgggttggcatggattgtaggcgccgccctataccttgtctgcctccccgcgttgcgtcgcggtgcatggagccgggccacctcgacctgaatggaagccggcggcacctcgctaacggattcaccactccaagaattggagccaatcaattcttgcggagaactgtgaatgcgcaaaccaacccttggcagaacatatccatcgcgtccgccatctccagcagccgcacgcggcgcatctcgggcagcgttgggtcctggccacgggtgcgcatgatcgtgctcctgtcgttgaggacccggctaggctggcggggttgccttactgcgaacgtgaagcgactgctgctgcaaaacgtctgcgacctgagcaacaacatgaatggtcttcggtttccgtgtttcgtaaagtctggaaacgcggaagtcagcgccctgcaccattatgttccggatctgcatcgcaggatgctgctggctaccctgtggaacacctacatctgtattaacgaagcgctggcattgaccctgagtgatttttctctggtcccgccgcatccataccgccagttgtttaccctcacaacgttccagtaa

SEQ ID NO: 2878 - DNA, 3314 bp, Homo sapiens
  SIMILAR (3286)..(3312): 1001254mologous to Escherichia coli reading frame ?,accession number V00359,Smith-Waterman Score=47.
gaacgtctccaacagcgactggtcccgcgctcgtgtgctaccgcgccagtttagtcgcactgcgcgaggaagacaccaggtcccaggagtatgttcccttccgtggcaatagggactttgcacacgtgaagaagatgggcgggcttgggcttctggccatggacgtgcccgaggagcttggcggtgctggcctcgattacctggcctacgccatcgccatggaggagatcagccgtggctgcgcctccaccggagtcatcatgagtgtcaacaactctctctacctggggcccatcttgaagtttggctccaaggagcagaagcaggcgtgggtcacgcctttcaccagtggtgacaaaattggctgctttgccctcagcggaaccagagccttcaacccagtcagctccttccggtgggcgcggggcatgactatcgtcgccgcacttatgactgtcttctttatcatgcaactcgtaggacaggtgccggcagcgctctgggtcattttcggcgaggaccgctttcgctggagcgcgacgatgatcggcctgtcgcttgcggtattcggaatcttgcacgccctcgctcaagccttcgtcactggtcccgccaccaaacgtttcggcgagaagcaggccattatcgccggcatggcggccgacgcgctgggctacgtcttgctggcgttcgcgacgcgaggctggatggccttccccattatgattcttctcgcttccggcggcatcgggatgcccgcgttgcaggccatgctgtccaggcaggtagatgacgaccatcagggacagcttcaaggatcgctcgcggctcttaccagcctaacttcgatcattggaccgctgatcgtcacggcgatttatgccgcctcggcgagcacatggaacgggttggcatggattgtaggcgccgccctataccttgtctgcctccccgcgtttgcgtcgcggtgcatggagccgggccacctcgacctgaatggaagccggcggcacctcgctaacggattcaccactccaagaattggagccaatcaattcttgcggagaactgtgaatgcgcaaaccaacccttggcagaacatatccatcgcgtccgccatctccagcagccgcacgcggcgcatctcgggcagcgttgggtcctggccacgggtgcgcatgatcgtgctcctgtcgttgaggacccggctaggctggcggggttgccttactgcgaacgtgaagcgactgctgctgcaaaacgtctgcgacctgagcaacaacatgaatggtcttcggtttccgtgtttcgtaaagtctggaaacgcggaagtcagcgccctgcaccattatgttccggatctgcatcgcaggatgctgctggctaccctgtggaacacctacatctgtattaacgaagcgctggcattgaccctgagtgatttttctctggtcccgccgcatccataccgccagttgtttaccctcacaacgttccataaccgggcatgttcatcatcagtaacccgtatcgtgagcatcctctctcgtttcatcggtatcattacccccatgaacagaaatcccccttacacggaggcatcagtgaccaaacaggaaaaaaccgcccttaacatggcccgctttatcagaagccagacattaacgcttctggagaaactcaacgagctggacgcggatgaacaggcagacatctgtgaatcgcttcacgaccacgctgatgagctttaccgcagctgcctcgcgcgtttcggtgatgacggtgaaaactctgacacatgcagctcccggagacggtcacagcttgtctgtaagcggatgccgggagcagacaagcccgtcgaaggccgtggcggcggcacttttgcccatgaattgctcgctgtggagtacgcaggctggatttctcccgcgtttcggctgaaggtaaaccagacatttatcgactatcgaaccggaagattacaacctgctattccgcagagtctccctgaagctctccgtttggctgccgacctggcagagcaaaagcaacggctggagcaaaaaatgcttatggatgcacctaaagtcgaattgctgaacgcgttgctaccgccagcgggcgccgggcatatcctgtcgcaatgtgcaaatctcgcggcaacaaccagtgaatacttcattcacaagcctcaccgcctgatcgcggcagaaactggttatagccaatcaaccgtcgttcgtgcattccgtgaagctgtaaacaaaggaattctgtctgtagagattgttatcggcgatcaccgtgaacgtcgcgctaacctgtaccggtttacaccatcctttttggccttcgcacaacaagccaaaaatgcgctgatagaaagcaaattaaagatctcttcagcggcaaccaagatcctctacgccggacgcatcgtggccggcatcaccggcgccacaggtgcggttgctggcgcctatatcgccgacatcaccgatggggaagatcgggctcgccacttcgggctcatgagcgcttgtttcggcgtgggtgaccacgttggtcaagaaatcacagccgaagccattaaggttcttaaagctatttctgatgttcgttccaatgtcaagttcgatttcgaaaatcatttaattggtggtgctgctatcgacctgcaggggggggggggaaagccacgtgcgacaatctatcgattgtatgggaagcccgatgcgccagagttgtttctgaaacatggcaaaggtagcgttgccaatgatgttacagatgagatggtcagactaaactggctgacggaatttatgcctcttccgaccatcaagcattttatccgtactcctgatgatgcatggttactcaccactgcgatccccgggaaaacagcattccaggtattagaagaatatcctgattcaggtgaaaatattgttgatgcgctggcagtgttcctgcgccggttgcattcgattcctgtttgtaattgtccttttaacagcgatcgcgcgcaatcacgaatgaataacggtttggttgatgcgagtgattttgatgacgagcgtaatggctggcctgttgaacaagtctggaaagaaatgcataagcttttgccattctcaccggattcagtcgtcactcatggtgatttctcacttgataaccttatttttgacgaggggaaattaataggttgtattgatgttggacgagtcggaatcgcagaccgataccaggatcttgccatcctatggaactgcctcgaaacggctttttcaaaaatatggtattga

SEQ ID NO: 2879 - DNA, 2919 bp, Homo sapiens
  SIMILAR (2891)..(2917): 1001254mologous to Escherichia coli reading frame ?,accession number V00359,Smith-Waterman Score=47.
  misc_feature (1)...(2919): n = a,t,c or g
atgcccttgagagccttcaacccagtcagctccttccggtgggcgcggggcatgactatcgtcgccgcacttatgactgtcttctttatcatgcaactcgtaggacaggtgccggcagcgctctgggtcattttcggcgaggaccgctttcgctggagcgcgacgatgatcggcctgtcgcttgcggtattcggaatcttgcacgccctcgctcaagccttcgtcactggtcccgccaccaaacgtttcggcgagaagcaggccattatcgccggcatggcggccgacgcgctgggctacgtcttgctggcgttcgcgacgcgaggctggatggccttccccattatgattcttctcgcttccggcggcatcgggatgcccgcgttgcaggccatgctgtccaggcaggtagatgacgaccatcagggacagcttcaaggatcgctcgcggctcttaccagcctaacttcgatcattggaccgctgatcgtcacggcgatttatgccgcctcggcgagcacatggaacgggttggcatggattgtaggcgccgccctataccttgtctgcctccccgcgtttgcgtcgcggtgcatggagccgggccacctcgacctgaatggaagccggcggcacctcgctaacggattcaccactccaagaattggagccaatcaattcttgcggagaactgtgaatgcgcaaaccaacccttggcagaacatatccatcgcgtccgccatctccagcagccgcacgcggcgcatctcgggcagcgttgggtcctggccacgggtgcgcatgatcgtgctcctgtcgttgaggacccggctaggctggcggggttgccttactgcgaacgtgaagcgactgctgctgcaaaacgtctgcgacctgagcaacaacatgaatggtcttcggtttccgtgtttcgtaaagtctggaaacgcggaagtcagcgccctgcaccattatgttccggatctgcatcgcaggatgctgctggctaccctgtggaacacctacatctgtattaacgaagcgctggcattgaccctgagtgatttttctctggtcccgccgcatccataccgccagttgtttaccctcacaacgttccataaccgggcatgttcatcatcagtaacccgtatcgtgagcatcctctctcgtttcatcggtatcattacccccatgaacagaaatcccccttacacggaggcatcagtgaccaaacaggaaaaaaccgcccttaacatggcccgctttatcagaagccagacattaacgcttctggagaaactcaacgagctggacgcggatgaacaggcagacatctgtgaatcgcttcacgaccacgctgatgagctttaccgcagctgcctcgcgcgtttcggtgatgacggtgaaaactctgacacatgcagctcccggagacggtcacagcttgtctgtaagcggatgccgggagcagacaagcccacatttatcgactatcgaaccggaagattacaacctgctattccgcagagtctccctgaagctctccgtttggctgccgacctggcagagcaaaagcaacggctggagcaaaaaatgcttatggatgcacctaaagtcgaattnnntgaacgcgttgctaccgccagcggggttctaatcggcaactatgccaaagtgctcggcctgggccaaaactatctcttcacctggttgcgtgataacggaattctgatcgcaaccggtgaacgcaggaacgtccccaaacaagaatacatatctcgtgggtatttcacccttaaagaaaccgtgatcgatacaagcaatggaagcaggatttctttcacgactcgtataaccggcaaaggtgcggttgctggcgcctatatcgccgacatcaccgatggggaagatcgggctcgccacttcgggctcatgagcgcttgtttcggcgtgggtatggtggcaggccccgtggccgggggactgttgggcgccatctccttgcatgcaccattccttgcggcggcggtgctcaacggcctcaacctactactgggctgcttcctaatgcaggagtcgcataagggagagcgtcgaggagaacttctaggatataccattctaatgtctgcccctaagaagatcgtcgttttgccaggtgaccacgttggtcaagaaatcacagccgaagccattaaggttcttaaagctatttctgatgttcgttccaatgtcaagttcgatttcgaaaatcatttaattggtggtgctgctatcgacctgcaggggggggggggaaagccacgtgcgacaatctatcgattgtatgggaagcccgatgcgccagagttgtttctgaaacatggcaaaggtagcgttgccaatgatgttacagatgagatggtcagactaaactggctgacggaatttatgcctcttccgaccatcaagcattttatccgtactcctgatgatgcatggttactcaccactgcgatccccgggaaaacagcattccaggtattagaagaatatcctgattcaggtgaaaatattgttgatgcgctggcagtgttcctgcgccggttgcattcgattcctgtttgtaattgtccttttaacagcgatcgcgcgcaatcacgaatgaataacggtttggttgatgcgagtgattttgatgacgagcgtaatggctggcctgttgaacaagtctggaaagaaatgcataagcttttgccattctcaccggattcagtcgtcactcatggtgatttctcacttgataaccttatttttgacgaggggaaattaataggttgtattgatgttggacgagtcggaatcgcagaccgataccaggatcttgccatcctatggaactgcctcgaaacggctttttcaaaaatatggtattga

SEQ ID NO: 2880 - DNA, 2823 bp, Homo sapiens
  SIMILAR (1759)..(2166): 991254mologous to enterobacteria phage P1 essential to replication protein,accession number X15639,Smith-Waterman Score= 674.
atgcccttgagagccttcaacccagtcagctccttccggtgggcgcggggcatgactatcgtcgccgcacttatgactgtcttctttatcatgcaactcgtaggacaggtgccggcagcgctctgggtcattttcggcgaggaccgctttcgctggagcgcgacgatgatcggcctgtcgcttgcggtattcggaatcttgcacgccctcgctcaagccttcgtcactggtcccgccaccaaacgtttcggcgagaagcaggccattatcgccggcatggcggccgacgcgctgggctacgtcttgctggcgttcgcgacgcgaggctggatggccttccccattatgattcttctcgcttccggcggcatcgggatgcccgcgttgcaggccatgctgtccaggcagcctaacttcgatcattggaccgctgatcgtcacggcgatttatgccgcctcggcgagcacatggaacgggttggcatggattgtaggcgccgccctataccttgtctgcctccccgcgttgcgtcgcggtgcatggagccgggccacctcgacctgaatggaagccggcggcacctcgctaacggattcaccactccaagaattggagccaatcaattcttgcggagaactgtgaatgcgcaaaccaacccttggcagaacatatccatcgcgtccgccatctccagcagccgcacgcggcgcatctcgggcagcgttgggtcctggccacggtctggaaacgcggaagtcagcgccctgcaccattatgttccggatctgcatcgcaggatgctgctggctaccctgtggaacacctacatctgtattaacgaagcgctggcattgaccctgagtgatttttctctggtcccgccgcatccataccgccagttgtttaccctcacaacgttccataaccgggcatgttcatcatcagtaacccgtatcgtgagcatcctctctcgtttcatcggtatcattacccccatgaacagaaatcccccttacacggaggcatcagtgaccaaacaggaaaaaaccgcccttaacatggcccgctttatcagaagccagacattaacgcttctggagaaactcaacgagctggacgcggatgaacaggcagacatctgtgaatcgcttcacgaccacgctgatgagctttaccgcagctgcctcgcgcgtttcggtgatgacggaaacagctatgaccatgattacgccaagcttgcatgcctgcaggtcgaaggccgtggcggcggcacttttgcccatgaattgctcgctgtggagtacgcaggctggatttctcccgcgtttcggctgaaggtaaaccagacatttatcgactatcgaaccggaagattacaacctgctattccgcagagtctccctgaagctctccgtttggctgccgacctggcagagcaaaagcaacggctggagcaaaaaatgcttatggatgcacctaaagtcgaattcgctgaacgcgttgctaccgccagcggggttctaatcggcaactatgccaaagtgctcggcctgggccaaaactatctcttcacctggttgcgtgataacggaattctgatcgcaaccggtgaacgcaggaacgtccccaaacaagaatacatatctcgtgggtatttcacccttaaagaaaccgtgatcgatacaagcaatggaagcaggatttctttcacgactcgtataaccggcaaagacgtagtaagaaccaccagcattgtaatgctggctaaagtcactttcctgagctgtataacgatgagcgattttactttttctggctatgaattggcctgctttgtaacacactccggtctatcccgtagcgccgggcatatcctgtcgcaatgtgcaaatctcgcggcaacaaccagtgaatacttcattcacaagcctcaccgcctgatcgcggcagaaactggttatagccaatcaaccgtcgttcgtgcattccgtgaagctgtaaacaaaggaattctgtctgtagagattgttatcggcgatcaccgtgaacgtcgcgctaacctgtaccggtttacaccatcctttttggccttcgcacaacaagccaaaaatgcgctgatagaaagcaaattaaagatctcttcagcggcaaccaaggcaaaagcaaaggctgacaatctgcggttatccaaaaaacgcactcaaaaacatgagttcaagcagaaagtagaggcggctgcgcggaaatatgcttacctgaagaacaagcgttcgcctgatattggcgggatatcaaacttcgataacctaccgcattgcatgacgatcctctacgccggacgcatcgtggccggcatcaccggcgccacaggtgcggttgctggcgcctatatcgccgacatcaccgatggggaagatcgggctcgccacttcgggctcatgagcgcttgtttcggcgtgggtatggtggcaggccccgtggccgggggactgttgggcgccatctccttgcatgcaccattccttgcggcggcggtgctcaacggcctcaacctactactgggctgcttcctaatgcaggagtcgcataagggagagcgtcgaggagaacttctaaagatcgtcgttttgccaggtgaccacgttggtcaagaaatcacagccgaagccattaaggttcttaaagctatttctgatgttcgttccaatgtcaagttcgatttcgaaaatcatttaattggtggtgctgctatcgacctgcaggggggggggggaaagccacgttgtgtctcaaaatctctgatgttacattgcacaagataa

SEQ ID NO: 2881 - DNA, 2106 bp, Homo sapiens
  SIMILAR (214)..(828): 911254mologous to synthetic construct tetracycline resistance,accession number V00083,Smith-Waterman Score=922.
atgacgatgtgggtactacattgcgcattcacctactttgtgagcgcatggtcgaagcatggatatgcgcatgctgtgactgccaagatcctctacgccggacgcatcgtggccggcatcaccggcgccacaggtgcggttgctggcgcctatatcgccgacatcaccgatggggaagatcgggctcgccacttcgggctcatgagcgcttgtttcggcgtgggtatggtggcaggccccgtggccgggggactgttgggcgccatctccttgcatgcaccattccttgcggcggcggtgctcaacggcctcaacctactactgggctgcttcctaatgcaggagtcgcataagggagagcgtcgaccgatgcccttgagagccttcaacccagtcagctccttccggtgggcgcggggcatgactatcgtcgccgcacttatgactgtcttctttatcatgcaactcgtaggacaggtgccggcagcgctctgggtcattttcggcgaggaccgctttcgctggagcgcgacgatgatcggcctgtcgcttgcggtattcggaatcttgcacgccctcgctcaagccttcgtcactggtcccgccaccaaacgtttcggcgagaagcaggccattatcgccggcatggcggccgacgcgctgggctacgtcttgctggcgttcgcgacgcgaggctggatggccttccccattatgattcttctcgcttccggcggcatcgggatgcccgcgttgcaggccatgctgtccaggcagcctaacttcgatcattggaccgctgatcgtcacggcgatttatgccgcctcggcgagcacatggaacgggttggcatggattgtaggcgccgccctataccttgtctgcctccccgcgttgcgtcgcggtgcatggagccgggccacctcgacctgaatggaagccggcggcacctcgctaacggattcaccactccaagaattggagccaatcaattcttgcggagaactgtgaatgcgcaaaccaacccttggcagaacatatccatcgcgtccgccatctccagcagccgcacgcggcgcatctcgggcagcgttgggtcctgcagatccggctgtggaatcttcacgctgccgcaagcactcagggcgcaagggctgctaaaggaagcggaacacgtagaaagccagtccgcagaaacggtgctgaccccggatgaatgtcagctactgggctatctggacaagggaaaacgcaagcgcaaagagaaagcaggtagcttgcagtgggcttacatggcgatagctagactgggcggttttatggacagcaagcgaaccggaattgccagctggggcgccctctggctattcggctatgactgggcacaacagacaatcggctgctctgatgccgccgtgttccggctgtcagcgcaggggcgcccggttctttttgtcaagaccgacctgtccggtgccctgaatgaactgcaggacgaggcagcgcggctatcgtggctggccacgacgggcgttccttgcgcagctgtgctcgacgttgtcactgaagcgggaagggactggctgctattgggcgaagtgccggggcaggatctcctgtcatctcaccttgctcctgccgagaaagtatccatcatggctgatgcaatgcggcggctgcatacgcttgatccggctacctgcccattcgaccaccaagcgaaacatcgcatcgagcgagcacgtactcggatggaagccggtcttgtcgatcaggatgatctggacgaagagcatcaggggctcgcgccagccgaactgttcgccaggctcaaggcgcgcatgcccgacggcgaggatctcgtcgtgacccatggcgatgcctgcttgccgaatatcatggtggaaaatggccgcttttctggattcatcgactgtggccggctgggtgtggcggaccgctatcaggacatagcgttggctacccgtgatattgctgaagagcttggcggcgaatgggctgaccgcttcctcgtgctttacggtatcgccgctcccgattcgcagcgcatcgccttctatcgccttcttgacgagttcttctga

SEQ ID NO: 2882 - DNA, 7038 bp, Homo sapiens; identical to SEQ ID NO: 2273
  SIMILAR (19)..(5586): 991254mologous to Homo sapiens actin binding protein ABP620,accession number AB029290,Smith-Waterman Score=9337.

SEQ ID NO: 2883 - DNA, 2301 bp, Homo sapiens
  SIMILAR (883)..(2298): 1001254mologous to Cloning vector pBACe3.6 levansucrase,accession number U80929,Smith-Waterman Score=2482.
atggctacaaatatggaggggctggttcagcacagagtggggacccagcaggtggctgagaactttaaaacgtttcatgccaagtggcctaacctgggtatcggcacgattaatgtcgtatgtgctgctgatgtgctgattgttcccacgcctgctgagttttctgactacacctccgcactgcagtttttcgatatgcttcgtgatctgctcaagaacgttgatcttaaagggttcgagcctgataaccggtttacgcagtttcggcttagtgaaacaaaagaaatcaccaatccgtatgccatgcgtttatacgaatccctgtgtcagtatcgtaagccggatggctcaggcatcgtctctctgaaaatcgactggatcatagagcgttaccagctgcctcaaagttaccagcgtatgcctgactttctgccgccgcttcctgcaggtgcactgagcctcatctccaaagtcacagaccgtgccaacgacagcatggagcaaggggctgaaacaagccagggagctctgggcacactggcaaatgtagtgacctcccttgccaacctaagtgaatctttgaacaacggtgacacttcagaaatccagccagaggaccagtctgcaagtgagataactcgggcatttgataccttagctaaagcacttaataccacagacagctcctcttctccaagcttggcagatgggatagacaccagtggaggagggagcatccacgtcatcagcagagaccagtcgacacccatcattgaggttgaaggccccctcctttcagacacacacgtcacatttaagtcaattcgggaggatcgaaacggcagatcgcaaaaaacagtacatacagaaggagacatgaacatgaacatcaaaaaaattgtaaaacaagccacagttctgacttttacgactgcacttctggcaggaggagcgactcaagccttcgcgaaagaaaataaccaaaaagcatacaaagaaacgtacggcgtctctcatattacacgccatgatatgctgcagatccctaaacagcagcaaaacgaaaaataccaagtgcctcaattcgatcaatcaacgattaaaaatattgagtctgcaaaaggacttgatgtgtgggacagctggccgctgcaaaacgctgacggaacagtagctgaatacaacggctatcacgttgtgtttgctcttgcgggaagcccgaaagacgctgatgacacatcaatctacatgttttatcaaaaggtcggcgacaactcaatcgacagctggaaaaacgcgggccgtgtctttaaagacagcgataagttcgacgccaacgatccgatcctgaaagatcagacgcaagaatggtccggttctgcaacctttacatctgacggaaaaatccgtttattctacactgactattccggtaaacattacggcaaacaaagcctgacaacagcgcaggtaaatgtgtcaaaatctgatgacacactcaaaatcaacggagtggaagatcacaaaacgatttttgacggagacggaaaaacatatcagaacgttcagcagtttatcgatgaaggcaattatacatccggcgacaaccatacgctgagagaccctcactacgttgaagacaaaggccataaataccttgtattcgaagccaacacgggaacagaaaacggataccaaggcgaagaatctttatttaacaaagcgtactacggcggcggcacgaacttcttccgtaaagaaagccagaagcttcagcagagcgctaaaaaacgcgatgctgagttagcgaacggcgccctcggtatcatagagttaaataatgattacacattgaaaaaagtaatgaagccgctgatcacttcaaacacggtaactgatgaaatcgagcgcgcgaatgttttcaaaatgaacggcaaatggtacttgttcactgattcacgcggttcaaaaatgacgatcgatggtattaactcaaacgatatttacatgcttggttatgtatcaaactctttaaccggcccttacaagccgctgaacaaaacagggcttgtgctgcaaatgggtcttgatccaaacgatgtgacattcacttactctcacttcgcagtgccgcaagccaaaggcaacaatgtggttatcacaagctacatgacaaacagaggcttcttcgaggataaaaaggcaacatttgcgccaagcttcttaatgaacatcaaaggcaataaaacatccgttgtcaaaaacagcatcctggagcaaggacagctgacagtcaactaa

SEQ ID NO: 2884 - DNA, 2607 bp, Homo sapiens
  SIMILAR (1417)..(2169): 971254mologous to enterobacteria phage P1 essential to replication protein,accession number X15639,Smith-Waterman Score= 1229.
atgcccttgagagccttcaacccagtcagctccttccggtgggcgcggggcatgactatcgtcgccgcacttatgactgtcttctttatcatgcaactcgtaggacaggtgccggcagcgctctgggtcattttcggcgaggaccgctttcgctggagcgcgacgatgatcggcctgtcgcttgcggtattcggaatcttgcacgccctcgctcaagccttcgtcactggtcccgccaccaaacgtttcggcgagaagcaggccattatcgccggcatggcggccgacgcgctgggctacgtcttgctggcgttcgcgacgcgaggctggatggccttccccattatgattcttctcgcttccggcggcatcgggatgcccgcgttgcaggccatgctgtccaggcaggtagatgacgaccatcagggacagcttcaaggatcgctcgcggctcttaccagcctaacttcgatcattggaccgctgatcgtcacggcgatttatgccgcctcggcgagcacatggaacggtaaccgggcatgttcatcatcagtaacccgtatcgtgagcatcctctctcgtttcatcggtatcattacccccatgaacagaaatcccccttacacggaggcatcagtgaccaaacaggaaaaaaccgcccttaacatggcccgctttatcagaagccagacattaacgcttctggagaaactcaacgagctggacgcggatgaacaggcagacatctgtgaatcgcttcacgaccacgctgatgagctttaccgcagctgcctcgcgcgtttcggtgatgacggaaacagctatgaccatgattacgccaagcttgcatgcctgcaggtcgaaggccgtggcggcggcacttttgcccatgaattgctcgctgtggagtacgcaggctggatttctcccgcgtttcggctgaaggtaaaccagacatttatcgactatcgaaccggaagattacaacctgctattccgcagagtctccctgaagctctccgtttggctgccgacctggcagagcaaaagcaacggctggagcaaaaaatgcttatggatgcacctaaagtcgaattcgctgaacgcgttgctaccgccagcggggttctaatcggcaactatgccaaagtgctcggcctgggccaaaactatctcttcacctggttgcgtgataacggaattctgatcgcaaccggtgaacgcaggaacgtccccaaacaagaatacatatctcgtgggtatttcacccttaaagaaaccgtgatcgatacaagcaatggaagcaggatttctttcacgactcgtataaccggcaaaggtcagcagtggctgatgaagcgattgcttgatgcaagaaaccgtgatcgatacaagcaatggaagcaggatttctttcacgactcgtataaccggcaaagcgccgggcatatcctgtcgcaatgtgcaaatctcgcggcaacaaccagtgaatacttcattcacaagcctcaccgcctgatcgcggcagaaactggttatagccaatcaaccgtcgttcgtgcattccgtgaagctgtaaacaaaggaattctgtctgtagagattgttatcggcgatcaccgtgaacgtcgcgctaacctgtaccggtttacaccatcctttttggccttcgcacaacaagccaaaaatgcgctgatagaaagcaaattaaagatctcttcagcggcaaccaaggttaaagctgttctcgctaagacattggctttatttaattttttatccacacccccatgtcaaaatgataccccctccccctgtcaggatgacgtggcaataaagaataagaagtcacaagttaaaaaaacaaaaagatcagtttccggcggtgccggaacaaccagcctcaaaaaattgacttcatggatcgctaaggcaaaagcaaaggctgacaatctgcggttatccaaaaaacgcactcaaaaacatgagttcaagcagaaagtagaggcggctgcgcggaaatatgcttacctgaagaacaagcgttcgcctgatattggcgggatatcaaacttcgataacctaccgcattgcatgacggtaaacgaagctcttaatgcggttttagccaaaaataaagataacgaacaatggggtgcggttgctggcgcctatatcgccgacatcaccgatggggaagatcgggctcgccacttcgggctcatgagcgcttgtttcggcgtgggtatggtggcaggccccgtggccgggggactgttgggcgccatctccttgcatgcaccattccttgcggcggcggtgctcaacggcctcaacctactactgggctgcttcctaatgcaggagtcgcataagggagagcgtcgaggagaacttctaaagatcgtcgttttgccaggtgaccacgttggtcaagaaatcacagccgaagccattaaggttcttaaagctatttctgatgttcgttccaatgtcaagttcgatttcgaaaatcatttaattggtggtgctgctatcgacctgcaggggggggggggaaagccacgttgtgtctcaaaatctctgatgttacattgcacaagataa

SEQ ID NO: 2885 - DNA, 2076 bp, Homo sapiens
  SIMILAR (658)..(2073): 991254mologous to Cloning vector pBACe3.6 levansucrase,accession number U80929,Smith-Waterman Score=2477.
atgaacatgaacatcaaaaaaattgtaaaacaagccacagttctgacttttacgactgcacttctggcaggaggagcgactcaagccttcgcgaaagaaaataaccaaaaagcatacaaagaaacgtacggcgtctctcatattacacgccatgatatgctgcagatccctaaacagcagcaaaacgaaaaataccaagtgcctcaattcgatcaatcaacgattaaaaatattgagtctgcaaaaggacttgatgtgtgggacagctggccgctgcaaaacgctgacggaacagtagctgaatacaacggctatcacgttgtgtttgctcttgcgggaagcccgaaagacgctgatgacacatcaatctacatgttttatcaaaaggtcggcgacaactcaatcgacagctggaaaaacgcgggccgtgtctttaaagacagcgataagttcgacgccaacgatccgatcctgaaagatcagacgcaagaatggtccggttctgcaacctttacatctgacggaaaaatccgtttattctacactgactattccggtaaacattacggcaaacaaagcctgacaacagcgcagtcaattcgggaagaccgaaacggcagatcgcaaaaaacagtacatacagaacgagacatgatcatgaacatcaaaaaaattgtaaaacaagccacagttctgacttttacgactgcacttctggcaggaggagcgactcatgccttcgcgaaagaaaataaccaaaaagcatacaaagaaacgtacggcgtctctcatattacacgccatgatatgctgcagatccctaaacagcagcaaaacgaaaaataccaagtgcctcaattcgatcaatcaacgattaaaaatattgagtctgcaaaaggacttgatgtgtgggacagctggccgctgcaaaacgctgacggaacagtagctgaatacaacggctatcacgttgtgtttgctcttgcgggaagcccgaaagacgctgatgacacatcaatctacatgttttatcaaaaggtcggcgacaactcaatcgacagctggaaaaacgcgggccgtgtctttaaagacagcgataagttcgacgccaacgatccgatcctgaaagatcagacgcaagaatggtccggttctgcaacctttacatctgacggaaaaatccgtttattctacactgactattccggtaaacattacggcaaacaaagcctgacaacagcgcaggtaaatgtgtcaaaatctgatgacacactcaaaatcaacggagtggaagatcacaaaacgatttttgacggagacggaaaaacatatcagaacgttcagcagtttatcgatgaaggcaattatacatccggcgacaaccatacgctgagagaccctcactacgttgaagacaaaggccataaataccttgtattcgaagccaacacgggaacagaaaacggataccaaggcgaagaatctttatttaacaaagcgtactacggcggcggcacgaacttcttccgtaaagaaagccagaagcttcagcagagcgctaaaaaacgcgatgctgagttagcgaacggcgccctcggtatcatagagttaaataatgattacacattgaaaaaagtaatgaagccgctgatcacttcaaacacggtaactgatgaaatcgagcgcgcgaatgttttcaaaatgaacggcaaatggtacttgttcactgattcacgcggttcaaaaatgacgatcgatggtattaactcaaacgatatttacatgcttggttatgtatcaaactctttaaccggcccttacaagccgctgaacaaaacagggcttgtgctgcaaatgggtcttgatccaaacgatgtgacattcacttactctcacttcgcagtgccgcaagccaaaggcaacaatgtggttatcacaagctacatgacaaacagaggcttcttcgaggataaaaaggcaacatttgcgccaagcttcttaatgaacatcaaaggcaataaaacatccgttgtcaaaaacagcatcctggagcaaggacagctgacagtcaactaa

SEQ ID NO: 2886 - DNA, 3606 bp, Homo sapiens
  SIMILAR (2239)..(3603): 991254mologous to Cloning vector pBACe3.6 levansucrase,accession number U80929,Smith-Waterman Score=2393.
atgaaactcatggaaacacttaaccagtgcataaacgctggtcatgaaatgacgaaggctatcgccattgcacagtttaatgatgacagcccggaagcgaggaaaataacccggcgctggagaataggtgaagcagcggatttagttggggtttcttctcaggctatcagagatgccgagaaagcagggcgactaccgcacccggatatggaaattcgaggacgggttgagcaacgtgttggttatacaattgaacaaattaatcatatgcgtgatgtgtttggtacgcgattgcgacgtgctgaagacgtatttccaccggtgatcggggttgctgcccataaaggtggcgtttacaaaacctcagtttctgttcatcttgctcaggatctggctctgaaggggctacgtgttttgctcgtggaaggtaacgacccccagggaacagcctcaatgtatcacggatgggtaccagatcttcatattcatgcagaagacactctcctgcctttctatcttggggaaaaggacgatgtcacttatgcaataaagcccacttgctggccggggcttgacattattccttcctgtctggctctgcaccgtattgaaactgagttaatgggcaaatttgatgaaggtaaactgcccaccgatccacacctgatgctccgactggccattgaaactgttgctcatgactatgatgtcatagttattgacagcgcgcctaacctgggtatcggcacgattaatgtcgtatgtgctgctgatgtgctgattgttcccacgcctgctgagttgtttgactacacctccgcactgcagtttttcgatatgcttcgtgatctgctcaagaacgttgatcttaaagggttcgagcctgatgcagaagaaattgccaaattccttggattagataaaagaaacttcaaggcaacaagaggttccgccacacttcaccactggcagcagttggcccaacctcaccttgggggcatcctggacccccggcccggtgtggtcaccaagggcttccggacgctggatgttgacctggacgaagtgtactgccttaacgactttgaagaagatgacacagctacctccactccagttcagcacccagagacctcaggtgagaggtcccaagcacgtgtgactgtctcaggcagcagaagttacccgagccggcctcaggcttccccagaggagatgcaggagccgccagcggccacggaggaggaggaggaggaggaggaggaggaggggtctgttttatgtgctgaaagagttggccagatgactaagacatataatgacatagatgctgtcactcggcttcttgaggaggtggcatctaggttctgggtgctggcactggccagagctgcgggggaggctggtgtccacttcctttgtcctgttggcaaggctcttcaggacatacctgcctctctgctcccaggcagtgtgtggaatgattcccacatctgtctggggccaggacccctgccaaatgagctcatctgtccttggagccccaaactcatcaggggcttctcctataaccttggatgtggcccacagatggggaaaggacaaaggctcccacaccggttgaacgctggcatcccttccaactcccacggcctggagaatctgcatgaagtccttgtcctttgtgtttggcaagcaggagtagcacaggaggagacttggcactctgcatcccagctgctgctgttccagctcaagctggtgttaaagggggccaaggaatgtgcctgcacagccagtgagcatttgtactggggcccattaggtagtgtgaatgggagtccgcagggacagcagagaactcctatcagcaggaatatctcctggcaggccctggacacccatctggaaattctgctgctgaccatttgtgcagctgggacactgatgtccttcttgttctcagacctgtgggttttgatggaagcaatggaaagccgtagaagacccaaggaaggtcgacaagtttccaaagtgctaaagccagagatttggcccttccaaaataccaccaggacgcctggacccgtgggctctccgcatgtcaccactgactgccaggatgatgctgcacctcccttccttgagacacaacagagagacagtgagtcacccaagactgggatcatcagaggctcctcatgcttgctacagagaagcaacgggctgattcctaaagccctgggtgcaggaggagcgactcaagccttcgcgaaagaaaataaccaaaaagcatacaaagaaacgtacggcgtctctcatattacacgccatgatatgctgcagatccctaaacagcagcaaaacgaaaaataccaagtgcctcaattcgatcaatcaacgattaaaaatattgagtctgcaaaaggacttgatgtgtgggacagctggccgctgcaaaacgctgacggaacagtagctgaatacaacggctatcacgttgtgtttgctcttgcgggaagcccgaaagacgctgatgacacatcaatctacatgttttatcaaaaggtcggcgacaactcaatcgacagctggaaaaacgcgggccgtgtctttaaagacagcgataagttcgacgccaacgatccgatcctgaaagatcagacgcaagaatggtccggttctgcaacctttacatctgacggaaaaatccgtttattctacactgactattccggtaaacattacggcaaacaaagcctgacaacagcgcaggtaaatgtgtcaaaatctgatgacacactcaaaatcaacggagtggaagatcacaaaacgatttttgacggagacggaaaaacatatcagaacgttcagcagtttatcgatgaaggcaattatacatccggcgacaaccatacgctgagagaccctcactacgttgaagacaaaggccataaataccttgtattcgaagccaacacgggaacagaaaacggataccaaggcgaagaatctttatttaacaaagcgtactacggcggcggcacgaacttcttccgtaaagaaagccagaagcttcagcagagcgctaaaaaacgcgatgctgagttagcgaacggcgccctcggtatcatagagttaaataatgattacacattgaaaaaagtaatgaagccgctgatcacttcaaacacggtaactgatgaaatcgagcgcgcgaatgttttcaaaatgaacggcaaatggtacttgttcactgattcacgcggttcaaaaatgacgatcgatggtattaactcaaacgatatttacatgcttggttatgtatcaaactctttaaccggcccttacaagccgctgaacaaaacagggcttgtgctgcaaatgggtcttgatccaaacgatgtgacattcacttactctcacttcgcagtgccgcaagccaaaggcaacaatgtggttatcacaagctacatgacaaacagaggcttcttcgaggataaaaaggcaacatttgcgccaagcttcttaatgaacatcaaaggcaataaaacatccgttgtcaaaaacagcatcctggagcaaggacagctgacagtcaactaa

SEQ ID NO: 2887 - DNA, 784 bp, Homo sapiens
  SIMILAR (127)..(732): 341254mologous to Latrodectus geometricus major ampullate spidroin 2,accession number AF350274,Smith-Waterman Score=191.
  misc_feature (1)...(784): n = a,t,c or g
tttttttttttttttctacttaaaatatttatttattctctgacatgacaagacacaaaaagttacaacttcttaaaactcttcaaaagaaaaaaatataattctgtaagcagcagcagcagcttccaaggttctgatgtgaacgggaggggcagctccccaggagcaaccgtgaactgggggggtccaggcctgagccccaggtagtgtcgctgggaaggggcctctgtggagggccccggttttggggacacagcaccagcacatcagggtctgtcaccaacacgatcacatggccagggcggggcagggagagcttcggctcacagcagggatccgcccggtggcaccgggggatggggcttcttgaagtgtggtccaggggccttatgcccggagcgcgggaaggatggggcttctgccagtgtacccagggggcnttatgcagaggctgaaaaaggagggtgggccctgagaggacttgggggtgtggcagctcctggccctccctccagagcagggcaggcaccctcagggctccacactggtcccaatgcccgccctgctccctggccaatcccaggccagggtggaggactcaggagagaccaagctgggtaagttagttcctggacggggtcaacagagcctggggcacacacagcacacagagcgcctggccacggcgggaaggggggcagtccccagcagccccatccccaagggccaggccagatccccacaacacacacacgcatgcactcgtgccgaattactgcagcgc

SEQ ID NO: 2888 - DNA, 3267 bp, Homo sapiens
  SIMILAR (1380)..(4): 981254mologous to Cloning vector pBACe3.6 levansucrase,accession number U80929,Smith-Waterman Score=2401.
ttagttgactgtcagctgtccttgctccaggatgctgtttttgacaacggatgttttattgcctttgatgttcattaagaagcttggcgcaaatgttgcctttttatcctcgaagaagcctctgtttgtcatgtagcttgtgataaccacattgttgcctttggcttgcggcactgcgaagtgagagtaagtgaatgtcacatcgtttggatcaagacccatttgcagcacaagccctgttttgttcagcggcttgtaagggccggttaaagagtttgatacataaccaagcatgtaaatatcgtttgagttaataccatcgatcgtcatttttgaaccgcgtgaatcagtgaacaagtaccatttgccgttcattttgaaaacattcgcgcgctcgatttcatcagttaccgtgtttgaagtgatcagcggcttcattacttttttcaatgtgtaatcattatttaactctatgataccgagggcgccgttcgctaactcagcatcgcgttttttagcgctctgctgaagcttctggctttctttacggaagaagttcgtgccgccgccgtagtacgctttgttaaataaagattcttcgccttggtatccgttttctgttcccgtgttggcttcgaatacaaggtatttatggcctttgtcttcaacgtagtgagggtctctcagcgtatggttgtcgccggatgtataattgccttcatcgataaactgctgaacgttctgatatgtttttccgtctccgtcaaaaatcgttttgtgatcttccactccgttgattttgagtgtgtcatcagattttgacacatttacctgcgctgttgtcaggctttgtttgccgtaatgtttaccggaatagtcagtgtagaataaacggatttttccgtcagatgtaaaggttgcagaaccggaccattcttgcgtctgatctttcaggatcggatcgttggcgtcgaacttatcgctgtctttaaagacacggcccgcgtttttccagctgtcgattgagttgtcgccgaccttttgataaaacatgtagattgatgtgtcatcagcgtctttcgggcttcccgcaagagcaaacacaacgtgatagccgttgtattcagctactgttccgtcagcgttttgcagcggccagctgtcccacacatcaagtccttttgcagactcaatatttttaatcgttgattgatcgaattgaggcacttggtatttttcgttttgctgctgtttagggatctgcagcatatcatggcgtgtaatatgagagacgccgtacgtttctttgtatgctttttggttattttctttcgcgaaggcttgagtcgctcctcctgtgatgattgccaatgtgacagtggcattgagctgctgttcctgcagatggatatggcaggtgtaggtcccagcctgggcctggctcacatcctctagtcgaagggtaaagtcgccattgtctccagtcaccaggaggtcagggcctcccccaggaggagtccacttggcagtgaggaaagaccgggtccccacaccagcaggcaggcggcagggcagccccaccctggaacctgctccagcgtacactgtcaagggagttgggggctccagacccagaacagtgaggttatacatgatggagacgttgaagccatctctgtaggtgaggatgcagccccagggcccagagtccatggggctgacttggggcaggaagaggaagctttccgctaagtggtgatggggggactcccggacagggactcggccctggccccggttccggaaccaatgcacagaggctgggcggtcagggcggctgaaggagcagttcaaaatgacccagtcggaggctctgagagatcctggggggctggcagtcactcccagcccttctcccatcgtcccgccccacatactcgaggcctggcccaggcgcagacggaggcggcaggagagggcgcggtccctgaggtgcaccgcggcgcggtactcgccggcgtccgcgcgccgggctgggcgcagccatagcgagaagtccccgcgctgccggccgcgctcatccagctggacgcggggctgcaggggcagcctcccgctgcgcaggcctccgggacccacgctcagcaccgtgtagcggcggggcctgggcccccaggaggagggcgccgccgggtgagggccgggggccaggggatggccgggggcggcagcgggcgggccactgggcgggaaagagaatggagttgagaagctccaggggtaggaagcccgggaggatgcaggcagccacccgttgaggatgagaaagcccgccccaagagttctcttgaccaccaaccgtcccctcacgcccgacccctctgttggactggccgcatccacttctgtctggctgatgctgccaagtgacccctgctcttcgcagaaggctgagatcgccgatgccccattttctgtcttctgccgtttgggatccgcttcatcctcctcttcggcagctctcttcagcgcgggcccttcatcatcctcttcttcttcttcctcatcttcttcttccccttcatcttcctcctctccatcctcggcagtttcttcttcttcctcctcagccccgttctcctcctcctccaccacttctttctttcgctctttccggcttgccttctcctccaccttctccttcttctccttcaggtccttggcgctcaactcggccgctgcctccacgcttttctccgacatggtgccggggccggggccggggctggcggggagccggggtcccggggccgagacggaggggccctggacggcggagggtggccgcggccggaacctggcgcggtggcggcggcggcggcgacagcggcagcggcggccgctcggcaagctgggtctctggaagaggcggcagaggcgcgcggggtggggcgggggtgggtctggagcggagacccgcagggctgcggccgtccggagggcgggcggaagggcggtgcaggcggtggccggcgcgctcggccgcggtagctcgatcccgggctcgccgcccccgcaccagcagagtgccgccgaccagccgtgccgcccccgggaagggaacccgcttataaggcggcgccttccataagggacctggcctcccacttctctaactgggaccaccagggttagcgtgggctgtgggccggactgtgggctgggcctcagggctggccggatcatgattgagtgtgttacctccat

SEQ ID NO: 2889 - DNA, 2421 bp, Homo sapiens
  SIMILAR (1066)..(2418): 1001254mologous to Cloning vector pBACe3.6 levansucrase,accession number U80929,Smith-Waterman Score=2385.
atgaaactcatggaaacacttaaccagtgcataaacgctggtcatgaaatgacgaaggctatcgccattgcacagtttaatgatgacagcccggaagcgaggaaaataacccggcgctggagaataggtgaagcagcggatttagttggggtttcttctcaggctatcagagatgccgagaaagcagggcgactaccgcacccggatatggaaattcgaggacgggttgagcaacgtgttggttatacaattgaacaaattaatcatatgcgtgatgtgtttggtacgcgattgcgacgtgctgaagacgtatttccaccggtgatcggggttgctgcccataaaggtggcgtttacaaaacctcagtttctgttcatcttgctcaggatctggctctgaaggggctacgtgttttgctcgtggaaggtaacgacccccagggaacagcctcaatgtatcacggatgggtaccagatcttcatattcatgcagaagacactctcctgcctttctatcttggggaaaaggacgatgtcacttatgcaataaagcccacttgctggccggggcttgacattattccttcctgtctggctctgcaccgtattgaaactgagttaatgggcaaatttgatgaaggtaaactgcccaccgatccacacctgatgctccgactggccattgaaactgttgctcatgactatgatgtcatagttattgacagcgcgcctaacctgggtatcggcacgattaatgtcgtatgtgctgctgatgtgctgattgttcccacgcctgctgagttgtttgactacacctccgcactgcagtttttcgatatgcttcgtgatctgctcaagaacgttgatcttaaagggttcgagcctgatccatgcttcgttggacggcaaatatttgagctgctttatgaggatctgggacattgcagagtcttcaaaatcacagcaagctgcccccacgtgagagttaattactcataccaggccctgtttgcagcgctggctgtggaaatggttcccaatcctcagtcacgtctaagctgtgagggaggagcgactcaagccttcgcgaaagaaaataaccaaaaagcatacaaagaaacgtacggcgtctctcatattacacgccatgatatgctgcagatccctaaacagcagcaaaacgaaaaataccaagtgcctcaattcgatcaatcaacgattaaaaatattgagtctgcaaaaggacttgatgtgtgggacagctggccgctgcaaaacgctgacggaacagtagctgaatacaacggctatcacgttgtgtttgctcttgcgggaagcccgaaagacgctgatgacacatcaatctacatgttttatcaaaaggtcggcgacaactcaatcgacagctggaaaaacgcgggccgtgtctttaaagacagcgataagttcgacgccaacgatccgatcctgaaagatcagacgcaagaatggtccggttctgcaacctttacatctgacggaaaaatccgtttattctacactgactattccggtaaacattacggcaaacaaagcctgacaacagcgcaggtaaatgtgtcaaaatctgatgacacactcaaaatcaacggagtggaagatcacaaaacgatttttgacggagacggaaaaacatatcagaacgttcagcagtttatcgatgaaggcaattatacatccggcgacaaccatacgctgagagaccctcactacgttgaagacaaaggccataaataccttgtattcgaagccaacacgggaacagaaaacggataccaaggcgaagaatctttatttaacaaagcgtactacggcggcggcacgaacttcttccgtaaagaaagccagaagcttcagcagagcgctaaaaaacgcgatgctgagttagcgaacggcgccctcggtatcatagagttaaataatgattacacattgaaaaaagtaatgaagccgctgatcacttcaaacacggtaactgatgaaatcgagcgcgcgaatgttttcaaaatgaacggcaaatggtacttgttcactgattcacgcggttcaaaaatgacgatcgatggtattaactcaaacgatatttacatgcttggttatgtatcaaactctttaaccggcccttacaagccgctgaacaaaacagggcttgtgctgcaaatgggtcttgatccaaacgatgtgacattcacttactctcacttcgcagtgccgcaagccaaaggcaacaatgtggttatcacaagctacatgacaaacagaggcttcttcgaggataaaaaggcaacatttgcgccaagcttcttaatgaacatcaaaggcaataaaacatccgttgtcaaaaacagcatcctggagcaaggacagctgacagtcaactaa

SEQ ID NO: 2890 - DNA, 4041 bp, Homo sapiens
  SIMILAR (3927)..(2482): 561254mologous to Homo sapiens myosin light chain kinase isoform 3B,accession number AF069603,Smith-Waterman Score=1232.
ttagttgactgtcagctgtccttgctccaggatgctgtttttgacaacggatgttttattgcctttgatgttcattaagaagcttggcgcaaatgttgcctttttatcctcgaagaagcctctgtttgtcatgtagcttgtgataaccacattgttgcctttggcttgcggcactgcgaagtgagagtaagtgaatgtcacatcgtttggatcaagacccatttgcagcacaagccctgttttgttcagcggcttgtaagggccggttaaagagtttgatacataaccaagcatgtaaatatcgtttgagttaataccatcgatcgtcatttttgaaccgcgtgaatcagtgaacaagtaccatttgccgttcattttgaaaacattcgcgcgctcgatttcatcagttaccgtgtttgaagtgatcagcggcttcattacttttttcaatgtgtaatcattatttaactctatgataccgagggcgccgttcgctaactcagcatcgcgttttttagcgctctgctgaagcttctggctttctttacggaagaagttcgtgccgccgccgtagtacgctttgttaaataaagattcttcgccttggtatccgttttctgttcccgtgttggcttcgaatacaaggtatttatggcctttgtcttcaacgtagtgagggtctctcagcgtatggttgtcgccggatgtataattgccttcatcgataaactgctgaacgttctgatatgtttttccgtctccgtcaaaaatcgttttgtgatcttccactccgttgattttgagtgtgtcatcagattttgacacatttacctgcgctgttgtcaggctttgtttgccgtaatgtttaccggaatagtcagtgtagaataaacggatttttccgtcagatgtaaaggttgcagaaccggaccattcttgcgtctgatctttcaggatcggatcgttggcgtcgaacttatcgctgtctttaaagacacggcccgcgtttttccagctgtcgattgagttgtcgccgaccttttgataaaacatgtagattgatgtgtcatcagcgtctttcgggcttcccgcaagagcaaacacaacgtgatagccgttgtattcagctactgttccgtcagcgttttgcagcggccagctgtcccacacatcaagtccttttgcagactcaatatttttaatcgttgattgatcgaattgaggcacttggtatttttcgttttgctgctgtttagggatctgcagcatatcatggcgtgtaatatgagagacgccgtacgtttctttgtatgctttttggttattttctttcgcgaaggcttgagtcgctcctccttcaggtttctctcctaccgttgtgagttcagactcctggcttggctcactggttccatacacgttgattgcacgtacacggaacttatattcgtggtcaggcagcaggtcctggacgttgaaagaggtgctgcggcatgtggctagttccttccacgtcttgttggctgagtcccagatctcgatgctgtaggactgtacagcactgcccccatcatatgaggagccataccaggacagggtcagtgaggagctccgaatgtcagaggcacaaggtgtgccagctggggggtctggcttatccacgacagtgaggttgacctgggcctgcctgctgcccagcttgttctccaccagcagtgtgtagcagccgcagtgctcctggcgcgcggccaggatggtgagcttgctgccattctcgctgttctccaccttcatgtgctcgctttcctggatctgctttcggaacttcatccaggtacaggtgatgggctgagtgcctgtcactttgccaaacagctccactgactctcctgcgcgtaccttctggtcctcagggaactggatgatctgagggggcattgctgccttcggaggtgtcttgggggcaggtttctttttcacagtcgcatcactctcagttcctagcacgggaggaagagagctcttgggcctccgggatttcatctctggggccttggtgttctcactggctggagcatcatccacggtgacttggcaggagcactccgcctggccagcgtcattcttggctacacacttgtataagcctctgtcctcaggcagtgccttctcgatggagacggagcagagtgagccttcctgggagaggatgatgaacttggtggtcttgatggtctttccgttcagcgtccagatgatggtggctggggggtcagaagacacctggcactggagcagcagcttcttgccctctgccacatgaacatcttgcagcttctgcttgaaggctggggctgtcccctggctctctgatctcttttcattatctgtggtccctgcatggcctctcttgcagttcacatcattcttaacgtctttcttgagttcttctttgctagcggatttcaggttctcatcaggcttggcattgcccatgggcttcagggtctcggcaggcttggcgttgcccattggcttcagggtctcagcaggcttggcgttgcccacgggtttcaagggccctgaaggctgtgcattgctcaggggcttggaactctccactgccttggcattcagggtctcggcactgctgctgccattctctgctggtaatttcttcttgccacccagcactgagcgaaaatccggggtggcaggttttggcggtggcaccttctcaggcacgggggtcttggaagtccccttcttggccaggacagagcgaaaatcgacctgctgggggctgtgcaccttcctctcttcctcagacacagtctttggcttcacttgccgctgcaggttggcacggaaatccatctgctcggctgggatctccttcaggtcgtcttccgatagggtctttgtactcaccttcttccccaggaggtctcggaagtccagctgctccacctcctgctggcggatcgcctcctcagtgtgctgcctcgtctccacgcgcctcttcagcacccctcgcacgtcctcgccgtcttcctcctctagccaaccctgccctcttgctggccagccaggcctcagggacccatagcggtcactaccaccaccatcagcaccaactcctccaccacagaggtcctcgcagctggcaggctccctcccccgtggaagggctctggcagagctgttctgtagcatcagtgacacctggcaactgcattcgccaacccggttccttcccatgtaacctagcaagccctggaagtccaagccccacatcagtttgtgcttcttctggctgcccagacccaggttaggggagttgagcaggatctcatactggccggcatgccagggctgcaccttctttagaaccagggtgaacacgtcctcattctgaagcacctcgaagtggccagtgtctttgcagagggctttgccatctctgagccagtgcacggtaggaaaggggtcaccagctatggcgcaggagatgaggacactctggcccagggaggctgtcactgagcgaggcttactgatgaaccagggctgggtgccatcgtgaggctcttgtaccgtgagcacggcctgggtgcggacctctccagcgctgttccaggcctcgcaggtgtacgtgcccgtgtcctccgggaacacttcctggatacaaaggctgtgctgagttcctctctgttcaaagtggaagtcctctgactcttggatctcattcccattgtgcagccagatgacttcagggggtggattccctgacacttggacagtcatagtgacctggcttccatccatgactttgagatcagagaggccctgcaggaagatgggtgcagtgggcttgctgggagccacaggcagaaggtactcactcttcctgctactcttcttttctggcagctcactggttccacctgcagctgtggaggggatcctggcctcaggcaagtctgcctccgtctgaagccccacttcctcatcggtctctacggggagtcgtggtatcat

SEQ ID NO: 2891 - DNA, 3636 bp, Homo sapiens
  SIMILAR (2810)..(2965): 1001254mologous to synthetic construct tet protein,accession number M20189,Smith-Waterman Score=264.
atgactatcgtcgccgcacttatgactgtcttctttatcatgcaactcgtaggacaggtgccggcagcgctctgggtcattttcggcgaggaccgctttcgctggagcgcgacgatgatcggcctgtcgcttgcggtattcggaatcttgcacgccctcgctcaagccttcgtcactggtcccgccaccaaacgtttcggcgagaagcaggccattatcgccggcatggcggccgacgcgctgggctacgtcttgctggcgttcgcgacgcgaggctggatggccttccccattatgattcttctcgcttccggcggcatcgggatgcccgcgttgcaggccatgctgtccaggcagcctaacttcgatcattggaccgctgatcgtcacggcgatttatgccgcctcggcgagcacatggaacgggttggcatggattgtaggcgccgccctataccttgtctgcctccccgcgttgcgtcccggtgcatggagccgggccacctcgacatgaatggaagccggcggcacctcgctaacggattcaccactccaagaattggagccaatcaattcttgcggagaactgtgaatgcgcaaaccaacccttggcagaacatatccatcgcgtccgccatctccagcagccgcacgcggcgcatctcgggcagcgttgggtcctggccacggtctggaaacgcggaagtcagcgccctgcaccattatgttccggatctgcatcgcaggatgctgctggctaccctgtggaacacctacatctgtattaacgaagcgctggcattgaccctgagtgatttttctctggtcccgccgcatccataccgccagttgtttaccctcacaacgttccataaccgggcatgttcatcatcagtaacccgtatcgtgagcatcctctctcgtttcatcggtatcattacccccatgaacagaaatcccccttacacggaggcatcagtgaccaaacaggaaaaaaccgcccttaacatggcccgctttatcagaagccagacattaacgcttctggagaaactcaacgagctggacgcggatgaacaggcagacatctgtgaatcgcttcacgaccacgctgatgagctttaccgcagctgcctcgcgcgtttcggtgatgacggtgaaaactctgacacatgcagctcccggagacggtcacagcttgtctgtaagcggatgccgggagcagacaagcccctaaaccagacatttatcgactatcgaaccggaagattacaacctgctattccgcagagtctccctgaagctctccgtttggctgccgacctggcagagcaaaagcaacggctggagcaaaaaatgcttatggatgcacctaaagtcgaattcgctgaacgcgttgctaccgccagcggggttctaatcggcaactatgccaaagtgctcggcctgggccaaaactatctcttcacctggttgcgtgataacggaattctgatcgcaaccggtgaacgcaggaacgtccccaaacaagaatacatatctcgtgggtatttcacccttaaagaaaccgtgatcgatacaagcaatggaagcaggatttctttcacgactcgtataaccggcaaaggtcagcagtggctgatgaagcgattgcttgatgctggtgtgctggtacctgtcgcggcaacgctaacagacgtagtaagaaccaccagcattgtaatgctggctaaagtcactttcctgagctgtataacgatgagcgattttactttttctggctatgaattggcctgctttgtaacacactccggtctatcccgtagcgccgggcatatcctgtcgcaatgtgcaaatctcgcggcaacaaccagtgaatacttcattcacaagcctcaccgcctgatcgcggcagaaactggttatagccaatcaaccgtcgttcgtgcattccgtgaagctgtaaacaaaggaattctgtctgtagagattgttatcggcgatcaccgagaacgtggcgctaacctggaccgggttacaccatcctttttggccttggcacaacaagccaaaagtgcgctgacagaaagcaaattaaagatctcttcagcggcaaccaagatcctctacgccggacgcatcgtggccggcatcaccggcgccacaggtgcggttgctggcgcctatatcgccgacatcaccgatggggaagatcgggctcgccacttcgggctcatgagcgcttgtttcggcgtgggtatggtggcaggccccgtggccgggggactgttgggcgccatctccttgcatgcaccattccttgcggcggcggtgctcaacggcctcaacctactactgggctgcttcctaatgcaggagtcgcataagggagagcgtcgaccgatgcccttgagagccttcaacccagtcagctccttccggtgggcgcggggcatgactatcgtcgccgcacttatgactgtcttctttatcatgcaactcgtaggacaggtgccggcagcgctctgggtcattttcggcgaggaccgctttcgctggagcgcgacgatgatcggcctgtcgcttgcggtattcggaatcttgcacgccctcgctcaagccttcgtcactggtcccgccaccaaacgtttcggcgagaagcaggccattatcgccggcatggcggccgacgcgctgggctacgtcttgctggcgttcgcgacgcgaggctggatggccttccccattatgattcttctcgcttccggcggcatcgggatgcccgcgttgcaggccatgctgtccaggcagcctaacttcgatcattggaccgctgatcgtcacggcgatttatgccgcctcggcgagcacatggaacgggttggcatggattgtaggcgccgccctataccttgtctgcctccccgcgttgcgtcgcggtgcatggagccgggccacctcgacctgaatggaagccggcggcacctcgctaacggattcaccactccaagaattggagccaatcaattcttgcggagaactgtgaatgcgcaaaccaacccttggcagaacatatccatcgcgtccgccatctccagcagccgcacgcggcgcatctcgggcagcgttgggtcctggccacggaactccatctggatttgttcagaacgctcggttgccgccgggcgttttttattggtgagaatcgcagcaacttgtcgcgccaatcgagccatgtcgtcgtcaacgaccccccattcaagaacagcaagcagcattgagaactttggaatccagtccctcttccacctgctgatctgcgacttatcaacgcccacagcttccgctgtcttctcagttccaagcattgcgattttgttaagcaacgcactctcgattcgtagagcctcgttgcgtttgtttgcacgaaccatatgtagctatatgcaaattgaaacaaaagagatggtgatctttctaagagatgatggaatctcccttcagtatcccgatggtcaatgcgctggatatgggatagatgggaatatgctgatttttatgggacagagttgcgaactgttcccaactaaaatcattttgcacgatcagcgcactacgaactttacccacaaatag

SEQ ID NO: 2892 - DNA, 3031 bp, Homo sapiens
  SIMILAR (1760)..(2593): 991254mologous to enterobacteria phage P1 essential to replication protein,accession number X15639,Smith-Waterman Score= 1401.
atgcccttgagagccttcaacccagtcagctccttccggtgggcgcggggcatgactatcgtcgccgcacttatgactgtcttctttatcatgcaactcgtaggacaggtgccggcagcgctctgggtcattttcggcgaggaccgctttcgctggagcgcgacgatgatcggcctgtcgcttgcggtattcggaatcttgcacgccctcgctcaagccttcgtcactggtcccgccaccaaacgtttcggcgagaagcaggccattatcgccggcatggcggccgacgcgctgggctacgtcttgctggcgttcgcgacgcgaggctggatggccttccccattatgattcttctcgcttccggcggcatcgggatgcccgcgttgcaggccatgctgtccaggcagcctaacttcgatcattggaccgctgatcgtcacggcgatttatgccgcctcggcgagcacatggaacgggttggcatggattgtaggcgccgccctataccttgtctgcctccccgcgttgcgtcgcggtgcatggagccgggccacctcgacctgaatggaagccggcggcacctcgctaacggattcaccactccaagaattggagccaatcaattcttgcggagaactgtgaatgcgcaaaccaacccttggcagaacatatccatcgcgtccgccatctccagcagccgcacgcggcgcatctcgggcagcgttgggtcctggccacggtctggaaacgcggaagtcagcgccctgcaccattatgttccggatctgcatcgcaggatgctgctggctaccctgtggaacacctacatctgtattaacgaagcgctggcattgaccctgagtgatttttctctggtcccgccgcatccataccgccagttgtttaccctcacaacgttccataaccgggcatgttcatcatcagtaacccgtatcgtgagcatcctctctcgtttcatcggtatcattacccccatgaacagaaatcccccttacacggaggcatcagtgaccaaacaggaaaaaaccgcccttaacatggcccgctttatcagaagccagacattaacgcttctggagaaactcaacgagctggacgcggatgaacaggcagacatctgtgaatcgcttcacgaccacgctgatgagctttaccgcagctgcctcgcgcgtttcggtgatgacggaaacagctatgaccatgattacgccaagcttgcatgcctgcaggtcgaaggccgtggcggcggctacttttgcccatgaattgctcgctgtggagtacgcaggctggatttctcccgcgtttcggctgaaggtaaaccagacatttatcgactatcgaaccggaagattacaacctgctattccgcagagtctccctgaagctctccgtttggctgccgacctggcagagcaaaagcaacggctggagcaaaaaatgcttatggatgcacctaaagtcgaattcgctgaacgcgttgctaccgccagcggggttctaatcggcaactatgccaaagtgctcggcctgggccaaaactatctcttcacctggttgcgtgataacggaattctgatcgcaaccggtgaacgcaggaacgtccccaaacaagaatacatatctcgtgggtatttcacccttaaagaaaccgtgatcgatacaagcaatggaagcaggatttctttcacgactcgtataaccggcaaagacgtagtaagaaccaccagcattgtaatgctggctaaagtcactttcctgagctgtataacgatgagcgattttactttttctggctatgaattggcctgctttgtaacacactccggtctatcccgtagcgccgggcatatcctgtcgcaatgtgcaaatctcgcggcaacaaccagtgaatacttcattcacaagcctcaccgcctgatcgcggcagaaactggttatagccaatcaaccgtcgttcgtgcattccgtgaagctgtaaacaaaggaattctgtctgtagagattgttatcggcgatcaccgtgaacgtcgcgctaacctgtaccggtttacaccatcctttttggccttcgcacaacaagccaaaaatgcgctgatagaaagcaaattaaagatctcttcagcggcaaccaaggttaaagctgttctcgctaagacattggctttatttaattttttatccacacccccatgtcaaaatgataccccctccccctgtcaggatgacgtggcaataaagaataagaagtcacaagttaaaaaaacaaaaagatcagtttccggcggtgccggaacaaccagcctcaaaaaattgacttcatggatcgctaaggcaaaagcaaaggctgacaatctgcggttatccaaaaaacgcactcaaaaacatgagttcaagcagaaagtagaggcggctgcgcggaaatatgcttacctgaagaacaagcgttcgcctgatattggcgggatatcaaacttcgataacctaccgcattgcatgacggtaaacgaagctcttaatgcggttttagccaaaaataaagataacgaacaatggggtgcggttgctggcgcctatatcgccgacatcaccgatggggaagatcgggctcgccacttcgggctcatgagcgcttgtttcggcgtgggtatggtggcaggccccgtggccgggggactgttgggcgccatctccttgcatgcaccattccttgcggcggcggtgctcaacggcctcaacctactactgggctgcttcctaatgcaggagtcgcataagggagagcgtcgaggagaacttctaaagatcgtcgttttgccaggtgaccacgttggtcaagaaatcacagccgaagccattaaggttcttaaagctatttctgatgttcgttccaatgtcaagttcgatttcgaaaatcatttaattggtggtgctgctatcgacctgcaggggggggggggaaagccacgttgtgtctcaaaatctctgatgttacattgcacaagataa

SEQ ID NO: 2893 - DNA, 3074 bp, Homo sapiens
  SIMILAR (2564)..(1155): 1001254mologous to Cloning vector pBACe3.6 levansucrase,accession number U80929,Smith-Waterman Score=2472.
ctagtgatggcggatttcatcatatctgtcattgtaattggtcctgatagcttccaccagcttagccaaagtgtctttgtcttccgagttaacctgtgtaaagttgacagtggtgcaggtcttcctgtggactagatgtcccagtcttgccttccccttgataatgcagtaagggacccccattttatgacacaaggcaagcaggaagacaactagcttgatgggatccacttcatgtgcagtcaccaccagctgagccttcttgttctcctccaaggtggtgatggtgttaactcctgctcgaaggacaggtggtcttttagtggggacgtcccctttgccagcagctttcttcttggcctggacaaacagcctctgcttcttctcttgggaagctggcaatgtcacaggagaaacagcattgaaagaccaaccaaaagacctaatgacatcttgaactaaagtgatgacagtggaatctccttgttcctcctcctccacattgattaaatcaacaaattctgctgaaattgcctcctcaattagtccctctggccctgcattatccaatatggtagctactagccagtgggtctgttgagcacttgaaatgtggctgaccaaattgagatgtgctctcctcagcttttcttctctcccaccctgcactgtacactccactggtcctaaaattcttgttattctctcaacataccgtaacatttcactcatttgtgcctttgcatttgctgattctttaattgagggcagggaccatgtcttgtttacccttatatccacccgtgcttcaggtagtacctggttacccaggccgtgccggcacgttaaccgggctgcatccgatgcaagtgtgtcgctgtcgacggtgacccgtgtatgaaatctaacaatgcgctcatcgtcatcctcggcaccgtcaccctggatgctgtaggcataggcttggttatgccggtactgccgggcctcttgcgggatatcgtccattccgacagcatcgccagtcactatggcgtgctgctagcgctatatgcgttgatgcaatttctatgcgcacccgttctcggagcactgtccgaccgctttggccgccgcccagtcctgctcgcttcgctacttggagccactatcgatgtcagctgtccttgctccaggatgctgtttttgacaacggatgttttattgcctttgatgttcattaagaagcttggcgcaaatgttgcctttttatcctcgaagaagcctctgtttgtcatgtagcttgtgataaccacattgttgcctttggcttgcggcactgcgaagtgagagtaagtgaatgtcacatcgtttggatcaagacccatttgcagcacaagccctgttttgttcagcggcttgtaagggccggttaaagagtttgatacataaccaagcatgtaaatatcgtttgagttaataccatcgatcgtcatttttgaaccgcgtgaatcagtgaacaagtaccatttgccgttcattttgaaaacattcgcgcgctcgatttcatcagttaccgtgtttgaagtgatcagcggcttcattacttttttcaatgtgtaatcattatttaactctatgataccgagggcgccgttcgctaactcagcatcgcgttttttagcgctctgctgaagcttctggctttctttacggaagaagttcgtgccgccgccgtagtacgctttgttaaataaagattcttcgccttggtatccgttttctgttcccgtgttggcttcgaatacaaggtatttatggcctttgtcttcaacgtagtgagggtctctcagcgtatggttgtcgccggatgtataattgccttcatcgataaactgctgaacgttctgatatgtttttccgtctccgtcaaaaatcgttttgtgatcttccactccgttgattttgagtgtgtcatcagattttgacacatttacctgcgctgttgtcaggctttgtttgccgtaatgtttaccggaatagtcagtgtagaataaacggatttttccgtcagatgtaaaggttgcagaaccggaccattcttgcgtctgatctttcaggatcggatcgttggcgtcgaacttatcgctgtctttaaagacacggcccgcgtttttccagctgtcgattgagttgtcgccgaccttttgataaaacatgtagattgatgtgtcatcagcgtctttcgggcttcccgcaagagcaaacacaacgtgatagccgttgtattcagctactgttccgtcagcgttttgcagcggccagctgtcccacacatcaagtccttttgcagactcaatatttttaatcgttgattgatcgaattgaggcacttggtatttttcgttttgctgctgtttagggatctgcagcatatcatggcgtgtaatatgagagacgccgtacgtttctttgtatgctttttggttattttctttcgcgaaggcttgagtcgctcctcctgccagaagtgcagtcgtaaaagtcagaactgtggcttgttttacaatttttttgatgttcatgttcatgtctccttctgtatgtactgttttttgcgatctgccgtttcgatcctcccgaattgacttcacagtaaggtactcactgtccacgtcaagagccaagccaaggtactgttcctccaatgagtaaacagcactgctgtagggctggcctaagtcaggcagttcaagataacctgaaggagtcgaataacatctatccagtgagtcctgcaagacttcaggctctttctcatccagcagctccctgctgagcctgagtaaactcaggctgtctgtctggtcttgaaccttcatctcgataacatcgggcaacctgaaaatatcttttccagactcccttgcctgacggctaccattaggtccagcccaggggagacacaggcaggagcctggcggcggcagggacgggcctggggagcgggctgaccacacgtaactgtcatgccagggtgtgaagacacagaacatcagttcaaacctcagaggaaagagaaggctctctagcat

SEQ ID NO: 2894 - DNA, 9917 bp, Homo sapiens
  SIMILAR (4632)..(7244): 1001254mologous to Homo sapiens von Willebrand factor prepropeptide,accession number M10321,Smith-Waterman Score=4674.
gcgtgtgcacaggcagctccactcggcacatcgtgacctttgatgggcagaatttcaagctgactggcagctgttcttatgtcctatttcaaaacaaggagcaggacctggaggtgattctccataatggtgcctgcagccctggagcaaggcagggctgcatgaaatccatcgaggtgaagcacagtgccctctccgtcgagctgcacagtgacatggaggcttttaggttcttggtgcatggccacccgtacagtattacaacagcctgttttctggtcaagctctgtaaagtcaagctctgttttctagtcaagctcttctttatcttagaagagctgccgacaaatatcaaggtgacggtgaatgggagactggtctctgttccttacgtgggtgggaacatggaagtcaacgtttatggtgccatcatgcatgaggtcagattcaatcaccttggtcacatcttcacattcactccacaaaacaatgagttccaactgcagctcagccccaagacttttgcttcaaagacgtatggtctgtgtgggatctgtgatgagaacggagccaatgacttcatgctgagggatggcacagtcaccacagactggaaaacacttgttcaggaatggactgtgcagcggccagggcagacgtgccagcccatcctggaggagcagtgtcttgtccccgacagctcccactgccaggtcctcctcttaccactgtttgctgaatgccacaaggtcctggctccagccacattctatgccatctgccagcaggacagttgccaccaggagcaagtgtgtgaggtgatcgcctcttatgcccacctctgtcggaccaacggggtctgcgttgactggaggacacctgatttctgtgctatgtcatgcccaccatctctggtctacaaccactgtgagcatggctgtccccggcactgtgatggcaacgtgagctcctgtggggaccatccctccgaaggctgtttctgccctccagataaagtcatgttggaaggcagctgtgtccctgaagaggcctgcactcagtgcattggtgaggatggagtccagcaccagttcctggaagcctgggtcccggaccaccagccctgtcagatctgcacatgcctcagcgggcggaaggtcaactgcacaacgcagccctgccccacggccaaagctcccacgtgtggcctgtgtgaagtagcccgcctccgccagaatgcagaccagtgctgccccgagtatgagtgtgtgtgtgacccagtgagctgtgacctgcccccagtgcctcactgtgaacgtggcctccagcccacactgaccaaccctggcgagtgcagacccaacttcacctgcgcctgcaggaaggaggagtgcaaaagagtgtccccaccctcctgccccccgcaccgtttgcccacccttcggaagacccagtgctgtgatgagtatgagtgtgcctgcaactgtgtcaactccacagtgagctgtccccttgggtacttggcctcaactgccaccaatgactgtggctgtaccacaaccacctgccttcccgacaaggtgtgtgtccaccgaagcaccatctaccctgtgggccagttctgggaggagggctgcgatgtgtgcacctgcaccgacatggaggatgccgtgatgggcctccgcgtggcccagtgctcccagaagccctgtgaggacagctgtcggtcgaacaccgtaccctataaattactaggtaaatgtcaagtaacctcttggggaagcccaaatctgcacgttggtgagcagtattgggatcgagtgttcgtcttgtatgggaggctagccctgcgagagtggagactggatcccagtcatcctgagtgtgcctcccgggcttcacttacgttctgcatgaaggcgagtgctgtggaaggtgcctgccatctgcctgtcggctcccagtgggcctccccggagaacccctgcctcatcaatgagtgtgtccgagtgaaggaggaggtctttatacaacaaaggaacgtctcctgcccccagctggaggtccctgtctgcccctcgggctttcagctgagctgtaagacctcagcgtgctgcccaagctgtcgctgtgagcgcatggaggcctgcatgctcaatggcactgtcattgggcccgggaagactgtgatgatcgatgtgtgcacgacctgccgctgcatggtgcaggtgggggtcatctctggattcaagctggagtgcaggaagaccacctgcaacccctgccccctgggttacaaggaagaaaataacacaggtgaatgttgtgggagatgtttgcctacggcttgcaccattcagctaagaggaggacagatcatgacactgaagcgtgatgagacgctccaggatggctgtgatactcacttctgcaaggtcaatgagagaggagagtacttctgggagaagagggtcacaggctgcccaccctttgatgaacacaagtgtctggctgagggaggtaaaattatgaaaattccaggcacctgctgtgacacatgtgaggagcctgagtgcaacgacatcactgccaggctgcagtatgtcaaggtgggaagctgtaagtctgaagtagaggtggatatccactactgccagggcaaatgtgccagcaaagccatgtactccattgacatcaacgatgtgcaggaccagtgctcctgctgctctccgacacggacggagcccatgcaggtggccctgcactgcaccaatggctctgttgtgtaccatgaggttctcaatgccatggagtgcaaatgctcccccaggaagtgcagcaagggagacactggaatttttctgaagtggtcctgcattcctgccgagaaggggctgcagacctctggggcctgggtagaggcagcagatatacccctgctccctggctccccacgccggctgagccctcaggcagggtccagagggggccagggccccaaacatggacagcagtgtctcaagatgccaggtccccgggccccaggtctgcagggcggttccaacagagatcctggccagccctgcggtggagagagcacccgcagcagctctgtcatcaacaactatctggatgccaatgagcctgtgtccttggaggcccgtcttagccgcatgcacttccatgacagtcagaggaaggtcgactatgtacttgcctaccactaccggaaacgcggggtgcacctggcccaaggcttccctggccactcgctggctatcgtctccaatggggagacaggcaaggagcctcatgctgggggcccaggtgacattgagctgggaccgctcgatgccctggaggaggagaggaaggagcagcgggaggaatttgagcacaatctgatggaggctggactggagcttgagaaggacttggaggtctggcagagcctggatgtctggcatctcaacctgaattgcagcactgagtcaaagggggatatcttgggacaggtgccggcagcgctctgggtcattttcggcgaggaccgctttcgctggagcgcgacgatgatcggcctgtcgcttgcggtattcggaatcttgcacgccctcgctcaagccttcgtcactggtcccgccaccaaacgtttcggcgagaagcaggccattatcgccggcatggcggccgacgcgctgggctacgtcttgctggcgttcgcgacgcgaggctggatggccttccccattatgattcttctcgcttccggcggcatcgggatgcccgcgttgcaggccatgctgtccaggcagcctaacttcgatcattggaccgctgatcgtcacggcgatttatgccgcctcggcgagcacatggaacgggttggcatggattgtaggcgccgccctataccttgtctgcctccccgcgttgcgtcgcggtgcatggagccgggccacctcgacctgaatggaagccggcggcacctcgctaacggattcaccactccaagaattggagccaatcaattcttgcggagaactgtgaatgcgcaaaccaacccttggcagaacatatccatcgcgtccgccatctccagcagccgcacgcggcgcatctcgggcagcgttgggtcctggccacggtctggaaacgcggaagtcagcgccctgcaccattatgttccggatctgcatcgcaggatgctgctggctaccctgtggaacacctacatctgtattaacgaagcgctggcattgaccctgagtgatttttctctggtcccgccgcatccataccgccagttgtttaccctcacaacgttccataaccgggcatgttcatcatcagtaacccgtatcgtgagcatcctctctcgtttcatcggtatcattacccccatgaacagaaatcccccttacacggaggcatcagtgaccaaacaggaaaaaaccgcccttaacatggcccgctttatcagaagccagacattaacgcttctggagaaactcaacgagctggacgcggatgaacaggcagacatctgtgaatcgcttcacgaccacgctgatgagctttaccgcagctgcctcgcgcgtttcggtgatgacgaacagtggttccgggaggtccggcatgagaacagatgtgtggccctggaaaggtgtccctgcttccatcagggcaaggagtatgcccctggagaaacagtgaagattggctgcaacacttgtgtctgtcgggaccggaagtggaactgcacagaccatgtgtgtgatgccacgtgctccacgatcggcatggcccactacctcaccttcgacgggctcaaatacctgttccccggggagtgccagtacgttctggtgcaggattactgcggcagtaaccctgggacctttcggatcctagtggggaataagggatgcagccacccctcagtgaaatgcaagaaacgggtcaccatcctggtggagggaggagagattgagctgtttgacggggaggtgaatgtgaagaggcccatgaaggatgagactcactttgaggtggtggagtctggccggtacatcattctgctgctgggcaaagccctctccgtggtctgggaccgccacctgagcatctccgtggtcctgaagcagacataccaggagaaagtgtgtggcctgtgtgggaattttgatggcatccagaacaatgacctcaccagcagcaacctccaagtggaggaagaccctgtggactttgggaactcctggaaagtgagctcgcagtgtgctgacaccagaaaagtgcctctggactcatcccctgccacctgccataacaacatcatgaagcagacgatggtggattcctcctgtagaatccttaccagtgacgtcttccaggactgcaacaagctggtggaccccgagccatatctggatgtctgcatttacgacacctgctcctgtgagtccattggggactgcgcctgcttctgcgacaccattgctgcctatgcccacgtgtgtgcccagcatggcaaggtggtgacctggaggacggccacattgtgcccccagagctgcgaggagaggaatctccgggagaacgggtatgagtgtgagtggcgctataacagctgtgcacctgcctgtcaagtcacgtgtcagcaccctgagccactggcctgccctgtgcagtgtgtggagggctgccatgcccactgccctccagggaaaatcctggatgagcttttgcagacctgcgttgaccctgaagactgtccagtgtgtgaggtggctggccggcgttttgcctcaggaaagaaagtcaccttgaatcccagtgaccctgagcactgccagatttgccactgtgatgttgtcaacctcacctgtgaagcctgccaggagccgggaggcctggtggtgcctcccacagatgccccggtgagccccaccactctgtatgtggaggacatctcggaaccgccgttgcacgatttctactgcagcaggctactggacctggtcttcctgctggatggctcctccaggctgtccgaggctgagtttgaagtgctgaaggcctttgtggtggacatgatggagcggctgcgcatctcccagaagtgggtccgcgtggccgtggtggagtaccacgacggctcccacgcctacatcgggctcaaggaccggaagcgaccgtcagagctgcggcgcattgccagccaggtgaagtatgcgggcagccaggtggcctccaccagcgaggtcttgaaatacacactgttccaaatcttcagcaagatcgaccgccctgaagcctcccgcatcgccctgctcctgatggccagccaggagccccaacggatgtcccggaactttgtccgctacgtccagggcctgaagaagaagaaggtcattgtgatcccggtgggcattgggccccatgccaacctcaagcagatccgcctcatcgagaagcaggcccctgagaacaaggccttcgtgctgagcagtgtggatgagctggagcagcaaagggacgagatcgttagctacctctgtgaccttgcccctgaagcccctcctcctactctgccccccgacatggcacaagtcactgtgggcccggggctcttgggggtttcgaccctggggcccaagaggaactccatggttctggatgtggcgttcgtcctggaaggatcggacaaaattggtgaagccgacttcaacaggagcaaggagttcatggaggaggtgattcagcggatggatgtgggccaggacagcatccacgtcacggtgctgcagtactcctacatggtgaccgtggagtaccccttcagcgaggcacagtccaaaggggacatcctgcagcgggtgcgagagatccgctaccagggcggcaacaggaccaacactgggctggccctgcggtacctctctgaccacagcttcttggtcagccagggtgaccgggagcaggcgcccaacctggtctacatggtcaccggaaatcctgcctctgatgagatcaagaggctgcctggagacatccaggtggtgcccattggagtgggccctaatgccaacgtgcaggagctggagaggattggctggcccaatgcccctatcctcatccaggactttgagacgctcccccgagaggctcctgacctggtgctgcagaggtgctgctccggagaggggctgcagatccccaccctctcccctgcacctgatcctattggatgtcaggttgtaggcctggtggccattgtccctgctggcacctgtgtgctcaccttcctggttgtctttgcagactgcagccagcccctggacgtgatccttctcctggatggctcctccagtttcccagcttcttattttgatgaaatgaagagtttcgccaaggctttcatttcaaaagccaatatagggcctcgtctcactcaggtgtcagtgctgcagtatggaagcatcaccaccattgacgtgccatggaacgtggtcccggagaaagcccatttgctgagccttgtggacgtcatgcagcgggagggaggccccagccaaatcggggatgccttgggctttgctgtgcgatacttgacttcagaaatgcatggtgccaggccgggagcctcaaaggcggtggtcatcctggtcacggacgtctctgtggattcagtggatgcagcagctgatgccgccaggtccaacagagtgacagtgttccctattggaattggagatcgctacgatgcagcccagctacggatcttggcaggcccagcaggcgactccaacgtggtgaagctccagcgaatcgaagacctccctaccatggtcaccttgggcaattccttcctccacaaactgtgctctggatttgttaggatttgcatggatgaggatgggaatgagaagaggcccggggacgtctggaccttgccagaccagtgccacaccgtgacttgccagccagatggccagaccttgctgaagagtcatcgggtcaactgtgaccgggggctgaggccttcgtgccctaacagccagtcccctgttaaagtggaagagacctgtggctgccgctggacctgcccctgtcagaaggccgtgagcggcggcacttttgcccatgaattgctcgctgtggagtacgcaggctggatttctcccgcgtttcggctgaaggtaaaccagacatttatcgactatcgaaccggaagattacaacctgctattccgcagagtctccctgaagctctccgtttggctgccgacctggcagagcaaaagcaacggctggagcaaaaaatgcttatggatgcacctaaagtcgaattcgctgaacgcgttgctaccgccagcggggttctaatcggcaactatgccaaagtgctcggcctgggccaaaactatctcttcacctggttgcgtgataacggaattctgatcgcaaccggtgaacgcaggaacgtccccaaacaagaatacatatctcgtgggtatttcacccttaaagaaaccgtgatcgatacaagcaatggaagcaggatttctttcacgactcgtataaccggcaaagacgtagtaagaaccaccagcattgtaatgctggctaaagtcactttcctgagctgtataacgatgagcgattttactttttctggctatgaattggcctgctttgtaacacactccggtctatcccgtagcgccgggcatatcctgtcgcaatgtgcaaatctcgcggcaacaaccagtgaatacttcattcacaagcctcaccgcctgatcgcggcagaaactggttatagccaatcaaccgtcgttcgtgcattccgtgaagctgtaaacaaaggaattctgtctgtagagattgttatcggcgatcaccgtgaacgtcgcgctaacctgtaccggtttacaccatcctttttggccttcgcacaacaagccaaaaatgcgctgatagaaagcaaattaaagatctcttcagcggcaaccaaggttaaagctgttctcgctaagacattggctttatttaattttttatccacacccccatgtcaaaatgataccccctccccctgtcaggatgacgtggcaataaagaataagaagtcacaagttaaaaaaacaaaaagatcagtttccggcggtgccggaacaaccagcctcaaaaaattgacttcatggatcgctaaggcaaaagcaaaggctgacaatctgcggttatccaaaaaacgcactcaaaaacatgagttcaagcagaaagtagaggcggctgcgcggaaatatgcttacctgaagaacaagcgttcgcctgatattggcgggatatcaaacttcgataacctaccgcattgcatgacggtaaacgaagctcttaatgcggttttagccaaaaataaagataacgaacaatggggtataccggcaggattcagaggtgcggtagctggcgcctatatcaccgacatcaccgattggaaagatcgggctcgccactacgggctcatgagcgcttgtttcggcgtgggtatggtgtcaggccccgtggccgggggactgttgggcgccatctccttgcatgcaccattccttgcggcggcggtgctcaacggcctcaacctactactgggctgcttcctaatgcaggagtcgcataagggagagcgtcgaggagaacttctaaagatcgtcgttttgccaggtgaccacgttggtcaagaaatcacagccgaagccattaaggttcttaaagctatttctgatgttcgttccaatgtcaagttcgatttcgaaaatcatttaattggtggtgctgctatcgacctgcaggggggggggggaaagccacgttgtgtctcaaaatctctgatgttacattgcacaagataa

SEQ ID NO: 2895 - DNA, 6391 bp, Homo sapiens
  SIMILAR (1405)..(1890): 881254mologous to Homo sapiens putative p150,accession number U93563,Smith-Waterman Score=732.
atggataaattcctcaacacatacaccctcccaagactaaaccaggaagaagttgaatctctgaatagaccaataacaggctctgaaattgtggcaataatcaatagtttaccaaccaaaaggagtccaggaccagatggattcacagccaaattctaccagagaaaaattaactcaagatggattaaagacttaaatgtaagacctaaaaccataaaaaacctagaagaaaacctaggcaataccattcaggacataggcatgggcaaaggcttcataactaaaacactgaaagaaatggcaacaaaagccaaaattgacaaatgggatctaattaaactaaagcgcttcttcacagcaaaagacactatcatcgtagtgaacagacaacctacagaatgggacaaatgtttttcaatgtatccatccgacaaagggctaatatccagaagctacaaggaacttaaacaaatttccgagaataaaacaaccccatcaaaaaaaagatcaacaagacagaaaattcacaaggatattcaggacttgaactcagctctggaccaagtggaactaataatagacatctacagaactctccaccctaaatcaacagaagatacattcttctcagcaccacattgcacttattctaaaattgaccacataattggaagaaaaacactcctcagcaaatgcaaaataatggaaatcataacaatcagtctcacgggctacagtgcaatcaaattagaactcaagattaaaaaactcactcaaaaccgcacaactacatggaaactgaacaacctgctcctgaatgactactgggtaaataacaaaaggaagaatgggccccaccagagacagctggacatctacttcatttttcccaaatctccatggcagttaggaggcttatgtgcccagagcacacacaggaccttcaggaacagtgttgctcatgtccacatgcaagtctattggatcacaactcctcaccagcaagggaacaaaactcaacagaaaaatgagtttgacgagttgacagaagtaggattcagaagtgaccagctcagctccattgtctgtattcatatacacctagcccttaagccggtggctgagaacttacctgtgttttcattcattcccttgccagaaaggaatagcatcaacatcaacaaaaaggacatctacaccaaaaccccatctgtaggtcaccatcatcaaagaccaaaggtagataaaaccacaaagatggggagaaaccagagcggaaaagctgaaaattctaaaggtcagagcacctcttctcctccaaaggatcgtagctcctcaccagcaacagaacaaagctggatggagaatgactttgacaagttgacagaagtaggcttcagaagcacttattctaaaattgaccacatagttggaagtaaagcactcctcagcaaatgtaaaagaacagaaatcacaacaaactgtctctcaatcaaattagaactcaggattaagaaactcactcaaaactgcacaactacatggaaactgaacaacctgctcctgaatgactactgggtaaataatgaaatgaaggcaggaagaaagatgttctttgaaaccaatgaaaacaaagacacaacgtaccagaatctctgggacacatttcgagcagtgtgtagagggaaatttatagcactaaatgcccacaagagaaagaagaaaagatctaaaattgacaccctaacatcacaattaaaagaactagagaagcaagagcaaacacattcaaaagctagcagaaggcaagaaataactaagatcagagcagaactgaaagagacacaaaaaacccttcaaaaaatcaacgaatccaggagctggtttttttgaaaagatcaacaaaattgatagactgctagcaagactaataaagaagaaaagagagaagaatcaaatagacgcaataaaaaatgataaaggcgatatcaccaccgatcccacagaaatgcaaactaccgtcagagaatactataaacacctctacgtaaataaaccagaaaatctagaagaaatggataaattcctcgacacatacaccctcccaagactaaaccaggaagaacttgaatctctgaataaaccaataacaggctctgaaattgaggcaataattaatagcttaccaactaaaaaaagtccaggaccagatggattcacagccgaattctaccagaggtacaaggaggagctgttaccattccttctgaaactattccaatcaatagaaaaagagggaatcctccctaactcattttatgaggccagcatcatcctgataccaaagccgggcagagacacaacaaaaaaagagaattttagaccaatatccctgatgaacatcgatgcaaacatcctcaataacatactggcaaaccaaatccagcagcacatcaaaaagcttatccaccacgacgaagttggcttcatccctgggatgcaagggtggttcaacatacgaaaatcaataaacttaatcccgcatgtaaacagaaccaaagacaaaaaccacatggttatctcagtagatgcagaaaaggcctttgacaaaattcaacaacacttcatgctaaaaactctcaataaattaggtattgatgggacgtatctcaaaataataagacctatttttgacaaacccacagctgatatcatactgaataggcaaaaactggaagcattgcctttgaaaactggcacaaggcagagatgctctctctcaccactcctattcaacatagtgttggaagttctggcgagggcaatcaggcaggagaaagaaataaagggtattcaattaggaaaagaagaagtcaaattgtccctgtttgcagatgacatgattgtatatctagaaaaccccattgtctcagcccaaaatctccttaagctgataggcaacttcagcaaagtctcagaatacacaatcaatgtgcaaaaatcacaatcattcttatacaccaataacagacaaacagagagccaaatcatgagtgaactcccattcacaattgcttcaaagagaataaaatacctaggaatccaacttacaagggaggtgaaggacttcttcaaggagaactacaaaccactgctcgatgaaataaaagagaatacaaacaaatggaagaacattccatggtcatgggtaggaagaatcgatattgtgaaaatggctatactgcccaagcaaatgccagatgttaatgtaagctgggatggagagggcccaaagcaactgccatttattgacatttcagtggctgtggcaacagataaaggcttacttactccaatcataaaagatgctgctgctaaaggtatccaggaaattgctgactctgtaaggagcaatatagtcctacaatgtcaagctcgaccgatgcccttgagagccttcaacccagtcagctccttccggtgggcgcggggcatgactatcgtcgccgcacttatgactgtcttctttatcatgcaactcgtaggacaggtgccggcagcgctctgggtcattttcggcgaggaccgctttcgctggagcgcgacgatgatcggcctgtcgcttgcggtattcggaatcttgcacgccctcgctcaagccttcgtcactggtcccgccaccaaacgtttcggcgagaagcaggccattatcgccggcatggcggccgacgcgctgggctacgtcttgctggcgttcgcgacgcgaggctggatggccttccccattatgattcttctcgcttccggcggcatcgggatgcccgcgttgcaggccatgctgtccaggcaggtagatgacgaccatcagggacagcttcaaggatcgctcgcggctcttaccagcctaacttcgatcattggaccgctgatcgtcacggcgatttatgccgcctcggcgagcacatggaacgggttggcatggattgtaggcgccgccctataccttgtctgcctccccgcgtttgcgtcgcggtgcatggagccgggccacctcgacctgaatggaagccggcggcacctcgctaacggattcaccactccaagaattggagccaatcaattcttgcggagaactgtgaatgcgcaaaccaacccttggcagaacatatccatcgcgtccgccatctccagcagccgcacgcggcgcatctcgggcagcgttgggtcctggccacgggtgcgcatgatcgtgctcctgtcgttgaggacccggctaggctggcggggttgccttactgtaacccgtatcgtgagcatcctctctcgtttcatcggtatcattacccccatgaacagaaatcccccttacacggaggcatcagtgaccaaacaggaaaaaaccgcccttaacatggcccgctttatcagaagccagacattaacgcttctggagaaactcaacgagctggacgcggatgaacaggcagacatctgtgaatcgcttcacgaccacgctgatgagctttaccgcagctgcctcgcgcgtttcggtgatgacggtgaaaactctgacacatgcagctcccggagacggtcacagcttgtctgtaagcggatgccgggagcagacaagcccgtcaggctgttcacgggatgttggcggctaaaccagacatttatcgactatcgaaccggaagattacaacctgctattccgcagagtctccctgaagctctccgtttggctgccgacctggcagagcaaaagcaacggctggagcaaaaaatgcttatggatgcacctaaagtcgaattcgctgaacgcgttgctaccgccagcggggttctaatcggcaactatgccaaagtgctcggcctgggccaaaactatctcttcacctggttgcgtgataacggaattctgatcgcaaccggtgaacgcaggaacgtccccaaacaagaatacatatctcgtgggtatttcacccttaaagaaaccgtgatcgatacaagcaatggaagcaggatttctttcacgactcgtataaccggcaaaggtcagcagtggctgatgaagcgattgcttgatgctgacgtagtaagaaccaccagcattgtaatgctggctaaagtcactttcctgagctgtataacgatgagcgattttactttttctggctatgaattggcctgctttgtaacacactccggtctatcccgtagcgccgggcatatcctgtcgcaatgtgcaaatctcgcggcaacaaccagtgaatacttcattcacaagcctcaccgcctgatcgcggcagaaactggttatagccaatcaaccgtcgttcgtgcattccgtgaagctgtaaacaaaggaattctgtctgtagagattgttatcggcgatcaccgtgaacgtcgcgctaacctgtaccggtttacaccatcctttttggccttcgcacaacaagccaaaaatgcgctgatagaaagcaaattaaagatctcttcagcggcaaccaaggttaaagctgttctcgctaagacattggctttatttaattttttatccacacccccatgtcaaaatgataccccctccccctgtcaggatgacgtggcaataaagaataagaagtcacaagttaaaaaaacaaaaagatcagtttccggcggtgccggaacaaccagcctcaaaaaattgacttcatggatcgctaaggcaaaagcaaaggctgacaatctgcggttatccaaaaaacgcactcaaaaacatgagttcaagcagaaagtagaggcggctgcgcggaaatatgcttacctgaagaacaagcgttcgcctgatattggcgggatatcaaacttcgataacctaccgcattgcatgacggtaaacgaagctcttaatgcggttttagccaaaaataaagataacgaacaatggggtgcggttgctggcgcctatatcgccgacatcaccgatggggaagatcgggctcgccacttcgggctcatgagcgcttgtttcggcgtgggtatggtggcaggccccgtggccgggggactgttgggcgccatctccttgcatgcaccattccttgcggcggcggtgctcaacggcctcaacctactactgggctgcttcctaatgcaggagtcgcataagggagagcgtcgaggagaacttctaaagatcgtcgttttgccaggtgaccacgttggtcaagaaatcacagccgaagccattaaggttcttaaagctatttctgatgttcgttccaatgtcaagttcgatttcgaaaatcatttaattggtggtgctgctatcgacctgcaggggggggggggaaagccacgttgtgtctcaaaatctctgatgttacattgcacaagataa

SEQ ID NO: 2896 - DNA, 2824 bp, Homo sapiens
  SIMILAR (1405)..(1647): 1001254mologous to Cloning vector pBACe3.6 levansucrase,accession number U80929,Smith-Waterman Score=410.
atggtaaagggatcaactaaacaagaagagctaactatcctaaatatatatgcactgaatacaggagcacccagattcaaaaagcaagtcctgagtgacctacaaagagacttagactcccacacattaataatgggagactttaacaccccactgtcaacattagacagatcaacgagacagaaagtcaacaaggatacccaggaattgaactcagctctgcaccaagcggacctaatagacatctacagaactctccactcaaaaacaacagaatatacatttttttcatcaccacaccacacctattccaaaattgaccacatacttggaagtaaagctctcctcagcaaatgtaaaagaacagagattataagaaactatctctcagaccacagtgcaatcaaactagaactcaggattaagaatctcactcaaaaccactcaactacatggaaactgaacaacctgctcctgaatgactactggatatgtaacgcaatgaaggcagaaataaagatgttctttgaaaccaacgagaacaaagacacaacataccagaatctctgggatgcattcaaagcagtgtgtagagggaaatttatagcactaaatgcccacaagagaaagcaggaaagatccaaaattgacaccctaacatcacaattaaaagaactagaaaagcaagagcaaacacattcaaaagctagcagaaggcaagaaataactaaaatcagagcagaactgaaggaaatagagacacaaaaaacccttcaaaaaattaatgaatccaggagctggttttttgaaaggatcaacaaaattgatagactgctagcaagactaataaagaaaaaaagagagaagaatcaaatagacacaataaaaaatgataaaggggatatcaccaccgatcccacagaaatacaaactaccatcagagaatactacaaacacctctacgcaaataaactagaaaatctagaagaaatggataaattcctcgacacatacactctcccaagactaaaccaggaagaagttgaacctctgaatagaccaataaaaggagctgaaattgtggcaataatcaatagtttaccaaccaaaaagagtccaggaccagacggattcacagccgaattctaccagagcacccacttggatctgaagaagagagataatgggcctttctacaattctggtggaaaacaaaagaacacaactacattgttaaagaagtcaggatggtttaaaacaagtcatagtgatattgattttcctttaaagatgccagtggatgaaaaaagaaaggaaggacagaaggaaagaaagatgaagtcaattcgggaggatcgaaacggcagatcgcaaaaaacagtacatacagaaggagacatgaacatgaacatcaaaaaaattgtaaaacaagccacagttctgacttttacgactgcacttctggcaggaggagcgactcaagccttcgcgaaagaaaataaccaaaaagcatacaaagaaacgtacggcgtctctcatattacacgccatgatatgctgcagatccctaaacagcagcaaaacgaaaaataccaagtgcctcaattcgatcaatcaacgattaaaaatattgagtctgcaaaaggacgttgatgtgtgggacagctggccgctgcaaaacgctgacggaacagtagctgaatacaacggctatcacgttgtgtttgctcttgcgggaagcccgaaagacgctgatgacacatcaatctacatgttttatcaaaaggtcggcgacaactcaatcgacagctggaaaaacgcgggccgtgtctttaaagacagcgataagttcgacgccaacgatccgatcctgaaagatcagacgcaagaatggtccggttctgcaacctttacatctgacggaaaaatccgtttattctacactgactattccggtaaacattacggcaaacaaagcctgacaacagcgcaggtaaatgtgtcaaaatctgatgacacactcaaaatcaacggagtggaagatcacaaaacgatttttgacggagacggaaaaacatatcagaacgttcagcagtttatcgatgaaggcaattatacatccggcgacaaccatacgctgagagaccctcactacgttgaagacaaaggccataaataccttgtattcgaagccaacacgggaacagaaaacggataccaaggcgaagaatctttatttaacaaagcgtactacggcggcggcacgaacttcttccgtaaagaaagccagaagcttcagcagagcgctaaaaaacgcgatgctgagttagcgaacggcgccctcggtatcatagagttaaataatgattacacattgaaaaaagtaatgaagccgctgatcacttcaaacacggtaactgatgaaatcgagcgcgcgaatgttttcaaaatgaacggcaaatggtacttgttcactgattcacgcggttcaaaaatgacgatcgatggtattaactcaaacgatatttacatgcttggttatgtatcaaactctttaaccggcccttacaagccgctgaacaaaacagggcttgtgctgcaaatgggtcttgatccaaacgatgtgacattcacttactctcacttcgcagtgccgcaagccaaaggcaacaatgtggttatcacaagctacatgacaaacagaggcttcttcgaggataaaaaggcaacatttgcgccaagcttcttaatgaacatcaaaggcaataaaacatccgttgtcaaaaacagcatcctggagcaaggacagctgacagtcaactaa

SEQ ID NO: 2897 - DNA, 7007 bp, Homo sapiens
  SIMILAR (4091)..(4246): 1001254mologous to synthetic construct tet protein,accession number M20189,Smith-Waterman Score=264.
atgcccttgagagccttcaacccagtcagctccttccggtgggcgcggggcatgactatcgtcgccgcacttatgactgtcttctttatcatgcaactcgtaggacaggtgccggcagcgctctgggtcattttcggcgaggaccgctttcgctggagcgcgacgatgatcggcctgtcgcttgcggtattcggaatcttgcacgccctcgctcaagccttcgtcactggtcccgccaccaaacgtttcggcgagaagcaggccattatcgccggcatggcggccgacgcgctgggctacgtcttgctggcgttcgcgacgcgaggctggatggccttccccattatgattcttctcgcttccggcggcatcgggatgcccgcgttgcaggccatgctgtccaggcagcctaacttcgatcattggaccgctgatcgtcacggcgatttatgccgcctcggcgagcacatggaacgggttggcatggattgtaggcgccgccctataccttgtctgcctccccgcgttgcgtcgcggtgcatggagccgggccacctcgacctgaatggaagccggcggcacctcgctaacggattcaccactccaagaattggagccaatcaattcttgcggagaactgtgaatgcgcaaaccaacccttggcagaacatatccatcgcgtccgccatctccagcagccgcacgcggcgcatctcgggcagcgttgggtcctggccacggtctggaaacgcggaagtcagcgccctgcaccattatgttccggatctgcatcgcaggatgctgctggctaccctgtggaacacctacatctgtattaacgaagcgctggcattgaccctgagtgatttttctctggtcccgccgcatccataccgccagttgtttaccctcacaacgttccataaccgggcatgttcatcatcagtaacccgtatcgtgagcatcctctctcgtttcatcggtatcattacccccatgaacagaaatcccccttacacggaggcatcagtgaccaaacaggaaaaaaccgcccttaacatggcccgctttatcagaagccagacattaacgcttctggagaaactcaacgagctggacgcggatgaacaggcagacatctgtgaatcgcttcacgaccacgctgatgagctttaccgcagctgcctcgcgcgtttcggtgatgacggactgggcggcggccaaagctgtcggacagtgctccgagaacgggtgcgcatagaaattgcatcaacgcatatagcgctacagcacgccatagtgactggcgatgctgtcggaatggacgatatcccgcaagaggcccggcagtaccggcataaccaagcctatgcctacagcatccagggtgacggtgccgaggatgacgatgagcgcattttccgcaccctgaaggaatacctgtctcatgaacaggatatgctgcgtcttcgcatcatgatctggcgcactcttgcgaccgacacctttgacatcgctctgccggttaaccagtcctttgatgtatgggcaaccatcattcgtggcaaattccagactgtatatcgcgacattattgagcgcgttaaatcttctgacagctgtgacgtctctggatctgaagtgttaaagtttcacgtaatacgaacgccgagcacttctcaggcaccgtgtatgaaatctaacaatgcgctcatcgtcatcctcggcaccgtcaccctggatgctgtaggcataggcttggttatgccggtactgccgggcctcttgcgggatatcgtccattccgacagcatcgccagtcactatggcgtgctgctagcgctatatgcgttgatgcaatttctatgcgcacccgttctcggagcactgtccgaccgctttggccgccgcccagtcctgctcgcttcgctacttggagccactatcgactacgcgatcatggcgaccacacccgtcctgtggatctgcctcgctggcctgccgcagttcttcaacctcccggcgcagcttttcgttctcaatttcagcatccctttcggcataccattttatgacggcggcagagtcataaagcacctcattacccttgccaccgcctcgcagaacgggcattccctgttcctgccagttctgaatgaaagtttggccattaaagactggcataggcttggttatgccggtactgccgggcctcttgcgggatatcgtccattccgacagcatcgccagtcactatggcgtgctgtagcgctatatgcgttgatgcaatttctatgcgcacccgttctcggagcactttttgaccgctttgccgcagccaagtcctgcaacttcgctacttggagccactatcgactacgcgatcatgcgaccacacccgtcctgtggatctgcctcgctggcctgccgcagttcttcaacctcccggcgcagcttttcgttctcaatttcagcatccgtttcggcataccattttatgacggcggcagagtcataaagcacctcattacccttgccaccgcctcgcagaacgggcattccctgttcctgccagttctgaatggttctaaggctctggaatattccaatgggatttttgattgccaatctcccacctctccattcatgggaagtttgcgagctctgcaccttgtggaagacctgcgtggattgttagagatgatggaaacagatgagaaagaaggcttgagatgccagatcccagattcaacagcagaaacgcttgttgaatggcttcagagtcaaatgaccaacagaagaattcttaacagttctagaaccaagaagattaacatcatgtttattccatattttaaaattcattgtctgcattctgctcttggagtagctgaaacagaaaaagagacagcagagcacctagatctggctggtgcttcttctcggccaaaagattcacagaggaacagtcccttccagataccgcctccatctccagattccaaaaagaaatccagaggtatcatgaaactctttggaaacctggggccttacggaggacatcgccgttctaaccagcgtgcctatacttcgcggccattcctgttcatctcaagcaatataggctcgagcatgtccatgcggcaaccaggttcgcctgggtgtcggatgtgctcagaggctgcgaaacggtcctactggcggtccaaaacgcgctacatgtttcttattgccttatggccgtgtttgtaccgccagtgctacttcagcgtcaatagggcactctggccgcgccgcacattcagcagcgtttttcagcgcgttttcgatcaacgtttcaatgttggtatcaacaccaggtttaactttgaacttatcggcactgacggttaccttgttctgcgctggctaatcacgctggataccaaggctgatgttgtagatgttggtgcggttgctggcgcctatatcgccgacatccccgatggggaagatcgggctcgccacttcgggctcatgagcgcttgtttcggcgtgggtatggtggcaggccccgtggccgggggactgttgggcgccatctccttgcatgcaccattccttgcggcggcggtgctcaacggcctcaacctactactgggctgcttcctaatgcaggagtcgcataagggagagcgtcgaccgatgcccttgagagccttcaacccagtcagctccttccggtgggcgcggggcatgactatcgtcgccgcacttatgactgtcttctttatcatgcaactcgtaggacaggtgccggcagcgctctgggtcattttcggcgaggaccgctttcgctggagcgcgacgatgatcggcctgtcgcttgcggtattcggaatcttgcacgccctcgctcaagccttcgtcactggtcccgccaccaaacgtttcggcgagaagcaggccattatcgccggcatggcggccgacgcgctgggctacgtcttgctggcgttcgcgacgcgaggctggatggccttccccattatgattcttctcgcttccggcggcatcgggatgcccgcgttgcaggccatgctgtccaggcagcctaacttcgatcattggaccgctgatcgtcacggcgatttatgccgcctcggcgagcacatggaacgggttggcatggattgtaggcgccgccctataccttgtctgcctccccgcgttgcgtcgcggtgcatggagccgggccacctcgacctgaatggaagccggcggcacctcgctaacggattcaccactccaagaattggagccaatcaattcttgcggagaactgtgaatgcgcaaaccaacccttggcagaacatatccatcgcgtccgccatctccagcagccgcacgcggcgcatctcgggcagcgttgggtcctgcagatccggctgtggaatgtgtgcttttgcaaaaagcttcacgctgccgcaagcactcagggcgcaagggctgctaaaggaagcggaacacgtagaaagccagtccgcagaaacggtgctgaccccggatgaatgtcagctactgggctatctggacaagggaaaacgcaagcgcaaagagaaagcaggttctccggccgcttgggtggagaggctattcggctatgactgggcacaacagacaatcggctgctctgatgccgccgtgttccggctgtcagcgcaggggcgcccggttctttttgtcaagaccgacctgtccggtgccctgaatgaactgcaggacgaggcagcgcggctatcgtggctggccacgacgggcgttccttgcgcagctgtgctcgacgttgtcactgaagcgggaagggactggctgctattgggcgaagtgccggggcaggatctcctgtcatctcaccttgctcctgccgagaaagtatccatcatggctgatgcaatgcggcggctgcatacgcttgatccggctacctgcccattcgaccaccaagcgaaacatcgcatcgagcgagcacgtactcggatggaagccggtcttgtcgatcaggatgatctggacgaagagcatcaggggctcgcgccagccgaactgttcgccaggctcaaggcgcgcatgcccgacggcgaggatctcgtcgtgacccatggcgatgcctgcttgccgaatatcatggtggaaaatggccgcttttctggattcatcgactgtggccggctgggtgtggcggaccgctatcaggacatagcgttggctacccgtgatattgctgaagagcttggcggcgaatgggctgaccgcttcctcgtgctttacggtatcgccgctcccgattcgcagcgcatcgccttctatcgccttcttgacgagttcttctgagcgggactctggggttcgaaatgaccgaccaagcgacgccaacctgccatcacgagatttcgattccaccgccgccttctatgaaaggttgggcttcggaatcgttttccgggacgccggctggatgatcctccagcgcggggatctcatgctggagttcttcgcccaccccgggctcgatcccctcgcgagttggttcagctgctgcctgaggctggacgacctcgcggagttctaccggcagtgcaaatccgtcggcatccaggaaaccagcagcggctatccgcgcatccatgcccccgaactgcaggagtggggaggcacgatggccgctttgattccaacctatggaactgatgaatgggagcagtggtggaatgcctttaatgaggaaaacctgttttgctcagaagaaatgccatctagtgatgatgaggctactgctgactctcaacattctactcctccaaaaaagaagagaaaggtcgttcgctccaagctgggctgtgtgcacgaaccccccgttcagcccgaccgctgcgccttatccggtaactatcgtcttgaagtccaacccggtaagacacgacttatcgccactggcagcagccactgcagaactttaaaagtgctcatcattggaaaacgtttcttcggggcgaaaactctcaaggatcttaccgctgttgagatccagttcgatgtaacccactcgtgcacccaactgatcttcagcatcttttactttcaccagcgtttctgggcacttgtccggctgcccccccacatctcacagtgtgacgaagtcttccggttcttcgaggctcgacccgaggatgtcaaccctccaaaagagaggcaaatggaaggttgtggacagagccctggaacctctccacagcagcctcccttcactctgcaggtagttactgagtgccagctgtatgccagcccaggcctgggtacagagcagccaccccaaaaaggctgggggaatggaattgggttggccgagctgaaggaaggcctacagagccctttggagcctctggcggaaggggccatccccagacatagccggagggagctgtccaaaaagcctgtgtttcctactgtgcttagggtgactgcctggggtttcctggtgcccttctcctggggaggcctgggctccaacctcccactgagggagccactggttggtgctgcaggaaccagaggaaagagcctggcagccgcagggaagctgagtttctgtaacgagtgtggagacaggactgtgattcactcaaggcctgaggtcggcgccaacaaaggttatcaggaaggcctgcagggaggaggccaggctcatgtgtcccttgttccagaagagccagatcaggatagtgcccatgtccccagtgactgctgggctctgaaggtcacccccaagtcagctgtctggcagcccagccggcctcttgagcagttcccagtggctgtaggccccgcagacaggcatcctgggcccagcagccaatgtcagctggcagacagaaggtggctcttcctggcttcacctctcactctgggaactctgaacggcaggatggcaatctccattccccagcgaggcctgctgcccgctgctg

SEQ ID NO: 2898 - DNA, 376 bp, Homo sapiens
  SIMILAR (273)..(163): 891254mologous to Homo sapiens Human mammastatin amino acid sequence,accession number AAY23756,Smith-Waterman Score=172.
gaactttttttttactgcagaaaacatttttataactttagaacttttctaaaatactactttgtcagctgaacaatatagaaaagtgcagaggcaagtgcctttccagaaccgcgtggtgacttagaagcggggcttgcgcttgcggccggtgtactgggtcaaaaagcgacgtcgctatgaacgcttggccgccacaagccagttatccctgtggtaacttttctgacacctcctgcttaaaacccaaaaggtcagaaggatcgtgaggccccgctttcacggtctgtattcgtactgaaaatcaagatcaagcgagcttttgcccttctgctccacgggaggtttctgctcgtgccgaattcctcagcgcgga

SEQ ID NO: 2899 - DNA, 1694 bp, Homo sapiens
  SIMILAR (868)..(1047): 951254mologous to Homo sapiens Human cerebellin-2 protein sequence,accession number AAY32937,Smith-Waterman Score=291.
tcgggagccttcagggatgcgctgccagctgcgcccgggcgtttctccggacctgttgtgccagatcggaaagcgggttggctgtgcgcgggaccaagggggtggccttcggggagaacccccgagccgcaggcacctgctcccagtcccccttcttcccggtggctccacctcccggtgtaaggctttgggttctgtgccctgacaggttcacaggcgcctttcttctgagaacgaccctggccttgaacgtcagagccggggacgaaggcccccggaggctgctgcgagctccgcgcgttccttcgcgcccttccgcgccgctcgcgccggcgccggcctccacccccgcgcgccgccttccaccagtcccgatgcaggcgcccggccgggggccactcgggctgcggctgatgatgcccgggcgccggggggcgctgcgcgagcctggcggctgcggatcctgcctgggggtggcgctggccctgctgttgctgctactgcccgcctgctgccccgtgcgggcgcagaacgacacggagcccatcgtgctggagggcaagtgcctggtggtgtgcgactccagcccgtcggcggacggcgccgtcacctcctccctaggcatctccgtgcgctccggcagcgccaaggtggccttctccgccacgcggagcaccaaccacgagccgtccgagatgagcaaccgcaccatgaccatctatatcgaccaggtgtttagtaatattgggcaccactttgatcttgcttccagtatatttgtagcaccgagaaaagggatttatagcttcagcttccacgtggtcaaagtgtataacagacaaaccatccaggtcagtttattgtttgaatggctacccagtgatctcggcctgggcaggataccaggatgtcacgggagaagctgctagcaatggcgtgctgctgctcatggaaagggaagacaaagtgcatctcaaacttgagagaggcaacctcatggggggctggaaatactccacattctcgggcttcttggtgtttcctctataaacacagagccccctagatggtgggggaatggcaaactggacccagggactccgccctttaaaacaccctggaacttactgggaattggacaccttgtttccaacctccgttcagactgtttgcagtaggaaggaatgatttcctttggaaaccttccagtacttttgttttttgttttttgggattattgacatttcctcgggaacctggcctctaattagttttagatgacaaggtcttaaggagaaatgaaattatcgatttgagcaatttgcacctgtgattgtaaagtcaatatcggattttattgttgggaccatggacctcttttgcttgtatgttgtattgtcgtcccaacggaaggagagctcctgactccaggatgggctgctggttgcagtcagggcttgaagtaggatcccagtcaataaccacctgctggacagtcctttgacatgtgttctgtgtgtgtctgtatagccttaagaaaaagaatggcttcactttcattctgtattcttccccccaccatgtggctgggaggacttgggagggggatggggacattggggaacctgttcaagaagtgctttattccagaggaagcaaatttttgcacgattgggactgcaatttttgttttg

SEQ ID NO: 2900 - DNA, 401 bp, Homo sapiens
  SIMILAR (1)..(396): 921254mologous to Homo sapiens methyl-CpG binding protein 1,accession number AF120982,Smith-Waterman Score=641.
aaaggcgcaagcagtcctgtgcaggtgccgggccctgttgcagcttccacagaagccctgttgcaggaggcccagtgctctggcctgagttgggttgtggccttaccccaggtgaagcaagagaaggcggatacccaggacgagtggacaccaggcacagctgtcctgacttctcccgtattggtgcctggctgccctagcaaggcagtagacccaggcctgccttctgtgaagcaagagccacctgacccagaggaggacaaggaggagaacaaggatgattctgcctccaaattggccccagaggaagagatcacggagattttcagcctgggtggaccccgcttccgagatacagcagtctgattgccaaggtccaaagaccttaaaaaaccacgaaa

SEQ ID NO: 2901 - DNA, 678 bp, Homo sapiens
  SIMILAR (678)..(601): 801254mologous to Homo sapiens methyl-CpG binding protein,accession number Y10746,Smith-Waterman Score=105.
  misc_feature (1)...(678): n = a,t,c or g
agcagttcctttccttatttattcaattacattttcaattgctatctccctgaggaagtatgtagagacactgccaggtctcatccagaagccacttacaattactcatgaacatggcttgtttaggttgttttgtggtggctttaattatattacctttctccaacccagctcccccacccttaaaatccaacttcttatactcaggctcttgggaggagaagatgcaccaactttctactctttctcttcctttcccgcttacttcttctagaagctcaaagtactcttaggcctgctcttctggtttggtagtaggtttttcctcctagggttgattcacacacaagccctggcaaccaatctagggtccagcccctagtagatcagtgttgtctctcataaagccagtctgcaaatatcaccttgaatcctacagtctgtagaagcctccagtctactgctttctagctccaggttttttaaggtctttggaccttggcaaccagactgctgtgcgtgtagccaaggtgggcttcaaggtagggccaagatggtgccgtcgggcagagctgggcctcttttcgacgacggtaggtggggcgatccctgcccatnctcagactctgaccagacacttggcagcagccgcttcatggcaaactgcacctcgtgccg

SEQ ID NO: 2902 - DNA, 1602 bp, Homo sapiens
  SIMILAR (814)..(1386): 991254mologous to Homo sapiens Regulator of fibroblast growth factor-2 transcription-B,accession number AAY28900,Smith-Waterman Score=1006.
atgataagagaacagaagatataccataaatatttggcacagagacgtgaggaagaaaaagctcaggagaaagaatttgacagaatattagaggaagacaaggcaaagaagttggctgagaaggacaaggagctgagacttgaaaaggaggcaaggagacagcttgtggatgaggtcatgtgtacaagaaaacttcaagttcaagaaaagtcccagtatgtaaagctgctcctggctgcccaccccacaggagacaggatccgaagcaaagttgagctgactcgatacctgggccctgcgtgtgatctcaccctcttcgacttcaaacaaggcatcttgtgctatccagcccccaaggcccatcccgtggcggttgccagcaagaagcgaaagaagccttcaaggccagccaagactcggaaacgtcaggttggaccccagagtggtgaggtcaggaaggaggccccgagggatgagaccaaggctgacactgacacagccccagcttcattccctgctcctgggtgctgtgagaactgtggaatcagcttctcaggggatggcacccaaaggcagcggctcaaaacgttgtgcaaagactgtcgagcacagagaattgccttcaaccgggaacagagaatgtttaagcagccctacacgaaccgccggcagaaccgcaagtgcggggcctgtgcagcctgcctacggcggatggactgtggccgctgcgacttctgctgcgacaagcccaaattcgggggcagcaaccagaagcgccagaagtgtcgttggcgccaatgcctgcagtttgccatgaagcggctgctgcccagtgtctggtcagagtctgaggatggggcaggatcgcccccaccttaccgtcgtcgaaagaggcccagctctgcccgacggcaccatcttggccctaccttgaagcccaccttggctacacgcacagcccaaccagaccatacccaggctccaacgaagcaggaagcaggtggtggctttgtgctgcccccgcctggcactgaccttgtgtttttacgggaaggcgcaagcagtcctgtgcaggtgccgggccctgttgcagcttccacagaagccctgttgcaggaggcccagtgctctggcctgagttgggttgtggccttaccccaggtgaagcaagagaaggcggatacccaggacgagtggacaccaggcacagctgtcctgacttctcccgtattggtgcctggctgccctagcaaggcagtagacccaggcctgccttctgtgaagcaagagccacctgacccagaggaggacaaggaggagaacaaggatgattctgcctccaaattggccccagaggaagaggcaggaggggctggcacacccgtggaacctcagtggacagtatctacccagagagacaattgtaggtctctagctggagctacctacactcctgtgggactgaaaggtatccgtgtggaagcatctaactaccacctgttcagcttcgatgatgtgggtgtcctgcagaagaagctggtgcccttcctcacagagttaaatatgcatctggcccaggaattagagaagctgaaaggatga

SEQ ID NO: 2903 - DNA, 1761 bp, Homo sapiens
  SIMILAR (1)..(1758): 1001254mologous to Homo sapiens methyl-CpG binding protein splice variant 2,accession number AF078831,Smith-Waterman Score= 3258.
atggctgaggactggctggactgcccggccctgggccctggctggaagcgccgcgaagtctttcgcaagtcaggggccacctgtggacgctcagacacctattaccagagccccacaggagacaggatccgaagcaaagttgagctgactcgatacctgggccctgcgtgtgatctcaccctcttcgacttcaaacaaggcatcttgtgctatccagcccccaaggcccatcccgtggcggttgccagcaagaagcgaaagaagccttcaaggccagccaagactcggaaacgtcaggttggaccccagagtggtgaggtcaggaaggaggccccgagggatgagaccaaggctgacactgacacagccccagcttcattccctgctcctgggtgctgtgagaactgtggaatcagcttctcaggggatggcacccaaaggcagcggctcaaaacgttgtgcaaagactgtcgagcacagagaattgccttcaaccgggaacagagaatgtttaagcgtgtgggctgtggggagtgtgcagcctgccaggtaacagaagactgtggggcctgctccacctgcctcctgcagctgccccatgatgtggcatcggggctgttctgcaagtgtgaacggagacgctgcctccggattgtggaaaggagccgagggtgtggagtatgccggggctgtcagacccaagaggattgtggccattgccccatctgccttcgccctccccgccctggtctcaggcgccagtggaaatgtgtccagcgacgttgcctacggggtaaacatgcccgccgcaagggaggctgtgactccaagatggctgccaggcggcgccccggagcccagccactgcctccaccacccccatcacagtccccagagcccacagagccgcagccctacacgaaccgccggcagaaccgcaagtgcggggcctgtgcagcctgcctacggcggaatggatgtggccgctgcgacttctgctgcgacaagcccaaattcgggggcagcaaccagaagcgccagaagtgtcgttggcgccaatgcctgcagtttgccatgaagcggctgctgcccagtgtctggtcagagtctgaggatggggcaggatcgcccccaccttaccgtcgtcgaaagaggcccagctctgcccgacggcaccatcttggccctaccttgaagcccaccttggctacacgcacagcccaaccagaccatacccaggctccaacgaagcaggaagcaggtggtggctttgtgctgcccccgcctggcactgaccttgtgtttttacgggaaggcgcaagcagtcctgtgcaggtgccgggccctgttgcagcttccacagaagccctgttgcaggcagtagacccaggcctgccttctgtgaagcaagagccacctgacccagaggaggacaaggaggagaacaaggatgattctgcctccaaattggccccagaggaagaggcaggaggggctggcacacccgtgatcacggagattttcagcctgggtggaacccgcttccgagatacagcagtctggttgccaagtctgcagggcaggcactcgggaagggaagatggatgtaaagtgtgggagaccgaggacacagtggagcccacgagcacgagctggaacccacgaggatggcctggaacccatgtcagtctctcaccacctccagcttcgatgatgtgggtgtcctgcagaagaagctggtgcccttcctcacagagttaa

SEQ ID NO: 2904 - DNA, 1650 bp, Homo sapiens
  SIMILAR (1)..(1647): 1001254mologous to Homo sapiens methyl-CpG binding protein splice variant 3,accession number AF078832,Smith-Waterman Score= 2999.
atggctgaggactggctggactgcccggccctgggccctggctggaagcgccgcgaagtctttcgcaagtcaggggccacctgtggacgctcagacacctattaccagagccccacaggagacaggatccgaagcaaagttgagctgactcgatacctgggccctgcgtgtgatctcaccctcttcgacttcaaacaaggcatcttgtgctatccagcccccaaggcccatcccgtggcggttgccagcaagaagcgaaagaagccttcaaggccagccaagactcggaaacgtcaggttggaccccagagtggtgaggtcaggaaggaggccccgagggatgagaccaaggctgacactgacacagccccagcttcattccctgctcctgggtgctgtgagaactgtggaatcagcttctcaggggatggcacccaaaggcagcggctcaaaacgttgtgcaaagactgtcgagcacagagaattgccttcaaccgggaacagagaatgtttaagcgtgtgggctgtggggagtgtgcagcctgccaggtaacagaagactgtggggcctgctccacctgcctcctgcagctgccccatgatgtggcatcggggctgttctgcaagtgtgaacggagacgctgcctccggattgtggaaaggagccgagggtgtggagtatgccggggctgtcagacccaagaggattgtggccattgccccatctgccttcgccctccccgccctggtctcaggcgccagtggaaatgtgtccagcgacgttgcctacggggtaaacatgcccgccgcaagggaggctgtgactccaagatggctgccaggcggcgccccggagcccagccactgcctccaccacccccatcacagtccccagagcccacagagccgcaccccagagccctggccccctcgccacctgccgagttcatctattactgtgtagacgaggacgagctacagcggctgctgcccagtgtctggtcagagtctgaggatggggcaggatcgcccccaccttaccgtcgtcgaaagaggcccagctctgcccgacggcaccatcttggccctaccttgaagcccaccttggctacacgcacagcccaaccagaccatacccaggctccaacgaagcaggaagcaggtggtggctttgtgctgcccccgcctggcactgaccttgtgtttttacgggaaggcgcaagcagtcctgtgcaggtgccgggccctgttgcagcttccacagaagccctgttgcaggaggcccagtgctctggcctgagttgggttgtggccttaccccaggtgaagcaagagaaggcggatacccaggacgagtggacaccaggcacagctgtcctgacttctcccgtattggtgcctggctgccctagcaaggcagtagacccaggcctgccttctgtgaagcaagagccacctgacccagaggaggacaaggaggagaacaaggatgattctgcctccaaattggccccagaggaagaggcaggaggggctggcacacccgtgatcacggagattttcagcctgggtggaacccgcttccgagatacagcagtctggttgccaaggtccaaagaccttaaaaaacctggagctagaaagcagtag

SEQ ID NO: 2905 - DNA, 1824 bp, Homo sapiens
  SIMILAR (667)..(1821): 971254mologous to Homo sapiens methyl-CpG binding protein splice variant 1,accession number AF078830,Smith-Waterman Score= 2050.
atggctgaggactggctggactgcccggccctgggccctggctggaagcgccgcgaagtctttcgcaagtcaggggccacctgtggacgctcagacacctattaccagagccccacaggagacaggatccgaagcaaagttgagctgactcgatacctgggccctgcgtgtgatctcaccctcttcgacttcaaacaaggcatcttgtgctatccagcccccaaggcccatcccgtggcggttgccagcaagaagcgaaagaagccttcaaggccagccaagactcggaaacgtcaggttggaccccagagtggtgaggtcaggaaggaggccccgagggattgagaccaaggctgacactgacacagccccagcttcattccctgctcctgggtgctgtgagaactgtggaatcagcttctcaggggatggcacccaaaggcagcggctcaaaacgttgtgcaaagactgtcgagcacagagaattgccttcaaccgggaacagagaatgtttaagcgtgtgggctgtggggagtgtgcagcctgccaggtaacagaagactgtggggcctgctccacctgcctcctgcagctgccccatgatgtggcatcggggctgttctgcaagtgtgaacggagacgctgcctccggattgtgggaaaggagccgagggtgtgggagtatgccggggttttcaagacccaagaggatttttgggccattgccccatctgccttcgccctccccgccctggtctcaggcgccagtggaaatgtgtccagcgacgttgcctacggggtaaacatgcccgccgcaagggaggctgtgactccaagatggctgccaggcggcgccccggagcccagccactgcctccaccacccccatcacagtccccagagcccacagagccgcaccccagagccctggccccctcgccacctgccgagttcatctattactgtgtagacgaggacgagctacagccctacacgaaccgccggcagaaccgcaagtgcggggcctgtgcagcctgcctacggcggaatggatgtggccgctgcgacttctgctgcgacaagcccaaattcgggggcagcaaccagaagcgccagaagtgtcgttggcgccaatgcctgcagtttgccatgaagcggctgctgcccagtgtctggtcagagtctgaggatggggcaggatcgcccccaccttaccgtcgtcgaaagaggcccagctctgcccgacggcaccatcttggccctaccttgaagcccaccttggctacacgcacagcccaaccagaccatacccaggctccaacgaagcaggaagcaggtggtggctttgtgctgcccccgcctggcactgaccttgtgtttttacgggaaggcgcaagcagtcctgtgcaggtgccgggccctgttgcagcttccacagaagccctgttgcaggaggcccagtgctctggcctgagttgggttgtggccttaccccaggtgaagcaagagaaggcggatacccaggacgagtggacaccaggcacagctgtcctgacttctcccgtattggtgcctggctgccctagcaaggcagtagacccaggcctgccttctgtgaagcaagagccacctgacccagaggaggacaaggaggagaacaaggatgattctgcctccaaattggccccagaggaagaggcaggaggggctggcacacccgtgatcacggagattttcagcctgggtggaacccgcttccgagatacagcagtctggttgccaaggtccaaagaccttaaaaaacctggagctagaaagcagtag

SEQ ID NO: 2906 - DNA, 2212 bp, Homo sapiens
  SIMILAR (1)..(1722): 1001254mologous to Homo sapiens Regulator of fibroblast growth factor-2 transcription-B,accession number AAY28900,Smith- Waterman Score=3136.
  misc_feature (1)...(2212): n = a,t,c or g
atggctgaggactggctggactgcccggccctgggccctggctggaagcgccgcgaagtctttcgcaagtcaggggccacctgtggacgctcagacacctattaccagagccccacaggagacaggatccgaagcaaagttgagctgactcgatacctgggccctgcgtgtgatctcaccctctttgacttcaaacaaggcatcttgtgctatccagcccccaaggcccatcccgtggcggttgccagcaagaagcgaaagaagccttcaaggccagccaagactcggaaacgtcaggttggaccccagagtggtgaggtcaggaaggaggccccgagggatgagaccaaggctgacactgacacagccccagcttcattccctgctcctgggtgctgtgagaactgtggaatcagcttctcaggggatggcacccaaaggcagcggctcaaaacgttgtgcaaagactgtcgagcacagagaattgccttcaaccgggaacagagaatgtttaagcgtgtgggctgtggggagtgtgcagcctgccaggtaacagaagactgtggggcctgctccacctgcctcctgcagctgccccatgatgtggcatcggggctgttctgcaagtgtgaacggagacgctgcctccggattgtggaaaggagccgagggtgtggagtatgccggggctgtcagacccaagaggattgtggccattgccccatctgccttcgccctccccgccctggtctcaggcgccagtggaaatgtgtccagcgacgttgcctacggcaccttgctcaccgtctgcgtcgccgtcatcagagatgtcagcgacgcactcccctggctgtggctcccccaactggtaaacatgcccgccgcaagggaggctgtgactccaagatggctgccaggcggcgccccggagcccagccactgcctccaccacccccatcacagtccccagagcccacagagccgcaccccagagccctggccccctcgccacctgccgagttcatctattactgtgtagacgaggacgagctaaagcggctgctgcccagtgtctggtcagagtctgaggatggggcaggatcgcccccaccttaccgtcgtcgaaagaggcccagctctgcccgacggcaccatcttggccctaccttgaagcccaccttggctacacgcacagcccaaccagaccatacccaggctccaacgaagcaggaagcaggtggtggctttgtgctgcccccccctggcactgaccttgtgtttttacgggaaggcgcaagcagtcctgtgcaggtgccgggccctgttgcagcttccacagaagccctgttgcaggaggcccagtgctctggcctgagttgggttgtggccttaccccaggtgaagcaagagaaggcggatacccaggacgagtggacaccaggcacagctgtcctgacttctcccgtattggtgcctggctgccctagcaaggcagtagacccaggcctgccttctgtgaagcaagagccacctgacccagaggaggacaaggaggagaacaaggatgattctgcctccaaattggccccagaggaagaggcaggaggggctggcacacccgtgatcacggagattttcagcctgggtggaacccgcttccgagatacagcagtctggttgccaaggtccaaagaccttaaaaaacctggagctagaaagcagtagactggaggcttctacagactgtaggattcaagtctgcagggcaggcactcgggaagggaagatggatgtaaagtgtgggagaccgaggacacagtggagcccacgagcacgagctggaacccacgaggatggcctggaacccatgtcagtctctcaccacctccagcttcgatgatgtgggtgtcctgcagaagaagctggtgcccttcctcacagagttaaatatgcatcttggcccaggaattagagaagctgaaaggatggatcctggggaaggtggagcagctgcaggcctggctgcaggcctgactactgcccacaccaacgaggtgatctagcagatacatggcaacgtgtgaactgcaacaacgcctggtgccccagcacaanccttccaagtgtaaaacaatgtgctgctgcttcanttccgccctccggttatcaagcaaaatgtctcttgtggnccatctttactggaagagagttc

SEQ ID NO: 2907 - DNA, 1949 bp, Homo sapiens
  SIMILAR (1)..(1494): 971254mologous to Homo sapiens Regulator of fibroblast growth factor-2 transcription-A,accession number AAY28898,Smith-Waterman Score=2702.
atggctgaggactggctggactgcccggccctgggccctggctggaagcgccgcgaagtctttcgcaagtcaggggccacctgtggacgctcagacacctattaccagagccccacaggagacaggatccgaagcaaagttgagctgactcgatacctgggccctgcgtgtgatctcaccctctttgacttcaaacaaggcatcttgtgctatccagcccccaaggcccatcccgtggcggttgccagcaagaagcgaaagaagccttcaaggccagccaagactcggaaacgtcaggttggaccccagagtggtgaggtcaggaaggaggccccgagggatgagaccaaggctgacactgacacagccccagcttcattccctgctcctgggtgctgtgagaactgtggaatcagcttctcaggggatggcacccaaaggcagcggctcaaaacgttgtgcaaagactgtcgagcacagagaattgccttcaaccgggaacagagaatgtttaagcgtgtgggctgtggggagtgtgcagcctgccaggtaacagaagactgtggggcctgctccacctgcctcctgcagctgccccatgatgtggcatcggggctgttctgcaagtgtgaacggagacgctgcctccggattgtggaaaggagccgagggtgtggagtatgccggggctgtcagacccaagaggattgtggccattgccccatctgccttcgccctccccgccctggtctcaggcgccagtggaaatgtgtccagcgacgttgcctacggcaccttgctcaccgtctgcgtcgccgtcatcagagatgtcagcgacgcactcccctggctgtggctcccccaactggtaaacatgcccgccgcaagggaggctgtgactccaagatggctgccaggcggcgccccggagcccagccactgcctccaccacccccatcacagtccccagagcccacagagccgcaccccagagccctggccccctcgccacctgccgagttcatctattactgtgtagacgaggacgagctacagccctacacgaaccgccggcagaaccgcaagtgcggggcctgtgcagcctgcctacggcggatggactgtggccgctgcgacttctgctgcgacaagcccaaattcgggggcagcaaccagaagcgccagaagtgtcgttggcgccaatgcctgcagtttgccatgaagcggctgctgcccagtgtctggtcagagtctgaggatggggcaggatcgcccccaccttaccgtcgtcgaaagaggcccagctctgcccgacggcaccatcttggccctaccttgaagcccaccttggctacacgcacagcccaaccagaccatacccaggctccaacgaagcaggaagcaggtggtggctttgtgctgcccccgcctgggcactgaaccttgtgttttttacgggaagggcgcaagcagtcctgtgcaggtgccgggccctgttgcagcttccacagaagccctgttgcaggaggcccagtgctctggcctgagttgggttgtggccttaccccaggtgaagcaagagaaggcggatacccaggacgagtggacaccaggcacagctgtcctgacttctcccgtattggtgcctggctgccctagcaaggcagtagacccaggcctgccttctgtgaagcaagagccacctgacccagaggaggacaaggaggagaacaaggatgattctgcctccaaattggccccagaggaagaggcaggaggggctggcacacccgtgatcacggagattttcagcctgggtggaacccgcttccgagatacagcagtctggttgccaagtctgcagggcaggcactcgggaagggaagatggatgtaaagtgtgggagaccgaggacacagtggagcccacgagcacgagctggaacccac

SEQ ID NO: 2908 - DNA, 2453 bp, Homo sapiens
  SIMILAR (322)..(1506): 891254mologous to Homo sapiens methyl-CpG binding protein splice variant 3,accession number AF078832,Smith-Waterman Score= 1939.
tttgtgtgatactccccccggccgcggaggaggaggaaggggaggagggcgaggcgggaggttgcaggagggaccctcgttcatgggtccacgaggcctagagtggcggaagataccggcctggttgcctaactggctactgctgcttcctgtggcctccatggctgaagacatggctgtactgcccggccctgggccctggctggaagcgccgcgaattctttcgcaagtcaagggccacctgtggacgcttaaacacctattaccagagccccacaggagacaggatccttagcaaagttgagctgactcgatacctggggccctgcgtgtgatctcaccctcttcgacttcaaacaaggcatcttgttgctatccaagcccccaaaggcccatcccgttgggcggtttgccaggcaagaagcgaaagaagcctttcaaggccagccaagacttcggaaacgtcaggttggaccccagagtggtgaggtcaggaaggaggccccgagggatgagaccaaggctgacactgacacagccccagcttcattccctgctcctgggtgctgtgagaactgtggaatcagcttctcaggggatggcacccaaaggcagcggctcaaaacgttgtgcaaagactgtcgagcacagagaattgccttcaaccgggaacagagaatgtttaagcgtgtgggctgtggggagtgtgcagcctgccaggtaacagaagactgtggggcctgctccacctgcctcctgcagctgccccatgatgtggcatcggggctgttctgcaagtgtgaacggagacgctgtctccggattgtggaaaggagccgagggtgtggagtatgccggggctgtcagacccaagaggattgtggccattgccccatctgccttcgccctccccgccctggtctcaggcgccagtggaaatgtgtccagcgacgttgcctacggggtaaacatgcccgccgcaagggaggctgtgactccaagatggctgccaggcggcgccccggagcccagccactgcctccaccacccccatcacagtccccagagcccacagagccgcaccccagagccctggccccctcgccacctgccgagttcatctattactgtgtagacgaggacgagctaaagcggctgctgcccagtgtctggtcagagtctgaggatggggcaggatcgcccccaccttaccgtcgtcgaaagaggcccagctctgcccgacggcaccatcttggccctaccttgaagcccaccttggctacacgcacagcccaaccagaccatacccaggctccaacgaagcaggaagcaggtggtggctttgtgctgcccccgcctggcactgaccttgtgtttttacgggaaggcgcaagcagtcctgtgcaggtgccgggccctgttgcagcttccacagaagccctgttgcaggcagtagacccaggcctgccttctgtgaagcaagagccacctgacccagaggaggacaaggaggagaacaaggatgattctgcctccaaattggccccagaggaagaggcaggaggggctggcacacccgtgatcacggagattttcagcctgggtggaacccgcttccgagatacagcagtctggttgccaaggtccaaagaccttaaaaaacctggagctagaaagcagtagactggaggcttctacagactgtaggattcaaggtgatatttgcagactggctttatgagagacaacactgatctactaggggctggaccctagattggttgccagggcttgtgtgtgaatcaaccctaggaggaaaaacctactaccaaaccgagaagagcaggcctaagagtacttttgagcttctagaagaagtaagcgggaaaggaagagaaagagtagaaagttggtgcatcttctcctccccaagagcctgagtataagaagttggaattttaagggtgggggagctgggttggagaaaggtaatataattaaagccaccacaaaacaacctaaacaagccatgttcatgagtaattgtaacgtggcttctggatgagacctggcagtgtctctacatacttcctcagggagatagcaatcgcaaaatgtaattgaataaataagagaaaggaactgatatttggtgtgttcctctgtggacccagtttatttaatccttaaaaataatatttttgggaagacattgattttgtccatttaaggtgaatgggaaaactaagactcattaatttgtccaatgtcgaacagctggtgttagtagagcctagactcaaacccagcttttaaagcccttgttctttactccactaaactgtaacctgtaatcctgtatgcactaacaggagtttggggtgaccttgaaaccaaaaaaaaacaaaattactataataaatcccttacattcctgtctctagcatggttta

SEQ ID NO: 2909 - DNA, 1511 bp, Homo sapiens
  SIMILAR (812)..(615): 601254mologous to Homo sapiens Human mammastatin amino acid sequence,accession number AAY23756,Smith-Waterman Score=164.
  misc_feature (1)...(1511): n = a,t,c or g
cttcttttttttttttttctttacaaacccttgtgtcgagggctgactttcaatagatcgcagcgagggagctgctctgctacgtacgaaaccccgacccagaagcaggtcgtctacgaatggtttagcgccaggttcccccacgaacgtgcggtgcgtgacgggcgagggggcggccgcctttccggccgcgccccgtttcccaggacgaagggcactccggagcggaccctttgtcccggcgcgcggcggggcacgcgccctcccgcgcgcgcggggcgcgtggagggggggggggccggcccgccggcggggacaggcgggggaccggctaatccgaggccaaaccgaggctccgcggcgctgccgtattacgttccgcctgggcgggattcatgacttagaggcgttcagtcataatcccacaagatggtaactttcgcccccattgggctcctcaancccaagcacattacaccaaatgtctgaacccttgcggttccttctcgtactgggagcaggattacccattggcaacaacgacatcatcagttaggggtaaaactaaccctgtcttaccaacgggtctaaacccagcttcacgttcctttttagtttgggggtgaacaattcaaacgctttgggtggaatttctgctttcacaatgatagggggaagagcccgacatcgaagggatcaaaagcgcgaacgtcggctatgaaacgcttggccgccacaagccagttatccctgtggtaacttttctgacacctcctgcttaaaacccaaaaggtcagaaggatcgtgaggccccgctttcacggtctgtattcgtactgaaaatcaagatcaagcgagcttttgcccttctgctccacgggaggtttctgtcctccctgagctcgccttatgacacctgcgttaccgtttgacaggtgtaccgccccagtcaaactccccacctggcactgtccccggagcgggtcgcgcccggccggctcgcgggcggacgcttggcgccagaagcgagagcccctcggggctcgcccccccgcctcaccgggtcagcgaaaaaacgatcagagtaatggtatttcacccgggggcccgcagggccggcgggaccccgccccgggcccctcgcggggacaccgggggggcgccgggggcctcccacttattctacacctctcatgtctcttcaccgtgccagactagagtcaagctcaacagggtcttcttttcccgctgattccgccaagcccgttcccttggctgtggtttcgctggatagtaggtagggacagtgggaatctcgttcatccattcatgcgcgtcactaattagannnnnnnnnnnnnnnnnnnnnnnnnnnnnnnnnnnnnnntcccgccgtttacccgcgcttcattgaatttcttcactttgacattcagagcactgggcagaaatcacatcgcgtcaacacccgccgcgggctttcgcgatgctttgttttaattaaacagtcg

SEQ ID NO: 2910 - DNA, 391 bp, Homo sapiens
  SIMILAR (1)..(180): 761254mologous to Homo sapiens CGI-79 protein,accession number AF151837,Smith-Waterman Score=239.
agccctttaaataaggtgcagctgatcaacgagctgaatgaacgagaggtccagcttggggtggccaataaggtgtcctggcactcagagtacaaggacagcgcatggatcttcctgggagggcttccttatgacctgacttaaaggggacatcatctgtgtgttctcacaaccagaggagcacaattgtggccgtcgacaattttaatgggatcaagatcaaaggaagaactatccgagtggatcatgtgtctaactatcgggctcctaaggactcagaagaaatagatgatgtgaccagacaactccaggagaagggctgtggggctcgtaccccctcaccaagtttgtctgagagctctgaagatgaaaaaccaacaaaaaagcccaa

SEQ ID NO: 2911 - DNA, 399 bp, Homo sapiens
  misc_feature (1)...(399): n = a,t,c or g
gctcgtaccccctcaccaagtttgtctgagagctctgaagatgaaaaaccaacaaaaaagcacaaaaaaggtaaagcattaagacttaagagaagattctgggtggtcttaatgtctgctcttccttgcattcactgatagttgataatcaactcaagtgtgaaaggggaaggtgtggggaagcatagtttaattgggaaagcagggagtatcagtggaaggctggtgcnnnnnnnnnnnnnnnnnnnnnnnnnnnnnnnnnnnnnnnnnnnnnnnnnnnnnnnnnnnnnnnnnnnnnnnnnnnnnnnnnnnnnnnnnnnnnnnnnnnnnnnctcaggatgggaattaccttgtacagccactcgacatatcaaaggtgacagacatccaagttggctt

SEQ ID NO: 2912 - DNA, 452 bp, Homo sapiens
  SIMILAR (63)..(236): 1001254mologous to Homo sapiens RNA-binding protein,accession number AF078865,Smith-Waterman Score=307.
atccttaattaaattaatccccccccccccctttcctgagtgctgagcgcgaacccgaggagatgaaccctttaactaaggtgaagctgatcaacgagctgaatgaacgagaggtccagcttggggtggccgataaggtgtcctggcactccgagtacaaggacagcgcctggatcttcctgggagggcttccttatgaactgactgaaggggacatcatctgtgtgttctcacagtaagtgtcctttcatttcctgcctcctgagtcgacagagtactttgtttctgtaatacattttgtggcatcacaaaaaccacttattttcactctaggctgaatggcatccctgcatggggagggctggagcttctgttctagatcagtcccaggacatggttctagaatgttctgtgggagatccaagaggtttgttaatttgggagggcatctt

SEQ ID NO: 2913 - DNA, 1426 bp, Homo sapiens
  SIMILAR (254)..(730): 971254mologous to Homo sapiens CGI-79 protein,accession number AF151837,Smith-Waterman Score=818.
tgattcctgagtgctgattgcgaaccctaggtgatgaagtttggcgtcagctttcttttgaggaaggagcagcgggccactgggggtggtccaccgggactggtgtggtacagcgtctgcggggccgacgggcggtagcggcgcggcgactggaacagctcgtcccctagttttgctcttcctcagctccggccggatcgcacttacttggctgcttttctgcctaccctgcccaccccccccgccaccgtgaagtcctttaactagggtgaagctgatcaacgagctgaatgaacgagaggtccagcttggggtggccgataaggtgttctggcactccgagtacaaggacagcgcctggatcttcctgggagggcttccttatgaactgactgaaggggacatcatctgtgtgttctcacaatatggggagattgttaacattaatctcgtgcgggacaagaaaactgggaaatccaaaggattctgtttcctctgctatgaagaccagaggagcacaattctggccgtcgacaattttaatgggatcaagatcaatggaagaactattcgagtggatcatgtgtctaactatcgggctcctaaggactcagaagaaatagatgatgtgaccagacaactccaggagaagggctgtggggctcgtaccccctcaccaagtttgtctgagagctctgaagatgaaaaaccaacaaaaaagcacaaaaaagcacctcagaatgcgactgtatttggagataaggtctttgaagaggtaactcaggatgggaattaccttgtacagccactcgacatatcaaaggtgacagacatccaagttggcttctcggaggcactctcctggaggcctagacagtggctgcttcatgctgctgccaaggttgttctccttatgcacattccccacttcctagcatacaaaaaggaaaaaaagaaaaaaaagaaagaaaaagagaaagccgaccgggaggtacaggcagagcaaccatcctcttcgtcacccagacgcaagacagtaaaggaaaaggatgacactggccctaagaagcacagcagcaagaactcagagagagctcagaagtcagagcccagggaggggcagaagctccccaaatccaggacggcctactctggtggagcagaggacctagagagggagctgaagaaggagaaacccaagcacgagcacaagtcctcaagcaggagggaggcaagagaagaaaagaccaggattagggacagagggcggagctcagatgcacattctagctggtataatgggcgttctgaagggcgtagttatagaagtagaagtaggagccgagataaatcccataggcataaaagggcccgacgctcccgggagcgggagtcttcgaatcccagtgaccgttggcgtcactga

SEQ ID NO: 2914 - DNA, 1836 bp, Homo sapiens
  SIMILAR (38)..(979): 511254mologous to Homo sapiens CGI-79 protein,accession number AF151837,Smith-Waterman Score=640.
gcgctgattcctgagtgctgagcgcgaacccgaggagatgaaccctttaactaaggtgaagctgatcaacgagctgaatgaacgagaggtccagcttggggtggccgataaggtgtcctggcactccgagtacaaggacagcgccctggatctccttggggagggcttccttatgaactgactgaagggggacatcatctgtgtgttctcacaatatggggagattgttaacattaatctcgtgcgggaccaagaaaactgggaaatcccaaaggattctgtttcctctgctatgaagaccagaggagcacaattctggccgtcgacaattttaatgggatcaagatcaaaggaagaactatccgagtggatcatgtgtctcaactatcgggctcctaaggactcagaagacatagatgatgtgacccgacaactccaggagaagggctctggggctcgtcccccctcaccaactttgtctgagagctctgaagatgaaaaacccacaaaaaagcacaaaaaagacaaaaaaggaaaaaaagaaaaaaaagaaagaaaaagagaaagccgaccgggaggtacaggcagagcaaccatcctcttcgtcacccagacgcaagacagtaaaggaaaaggatgacactggccctaagaagcacagcagcaagaactcagagagagctcagaagtcagagcccagggaggggcagaagctccccaaatccaggacggcctactctggtggagcagaggacctagagagggagctgaagaaggagaaacccaagcacgagcacaagtcctcaagcaggagggaggcaagagaagaaaagaccaggattagggacagagggcggagctcagatgcacattctagctggtattattggcgttcttgaagggcgtagttatagaagtagaagtaggagccgagataaatcccataggcataaaagggcccgacgctcccgggagcgggagttcttcgaatcccagtgaccgttggcgtcactgaagacttcagctgcacagtagatttggaaataattatgtttttttaaatgcagacaaattcaggtgggggggtactatttttgtatctaaaactttctgggggcctgggattcttttaaatcccctggactatttagagtcattgggagggctgcagtttcaacagctagatatcctggatattgtttgcaccatcccattgtccctgtaccagagtatgtatcctgaactttggttcataaatatggctcttgaacccatagaccccagttgaagatggaattttcaggaaagggaaaatactagataattctagaattctagtcttcgtgttagatgtttatagcccagcatcttgggacctttccagttactaggtttggacagcttgatgtgaacgaatgggataggatttttaaaatcaagccagctccatgcccaaaccttccctgtttgcagaactttttaatgtcttttctttttccattaaaacttttttgttcgatatgcctctttccacattttttccttgcaatgtatttattatttatttgtatttaggtgaaattcacataacataaagttaaccattttaaagggaacaattcagtggcatttggtactgaacatccacagtgttgtgtaaccattgcctctgtctagttccaaaacatttttttatcatcccaaaatgaaaccctgtagccattaaacaagagctccccgtttcctccctcctccctgtccctagcaaccaccagtggacttcctgtttatgggtttgcctattctggatctttcataaaaatggaattacacaaa

SEQ ID NO: 2915 - DNA, 418 bp, Homo sapiens
ctactactactaaattcgcggccgcgtcgacgttgccttctctcatgtcatgcctgtatgtatacacagacacatatgaaatgcatataggcatgcttggtatgtgtatatgcatatacagagaaagaaatgttttaactacttggaaagactaccttaagacaaatgaagtcttccctcttccctatagtaataagaaggtaggctccccattcaattttgcaatcttctgctactatatttacagaaaagctgccttttacaatgccgagatcatggtgtacctcagaatctctgaccaagagcaaataagcattttttcttattgtttttcagtatgttgcaagagaaagagagagagtttcaagaagtgtaattgtggcttgtatcaacactgttactttcgtacattggtaag

SEQ ID NO: 2916 - DNA, 996 bp, Homo sapiens
  SIMILAR (1)..(621): 991254mologous to Plasmid F Protein A,accession number M12987,Smith-Waterman Score=1087.
atgcgtgatttgtttggtacgcgattgcgacgtgctgaagacgtatttccaccggtgatcggggttgctgcccataaaggtggcgtttacaaaacctcagtttctgttcatcttgctcaggatctggctctgaaggggctacgtgttttgctcgtggaaggtaacgacccccagggaacagcctcaatgtatcacggatgggtaccagatcttcatattcatgcagaagacactctcctgcctttctatcttggggaaaaggacgatgtcacttatgcaataaagcccacttgctggccggggcttgacattattccttcctgtctggctctgcaccgtattgaaactgagttaatgggcaaatttgatgaaggtaaactgcccaccgatccacacctgatgctccgactggccattgaaactgttgctcatgactatgatgtcatagttattgacagcgcgcctaacctgggtatcggcacgattaatgtcgtatgtgctgctgatgtgctgattgttcccacgcctgctgagttgtttgactacacctccgcactgcagtttttcgatatgcttcgtgatctgctcaagaacgttgatcttaaagggttcgagcctgatgatctaaaaaaatcattcaagagcccagaacccaggctctttactcctgaagaattctttagaatttttaatagatccattgatgccttcaaggactttgtagtggcatctgaaactagtgattgtgtggtttcttcaacattaagtcctgagaaagttctcagggcctcatggaaaagagactcggataattctcttaaatcattatccccaacacaaatccggctgggcgaggtgctcacgcctgtaatgtcagcattttgggaggccgaggtctggaattctggtgattctgatgacatggctctagattttgattgcacatcctcagaggtagatgctgaaagcacaaacagaaaggtacttcgtccctag

SEQ ID NO: 2917 - DNA, 3985 bp, Homo sapiens
  SIMILAR (1296)..(1415): 971254mologous to Homo sapiens Human Stem Cell Factor from 5637 bladder carcinoma line,accession number AAR11712,Smith- Waterman Score=206.
  misc_feature (1)...(3985): n = a,t,c or g
cgccctcccgattcttccctccgcgcccttgcctgcttctcgcctaccccgggctccgaaagggaaggaggcgtgtccggagcaggcgggcgggaactgtataaaagcgccggcggctcagcagccgggcttcgctcgccgcctcgcgccgagactagaagcgctgcgggaagcagggacagtggagagggcgctgcgctcgggctacccaatgcgtggactatctgccgccgctgttcgtgcaatatgctggagctccagaacagctaaacggagtcgccacaccactgtttgtgctggatcgcagcgctgcctttccttatgaagaagacacaagtgagtagggcgcgcccgggagctcccaggctctccaggaaaaatcgcgcccggtgccccggggaagccggcgctccctgggacttgcagctggggcgtgcagggctgtgcctgccgggtgnnnnnnnnnnnnnnnnnnnnnnnnnnnnnnnnnnnnnnnnnnnnnnnnnnnnnnnnnnnnagatactacaaagataaatcagttgcacaagttcttgaaactctacagtgtaataaggaaaaataagtcatgcataaaagcaactataatacataatagaaaatgttattttcaagccgatgtgtaggttatgtgtgttcgagagagagagagagaagacagattactttctgctagggttcaagaatggcttcctgttgggtaagaaaatattttccttaagtggctaaaaagctgtgtttcaaaatattcttttgatgtctcacaaattcagtggaattctcttaggtctaaaaatatacatctctctcactttaacttggtgtgctattgtagattattggattaaagcactgctcagggattatgctgcttcttgccaagcagtctacatttaaagtagaaataagatgtttcttttggtgccataaggtatacattttatgcattctctagtttttagaagataccctaagggctaagtctttaacatgctgctacaagtttattcctaattgccattgggaaattggctgaagaaagtttttaacaaaagttaacaatattgtcattgagagaataattcaaaatggattttaactaaaagcttttaaaaactttggtgagcatagcttgaatgcgtaatatttaattgcatttaagccaataacatatattagactggtctttttgtgcatcaaggcattagatgttaaaagtttgaatgattacagatcttaactgatgatcaccaagcaatttttctgttttcatttagacttggattctcacttgcatttatcttcagctgctcctatttaatcctctcgtcaaaactgaagggatctgcaggaatcgtgtgactaataatgtaaaagacgtcactaaattggtaagtaaggaatgctttaccgtgctgtgtaaaaaagagctgtggctctttttcctgtgcttgttgataaaagatttagatttttcttgccccaaagtaatgttttcctaaagtggggaaagtaatcactgggtcatggataagggtttatagaaagcaggtagtgagatatttagggtcatggataatttgttggtaaaactggctagttgcacaccactgctgtgactgcttctttgctggtcttctccccatccttcataggcagtgaaggaccttggagagttcgctgtgtgctgatgggcttgccccagcttgttccccataatctctccagtgggtttcccagcatgttctattccccttcagaaatggctattctcccaattcaatcagcaggaagaccctgtcacatgtcagtgggtgtttgctccttcagggaacatagagaggtgattcattgcccacatgttgaagggactcatctccctggtttgtcacattgaactcttccctcaagcgaaagcatttgcattgcttcccnnnnnnnnnnnnnnnnnnnnnnnnnnnnnnnnnnnnnnnnnnnnnnnnnnnnnnnnnnnngaattccaagatcacaggtggaagctgaaattcagatcatgtttccaaaactcagtaggttatacctagccaggcataactgaatttggagtctaaaagatctgtattatcacttttttattttgaaggatgccttttgattacagagggaaatcaaggattaaaaatcaatatacatgtaaatattgaaattcattggtaactttaaaaagcacaacagttttgtgtgcttttctccaaagcactacaaatatgattaattgatgtataagaattttcttatggaatttttttttttgtctctgtaggtggcaaatcttccaaaagactacatgataaccctcaaatatgtccccgggatggatgttttggtatgtaaactacatttctgagtttcattttagtagctcatagaagaaatgggatcattcatattgagatagtacactagctgctatttaggagcttgcttattgtcaggatttgaagaatttatctttggaatttgacttgcaggcttttttttccccctcttnnnnnnnnnnnnnnnnnnnnnnnnnnnnnnnnnnnnnnnnnnnnnnnnnnnnnnnnnnnncctgttacaagagtccctcctcctattacaatagtccctcctcctcctgtcacactagtcccttctcttcctgttacaataacccctgtcctcctattacaacattttaagtaatgtaatattaattttaaaaatctggccaggcacggtggttcatgcttgtaatcccagcacattgggaagctgagacgggtggatcatttgaggtcaggaagtttgagacagcctggccaacatggtgaaacttcctctctactaaaaataaaaaagtagccaggcatggtggcaggcacttgtaatctgagctactcgagaggctgaggcaggagaatcacttgagtaactaaaacgatagctttgaagagtactccgagttttatggcacttacttattaaaatagctgttttgtctcttttttcatatcttgcagccaagtcattgttggataagcgagatggtagtacaattgtcaagacagcttgactgatcttctggacaagttttcaaatatttctgaaggcttgagtaattattccatcatagacaaacttgtgaatatagtggatgaccttgtggagtgcgtgaaagaaaactcatctaaggatctaaaaaaatcattcaagagcccagaacccaggctctttactcctgaagaattctttagaatttttaatagatccattgatgccttcaaggactttgtagtggcatctgaaactagtgattgtgtggtttcttcaacattaagtcctgagaaagggaaggccaaaaatccccctggagactccagcctacactgggcagccatggcattgccagcattgttttctcttataattggctttgcttttggagccttatactggaagaagagacagccaagtcttacaagggcagttgaaaatatacaaattaatgaagaggataatgagataagtatgttgcaagagaaagagagagagtttcaagaagtgtaaattgtggcttgtatcaacactgttactttcgtacattggctggtaacagttcatgtttgcttcataaatgaagcagctttaaacaaattcatattctgtctggagtgacagaccacatctttatctgttcttgctacccatgactttatatggatgattcagaaattggaacagaatgttttactgtgaaactggcactgaattaatcatctataaagaagaacttgcatggagcaggactctattttaaggactgcgggacttgggtctcatttagaacttgcagctgatgttggaagagaaagcacgtgtctcagactgcatgtaccatttgcatggctccagaaatgtctaaatgctgaaaaaacacctagctttattcttcagatacaaactgcag

SEQ ID NO: 2918 - DNA, 1196 bp, Homo sapiens
  SIMILAR (879)..(1193): 1001254mologous to Homo sapiens A human interleukin (IL) 173 polypeptide,accession number AAB07595,Smith-Waterman Score=570.
atagtggccagaactatagtgccagtagtaaaggtgaacgactaagtgccagactcagagctttacctgggacaaatgaaccttatgaaagtagcagtaacaaagaaataggcaagtactctccacccagttcctccaggcatagcaggtctgaagaagaatgcacaggccctgagcgcgcgaccccaggccctgggcgccccgccgcatgctcgcggctggaagccccagtttgcgtggcccttcgggttattccgctcaagagccgccgcgtcgccccatctcggcgcgaatctgaaagcgctttcgggggagaagatgttgggggcactggcaggatctgggagccgagggaggttatggatgagaatgacacacagggttcggggatcgtggtctgggccacccagatctgcccacatgtggaacctcagtgctgggtggtcccaggagcaggagtggcagctgcagcagggtggctgaaggtgtcatgtgcatcatttttcatattatttagcaacagtgatgagatcactccccatgggcaaacggaggctctggggcttcctgaagaggcactgcagacatctggatggattttcagagttcctgcgactccatggctggtttgtgctcctggtgaggagcccagacctggaaagatgaaggtattggccccagctcagtttccatcacctctaatcatccctggaggactcgtcctttgttcctggattaagccgggccacctgtcactcgctcaagccaagcttcccacgtggccagggacacttctgcgatcccatcagaggggaaaacttgatgtgtttcaagaatgccctggtgccaagcttctgcagagcagcacgcagaaaataatctcctacgacccggcgaggtaccccaggtacctgcctgaagcctactgcctgtgccggggctgcctgaccgggctgttcggcgaggaggacgtgcgcttccgcagcgcccctgtctacatgcccaccgtcgtcctgcgccgcacccccgcctgcgccggcggccgttccgtctacaccgaggcctacgtcaccatccccgtgggctgcacctgcgtccccgagccggagaaggacgcagacagcatcaactccagcatcgacaaacagggcgccaagctcctgctgggccccaacgacgcgcccgctggcccctga

SEQ ID NO: 2919 - DNA, 466 bp, Homo sapiens
  SIMILAR (464)..(297): 1001254mologous to Homo sapiens Unknown (protein for MGC:3103),accession number BC000207,Smith-Waterman Score=302.
ttttttttttttgaggtgtccccaacaattttattataaataaaaacaagactcccagtgggtggctgcagcccctgcctcggtggctgtgagcacctgttggaggggcctgccattaccctggtctggaggccagaaccgaggaaagggctccctgcccctccaagtacacaggggagcctgaggtactgagaattaaaaaccagggagggactcccaggccaggcggcggccccgggccctctgccccacgaggctcattcctttggagcacacaggaagctgcccgtccatcacaccacactctcttccagccgctcggcgctgcctcctaccccccggcaccctgccccgagcagccccccatgcacagagtggctccgtcgggcccaagctcctcccaggcgcctggcataaccgtagcacccggcatctcccaggtccagagagcagctgcgctgcggcc

SEQ ID NO: 2920 - DNA, 865 bp, Homo sapiens
  misc_feature (1)...(865): n = a,t,c or g
ctccaacatcgtcgtcatagaccaagagatgcccatgaacagccatgaaagtgccagtcaagggaagtattcagtgctttgttgtagagttgttggatagaggcacaggatcatttcatgttgttgaggagaaaggagcaacagcctcctcccaccttattaaaaatagagatttaaaaaaaacctctaatttcctcgaagtacagaatctcaagaggtagctctaaggagaatccctctgggttttgagcgcaattccttctttccaggggggccttaattcttggaactgcttttcctttaaatagagaaaatctctctggagccaaaaaatcggccttccccccaaattcccaatcttgtcggcccccactttttcttgttccgggagacttccaaagccaagtccccaacttccttcctttcaagccaagttcgggcccgnacccggcggccggcaagggccagcccttctccttccttcctgcgtggcgcagcacaggccctgagcgcgcgaccccaggccctgggcgccccgccgcatgctcggcgctggaagccccgagtttgcgtggcccttcgggttattccgctcaagagccgccgcgtcgccccatctcggcgcgaatctgaaagcgctttcgggggagaagatgttgggggcactggtgagtacactgcacaagtgacaaaatgttttcagctcctggaggcgaaaggtgcagagtcgctctgtgtccgtgagccgggcgcgacctcgctcagtcggcttctcggtccgagtccccgggtacgaggaaagaccacagggggttctcgcggaaaagcgggccgcggaccctgcgcgggctggctggcgacgagg

SEQ ID NO: 2921 - DNA, 1717 bp, Homo sapiens
cagtatgcataagacccatggtctccaatcagccacatggtcaagggcatgaataattaaaagttggtgggaactcacaaagaccctcagagctgaggcgcccactccagtgggagctcacaaagaccctcagagctgagacacccacaacagtgggagctcacaaagaccctcagagctgagacacccacaacagcacctcgttcagctgccacatgtgtgaataaggatgcaatgtccagaagtgttggctgccctcccaagtgacaggtaacacttgcagaacctatctgaggacctgcccagcctcccgtttcaacgcagcccactctgctgctctacaaagtttcacatcaggggtcagcggctttgtaaaggggactccgcaggaacacagctgtgctggggctgctgctgctgtactgcggccagcagagctgagtgggacagtatttaccatctctggtccttttacagaacaagactgctgactcctcctcaatggacaaagacaaaaactcctgcctcctcgagactccttccttagaaaaatagcagatttttctctctgtgactgataaataattctgctaccaagactttctgaaggaaatcttcattttggggcttagataaaagaagaagaggtgcaagttttagccagaagtgagaagccataaggataacaagtagtcccagatcccaagaaccccaagaacaactcagggctttcatcccttaaatcctccataggatatctgtgattgtacaaaggcaaaggctagagacaaatgttaggagactataagaaatatttttaaaagttttccccttaaaacaatgtataaatgttaaggaagtaagcacacaaggaacagaatcattcctctgttcagcagtgtctcctgaagagtaggaatgaaatgaccatgacctcctgtgtgtcaaaagatgatgctactgacatgtcacaaattaggtctcactgattaatttacaagttctcaggcaaagtctagagcaggtaactgaaaccttcacgtcttattttaaaccatcctgtcaactcccacttcccctatcagggctatgaaatggactgagttgaggttcctctcctgtctgcccgcagggaggcagcactatctgctccccgccaccccaccgtgctccgtccgaggcgtgcacggcaaaccctcaacagtgccaccggctgccccttctccaacctcagcccagtctcaccagcctgcttctcacccactatcatctccaacctttctctttgaacccatcaaggatgccggcacacatgcctctctcttctcaagagacagacatctccccttccctacctgccacattcgtagaccacctcagccctgcctctccccaccacactgttctcaggggagcagaacaggaagagctgttacagcagctctgcgcatggcagcagcagcagctatgacaggaaaccaatccccaacacgcatttaatctgtcggggccaattcagcattcaagtatgaacttccgtgtttgccacttcatgtcagggcatgagacaaagtttcctctgagcttgaaattcaagtgaattttaacaaagtccctaccaatattctaactgtcaagaatacaggtatccaacgacataaaggtcacagaatatgtccaactacctaattcctaattttagaaagtttaaaataag

SEQ ID NO: 2922 - DNA, 872 bp, Homo sapiens
  SIMILAR (166)..(585): 721254mologous to Homo sapiens alternatively spliced product of metastasis-suppressor gene CC3,accession number AF092095,Smith- Waterman Score=439.
  misc_feature (1)...(872): n = a,t,c or g
ccgggtagcgctcgtctccgtcgcctccaacccccccggtccgaccagggaaggtgggatgctctgatggccgggctgcgngctgagcggcnggcggcggctgctctggcggccgcatcgctcctgctgcgtcgtgaggacccggggccgggggctggccccagcatggccgaaacagaagccctgtcgaagcttcgggaagacttcaggatgcagaataaatccgtctttattttgggcgccagcggagaaaccggcagaagtgctcttaaaggaaatcctggaagcagggcctgttttccaaagtcacgctcattgggccggaggaagctcaccttcgacgaggaagcttataaaaatgtgaatcaagaagtgggtggacttttgaaaagtttggatgactacgcctctgcctttcaaggtcatgattttgggattctgtttgcctggggtaccaccaggaggggaaagctgggggcggttaagggaagggcatatgcttctttttcccnttttttgcttggcccagtaatatcaagggttcttttcttgctcactctttttctttgtgcctgttgcaatgcttaaatgtgaataagcctttattgtttaagattctatatgctgcactaacctttggtatccttttaatagtactgataagttcgtctttcaaagttaatccttgagttcaggccccagtgccggagacgtcgtaaatatttacatgattttgcctattgtgattatcgctatcactacatcccctgactaagggaaaccatgatgtctgagtaaaactaattggtttatgctgttaacaatcagctgtttttccccttaataaatgtttgaaatttgaaaaaaaaaaa

SEQ ID NO: 2923 - DNA, 526 bp, Homo sapiens
acttccttgttcatctgttcattcattcattcttctatgcattggttagttcatggaatatctcactctttcattcattcatgtccttctgcaatgattcattcactgctttgttcatctgttcattcactcattcttctatgcattgatgaaatcactcattcagtgatttattcatctatactcatgcttcaatgcattgatttactcatttcctcatgcatttattcattcatctatgcattggttaaatcactggccaactcactaactcattcattcattcacacttttctgcaatgatttgttcacttgttcactcccttgcttatctgttcattcactcattcttcaatacattgaccaagccattcactgacatttattcagctacatttattctttcatgcattggtttctggatttatttggtcattcatttatttattttgcaaaattaatgtatttttaattgacaaataaaaactgtatatattttcatgtgcaacataaaaaaaaaaaaaaa

SEQ ID NO: 2924 - DNA, 1871 bp, Homo sapiens
  SIMILAR (383)..(457): 841254mologous to Homo sapiens Tat-interacting protein (30kD),accession number BC002439,Smith-Waterman Score=99.
gcggccgccctgctcctgctgcgtcgtgaggacccggggccgggggctggccccaggtaacccctccgcgtatgggaccgagctgggccaggtctcctggccgggccggggataccgtggggtatgcccagtgatgccagcagcttgtggcacctgggcgcaccctccagctcgggccccttccgatgggtctgctggctcaggtgcgggcgatggccggggagccgcgccccgcacgtgactcagcactttccccagagcccggactgcggagaacaatatcctcctccctaacagataaacagcccttgttcctcgggataaggactggcagtcccctgacaccctaaagaccggcatctgtcgatgttatttccccagcatggccgaaacagaagccctgtcgaagcttcgggaagacttcaggatgcagaataaatccggtctttattttgggcgccactgtagaaaccggcagagtgctcttaaaggaaatcctggagcagggcctgttttccaaagtcacgctcattggccggaggaagctcaccttcgacgaggaagcttataaaaatgtgaatcaagaagtggtggactttgaaaagttggatgactacgcctctgccttttcaaggtcatgatgttggattctgttgcctggggtaccaccagagggaaagctggggcggaagggatttgttccgtgttgaccgagattatgttgctgaagtctgcagagctggaaaaagctggagggtgcaaacatttcaacttgctatcctctaaaggagctgataaatcaagcaattttttatatctacaagttaagggagaagtagaagccaaggttgaagaattaaaatttgaatcgttactctgtatttaggcctggagttctgttatgtgataggcaagaatctcgcccaggtgaatggctggttagaaagttctttggctccttacccagactcttgggcccagggggcattctgtgcctgtggtgaccgtggttagagcaatgctgaaccaatgtggtgagaccaagagacaagcagatggaactgctggagaaccaaggccatccatggacctgggggaaagcggcatggctcttctcaaggccatgaccacactgggagaaatggtttttatttgttcaaccttaacacccatgaccaaatcgggtaattttcagggtcttaaaaaaagttcagcatgttttaactttgtttgttttactatcctcaggcatccattccaatcaagaaatgatggtgctctgcatcagtggttcagagccctggttatacatatagatcactcagggagctttggaaaaataaaagatttgtccagccctatcctcaaacttgaatcaaaatttctggggtgtgggcacaataatctgtaattttctttgtttatacttcccctgatgccactggttccgattccactggctgggggggcctgctttggaaatgctttgtcttgcagagttcacagccagccatggaaaaaccttatgaccgtggcaaaatgagctctgctcttaaaattgttgacattcatgtctctgagttacaaaagtgctaattcactacatgtaattgtgtaagtaaacattgtgcctttactacttctttatgtaatagaagttatatacctaaggcttatataatacatggggggagggtttaaattaaagggattaaaggtggatgggacaactcctgggtgcctcttagattgcttgaaaatgcccatgtagtgtgatatgcagcatttcagcctatggggtgatataatagcagctaataggctttattctgcaagcaatcaaataataaatctattctgctaagaggtcc

SEQ ID NO: 2925 - DNA, 488 bp, Homo sapiens
  SIMILAR (7)..(177): 931254mologous to Homo sapiens cytokeratin 8,accession number M34482,Smith-Waterman Score=249.
  misc_feature (1)...(488): n = a,t,c or g
tactaaattcgcggccgcgtcgacgcttacatgaacaaggtagagctggagtctcgcctggaagggctgaccgacgagatcaacttcctcaggcagctatatgaagaggagatccgggagctgcagtcccagatctcggacacatctgtggtgctgtccatggacaacagccgctcctccagggccgtggttgtgaagaagatcgagacacgtgatgggaagctggtgtctgagtcctctgacgtcctgcccaagtgaacagctgcggcagcccctcccagcctacccctcctgcgctgccccagagcctgggaaggaggccgctatgcatggtagcactgggaacaggagacccacctgaggctcaggcctagccctcagcccacctggggagtgtactacctggggacccgccttgcccatgcctncagctacaaaacaattcaattggttggttttgtgggtcgaaataaacctcggcttgctct

SEQ ID NO: 2926 - DNA, 473 bp, Homo sapiens
  SIMILAR (412)..(471): 801254mologous to Homo sapiens cytokeratin 8,accession number M34482,Smith-Waterman Score=71.
  misc_feature (1)...(473): n = a,t,c or g
agtgggtgnnaatggagacctagncagnctgtgagacattgaggagtgcgagagcatgcactaggatgatatcagaaagcatacagagatggagaatgaatttgccctcatcaagaaggatatggatgaagcttacaagaacaaggtagagctggagtctcacctggaagggcttactgaagagatcagcttcctcacgcaactgtatgaagaggagatccgggagctgcacgtcccagatctcggacacatctgtggtgctgtccattgacaacagtcgctccctggacatgaacagcatcatcgctgaggtcaaggcaccgtacgaggagatcgccaaccacaaccaggctgaggctgagagcatgagatcaaatatgaggagctgcagacgctggcttggaagcatgggatgacccgtggtgcacaaagactgagatctccaagatgaacaggaacatcagtcggctccc

SEQ ID NO: 2927 - DNA, 3636 bp, Homo sapiens
  SIMILAR (3618)..(2797): 821254mologous to Homo sapiens Keratin 8,accession number X74929,Smith-Waterman Score=1070.
tcatgatttggctctctgtttgtctgttattggtgtataggaatgcttgtgatttttgccgttgattttatatcctgagactttgctgaagttgcttatcaacgtaagaagatttaggactgagacaactgggttttctaaatatacaatcatgtcatctgcaaacagagacaatttgacttcttctttttctaattgaaaaccctttatttctgtctcttgcctgattgcctggccaaagcttccaatactatgcttctcttcctgctttatttcattaagatgatcctcaatctctgatatcctttcttctgcttgatcgatttggctattgatgcttgtgtatgcttcatgatgtcctcgtgctgtgtttttcagctctatcaggtcatttatattcttctctaaactggttattctagttagcaattcatctaaccttttttcaaatttcttagctttcttgcagtcaggcccctctgctgcaggtctgctggagtttgctggaggtccactccagaccctgtttgcctgggtatcaccagtggaggctgcagaacagcaaagattgctgcctgttccttcctctggaagctttgtcccagaggggcacctgccagatgccagccagagctctcccgttctcatcaaagtatccctttcttctatcaggcgagtcaaataatcatccaaaccttcttccaatacactgccatgggggccatccttttttccacttgcaatctctgtggaatcctggtattgtttttgctcttgttgccttaacctgttcaattcatttcttatatccaacaattcttgtcgctcggtttttactgtatctttttcctcagcggcaaggtaacgtagtctcatctgttccaattcttcctgctgttttttaagacgagccatttgactttcttgctccctctgtttaagtctggcaagttctttcaaagctcgtccccactgctgcttgtaatgcagtttagacttagttgcagattccaactttctttcaagttcaaccttttccaaggtgagaagatttatttcagactgtagacggatttctggtttgttgttttgctggtccttgaactgttggaactctttttccaaaatcttatacttattttcagcatcattaagctgttgctgaaggcggtgtttatcctcttcgagctgtttgatttttaacctttctagttctacttggtgaatacagtcctctttggccctacggatagagtcctgcagttcttgcaggttccgctgacgttctgattgcagttcctttttttctctttgaagctctgattccacactagcaagctgctgctctcgcttctccaagtcaattagagttttttgaagttttccttctagaatagtatattcaggcacctttttctttactagtgattctctttctcggtcccttttcttccattcctctgcaagagcctgcatatgagccagttctttctgcttcagctgattttcaaatatatcttcttgcatctccttccacatttctagctcaagtgctgctttgtattctaacgtttcacgaggctctgtctggatctctgaaggacaaggtgctggaggaagagaagacggcttttgctgtacggcagatacaccctgagatgaatcagagataaaaatctcacgcatttttactagtccataatcttctagagtcactgtgtaagaaagatctgctatcctgttatttgatctacaaataaaataagaaataccctgtgctgctataacaggcacactttcactgtaagtttgacgccaacactgttcaccattagaacctaaaaaacgagttttttctgaagacaagatgttagaaagctggattctcgcaattcccagaagtaaatctttactcattttatccttgtgccatagttcaaccagtaatggaatccttaagaaggtgtcttgcagctgatgaggcatagttgcaaaatcaaatgcacagtaagactggggaagaaaaacttccatgtttttccgaacttctacaggaggattagtcataataggagctgcacttccaaagaatggatatgagtaccttaatatacagttgattggaaaaccaatctccaaggcatgtatactccttaagtctattgaaaagcaaaaatgatgtgatgttgctggtacagcaatcttctgtcctgaagctacttctgaagcattggatgtagtcactagctgggccagtgaagcaggtacagaagaactggcttttggatttggtttggtgtccttatcatactgtaaactttccacttcactttctgttgcatcatcttttgttggaggtgactggttgtgagatggaacaggggacactgttggtgattttggcccagtaagtgtcttctcctttatgggggttaaaactttcttctttgaatgctctggctcatgttcattctgggtctttaattcaattaaagaagttggggctagctccacaggaataggtgcaagcttctgtttggctctgtttggagggtcaagggtaaaagcaccttcgactgtgactgggtgctggttgatttctgtactgccctttttaagtaatccagttaaaggtatttctgtacttccaagtgactggtctccacagcagaggtgaatctgttccaactgggtagcaaatgctatggtcactgacataataaaggagtcagtacagtattctgctggtccaatctgatggtagcctccctcttcattcagcacagccacaatgtccttgggcaggacgtcagaggactcggacaccagcttcccatcacgtgtctcgatcttcacaaccacggccctggagtagctggtgcggctgaaggagctggcgcccaggccgtagctgaggccggggcttgtgaggcccccacaggccgagctcagaccacttgcatagccgctggtggtcttcgtatgaatactcatgttctgcatcccagactccagccggctctcctcgccctccagcagcttcttgtaggtggcgatctcgatgtccagggccagcctgacgttcatcagctcgcagctgccacgccatgtcctgcttggcccgctgcagggcggcctccagctcgacaacttggcgttagcatccttaatggccagctctccacactgctcggcatctgcaatggcggcctccaggaaagccctctggcctttgaggccctcattctcagcctggagccggctgatgttccggttcatctcggagatcttagtctttgtgcaccgcaggttatccccatgcttcccagccagactctgcagctcctcatccttgatctggtacatgctctcagcctcggcctggctgcggttggcgatctcctcgtactgtgccttgacctcagcgatgacgctgttcatgtccagggagcggctgttgtccatggacagcaccacagatgtgtctgagatccaggactgcagctcccggatctcctcttcatacagctgcctgaggaagttgatctcatcagtcagcccttccaggcgagactccagctctaccttgttaatgtaagcttcatccacaatccttcttgatgaggacaaattcat

SEQ ID NO: 2928 - DNA, 3979 bp, Homo sapiens
  SIMILAR (209)..(892): 741254mologous to Homo sapiens nuclear pore complex protein,accession number AJ295745,Smith-Waterman Score=777.
cgcctgcgccaccggcgcacacctgtaggctgaagtcgcgcatgctagatgggaacgttgtttcttctcccctaccccttttctgtggggctgttttagggacagactgcttccgggtcgaagggcttgcttccggagagcgggaaggctaaaacgcggtagctacaactgcagccaactttggttgtgtgtggaaaaggctttagccatggacaggagtggctttggagagatatcatcccctgtaatccgggaggcagaggtgacacggactgcacggaaacagagtgctcagaaaagagttttacttcaggcatctcaagatgaaaattttggtaatactacaccaagaaaccaggttatccctccgaactcctagctcatttcgacagccttttacccccaacaagccgaagcttactaaggcagccagatatttcctgcattcttggaacaggagggaagtcgccccgacttacgcagtcttcagggttctttggaaatctctccatggttactaatctggatgacagtaactgggcagctgcattttcatcacagcgttcccgggctgttcacaaacacagagccccacagtataacagaagatgtaactatcagtgctgttatgttacgtgaggatgatcctggagaagctgcatccatgagtatgttttctgatttcctgcagtcttttctgaagcactcttcgagtacagtttttgatcttgtggaagagtatgaaaacatctgtggtagtcaggtgaatatactgagtaaaatagtgagtcgagcaacacctggacttcaaaaattttcaaaaacagccagtatgctctggcttcttcaacaggagatggtcacatggaggctgctggcttctttgtatagagtgacccagaagtccttcaaggtgtccaactctggcccaagggccttcagtagccattcctacatgtgtgggcccagtgcctgcatcagctcctcgagcttctcccgaatgggcagcagcagtttccggggtagcctgggtggagactttggcagggccagtggtaggggaggcatcaccccagtcacggtcaaccagagcctgctgagcccccttaacctggaggtggaccccaacatccaagctgtgtgcacccaggtgaaggagcagatcaagaccctcaacaacaagtttgcctccttcattgacaagctgtacactctgggccaagagaagctgaagctggaggtggaacttgataacatgcaggggctggtggaggacttcaagaacaagtacgaggatgatatcaaaaagcatacagagatggagaatgaatttgtcctcatcaagaaggatatggatgaagcttacaagaacaaggtagagctggagtctcacctggaagggcttactgaagagatcagcttcctcaggcaactgtatgaagaggagatccgggagctgcagtcccagatctcggacacatctgtggtgctgtccattgacaacagtcgctccctggacatgaacagcatcatcgctgagactgagatctccaagatgaacaggaacatcagtcggctccaggatgagattgagggcctcaaaggccagagggcttccctggaggctgccatcgcagatgctgagcagcatggggagctggcagttaaggatgccaacaccaagctgtccaagctggaggctgttaatgccagtgaaaaaacagttgtggaagcgttatttcagagggattcacttgttcgacaaagtcagctggtggtagattggttagagagtattgccaaagatgaaattggagaattttctgataatattgagttttatgcaaaatcagtatattgggaaaatactctgcataccttaaaacaacggcagctgacttcttacgttggaagtgttcgtccgcttgtcactgaattggaccctgatgctcccataagacagaaaatgccccttgatgatctggatagagaagatgaagttagattactcaaatatctctttactctaatccgtgctggaatgacagaagagaaatcttctgttctggttactattgttacacggcaaatcacttcacaactcagtggtgtaaaacgaccattgtattatgctcatggattcagaggaggtctttctccgagagaagtccacattagaaaacatttagctcatggaactccagtcttagcagcccagtgtagaggctccaaatctgcttatctgggcagagaggaagcacgtacttcattccttgttctgaaaaatgccggtaaaccagtgggccttgtgcctgacctgctgtccttgtcaataattgtagatttccttctcaacatctctttccccacctccattcagagggccacttggagagaaaaccagttcctaaaaagatgcccagaaaaatcttggtcccagaccgtatcagctgtaggtgttccagttcccacagtcaaaccgtctgactttgtggagggctcagtggcacaaattcgctctgcactgtccggctttcttcgctatgtattgaatgaaagaacagctgacagaagagactttgtgtctcctctgaggtctcttcactccccagtgagtttgaagagaacctacagagaaactgggtcagactcagccagcctgcacccaggtgaaataaacagccttgttgctcacacaaagcctgtttggtggtctcttcacacggatgtgcgtgaaagatatcatgtgggctctgaaagcaagaaacaggaggacctgtttccctggggtttgaaggaagagaattgcgctggaaacagaacttggagcctccagtgggaggagtatgagaaggggagctactcagttaaactggatgggcctgggcttcagagaattacactggaaatggcagaggaaccttcagcttcttctgaaggcctgccagcttttgcaggaagccatctgcgtgcttggaggcaggagcctggggcatatggggatacaggtgatggagcagagcaccagcagcatgaagcacccaagagggcaatattcgcgtgtgaagggagtgggcctatatcacaagtgattgcttcaagcgtggatgacacaatatgtgggccaataagactggagaagaaattttctgtaacctctgagaagtatcctttctcttttctgaaagcttctggaaatgggcatctctctggttctctccaaggacatattcttgcaatacgagtatatttatccccacttgtttacaaagaagaaaacagagggaccagaggtgcccatgccataggacccacagctaataagacctgcaattcaagccacaagcctaaacccttggggaaagagattctctattcacattctaaagaaacaggaatggagaagttcctccaaactccagttccctgggcttggggaagggtggaagaggcggaggtctgggaccagtttcaagagcagagaggaattgtgtcccgcattaagcagcccactaggaagcctgccagcctggagagggatggctacattgtgcacattgacagaaatataagcagccttcacaaagattcctgggctcacagcatgacatgggaacagcagaagatcattaaaactgaggacagagatgacaagctctcaggcctaccctgtgaaaccctcaaagagaccttccctgatcaccccataggaaggagactagcagccctgatagatgtccacatcctaatccccgaaacttgtgaatatgttaccttacatggcaaaagaggccttgcagggattgagagagcagaagacctcaatgtgctattcctagagaaaggagatggatgcccagatggaaaagataatccatgcccttttatgtatcgctatggttttcaatcagcttaccgagcagtcttagatgatctgaggaatccccctctgaagtttttacatcggcaaaaactttga

SEQ ID NO: 2929 - DNA, 1239 bp, Homo sapiens
  SIMILAR (227)..(637): 621254mologous to Homo sapiens cytokeratin 8,accession number M34225,Smith-Waterman Score=331.
tctgggccaggagaagctgaagctggaggcggagttggcaacatgcaggggctggtggaggacttcaagaacaagtatgaggatgagatcaataagcgtacagagatggagaacgaatttgtcctcatcaagaaggatgtggatgaagcttacatgaacaaggtagagctggagtctcgcctggaagggctgaccgacgagatcaacttcctcaggcagctgtactgaagaggagatccgggagctgcagtcccagatctcggacacatctgtggtgctgtccatggacaacagccgctccctggacatggacagcatcattgctgaggtcaaggcacagtacgaggatattgccaaccgcagccgggctgaggctgagagcatgtaccagatcaagtatgaaggagctgcagaaccttggctgggaagcacggggatgacctgcggcgcacaaaagacctgagatctcttgagatgaacccggaacatcagccggctccaggcttgaagatttgaagggcctcaaaggccagagggcttccctgggaggccgccattggcagatgccgagcagcgttggagagctggccatttaaggatgccaacgccaagttgttccgagctggaggccgcccttgcagcgggccaagcaggacatggcatggcaactgcttgagtaccaggaactgatgaacatcaagctggccctggacatcgagatagccacctacaggaagctgctggagggcgaggagagccagctggactctgggatgcagaacatgagtatccatacaaagaccaccggcggctatgcgggtggtttgagctcggcctatggggacctcacagaccccggcctcagctacagcctgggctccagctttggctctggcgcgggctccagctccttcagccgcaccagctcctccagggccgtggttgtgaagaagatcgagacacgtgatgggaagctggtgtctgagtcctctgacgtcctgcccaagtgaacagctgcggcagcccctcccagcctacccctcctgcgctgccccagagcctgggaaggaggccgctatgcagggtagcactgggaacaggagacccacctgaggctcagccctagccctcagcccacctggggagtttactacctggggaccccccttgcccatgcctccagctacaaaacaattcaattgctttttttttttggtccaaaataaaacctcagctagc

SEQ ID NO: 2930 - DNA, 2958 bp, Homo sapiens
  SIMILAR (1788)..(2450): 601254mologous to Homo sapiens dJ756G23.1 (novel Leucine Rich Protein),accession number AL035681,Smith-Waterman Score=624.
atgcccggctacagtgctctttctaataaacccatgctggaaacaacccaaatgtctatcactagaggaatgggtaagctacttgtggtacggtgtggtaccgagaaggctggaccagcagttccaggcggcatggaggggccccggagctccacccatgtccccttggtgctgccgcttcttgtacttctgctgctggccccggctaggcaggccgccgcccagcgctgcccacaggcctgcatctgtgacaactccaggcgacacgttgcctgccggtaccagaacctcactgaggtgccagacgccatccctgagctgacccagcggctggacctgcagggcaatttgctgaaggtgatccccgcagccgccttccagggcgtgcctcacctcacacacctggacctgcgccactgcgaggtggagctggtggccgagggcgccttccgtggcctgggccgcctgctcctgctcaacctggcctccaaccacctgcgtgagctgccccaggaggcgctggacgggctgggctcgttgcggcggctggagctggaggggaacgcactggaggagctgcggccggggacgttcggggcactgggtgcgctggccacgctaaacctggcccacaacgccctggtttacctgcccgccatggccttccaggggctactgcgcgtccgctggctgcggctgtcgcacaacgcgctcagcgtgctggcccccgaggccctggctggcctgcccgccctgagacggctcagcctacaccacaacgagctccaggctctgcccgggcctgtcttgtcccaggcccgcggcctggcccgtctggagctgggccacaacccgctcacctacgcgggcgaggaggacgggctggcgctgcccggcctgcgggagctgctgctggacggcggggccctgcaggccctgggtcccagggccttcgcacactgtccgcgcctgcacaccctcgacctccgcgggaaccagctagacaccctgcccccgctgcagggcccgggccagctgcgccggctgcggctgcaggggaatccgctgtggtgcggctgccaggcgcggcccctactcgagtggctggcgcgggcgcgcgtgcgctcggacggcgcgtgccaggggccgcggcgcctgcggggcgaggctctggacgccctgcggccctgggacctgcgctgccctggggacgcggcgcaggaagaggaagagctggaagagcgggctgtggccgggccccgcgcccctccgcgcggccctccgcgcggccccggggaggagcgggcagtcgcgccttgccctcgcgcctgcgtgtgcgtccccgagtcccggcacagcagctgcgagggctgcggcctgcaggcggtgccccgcggcttccccagcgacacccagctcctggacctgaggcggaaccacttcccctcggtgccccgagcggccttccccggcctgggccacctggtgtcgctgcacctgcagcactgcggcatcgcggagctggaagcgggcgccctggccgggctgggccgcctgatctacctgtacctctccgacaaccagctcgcaggcctcagcgctgctgcccttgaaggggctccccgcctcggctacctgtacctagaacgcaaccgtttcctgcaggtgccaggggctgccctgcgcgccctgcccagcctcttctccctgcacctgcaggacaacgctgtggaccgcctggcacctggggacctggggagaacacgggccttgcgctggggtctaccttaagtggaaaccgcatcaccgaagtgtcccttggggcgctgggcccagctcgggagctggagaagctgcacctggacaggaatcagctgcgagaggtgcccactggggccttggaggggctgcctgccctcctggagctgcagctctcgggcaacccactcagggccttgcgtgacggagccttccagcctgtgggcaggtcgctgcagcacctcttcctgaacagcagtggcctggagcaggtgggcactgggcatctggcggggttggtgcaggaggcggcacaaggccacaggcagcgtgcattcactcaacaagcatttgccagccccttggtgccaggcctggggcccgggctccagagcctgcacctgcagaagaaccagcttcgggccctgcctgccctgcccagtctcagccagctggagctcatcgacctcagcagcaatcccttccactgtgactgccagctgcttccgctgcacaggtggcttactgggctgaacctgcgggtgggggccacctgcgccacccctcccaatgcccgtggccagagggtgaaggctgcagctgctgtctttgaagactgcccgggctgggctgccagaaaggccaagcggacaccagcctccaggcccagtgccaggagaacccccattcaaaggaagacagtttggaccagataaggtggggaaggagaagggtcgtctctgagcacggagcaggctggtcctgccttgaccccagcccggtgcttcttactctcgccaggaacaggctccgacgagatcttcctggcaccctgagggtcgtcctccagcaggggcttcttggacccctgtctgaggggtcgcgtcttagtgggcgggattctttttccttttcttcccaaactgtttctctttcttctttgtggcctcattggccttcagcggtgtggccggttctgcggccacaggaggctggagctggtagccggtgagctcacaccagccgctggggtagatgtgtggggactcgcagtccccccactggtcgtactcgctgtcccagccgtcaaagtggatgctgaggacccgatgcaccactcgtttcaccgtggccacacaaatgagccggggctccatcaggtcctcggcctccagcttcacctcgtgacaagaagggagt

SEQ ID NO: 2931 - DNA, 2354 bp, Homo sapiens
  SIMILAR (970)..(1737): 941254mologous to Homo sapiens Human cell cycle and proliferation protein CCYPR-36, SEQ ID NO:36,accession number AAB60488,Smith-Waterman Score=1303.
gagaccccatcttcagaaccaatggaggaagaggaagatgacgacttggagctgtttggtggctatgatagtttccggagttataacagcagtgtgggcagtgagagcagctcctatctggaggagtcaagtgaagcagaaaatgaggatcgggaagcaggggaactgccgacctccccgctgcatttgctcagccctgggactcctcgctccttggatggcagtggttctgagccagctgtctgtgagatgtgtggtatcgtgggtacaagggaagccttcttctccaagaccaagaggttctgcagcgtctcctgctccaggagctactcctccaactccaagaaagccagtatcttggctaggttacagggaaaaccaccgaccaaaaaagccaaagtcctgcacaaggctgcctggtctgccaaaattggagccttcctccactctcaagggacaggacagctggcagatgggacaccaacaggacaagacgctctggtcttgggcttcgactgggggaagttcctgaaggatcacagttacaaggctgctcccgtcagctgtttcaagcacgtcccactctatgaccagtgggaggatgtgatgaaagggatgaaggtggaggtgctcaacagtgatgctgtgctccccagccgggtgtactggatcgcctctgtcatccagacagcagggtatcgggtgctgcttcggtatgaaggctttgaaaatgacgccagccatgacttctggtgcaacctgggaacagtggatgtccaccccattggctggtgtgccatcaacagcaagatcctagtgcccccacggaaggcctgggggcagatccacgtgtggaatctgatgttctcagatgaagtcattgctggcctgaagaggcagctattttcagtccccactgctgaggggtccccactctgggtcggcgctagcgcccctgtcagtggagccatccatgccaagttcaccgactggaagggctacctcatgaaacggctggtgggctccaggacgcttcccgtggatttccacatcaagatggtggagagcatgaagtacccctttaggcagggcatgcggctggaagtggtggacaagtcccaggtgtcacgcactcgcatggctgtggtggacacagtaatcgggggtcgcctacggctcctctacgaggatggtgacagtgacgacgacttctggtgccacatgtggagccccctgatccacccagtgggttggtcacgacgtgtgggccacggcatcaagatgtcagagaggcgaagtgacatggcccatcaccccaccttccggaagatctactgtgatgccgttccttacctcttcaagaaggtacgagcagtctacacagaaggcggttggtttgaggaagggatgaagctggaggccattgaccccctgaatctgggcaacatctgcgtggcaactgtctgtaaggttctcctggatggatacctgatgatctgtgtggacggggggccctccacagatggcttggactggttctgctaccatgcctcttcccacgccatcttcccggccaccttctgtcagaagaatgacattgagctcacaccgccaaaaggttatgaggcacagactttcaactgggagaactacttggagaagaccaaatcgaaaagccgctcccatcgaaaactctttaaacatggattgcccaaaaccatggcttcaaaggtgggcaatgaaactggaggccgtggacctgaatggaaccccggctcatctgtgtggccacggtgaaaacgaagtggtgcatcggctcctcaagcatccactttgacggctgggacagcgaagtacgaccagtgggtggactgcgagtccccagacatctaccccgtcggctggtgtgagctcaccggctaccagctccagcctcctgtggccgcagaaccggccacaccgctgaaggccaaagaggccacaaagaagaaaaagaaacagtttgggaagaaaaggaaaagaatcccgcccactaagacgcgacccctcagacaggggtccaagaagccccttgtggaggacgacccttaaggtgccaggaagatctcgtcggagcctgttcctggcgagatcattgctgtgcgtgtgaaggaagagcatctacacgtggcctcgcccgacaaggcttcaagtccagagctgcctgtctccgtcgagaacatcaagcaggaaacagacggacttgagccttcctgcctccagcctggcttctagctggaagccagcccagcgtttctctaccaccaccaccatgcctccacctgactttggcttggagactgatcctctctgtg

SEQ ID NO: 2932 - DNA, 1536 bp, Homo sapiens
  SIMILAR (213)..(872): 521254mologous to Homo sapiens Similar to katanin p60 (ATPase -containing) subunit A 1,accession number BC000612,Smith-Waterman Score=457.
acgcgcgtcgcgagctaacggactcggcggcggcggcggcggcggcctgcgccccacccgcaccccatctggaccgcatcgctgaatgtgcccggacctgcgccttctgggtctctgaaagaagatgaatttggctgagatttgtgataatgcaaagaaaggaagagaatatgcccttcttggaaattacgactcatcaatggtatattaccagggggtgatgccagcaagattccagagacattgcccagtcagtccagagatcccagctatccaaaggcaaatggccaaccaggttcgggcaggaattattgggaggaatatgaacaagttaaaagtattgtcaagcactttaagaaagtttttaaaattgacaagccctcccagatttcccctgtgtccctgtcaagatgaacccatttagagatccctgctgtttggcccaccccctgttcctgcagaacacagagctccacctcagatcaggcgtcccaatcgagaagtaagacctctgaggaaagaaatggcaggagtaggagcccggggacctgtaggccgagcacatcctatatcaaagagtgaaaagccttctacaagtagggacaaggactattgagccagaggggggagatgacaagggaaggaagaatatgcaagatggtgcaagtgatggtgaaatgccaaaatttgatggtgctggttatgataaggatctggtggaagcccttgaaagagacattgtatccaggaatcctagcattcattgggatgacatagcagatctggaagaagctaagaagttgctaagggaagctggtgttcttccaatgtggatgcctgactttttcaaagggattagaaggccatggaagaatgactcacagaacttagggaagccttacagtcgagcccaggacgacataggcatgaacatcgtgggtccccttacacatggcttttcttctgcctctgctgccccagagacaacaagacagcccctccttttccttctcctccttagcctatccaaggtgaagacctttaagggtgtactgatggttggacccccaggcactggtaaaactatgctagctaaagctgttgccactgaatgtggtacaacattcttcaacgtttcgtcttctacactgacatctaaatacagaggtgaatctgagaagttagttcgtctgttgtttgagatggctagattttattcccctaccacgatcttcatttgatgagatagattctatctgcagtcgaagaggaacctctgatgaacatgaggcaagtcgcagggtcaagtctgaactgctcattcagatggatggagttggaggagctttagaaaatgatgatccttccaaaatggttatggtattggctgctactaatttcccgtgggacattgatgaagctttgcgaagaaggtgtttcatctgggttggtgatttcccagatgtccctcaggaaaaggacacttctgtctccccagagtcctgtttgttgactgactggtggtgggggctgtga

SEQ ID NO: 2933 - DNA, 994 bp, Homo sapiens
  misc_feature (1)...(994): n = a,t,c or g
ttttttttttttttttgcccatccctgattactttttttcaagagggaaaagtttattgcaggttggggacacttgtaaaaggcaaaatctaacaatgagaacgaactatagggctcgccagtttagaagatgagcaggtaaaacaaatacacggattattgtcaattattaaaaaagagcaagggggtggacaaaaaaggaaaaactgccagcagccttccagaaggttcacagagtatatccagggagcaccttcccgcccagtcctggctgccttgggcatgcctcctcctgtggttacctgccctgctccagatgaaatgcaaatgaggaagcagctaccggggctcaggagcagagctcattctgctcggcaagttcgctggcttgcagggaagcagccgctgggtgccgcatgcgccaagcctctcatttaaaaagcccagagggcaagtttcacgggcatttccttaacacacgtgtgggaagagctgggggaaacccacaccgcccagggaagaagtggcttcttccatcgtctgtgtatgtatgtaatactgagcattgtctctggggagcctggtgccccaagccgaatggctgagcccgccgccctgggcctctgagcgcttctcaaagcctgcaatccgtgtccaatgaccaaattgtcctctcaggcgctcacttcttctattagaaagccagtcctcttagcccccataccacctctcacaggacacccacaaaaggacaaatgcaattctaagtctttcgtnnnnnnnnnngagagagagagagagaaaagaaaagaaagggagtgttctgagtctacttaaataaggaaaaggccttggttcatccaaagtgtttccaaagtgtttctataaaaatgcatcgaatgctggaataaagttgcacattctcctggtgaagctgtaaaatgtccaacaaactgaaaatgacgggatgatctggaacgagtctctccgaaca

SEQ ID NO: 2934 - DNA, 514 bp, Homo sapiens
  SIMILAR (253)..(513): 981254mologous to Homo sapiens putative HIV-1 infection related protein,accession number AF094583,Smith-Waterman Score=457.
  misc_feature (1)...(514): n = a,t,c or g
cagtgtggctcataagccacgaaccgggaactccactntgtggcaccgtgagattctccagacggtatccaactgttgaanaacgagccagagtcttcaatggagcaagttatgtgcctgttcctgaagatggtccctttcttaaagcactgctctttgaacttagattattggatgatgataaagacttcgttgagagtcgtgatagctgttcacgcatcaataaaacatccatttatggactcctgataggagtgtgatttggaaggaatcatgccaaatgttaccatcagcttgagtctccccaccaatggatctccacttcaggatattctagttcacccttgtgtaacttctcttgactctgcaattctgacttctagtagtattgatgcaatggatgactctgcatttagtgggccttacaaatttccattcactccacctttagagtcattcaacttatgcttctacacttcccaggtccctgtcccaccaattttgggtttttatc

SEQ ID NO: 2935 - DNA, 1613 bp, Homo sapiens
  SIMILAR (1016)..(1099): 1001254mologous to Homo sapiens putative HIV-1 infection related protein,accession number AF094583,Smith-Waterman Score=145.
gcgaataaaacgagcggcgaaagaaccgaaaaaaggctcgacgctaccgtgtatgaggaactttgatccttgcgggccaccattccggaagtagaatttagaggaagaaaataccggagttgcagggtataggtaaatttctcaaggttataggttggggttcttagaactttttgtggtgtgtgttggcctagagcgactcagaagcgttagtgacttcacctaaaaaagctaacctctctgctgagcgcgaccggtatgcggcgcaggatgagcctcagggcttctgttaaagaggcatgtctgagaaagccggtctgcgctgttcctcggatgcgaccttaattatgagatgagctaatgctttactgacttaaccatggcgcagcgggcaagtgttggctcataagccacgaacccgggaactccaacttttgtggcaaccggtgagattctcccaggacgggtatccaactggtttgaaaaaaccgagccagaggtctttcaattgggagcaagttatgtgcctggttcctgaagatgggtccctttcttaaagcactggtcctttgaacttaggattatttggatgattgataaagacttcgttgagagtcgtgatagctgttcacgcatcaataaaacatccatttatggactcctgataggaggtgaagaactctggccagttgttgcttttctgaagaatgacatgatatatgcttgtgttccactagttgaacaaactctgtcccctcgtccgccactaattagtgtcagtggagtttcacaaggctttgaatttctttttgggatacaggattttctttattcaggtcaaaaaaatgactctgagctgaatacaaaattgagccagttgcctgacttgcttctgcaggcttgtccatttgggtactttattaggatgccaacttacagaattcattagataataccaattttggcatctgtgactcagccacagaaacagccagcttggaaaactgggacgtacaaaggaaaaccacaagtttctatttctatcactgaaaaggtaaaatccatgcaatatgataaacagggtatagcagatacatgggcaagttgttggaacagtgacttgcaagtgtgatttggaaggaatcatgccaaatgttaccatcagcttgagtctccccaccaatggatctccacttcaggatattctagttcacccttgtgtaacttctcttgactctgcaattctgacttctagtagtattgatgcaatggatgactctgcatttagtgggccttacaaatttccattcactccacctttagagtcattcaacttatgcttctacacttcccagtcagtcattgatgaccaaccaagtaagttactgctgaacgatgggattggagaactcatgggattcaattggagcaacaggagctgtgggcaggttggcagtaatcagtatgcctactgcatgccctatgcggcagatcagagaacatggagacggggagcctggacgagcaagtataggaacaagaatgcattgtacacctttgtaaagcgcttttctcatctccgaaaacaaagagagaagaatccctatccttaa

SEQ ID NO: 2936 - DNA, 390 bp, Homo sapiens
ggtgcgcgtcgggccactaggggtaccccaactcggagagaaggaccatgagttgaatttgaagtttgtgggaatagaggtgaagcaccaggggcagaaaaaaaacaggagacctcgcctcagacaagcggggcctgggtcccccatggatgaaagtgccttcccattatgccgtacgctgggcagagtggacagtgacgaccctggtttgatcccagggtgcgcttcgggaccacttgcggtaccagaaagcgaacaaaaggtccatgagcggaagtccctgcactgggacctggggaccctggtgtccctggttcgagctcagggtgtgcctcagccgctaagtgcaccccaaggggagctttgggagcacaaagcccatgagggaag

SEQ ID NO: 2937 - DNA, 856 bp, Homo sapiens
agttgaggcacctggggcagagaaaaaaatgcattgccaagaggtttctgggtcatctactgacgaaaatgtcttcccatcagcccttgcgctggtccccagggaccctggcatccgtcgatggcgcccagggtgcgcgtcgggccactaggggtaccccaactcggacagaaggcccatgagttgaatttgaagtttgtgggaatatgaggtgaggcaccaggggcagaaaaaaaaacaggagacctcgcctcaaacaagcggggcctgggtcccccatggatgaaagtgccttcccattatgctgtaccctgggcagagtggacagtgacgaccctggttcgagccccaggggtgagcttcgggaccgcttgcggttaccagaaagcgaacaaatggtccatgagcggaaggtgaggcacctgaggcagagaaagtaaagaaacgcgccgccgagaagcagtgcctgggtccctcacggaggaaattgtcttctccttagcccgttcgcttggcactgaaggtccctggcgtcccctggtttgattcccagggtacgcctcggggccactagtgttaccccaaggtgggcagaaagcccataaagggggaaggcgaggcacctggggccagagaaaaaaaaaactttgctgcagaaaagcgcggcctgattccccacggacgaaagtgtcttcccatcagtccctgcactgggacccggggaccctggtgtccctggttcgagctcagggtgtgcctcagccgatacgtgcaccccaaggggagctttgggagcccaaaagccaataagggaaagtaatttttaaggcccccagtggtgaggcccctgtcacag

SEQ ID NO: 2938 - DNA, 325 bp, Homo sapiens; identical to SEQ ID NO: 1742
  SIMILAR (6)..(161): 1001254mologous to Homo sapiens HSPC118,accession number AF161467,Smith-Waterman Score=266.
  misc_feature (1)...(325): n = a,t,c or g

SEQ ID NO: 2939 - DNA, 945 bp, Homo sapiens; identical to SEQ ID NO: 1743
  SIMILAR (673)..(942): 981254mologous to Homo sapiens HSPC118,accession number AF161467,Smith-Waterman Score=448.

SEQ ID NO: 2940 - DNA, 805 bp, Homo sapiens
  SIMILAR (380)..(306): 961254mologous to Homo sapiens Human 5' EST secreted protein SEQ ID NO: 489,accession number AAY12176,Smith-Waterman Score=123.
atttatagactttcccacaggcaaacattaagtctacgcagggcattttgaaaatcatttgccagttctaaaagtagtaataataaatactcccaagaactaaaagtccccctggtagcattctgggatacctggcagggcaatgttctggtgggccccattcttcaatcccaagttatccaaacttagcttttgggatgtttgaggttcttcacttttgctccctctttgggtggccgttctagtggcaagaaatcacataatccttttgtgacgaacactgtcctattaaaaggccagagacaaaagccctttccttggagatttatgtttgaaagatactggccaacagtctcttctacaatgtaggttcttcccatttttaggaactaaaatctcctgttttcagaatgtgcactcgtggcagacaattacctcggacggtctctccgccggagatgggggtttcgggcccaagtaccagcctctaggggccagattccctccggtctcaattcactgccactgaattcatcagaaagcgacctacttcccacacctcacttcccactccaaagccagggacttgggagtcaggtggcgcagattgatgacgtaaaagccccccctcccttccccgcagagcctcagccaaagcgactgcggtcgccaccccgcccccttctgggcgccatagagagcgtggcggtatcccggagcctgccgtccggccctaccgggaccgatgccctctagtggctcagtgtacagaagccgccaacgaggacgatccatggcaacgaag

SEQ ID NO: 2941 - DNA, 470 bp, Homo sapiens
  SIMILAR (6)..(158): 961254mologous to Homo sapiens HSPC118,accession number AF161467,Smith-Waterman Score=253.
ccgcgatggtaggcggcggcggggtcggcggcggcctcctggagaatgccaaccccctcatctaccagcgctctggggagcggcctgtgacggcaggcgaggaggacgagcaggttcccgacagcatcgacgcacgcgagatcttcgatatccgccgctgctgggcgcgggcgggttccgggggcttgcggtggggggagcagtgatatcgagcagctggtggagccgcatcccagcagggcgttcctggcagagggttctaagtgggcaagggcgcagagtcccttttccttcacttcccacaatttgattcgcttccttaatgaccccggagcattcactgacgctagaggagttgaacgtagtagagcaggtgcgggttcaggttagcgaccccgaaagtacagtggctgtggctttcacaccaaccatttcgcactggagcatgggcacccttattggggtgtgcg

SEQ ID NO: 2942 - DNA, 738 bp, Homo sapiens
  SIMILAR (38)..(559): 421254mologous to Homo sapiens HSPC118,accession number AF161467,Smith-Waterman Score=200.
cgcacgctcgcataggatcagcggtggtggttccgcgatggtaggcggcggcggggtcggcggcggcctcctggagaatgccaaccccctcatctaccagcgctttggggaagcggcctgtgacggcaggcgaggaggacgagcaggttcccgacagcatcgacgcacgcgaagtctttcgatctgattcgctcccatcaaatgaccccggagcatcccactgacgctagaggagttgaacgtagtaagagcaggtgcggcgttcaggttagcgacccccgagagtacagtggctgtgggctttccaaaaccaacccattccggcacttgcaggcatggcccacccttaattggtctgtccaatcaaggtcaaagcttctgcgctcccttccttcagcgttttcaagatgggacgttgcacatttactcccgggggacccattgcctcaagagcatgcagttgaacaagcaactttgcagattaaggaagcggggtgggcaactgcccttggaagaacacaccaccttttggaggttgtgaattcagtgcctgtcgagcccggctcctggaacctgggcctttgtacccctcagcctggcataattggtatcctggtcccagctcctgccagggctgttaccgttgttgtgggtgggtcactcacaatgagaaactaacattttggctttttgtaataaagttaatttatattcagttcccaaaaaaaaaaaaaaaaa

SEQ ID NO: 2943 - DNA, 339 bp, Homo sapiens
tcactggatccctggacatttcaacaaggtcgcgaggtcctgagttagtgtgggttgatctctcctctctgagatatttgctacttccagctcaccagactcgagcagcatgataccaccaatgtggctgaccagcatgatgttctgtgtaggtggctgggcacagaggaagctcgggctttgcggaggaacaaacacagacgatgacggggacagaggttgccggtttctagaaagtggctgttgggcacagaggaagcttgggctctcaggtgatccacccgcctcagcctcccaaagtgctgggattacaggcatgagccaccatgcccggcccat

SEQ ID NO: 2944 - DNA, 1683 bp, Homo sapiens
  SIMILAR (32)..(895): 651254mologous to Homo sapiens protein x 0004,accession number AF117229,Smith-Waterman Score=827.
cagggagccaacatgcctcggtatgcgcagctgcgtcatgggccccgcgggcatcgttaagagcacctactgtgccaccatggtccagcactgtgaagccctcaaccggtctgtccaagttgtaaacctggatccagcagcacaacacttcaactactccgtgatggctgacatccgggaactgatcgaggtggatgatgtaatggaggatgattctctgcgattcggtcccaacggaggattggtattttgcatggagtactttgccaataattttgactggctggagaactgtcttggccatgtagaggacgactatatccttttttgattgtccaggtcagattggagttgttacactcacctggcctgtgattgaaacagctggttccagcagctcgagcagtgggagttccgagtctgtggagtttttcttgttgattctcagttcatggtggagtcattccaggtttatttctggccatctgggcagccctgagtgcccatgatctctctagaaattccgcaagtcaacatcatgaccaaaaatggatctgctgagtaaaaaagcaaaaaaggaaattgagaaatttttagatccagacatgtattctttattagaagattctacaagtgacttaaggaaggcaaaaaattcaaggaaactggacttaaaggctattatgtgggacttgattggatggacttacagcctggttcggatttttacccttacgatcagtcagatgaagaaagcatgaacattgtattgcagcatatttggttttgccattcaatatgggagaagacctagaatttaaaaggaacccaaaggaacgtgaagaatgagtcttcctctatgtttgacgaatattttcaagaatgccaggatgaatgaagagtttactaaaagtaaccatctaaagagcttgtggccaaaccagcagaacattcttctcttcaaaggatgcaatagtagaaagctacttattttaatggaaaaaaagtaaaaacttcgttctttatccagcctcatgcctgaatccaaatttttaattattctgaaactgctgctgtttaaagtggaatcttttagtattataacagcatcactttagatttttgtaagtccaaaattgaaatgaatgcccatagatttatatataaattagcacctgagctaagggtaaggcttggtctaaacttattttcactttttgtattatttttaagatgcaggaattactgtaacaaaatatgtatgtccgaagggaaaaagctgcaaggatatatataagaccactgcttatctgtatcttcccattttcctatattgaaaatgtatattatttatataacttaaaaagtaaaaataactatgttttgagatatgtatgtgtatatataaaagaaacaaaggtttttaatgattcttggacctagataacaagtacactgcagtgtctaatttgattcattttaattaagcaaaatgtggccaagcgtggtggctcacacctacaatgccagcacctcaggtgatccacccgcctcgacctcccaaagtgctgggattacaggcgtgagccactatgcccggccctgaaaaggtgacatttgaaaaaaatacaaaagaggtgattgatctcagattctggaacctcaagacccatctccattgct

SEQ ID NO: 2945 - DNA, 2477 bp, Homo sapiens
  SIMILAR (1107)..(1316): 941254mologous to Homo sapiens monooxygenase X,accession number AY007239,Smith-Waterman Score=344.
atggattacgggcttttatgtgggcagcaacttgtgcctcaggttgagccagtgatacagagaggccatgagagtctggtgcaccacatcctgctctatcagtgcagcaacaactttaacgacagcgttctggagtccggccacgagtgctatcaccccaacatgcccgatgcattcctcacctgtgaaactgtgatttttgcctgggctattggtggagagggcttttcttatccacctcatgttggattatcccttggcactccattagatccgcattatgtgctcctagaagtccattatgataatcccacttatgaggaagttctggatgctgagaagtacaagtacaaggtactggcatctgatgagggccttcttacgggtcataacatggcagtaggcttcacatggtggaagggcttaatagataattctggactgaggttattttacacaatggatataaggaaatatgatgctggggtgattgaggctggcctctgggtgagcctcttccataccatccctccagggatgcctgagttccagtctgagggtcactgcactttggagtgcctggaagaggctctggaagccgaaaagccaagtggaattcatgtgtttgctgttcttctccatgctcacctggctggcagaggcatcaggctgcgtcattttcgaaaagggaaggaaatgaaattacttgcctatgatgatgattttgacttcaatttccaggagtttcagtatctaaaggaagaacaaacaatcttaccaggagataacctaattactgagtgtcgctacaacacgaaagatagagctgagatgacttggggaggactaagcaccaggagtgaaatgtgtctctcataccttctttattacccaagaattaatcttactcgatgtgcaagtattccagacattatggaacaacttcagttcattggggttaaggagatctacagaccagtcacgacctggcctttcattatcaaaagtcccaagcaatataaaaacctttctttcatggatgctatgatataagtttaaatggactaaaaaggaaggtctctccttcaacaagctggtcctcaggcctgccagtgaatgtgagatgttccaagacagacaatgctgagtggtcgattcaaggaatgacagcattacctccagatatagaaagaccctataaagcagaacctttggtgtgtggcacgtcttcttcctcttccctgcacagagatttctccatcaacttgcttgtttgccttctgctactcagctgcacgctggagcaccaagagcttgtgatcaaaattctggttggacttgacaatggtttctatgatctgaacctggcatttgaagtacagggttaaagactgtgtccactttgggcatgaagaagtgtggagacttttcttccccattttccctccctcctttttcctttccatgttacatgagagacatcaatcagggttcccttctctttcttaggaaatatctgatgttatatatacatggtcaataaaataaaactggcctgacttaagataaccattttaaaaaattgggctgtcatgtgggaataaaagaattctttctttcctactacattctgttttatttaaatactcattgttgctatttcactttttgacttgacttttatatttctttaaaaaattccttccttttaaaaaatataaaagggactactgttcattccagttttcttcttctttgttggtcttctagtgggacttttcaagtgtaacagccattcttcctgactttaatattggccagttctggtcttttctgtgaattacccactgggcccccttacctcaatgctttttgttgatgccccactctggttccccttggtttatctggagtctgttggtacccccaaatgacccccacacccatctttaaagtacttttttttcaccttcccctgttttagtactggcccagatgagtttttttcttagagctctgtcactatctgaaaagaaagaggctatggggaaacatagaaaatggtatgtattaataactgaatccataggctgagggaggaaaaaatgtaggctgggctggcaaacccagtgctgtggagggtgacttatatggagggttccagatccaaagacagggccgtgtggaggccagtccaggagggtgtaagttctgaaatgggttccttggctgactttggggtgacacatgtaccacaaactggctcaagtttaagtcatggttctattgtagatttatatattatattagttaataaatgactttaaattgtcaccaattgaaaatcttgtcactcttttggttttctttatatagctcagccaaatcttgttttatgtcctgtcctcatctcttaagctaaatctgtttggatcatattaataaactaaatgaaattacaaaaaaaaaaaaaaaaa

SEQ ID NO: 2946 - DNA, 394 bp, Homo sapiens
  SIMILAR (360)..(389): 801254mologous to Mus musculus breast metastasis suppressor 1 -like protein,accession number AF233580,Smith-Waterman Score=43.
ggggaggagccaagggggcgagcaagctcggtggctgggtgggttggggcgttccgcgcgcccttcattgaagcggcggtggccgggctgggcgccggtagtggaaagcgacggcgcggctggaaaatgccagtccattcccgaggggataagaaggagaccaaccatcacgatgagatggaggtggactacgccgaaaatgaggggagcagctccgaggacgaggacactgagagctcgtcggtctccgaggatggagatagctcagaaatggatgatgaagactgtgaaagaagaagaatggaatgtttggatgaaatgtccaatcttgaaaaacagtttaccgatctcaaagatcaagcgaaaagctgttgctatatgatacagtccagag

SEQ ID NO: 2947 - DNA, 150 bp, Homo sapiens
  SIMILAR (1)..(96): 1001254mologous to Mus musculus putative,accession number AK003055,Smith-Waterman Score=155.
agcgaaaagctgttgctatatgatacagtccagagtgaactagaggagaagataagaaggcttgaagaggataggcacagcattgatattacctcagtttatatgctacaagatcttgatattcttgaagactggacaacaattaggaag

SEQ ID NO: 2948 - DNA, 1581 bp, Homo sapiens
  SIMILAR (943)..(1572): 951254mologous to Plasmid F Protein A,accession number M12987,Smith-Waterman Score=1048.
atgagactgcggaagctcggtggctttagtagtggtagcagcaatagcagcactagcaacacccataccagcacaaatagtgctacagagctagtaaaacctggtgtgtacagacctctagatacacttggtactgcatcagtaagcagcaaaacagtgaaggaatccacagagattcccaccaccatattacaaaaagaaggaattgcaagtagtcaattaggtagtcgtagtactcttaggtcatcaagtcatgaggcaggactacagcagggctccctgggtggcgtttataaaactgttgtacatgctctttcgaagccgaaggcaaatgtttccccacagaggcagaacagaatgccaccagaggctccactgagggatctgtacagtcatgtaatgggctattttggaaggaaagctgcagcgcaacggcccagcgcgcaaaaccaaccgccccacagcacaaccaaaaaacaccgcccccgggcacaacaagcgccaacacaaaaccacggcgaacacaacacagggacgaaacaaaagaggaaaaacgcgccggagcgaacagagggaaaaccttccccagccccaaaaaccaccccagcgcgaaccgcccaagaagcgcagaaatatttccagcaaattcattctgcaatcggcttgcataacgctgaccacgttcataagcacttgttgggcgataatcgttacccaatctggataatgcagccatctgcttatatccagctccccccccagaacacgataatcacttcgaaatggatgatgaagactgtgaaagaagaagaatggaatgtttggatgaaatgtccaatcttgaaaaacagtttaccgatctcaaagatcacgccgggttattttcctcgcttccgggctgtcatcattaaactgtgcaatggcgatagccttcgtcatttcatgaccagcgtttatgcactggctatcagagatgccgagaaagcaggccgactaccgcaccggtatatggaaattcgaggacgggttgagcaacgtgttggttatacaattgaccaaattaatcatatgcgtgatgtgtttggtacgcgattgcgacgtgctgaagacgtatttccaccggtgatcggggttgctgcccataaaggtggcgtttacaaaacctcagtttctgttcatcttgctcaggatctggctctgaaggggctacgtgttttgctcgtggaaggtaacgacccccagggaacagcctcaatgtatcacggatgggtaccagatcttcatattcatgcagaagacactctcctgcctttctatcttggggaaaaggacgatgtcacttatgcaataaagcccacttgctggccggggcttgacattattccttcctgtctggctctgcaccgtattgaaactgagtccatgggcaaatttgatgaaggtaaactgcccaccgatccacacctgatgctccgactggccattgaaactgttgctcatgactatgatgtcatagttattgacagcgcgcctaacctgggtatcggcacgattaatgttgtatgtgctgctcacccctga

SEQ ID NO: 2949 - DNA, 370 bp, Homo sapiens
  SIMILAR (307)..(152): 471254mologous to Homo sapiens Human secreted protein, SEQ ID NO: 6574,accession number AAG02493,Smith-Waterman Score=143.
  misc_feature (1)...(370): n = a,t,c or g
agcaatttccccaggggattaaggggctctagggccaccnnnnnnnnnnnnnnncgaaaagggagtctcgttttgcccccaggttgaagggcaggggcccaatttgggaaaacctccgctttgggggttaaagcaattctccggcctaaccctccggagaaccgggaactatgggggcaggccaccttgcccagtaaattttggaattttaagaaaaaacggggttcccccatgtggcccaggagggcctaaatctccggacctaaggacccacccacttgggcctccaaaagggcgggaatcccgggcggaacccattgccccgggccacccctgggttttaaaaaaccctggcccccagggagggttg

SEQ ID NO: 2950 - DNA, 428 bp, Homo sapiens
  SIMILAR (63)..(284): 971254mologous to Homo sapiens Extended human secreted protein sequence, SEQ ID NO. 499,accession number AAY36114,Smith- Waterman Score=384.
  misc_feature (1)...(428): n = a,t,c or g
cggacttcccgggtcgactacagcatcggcggcggcggctagtgccgctagcgcctctagcgatgcaccttctttccaactgggcaaaccccgcctccagcagacgtccttctatggccgcttcaggcacttcttggatatcatcgaccctcgcacactctttgtcactgagagacgtctcaaagaggctgtgcagctgctggaggactataagcatgggaccctgcgcccgggggtcaccaatgaacagctctggagtgcacagaaaatcaagcaggttatattccttttgggacgccaattgtagtcggtcttctcttgcccaaccagacactggcatccactgtcttctggcagtggctgaaccacagccacaatgcctgtgtcaactatgcaaaccgcaatgcgaccaagccttcacctgcatn

SEQ ID NO: 2951 - DNA, 2156 bp, Homo sapiens
  SIMILAR (508)..(1326): 941254mologous to Homo sapiens Similar to RIKEN cDNA 0710008O11 gene,accession number BC006250,Smith-Waterman Score= 1338.
atggcggccgggcagagacgctcctcactttccagactgggcagccagtttataaactgcgatccagagtgtcagctttcgtgccttgtgggacttgaagtccagaaggaagaagtgatcagggctgccgagggatggaagcgtgcagcccctgcaggtctgagacctacgaactacaactcccggcaagcatcggaaggccgcgtcgtaattgcgggcaaccaatcgtaccagagcagggcaagcccccgccctctggctcggtggaaggcctccgccaatggcagagctcccatcgcagagcctgcggcggcggtggccgggctgggcgccggtagtggaaagcgacggcgcggctggaaaatgccagtccattcccgaggggataagaaggagaccaaccatcacgatgagatggaggtggactacgccgaaaatgaggggagcagctccgaggacgaggacactgagagctcgtcggtctccgaggatggagatagctcagaaatggatgatgaagactgtgaaagaagaagaatggaatgtttggatgaaatgtccaatcttgaaaaacagtttaccgatctcaaagatcaactttataaagaacgattaagtcaggtggatgcaaaactacaagaagtcatagttggaacgagcaccagaacactttggaaccggctggcaactttacaggaaaatatgcaaattcgtacaaaggtagcaggaatctatagagagctctgcttagaatctgtaaagaacaaatatgaatgtgaaattcaagcttctcgccagcattgtgagagcgaaaagctgttgctatatgatacagtccagagtgaactagaggagaagataagaaggcttgaagaggataggcacagcattgatattacctcagagctgtggaatgatgagcttcagtcaagaaaaaagaggaaggatcctttctggcctgacaaaaagaagccaggtgttgtttcaggtccatatatagtttatatgctacaagatcttgatattcttgaagactggacaacaattaagaatgcaatggctacattggggccacacagagtgaaaacggatccacctgtgaaactggaaaaacatctgcacagtgctatatctgaagagggaagactatattatgatggtgaatggtatatacgtggacaaacaatatgtattgataaaaaagatgaatgtcctacaagtgctgtaattacaacaattaaccatgatgaagtttggtttaagaggcctgatggaagcaaatctaagctttacatttcacagctacagaaaggaaaatattcaattataacattcataatcatgatttaagtgttatctaaatttaccttattagtgttaccaaatgtaagtgccatgagagtaaaaaaatgtattcaataacttaatattctcactgaatcatgaaaagactgtgtatttgtaggtagtactctaaatagatctcattgatatgttattaaaagaaacagtaataaaaattttatcacgatccttacgttgatttgcctcttaagtccgatgaccaataagtattctgtatatggtaggggtttctttctaaacatttttctttggttctaaaaaaagttatgcaaatttggcttatctttagtaaactatgactacatttatctgcaatttttaaaattttccatatctttgtccattccattgtgtgtttgtaaataaggccgataggaatgtttcctataaatggtttgtactagtacattagtgttaaaccagaactgaaatttaaacatatatatatatgaggatgtatatatggcatcatcagcttatttagaactgatggccataccttacaatcttgttttacccaaaattaagctattggggttgaaagctaaaaggagcacttttgtagaatagcaacttttcttttcctctttcttgattgtatggtggggtggtgacctatttttacaaattatacctaatgagtaaaattagtgtaaagtgataacatgcttctacctgtatttctagtgaccctttagcggcaggtatttatacctggtatttatgatgcagtatataagtggtgaacaataactgacagtattgtgcttgctgtacatgtctggtctttt

SEQ ID NO: 2952 - DNA, 383 bp, Homo sapiens
  SIMILAR (77)..(382): 801254mologous to Homo sapiens NPD016,accession number AF267854,Smith-Waterman Score=406.
ggcacgagggggagaacaggagtaaacaaggacttgacaaaggggaagagttatcagtcctttgacaaggacaggtggggcagggagcaagacaggtaggctggaagaacagttattggcaagtatgcagagccgtgaacgtcatggcatgtccaaggaattcctgcaggagcactttaacccccagagacggtacaacccaagctcccacgtcctctctggagcttgcgcaggagctgtagctgccgcagccacaaccccactggacgtttgcaaaacactgctcaacacccaggagtccttggctttgaactcacacattacaggacatatcacaggcatggctagtgccttcaggacggtatatcaagtaggtggggtga

SEQ ID NO: 2953 - DNA, 526 bp, Homo sapiens
  SIMILAR (306)..(524): 1001254mologous to Homo sapiens NPD016,accession number AF267854,Smith-Waterman Score=399.
atcagagataggtacttagttcaagaagactctctgaagctcccaaactgtagatatgtcctgtgtgcgaactggctggctttacagaagtcctgatggaagtgggtttattgttttttgactcgttacctaccctctgcttactccttcccctcaaaaaagggaagctgacttctcaggttagccagcagctcactcatacttttttctctctctattccattggctgatctgctgacttggggctctgaatctggatactctccatcaccggttggctgctgtcaccatttccttcctcgttgatggcactactagtggtcaagcagaggatgcagatgtacaactcaccataccaccgggtgacagactgcgtacgggcagtgtggcaaaatgaaggggccggggccttttaccgcagctacaccacccagctgaccatgaacgttcctttccaagccattcacttcatgacctatgaattcctgcaggagcactttaacccccagagacggtacaacccaag

SEQ ID NO: 2954 - DNA, 1834 bp, Homo sapiens
  SIMILAR (897)..(1481): 601254mologous to Homo sapiens Human transport protein TPPT- 33,accession number AAB60113,Smith-Waterman Score=511.
aagggatacaggatactcccttacctaccagcctgacttgggcctttaaactccctggcatccacttgtaacgcccgggtaatgtggagacacactgaactacccccagtttatgtttgacagttggggggggtcctgctccttaaggcaggattggaggcgacccagccagccacccaaggaagatactaatgaagcccctgctttttgactcaccttttcaggatgccaactcaccagaggcagtttgtgttgagaacatgacaaagcctcatgacaaaatgaatgggggtggggccaaggaactgcatgaagaaaccagaaggttgtgtggaagtaagagaaaggatagcagcctagggctttaggaccggctggaaaccaagttgagtgtggagaggatgaggggtagagtagttcaggacctgaacgaaagatctttgtagacaaatgttacgctctgcaaatgggttctgcggcaggactgaggtgggattctgtggtgaggttctgtgagatctgaccacctggcccccgtatctccctccactggtggcaggtgatgtgctggcatccctaggcagcagtgtatctgcttcctgtctggggtgtgagctgcatttattctcagaatgatctttattgataagacttgagctggccttcctatcatggatgtggaatacattagtgaccttacaaagttggtgggaacagatactttaccttcttaaacaggagtttaggagcagttgggtccccatcttttggactagctcttaacgttaacttttccccgctgtagtgtagcacagccactccccttcactggggggacctcagtgagttggtcagctctcttggccttacatgtggcagttgttttcttgtttgcaggtgcggccgggtgtgtggcaacattacttcatgatgcagccatgaaccctgcggaagtggtcaagcagaggatgcagatgtacaactcaccataccaccgggtgacagactgtgtacgggcagtgtggcaaaatgaaggggccggggccttttaccgcagctaccccacccagcttgaccatgacgttccttttccaagccattcacttcatggacctatggaattcctgcaggagcactttaacccccaagagaagttacaacccagactcccaacttcttttctggactttgcgcaggagctgtagctgccgcagccacaaccccacttggacgtttgcaaaacactgctcaacaccccaggagtccttggctttgaactcacacattacaggacatatcacaggcatggctagtgccttcaggacggtatatcaagtaggtggggtgaccgcctatttccgaggggtgcaggcccagagtaatttaccagatccccctccacagccatcgcatggtctgtgtatgagttcttcaaatacctaatccacttaaaaggccaggaagagtggagggctggcaaagtgaagttagcactgaacgaaagcccaggggttcaggatgacactgatgcatcctggtcacattctctgtctcctggaatgctcccacctcaagtggagttaaaaggaaaggagaaggggctctcccccacggattttggtgttttgactaacaccagttcctgccaacctctgttgccaccacctttccttccaggccctaagcacgtgcagcaaagcactcctcagcacctttgataacctctgtcacatcctgggcctgatgacgctgctctagactgttatagcagggataagcagctcattccccctggttcctaatataaaagcctttaaattaaaaaaaaaaaaaa

SEQ ID NO: 2955 - DNA, 2823 bp, Homo sapiens
  SIMILAR (1405)..(1578): 741254mologous to Myxine glutinosa calmodulin,accession number AF187305,Smith-Waterman Score=201.
  misc_feature (1)...(2823): n = a,t,c or g
atgctgcagcaaggtgccatcctggaagcagagaccaagccctcaccagacaccaaatataccagtgccttgatcttcaacttcccagcctccacagctgacctgggaaaaacaaaacgacccgccgtagaggaaaaggaaaccccaaacaaaactcgggcgcagagcctatttctactggccaaagagcgccgccaagaccccttccgtccggggctgtccgcgctgccactagtaaagatggcggccataggcggagccgctcactccgaaggccgcaggctaccctgccggccacgaccattcacgcggagccctccacgcccttcgcggcttgacgcattgcaggtgcagcgcgaccaatcagacggcgcggctcttttcggccaaccactgcagggtcgcgccggcctatcagagcgtccttgtcaaactgaacgaggaaagaagcctcagcagcgccaactaagcaaccggctacagaccgcgttccggaggggcccgctgggctcgggttttcagctgcgttggagctgcagaggctgcggagtgaacgcggccaggagcccgcctgggagcgcgcagcgctctaggagccgagagccgctgcttggccctcgctggccgggaagcagaggatggatccagttatgtgaaagtctgaagaaaattgccaaaggatgggtcagccaagacccctctcctcggcagctgaaggagtgtggccaatctgcctccacctccccgcggaccccctactctcaggacctcctgcagcaccccaaactggaagtggccgctgcagacccaaggacgaggggcacgcgggagccggcagccctagtggagcggttggagatgttgagtggtgctgggagtgtcgtggacgccgtgccgttactcgtagtcaggcggcggcgcaggcggcggcggcggcatagcgcacagcgcgccttagcagcagcagcagcagcagcggcatcggagcctctagattgccagatgcgactgtgcgcctcgctgggtgtgttttccacagccccttcctcctcggcgtgcagggctgacatcaccgactgcgtttctggtttggcgggtggggagatggttccccgcagggttctggctgatcagctgaccgaagaacagattgctgaattcaaggaagccttctccctatttgataaagatgggcgatggcaccatcacaacaaaggaactttggaactgtcatgaggtcactgggtcagacccaaacagaaggttgaattgccaggatatgatcaatgaagtgtatgctgatggtaatggcaccattgacttccctgtatttttgactatgatggctagaaaaatgaaagatacagatagtgaagaagaaattccgtgagtcattccgagttctttgcaaaggatggcaatggttatatcagtgcagcagaactacgtcacgtcatgacaaacttaggagaaaaaactaccagatttagaaagtagatgaaatgatcagagaagccagatattgatggagacggacaagtcaactatgaggaattcgtacagatgatgactggcaaaatggaggaccttactttccaactccctttttccccccctctagaggaatcaaattggaatcttttacttaccctcttgcaaaaaaaagaaaaaaagaaaaaagttcatttattccattcctgtttcctatatagcaaaactgaatgtcaaaagtaccttctggtccacacacaccaaaatctgcatgtattggttggtggtcctgtcccctaaagatcaagctacacatcagttttacaatataaatacttgtactaccttaatgataaggactccttaaaggtccattttgctaatgattaatacactgtttgggctggccagttttttccatgcatgcagctttgacgattggagcacaagtcagggcctttggtacttaaaattggaaaatggaaaaaacaaatttcaaaacctattcaaatgggttctagttcaatttgtttagtataaattgtcatagctggtttacctgaaaaccaaacaccattttaaaattgggtttacctcaggatgaccgtgccagaaaaatgggttgaagggataaacccnttgaagacgtggccccactggtaggatggtcctcttggtacttcggtgtgctccggacccgatggtgaccgatgacacaccctgggtggcatgcccggtgtatgttgggtttagcgttgtctgcattggttccaagagtggaaacaggtgtccaggctgtcactggttcacacaaatttttaattaaggaaacatttacccaaggggagcatcctttggactctctggttttttaaaaccttctgaaccgatgacttggagcccggcagagtaggctgtggctgtgggacttcagcacaaccttcaacattgctgtttcaaaggaattacagtttacgtccatttccaagttgtaaatgctagtctttaaatttttctttttttccaataaaaagaccgattaacttaaagtggtgttaaatgctttgtaaagctgagatctaaatggggacaaggcaggtgggaggggaggccagtgtacatgtaaatgcccacagcccagcattggggtttccctccccaaggccccagcaccaacctctgagcccaagaccttgcctgaaaacaagcagataccgattgcttcatcctatttatggacgtgtaggtctagttgcattttcactggggggaggggggaaggtgaattatggtaacttttaatgatctattcaggcagtagagctcttaagg

SEQ ID NO: 2956 - DNA, 483 bp, Homo sapiens
  SIMILAR (269)..(3): 981254mologous to Mus musculus putative,accession number AK004558,Smith-Waterman Score=441.
ggacctccacgacctccaacaccacctcttcttaagcccattcggggagctacggctcgtccacctcggagcaggttttgacctcggagtgacatcccgcccctaagtagggttctggtggcacgtcccccacgtagtcctcctctgggcaagcctctctggattatgggtaggcctcgtcctccgattgctcccctggccagggcccctatgggtcggcctaaccgtgcctggatgttactcttacccaggcgctgctttaagctcttcgaaggaaacagacgccagtgctcctcccggggctgccaccacggctccggcaggcgggccggggaccggccgaacctgagttgacggtggaggggctcgggttagctagatgggcggttggttagatgcgtaagcggtagtatgcgagctcagttcgttgttgctggttggctgtctagtcggccgatccgtctgctcacccggcctgccctt

SEQ ID NO: 2957 - DNA, 427 bp, Homo sapiens
tttcgtgccgctgcagacgaaaggcaggaaagggcaggccgggtgagcagacggatcggccgactagacagccaaccagcaacaacgaactgagctcgcatactaccgcttacgcatctaaccaaccgcccatctagctaacccgagcccctccaccgtcaactcaggttcggccggtccccggcccgcctgccggagccgtggtggcagtcccgggaggagcactggcgtctgtctccttcgactctcgggattcgaagacggctgcacagtcatcgtcggaagtcggtgctcttccgccccatcaagatgtgactatctgtgcggtgagggctgcaacttgattttctcttccctcctactacatcatcaccagcctatgactcggtgtatggttggcgatgagtgtagttcgcccaattcttgg

SEQ ID NO: 2958 - DNA, 387 bp, Homo sapiens
  SIMILAR (134)..(385): 981254mologous to Homo sapiens HT031,accession number AF261137,Smith-Waterman Score=392.
agcggccgctgcagacgaaaggcaggaaagggcaggccgggttcggccggtccccggcccgcctgccggagccgtggtggcagccccgggaggagcactggcgtctgtttccttcgattctcgggattcgaagatggctgcacagtcagcgccgaaagttgtgctaaaaagcaccaccaagatgtctctaaatgagcgctttactaatatgctgaagaacaaacagccgacgccagtgaatattcgggcttcgatgcagcaacaacagcagctagccagtgccagaaacagaagactggcccagcagatggagaatagaccctctgtccaggcagcattaaaacttaagcagaagagcttaaagcagcgcctgggtaagagtaacat

SEQ ID NO: 2959 - DNA, 1151 bp, Homo sapiens
  SIMILAR (239)..(814): 861254mologous to Homo sapiens HT031,accession number AF261137,Smith-Waterman Score=813.
ggcctcgttatcacttttggttgaatgtgctgcacttagctgcatttctaagtttctgattcttgcaagtttgtggaaacagaggagtctttaacccacatcagccttgatctaagtgtaccactttacttaaaagttcgcgggatctggagctactggtctagcaagccatgaaaatgccaataaatgtttgtaataaagcttttatttaaacatccattttgttcgaccttgaagctttactaatatgctgaagaacaaacagccgacgccagtgaatattcgggcttcgatgcagcaacaacagcagctagccagtgccagaaacagaagactggcccagcagatggagaatagaccctctgtccaggcagcatttaaaactttaagcagaagagcttaaagcagcgccttgggtaagagtaacatccaggcacggttaggccgacccataggggccctggccaggggagcaatcggaggacgaggcctaccccatattcaagagaggctttgcccagagaaggactacgtgggggacgtgccaccgagaaccctacttaggggcgggatgtcactccgaggtcaaaacctgctccgaggtggacgagccgtagctccccgaatgggcttaagaagaggtggtgttcgaggtcgtggaggtcctgggagagggggcctagggcgtggagctatgggtcgtggcggaatcggtggtagaggtcggggtatgataggtcggggaagagggggctttggaggccgaggccgaggccgtggacgagggagaggtgcccttgctcgcccctgtattgaccaaggagcagctggacaaccaattggatgcatatatgtcgaaaacaaaaggacacctggatgctgagttggatgcctacatggcgcagacagattccgaaaaccaatgattgaagcctgcccatcctcccatgaaagactgttgttagtcaacacatttgtaaataaccttgagataacagatgagaagaaatttgattgatgctggatggacctatcacaataggctgtggacttacttgccaccagcttgtgcatttagtgtgttccttttactttttgatactgtgttgtatgaaacccttttgtcctttgaaaaaaaaaaaaaaaaaaaa

SEQ ID NO: 2960 - DNA, 905 bp, Homo sapiens
ttcgtgaaaaggctaaggcgtatgtcacctgcctactttaggaatgcttgaggtccggtactgtgggggtctaagggtctggttaaaagtctaaaagcactaagctgggtacgcggacaatacagctaaaatcttccctgtcctctagtggtacgcggatctgacgcctgacgtaattgtgtagacgccattttagccggtcagacaagcactggacgtggcggccattttgttttggacaccgagcaggagctggcggccgctgcagacgaaaggcaggaaagggcaggccgggtgagcagacggatcggccgacctagacagccaacgcagcagcaacgaactgagctcgcatactaccgcttacgcatctaaccaaccgcccatctagctaacccgagcccctccaccagtcaactcaggttccggccggtccccgccgtcgccgtgcccggagccgtaggtggcagcccccgggaggagcatctggcgtctgtttccttcgattctcgggattcgaagatggctgcacaagtaagctccgaaaagttgtgctaaaaaagcaccaccaagatgtcttctaaatgaggcgcttttacttaatatgcttgaaggaacaaacaggccgacggcagtggaatatttcggggcttttggatggcagggcaacaacaggcagcttgggccagttgtccaggaaacaggaaggatttggcccaggcagatgggggatttgggaccctctgttccagggcagcatttaaaacttaaggcagaagagtttaaaggcaggcgcttgggttaaggagttaacattccgggcacggtttagggccgacccttaggggcccttgggcagggggagcaatcgcgaggacgaggcctacccataatccagagaggct

SEQ ID NO: 2961 - DNA, 352 bp, Homo sapiens
  SIMILAR (19)..(129): 1001254mologous to Homo sapiens Extended human secreted protein sequence, SEQ ID NO. 498,accession number AAY36113,Smith- Waterman Score=189.
ccgctagcgcctcgagcgatgcacctcctttccaactgggcaaaccccgcttccagcagacgtccttctatggccgcttcaggcacttcttggatatcatcgaccctcgcacactctttgtcactgaggaagaaggctgtctttgttctaagaatgccttgaacaaagcttcagaggaggaggttgccctgcttgacagaggagaagaatggtgcattttgatcctaaatggagaaaggagagggaaggaagaggaggaaaaaaacagcgggaaggagagcatgatactgagatgagctgaaagaccaataaagaaatgccacaatgaggtgtggctgggggctcttttgaa

SEQ ID NO: 2962 - DNA, 420 bp, Homo sapiens
  SIMILAR (1)..(222): 861254mologous to Mus musculus putative,accession number AK003605,Smith-Waterman Score=343.
aaactctgcacgatggttgccccaaagctccgctcctggatgtatgctgtgtacggggccttggctgtgatgggcacaatgggcccttggtacctgctgctgctgcttggtcactgtgtgggcctctatgtggcctcgcttttgggccagccctggctctgtcttggccttggcttggccagcctggcctccttcaagatggaccccctaatctcttggcaggtgagccaggtggagccagtgagacgcgagggtgagctgtggcacatccgagcccaggcaggcctaagcgtggtggccatcatggccgtcgacatcttctttcacttcttctacatcctcactatccccagcgacctcaagttcgccaaccgcctcccagacagtgccctcgctggcctagcctattcaaacctggtg

SEQ ID NO: 2963 - DNA, 437 bp, Homo sapiens
  SIMILAR (144)..(437): 481254mologous to Homo sapiens Human secreted protein sequence encoded by gene 14 SEQ ID NO:73,accession number AAB51840,Smith-Waterman Score=189.
tcatccctcctgcttggcacgagggatcctggaggacccaggcctgaccaagtacccggcctcagtttgttatcatgctggcaggcttggaacttctcgctctgtgaccagcctgggccacacactggtggaatgtgctctcacgaggccttccctgcccagtccccacaggacctcacctaaggtggaggagagcaacagcaagctcctggagtcagagaggaagctgcaggaggagcgacaccgcaccgtggtgctggagcaacatctggagaagatacgcctggagccagggaaggcatcatcctcccagagagcagctcccatgaccaaaacagctccgctcctggatgtatgctgtgtacggggccttggctgtgatgggcacaatgggcccttggtacctgctgctgctgcttggtcactgtgtgggcctc

SEQ ID NO: 2964 - DNA, 337 bp, Homo sapiens
  SIMILAR (25)..(249): 851254mologous to Mus musculus putative,accession number AK003605,Smith-Waterman Score=328.
cttagctgacctgctcaagtacaacttctacctgccatgaacttctgggccatcatcatgtacaaccttgtgagcctgaacagcctcaaattcacagagctggttgcccggcgcctgctactcacagggttcccccagaccacgctgtccatcctgtttgtcacctactgtggcgtccagctggtaaaggagcgtgagcgaaccttggcactggaggaggagcagaagcaggacaaagagaagccggagtaggagggagcgggtagagggatgggctctgctcagctattcttgggccagatggggcctgaccgatagaataaaagacttttctaca

SEQ ID NO: 2965 - DNA, 6777 bp, Homo sapiens
  SIMILAR (1443)..(1150): 181254mologous to Homo sapiens cyclophilin-related protein,accession number L04288,Smith-Waterman Score=61.
ctagttgttggcgttcatcctcccgccggggctggcagtggtggggaagagcggaggcgggggcggcaggtggggcgggggcggcagggtctggggcagccccgggagcaggggcagtgcgtgcgcctggggctgggttgggggcaggcctggggcagcggggacgccgtcgccggccagggtgtggctgacgcggaagcacttctccttgtgggccttgagcatgttggagaagcggaagcgctggccacacacgtcgcacgggtacggcttctcgcccgtgtgcgtgcgccggtgccgcttcatgttgggccggctggtgaagctcttgccacagatctcgcagatgtacggcttctctcctgtgtgggtcttcatgtgctcatcgaagtactgcttcatgttgaagtccttgccgcaccattggcacatgaactgcttgtggccaatgtggatgctcatgtgtgaccgcagctggtacttgtactggaagcgctcattgcagttctcacatctgaacggcttctcccctgagtgctgcagtgagtgcaccttgagggacatgctgcgcttgaaggactttccgcaggtctcgcaggtgaagggcatgtccttggtgtgggcaaccatgtgcttacgcacgtgggccatggtgtagaacttcttctcacagatctcgcatgagaacttcttctctgcgtagccgtgcacaatcttgttatgctcatggagggaccaaagcttcttgaaagctttgccacatgtcacacactggatgttgcgctcgcagtctgtctgcctgtgcagcagcagctcgctctccagcaggaagcgcttgccgcactggtcgcagatctgcatgcggctgtgggtcacattcatgtgtttctccaggtaccagcggttgttgaaaactcgtgggcacttctggcatggatggtgctgcttctcctccagcttcaccttggcccccagcccatcagtggctggcggccctcgggccgatgcagaggccactccagggggtggctttggcctcttcccaccccgccgcccagcttcttcaggttcaggggtaccccggcgccgggcgttctcccgggaccgtgtggccatgtgactgtggggaggggggtctgcccggctgcttcggcttccccgtggcccctgcttgcccccagcctccccctcctccccctcctcctcctcagagctctcttgatcctgctcactaggcccttcctcctcttcctcctcctcttcctcttcctgctcactgtgcccgtcctcctcctcttcttcctcttctccctgactgccaccctcttcctcctcctcctcctcccgtccactgccaccaccttcctcttcctcttcttcctcctcctcctcctcgtcgtcctcctcctcctcgtccgagtgtctctgcagcccgtcctcccggcccagaaccacggtggctgggcttggcccggcacctggcttcccctctggccccgtggacacgtgcagtgtctggttgttgaggttcacctccacgatgatctgggattgctccctgcggctgtaggtgccagaacccccaagctcttcctccaactcttctccaccctccagcttgcacaagctggctgggggcccaccggcctcctcgacaccaccctccttctcctccttaaagaagggctgggctggcccaatggtggcaggcactgtgccaccagcagtccctgccccgtcctcaacacgcaccgagtaagggtcagggccctcgcgggcatagatcttgggcaggcctggggtgtcggcctcctgcttgatgtcacagtagtagggcggcgcagctggagtgcagctggcagccggctgggccagggccacagtgcccggacctggtgggcctagagagcgggcgtccagcagctcttggcaggacgcagcgatgtcagccatctgcagcaatgaggcggcgctgagcacctcgtggacgttggccgcgttgaccagcagcttggacgtatagatgaagttgaggatctgctgcaggccaccaggtgccagtgcctccagggacagctccacacgctgcagctgcttgttctgggtgaagagtgagtggaagaactggctgtaggcggctagcacacccttgtgtgccggaaagacgctgcgctggggcaccagcaccaagtccacgtcgcagaggtcaggctggaagaggcgctgctcgttcaggcggcccatcaagcaggcaaagtgcagcgccacgtcctccaccagcgagaactcagccgccggggagtcagttgtcttctcaaccagcaacatggtgccgtggcgctgggggctcacagggccccgcgggatcgcgctgcccccggcggccaggccagggccgctccatgaagcgccgcgctgggggccgcccccgcgcagggccccgcgaccatggcccccgggggcgcggccaggcaggcggaggcgcagggccgcggcgagtccagcgccaagcagctgcggccccagagcctcgggcgcggcgggcggggggcgcggggcgccgattggagcccgcgcgtcagctggggccgccgtctggacgctgaccactgctgagtggcccccttgctcagcctctgctggggagatgcagccaggcttgcggaatgctgctctggcatggacacccgtgggggcagggggctggctctgttggcaggaggctggcaacactggacctggcaggaaggagtggtttgaagagctgtctggtgggcccacagggctgctcagagctgaggcttgaacttgaacattaactagagcaatgagggagtgaaagggctttccagacagaaagcctggaccgccgattataacttctgcctcggtggtaactgtcacttctctggcttctacttcgactccgactcctgctatagtagctatcgtaggtgtaggacctgctgtgacttttgtaactccggtaggaactgctccggcttctggttcggcctctgctgtaccatcctctgctccgacttctagagtagcttcttgatttcgagatctacttggactcctggactggctatcatcatcccgactaggcgtctgctcatcacttgaactctcctgatttcttggtctacggtttaagcgtgctgtctttcttacttcatcaaagagagacccaggccgaactttatttttgcttttaatttctattctcaagccttgtggtttcatttcaggcacagtggtcaacaccttaacttccacagcactggatgtggcagcattaggtgctgccaggttccccacaccttgcaggggcttccatttcttatcaatgaggttgatctggctcttctcagccacctccttcttcccggtactttctccagcactagccaagctagcagagctgctgtcctgtttccccacttcacccaacactttactttcggacatgctgctttcctgttttactacctctgcttgaggatgttccgttgccatatcctgcttcaaaacaatgtttatatctggggtatcaagccgtgcatttcctagaggggaagtctcctctacttttgctggggaactcctatcaggagtgcagatctccatgttgtcatctgtttgaagcacatcttccactccattgggaacactttcttcaacgtgctgaatgttttgtaaacaggccacattttcctcagtatttaaagctgtgggagaaatactgagtttactatcatctttagtaaactgatcaagatctgatgaaacagtcactgtatcatgtttacctgaaaggtcctcttcactggatttctcagtttttagaatattatcttttatggtttcattgttttcagaaacttttttctcttttgattcctgagtaacttgcttgtcatcaatctcctcctcctcctcttcaccaaattctagtggaggctgccagtgaaatgcttgctttcgttttggagccttatgctttttgtcttttttccctttcaatttctctttcacttttttggtgtgttctcttttaagattttcctttgacccatgtttgtgcttttgtggctttcccctattgttttccgaattggaacaggacccctcagagtcagaagttgatgtgcgctgtttgcttgatttccaagcaccattatcatcaggcagtgaagtatttgtggacgacttggttgtgggtttgactttgatgtgaatttcactaacctctgattcagaatcggatgtggcctcaccttcttccttgtcagaggatggatgggagtcatttttactgtttttagtgacatctcgttctgaatttgactcagagtcccatttactaccagcataattcttccttttgggcttactgccatttctaaggtgatcagaaagattctctttcaaagttcttttttttgaatgagggcattcccgttcagacttggatttttcttcacctctgtttttttcttgtttattatgtgttctttccatttggccctgcttctctttttcctgggctgactgtgtggcctgaacacttgactgctcactgtctgaagaataatctaaagatgatctgctctcgctatactttctcacacatgaagacctgtctctacctttgacatatttactgtgaagtgtcttttcagagctgctgctatgctttttatgtgaaacgctattttttttcccactggatctaagtctcctcttagctcgccttccatcatcactgctaatagaagtatatgaagatgatctactacactgtgaatgatcactgtatttatttcgtgaatgagatctagatgatggagacctagaccttgaatgtgaactagctagactacgtgatcttgtatatgatctggaataagatctactcctagaagatctgctccttgaccttggtgagctttctgaacttctatcactgtattttgaataagtgctctgatcactttccgaatttttttctcttttatggtaggatgatgagctaccagtctctttaatatttgctaaactgtaagtgctttggatgggtagcaaatgggttgttttagctttcatttcctgaattcgctcataagagggcttccaaggtttctgtccaggcttccatcttgaaggggggggactgtcactcagtggtattacaggaatattttctgctacaactggttgtactactacattttcattttgtgccatggttgctcttaaaggttctgttttaactggtttattttcacttaactgagaagctgtttttcttggtgattttgatgctctctttcggtgcccagacttggaactagatctggactttgatctacttcgagaatgtgatgaggactttgacgcagtccttgatcttgagcttcctctagaataagactgtgagtgagattttgatctgtatgagtctctgctggaatgggttaaagagctctggacatccttatcagatttagaccagtctctctttgatgagtgatgagatgacaatgaggaagaacgagaactcctttctctatcacaagaggatttcattcttcgagtggaagattttgaggattctatgtcagacggtataagaatccttctcttctttgtttgtttgtgtcttctgcagtgtttctgctttttccctttctttttatgcttaacctttttttcttttctgcgttttttatggtggccagagtgtcttgctgtactaaggtctgaataatatccattataggaccatgatctggatctctgagacaagcttctttcatcccatcggcttgaacaggggtcacttaacttatctcctttactccatttttctccactaggtggtctatatgctcttaatctctgcatttcctctttccagtgaggaggagtttcactgctgtcatcatcatctgactcagaacaggatcttgatcttggaggtgtgtgatagcgaatgggtgcaacatcaggaatcttcggttcaggttctgcagtaacaacaggcatatctcttctcagtaaaaatcggttctcaggcactggaggaatctcttctgggcggaccacaggtttttcccttttagcactggaatcaactgaccttttttcattggtatcactcctctcagagtgaccttttgggttcattgcatgtttattccttggctcttctgaactgcttgcttcctttcgcctctttttagaacgtttaacttttggcctcctcttatgtttcctccttctgcttctctcatgttcaagttcactttctgaagatgattcatcttttattgattttgtggcaagtactccacagtcaataactcgcacatctgcatatggtctgcttgcagcatcggtcttcagattttcaatttgttcgattacttcaaaaccagaaataaccagtccaaagactacatgcacccttttcattttgcaaaagaccacattctcttcactgaagtccccaccctgaatcataaagtttttaaccacacgatggaacgtagaacctttataacataacttcttcccagttgttttcccaaggcctttctctcccggctcccggttgatctcgatgtcgaagtggcactgcggccggtcctgcgcccccatcgcgaccgaggtggcggcaagaggccggcccgtcgcgacagcgcaggaggccaagacgaggccccctcccgccccgggcctcgcggctcccacgcagcgcgcacgcat

SEQ ID NO: 2966 - DNA, 157 bp, Homo sapiens
ctggtaaaggagcgtgagcgaaccttggcactggaggaggagcagaagcaggacaaagagaagccggagtaggagggagcgggtagagggatgggctctgctcagctattcttgggccagatggggcctgaccgatagaataaaagacttttctaca

SEQ ID NO: 2967 - DNA, 501 bp, Homo sapiens
  SIMILAR (323)..(3): 811254mologous to Homo sapiens cyclophilin-related protein,accession number L04288,Smith-Waterman Score=487.
ccttttgggttcattgcatgtttattccttggctcttctgaactgcttgcttcctttcgcctctttttagaacgtttaacttttggcctcctcttatgtttcctccttctgcttctctcatgttcaagttcactttctgaagatgattcatcttttattgattttgtggcaagtactccacagtcaataactcgcacatctgcatatggtctgcttgcagcatcggtcttcagattttcaatttgttcgattacttcaaaaccagaaataaccagtccaaagactacatgcaccccatccaggtgtggagcaggctttgtggtactttggagcgcacggtgtaacactctttatgaaaaactgggaaccattggtatgtttccctcgatttgccattgataaaaggaacgctctgtcatgtttgagaataaagttttcatctgtttgaagaaaacacaaatttgtcagtctccaattataagtcactttaaagtaatgttc

SEQ ID NO: 2968 - DNA, 7138 bp, Homo sapiens
  SIMILAR (7001)..(6477): 921254mologous to Mus musculus cyclophilin-related protein,accession number L04289,Smith-Waterman Score=866.
acaacataattcaattttattaaaaaataacttcaaaatgtagaacaatcccctttaggaagaaaagctatttctgtagttcactctgtcagtaaacacacaagttgaacgctgcagcagagggctgtccttttccatggagaaaagaaatgaggcttctagggcctatcttttctgggtaaaaattccacctacagctgagatgggcagttattgcctgtggtaggcagaatttgaaaatgcccctcccactttcaatgagctaatctccagaacccgtgaatatgatgagatgagacagtactcctgcaattatgttctatcgcacaatcaaccttaaaatatatctgtgggcttgagctaatcatatgcccctaaaacaggaggacgggagagagatatgaagcatgagaaagagcaggaaggctggtttgaagctggaggggaccacataagaaggaatgcaggcagccttgaggtgagagaggggcctccagctgagagccagcaaagaactgaattccgccaacaacctgaatgaacttagaagcagattcttccccagagcctccatgaaggaatgttgtcctgccaacccttatttcagcctttaagaccctgagcagagaatccagccacactgtgccagactcatgagctacagaactgctatgggtattgttttttaaactgctaaatttggggtaatttgtcacacagcaatagaaaactaatacactgcccaagggtaacttttcttaacctaattacatttggcagtttctgcttgggttctgaatgcatttttttcctgctgactagtagtaatattctcctttgcaggcaacctttggaaacctttaatataaatcatactgttttgtattcagtatccagtattgtttgtttggcctaagtcctgttttctaatgtactttctgtctattgacctggcaaacaactgaccaccttaccctgttttcataccttctttgggtgatagttttaatacattcaagggcaccctccctccaccaagggttgtcagctccctccaactgagggctcttttccacttcccaaatacaccagacaaggcctgtggtagggtggtgctgagctctacatcaggcaaccaatatgaatttcttctgcataactggattaaactggcactaaggtgattaagtacacttggggaacaaattcaaagtaaagattaaaaaaaaaaaccacacacacacacacacacacacacacacacacactagtttttacaggtccaattatttttggaggaaccacccaaagccatgaaaatatgtaatttatgctataccctctatccctcttcccctgtctcttgcacctgggtcaggtcacgcaaggctttgagtcagctgcaggtcacagtggaaataggaaaaacatgctggttacaacagttcagctgctgttgtggtaatatcctgtacttgaaagacttgaaaggaaagccctgcaaaatgtctccaggatggtggcagttagatttttgatgttacttttgaagtccattcttcactcttccagaggcacacacacacagtagacttgagtggccaatatctcttactgccaatcctgcctgctccaggggaccccaacccacatctgtacttgagagaagccccccaaatagtcaaagtgaagacagctcagaataaaccatttttggtgccagtgattttgtctgaatttcatttttatggtattttaatatatgatatataagagtaatgcttaaagacgcaccaaaaattaccaagcaccaaagcatgaagtagaattgtttttataacctaaacttctgatcggtattgattaaaaagaacataaaatagtaagtcctcagagacagtgcaggtatttatagttaaggctgattgattcttcctaaccttgcccacaagcctgaagtaatacagactgtgtgggatgtatgatgaccactttcctaatcctgtgaagtatcaaagaagttaggaatgaattaagaaccccagagccactgccttatactcctggttaccaacagtatcaattctgggtggtttgtttttagagcacatatgtacaagactctatgtaatcagtatataaatatttggccgcctttaacagttctccttcacagttctatgcttggcagcatatatgctaaaactggaaaaacaggcaaaaagaatctgtattctaagggatacgtaagatagagtgaaatagacttaaaataatattgcaaattatacatagataaatttcacgatttcttgattcaagaaaatgaaattcatttccatagttggctactgtaaaatgtggcataaaaatatttttaggagacatatctgtattttaaattcttctccccacatgtaaatgaaccagtaacaattaagaagtgtctatttttgaaattcacctctgatattgaaatagaacaacagactgtcattacatttcttaagctaagttgccagatatttacaaataagatataatttgtatccggacgttttcaactgtatctgctgctctcactggggctccggtgatgagagtaacttcggtcactttcactgtcagagccataagatctacaactcctggaccgccgattataacttctgcctcggtggtaactgtcacttctctggcttctacttcgactccgactcctgctatagtagctatcgtaggtgtaggacctggatcgactgtggggatcatatgagctgctcctggatctgctcctgctggacgtcctgtgacttttgtaactccggtaggaactgctccggcttctggttcggcctctgctgtaccatcctctgctccgacttctagagtagcttcttgatcgataagatgatgtggaacttctcgatcgacttcttgagtgactataggagacagaccttgttctgtgtcttgatttggtttcagatttacttcgagatctacttggactcctggactggctatcatcatcccgactaggcgtctgctcatcacttgaactctcctgatttcttggtctacggtttaagcgtgctgtctttcttacttcatcaaagagagacccaggccgaactttatttttgcttttaatttctattctcaagccttgtggtttcatttcaggcacagtggtcaacaccttaacttccacagcactggatgtggcagcattaggtgctgccaggttccccacaccttgcaggggcttccatttcttatcaatgaggttgatctggctcttctcagccacctccttcttcccggtactttctccagcactagccaagctagcagagctgctgtcctgtttccccacttcacccaacactttactttcggacatgctgctttcctgttttactacctctgcttgaggatgttccgttgccatatcctgcttcaaaacaatgtttatatctggggtatcaagccgtgcatttcctagaggggaagtctcctctacttttgctggggaactcctatcaggagtgcagatctccatgttgtcatctgtttgaagcacatcttccactccattgggaacactttcttcaacgtgctgaatgttttgtaaacaggccacattttcctcagtatttaaagctgtgggagaaatactgagtttactatcatctttagtaaactgatcaagatctgatgaaacagtcactgtatcatgtttacctgaaaggtcctcttcactggatttctcagtttttagaatattatcttttatggtttcattgttttcagaaacttttttctcttttgattcctgagtaacttgcttgtcatcaatctcctcctcctcctcttcaccaaattctagtggaggctgccagtgaaatgcttgctttcgttttggagccttatgctttttgtcttttttccctttcaatttctctttcacttttttggtgtgttctcttttaagattttcctttgacccatgtttgtgcttttgtggctttcccctattgttttccgaattggaacaggacccctcagagtcagaagttgatgtgcgctgtttgcttgatttccaagcaccattatcatcaggcagtgaagtatttgtggacgacttggttgtgggtttgactttgatgtgaatttcactaacctctgattcagaatcggatgtggcctcaccttcttccttgtcagaggatggatgggagtcatttttactgtttttagtgacatctcgttctgaatttgactcagagtcccatttactaccagcataattcttccttttgggcttactgccatttctaaggtgatcagaaagattctctttcaaagttcttttttttgaatgagggcattcccgttcagacttggatttttcttcacctctgtttttttcttgtttattatgtgttctttccatttggccctgcttctctttttcctgggctgactgtgtggcctgaacacttgactgctcactgtctgaagaataatctaaagatgatctgctctcgctatactttctcacacatgaagacctgtctctacctttgacatatttactgtgaagtgtcttttcagagctgctgctatgctttttatgtgaaacgctattttttttcccactggatctaagtctcctcttagctcgccttccatcatcactgctaatagaagtatatgaagatgatctactacactgtgaatgatcactgtatttatttcgtgaatgagatctagatgatggagacctagaccttgaatgtgaactagctagactacgtgatcttgtatatgatctggaataagatctactcctagaagatctgctccttgaccttggtgagctttctgaacttctatcactgtattttgaataagtgctctgatcactttccgaatttttttctcttttatggtaggatgatgagctaccagtctctttaatatttgctaaactgtaagtgctttggatgggtagcaaatgggttgttttagctttcatttcctgaattcgctcataagagggcttccaaggtttctgtccaggcttccatcttgaaggggggggactgtcactcagtggtattacaggaatattttctgctacaactggttgtactactacattttcattttgtgccatggttgctcttaaaggttctgttttaactggtttattttcacttaactgagaagctgtttttcttggtgattttgatgctctctttcggtgcccagacttggaactagatctggactttgatctacttcgagaatgtgatgaggactttgacgcagtccttgatcttgagcttcctctagaataagactgtgagtgagattttgatctgtatgagtctctgctggaatgggttaaagagctctggacatccttatcagatttagaccagtctctctttgatgagtgatgagatgacaatgaggaagaacgagaactcctttctctatcacaagaggatttcattcttcgagtggaagattttgaggattctatgtcagacggtataagaatccttctcttctttgtttgtttgtgtcttctgcagtgtttctgctttttccctttctttttatgcttaacctttttttcttttctgcgttttttatggtggccagagtgtcttgctgtactaaggtctgaataatatccattataggaccatgatctggatctctgagacaagcttctttcatcccatcggcttgaacaggggtcacttaacttatctcctttactccatttttctccactaggtggtctatatgctcttaatctctgcatttcctctttccagtgaggaggagtttcactgctgtcatcatcatctgactcagaacaggatcttgatcttggaggtgtgtgatagcgaattgtgccccttcctttaatcttccgtccagactttgatacagatggtttctgatcacttacaatgggtgcaacatcaggaatcttcggttcaggttctgcagtaacaacaggcatatctcttctcagtaaaaatcggttctcaggcactggaggaatctcttctgggcggaccacaggtttttcccttttagcactggaatcaactgaccttttttcattggtatcactcctctcagagtgaccttttgggttcattgcatgtttattccttggctcttctgaactgcttgcttcctttcgcctctttttagaacgtttaacttttggcctcctcttatgtttcctccttctgcttctctcatgttcaagttcactttctgaagatgattctgaagaagaggaggaattggaagaggaatccgagccttctgaatgagttggtttcttcctttttttctcaaaaacatcttttattgattttgtggcaagtactccacagtcaataactcgcacatctgcatatggtctgcttgcagcaggcggtcttcagattttcaatttgttcgattacttcaaaaccagaaataaccagtccaaagactacatgcaccccatccaggtgtggagcaggctttgtggtaatgaaaaactgggaaccattggtatgtttccctcgatttgccattgataaaaggaacgctctgtcatgtttgagaataaagttttcatctttaaaatatccaccataaattgattctccaccttttccattaccttcactgaagtccccaccctgaatcataaagtttttaaccacacgatggaacgtagaacctttataacataacttcttcccagttgttttcccaaggcctttctctcctgagcacaagcaaaggaagtttttgcatgtttttggacatatgtctgagaagagctgaaacataatgcgaccaaccggctcccggttgatctcgatgtcgaagtggcactgcggccggtcctgcgcccccatcgcgaccgaggtggcggcaagagctggctggcctccagcctgagcgggtccccgtgagcagaagagaaagcactgccactgcagccaaaccccaacgccgctaacggaacgccgtctcctcccccaggccgggcctcccaatgccacgctaaaccccgcgagagtcgggacaaataccgcgagagtac

SEQ ID NO: 2969 - DNA, 1161 bp, Homo sapiens
  SIMILAR (559)..(1131): 1001254mologous to Plasmid F Protein A,accession number M12987,Smith-Waterman Score=1014.
gtcaatctgtgctcatggatgggcttctcagcaatataattctttttattttttatttttctcttcagttttccaaaatgggtcggatagtaagcagtacaatatcatgtgtccctgtaaggaaggttcccaagtaccaagcgaaatctgaatgttaccagactctttaccctaaaatggttaagaaccattgttttaaaggcagaaaactgaggcccagtttgcataatcgtttccttttatgaagcagatttcaagttctcattccattctagttgcttcatacaacaaacagtttggttttattttcaggtctgtggacatgtcattgattacagttaattgtcttgattactgtttatagcttaattatcaaaccagttgtttcttgaatttgtattatgacaggcgggtgcatgtagtctttggactggttatttctggttttgaagtaatcgaacaaattgaaaatctgaagaccgatgctgcaagcagaccatatgcagatgtgccgagttattgactgggggagtacttgccacaaaatcaataaaagatgcctcaatgtatcacggatgggtaccagatcttcatattcatgcagaagacactctcctgcctttctatcttggggaaaaggacgatgtcacttatgcaataaagcccacttgctggccggggcttgacattattccttcctgtctggctctgcaccgtattgaaactgagttaatgggcaaatttgatgaaggtaaactgcccaccgatccacacctgatgctccgactggccattgaaactgttgctcatgactatgatgtcatagttattgacagcgcgcctaacctgggtatcggcacgattaatgtcgtatgtgctgctgatgtgctgattgttcccacgcctgctgagttgtttgactacacctccgcactgcagtttttcgatatgcttcgtgatctgctcaagaacgttgatcttaaagggttcgagcctgatgtacgtattttgcttaccaaatacagcaatagtaatggctctcagtccccgtggatggaggagcaaattcgggatgcctggggaagcatggttctaaaaaatgttgtacgtgaaacggatgaagttggtaaagacttgcatgccctgctagtgcgactctag

SEQ ID NO: 2970 - DNA, 746 bp, Homo sapiens
  SIMILAR (456)..(746): 1001254mologous to Homo sapiens cyclophilin-related protein,accession number L04288,Smith-Waterman Score=487.
ttttaagtgttttgttttgttgttttggagttgagagtaactttaatttttatgtgtattcatgctgtgtatttatggctacaagtcaaactgatttcatatgtatgcatacatatagtctaatagagatgattgtaattcattataatcttgagtttttttaaattagtaagatggctactattgctgttttggggtttttaaggttagatatatatcatgtttaactttttcccctatctttttatctttacttctttgttctctacatgctgtgtttaaacctttctgctctcttcacctgaacacatcgtgtttgacatcatctttgtgttgatgtttattacatagtaccacaaagcctgctccacacctggatggggtgcatgtagtctttggactggttatttctggttttgaagtaatcgaacaaattgaaaatctgaagaccgactgctgcaagcagaccatatgcagatgtgcgagttattgactgtggagtacttgccacaaaatcaataaaagatgtttttgagaaaaaaaggaagaaaccaactcattcagaaggctcggattcctcttccaattcctcctcttcttcagaatcatcttcagaaagtgaacttgaacatgagagaagcagaaggaggaaacataagaggaggccaaaagttaaacgttctaaaaagaggcgaaaggaagcaagcagttcagaagagccaaggaataaacatgcaatgaaccca

SEQ ID NO: 2971 - DNA, 2980 bp, Homo sapiens
  SIMILAR (1442)..(2566): 731254mologous to Mus musculus putative,accession number AK003605,Smith-Waterman Score=1330.
  misc_feature (1)...(2980): n = a,t,c or g
attggcacgaggggcagaagtcttaggatacggctcgcacagtcgtggtagggttccaggtgcattagtggggcagggggcgggccggctgttcacagagcacccaggttcctcaccagttactctggccatatatccaacacagaaagcaacaagtgtggctgtgtccatctctgctcccccaaaggcccgctctaggccttatcctccctctaggtcctgccacaacctgtccctggctggctccagcgtcctcggtccctcctgggcctgtgcaccggtggatggggcgcccatagcactgccggtaaaggagcctgcatgttcaggcccctcgggggatttggggggactgcgggaggcgcagcctaagacccaaattgcttgcccccaatgaggctagcacttaataggaaacccttttttgttgtcatttaatgtctttattcctgcctttaantaatgggggaggaaggttccataagctacatgtttcctaagttaaagctctttcctatttgtgtttatacagtttttgttttgtttatactcttttgcacctttaaacccccaccactccccgacactattgcctttcccagcatggctggagtgggaagaggcttgggccccgggggaatggttagggggactgaacccctctgaccttatgaggcccatggcactggggcagggagctggggacattttaatcatcaataaacgaagcactttattctgtacagatttgggcaggcccaaggtgcccgagtgatctgaggatttataatccaagccacaccaccctggttgttctctgggcttggagggtacagtgccagcagcttccttgcccaattgatgttggagctgtagacgtacgctcaggcgctcctgctgtccatcttttattgattttgtggcaagtactccacagtcaataactcgcacatctgcatatggtctgcttgcagcatcggtcttcagattttcaatttgttcgattacttcaaaaccagaaataaccagtccaaagactacatgcacccccagattccagaggggggtcactgagaaacccaatcctgaagggaggcaggcagaagtctgtcccaggtctgccatgtgaccttgacaggtccctgcccctatctggcccatgacccctccatctgtacgaggagaccgtcggctgctggggggcccaggggagatggctacagggctggggatgaagatttaggggaggatcaaggccctgtccaggctatgggcatcaagacagcattgccggcggctgagctgggcctctactctctggtgctgagtggggccctggcctatgctggccggggcctccttgaggcttcacaagatggggcccacaggaaggccttccgggagtctgtgcgacctggctgggagtacattggccggaagatggatgtggctgacttcgagtgggtgatgtggttcacctcctttcgcaacgtcatcattctttgccctctccggacatgtgctgtttgctaaactctgcacgatggttgccccaaagctccgctcctggatgtatgctgtgtacggggccttggctgtgatgggcacaatgggcccttggtacctgctgctgctgcttggtcactgtgtgggcctctatgtggcctcgcttttgggccagccctggctctgtcttggccttggcttggccagcctggcctccttcaagatggaccccctaatctcttggcagagcgggtttgtaacaggcacttttgatcttcaagaggtgctgtttcatgggggcagcagcttcacagtgctgcgttgcaccagctttgcactggagagctgtgcccaccctgaccgccactactccttagctgacctgctcaagtacaacttctacctgcccttcttcttcttcgggcccatcatgacctttgatcgcttccatgctcaggtgagccaggtggagccagtgagacgcgagggtgagctgtggcacatccgagcccaggcaggcctaagcgtggtggccatcatggccgtcgacatcttctttcacttcttctacatcctcactatccccagcgacctcaagttcgccaaccgcctcccagacagtgccctcgctggcctagcctattcaaacctggtgtatgactgggtgaaggcggccgtcctctttggtgttgtcaacactgtggcatgcctcgaccacctggacccaccccagcctcccaagtgcatcaccgcactctacgtctttgcggaaacgcactttgaccgtggcatcaacgactggcttttgcaaatatgtgtataaccacattggtggggagcattccgctgtgatcccagagctggcagccacagtggccacatttgccattcaccacactgtggcttgggccttgtgacattgtctacctgtggtcattccttaactgctttggccctcaaactttgaaactcctgggtgccaaaaactggccagaagtgggggccccctaaacacgaaattgaaggcctcctctgtcaagtgcagatgtcccgtagggtcccgggccctgtttggagcccatgaactttcttggcccatcatcatgtacaaccattgtgagcctgaacagccttcaaattcacagaagctggttgcccggcgcctgctactcacagggttcccccagaccacgctgtccatcctgtttgtcacctactgtggcgtccagctggtaaaggagcgtgagcgaaccttggcactggaggaggagcagaaagcaggacaaaaagaagccggagtaggagggaacgggtaaaaggatgggctttgctcagctatttttgggccagatggggcctggcccgatagaataaaagactttttctacaacagcctgggctgttccttgactcttgtctccaccgtcccttgcctccaccgccattatcggctgacggacttggaagcttttag

SEQ ID NO: 2972 - DNA, 888 bp, Homo sapiens
  SIMILAR (691)..(885): 981254mologous to Homo sapiens sepiapterin reductase,accession number M76231,Smith-Waterman Score=323.
agacgtctcagagaggctgtgcagctgctggaggactataagcatgggaccctgcgcccgggggtcaccaatgaacagctctggagtgcacagaaaatcaagcaggctattctacatccggacaccaatgagaagatcttcatgccatttagaatgtcagggatttgtcagggatgtcttctcgtggcaacctcagatgctcagcagggcaagcaggaaggcatgaggcctctgagccagggctcagaactgacacgctgccacgtcctcccacgtgctgtcagtcagagcaagttagatgaccaagcagagccaaaaagtgaggaaataaattccttctgtgatgaggccgtggcaaggaggattataaagggaaccctgtggtgtcacgggcagtgtcctggacagcagttgtctggtaaatgcagtgagtgctattgggctgtatcttacgatgttcctggtggtccaagtacagttcgaggggtagtcggtcttctcttgcccaaccagacactggcatccactgtcttctggcagccttcacctgcatccaagttcatccagggatacctgggagctgtcatcagcgccgtctccattgctgtgggccttaatgtcctggttcagaaagccaacaagttcaccccagccacccgccttctcatccagaggtttgtgccgttccctgctgtaggtcctctggacacagacatgcagcagttggcccgggagacctccgtggacccagacatgcgaaaagggctgcaggagctgaaggcaaaggggaagctggtggattgcaaggtgtcagcccagaaactgctgagcttactggaaaaggacgagttcaagtctggagcccacgtggacttctatgacaaataa

SEQ ID NO: 2973 - DNA, 391 bp, Homo sapiens
  SIMILAR (244)..(390): 871254mologous to Mus musculus Six5,accession number D83146,Smith-Waterman Score=201.
cgcttggcgcagtggacttttatcgactgcgcaagaagttcccgctgcccaagaccatctgggacggcgaggagacagtctactgcttcaaggagcgctcccgcgcagcgctcaaggcctgctaccgcggcaaccgctaccccacgccggacgagaagcgccgcctggccacactcaccggcctgtcgctcacgcaggtcagcaactggttcaagaaccggcgacagcgcgaccggaccggggccggaggcggcgcgccctgcaagaggaaacttcctcctggccaaccctgtgtctggcagccccatcgtgacgggtgtggccgtgcagcagggcaagatcatcctcaccgccaccttccccaccagcatgctcgtctcccaggtcctgc

SEQ ID NO: 2974 - DNA, 2947 bp, Homo sapiens
  SIMILAR (203)..(2218): 831254mologous to Mus musculus Six5,accession number D83146,Smith-Waterman Score=2784.
atggctaccttgcctgcggagccgagcgcggggccggcggctgggggggaggcggtggcggcggcggcggcgaccgaagaggaggaggaggaagcgcgccagctcttgcagactttgcaggcggccgagggtgaggcggcggcggcggccggggccggggcgggcgcagcggctgcgggagctgagggcccgggatccccgggcgtccccgggtcgccccccgaggccgcttccgaaccgcccacgggcctccgcttctcgcccgagcaggtggcgtgcgtctgcgaggcggctgctccaggcgggccacgccggccgcttgagccgcttcctgggcgcactgcccccggccgagcgcctacgtggcagcgacccggtgttgcgcgcgcgggccctggtggccttccagcggggcgagtacgccgagctctaccggctactcgagagccgccccttccccgccgcccaccacgccttcctgcaggacctctacctgcgcgcgcgctaccatgaggccgagcgggcccgcggccgcgcgcttggcgcagtggacaagtatcgactgcgcaagaagttcccgctgcccaagaccatctgggacggcgaggagacagtctactgcttcaaggagcgctcccgcgcagcgctcaaggcctgctaccgcggcaaccgctaccccacgccggacgagaagcgccgcctggccacactcaccggcctgtcgctcacgcaggtcagcaactggttcaagaaccggcgacagcgcgaccggaccggggccggaggcggcgcgccctgcaagagcgagtctgatgggaatcccacgactgaggacgagtccagccgaagtcctgaggacctggagagaggggcggccccagtgtccgccgaggccgctgcccagggctccatattcctggcagggaccggccctcccgcgccttgcccggcttcctcctccatcctggtgaacgggagcttcctggcagccagcggctccccagcagtgctcctcaacgggggccccgtcatcatcaacggcctggccctgggcgaggcctccagcctgggcccgctgctgctcactgggggcgggggtgcccctccaccgcagcccagccctcagggggccagcgagaccaagacctctctggtcctggaccctcagacaggggaggtgcggctggaggaggctcagtcggaggcccctgagaccaaaggggcccaggtggctgctccgggaccagcccttggagaggaggtcctggggcccctggcccaagtggtgcctggccccccgacggctgccacctttcctctgcccccggggccagtgcctgctgtggctgccccacaagtggtaccgctctccccacccccggggtatcccacgggcctgagccccacctccccactattgaacctgccccaggtagtacccacctcacaggtggtgaccctgccccaggctgtggggcccctgcagctgttggcagccgggccaggcagccctgtgaaggtggcagctgcagcaggccctgccaatgtgcacctcatcaactccggggtgggcgtgactgccctgcagctgccttcggccactgccccaggaaacttcctcctggccaaccctgtgtctggcagccccatcgtgacgggtgtggccctgcagcagggcaagatcatcctcaccgccaccttccccaccagcatgctcgtctcccaggtcctgccgccagcccccggcctggccctgccactgaagccagagacggccatctccgtgcctgagggaggcctcccggtggcccccagccctgctctcccagaggctcacgccctaggcaccctttctgcacagcagccaccccccgccgctgccaccacctccagcaccagcctgcccttctcccctgactcccctggcctcctgcccaacttcccggcgcccccaccagaggggctgatgttgtcacccgcggccgtgcctgtctggtcagcagggctggaactaagcgcaggaacagaggggctgctggaagcggaaaaggggctggggacacaggccccccacaccgtgctgaggctgccagaccccgaccctgaggggctgctcctgggggccaccgcagggggtgaggttgacgaggggttggaagctgaggccaaggttctgacccagctccagtcggtgcctgtggaggagcccttggaactgtgacccagtgtggccccgtggcctctcccgacattggtgctgaagacgcagggacaggaatgggaggggggagccccagaaatgcggttgctgaagaccccagtcaccacatccttctgcctgggtggcctctccaagccctggtggtgctgggggttgtatccccggccacctcctgtccaggtctccatccccctttggatgggaggcctctctgttacagcccttcccatgctgttcccctgcccatatacgtgggggaactcagggttccttgacttccaggcccttgcccccttccacttggtacttagctgtaagcggaacaccctgccccagggccggaacttccagcccccagagccctctccctgtcactccctgaaacactattaatagctcttgccgatagctggtgttgtcacaaactgccttgaatccgaaggtggaggacaggcagccccgcgcccctgagactggagaccctccccagtgtggcatttcctgccaggggcggggggtggggcagctgtggggagacgggggtcttccttcaccagctcccctcgactcaagcccttgtcctcattatccggcccagaccaaagattccctcatccctgggggcagccctgccgctgtgtctcctttgtatcctaaatctttatttttctaggacatgttatgcctccattttcaattaaaataaagttatcggattacaccacc

SEQ ID NO: 2975 - DNA, 478 bp, Homo sapiens
  SIMILAR (476)..(210): 511254mologous to Mus musculus putative,accession number AK002758,Smith-Waterman Score=190.
tttttttttttttttctatttttaatggctttggctttatagcacgaagcaggcaccctctcgttaaaggcacacagtcctctcttctgccccacctcctgggtccttaaaatcgagtcctgagttccagaggggtcactgcaaggcagcagggaagggagagggtcacagtttcactctgtgagtatcagacaccctctgggcattggctgggctggctgcagggaggtgggctggaggctgccagactcttgggttgcagggagttgtccagggccttggccttcttattaatggaccgagggctggagctgctcctctttctcttggcaatcttcatcctccaagtgctgcacgctggcatcccagttaagctgcctctcatacggggacaggacagagcttggttggaatcgtcgaaccacataacccaacctcttcaggtggctgaagacctggtactgcaggaaggtcacag

SEQ ID NO: 2976 - DNA, 718 bp, Homo sapiens
  SIMILAR (19)..(126): 691254mologous to Mus musculus putative,accession number AK002758,Smith-Waterman Score=120.
gaggagcttaccatatgcttgctgaccgaccacactgtgaccttcctgcagtaccaggtcttcagccacctgaagaggttgggttatgtgggtcgacgaattccaaccagctcttgtcctgtccccgtatgagaggcagcttaacctggatgccagcgtgcagcacttggaggatggagatggcaagagaaagaggagcagctccagccctcggtccattaataagaaggccaaggccctggacaactccctgcaacccaagagtctggcagcctccagcccacctccctgcagccagcccagccaatgcccagaggagaaaccccagggagtcaagccccatgaagggcccagggggcccctttcagcttctggggtccctgggccccagccctggcccggccagggagggggtggggtgcagctgggagagtggcagagccgagaacggagtcacgggagccggtaagcggcgctggaacttcgagcagatctccttccccaacatggcttcagacagccgccacacccttctgcgcgccccagccccagagctgctcccggccaacgtggctgggcgggagacagacgctgagtcctggtgccagaagctgaaccagcacaagaagaagctctccaggcgggaacgggagcaccacgcggaggccgcgcagttccaggaagatgtcaacgccgatcccgaggtgcagcggtgctt

SEQ ID NO: 2977 - DNA, 3646 bp, Homo sapiens
  SIMILAR (1475)..(2074): 371254mologous to Homo sapiens squamous cell carcinoma antigen recognized by T cell,accession number AF098066,Smith- Waterman Score=366.
atggcgttaatgtttacaggacatttactattcttagcattattgatgtttgctttctctacttttgaggaatctgtgagcaattattccgaatgggcagttttcacagatgatatagatcagtttaaaacacagaaagtgcaagatttcagacccaaccaaaagctgaagaaaagtatgcttcatccaagtttatattttgatgctggagaaatccaagcaatgagacaaaagtctcgtgcaagccatttgcatctttttagagctatcagaagtgcagtgacagttatgctgtccaacccaacatactacctacctccaccaaagcatgctgattttgctgccaagtggaatgaaatttatggtaacaatctgcctcctttagcattgtactgtttgttatgcccagaagacaaagttgcctttgaatttgtcttggaatatatggacaggatggttggctacaaagactggctagtagagaatgcaccaggagatgaggttccaattggccattccttaacaggttttgccactgcctttgactttttatataacttattagataatcatcgaagacaaaaatacctggaaaaaatatgggttattactgaggaaatgtacgagtattccaaggtccgctcatggggcaaacagcttctccataaccaccaagccactaatatgatagcattactcacaggggccttggtgactggagtagataaaggatctaaagcaaatatatggaaacaggctgtagtggatgtcatggaaaagacaatgtttctattgaatcatattgttgatggttctttggatgaaggtgtggcctatggaagctacacagctaaatccgtcacacagtatgtttttctggcccagcgccattttaatatcaacaacttggataataactggttaaagatgcacttttggttctattatgccacccttttacctggcttccaaagaactgtgggtatagcagattccaattataattggttttatggtccagaaagccagctagttttcttggataagttcatcttaaagaatggagctggaaattggttagctcagcaaattagaaagcaccgacctaaagatggaccgatggttccttcaactgcccaaaggtggagtactcttcacactgaatacatctggtatgatccccagctcacaccacagccacctgctgattatggtactgcaaaaatacacacattccctaactggggtgtggttacttatggggctgggttgccaaacacacagaccaacacctttgtgtcttttaaatctgggaagctggggggacgagctgtgtatgacatagttcattttcagccatattcctggattgatgggtggagaagttttaacccaggacatgagcatccagatcagaactcatttacttttgcccccaatggacaagtatttgtttctgaagctctctatggacccaagttgagcgcaccttaacaatgtattggtgtttgctccatcaccctcaagccagtgtaataagccctgggaaggtcaactgggagaatgtgcgcagtggcttaagtggactggcgaggaggttggtgatgcagctggggaaataatcactgcctctcaacatggggaaatggtatttgtgagtggggaagccgtgtctgcttattcttcagcaatgagactgaaaagtgtatatcgtgctttgcttctcttaaattcccaaactctgctagttgttgatcatattgagaggcaagaagattccccaataaattctgtcagtgccttctttcataatttggatattgattttaaatatatcccatataagtttatgaataggtataatggtgccatgatggatgtgtgggatgcacattacaaaatgttttggtttgatcatcatggcaatagtcccatggccagtatacaggaagcagagcaagctgctgaatttaaaaaacgatggactcaatttgttaatgttacttttcagatggaatccacaatcacaagaattgcatatgtcttttatgggccatatatcaatgtctccagctgcagatttattgatagttccaatcctggacttcagatttctctcaatgtcaataatactgaacatgttgtttctattgtaactgattaccataacctgaagacaagattcaattatctgggattcggtggctttgccagtgtggctgatcaaggccaaataacccgatttggtttgggcactcaagcaatagtaaagcctgtaagacatgataggattattttcccctttggatttaaatttaatatagcagttggattaattttgtgcattagcttggtgattttaactttccaatggcgtttttacctttcttttagaaaactaatgcgatggatattaatacttgttattgccttgtggtttattgagcttttggatgtgtggagcacttgtagtcagcccatttgtgcaaaatggacaaggacagaggctgagggaagcaagaagtctttgtcttctgaagggcaccacatggatcttcctgatgttgtcattacctcacttcctggttcaggagctgaaattctcaaacaactttttttcaacagtagtgattttctctacatcagggttcctacagcctacattgatattcctgaaactgagttggaaatcgactcatttgtagatgcttgtgaatggaaggtgtcagatatccgcagtgggcattttcgtttactccgaggctggttgcagtctttagtccaggacacaaaattacatttgcaaaacatccatctgcatgaacccaataggggtaaactggcccaatattttgcaatgaataaggacaaaaaaagaaaatttaaaaggagagagtctttgccagaacaaagaagtcaaatgaaaaggcgcctttgatagagatgctgaatatattagggctttgaggagacacctggtttactatccaagtgcacgtccctgtgctcagtttaagcagtggaagctggacgttaaagcttcatttttttcaggaagttttaggagcttcgatgagggcattgtacatagtaagagaccctcgggcatggatttattcaatgttgtacaatagtaaaccaagtctttattctttgaagaatgtaccagagcatttagcaaaattgttttaaaatggagggaggtaaaaggcaaatgtaacttaaattcgggttatgctttcggagtatgaaccattgaggaaagaattatcaaaatcccaaatcaaatgcagtgtccctcttgtctcacttgtggctagcaaatacagcagcagccttgagaataaatacagatttgctgcctactagctaccagctggtcaagtttgaagatattgtgcattttcctcagaaaactactgaaaggatttttgcctttcttggaattcctttgtctcctgctagtttaaaccaaatattgtttgccacctctacaaaccttttttaccttccctatgaaggggaaatatcaccaactaatactaatgtttggaaacagaacttgcctagagatgaaattaaactaattgaaaacatctgctggactctgatggatcgcctaggatatccaaagtttatggactaa

SEQ ID NO: 2978 - DNA, 512 bp, Homo sapiens
  SIMILAR (23)..(505): 751254mologous to Mus musculus putative,accession number AK004618,Smith-Waterman Score=610.
atccagcgtggtggaattctctcgacccagaggtggaacaagtcaatcagatatttcaactctttctacgttcccatcaagtcctgatttggaagtgagtgagactgcaatggaagtagatactccagctgaacaatttcttcagccttctacatcctctacaatgtcagctcaggctcattcgacatcatctcccacagaaagccctcattctactcctttgctatcttctccagatagtgaacaaaggcagtctgttgaggcatctggacaccacacacatcatcagtctgataacaataatgaaaagctgagccccaaaccagggacaggtgaaccagttttaagtttgcactacagcacagaaggaacaactacaagcacaataaaactgaactttacagatgaatggagcagtatagcatcaagttctagaggaattgggagccattgcaaatctgagggtcaggaggaatcttttcgtcccacagagttcagtgcacccaccagaa

SEQ ID NO: 2979 - DNA, 960 bp, Homo sapiens
  SIMILAR (7)..(675): 911254mologous to Homo sapiens PC326 protein,accession number AF150734,Smith-Waterman Score=999.
gagggtgaaactgcaatggaagtagatactccagctgaacaatttcttcagccttctacatcctctacaatgtcagctcaggctcattcgacatcatctcccacagaaagccctcattctactcctttgctatcttctccagatagtgaacaaaggcagtctgttgaggcatctggacaccacacacatcatcagtctgattctccttcttctgtggttaacaaacagctcggatccatgtcacttgacgagcaacaggataacaataatgaaaagctgagccccaaaccagggacaggtgaaccagttttaagtttgcactacagcacagaaggaacaactacaagcacaataaaactgaactttacagatgaatggagcagtatagcatcaagtttctagaggaattgggagccattgcaaatcctcgagggtccaggaggaaatctttccgtccccacagatgctccagtgcaaccaccagaaggagacagtgaaacaaaagctcctgaagaatcatcagaggatgtgacaaaatatcaggaaggagtatctgcagaaaacccagttgagaaccatatcaatataacacaatcagataagttcacagccaagccattggattccaactcaggagaaagaaatgacctcaatcttgatcgctcttgtggggtttcaggaagaatctgcttcatctgaaaaagccaaggaaccagaaacttcagatcagactagcactgagagtgctaccaatgaaaataacaccaatcctgagcctcagttccaaacagaagccactgggccttcagctcatgaagaaacatccaccagggactctgctcttcaggacacagatgacagtgatgatgacccagtcctgatcccaggtgcaaggtatcgagcaggacctggtgatagacgctctgctgttgcccgtattcaggagttcttcagacggag

SEQ ID NO: 2980 - DNA, 674 bp, Homo sapiens
  SIMILAR (311)..(670): 581254mologous to Caenorhabditis elegans sre-2,accession number Z48045,Smith-Waterman Score=386.
gagctgccccttgtcctgcacttcagcagctacagggctgtgggtgaaggagggcctgaggattgtgagctcggtgcttttaggcttgagctgcccttggggatcccccctggaggcagagctggaccttggggagggaccctgtggcggacgtccttctatggccgcttcaggcacttcttggatatcatcgaccctcgcacactctttgtcactgagagacgtctcagagaggctgtgcagctgctggaggactataagcatgggaccctgcgcccgggggtcaccaatgaacagctctgaagtgcacagaaaatcagccagggctatttaccatccggacaccaatgagaagatcttcatgccatttagaatgtcaggttatattccttttgggacgccaattgtagtcggtcttctcttgcccaaccagacactggcatccactgtcttctggcagtggctgaaccagagccacaatgcctgtgtcaactatgcaaaccgcaatgcgaccaagccttcacctgcatccaagttcatccagggatacctgggagctgtcatcagcgccgtctccattgctgtgggccttaatgtcctggttcagaaagccaacaagttcaccccagccacccgccttctcatccagaggtttgtgccgttccctgctgtag

SEQ ID NO: 2981 - DNA, 1945 bp, Homo sapiens
  SIMILAR (1464)..(1832): 871254mologous to Homo sapiens Human cell cycle and proliferation protein CCYPR-53, SEQ ID NO:53,accession number AAB60505,Smith-Waterman Score=550.
  misc_feature (1)...(1945): n = a,t,c or g
aaccggaggacccgtcccggctgcggagtcgttacctgttatagaagagaatttatccaaagattaaaacttgaagcagcccttaatgtgcatgatggttgtgttaatacaatctgttggaatgacactggagaatatattttatctggctcagatgacaccaaattagtaattagtaatccttacagcagaaaggttttgacaacaattcgttcagggcaccgagcaaacatatttagtgcaaagttcttaccttgtacaaatgataaacagattgtatcctgctctggagatggagtaatattttataccaacgttgaggcaagatgcaggaaaccaacagacaatgcccaatttacgtgtcattatggaactacttatgagattatgactgtacccaatgacccttacacttttctctcttgtggtgaagatggaactgttaggtggtttgatacacgcatcaaaactagctgcacaaaagaagattgtaaagatgatattttaattaactgtcgacgggctgccacgtctgttgctatttgcccaccaataccatattaccttgctgttgggttgttctgacagctcagtacggaatatatgatcgggcgaatgctggggcacaaggagctacaggggaattatggcaggtcgaggggactactgggattgggttgccccgttttatttcccttccccatcttaataataagtcctgcagagtgacatctctgtgttacagtgaagatggtcaagagattctcgttagttactcttcagattacatatatctttttgacccgaaagatgatacagcacgagaacttaaaactccttctgcggaaggagagaagagaagagttgcgacaaccaccagttaagcgtttgagacttcgtggtgattggtcagatactggacccagagcaaggccggagagatgaacgagaacgagatggagagccagagtccccaatgtgtccattgatgccagagaatgtcctgatatgttatcaagatggtttgaagaagcaagtgaggttgcacaaagcaatagaggacgaggaagatctcgacccagaggtggaacaagtcaatcagatatttcaactcttcctacggtcccatcaagtcctgatttggaagtgagtgaaactgcaatggaagtagatactccagctgaacaatttcttcagccttctacatcctctacaatgtcagctcaggctcattcgacaatcatctcccaaagaaagccctcattcctactccttttgctattttcttccagatagtggaccaaaggcagtctgttgaggcatctggacaccacacacatcatcagtctgaatttttaaggggccctgagatagctttgcttcgtaagcgcctgcaacaactgaggcttaagaaggctgagcagcagaggcagcaagagctagctgcacatacccagcaacagccttccacttctgatcagtcttctcatgagggctcttcacaggaccctcatgcttcagattctccttcttctgtggttaacaaacagctcggatccatgtcacttgacgagcaacaggataacaataatgaaaagctgagccccaaaccagggacaggtgaaccagttttaagtttgcactacagcacagaaggaacaactacaagcacaataaaactgaactttacagatgaatggagcagtatagcatcaagttctagaggaattgggagccattgcaaatctgagggtcaggaggaatctttcgtcccacagagctcagtgcaaccaccagaaggagacagtganacaaaagctcctgaagaatctcagaggatgtgacaaatatcaggaagagttctgcagaaanccagttgagaccantcatatncccatccgntagtnacagccagccatggatccactcggngaagaatgnctca

SEQ ID NO: 2982 - DNA, 1881 bp, Homo sapiens; identical to SEQ ID NO: 991
  SIMILAR (367)..(1284): 911254mologous to Homo sapiens hnRNP B1 protein,accession number M29064,Smith-Waterman Score=1607.

SEQ ID NO: 2983 - DNA, 741 bp, Homo sapiens
  SIMILAR (5)..(199): 1001254mologous to Homo sapiens hnRNP A2 protein,accession number M29065,Smith-Waterman Score=381.
gcgcaactatggaggaggaaattatggaagtggaaattacaatgattttggaaattataaccagcaaccttctaactacggtccaatgaagagtggaaactttggtggtagcaggaacatggggggaccatatggtggaggaaactatggtccaggaggcagtggaggaagtgggggttatggtgggaggagccgatactgagcttcttcctatttgccatggatcttttagatgctgcttcttcaatgcaaggaaaggaaataaccccagcgaggtactcttcagggacacaggtctagtacaagagaactcttgacggctactaagttcagccagtcttaaaaaactgtgctgtttctacaaaactttaactacagtagtttataaggatgccaacgaaagctgagggtagagcaaaatagttctaagcttcagttaaacttctttagcattgatatgaaccatggacaagtatattctgctgccacaaagactgtaaagtgcttcatttcaacagctgaggcaagccaagtgatcattaataaagcttttcttggttccttcagtggtgttggtagtaaaatggaaggtgtcttgctgcaggtaactaatgaagaagtggtcaaccacagagtcttcaagaaataagaaattctgtaccatctgaaagtagttcttgttggtgccttcatttaaaaagcactctttaaaataaaagggaaatgttttctgataaacca

SEQ ID NO: 2984 - DNA, 423 bp, Homo sapiens
gatcatgatcacgccaagcttggcacgaggcttctaactacggtccaatgaagagtggaaactttggtggtattcaggaacatggggggaccatatggtggaggtaatttataaaaattgaggttattcacatttttgtgattaaaggattaaccttttgtgacttaaagggaagataacatactaagtactttgtactgtgggcagtgctccatgtacggacttattgaaaataaagaaattttgcataaatttccacagaagtactcagcacgcagttatgacatcaaattgggattacggatgctggaggtgagggtgtacacacctcctgccctcttcatatgggtccgggggattgttttcctccctatcccgacttttccaataaacagcagctttctgcttctccagcaagacacc

SEQ ID NO: 2985 - DNA, 611 bp, Homo sapiens
tcgggtcgacccacgcgtccgccgtgcggaggtgctcctcgcagagttgtttctcgagcagcggcagttctcactacagcgccagtacgagtccggttcgtgttcgtccgcgcagatctctctcatctcgctcgtctgcgggaaatcgggctgaagcgactgagtccgcgatggaggtaacgggtttgaaatcaatgagttattgaaaagggcatggcgaggccgttggcgcctcagtggaagtcgcccagccgcctccgtgggagagaggcagagaaatcggaccaattcagtagcagtggggcttaaggtttatgaacggggtcttgagcggaggcctgagcgtacaaacagcttccccaccctcagcctcccggcgccatttcccttcactgggggtgggggatggggagctttcacatggcggacgctgccccgctggggtgaaagtggggcgcggaggcgggaattcttattccctttctaaagcacgctgcttcgggggccacggcgtctcctcggcgagcgtttcggcgggcagcaggtcctcgtgagcgaggctgcggagcttcccctccccctctctcacgggaaccggatttggcggccgc

SEQ ID NO: 2986 - DNA, 1790 bp, Homo sapiens
  SIMILAR (209)..(466): 681254mologous to Homo sapiens hnRNP B1 protein,accession number M29064,Smith-Waterman Score=273.
gggaaggttctagaaaagcggcggcacggctctagcggcagtagcagcagcgccgggtcccgtgcggaggtgctcctcgcagagttgtttctcgagcagcggcagttctcactacagcgccaggacgagtccggttcgtgttcgtccgcggagatctctctcatctcgctcggctgcgggaaatcgggctgaagcgactgagtccgcgatggagaaaactttagaaactgttcctttggagaggaaaaagagagaaaaggaacagttccgtaagctctttattggtggcttaagctttgaaaccacagaagaaagtttgaggaactactacgaacaatggggaaagcttacagactgtgttggtaatgagggatcttgcaagccaaaagatcaagaggattttgttttgtaactttttccatccatgggcttgaggttgatgctgccattgcttccaagacctcatttcaattaatggggaagtagttgagcaaaaacgtgctgtagcaagagaggaatctggaaaaccaggggctcatgtaactgtgaagaagctgtttgttggcggaattaaagaagatactgaggaacatcaccttagagattactttgaggaatatggaaaaattgataccattgagataattactgataggcagtctggaaagaaaagaggctttggctttgttacttttgatgaccatgatcctgtggataaaatcgtattgcagaaataccataccatcaatggtcataatgcagaagtaagaaaggctttgtctagacaagaaatgcaggaagttcagagttctaggagtggaagaggaggcaactttggctttggggattcacgtggtggcggtggaaatttcggaccaggaccaggaagtaactttagaggaggatctgatggatatggcagtggacgtggatttggggatggctataatgggtatggaggaggacctggaggtggcaattttggaggtagccccggttatggaggaggaagaggaggatatggtggtggaggacctggatatggcaaccagggtgggggctacggaggtggttatgacaactatggaggaggaaattatggaagtggaaattacaatgattttggaaattataaccagcaaccttctaactacggtccaatgaagagtggaaactttggtggtagcaggaacatggggggaccatatggtggaggaaactatggtccaggaggcagtggaggaagtgggggttatggtgggaggagccgatactgagcttcttcctatttgccatgggcttcactgtataaataggagaggatgagagcccagaggtaacagaacagcttcaggttatcgaaataacaatgttaaggaaactcttatctcagtcatgcataaatatgcagtgatatggcagaagacaccagagcagatgcagagagccattttgtgaatggattggattatttaataacattaccttactgtggaggaaggattgtaaaaaaaaatgcctttgagacagtttcttagctttttaattgttgtttctttctagtggtctttgtaagagtgtagaagcattccttctttgataatgttaaatttgtaagtttcaggtgacatgtgaaaccttttttaagatttttctcaaagttttgaaaagctattagccaggatcatggtgtaataagacataacgtttttcctttaaaaaaatttaagtgcgtgtgtagagttaagaagctgttgtacatttatgatttaataaaataattctaaagg

SEQ ID NO: 2987 - DNA, 4522 bp, Homo sapiens
  SIMILAR (989)..(1375): 941254mologous to Homo sapiens hnRNP B1 protein,accession number M29064,Smith-Waterman Score=637.
ttggatacaaaaagtatttattttataaactttatatttaaaatagaattgtaatctgtctactcacaaaacctaatttaaaacatgatacatttatctctctagccaatttgatgttaactgttttaacaaacaacactcattttgtaaattgttttaatatcaagaacctcaactaaatgtttgttttatcagaaaacatttccccttttattttaaagagtgctttttaaatgaaggcaccaacaagaactactttcagatggtacagaatttcttatttcttgaagactctgtggttgaccacttcttcattagttacctgcagcaagacaccttccattttactaccaacaccactggaaggaaccaagaaaagctttaattaatggatcacttggcctggcctcagccggttgaaattgaagcacttttacaggtctttggtggcagcaggactatacttgtccatgggttcataatcaatgccatggcaaatagaaagaagctcagtatcggctcctcccaccataaccatcacttcctcccgtgcctcgtggaccatagtttcctcctccatatggtccccccatgttcctgctaccaccaaagtttccactcttcattggaccgtagttagaaggttgctggttataatttccaaaatcattgtaatttccacttccataatttcctcctccatagttgtcataaccacctccgtagcccccaccctggttgccatatccaggtcctccaccaccatatcctcctcttcctcctccataaccggggctacctccaaaattgccacctccaggagtagcagcagcgccgggtcccgtgcggaggtgctcctcgcagagttgtttctcgagcagcggcagttctcactacagcgccaggacgagtccggttcgtgttcgtccgcggagatctctctcatctcgctcggctgcgggaaatcgggctgaagcgactgagtccgcgatggagagagaaaaagaaacagttccgtaagctctttattggtggcttaagctttgaaaccacagaagaaagtttgaggaactactacgaacaatggggaaagcttacagactgtgtggtaatgagggatcctgcaagcaaaagatcaagaggatttggttttgtaactttatcatccatggctgaggttgatgctgccatggctgcaagacctcattcaattgatgggagagtagttgagccaaaacgtgctgtagcaagagaggaatctggaaaaccaggggctcatgtaactgtgaagaagctgttagttggcggaattaaagaagatactgaggaacatcaccttagagattactttgaggaatatggaaaaattgatacccattgagataattactgataggcagtctggaaagaaaagaggctttggctttgttacttttgatgaccatgatcccgtggattaaattggatttgaggaaataccataccatcaatggtcataatgcagaagtaagaaaggctttgtctagacaagaaatgcaggaagttcagagttctaggagtggaagaggaggcaactttggctttggggattcacgtggtggcggtggaaatttcggaccaggaccaggaagtaactttagaggaggatctgatggatatggcagtggacgtggatttggggatggctataatgggtatggaggaggacctggaggtggcaattttggaggtagccccggttatggaggaggaagaggaggatatggtggtggaggacctggatatggcaaccagggtgggggctacggaggtggttatgacaactatggaggaggaaattatggaagtggaaattacaatgattttggaaattataaccagcaaggttctagcgtacggtccaatgaagagtggaaactttggttgttggcgggaacatggggggacccatatggtggaggaaactatggtcccaggaggcagtggaggaagtgggggtttatggtgggagaagcccgatactaaagcttcttcctatttgccatggggcttcactggtataaataggagagggctgggagccccggaggtaaccagaacagctttcaggtttatcgaaataaccaatgttaagggaaactcttatctccagtccatgcataaatatgcagtgatatggggccaggaagacaccagacgcacgatgcacgagacgccacttttgtggaatggattggattattttaataacattaccttactgtggatggaaggatttgtaaaaaaaaaaatgccctttgagacagttttcttagctttttaattgttgtttctttctagtggtcctttgtaagagttgtagaagcattccctcccttgataatgttcacatttgtaagtttcaggtcgacatgtgaaacctttttttaagatttttctcaaagttttgaaaagctattagccaggatcatggtgtaataagacataacgtttttcactttaaaaaaatttaagtgcgtgtgtagagttaagaagctgttgtacatttatgatttaataaaataaatcctaaaggaaattgtgtaattatagactttttattttaaataagttaaggagtgggtagtataattaaggtccgttgccaaagctgttgttatatttgtataaggtaaaatgctggtccagatgtaagtgtgttgactgcaattcatcatcgattaaattatgtagataacttaagggatatctctgcaaggagaaacacctttttagatcttttagatgctgcttcttcaatgcaaggaaaggaaataaccccagcgaggtactcttcaggggacacaggtctagtacaagagaactctttgacggctactaagtttcagccagtctttaaaaaaactgtggctgttttctaccaaaactttaactacagtagtttataaggatgccaacgaaagctgagggtgtagagcaaaatagttctaagcttcagttaaacttctttaggtaagatcttatttacttttcctttcttaattttcctccctaaaagataaactaatactcttaaatggtctttccagtatagtggttcttacgtagtttaacatagctataaattggagtttaacaatttataaactccaaggggaataatttttataaaccctggttttccaacctggtcatttacttaaattattttggttgtttttcccttttttttccttcttttcccaccccctccccctccatgtgaagatttgggtgcttaacatatcatttttttccctgccggaattttagcattgatatgaaccatggacaagtatattctgctgccacaaagactgtatagggcttcatttcaacagctgaggcaagccaagtgatcattaataaagcttttcttggttccttcagtggtgctggcagtaaaatggtaggtaaaagttaggctgcaagttcaataaatcatgagatttcccatcgttacacccttgtgtattcacatttcttggatcaaacattttgagtgaactaggggtttttattaaagacatttgttgtatttatggttgtaactgtacatgcttatcatgatgagactgaaagaaggtagggcaaaaatggttgaatctattttcagatagtagttcatacttgagtgaagtgtcttgtctgcattatgaagcctggtatgtatccagtactaaataggtgggttaaatgtggtaattctagttcagtgtcttaccctgaagagaaagttgtaggttggctgttgaaattcattccttagatatgatcagtttgattgcccggctttattgcctttacaggaatgtgatactcagggcttactctatacaccaatgagtcttctttgatcctaagaccaccactgaagttgtttaggttcttttggacaaacatgataaacttcttcagatactttttttttcctttggcaggaaggtgtcttgctgcaggtaactaatgaagaagtggtcaaccacagagtcttcaagaaataagaaattctgtaccatctgaaagtagttcttgttggtgccttcatttaaaaagcccctcttttaaaataaaagggaaatgttttctgataaaacaaacatttagttgaggttcttgatataaaacaattacaaaatgagtgttgtttgtaaaacagtaacatcaaattggctagagagataaatgtatcatgttttaaattaggttttgtgagtagacatgattacaattctattttaaatataaagtttataaaataaatactttttgtatccaaatacttggtgtaatgtttacacataaaatgtgtgaatcttgttctataaatatttggttgtctaaaagatcaccatcccctaaatttttaaaagcagtttcacaaagctatgcatattttaatattaacaggtaaatgagaagagcattgtggacattattggctgtccccaataaaatgctgttcattatgcactgtaaaaaa

SEQ ID NO: 2988 - DNA, 355 bp, Homo sapiens
gggcaatcatgagtgcagggagagttcacatgtgaggacctggtaggtgggtagtagtggatgaggtcacaatgtggttggaacttgaacagtatccagtttcattcctaaaacaaccttttgaaataggtaggcacctggacctgccaaaaggaacctatggtatttgtgtcaacatgtgcccaggaaacaaatcctgtctaggggaaagagatgccaaagcaatggctgtggtcatgtgtgcaaagttgttcctgaaacaagtaaaagccagcccctgagatgctcccaggggaaaatgacacattggtcttccttatgataaccacagggaagcaggaattgttttgactat

SEQ ID NO: 2989 - DNA, 713 bp, Homo sapiens
  SIMILAR (24)..(713): 611254mologous to Homo sapiens protocadherin beta 13,accession number AF152492,Smith-Waterman Score=664.
acttgtgcggaggagtgatagatgtgaacgaccatgccccagaagttaccatgtctgcatttaccagcccaatacctgagaatgcgcctgaaactgtggttgcacttttcagtgtttcagaccttgattcaggagaaaatgggaaaataagttgctccattcaggaggatctacccttcctcctgaaatcttctgtggggaacttttacaccctactaacagagacaccactagacagagaaagcagagccgagtacaacgtcactatcaccgtcactgacttagggacacccaggctgacaacacatctcaatatgaccgtgctggtgtcggacaacaacagccccgccctgcacatcggcagcgtcagcgctacagacagagactcaggcaccaacgcccaggtcacctactcgctgctgccgccccaggaccctcacctgcccctcacatccctggtctccatcaacgcggacaacggccacctgttcgccctcaggtctctggactacgaggccctgcaggggttccagttccgcgtgggcgcttcagaccacggctccccggcgctgagcagcgaggcgctggtgcgcgtggtggtgctggacgccaacgacgactcgccctttgtgctgtacccgctgcagaacggctccgcgccctgcaccgagctggtgccccgggcggccgagccgggctacctggtgaccaag

SEQ ID NO: 2990 - DNA, 522 bp, Homo sapiens
  SIMILAR (52)..(519): 981254mologous to Homo sapiens Similar to protocadherin-3 (pcdh3),accession number AF131761,Smith-Waterman Score=787.
ctgctcaaggccacggagctcggtctgttcggcgtgtgggcgcacaatggggaggacaatggcgagcctccgcgctcggccaccgccacgctgcacgtgctcctggtggacggcttctcccagccctacctgcctctcccggaggcggccccggcccaggcccaggccgaggccgacttgctcaccgtctacctggtggtggcgttggcctcggtgtcttcgctcttcctcctctcggtgctcctgttcgtggcggtgcggctgtgcaggaggagcagggcggcctcggtgggtcgctgctcggtgcccgagggtccttttccagggcatctggtggacgtgaggggcgctgagaccctgtcccagagctaccagtatgaggtgtgtctgacgggaggccccgggaccagtgagttcaagttcttgaaaccagttatttcggatattcaggcacagggccctgggaggaagggtgaagaaaattccaccttccgaaatagctttggatttaatattcagtaa

SEQ ID NO: 2991 - DNA, 1325 bp, Homo sapiens
  SIMILAR (23)..(406): 961254mologous to Homo sapiens sepiapterin reductase,accession number AB017547,Smith-Waterman Score=602.
gccgccggcggagaacaggagcatggagggcgggctggggcgtgctgtgtgcttgctgaccggggcctcccgcggcttcggccggacgctggccccgctcctggcctcgctgctgtcgcccggctccgtgcttgtccttagcgcccgcaacgacgaggcactgcgccagctggaggccgagctgggcgccgagcggtctggcctgcgcgtggtgcgggtgcccgccgacctgggcgccgaggccggcttgcagcagctgctcggcgccctgcgcgagctcccccggcccaaggggctgcagcgactgctgcttatcaacaacgcgggctctcttggggatgtgtccaaaggcttcgtggacctgagtgactccactcaagtgaacaactacatgggcactgaacttgacctccatgctctgcctgacttccagcgtcctgaaggccttcccggacagtcctggcctcaacagaaccgtggttaacatctcgtccctctgtgcccatgcaacctttcaaaggctgggcgctgtactgtgcaggaaaggctgctcgtgatatgctgttccaggtcctggcgctggaggaacctaatgtgaaggtggctgaactatgccccagtgtcctctggacacagacattgaagcagtttggcccgggagacctccgtggacccagacatgcgaaaagggcctgcaggagctgaaggcaaagggaaagctgttggatgcaaaggtgtcagccaagaaactgctgaggcttactggaaaaggacgagttcaagtctggagcccacgtggactttattgacaaataagcccatgttttttggtttccggaacctttttgcccccacttttagacataccccagaagccctgtggctccccacaccctgccataggggcagtcctgccttacacatagaagcattcatgcctgctgccctgccctcaggcacagccagctgtgagctcccaggtcattggccttaccagttgtcaggagtcttgtgctgtgcaccctgggttataaaggaggcttaggagagaggttatgggtattggtgtctctatccccaggaatagaacttaaggggtgggaagaacaggaaaagaagctggaacacagaagagaggaggttgtgtctcttgctcatagcaagcctgtgggtagaggaaagagtgatctggtgtcgaataggaggacccatgtagattcgcagatggcctggatgggaggaagggcagacggtacatgtcccagcccacatagatgccccttgctgagggtagcaggaccttctgttgaactttgtgtcctcac

SEQ ID NO: 2992 - DNA, 966 bp, Homo sapiens
  SIMILAR (917)..(961): 931254mologous to Homo sapiens protocadherin beta 15,accession number AF152494,Smith-Waterman Score=71.
atgggtcatcatctcatgatagataaactcgtcgcgctcggtggtttgtactacgccatccagcgccattacgcgaccaaatgcagcgttctcaaaaatgatcagatcctggtgatcggtcttttcatgatacagaacgttatctaccgcaaacatttcgccaacccgctgagcgctctgttcctgcaacaaggcatcgaactgtttgccgccattgcagaaattcacataactactgtcgccgagcgcaatcacgccataacgcagattcggctggaagcccagactatctttgattccctgaaagagtggcacaatgctatcaggaagtcgctggactacgaggccctgcaggctttcgagttccgcgtgggcgccacagaccgcggcttcccggcgttgagcagcgaggcgctggtgcgcgtgctggtgctggacgccaacgacaactcgcccttcgtgctgtacccgctgcagaacggctccgcgccctgcaccgagctggtgccccgggcggccgagccgggctacctggtgaccaaggtggtggcggtggacggcgactcgggccagaacgcctggctgtcgtaccagctgctcaaggccacggagcccgggctgttcggcgtgtgggcgcacaatggcgaggtgcgcaccgccaggctgctgagcgagcgcgacgtggccaagcacaggctagtggtgctggtcaaggacaatggcgagcctccgcgctcggccaccgccacgctgcaagtgctcctggtggacggcttctctcagccctacctgccgctcccaagagcggccccggcccaagcccaggccgactcgctcactgtctacctggtggtggcgttggcctcggtgtcgtcgctcttcctcttctcggtgctcctgttcgtggcagtgcggcctgtgcaggaggagcagggcggccccggtcggtcgctgctcggtgcttga

SEQ ID NO: 2993 - DNA, 2783 bp, Homo sapiens
  SIMILAR (2463)..(2783): 661254mologous to Homo sapiens protocadherin beta 4,accession number AF152497,Smith-Waterman Score=378.
cggattctctcggtcgacgatttcgtggaattgaatgtctcaagtctcgttgcggttgctgaggggattggatatagggacctggactccaacatgaagaagctagggagaattcatccaaacaggcaagtgttggcctttattttgatggtgttcttgtctcaggttcgcctcgagcctattcgttattctgtgttggaggaaacagagagcggctcctttgtagcccatctggccaaggatctgggcctgggaattggggaactggcctcccggtcagcccgggtgctgtctgacgatgacaagcagcgtttgcagctggatcgtcagactggagatttgcttctgagggagaaactagaccgcgaagagctctgtggtcctattgaaccgtgtgtactgcatttgcaagtggtcctggaaatgccggtgcaattttttcaaggagaattattgatccaggacataaatgatcactctccaatattccctgaaagggaagtgctcttgaaaatactagaaaatagccagccgggtactctatttccgttgctaatagctgaggatttggatgtgggcagcaatggtcttcaaaaatacacaatcagccccaattctcattttcacattctcactcgaaatcatagtgagggcaagaaatacccagatttggtgcaggacaaaccactggatcgagaggagcagcctgagttcagcttaaccctcgtggcgctggatggtgggtcaccacctaggtctggcacggtcatggttcgaatcctgatcatggacatcaatgacaatgctcctgagtttgtgcacactccatatggggtgcaggtcctggaaaacagccccctagactctccaattgttagggtcttagctagagatatagatgctggaaacttcgggagtgtttcttatggcttattccaagcatcagatgaaattaaacaaactttctcaataaatgaagtcacgggagaaatactgttgaaaaaaaaattggatttcgaaaaaattaaatcttaccatgtagaaattgaggccacagatggaggaggcctttctggaaaaggcactgtagtcatagaggtggtggatgtgaatgacaatcccccagaacttatcatatcttcactcaccagctccatcccagaaaatgctcctgagacggtagtctctatcttccgaattcgagatagagattccggagaaaatggaaagatgatttgctctattccagataatctaccgtttattctaaaaccaactttgaagaatttttacaccctggtaacagagagaccactggaccgagagagccagcgctgagtacaacatcaccatcgccgtcactgacttggggacacccaggctgaaaacccagcagaacataaccgtgcaggtctccgacgtcaatgacaacgcccccgccttcacccaaacctcctacaccctgttcgtccgcgagaacaacagccccgccctgcacatcggcagtgtcagcgccacagacagagactcgggcaccaacgcccaggtcacctactcgctgctgccgccccaggacccgcacctgcccctcgcctccctgggtctccattaacacggacaacggccacctgtttcgctctccagttcgctggattacggaggccctgcaggcttttcgagtttccgcgttgggcgccacagaccgcggttctccggctttgagcagcgaggcgctggtgcgcgtgctggtgctggacaccaacgacaacttggcccttcgtgctgtacccgctgcagaacggctccgcgccctgcaccgagctgatgccccgggcgggccgccgagccgggctacctggtgaccaaggtggtggcggtggacggtgactcgggccagaacgcctggctgtcgtaccagctgctcaaggccacggagcccgggctattcggcgtgtgggcgcacaatggcgaggtgcgcaccgccaggctgctgagcgagcgcgacgcggccaagcacaggctggtggtgctggtcaaggacaatggcgagcctccgcgctcggccaccgccacgctgcacgtgctcctggtggacggcttctcccagccctacctgcctctcccggaggcggccccggcccaggcccaggccgaggccgacttgctcaccgtctacctggtggtggcgttggcctcggtgtcttcgctcttcctcctctcggtgctcctgttcgtggcggtgcggctgtgcaggaggagcagggcggcctcggtgggtcgctgctcggtgcccgagggtccttttccagggcatctggtggacagtaagcggcaccgggaccctgtcccagagctaccagtacgaggtgtgtctgacaggagactctgggactggtgagttcaagttcttgaaaccaattatccccaacttcctaccccagagcacagacttgtgcggaggagtgatagatgtgaacgaccatgccccagaagttaccatgtctgcatttaccagcccaatacctgagaatgcgcctgaaactgtggttgcacttttcagtgtttcagaccttgattcaggagaaaatgggaaaataagttgctccattcaggaggatctacccttcctcctgaaatcttctgtggggaacttttacaccctactaacagagacaccactagacagagaaagcagagccgagtacaacgtcactatcaccgtcactgacttagggacacccaggctgacaacacatctcaatatgaccgtgctggtgtcggac

SEQ ID NO: 2994 - DNA, 1059 bp, Homo sapiens
  SIMILAR (558)..(4): 1001254mologous to Escherichia coli K12 putative transport system permease protein,accession number AE000406,Smith-Waterman Score=935.
tcaatgcggtgtacgcccggtgttaaaacgtttttccagatactggctatagcgcgacatgctgaaacagaagatccagtagatcagcgcggcgaaaacatacccttccgtcgacatacccaaccaggcgggatcaacggttgcctgctgaacgctactgaaaagatcgaacaacccgataatgatcaccaggctggtatctttgaagagtgcgatgatggtatttaccagcccaggaattaccagcttcaacgcctgtggcagaataaccagcccctgagttttccagtaacccaacgccagcgactctgccgcttcatattgccctttaggcagcgcctgtaatccacctcgcacgacttccgcaacatatgctgactgaaacaggatcacgccaaccagcgcgcggatcaatttgtcgatactggtgccttctgccataaacaacggcagcatgaccgaagacataaacagaacggtaatcagcggcacgccgcgccagaattcgataaaaatgaccgataagatacgcacaatcggcatatgggagcggcgacctggcgtggtggtgttaactacctgtttgataatggtgtaacaccttacttcagctatagcgaatcgtttgaaccttcttcgcaagttgggaaggatggtaatattttcgcaccgtctaaaggtaagcagtatgaagtcggcgtgaaatatgtaccggaagatcgtccgattgtagttactggtgccgtgtataatctcactaaaaccaacaacctgatggcggaccctgagggttccttcttctcggttgaaggtggatttgcccccattacaagcccgctgccgcagatattcccgtggcgagcgataacccagcgcactatgcggatgccattcgttataatgctcgaacgcctctgcaaggttctttgctgccgttaacccgtctggtttgggcatgatactgatgtagtcacgctttatcgttttcacgaagctctctggtattccgttactctccggactccgcaccggcgtgttcttcggcttcagtcccaacat

SEQ ID NO: 2995 - DNA, 3075 bp, Homo sapiens
  SIMILAR (2491)..(3033): 1001254mologous to Escherichia coli ASPARTATE AMINOTRANSFERASE (EC 2.6.1.1) (TRANSAMINASE A) (ASPAT),accession number D90860,Smith-Waterman Score=940.
atgcagctgcctgatacgctatgccgatcaggcctacgcagtccttgcaatatattgaatttggacgattttgtaggcctggtaagtcgtttacgccgcatcaggcatagacaaagagcactttatcaacaaactacatttgtacccgtaacgctatgcttccggcggcagacagacgccaattccgccaattccacagtaaccatacgggtttttatgcagatattgctggtggtcatcttcggcataataaaacggtgtggcgttagcgatttccgtggtgatgtgacgatcgtcatcggcggcaagcatcgccgcctgaaaacgttccagactggcgcgagctgcggcatcctgttctgggctgtctttatgtattccgctccaacaaattccacatatagctcggtacctgcgtacaccaacatcacgcaaatgtggcggaataccgacatcacggttgagagcaaacaccgcttcaacagcggcattacgcgcctcttccaggcggcactggatgatgtttgtaccggtggcaacccgcgtgaagcaacgcttgaggatattgtagagctttaccataccgcctggcatttttccagtacagggagagcgccactacggtatagccttctcaaccagcgcgaactggactcattatcggtgccgccgctgctggcgaaaataggaattcatcagcaaaccacgctgttacgccacggtttttaccctgccggaggcggtgtggtggcaacggaagtctcgcccgtggcatcgtttaacaccttgcaacttggcgagcgcgggaacattgtgcagatgcgtggagaagttctattagctggtgtgccgcgccatgttgctgagcgtgaaatcgctacactggcggggagtttttccctgcatgaacagaatattcataacctgccgcgcgaccaggggccggcgcgtcagtgccgaggtggttgcggcacagttggtcgtccgaataaccaaattggcttttaccagtccattaccgccgacggcaactggggtgatgaaaagctaagccccggttacaccgtgaccaccggctggaaaaactttacccgcgtctttaccgacgaaggcattcagaaaccgttcctcgccattttcgtctggaccgtggtgttctcgctgatcactgtctttttaacggtggcggtcggcatggttctggcgtgtctggtgcagtgggaagcgttgcgcggcaaagcggtctatcgcgtcctgctgattctgccctacgcggtgccatcgttcatttcaatcttgattttcaaagggttgtttaaccagagcttcggtgaaatcaacatgtacggtacatgtgacacagtgcgcgtacctgggattcagctcacaggagagcagcagcagctggtcagcgtgtttgagcgttacggcctgccggaccggatgaccatggataacggctcaccgtggggcgacaccaccggcacctggacggcgctggagctgtggctgatgcgcctgggtatccggcgcacgctgaaccacatcgcgcgttgggttgccgcgacgcgagtaatcatgcgcgcgcggttcattaaatccggtaaagttataggtgctggaaagctgttcggtgcccagccccacggggaccaggtgcgtggaaccgcaggaagggcactggcgcggcaccggacgctgactgtcacagtggtggcagcgcagatcataaaaaaagccatcggtggtatgacgagcaaccggatcggggatatccgggatcgagttaccgacgcccttggcataggctttagccgggtcgagcagaatgaaatccccgaagaactgccgctgctgccgaaagagtctcgttactggttacgtgaaattttgttatgtgccgatggtgaaccgtggcttgccggtcgtaccgtcgttcctgtgtcaacgttaagcgggccggagctggcgttacaaaaattgggtaaaacgccgttaggacgctatctgttcacatcatcgacattaacccgggactttattgagataggccgtgatgccgggctgtgggggcgacgttcccgcctgcgattaagcggtaaaccgctgttgctaacagaactgttttaccggcgtcaccgttgtactaagaggaaaaaaatatgcgactgcatcagtgcaaacgtctgggcggtgttgaagactgttgaagcagccggtagtgaccgcccagtgcagtgcctcacgatcacagcagtccagcgcgaacgtgacacgcagtctctctccgttatcacagcagaactcgaacccgtcagcagcccgcacttcatccgtgaggcgggtcagtacggtactgggcgatcatcgaaagaacgagaagttcagcctgtggtgcagcgatctttctccaactggattcgaaataactgtggcgacatctgtgagctgtccccgactagtggcgaccaccccccaccctcagggccaggtctttactccgcgcgtaaagccatcatgcagcactaccaggctcgtggcatgcgtgatgttaccgtggaagatatttacatcggcaatggtgtatcggagcttatcgttcaggcaatgcaggcattgctgaacagcggggacgaaatgttggttcctgcaccagattacccactctggaccgcggcggtttcgctttccagcggtaaagcggtgcattatctttgcgatgaatcctctgactggttcccggacctcgatgatattcgcgctaaaattacgcctcgtacgcgtgggatcgttattatcaacccaaataacccaaccggcgcggtatattccaaagagcttttaatggagattgtggagattgcacgtcagcataatctcattatcttcgccgatgaaatttatgacaaaattctctacgacgacgctgagcatcactcaattgcgccgctggcacctgacctgctgaccattacctttaacggactgtcgaaaacgtaccgcgttgcaggcttccgtcaggggtggatggtgcaccgctttttcacgccacgactcaccgtgcaggcgatataa

SEQ ID NO: 2996 - DNA, 2588 bp, Homo sapiens
  SIMILAR (742)..(804): 851254mologous to Escherichia coli similar to,accession number D90870,Smith-Waterman Score=86.
atgcctttataccaggatgcggataatatttcggcaccgtatgcaggtaagtgtcgccagattcagcgtctgacgcggatagtggtattcgctgccaggcttcagcgccaacgttttttcgcctccgccatcagctcttcacgcgtaccgaaaatcaccccgcgccgggcacacttctacgcagccaggtctggtgtccttggggttacgttcagggaaattgatatcctgacacttggtgacgcaagcctgcagcctacgcacaaggtcgagtcgtacaacatccccagcgatcccggattggcgggcggttttcagcagccgcatgacctgcaggcagtcagtcagtggtttaagaaccgtccgattcagtttgatcatgcagttagcctgatcgatatccgggatacccgatttctcatgataatggcgacgccgcgaccgatgtgccagtcaccattttgcggttcggtgacgaccattggatcatctcgcgaccctgacgcaggatctcttcagtgcacagctggcggcggatggaacggaggtggtgacctggaaatcgacgtatcgcacggatataacggcagcgacagcgccgttccgttacacggcatgatgatctccgaggaaggggggggggaaggggaagaaggcgaatcgagttctacttacaggggcacctctggatccgatcgacctgagccagtcggcagtgagtcacagtgtgaaggaactggaaatcatactggtgttcgcctgctggacagaaccacgcgtgaagtggtgcttcagatgcagggcagcagctggctttgcgtcttgagcgactgctggatgactgaacagcacgttgcgcgataccgggcgtatggggcaacaactgagcggaaaaagttcgggtcgctgccagccagaccatttccgcgcatcttattccgcaatgcattgctgaaagccatcgccgctatccagatattcagtttgtcctgcacgatcgtccgcagcagtgggtaatggaaagtattcgccagggagatgtcgattttggcatcgtcatcgatccaggcccagtgggcgatctgcaatgtgaagcgattctttccgagcctttctttctgctttgccatcgcgatagcgctttggccgtggaagattatgtaccctggcaggcattacagggagcgaaattggtgttgcaggattacgcgtcaggcagccgaccgctgattgacgcagcgctggcgcgcaatggtattcaggcgaatattgtgcaggagattggacatccggcgacgctgttcccgatggtagccgcaggcatcggcatcagtattcttcccgcactggcgctaccattgcctgaaggtagcccactggtggtaaagcgcattacgccggttgttgaacgccagttgatgctggtgcgcaggaagaaccgttcactttccaccgccgctgaagctttatgggacgtgtgcaactgcgccattcagcccttctttaccgccattacccgctgcataggtagcgtcacggtcaaactcgtactcgttccagttggtaagagtgaatttctcgctgcccagcataaagttgtaacctgcaacccagccggcgacatagccgttgtcgccagtgtaataggtttgatctgtataacgcttagcaaagaacggtttgaaccaccaaccgctgccggtgaaattgtagccgataccgtacaggaacatatcgtcgtggaaattcacgcgattcgcagaaccgtaggtgccatacgcatgcaagtagagattaaatccggtgtcacccaggcttatttgcagctgggtatcaatgaaaagttaggactctctggaaggccagacaggcccattggctgcctcgggacatcaaagatttatcgcattctaggaaagactgtggtttgttacccgattattttcgacctaagtgatttctacatgtctcaggatgttttcctgctgatagatgacataaagaatgcgctgcagttcattaaacaatattggaaaatgcatggacgtccacttttccttgttctcatccgggaagacaatataagaggtagccggttcaaccccatattagatatgctggcagcccttaaaaaaggaataattggaggagtcaaagttcatgtggatcgtctacagggcccactggaaaatgacttggtagttcatgtggcacttatagcagaaagccaaagacttcaagtttttctgaacacatatggtattcaaactcaaactcctcaacaagtagaacccattcagatatggcctcagcaggagcttgtgaaagtaactctgggtgcctttgggcatgaagaagaagttatctctaatcctttgtctccaagagtgattcaaaacatcatctattataagtgtaacacccatgatgagagggaagcggtcattcagcaagaactggtcatccatattggctggatcatctccaataaccctgagttattcagtggcatgctgaaaatacgaatcgggttgcagaatgaatgctctctggtcatacaggtctcaaccatcatccctgccacatag

SEQ ID NO: 2997 - DNA, 2890 bp, Homo sapiens
  SIMILAR (111)..(212): 1001254mologous to Escherichia coli similar to,accession number D90870,Smith-Waterman Score=161.
gaggatacgaaaaagtttcataaagactccagatgatcgatggttctattgtgcttcttccagtttgagaaataaaattgatttattgcatccattcatgaagaaaacagatgaattattctttaaaacaattaaaggttttcgtcacagtagcgcaggagaaaagttttagtcgtgcaggagagcgtatcggcctgagccagtcggcagtgcagtcacagtgtgaaggaactggaaaatcatactggtgttcgcctgctggacagaaccacgcgtgcagtggtgcttacagatgcagggcagccgctggctttgcgtcttgagcgactgctggatgaactgaacagcacgttgcgcgacaccgggcgtatggggcaacaactgagcggaaaagttcgggtcgctgccagccagaccatttccgcgcatcttattccgcaatgcattgctgaaagccatcgccgctatccaaatattcagtttgtcctgcacgatcgtccgcagcagtgggtaatggaaagtattcgccagggagatgtcgattttggcatcgtcatcgatccaggcccagtgggcgatctgcaatgtgaagcgattctttccgagcctttctttctgctttgccatcgcgatagcgctttggccgtggaagattatgtaccctggcaggcattacagggagcgaaattggtgttgcaggattacgcgtcaggcagccgaccgctgattgacgcagcgctggcgcgcaatggtattcaggcgaatattgtgcaggagattggacatccggcgacgctgttcccgatggtagccgcaggcatcggcatcagtattcttcccgcactggcgctaccattgcctgaaggtagcccactggtggtaaagcgcattacgccggttgttgaacgccagttgatgctgcgggtagacctgagatttgcccaaaagtttcagattggcgaccggaagatcctgcgttctggcaacaacgcggtcaacgtattgccagccgcaacctgtggatttccgttccctgtctgctgctggcgttttgcgtatggatgttgttcagcgctgttgcggatacctccacgcctctatagcgtcttcatcatcatctctctgctatacggcttttctcgcgcgcacatctcaagcccgggtgcctgttgggtcttcatccacgaacgatttggtcagtttatgtatgggctttacccacacgaccaacgctggcgaattaacctcgcattactgattgggcttgtgtcgatcgcaccaatgttctggaaaatactcccgcatcgcggtcgctatattgcggcctgggcggtgatttacccactgattgtctggtggctgatgtatggcggtttttttgctcttgagcgggttgaaacccggcaatggggcgggctgacgctaactttaattattgcatcagttgggattgcgggggcgctaccgtgggggatcttactggcgttaggtcgccgctcccatatgccgattgtgcgtatcttatcggtcatttttatcgaattctggcgcggcgtgccgctgattaccgttctgtttatgtcttcggtcatgctgccgttgtttatggcagaaggcaccagtatcgacaaattgatccgcgcgctggttggcgtgatcctgtttcagtcagcatatgttgcggaagtcgtgcgaggtggattacaggcgctgcctaaagggcaatatgaagcggcagagtcgctggcgttgggttactggaaaactcaggggctggttattctgccacaggcgttgaagctggaaacggtcagacagccacaaacgctggcgatggaagagatcaactgtcaccacaactatgtgcaaaaagaacagcactttggtgaagagatctacgtgacgcgtaaaggcgcggtgtctgcgcgtgctggtcaatatggaattattcccggttcgatgggagcaaaaagctttatcgtccgtgggctgggaaatgaagagtcgttctgttcgtgcagccacggtgccgggcgggtaatgagccgaactaaagcgaaaaaactgttcagcgtggaagatcaaattcgtgccaccgcgcatgtggaatgccgtaaagatgccgaagtgatcgacgaaatcccgatggcgtataaagatattgatgcggtgatggcggcacaaagcgatctggtggaagttatctataccctgcgtcaggtgcattcgtgccgggcgggcgaaaccggggctgttgcgccagcatctgaccgcggtaaaggcggcgacggaaatttgcggagcaaccgtggaaggcgcggagctggggtcgcagcgtctgctcttccggcccggcaccgtgcgcgggggcgattaccgctttgctatcggtagcgccggaagttgtacgctggtgctgcaaacggtgctgcccgcgctgtggtttgccgatggaccttcgcgtgttgaagtgagcggcggcaccgataacccgtcggcgccgcctgcggattttatccgccgggtgctggagccgctgctggcgaaaataggaattcatcagcaaaccacgctgttacgccacggtttttatcctggccgaagcggtgtggtggcaacggaagtctcgcccgtggcatcgtttaacaccttgcaacttggcgagcgcgggaacattgtgcagatgcgtggagaagttctattagctggtgtgccgcgccatgttgctgagcgtgaaatcgctacactggcggggagtttttccctgcatgaacagaatattcataccctgccgcgcggtttttcccgtttaatacccgcgtgccagtgggaagagcgtgaagaacaggcggtaaaccaattaggcaacttaattcaagaacggctgtaa

SEQ ID NO: 2998 - DNA, 345 bp, Homo sapiens
  SIMILAR (50)..(328): 951254mologous to Mus musculus putative,accession number AK011070,Smith-Waterman Score=487.
cttgagggacagagattttcatcgcatagtccaaatttcttctttcatagagttgcatgctgagaatttgaaaaatgaagatgatgtagacactggactattaggattctggactctacttataatatccctaactgctggattctcctgttgcagcttttcttggacagtgacttactttgattcttttgaaccaggaatgtttcctcctactcctctttcacctgccaggttcaagaaactgactggacattctttccacatgggctatagcatggcgattttgaatggcatcgtagctgctcttactgtagcatggtgcctcatgtaaacccacactggagc

SEQ ID NO: 2999 - DNA, 378 bp, Homo sapiens
  SIMILAR (173)..(376): 941254mologous to Mus musculus putative,accession number AK011070,Smith-Waterman Score=356.
tctgctcgctgctcttcgccattcttctcgccttcctcctcgccatcgcctacttgatcgttaaagcgtttagtgggctacagatggcatggcatctaaaaccttacaatgcttgattttcatacagaagacactttggccagttgatgtgggttttacctcttcataaaatgagttgcatgctgagaatttgaaaaatgaagatgatgtagacactggactattaggattctggactctacttataatatccctaactgctggattctcctgttgcagcttttcttggacagtgacttactttgattcttttgaaccaggaatgtttcctcctactcctctttcacctgccaggttcaagaaactgactggacattc

SEQ ID NO: 3000 - DNA, 442 bp, Homo sapiens
  SIMILAR (6)..(395): 551254mologous to Mus musculus putative,accession number AK011070,Smith-Waterman Score=315.
tctgctcgctgctcttcgccattcttctcgccttcctcctcgccatcgcctacttgatcgttaaagagttgcatgctgagaatttgaaaaatgaagatgatgtagacactggactattaggaattatctgtattagcaggaaattttcccttatgctgtaagttgcaaaggattctggactctacttataatatccctaactgctggattctcctgttgcagctttttcttggacagtgacttactttgattcttttgaaccaggaatgtttcctcctactcctctttcacctgccaggttcaagaaactgactggacattctttccacatgggctatagcatggcgattttgaatggcatcgtagctgctcttactgtagcatggtgcctcatgtaaacccacactggagcgatattgttggcaaaacttaatcatgattg

SEQ ID NO: 3001 - DNA, 1270 bp, Homo sapiens
  SIMILAR (325)..(432): 801254mologous to Mus musculus putative,accession number AK011070,Smith-Waterman Score=170.
ttcggcctccgctcgcttctccctgcgcgctttcctgctcccctttccggctacagccctggggtcgagctctggtcgaagcgcattccgcctctcctttggccctgcggcttcctttgcaacccgccgcccacccttgctctccgtggtttacccctgggctctgaggcctggtggtagcggccactgccgcggattggctgttgcggacccggggcggggcaggtgggagaggctcgttctccgcgggtttcgttgtgtttcgcgccatgtcgtttgctgagagcgggtggcggtcgggctctgcggcgccgcggtcccggcaccccgggccctgtggctcggccatcgtattcctcctttactcagggggacagctggggtgaaggcgaagtcgacgaggaggagggatgcgaccaagtggcccgcgaccatgcgggcggagttcatcggcatggggcagtggtcagagcccagaaagctctcggtgctcccgccggaccggaacgggtcacccgttctgcccgataagcagcaatggtatctttcccagcggccgcgggcagcaagaacccagccttcggcgttggccgttccaggtcctctctattctctgctcgctgctcttcgccattcttctcgccttcctcctcgccatcgcctacttgatcgttaaagagttgcatgctgagaatttgaaaaatgaagatgatgtagacactggactattaggattctggactctacttataatatccctaactgctgggattctcctgttgcagcttttcttgggacagtgacttactttgattcttttgaaccagggaatgtttcctcctactcctccattcacctgccagggttcaaggaaactggactggggacattcttgtccacatgggggctattaggcatgggcgatttttgaatgggcatcgtaggcttgctctttacttgtaggcatggggtgccctcatggttaaaccccacacttgggagcgatattgttgggcaaaacttaatcatgattgttttgtaataacaaggaagggagcatcactggtctactcagaagactgaggaaacctgctgtccattatgtagctcagatattcatcacaatcatcctcattatgcgagaccttttaaagcattggtttaagaatggctgagtattaagatacagattaattgggaatatctgagtattaagtactttcttcagagtataagatgtttacctcatctttttacttttgggtgagag

SEQ ID NO: 3002 - DNA, 1213 bp, Homo sapiens
  SIMILAR (919)..(1128): 651254mologous to Homo sapiens Human myelin oligodendrocyte glycoprotein gene,accession number AAZ29204,Smith-Waterman Score= 206.
ttccaaaaaggtaatatgcatcttccagcgcccactcaaattttgctaaggaccagggcagccaaaatccctgccttccaagaaatgtataggactactgcaagaaacaaagaaattaggcaattacaatatagtgtattcaaaagtgttatgctaaaggagctaaagaagacaatgggggtggggagtggataggggtgtctgacacagccgtgcagtcaggaaaagctttccagatgttaaaatttgattcttcagagataggtgttagaccaattaaaataggagaaatgctagggaggatggaggatagaggatctcaatgctactaaagctgaggactagaaaaatggtgagtaatgaactgagaggggaagaagcaagcccagatcaccacataataaaaattgtactttattcctgagtgcagtggagagacactaaagtaaaaagagagtgacataaccaaatttgtgttttttactgtactttattgtcggtgtgagtgttaaaattgcaaagaggcgagcatctgaacctgagtactaggttaatcaaatctcaaatccaataacaatactgaaaaaggaactagaaatcctaagagggggaaaagctaaatacaaagcaattccttcaaggcaaaaaccactatgcactatcatggggttggggggcaggatacaacagcatctctgagactgtaggattagaattatgtcagaaggaggccaagaagggtctagggatttatccctgggaatggcaatggcatttatactggatttaagatttgatccttactttacaatcctcaaattattagaaatataactacttagaagttagtctgactatactcctaagaacaaagaaaggcctggtggctcaagcctgtaatcccagcactttggaaggccaaggtgggcggatcacttgaggtcaggagtttaagaccaacctggccaacatgacgaaaccccatctctactaaaaatacaaaaactagccgggtatagtggtgagcacctgtaatcccaactactcaggaggctgaggcacgagaactgcctgaacccgggaagtggaggctgcagtgagccaagactgcaccactgcactccggcgtgggcgcagagccagactctgttgggggtggggtcgggggcaaagagaaaaataatacttctaatatgttgcaaacaagaccttt

SEQ ID NO: 3003 - DNA, 386 bp, Homo sapiens
aagcagatgaagcttcgagtgatgaattcccaggagcagtgcctcccttcaggagccgaggacatcatgtctggtggccccactttggaggctgctgaatttgatgacttgattgggaagtgtctgccagatcgccccattgcagagtgaggatggacagttcccgcgtttggaaacacatttcctggatgaacttaagagctgtggccactagttcgttctaaaaatcattattgggcaccagcatgtgtggataaataaagcctcccacctgccccacatcaccaaggatgagaagatccagtaaactggggagagtgaattggtttgaaaacacatttgatttcaggaataaaaggtgcaaatgagtaaaaaaaaaaaaaaaa

SEQ ID NO: 3004 - DNA, 1899 bp, Homo sapiens
  SIMILAR (103)..(432): 851254mologous to Homo sapiens dJ1184F4.4 (novel protein similar to nucleolar protein 4 (NOL4) (NOLP)),accession number AL034550,Smith-Waterman Score=465.
atgccctttgccccccatctgctctctgctcttgaatgggctgctggtgaagagacactgctgttcggccatcatgataaagggcctgaagctcgaagcacaggggcagatggcctgtcggagccagagggcatctctctgaagcgggtcgctgtggtggaagatttctttgacatcatctactcgatgcatgtggagagctcagcggagccaggcaaagcccccaagcacgctgggcagaagaaaacctaccgagcgatcgcagagacctatgccttcctcccgagagaggccgtgacccggttcctgatgagctgtacggagtgtcagaagaggatgcactttaactccaatggcctggaacccaaaggtggctttggcacattgagacggcccagcacatttggctggtacaattataatgctgccctgagaaatggtcgccagcccgtgtcgtggcctacggtgcccagacacaaggctgccaacgtccaggtggcccaacagagacacaaggtctgcctctacccaggccaatgggagatgctgggaggattcacggggggctctgtagccaggctcactcatgaagcaaaggccaaagtggccccagctgactcctctgctagctcaggaactcaagtccagggccaggggctccacagtgagccagtggctcatactgtgtgccagcctcggggcctttccatttgctacgctgggttccagtctgttgctcaaccactcggtggccctggagatgacacatcttttggggcgccctcagtttctccgtatgtaaaagggtacttccggctggaaaaggagatatgtgttcctgagatcatgttcctggaggaggatggagagcagaaagcccttccagcttcatcacccctggggtcatacctcagccctgtcctgtgcctgccatgtgagccttcctccagccagcatccctctggggctgttttccttgtctggcaaatggagctgacactacctgcccctgtggagccctcagctggctgggagagcccccgagagagagcgcagacgtggggattttcattcattcatttattcagtaaacacatatgggacacctactacgtgtcaggtattgttctggatgttggagatactgcagtgaacaggacagagctctgccctctaggaatgtacattccagtaggcctggaacttcctgtggcacagtcagggccacctcactgtcaagttgcaggcatccccgctcatctgggcccagggtcagagctcagtgaaaggcaggtgatctgggccaaatcaggcaaaggccaggtgtctggaatggaaatcaaaaaagagcagctgccccctgggaccgtgattgcatccccccaggagttgggcattgtgggagacttaccccacaccccacccagcatgcccctcctaaaggaccccagtgacacggataggctgaagacccagggtctgtttctgcaaaagtcaggccacctctccaagctccaggtcttcgtctgtaaaatggagccattccggaaaagaagagctgccaccagccccaaaggaaaacccagtgttcttgccccagaagaaaacgagcctccatctccactggtctctgggattattgattacaacatgcccctcacctccacctacctgaagcagatgaagcttcgagtgatgaattcccaggagcagagcactgcaggggaggtgtacagggagctaacgattgaaaaagcggatgattcccacgaacgttccagcatcttctggacgctctgcgtgtgttgcttacagaacctcacagccgctcatgggttgataccgctctcagccccatttacaggggagaaaactgagcccctcacagagctgtcctga

SEQ ID NO: 3005 - DNA, 275 bp, Homo sapiens
  SIMILAR (3)..(119): 921254mologous to Homo sapiens dJ1184F4.4 (novel protein similar to nucleolar protein 4 (NOL4) (NOLP)),accession number AL034550,Smith-Waterman Score=186.
aaaacgagcctccatctccactggtctctgggattattgattacaacatgcccctcacctccacctacctgaagcagatgaagcttcgagtgatgaattcccaggagcagagcactgcaggggaggtgtacagggagctaacgattgaaaaagcggatgattcccacgaacgttccagcatcttctggacgctctgcgtgtgttgcttacagaacctcacagccgctcatgggttgataccgctctcagccccatttacaggggagaaaactgag

SEQ ID NO: 3006 - DNA, 395 bp, Homo sapiens
  SIMILAR (23)..(211): 981254mologous to Homo sapiens dJ1184F4.2.2 (novel protein, isoform 2),accession number AL034550,Smith-Waterman Score=315.
gctgtcaccggcgcccgccccgctcactcgcggatcccgaccgcccatctccgcctcgcttgcagcccaggatgagacttctgtgagcagcgaggattttgatatgagcgactccacatggatgtcagctgacccgcacctggcctccagcctgagccccagccaggacgagaggatgcggagcccgcagaacctccacagtcaagaggacgatgactcctcctctgagagtggcagcggcaatggctcctccaccctgaacccatccacgtcgagcagcacgcagggcgaccctgccttccccgagatgaatggcaacggcgccgtggcccccatggacttcaccacggccgccgaggatcagcccatcaacctgtgtgacaagctcccgccgg

SEQ ID NO: 3007 - DNA, 536 bp, Homo sapiens
  SIMILAR (195)..(359): 1001254mologous to Homo sapiens dJ1184F4.2.2 (novel protein, isoform 2),accession number AL034550,Smith-Waterman Score=286.
tcccgaccgcccatctccgcctcgcttccagcccaggatgagacttctgtgagcagcgaggattttgatatgagcgactccacatggatgtcagctgacccgcacctggcctccagcctgagccccagccaggacgagaggatgcggagcccgcagaacctccacagtcaagaggacggtggtgtctgtctccagggccccaccgcttgagccacctgtcccaaggcctgaacatcatctgcagcttggacacctctctacgggccaggaaccccagggtctctgcagagagaaatgatttcagttttaggggaagatctaggtgtgtgacgtctaattcattagccaaggacggctactgagccttggaaaaggctagtgcagacaggtgtgcaatacacgctgcgtctcagcggctccgtaggaaagaagaaggtgaaatatctcagctctgataacacggtatcaattatttgttgaaatggtactattttggatatattgggttaaataaagtagattattaaaattgaaaa

SEQ ID NO: 3008 - DNA, 3317 bp, Homo sapiens
  SIMILAR (2068)..(3105): 491254mologous to Homo sapiens nolp,accession number AB017800,Smith-Waterman Score=720.
cagcagaggcactcaccgcggagggtctgtgaggactacgggagatcaggcttggcacggcgcctggcacatagcgggcgctccctgaaggagagctggcaagatcgaatggtaccgccctgcacaaaggacagggggcagatggcctgtcggagccagagggcatctctctgaagcgggtcgctgtggtggaagatttctttgacatcatctactcgatgcatgtggagagctcagcggagccaggcaaagcccccaagcacgctgggcagaagaaaacctaccgagcgatcgcagagacctatgccttcctcccgagagaggccgtgacccggttcctgatgagctgtacggagtgtcagaagaggatgcactttaactccaatggcctggaacccaaaggtggctttggcacattgagacggcccagcacatttggctggtacaattataatgctgccctgagaaatggtgcccaggtgggcgatttatcagggtttccaggactgcctggtgcatcatgccagctcccgggcatcgggcctgtggaagttgctgaacccgtgtcgtggcctacggtgcccagacacaaggctgccaacgtccaggtggcccaacagagacacaaggtctgcctctacccagctgctgggaaagcagagcctgccaccagccccagaggcagacccagtgttcctgccccaggaagaaaacgagcctccatctccactggtctctgggattattgattacaacatgcccctcacctccacctacctgaagcagatgaagcttcgagtgatgaattcccaggagcaggcgggtagctccccgacccctattcagactgagaggcacacagcacagctgctgctcacggccgaccagacccttgtcctccctgcaacacagcattatgtagttttaaagaaatttcctaggccaggagccgaggacatcatgtctggtggccccactttggaggctgctgaatttgatgacttgattgggaagtgtctgccagatcgccccattgcagggtctgtccgcctgggggaccgcatctggaatccgcgtggctcccctccccggcggtgccgtctccacggacagtgcgtgcccgggtctgggctggagcgacgtccccgagattatcctattactttacaactgtggctcgcgcgccgtcaggacccggcccggtgtgggctggcggagcacaatgaccggcggcggggcgggggcgggcacgcgggcggcgggcgctgggggtcgcgtagatgtttgggtcgaacagtgacgcgccgcggtggtgccagcccctctccccgggcagccgcggcggcagcagcagcagcagcagctggagctgtggggctgtcaccgccgcccgccccgctcactcgcggatcccgaccgcccatctccgcctcgcttccagcccaggatgagacttctgtgagcagcgaggattttgatatgagcgactccacatggatgtcagctgacccgcacctggcctccagcctgagccccagccaggacgagaggatgcggagcccgcagaacctccacagtcaagaggacgggtgggcagtcgggggattgctgagcaagagtcgtgtggagccctggctggggcaggtgatgcccaccctcccctgggcccatccctgggtcacagcagccctctcccaccaggaggcacagaactccggcctgctgctgcctccccctggacccaacactcatggccagacgtctgctctggagcagagagctggggcccaagccttccagggattggctgtgggccacactggcagtcccgggtcacaggaaagtgtccatcatcagctgggccgcaggcggcacagacaatgctgggctgtgctgggccccggcccgccaagggagtctcatggaggcggcactgcctccagcagccacacctctggacacggaaggcagtctgcacgcagggcctgctggcctccagtggccgtgtacctggcctatggtcccagggatgagccgtggcccacagccggtgccacgatggagatcggggcagatgactcctcctctgagagtggcagcggcaatggctcctccaccctgaacccatccacgtcgagcagcacgcagggcgaccctgccttccccgagatgaatggcaacggcgccgtggcccccatggacttcaccacggccgccgaggatcagcccatcaacctgtgtgacaagctcccgccggccacggcacttggcacagcctcctacccctcggatggctgcggtgccgacgggctgcggagccgcgtcaaatacggggtgaagaccacccccgagtcccccccctacagctctgggagctacgattccatcaagaccgaggtcagcggctgccctgaggacctgacagtgggccgggccccgacggcagatgatgacgacgatgaccacgatgaccatgaggacaatgacaagatgaacgactctgaaggcatggaccctgagcgtcttaaggccttcaacgtgagcaccggccggaaacagatgtttgtgcgtctctttgtggacgagaacctggaccgcatggtgcccatctccaagcagcccaaggagaagatccaggccatcatcgagtcctgcagccggcagttccctgagttccaggagcgggcccgcaagcgcatccgcacgtacctcaagtcctgccgtcgcatgaagaagaacggcatggagatgaccagacccacgccaccccatctgacctcggccatggcagaaaacatcctggcagctgcctgtgagagcgagacaagaaaggcagccaagcggatgcgtctagagatctaccagtcctcacaggatgagcccatagccctggacaagcagcactcgcgggactccgcagccatcacccactccacctactcactgccagcctcctcctactcccaggaccctgtgtacgccaacggcggcctcaactacagttaccgcgggtacggggccttgagcagcaacctgcagccccctgcctccctccaaacaggaaaccacagtaatgggcccacggacctcaagcatgaaaggcggggcctttaccacctccaccacccccacgcccaccccttccagcaccagcaccagcaggcccgtgcccaccgctcagctcagccccacggagatcagcgccgtgcggcagctcatcgcgggctaccgggagtctgctgccttcctgctgcgctctgcagatgaactggaaaacctcatcctacagcagaacagaccccgccggcacctgtaat

SEQ ID NO: 3009 - DNA, 1547 bp, Homo sapiens
gcccctctgagaaacacatgcccctccaagtggggtctggggcctggagagaccctcccacccagcagaccaggagatagctgggggacaagggcagacggcccctgcctgggaaaaaccacactcacaccccaccccgaagagctgtggagaccaaaccaagactacgctacacacagaacgccgagaagataaaccaagctttacacgagcaggatggggatgggaaaacttaaaggggccccctgtgaccgaaggagcagggtccccagggggcagctcccacggagcgggcttgaacagggaccaccccctgcagagccagccagggcggagagccataccctggccccagcgcgccccgacacacatgcttttctccatgacacgaggccagtccccaggagcagccccaggagcacaacctgagatttctaagcttgcaggttacaaaaaacaaaaaaaacagagaagctgcctgcgtaaaaagtgccacccacggaggcaggacacaggcagcgtgtggcccattcagcaggcccaggtcttcagggtgaggctgctggcgagggcaggggagagggggcattctggttaaaagcaagaaattccaaatactcctccctcgggatcaacatccccccaaataagggcgcccagggatcttgcctggggaaagtggggtgcagaaggcatgacccacgccacagcgggctctcagcacccttcccacgtcccatgtcacaggctctttgagctgctggctttgttctctcaagtcaggtctgagggaacccatcggcttctgtaataatcgtattgcctatatacttgaattaaaaatatatggtggctcaaatgtgcccgcgtgtatggcagacggtgcggggtggaggccgtcacgcccatacacgtgtgcacacacagcggggggctgtgtccacggactgcgcacacagtatatattaacatatatattgctcaagtatatatgctatttacagtatatatctctatcaacataaaacacaggtatttataggtgtgtacaatagatacgtcctaggaagtctaggggacacacgactctggggtcacggggccgacacacttgcacggcgggaaggaaaggcagagaagtgacaccgtcagggagaaatgacagaaaggaaaatcaaggccttgcaaggtcagaaaggggactcagggcttccaccacagccctgccccacttggccacctcccttttgggaccagcaatgtacgagttttgttctggagttttgtgcaaaacaaattaacttaaaaaaaaaaaagttggtttctaattaatgtggtgggccttcaacacccacaaggattttaaagaacagcttctccttctggtgggcttccagggctcagagggtcccactcagagaagcagggaacactttgtcaggactagaaaatatccttctcctctgaccacagaaaccagcacaactcggctgggtgtgtggctcacgcctgtaatccggcatttgggagccgagcctcgttccgaa

SEQ ID NO: 3010 - DNA, 1213 bp, Homo sapiens
  SIMILAR (217)..(285): 1001254mologous to Mus musculus putative,accession number AK012619,Smith-Waterman Score=122.
  misc_feature (1)...(1213): n = a,t,c or g
atgaggaaagagcagaagatggaaggggacacctatgagattatgcagggtggggggagggagcgcacgacgtgcgcgcaccctctcccctcgtccaccgctgccgcctccttcttctgccgctcctggtgctgcttgtgtgctcgtttggtgcggacctgcgtacctcttrttgtgaagcggcagctgaggagactccggcgctcgccatggcccgacgaaaagcccaaggaaggagtcaagactgagaacaacgatcatattaatttgaaggtggcggggcagygatggttctgtggagcagtttaagattaagaggcatacaccacttagtaaactaatgaaagcctattgtgaaccgacagggattgtcaatgaagcagatcaagattcccgattttgacgggcaacccaatcaatgaaacggacacacctgccacagttgggaaatggaaggatgaaagataccaattgatggtgttccaacaagcaagaccgggaggtgtctacctgaaaagggaactttgcttcctttactcccagaactctgtttctttttaaaggacccaagattacatttcttcaattaggaaaacttgcaatttgggttccacccacatcatgactattactatagtatagtttttttctaatcctttcatttccccctttccccattccctttattgtaccataaagtaactgggtatatgtggcaccaagccatattgcattttttttttttttttttaactaaacagcccaatggtatgtttggattgaccatccaagtgggagacggggatgggggaaaaatactgattctgtggaaaatacccccctttctcccattagtggcatgctccattcagcccttaaacctttatattccgagtaagttattttgctctcactgttttaacaaaaacaacaacaacaacaacataaaaatccttgcataccttgttcaattggagaattttaatgtttttcatttatcattgtaaaaccaaggacgaattttataacttttttggtacggtagctgttaccnatgtagggcaatctcgtctttaagtagggattaaattactcnctaaaacaaaaaagaatcctagatagttttcccttcaagtcaaagcgtcttgttgtttaaataaacttcttgtttaaaatgaaaaaaaaaaaaaaaaaaaaaaaagggcggccgctc

SEQ ID NO: 3011 - DNA, 493 bp, Homo sapiens
  SIMILAR (158)..(340): 1001254mologous to Homo sapiens GPP34-related protein,accession number AJ296153,Smith-Waterman Score=309.
cggacgcgtgggggaagtttgtgctctctgcgtggctaagtttttcacctactaggacgggggtggggtggggagaacaggtgtccttctaaaatacagcacaagctacagcctgcgtccagccataacccaggagtaacatcagaaacaggtgagaatgaccactttaactcaccgggcccgtcgcactgaaataagcaagaactctgaaaagaagatggaaagtgaggaagacagtaattgggagaaaagtccagacaatgaagattctggagactctaaggatatccgccttactcttatggaagaagtattgcttctgggactaaaagataaagaggtaatgcagttaggtttgctaggctatctcaaagactattaaatattggaatgttttaggaagtaacctaatggaatatatttaataataaattggtcttagaattgtgctctaaccatctggaagatggaggagttgggagagcacccacag

SEQ ID NO: 3012 - DNA, 479 bp, Homo sapiens
  SIMILAR (393)..(479): 961254mologous to Homo sapiens Human ORFX ORF1959 polypeptide sequence SEQ ID NO:3918,accession number AAB42195,Smith-Waterman Score=141.
ccgatagtgcggtggaattccacactcctccttagcgaggggtctccccgccgcggtggctgcccggccccaaggtcaggagggatttgtgcactgactcctgaccccgtcctccagcgctgctctgaagggagagtctgtgcagtggcacctgcgcgaagctggccaaagcctgcccagacggctcacctgtgcgggatggaacaaaaggttccttcattggattgaccagctgtcaggttgaacgcaaacctgcctccttttggtggtgtttgtctggatcgcaacagaatagctgggggagagcctccccctgtgagctccgattggcgggactcaaccttggtgatttctgattggcgcaatgaagaaacaccaagaaacaggtgagaatgaccactttaactcaccgggcccgtcgcactgaaataagcaagaactctgaaaagaagatggaaagtgagtaagacagtaattgg

SEQ ID NO: 3013 - DNA, 1012 bp, Homo sapiens
  SIMILAR (888)..(1010): 871254mologous to Mus musculus putative,accession number AK016757,Smith-Waterman Score=185.
ggctcttataagaagacatcgttgggagaaatttgttgtatgcagcttgcatggctgggcaaagtgacgtgattagagctttggcaaaatatggtgtgaatctgaatgaaaaaccaccagagggtacacactcttacattgtgctgcagcctggggtcgtttggaaactttgaaagcactggtagaactggatgttgatatagaagctttgaacttccgggaagaaagggctcgagatgttgctgctagatattctcagactgagtgtgttgaattcctggactgggcaggactcaatcctggtacagcaacccatgattctgacgaggaagctgctttcttaactagagtatggtctacaggtcacaatgattctggtgtgaagcagaggatgggccagaaagagattcaaaatgctacatcttcaaatcacttcacctgtccctccagtagcccttcagaggaagaaaggagtatgatttgtagggctgctatggtagttcaggaatgtgagcaccctcctgatgaaaacattcctaccacaggccagaaattctccacccgagacccccagtgggacaataacaacgcagatcaccgggaaaatatgcagaatgtatttttggagttatatggagtcagaaggacctccagagtcggagagggcagaatttttctcacagcaagaagaggaaaatgaagaagaagaagcccaagaaccagaggaaacaggccctaagaacccccttttacaacctgctctcacaggggatgtagagggtttgcagaagatatttgaggatcctgagaatcctcatcatgaacaggccatgcagcttctcttagaagaagacatcgttgggagaaatttgttgtatgcagcttgcatggctgggcaaagtgacgtgattagagctttggcaaaatatggtgtgaatctgaatgaaaaaaccaccagaggggacacactcttacattgtgctgcagcctggggtcgattggaaactttggg

SEQ ID NO: 3014 - DNA, 1926 bp, Homo sapiens
  SIMILAR (538)..(1050): 981254mologous to Homo sapiens GPP34-related protein,accession number AJ296153,Smith-Waterman Score=863.
  misc_feature (1)...(1926): n = a,t,c or g
cggggaccattgaccctcgtccgtgtggtggaattccgaaggatcaggaagtttgtgctctctgcgtggctaagtttttcacctacataggacgggggtggggtggggagaacaggtgtccttctaaaatacagcacaagctacagcctgcgtccagccataacccaggagtaacatcagaaacaggtgatgaatgaccactttaactcaccgggcccgtcgcactgaaataagcaagaactctgaaaagaagatggaaagtgaggaagacagtaattgggagaaaagtccagacaatgaagattctggagactctaaggatatccgccttactcttatgggaagaagtattgcttctgggactaaaagataaagaggggtacacatctttctggaatgactgcatatcatcaggcctgcgagggggcatcctgatagagctggccatgcggggtcgaatctatctggaaccccggaccatgcgtaagaagcgactactagacagaagggtactgctaaagtcagacagcccaacagggtgatgtttactgggatgaaactctgaaacacatcaaagcaactgaacccacagaaactgtccaaacatggatagagctactcactggtgagacctggaaccccttcaaattacagtaccagctgagaaatgtacgagagcgcatcgcaaagaacctagtagagaaaggtattctaaccactgagaagcagaatttcctgctatttgacatgactactcatccagtgaccaatacaacagagaaacagcgactagtgaaaaaacttcaagatagtgtactagagcggtgggtaaatgaccctcagcgtatggacaagcgaacactagcactcctggtgctagcccactcctctgatgtgctagagaatgtcttctcctctctgacagatgacaagtatgatgtggcaatgaatcgagccaaggacttagtagaactggaccctgaagtggaagggacaaagcctagtgccacagaaatgatctgggctgtgctggcagccttcaataaatcttaaagccggcaggtggatttctccttttcccctgctggctggtgactgtcagagaccccatcactgagttttgtgtgatgagatgttttcatcatttttgtttccttttcttgaatcagacttgtgatttggggagagcaacttcagggcttctccatagaccttgaccattataagcagaccttatttctccctacacttccactccataggtaaataaactgggtgaaccccacacacacccaatgaacattttctcccatttggtggtttagtttcaccacagtgtgcttttggataagcagaaatatctaaatgggattttgagttctccagctatagaatgtgaatgagataaaaagtgaactatctattatatttttctgagtttgttttctatcataaatacatgttttcacagcctttgtctctcagactctgctaaataatgtagcttattgaaataactgtcgctgaataaggagcaatgagaaacaaaactaatttttggagcagatggtctctggaattgcatatcctgctagtgattttctcatctttccttttctaacctaatgagaatgtcccagattcaattacctggatgtcaaagtcctagagccagaaatatattctctcatccctcttagcattctcttgctccttcattcactagggcaaatgtctaaatgaagaaaagtctctctcaacacctcgttcatgcaatcagcattagaatttgtaaggaaggaaggggggtggcatgaaaatttccattcttggggtatatgactgtcctgtttcccccaggccacnnnnnnnnnnnnnncttttggaaacagggtcttgcttttgcccagccaggattccagaatg

SEQ ID NO: 3015 - DNA, 1737 bp, Homo sapiens
  SIMILAR (189)..(344): 611254mologous to Mus musculus putative,accession number AK005570,Smith-Waterman Score=137.
atggagcccataggggcgcggctaagtttggaggcgccgggaccagcgcccttccgagaggccccgccggccgaggagctgcccgccccggtggtcccctgtgtgcagggtggcggcgacggcggtggcgcttcggagaccccgagtcctgacgctcagctaggggataggcccctgtccccgaaggaagaggccgccccccaggagcaggaggagctgctggaatgccgccgccgctgccgcgcgcgctccttttccttgcccgccgaccccatcttgcaggcggccaagttcctgcagcagcagcagcaacaggcggtggcactgggcggcgagggggcggaggacgcacagctcggcccgggcggctgctgcgccaagtgcaagaagcgggtgcagttcgcggacacgctggggctaagcctggccagcgtgaagcacttcagcgaggcggaggagccgcaggtgccgcccgccgtgctctcgcgcctgcgaagcttccctatgcgtgccgaggacctggagcagctcggggggctgctggccgcggcggcagtggccgcgcccctttcagcgccgccttcccggctccggccgctcttccagctcccggggccgagcgccgcggccgagcgtctgcagcggcagcgcgtgtgcctggagcgcgtgcagtgctcgacggcctcgggcgctgaggtgaagggctccggccgggtgctcagctgccctgggcccagggccgtgaccgtgcgctacacctttaccgagtggcgctccttcctggacgtgccggctgagctgcagcccgagccgctggagccacagcagccagaggcaccgtctggggcctccgagccagggtccggggatgccaagaaagagccaggcgccgagtgcttccacttctcgctgtgcctgcccccgggcctgcagcctgaggacgaagaggacgccgacgagcgcggcgtcgcggtccacttcgctgtctgctaccgctgcgcgcagggcgagtactgggacaacaacgcgggcgccaactacacgctgcgctacgcgcgccctgcggacgcgctctgagcctggagagtatgcaagagccgtggggcggggttgattagcacgtggagctcgggctgccgcctcaaggaacttgctgggacgctttgctgagcgtggcgagtctggcgtgaggggcgcgtggagggaaaggagggagactttgaaccgtcgactcgcacccccgcagacaagtgagcgagcttagagagacccggcaatgctccgaaagcctctgacctcagtcttctcgtccgtttgaccttcctacaaggcctctagaattcccagcctgcgtcagagtaggaagaaacttccaaggcccggagcagctgcctccaagaaaaaggctcccaactcccgggcatggttctaaggccttgggattggtttttaactctaaatatcatattgtagccccttgcagtttgctggagacccctagggaaaagaataaagcgtcctgcccacggtgcaccagaggaaggtgccacggactgtgggtgcacgcgtgggacctttacaccccaacctatttctcagagaaaacccttcggggctgggccaggccacccttttcttttgactgagatgtgggtaatgtgtgcccagacttgacgttgtttattgtgcgacattgtgtacaaatgtcctttataaaagtaaaggccactcgcaaaa

SEQ ID NO: 3016 - DNA, 424 bp, Homo sapiens
  SIMILAR (240)..(422): 1001254mologous to Homo sapiens Ku70-binding protein,accession number AF078164,Smith-Waterman Score=340.
ccatgcggtggaattcatcatatctatagaatttgaactagaatggattttgtgtacaacctccttattttacaggtgagataacagtcctgaagatgttgtttctttcccaagatttcctatgtgttagtagtagaggggatttactatatggtggagggtctcctgagccctggcccagggctgtttgccacatacacactgtttctggacattgtctccttttcttgccttttagtgctgttaacaaagatagacacttttcttgcgaagactgtaatggaaatgtcagtggaggttttgatgcttcaacatctcagatagttttgtgccagaataatatccataatcaggcccatatgaacagagtggtcacacacgagctcattcatgcatttgatcattgtcgtgcccatgtcgactg

SEQ ID NO: 3017 - DNA, 1282 bp, Homo sapiens
  SIMILAR (562)..(882): 501254mologous to Homo sapiens Ku70-binding protein,accession number AF078164,Smith-Waterman Score=232.
tcccgcctaacgtcttcagcccagccagtctgcccttcttccctgcggagggagggcctgggcggtcgcgttggcgggagggaggttacctttcccagtctcgctctggccgcctgagccaggaggaagcagcgtcgaggtctgcgggaggcatggcgggagctccggacgagcgccggcggggccccgcggcaggggagcagctgcagcagcaacacgtctcttgccaggtcttccccgagcgtctggcccaggggaatccccagcaagggttcttctccagcttcttcaccagcaaccagaagtgccagcttaggctcctgaagacgctggagacaaatccatatgtcaaacttctgcttgatgctatgaaacactcaggttgtgctgttaacaaagatagacacttttcttgcgaagactgtaatggaaatgtcagtggaggttttgatgcttcaacatctcagatagttttgtgccagaataatatccataatcaggcccatatgaacagagtggtcacacacgagcttattcatgcatttgatcattgtcgtgccccatgtcgactggttcaccaacatcagacatttggcgtgctcagaggttcgagctgctaaccttagtggagactgctcaacttgtcaaatgaaatattccgggtttcaatttggattaaaacacccccccccagacttggtgtgcgagacagagccactctttctatcctggctgttaggaatatcagcaaagaagtagctaaaaaggctgttgatgaagtttttgaatcctgtttcaatgaccatgaaccttttggaaggatccccacataacaagacttatgcaagatatgctcacagagactttgaaaaccggggtcgggtattattcaaatatatgagcacaatgacatttttatattacagagcttccatcatcatgaagaaaaaaaaaatttggttctcaagtgaacaaaccatataaaatgtaaacaatccctacaatccagataaaacagagaagactgtgattctagcatattatcagaaaaagtaactatggcaaaaaatgaaactgctttaaactccaaggcagaaattgtatctttatagctaaccatttagtaaataaatacattacatttttgtattttagtcatttgtttttattacatgtgattattttaaaatttgattatgaaacctgtgaagtgtgctcttccatgatgttgataggtgaccactgttggtatttacattaaatgtaaagaaatgtgaaaaaa

SEQ ID NO: 3018 - DNA, 349 bp, Homo sapiens
  misc_feature (1)...(349): n = a,t,c or g
atacagagtttctgtcattggatctctgattggtagtgttaataaatattctttcagtgtgagccagattcataaaattaattttcttcattttagtagtaaaaagtagtctaatagctttttgtcagcttgatttttttgtgtgtgtaatattcaagggcataatgacaggacagataagcaataagaaatgtatagaattagaaaatatnnnnnnnnnnnnnnnnnnnnnnnnnnnnnnnnnnnnnnnnnnnnnnnnnnnnnnnnnnnnnnnnnnnnnnnnnnnnnnnnnnnnnnnnnnnnnnnnnnnnnnnnnnnnnnnnnnnnnnnnnnnnnnnnnnnnnnncag

SEQ ID NO: 3019 - DNA, 2165 bp, Homo sapiens
  SIMILAR (884)..(1159): 561254mologous to Homo sapiens Human secreted protein, SEQ ID NO: 4609,accession number AAG00528,Smith-Waterman Score=247.
tgtttaattttataaaattgaaaagtttaggaatgagttttattgcaatcttttctctgcaaatgaagtttttttctactagtggatattttaaagggactattttataattccaaaacgtctagtttcaaatgcttcagagaattttgtaacttaagtttcatatagagtagtctccccttatccacgattttgctttctgtggtttcggttactcacggtcaaccacagtctgattacaggtgagtacagtacaataagatattttgagagaaagagacagacatatccacattaacatcacttttaattacagtgcactgttaataattgttctatttgcagttattgtttatctcttgctgtccctgatttataaatagaactttatcataggtatatatgtataggaaacaacagtgtatagaggtgtctatactatccatgggtttcagacgttcactgggggtcttggaacgtatgtcccatgggtaagagggaactactatattttctaattctatacatttcttattgcttatctgtcctgtcattctgcccttgaatattacacaccacaaaaaaatccaagctgacgaaaaagctattagactactttttactactaaaatgaagaaaattaattttatgaatctggctcacactgaaagaatatttattaacactaccaatccaggaggatccaatgagcaggaaacactggtgctgggaatacaaaagaacaaaaaatgaggtcatttggaattggccctggaaaaactcggaaattcttgcgaaggatggtggtacttgtatctgatattctggaagtgactagtggtttgaattttaactcaaaggattaaataagagtttgttttttttttttttgagacggagtctttctctgtcacccatgctggagtgcagtgggcacaatcttgggctccattgtaacctccacctcccaggttcaagcaatgctcctgcctcagcctcccgagtagctaggattacaggcgcacaccaccacgccaggctaatttttgtatttttagtagagatggggtttcaccaaactggctgggccatgctggtcttgaaactccctgacatccaggtgatatgcccgccttggcctccccaaagtgctgggatttacaggcatgagccacagcaccctggccgtaaatgagagtttttatgtgcaagtaaaggcagttaaataactttcagtaataaaatgcatctcagatatttccacaggttgtaaaacacaacctgggttacctttttgaataaaataacatttggaagaaggcatagctacttttaaaagctattctatgctttccttgtgtttgaaatttcaagaaaaaataaaatgatcaatcacggaattaacaatgccaaattcaagttaattcctataattcttccattatgttatgaatattatgtaatatcaaaccatccatttttaatgtgctaaaaaatatgggtttaccaaaatatgaacaggtaatttttaaagagtaaattatgttaagaactttattattttcgattcattttatagggtagtaaaataatacttcttcaaaatcatttaaatgttattggatgcccattggcaaaatcatttataaataaattttcctcccattatcccaatcacatcctagataacattgaaatatgttacagggtttctctggataggtaccaaaaggtaccacattttatacaggacttaattgtgaaagctggggtgaaataaattttcaggatcaaaattttttttaaggtttaaatcattcactctttaaatttccagacagtgtccagtgtgactccttacttttaaagggaaaaaaaattagtttaaaatttaatagcccacagatttaataatttttttactttaacacttaatgtacattttcatgagcagtaattaagatatgttgaaattttaaatgtgaaagatttcaaagtttcagtatgttaacattactcttcaaatgttcttaatatatatataaacacttacaaattatagatacaactagttgtatatctacaatacatatatgaacaccattcttcttctctagccatatttatatgaggataaagtaataaatctctgtgctattcaagga

SEQ ID NO: 3020 - DNA, 617 bp, Homo sapiens
  SIMILAR (595)..(503): 901254mologous to Mus musculus putative,accession number AK016662,Smith-Waterman Score=154.
gaatatagcaaggttatttttaaatcattttaataatgcggaaatgctgatacatggtgctttcatctttcaacttccaaaaggctataaaattggctcttctcaaatattttaaaatttcatttcaactatttcctttttacgttcacaaaattgggtgcagacactctcactttgccatgaatgtttcttgataaatctgtgtcctttacgctgcggaataagctctttttcatcttgctggtgcttctctggaatgcatgaaactatccaaggctgttcttgccgctgtaaatacaaaaaagagtaacaataatctactgttaaatcactgaactgtttaaaatcataattcaaaataacaaatttgaataccttttccctttttctgcactccaggagtaagtttcactttatatctttaaaaaggaattacatgtgttactaaatagatgttacaaaacaattcacaaaagccattctgtccactaatggtaacttacttgtagtttgtcatggtggtgtaacgagcacatatcggaatggcaaacagtagtacatcttcaggatgtggctggcctgtcaaagaatcaaathaggttttcctcatttccctg

SEQ ID NO: 3021 - DNA, 742 bp, Homo sapiens
  SIMILAR (377)..(685): 591254mologous to Homo sapiens antigen NY-CO-1,accession number AF039687,Smith-Waterman Score=255.
ggtcaacagatgttttattgaatgcctaagacctgccaatgctatgttggtacaaagactacaaatcccagtgcctggccatcaaggtgatcaggggcaaaatgtgcctagtgagtaagggatgagtcaggggtgacaatatgttgagcttggatgatggaaagaaagataaatcccatgagagatgaaaaacttgcatctttttccccacatgatgattttaagcatctttgtattttctaacttggtgattatcaagtgaagcagaagccatgaccatttatatactgtatatgtgccttccccatggaacttttttagggcactaagaatttcaaattctaagaatgaaatgttttccatgtcttttttattcagggaaatgaaaaagaaaaaacttccaagtgactcaggagatttagaagcgttagagggaaaggataaagaaaaagaaagtactgtacacattgaaactcatcagaacacaagcaaaaatgttgcggctgtgcagccaatgaaacgatggacaaaagagtaaaatgaaaaaaatgaaagaaaaatactaagaccaggatgaagaagaccgtgaacttatcatgaagttgctggggtctgcaggttcaaacaaagaagaaaaagggaagaaggggaagaaaggaaaaacaaaggacgaacctgtgaagaaacagccccagaaacctagaggtggacagagggtctctgacaacattaagaaagaaat

SEQ ID NO: 3022 - DNA, 2759 bp, Homo sapiens
  SIMILAR (852)..(1391): 601254mologous to Homo sapiens antigen NY-CO-1,accession number AF039687,Smith-Waterman Score=477.
aatttattgtggtaaaggatcttggagatcatttagttcaacctattcatgatacaggttattcttttgtctaagagtaccctttgggaatgatcagacacttttctgttgattttttggagaaatatgggagaaacagtggaatatttttatgacatttttaggaaatcacctggcttggttggtagtcccacactgactttccttatgataattctacagatggaggtgacacgagcagtgatgaggataaagaagaacatgaaactcctgtggaagtagaactcatgactcaggttgaccaagaggatatcactcttcagagtggcagagatgaactaaatgaggagctcattcaggaagaaagctctgaagacgaaggagaatatgaagaggttaagaaaaagatcaggattctgttggtgaaatgaaggatgaaggggaagagacattaaattatcctgatacctaccattgacttgtctcacctttcaaccccaaaggtccatccagaaattggcttcaaaagaggaatcttctaattctagtgacagtaaatcacagagccggagacatttgtcagccaaggaaagaagggaaatgaaaaagaaaaaacttccaagtgactcaggagatttagaagcgttagagggaaaggataaagaaaaagaaagtactgtacacattgaaactcatcagaacacaagcaaaaatgttgcggctgtgcagccaatgaaacgaggacaaaagagtaaaatgaaaaaaatgaaagaaaaatacaaagaccaggatgaagaagaccgtgaacttatcatgaagttgctggggtctgcaggttcaaacaaagaagaaaaagggaagaaggggaagaaaggaaaaacaaaggacgaacctgtgaagaaacagccccagaaacctagaggtggacagagggtctctgacaacattaagaaagaaactccgttccttgaggttataactcatgagttacaagacttttgcctgtagatgatccacattgattgaccaagggaaagagccagatctggatcaacagggaaatgaggaaaacctattttgattcctttgaccagggccagccacattcctgaagatgtactactggttttgccattccaatatgtgccccttacaccaccatgacaaactacaaatataaagtgaaacttactcctggagtgcagaaaaagggaaaagctgcaaaaacagccttgaatagtttcatgcattccaaagaagcaacagcaagagaaaaagacttattccgcagcgtaaaggacacagatttatcaagaaacattcctggcaaagtgaaaagtgtctgcacccaatcttctgaacgtaaaaaggaaatagctgaaatgaaattctaaaatatttgagaagagccaattttatagccttttggaagttcaaagatgaaagcaccatgtatcaggatttccgcattataaaaatgaactaaacattgccttgctatattcaccaaaaggacttaattcttgtttttttcccagttttatatagaggaaacactgtctatgataggatttccaaaagtatttgtggacagttaaatgctaattaatatacatccgtagttattctacattttcttgaaatttgggaggttaataccaagtattcatttcatgatgtaaagaaactgaacagtgaagtggcttgattgcttaaactattgacttggtaagtctactgtatataacatctaatatatatattacaggccaaatgaactaaacattgccttgctatattcaccaaaaggacttaattcttgtttttttcccagttttatatagaggaaacactatgataggatttcctaaagtatttgtggacagttaaatgctaattatatacatctgtagttattctacattttcttgaaatttgagaggttaataccaagtattcatttcatgatgtaaagaaactgaacagtgaagtaggcttgattgctttaaactattggactttggtaagtctactgtatataacatctaatatatatatattataggccagctacaaggggtttaaatatttaggacttgtgtcttgaaaactaagtattgggagtgggattttcttctgctttcattgatacttgtcaggaaaaaaatattaggccccaaaatgtaaaatataaagaataattcctcatgactccaggctaatcatttccaattatttgtagccccttcaaggttgatcttaaattttttcctgtatttctaaatcagttccggacccattttaattccccacctttaagaattaatttcccaattatagcacgttaagagtatcttaacccaataatacaggaagcgcattttaggcttaccacttaaagcctctaacccaccttttctctgtctcttaacagaaaggaaaatgatgtcatcattatttccattccttcatgagctataaaacctattaattaaaaaaaaactttttaattgactggacagcacctgcctgtattcagcatgaccacttgctccagcccctacactgaagcattaaggtcaaagtactgaacagttgttggtccctccacactttgtttttccagcttcgtcataatgtgaatattaatgtttaaaaaaaaaacctttattatattgtatttacaacactaggttacataactatagactactcttgccattaaaaaaaaactctataatgttttcaaaaaaaaaaaa

SEQ ID NO: 3023 - DNA, 1511 bp, Homo sapiens
  SIMILAR (192)..(809): 1001254mologous to Homo sapiens uncoupling protein UCP- 4,accession number AF110532,Smith-Waterman Score=1072.
gcagctggaccactccagctgggactgctaggaaggttgcgggtccacccggccgagccgaacgagggaaatggtcctcacccggccactcgccggttgaaaaggggccgccctggcagggaagcggccgccgcggcgcggtgcagcgcagcggcgagaaggagtgcgttatcgtcttgcgctactgctgaatgtccgtcccggaggaggaggagaggcttttgccgctgacccagagatggccccgagcgagcaaattcctactgtccggctgcgcggctaccgtggccgagctagcaacctttcccctggatctcacaaaaactcgactccaaatgcaaggagaagcagctcttgctcggttgggagacggtgcaagagaatctgccccctataggggaatggtgcgcacagccctagggatcattgaagaggaaggctttctaaagctttggcaaggagtgacacccgccatttacagacacgtagtgtattctggaggtcgaatggtcacatatgaacatctccgagaggttgtgtttggcaaaagtgaagatgagcattatcccctttggaaatcagtcattggagggatgatggctggtgttattggccagtttttagccaatccaactgacctagtgaaggttcagatgcaaatggaaggaaaaaggaaactggaaggaaaaccattgcgatttcgtggtgtacatcatgcatttgcaaaaatcttagctgaaggaggaatacgagggctttgggcaggctgggtacccaatatacaaagagcagcactggtgaatatgggagttacagcctttatccataaccgcagccatccatccagaaatgcccaccgtctgaggttgggagagccggtgcggcaaaagcctctcgtcctcctccgggacggacattcagcagtagcgcaagacgataacgcactccttttcgccgctgcgctgcaccgcgccgcggggcacgctatccctgccagggcggccccttttcaaccggcgagtggccggcggaagaatttgcgtagacccccgtgcatcaagggctggattccttggattggagttggatttgagtttgggaaagcccctctagaatttatagagaaagcaagaatcaagatgagaagtttagagaagttacgcagtgtaaccaaggttcaacaactctttgatcaggctgacttgggaatccaagcctttacctactgtgctgcctccctgtggcattgtgtctggaatttgtgggttcttggtctcactgacttcaagaatgaagccacggcccctcgtggaatgaagctgcagaccttcgcggtgagtgttacagctcttaaggcaacgcgtctggacttgttcgttcctcccggtgggctcgtggtctccctggcttcaggagtgaagctgcagaccttttcgataccaccacctcctccaagagacctgaattcttctggtctgaattcttcagactacattatgagctccaggtaa

SEQ ID NO: 3024 - DNA, 496 bp, Homo sapiens
tggggctccttcctggcactgaggaggggcgctcccaatgctgtgaggcagcggggagggaccgtgcacccgtggctatcagagcccctccgctgtcccaccctgggcctgggacacgggcctggggcagtgtgtgtctgctggtcatgtgctggtgccagttggggaggaatcagctgtctcggtggattctgagactcactgtggggcgggaagaagggtcttcactctgccattcagggataaagtttaattttatttttctacacattttgccaggtcaggcattttgctagtaagcaggatgcccccaactctcagccgggcagcctggcctctcctgcccagacctgcggtcccagcatcccccagagccagggaacaggcccagcgggagggggttttatgttttgtttcaaacagaaaacacaaccttatttttctttacaaaagcaaaaaaggaaaccaaaaaagatacagcctttgaatgataaaa

SEQ ID NO: 3025 - DNA, 1109 bp, Homo sapiens
cggccgccgcggcgcggtgcagcgcagcggcgagaaggagtgcgttatcgtcttgcgctactgctgaatgtccgtcccggacgaggagggagaggcttttgcgtctgacccagagatggccccgagcgagcaaattcctactgtccggctgcgcggctaccgtggccgagctaggtacccggctgcccacgcctgggcctcccgggccagtggcacgcgccgcgctgggggaggagaccgcgggggcggcttcgcgcccgggcagtgcgcaatcgaagaggtcgcccccttcccatgcccgcctggcagaggttgcggtggaggccaggccccgcggtgggaggaggagggatttggaggtctccacggccttttccttctaatctcttctaaatgcttcccttagggcatgtgctgtggtgcttgaatgttgtactttaaggaagcttcgcgagctgtcattcctcgtgtaggaatcattttccttttcatgaggatgacctttttaaaaaacgtaatctgttttccatccttactgagatcatctctgtggtttatagtcttacacagccacactgtcattatcttgtgggtccaagttgtggacctaccttgtgggacttccgttattaacctgccactcacagagcatcgactacttgacctctttgagtgtaattcatctatactgtttaccttgcaggattctgagaagtcaataatatatgattgctaaacccaaggcaggacacccattagttgcgacatttttataattcctacaataccagggactgtggatatataatttgaaaagacccagttctgaccttcttacaggctgctggggagacagagaaagacaattataatgtgctacttgttataatgaagatattattaggtgtcataaaagcatagaagagcagttacatctgcctacatgagtaagaaaaaactttaagaggccatctagagtggaatgatgatgcccttgaatgagcaagtagcgtttattccaaggattttgtgagtagtatactcatgtgtttcctgtgaagccttaactgtgtattttaagattacccttacattttcttgcctgttac

SEQ ID NO: 3026 - DNA, 1960 bp, Homo sapiens
  SIMILAR (1316)..(1450): 1001254mologous to Homo sapiens trophoblast membrane expressed protein,accession number A23031,Smith-Waterman Score=231.
ggggggccgtgcggacctggggaagaggattccaaacagaaaaatgccaagcatcacttttaaacttctggaacccgcctaccactgcccaagtcacgattgaagccgagccaaccaaagtttccaaggggaaggacgttcttctacttgtccacaatttgccccagaatcttgctggctacatctggtacaaagggcaaatgaaggacctctaccattacattacatcatacgtagtagatggtcaaataattatatatgggcctgcatacagtggacgagaaacagtatattccaatgcatccctgctgatccagaatgtcacccgggaggacgcaggatcctacaccttacacatcgtaaagcgaggtgatgggactagaggagaaactggacatttcaccttcaccttataccgtcattccttggactctgctctatctttagaggtcactggctcaagtcagccactatgagacacctgggaaaactgccccaccttgtggctccactgcctgatgactgaactgacctccggacttgactctgttctcccctgtgttatttctgctgaagtacccagtcccaggtcaggctttccagtatccaaagggtttaaagacaattggaagttccatcacccatctctaggatgtccttggcaagggaagctgcagagaaaacatacctcgggcggcaaagtaagactgaaactaagaagattccagcactgcatgctccaagtgaggaccacaagtggagactcccaagccctccatctccagcagcaacttataccccagggaggacatggaggctgtgagcttaacctgtgatcctgagactccggacgcaagctacctgtggtggatgaatggtcagagcctccctatgactcacagcttgcagttgtccaaaaacaaaaggaccctctttctatttggtgtcacaaagtacactgcaggaccctatgaatgtgaaatacggaacccagtgagtgccagccgcagtgacccagtcaccctgaatctcctcccgaagctgcccaagccctacatcaccatcaacaacttaaaccccagggagaataaggatgtcttagccttcacctgtgaacctaagagtgagaactacacctacatttggtggctaaatggtcagagcctcccggtcagtcccagggtaaagcgacccattgaaaacaggatcctcattctacccagtgtcacgagaaatgaaacaggaccctatcaatgtgaaatacaggaccgatatggtggcatccgcagttacccagtcaccctgaatgtcctctattactacaaagcatagcgggctctatgcttgctctgttcgtaactcagccactggcatggaaagctccaaatccatgacagtcaaagtctctgctccttcaggaacaggacatcttcctggccttaatccattatagcagccgtgatgtcatttctgtatttcaggaagactggcagacagttgctttcattcttcctcaaagtatttaccatcagctacagtccaaaattgctttttgttcaaggagatttatgaaaagactctgacaaggactcttgaatacaagttcctgataacttcaagatcataccactggactaagaactttcaaaattttaatgaacaggctgatacttcatgaaattcaagacaaagaaaaaaacccaattttattggactaaatagtcaaaacaatgttttcataattttctatttgaaaatgtgctgattctttgaatgttttattctccagatttatgcactttttttcttcagcaattggtaaagtatacttttgtaaacaaaaattgaaacatttgcttttgctccctaagtgccccagaattgggaaactattcaggagtattcatatgtttatggtaataaagttatctgcacaagttcaaaaaaaaaaaaaaaaccc

SEQ ID NO: 3027 - DNA, 1011 bp, Homo sapiens
  SIMILAR (124)..(882): 951254mologous to Homo sapiens pregnancy-specific beta- glycoprotein e,accession number M20882,Smith-Waterman Score=1269.
atggccacggagaagaggctcagtgcagaaggaggaaggacagcacagctgacagccgtgctcaggaagtttctggatcctaggctcatctccacagaggagaacacacaggcagcagagaccatggggcccctctcagcccctccctgcacagagcacatcaaatggaaggggctcctggtcacagcatcacttttaaacttctggaacctgcccaccactgcccaagtcacgattgaagcccagccaccaaaagtttccgaggggaaggatgttcttctacttgtccacaatttgccccagaatcttactggctacatctggtacaaagggcaaatcagggacctctaccattacattacatcatatgtagtagacggtcaaataattatatatgggcctgcatatagtggacgagaaacagcatattccaatgcatccctgctgatccagaatgtcacccgggaggacgcaggatcctacaccttacacatcataaagcgaggtgatgggactagaggagtaactggatatttcaccttcaccttatacctggagactcccaagccctccatctccagcagcaacttaaaccccagggaggccatggaaactgtgatcttaacctgtgatcctgagactccggacacaagctaccagtggtggatgaatggtcagagcctccctatgactcataggtttcagctgtccgaaaccaacaggaccctctttctatttggtgtcacaaagtatactgcaggaccctatgaatgtgaaatacggaactcagggagtgccagccgcagtgacccagtcaccctgaatctcctccgtgagtatcttctgttcctctgtgggccagactgccatcccaaatacacatggccagaggccaggcctctcagtccctctcaggtccaagtacagagacctttacccctaggcatcaaagctggccatgactttctgccccaggcaaaccagaataggcctaggcttgatccacaatag

SEQ ID NO: 3028 - DNA, 1882 bp, Homo sapiens
  SIMILAR (87)..(1370): 1001254mologous to Homo sapiens pregnancy-specific beta- glycoprotein c,accession number M20879,Smith-Waterman Score=2278.
ggacagcacagctgacagccgtgctcagagagtttctggatcctaggcttatctccacagaggagaacacacaagcagcagagaccatgggaaccctctcagcccctccctgcacacagcgcatcaaatggaaggggctcctgctcacagcatcacttttaaacttctggaacctgcccaccactgcccaagtcacgattgaagccgagccaaccaaagtttccgaggggaaggatgttcttctacttgtccacaatttgccccagaatcttaccggctacatctggtacaaagggcaaatgagggacctctaccattacattacatcatatgtagtagacggtgaaataattatatatgggcctgcatatagtggacgagaaacagcatattccaatgcatccctgctgatccagaatgtcacccgggaggacgcaggatcctacaccttacacatcataaagggagatgatgggactagaggagtaactggacgtttcaccttcaccttacacctggagactcctaagccctccatctccagcagcaacttaaatcccagggagaccatggaggctgtgagcttaacctgtgaccctgagactccagacgcaagctacctgtggtggatgaatggtcagagcctccctatgactcacagcttgaagctgtccgaaaccaacaggaccctctttctattgggtgtcacaaagtatactgcaggaccctatgaatgtgaaatacggaacccagtgagtgccagccgcagtgacccagtcaccctgaatctcctcccgaagctgcccaagccctacatcaccatcaacaacttaaaccccagggagaataaggatgtcttaaacttcacctgtgaacctaagagtgagaactacacctacatttggtggctaaatggtcagagcctcccggtcagtcccagggtaaagcgacccattgaaaacaggatcctcattctacccagtgtcacgagaaatgaaacaggaccctatcaatgtgaaatacgggaccgatatggtggcatccgcagtgacccagtcaccctgaatgtcctctatggtccagacctccccagaatttacccttcattcacctattaccgttcaggagaagtcctctacttgtcctgttctgcggactctaacccaccggcacagtattcttggacaattaatgaaaagtttcagctaccaggacaaaagctctttatccgccatattactacaaagcatagcgggctctatgtttgctctgttcgtaactcagccactggcaaggaaagctccaaatccatgacagtcgaagtctctgcttatagcagttcaataaactatacttctgggaaccgtaattgaaacatttacttttgctttctacctgactgccccagaattgggcaactattcatgagaattgatatgtttatggtaatacacatatttgcacaagtacagtaacaatctgctttctttgtaacatgacacatttgaaatcattggttatattaccaatgctttgattcggatgttatattaaaaacatagatagaatgaaccaatatgaactgcaggcaaagtctgaagtcagccttggtttggcttcctattctcaagaggtttgtgaagatttaatctcagattccttataaaaacttagagaaaagaaaattttagaagacagcctacatggtccattgctactcttgctgcacttatgtaaacaatcagaccacatttgaagaaactccacctattttgcaaacaaacttattctactgaaattatcattggtaaaagtagagatgcccatagagggaaaaattatgtggaaaataaaaactgtagtatacctgttatgagactgc

SEQ ID NO: 3029 - DNA, 1857 bp, Homo sapiens
  SIMILAR (124)..(786): 931254mologous to Homo sapiens pregnancy-specific beta- glycoprotein e,accession number M20882,Smith-Waterman Score=1145.
atggccacggagaagaggctcagtgcagaaggaggaaggacagcacagctgacagccgtgctcaggaagtttctggatcctaggctcatctccacagaggagaacacacaggcagcagagaccatggggcccctctcagcccctccctgcacagagcacatcaaatggaaggggctcctggtcacagcatcacttttaaacttctggaacctgcccaccactgcccaagtcacgattgaagcccagccaccaaaagtttccgaggggaaggatgttcttctacttgtccacaatttgccccagaatcttactggctacatctggtacaaagggcaaatcagggacctctaccattacattacatcatatgtagtagacggtcaaataattatatatgggcctgcatatagtggacgagaaacagcatattccaatgcatccctgctgatccagaatgtcacccgggaggacgcaggatcctacaccttacacatcataaagcgaggtgatgggactagaggagtaactggatatttcaccttcaccttataccgggaggccatggaaactgtgatcttaacctgtgatcctgagactccggacacaagctaccagtggtggatgaatggtcagagcctccctatgactcataggtttcagctgtccgaaaccaacaggaccctctttctatttggtgtcacaaagtatactgcaggaccctatgaatgtgaaatacggaactcagggagtgccagccgcagtgacccagtcaccctgaatctcctccagcattcttggctgattgatgggaagttccagcaatcagcacaagtgttctttatccctcaaatcactaaaacatatagagggctctatgtctgtttcatccataactcagccactgctggaacaaatctcataatcaagaggaccatagtccctgccttaaaaaataaacgagtgcagcatggccagtatggaattgaccgaaaactaatcaccaagccagaaacgtgggagaataaggatgtattagccttcacctgtgaacctaagagtgagagctacacctacatttggtggctaaatggtcagagcctcccggtcagtcccagggtaaagcgacccattgaaaacaggatcctcattctacccagtgtcacgagaaatgaaacaggaccctatgaatgtgaaatacgggaccgatatggtggcatccacagtgacccagtcaccctgaatgtcctctgtatcttttgttcctctgtgggccaggccaccagcttaaatccaaatgaccaggggccaggcctctcagtctctctccggtccaagtatagacaactttacttctggacatccaagctggccatgactccctgccctgggaaaacctgggtaggcacagccttaaccaagaatataaggggagtggacggtcttgtcgtgggagacttggggcccacatcttgtgatggtccagacctccccagaattcacccttcatacaccaattaccgttcaggagataacctctacttgtcttgcttcgcgaactctaacccaccggcacagtattcttggacaattaatgggaagtttcagcaatcaggacaaaatctgtttatcccccaaattactacaaagcatagcgggctctatgtttgctctgttcgtaactcagccactggcgaggaaagctccacatcgttgacagtcaaagtctctggctgcagggaaatgagaagagaaggagcctcagggcagactcctaagcctggtcctggctctgaagtcagcggttgtatgaagctgtgggcacagtacgtgggacacagcatggaggactgtgactga

SEQ ID NO: 3030 - DNA, 1922 bp, Homo sapiens
  SIMILAR (67)..(1317): 1001254mologous to Homo sapiens pregnancy-specific beta-1- glycoprotein,accession number M17908,Smith-Waterman Score=2221.
gtgctcagagagtttctggatcctaggcttatctccacagaggagaacacacaagcagcagagaccatgggaaccctctcagcccctccctgcacacagcgcatcaaatggaaggggctactgctcacagcatcacttttaaacttctggaacctgcccaccactgcccaagtcacgattgaagcccagccacccaaagtttccgaggggaaggatgttcttctacttgtccacaatttgccccagaatcttaccggctacatctggtacaaagggcaaatgagggacctctaccattacattacatcatatgtagtagacggtgaaataattatatatgggcctgcatatagtggacgagaaacagcatattccaatgcatccctgctgatccagaatgtcacccgggaggacgcaggatcctacaccttacacatcataaagggagatgatgggactagaggagtaactggacgtttcaccttcaccttacacctggagactcctaagccctccatctccagcagcaacttaaatcccagggagaccatggaggctgtgagcttaacctgtgaccctgagactccagacgcaagctacctgtggtggatgaatggtcagagcctccctatgactcacagcttgaagctgtccgaaaccaacaggaccctctttctattgggtgtcacaaagtatactgcaggaccctatgaatgtgaaatacggaacccagtgagtgccagccgcagtgacccagtcaccctgaatctcctcccgaagctgcccaagccctacatcaccatcaacaacttaaaccccagggagaataaggatgtcttaaacttcacctgtgaacctaagagtgagaactacacctacatttggtggctaaatggtcagagcctcccggtcagtcccagggtaaagcgacccattgaaaacaggatcctcattctacccagtgtcacaagaaatgaaacaggaccctatcaatgtgaaatacgggaccgatatggtggcgtccgcagtgacccagtcaccctgaatgtcctctatggtccagacctccccagaatttacccttcattcacctattaccgttcaggagaagtcctctacttgtcctgttctgcggactctaacccaccggcacagtattcttggacaattaatgaaaagtttcagctaccaggacaaaagctctttatccgccatattactacaaagcatagcgggctctatgtttgctctgttcgtaactcagccactggcaaggaaagctccaaatccatgacagtcgaagtctctgaagccctataagctggaggtggacaactcaatgtaaatttcatgggaaaacccttgtacctgaagcatgagccactcagaactcaccaaaatattcgacaccataacaacagatgctcaaactgtaaaccaggacaacaagtggatgacttcacactgtggacagtttttcccaagatggtcagaaccagactccccatcatgataaggctctcccccctcttaactggcccttgctcatgcctgcctctttccacttgggcaggataatgcagtcattagaatttccacatgtagtagcttctgagagtaacaacagagtgttcagatatgtcatctcaacctcaaacttttacataacatctcagggggaaatgtgggctctctccaccttgcattacagggctcccaataggaaatggaacacagaggtatttgcctgtgtgtttgcagagaagatggtttgtatgaagacgtaggaaagctgaaattataatagagtcccctttaaatccacattgtgtggatggctcttgccgtttcctaagagatacattgtaaaacgtgacagtaagacattctagcagaataaaacatgtaccacctttgctaaa

SEQ ID NO: 3031 - DNA, 2250 bp, Homo sapiens
  SIMILAR (811)..(1518): 1001254mologous to Homo sapiens F19434_2,accession number AC004654,Smith-Waterman Score=1249.
atggccatactgcccaaggtaatttacagattcaatgccatacccatcaagctaccaatgactttcttcacagaattggaaagaactactttaaagttcatatggaaccaaaaaagagcctgcatcgccaagtcaatcctaagccaaaagaacaaagctggaggcatcacactacctgacttcaaactatactacaaggctacagtaaccaaaacagcatggtactggtaccaaaacagagatatagatcaatggaatagaacagacccctcagaaataacacctcatatctacaactatctgatctttgacaaacctgagaaaaacaagcaatggggaaaggattccctatttaataaatggtgctgggaaaactggctagccatatgtagaaagctgaaactggatcccttccttacaccttatacaaaaatcaattcaagatggattaaagacttaaatgttagacctaaaaccataaaaaccctagaagaaaacctaggcattaccattcaggacataggcatgggcaaggacttcatgtctaaaacaccaaaagcaatggcaacaaaagccaaaattgacaaatgggatctaattaaactaaagagcttctgcacagcaaaagaaactaccatcagagtgaacaggcaacctacaaaatgggagaaaattttcacaacctactcatctgacaaagggctaatatccagaatctacaatgaactcaaacaaatttacaagaaaaaaacaaacaaccccatcaaaaagctcatctccacagaggagaacacacagacagcagagaccatggggctcctctcagcccctccctgcacacagcgcatcacctggaaggggctcctgctcacagcatcacttttaaacttctggaacccacccacgactgcccaagtcacgattgaagcccagccaaccaaagtttctgaggggaaggatgttcttctacttgtccacaatttgccccagaatcttactggctacatctggtacaaagggcaaatcagggacctctaccattacattacatcatatgtagtagacggtcaaataattatatatgggcctgcatacagtggacgagaaacaatatattccaatgcatccctgctgatccagaatgtcacccaggaagacgcaggatcctacaccttacacatcataatgggaggtgatgagaatagaggagtaactggacatttcaccttcaccttatatctggagactcccaagccctccatctccagcagcaaattaaaccccagggaggccatggaggctgtgagcttaacctgtgatcctgagactccggacgcaagctacctgtggtggatgaatggtcagagcctccctatgtctcacaggttgcagttgtctgaaaccaacaggaccctctttctattgggtgtcacaaagtacactgcaggaccctatgaatgtgaaatacggaacccagtgagtgccagccgcagtgacccattcaccctgaatctcctccagcattcttggctgattgatgggaagttccagcaatcagcacaagtgttctttatcccccaaatcactaaaacatatagaggggtctatgtctgtttcatccataactcagccactgctggaacaaatctcataatcaagaggatcatagtccctgcgaagctgcccaagccctacatcaccatcaacaacttaaaacccagggagaataaggatgtcttaaacttcacctgtgaacctaagagtgagaactacacctacatttggtggctaaatggtcagagcctcccggtcagtcccagggtaaagcgacccattgaaaacaggatcctcattctacccagtgtcacgagaaatgaaacaggaccctatcaatgtgaaataagggaccaatatggtggcatccgcagttacccagtcaccctgaatgtcctctatggtccagacctccccagaatttacccttcattcacctattaccgttcaggagaagtcctctacttgtcctgttctgcggactctaacccaccggcacagtattcttggacaattaatgggaagtttcagctatcaggacaaaagctctttatcccccaaattactacaaagcatagcgggctctatgcttgctctgttcgtaactcagccactggcaaggaaagctccaaatccatgacagtaaaagtctctggtggcattgccttagcagacacctctttcagctgcagctaa

SEQ ID NO: 3032 - DNA, 1993 bp, Homo sapiens
  SIMILAR (1)..(708): 1001254mologous to Homo sapiens pregnancy-specific beta-1 glycoprotein,accession number M93061,Smith-Waterman Score=1253.
atggggcccctctcagcccctccctgcacacagcgcatcacctggaaggggctcctgctcacagcattacttttaaacttctggaacttgcctaccactgcccaagtcacgattgaagccgagccaaccaaagtttccaaggggaaggacgttcttctacttgtccacaatttgccccagaatcttgctggctacatctggtacaaagggcaaatgaaggacctctaccattacattacatcatacgtagtagatggtcaaataattatatatgggcctgcatacagtggacgagaaacagtatattccaatgcatccctgctgatccagaatgtcacccgggaggacgcaggatcctacaccttacacatcgtaaagcgaggtgatgggactagaggagaaactggacatttcaccttcaccttatacctggagactcccaagccctccatctccagcagcaacttataccccagggaggacatggaggctgtgagcttaacctgtgatcctgagactccggacgcaagctacctgtggtggatgaatggtcagagcctccctatgactcacagcttgcagttgtccaaaaacaaaaggaccctctttctatttggtgtcacaaagtacactgcaggaccctatgaatgtgaaatacggaacccagtgagtgccagccgcagtgacccagtcaccctgaatctcctccagcattcttggctgattgatgggaagttccagcaatcagcacaagtgttctttatcccccaaatcactaaaacatatagaggggtctatgtctgtttcatccataactcagccactgctggaacaaatctcataatcaagaggatcatagtccctgatacactgagaaaaagaggcaaccatgaaaaggtggaaagttctgatgacatagaaaatagcaatcagcctttctcacatcccaaggccttcaaaaatatacaagtgcagcatggccagtatggaattcaccgaaaactaatcaccaagctagaaaagtggcttgattctggtctcccctgtgttatttctgctgaaacatccagtcccaggccaggctgctcagtatcttcagggtttcagggccatgggaagtcccattattactcatctctagaatgtccttggaaatggaagttgcagagaaatcacatctatgggggcaaagtaggatggaatttggaaggggcccaccagttgcacattccagcgaagctgcccaagccctacatcaccatcaacaacttaaaccccagggagaataaggatgtcttagccttcacctgtgaacctaagagtgagaactacacctacatttggtggctaaatggtcagagcctcccggtcagtcccagggtaaagcgacccattgaaaacaggatcctcattctacccagtgtcacgagaaatgaaacaggaccctatcaatgtgaaatacaggaccgatatggtggcatccgcagttacccagtcaccctgaatgtcctctgtatcttttgttcctctgtgggccaggacaccagcttaaatccaaacgaccaggggccaggcctctcagtctctctccggtccaagtacagacacctttacttttggacatccgaggtggccatgactccctgccctgggaaaacttgggtagacacagccttaaccaagaatataaggagaggggatgctcttgtcatgggagacttggggcccacagcttgtgatggtccagacctccccagaattttcccttcagtcacctcttactattcaggagagaacctcgacttgtcctgcttcgcaaactctaacccaccagcacagtattcttggacaattaatgggaagtttcagctatcaggacaaaagctctttatccctcagattactccaaagcataatgggctctatgcttgctctgctcgtaactcagccactggcgaggaaagctccacatccttgacaatcagagtcattg

SEQ ID NO: 3033 - DNA, 1696 bp, Homo sapiens
  SIMILAR (28)..(1005): 1001254mologous to Homo sapiens pregnancy-specific beta 1- glycoprotein 4 precursor,accession number U18469,Smith-Waterman Score=1737.
gaggagaacacacaagcagcagagaccatggggcccctctcagcccctccctgcacacacctcatcacttggaagggggtcctgctcacagcatcacttttaaacttctggaatccgcccacaactgcccaagtcacgattgaagcccagccacccaaagtttctgaggggaaggatgttcttctacttgtccacaatttgccccagaatcttgctggctacatttggtacaaagggcaaatgacatacgtctaccattacattacatcatatgtagtagacggtcaaagaattatatatgggcctgcatacagtggaagagaaagagtatattccaatgcatccctgctgatccagaatgtcacgcaggaggatgcaggatcctacaccttacacatcataaagcgacgcgatgggactggaggagtaactggacatttcaccttcaccttacacctggagactcccaagccctccatctccagcagcaacttaaatcccagggaggccatggaggctgtgatcttaacctgtgatcctgcgactccagccgcaagctaccagtggtggatgaatggtcagagcctccctatgactcacaggttgcagctgtccaaaaccaacaggaccctctttatatttggtgtcacaaagtatattgcaggaccctatgaatgtgaaatacggaacccagtgagtgccagccgcagtgacccagtcaccctgaatctcctccatggtccagacctccccagcatttacccttcattcacctattaccgttcaggagaaaacctctacttgtcctgcttcgccgagtctaacccacgggcacaatattcttggacaattaatgggaagtttcagctatcaggacaaaagctctctatcccccaaataactacaaagcatagtgggctctatgcttgctctgttcgtaactcagccactggcaaggaaagctccaaatccatcacagtcaaagtctctgactggatattaccctgaattctactagttcctccaattccattttctcccatggaatcacgaagagcaagacccactctgttccagaagccctataagctgggaggtggacaacttcgatgtaaatttcatggggaaaacccttgtacccgacatgttgagccattcagaactcaccaaaatgtttcgacaccataacaacagctactcaaactgtaaaccaggataacaagttgatgacttcacactgtggacagtttttccaaagatgtcagaacaagactccccattcatggattaagggctcccacccctcttaactgtccttggcttcatggcctggcctctttcacttgggcaggataatggcagtcattaggattttcacatgtaggtaggttctgagggtaacacagggtgttcaggtttgtccttctcaacctcaaacttttacgtaacatctcagggggaaatgtggctctctccaccttgcatacaggactcccaatagaaatgaacacagagatattgcccgtgtgtttgcagataagatggtttctatgaagaggtaggaaagctgaaattataatagagtcccctttaaatgcacattctgtggatggctctcgccatttcctaagagatacattgtaaaatgtgacagtaatactgattctagcagaataaaacatgtaccacatttgca

SEQ ID NO: 3034 - DNA, 1551 bp, Homo sapiens
  SIMILAR (763)..(1080): 551254mologous to Homo sapiens pregnancy specific beta-1- glycoprotein 3,accession number BC005924,Smith-Waterman Score=251.
cagcacagctgacagccgtgctcaggaagtttctggatcctaggctcatctccacagaggagaacacacaggcagcagagaccatggggcccctctcagcccctccctgcacagagcacatcaaatggaaggggctcctggtcacagcatcacttttaaacttctggaacctgcccaccactgcccaagtcacgattgaagcccagccaccaaaagtttccgaggggaaggatgttcttctacttgtccacaatttgccccagaatcttactggctacatctggtacaaagggcaaatcagggacctctaccattacattacatcatatgtagtagacggtcaaataattatatatgggcctgcatatagtggacgagaaacagcatattccaatgcatccctgctgatccagaatgtcacccgggaggacgcaggatcctacaccttacacatcataaagcgaggtgatgggactagaggagtaactggatatttcaccttcaccttatacctggagactcccaagccctccatctccagcagcaacttaaaccccagggaggccatggaaactgtgatcttaacctgtgatcctgagactccggacacaagctaccagtggtggatgaatggtcagagcctccctatgactcataggtttcagctgtccgaaaccaacaggaccctctttctatttggtgtcacaaagtatactgcaggaccctatgaatgtgaaatatgggaactcagggagtgccagccgcagtgacccagtcaccctggaatctcctccatgggtccagacctccccaggattttccctttcagttcacctcttaattatttcagggagaggaacctcggatttgttcctggtttgggggacttttaaaccccaccaggcacagtattcttggacaattaatgggaagtttcagctatcaggacaaaagctctttatccctcagattactccaaagcataatgggctctatgcttgctctgctcgtaactcagccactggcgaggaaagctccacatccttgacaatcagagtcattgctcctccaggattaggaactttttgctttcaataatccaacatagcagctgtgatgtcatttctgtatttcaggaagactggcaggagatttatggaaaggtctcttacaaggactcttgaatacaagctcctgataacttcaagatcataccactggactaagaactttcaaaattttaatgaacaggctgataccttcatgaaattcaagacaaagaagaaaaatactcaatgttattggactaaataatcaaaaggataatgatttcataattttctatttgaaaatgtgctgattcttggaatgtttcattctccagatttatgaacattttttcttgagcaattggtaaagtatacttttgtaaacaaaaattgaaacatttccttttgctctctatctgagtgccccagaattgggaatctattcatgagtattcatatgtttatggtaataaagctatttgcacaagttcagtaaaaaaaa

SEQ ID NO: 3035 - DNA, 1139 bp, Homo sapiens
ttttcatcattcaaaggctgtatcttttttggtttccttttttgcttttgtaaagaaaaataaggttgtgttttctgtttgaaacaaaacataaaaccccctcccgcctgggcctgttccctggctctgggggatgctgggaccgcaggtctgggcaggagaggccaggctgcccggctgagaggagggagcgccctcagagccagagatggagtgcatttgggaatggagtttgattaagcaaaaaataaaaaacctcgacacacacacacacgcctgctatacagaaatgggggaccaagagggcgctgcctccgagttgggaaccattgctgggcagctgggacttcaaaagtcctgatgctgtcctggggggcccccatttccccacgttttcaggggtagggcaggggcagggagggcggcatccacagcttttcagggacaggattcagggggagaggagggttacgtcagagcaagctccttccccacattaaaaaaaaaagtattaaaaaagcacccaaagcttaaaaaaaagaatcctccatggcagggagagttgggggcatcctgcttactagcaaaatgcctgacctggcaaaatgtgtagaaaaataaaattaaactttatccctgaatggcagagtgaagacccttcttcccgccccacagtgagtctcagaatccaccgagacagctgattcctccccaactggcaccagcacatgaccagcagacacacactgccccaggcccgtgtcccaggcccagggtgggacagcggaggggctatgatagccacgggtgcacggtccctccccgctgcctcacagcattgggagcgcccctcctcagtgccaggaaggagccccagcaggggagtgggcaagagaaccaggggaagatggggttctcaggggctcctgggcagaactaggggaagatggagttctcaggggctggaggcaggtgcccagtagggtggtcgaaggggtgcagtctcatctgagatctgaaggccccccgccagcctgccctgcagttccatgtgcagctgaaggaccagacgtgcaggcctggaaacacagggcgaggtgggccagggctaaggaaccaaaggaggtgggaagagtggg

SEQ ID NO: 3036 - DNA, 2329 bp, Homo sapiens
  SIMILAR (880)..(1398): 981254mologous to Homo sapiens pregnancy-specific beta- glycoprotein c,accession number M20879,Smith-Waterman Score=932.
gaattcgggctgaccctgcccatgagcttgagaattgctcctgccctgggaagaggctcagcacagaaagaggaaggacagcacagctgacagccgtgctcagagagtttctggatcctaggcttatctccacagaggagaacacacaagcagcagagaccatgggaaccctctcagcccctccctgcacacagcgcatcaaatggaaggggctactgctcacagcatcacttttaaacttctggaacctgcccaccactgcccaagtcacgattgaagcccagccacccaaagtttccgaggggaaggatgttcttctacttgtccacaatttgccccagaatcttaccggctacatctggtacaaagggcaaatgagggacctctaccattacattacatcatatgtagtagacggtgaaataattatatatgggcctgcatatagtggacgagaaacagcatattccaatgcatccctgctgatccagaatgtcacccgggaggacgcaggatcctacaccttacacatcataaagggagatgatgggactagaggagtaactggacgtttcaccttcaccttacacctggagactcctaagccctccatctccagcagcaacttaaatcccagggagaccatggaggctgtgagcttaacctgtgaccctgagactccagacgcaagctacctgtggtggatgaatggtcagagcctccctatgactcacagcttgaagctgtccgaaaccaacaggaccctctttctattgggtgtcacaaagtattacttgcaggaccctatcgaatgtgaaatacggaacccagtgagtgccagccgcagtgacccagttcaccctggaatctcctgcccgaaggttgcccaagccctacatcaccatcaacaacttaaaccccagggagaataaggatgtcttaaacttcacctgtgaacctaagagtgagaactacacctacatttggtggctaaatggtcagagcctcccggtcagtcccagggtaaagcgacccattgaaaacaggatcctcattctacccagtgtcacaagaaatgaaacaggaccctatcaatgtgaaatacgggaccgatatggtggcgtccgcagtgacccagtcaccctgaatgtcctctatggtccagacctccccagaatttacccttcattcacctattaccgttcaggagaagtcctctacttgtcctgttctgcggactctaacccaccggcacagtattcttggacaattaatgaaaagtttcagctaccaggacaaaagctctttatccgccatattactacaaagcatagcgggctctatgtttgctctgttcgtaactcagccactggcaaggaaagctccaaatccatgacaagtcgaagtctctggtaaagtggatcccaagcatcgttggcaatagggttttaggtggagtctatctggcattcagagaagagtcagggaaaacaattgtattcccagcctgtgtcccatgggcacaagcaaatcccaaattctcctcctgaaccctccaaatttgtctaagaacttcgaaaactttaacaaacaggctgatatcttcataatattcccagcctagacccaagcaggaagaacattgatttcattgaaataattgataataatgaagataatgtttttatgatttttatttgaaaatttgctgattctttaaatggtttgttttctacattgatggaatttttctcttaattaatctatctacagcttatagcagttcaataaactatacttctgggaaccgtaattgaaacatttacttttgctttctacctgactgccccagaattgggcaactattcatgagaattgatatgtttatggtaatacacatatttgcacaagtacagtaacaatctgctttctttgtaacatgacacatttgaaatcattggttatattaccaatgctttgattcggatgttatattaaaaacatagatagaatgaatgaaccaatatgaactgcaggcaaagtctgaagtcagccttggtttggcttcctattctcaagaggtttgtgaagatttaatctcagattccttataaaaacttagagaaaagaaaattttagaagacagcctacatggtccattgctactcttgctgcacttatgtaaacaatcagaccacatttgaagaaactccacctattttgcaaacaaacttattctactgaaattatcattggtaaaagtagagatgcccatagagggaaaaattatgtggaaaataaaaactgtagtatacctgtacccgaattc

SEQ ID NO: 3037 - DNA, 2055 bp, Homo sapiens
  SIMILAR (1056)..(1562): 551254mologous to Homo sapiens pregnancy specific beta-1- glycoprotein 3,accession number BC005924,Smith-Waterman Score=342.
gggcgggacaactggtctgagtactatggctgattttcgctgtctggcattgagaagccacacgccccttttgcttaggaggcctctctgctggaggatgacgatggcatggtttatctaaggccactgacaagtcatcaatataggacagcacagctgagagccatgctcaggaagtttctggatcctaggctcagctccacagaggagaacacgcaggcagcagagaccatggggcccctctcagcccctccctgcacacagcgcatcacctggaaggggctcctgctcacagcatcacttttaaacttctggaacccgcctaccactgcccaagtcacgattgaagccgagccaaccaaagtttccaaggggaaggacgttcttctacttgtccacaatttgccccagaatcttgctggctacatctggtacaaagggcaaatgaaggacctctaccattacattacatcatacgtagtagatggtcaaataattatatatgggcctgcatacagtggacgagaaacagtatattccaatgcatccctgctgatccagaatgtcacccgggaggacgcaggatcctacaccttacacatcgtaaagcgaggtgatgggactagaggagaaactggacatttcaccttcaccttatacctggagactcccaagccctccatctccagcagcaacttataccccagggaggacatggaggctgtgagcttaacctgtgatcctgagactccggacgcaagctacctgtggtggatgaatggtcagagcctccctatgactcacagcttgcagttgtccaaaaacaaaaggaccctctttctatttggtgtcacaaagtacactgcaggaccctatgaatgtgaaatacggaacccagtgagtgccagccgcagtgacccagtcaccctgaatctcctcccgaagctgcccaagccctacatcaccatcaacaacttaaaccccagggagaataaggatgtcttagccttcacctgtgaacctaagagtgagaacttacacctacatttggtgggttaaatggtcagagccttcccggttcagttcccagggtaaagcgacccatttgaaaacagggtcctcatttttaccccgtgttcaaggggaattgaaacagggaccctattcaatgtgaaatacagggaccgattatgggtgggcctccgcagtttacccagttcaccctggaatgttcctcttatgggtccagacctccccagaattttacccttcatttcacctatttaccgtttcagggaggaaaaccttcggacttgtcctggctttcacgggaatcttaaccccaccgggcaggagtatttttttggggacaatttaatggggggagtttttcaggcattcagggacaaaagctctttatcccccagattactacaaagcatagcgggctctatgcttgctctgttcgtaactcagccactggcatggaaagctccaaatccatgacagtcaaagtctctgctccttcaggaacaggacatcttcctggccttaatccattatagcagccgtgatgtcatttctgtatttcaggaagactggcagacagttgctttcattcttcctcaaagtatttaccatcagctacagtccaaaattgctttttgttcaaggagatttatgaaaagactctgacaaggactcttgaatacaagttcctgataacttcaagatcataccactggactaagaactttcaaaattttaatgaacaggctgatacttcatgaaattcaagacaaagaaaaaaacccaattttattggactaaatagtcaaaacaatgttttcataattttctatttgaaaatgtgctgattctttgaatgttttattctccagatttatgcactttttttcttcagcaattggtaaagtatacttttgtaaacaaaaattgaaacatttgcttttgctccctaagtgccccagaattgggaaactattcaggagtattcatatgtttatggtaataaagttatctgcacaagttcaa

SEQ ID NO: 3038 - DNA, 2753 bp, Homo sapiens
  SIMILAR (772)..(1437): 791254mologous to Homo sapiens precursor (AA -34 to - 390),accession number X17098,Smith-Waterman Score=882.
atgctggaggctgctgtgcacgccccaggtaactcagatgtcaccaggacacgatgtgccactcaggtcctaaagcccttggtgtcctatggtcaggcagaaaccggcttctcagttcctcagctcaaatacccaccttgggacgggcttctgcaccgggacatcccgccaggaactctcccggtggaacacagtccatgttctctggctgccctgcagtttttaaatgccaccagtacacatggggaatgttctgccttcgcaaggaggaagctggaaagttcattttcccagcactccttgcaggagggacaccgacacgggtccaggctttccccatcaggtgctcccgtgaaagactcagggtcccgaacagcaccaggaagcagagggggccagcagcatccgagccagcttcttctctgtggcagagatgatctttttcaggcctcctccggccatggccctttcctgctcctctttccagagctcccaagtccccgggatgcactccagctgctaagagaggcctcgaagttccctacggataaacgtcaaggtcgttcctggtctgtggccatcaccaacactgccgcgactagtctagaatgggtgccatttcatgcatttgcaattcccagaagtacactggttagtcagcagaggctcagcacagaaagaggaaggacagcacagctgacagccgtgctcagagagtttctggatcctaggcttatctccacagaggagaacacacaagcagcagagaccatgggaaccctctcagcccctccctgcacacagcgcatcaaatggaaggggctcctgctcacagcatcacttttaaacttctggaacctgcccaccactgcccaagtcacgattgaagccgagccaaccaaagtttccgaggggaaggatgttcttctacttgtccacaatttgccccagaatcttaccggctacatctggtacaaagggcaaatgagggacctctaccattacattacatcatatgtagtagacggtgaaataattatatatgggcctgcatatagtggacgagaaacagcatattccaatgcatccctgctgatccagaatggtcacgcaggaggatgcagggatcctacaccttaccacatcataaagcgacgcgatgggactggaggagtaactggacatttcaccttcaccttacacctggagactcccaagccctccatctccagcagcaacttaaatcccagggaggccatggaggctgtgatcttaacctgtgatcctgcgactccagccgcaggctacccagtggtggatgaatggtcagaggcctcccctatgactcacaggttgcagctgtccaaaaccaacaggaccctctttatatttggtgtcacaaagtatattgcaggaccctatgaatgtgaaatacggaaccccagtgagtgcccagccgcagtgacccagtcaccctgaatctcctcccgaagctgcccaagccctacatcaccatcaacaacttaaaccccagggagaataaggatgtcttaaacttcacctgtgaacctaagagtgagaactacacctacatttggtggctaaatggtcagagcctcccggtcagtcccaggggtaaagcgacccattgaaaacaggatcctcattctacccagtgtcacgagaaatgaaacaggaccctatcaatgtgaaatacgggaccgatatggtggcatccgcagtgacccagtcaccctgaatgtcctctatggtccagacctccccagaatttacccttcattcacctattaccgttcaggagaagtcctctacttgtcctgcttctgcggactctaacccaccggcacagtattcttgggacaattaatggaaaagttttcagcttaccagggacaaaagctctctatcccccaaataactacaaagcatagtgggctctatgcttgctctgttcgtaactcagccactggcaaggaaagctccaaatccatcacagtcaaagtctctgactggatattaccctgaattctactagttcctccaattccattttctcccatgggaatcactaagagcaagacccactctgttccagaagccctataagctgggaggtgggacaactcaatgtaaattttcatgggggaaaacccttgtacgtgaaggcatgaggccactcagaactcaccaaaatattcgacaccataacaacagatgctcaaactgtaaccccgggataacaagttgatgacttccacactgtgggacagtttttcccaaagatgtcagaacaagactcccccatccatgataaggctccccacccctcttaactgtccttgctcatgcccggcccccttcaccggggcaggataatgccagtcattagaatttccacatgtagtataggagcttctgagggtaacaacagagtgtccagatatgtcatcctcaaccctcaaaccttttaccgtaacatcctcaggggaaatgtggctctctccatcttgcatacagggctcccaatagaaatgaacacagagatattgccctgtgtgtttgcagagaagatggtttgtatgaagacgtaggaaagctgaaattatagtagagtctcctttaaatgcacattgtgtggatggctctcaccatttcctaagagatacagtgtaaaaacgtgacagtaatactgattctagcagaataaaacatgtaccacatttgctaaaaaa

SEQ ID NO: 3039 - DNA, 536 bp, Homo sapiens
tttttttttaaattacataagacattcaatactttattaaaacaggcttcgtgttagacgagtttccccaactacaggctaaggcgttctgaacaagcttaagatggaccatgctaagctgtgatgtttgggagattaggtgtattaaacacatttcaacttgcaatactttcaacctatgatgtactcaccggaatgtaacccattgtaaactgaggaacacctgtactcaccccactggaagggatgtgggaggaaggtcaagcgcctcttccaggtcagaaggggcagaggttggatacaaaccaggcagcctgggtccatggtaaaagaacctccactaagtgaggctggggctgaatcccacgtttcctgcctcaaggagattgcagcaggcccccctcttttcccctctctccagagcgagtcaccccctggctcccagacagccacacctggtgaaggagaatgcggtgacaatggagagaacccccaggttcagtaagctgcctcgtctggctcactacacctagctg

SEQ ID NO: 3040 - DNA, 3434 bp, Homo sapiens
  SIMILAR (2055)..(2336): 551254mologous to Mus musculus putative,accession number AK002623,Smith-Waterman Score=203.
atgcgccctccccgtgcccccgtcgtgcctccagacctgggcggcccccgcctgtgcccggtccccgccgccgggggcgcacgcagcccgagctcgccctactcggtggagacgccctacggcttccacctggacctggacttcctcaagtacatagaggagctggagcgtggccccgctgcccgccgcgccccgggacccccgacctcgcgccgtccccgcgcgccccggcccggcctcgcgggcgcacgtagcccaggcgcctggacatccagcgagtccctggccagtgacgacggtggagcaccgggcatactctcccagggcgcgccctcggggctcctgatgcagccgctgtcgccgcgcgcgcccgtgcgcaacccgcgcgtcgagcacacgctccgggagaccagccggcggctggagctggcgcagacacacgagcgcgcgcccagccccggccgcgggctggtgcgcgagcagatggccgcggcgctgcggcgcctgcgcgagctcgaggaccaggcgcgaacgctgcccgagctgcaggagcaggtgcgcgcgctgcgcgccgagaaggcgcggctgctggccgggcgcgcgcagcccgagccggacggggaggctgagacgcgcccggacaagctcgcccagctgcggcggctcaccgagcgcctggccacctccgagcgcggcggccgtgccagggccagcccccgggctgacagcccagacggcctggctgcagggcgcagcgagggcgcgctccaggtcctcgacggggaggtcgggagtctcgatgggacgccccagacccgggaggtggccgccgaggccgtgcccgagacccgagaagcgggtgcccaggccgtgccggagacccgggaggccggcgtggaggctgcccccgagaccgtggaggcggacgcgtgggtgaccgaggcgctgctggggctgcctgcggccgccgagcgcgagctagagctgctgcgcgccagtctggagcaccagcgcggggtgagtgagcttctgcggggccggttgcgggagctggaggaagcccgcgaggctgcggaggaggcagcggcgggggcccgggcccagctacgcgaggccaccacccagaccccgtggagctgtgccgaaaaggccgcgcagaccgagtccccggcagaggcgccctccttgactcaggagagctcgcccggatccatggacggagacagggccgtggcgcccgcgggcatcctcaaatccatcatgaagaagagagacggcacacctggtgcccaacccagctccggacccaagagcctgcagtttgttggggtcctcaacggagagtacgagagctcctccagcgaggacaccaagcgacagcgatggcgacagcgagaacggtggcgccgagcccccgggtagctcctcgggctccggggatgacagcggcgggggatccgactcgggcacccctggccctcccagcggcggggacatccgggaccctgagcccgaggcggaggcagagcctcagcaggtggcacaggggaggtgcgagctgagcccgcgtctgagggaggcgtgcgtagcgctgcagcggcagctgagccggccccgcggagtagccagcgacggcggcgcagtgcgcctcgtggcccaggagtggtttcgagtgtccagccagcggcgctctcaggcggagcccgtggccaggatgctggaaggggtgaggcgcctgggacccgaactgctggcgcacgtggtgaacctggcggatggcaacgggaacacggccctgcactacagtgtgtcccacgggaacctggccatcgcaagcctgctcctggatacgggggcctgcgaggtcaaccgccagaaccgagccggctactcggccctcatgctggctgcactcacctctgtgaggcaggaagaggaggacatggctgtggtccagagactcttctgcatgggtgatgtcaatgccaaggccagtcagacggggcagacagccctcatgctggccatcagccatggccgacaggacatggtgggcaaccctactggcgtgtggggctgatgtgaatgcgcaggatgcggatggggccacagcgctgatgtgtgccagtgagtatgggcgcctggacaccggtgcggctgctgctcacccagccagggctgtgacccctgccatcctggacaatgagggccccagtgccctggccaatcgccctggaaggctgaaacaggaatgaaggtggccgctctgctaacatgcccacctgagctcgggccatcccgacacccagagcggagtcacccccttggctccccagacagccaacacctggtgaaggagaatgcggtgacaatggagagaacccccaggttcagtaagctgccttcgtctggctcactacacctagctgtggggagatctcctcgtcagtcacctcagcctttggcgcacagaagggtccagggtcccctggctcagaggctaacactggccgaagagaaaggcaatttcaggttggggtgactgtggcaggaacggggctcactctggccccaccaaggtgaggtggggacccaacgtgatagagccctgatccacccactctctgaaacttctttgctaataaaacattcctactacgcttgtgttttgtttggggtagaaggtgcaatcgaacaaacacgaaccccccgcctcaaaaaaggaaaagcttcgtttggcaagaccgcacggcccaggatttccagagtgcggaggatcggtgaaccgccctgggagcccactcaagaaacctggagaaaccctagtcgtataacccagaacaagaacctgagttaacttgaaaacacaaacgcttttattttaaaggagcatctcaagttacgtgtggcggacaaaaaaaaaggagcagactgtgacagacccattccccatcggcccaagtggtcgaacccgacatccaagacccagcgagcagccaagctcagcgcaacctccgggctttctcgctctgactccaaaagggtgagcacgtcgccctcgcgcacggggccttttacattgcggatgatggatcggctcgtgtcgtccatggaattccacggcgcacctacgggtccccaccggagtggaggaagaagtaagggcgggccgcggaaaggcaccgcggagtgggaagcagatatgaattcagagaacgtgtcggggccagaatacagatcgttaaagggaaccatcagaaccccgtgatgaaatgagaatcggctcccggattccggctggcaggggttagggcagggtagaggtcacatcagggtttaggtcgccggcagtcggccaaatgcccccacccgattacctgcatgcactgtccctgagaaccggtcctgcccaggaccttggtgaccctacgaaa

SEQ ID NO: 3041 - DNA, 617 bp, Homo sapiens
  SIMILAR (141)..(7): 691254mologous to Homo sapiens Human secreted protein, SEQ ID NO: 7253,accession number AAG03172,Smith-Waterman Score=167.
ttttctggctaattttttgtgttttattagagacggtttcaccatgttggccaggatggtctccatctcctgacctcatgatctgcttgcctgggcctcccaaagtgttgggattacaggcgtgagccactgcgcccaacctccccactcctctcccgtccacaccaggcactctgctgcttggcctttgggcactctgcagccacctgtacctgtgtgaactggcacttgcctgggcggggttttggaatccacaggccccaggcttcctgtagctcctgcccacctgctcacccacactgtctccctatctcccatgccactttgggccacctgttccccaggggcagggcatgaagcccctggtctaatgctccaagacccatttgggccaccgtggtgctcctgtggccctgtgtttcatgagaagacagctggttgcaaagccagggctttctctgggagggtctgtaggtgcaaggctcaggcacttcctgagacaggtaggtagaagccagggttcggccagggcccagccccagggtgtttgtgaacaggtggacttgggtgtggctgaaaaggagaggttgtaggaagctggccagagaatcagggca

SEQ ID NO: 3042 - DNA, 776 bp, Homo sapiens
  SIMILAR (169)..(564): 481254mologous to Mus musculus putative,accession number AK003340,Smith-Waterman Score=251.
  misc_feature (1)...(776): n = a,t,c or g
gcggccgcggccaatcggagccgctcttgctgcgacgcagcggtgcggttagcggagcaaggtcgaggccgggttggcgccggagccggggccgcttggagctcgtgtggggtctccggtaccagggcgcggcatgggcgtcctggccgcagcggcgcgcatncatcggtccggggtgcggaccgaatgagcaagtggacgagcaagcggggcccgcgcagcttcaggggccgcaagggcccggggcgccaagggcaatcggctttcctcaccttcggcttggaggttcgtgcaagatcaaaggagatggtcccggagttcgtcgtcccggatctgaccggctttcaagctcaagccctacgtgagctacctcgcccctgagagcgaggagacgcccctgacaggtcgcgcagctttttcagcgaaagccgtgggcgcctgcccatcgaaaaggacttccaggaccggtaccttctgaccctgacaaccttggaaaagtaccgcttccgacccaacacaaggagggaaaagctcttccagctctaccccaggaacttcctgcgctagctgggcgggagaggagcgagcctgcccatcatctcatttctattaaacgcctttgccagctnnnnnnannnnnnnnnnnnnnnnnggggggggccgtttaaaagaaccaaagttaacgaccccgggctggcaaggtaaaagttttttaatggggcccccaaaatcaattcccggggccgcggtttaacaacgccgggactggagaaaag

SEQ ID NO: 3043 - DNA, 620 bp, Homo sapiens
  SIMILAR (111)..(266): 801254mologous to Homo sapiens Human CD44 splice variant (RA- CD44) protein sequence,accession number AAY97579,Smith-Waterman Score=232.
  misc_feature (1)...(620): n = a,t,c or g
tgctcctttcactggaggagccgctgctcacgtcatcatcagtagggtacatcttttacaccttttctactgtacaccccatcccagacgaagacagtccctggatcaccgacagcacagacagaatccctgctaccacagcctcagctcataccagccatccaatgcaaggaaggacaacaccaagcccagaggacagttcctggactgatttcttcaacccaatctcacaccccatgggacgaggtcatcaagcaggaacgaaggatggatatggactccaagtcatagtacaacgcttcagcctactgcaaatccaaacacaggtttggtggaagatttggacaggacaggacctctttcaatgacaacgcagcagagtaattctcagagcttctctacatcacatgaaggcttggaagaagattaaagaccatccaacaacttctactctgacatcnagcaatagggatgatgtcacaggtggaagaagngacccaaatcattctgaanggtcaactactttacttggaaggttatacctctcattnnccacacacgaagggaagcaggancttnatnccagtgactcagctaanntggggccttttgngttnctg

SEQ ID NO: 3044 - DNA, 403 bp, Homo sapiens
  SIMILAR (318)..(401): 1001254mologous to Homo sapiens CD44 core protein,accession number X55938,Smith-Waterman Score=150.
  misc_feature (1)...(403): n = a,t,c or g
agacacctcagtttttctggatcaggcattgatgatgatgaagattttatctccagcaccaatatggactccagtcatagtacaacgcttcancctactgcaaatccaaacacaggtttggtggaagatttggacaggacaggacctctttcaatgacaacgcagcagagtaattctcagagcttctctacatcacatgaaggcttggaagaagataaagaccatccaacaacttctactctgacatcaagcaataggaatgatggtcacaggtggaagaagagacccaaatcattctgaaggctcaactactttacttggaaggttatacctctcattacccacacacgaaggaaagcaggaccttcatcccagtgacctcagctaagactgggtcctttgg

SEQ ID NO: 3045 - DNA, 530 bp, Homo sapiens
  SIMILAR (1)..(528): 1001254mologous to Homo sapiens cell-cell and cell-matrix adhesion interaction glycoprotein isoform,accession number S82326,Smith-Waterman Score=943.
gacacatattgcttcaatgcttcagctccacctgaagaagattgtacatcagtcacaggacctctttcaatgacaacgcagcagagtaattctcagagcttctctacatcacatgaaggcttggaagaagataaagaccatccaacaactcctactctgacatcaagcaataggaatgatgtcacaggtggaagaagagacccaaatcattctgaaggctcaactactttactggaaggttatacctctcattacccacacacgaaggaaagcaggaccttcatcccagtgacctcagctaagactgggtcctttggagttactgcagttactgttggagattccaactctaatgtcaatcgttccttatcaggagaccaagacacattccaccccagtggggggtcccataccactcatggatctgaatcagatggacactcacatgggagtcaagaaggtggagcaaacacaacctctggtcctataaggacaccccaaattccagaatggctgatcatcttggcatc

SEQ ID NO: 3046 - DNA, 484 bp, Homo sapiens
  SIMILAR (19)..(435): 1001254mologous to Homo sapiens CD44 isoform RC,accession number AF098641,Smith-Waterman Score=760.
ccgttcgctccggacaccatggacaagttttggtggcacgcagcctggggactctgcctcgtgccgctgagcctggcgcagatcgatttgaatataacctgccgctttgcaggtgtattccacgtggagaaaaatggtcgctacagcatctctcggacggaggccgctgacctctgcaaggctttcaatagcaccttgcccacaatggcccagatggagaaagctctgagcatcggatttgagacctgcagtttgcattgcagtcaacagtcgaagaaggtgtgggcagaagaaaaagctagtgatcaacagtggcaatggagctgtggaggacagaaagccaagtggactcaacggagaggccagcaagtctcaggaaatggtgcatttggtgaacaaggagtcgtcagaaactccagaccagtttatgacagctgatgagacaaggaacctgcagaatgtggacatgaagattggggtgtaa

SEQ ID NO: 3047 - DNA, 1010 bp, Homo sapiens
acgagaaagtgcggccaacttccgaggcaggctcattgcccagcggaccccagcctctgtcaggtttcgggcgtcattctcgatccgtcctccgtcggcccctgccccgcgcccagggatcctccagcttctttcgtccgcgcactccgttcgctccggacaccatggacaagatttggtggtacgcagcctggggactctgccttgtgccgctgagcctggcgcagatcggtgagtgcccgccgcagcctgggcagcaagatgggtgcggggtgctcagcgcggacccggcggcagcccctccggctgagtcggccctgggggactggagtcaacctcagagcagagagaagagccttgataccagggcaacatcagggaccctggagctagggctccaatatctcatccaaacagggtcagtgctttgtggtggctatggaggggaggggctgcgttctctggtatgcttttatcagcagcatgaaaacgaattaatgcacttggtaacatgccaattacttgaccaagggaagggctgtcaagcagggacgtttaagcctgcagaagctgtctgctgccttttgttcagatatgccctgcccccagaggtggaatctagagaggcagtaggccttgttgagctatggtcgatctcagactgctgtgctagcagcgagcaaggctctgtgggcatgggacttaccaaaccaggcacgggaagggatctcctggtctgctggttgggaagactgggaaaagcgcagtatttgggcgagagtgtaccactcctccagatacatcttctcacaggtaattgggcagaaaaatgcttattgactgatcttgaaaacttcaatgcatctaaagctggagaacattcaaaaaccatgcttctctttatttatttcagtttccatggcaagaggaaaataaaaggcaactgttttgaaagcaacaacagtaaacgaagcaacatctctggcaagcaggcaaaccttaaagagtaa

SEQ ID NO: 3048 - DNA, 2265 bp, Homo sapiens
  SIMILAR (1)..(2226): 1001254mologous to Homo sapiens transmembrane glycoprotein,accession number AJ251595,Smith-Waterman Score=3989.
atggacaagttttggtggcacgcagcctggggactctgcctcgtgccgctgagcctggcgcagatcgatttgaatataacctgccgctttgcaggtgtattccacgtggagaaaaatggtcgctacagcatctctcggacggaggccgctgacctctgcaaggctttcaatagcaccttgcccacaatggcccagatggagaaagctctgagcatcggatttgagacctgcaggtatgggttcatagaagggcatgtggtgattccccggatccaccccaactccatctgtgcagcaaacaacacaggggtgtacatcctcacatacaacacctcccagtatgacacatattgcttcaatgcttcagctccacctgaagaagattgtacatcagtcacagacctgcccaatgcctttgatggaccaattaccataactattgttaaccgtgatggcacccgctatgtccagaaaggagaatacagaacgaatcctgaagacatctaccccagcaaccctactgatgatgacgtgagcagcggctcctccagtgaaaggagcagcacttcaggaggttacatcttttacaccttttctactgtacaccccatcccagacgaagacagtccctggatcaccgacagcacagacagaatccctgctaccactttgatgagcactagtgctacagcaactgagacagcaaccaagaggcaagaagcctgggattggttttcatggttgtttctaccatcagagtcaaagaatcatcttcacacaacaacacaaatggctggtacgtcttcaaataccatctcagcaggctgggagccaaatgaagaaaatgaagatgaaagagacagacacctcagtttttctggatcaggcattgatgatgatgaagattttatctccagcaccatttcaaccacaccacgggcctttgaccacacaaaacagaaccaggactggacccagtggaacccaagccattcaaatccggaagtgctacttcagacaaccacaaggatgactgatgtagacagaaatggcaccactgcttatgaaggaaactggaacccagaagcacaccctcccctcattcaccatgagcatcatgaggaagaagagaccccacattctacaagcacaatccaggcaactcctagtagtacaacggaagaaacagctacccagaaggaacagtggtttggcaacagatggcatgagggatatcgccaaacacccagagaagactcccattcgacaacagggacagctgcagcctcagctcataccagccatccaatgcaaggaaggacaacaccaagcccagaggacagttcctggactgatttcttcaacccaatctcacaccccatgggacgaggtcatcaagcaggaagaaggatggatatggactccagtcatagtacaacgcttcagcctactgcaaatccaaacacaggtttggtggaaaatttggacaggacaggacctctttcaatgacaacgcagcagagtaattctcagagcttctctacatcacatgaaggcttggaagaagataaagaccatccaacaacttctactctgacatcaagcaataggaatgatgtcacaggtggaagaagagacccaaatcattctgaaggctcaactactttactggaaggttatacctctcattacccacacacgaaggaaagcaggaccttcatcccagtgacctcagctaagactgggtcctttggagttactgcagttactgttggagattccaactctaatgtcaatcgttccttatcaggagaccaagacacattccaccccagtggggggtcccataccactcatggatctgaatcagatggacactcacatgggagtcaagaaggtggagcaaacacaacctctggtcctataaggacaccccaaattccagaatggctgatcatcttggcatccctcttggccttggctttgattcttgcagtttgcattgcagtcaacagtcgaagaaggtgtgggcagaagaaaaagctagtgatcaacagtggcaatggagctgtggaggacagaaagccaagtggactcaacggagaggccagcaagtctcaggaaatggtgcatttggtgaacaaggagtcgtcagaaactccagaccagtttatgacagctgatgagacaaggaacctgcagaatgtggacatgaagattggggtgtaacacctacaccattatcttggaaagaaacaaccgttg

SEQ ID NO: 3049 - DNA, 1738 bp, Homo sapiens
  SIMILAR (116)..(730): 921254mologous to Homo sapiens CD44R1,accession number X56794,Smith-Waterman Score=1008.
ccagcctctgccaggttcggtccgccatcctcgtcccgtcctccgccggcccctgccccgcgcccagggatcctccagctcctttcgcccgcgccctccgttcgctccggacaccatggacaagttttggtggcacgcagcctggggactctgcctcgtgccgctgagcctggcgcagatcgatttgaatataacctgccgctttgcaggtgtattccacgtggagaaaaatggtcgctacagcatctctcggacggaggccgctgacctctgcaaggctttcaatagcaccttgcccacaatggcccagatggagaaagctctgagcatcggatttgagacctgcaggtatgggttcatagaagggcacgtggtgattccccggatccaccccaactccatctgtgcagcaaacaacacaggggtgtacatcctcacatccaacacctcccagtatgacacatattgcttcaatgcttcagctccacctgaagaagattgtacatcagtcacagacctgcccaatgcctttgatggaccaattaccataactattgttaaccgtgatggcacccgctatgtccagaaaggagaatacagaacgaatcctgaagacatctaccccagcaaccctactgatgatgacgtgagcagcggctcctccagtgaaagggagcagcacttcaggaggttacatcttttacaccttttctactgtacaccccatcccagacgaagacagtccctggatcaccgacagcacagacagaatccctgctaccaatatggactccagtcatagtacaacgcttcagcctactgcaaatccaaacacaggtttggtggaagatttggacaggacaggacctctttcaatgacaacgcagcagagtaattctcagagcttctctacatcacatgaaggcttggaagaagataaagaccatccaacaacttctactctgacatcaagcaataggaatgatgtcacaggtggaagaagagacccaaatcattctgaaggctcaactactttactggaaggttatacctctcattacccacacacgaaggaaagcaggaccttcatcccagtgacctcagctaagactgggtcctttggagttactgcagttactgttggagattccaactctaatgtcaatcgttccttatcaggagaccaagacacattccaccccagtggggggtcccataccactcatggatctgaatcagatggacactcacatgggagtcaagaaggtggagcaaacacaacctctggtcctataaggacaccccaaattccagaatggctgatcatcttggcatccctcttggccttggctttgattcttgcagtttgcattgcagtcaacagtcgaagaaggtgtgggcagaagaaaaagctagtgatcaacagtggcaatggagctgtggaggacagaaagccaagtggactcaacggagaggccagcaagtctcaggaaatggtgcatttggtgaacaaggagtcgtcagaaactccagaccagtttatgacagctgatgagacaaggaacctgcagaatgtggacatgaagattggggtgtaacacctacaccattatcttggaaagaaacaaccgttggaaacataaccattacagggagctgggacacttaacagatgcaatgtgctactgattgtttcattgcgaatcttttttagcataaaattttctactctttttaa

SEQ ID NO: 3050 - DNA, 2770 bp, Homo sapiens
  SIMILAR (465)..(803): 961254mologous to Homo sapiens transmembrane glycoprotein,accession number AJ251595,Smith-Waterman Score=594.
cgagaactgcacgagactgttgatgacgtgagcagcggctcctccagtgaaaggagcagcacttcaggaggttacatcttttacaccttttctactgtgcagcaaacaacacaggggtgtacatcctcacatccaacacctcccagtatgacacatattgcttcaatgcttcagctccacctgaagaagattgtacatcagtcacagacctgcaggtatgggttcatagaagggcacgtggtgattccccggatccaccccaactccgttcgctccggacaccatggacaagttttggtggcacgcagcctggggactctgcctcgtgccgctgagcctggcgcagatcgatttgaatataacctgccgctttgcaggtgtattccacgtggagaaaaatggtcgctacagcatctctcggacggaggccgctgacctctgcaaggctttcaatagcaccttgcccacaatggccccagatggagaaagctctgagcatcggatttgagacctgcaggtatgggttcatagaagggcatgtggtgattccccggatccaccccaactccatctgtgcagcaaacaacacaggggtgtacatcctcacatacaacacctcccagtatgacacatattgcttcaatgcttcagctccacctgaagaagattgtacatcagtcacagacctgcccaatgcctttgatggaccaattaccataactattgttaaccgtgatggcacccgctatgtccagaaaggagaatacagaacgaatcctgaagacatctaccccagccaaccctactggatgatgacgtgagcagcggctcctccagtgaaaagggagagcactttcaggaggttacatcttttacaccttttctactggtacaccccatcccagacgaagacagtccctggatcaccgacagcacagacagaatccctgctaccagagaccaagacacatttccaccccagtgggggttcccattaccacttcatggatctgaattcagatgggacactcacatgggaagtcaaggaaggtgggagcaaacacaacctcttggtcctataagggacaccccaaattcccagaatgggctgattcatcttgggcatcccctcttggcccttggcctttgattccttgccagtttgccattgccagtccaacagttcgaagaaagttttgggccagaagcaaaaagcttagtgatccaaccagtgccaatggagcttgtggaggacagaaagccaagttggactcaacggagaggcccagcaagtctcaggaaatggtgcatttggtgaacaaggagtcgtcagaaactccagacccagtttatgacagctgatgagacaaggaacctgcagaatggtggacatgaagagttggggtgtaacacctacaccatttatcttggaaaagaaacaaccggtggaaaacatacccattacagggaagctgggacacttaacagatgcaatgtgctactgattgtttcattgcgaatcttttttagcataaaattttctactctttttgttttttgtggtttgttctttaaagtcaggtccaatttgtaaaaacagcattgcttcctgaatttcggcccccattaataatcgccaagaattggatcgtttccagttcccacttggaggcctttccatcccctcggggtgtgctatgggatggcttcctaaacaaaaacttacacatatggtagtccctggattcgcccaaccttttccccccaccagctaagggccatttcccaggggttaatagggcctggtccctgggaggaaatttgaatgggtccattttgcccttccatagcctaatccctgggcattgctttccactgagggtggggggttggggtgtactagttacacatctttcaacagaccccctccaagaaattttttcagatggcttttggggagacacccaaagggtgaagctatttatctgtagtaaactatttatctgtgtttttgaaatattaaaccctggatcagtcctttgtatcagtataaattttttaaagttacttttgtcagaggcacaaaagggtttaaactgattcataataaatatctgtacttcttcgatcttcaccttttgtgctgtgattcttcagtttctaaaccagcactgtctgggtccctacaatgtatcaggaagagctgagaatggtaaggagactcttctaagtcttcatctcagagaccctgagttcccactcagacccactcagccaaatctcatggaagaccaaggagggcagcactgtttttgttttttgttttttgttttttttttttgacactgtccaaaggttttccatcctgtcctggaatcagagttggaagctgaggagcttcagcctcttttatggtttaatggccacctgttctctcctgtgaaaggctttgcaaagtcacattaagtttgcatgacctgttatccctggggccctatttcatagaggctggccctattagtgatttccaaaaacaatatggaagtgccttttgatgtcttacaataagagaagaagccaatggaaatgaaagagattggcaaaggggaaggatgaatgccatgtagatcctgtttgacatttttatgggctgtatttgtaaacttaaacacaccagtgtctgttcttgatgcagttgctatttaggatgagttaagtgcctggggagtccctcaaaaggttaaagggattcccatcattggaatcttat

SEQ ID NO: 3051 - DNA, 1439 bp, Homo sapiens
atgccggtccgggcgaggttgcaggagatgggcgcgattccggcgggccggcgggtgggcggcgatgctggctcaattggagtggctctgggaaatcactccggaaagggaacccttcggtatcgatttattgtttttgtcttccaaaccattatctctttgaccgaaatactgtctgagaagttccgcagggacaaagtcagggtcctatcctccacaaatcagttccctgatgctgatactggttcctccatgtgtcccacagcagactcacccaggactggacttgaaaacccaaaagctttccttgctgtctgcccttatctaaccactgaagccttgtgttctgttctttcccctccaggcttggtttccagatttccaagaatacagccagctactctgcccccagacgtggctgtgatggacagcagctgcaggttggaagtgggcgcgtccagatacccaccacatggtgtaattgccctttgtgaaattctgggtgctgggattatggcattagccaccgcccttatccaggtgagtcattcttttgtggaacccctgaatcatagagaaagccaattggctgtgcaggttgctttcctggacataacaacagctgccattttgctacttagaggagctgagaactttgccaagcacttgacacacattgctaccgaatcttccccacaaccgcaatgtgatgttactatccccattttacagatgactcaaatgtggcatagagagctccaggaaattgccctgggtctcagaggcagccaggaggttgtgataccagtgccacaccctctgagctccaaggcagccaccgtggctcctcatgcggtgctcaggcagctgaacccaaggctggaatcagagtttctcacctctgactctgccttctggaaaaccagcagagagacccctcctcacccacgtgtaaacgaaattgctacaaccattaaaggtcaagagagaaatgtgcttctcaggacatgccaggaaaagggaagaaccctagaccaatctctccttgctgaaaactgtgttaccaaaaggctcccctttcatgtctcccattttaagctcctctacacagagtcactctcagcaagttccccagcacccctgcaaccgttccttctccctgattcaaagccctgtgagcacccctgctacttacagaattaaatccaaactcgtttatttgacattcattgctctctgcaatttaatgccaacctctcttcccatcaacaacacctaagaaacttttttcctatccatactttgtgtgtttgctctttgtgtaaggaggaaataagtgcatgatttatttggcttctcaaaagcagattgtgaatgctcaggacggaatacaagagtctttccctaggcatatgatgacggtctagaccaagacaaat

SEQ ID NO: 3052 - DNA, 4038 bp, Homo sapiens
  SIMILAR (1822)..(1106): 521254mologous to Human herpesvirus 6 U88,accession number X83413,Smith-Waterman Score=664.
gacaacttccccagataccccgtgggcaagttcttccaatatgacacctggaagcagtccacccagcgcctgcgcaggggcctgcctgccctcctgcgtgcccgccggggtcacgtgctcgccaaggagctcgaggcgttcagggaggccaaacgtcaccgtcccctgattgctctacccacccaagaccccgcccacgggggcgcccccccagagatggccagcaatcggaagtgagcaaaactgccgcaagtctgcagcccggcgccaccatcctgcagcctcctcctgaccacggacgtttccatcaggttccatcccgaaaatctctcggttccacgtccccctggggcttctcctgacccagtccccgtgccccgcctccccgaaacaggctactctcctcggccccctccatcgggctgaggaagcacagcagcatcttcaaacatgtacaaaatcgattggctttaaacacccttcacataccctccccccaaattatccccaattatccccacacataaaaaatcaaaacattaaactaacccccttcccccccccccacaacaaccctcttaaaactaattggctttttagaaacaccccacaaaagctcagaaattggctttaaaaaaaacaaccaccaaaaaaaatcaattggctaaaaaaaaaaagtattaaaaacgaattggctgagaaacaattggcaaaataaaggaatttggcactccccacccccctctttctcttctcccttggactttgagtcaaattggcctggacttgagtccctgaaccagcaaagagaaaagaagggccccagaaatcacaggtgggcacgtcgctcgtaccgccatctcccttctcacgggaattttcagggtaaactggccatccgaaaatagcaacaacccagactggctcctcactcccttttccatcactaaaaatcacagagcagtcagagggacccagtaagaccaaaggaggggaggacagagcatgaaaaccaaaatccatgcaaatgaaatgtaattggcacgaccctcacccccaaatcttacatctcaattcccatcctaaaaagcactcatactttatgcatccccgcagctacacacacacaacacacagcacacgcatgaacacagcacacacacgagcacagcacacacacgagcatacagcacacacacaaacgcacagcacacacagcacacagatgagcacacagcacacacacaaacgcacagcacacacacgcacacacatgcacacacagcacacaaacgcacggcacacacacgcacacacagtgcacacacagcacacacgcaaacgcacacgcacacacaaacgcacagcacacacgcacacacagcacacacacgagcacacagcacacaaacgcacagcacacgcacacacatgcacacacagcacactagcacacagcacacacacaaagacacagcacacacatgcacacacagcacacacacgcgaacacagcacacacgaacacagcacacacagcacacacacaaacacagcacacacatgcacacagcacatgcacacacagcacacacatgaacacagcacacagcacacacatgcacacagcacacacgcatgcacagcacacatgaacacagcacacacaaacacacagcacacacatgcacacacagcacacacactcatgcgcagcacatacatgaacacagctcacagcacacaaacacgcagcacacacgttgcacacgcaagcacccacctgcacacacacatgcgcacacacacgcacacccccacaaaattagatgaaaacaataagcatatctaagcaactacgatatctgtatggatcaggccaaagtcccgctaagattctccaatgttttcatggtctgagcccccctcctgttcccatctccactgcccctcggccctgtctgtgccctgcctctcagaggagggggctcagatggtgcggcctgagtgtgcggccggcggcatttgggatacacccgtaggtgggcggggtgtgtcccaggcctaattccatctttccaccatgacagagatgcccttgtgaggctggcctccttggcgcctgtccccacggcccccgcagcgtgagccacgatgctccccataccccacccattcccgatacaccttacttactgtgtgttggcccagccagagtgaggaaggagtttggccacattggagatggccggtagctgagcagacatgcccccacgagtagcctgactccctggtgtgctcctggaaggaagatcttggggacccccccaccggagcacacctagggatcatctttgcccgtctcctggggaccccccaagaaatgtggagtcctcgggggccgtgcactgatgcggggagtgtgggaagtctggcggttggaggggtgggtggggggcagtgggggctgggcggggggagttctggggtaggaagtggtcccgggagattttggatggaaaagtcaggaggattgacagcagacttgcagaattacatagagaaattaggaacccccaaatttcatgtcaattgatctattccccctctttgtttcttggggcatttttccttttttttttttttttgttttttttttacccctccttagctttatgcgctcagaaaccaaattaaaccccccccccatgtaacaggggggcagtgacaaaagcaagaacgcacgaagccagcctggagaccaccacgtcctgccccccgccatttatcgccctgattggattttgtttttcatctgtccctgttgcttgggttgagttgagggtggagcctcctggggggcatggccatgagcccccttggagaagtcagaggggagtggagaaggcatgtccggcctggcttctggggacagtggctggtccccagaagtcctgagggcggaggggggggttgggcagggtctcctcaggtgtcaggagggtgctcggaggccacaggagggggctcctggctggcctgaggctggccggaggggaaggggctagcaggtgtgtaaacagagggttccatcagctggggcagggtggccgccttccgcacacttgaggaaccctcccctctccctcggtgacatcttgcccgcccctcagcaccctgccttgtctccaggaggtccgaagctctgtgggacctcttgggggcaaggtggggtgaggccggggagtagggaggtcaggcgggtctgagcccacagagcaggagagctgccaggtctgcccatcgaccaggttgcttgggccccggagcccacgggtctggtgatgccatagcagccaccaccgcggcgcctagggctgcggcagggactcggcctctgggaggtttacctcgcccccacttgtgcccccagctcagcccccctgcacgcagcccgactagcagtctagaggcctgaggcttctgggtcctggtgacggggctggcatgaccccgggggtcgtccatgccagtccgcctcagtcgcagagggtccctcggcaagcgccctgtgagtgggccattcggaacattggacagaagcccaaagagccaaattgtcacaattgtggaacccacattggcctgagatccaaaacgcttcgaggcaccccaaattacctgcccattcgtcaggacacccacccacccagtgttatattctgcctcgccggagtgggtgttcccgggctgcctgtctgacctccgtgcctagtcgtggctctccatcttgtctcctccccgtgtccccaatgtcttcagtggggggccccctcttgggtcccctcctctgccatcacctgaagacccccacgccaaacactgaatgtcacctgtgcctgccgcctcggtccaccttgcggcccgtgtttgactcaactcagctcctttaacgctaatatttccggcaaaatcccatgcttgggttttgtctttaaccttgtaacgcttgcaatcccaataaagcattaaaagtca

SEQ ID NO: 3053 - DNA, 413 bp, Homo sapiens
  SIMILAR (315)..(410): 751254mologous to Homo sapiens arylamine N- acetyltransferase,accession number D90041,Smith-Waterman Score=135.
tggttgccggctgaaataacctgaattcaagccaggaagaagcagcaatctgtcttggggattaaaactgaagatcaaggtactttcaacttactaagaaaggggatcatggacattgaagcatatcttgaaagaattggctataagaagtttacgagcaaattggacttcgaaactttaactgacattctatcgcaccagatcccagctgtttcctttgataatcttaccgttctatgtggggatgccatggacttaggcttagaggccatttttgatcaagctgtgagatgaaatcgggcgtggatggatacatccaggtcaatcatcttctgtactgggctttgaccactattggttatgagaccacgaagattggaaggtatggttaccagactccagccgaaaaatag

SEQ ID NO: 3054 - DNA, 434 bp, Homo sapiens
  SIMILAR (252)..(434): 651254mologous to Homo sapiens Human secreted protein, SEQ ID NO: 7075,accession number AAG02994,Smith-Waterman Score=211.
gttataggtaaggaatatagaaatgaatgttttttgttgtgaaggtgttttcatgtgatattttataaacacattttaaaaaatctccatcactttttagtataggaaggatagctttgcctgggaaaaacagtttcaacacacctgctcagagtagcagttctccctcaaaaaagcagtgttcagcctgcactgactgttctgcttgccaaaaggaggaagcatgcaagatacttatttctccatagattgtggagtatagagggatgtgggactacagattattattttttttccccgagacagagtcttgctctgtcgcccaggttggaacacaatggcacgacctcagctcactgcaacctctgtctcccgggttcaagcaattctcctgcttcagcctcctgagtagctgggattacaggcacacacca

SEQ ID NO: 3055 - DNA, 919 bp, Homo sapiens
  misc_feature (1)...(919): n = a,t,c or g
ccactgaagcgctcagatggctgtaacgacggccgacccacgcgtccgcccacgcgttcgcacaactgtgttcactagcatcgctcatacagacaccatggtgcacctgactcctgtggagagagtctgccgttactgccctgtgggcaaagcgtgaacgtgaatgaagttggtggtgaggcccctgggcaaggctgctgggtggtcctacccctgggacccccaaaaggtcctttgaaaccctttgggggaatctgtcccaactccctgaatgctggttaaatggggcaaaccccctaaaggtgaaaaggctcaatggcaaaagaaaaagtgctcgggtgccctttaagtgaatggcccctggcctnacccctggaaaaccctcaaggggcaccctttgccccacactgaagtgaagctgcacctgtgaacaagctgccaccgtggatccctgaagaacttgcaggctcctgggggcaacagtgcctggtctgtgttgctgggcccattcacttttgggcaaagaatttcacccccacccagtgcaggctgccctatcagaaagtggttggctggtgtggctaatgccctgggcccacaagtatcactaagctcgctttcttgctgtccaatttctatttaaaggttcctttgtttccctaagttccaacttattaaactggggggatattattgaagggccttgagcatctgggattcttgcctaattaaaaaacatttattttcattgcnnnnnnnnnnnnnnggggcggccgttttaaagaaccaaagttaacgaacccgggcaggcaaggaaaaagtttttttatggggcccccaaaattaattccctggcccgcggtttaaaaacgcgggaacgggaaaaacccgggggttacccaattaaatgccctgtgag

SEQ ID NO: 3056 - DNA, 1383 bp, Homo sapiens
  SIMILAR (1383)..(862): 641254mologous to multiple sclerosis associated retrovirus polyprotein,accession number AF009668,Smith-Waterman Score=596.
ttacttgctgggtcctacggagcaaattaacatcattccttgaaccctagtttctatgtctgtaaaatactgagtaagtttgccaagacgaaaacaggagacaaactgagaaattactggctgttcaattttatgtcgagagatggaatcgtatttacctttttcgtctttggtccggaatgcaaatgcattgcacaggagcagaatgactggatttgtttctgcgacaaaaaagggcaaacaaaacactaacagctttgcttgcaggttttcctggcagctcaccctccaggcacagttctccaaaatgcagcaaacttggtctgtttgtttcaatactaaaataatgtagagattatttggggtatttttctttcctgccctgtcaaaattctgtacactgacgacacgtgttgtttcttttgaagaacggggcgaatgatgtgaaacaccatcggtggttccgctccgtggactggaaagctgttccgcagagaaaactaagcagaccagaagcaaaatgtcttcttcacggcctgaggacatttccagttttctctgtacctcaaatatggcattgctcaaatctgctgtgtatgaggtcacagggcccagctgtggcaggggtgagtgcattgaagaagtaggttttggagccttccaggaattccatcctgttgggattaacagttgagggccatcgctgcctaaacatttagcgtgcggtttcccatcagttttactgtgaatgtgaaaaggtgaaactgttgctgacttcggcagcaggtatacttgttgccaacgtgcttctggggcccctgtgactgctgccggatgcaaacagatgaaggctatccctaaacctttggggcaagaccatccatgtaagttgggacatgtggtctgtgggatcctcaaaggcaaagagaaactgagagagtgcagcggaatacagaaaaaggcatcttggaggtcccgaacagtgaaccattctgtttcctctggtatttgagagatgagggtataggggttgggtataactggatatagaggaattactgcctcattgatgagtctaagctcttgcactagtctccactgaccatttggtttttgaactcctagaattggggtgttgcaaggactgctgcatttccttactaagccttgagcttttaaatgtttaacaatatcctgtaatcctttatgagcttcaggccttaagacatattgccattgataaggaaaagtgatgggaacttttagcctgatttggactgggagggcattttttgcccttccaaattgtccttccaatccccagacttcagggttgattccctcctcaagtagggcacagcaaatgggtaacttgttccccat

SEQ ID NO: 3057 - DNA, 606 bp, Homo sapiens
  SIMILAR (423)..(605): 961254mologous to Homo sapiens protein kinase,accession number X85545,Smith-Waterman Score=338.
ttacttgctgggtcctacggagcaaattaacatcattccttgaaccctagtttctatgtctgtaaaatactgagtaagtttgccaagacgaaaacaggagacaaactgagaaattactggctgttcaattttatgtcgagagatggaatcgtatttacctttttcgtctttggtccggaatgcaaatgcattgcacaggagcagaatgactggatttgtttctgcgacaaaaaagggcaaacaaaacactaacagctttgcttgcaggttttcctggcagctcaccctccaggcacagttctccaaaatgcagcaaacttggtctgtttgtttcaatactaaaataatgtagagattatttggggtatttttctttcctgccctgtcaaaattctgtacactgacgacacgtgttgtttcttttgaagaacggggcgaatgatgtgaaacaccatcggtggttccgctccgtggactggaaagctgttccgcagagaaaactgaagcctcccatcgtgcccaagatagctggtgacggcgacacttccaacttcgaaacttaccctgagaatgactgggacacagccgcgcccgtgccgcagaaag

SEQ ID NO: 3058 - DNA, 852 bp, Homo sapiens
  SIMILAR (10)..(582): 971254mologous to Homo sapiens protein kinase,accession number X85545,Smith-Waterman Score=990.
atggcagaaggcactgggacgttcgggcgggtgcacctggtgaaggagaagacagccaagcatttcttcgccctcaaggtgatgagcattcccgacgtcatccgcctaaagcaggagcaacacgtacacaatgagaagtctgtcctgaaggaagtcagccacccgttcctcatcaggctgttctggacgtggcatgacgagcgcttcctctacatgctcatggagtacgtgccgggcggcgagctcttcagctacctgcgcaaccgggggcgcttctccagcaccacggggctcttctactctgcagagatcatctgtgccatcgagtacctgcactccaaagagatcgtctacagggacttgaagccagagaacatcctgctggatagggatggccacattaagctcacggactttgggttcgccaagaagctggtagacaggacttggaccctctgtggaacacccgagtacctagcccccgaagtcattcagagcaagggccacggaagggccgtggactggtgggccctcggcatcctgatattcgagatgctttcgggcctgaatcaatcaatagactgtgatctgtgtcaacccatcagaattcaacaagcatcaactagtcagaactcggtaagtgtcaaccagttagaacccaacaagtgtcaaacagtcagagctcatcgggggtcgacccatcagaactcaacaagtgttgactcatcagaacccaagtgccaaactcatcagaactcaacaagtgcccaccagtcagaacccaataagtgtcaacccatcagaactcaacaagtgtccgcctatcagaactcaatgagcatcagcccatga

SEQ ID NO: 3059 - DNA, 1891 bp, Homo sapiens
  SIMILAR (1038)..(1163): 971254mologous to Homo sapiens protein kinase,accession number Y15801,Smith-Waterman Score=229.
cccacaacagtccccagagtgtgatgttccccttcctgtgtccgtgtgttctcattggtcaattcccacctctcaccggctcctccgagtgctggttacagtcgaatgtgagctgtatgtcaggtggccccgttgcaatgctgacttgacttgcaccaaggcagtacagaatggatgggatttgctaaaggtgcccacctgcctccaccttttgctggcagttccaggtgttggactttttattgatgaaggtgtaaagcaaggattttcagtggagacattcagggacacacgtggagttttggtacatggatgtatcatgtcatgcctgtgcaacaacagagtgagaccctatctaggaaaaaaacagaaaagtaagaaaacaacagatgttggtgtggaagtggaggaaagtggccgtggatgcgctgctggtgcggaggaggtcttccagtgcatgcagcaggggagccactcagctgctgaggggcaggaatctagcagcaaggtggagagcggaaggcattcctacaacctgtatttgtgggtcattagtccccgaactccagcatccttgcagaatctgcaaattttaaagtgcatcaggttctggacgtggcatgaggagcgcttcctctacatgctcatggagtatgtgccgggtggcgagctcttcagctacctgcgcaaccgggggcacttctccagcaccacggggctcttctactctgcggagatcatctgtgccattgagtacctgcactccaaggagatcgtctacagggatttgaagccggagaacatcctgctggatagggatggtcacatcaagctcacggactttgggtttgccaagaagctgggcttacagattaatgtggaaaagtctcttgtcggaaaagaggtgggtatggagatgtggtggagaagcgaaggaaagataacagtaacaacaatttgggtgggttcctgcaagcaggaaggtgaggagctgaagccaagatacgtgcccacaccaccgcaaacagggcagactcaggacttggaccctctgtggaacacccgagtacctagcccccgaagtcattcagagcaagggccacggaagggccgtggactggtgggccctcggcatcctgatattcgagatgctttcggggtgggttttgtaagagtggcaagcctcgccaaccccaactctccccaggcatttctgggctctccctccactctcgctggcctgagctcttgccttgacggagatgcaggatacagctttctcacagtctcctgcatctcctgcctgcagtaccttttcgttgaagcagctgcagcccgtgtctgcacctttcctatcgcagctcgatttgctggattcccactcttagcaggatcaagcatttccaaagcacgtgtcttccaatgccagccctggtcttcagaactggggcagctgaatgtattgacacagggtcgccccccaaacccagagagaaacaggaatgcgactcccctaactactgttagaacgctgcgggcagtgtattggacagttcacatgtgtagttcgacgtatgaatgtcctgacgctgcagttagaaactatcacagactggaaggtttaaacaagagaactttatcctctcttagtcctggagaccagaaatttgagatcaaagtatctcaggactgtgctccaaggaaggatcctttctgcctctgccagctcctggggctccaggcatccctggacttgtggccgcatcactacagtctctgcctctgtccccatgtggccttctcctctgtgtgtgtgcctcctcttcagtcccttatgacaatacttgtcattggatttggacctaccctattccaggatgatttcgtctga

SEQ ID NO: 3060 - DNA, 7268 bp, Homo sapiens
  SIMILAR (341)..(1156): 921254mologous to Homo sapiens protein kinase,accession number X85545,Smith-Waterman Score=1338.
gcacgcggccaccgagctggaggaagcggcgggcgtgagaccgggaatgcttgggcccccgccttcctcgcagccatccagcactcggtgcacgccccgcgaggccagcggctgctccctcccggggctattgctgctagtgccgtgagcaccgcccagccattgtctctgtgtctccgtcagccgtgccgagccgcgcacccagaggcgagggcgcgcatggggagcctccgttgatgctgccgcggctgccgcgccgccctccgaggctgcgtcccggggagtccggcttcccgagcgctccggcctggcccggcgccccggacctgagtgcctccccatggaggcgcccgggccggcccaggcggccgcggcggagagcaactcccgagaggtgacggaggatgccgccgactgggcgcccgcgctctgccccagccccgaggcgcggtcgccggaggcvcctgcctaccgcctgcaggactgcgacgcgctggtcaccatgggcactgggacgttcgggcgggtgcacctggtgaaggagaagacagccaagcatttcttcgccctcaaggtgatgagcattcccgacgtcatccgccggaagcaggagcagcacgtgcacaatgagaagtctgtcctgaaggaagtcagccacccgttcctcatcaggctgttctggacgtggcatgaggagcgcttcctctacatgctcatggagtatgtgccgggtggcgagctcttcagctacctgcgcaaccgggggcacttctccagcaccacggggctcttctactctgcggagatcatctgtgccattgagtacctgcactccaaggagatcgtctacagggatttgaagccggagaacatcctgctggatagggatggtcacatcaagctcacggactttgggtttgccaagaagctggtagacaggacttggaccctctgtggaacacccgagtacctagcccccgaagtcattcagagcaagggccacggaagggccgtggactggtgggccctcggcatcctgatattcgagatgctttcggggtttcctccattttttgatgacaacccgtttggcatttatcagaaaattcttgcaggcaaactatatttccccagacatttggatttccatgtaaaaacggggcgaatgatgtgaaccaccatcggtggttccgctccgtggactggaaagctgttccgcagagaaaactgaagcctcccatcgtgcccacgatagctggcaacggcgacacttccaacttcgaaacttaccctgagcatgactgggacacagccgcgcccgtgccgcagaaggatttagaaatcttcaagaatttctgaggacgagctcacatctggaagaaacaggaagattggaatctgcctggaacaaagaactgcacctaagcagaccagaagcaaaatgtcttcttcacggcctgaggacatttccagttttctctgtacctgtgtgtatagaaatagatcagagcacagttgaaattcatggaactggcattatttaagcaaccagaattccacactgtaggaaggttttgaaaattgtttcgttatagattttatcttatcttttggtgttgtcttggtttttctcatagactttataagtttgaactggacttatttgattataaccacaaattgtgtgtgtgtgtgtgtgtgtatatatagaagtcattatggcagatgcacaaattgtgcagtgatgtaaatatacatacttcacagagcctattatttttatttttcaattcagtttctcaaattatcttcccttctcttggggacaacatctgaagggtatgttgcatgcatttttaaaaaaatcatctcatatgcattgtatagtttgggggaataagatatccgggggccgggggtgtctacattcagtatctttagttcttcctacctagtaacttgrgactttaaaagargaaacatggagaagatgtgggagcgaatttattgcaggaatccacaatgactttgaagttgttggagcaatgcattgtattcagaaaacctgtgtcacattaaaaaatttcatctaggctaggtgcagtggcttgttcctgtagtcccagcactctgggaacctgggttgggaggattgcttaaggccaggagtttgagaccagcttgggcaacatagtgaaccctgtctgtatggaatttacacaaattataaaaattagtcgggtgtcattgtgcatacctgtagtcccagctattcaggagctgttgtaggagagattgcctgagctcaagaggttgaggctgcagtgagccctgattgtgccagtgcactccaggctggacgacagagcaagaccctgtattaaaaaaaaaattcatcctgcacagggaaatggctacctattaaagtcccagttgaaattttttgaaaaaatacacctcccacagttcacaaataacttttaagatcagctcatctataaggctgaccttcatgcagagattttatttcacctttagttttgggaaaagcgagaaacagatgatctataggatgtgagtgggtggcagagtcaaaaggaacctcacctgttcctaatttctccttttaaatattcatgttgagtgtgcctaatactctcctcgacaagtcatgctgttttatgcagaataatccaggcgtgagagtgttctcttgggaaatgactggggagacacctgaaaggagcaacccccagatgttcttccctgggtgttgatggcatgacagccatacagtgagtttgttctgaaacatctcttgctaaatgtgggtcatgctagacacagcataaactgagggtgtggggtctggctttgtacataactcattttctcccttgctttttctctggaccatcctggctggaaacttggctgtagacatctgaagagggtgcaccttttctctttactgtgactcacctcaaatatggcattgctcaaatctgctgtgtatgaggtcacagggcccagctgtggcaggggtgagtgcattgaagaagtaggttttggagccttccaggaattccttgttgacaacaggggtacactcacacagacctccaagactttcttctccacctcttctttttctcatgccctgccttcatctgtctccttctgcacccagagtaggggtggagtatacccttgccatgtgttagtgaaaatgtgtgcagtgagaagccagttgggtcccctcggctcctaatctcttctcaaaactcagtagctcaggttctctggagccatccggtgcattccttgctattggagctgtttttccaagcaatatctgggaagagatttctccctctagcacttgctacctctcttctgcacacatatcacacatcagtactgtggagagtttctgttaggaaaagccatacatttttaaaaatgtaggcaaaatgtcaagggaaatgtaatcagatttgggccagagttcgcctacagataagaaggcactggggccaggctcacacctgtaatcctaagtaacactttgggaggctggggcgagaggattgcttgagcccaggagttcaatacctgtctgggaaacacctcatctctacaaaatacaaaaaagttaactgggcatggtggagcatgcctgtagtctcagctactcaggaggctgagatgagaggatcacttgagcctgaggaggtccaggccacagtgatctgagatcacaccattgccctccagcctgggtgacagagtgagaccctgttccaaaaaaaaaaaaaaacccaaaaaacctcaatggctttttgcttttgaaggtggtatgaagagaacgtccactttaaggctttaaaagacagtgaagctggttgtagggctcacttttataatcctaggatttggggaagctgaagcagaaagattgcttgagcctgggagtttgagactggcctgggcagcatagcgagaccccatctctatataaaaaaaaagatgttaaaacagtgaaattacagaaacagaacatagccaccctgtttcatcagtgaccttttcttcacgtgacggtcaactcagtaggtgagaataattagtaggttcagcagaataaactctttacaattaataactcagtggaaaatgatgttcagatggtgaaatgtggaaatgttttagacaactctattttcagcctgtgcttctcactcaccatcctgttgggattaacagttgagggccatcgctgcctaaacatttagcgtgcggtttcccatcagttttactgtgaatgtgaaaaggtgaaactgttgctgacttcggtagcaggtatactaaaattggaatgacacagaggagattagcatggccccctgcgcgaggaagatccgcagattcatgcagcattccatatttttttaaaaaaaggttacactgtgcaccgacgtggagctagaaggaaaagcatgaagtctcatgtttgctgactataaaaataaatcatagtaataatattattgaacattctactttaaaaattattaataaaaccataaatgaaacacttgagcacactttaaaaagtacataaacccatgagtccatatgtgtaattttatgttgtctgttttattatccaggatttcatactcagatgagcattagcatcaggaaagcctgaaatgccttaattgtgaactgatacgcaggaaaatgaaatatgtaagcacattggtgaccttgttctttacagacatcatgatcagcctccagccatacagaacaaatgagaaattagaagcaattccaagaacgtgtgatggtgtgaacccacttttgaccgtcacacacatttcagcatttgaagagacacaggctacctggaaactgcccatggcggggtcataatttaaatgtcccaatgtcatatagaggttaatttaatcaaaatgagctaaaacatggaacaatcactgaataatttaaaaagagtttacctggcagagtgtgtcatgcctgcaatcccagcactttgggaggccaaggcaggcagatcacctgaggtcaggagtttgagaccagcctggccaacatgatgaaacccttgtctctattaaaaacacaaaaattagccagatgtggtggcacatgcctgtaatcccagttagtcgggaggctgaggcaggagaatatggaactcaggaggcggaggctgcagtcaaccaagattgcgccactgcactccagccagggcgaaggagtgagactcccatctcaaaaaataaaaaaaaaaataaataaaaatagttgacccgggtgggcattccaaaatgttcccatagatgatcgtgaaacaatcactgtgcaaaatgtagaggaaaattcttacgataatcacaaaatttgtatcagaaaaacattacaaatttactttgctccatgtaattttatgaattggcagtattttcttaaattgggatacagtaagagaatatctttaggaaatggaaatgttaaaacaagaagtaacaagaggttgtttttctgaagggaaatgccaccggcctgctttcataggcattgataaagccaggaaggaaataaagtcacaaccgaatagtatacactgtatctactgaattcttctaattccttcacaacagaagtctaaatcctgcttagcctaaacatatctatagccagcgatgggcaaattatatttgctgtcagcatgatggaataagaaacagaaaccccccagcagtgggtaagattgcacgcttcatcccctcaaaatgcagttcagccccactccctctccatgcccatcaaacaactgcaaaatcacttgttactgaatttctcattcagcgttttgtttcttttctgtccatattcaagacctttttatttgtttgctttgaagaaaaagcaaaagcaacaaaacaccaaatcatttgaaattccaaccttaaccccccaattttaaaaaaaaattccaccagtggaactaaacagttgagtggtttgggatgtgttgttcgccatttctgtgtttgacctacatggtctctagttctttggacaattgtaactgtgaaactatggcttaacactgttaaagactccaaggctccactctgtagccaggtgcaactcaggctgcacaaataccccaccagaatgtcacaatcattcattgctccagctgctgagtgaacagagtgcaagacagcactggcttgggttttatttttgcagccagttaactttgcatcaggtctacacagtccttgcagcctttgatttctccagttgtacagatttgaaatggggtgcccgggttcctctcgtttttccttcaatctacctagcatgcattttacacacattggaggagtcgatgcactgtttttctcttgctgatggaggcaagaacgccttctaattagtataacttaaatggacgggattgacttaaaagcaagaagaaaagcacatgaacaggtgtcttaatgcatttggatactttggggtgtgtgcctgtctgtgtgtgtgtcttggtgaaggtgggctgtattttcaccaagccttttcataatcaagtttgctttgcaaaccatctgccttgcccccagcagtacagtccttcctaataacggggatgctctgtcatgtttctctgtaaattgttgtgtgttgggaagttctgttgaggcttagtttgatcttccatggtggacatgtctgttctgtatataaaaagcattacatctgtgttttagcaggtgggatttgaagcttttccacagtccttgtgctctgagatggctgttgagctctgctcagctgtcacagctgaattctttttttgtgctgaacactgggcagcctcgccttgttgccaacgtgcttctggggcccctgtgactgctgccggatgctgtgcacacaggcagagtgccttggcaggtttgtgcaccccttggcgagccagaactgggaaccccgcggagtgaccccaccttctcatggggggtcagggaggggagtgcctatttttaatcttgtttgttgcgcaatggaaatcactgtgatttgtacatatgccctaggaaaattttaccgctgtctaatttatgtaataatactgatgattctaggtttgcccaataaactttatatcttttcagaagcaaggctccactctgtagccaggtgcaactcaggctgca

SEQ ID NO: 3061 - DNA, 971 bp, Homo sapiens
  SIMILAR (418)..(681): 1001254mologous to Homo sapiens protein kinase,accession number Y15801,Smith-Waterman Score=476.
atggctgcagaggttctgacagtcatggcagaaggcactgggacgttcgggcgggtgcacctggtgaaggagaagacagccaagcatttcttcgccctcaaggtgatgagcattcccgacgtcatccgccggaagcaggagcagcacgtgcacaatgagaagtctgtcctgaaggaagtcagccacccgttcctcatcaggctgtggccccgttgcaatgctgacttgacttgcaccaaggcagtacagaatggatgggatttgctaaaggtgcccacctgcctccaccttttgctggcagttccaggtgttggactttttattgatgaaggtgtaaagcaaggattttcagtggagctgacggcgtaccccctgccctgccctggcggggccctgagcgtatgctgtccctgcaggttctggacgtggcatgaggagcgcttcctctacatgctcatggagtatgtgccgggtggcgagctcttcagctacctgcgcaaccgggggcacttctccagcaccacggggctcttctactctgcggagatcatctgtgccattgagtacctgcactccaaggagatcgtctacagggatttgaagccggagaacatcctgctggatagggatggtcacatcaagctcacggactttgggtttgccaagaagctggtagacaggtaagaggaacgtgaactccgatggaatctacactgcttggcaatgagaaaggtggtggtagttgtggcaggtcaggcagggaaagattgggaaccagagtttaactctcatgtgtaggagacacttgcaaccagggatgagagagccaggttgacccacagctcgttttaggtgggctgcgattgctggcaaagagccagtgggcaggaagtcagtctccttcactggcaccgtggaggaaatcagaacaccacatatccgctattgatccgaaatgatgaggaaatgag

SEQ ID NO: 3062 - DNA, 1634 bp, Homo sapiens
  SIMILAR (563)..(685): 1001254mologous to Homo sapiens protein kinase,accession number X85545,Smith-Waterman Score=228.
atgaacatgaacatcaaaaaaattgtaaaacaagccacagttctgacttttacgactgcacttctggcaggaggagcgactcaagccttcgcgaaagaaaataaccaaaaagcatacaaagaaacgtacggcgtctctcatattacacgccatgatatgctgcagatccctaaacagcagcaaaacgaaaaataccaagtgcctcaattcgatcaatcaacgattaaaaatattgagtctgcaaaaggacttgatgtgtgggacagctggccgctgcaaaacgctgacggaacagtagctgaatacaacggctatcacgttgtgtttgctcttgcgggaagcccgaaagacgctgatgacacatcaatctacatgttttatcaaaagggcttacagattaatgtggaaaagtctcttgtcggaaaagaggtgggtatggagatgtggtggagaagcgaaggaaagataacagtaacaacaatttgggtgggttcctgcaagcaggaaggtgaggagctgaagccaagatacgtgcccacaccaccgcaaacagggcagactcaggacttggaccctctgtggaacacccgagtacctagcccccgaagtcattcagagcaagggccacggaagggccgtggactggtgggccctcggcatcctgatattcgagatgctttcggggcatttccaaagcacgtgtcttccaatgccagccctggtcttcagaactggggcaggtttcctccattttttgatgacaacccgtttggcatttatcagaaaattcttgcaggcaaactatatttccccagacatttggatttccatgtaaaatgccaaacaccaaaagaaaaacaaaaaacaaaaaacaaggtcatcttcttacatgccagacaccaaaaacaaaacaaaacaaacaacaacaacaacagcaacaacaaaatgaagtttattaagaacggggcgaatgatgtgaaacaccatcggtggttccgctccgtggactggaaagctgttccgcagagaaaactgaagcctcccatcgtgcccacgatagctggcaacggcgacacttccaacttcgaaacttaccctgagcatgactgggacacagccgcgcccgtgccgcagaaggatttagaaatcttcaagaatttctgaggacaggagctcacatctggaagaagcaggaaggctggaatctgcctgcaacaaagagctgctcctgagcagaccagtagcaatgtcttcttcacgtgataaggacatttccacttttctgtctttgtgcctgtatgtatagaaacagatcagagcacagttgaaattaatgtaactggcattatttaagcaactggaattccacactgtaggaaggttttgaaaattgtttgcttgtagattttatcttatcctttagtgttgtgttcctactgtgatgtcttggtttttctcatagacctaagtttataagttatgaactcgacttgttcaattataaccacaaattgtgtgtgggtgagtgtgtgtgaaaacatgcgcccgcctatgtttatatatacattacagtttggcagatacagagaagttgtgcgttgtttcatatgcttatacttcacagagcctgtatt

SEQ ID NO: 3063 - DNA, 6067 bp, Homo sapiens
  SIMILAR (367)..(1380): 921254mologous to Homo sapiens protein kinase,accession number X85545,Smith-Waterman Score=1616.
ccacgcgtccggagctggaggaggcggcgggcgcgagacccggaatgcgcagggcccccgcctcgccccccccagcccgggccgcggcccccgccttccccgcagtcgtcccgcactcggtgcccgccccccgaggccggcggctgctcccactcggggccgttgctgcttgtgccgtgagcgccgcccagccattgtccccgtcgctccgtcagccgcgccggaccgcgcaccaggaggcgagagcgcgcatggggagcctctgttgatgccgccgccgcgccgccctccgaggctgcgtcccgggaagcccggctccccgagcgctccggcctggcccggtgccccggacctgagtgcgtccccatggaggcgcccgggctggcccaggcggccgcggcggagagcgactcccgcaaggtggcggaggagacccccgacggggcgcccgcgctctgccccagccctgaggcgctgtcgccggagccgcctgtgtacagcctgcaggactttgacacgctggccaccgtgggcactgggacgttcgggcgggtgcacctggtgaaggagaagacagccaagcatttcttcgccctcaaggtgatgagcattcctgacgtcatccgcctaaagcaggagcaacacgtacacaatgagaagtctgtcctgaaggaagtcagccacccgttcctcatcaggctgttctggacgtggcatgacgagcgcttcctctacatgctcatggagtacgtgccgggcggcgagctcttcagctacctgcgcaaccgggggcgcttctccagcaccacggggctcttctactctgcagagatcatctgtgccatcgagtacctgcactccaaagagatcgtctacagggacttgaagccagagaacatcctgctggatagggatggccacattaagctcacggactttgggttcgccaagaagctggtagacaggacttggaccctctgtggaacacccgagtacctagcccccgaagtcattcagagcaagggccacggaagggccgtggactggtgggccctcgggcatcctgatattcgagatgctttcggggtttcctcccgttttttgatgacaaccccgtttggcatttatcagaaaattcttgcaggcaaaaatagatttccccagacatttggatttcccatgtaaaagaccctcattaagaaactgctcgtggttgacagaacaaggcgattaggaaacatgaagaacggggcgaatgatgtgaagcatcatcggtggttccgctccgtggactgggaagctgttccgcagagaaaactgaagcctcccatcgtgcccaagatagctggtgacggcgacacttccaacttcgaaacttacacctgagaatgactgggacacagccgcgcccgtgccgcagaaggatttaaaaatcttcaagaatttctgaggacaggagctcacatctggaagaaacaggaagattggaatctgcctggaacaaagaactgcacctaagcagaccagaagcaaaatgtcttcttcacggcataaggacatctccacttttctctgtacctgtgtgtatagaaatagattagagcacagttgaaattcatggaactggcattatttaagcaactggaattccacactgtaagaaggttttgaaaattgtttggttgtagattttatcttatcctttagtgttgtgttcctactgtgatgtcttggtttttgtcatagacttaagtttataagtttgaactggacttgttcgattataaccacaaattgtgtgtgtgtgtgtgtgtgtgtgtgtgtgtgtgtgtgtgtgtgtgtatgcctgtgtgtatatatagaagtcattatggcagatgcacagaaattgtgcagtgatgtaaatgttcatactttacagagcctataatttttatttttcaatttgttttttcaaaaatctcttctcggggacaacatctgaagggtatgttgcatgcattaaaaaaaatcatctcacatgcattttatagttttggggaagaaaaatatcatggggaggtctaccttcagtatctttagtgcttcttacctgggtaacttgagactttaaaagaagaaacaaagaggggaaggatatggggagcgaatttattcccaagaatcctacaatgacattgaagttgttggaggaatgtactgtatttaaaaaaaccttctgtgacacattcaaaaaatttcatctaaagctgggcgcagtggcttgttcctgtagtcccagcacttcaggaggctgaggtgggtggattgcttgagcccaggagttggagaccagtctgggaaacatggtgagatgtcatctctctacaaaatacaaaaaaattagccgggcatggtggcacgtgagtgtaggtctcagctactcaggaggctgagatgagaggatcacttgagcctggggaggtccaggccgcagtgatccgagatcacaccactgcattccagcctgggtgacagagtgagaccctgtccaaaaaaaaaaaaaaaaaaaagaaggcaatggctttgtgcttttgaagatggattgaagagaacgtccaccttaaggctttaaaagacagtgaagctgggtgcggtggtgcactcctgtaaccctgggactttgggaagctgaggcaggaagattgagcctaggagttcgagactgacctgggcagcatagcgagaccccatctctatataaaaaaaaagatgttaaaacagtgaaattacagaaacagaacatagccaccctttttcatcagtgaccttttcttcacgtggaggtcaactcagtaggtgagaataattagtaggttcagcagaataaactctttacaattaataactcagtggaaaatgatgttcagatggtgaaatgtggaaatgttttagacaactctattttcagcctgtgcttctcactcaccatcctgttgggattaacagttgagggccatcgctgcctaaacatttagcgtgcggtttcccatcagttttaccgtgaatgtgaaaaggtgaaactggtgctgacttcggcagcaggtatactaaaattggaatgacacagaggagattagcatggccccctgcgcgaggaagatctgcagattcatgcagcattccatatttttttaagaaaaggttacactgtgcaccgacatgtggagctagaaggaaaagcttttaagtctcatgtttgctgactataaaaataaatcatagtaataatattgaacattctactttaaaaattattaataaaaccataaatgaaacacttgagcacactttaaaaagtacataaatccatgagtccatatgcctatttttaggttgtctgttttattatccaggatttcatactcagatgagaattagcatcaggaaagcctgaaatgccttaattgtgaactgatatgcaggaaaatgaaatatgcaagcacattggtgaccttgttctttacagacgtcgtgatcagcctccagccatacagaacaaatgagaaattagaagcgattccaagaacgtgtgatggtgtgaacccactttggaccatcacacacatttcagcatttgaagtgacacaagctacctggtaactgcccatggcggggtcatagtttaaatggcccaatgtcatgtagaggttaatttaatcaaaatgagctataaacatggagcaatcactgtataattttaaaatagtttacctggccaggcatggtcgtcacgcctgtaatcccagcactttgggaggccgaggcaggtggatcacctgaggtcaggagttcgagaccagcctggccaacatggcaaaacccccgtctctactaaaatacaaaaattaggtgtggtggcgggcacctgtaatcctggctactcgggaggctgaggcaggagaatcgcttgaacccgggaggcagaggctgcagtgagccgagatcgtgccactgcactccagcctgggccacagagcaagactccgtctcaaaacataaaaataaaaaaaatacaaatagctgacccgggtgggcattccaaaatgtccgcatggacgatcacgaaacaatcacggtgcgaaatgtccgcatggatgatcacgaaacaatcacggtgcggaatgtccgtatggatgatcatgacaaacaatcactgcgcaaaatgtggaggaaaattcattaccataatcacaacatttgtatcagaaaaacattacaaatttactttgcttcatgtaattttacgagttggcaatattttcttaaattggaatactctaagagaataggacatggatatgttacaagaagaagtgtattggggcaagtcttgtttttctgaagggaaatgccaccggcctgctttcataggcattgataaagccaggaaggaaataaagtcacaaccaaatagtatacactgtctctactgaattcttctaattccttcgcaacagaagtctaaatcctgcttagcctaaacatatctatagccagcgatgggcaaattatatttgctgtcagcatgatagaataagaagcagaaaccccccagcagtggggtgaagattgcacgcttcatcccctcaaaatgcagttcagccccactccctctccatgcccatcaaacaactgcaaaatcacttgttactgaatttctcattcagcgttttgtttctttctgtccatacttaaagaccaaattatttgtttgctttgaagaaaaagcaaaaacaagaacaaaaacaccaaatcatttgaaatcactgtccattaaaaaaaatcaccagtggaactaaacagttgagtggtttgggatgtgttgttcgccatttctgtggtttgacctacatggcctgtaattctttggaccattgtaactgtgaactatggcttaatactgttaaagaccccaaggctccactctgtagccaggtgcacctcaggctgcacaaataccccaccagaatgtcacaatcattcattgctccagctactgagtgaacagggtgcaagacagcactggcttgggttgtatttttgcagccagttaactttgcatcaggtctacacagtccttgcagcctttgatttctccagttgtagagatttgaaatggggtgcccgggttgctctcgtttttccttcaagctacctagcatgcattttacacacattggaggagtcgtatgcactgtttttctgttgctgatggaggcaagcaggccttctaattagtctaagttaaacggatgggattcacttaagaaaagcaagaagaaaagcacacgaacaggtgtcttaatgcatttggatagtttctttgcggggtgtgtgtgtgtgtgtgtgtgtgtgtgtgtgtgtgtgtgtcttggtgaaggtgaggggctgtattttcaccaagccttttcataatcaagtttgctttgcaaaccttatggccttgcaccccgcagaacagtcccttcctaatagcagggatgctctgtcatggtttttctgtaaattatcgtgtgttgggaagttctgttgaggcttagtttgatcttccatggtggacacgtctgttctgtatgtaaaaggcattacaattgtgttttagcagatgagacttgaagcctttccacagtccttgtgctctgagatggctgttgagctctgctcaactgtcgtagctgaattctttctttgcgctgaacactgggcagcctcaccatgttgccaacgtgcttctggggcccctgtcactgccgctggatgccgcgcacacaggcagagtgccttggcaggtttgtgcaccccttggcgagccagaactgggaaccccgcggggtgaccccttctcatggggggtcggggaggggagtgcctatttttaatcctgtctgtttgttgcacaatggaaatcactgtgatttgtacatatgccctaggaaaattttactgctgtctaatttatgtaataatactgttgattccaggtttatttaataaaactttgtatcttttcagaaaaaaaaaaaaa

SEQ ID NO: 3064 - DNA, 568 bp, Homo sapiens
  misc_feature (1)...(568): n = a,t,c or g
acatgcccatgcntgcacagatagaagaacctcagcccattcaggtaaaaactcgcacaaacctccggctcactcagttaagggaacaagaccagacacagaaatgcctttgtcctttgtataatcagcaggctccgaggaaaaagtttcttcttttgtgggcatgaacacagtgggcttcagtaggttcaggttggcactttcttttgtggaaaaggaaaagcccagcctctgtaaatcatcacttcagctcctgattggtcccaggccaagctgaatagcccttaggaattatccacttcaactcctgattggtcccgggccaagctgaatagcccttatgaatcatcacttcggttcctgattggtcccgggccaaggtcccagaccaagctgaatcacgctttctccaagaacagcccgcaggctaagtgcattccttccccttcccagtccataaaaaccccggaccccagcctcatactgggcaacttatttggatccccatctccactgtggagagcttttttctttcacttattaaacttttactccaatttcaaaaaaa

SEQ ID NO: 3065 - DNA, 986 bp, Homo sapiens
  SIMILAR (640)..(930): 591254mologous to Homo sapiens Human myelin oligodendrocyte glycoprotein gene,accession number AAZ29204,Smith-Waterman Score= 224.
gatgctcctccattcttggccagaggcctgggcctccttcacacgcccctccctgtggatcgcctgcctgttcccatagcaggggaactggagtttgtgggggggcagagcaggttatgtgcagacagggaaacgagaactttggacctggctttctgagtccaggtgagagctgtgtggccccccgatgccactctgcccgccggagggatgtgcctgctgagccttttccttccacgccgcctctcactgccaggccagcggcttccgctgagactcgctggagaggcggctcccgtgtccgtccaccgagcactcagatggatgctgatcaccagggccgagggggctcccagaaggaccccaggccctggggagggtggctgtgggaggccaagtccactggccggaagtcttgtcagccctaagccagggaagcctggagcgtggcctggcgggtctgggtggacaccgtccccactccggactcccagcacaggggaggagacctgagcctgtatggccctgtagccctgggcaaagctgggcctgtcgtgtgttcctgcctggcaggtgcaggtgctggccatttgcaggtggaaagaggtgggaatcttggattttttgtttttttttgtctttttttttttgagatgaagtctcgctctgacacccaggctggcgtgcagtggtgtgatctcggctcactgcaaactccgcttcctgggttcaagtggttctcctgccccagcctcccaagtagctgggattacaggcatgcgccaccacgctcagctgatttttgtatttttagtagagatggggtttcaccatgttggccaagctggtctcaaactcctgacctcaagtgatctgcccgcctcggcctcccagagtgctgggattacaggcgtgagccagtgcacccggcggaatcttggaatttttatagacggcacctcagtttctgactccagccgcacacc

SEQ ID NO: 3066 - DNA, 2197 bp, Homo sapiens
  SIMILAR (1151)..(1609): 901254mologous to Homo sapiens ZNF155,accession number AC018725,Smith-Waterman Score=778.
  misc_feature (1)...(2197): n = a,t,c or g
atggaccctggtacgttgcagagtgcttcacaaggccctacagccattaacccgtgtgactatgtactcaaaaggagaaatattcaaacatcttggcaacgactaactcctattatcaaatggcacgtttatattttgatgattgggcctggtgagaaggaagcaggaaggaatctaggcatatttggcaaatggactccatttcccaagataccagcgaaacgcctgcgggagtctaattgcccggtcgatgcgcaggaaatttggctcccgcaggcgtttcgcgagtatcttgggaggcgtgggaattttggcccaggcaggaggacctgtgaattctgggaagtggagtccatttgctctgtggagtcgtgggaactttggctcaggcaggcggattcgggggattctgggaagtgtagtccagacgcctgtggcatcatcgacacttccggtctccgagcaggacactgctacttaacaagactgtggcacgtttcaggcaggattcctccttcattcaaactgcatcacccaggagtctgcaaattccccaaagtaggaggaaaaatgaccacattcaaggaggcagtgaccttcaaggatgtggctgtggtcttcactgaggaggagctggggctgctggaccctgcccagaggaagctgtaccgagatgtgatgctggagaacttcaggaacctgctctcagtggggcatcaaccgttccaccaagatacttgccacttcctaagggaagaaaagttttggatgatggggacagcaacccagagagaagggaattcaggaggcaagatccaaactgagttggagtctgttccagaagcaggagcacatgaagagtggtcctgccagcaaatctgggaacaaattgcaaaagacttaaccaggtctcaggactctatcataaataactctcagttctttgaaaatggtgatgtcccctcccaggttgaagcaggactacccacaattcatacaggacagaaaccttcccagggtgggaagtgtaaacagtccttcagtgatgttcccatctttgatcttcctcagcagttatactcagaagagaagtcttatacatgtgatgagtgtggaaaaagcatctgttacatctcagcccttcatattccatcaaagagtccacatgggagagaaatgctataagtgtgacgtgtgtggtaaggaatttagtcagagctcacatcttcaaactcatcagagagtccacactgggagagaaaccattcaaatgtggagcaatggtgggaaaggtttcagtcgtagatcagcacttaatgttcatcataaattacacacaggagagaaaccttacatttgtgaggcatgtgggaaggctttcattcatgattcccagcttaaggaacataagagaatccatactggggagaaaccattcaaatgtgatatatgtggtaagaccttctattttaggtcaagacttaagagccattccatggttcacacaggagaaaaaccatttaggtgtgatacatgtgataagagctttcatcagagatcagcacttaataggcattgcatggtccacacaggagagaaaccgtacagattgtgagcagtgtggaaaaggctttattggtaggctagatttttataagcatcaggtggtccacacaggagagaaaccatataattgtaaagaatgtgggaagagcttcagatggtcctcatgccttttgaaccatcagcgagtccacagtggagaaaaaagcttcaaatgtgaagaatgtgggaagggattttatacaaattcacaactgtcttcccatcagagatcccacagtggtgaaaagccatataaatgtgaggagtgtgggaagggctatgttactaagtttaatcttggacttgcaccagagggtccacacgggagagagaccttataattgtaaggaatgtggggaagaactttagccgggcctccaagtattttgaatcataagagactccactgccagaaaaaaaccntttcaaatgtgaggactgtggaaagaggcttgtacacaggacataccgtaaagaccagccaagagactatagtggggaaaacccatccaaatgtgaggattgtgggagacgctacaagaggcgcttgaatctggatatacttttatcattatttctaaatgacacataa

SEQ ID NO: 3067 - DNA, 5664 bp, Homo sapiens
  SIMILAR (727)..(939): 741254mologous to Homo sapiens Zinc finger protein ZNF221,accession number AC035150,Smith-Waterman Score=246.
  misc_feature (1)...(5664): n = a,t,c or g
atggatggtgccaaagcattttttagtgcagtggcagcaggatttgtcatcattctcacatgccagctgcagtggcagtggcaacatggtggggtgcatgctcatcagctgtggcagcttgctagtgggtaccgggatgcctgcttctgtgtgagcacttacagcagtggcccttctgaatttcctggacctactctcggaaccctcaacgagctagcgatagatttagaggaaaggaagcaccgtcggaaagcaaaggtttggaagggtgagggcggcggtttgcgatccccgcggcagagccttcttgcgtttagggctgtcctagcatcccgagggactcggtcctgtcacgtttcgccctatttgggggtttctggggctctcagctcgcccaatccgcatccctccactactggcgcggggccgattcccccggtacaacgttggggtcttccccagatcaaccagaaaaatagagaaattgctatcccactgacattgggtatgagcacacacttgcgaagagggtgcaagaacatgtctcgatttagcccatctttgcactgctgcactactcccatatccactaatttcacggacccaggcagccactgcaagggagcacatggggatatctgcttgttgattcaaaacctgaagggggctctgccaatgagcatcaacaggtcctactttaatgcacaccccctacttcaaatttctgaggcagtgacattcaaggatgtggctgtggtcttcactgaggaggagctggggctgctggaccctgcccagaggaagctgtaccgagatgtgatgctagagaacttcaggaacctgctctcagtagggaatcaacccattcccacccaagatactttcccacttcttagggaaggaaaagttttggaagatgaagacaacaagcccaaagagaagggaattcaggaggcaagatccaaattgagatggagactgttccagaagcaggcccacatgaagagtggtcctgtcagcaaatatgggaacaaattgcaagtgacctaaccaggtctcaaaactccataaggaacagctctcagttcttcaaagaaggtgatgtcccctgccagattgaggcaagactatctataagtcacgtgcaacagaaaccttaccgttgtaatgaatgtaaacagtccttcagtgatgtttctgtctttgatcttcatcaacaatcacactcaggagagaaatctcatacatgtggtgagtgtggaaaaagcttctgttacagcccagcccttcatattcatcagagagtccatatgggagaaaaatgctataagtgtgatgtgtgtggtaaggaatttaatcagagctcacatctgcaaactcatcagagagtccatactggagagaaaccattcaaatgtgggcaatgtgggaaaggcttccatagtagatcagcacttaatgttcattgcaaattgcacacaggagagaaaccttataattgtgaggaatgtgggaaagccttcattcatgattcacagcttcaagaacatcagagaatccatactggggagaagccattcaaatgtgatatatgtggtaagagcttccgtgttagatcaagacttaataggcattccatggttcacacaggagaaaaagcattcagatgtgatacatgtggcaagaactttcgtcagagatcagcacttaatagtcattccatggtccacatagaagagaagccatacaaatgtgagcaatgtggaaaaggcttcatttgtaggcgagatttttgtaagcatcagatggtccacacaggagagaaaccatataattgtaaagaatgtgggaagaccttcagatggtcctcatgtcttttgaaccatcagcaagtccacagtggacaaaaatccttcaaatgtgaagaatgtgggaagggattttatacaaattcacgacgatcttcccatcagagatcccacaatggagaaaagccatataactgtgaggagtgtggtaaggactataaaaggaggttggatcttgagtttcaccagagggtccacacgggtgagagaccctataattgtaaggaatgtggcaagagctttggctgggcctcctgtcttttgaaacatcagagactccacagtggggaaaaacctttcaaatgtgaagagtgtggaaagagatttactcagagttcacaacttcattcccatcagacatgccatactggagaaaagctatacaaatgtgagcagtgtgagaaggggtacaacagtaaatttaatcttgacatgcaccagagggtccacgggggagagcgaccctataattgtaaggaatgtggaaagagctttggctgggcttcatgtcttttgaaacatcagagactccacagtggagaaaagccattgaaatctggagtgtgggaagagatctactcagaattcacagcttcatttacatcagagtcttcaggccagaaactggtcagtatccccctgggacagagtttccaaaagaaggagaaggctgccatctttgctgttttgcagctttcactggtgacacctccaggtacgggaaaaacggaggcaactagggtctcgagcagaccccagcaaactgtggcagccctacagttgctaacagtcagtggcttgactgttaaaaacaggcagaaaacaacaagaacatcaacaaaaagaccccacaaaaaccccattcaagggtcagcaacctcaagattgaagagcaaatggactccatttcccaagataccagcgaaacgcctgcgggagtctaattgcccggtcgatgcgcaggaaatttggctcccgcaggcgtttcgcgaactgtggcacgtttcaggcaggattcctccttcattcaaactgcatcacccaggagtctgcaaattccccaaagtaggaggaaaaatgaccacattcaaggaggcagtgaccttcaaggatgtggctgtggtcttcactgaggaggagctggggctgctggaccctgcccagaggaagctgtaccgagatgtgatgctggagaacttcaggaacctgctctcagtggggcatcaaccgttccaccaagatacttgccacttcctaagggaagaaaagttttggatgatggggacagcaacccaaagagaagggaattcaggaggcaagatccaaactgagttggagtctgttccagaagcaggagcacatgaagagtggtcctgccagcaaatctgggaacaaattgcaaaagacttaaccaggtctcaggactctatcataaataactctcagttctttgaaaatggtgatgtcccctcccaggttgaagcaggactacccacaattcatacaggacagaaaccttcccagggtgggaagtgtaaacagtccatcagtgatgttcccatctttgatcttcctcagcagttatactcagaagagaagtcttatacatgtgatgagtgtggaaaaagcatctgttacatctcagctcttcatgttcatcagagagtccacgtgggagagaaactctttatgtgtgatgtgtgtggcaaggaatttagtcaaagctcacatctgcaaactcatcagagagtccacactggagagaaaccattcaaatgtgagcaatgtgggaaaggtttcagtcgtagatcagcacttaatgttcatcgtaaattacacacaggagagaaaccttacatttgtgaggcatgtgggaaggccttcattcatgattcccagcttaaggaacataagagaatccatactggggagaaaccattcaaatgtgatatatgtggtaagaccttctattttaggtcaagacttaagagccattccatggttcacacaggagaaaaaccatttaggtgtgatacatgtgataagagctttcatcagagatcagcacttaataggcattgcatggtccacacaggagagaaaccgtacagatgtgagcagtgtggaaaaggctttattggtaggctagatttttataagcatcaggtggtccacacaggagaaaaaccatataattgtaaagaatgtgggaagagcttcagatggtcctcatgccttttgaaccatcagcgagtccacagtggagaaaaaagcttcaaatgtgaagaatgtggaaagggattttatacaaattcacaactgtcttcccatcagagatcccacagtggtgaaaagccatataaatgtgaggagtgtgggaagggctatgttactaagtttaatcttgacttgcaccagagggtccacacgggagagagaccttataattgtaaggaatgtgggaagaactttagccgggcctcaagtattttgaatcataagagactccactgccagaaaaaaccattcaaatgtgaggactgtggaaagaggcttgtacacaggacataccgtaaagaccagccgagagactatagtggggaaaacccatccaaatgtgaggattgtgggagacgctacaagaggcgcttgaatctggatatacttttatcattatttctaaatgacacnnnnnnnnnnnnnnnnnnnnnnnnnnnnnnnnnnnnnnnnnnnnnnnnnnnnnnnnnnnnnnnnnnnnnnnnnnnnnnnnnnnnnnnnnnnnnnnnnnnnnnnnnnnnnnnnnnnnnnnnnnnnnnnnnnnnnnnnatttgagaggagttggtagacagcaagggaagggtccctggagacccccagccaaaggggtcagtgtctcatccccacataacacaaaaagcagcctggggaagacaatcaagctacaggcactgataagggaactagcacaggggattgtgcctggagacatgcccatggctgcacagatagaagaacctccagcccattcaggtaaaaactcgcacaaacctccggctcactcagttaagggaacaagaccagacacagaaatgccctttgtcctttgtataatcagcaggctccgaggaaaaagtttcttcttttgtgggcatgaacacagtgggcttcagtaggttcaggttggcactttcttttgtggaaaaggaaaagcccagcctctgtaaatcatcacttcaactcctgattggtcccgggccaagctgaatagcccttatgaatcatcacttcggttcctgattggtcccgggccaaggtcccagaccaagctgaatcacgctttctccaagacagcccgcaggctaagtgcattccttccccttcccagtccataaaaaccccggaccccagcctcaatactgggcaacttatttggatccccatctccactgtggagagcttttttctttcacttattaaacttttactccaatttcacccttgtgtctgtgcttcttaatcatattggacgtgagattaagaactccgggggatacatcacaagagagactgttacagtgtggtgcatttgtgagactacaacacatttttagcaatttgtaaataattgttgatgatagtcacctttagtgctgcagaacagtagaacttattcttcccctctacctcttttgtatctgttgccaacctttggccatctcacctacctcctacacttccctgcctgtctacatccactgttctactctctactacaaaatcaactttttttaacttc

SEQ ID NO: 3068 - DNA, 2292 bp, Homo sapiens
  SIMILAR (464)..(1384): 721254mologous to Mus musculus putative,accession number AK004781,Smith-Waterman Score=1210.
tttcgtgcggcttcgggccgggagacccgcgcagccctcggggcatctcagtgcctcactccccaccccctcccccgggtcgggggaggcggcgcgtccggcggagggttgaggggagcggggcaggcctggagcgccatgagcagcccggatgcgggatacgccagtgacgaccagagccagacccagagcgcgctgcccgcggtgatggccgggctgggcccctgcccctgggccgagtcgctgagccccatcggggacatgaaggtgaagggcgaggcgccggcgaacagcggagcaccggccggggccgcgggccgagccaagggcgagtcccgtatccggcggccgatgaacgctttcatggtgtgggctaaggacgagcgcaagcggttggcgcagcagaatccagacctgcacaacgccgagttgagcaagatgctgggcaagtcgtggaatgcgcctgacgctggcggagaagcggcctttagtggaggaggcagagcggctgcgcgtgcagcacatgcaggaccaccccaactacaagtaccggccgcggcggcgcaagcaggtgaagcggctgaagcgggtggagggcggcttcatgcacggcatggatgagccgcaggcggccgcgatgggccccgagggcggccgcgtggccatggacggcctgggcctccagttccccgagcagggcttccccgccggcccgccgctgctgcctccgcacatgggcggccactaccgcgactgccagagtctgggcgcgcctccgctcgacggctacccgttgcccacgcccgacacgtccccgctggacggcgtggaccccgacccggctttcttcgccgccccgatgcccggggactgcccggcggccggcacctacagctacgcgcaggtctcggactacgctggccccccggagcctcccgccggtcccatgcacccccgactcggcccagagcccgcgggtccctcgattccgggcctcctggcgccacccagcgcccttcacgtgtactacggcgcgatgggctcgcccggggcgggcggcgggcgcggcttccagatgcagccgcaacaccagcaccagcaccagcaccagcaccaccccccgggccccggacagccgtcgccccctccggaggcactgccctgccgggacggcacggaccccagttcagcccgccgagctcctcggggaggtggaccgcacggaattttgaacagtatctgcacttcgcgtgcaagcctgagatggggcctcccctaccaggggcatgactccggtgtgaatctccccgacagccacggggccatttcctcggaggtgtccgacgccagctccgcggtatattactgcaactatcctgacgtgtgacaggtccctgatccgccccagcctgcaggccagaagcagtgttacacacttcctggaggagctaaggaaatcctcagactcctgcgtttttgttgttgctgttgatgttttttaaaaggtgtgttggcatataatttatggtaatttattttgtctgccacttgaacagtttgggggggtgaggtttcatttaaaatttgttcagagatttgtttcccatagttggattgtcaaaaccctatttccaagttcaagttaactagctttgaatgtgtcccaaaacagcttcctccatttcctgaaagtttattgatcaaagaaatgttgtcctgggtgtgttttttcaatcttctaaaaaataaaatctggaatcctgcttttttgctctactagtacctctgtcacactagtcttatcaaaaaccagttcttaagatcaatgttaagtttattagttaatgtaaatttctcatcctcgaaaagggtgaacataaatgcctttaaggagtatatctaaaaataaacattaggatatctaagtttgatgtaattgtttcaggaaggaaaaaagaaaagcattctggaatgagcctacttcaagtaatcttagtttctaaaactaacagttaataatttccaattcccaggtatatcactttaagtagaaggggatgtccaagtaattttggttttctaactgttgaatcataagcttgacctgccccaagaggctttttggatgtttttatctgtgttttgccatctctttacactcctcgacattcagtttaccttaatcttcacatttttacaccttgggaagtggcaagcatcgctgggtttaagataaaggagtcacaaaaactaatcaaaataaaatttgcattatgacaacttttaaaaatt

SEQ ID NO: 3069 - DNA, 633 bp, Homo sapiens
tctcccggacatccaaaacaggttaccttgtccacgctctccggaccacgctttggacttgctcacttttatttaagagtccgacgggggaaagaggaaaaaaaaatccagaggagatccaagtcaattggaagaaaaaatttcaaaagggtgtccacagaggcgaaaaaagcccaggctctaccgaccttcaaactacaacagagctttcaggagaatgcggagagacggcttcccacccggacctcaccagaaacccgcacaccccagccacattgctcctcattcagccagaaaggactccaactccaccaccagggaggccccccttcctgggtgctggccagttgcagaggctgttcatgggcatcccacaggtgggcgactgccccccaccctcctcctaggcactttagaggggtccctctgtgggcagacaccatgggttaggtttctcttttccaacttcctgtttgggtctggcaagtgacagatcatcttcactacattaatcagtagtcacccgaacattcctatactgtcccccaattcctttcagcaccagctgcctcccccactggaattattcaatatggaactagattaaattgaagacttgccctttagttttta

SEQ ID NO: 3070 - DNA, 1364 bp, Homo sapiens
  SIMILAR (1221)..(1361): 531254mologous to Mus musculus putative,accession number AK004948,Smith-Waterman Score=111.
  misc_feature (1)...(1364): n = a,t,c or g
tttcgtggacgccgccggttgtcctcttcgctgctccgtagtgacggggattgttgtgttgcagaaatccggcaatcgacctgaggacttgcgagccgctcagctcccgggacgtttggagctgctgctaaataatttctgctcagccatgtcgccggctccagatgcagccccggctcctgcgtcgatctccctgtttgacctcagcgcggatgctccggtctttcagggcctgagcctggtgagccacgcgcctggggaggctctggcccgggctccgcgtacttcctgttcaggctcaggggagagagaaagcccagaaagaaagctactccaaggggtcctatggactatttcagagaagttattttgttcaacttgtgaccagaccttccagaaccaccaagaacagagggaacattataagcttgactggcatcggtttaacctaaagcaacgtcttcaaggacaagcctctcctgtctgccctgggactttgaaaagcagagctccacaggagatcttttccagcattttcggggatcagaaggattcaggattcagccagtgaggaggacttgcagacactggatcgggagagggctacatttgagaagttgagccgacccccaggcttttaccctcatcgagttcttttccagaatgcccagggccagttttctttatgcctaccgctgtgtcctaggccctcatcaggatcccccagaagaggcagaacttgctgcttacaagaaccttgcaaagtagaggtcccagagactgcgtggtgctcatggctgcagctgggcactttgctggtgctatatttcaaggaagagaagtggtgacacacaaaacttttcaccgctatacggttcgggccaagcggggcacagccagggggctttcgggatgcccgaggtgggccatcacactctgctggagccaacctgagggcgctacaatgaagccacactatataaggtgagttaagccttttagatctggtggtactgatccatactttttttgcatctctgttcaactcactgttaagtagggaggtttttgactcatatccttccaattttcattataggtagacaaaggtagatgagggattccccaggagccttaatcctctattctttctccgtgttatgctctactttccaccccttgcacttctgtgagccattttttttagctggagaattataaatagcaagcgatggcatgcaggactgaggtactctcttctctaggatggtcgagacctgctggcagggccaagctgggctaaggcgctgtaggaggctggtacaatactggtgcgtgctccccgctctgaccggnctttgatc

SEQ ID NO: 3071 - DNA, 463 bp, Homo sapiens
  SIMILAR (32)..(463): 771254mologous to Homo sapiens Similar to RIKEN cDNA 3222401G21 gene,accession number BC004117,Smith-Waterman Score=530.
  misc_feature (1)...(463): n = a,t,c or g
nttgcgaccctagtccgngtggtggaactccctagaggtgacagtctacgcattcagcattgagaacttcaaacgctccaagagtgaggtagacgggcttatggatctggcccggcagaagttcagccgcttgatggaagaaaaggagaaactgcagaagcatggggtgtgtatccgggtcctgggcgatctgcacttgttgcccttggatctccaggagctgattgcacaagctgtacaggccacgaagaactacaacaatgatatctctgagtctctgcttgataagtgcctctataccaaccgctctcctcatcctgacatcttgatacggacttctggagaagtgcggctgagtgacttcttgctatggcagacctctcactcctgcctggtgttccaacccgttctgtggccagagtatacattttggaacctcttcgaggccatcctgcagttccag

SEQ ID NO: 3072 - DNA, 1922 bp, Homo sapiens
  SIMILAR (593)..(763): 921254mologous to Homo sapiens Similar to RIKEN cDNA 3222401G21 gene,accession number BC003643,Smith-Waterman Score=292.
gcagcaatacccgtgtcgacgatttcgtctgaactgaaggggtgaactagaggagaagagggtgactgggcttttatcatctgcgggagaagcataggttacgactgagggaataatcaggagaccactgaggcgtgaagtactacgcgtgcgataactgaaggagttagtaactgggagcacagagttggaaacagcttatgggaagatggagaaggaagaaacggggaatgatcaagatgtgggcaccatgatgtggcaggaaaccgacttagatgttcagaagaagtcagtgcagatacggaggaaatgggaatgggaagaagtctgcaaagccaggagaaccgaggaaaggcttttgcctccagaggtcacattgcgttataaaactctgggtggtaaaagattataggcttagaccagtgtctttggattctaatgctggctgctctccatagtccatctgattccccagaagtcagttatagctcttcgcaaaccttggagacttcttattttctttcttggttatccaagattacctggctggtgtttgcttgttctggagtgatcttctgactggaaaagaactatgtcatggatcaaggaaggagagctgtcactttgggagcggttctgtgccaacatcataaaggcaggcccaatgccgaaacacattgcattcataatggacgggaaccgtcgctatgccaagaagtgccaggtggagcggcaggaaggccacttcacaggcttcaaacaagctagctgagactctgcggtggtgtttgaacctgggcatcctagaggtgacagtctacgcattcagcattgagaacttcaaacgctccaagagtgaggtagacgggcttatggatctggcccggcagaagttcagccgcttgatggaagaaaaggagaaactgcagaagcatggggtgtgtatccgggtcctgggcgatctgcacttgttgcccttggatctccaggagctgattgcacaagctgtacaggccacgaagaactacaacaagtgtttcctgaatgtctgttttgcatacacatcccgtcatgagatcagcaatgctgtgagagagatggcctggggggtggagcaaggcctgttggatcccagtgatatctctgagtctctgcttgataagtgcctctataccaaccgctctcctcatcctgacatcttgatacggacttctggagaagtgcggctgagtgacttcttgctatggcagacctctcactcctgcctggtgttccaacccgttctgtggccagagtatacattttggaacctcttcgaggccatcctgcagttccagatgaaccatagcgtgcttcagaaggcccgagacatgtatgcagaggagcggaagaggcagcagctggagagggaccaggctacagtgacagagcagctgctgcgagaggggctccaagccagtggggacgcccagctccgaaggacacgcttgcacaaactctcggccagacgggaagagcgagtccaaggcttcctgcaggccttggaactcaagcgagctgactggctggcccgtttgggcactgcatcagcctgaatgaggctggccacctgccactttgccctgccctttggcttcaggggttcaattcccttcccttttcttggtgaaaaggcacctcctttcctgataatgaatggtgttccctttgcttggctggggagccccccaggccaggtttgctggccataaatacctttgggctgcctgggacaggctccttaggaggattgagggtgaaagtttcccccgagtaccctaaacctaggtttggtccccaatagggtttggaaagcaaagggccccaactcttcaccaaaaaaaaaaaaaaaaaaaaaaaaaaaaaaaaaaaaaaaaaaaaaa

SEQ ID NO: 3073 - DNA, 365 bp, Homo sapiens
  SIMILAR (2)..(364): 741254mologous to Homo sapiens Human secreted protein, SEQ ID NO: 8117,accession number AAG04036,Smith-Waterman Score=424.
ggaggatttgctcgacttggacgaggagcttcgctacagcttggctacctccagggccaagatgggtcgccgagctcaacaggagtcagcgcaggccgagaatcacctcaatggcaagaattcctctttgactctgactggagagacttcctctgctaaattacctcgctgccgacagggaggctgggcaggtgattccgtgaaggcttcgaacggtacccaaacaggcaaacaacagctggatctgaacgcatgctatcacaaaacgcatcacagagatttggggctggcttcattggaagaggcagatattcctatcattccggatctggaggaagtacaggaagaagactttgttttgcagg

SEQ ID NO: 3074 - DNA, 464 bp, Homo sapiens
  SIMILAR (217)..(342): 1001254mologous to Homo sapiens Human secreted protein, SEQ ID NO: 8117,accession number AAG04036,Smith-Waterman Score=211.
cggagatggaggatttgctcgacttggacgaggagcttcgctacagcttggctacctccagccccgagtgcgaacttccccagaacagatcgatcacagggtgataggggagccccggccgggttcgcactcgctcccatcctagagtttttcctttgggacacctcgtcgcagaagttcctgcaaaagccgcactgttttatgcatggaagggagagggccaagatgggtcgccgagctcaacaggagtcagcgcaggccgagaatcacctcaatggcaagaattcctctttgactctgactggagagacttcctctgctaaattacctcgctgccgacaggaggctgggcaggtgattccgtgaaggcttcgaagtttaggaggaaggcttctgaagaaatagaagatttccgcctcagaccacagagcctgaatggatcagattatggaggagatattcct

SEQ ID NO: 3075 - DNA, 793 bp, Homo sapiens
  SIMILAR (3)..(68): 811254mologous to Homo sapiens Human secreted protein, SEQ ID NO: 8117,accession number AAG04036,Smith-Waterman Score=78.
aggatttgctcgacttggacgaggagcttcgctacagcttggctacctccgtgaggaccaattcgggggccttgggggccaggatttggcgggtggggaggagcgaccccgccggccccgacttctctgaggcgactcagggcggcaggcctcgcgccgcgccgggtgaggcccagaaggaggcagcctcaccgccccgcccccaggccactgtgggctccgccgctgctggcctggggtttgctttctttaaaatcctcagaaagtagaaaacaccctgtccccgccggcgtctaggaccgtgggaaatttccgagcctttctccgttttctagagccccgagtgcgaacttccccagaacagatcgatcacaggagggccaagatgggtcgccgagctcaacaggagtcagcgcaggccgagaatcacctcaatggcaagaattcctctttgactctgactggagagacttcctctgctaaattacctcgctgccgacagggaggctgggcaggtgattccgtgaaggcttcgaagtttaggaggaaggcttctgaagaaatagaagagtacgtttccagcattcttattcttatggtatcctatgttgatcttgggcaacagggcaggcttggtggtcatgatctgttccacctatgttgaacactgtgttagaagtctggggctagaattattgatgccctgctgaatccaaggtttggttaatcccgcttcctcaactgaaggtctggaccctggcattgatgcccatgtcctatctcccactgtgtg

SEQ ID NO: 3076 - DNA, 571 bp, Homo sapiens
  SIMILAR (271)..(336): 861254mologous to Mus musculus putative,accession number AK006115,Smith-Waterman Score=115.
tcatgaagtactcagccattcagacactggatggggagatcgacctgaaactcctcaccaaagtgctcgcgccggagcacgaagtccggtaggtacagtggtggcagcaattccccggtctctcaactctggcaatccccataaacccagccgaactccccgggctggccctgtgcctcccctgaaggccctggaatgggagggagaaagtcagcctacagttaagggaaaaggccctttctttgtcttacccagcgaaacccttcttggcaggatgatgtcggctgggactgggaccatctgttcactgaggtgtcctcagaggtcctcactgaagtgggacccactgcagacggagaaggaggaccctgcggggcaggccaggcacacctgagcccgtcacccatgctctagacatgaagaaatgcaatgagcttaaagctaaagaagcttgtaagcagctccgaatttttacctggaatattttgtaataaaaatatttatattcagtcaaccacattggataattcaattgcaataaattgcttcttctgtgccaaaaaaaaaaaaa

SEQ ID NO: 3077 - DNA, 952 bp, Homo sapiens
  SIMILAR (5)..(76): 791254mologous to Homo sapiens Human secreted protein, SEQ ID NO: 8117,accession number AAG04036,Smith-Waterman Score=84.
tttcgtggaggatttgctcgacttggacgaggagcttcgctacagcttggctacctccgtgaggaccaattcgggggccttgggggccaggatttggcgggtggggaggagcgaccccgccggccccgacttctctgaggcgactcagggcggcaggcctcgcgccgcgccggagggccaagatgggtcgccgagctcaacaggagtcagcgcaggccgagaatcacctcaatggcaagaattcctctttgactctgactggagagacttcctctgctaaattacctcgctgccgacagggaggctgggcaggtgattccgtgaaggcttcgaagtttaggaggaaggcttctgaagaaatagaaggatttccggcctcagaccacagagcctgaatggttcagaattatggaggagatattcctattcattccggatctggaggaagtacaggaagaagactttgttttgcaggtgggcagcccctcccagcattccagataaagcgggtgatgacctaccgtgacctgggacaatgacctcatggaagtacttcagccattcagacactggatggggaagattcgacctgaaactcctcacccaaaagtgctcgcgccggagcacgaagtccgggagcgaaacccttcttggcaggatgatgtcggctgggacttggacccatctgttcactgaggtgtcctcagaaggtccttcactgagtgggacccactgcagacggagaaggaggaccctggcgggcaaggccaggcacacctgagcccgtcacccatgctctagacatgaagaaatgcaatgagcttaaagctaaagaagcttgtatgcagctccgaatttttacctggaatattttgtaataaaaatatttatattcagtcaaccacattggataattcaattgcaataccccgcttattctgtgccaaaaaaa

SEQ ID NO: 3078 - DNA, 400 bp, Homo sapiens
  SIMILAR (244)..(333): 811254mologous to Homo sapiens Human secreted protein, SEQ ID NO: 8093,accession number AAG04012,Smith-Waterman Score=135.
  misc_feature (1)...(400): n = a,t,c or g
cgccgctgcgaagggagccgccgccatgtctgcgcatctgcaatggatggtcgtgcggaactgctccagtttcctgatcaagaggaataagcagacctacagcactgagcccaataacttgaaggcccgcaattccttccgctacaacaagaatgctcgcgccacgctcagcagcatcagacacatgatccgcaagaacaagtaccgccccgacctgcgcatggcagccatccgcagggccagcgccatcctgcgcagccagaagcctgtgatggtgaagaggaagcggacccgccccaccaagagctcctgagccccctgcccccagagcaataaagtcagctggctttctcaccnnnnnnnnnnnnnnggggcgcccgtttaaaagaatccactttta

SEQ ID NO: 3079 - DNA, 361 bp, Homo sapiens
  SIMILAR (28)..(102): 921254mologous to Homo sapiens Human secreted protein, SEQ ID NO: 8093,accession number AAG04012,Smith-Waterman Score=123.
  misc_feature (1)...(361): n = a,t,c or g
gtcgccgctgcgaagggagccgccgccatgtctgcgcatctgcaatggatggtcgtgcggaactgctccagtttcctgatcaagaggaataagcagccccaccaagagctcctgagccccctgcccccagagcaataaagtcagctggctttctcaccnnnnnnnnnnnnnnnnnnnntttttttttaagggggccgaagctttttccttttaggggggggtaattttaagtggggccggggcggggttttaaaannnnnnnnnnnnnaaaacccggggggtccccaaattaaacgcctttgggcaaannnnnnnnnnnnttnnnttttanangnngggttttttgttattttttgtgtcg

SEQ ID NO: 3080 - DNA, 346 bp, Homo sapiens
  SIMILAR (8)..(169): 1001254mologous to Homo sapiens Human secreted protein, SEQ ID NO: 6011,accession number AAG01930,Smith-Waterman Score=278.
  misc_feature (1)...(346): n = a,t,c or g
gcacgagggccagcggaagcctgccacctcctatgtgcggaccaccatcaacaagaatgctcgcgccacgctcagcagcatcagacacatgatccgcaagaacaagtaccgccccgacctgcgcatggacatgctggcatctactgggtcagggctctgctgctcggtgnnnnnnnnnnnnnnnnnnnnnnnnnnnnnnnnnnnnnnnnnnnnnnnnnnnnnnnnnnnnnnncgtgtcgatagaccctactactcagggttgatgagaagattaaatgtgcaaaacctgcttgactgtgcccacaaatcctgattgtaggaataaattaatgactttttataaatn

SEQ ID NO: 3081 - DNA, 9234 bp, Homo sapiens; identical to SEQ ID NO: 2481
  SIMILAR (3192)..(3629): 481254mologous to Homo sapiens Human myelin oligodendrocyte glycoprotein gene,accession number AAZ29204,Smith-Waterman Score= 223.

SEQ ID NO: 3082 - DNA, 418 bp, Homo sapiens
  misc_feature (1)...(418): n = a,t,c or g
ccggaattgccgggacgacccacgcgtacgagggcgcaccctggaaggctgccaagcccaaagatgtgcaaagcgctggggactccatactccccacagcagcagagactcgggactgaggcatcctctgttcacaggacatgctggcatctactgggtcaaggctctgctgctcggtgnnnnnnnnnnnnnnnnnnnnnnnnnnnnnnnnnnnnnnnnnnnnnnnnnnnnnnnnnnnnnnncgtgtcgatagaccctactactcagggttgatgagaagattaaatgtgcaaaacctgcttgactgtgcccacaaatcctgattgtaggaataaattaatgactttttataaatattttgatcagatggactcagatgatcacagatgtcttcacatgcctatgactaatttgtaca

SEQ ID NO: 3083 - DNA, 464 bp, Homo sapiens
  SIMILAR (33)..(242): 981254mologous to Homo sapiens ribosomal protein L28,accession number U14969,Smith-Waterman Score=360.
ggcaggtcgccgctgcgaagggagccgccgccatgtctgcgcatctgcaatggatggtcgtgcggaactgctccagtttcctgatcaagaggaataagcagacctacagcactgagcccaataacttgaaggcccgcaattccttccgctacaacggactgattcaccgcaagactgtgggcgtggagccggcagccgacggcaaaggtgtcgtggtggtcattaagcggagatccggtgagttttgtctggtttgggccagagagcggcccctttcccgggtctgggagctgtgattttttactgtcaggtaggaagagcggtaactgccatcgcggcgggcatccctggcgccagggtgttggtctgggtaccggcttccctctcggccgacttgtcagctctgtgagccgcgcgcgtctgagcccgtgtcctcacctgtaaagtggagaaatgaaaaagga

SEQ ID NO: 3084 - DNA, 523 bp, Homo sapiens
  SIMILAR (69)..(272): 971254mologous to Homo sapiens ribosomal protein L28,accession number U14969,Smith-Waterman Score=340.
attgcacacccctaaccccgggtcgacccacgcgtccgcaggtcgccgctgcgaagggagccgccgccatgtctgcgcatctgcaatggatggtcgagcggaactgctccagtttcctgatcaagaggaataagcagacctacagcactgagcccaataacttgaaggcccgcaattccttccgctacaacggactgattcaccgcaagactgtgggcgtggagccggcagccgacggcaaaggtgtcgaggtggtcattaagcggagatccgagtgagcttatctcaggtccttgattggaactgcctcagagccaagggtccttttactcagtggcagcaacaaacgcagtctgttggctagggatcctcctgtctcagggacacgtagtccagggagcagccaattgcttggcacttggggaccccgttctggtgaggcctgaaagctttcacctcttggattgccgaatacatgggtggcccttcctagactaagggactggcctgagtgaggctggct

SEQ ID NO: 3085 - DNA, 930 bp, Homo sapiens
  SIMILAR (42)..(368): 601254mologous to Mus musculus putative,accession number AK012368,Smith-Waterman Score=281.
gcaggattcggcacgaggccgctgcgaagggagccgccgccatgtctgcgcatctgcaatggatggtcgtgcggaactgctccagtttcctgatcaagaggaataagcagacctacagcactgagcccaataacttgaaggcccgcaattccttccgctacaacggactgatttcacccgcaagactgtggggcgtggagccggccagcggacggcaaaggtgtcgttggtggtcatttaagcggagatccggccagcgggaagcctgcccacctcctatttgcggaccaccatcaacaagaatgctcgcgccacgctcagcagcatcagacacatgatccgcaaagaacaagtaccgccccgaccttgcgcatggacatgctggcatctaactgggtcaagggctctggttgctccggtggctgtgcaacctttgggcaagttcctcgaacctctctgtgtcttcgtaccctcatctgtaacatgcgtgtcgatagaccctactactcagggttgatgagaagattaaatgtgcaaaacctgcttgactgtgcccacaaatcctgattgtaggaataaattaatgactttttataaatattttgatcagatggactcaggatgatcacagatgtcttcacatgcctatgactaatttgtacacaaactaatgctcgtgtttcccaagcacctggaagaccatgccagatccatgtgcagtaatgcctggtggctccaggtctgccccgccgtcctgtggggctgtgagctttcccagcctcctgcccgtgtttgtgaatatcattctgtcctcagctgcatttccagcccaggctgtttggcgctgcccaggaatggtatcaattcccctgtttctcttgtagccagttactagaataaaatcatctactttaaaatctttcaaaaaaa

SEQ ID NO: 3086 - DNA, 562 bp, Homo sapiens
  SIMILAR (54)..(512): 401254mologous to Homo sapiens Human secreted protein, SEQ ID NO: 8093,accession number AAG04012,Smith-Waterman Score=163.
ggtcgccgctgcgaaagggagccgccgccaatgtctgcggcatctgcaatggatgggtcgtgcggaactgctccagtttcctgatcaagaggaataagcaagaccctacagcactgagccccaataacttgaaggcccagcaattccttccgcttacaacgggactgattcaccgcaaagactgtgggacgtggagccggtcagccgacggcaaaaggtgtcgtggtgggtcattaaggcggagatccgggccagcggaagcttgccacctcctatgttgccggaccaccatcaacaaggaatgctcgcagccacgcttcaggcaggcatcaggacacattgatcccgcaaggaacaagttaccgcccccgacctgccgcatgggcagcccattccgcagggcccagcggccattcctggcgcaggcaggaaggcttgttgattggttgaaggagggaaggcgggacccggccccaccaagaagctccttgaagccccttggcccccagaagcaattaaagtcagctggggttttctcaaaaaaaaaaaaaaaaagtcgacg

SEQ ID NO: 3087 - DNA, 139 bp, Homo sapiens
gatagacgggcgggtgacccgtggccccgtacccacgagtttgggtcccctgaggcatctctccaggcctctgcctggcgagatggaaagaaagtatcaaggagtgagctgaagccactgcccttgagaaccctctcga

SEQ ID NO: 3088 - DNA, 602 bp, Homo sapiens
  SIMILAR (78)..(140): 691254mologous to Homo sapiens FRG1,accession number AF146191,Smith-Waterman Score=76.
gttggaatctggtgaccagtaacaaactttggtgtaatttcaggaaccaaagccattgaaatggattaagggacccttatatacacgcactcaccaatggtcttttaaccgtggaagctccacacaaagaagaatcgccctgaaacctggctatggaaaataccttagtataaattcagatgaacttgttgttggcgttcagatgcaattggaccaagagaacaatgggaaccagtctttcaaaatgatggccatccagtaatgagaatgaacagtctccaactaaaggcaacaatatagatgaatctcggaaacatgatattgaccagacagaaaagattccacttacataaacttcaaaagaagataaaactgatctatgacattaatagtcagaatattcattatccttgagggaactaaactgggaagccacatgatagggcatctggaagctagtaatgtcctctttcttgatctgttacattggtgtgtttatttcattagatttattgagctatacatttaccaccgtgtacttgtctctgtatatgttttgcattgaaataaattttaccaataaaatgataaagcaaaataaa

SEQ ID NO: 3089 - DNA, 1001 bp, Homo sapiens
  SIMILAR (550)..(89): 921254mologous to Homo sapiens FRG1,accession number AF146191,Smith-Waterman Score=725.
tttaactctgtaaaagcatttcctctgaatattttattcagaaaaaaaaaacacaaaaagataaggcagaaacaaaaatccccagtcacttgcagtatctggtcggcttccaatttgggccctcctgtccagaaagcgtctcatgcaaaaatccatctttccgagcctttttaagaattttactgtcttctttacttattttaagtttgtggtcttggaagctctgaaatttctttacataattgatttcacattgttttacatttcctttgtcttcttctggaatgtcatcttttttcttggtttctctttcagcacaggatctaatcttgatcatttcttcttctcctgctgttttactttttgcttctatgtcccctgcttcattgcatctaataaagcagctatttgaggccaacaaagccattttcccattttgaaagactggttcgcattgttctcttggtccaattgcatctgaacgcccaacaacaagtccatctgaatttataccaagatattttccatagccagatttcagggcgattcttctttgtgtggagctcccagggtaaaaagaccattgtcgagtgcatgtatataggttcccttcctcccattccaaatggctatgggtccctgaaatttcaccaaagttttgttactgttcaccagattccaacgtatcaagctgggtttcttcatcttctctttttctcttcttatctgtgctctttttcttcttactcggttcccttgagcacgagcttgctagacttcacataagagtactaggccatggctccgggagacttctgcgcggacaggctgaagccggctcaggacgagtatgtgacctggagcagcaccagggcagggaggaacagaagtggaggcgaagtaaacactccctgacagcctacgtctgtccagaacccgcctccgtcttcacccaaacggtgaatgcccgagatttcccggagcgcgtgggtcgacacggg

SEQ ID NO: 3090 - DNA, 754 bp, Homo sapiens
  SIMILAR (418)..(747): 911254mologous to Homo sapiens FRG1,accession number AF146191,Smith-Waterman Score=520.
cggcacgaggcttatgtgaagtctaccaagcttgtgcataagggaaccaaggcgaagagatttgcctgaggttgactatacatacaaatattgagcatttcctcctggtctccgtgataaacaaaggttttgatattgttcggcgagatggaaagaaaatatcaaggagtgagctgaagccactgcccttgagaaccctctcgaggagtctggcctcatgaagatgccagaataaacggcagtaagaagaaaaagagcaaagagaagaagagaaaaagagaagaagatgaagaaacccagtttgatatgttggaatctggtgaacagtaacaaactttgatgaaatttcaggaaccatagccattgaaatggatgagggaacctatatacatgcactcgacaatggtctttttaccctgggagctccacacaaagaaggggaaaatggctttgttggcctcaaatggctgctttattagatgcaatgaagcaggggacatagaagcaaaaagtaaaacagcaggagaagaagaaatgatcaagattagatcctgtgctgaaagagaaaccaagaaaaaagatgacattccagaagaagacataggaaatgtcaaacaatgtgaaatcaattatgtaaagaaatttcagagcttccaagagcacaaacttaaaataagtaaagaagacagtaaaattcttaaaaaggctcagaaagatggatttttgcatgagacgcttctggacagaggaccaa

SEQ ID NO: 3091 - DNA, 919 bp, Homo sapiens
  SIMILAR (269)..(511): 951254mologous to Homo sapiens FRG1,accession number AF146191,Smith-Waterman Score=415.
gggtcgacccacgcgtccgctcgtcctgagccggcttcagcctctccgcgcagaagtctcccggagccgacttctgagagtcgagtactcctatgtgaagactaccaagctcgtgttcaagggaaccaaggcgaagagagctaagaagtgacagaatcaggatttaaaatctggaagtgtggctctacaatctgctttgaactttaacataatatgtacaaagcctgaagcaaattctcagcgctgtatttaagagagcatagcaattaagaagaaaaagaacaaagataagaaaagaaaaagagaagaagatgaagaaacccagcttgatattgttggaatctggtggacagtaacaaactttggtgaaatttcaggaaccatagccattgaaatggataagggaacctatatacatgcactcgacaatggtctttttaccctgggagctccacacaaagaagttgatgagggccctagtcctccagagcagtttacggcctgtcaaattatctgattccagaatcgccctgaagtctggctatggaaaatatcttggtataaattcagatggacttgttgttgggcgttcagatgcaattggaccaagagaacaatgggaaccagtctttaaaattggggaaaatggctttgtcgacctcaaatagctgctttattaggatacagtgaagcagaggacatagaagcaaaaagtaaaacagcaggagaagaagaaatgatccaaggctctccttaatcttctgttcagccctttcaccttttatggacctttgcctttattcttacccaggaacacagatccctcttactaaagattagatcctgtgctgaaagagaaaccaagaaaaaagatgacattccagaagaagacaaaggaaatataaaacaatgtgaaatc

SEQ ID NO: 3092 - DNA, 336 bp, Homo sapiens; identical to SEQ ID NO: 186

SEQ ID NO: 3093 - DNA, 1631 bp, Homo sapiens
  SIMILAR (1067)..(1132): 861254mologous to Homo sapiens FRG1,accession number AF146191,Smith-Waterman Score=92.
tcagcccgcagctctagcgggaggcggttccacagcgagcccggcagtcccgccaccgtcagcaccggcgccttgggcgagctttccccacttctgggaggcacaaatcctcaggggctcctcgagaggaaacgagggagcagatgcgtgcggacacctttcggccctctgcggccgcggtagctccgctgtcagcggagtgtttacttcgccttctacttctgttcctccccgccctggtgctgctccaggtcacatactcttcctgagccggcttcagcctctccgcgcagaagtctcccggagccatggcctagtattcttatgtgaagtctaccaagcttgtgctcaagggaaccgatggtgaagagctgggtcctgcagctccggtgggagcctcctcggttcttttcggatgcactccacccccgcgaaatccggtggaagccgtgatgcggagagccggcttcgtggccttcccaggtttcgcggcctcccaggtttcgccctgaccctgtctgggctggacggaggctggaccgcggttcctgggcgcctgtgcagagaggggcagcctcctgcgcgggacgaccctgggaaacaggattagacgggcgggtgacccgttgaccccgtaacccacgaattttggggttcctttgaaggcatctctccaggcctctgcctgatttgcctgaggttgactgtacatgcaaatattgagcatttcctcctggcctccgtgataaacagaagttttgatattgttaggcgagatggaaagaaagtatcaaggagtgagctgaagccactgcccttgagaaccctctcgaggagtctcggcctcatgaagatgccagaataaatggcagtaagaagaaaaagagcaaagataagaagagaaaaagagaagaagatgaagaaacccagtttgatatgttggaatctggtggacagtaataaactttggtggaatttcaggaaccatagccattgaaatggatgagggaacctatatacatgcactcgacaatggtctttttaccctgggagctccacacaaagaagaatcgccctgaaacctggctatggaaaatatcttagtataaattcagatgaacttgttgttggcgttcaaaagccattggaccaagagaacaatgggaaccagtctttcaaaatggtgcctgtgcagcaggattcactgtgataggaagtgagaagcagtctgagtgttcattgctgagggaatcaagggcaaaatatcatggatgcactcatggacaaataagcagcagtttgaagcaacaccctagatggatgtacagccatcaagaggatcttaaagtgtggtctttagtggaaaaaaaggttacatttgaacatatttatctgctaaagcgaaataattcccatcattctatagcagaagcaatgtatgggagactgagtaattacatatgagctcacatcactatctcttccgccactgtcatccatcatgactgatctgggagatgaaacagcacagatctaaaggacgtggtaagaatcgagatcaccagagatcagtagatacttgcatacttggaggattaacactgtctggattccaacgatcagctgagtat

SEQ ID NO: 3094 - DNA, 1120 bp, Homo sapiens
  SIMILAR (897)..(1079): 541254mologous to Homo sapiens Human myelin oligodendrocyte glycoprotein gene,accession number AAZ29204,Smith-Waterman Score= 154.
  misc_feature (1)...(1120): n = a,t,c or g
ttccccctaaagatctatttaaaganaaccctttccctaaaantttttacctaaatattgggcaaaanccgtatcattcaaagattaaatctgggttatttcctttgaataagaactgaatgtggccgggcgcaagtngtcacgcctgtaatccccagctactcgggaggctgaggcaggagaattgcttaaacctgggaggtggaggctgcagtgagccaagtatcgtgccactgcactccagcctgagtgacagagcaagactccgtcaaaaaaaaaaaaaaaaaaaaaagaaatgatatctggccccccctttaacactggagccccactcccttctcccatccgggcccgagattagggaggattgactgtgtcagggatggcgggtggcctctctcgctgccagggcccttgtcagagcagccaggcttgacagacggcctccctcctctccaatctgaccggcacctgctgctttcgggcttaaggccaacgctcccctgtcccccagaggagataagccccagatggactggaatgttgtgggcaatgagagcgcatgttgtgcgattggccccgctgttggtcccctctctgtccctccatcttgtatgtgttctgtgtcccttgcatgtgtgcggtgttagagtgaagcgcgtatgcatcaactcattgggctcttggctgctcacaaggcaaatttgactttggaaagactttcatctccttggaaccaagacttcctgagtccccctcaccctgggccctgttccaccatggttatctggggaattggggaatggaaacttttggggggagtgactttttgaaaagagacacttataaatttgctaataantgcaatccagtgttaagggggggccagatatcatttctttttctttttttttttttttgacggagcttgctctgtcactcaggctggagtgcagtggccgatacttggctcactgcagcctccacctcccaggtttaagcaattctcctgcctcagcctcccgagtagctggggattacaggcgtgacnacttgcgcccggccacattcagttcttattcaaaggaaataacccagatttaatctttgaatgatacgg

SEQ ID NO: 3095 - DNA, 2218 bp, Homo sapiens
  SIMILAR (549)..(1388): 421254mologous to Homo sapiens transmembrane protein BRI,accession number AF246221,Smith-Waterman Score=426.
atgctaaatattagtgtctcctcctacaatccttgttgtcaaaagaatggctatgacaacatcaatgcctttatgccatttgcctggaagttcaaagccttcctggatgaagcccaaaaaataaagggactcgtcatcgagtactttgagtcacaaatcagccaagtgtgcatgtggtttttttccaagtacgcacaagagtggaacatttcgttttacgagtgtgagatgtttgaaatacaaatctgccaagagcttcctccacattgggtacagggaagcggcggtctggtgctgccaaaggttagtcccttgtacccggcgaactcaggaaagttcactcgatttcgctacaaacctgcagcactcggcctggagccgcctctgccgccgcggagcttcccgaacctcttcagccgcccggagccgctcccggagcccggccgtagaaggctgcaatcgcagcccgggagccccgcagcccgcgccccgagcccgccgccgcccttcgaggggcgccccaggccgcgccatggtgaaggtggcggttcaactccgctctggcccagaaggaggccaagaaggacgagcccaagagcggcgaggaggcgctcatcatcccccccgacgccgtcgcggttggactgcaaggacccagatgatgtggtaccagttggccaaagaagagcctggtgttggtgcatgtgctttggactagcattttatgcttgcaggtgttattctaaggaggagcatacttgtacaaatattttgcacttcaaccagatgacgtgtactactgtggaataaagtacatcaaggaatgatgtcatcttaaatgaagcccttctgcagatgccccagctgcttctctaccagacaattgaagaaaatattaaaatctttgaagaaagaagaagtttgaattttatcagtgtgcctgttccagagttttgcagatagtgatcctgccaaaattgttcaagactttaaccaggaaacttaccggccctatttagattttaacctgggataagtgttatgtgatcccttttgaacacttccatgtgttatgccaccccgaaaaccttactggagttacttattaacatgaaaggctgggaacctatttgccctcagcccctatctggattccatgaggcacatgggttatttactggatcgcattggaaaacattgatcacccgggtttcctttatttatcgactgtgtcatgacaaggaaacttacaaacttgcaacgcagagaaactattaaaggtattcagaaacgtgaagccagcaattgtttcgcaattcggcattttcgaaaacaaatttgccgtggaaacctttaatttgttcttgaacagtcaagaaaaacattattgaggaaaattaatatcacagcataaccccaccctttacaatttggtgcaggtgattaattttttaaaggcttctttcatgtaagtagcaaatcagggctttactatcttttcatctcattaattcaattaaaaccattaccttaaaatttttttctttcgaagtgtggtgtcttttatatttgaattagtaactgtatgaagtcatagataataggtacatgtcaccttaggtagtaggaagaattacaatttactttaaatccatttatctggatttttatgttttattagcattttcaagaagacggattatctagagaataatcatatatatgcatacgtaaaaatggaccacagtgacttatttgtagttggtaggtgccccggctacctagtttgttagtgcaattgaggcccccattttaattttcctctaattaaaatgtgcagtattttcagtgtcaaatatatttaactatttagagaatgatttccacctttatgttttaatatcctaggcatctgctgtaataatattttagaaaatgtttggaatttaagaaataacttgtgttacctaatttgtataacccatatctgtgcaatggaatataaatatcacaaagttgtttaactagactgcgtgttgtttttcccgtataataaaaccaaagaatagtttggttcttcaaatcttaagagaatccacataaaagaagaaactattttttaaaaattcacttctatatatacaatgagtaaaatcacaagattttttctttaaataaaaataagtcattttaataactaaaaaaaaaaaaaaaaaaa

SEQ ID NO: 3096 - DNA, 1675 bp, Homo sapiens
  SIMILAR (180)..(443): 851254mologous to Rattus norvegicus vesicle associated membrane protein 2B,accession number AJ133104,Smith-Waterman Score= 367.
gggtcgacccggatcgcatctgtgaggtcgccctcagttgacaggcggggaaactgaggccgggggggctcgactcaaggtcacgcagctcatcggcggcagggctggaccgagaccagggcctacatcgggtggccttcctcccgaaaaggaggactggagggacgaggatggacaggtctgctaccgctgccacggccccccctgctgccccggctggggagggtggtccccctgcaccccctccaaacctcaccagtaacaggagactgcagcagacacaggcccaggtggatgatgtggtggacatcatgagggtgaacgtggacaaggtcttggagcgagaccagaagcagtcggagctggacgaccggtgccagatgcactccaggcgggggcctcccagttttgaaacaagcgcagccaagctcaagcgcaaatacttggtggaaaaacctcaagattgatgatcatcttgggagtgatttgcgccatcatcctcatcatcatcatagtttactttcagcacttaaatccccgaggagtctgccctgcctagagaagggcctctcccccaacccttcagccgttcctccacctctcagccatatctttcagcccccctcttcccctgggatccgtgtgtgtgtgtgtccgtgtgtgtgtccccctgttaaatagccagctgttatttatacatatataatattatatatatttggtctgtttgttagttttattactagaggaatttttccggttgtccttaacaccccttcctgaggttcccttcacccctctctcttgccttccttccctttccctttcttcctgactagccccaagtcccttcatttgcatctgctatgcaataagtccctctcctttccttcttcttccctcaagatttaagctgatccttcctcccaccctgggccttcctttcctctttcctccccactccccagctggctgacaccctctcttggactcagtttttccatctacaaagcaaggggctagacaggtaggttctgaggtcccttccgctccatggtatggccttgaagccacagaccctaatcctctgagcctctgagaccgcaagctctcaaataatggggtggttggcttcctggtcatgtctcaagcccctggtcctttcctttctcccactcctcaattccagggttctcagactgggctcttaggcctaaagggtcctcaatggatacaccagctttcctatttccaaatgttaacaagactgccaagaactaggcaaaatgcaggctaaataacatcaaagtttttggctctagatgaatcagaattgccattaagcagcaatatgtgtttttggctgaagagtaaaaactagattaatgaccttcaaaacctagaatccactggggaaacctctccagggaaagggccccggccattctcaccctactcacctatgatgatgatgaggatgatggcgcaaatcactcccaagatgatcatcatcttgaggtttttccaccagtatttgcgcttgagcttggctgcgcttgtttcaaactgggaggcccccgcctggagtgcatctgcacggtcgtccagctccgacagcttctggtctcgctccaggaccttgtccaccgttcaccctcatgatgtccaccacctc

SEQ ID NO: 3097 - DNA, 912 bp, Homo sapiens
  SIMILAR (228)..(728): 701254mologous to Homo sapiens HSPC018,accession number AF077204,Smith-Waterman Score=553.
  misc_feature (1)...(912): n = a,t,c or g
tgtctgcctcttgaaaatgcccaagtaacaaaacattgctaataccccaatgcggttttaatggttaaggaaggcctatctgaagaagtaattgttgcaatcatatctaaagtgctgggattacaggtatgagccaccgcaccgggcctgttctatttttctagttaagggaactgaagctcagagaggtgtcaccagcaggtgttcattcccatgccagccttgccccccggcttcttcccaggcaggctcctgcgtgcccactggctccagcctggtcctctggtctcttggctgcttcactcctgctctttgtcccgactctggccctgcttacaggggccactacctgctggtgcctccataacaagcgtctggccgttgaagacccctggcatgggcaggggcctttgggggtctggtttccacaaggcttatccatggcagaaccctcgttttattttaactctttgccccctacaaacaaacagcagtacttgcccagaacccattcttgggattcaggaggtcggggcgacctgccttggcctctggccgcacccaggagggtggggttggatctgtgtagttgccaggcccacacctgccagcagggggctgactggatccatgctttactgtgtttaatgggggtaacaggggtccctacagccctcccagctaaacatttggaacaaaacaccagcccttttgtagtggatgcagaataaaattgttaatccaatcacctccnnnnnnnnnnnnnnnnnnnnnnnnnnnnnnnnnnnnnnnnnnnnnnnnnnnnnnnntgannnnnnnnnnnacnnnnnnnnnncnnnnnnnnnnnnnggggggggataatttttttgtggggcgccggcccttttaaaaaagctgaaggggaaaaacccc

SEQ ID NO: 3098 - DNA, 1275 bp, Homo sapiens
  SIMILAR (751)..(1269): 941254mologous to unidentified bacterium transposase,accession number Z78058,Smith-Waterman Score=825.
atggcgcgatctcggctcactgtaacctccgcctcccgggttcaagcgattctcctgactcagcctcaaatctcatccaaatgtcacttcttagagttttgcttctggaaatggttctcacactcagaacaactagaaagcctagtgaaatataactatatccatttagaggcatcagagagatacccaatcagtgaggaaaacagggctgccaatatgctgtcttcacgggacgtgataatggatcattcttggcatttcccactcattagatggattaatttaggggcattttctgtccttggtataatcattgagaagggaatgagaatagctgctgcattggatgaattacagcacagggtccagaacttagatgtgaaaaaagaaaaggagaaattgaggatggaaagagaggtgaaaagggggttgagattgaatggtaaatttaattctctcgtgttaaacgacggtgtaaccgaggttgaccctagtgaagaaccacaagagaacactggcataacaccatatcacgatggtcccgtgaagacatggaccagagaaggtggagccgcggatatgttagacatagcggagtttcgtcgtggcgccaataacaagagacgctcagacccaggactcagtcctgccacccctgtgacttgggcaagcaccatctgtcaagtccaggttgggccaggctgtctaagagaaggagaagctaaccgaccagcagagacggtgaaagggctggcccgatttgcgcaaccgccagacgagatacgcattgctgacggggaattcgtttggcgtccgaaatgtatccgctcacttgcttttggagaagctgattatatcgtcggggttcactggcgaggattgcgctggttaactgcagaaggaatgcgctttgacatgatgggttttctgcgcgggctggattgcggtaagaacggtgaaaccactgtaatgataggcaattcaggtaataaaaaagccggagctccctttccggcacgtctcattgccgtatcacttcctcccgaaaaagcattaatcagtaaaacccgactgctcagcgagaatcgtcgaaaaggacgagtagttcaggcggaaacgctggaagcagcgggccatgtgctattgctaacatcattaccggaagatgaatattcagcagagcaagtggctgattgttaccgtctgcgatggcaatttgaactggcttttaagcggctcaaaagtttgctgcacctggatgctttgcgactatag

SEQ ID NO: 3099 - DNA, 1611 bp, Homo sapiens
  SIMILAR (197)..(436): 731254mologous to Homo sapiens Human secreted protein, SEQ ID NO: 6953,accession number AAG02872,Smith-Waterman Score=298.
aaagaggtttaattgactcacaattttgcaggctttataggaaacatggcgctgacgtctgttcaccctctcgggaaacctgaggaaggttatatttgatggtgggaggtgaagggcatgtcacatggccagaagaacaaacaagagggaggtgccattcactttcgtgcgtgcgtgtgcgtgatggagtctcactctgtcacccaggctagagtgcagtggcgcgatctcggctcactgcaacctccgcctccagggttcaagcaattctcctgactcagcctctcgagtagctggtactaccagtacccgccacgaagcccagctaatttttgtatttttggcagaaacagggtttcaccatgttggccaggctgctcttgaactcctgacctcaagtgatccgcccacctcagcctcccaaagtgcagatatgctttacaaatgaaatgagggtggcagaagcttcaccagagttcagtcactacttgagagtttatattggaaagaaatcgtataaatgtatgtgctagaggcttccccgaggtgtctgaactcactagacctcagaatatacatctttgacaaatgtaatgtgtgtgctaagactttttacccgaacatccaaatggaaacatcagagtattcatactggagaacagtcttacaaatgtaacgaatgtggtaagcctttttaaaaatcaaatgggctgggtatggtggctcacacctgtaatcccagcactttgggaggccgaggtgggtggatcacctaagagcccttatattttggattcttacgagctaacccgggcttccaccctgactctcatcactaccacacccatgtgtctttcctctctccgtctccctgagacgccagtgaaccacctgggcttggaatccagagccccggaacaccttgcagtacttgcccgaagcaacgcgccaacagcgggagggagacgcagacgcgaagaccggcgagaggatgtgcgctctcgcgcccgacgaggtggatttggctgtccaccgagctccggcgcctgtcgttctaattgggtttggatttgcaccgttaaggaggggggaagagaaggaagaggcgggcgaggaaggcgagtccagctagcggctgttgcggggaccgtagccccagctgcagctccgaagaatcccccgccacggtttcggtggagcgtctgggcacgggatggagtgaaagagcgagtgcctctccaagcgggggtgggagggggtcaggctgtgcagaggagagagacagcgagaagaagccgcggctggctactgcgaatttgggattcgattgggagggaccgctcactcgggggaaatggattctttaccacggctgaccagcgttttgactttgctgttctctggcttgtggcatttaggattaacagcgacaaacttggctcatctctgaatgcagtgcctcggatttgcagtataccaagcaccccacgatacgtggctctgcgttctgccctaggcagaaggctccagttggggtatcttgcaaccaatgggcaccggtttaacaggattgggagttttggcctaagagtcatggaccaatgttgttaa

SEQ ID NO: 3100 - DNA, 1128 bp, Homo sapiens
  SIMILAR (269)..(352): 921254mologous to Homo sapiens G protein gamma-4 subunit,accession number U31382,Smith-Waterman Score=124.
ccgctatcggtacggaatttccgggtcgacgatttcgttgccgatcgggctggccgccccccgcgagcaccgcgctgcagacgaagcccgcgcgtgatcccggtgccgggggacctcaaagcagaagctctgaattcacctctcatctgacgactgacagctgctgccaccgccagcctctgtcccttgcccaggcctgtcacacggctgcctctcagcaggggcagtaaaatgaaagagggcatgtctaataacagcaccactaggcatctccaagcccaggaaagctgtggagcagctaaagatggaagcctgtatggacagggtcaaggtctcccaggcagctgcggaccctcctggcctactgtgaagctcacgtgcgggaagatcctctcatcattccagtgcctgcatcagaaaacccctttcgcgagaagaagttcttttgtaccattctctaactccgtgtgtgatgaaaacgcctccttttctgaccttcaaagtcccctgtagagaccatgcatgctctaagccttagggagtgagaccaacacccatccctgcccagccaacagtggccggggcttgtcttatgtttccatctgttttcttcgtggcattcaatttcatttttttccttttcattttcatgttattttcattattggcaaagaaaatcaaaatgtttatagccaaataacaaatgtgccatgtaaaagtaagtctggacttaagagtttaaaatttttaaacatcagtttccaagtttatatcatattaatacatttcagtggataatttatttaaaaaaaaaaactatgcctaaatatcccttatttgtaatattcagtatcaaattagagcattttgaccaactgaaacatattaccgttttcatctcctttccctggagaaaagcaactgcaaaaggttctggattttcctgcatttccatcatccctaggaaaaagacaccaccccacaggattgggaatgggttttcttttgtttttttgttgttgttgttgttttgaggtgggagtctcgctctgttcacccggggtgggagtgccatgggcgtggacctcaggctcactggcggacctccacctcccgggggtttcaggc

SEQ ID NO: 3101 - DNA, 447 bp, Homo sapiens
  SIMILAR (160)..(447): 971254mologous to Homo sapiens Thy-1 glycoprotein,accession number AF261093,Smith-Waterman Score=481.
tttccagtgtgctggaattcggaggctgcagcagcggaagaccccagtccagatccaggactgagatcccagaaccatgaacctggccatcagcatcgctctcctgctaacaggtgggtgggaggcccctgtgccgcaagcccctccagtttgaaggaggcactgctggtgccagtcttgcaggtctcccgagggcagaaggtgaccagcctaacggcctgcctagtggaccagagccttcgtctggactgccgccatgagaataccagcagttcacccatccagtacgagttcagcctgacccgtgagacaaagaagcacgtgctctttggcactgtgggggtgcctgagcacacataccgctcccgaaccaacttcaccagcaaatacaacatgaaggtcctctacttatccgccttcactagcaaggacgagggcacctacacg

SEQ ID NO: 3102 - DNA, 1941 bp, Homo sapiens
  SIMILAR (1)..(774): 991254mologous to Homo sapiens ubiquitin specific protease 2,accession number BC002854,Smith-Waterman Score=1345.
  misc_feature (1)...(1941): n = a,t,c or g
atgtcccagctctcctccaccctgaagcgctacacagaatcggcccgctacacagatgcccactatgccaagtcgggctatggtgcctacaccccatcctcctatggggccaatctggctgcctccttactggagaaggagaaacttggtttcaagccggtccccaccagcagcttcctcacccgtccccgtacctatggcccctcctccctcctggactatgaccggggccgccccctgctgagacccgacatcactgggggtggtaagcgggcagagagccagacccggggtactgagcggcctttaggcagtggcctcagcgggggcagcggattcccttatggagtgaccaacaactgcctcagctacctgcccatcaatgcctatgaccagggggtgaccctaacccagaagctggacagccaatcagacctggcccgggatttctccagcctccggacctcagatagctaccggatagaccccaggaacctgggccgcagccccatgctggcccggacgcgcaaggagctctgcaccctgcagnngctctaccagacagccagctgccctgaatacctggtcgactacctggagaactatggtcgcaagggcagtgcatctcaggtgccctcccaggcccctccctcacgagtccctgaaatcatcagcccaacctaccgacccattggccgctacacgctgtgggagacgggaaagggtcaggcccctgggcccagccgctccagctccccgggaagagacggcatgcaactcttggcctgtgtgagcctgggtgagaggtctgtcctccctctggccttggtgtcatcctctgagaaacgggctgatgtctgctctgcctgcatcgcaggcctcggcttttccatctgcacactggagatgataacagtacctgtcttagaggatggaacttggctgtgtgcccctaccgccctcaccatcagacaaattcatgtcagtgtcagcattgacgatattctcccaagagggaaagtctttagagaagatgtcatcatcatttacaaggcaaaacatagaggggaggtgagcagcccctaccactacctccagctcagtcccattctaaaggcagccagtgtccactctgcccagaatgtcgtggacaccttactttctgagctccaaaccggcactgatccccgaatcctccctcccggatccccgacaggtggcacgtacctgcctcttcttggaggatggacgagtcgaaccgggcacaagcatggagctgcggtgcacaaaaacactctccacaccaagctgctgctgctgggggatggagggatggcgtcagcgattcaagactgtttttcctacctgttcagcacttctttcagcgatatgaagttaaatccagatccaggactgagatcccagaaccatgaacctggccatcagcatcgctctcctgctaacagtttgaaggaggcactgctggtgccagtcttgcaggtctcccgagggcagaaggtgaccagcctaacggcctgcctagtggaccagagccttcgtctggactgccgccatgagaataccagcagttcacccatccagtacgagttcagcctgacccgtgagacaaagaagcacgtgctctttggcactgtgggggtgcctgagcacacataccgctcccgaaccaacttcaccagcaaatacaacatgaaggtcctctacttatccgccttcactagcaaggacgagggcacctacacgtgtgcactccaccactctggccattccccacccatctcctcccagaacgtcacagtgctcagagacaaactggtcaagtgtgagggcatcagcctgctggctcagaacacctcgtggctgctgctgctcctgctctccctctccctcctccaggccacggatttcatgtccctgtga

SEQ ID NO: 3103 - DNA, 3847 bp, Homo sapiens
  SIMILAR (3753)..(181): 991254mologous to Homo sapiens zinc finger protein,accession number L11672,Smith-Waterman Score=6594.
tttttttttttttttgagacggagtctcgctctgtcgcccaggcttgagtgcagtggcgtgatctcggctcactgcaagctccgcctcccgggttcacgccattctcctgcctcagcctctcgcatagctgggactacaggcgcccgccaccacgcccggctaattttttgtattttttagtagagaaggggtttcactgtgttagccaggatggtctccatctcctgacctcgggatcccgccgcctcggcctcccaaagtgctgggattacaggtgtgatagtatgaattttcttatggttagtaaggattgaagactggttaaaggctttgccacatttttcacatttgtagggtttctctccagtgtgaattatcttatgtttagtaagagctgaggactctttaaaggctttgccacattctccacatttgtagggtttctctccggtgtgcaacctcttatgtctaggtaggggtgaagattggctaaatgctttgccacattcttcacatttgtagggtttctctctagtatgaattctcttatgtccatttagggttgaggatgatataaatgctttgccacattcttcacacttgtaaggtttctctccagtatgaattatcttatgtgtagtaagctttgaggatcgattaaaagctttcccacattcttcacatttgtatggtttctctccagtgtgcatcctcgtatgtctagttagggttgaggattggctaaatgctttgccacattcttcacatttgtagggtttctctccagtatgaattatcttatgttcagtaagagttgaagatttcctaaaagctttgccacattcttcacatttgtagggtttctctccagtatgaattatcttatgtgtagtaagggttgaggattggctaaaagctttgccacattcttcacatttgtagggtttctctccagtgtgcatcctcttatgtgtagtaaggtgtgaaggctggctaaatgctttgccacattcttcacatttgtagggtttctctctggtatgaattctcttatgttcagtaagggttgaggaccagataaatgctttgtcacattcttcactcttggaaggtttctctttagtatgaattatcttatgtgtcgtaagatttgaagattgattaaaagctttgccacattcctcacatttgtagagtttctctccagcatgtattattttatgtttagcaagggctgaggagtgcttaaaagctttgccacattctttacatttgtagggtttctctccagtatgaattgtcttatgcttagtaagggttgaggaacggctaaaagctttgccacattcttcacatttgtagggcttctctccagtgtgtatcctcttatgtctagttagggttgaagaccatataaatgctttgccacattctttacatttgaagggtttctctctagtatgaattcttttatgtttagtaaggcttgaggaccagttaaatgctttgccacattcttcacacttgtaaggtttctctccagtatgaataaacttatgtatagtaagatttgaagatcgattaaaagctttgccacattcttcacatttgtagagtttctctccagcatgtattattttatgtttagtaagggttgagagtcgcttaaaagttttgtcacattctttacatttgtagggtttctcttcagtatgagttatcttatgattagcaagggttgaggaattgctaaaagctttgccacattctttacatttgtagggtttctctccagtatgaattctcttatgtttagcaagggctgaagaatggctaaaagctttgccacattcttcacatttgtagggtttctctccagtgtgtatcctcttatgtcttcttagggttgaggaccatagaaatgctttgccacattcttcacacttgtaagacttctctccagtatgaattatcttatgtgtagaaagacttgaggaatgattaaaagctttgccacattcttcacatttgtagagtttctttccagcatgaattattttatgtgtagtaagggttgagaattgcttaaaagctttgccacattctttacatttgtagggtttctctctactatgaattatcttatgtttattaagggttaaggattgtctaaaagctttgccacattcttcaaatttgtagggtttctctccagtatgaattatcttatgtttagtaagggttgaggattgcctaaaagctttgccacattcttcacatttgtagggcttctctccagtgtgtatcctcttatgtctagttagggttgaagaccatataaatcctttgccacattctttacatttgaagggtttctctctagtatgaaatcttttatgtttagtaaggcttgaggaccagttaaatgctttgccacattcttcacacttgtaaggtttctctccagtatgaataaacttatgtatagtaagatttgaagatcgattaaaagctttgccacattcttcacatttgtagagtttctctccagcatgtattattttatgtttagtaagggttgagagtcgcttaaaagttttgtcacattctttacatttgtagggtttctcttcagtatgagttatcttatgattagcaagggttgaggaattgctaaaagctttgccacattctttacatttgtagggtttctctccagtatgaattctcttatgtttagcaagggctgaagaatggctaaaagctttgccacattcttcacatttgtagggtttctctccagtatgaattctcttatgtttagcaagggttgaagaatggctaaaagctttgccacattcttcacatttgtagggtttctctccagtgtgtatcctcttatgtctagttagggttgaggaccatagaaatgctttgccacattcttcacacttgtagattttctctttagcacagattattttatgtgtagtaagggttgagagctgcttaaaagctttgccacattcttcacatttgtagggtttatcttcagtatgaatttccttatgattagtaagggttgaggaccaatgaaaggttttttcacattctttacatttacaggacttctctgtaatataaacgcatttatgttgggttttgtgtaaacggatgcaaaatgacttgacacattttttacatttgaagcatttctttccggtatgtcttatcgtatgtctgtttgaatttaaaaatttatagaagactttcaaatatttcccacattgaaatactttgctctgggcagttgtgagacactggttaagtttattataaccttctttgtgcaccttacactcatccacacttttacaaccttttcttaactgtaaattctcatgtccacatttttcatattttctcagtaatactttttgaaaagaatcttccatgctctgctctggccaaaagtcttgaggaaaatgaggacatatacctgtgggttcatccaccatctcatgttgcttcatattccagggctcttttccttgctccagataagtaatcaggtctggcttagagagagcaatacccaggaaggccaggtttctgtagttctctaacatcacattcctatataaattctgctgtgcagtgtccagacattgccactcctccggagagaattctatggccacatccctaaatgtcaacagtcccatttctaggcttccaggggttcctggcatcttagctgtggctcttccaatacctgcaggtcacagggccacacaggctgggcctcctggagcagaggacacagagcagtgaagtcgagacctg

SEQ ID NO: 3104 - DNA, 683 bp, Homo sapiens
  SIMILAR (1)..(393): 1001254mologous to Homo sapiens ornithine decarboxylase antizyme 2,accession number AF057297,Smith-Waterman Score=685.
aaggacgagaagctcactgtgacccaggacctccctgtgaatgatggaaaacctcacatcgtccacttccagtatgaggtcaccgaggtgaaggtctcttcttgggatgcagtcctgtccagccagagcctgtttgtagaaatcccagatggattattagctgatgggagcaaagaaggattgttagcactgctagagtttgctgaagagaagatgaaagtgaactatgtcttcatctgcttcaggaagggccgagaagacagagctccactcctgaagaccttcagcttcttgggctttgagattgtacgtccaggccatccctgtgtcccctctcggccagatgtgatgttcatggtttatcccctggaccagaacttgtccgatgaggactaatagtcatagaggatgctttacccaagagccacagtgggggaagaggggaagttaggcagccctgggacttctgcggggcctgagcaagccatggagtgagacccaggagccggacacttctcaggaaatggcttttcccaacccccagcccccacccggtggttcttcctgttctgtgactgtgtatagtgccaccacagcttatggcatctcattgaggacaaagaaaactgcacaataaaaccaagcctctggaaaaaaaaaaaaaaaaaaaaaaaaaaaaaaaa

SEQ ID NO: 3105 - DNA, 2493 bp, Homo sapiens
  SIMILAR (592)..(789): 831254mologous to Homo sapiens Human secreted protein, SEQ ID NO: 4247,accession number AAG00166,Smith-Waterman Score=272.
cggcgatgagaccgttggacactgataacctcccttggcccgaggagaacaggtcagaagaaagggttaaagccttaaaaggggaacttccattgcggggctcagggaggaggataatggtctttgggctgccggaccctgatccccggggtcccgaacccttccgtccctggccagggctgccaaccacagggggagggcccccttccgccgcaacctggcactctcacaccaatgcgggaccgccttctcttttttcctcacccagcaccccaccctggcgtgctttctcccccaatctccgactttgattggctgagcccccggctccccgctcccccttttctccattcccggtgaaaactgcgggctccgagctgggtgcagcaaccggaggcggcggcgcgtctggaggaggctgcagcagcggaagaccccagtccagatccaggactgagatcccagaaccatgaacctggccatcagcatcgctctcctgctaacagtcttgcaggtctcccgagggcagaaggtgaccagcctaacggcctgcctagtggaccagagccttcgtctggactgccgccatgagaatacccagcagtttcacccatccagtacgagttcagcctgacccgtgagacaaagaagcacgtgctctttggcactgtgggggtgcctgagcacacataccgctcccgaaccaacttcaccagcaaatacaacatgaaggtcctctacttatccgccttcactaggcaaggacgagggcacctacacgtgtgcactccaccactctggccattccccacccattttcctccccagaacgtcccagtgttcagagaccacggggtcaagttgtgagggcatcagcctgctggcttcagaacgcctcgtggctgttggttgctcctgctctccctctccctcctccagggccacggatttcatgtccctgtgactggtggggcccatgggaggagacaggaagcctcaagttccagtgcagagatcctacttctctgagtcagctgaccccctccccgcaatccctcaaaccttgaggagaaattgggaccccaccccttcatcaggaagttccaagtgctgcatgcgattatctaccccacgtccaacgcggcccgcctcaccctctcccgcacacctctggctgttctttttgtacttttttgttccagagctggcttctgtcctggtttatttaggttttatccttcccttttctttgagagttcgtgaagagggaagcccaggattggggacctgatggagagtgagagcatgtgaggggtaagtgggatggtggggtacccagcccactggaggggtcatccttgcccatcgggaccagaaaccctgggagagacttggatgaggagtggttgggctgtgcatgggccatagcacggacatggtctgtcctgacagcactcctcggcaggcatggctggtgcctgaagaccccagatgtgagggcaccaccaagaatttgtggcctaccttgtgagggagagaactgagcatctccagcattctcagccacaaccagaaaaaaataaaaagggcagccctccttaccactgtggaagtccctcagaggccttggggcatgacccagtgaagatgcaggttttgacccaggaaaagcagccctagttggagggtttgagaaggaggtaaagggatgagggttcatcatccctccctgcctaaggaagctaaaagcattggccctgctggcccctccctgccttccacccaacagtggagacgggctacaaaggaaggacaagaccctctccaggctgtccccaagctcccccaaagagctttccaagagctctgaacccaaccagccttccaaagtcaaggtgggggttggagtccccagagcttgcacaggggttttggcccaaagtttcttaagggaggcaatttccttcccctttcgcccatcagttgccagccccttgctggctggtgcctggagccccttcagacagcccccctgccccgcaggcctgccttctcaaaggacttctgcgggggctgaggcaaagccatgggagtgagaccccaggagccggacacttctcaggaaatggcttttcccaacccccagccccccacccggtggttcttcctgtactgtgactgtggatagggccaccacagcttatggcatctcattgaggacaaagaaaactgcacaataaaaccaagcctctggaatctgtcctcgtgtccacctggccttcgctcctccagcagtgcctgcctgcccccgcttcgctggggtctccacgggtgaggctggggaacgccacctcttcctcttccctgacttctccccaaccacttagtagcaacgctaccccaggggctaatggctgcacactgggcttcttttcagaatgaccctaacgagacacatttgcccaaataaacgaacatcccatgtctgctgac

SEQ ID NO: 3106 - DNA, 580 bp, Homo sapiens
cactgatctactctttaatagaagattgtaaaaggttatacaaggcgtatggaaatcttacttcgtggtcaaactgattaaaattagatttgtttataaggttttattagctttaacattaataatacccctaaaacattaataagagatcaaagatttttgtttaccttttaagtaaactacaggaaaaaaaaaggagagagacagacatttagttggtttcctgctgtcttcattggatcttacagttggggaaactgagtctccttcatatcaatgagtaaaggtctttggtgttttggttttttggttttttggaaatctttgaattatcgttttggctaaatgaataactattttataatgaaccgcgatcctattttgtggcatcaaatgttttaaacttttgatattcgactgatgaacttcccaacatcaagatttcaacttctggccggctacagtggctcatgtctataatcccagcactttgggaggctgagaccaggcaggcagatcatttgagttcaggaatttgagattagtctggacaacatagtgagacctcgtctctacaaaa

SEQ ID NO: 3107 - DNA, 1220 bp, Homo sapiens
  SIMILAR (138)..(1): 971254mologous to Homo sapiens Human secreted protein clone cb123_1 protein sequence SEQ ID NO:100,accession number AAY53047,Smith-Waterman Score=242.
gtgccaggaaacctcacccagtagctgccaggagcccctgcacccctcatgccttgaggctggtgatgggagagggaggggagtaaaggtaataaaggccttgccagagtccagtggcgcctttacagtctctgccatccccctcccccactttggggctgcctgccccaggtatagggatccaccccaccccagctctatggggaggacaaagggagagtcaaagagagaggccaaaagcccatgttgttgggtgtcagacacatgagccagaagggggatgtcatctccctccttagcagttagatatcccaaaaagcaggagtgtgggcagcagacaaccctagctcctgatactgctctacccgagcccactgcaaggcagggggagggtcctctaggcagctgaggcctgtgtttccctgagcatcttttaccctctcatcagagcccatccctggaccttccagaggcctgagtgggggacttgcaagggctgatgggtaacccctcccacctgctgctactccctgccccaaaaagcagcttggctcacaagcctgggcatgcagggcagcacgaggagctgagcagggagtgtgggggtggagaaagcaccccgcaccatccaggggcagagtagacaagggtagcaccaaacagaaggacccctccccagcacacacaacatccaccctcaattaccagatgcactcctgctccctaaaagaagacacacacacacacacacacacacacacacacacacacacacacacacacacacacggcaacataatattcctgggggtcccagccctgaccaggaagaagctggacaggtggtggagaagaaggctgccaatccctcccacaatcccactctgcaagacagaagggtgagcagcattctttcctgctgcaagaggaagttggaagctccatccccagaacagatctcgatggtaggccctagaggaagtaacttgtggttcccccattggcagaggcggcaggaaccagcaaagtgtagttttggcttgaaggagcaatggggaggggacttcagcaggatgaacagacttatgggtccaggggtaaatccatcgacctctttcccgtggagcaggaagttgctccacgggaaagatgtcagatgttggttgagacatcgtgcaaagtgcttgagtgccaggtgcccaaggatctggcgggtctgg

SEQ ID NO: 3108 - DNA, 1807 bp, Homo sapiens
  SIMILAR (1797)..(1669): 461254mologous to Homo sapiens PRO0974,accession number AF113685,Smith-Waterman Score=65.
tttttttttttttttttgagtttataaatatataactatatttattttgaatattaaatagtttttaaattacaagcaatttattgaatcacactatgcatccatatacagtaaaaatcttaccattttagaaaggtacacaatttaaactgaaagttcattgcatattatattgccatgaacctcttctgctctgtgttaaagcacagcagggaggcctgggtgggtgtgacggccccctacgtcctcctctgcagacggaatccgacggtgggatccatacaccagccccatgatcaaaattccggctgggccccacgtagggcctgagtgcttaaccaggcacgtgtccacaccgggtcaaactgattctttcacagggctgttggggtaatttcaacactgttcaatggcatcctttaaggaatttcctttataggtggaaagaggaatggttccttggttaataaagacatgagacaaaccccggtgctctttaggaatattgttttggagatttccatcggaagtcactgcgtatacccattctttttttaagggctacttcccataaggctccatgttttggaagccaactcttaacagaagcccaacctctgggcgtctaaacccttggttcacttctggaattttcaggatgatgggctgagtcaaggaagaggcaggcgctgccttccttccaccggggccctggggacaggcatgcagtaggtccttaactctacaaataccttattttcgggaaacaggaataaaaggaggggtttggaaaggccttttacagcagcaagacaatccaagacttttcttagataaccccttttctatagaaccgcctctaccctgtacattttaaaaatagaacgaacgttgtttgcaattcggcttggtcgagctttctgcacccttacggtgaatggcttctcgtccacacacacaggccaagtctcagaaggatgtggggagcactttttctgggttgccctttctggcttattgacaagggtcattccaaaaagacaaattcgcatcctagctagtaaggaaatgaaaactagattatttttggttatggggtttaaaatggtacaaactcccacccaaaacagggactaattccagattggattcctggggtggctacccccatggaagggccagaaaaatattcctaaccttcccccccacattatcctagagaatgcccactgatttagttcattgtacaacttattagaacaagtacattttgaaaaccccacccactgataaccaacttaattagttaaaaaataacaaaacaaacaacaaaaacctgaactgaacacagcacatgctgacatttcaaaaatgggctgcaatttttattctacttaaatttcctgtgtattgcttggatttcaaaaaaacatgttaacccacgtgttgattataaatataaaatctcgcccctccatgcaacaccacactaagatccactaccccccaactcaatgtataaaatgcttttttggcaattaattatgagtgactcaaaataaataaaaatgggaattatgttatgaaaaaaattgtttttttttttgagacagggtctggctgttacccaggctagagtacagtggcatggtctcagctcactgcaacacccatctcctgggctctagccaatcctcccacctcagcctcccaagcagctgggactacaggtgcacaccactatgtgccccagctagtatatatatatatatatattttgggatttttagtagagacgaggtttcgc

SEQ ID NO: 3109 - DNA, 434 bp, Homo sapiens
  misc_feature (1)...(434): n = a,t,c or g
cacaaactttaaatttataataattatgattcttgcagttttcaagtaatttgttaaatgcctattcaacacagacagatttttattttcagctgtggcttgtaaatgcctacaaactgattcatgttggtggtcgttatgacactttctgtgaattggtgaataaatatgattttagaatttcacnnnnnnnnnnnnnnnnnnnnnggggggggccgttttaaagaacccttggggggcccaaatttacccggggctggcaaggtattatttttttccttatggggggccgattaaaaacctgggcccggcccgtgttttaaaaccgccggaatgggaaaatctgttacttgggaatttttggaaagaacctttcttttgggggggggacatattggcccaacctccctccaaaaattaaaggctttagggaa

SEQ ID NO: 3110 - DNA, 1033 bp, Homo sapiens
  misc_feature (1)...(1033): n = a,t,c or g
ggaggaaagccaccttgacagcccaggtccctccaggtcacccacagccagtttcaggaaggctgcccctctctcccactaagttctggcctgaagggacctgctttcttggcctggcttccacctctccactcctgtgtctacctggccagtggagtggtccatgctaagtctaacactcctgggagctcaggaggcttctgagcttctcctgtactgtgcatcgtgagggccagagacaggaatgtaaggattggcaactgtgttaacctttcaagtttatcttaataacccaggtaatcagggacccattgttctcttcagaaccctatctgggagagaaggcgaaccaccctccgggtttccatcatgtcaaaggtcaacaggcatcccatgtgtgcaaaacccatcctgcccccagctgccctccacagactgctgtctcccttgtccctccctcggccctgccccccacttcaggggctgctgtgagatggaattcccaggaaagaacttcaggtgtctggaccctttctatctagataatatttttagattcttctgctccctagtgacctaccctgggggcaaagaaattgcaaggacttttttttaagggtcagagttttcaaaacaaaagcatctttcccttagaaatttttgtgaattgtttgaacttgtgcctgttttaaattaaattgagtgttcaaagcnnnnnnnnnnnnnggggggcgcccgttttaaagaacccctgggggggcccaaattttacccggggctggcaaggtaaaatttttttccttatggggggccatataaaaacctccctgggaatttttggaaaagaaccttttttttggggggggaacatattggcccaacctccctacagaaatttaagggctctagggaaaataaaaaattttaaaggggtaaagggggtaaaccaacctgcatatcctggcggctggaaagtttgctttccggggttggttttaggaaatttttatccccgggggctggggtttattat

SEQ ID NO: 3111 - DNA, 2196 bp, Homo sapiens
  SIMILAR (2029)..(2178): 981254mologous to Homo sapiens Secreted protein encoded by gene 9 clone HUSGC54,accession number AAY01391,Smith-Waterman Score =248.
gatatttttacatattcatgtaagacaatgtaaattgtctttctgcaataaattttttggatgcaaatttagatttcaaaagctttttgatgttataaaggagttgaggaacaaaaagctctttgaaatagctcacctagacctgttaatgtaatatattctttctgaattaagcaaaattttttttgtcttttaagactagaactaatccctctagcttttttactggaactttggggaaaaagaacaaatacaaatatacaaatgatatgaacaatatggtaataatcttttgcaacttaatatgttacatagtcatatgacttgggtcttgggaagaaaaaggaattgttttggtgctgaataaatattagaaatcaagtgacagagaagatgaaggtaaaattgtggcacagtttcagagaatgccgttaatgataacgtgttatttgtctcaaattcttagccctgggcttgcctcttcagagtggggttaccggcgagagggcaagcatgtaattaagagacactctagaggcatatggaatatagtttgtataaaacatacctgctgattagaaaaatggtaaaaatgaaaatacctttgtacatcatcttaagagagcttatatataaactaaatgggcaggctccatcgtctacctttctttttcttttcttcacatgtttatgtcttttttgttattagtcagacatttttagccctctgtatgctcattcttgtagttctatttctattgaaacttcctccaaaacttttctctgaattacccttgttgaaactgacctttcttccgtgtgaactcctacacttgcatctcctatttcaggatttggcatactttttctttaatgggctaagaaagtaaatatcttcagctttggggggcatatgatcccaatagcatcaacttaactctgctaactggaaggcaaaagtgtatcatcttactcgtctttataaactccacagcactctgcatagatatgaccatgtttataaggaactcaataaataattttgacacaaacatgaaattctagaagggcagacactgacaactagtaaggaagttgatcatgagtaactttgtattcagtgccaccttaacaagaattgtaaagaggataaacctttctaggaaggttgatgcgtgttgggtgaggaaggagcatctctcaggagggtaaacagtagctgtggttttgctgagagattttggctgtgagtgacaagcctatatcaaaaagaaaagtggcttatcaatctcagtttttattgctcaaagcaattctttactcctattttttccaaattccattgtttttactctttagagctcttatccgtcagagtgtagtctgcatatttctttattatcattgccatgtgactttctttggtgacaagttcagcgatatttcaagcatgatgttttgagtttgagaaatgtatttgtgaggacacatcagtttaattaaaaaagtgtgagtactatggtcattaagttattcagagtgagatttctgagaggagaagagagaatgtagatgggcagttattgagagtggggctataggacaaaaagaagaaaagtatgggttaacattgccaaataaagggtcatacagccttgctttttgctgggagttaggcaaaaatcattctccctatggatagttttaggatgttccccccagctccatttgtattattgagttttcagctgggtatatattataataacagtcaacatgatgtaggggctcagtattacatgggcagggctatactaattggcttcaatatgccttatctcattattctgtgagatagaattgtctcctcattttttagttgaaataactgaagtttaaagcaattgaatcatctgcccaaggataagctgctggtgagagcagagttgggatttgaagtcgagttagaccccagtgatcacagtcttgacgattaaattcttccagctttcatttttcactgagataatggtagtgatagtactgacctctaatgtgtgcatttgtgggtatgtgggccattcagctttaatccccagaagacaaggcttattccttttcttatttttggtcatgttttatttttccattgcttttaacaggattaccaaaggcaccactcagtagtcagcaaag

SEQ ID NO: 3112 - DNA, 551 bp, Homo sapiens
  SIMILAR (85)..(147): 951254mologous to Homo sapiens melanoma ubiquitous mutated protein,accession number U20897,Smith-Waterman Score=114.
ttgcgaccgctgcgcgtccttgcccgggcttggggcgccgcgctggggaaagccgggggcccggacacattggcgtgagacctcgggagtacgttgtgccaaatcattgccacttgccacatgagtgtaaatgatggcggatgccaagtatgtcctctgccgatgggaaaagcgattatggcctgcgaaggttttggcccgaaccgcgacttcaacaaaaaataagagaagaaaggaatattttctagctgtgcaaatcctctccctagaggaaaagttaagtgttgtgttgttttaatactgttttttcccgtgtagatttctgatacttcaatcccctactcccccaaaacagttgaagcccagcccactcttaatgggcttattcaccatttgtgtaattcattaatgctcataataacctcatgagaaagcaactagtttgattttatggtcagtttggaagctgaagatccaaacgaggcattctgtgagatctatggagagattggtacaaacactgaatacatgtaaattatactcagggtaga

SEQ ID NO: 3113 - DNA, 1940 bp, Homo sapiens
  SIMILAR (38)..(127): 931254mologous to Homo sapiens melanoma ubiquitous mutated protein,accession number U20897,Smith-Waterman Score=158.
ttgcccgggcttggggcgccgcgctggggaaagccgggggcccggacacattggcgtgagacctgggagtacgttgtgccaaatcattgccacttgccacatgagtgtaaatgatggcggatgccaagtatgtcctctgccgatgggaaaagcgattatggcctgcgaaggttttggcccgaaccgcgacttcaacaaaaaataagagaagaaaggaatattttctagctgtgcaaatcctctccctagaggaaaagaattaaggtgaaaagcactgaagttgagatcctagagaagtctcaaattgaagccattgcttcctcgttagcctcacagaatgaggttcctgcggcgcacccctggaagaactggcctacagacggtcgcttcgcgtggctctggacgttctgagcgagggctcgatttggagtcaagaaagctctgcagggacaggtagagctgaccggtctctgcgagggaagcccatggagcatgtctcctcgccctgtgattcgaactcctcatctcttccccgcggagacgtgttgggcagttccagacctcacaggaggaggccatgtgtgcaacaaagcctgtcaagttcgttcacttgtgaaaaggaccccgagtgcaaagtggaccacaagaaggggctcaggaaaagtgaaaacccaagaggcccgttggtcctcccagctggaggtggtgcccaagatgagagtgggtccagaatccaccacaaaaattggactcttgcaagtaagaggggaagaaactcagcgcagaaggctagcttgtgcctgaatggatcttccctttcagaggacgacacggagagagacatggggagcaaaggaggcagctgggcagccccgtccttgccctccggggtcagggaggacgatccctgtgccaacgctgagggacacgaccccggtctgccgttgggcagcctcactgcgcccccagcccctgagccctcggcctgctcagagcctggagaatgccctgcgaaaaagaggccgcgcctggatggcagccaaaggccgcctgccgtgcagctggagcccatggcagcaggggccgcaccatcccccgggccggggccagggcccagagagtctgtgaccccgcgcagcaccgccaggctgggcccgcctccctcccacgcctctgcggatgcaaccagatgtcttccttgcccggattcccagaagctggagaaagagtgccagtcttccgaagagtccatggggtctaattccatgcgttctatcctggaggaagacgaggaagacgaggagccaccaagagtccttttataccacgaaccacgttcgtttgaagtaggaatgctagtctggcataaacataaaaaataccccttctggccagcagtggtcagaagcgtcaggcagagagataagaaagcaagtgtgctatacatcgaaggacacatgaacccgaaaatgaaaggtttcacagtgtctcttaaaagtttaaagcactttgattgtaaagagaaacagacgcttctgaatcaagccagggaggacttcaaccaggacatcggctggtgtgtctccctcatcaccgactacagggtccggttaggtacgtggggtgctggggaggggtggagctgggcagcaggcgtccagcctctgaagaccccttggacgggctgggccggagctgcctggaggcggggcatatttccgtgggcctggggcattccctgtgggtgggctggggttctggcctggcctgattatttcctaaacagagacgccgggccagcccctggaacacacttcctgggactcctcttaggtctacacagtgctctctcccctccaccccctgcaggctgcgggtcttttgctggctctttcctggaatattacgcggctgatataagtaagtctacaggctgtatt

SEQ ID NO: 3114 - DNA, 6063 bp, Homo sapiens
  SIMILAR (1022)..(1783): 401254mologous to Homo sapiens zinc finger protein,accession number AF246126,Smith-Waterman Score=542.
gcggggagccggcggttatctgggcggcggagcgctcacaatgtggcaggagacagaaaagataagatgctcccaagtcccttgcagctctcttcagaagaaaaatcactagtgctctgctcttgccataataccaaacctttttgactcatgctttggtgctgcaacactggaagaattgcacacagtttccaggaatatctttttttcatttgagtgattctttgtggatgagaaaagatttgagtcttaataattaccttgttttaaagctatttctttatagtctgaactgtttaataaattgggccacttaccaatgagccacacagccagttcttgtcaggagctggttgaaaactgtgctgtgcatgtagcaggaatggcacaagaagatagccgtcgtggtcaagtgccatcttccttttatcatggtgccaaccaagaacttgacctgtccaccaaagtgtacaaaagggaatcaggaagtccttattctgtgttagtggacaccaagatgagcaaaccgcatctccatgaaacagaagaacagccatatttcagggagacaagagcagtgtctgacgtgcatgctgttaaggaagaccgggagaattctgatgacacagaggaggaagaggaagaagtctcttacaaaagggagcagatcatagtggaggtaaaccttaataatcaaacattaaatgtatctaaaggggaaaagggtgtctcttctcagtccaaagagactcctgttcttaagacaagcagtgaggaggaagaggaagagagtgaggaagaggccacagatgacagcaatgactatggagagaatgaaaagcagaagaaaaaggagaagatagtagagaaagtcagcgttacacaaaggagaaccaggagagctgcctctgttgccgcagctaccacttcccctactcccagaactacaagaggtcgtaggaagagtgtagagccacctaagcgtaagaagcgggccacaaaggagcccaaagcaccagtccagaaagctaagtgtgaagagaaagagactctgacctgtgagaagtgccccagggtatttaacactcgctggtacctggagaagcacatgaacgttactcataggcgcatgcagatttgtgataaatgtggcaagaagtttgtcctggaaagtgagctgtcccttcaccagcaaacagactgtgaaaaaaacattcagtgtgtttcctgtaacaaatcgttcaagaaactctggtcccttcatgaacatatcaagatcgtccatggatatgcagaaaagaaattttcctgtgaaatttgtgagaagaaattctataccatggctcatgtgcggaaacacatggttgcacacacaaaagacatgccatttacatgcgaaacctgtggaaaatcattcaaacgcagtatgtcactcaaggtgcactccttgcagcattctggagagaagccctttagatgcgagaactgtgacgaaaggtttcagtacaagtaccagctacgctcccacatgagcattcatattgggcacaaacagttcatgtgccagtggtgtggcaaggatttcaacatgaagcagtacttcgacgaacacatgaaaacacacactggagagaaaccctttatctgtgaaatctgtggcaaaagcttcaccagccgccccaacatgaagagacaccgcagaactcacacaggcgagaagccctatccatgtgatgtgtgtggccagcggttccgcttctcgaacatgcttaaggcccacaaggagaagtgctttcgggtgaccagccccgtgaatgtgccacctgctgtccagatcccacttacaacttccccagccaccccagttccttctgtggtgaacacagccacaaccccaacccctccaatcaatatgaatcctgtaagcactcttccccctcggcccatcccccaccccttctcacacctgcacatccacccacaccctcaccacccacaccaccttcccatccctccagtccctcacctcccgccacctccagctctctttaagagtgagcctttaaatcatagaggccagagtgaggacaactttctgcggcacctggcagagaagaacagttcagcacagcatcattaacatccgtctccttagtgtgttctccaggagacacgtccccatgtgtgagcgtgcacagagggagtcggtgagcatttccttagttctcagactctcctccgcctctaccaagagcttcgccagtgtcactgaatcaacagatccaagggaatgaacaagaagactaccttgagctcacagagggactgtcatctaaaccaggggaaccactgaactaaagcccaatttgcttgcattttctgatgacttttataagtttcaaatactcagacttgtggaattttataatttcatatcagctgatgaggtatgcttgcttttatatcccagacttctcctcaaagaggggataggcctggtttcctttgtactaatcgggaaggctgtgagattaatccagagcattaattgtatcactgtgtatggtaaggaattcttttcagcttttggtgccagctacagagttgagctggccatgtttcacagtatatcaagcattatagagaaagacagaaattttcttctttgtgtagctctcctaacgcactctttattttactacagaaattattttagagtttttgtatagacttctttggtagtctgtttctaaaatgaaatgtatttcaataagcagtgtaattttttcagtgtagctgaacctatgttgtaaaatagaaaaaaatttttataatcatcaaaatgtgattcttaaagatgcatataacttctataattcaaagctattcttacatccgtacaactcaaaaggtgcttcagagactagatgtatctgagagggtctccagaccaggttactgcaaaaatgaggttttgctttcaggatttggcgtaaatacttggtagttttgacatctctgcttaacactcaagagaggctccctaatgtgctcctgtcctccatgttctgcttggcttcgttagtgcattacatgaaatgatttgcaggggatggggccttttccagggaagtcacctaaagcttgcatgttttgaaaatttgaataaggctgtttgctgacaggaggaggaagtagtggagatcatttcatctcagtcacgtctgtttctcacttcccttaggaattgtgttgatgtttaacttttatgggatgacaaattgaaatcgctcattttgaggttgctttatttttctagaattgttataagaagctaaaatagtaaacttaaaatcacaaacatgacattgctgatagtggctgagaaattcagatgagaagacaaattggttatgaattttgaaatatctattatatgtaaaatgtggatatgttcacaaccttgagctattttaacacagtttaaatatagtgagggaaaactcctaagttttactgccctgtcctctgcaaattatgtaataccagcattcttaggcgataaagagagcagcacctctagtacctttaggcagattactttttcaagtttggggaacttcaaaagaccataatcaaccaggagcttattataggaaaggctgaacagaagggctagtgtattgattacacttaacagatcatatttatccagactcagtatagcttaaaattttgtatttctttatctgagagaactgagttcccaggctaaatcacttacctcccaccccctctccaattttttttttaagagacaaggtcttgctatgttgcccaggctagagtgcagtggctattcacaggtgcagttatagcacactacagcctccaactcttgggttcaagcaaccctgcctcagctaaccaagtagctgggactacaggtgcatgctaccatgcccagtccattttttaatcttgaaatttcttcatttttctttcttcggtttcttaaaatctttgcctgaatcagaacgctggcttttatttatttttttatttttaatattaaatgtgcagatatgcttcgagcacttttctaactaatgagctctgtggtaagaaaaaatgaactctttcaattgagattaagtccatatttttcaaacatcacgttctctattggctttttggtttagtgtttctaaattttctccttctgattttgcctgtcttatataatgagcataggaaaattttggaatgaggcagaaaagtatatcaagacatacttcctggttttggatgtaagttttaaagaatggtatttttaatatttgtacacattctttgagcacccaggtacccaagccaataaggaaagttaattccttgcatatgactgttatatctttagtggttgtctccctctccctccacagtctccttggcattccatgacaagtttgtcaacctacacttttatatagacatgtcattatttcatggtcaagcctgtagtattaaaatgatttttttaaaagatgtaaactgtgcttagttaattggttatattttgttctgtttttttttttttttttttttttttttgaggcagagtcttgttctgttgcctgggctggagtgcagtggcgtgatcttggctcactgcaacccccgccccccgggttcaagtgattctcctgcctcagcctcccgagtagctggaattacaggcatgcgccagcacgcccggctaagttttgtatttttggcagagatggggtttcaccatattggccaggctggtctcaaactcctgaccttgtgatccgcccacctcagcctccgaaagtgctgggattacaggcgtgagccaccacgtccaactgccttattttgttctgaataaatttacagtattgggcagcaattctggattctagacttgagaccacagaatcaaccatttcatgaggttgtactgtaattatacactggaatattcaggtagtcatctttgatttttcattcaagtaaatatagccataagaaaatatctgctatacaggaaaaccagtattaagcaaataccaccatccttaacagaaacaaaaatatatatatatattatttttaaaaattagcattgtcatacagtacaattcttagtgaagtgtattgtggaacaatttagaaacttcctttttttcccctagattaaggatactttccttgacttgagacttgtggtcttcaggaaaactactcagaatataatgactcctcatcagtatcatattgtatataaataatgaaatgcattaagaatattcacaacattgaacccaggaggcggagcttgcagtgagccgagatcccgccactgcactccagcctggggtgacagagcgagactccgtctcaaaaaaaaaaaaaaaaaaagaaaccacagcagctgtggctggggagcccagatgaagtgtggctctatcttgtatgtgagcacacccacattttcactgccattatctgggacagcagaaccaggtttggctcaacagatttctctttccacccatctattgcaggagtagtggtcttgctgcttctccagggaggtaagtagtcaataagtcactaccgcctggatctcctggcttgggtgctttcatttttgatgtacagtttctttttctgctacatgctttttctcttgattactctctccggttctgccactgacatatttatgacactgagtttttattctatctttttgtgtatcccttgttctagttctttttgagccactctctctctcacccctcccccatagctggcctcaatatgtgtgtgtgaatacaaacatacacaatgtttgtattatctgtttctctactgatctgtgtcatccatccatacatacatactgaatcttagtgctccatgggtgtttcatatgttggtggtatctctgtctctcaatgtattttttttttaatttttttgagacagggtctcactgtaaggtccaggctgtagtgcagtggtgtgacc

SEQ ID NO: 3115 - DNA, 3498 bp, Homo sapiens
  SIMILAR (379)..(585): 951254mologous to Homo sapiens melanoma ubiquitous mutated protein,accession number U20897,Smith-Waterman Score=312.
  misc_feature (1)...(3498): n = a,t,c or g
atggagcgaccgctccggggctcccgccacccgcggctgtttccggtgccccccggggtcttgggaccctcccaaggacacattggcgtgagacctgggagtacgttgtgccaaatcattgccacttgccacatgagtgtaaatgatggcggatgccaagtatgtcctctgccgatgggaaaagcgattatggcctgcgaaggtgacagccattattctgtaacttcaggacttagaaatgactttcgggtgacaaaaacgtctgtgacaggcccatcaattttgaaatatttggtttttgagcctgtcactctaaaccagcgtttaacgttcaaaaggcaaataactgatgaccaggcggcacattgttctgctccaattaaggtgaaaagcactgaagttgagatcctagagaagtctcaaattgaagccattgcttcctcgttagcctcacagaatgaggttcctgcggcacccctggaagaactggcctacagacggtcgcttcgcgtggctctggacgttctgagcgagggctcgatttggagtcaagaaagctctgcagggacaggtagagataataaggtctctgcgagggaagcccatggagcatgtctcctcgccctgtgattcgaactcctcatctcttccccgcggagacgtgttgggcagttccagacctcacaggaggaggccatgtgtgcaacaaagcctgtcaagttcgttcacttgtgaaaaggaccccgagtgcaaagtggaccacaagaaggggctcaggaaaagtgaaaacccaagaggcccgttggtcctcccagctggaggtggtgcccaagatgagagtgggtccagaatccaccacaaaaattggactcttgcaagtaagaggggaggaaactcagcgcagaaggctagcttgtgcctgaatggatcttccctttcagaggacgacacggagagagacatggggagcaaaggaggcagctgggcagccccgtccttgccctccggggtcagggaggacgatccctgtgccaacgctgagggacacgaccccggtctgccgttgggcagcctcactgcgcccccagcccctgagccctcggcctgctcagagcctggagaatgccctgcgaaaaagaggccgcgcctggatggcagccaaaggccgcctgccgtgcagctggagcccatggcagcaggggccgcaccatcccccgggccggggccagggcccagagagtctgtgaccccgcgcagcaccgccaggctgggcccgcctccctcccacgcctctgcggatgcaaccagatgtcttccttgcccggattcccagaagctggagaaagagtgccagtcttccgaagagtccatggggtctaattccatgcgttctatcctggaggaagacgaggaagacgaggagccaccaagagtccttttataccacgaaccacgttcgtttgaagtaggaatgctagtctggcataaacataaaaaataccccttctggccagcagtgtcatgggatgaaagcacacgtggatggatcagccggctgaaagcagcctttagaaccatcgcattgcatatccccaagtcgaacgcgcagaaccggtgtcatctgaccagcccaagccttcgggtccccggtgcccacctgcgttcagaccagcccaagccatcgggtccccggtgcccacctgcgttcagaccagcccaagccatcgggtccccggtgcccacctgcgttcagatcagcccaagccatcgggtccccggtgcccacctgcgttcagatcagcccaagccatcgggtccccggtgcccaccatttgagcagctcagggcccagacctgtgcctggtgcgtttcccatttaccagagggtccctgtgcgaggcgtctgccagagccccctttgtcagggaggaatcaagccagggaggacttcaaccaggacatcggctggtgtgtctccctcatcaccgactacagggtccggttaggctgcgggtcttttgctggctctttcctggaatattacgcggctgatataacatcccgagcctgccctggggccctcatcccatgggccacatccagcgtgtccctgctgtggctggtggctgcacacatcagatgttgtgaagaatgtaggccaggtgcttcttttgcaggctatcctgtccgaaaatccatccagcaggacgtcttggggaccaagcttcctcaactgagcaaggggagccccgaggagcccgtggtggggtgccccctggggcagaggcagccctgccggaaaatgctccccgaccgctcgcgggccgcccgggaccgggccaaccagaagctggtggagtacattgtgaaggccaagggcgcggagagccacctgcgggccatcctaaagagcaggaagccatctcgctggctgcagaccttcctgagctccagccagtacgtgacctgtgtggagacctacctggaggatgaggggcagctggacctggtggtgaagtacctgcagggcgtctaccaggaggtgggggccaaggtgctccagcgcaccaacggcgaccggatccggttcattctggacgtgcttctgcccgaggccatcatctgtgcgatctctgcggtggacgaggtggactacaagacggctgaggagaagtacatcaaggggccttcgctgaagctaccgggaaaaagaaatatttgaacaaccggctccttgaagagcggaaccgggccccgtcggtgagggagccagcccggcctgtgctgttccaacggggcctggcggtgaaaagcgcctccagtgtgccatgagcgtgtctgaaagatggggggctcagggggcacgtttgcgttttggacctgtctgtgccgttctcnctgccgtggcagttccctgatttccatactttctgggagaatccatttcgttaacactgaaagccagttctcttttcctggcagtttttttcattttatttttggcattttttacaagataccgttcgggaaaggcttttgaaaggacggaaagcgtattcactgtgcggccagtactcctggctgtgctgtggtttctcccgacgtgcacatcgatctcgtatgtgtggcatctgatattaaacgggaggttttaagaagcgtctgcccgtgaatcatggagcttcggaagcgggaatggttcttccgggtttgctgttttgtctgtttcccccttgtgtggtttccgcctgcgacagttccagaatttgctctcccactcagtgtgctctgcagctgtgaggaaacagccttcgttagaggcgggagcaggaggacgagccgctgctctgtgtcgtgttttgctgtgggccgcagggagagggagcgggacacgcacctttccagggggcctctgtgtcccgcactgtgtgtgagtggaccgcagcgcgcagccacatgccctgggttgccatgggccaaacccgcttcacctccccc

SEQ ID NO: 3116 - DNA, 488 bp, Homo sapiens
  misc_feature (1)...(488): n = a,t,c or g
gtttaaatgatagcctctgaaaatgagngtcatcgcaannnncnccanncgtncgnccacgcgtccggcaaaaaactgttggattatttattttagaaattcccccctttgtgttggactgcaaattgagtttctttctctttaggcctttcacaactaggactgagaatgtatgtaaaagttctgtgacagtacagaaggaaaacaactttttatgtatagcttctaaaagggnnnnnnnnnnnnnnggagaacccttttgatttccacgggcccatttaaaaactttccactcacaaatttggggttctggattccaggtcgggagttttccaatgttaaggaaaacaaaacgtgcccaccccctttaaaaggagggtatttttttttcctttggctgggcactaccggcgttttctatttctttttcttggggggaattaattnnnnnnnnnnnnnccttttggaccaacttattgcagtttaag

SEQ ID NO: 3117 - DNA, 4016 bp, Homo sapiens
  SIMILAR (805)..(1179): 791254mologous to Homo sapiens Berg36,accession number X99404,Smith-Waterman Score=511.
tgcgttaaagattaaacactggagctcttatccaagcttgctcttgcagccaaaagactaattgcaaaggcatcttctcagtgaagggggcggggtgggctagggctgagtggaaatggtgagagagattattgtagaaaatatctcttccgggaacttagggcaaagagttttattttcaggaatcacatccctgtctcccccaacctcagaccaggcccccaatctcctccccacaagaaaaagcaaaggcagtctgaaaacctgttgccaaaggaagggaacacttctgaaggaggaagttgagagtcttaggccaggtcttgaaggagggggtatcaattaagcagagactgattggaaggggacctaacgtagcctatgatagactcctttctgaggtttacctgtttttgtcgcgggcggtggcggggcgggtgcggtaatctagagaggtctgggttgtgtgagatattttgagttgaagaatctatttgactagtaaaaaagttgaactttaaagtggtagctttggggacagaggacatgggggttgcattgcaggagtcagcatggagcagggtgcttgtcacacagtttggatcttgtggtttcttacgcatggggccaaaataaacccaggtgaatggcctatgggagggagagagggaagggagcttgctagagccgaggtagagatgagttctttgagaaagagcgggcgtttgtgattgtgtagggggctgcccatagtggacatcctggtggatgtcctctgtccttaccatccttctcttctctctccagggtaacaagatgctcaactatagtgctcccagtgcagggggttgcctgctggacagaaaggcagtgggcacccctgctggtgggggcttccctcggaggcactcagtcaccctgcccagctccaagttccaccagaaccagctcctcagcagcctcaagggtgagccagcccccgctctgagctcgcgagacagccgcttccgagaccgctccttctcggaagggggcgagcggctgctgcccacccagaagcagcccgggggcggccaggtcaactccagccgctacaagaccggagctgtgccgcccctttgaggaaaacggtgcctgtaagtacggggacaagtgccagttcgcacacggcatccacgagctccgcagcctgacccgccaccccaagtacaagacggagctgtgccgcaccttccacaccatcggcttttgcccctacgggccccgctgccacttcatccacaacgctgaagagcgccgtgccctggccggggcccgggacctctccgctgaccgtccccgcctccagcatagctttagctttgctgggtttcccagtgccgctgccaccgccgctgccaccgggctgctggacagccccacgtccatcaccccaccccctattctgagcgccgatgacctcctgggctcacctaccctgcccgatggcaccaataacccttttgccttctccagccaggagctggcaagcctctttgcccctagcatggggctgcccgggggtggctccccgaccaccttcctcttccggcccatgtccgagtcccctcacatgtttgactctccccccagccctcaggattctctctcggaccaggagggctacctgagcagctccagcagcagccacagtggctcagactccccgaccttggacaactcaagacgcctgcccatcttcagcagactttccatctcagatgactaagccagggtagggagggacctcctgcctactccagcccctaccctgcaccccacatccccataccctcttctccctacccatcccattccccacaggccctacattaacaaggttaagctcaacccctttcccccagcacctcagaatgtgccctccctctccccctcataaccccacctaacataaggacaagtcaatttgtcagtagcttcttctggcttgaaaccccctccctggattttatagcccacttaccagtgcataacagacaagtcccatattttgtcagtagatgcctttttttttccggcttaagccttaagtgccaaatcacaagagaaaaagcagtaacagtttacagaagcaacttagtgccttgtaatctaactttgtcactgtgactacattaccttcttcagcgccagagggcacccgtgggcctccccggagcctctgcccatggcggggtggagacccggaaccagcagccccctccactggcgacacaactgcaccttccctcatttcagtctcccgcacacttattcctcctcccctcttcccggtggcacctctccacctgtaccagcccccccaccccccccacccctgccccttggaagagttgttgccagaccagggttttgggggaaacctgtcttgacattcaaaacctttttcttcccgatctgaacccctgttgactaatcttgcctgggtttgtgtaggtctgcaggaaggaaggctgaaaaagcggacgaagattttgacttaagtgggactttgtgatttaattttttcttttttttaagtggggaggaaggggaagctagatggactaggagagacttgattttggcgctaaagttccccagttcatatgtgacatctttttaaaaaaaataacaacaaaaaaaaaatgagagaaaagctaaaaaaaaaaaaagtaaggggtgagcagttaatggtattcattccacatacaatatctgtgtaaaacgatttcctgtagaagtagctttaatggtttttgctctagaataccgtaggtctatccttagagcactcacgccatgctttcttccctgggttttaaacttcatataactttcaggaaattgggagagcaaaaattttgcttgtcactggcacatccaatattaaaaaagcttatttaacttatcaaaaccgtatttattggcccaaactatgcttttttttggttaattttgttcatatttatccgggatgacaaatcccatggaatatattcttttatgttaaattatgatcttcatattaatccttaaaattttgtgacgtgtccttttcctttttttccacagttttaatatattattccttcaacgacattttttgtaactctacacttttttggttattttattttaaaaaaatgagaaattaatttaaaaaaaatgccaaaaaactgttggattattttattttagaaattcccccctgttgtgttggactgcaaattgagtttctttctctttaggcctttcacaactaggactgagaatgtatgtaaaagttctgtgacagtacagaaggaaaacaactttttatgtatagcttctaaaagggggaaaaaaaaaaaaaaaaaaaaaaaaaaaagagaaacccttttgatttccaggggcccatctcaagacattccactcacagatttgaggttcctggattccaggtctggagttttccaatgttaatgtaaacaggaactgggcacacacacattaagatgaatgtaattattattcctcttggctggtcactaccgtcgctttcatatttctctttcttatgtgtgaaatttatttaaaagcaaaaaaaaacttttgtgtaacgacctatttgcagatttaaaacatcatataaacccccgttttttcaagaaacattgatggtggagctggttttacttggttttggtttgactttgccagtaaggttctccccttgtataccttgcaagtcctggggagggggaggcggagagagagggctgtggctgtgggtggcggcatctctcatccctataagctaagcctatagctcccttccttgatgctggcagtttgctgcacttagaggggacggggtggaggttttctgcaaaggagcctgtacttcctgctgtattacttctgaaaagactgtgcagtgtgttagttgttggctgaatagcagcgggcccagccttgccgacacttgtgtggcc

SEQ ID NO: 3118 - DNA, 1501 bp, Homo sapiens
  misc_feature (1)...(1501): n = a,t,c or g
ctgttttccgggaagaactgnaactgtgggaactgggcccaaagaggnaggggggaaaaaggccacccaactcctagatccattttttaagggagatccaggaggagaggaagaaaaatagaaacgccgtatgtgaaatgggtaatgatatacaacatgggagaaaaaaataaacatccgtggaaccctgcctagcaatttcccacccaatttcccacccaaagcagtgaaccccttaactgacagaaattcagtacaatatacacattaattaacaactccaccattactagggctgctgttgaaagccaaaaaattaactacaatattgaaaaacagaatgcttacaatatctgagaaaaatagagtgaaaaggcaatgttagctaagctcttagctacatccactcttaatggcccccagtatttaaactatcatggattaaagccatgaaaataaaaatttcaatttgaaattttattagcctgttgctaaaatggtcaataaaaacatcaacacgtttgggctttgttggacatagttggaaaactgctctctcatttttaaaactttatttccacttccccagctttgaagatttctatgttaggaaaagccaaactaaatatactggctatggtgtttgtaacaatgctggtttctggaatggtgccatgtcctccccctccctctcctccaactcctttaaaaatatgactatttttgaaatgcagcccgaggagggagcaatcaagggttcagaacaataagcgcccttcacacattcaagttcccagacaccaggtgaacgagcgagctccttgtcgggggcggggccggctgtcctcaccgaattcgcagcgccatcttcctcccgggaccgggccggcttcccttctggccagcgagggagactcccaagcaaaaggcgggtgggggtggcgttcgcttcccacggtggaaagaaccggaggcaaacactgtctggcttagcccgcagcctggaacacaatgtcaggagaccttggggctggagagctggaaaagtcccgggcagcctcaggataacccggaatcccgaagtgctgtcttggggaattattcccaagtgcacaagggacaggctcgatttcttggaaatcctgcgatctggggacgcatccacagaggagctgaactgtgccctgtagagaccagttctcgcctccgaccggtctgtgtgcgcacgctcggggcggtgatggtccttttgagaagagggttgttttcgagtcgggccacagtcactggccatggactcgncgggaagggcatgtcctttctcctctcaagccctttccccgtcccggtttacatctcaaggggaaagcgcaccgggggtctccagccaccgtactaccgctgttgctgtttagatggcgctccgaacgcgtccttttcggcctgggggaatttcctagaattccccgggttgtttggggatgcagaagagagcccctga

SEQ ID NO: 3119 - DNA, 1121 bp, Homo sapiens
gcggccgcctgcgagtgctccaggagctcgccgacctcgtggacgacaaggagtagccgcctaggggctgccggcccctctgcctcccccgcacctcgctcccttcccttccccgcacccggacttcgcagtcagcggttctcaacctctgccccgccccgccacgcgcgtccgccgccggtggcccgggcccgggctgcacccccgcatccccaagccagcggcaggaagtctcaggtttctgcccctttggtcgaaagggcgccgctgcgagcgcctgggctgacagccacagcggtggtgacggtgctgggagaccccgcgtgcgcttttccccttgagatgtaaaccgggaacggggaaggggctgaggggagaaaggacatggccttccccgcgagtccatggccagtgacttgttggcccgacttcgaaaacaaccctcttcttaaaagggaccatcaccgccccgagcgtgcgcacacagaaccggtcggaaggcgagaactggtctctacagggcacaggtcaacttcctctgtggatgcgtccccacatcgcaggattttccaagaaaacgagcctgtcccttgggcacttgggaataatttccccaagacagcacttcgggattccgggttatcctgaggctgcccgggacttttccagctctccagccccaggtctcctgacattgtgatccaggactgcgggctaaaccagacagtgtttgcctccggttctttccaccgtgggaagcgaacgccacccccacccgcctttgcctgcgagactccctcgctggcagaagggaagccggcccggtcccggaaggaagatggcgctgcgaattcgcagaattttagagttggatctttgtctcatggatgctcttaggagacccaccaaccaccaactccttgtattgcaactggaccccctcgacctgggtgaatgtactcttttcagcaaccatatcctccctcctgttgccaggtaaggtgagaagcaattcctctgcctagaagctctgccgggtgaaatatcaggagatcccacccaagctttctcttgcgtgtagcctatatccagcacgggagcataggctaatcctgcagttg

SEQ ID NO: 3120 - DNA, 2048 bp, Homo sapiens
tttttttttttttttttcagttactccttttttaataaatttgaattcattcatcaacaagtttcatattgtatctatcactcaattttgctgttttttcatgtcaaataataccaaaaaattacatcaatgtgcttaagcaaaactgggtttaaatttatctttacaataaaatgaaatcaacatgagaattgattatgacagcaatcgcctattcctactaggattaatcctgtacttaccttaaacacactcactgacttgtgaagtagaaacatgaggacaaacgtgacaaaacatgttcatgggggttgggtcctagggagagggcatacgggagccactctctgggaagggtcattgtttacccaggtgttgggaatttagtatttcaggaaaacatggcgcctttcaatgcagtagaagaggtaatcaatccaaggcacactagctagtgtcctggaaaaatttaattcacctgggcagttctttgccccaagattcgatgttactctaatggctcacactgacagccagagtcaattccaagagtaacaaaatgtttcaccaattgttcagttttgcttacataaaatggccagaaatatgaactggttttcaggtggagagttaaaataagaattaagtgatggtttatactttcaagccaggagattcaaagttggacacattcttgttagaatacaccaatggtgggacaaacaccaatggattatctactagatgctgaaaatgaacacctacaactgcaatgtgccctgtcccccttaaaacccagcccccagactcgtttggcatcacctttgagatgatctcctcagtaaaaatgtcaacgctgtgtttggacaagagagaagtgccctttcagggagtgactgaacatgtcaaagttctgggtgctggcgttaaaaacacaatattgcagatgtacaggtagcttccaaatctaatggaaatattatcatgacatactttctagttcgtttgagaatccaggggaaaatggatgtccgccatggtaatagacagtgaaaccccctcccacagtcccggggttggtgaacaggaataacacttgttttaaggactactcaaagtctatcagtcttcctctgtagggagttatgtagcagggctcttcccattatctcaaggatatctgaatatgggtaataacaaactgtcataacaagattcttctgtagatcttgagcccctgtggcgcattttggaaagacaggactactgaggaaaattaactctttattactttcaattgttaagaaagaaatctcattatatccccaatgataccgttttctgcccttactcaaagaggtctgggtgtgggtaacagccacctcccaacaacgtcagaggtccgggttcagaattcctcaacgcgactcagtcacttgggtctcaaataactactctggagtaacgagaggtcattttaacacaacagagactccaattcaactctcttctgttaacacagtcagagttctcttctcaatgctctcacaagttttaaaaatggagaagctataaaataattttgttagaagaaaagtaattttcttctgaaatggagtaaagcaaacacatacccaaggatcttaaaaagtttttttttgtttttacagaatatatgtatgtatttgtgtgtgtgtgtgtgtgtgtgtgtgtagttacaaacactatttatagtatagctaatatgttaacttcatcgcagtgtctacaaagttgtggatcccagtcttggtgccaaatgcatataaaaagctcaaaagctattatgactataccatgcaaatttatatccagaaaaccttgggaaggagactgcagctctttggagccccatggggtctctgcctttgatatttgggtacctcaactatgcatcaaaaaagttttaaatcacttttctcccagaaagaattaatgtcacagttctgaatagtataaattatacacttaaatagaccattgactgtttttgtccacatccatttaca

SEQ ID NO: 3121 - DNA, 2631 bp, Homo sapiens
  SIMILAR (1061)..(1549): 581254mologous to Homo sapiens transcription factor,accession number X74142,Smith-Waterman Score=433.
  misc_feature (1)...(2631): n = a,t,c or g
tttttttttaattcctgaggggtggttgctgcttttgctacatgacttgccagcgcccgagcctgcgtccaactgcgctgctgccggagcgctcagtgccgccgctgccgcccgccgcccccccgcgccccgttcggcacccaccggtcgccgcgccgcccgcgcgccgctgtcccgctcccgcgccgccgccgccgtttccccccgacgactgggtgatgctggacatgggagataggaaagaggtgaaaatgatccccaagtcctcgttcagcatcaacagcctggtgcccgagggcctccagaacgacaaccaccacgcgagccacggccaccacaacagccaccacccccagcaccaccaccaccaccaccaccatcaccaccacccgccgccgcccgccccgcaaccgccgccgccccgagccgcgcagcagcagcagccgccgccgccgccgctcgccccgcaggccggcggcgccgcgcaatcgaacgacgaaaagggcccccagctgcttctgctcccgccgaccgaccaccaccggccgccgtccggagctaaagccggaggctgctgccggcctggggagctggggcccgtcgggccggacgagaaggagaagggcgccggcgctgggggggaggagaagaagggcgcgggcgagggcggcaaggacggggaggggggcaaggagggcgagaagaagaacggcaagtacgagaagccgccgccgttcagctacaacgcgctcatcatgatggcaatccggcagagccccgagaagcgcctcacgctcaacggcatctacgagttcatcatgaagaacttcccttactaccgcgagaacaagcagggctggcacaactccatccgcgacaatctgtccctcaacaagtgcttcgtgaaggtgccgcgccactacgacgacccgggcaagggcaactactggatgctggacccgtcgagcgacgacgtgttcatcggcggcaccacgggcaagctgcggcgccgctccagccacctcgcgggccaagctggccttcaagcgcggtgccgcgcctcacctccaccggcctcaccttcatggaccgcgccggctccctctactggcccatgtcgcccttcctgtccctgcaccacccgcgcgccagcagcactttgagttacaacggcaccacgtcggcctaccccagccaccccatgccctacagctccgtgttgactcagaactcgctgggcaacaaccactccttctccaccgccaacgggctggaggcgtgggaccggctggtcaaacggggagatcccgtaacggccacgcaccacctcacgggccgccgcgctagccgccttcggtgccctgcggcctgtcggtgccctgctctgggacctactccctcaacccctgctccgtcaacctgctcgcgggccagaccagttactttttcccccacgtcccgcacccgtcaatgacttcgcagagcagcacgttcatgagcgccagggccgcgtcctcctccacgtcgccgcaggccccctcgaccctgccctgtgagtctttaagaccctctttgccaagttttacgacgggactgtctgggggactgtctgattatttcacacatcaaaatcaggggtcttcttccaaccctttaatacattaacatccctgggaccagactgtaagtgaacgttttacacacatttgcattgtaaatgataattaaaaaaataagtccaggtattttttattaagcccccccctcccatttctgtacgtttgttcagtctctagggttgtttattattctaacaaggtgtggagtgtcagcgaggtgcaatgtggggagaatacattgtagaatataaggtttggaagtcaaattatagtagaatgtgtatctaaatagtgactgctttgccatttcattcaaacctgacaagtctatctctaagagccgccagatttccatgtgtgcagtattataagttatcatggaactatatggtggacgcagaccttgagaacaacctaaattatggggagaattttaaaatgttaaactgtaatttgtatttaaaaagcattcgtagtaaaggtgcccaagaaattattttggccatttattgttttctccttttctttaaagaactgtttttttttcttttgtttacttttagaccaaagattgggttctagaaaatgcgccttggtatacccaagtattaaaacaaacaaaaaggaaagttgtttccagttggcaacactgccccantcaattgaatcagaaggggacaaaattaacgattgcccctcagtttgtgttgtgtatattttgatgtatgtggtcactaacaggtcacttttattttttctaaatgtagtgaaatgttaatacctattgtacttataggtaaaccttgcaaatatgtaacctgtgttgcgcaaatgccgcataaatttgagtgattgttaatgttgtcttaaaatttcttgattgtgatactgtggtcatatgcccgtgtttgtcacttacaaaaatgtttactatgaacacacagaaataaaaaataggctaaattcatatataactagatacttttgcctcttttattaggtagggctaatt

SEQ ID NO: 3122 - DNA, 741 bp, Homo sapiens
  SIMILAR (486)..(740): 511254mologous to Homo sapiens tripartite motif protein TRIM5 isoform alpha,accession number AF220025,Smith-Waterman Score=163.
cctttgtgcagatcaggcccgtggattggtgagtgaatcctaaccacgtcttccctggcctgtcttcactcttctccccagaatcaccacttctgcactggtgtctgaaggtgtattgagtgattttgtggagggcagaagtaggaagtctttgggacaaaactgtatttaccttgggatctgtgaacaagaggaacctcagcagccaggacaggcaggagcagtggaatagctagtatggcttctggaatcctggttaatgtaaaggaggaggtgacctgccccatctgcctggaactcctgacacaacccctgagcctggactgcggccacagcttctgccaagcatgcctcactgcaaaccacaagaagtccatgctagacaaaggagagagtagctgccctgtgtgccggatcagttaccagcctgagaacatacggcctaatcggcatgtagccaacatagtggagaagctcagggaggtcaagttgagcccagaggggcagaaagttgatcattgtgcacgccatggagagaaactttctactcttctgtcaggaggacggggaaggttcattttgctgggctttgttgagcggttttcagggagcaccgtggttcaccacacgtttcctcacagaggaggtttgcccgggagtaccaagtgaagctccaggcagctctggagatgctgaggcagaagcagcaggaagctgaagagttggaagctgacatcagag

SEQ ID NO: 3123 - DNA, 510 bp, Homo sapiens
  SIMILAR (1)..(237): 981254mologous to Homo sapiens dJ510H16.2 (high-mobility group protein 2-like 1),accession number AL008635,Smith-Waterman Score=403.
atgtcggcctaccaggtgttctgtaaagagtatcgcgtgaccattgtggctgaccatccagattttggggaacttagtaaaaaactggctgaggtgtggaagcaattaccagaaaaagacaaactgatttggaagcaaaaagctcagtatctgcagcacaaacagaacaaagcagaagccacaactgtgaaaaggaaagcatccagctcagaaggttccatgaaagtcaaaggtagtgaccacatcccgcccctgcttttctctaaagcatgtgaattttgcttccttgctaagaaactgggaaaaaagcttgcagtattagaagtggaccttgattcccagggtatggtggctgtgtctggcagtttgtcagtgcttctggattccattatctgtgcccttggccccttggcatgtctcaccacacaactacctgaattgaatggctgtcccaaacaggtcttgtcaaacacattagacaacattgcttacatcatgccgggactgtga

SEQ ID NO: 3124 - DNA, 1411 bp, Homo sapiens
  SIMILAR (974)..(1249): 1001254mologous to Homo sapiens dJ510H16.2 (high-mobility group protein 2-like 1),accession number AL008635,Smith-Waterman Score=477.
cgatcggcggcgttgaggcgggatccgggcgagccgagtgaagattgttttgatggtgatcatacctttgaggacataggacttgcagctggccgaagccaacgagagaaaaaacgttcttacaaagattttttaagggaagaggaagaaattgctgctcaggtcaggaattcttccaagaagaagttgaaggatagtgaactttacttcttggggacggacacacacaagaagaagaggaagcactcctctggatgattcctactatggagatatttcgtctttggaatcgtcacagaagaaaaagaaaaagtccagcccacagtctacttgatacagctattggacctgttgaaagctatcactttccccacttggaagcaggctccaagccctccaaaaagacttggggagaaatcctctggctcttcaagccattcggagagtaaaaaggagcaccacaggaagaaagtcagtggaagcagtggggaactacccctagaggatggtgtctcccacaaatcgaaaaaaatgaaacctctctatgtgaacacaggagacactgacccttcgggagcctgatggtttaaaaatgaaacttattctgtcaccaaaggagaagggaagcagctctgttgatgaggagtcttttcaatatcccttcccaacaagcgactgtgaaaaaatcctcaaagaaatcagctcgggatgagcagggtgctttactcctaggacatgagttacagagctttctgaaaacagcccggaaaaagcacaagtcatcctcagacgcacattcatcttcctgggcccttgaaaggcttgttgggtcttgacgccttcccagtttcgcaagagtccccacagtgctaacccttgatctttcagggcttgaaccctattctggtagaatcagactcatcctctggtggggaactagaggctggggagttagtgatagatgattcttccccgagaaatcaagaagaaaaagaagtcaaagaagagcaaaaagaagaaagacaaggagaagcataaagagaagcgacactccaagtccaagagaagtttaggactttctgccgtgccagtgggagaggtcacagtgacatctggccctcctcccagcatcccatacgctggagcagcagcacctcccctgccacttcctggcctccacacagatgggcatagtgaaaaaaaaaagaaaaaagaagagaaggacaaagagagagagagaggagaaaagatgggaccatctagttggaagaaaataagctcagggctcccactgattctacatgatggtccatggaaaaattgttttccacgaaaccggtacccggtgccaaaaaggttgaggaccgctgacctagtgggcttgtatctgggaagccagaaacataaatga

SEQ ID NO: 3125 - DNA, 4270 bp, Homo sapiens
  SIMILAR (153)..(365): 541254mologous to Homo sapiens dJ510H16.2 (high-mobility group protein 2-like 1),accession number AL008635,Smith-Waterman Score=185.
ccaagatggcggcgatcggcggcgttgaggcgggatccgggcgagccgagtgaagacctggtcctgtagacgggaaggagcctggacacagtgaacacattctcaaaggccctgcaggaccaccatgggtttatgatggactccgtgaaggaaaggaggattgttttgatggtgatcatacctttgaggacataggacttgcagctggccgaagccaacgagagaaaaaagcgttcttacaaagattttttaagggtagaggaagatattgttgcttcaggtcaggatttcttccaagaaggaagttgaaggatagtgaactttacttctttggggacggacacacacaagaagaagaggaagcactcctctggatgattactacttatggaggacagtggttcttgttcttgagtgccgataaaccagtgttgaaggaggagagaggtggagggctggtattttggaggattcagccatagaagaacagtctgcatttgtgatacaccagatatttcgtctttggaatcgtcacagaagaaaaagaaaaagtccagcccacagtctactgatacagctatggacctgttgaaagctatcacttccccactggcagcaggctccaagccctccaaaaagactgggggagaaatcctctggctctttcaaagccatttcgggagagttaaaaagggagcaccacaggaagaaagtcagtggaagcagtggggaactacccctagaggatggtggctcccacaaatcgaaaaaaatgaaacctctctatgtgaacacagagacactgacccttcgggagcctgatggtttaaaaatgaaacttattctgtcaccaaaggagaagggaagcagctctgttgatgaggagtcttttcaatatccctcccaacaagcgactgtgaaaaaatcctcaaagaaatcagctcgggatgagcagggtgctttactcctaggacatgagttacagagctttctgaaaacagcccggaaaaagcacaagtcatcctcagacgcacattcatctcctggccctgaaggctgtgggtctgacgcctcccagttcgcagagtcccacagtgctaaccttgatctttcagggcttgaacctattctggtagaatcagactcatcctctggtggggaactagaggctggggagttagtgatagatgattcttaccgagaaatcaagaagaaaaagaagtcaaagaagagcaaaaagaagaaagacaaggagaagcataaagagaagcgacactccaagtccaagagaagtttaggactttctgccgtgccagtgggagaggtcacagtgacatctggccctcctcccagcatcccatacgctggagcagcagcacctcccctgccacttcctggcctccacacagatgggcatagtgaaaaaaaaaagaaaaaagaagagaaggacaaagagagagagagaggagaaaagccaaaaaagaagaacatgtcggcctaccaggtgttctgtaaagagtatcgcgtgaccattgtggctgaccatccaggtatagattttggggaacttagtaaaaaactggctgaggtgtggaagcaattaccagaaaaagacaaactgatttggaagcaaaaagctcagtatctgcagcacaaacagaacaaagcagaagccacaactgtgaaaaggaaagcatccagctcagaaggttccatgaaagtcaaagcctcttctgtaggagtactgtcaccccagaagaagtccccacccaccaccatgctgttaccagcctcaccagccaaagcccctgagacagagcccattgatgttgctgctcatcttcagctgttgggagagtccctaagcctcattggacaccgtctgcaggaaactgagggtatggtggctgtgtctggcagtttgtcagtgcttctggattccattatctgtgcccttggccccttggcatgtctcaccacacaactacctgaattgaatggctgtcccaaacaggtcttgtcaaacacattagacaacattgcttacatcatgccgggactgtgacagcaaagaatcctgggacagaaaccttatcctacaccattgctggtttgtgtatatatgactgttgcagattccttcagtggcctctggctgtaggttttaaatttttatatctatacatacatatatacatatatatataatgtacaatatatacatagactgtaactactttgcttttaataattttatgaaatggcaaaggtttagccaagaggaaattttggcatgaatacaggcttgggattcttttttctcctgtggtggataaatctgccttaaaaatcaatgtaactttgggggctgggggcttgttctgggtgccaagcgcatctctttatggacagctaaaatgtgattattttccaagctcagttggacctccagacccatcactgaccatttgccttacctgtcttagtctgaaatgtaataggaaagataacgggaagatgccagttgactgaaaattcaaagcctttcaatttgaagtgacctaggtgggaggtgataaaatttgttccctttatagttacggaggtggcttaggtgaattgagtagagggttcattccaattcctactgtataggtgtctgtgtctcaaaatttattgtaatcattgggtaccattggtgggcctccaacagaggccaaggggagttctggtgagccctgggcagcaaaaaacaccttggggggtgaagctgtcaatgccaccagttggacctccatacattctgagctaacccagaatctttagtcggcagaattaagtgctggtgtctttcactggcagcatgaagttagccaccaagtcctcacaagccgtgctgcttagttgctcggtggttatggataaactttgcccagcatgatttttgggttcatcttatcagttcccctggtgggcagatacacagtgttctgcattccacatgtaagtgaattgcaaaaacaaaacaaaactcactctcttgtaggtttatttatgtgtgtgtgaatgtgtattttaattatgtgtatttaactctttaaaatctcttagattttaattttatcctgctcatttctggatgtaccatctaacaagagttagcctccaccagcaacagcatgtggaagatacagatttgtcatttctcccttccgccctcccttctttccttccttccttccctgtttccttccctctttccttccttcctcctggtctgttccaaaaactctgaatcatctacattttaaggtattttacctcaaaaatgaatcattgtgttaggattctaattctttataaagaacttcatgggcttcaataatgtctagaaagtaaaataaagaggaatgttaccatccccagctgcccttatttccagagaaccagacgtttgtttcccatgttggaaagaagacagttgagcacttcaggatgggtttttaaatttgggtatgagattctctgccaacaccaagctctggagttaacggtgctttcttctccctggcccctgacagagcactacagcatcaaagtaaaatctttggggacagtgtagcccatctggcatcctatttgaatttcttccccttcctccccaccagtgttgtcacaggggctatgttggcttaaaaggtagtctgggctgctgaatcccttttttcaggttcagaggcagtttttaaggattttaatttggggattacagagaaacagggattgttttgaggaaccaaaattcaagaggaacagaaatcttaacttgatttcatggtgttaggaacattggtacccatgcctcttctgtatctgtgggaagtttccctgtttgaccacagggtatctaggaggggcggggaagacatggatagtataggaagaccattaatcctagcattgtcatttatatacattaatgaaatcctggatggagggacctgctttttgtttgttttcctttgaaacccagccctattgtatttgtatttaaaatttgtacacatttgtataataatctggacccttgtggtatttggtactattagaggaaaaactttggattcagaccttcttgcagtttttatatcattgttttattttgtttttttaaataaattctagtggtttgatccaaatcccattacagttgtataaagaaataaaattttgtacttatattattaaaaatcacatttttaatatttgt

SEQ ID NO: 3126 - DNA, 831 bp, Homo sapiens
ttttgtttccattaacttttgtgaaacataaagaattactgtaacagtctatgtcttggcgtattgccaattcaccactttctactttgtgctggaacagaactggcttttttgacatccctgaggagtggaaatgcaaaacgaatttcaaggtctctaatctttgttctatgacaaatgaaaaaacctaagttatctggtgttttggagatttgagaatacagcaggtgaagagaattagcttaaattccctcctcccttttgataaatccacagggatcccttcactctgtcaggaaatggtgtggtttccaagcattaacccttcatgatctgtctggtgcatttctgtgctcctgggaatcgccccaagtgccaggccacggccatcgccatcccccaggtgtcacccctgtgccccccaggaggggaagatgacacacccccaatttagggtaatgcctgcaccttcctgttataattggttattggaaaatgtgccctttattatccagaacagtggtgtgcgcatttcctgattatggagcctaacttttggatatctgacttagatactaaaaacatttgggtgttgcagttttgcacttgtagatacaactttaaaagcttgaaactggtgatttaattagatgttttctataaaatgcaccttgttacatttctgtgaaagggtcttaccagcgtggaataactggctcaagggttgagagaaacaaccattttctaaacaggttaattgtttaaaggactatacatgtaagtctgcaggcaataaaggctgttgtgaaaagcaaaaaaaaaaaaaaaaaa

SEQ ID NO: 3127 - DNA, 425 bp, Homo sapiens
  SIMILAR (346)..(423): 961254mologous to Homo sapiens KIAA0280,accession number D87470,Smith-Waterman Score=140.
  misc_feature (1)...(425): n = a,t,c or g
cagaggattcagagccgagtcgctgaggaggaggctccggtccccgcgcgccatccgccaccctactggacacgggcgagagcgtcgccgccgtagcctccggagaagacaagggcatcgccgcctcagccgccgccgccgccgttttcgcctgcagctgctcaccggatcctcagtcttccacaatgaaccctgtttacagccccgtgcagcctggggctccttatggcaaccctaagaacatggcctacacgggttaccccacagcctatccagcagctgcccctgcctacaatcccagcctgtaccccaccaatagtcccagttatgctccagcaactttggttatggaaacaggcctggccacagaactcgtcttcctgtggcactgaaggcaccttccacctcccagtggacaccgggan

SEQ ID NO: 3128 - DNA, 467 bp, Homo sapiens
  SIMILAR (52)..(351): 961254mologous to Homo sapiens KIAA0280,accession number D87470,Smith-Waterman Score=508.
tggaccgcccacgaattcccgggtcgacgatttcgtggaggctccggtccccgcgcgccatccgccaccctactggacacgggcgagagcgtcgccgccgtagcctccggagaagacaagggcatcgccgcctcagccgccgccgccgccgttttcgcctgcagctgctcaccggatcctcagtcttccacaatgaaccctgtttacagccccgtgcagcctggggctccttatggcaaccctaagaacatggcctacacgggttaccccacagcctatccagcagctgcccctgcctacaatcccagcctgtaccccaccaatagtcccagttatgctcttttcctccacggactccaaaggcgggggttgaagactgggcagaggctacatgggggcggatggcaggaacagaaattgcaaatgaagaaatagcatttggaaattctgtgaagacatctggaact

SEQ ID NO: 3129 - DNA, 291 bp, Homo sapiens
  misc_feature (1)...(291): n = a,t,c or g
ctcgtgncnagctttgttctgtgcccagagggggtgggccccattctgggccctgtgaactttgtcttatctgcccctttcctagaaaactcctcgtttctgaaattaggcattatatggttccaggacccagccttcaaaattcctggcaggccagcttcaacattccatggccagccctgcctaagccagacttgggtcccagtccctcagtctctccagtggatatcttctgtggtgcatgctgttgagtccaacccaaaggccaaccgaggcacacaggagtttggg

SEQ ID NO: 3130 - DNA, 408 bp, Homo sapiens
  misc_feature (1)...(408): n = a,t,c or g
gtaaataccatagttacaaattcttggcttcaatctttcagagtgatcactgtctgatcttcaaaacaaaacaaaaacccaaaagaatccaaaacaacaaaacaaaaccagatttacacttcatacacacaggcaaggccatggggctttccaatctttacactccggactgtgttttgaaaacacctataaattctttgatcaaactacttggaagacactggtcaaaggnnnnnnnnnnnnnnnnnnnnnnnnnnnnnnnnnaattttatttctttttaaaatgtgagttccaataaaatttaaaaattagattccaacctgtagattaaaatgaattaaaaaatacaaaatcatatccaacgctctcttcacagggatgttacatgccatgagaacaggtttctc

SEQ ID NO: 3131 - DNA, 282 bp, Homo sapiens
  SIMILAR (16)..(174): 621254mologous to Homo sapiens KIAA0280,accession number D87470,Smith-Waterman Score=162.
atggatgcagctggaggttaccccacagcctatccagcagctgcccctgcctacaatcccagcctgtaccccaccaatagtcccagttatgctccaggcttgggctccccccaggtggctcagcagcagttcctaaagcatgcaggaacgtgtctgatggtgcaaaaatcatgggttggagacacacatgaaccgtccctagggcagcagcaaaggatcatggcactaaaaggcgtctctcaacctaacctggctgccgaattcaaacaaacaaatgaataa

SEQ ID NO: 3132 - DNA, 7366 bp, Homo sapiens
  SIMILAR (433)..(945): 1001254mologous to Homo sapiens KIAA0280,accession number D87470,Smith-Waterman Score=931.
  misc_feature (1)...(7366): n = a,t,c or g
tttcgtcgggctcctcggcggctactgcagaggattcagagccgagtcgctgaggaggaggctccggtccccgcgcgccatccgccaccctactggacacgggcgagagcgtcgccgccgtagcctccggagaagacaagggcatcgccgcctcagccgccgccgccgccgttttcgcctgcagctgctcaccggatcctcagtcttccacaatgaaccctgtttacagccccgtgcagcctggggctccttatggcaaccctaagaacatggcctacacgggttaccccacagcctatccagcagctgcccctgcctacaatcccagcctgtaccccaccaatagtcccagttatgctccagagtttcagttcctgcattcagcttatgcaactctgctgatgaaacaggcctggccacagaactcttctttcttgtggcactgaaggcaccttccacctcccagtggacaccgggaccgagaaccgaacttaccaagcatcctctgcggctttcagatatactgcggggacaccatacaaggtcccaccgacccagagtaacactgctccacccccctactccccatcacccaacccctatcagacggccatgtatccaatcagaagtgcctacccccagcagaatctgtatgcccagggagcctactacacacagccggtgtatgctgcccagcctcatgtcatccaccacaccacggtcgtccagcccaacagcattccctctgctatctacccagcacctgttgccgccccgaggaccaacggtgtggccatgggcatggtggcaggcaccaccatggcaatgtcagcaggtaccctgctgactacaccccagcacacggcgattggggcacaccctgtctccatgccaacatatagggcccaaggaacccctgcgtacagctacgtgcccccacactggtaaagcctgcagcccatccaaatctggagtcacacattgtatgcaactactcaagtcttacaccggtgctggagcagttccctagcagcaccacctctatttgcaagaagagacaacggaagtgcaagggtcactttatgcatctttaatggttttgatttttatttttggtttttgtaaaagctgctttttctaatctcctgcctctccccaactgtccccctcttagcccctgcccttccagctctatccccttcctcctacctgaccaggccatgtcctctctgctcttccctaagtgtcctgtccctggggatcccagtctagaggcaagcagagagtagggtttattgcagtggttcatctgaaggctggattccatttgaagagcataaacagatgtggtccagggtaggaactcagagctgttgagcaggctacatctctaggggagtgttctggttgttttttcttaagcaagattagttcaggacattcccatgtcccagacacaaatgaaatgtctcctgagaaccattgcaacagaccaagaacaaaaccacctgagtatgtaggcgtgttattagcagcttaataccccaggctgagaacctggggaaaaaagtctttagaatttgggggagggtggggggagggagggcattgtggggaaggagagggaagaagggaggagcggtgcttgcctcatggctttggtttgaaaggtctctggccaaagcatctggccctggaccttctgatttgcacagtgatgttaactgacctggcacttcctcaaaaggtgattttgtccttagacctgccaagcggctgcagggtggtaggatcccagcatcccgaggccttggaaggccggatgccctgtgtcatccagacttcagcctctgagctgtcatggacccactctgatgaggagcttcctcctgattggagtgggaacctagggcatttctctcccttttcttttgcccttcccagtgccaggactcacctgtctgaccatagagcttgcaggcaggccaagctcttggttacctgtgccattcatggcccaagtgaaggaaccacattccaggtgggtgctggcagctctgaaggtgaggatagtgaaggaaaagcaatagcaataaacatttcatagactcatggaactgaagggaccttagcaatcatctcatccatttccctatttggcagatgaggaaactgaggcccagagaagcggaaaggacttccctagaccttacagtaaattagcattaaatgcagccttcctacctagtgggcaccttgcttacaaaaatttacctagggacggattggcttggttttgtaaaaatttaagtcggcagcgcccatacctggtgagtctggaatggtctctgggctcctgtttctgctcttttcctccacggactccaaaggcgggggttgaagactgggcagaggctacatgggggcggatggcaggaacagaaattgcaaatgaagaaatagcatttggaaattctgtgaagacatctggaacttccgtcctgtacctgactccacctccaggagaaggagcaggtggactggccgaaaaggagaggccatgcttttaggacagtagcccctcatcccgagaggagaggaagaggaggaagacagtgggagtcatcaggagaggagaatgaggatgaggcccaggagacaggctcatctgggagaagagggacccctgggacgaggaggtccctgctagtctcagccaggagcctggattgcccagcagcagcctccggcacccagcgcttggctgggccagcagcccctctgggggtggggcacgaacattttattgtgaaaaatgggatcattgacaacatttgggactttaaaaaactgctttcatttaaaattcatgcaaacttggacatatccttaccccaacctcccatgtctccctaagggagggaaaaatcaggaaacccttgggttggaaggagctcagaagctgtctagccattcccaggagggtaaagcccatcagcctccttggcctagagccaggagtttgggggcccaccttcctgggcttccaaggaactttaggaccagtaagaaaaaattcagctgttctaaattatctgttctgggtgctgatgaggtttcactttaaaacaatagaaagttttccagtgttaattcactttttgcaaatacctccttccaccctctttggttttgtaaaggtgggtgaaggttgttctagattatgtcatacgtgtttgaaaaatgccaaaataataataatgataataataatagaaacctttggatttgtcaggtgcatcacagaggtcaaagcacttcacggcctttcatgtactcgccctgagagggacagggttagagttattacagtcaattgacaaatgaggaaacaggttatggaagggaacaggcccacagtgagcagcatgctggtatccgccaggcttcccagaaccctgctgcctccatgtgggctggggtggaaccacagagaggagaaaggaagaagaggagacctaggaatgaccttgtaacttttgttctttcaacaccagtaagtaaaactaacagctggacctcacagttcacagaacagttgaacataaattatctggtttaacccgatgaaatagaggttatttctcctatttgatccataaggaaatcaaggcttggaaaagtcaagtgacttgctaataagtgacagagccactcgaatcccaggctgtctgctgtctcgttcccctccatctgatccccacacaggctcacgtactgaagcatctgtgctctgtgccctatcttagcacctactatgtaattcaagagcaaaggggggccccaaggtgaaaataaggcactgaaaggctgtggtctggaagagcccaggtccagcacccctttttcagtatgagccccagttcagccggcctcagcctcttgctgtgatggagatccacaagcctagccaagcttggggagtcactgcaaaaggactgagcccaggagagcggggacagtcatgtgcctccggtaggatgggcacagttactggtaaggtcacagagatctagtgggaggtaccataggtagatacctccaaagattctagatggcacggtggtcaagctagacaaaaagtcagagctggaagggccgtctcattgaaggcaggcaagcaagagaggacaagggatgtagccggcctgatncagtgagctacagcatctggcccccaggatgcaaacccctctctcctcctcatgccactgcctctccccaagtgcaacacctatggccaggatcaggggtacagatggctcgttaccagccaacccttttgaattcttctacttctacctgaccccctctcctcactggcctgggggtcaagaagtttgagtctgggagctggattgcctgcaaatagtgaaagcctgaaacataatggtttcccatgttttgaaaaaaaatgcatatttaatttcttcctcatgagataggacagttgctgttctttcttacctgggcaatgaccctaaaatgtatatcctctttcctgaatatttaggcagagacacacacacctgttccagaggcgtttttgggtatggcaaagtactttggacattggttgccaaagtcctccattttatagatgaaaaaactaaggctcaggaggcttgagacttgctaaaaggtcacacagcttggaagtgattcttcaaatcctctgctctttctgctgccacctgctgggtctcttggcaagcatggagggaggggctaactgtactttatagagctgggaagcccagtctctgagctgagcagatttgtatgaactgctttggggccagggacctgtaaatgagccctggggagggacccaggaggcacatcttaactgggcagcacaagggagggatgaggattttggcaacttaaaggcctcacttgggacaaaacactttgggggttcacaatgcccaggaccgaagacatgtttcaagggacagcacgaggcatcttttctattgggagacccatgttccttggtaagcctgcacacctggcttcctaatcccttgagagcctgcccactgtccagatccagtgagttggtacaaaacgtacagattgaagtccctggggtttgtttttccctgggtgagggaccagaaccagactctgagcatccttacccctggccacccgaattgttccaagtttgaggtaccccgttcccagagatctgggggtccttctttggagggcttgctttgttctgatggccttcagaaaggaatcacatgaagtataaaaggacaggccccttggtcaccaagttttggctcctcatacagatagggactcatccagggttcccaggcgaggcactgactaaggcgaggctcagagctttccattattcaaatttccttcagcttttgtttctgtggcccagagggggtgggccccattctgggccctgtgaactttgtcttatatatcaccatctgtatcagaattcctcctcaattgcagttaagtgaaaatacgtggaagtctgcttttccatcctgtacttctcccacatcacttactgggctgtgcggcccccgctggcttgccaagcttggggaattccagagaggggcagttagtattagtggggccagttggggacccacccgcagagctggaagaaacacgccagactaactgatggggattccacaccggagccttcttgaggcgcacaggcagggcatgccaagggggctgcagggtttgtcctttacttatctgcccctttcctagaaaactcctccgtttctgaaattaggcattatatggttccaggacccagccttcaaaattcctggcaggccagcttcaacattccatggccagccctgcctaagccagacttgggtcccagtccctcagtctctccagtggatatcttctgtggtgcatgctgttgagtccaacccaaaggccaaccgaggcacacaggagttgggactggctgccacaaagctaggaaaggggacaaaacagcacttgcttccctatgggccacatgggatagtccctggatattccttgctgtgggtaggaggtcctcttacccatttccagccactggataggcagggggattttccttcctaaaggagaacagatgtaacagctttttcaaagtaccggcccataggaatcaaatgggtgagatcagctttgggcctgaccccagcaagaccagcatctccagaccccagcctttctcctcaggcctaagagagtcaggggaaaagagaggaagacctgtccccagagaccccttctccctcggggtcagcccagaaaagtctgggatcctatggtgtgaactcaagctccctcccttaccccagggggggtaaaggcccaggcctcctagcctacttggagttgtcctgtaataatctgtgcatagagccaagggccctgtcccccatccctgaccttaaaggcatcctgcttcccctgtttcatatcacatgacagagaaacctgttactcatggcatgtaacatccctgtgaagagcagcgttgtatatgattttgtattttttaattcattttaatctacaggttggaatctaatttttaaaattttattggaactcacattttaaaaagaaataaaatttaaaataataataataataataataataataataataaaccctttgacccagtgtccttcccaagtagttttgatcrvgagaatttatagggtgtttttcaaaacacagtcccggagtgtaaagattggaaagccccatggccttgccctgtgtgtatgaagtgtaaatctggttttgttttgttgttttggattcctttggggtttttggttttgttttgaagatccagacagtgatcactcctgaaagattgaagcccaagaatttgtaacccatggtatttaccggtaagcctggtagaacactccataactattaaaaaaaaaaattcccccccaaaaaaaagtccttaggtgaactagactgagtggttccttggggagggaggcacagaggactgtccctgggccagtgagtcccttgggcgtctccccaagttgatgcctaaatttgttctcagtagtcaagaaaaacctatggtacatcttacagctgatctgacaggggtctgccctaagggtctcacagctgctggggagctttaagtggcaacttcagcacccaccctaagtgtgtgatgtgggagcacagtgaggccattcagagttgaaatccattgagccatccgcgcaataaagctgacatctattgtgtgaaaaaa

SEQ ID NO: 3133 - DNA, 1411 bp, Homo sapiens
  SIMILAR (1410)..(1336): 1001254mologous to Homo sapiens HSPC188,accession number AF151022,Smith-Waterman Score=136.
  misc_feature (1)...(1411): n = a,t,c or g
ttttttttttttttttttgcaaggccagataaagcatttattctgtgaaaacagtgctgatgtctgagtgctaaaagggcaactggcctccagtggcaggtgggggctctggccaggggaaaacatggtccacacatgcctgcatgagtggcaaaactttaatgggggcaggtgagaggagatcctggaggcgggagacgcccggcacccaagccacagcaggagacccataggggacgcttccagttttaggttgtggagtgaggcattgtgaattgccaagaagacaagctaagctccttcaccagggcttgacgggcctgggagggcccatcagtgagcaggggccagccctcaggatcccaatgcaagaggtggcagtgaggtcaggtcagctcaggaagggaagtgtggcaagagcccccattgacagcctgtggggctttggcagccacataactggcaggtgaggggatgcacataaggtccaggggagaaagcacgttaagggcgcctggggcctataagtggggctctaccacaggggcagaggggtggctgggggagaagcttgggccagggactaggctgcaggcaacatctggaggctcttggccaaaggttaagaaggccagggaggagtggcccaggctcaaggaagctgaccccnggaaaacggcctagctaaaaaaggcccaatgagagcacccactcaatctgagactgggaaacaggaagacttagggagctgacaagggttgagggcagggtccctggagcataggtcaagcagggaggcacaagtcctagaaagaccccaggatctacgtatggctgggtcagccctttgaggccaggtctcagggaacagggagctgagagctgcagggagtgaggctgacaaagcagcacttgtacctatgcgcccacctctgcccagactctgcagtgccctggggattgggaggcttcagctggctccttggggcttgcagtggttttctgtccagtccccacgccgtgcccaggaagagtcttctcatggctccctggccatccgcctgccacctccaccttctgcacaggcagccgagtcacggtgcctacctcacagtactgctctgcacaaccttcattcttgctggtagcaacactgcacagggctggaaagtgcctccaatccttactggagcctaagcgtagctctgcttctcagaagagcacagtctctgaacaaggggacccagggggcctgcagacagctgcaggaaggcctggtctgagaaagcctggcaaaggggaccctggagctggtgtccggctgcaggggcctcaggtgggtgtggccctctccacccatggctctggggccagctcccgctccaactgctcctgctccctgcaatccagc

SEQ ID NO: 3134 - DNA, 581 bp, Homo sapiens
  SIMILAR (48)..(401): 521254mologous to Homo sapiens Proline synthetase associated,accession number AB018566,Smith-Waterman Score=240.
cggcacgagggggggatgtggagagctggcagcatgtcggccgagctgggagtcgggtgcgcattgcgggcggtgaacgagcgcgtgcagcaggcttgtggcgcggcggccgcggggatctccccagcccatcccagccccggctagtggcggtccagccaaaaccaaacctgcagacatggtgatcgaggcctatggacatgggcagcgcacttttggcggagaactacgttcaggaactgctagaaaaagcatcaaatcccaaaattctgtctttgtgtcctgagatcaaatggcacttcattggccacctacagaaacaaaatgtcaacaaattgatgggaaagtctgagttcttaataaaaagagaaaacatcatgccaagaacagaattgaattcaccattttctggggttatatatacttgggaaacctacccaacctccatgtttattattatttggtggtctttcagaaaaattataaagaattgtagcccataaatttttttaactagcaaaagagacatttctgttctttttcctttaaataaaaggctacagtaaataaaatacaataca

SEQ ID NO: 3135 - DNA, 2056 bp, Homo sapiens
  SIMILAR (335)..(736): 481254mologous to Homo sapiens Proline synthetase associated,accession number AB018566,Smith-Waterman Score=241.
gaacttttcagcaacatctaaaacttcctttttgccacacacaaacgaacttggtcgtcccatcctgacctgaatgtgagcttccgttaaaacaaagcaagcatcgtagaacaatttcaggtttcctttcatacttttttttttctattacactttttggtccactttgaattccaattctgatcatgaaacttttatgttgccacaagtcatctggagacccaccatacctgcatcttttcgcaaaatctaagcacagcactttgcctttttccctggggctcggcgtcggtccccgggggatgtggagagctggcagcatgtcggccgagctgggagtcgggtgcgcattgcgggcggtgaacgagcgcgtgcagcaggctgtggcgcggcggccgctggcgatctcccagccatccagccccggctagtcggcggtcagcaaaacgcaaacctgcagacatgggtgatcgaggcctatggacatgggcagcgcacttttggcgagaactacgttcaggaactgcgtagaaaaagcatcaaaatcccaaaattctgtctttgtgtcctgagatcaaatggcacttcattcggccacctacagaaacaaaatgtcaacaaattgatggctgtccccaatctcttcatgctgggaaacagtgggattctgtgaatgtttggcagacaaagtgaacagttcctgggcagaggaaaaggttctcctggaaaggttaaaggttatgggtccaggatttaacaccagccgagaagagatatacctgttttctgtttctcttcttgaaggtaaacatgggccttccaccttcagagaccatagccatcgtggagcacataaacgccaagtgttcctaacctgggagtttgtggggttgattgaccttagggaagctttgggcatgatcttagtcaaggaccaaatccagacttccagctgttattgtcgctcccggaagagactgtggtaaaaagctgaacatccctgctgaacaggttgagctgatcatgggcatgtccgcggatttccagcatgcggttgaagtaggatctacaaatgtccgaataggaagcacgatttttggagagcgggattacgtcaaagaaacccaccccggacaagtgcgcagcagacgtgaaggccccgctggaggtggcacaggagcactgagccagggaatactgagagcactaactatgcactaacctagattttcattcccaccccccacccaacaccactaaagtcctgctctcctgtgttctgtggagagcactaatgatcacgtgtgttgatggaaaccatctgtgcttagtctctgacataggaagcttgcttcaggcaagtggctttggattgagtttgagaaattcaaacatttctgcagaacaagatcccaaatcaatagctaggaatcatgttcaatattgaattctgcccagggagcatgaactgatccatgaatgccttttccaggttaaaatttggtcactgatgcctataatcgtggaagtcagagtggattccccatttttcatcttcattttaatagggaaaattccttaatggttaaacatctcccttacaaactcctaactacgtcggtcttaaattgcctgcctctggaaaataagggtgatttcttgccccccccaagattccttcccctagcggggtagataccgtgaaagatattccccaaactgtgggaatgggcagtgtaggtaagcttcagggaaatggctcaggttaattcttcaaaacacaaaattgttgcttggccaggcatggtgactcatgcctgtaatccccagcaaatttgggagacagaggcggaaggatcacctgagcctaggagttcaagaccgagcctcagcaacagcaggagccccaccccccgtctctacaaaaaaatttaaaaattaactgggcatggtggctgaggtggaagaatggaagaatcacttgagcccaggagtttgaggctgcagtgagctatgattgcaccactgtactcctgccttaaaaaaaaaaaaaaaa

SEQ ID NO: 3136 - DNA, 457 bp, Homo sapiens
  SIMILAR (1)..(72): 1001254mologous to Homo sapiens CGI-125 protein,accession number AF151883,Smith-Waterman Score=127.
gctggaaatcgacttcggtttcagttggagttggaatttgtgcaatgtttagccaacccaaattaccttaattgtaccctcagtgtttacacatgttagagctgctccaatatgaacacttccgaaaggagctggtgaatgctcagtgtgcgaaatttattgatgaacagcagattctacattggcagcactattcccggaagcggatgcgccttcagcaagccttgggcaaagcagcaacagcaaaataacacatcgggaaaatgaaaaactggatacaaacgaggcacttaatacatgtatataatgtatttcttttgtacagtgaagacaaaaaaaatgaaaactcttcctatctacctttattatggtagcccctagaacctttagtgtgctttttcatccaactttttattgttaatagactatttctgttaaacctgaattgttctttgaa

SEQ ID NO: 3137 - DNA, 990 bp, Homo sapiens
  SIMILAR (712)..(987): 1001254mologous to Homo sapiens CGI-125 protein,accession number AF151883,Smith-Waterman Score=503.
atgattggtccacctggcagctggctggctggctggcaactggaggcctttctgtcctggctgagggccctggccccttggtggcctttgggaagcagcatctcatcgggccgttttttcgttctggcgggcggccggcttggccgcggggtcgggctctccgcgcagtgcagagacgtctccaccctcagggacgaggctctgacgtggcgggaggtcgtttccgtgcgctgcgaggaggattccacgtgccgggaggacgcctcgaggatgcgagggagccgcttccccgagggggagagggagggcccctcgctgcggcgctgggaggtctccacccgccgggacgacgtctccacgcggcagaagagaggaaaactacggtactgccatagccgggagcgccacaacacgatgacgtggaagcaccatggtccttcgaaggctaaaacactggactcctgcccctcaggcgctcccacggcccgggccccgccccctcgctattttggagccagcgcgggtggagccatcccagggctggtcggggatgggcggagccgccccgccccatatcccacagtgccccgggaccggaagagggagccgtggtttccggaacttcgcccgcgtctctgggcttttgctctgtcaggctggtggcgttttggtgtcttcgtttgttatggccgctgctgtcgctatggagacagaggttacttcaaagacaaagcttttgttaattatcttaaatacttgctttactggaaagacccagaatatgccaagtatctaaagtaccctcagtgtttacacatgttagagctgctccaatatgaacacttccgaaaggagctggtgaatgctcagtgtgcgaaatttattgatgaacagcagattctacattggcagcactattcccggaagcggatgcgccttcagcaagccttggcagagcagcaacagcaaaataacacatcgggaaaatga

SEQ ID NO: 3138 - DNA, 1220 bp, Homo sapiens
  SIMILAR (79)..(489): 621254mologous to Homo sapiens CGI-125 protein,accession number AF151883,Smith-Waterman Score=357.
cgtggtttccggaacttcgcccgcgtctctgggcttttgctctgtcaggctggtggcgttttggtgtcttcgtttgttatggccgctgctgtcgctatggagacagatgatgctggaaatcgacttcggtttcagttggagttggaatttgtgcaatgttacgccaaccacaataccctcatctttctgccccaaaggaggttacttccaaagacaaagcttttgttaattatcttaaatacttgctttactgggaaagacccagaatatgccaagtatctaaagtaccctcagtgtttacacatgttaggagctgctcccaatatggaacacttccgaaaggaggctgggtggaatgctcagtgtggcgaaatttattggatggaacaggcaggtttctacattgggcaagcactattccctggaagcggatggcgccttcagcaagccttggcagagcagcaacagcaaaataacacatcgggaaaatgaaaaactggatacaaacgaggcacttaatacatgtatataatgtatttctttagtacagtgaagacaaaaaaaatgaaaactcttcctatctacctttattatgggtagcccctagaacctttagtgtgctttttcatccaactttttattgttaataagactatttctgttaaaccctgaattgttctttgatttccctgtggatttgtaaggtgtttttcttttttacgcatttagcataatcagctgattaagaatggaaaagttaggtgctttagaccaaataaggcactgggggcatggggtaggggtgggccaccaagtatactgaattctaaggctagctgttcctgacatatagtagggcaagaccatctcctggaaccttactgtctcagatcaactactctaccactctactctaagatgtagtgagagtagcggagtccctgacctctttaaatcataggacaggaactgcataaaggttcttgaattctgcaggacaggaaataactgtattacctgctttgcaacggtggctttaagaatcactgaatcactgtggcctcacttgacctagtcatggcaggacaactagtggttagttactaactggactcttgactttagaacaaacatgaggagcctcaaatacttgtgttcatttgggaaagctaccattgatttgggaggtaccacaaaccaggtgctatgttaagtgcttc

SEQ ID NO: 3139 - DNA, 1522 bp, Homo sapiens
  SIMILAR (94)..(618): 991254mologous to Homo sapiens Human PRO1327 (UNQ687) amino acid sequence SEQ ID NO:218,accession number AAY99401,Smith- Waterman Score=942.
ttcgtggcgcgcctgaaggagcaggaaggggaaggaggcctgggaccccgataagagaaggggagagcgaggggacgagagcggaggaggaagatgcaactgactcgctgctgcttcgtgttcctggtgcagggtagcctctatctggtcatctgtggccaggatgatggtcctcccggctcagaggaccctgagcgtgatgaccacgagggccagccccggccccgggtgcctcggaagcggggccacatctcacctaagtcccgccccatggccaattccactctcctagggctgctggccccgcctggggaggcttggggcattcttgggcagccccccaaccgcccgaaccacagccccccaccctcagccaaggggaagaaaatctttggctggggcgacttctactccaacatcaagacggtggccctgaacctgctcgtcacagggaagattgtggaccatggcaatgggaccttcagcgtccacttccaacacaatgccacaggccagggaaacatctccatcagcctcgtgccccccagtaaagctgtagagttccaccaggaacagcagatcttcatcgaagccaaggcctccaaaatcttcaactgcccggatggagtgggagaaggtagaaccggggccgccggacctcgcttttcacccacgacccagccaagatctgctcccgagaccacgctcagagctcatccaacttggagcttgctcccaggccttttaaagtcgtctgtgtctacatcgccttctacagcacggactatcggctggtccagaaggtgtgcccagattacaactaccatagtgataccccctactacccatctgggtgacccggggcaggccacagaggccaggccagggctggaaggacaggcctgcccatgcaggagaccatctggacaccgggcagggaaggggttgggcctcaggcagggaggggggtggagacgaggagatgccaagtggggccagggccaagtctcaagtggcagagaaagggtcccaagtgctggtcccaacctgaagctgtggagtgactatatcacaggagcactggagggagagtggggctctctgtgcagcctcacagggctttgccacggagccacagagagatgctgggtccccgaggcctgtgggcaggccgatcagtgtggccccagatcaagtcatgggaggaagctaagcccttggttcttgccatcctgaggaaagatagcaacagggagggggagatttcatcagtgtggacagcctgtcaacttaggatggatggctgagagggcttcctaggagccagtcagcagggtggggtggggccagaggagctctccagccctgcctagtgggcgccctgagccccttgtcgtgtgctgagcatggcatgaggctgaagtggcacccctggggtctttgatgtcttgacagattgaccaactgtctccagccaggccacacctgtatgcggccgctcgggggatctccctacggacgc

SEQ ID NO: 3140 - DNA, 596 bp, Homo sapiens
  SIMILAR (166)..(381): 751254mologous to Homo sapiens PRO2852,accession number AF130079,Smith-Waterman Score=258.
  misc_feature (1)...(596): n = a,t,c or g
aaccctaacaatttnaacttgtaacgggaangaaaaaaacacgtttgtgcaagtgtgccatgtaaagttttacccataattatgtntaataattttgaaaacaggttcctcactctgtcaccccaggctggagtgcagtggcgtgatcttggttcaccgcaacctctgncctccctgggttcaagcaattctcctgcctcaggctccccagtagcttagattacaggtgcccgccaccatgacaggctaatttttgtatttttagtagagatggggttttgctatgttggtcaggctggtctcgaactcctgacttcaagtgatccacccacctcggcctcccaaagtgctggggttacaggtgtgagccactgtgcccggcctagttttgccttataattttaaaaatctgcttgatataatctagagttgtgtctcttttatcatcattaatactctaaatgtattatctttcattttctcttccttgattataactgccaaaatctaatcactattaacattgaatcaagtctaatattctccattctcttaatttctactttctactgttacttggctgaaattccacggca

SEQ ID NO: 3141 - DNA, 669 bp, Homo sapiens
atgagagcaagaaatctcatgacgaaactgacagtcatatccagaaaagaagaactacagcaagaggctgccgcgcaccgagaggtacagagtttaccaccaggtgaaatggaggaaagaagctcatctaaaacttgcccccaggtgtgcgatgggagaattctatcctgcatgatcaaagtccctcctggggaagagaaaaacactgaagaccaaggggcaggagtcactgacatgaagcgggatgtggtcccttcacaccgcccaaagtggatcaccatgaacatctaccgccaagaagagtggaagcgggaagcaggcagcaaaaatccacgacagagccttttccccaagctgctggttggtgacaagctggtgcccagtggtcaagtggattccgacgccccagagaagcacatcaactggaaggcccaggttccaccccaagggtgcacggcccagtctcagaagcccctgcgtgcctctctcaccatgaccccttcagatgtgttcagaaaggaactgcggtggtgttacttgcacgaaagtgaaagaactaatgaattctacgtgctagcacgaaatctcatgacgaaactgacagtcatatccagaaaagaagatctacagcaagaggctgccgttcaccgagaggtatcaagcttgtaa

SEQ ID NO: 3142 - DNA, 1118 bp, Homo sapiens
ttagcaaatgtttatttatatcaaaatacaaaacatttctgaagcagagtaatgttacatgaggagcaattaaatactaaacgtcttttcatcagtttaacttgcaacactcccggggtacctgcactggctgcacatctcatcatttgatgtgtgccttcttttttctcatttgcttatgcacgtgtttgctcattttgatttgtaattcaggatatgaacatgcagtgttactggggatgagttggttagtacttagcaagcctggaaatacctcagtctaaagttccagaatcaagaccatcccatcaagtaccttcctcccagtccctggactctgagactccaccctccaatgccacaggcaaccccctgtggacaggaagtgtgtgtgcaggcttgcctcttcccccacctcctactttcagaccgcccaaagtggatcaccatgaacatctaccgccaagaagagtggaagcgggaagcaggcagcaaaaatccacgacagagccttttccccaagctgctggttgttgacagtgggaaagagggacagggcccaccctgatccatgggagagtgattctcacacatctccctattcccgactcttgctctatatagtagacagaggtagcaagacagaaacaactcctcagatacctccaccttctaccaaagggaaaagcaccaaaattcaatgtccattctgctgtggggaccaaggaacgtgtcccaagcatggggaagagctcaggctcctggcagtggctgtgggccgtaaaagctccatcagagcacactcatccacctgtcgccccaactgatgccacaagcggttcccaggcctcctccttactccacataaagctgatctcaatgacctttgctccaagtgccttaagggctggctcttcagagaagctggaggtcccctctgacacccaaccttacctcatcttgctgagcagtggagcagaaaggtcacaggtaggcactaacatcccctccacactgtacaatttcaaggtaggggctatggccccatcttccctttccctccccaaaatgaagagtcatgttggagactgaggaatagaatggtgcggacgcgtggg

SEQ ID NO: 3143 - DNA, 1226 bp, Homo sapiens
ggctgcttggtgacaaagatccaggaaccactggctgtcttaatggaagtgcaggagggggcttcctcagggaccccagaaccacccaactggctggagcatcccgtcctccggttctcaccgtgtggcaaacaaaaccagtcgcgttggcgggggctgggcgtggaggcacaggcctgctcaccactgctgctggggtggggtctcctgctcacggacagcccagggaggggccctggagtttcaggcaggagaaatggttccaattgaaaacagcagatcaatgtgggagtggtgaggactctgcaactgggtgaaaaagcagctggagcagatgggcgtttggcactgttaggtccccatgtggccgtcagcaccgggacatcggagccacggataattcgggaaggtctggtcctgcagagcagcggccccaatcgtccccagcagcgcaatgtctgcggccggcggatccaggctcacctttcatcctaggaaccttccaccgcgaacgccaacccaggacagcgctgctcttacttgaagttatcagacagagcggcaggtttactcttcgaggggattaaacccagcgggaaccctggacctacggccggtcatcagacgtcaacaggtaaaatcctcaaaaatacatgatcccttttgtgtctgtctcaggtgtacaatgaagtctgaattccatgtttaaacaaacaaagaaaaacttggggtctgaagtgaaatcggacaccccccgagttaatgccaacactctctatgtcacgttccgggcggagaggctgttaggtggtccgtggctcggcagctcctggcttcccaacaggcatctgtccggtgcccgggcctccccggcagccttggtgtgtgccttgctgcgtttctgtctgtcctcccggacaaaggcggctggccgtgcagcgcggagcggaggggctgtcttgacacattcctcaagatgctgagctccaacctcctccccatgcccgacagggaggcctggggagaggaggtggtgccgagggagaaggaaaggaaagcaaagaattcccagaatcatacaatcagttgtctgaacttgtttatgtgtttttgtcttaaaccacgggaaggcaggcgatcaaatggaaagggctgggtgtgtccaggtgccgccgatgcccacaggccgccgcgggctgttctcctccgtctgtgggtgcggccgc

SEQ ID NO: 3144 - DNA, 357 bp, Homo sapiens
  SIMILAR (177)..(1): 961254mologous to Mus musculus putative,accession number AK011176,Smith-Waterman Score=306.
ccatctaccctgtctgtcttctgtgaggtgcgagggactaagagaacgagattcttgaggtcgtacaacttggctcaagagtctgtgtttttcatttttatcatctccactgttgtaggcatcactgtccggagaatgttcacgccggcgcttcggggactgtctagggctgggagatgttcaatacagaattgtacatttgaaagataaatctaagtgggctgaaacaatgtggcagcaactgctgtgatgtttggtctggtcttccctttagtactttcacttaagtaccaggtctatttttttaaggttttggctcttatgaatttctgcagtagtagttaatgtatgtatcgg

SEQ ID NO: 3145 - DNA, 1479 bp, Homo sapiens
  SIMILAR (202)..(1167): 1001254mologous to Homo sapiens tenascin-M1,accession number AF100772,Smith-Waterman Score=1826.
atgtatgaacgtgtttacgtctccacggacattgccatcaaactgtgctgcaagcttttgaatcgtcagtttgacaggctttacaagaagcatagcacaggatctgcatccggtgagggcctcaaagcccttccactcatcgtggaaggagaaggggagccagtgtgtgcagagatcacaaggcaagagagagaagagggagcagtgcatttgttcggcctgacttggcagttgcaaccagttgaaggagagctgtatgcaaatggagttagcaaagggaacagggggaccgagtccatggacactacttactctccaattggaggaaaagtttctgataaatcagagaaaaaagtgtttcagaagggacgggcgatagacactggagaagttgacattggtgcacaggtcatgcagaccattccacctggtttattctggcgtttccagattactatccaccatccaatatatctgaagttcaatatttctttagccaaggactctctgctgggaatttatggcagaagaaacattccacctacacatactcagtttgattttgtaaaactaatggatggcaaacagctggtcaagcaggactccaagggctctgatgatacacagcactcccctcggaacctgatcttaacttcgcttcaggagacaggtttcatagagtatatggatcaaggaccttggtatctggcgttttacaatgatggaaaaaagatggagcaagtattcgtgttaactacagcaattgaaataatggatgactgttcaaccaattgcaatggaaatggagagtgtatctctggccattgtcattgtttcccaggattccttggacctgactgtgctagagattcctgccctgtgctgtgtggtgggaatggagaatacgagaaaggacactgtgtctgccggcatggctggaaggggccagagtgtgacgttccggaagaacaatgcattgatccaacatgctttggccacggcacctgcatcatgggagtctgcatctgtgtgccaggatacaaaggagaaatatgcgaggaagaggactgcctagacccaatgtgttccaaccatggcatctgtgtaaaaggagaatgtcactgttctactggctggggaggagttaactgtgaaacaccacttcctagcagtgctcaggacacggaacttttcttctggacgctggagtatgcagctgtgatcccaagtggacaggatctgactgctcaacagagcacaaaggagggagcagtagactatttttgtgagaagaagccttacagtcagctatatgaagtgacaatagatcccaaaaggaagtatttacaaggtgtgtctgtccctgtatatgagagatcctatggagaaagtgtctaccactacagcttgccctgctgccatggaaattctctgacaggggaggataaagtagaaaggctctgtggtggagatggctga

SEQ ID NO: 3146 - DNA, 4512 bp, Homo sapiens
  SIMILAR (505)..(4179): 861254mologous to Homo sapiens dJ1052M9.3 (mouse DOC4 LIKE protein),accession number AL022718,Smith-Waterman Score=5376.
gtgcgattagagtggccaacagaccttgcagtaaatcctatggacaattcattgtatgtcttggataacaacattgtgctgcaaatttctgagaacaggcgtgttcggatcatcgcaggacgccccattcactgccaggtgccaggcatcgatcatttcctggtcagcaaggtagcaattcactccactctagagtcagcgagggccatcagtgtctcccacagcgggctgctcttcatagctgaaacagacgagaggaaagtaaaccgcattcagcaagtaaccaccaatggggagatctacatcatcgctggtgcccccactgactgtgactgcaaaattgatccaaactgtgactgtttttcaggtgatggtggctatgccaaagatgcaaagatgaaagccccttcctccttagcagtgtcgcctgatggaaccctctatgtggcagacctcggaaatgttcgaattcgtaccatcagcaggaaccaagcccacctgaatgacatgaacatttatgagattgcttcacccgctgatcaggaactgtaccagttcactgtaaatggaacccacctacacaccctgaacttgataacaagggactatgtttataacttcacctacaattctgaaggtgacttgggcgcgattaccagcagcaatggcaattcagtgcacattcgccgtgatgcaggcggaatgccgctatggcttgtggtgcctggcggacaagtatactggctgactataagcagcaatggagtcctgaaaagagtgtcagcccaaggctataatctggccttaatgacctatccaggaaacacagggcttctggctaccaaaagtaacgaaaatggatggacaaccgtttatgagtatgaccccgagggacacctgaccaatgcaacgtttcccactggagaggtcagcagcttccacagtgacctggagaagctgacaaaagtggagctagatacttccaaccgtgaaaatgtcctcatgtcaaccaacttgacggcaactagtaccatatatattttaaaacaaggtggtgacaccagacactctaagagtacactaacttttgttagtggtattttgtggagtacggcaactgtgatggtgggcccaggtgaaaatactcaaagtacctatcgggtgaatccagatggttccctgcgtgtcacttttgccagcgggatggagatcggcctcagctcagagccccacatcctggcaggggcagtcaaccctaccctgggcaaatgcaacatctcattgcccggagagcacaatgcaaacctcatcgagtggcggcagaggaaggagcaaaacaaaggcaatgtttcggcttttgaaaggaggctgagggcccacaacagaaacctactctccatagattttgatcatataacccgcacaggaaagatctatgatgaccatcgaaaattcacccttcgaattctttatgaccagactgggcgacccattctgtggtctcctgtaagcagatataatgaagtgaacatcacatattcaccttcgggattggtgacgtttattcaaagaggaacgtggaatgaaaaaatggaatatgaccagagtgggaaaattatttcaagaacttgggctgatgggaaaatttggagctatacctacttagaaaaatctgtgatgcttctcctacacagccagcggcgttacatctttgagtatgaccaaccagattgtctgctctcagtcaccatgcctagcatggtgcgtcacagcttacaaaccatgctttcagtgggctactaccggaacatctacaccccaccggacagtagcacttcttttatccaagactatagtcgagatggccgattgctacagaccctgcatctggggacagggcgcagagtcttatacaagtacaccaagcaagcaaggctttctgaggttctctatgataccactcaggtcacattaacatatgaagagtcttctggagtgattaagacaatacacctgatgcatgacggattcatctgcacaatcagatacaggcaaacaggacctcttattggacgccagattttcagattcagtgaagaaggccttgtgaatgcacggttcgactacagctacaacaatttccgagtcacaagcatgcaagctgtaatcaatgaaacccctttgcctatagatctttaccgatatgttgatgtctctggcagaacagagcagtttggaaaattcagtgtaattaattacgatttaaatcaggtcataactactacagtgatgaaacacaccaaaatcttcagtgccaatggacaagtcattgaagtccaatatgaaatcctaaaggcaattgcctactggatgaccattcaatatgataatgtgggccgcatggtaatatgtgacataagggtaggagtagatgccaatataacaaggtacttctatgaatacgatgctgatgggcaacttcagactgtttctgtaaatgacaaaacccagtggcgttatagttacgatctgaatggaaacatcaacctcttaagccatgggaagagtgctcgtcttactcctctccgatatgacctccgagaccgcatcaccagattaggagaaattcagtataaaatggatgaagatggctttctgaggcagaggggaaatgatatttttgaatataattctaatggcctgctgcagaaagcctacaataaggcttctggctggactgtgcagtattactatgatgggcttgggcgacgtgtcgcgagtaagtccagcctagggcagcaccttcagttcttttatgcagaccttaccaaccccataagagttactcatttgtacaaccacacaagctcggagattacatctctgtattatgatctccaaggtcaccttattgccatggagttaagcagtggtgaagaatattatgtagcctgtgataatacaggtaccccactagctgtgttcagcagccgaggtcaggtcataaaggagatactatacacaccttatggcgatatctatcatgacacttaccctgactttcaggtcattattggttttcatggaggactctatgatttccttactaaattagtgcacctggggcaaagggattatgatgttgttgctggcagatggacaacgcctaatcatcacatatggaaacagttgaacctccttcctaaaccattcaacctctactcctttgaaaataactacccagttggcaaaattcaagatgttgcaaagtataccacagacatcagaagttggttggagctatttggtttccaattacacaatgtactacctggatttcccaaacctgaattagaaaatttagaattaacttacgagcttctacggcttcagacaaaaactcaagagtgggatcctggaaagactatcctgggcattcagtgtgaactccagaaacagctcaggaatttcatttccttggaccaactacctatgactccccgatacaatgatggacggtgccttgaaggagggaagcaaccaaggtttgctgctgtcccttctgtttttgggaaaggtataaaatttgccatcaaggatggcatagtaacagctgatattataggagtagccaatgaagatagcaggcggcttgctgccattctcaataatgcccattacctggaaaacctacattttaccatagaggggagggacactcactacttcattaagcttgggtctctggaggaagacctggtgctcatcggtaacactggggggaggcggattctggagaatggtgtcaatgtcactgtgtcccagatgacttctgtgttgaatgggaggactagacggtttgcagatattcagctccagcatggagccctgtgcttcaacatccggtatgggacaactgtcgaagaggaaaagaatcacgtgttggagattgccagacagcgcgcagtggcccaggcctggactaaggaacaaagaaggctgcaagagggggaagaggggattagggcatggacagaaggggaaaagcagcagcttttgagcactgggcgggtacaaggttacgatgggtattttgttttgtctgttgagcagtatttagaactttctgacagtgccaataatattcactttatgagacagagcgaaataggcaggaggtatttgttacagcaatactcctcctctcagtaccaaaatctgtattggtctgttcaggctgccataacaagataccatagacagggtggcttaaacaacagaaatttatttctcacaattctggagactgggaagtccaagatcaaggtgctgcaaatagctgccatccagcccagtggcaagcaggagcttctcgccggtttccctgctgattttgccatgatacacagccactgcgtccatggcctggtggactcttgggcaggccgaggaggagaactgtgcaagggagatgccgctgctactgcagccaggcacaagtcaaccacctga

SEQ ID NO: 3147 - DNA, 1002 bp, Homo sapiens
  SIMILAR (403)..(1002): 991254mologous to Homo sapiens arylamine acetyltransferase,accession number X17059,Smith-Waterman Score= 1053.
gcgcttgcgagtcctccaaagagagtctagggtacaggtccgatagtagaataacacagaaggcaggccaggggcactgtgagatggtaaaagagatctgaagggatccagacgtgtacagaagggccatgctgttattactcttacacaaggaggcagccctcgagccacagggtccagctgttggctataatagcctaccggtctctgatgatcaccatgtttctggtaaaagcaaacaaatatggctgtctggatctacaggaatactgaaaaaggcaccgcagagattcacaactgagaaatactggctggtaaattcaagccaggaagaagcagcaatctgtcttctggattaaaactgaagatcaacctactttcaacttactaagaaaggggatcatggacattgaagcatatcttgaaagaattggctataagaagtctaggaacaaattggacttggaaacattaactgacattcttcaacaccagatccgagctgttccctttgagaaccttaacatccattgtggggatgccatggacttaggcttagaggccatttttgatcaagttgtgagaagaaatcggggtggatggtgtctccagggcaatcatcttctgtactgggctctgaccactattggttgtgagaccacgatgttgggagggtatgtttacagcactccagccaaaaaatacagcactggcatgattcaccttctcctgcaggtgaccattgatggcaggaactacattgtcgatgctgggtttggacgctcataccagatgtggcagcctctggagttaatttctgggaaggatcagcctcaggtgccttgtgtcttccgtttgacggaagagaatggattctggtatctagaccaaatcagaagggaacagtacattccaaatgaagaatttcttcattctgatctcctagaagacagcaaataccgaaaaatctactcctttactcttaagcctcgaacaattgaa

SEQ ID NO: 3148 - DNA, 639 bp, Homo sapiens
ctttgatatcaaccaagagatcaaataggtattgtgttattgagggcacagaaagaaagataggttgatatgttactattgttaggtataaaagcacaaagaaatagactttctgagcttagtgtatgtggaagaaattatatacaaatcaattggtgaagtactaagtctttgatgaatgaacaaatgaaaaggaacagataattcaaaaggaagaaaatgtaaatgcctaataaacatgtgaaaagatattgagcctcctagtaatgagaaatttttgcttctcatgtgagctgattttaaaaattcccaatgatatggctgccttgatatcgctggggggaagtactcaatccatgtaatttttttgaagagcattctggcagtatttcaagagcctaaatatgttcatgtcctttgacccagcaattctgctaataggaatatatcccaaggaaaagtcataaatacagaaaatactttatgcccagaagtgtctgagatattacttatggtagtaaaaaattataattaatatatttgtcacactaggaatgatcaggcaggattgatctatatctatatagtggaatatacttagcattaaagtaggtttgtgaattcttcacccttaaaggg

SEQ ID NO: 3149 - DNA, 12297 bp, Homo sapiens
  SIMILAR (344)..(6739): 961254mologous to Mus musculus Ten-m1,accession number AB025410,Smith-Waterman Score=11205.
tttagagcaccgctgccagcatccggaggagagcaatgcgggggcccgagcggcagctcgaacagtaatgtggatttacagtcgtttcccgcaggagtcggccgagacgccctaagtcccgggcactggcagcgcccggcggagccgagcacctggcgagggggcgggggaacagcacctggggacgccgccgaaacttgcgcttggaataggaattacaagggtgacctttattccgctgtctcctttttgattcccataacttctggacctatcaaggactgcttgcattaaaggacttcctcatcctttttttcatgaaactgagcttgcttaatcagagatggagcaaactgactgcaaaccctaccagcctctaccaaaagtcaagcatgaaatggatctagcttacaccagttcttctgatgagagtgaagatggaagaaaaccaagacagtcatacaactccagggagaccctgcacgagtataaccaggagctgaggatgaattacaatagccagagtagaaagaggaaagaagtagaaaaatctactcaagagatggaattctgtgaaacctctcacactctgtgctctggctaccaaacagacatgcacagcgtttctcggcatggctaccagctagagatgggatctgatgtggacacagagacagaaggtgctgcctcacctgaccatgcactaagaatgtggataaggggaatgaaatcagagcatagttcctgtttgtccagccgggccaactctgcattatccttgactgacactgaccatgaaaggaagtctgatggggaaaatggtttcaaattctctcctgtttgttgtgacatggaggctcaagctgggtctactcaagatgtgcagagcagcccacacaaccagttcaccttcagacccctcccaccgccacctccgcctcctcatgcctgcacctgtgccaggaagccaccccctgcagcggactctcttcagaggagatcaatgactacccgcagccagcccagcccagctgctccagctcccccaaccagcacgcaggattcagtccatctgcataacagctgggtcctgaacagcaacataccattggagaccaggcattccctgttcaaacatggatctggttcctctgcgatcttcagtgcagccagtcagaactaccctctgacatccaataccgtgtactcgccccctcccaggcctcttcctcgaagcaccttttcccgacctgcctttacctttaacaaaccttacaggtgctgcaactggaagtgcacagcattgagcgccactgcaatcacagtgactttggccttgttactagcctatgtgattgcagtgcatttgttcggcctgacttggcagttgcaaccagttgaaggagagctgtatgcaaatggagttagcaaagggaacagggggaccgagtccatggacactacttactctccaattggaggaaaagtttctgataaatcagagaaaaaagtgtttcagaagggacgggcgatagacactggagaagttgacattggtgcacaggtcatgcagaccattccacctggtttattctggcgtttccagattactatccaccatccaatatatctgaagttcaatatttctttagccaaggactctctgctgggaatttatggcagaagaaacattccacctacacatactcagtttgattttgtaaaactaatggatggcaaacagctggtcaagcaggactccaagggctctgatgatacacagcactcccctcggaacctgatcttaacttcgcttcaggagacaggtttcatagagtatatggatcaaggaccttggtatctggcgttttacaatgatggaaaaaagatggagcaagtattcgtgttaactacagcaattgaaataatggatgactgttcaaccaattgcaatggaaatggagagtgtatctctggccattgtcattgtttcccaggattccttggacctgactgtgctagagattcctgccctgtgctgtgtggtgggaatggagaatacgagaaaggacactgtgtctgccggcatggctggaaggggccagagtgtgacgttccggaagaacaatgcattgatccaacatgctttggccacggcacctgcatcatgggagtctgcatctgtgtgccaggatacaaaggagaaatatgcgaggaagaggactgcctagacccaatgtgttccaaccatggcatctgtgtaaaaggagaatgtcactgttctactggctggggaggagttaactgtgaaacaccacttcctgtatgtcaagagcagtgctcaggacacggaacttttcttctggacgctggagtatgcagctgtgatcccaagtggacaggatctgactgctcaacagagctgtgtaccatggagtgtggtagccatggagtctgctcaagaggaatttgccagtgtgaagaaggctgggtaggaccaacatgtgaggaacgctcctgtcattctcattgtactgagcatggccaatgcaaagatggaaaatgtgagtgtagccctggatgggagggcgaccactgcacaattgctcactacttagatgctgtccgagatggctgcccagggctctgctttggaaatggacgatgtaccctggatcaaaatggttggcactgtgtgtgtcaggtgggttggagtgggacaggctgcaatgttgtcatggaaatgctttgtggagataacttggacaatgatggagatggtttaaccgactgtgtggatcctgactgttgtcaacaaagcaactgttatataagtcctctctgccagggctcaccagatcctcttgacctcattcagcaaagccaaactctcttctctcagcacacttcaagacttttttatgatcgaatcaaattcctcattggcaaggacagtactcatgtcattcctcctgaggtgtcatttgacagcaggcgtgcctgtgtgattcgaggccaagtggtggccatagatggaactcctctagtgggagtgaatgtcagtttcttgcaccacagtgattatgggtttaccatcagccggcaagatggaagctttgacctcgtggccatcggtggcatctctgtcatcttaatcttcgaccgatcccctttcctgcctgagaagagaacactctggttgccttggaatcagtttattgtggtagagaaagtcaccatgcagagagttgtatcagacccgccatcctgcgatatctccaactttatcagcccaaaccctattgtgcttccttcaccgctcacatcatttggagggtcctgtccagagaggggaactattgttcctgagctgcaggttgtacaggaggaaattcccattccctccagctttgtgaggctgagttacctgagcagccgcacccctgggtataaaaccctgctacggatccttctgacacattcaacgattcccgtaggcatgataaaagtacacctcacagtagctgtggaagggcgactcacacagaagtggtttcccgccgcaattaatcttgtctacacatttgcttggaacaagaccgatatctatggacagaaggtttggggcctggcagaggctttggtatctgtgggatatgaatatgaaacgtgccctgactttattctctgggagcaaaggacagtcgttttacaaggttttgagatggatgcttctaacctaggagactggtctttgaataagcatcacattttgaatcctcaaagtggaatcatacataaagggaatggagaaaatatgttcatttcccagcagcccccagtcatatcaaccataatgggtaatggacaccaaaggagtgtagcctgcaccaactgcaatggcccagcccacaacaacaaactctttgctcctgtcgccttagcttctggccctgatggcagtgtgtatgttggcgacttcaattttgtaaggagaatatttccctcgggaaactccgttagtattttggaattaagcacaagtcctgctcacaaatactatctggctatggaccctgtgtctgaatcactctatctatcagacaccaatactcgcaaagtctacaagttgaaatctcttgtggagacgaaagatctgtccaagaattttgaagtggtggcaggaactggtgatcagtgccttccctttgaccagagtcattgtggagatggtgggagagcatcggaagcttcactgaatagccctcgaggcatcacagttgataggcatggatttatttactttgtggatgggactatgattcgcaaaattgatgagaatgctgtgatcacaactgtaatcggctcaaatggtctgacttccacacaaccactgagctgtgactcaggaatggacatcactcaggtgcgattagagtggccaacagaccttgcagtaaatcctatggacaattcattgtatgtcttggataacaacattgtgctgcaaatttctgagaacaggcgtgttcggatcatcgcaggacgccccattcactgccaggtgccaggcatcgatcatttcctggtcagcaaggtagcaattcactccactctagagtcagcgagggccatcagtgtctcccacagcgggctgctcttcatagctgaaacagacgagaggaaagtaaaccgcattcagcaagtaaccaccaatggggagatctacatcatcgctggtgcccccactgactgtgactgcaaaattgatccaaactgtgactgtttttcaggtgatggtggctatgccaaagatgcaaagatgaaagccccttcctccttagcagtgtcgcctgatggaaccctctatgtggcagacctcggaaatgttcgaattcgtaccatcagcaggaaccaagcccacctgaatgacatgaacatttatgagattgcttcacccgctgatcaggaactgtaccagttcactgtaaatggaacccacctacacaccctgaacttgataacaagggactatgtttataacttcacctacaattctgaaggtgacttgggcgcgattaccagcagcaatggcaattcagtgcacattcgccgtgatgcaggcggaatgccgctatggcttgtggtgcctggcggacaagtatactggctgactataagcagcaatggagtcctgaaaagagtgtcagcccaaggctataatccggccttaatgacctatccaggaaacacagggcttctggctaccaaaagtaacgaaaatggatggacaaccgtttatgagtatgaccccgagggacacctgaccaatgcaacgtttcccactggagaggtcagcagcttccacagtgacctggagaagctgacaaaagtggagctagatacttccaaccgtgaaaatgtcctcatgtcaaccaacttgacggcaactagtaccatatatattttaaaacaagaaaatactcaaagtacctatcgggtgaatccagatggttccctgcgtgtcacttttgccagcgggatggagatcggcctcagctcagagccccacatcctggcaggggcagtcaaccctaccctgggcaaatgcaacatctcattgcccggagagcacaatgcaaacctcatcgagtggcggcagaggaaggagcaaaacaaaggcaatgtttcggcttttgaaaggaggctgagggcccacaacagaaacctactctccatagattttgatcatataacccgcacaggaaagatctatgatgaccatcgaaaattcacccttcgaattctttatgaccagactgggcgacccattctgtggtctcctgtaagcagatataatgaagtgaacatcacatattcaccttcgggattggtgacgtttattcaaagaggaacgtggaatgaaaaaatggaatatgaccagagtgggaaaattatttcaagaacttgggctgatgggaaaatttggagctatacctacttagaaaaatctgtgatgcttctcctacacagccagcggcgttacatctttgagtatgaccaatcagattgcctgctgtcagttaccatgcctagcatggtgcgccacagcttacaaaccatgctttcagtgggctactaccgtaatatctacaccccaccggacagtagcacttcttttatccaagactatagtcgagatggccgattgctacagaccctgcatctggggacagggcgcagagtcttatacaagtacaccaagcaagcaaggctttctgaggttctctatgataccactcaggtcacattaacatatgaagagtcttctggagtgattaagacaatacacctgatgcatgacggattcatctgcacaatcagatacaggcaaacaggacctcttattggacgccagattttcagattcagtgaagaaggccttgtgaatgcacggttcgactacagctacaacaatttccgagtcacaagcatgcaagctgtaatcaatgaaacccctttgcctatagatctttaccgatatgttgatgtctctggcagaacagagcagtttggaaaattcagtgtaattaattacgatttaaatcaggtcataactactacagtgatgaaacacaccaaaatcttcagtgccaatggacaagtcattgaagtccaatatgaaatcctaaaggcaattgcctactggatgaccattcaatatgataatgtgggccgacatggtaatatgtgacataagggtaggagtagatgccaatataacaaggtacttctatgaatacgatgctgatgggcaacttcagactgtttctgtaaatgacaaaacccagtggcgttatagttacgatctgaatggaaacatcaacctcttaagccatgggaagagtgctcgtcttactcctctccgatatgacctccgagaccgcatcaccagattaggagaaattcagtataaaatggatgaagatggctttctgaggcagaggggaaatgatatttttgaatataattctaatggcctgctgcagaaagcctacaataaggcttctggctggactgtgcagtattactatgatgggcttgggcgacgtgtcgcgagtaagtccagcctagggcagcaccttcagttcttttatgcagaccttaccaaccccataagagttactcatttgtacaaccacacaagctcggagattacatctctgtattatgatctccaaggtcaccttattgccatggagttaagcagtggtgaagaatattatgtagcctgtgataatacaggtaccccactagctgtgttcagcagccgaggtcaggtcataaaggagatactatacacaccttatggcgatatctatcatgacacttaccctgactttcaggtcattattggttttcatggaggactctatgatttccttactaaattagtgcacctggggcaaagggattatgatgttgttgctggcagatggacaacgcctaatcatcacatatggaaacagttgaacctccttcctaaaccattcaacctctactcctttgaaaataactacccagttggcaaaattcaagatgttgcaaagtataccacagacatcagaagttggttggagctatttggtttccaattacacaatgtactacctggatttcccaaacctgaattagaaaatttagaattaacttacgagcttctacggcttcagacaaaaactcaagagtgggatcctggaaagactatcctgggcattcagtgtgaactccagaaacagctcaggaatttcatttccttggaccaactacctatgactccccgatacaatgatggacggtgccttgaaggagggaagcaaccaaggtttgctgctgtcccttctgtttttgggaaaggtataaaatttgccatcaaggatggcatagtaacagctgatattataggagtagccaatgaagatagcaggcggcttgctgccattctcaataatgcccattacctggaaaacctacattttaccatagaggggagggacactcactacttcattaagcttgggtctctggaggaagacctggtgctcatcggtaacactggggggaggcggattctggagaatggtgtcaatgtcactgtgtcccagatgacttctgtgttgaatgggaggactagacggtttgcagatattcagctccagcatggagccctgtgcttcaacatccggtatgggacaactgtcgaagaggaaaagaatcacgtgttggagattgccagacagcgcgcagtggcccaggcctggactaaggaacaaagaaggctgcaagagggggaagaggggattagggcatggacagaaggggaaaagcagcagcttttgagcactgggcgggtacaaggttacgatgggtattttgttttgtctgttgagcagtatttagaactttctgacagtgccaataatattcactttatgagacagagcgaaataggcaggaggtaacaaaaatatctctgcctttgcgtcaccaaagactgcctgtttttaaaacataaaatggtttattgtattggttttctagatcagaactctgtatatgtaaatatggaggaaaaacatatccaactgcctttcaatgtgacggaagatggtattttaatattgtttgtttaaactctttaagaaatgacagagatttttagttcttgtgtggcagtattcaaaataacacaaggtagaactcaaacagctaaaaacagttttcagaaagcaccactttcaatttgccgagccatgcatatgttccaatatccagaaagaacccaaggttctctatctctattgtgagaagcagtttcatccttaactgttggcagaacttacgggctatttgaataggtggtgcaatagtatctgaaacttgcctttcgaaagactgccagccctttgacgttttccagatctgttataggaaacttaaaaacaggtgtaaaatgtcttcagccaccatctcctagagtgaggacccaattgcccttccttcttgattattcctccttgcttgttaaagtaaatgccatattgttgtgctgtgttttggcgtgtggtggctgggttctgtctaccatgcttccctgtgggtgtggtaaccagactgtatagccgctatttgctcgtgtgtacatgataccaaagcagctggccagcgtgacctctctcacacgacctgttttgactcaattttttactaaaagttgttcagctgtattggtatcatgtaaacatagcttttattaacctgggtaggaatttctcatttatatataggatgtgttttggtcatagtttcacattagtgattcagtatctatacactgacccaatggttttgtgcacatgaacggtaatttacttaaaagtatgattctggtacaaaaacaaacaaaggctttagcaggcatacgtgtctgggatgccgatacatacattaactactactgcagaaattcataagagccaaaaccttaaaaaaatagacctgggtacttaagtgaaagtactaaagggaagaccagaccaaacatcacagcagttgctgcccacattgtttcagcccacttaggatttatctttccaaatgttacaattctgtattggaacatctcccagccatcttcagggaaatcggatccagtaaatcctttccaaccgaaaacatttcaactaactatagagaggcagactcatttttactaaaataatttatacagttagttattttcgttctccgtacttacccatttatctttatttaatcgtctctactgcctaggaaaataactattttccaggacgggttatttgttctgcgatcatttaaaatttggagaaaggtcaggattagtgttaatatcagctgcagtttctcaatctctaggaatcctgcagtaaaacaagccccttggtgagctggaagatttgtgcccagtgacaaagagatagtttgtaaaatgctgtgtaattgtaagttaccacaaatgaaaatacatgacagcacaatgtggcccgtagaaaattcccctgagccagcttctgcactttcatcaccgaatctgaacatttgctatgtctgaaggcaaatttatgatggaatgttagtttggattctttccagatgctacctaaatgcagtgtggggtcattgccttgctttgcgatgacagtttctttgaaaatatgcaaagtcataagctcatgttaaggtttttcaagagtctgcctcctactacacaaaggaaagcaagggaaaggaaatgaccctggcaaacagtagggaagggtgtattcaaacatttcattttcaaaaccttcgggttagaataccacttacacatgtattctgagagacagaattcatgaggaactcatctctctttataactggaaacacaccagcttgatatattgctaatccatactaaaatcatattattgggttttttctgaatcaggcctgtattaatggtacagtatttattcagaatggaattctaaaattactaacaaacttgttgaaaatttgaatacctccacaccaacctaaaaatggaccttaagttcctagaacctctgatgttcttttaaattaatggaaaaataatttgtgaactgtatatagagagtgcattcataaatgtgattatgtattttatcacaaatccaaaatgtcaatattagagtctattttgcttatattttaagcaattatacgtttttgcaattcattgatgatgtatcattttcaaactgctttaaatatccattagaaacaaatatttgaagcttttacttaatagtgattaccttgaactgtgcatttctagtttgtaatacgtatttggttggttcgtgcctttagtttgttaaagttacatttgtattatattcaggaaatgcactttttattacttacagctgtggttttaatactgccttgaactattattattctttttacaactcctaaagcttgagggaggaaagaaaaaaaaaacaaaactactaatcagtagtaaatcgaagagaaacattttggcatttcttaagaagaagatggagatattgagtatatcacttcctattcagctgaatagaaagaatgccttcattgacttgcagttctgcagtttaaattattgaaagaacaattcgtttgcatttcctgatgaaagtaaaagcatttttcagagaaacatatgaatttctcatacccagcagacagatggctgacactgcacagccacacaccattcgagtaagttaaagtgagagcatagtagttggactctcctatgaagaacattctgggctggaggcagggaatactccatggttgtttctttttcctacttaagcccattttgtttgtgcttttctgttttgttttgttttcactcttgcactacagtctagagatccaaatgaactgaaaagttcaaagtttaacacatttaaatatgtttacttttagttgtcattctaatcgttattgattagaagcatgactcctgaaggaaagggaaataaatctcaattcatactaacttgcaacaaaacacttttaccatataaataagtatatgatttatttttaacccaaaaaatgtataaaataagtgtgtcctttactgtcaatttatctagaagatctataatatatagactacatatatataatatatacaacatagccaaatgtatgaaaacttgacaatgtataatttggaattcacatgctacctatgtagacaggtatgaaattaagttataattttcatgaggacattttcatcactgttggacacagtttcaaggcattccctccatgttattttggactctttttctttgttttttctttaaaaaatatatttttaactagaccaggccccactataatatcacttaagagagtcagggcaaagtttttgcatttatgaagatgtgttcatgtaagggtgattgtaatggagttcattggtaatagaagcaaaagtacagtaacgaagtattgaaaagaaaattttggagacattggagcatattatatatagctatgtggaaagacataaggctacagatggaatggaacattcctgttttcttgaagaaattcacatacacatagctgacctgactagtacttcagctcttccacagccttctataaaggttctttcttctgcaaagaaaacaaaacaaaacaaaacaaaacaaa

SEQ ID NO: 3150 - DNA, 3188 bp, Homo sapiens
  SIMILAR (118)..(429): 571254mologous to Homo sapiens PRO2550,accession number AF130089,Smith-Waterman Score=259.
tttatacacccagactcttagtgttgcgtcctgccttgtttccttgttaaggatctatgcagacctcccgctttggcttagctagcgtgacattggctatcatttgacaagactaactttttttttttttttttttgactgagtctccctctgtcacctaggctggagtgcagtggcacaatcttggctcgctgcaaccttcacccttcacctcccaggtcgaagcgattctcctgcctcagtctcccgagtagctgggattacaggcgtgcgccaccaaatctggctatttttttattattattatttttagtagagatggggtttcaccatgttggccagactggtcttgaactcttggcctcaaattatctgcccacctcggcctcccaaagtgctgggattacaggcatgagccaccatgcccagctgacaagactaattttttatccctttggtttattggctacaacatcttcttggaatcagaggtgaattttttcttaccttgggatgcctgagactaggggagtatagaattccaattggtaattaaggcatctttctgctcctgatcagaagggcaggttagttgggagaggtcagatggcacaacagaagtcaccttgtaagtaaggcaaagactttgaaggcattagcgtttctcattacttaggtcaataaccttgagggaatcaatggcttttttgccgctctacctctttgtgtatctctttgacttttctttctctgtctagtttcctctgttctcagtttatattctatgttatcagtctctcctttccacagtacaaacattccatcctttctcctgtgcaattctgtctctccctcttattatctttatttgtactttttccttcctccctgtctaggcattgggcatgtgcctcttcttagcctgtgattttgccttgggactgatgataaattatttccagattcaatcagcccgggtcctaccccagtccaatcagaagtatgttggtggggaatcaacctgatcctgggccctttcttcttctccattttcattcgtaatccccctcagcagatctttacaaggcagttttccttataggcttcatgtatctttaggtctttgccttccaagcactgtacagaatactttgtggttcctttttagtctgacattttgtggagcagtgaagcgtgctcagagacataatcagctgaagagaaaaaatccacccatgggttttatatcagctaaatactaataattgattttgtttgatgtgcccataaatttttaaaagctgcaatataatataatgagggaccacaggtaatttctccctgtcatttgctttttggctgggatgggggtgggggagtaattgcttaaagttttaccctttacacattaaactctctataataatcttggtttggggcttgctaactgttgagctgttttaactaaactggtaggcaatcggagttgatttaaatgaaaagataatttaacaaatctatactataaaaagagacatttgcttaattgacatgtattttttccttctgagtcacctaaacatttactcttgacaccaactgttcatgatactgaatagacagtccatataagagaaattagtggacctaaagaagccagattgtaggtgttaatttattaaacagaattgcaaagcccttggaaatgtcactgcttggcaataccatatggcatgccaaaatttacaatgacttttctttataagttatccaaaagggatttgaacaaagtaagagggttatgccaaaatgtctccaatggtatggtcctgtaatatattgcagcttgaagccaatgatcccttatgacttgtatacaaactaatgcatgttttattggaattttgcatttcccacgggtggtaagttyctttaaaatgtttttgatcacctttttgtgccattaaacttgtacagaaaatgtttttatggccattttcaaagggagaaagtttaaaatggaaacagcccaccctttctgccctatagctgtagttagaattgagtacctgtagcaaaacagctgtaatttggtggttgtagtgttagaggtgttagcttgctagtgactagctttggagagtaaatgcatggtattgtacatcacatttcttaactcgttttaacctctgaaaagaatatattcttctttgtagtcctccytccccacccccttgcccctctcccctactcccctgcctccccagttgtccttacagttgtaaaatatctgatttggaggccccaataactcttgcccaagtaaagtcagcaaacaacaaacaaaccaaaatgtggggaaaaggcatttctcaaccatctctcagcagttattgatcatttcttaaggaacagcattgtgatcaaagactcaactttacgtaaaaatcagtggtaaattggggttgtatttggccatttgattacatttcaggattgaatagttttcagaatcacatgtaatccaaagacagtaggtagtgatgtcccttatccctgcagctgttttaagatagagacctcagaagactctgcttgaccgatgaccaataattatttgaaaaaaaaaaaaaaaaatgagagaaataaaacagatatttaagaactttagccacctatttagaatagttatagccagaaaaaaaaacaagggcatgagttcaaatgcattactatcagtgtcctaggcaatacctaacctactctgaaattgtgattcaaaagaagtatttgcaagaggcattctccttttttggtttgctgacccccacttggactggtaggtttggtgagccccccataaacccagctggagcagacccttttcatctcctgtgcctgtaacaccccctcttcccccaccccctccgcaattcaatgagggctttcttgggtcagaggacttcaaggttgtctagagaagtttgccatgtgggtaaaggtgctgtgaactgtgagtgctgaagattcgcagcattcaataccaggcagccaaagagctgctcttgcaattattttggctctcaagctctgtttttcatcgcattttcatttctgtgtacatttgcaagatgtgtgtaatgtcattttccaaaaataaaatttgatttcaataaaaaaaaaaaaaa

SEQ ID NO: 3151 - DNA, 506 bp, Homo sapiens
  SIMILAR (40)..(369): 1001254mologous to Homo sapiens recombination and sister chromatid cohesion protein homolog,accession number AF006264,Smith- Waterman Score=552.
  misc_feature (1)...(506): n = a,t,c or g
acgggngtttttactgatatgtctggccttcggcacgagccaaaagccctcaggcgagagctgcctgaggaggcagccgctgaggaggaaaggagaaagattgaagttccaagtgagattgaggtcccgagggaggccctggagcccagtgttccccttatggtgtctttagagatctccctagaggcagctgaagaggagaagtcccgcatcagcctcatcccaccagaagaacggtgggcctggcctgaggtggaggcgccagaagctcctgcattgcccgtggtgcctgaactccctgaggtgcccatggagatgcctttggtgctgcccccagagctcgagctgctctcactggaagcagtgcacagcccccgcaggatggctgcccgggtcttctacctgctcctggtgctctcagcgcaacagattcttcacgtgaaacaagaaaagccatatggtcgcctcctgatccagcccgggcccagattccactgagggtagag

SEQ ID NO: 3152 - DNA, 417 bp, Homo sapiens
  SIMILAR (3)..(185): 1001254mologous to Homo sapiens recombination and sister chromatid cohesion protein homolog,accession number AF006264,Smith- Waterman Score=325.
ccatcagaggccctgcggagttgttcagaaccccaactctctctggctggctaccccctgaactactgggtctctggacccattgtgcccagccacccccaaaagccctcaggcgagagctgcctgaggaggcagccgctgaggaggaaaggagaaagattgaagttccaagtgagattgaggtaactgcaccacctgtttactgcatcgccccagtgccagggtctgcctgaccagctggctgccctctcctgctatgagagccaacagcacaggctcactggccttgtgccttctgaggcccaagtcccagatgcttggggtcttagttctacttctcccatccccaggtcccgagggaggccctggagcccagtgttccccttatggtgtctttaggtaagcacctagagaaga

SEQ ID NO: 3153 - DNA, 445 bp, Homo sapiens
  SIMILAR (81)..(443): 1001254mologous to Homo sapiens Human gene 54-encoded protein fragment, SEQ ID NO:397,accession number AAY86482,Smith-Waterman Score=630.
gctgctctcactggaagcagtgcacaggtaccagggaggtggcaccttgatggggtggacccgggctgaagcctctgctaatggttcttgatccctatagggcagtggcactggagctgcaggctaacagggagcccgacttcagcagcctggtgtcacctctcagcccccgcaggatggctgcccgggtcttctacctgctcctgggtgagtgtatgcatgtgtgtgtgtgtatgtggggcagggacacagagaccagaggcccgtacagggactcccccgacctgccctctcctcgcctcttgaccagtgctctcagcgcaacagattcttcacgtgaaacaagaaaagccatatggtcgcctcctgatccagccggggcccagattccactgaggttagagtccatttacaaagctgccaggaaaccggccacttctagtaa

SEQ ID NO: 3154 - DNA, 508 bp, Homo sapiens
gcgtccgcccaagccagtgcaaggcccaggggcctgacatcgctcccagcgctcgaggaccgaggcctgctgtggaggacaccgtgctccctcgggacctgctctggattccggcccggacgtccccttggagctctgcatctccaacctggaacccaacccagaagtctcaagtttgacgcatcacgtggcgtgcggatccactgagggtccacagagaggggcgcccatctcctgcgtctcagttatcctggtaattgtgtatctgcccattgttcgttgcctcattaacttggctttctaggtgcacccaccttgccaccagagaagaccaaatcctgacttctctccaaggtgttgggaattctgtgccctaaagaaattccgactcaaaatcgaacggggatctggtggaatcgagggtgaaagaccagagggacaatgttctactatcccaacgtgcttcagcgccacaccggctgctttgccaccatctggtaagggcggg

SEQ ID NO: 3155 - DNA, 3135 bp, Homo sapiens
  SIMILAR (824)..(1099): 921254mologous to Homo sapiens Rec8p, a meiotic recombination and sister chromatid cohesion phosphoprotein of the rad21p family,accession number BC004159,Smith-Waterman Score=438.
ttgggggaagggcggggtctaacctcaggtcaggcgccgtgcaaggtacatcttggcacccggaagaggcccagtacagttgcccccgaggtgacccgacctcccctaccaattgaggcgcccttgttgccaggcttgcggcgggggagcggcgggagagcgacggggatgcgctcattggtcaaggaaggggcgcctgttactagaggcgagaaccggagcccattggtcggaacacctcacaatggaccccagcggcgcgcaaaatccttatgattggtttgctggctgcctcgggagaccctgttgccaggatacttggcgttcccgacccgacccccgttccccattggctgtcagggcaaaagccgccatctaatgaggagcgaggtgcggtgccccgaagcgctcgcttcccgcggtgcgatctagtcctgcagtaggcggcccggggccacaccgcggccgcccaagccagtgcaaggcccaggggcctgaacatcgctcccagcgctcgaggaccgaggcctgctgtggaggaaacccgtgcctccctcgggacctgctctggattccggcccggacgtccccttggagctctgcatctcccaacctggaacccaacccagaagtctcaagtttgacgccatcaccgtggcgtgcgcatcaacccgagggtccacagagaggggcgcccatctcctgcgtctcacttatccttggtgttgggaattcttgtgccctaaagaattccgactcagatccgaaccggggatctggtggaatcgagggtgaaagaccagagggaacatgttctactatcccaacgtgcttcagcgccaccaacggctgctttgccacaatctggctggcggcgactcgcggcagccggttggtgaagcgcgaatacctgagggtgaatgtggtgaaaacctgcgaggaaatcctcaattacgtgctggtacgagtgcaacccccgcagcccggcctgccgcggccccgcttctccctctatctctcagcccaacttcagatcggtgtgatccgcgtctattctcaacaatgccagtacctcgtggaggacatccagcacattttgttatcgcctccaccgtgcccagctgcagatgcgaatagatatggagactgagctacccagcctgctgcttcctaaccacctggccatgatggagaccctagaagatgctccagatcccttttttgggatgatgtctgtggatcccagacttcctagtcctttcgatatccctcagattcgacacctcttagaggctgcaatcccagagagagttgaagagatccctcctgaagttcctacagagcccagggagccagagaggattccggtcactgtgctgccacctgaggccatcacgatcctgggaggcagagccattacggatgctggagattgagggtgaacgggagctcccagaggtcagccgccgagaactgggacctgcttgatcgcagaggaagaagaagctatcttgttagaaatcccgcggctcccacctccagctcctgcagaggtggaaggaataggagaggcactgggtcctgaggagctgaggctgacaggctgggaacctggggccctactcatggaggtgacccccccggaggagctgcgtctgccagccccacccagcccagagaggaggcccccagtccccccacttcttcgccgccgccgtcgtcgccggttactgttctgggacaaggagactcagatctccccggaagaatttccaaggaacaacttgcaaaccagagcccacttgctgggaatgtcctatggtggcagccgcccgagaggaccatcagaggccctgcggagttgtttcagaaccccaactctctctggctggctaccccctgaactactgggtctctggacccacttgtgcccagccacccccaaaagccctcaggcgagagctgcctgaggaggcagccgctgaggaggaaaggagaaagattgaagttccaagtgagattgaggtcccgagggaggccctggagcccagtgttccccttatggtgtctttagagatctccctagaggcagctgaagaggagaagtcccgcatcagcctcatcccaccagaagaacggtgggcctggcctgaggtggaggcgccagaagctcctgcattgcccgtggtgcctgaaaatccctgaggtgccccatggaaatgcctttggtgctgccccccagagctcgagctgctcctcaactggaaaacagtgcacagggcaagtggcactggagctgcagggctaacagggagcccgacttcagcagccctggtgtcacctcctcagcccccgcaggatggctggcccgggtcttctacctgctccctggtgctctcagcgcaacagattcttcaccgtgaaacaagaaaagcccatatggtcgcctcctgatcccagccgggggcccagattccactgaggttagagtccatttacaaagctgccaggaaaccggccacttctagtaaacccacgtcgtgcctcactgggtcctgcttacctcatttctgaatgtgcatttccagccttcttgctctcagagctattgttcaagcacgaaaacaagctgcttttattacagtatgatgtcatgactcatttgtaacagatccagcctcagggacagccctgtaaggcagcaagtggggctggctccaaatgggtatgagtctcagaatctttggtaaggcagaactgaactgggctgagaggtggtcttaaggcctgggcaggctctattctctctggactggctgcagcctgcagtctaggagaggcccagtacagcctgggagctcctgagccttgtcaacaggcagtgagcccagagctgcttgaaagctgtcggtgtgctgtttggccagggaacgtcaggagcagcaacagtgcggcctttggtgtcttggtgggatcttgttgtccagccagaatgaggctgcagataccgcagaaggctcgggagccacatctataacctggtcagggctgctctggtacaggaagctgaagaggcgcccaatggtgacccactcctccaagtcctccttcagtggcagggcatgcagtagggca

SEQ ID NO: 3156 - DNA, 423 bp, Homo sapiens
  SIMILAR (196)..(339): 951254mologous to Homo sapiens GTP-binding protein,accession number Y14391,Smith-Waterman Score=245.
  misc_feature (1)...(423): n = a,t,c or g
ccgtagcggnnnnagtgggcgtttcgacgatttcgtgctctggggaggctcatagatgaagccccgaactgctcagaacagcgcgcagacctcttgcctctctactccccaaacctgccggtggttcctcagtaatcccctgagcacccgcagctcccgggttccctgctgcgcccgcctggagcccaaattccatccgagtggcaggtggcggaggccacagcgctggtgcacacgctggacggctggtccgtggtgcagacaatggtcgtgtccaccaaaacgccggacaggaagctcatctttggcaaagggaactttgagcacctgacagaaagaactggaagccgcctggggcgtggaggtgtttgaccgcttcacggtcgtcctgcacatcttacgctgtaacgcccgcacgaagga

SEQ ID NO: 3157 - DNA, 470 bp, Homo sapiens
  SIMILAR (2)..(247): 1001254mologous to Homo sapiens unnamed protein product,accession number AK002185,Smith-Waterman Score=439.
cggccgcccaggagggttgttcgtggccggcatcaacctcacggagaacctgcagtacgttctggcgcacccgtccgagtccctggagaagatgacgctgcccaaccttccgcggctgagcgcgtgggtccgagagcagtgcccggggccgggttcacggtgcaccaacatcatcgcgggggacttcatcggcgcagacggcttcgtcagtgacgtcatcgcgctcaatcagaagctgctgtggtgctgacggggacccttctgaagttcgggacgcggcggctgcagtttcaccccccgaatttccaagtattgtgactttgtttgggccaaatgttggtgatcataggaccgatgataatacgttttcattttctttaaaatagagatggggtggctgggcgtggtgacttcgcctgtcttcccagagtgctgggatcacaggcgtgagccaccgcacctggcctcaa

SEQ ID NO: 3158 - DNA, 2918 bp, Homo sapiens
  SIMILAR (247)..(1314): 641254mologous to Homo sapiens Human GTPase associated protein-5,accession number AAY99654,Smith-Waterman Score=1009.
  misc_feature (1)...(2918): n = a,t,c or g
gcgggccgccgtacgcccggggctgcggctctcccgcgtgggccgcggccgctcggctccgcgggcagccgcgccgtcctgccccgcgcgcgcgctagccgctgtcggccgcaggagccccgggaatctggaggggccgtggggcggagggaggggcctgcgggcggaaggcggacgaaaacagaacggaagacgacaaggaggagccggaagatgcggacgagaacgccgaggaggagctgctgcggggagagcctctgctgccggcggggacccaagcgcgtgtgtctggttcaccctgacgtcaagtggggcccagggaaatcgcagatgactcgagccgagtggcaggtggcggaggccacagcgctggtgcacacgctggacggctggtccgtggtgcacacaatggtcgtgtccaccaaaacgccggacaggaagctcatctttggcaaagggaactttgagcacctgacagaaaagatccgagggtctccagacatcacgtgcgtcttcctgaacgtggagaggatggctgccccgaccaagaaagaactggaagccgcctggggcgtggagggttgtttgaccgcgttcacggtcggtcctgcaacatcttccagcttgtaacgcccgcacgaagggagggcccggcttcaggtggccctggctggagatgcccgcttgcacaggtcgaacttgaaaagggacgtcgcccacctgtaccgaggagttggcttcgcgcttacatcatggggtcaggagaatcctttcattgcagctgcagcagcgtctcctgagagagaaggaggccaagatcaggaaggccttggacaggcttcgcaagaagaggcacctgcttccgccggcagcggacgaggcgggagttccccgtgatctccgtggtggggtacaccaacttgcggaaagaccacgctgatcaaggcattgacggggcgatgccgccattccagccacgggaccagctgtttgccacgctggacgtcacgtgcccacgcgggcacgctgccctcacgcatgaccgtcctgtacgtggacaccatcggcttcctctcccagctgccgcacggcctcatcgagtcctttttccgccaccctggaagacgtggcccactcgggatctcatcttgcacgtaagggacgttcagccaccccgaggcggagctccagaaatgcagcgttctgtccacgctgcgtggcctgcggctgcccgccccgctcctggactccatggtggaggttcacaacaaggtggacctcgtgcccgggtacagccccacggaaccgaacgtcggtgnccgtgtctgccctgcggggccacggggctccaggagctgaaagttgagctcgatgcggcggttttgaaggcgacggggagacagatcctcactctccgtgtgaggctcgcaggggcgcagctcaactggctgtataaggaggccacagttcaggaggtggacgtgatccctgaggacggggcggccgacgtgagggtcatcatcagcaaacttcccctacggcaaaattccggaagctctttcccaggatgaacggacgcccacagaaggcctgcggggtgggggcatcgcctgccctgggggagctgaggcgttacccgctgtgttgggggcagcttggtgtcaggtgcagcagggtcctccttgtctggttctgcacccgtctcgcctcccagccatttgctgggatgtaccgtgcatgccggtgacacggccgcacctgccccaaagcgggccgcccgagcgtccactccaagcctgagcatccacacaattccagtgggccctcggtgcctgctgtgaactgctttccctcggaatgtttccgtaacaggacattaaacctttgattttacttccgtgagcagcatttccagttcctcctgcacctgccgtgagccgtggccctggtgggcaccgacggcccctccgcccggctgtctgtgttcacagatggtctcggtttcccatggtggtgtcggggaaatgacgaaaaatcaggtttcccggcagcacagagaacccttccacaaaagtagaagggaaagcaaatagttttactaaagaagcagcttcaaaccagaccgtgagccaccgcacccggcctccttgagttaacattttctaaagatgcttctggcgtgcttatccttgaaagctgccagaggtgtcttggctgcattggtggtaataaaattcatactcatatttgactttaatgatgttcatgttatttagacgatctgtatgagttcggtgattttgtgggtacgcccctgacagacatcgattcacagcccacggaagtcagggaaggctccctgcaaattcttcatctccagcgggccatgcctgagccctgatcctgcagagccgtggggctgaggtagccgccggttgtggtccagggagtgcgtctttctggatgcggggcaccttcatttcaccgtagcaaccgggtaccaaaagtagaagcggatttttggaaaatgagtcattaggtcccaaagagaacctattgcaacatgggactccataacgttcttgaggatcatcctgaggaaactgatgttctctcgttagacaaaaatggcacgatttgcttgggaaaggggagtaaaaatggtgctggcatccattggctggctgggaacttgaaccagcagcttctgattgagcgcgatgacgtcactgacgaagtcctctgcgccgatgaagtcccccgcgatgatgttggtgcaccgtgaactccggccccgggcactgctctcggaccctacgcctcagccgcggaaggttgggcagcgtcatcttctccagggactcggacgggtgcgccagaacgtactgcaggttctccgtgaggttgatgccggccac

SEQ ID NO: 3159 - DNA, 251 bp, Homo sapiens
tttttttttttttttttttctcagtcagatttcactttatttgtatcgatgacaatattaactcttcagatttatagaatgacaaaacttgataattacctggaaacaatttattattaactaggttaaccctaaatccatcaagaaaaaccacctaacatattcagtgttaaaaagagacattacgactagcctggccaacatgatccgctagcctccgcctcccaaagtgctgggatcacaggcgtggg

SEQ ID NO: 3160 - DNA, 465 bp, Homo sapiens
  SIMILAR (73)..(423): 981254mologous to Homo sapiens Human MDM2,accession number AX057138,Smith-Waterman Score=632.
  misc_feature (1)...(465): n = a,t,c or g
agaacccttcatcttcacatttggtttttagcccatctacctcatctagaaggagagcaattagtgagacaggatcttgatgctggtgtaagtgaacattcaggtgattggttggatcaggattcagtttcagatcagtttagtgtagaatttgaagttgaatctctcgactcagaagattatagccttagtgaagaaggacaagaactctcagatgaagatgatgaggtatatcaagttactgtgtatcaggcaggggagagtgatacagattcatttgaagaagatcctgaaatttccttagctgactattggaagtgcacttcatgcaatgaaatgaatcccccccttccatcacattgcaacagatgttgggcccatcgtaagaattggcttcctgaagataaagggaaagataaaggncgaaatcgtcgccccagcaattcatgccggttaagggnctct

SEQ ID NO: 3161 - DNA, 1787 bp, Homo sapiens
  SIMILAR (312)..(1199): 1001254mologous to Homo sapiens mdm2-A,accession number U33199,Smith-Waterman Score=1582.
gcaccgcgcgagcttggctgcttctggggcctgtgtggccctgtgtgtcggaaagatggagcaagaagccgagcccgaggggcggccgcgacccctctgaccgagatcctgctgctttcgcagccaggagcaccgtccctccccggattagtgcgtacgagcgcccagtgccctggcccggagagtggaatgatccccgaggcccagggcgtcgtgcttccgcagtagtcagtccccgtgaaggaaactggggagtcttgagggacccccgactccaagcgcgaaaaccccggatggtgaggagcaggcaaatgtgcaataccaacatgtctgtacctactgatggtgctgtaaccacctcacagattccagcttcggaacaagagaccctggatcttgatgctggtgtaagtgaacattcaggtgattggttggatcaggattcagtttcagatcagtttagtgtagaatttgaagttgaatctctcgactcagaagattatagccttagtgaagaaggacaagaactctcagatgaagatgatgaggtatatcaagttactgtgtatcaggcaggggagagtgatacagattcatttgaagaagatcctgaaatttccttagctgactattggaaatgcacttcatgcaatgaaatgaatcccccccttccatcacattgcaacagatgttgggcccttcgtgagaattggcttcctgaagataaagggaaagataaaggggaaatctctgagaaagccaaactggaaaactcaacacaagctgaagagggctttgatgttcctgattgtaaaaaaactatagtgaatgattccagagagtcatgtgttgaggaaaatgatgataaaattacacaagcttcacaatcacaagaaagtgaagactattctcagccatcaacttctagtagcattatttatagcagccaagaagatgtgaaagagtttgaaagggaagaaacccaagacaaagaagagagtgtggaatctagtttgccccttaatgccattgaaccttgtgtgatttgtcaaggtcgacctaaaaatggttgcattgtccatggcaaaacaggacatcttatggcctgctttacatgtgcaaagaagctaaagaaaaggaataagccctgcccagtatgtagacaaccaattcaaatgattgtgctaacttatttcccctagttgacctgtctataagagaattatatatttctaactatataaccctaggaatttagacaacctgaaatttattcacatatatcaaagtgagaaaatgcctcaattcacatagatttcttctctttagtataattgacctactttggtagtggaatagtgaatacttactataatttgacttgaatatgtagctcatcctttacaccaactcctaattttaaataatttctactctgtcttaaatgagaagtacttggttttttttttcttaaatatgtatatgacatttaaatgtaacttattattttttttgagaccgagtcttgctctgttacccaggctggagtgcagtgggtgatcttggctcactgcaagctctgccctccccgggttcgcaccattctcctgcctcagcctcccaattagcttggcctacagtcatctgccaccacacctggctaattttttgtacttttagtagagacagggtttcaccgtgttagccaggatggtctcgatctcctgacctcgtgatccgcccacctcggcctcccaaagtgctgggattacaggcatgagccaccg

SEQ ID NO: 3162 - DNA, 1553 bp, Homo sapiens
  SIMILAR (312)..(965): 1001254mologous to Homo sapiens mdm2-B,accession number U33200,Smith-Waterman Score=1184.
gcaccgcgcgagcttggctgcttctggggcctgtgtggccctgtgtgtcggaaagatggagcaagaagccgagcccgaggggcggccgcgacccctctgaccgagatcctgctgctttcgcagccaggagcaccgtccctccccggattagtgcgtacgagcgcccagtgccctggcccggagagtggaatgatccccgaggcccagggcgtcgtgcttccgcagtagtcagtccccgtgaaggaaactggggagtcttgagggacccccgactccaagcgcgaaaaccccggatggtgaggagcaggcaaatgtgcaataccaacatgtctgtacctactgatggtgctgtaaccacctcacagattccagcttcggaacaagagaccctggactattggaaatgcacttcatgcaatgaaatgaatcccccccttccatcacattgcaacagatgttgggcccttcgtgagaattggcttcctgaagataaagggaaagataaaggggaaatctctgagaaagccaaactggaaaactcaacacaagctgaagagggctttgatgttcctgattgtaaaaaaactatagtgaatgattccagagagtcatgtgttgaggaaaatgatgataaaattacacaagcttcacaatcacaagaaagtgaagactattctcagccatcaacttctagtagcattatttatagcagccaagaagatgtgaaagagtttgaaagggaagaaacccaagacaaagaagagagtgtggaatctagtttgccccttaatgccattgaaccttgtgtgatttgtcaaggtcgacctaaaaatggttgcattgtccatggcaaaacaggacatcttatggcctgctttacatgtgcaaagaagctaaagaaaaggaataagccctgcccagtatgtagacaaccaattcaaatgattgtgctaacttatttcccctagttgacctgtctataagagaattatatatttctaactatataaccctaggaatttagacaacctgaaatttattcacatatatcaaagtgagaaaatgcctcaattcacatagatttcttctctttagtataattgacctactttggtagtggaatagtgaatacttactataatttgacttgaatatgtagctcatcctttacaccaactcctaattttaaataatttctactctgtcttaaatgagaagtacttggttttttttttcttaaatatgtatatgacatttaaatgtaacttattattttttttgagaccgagtcttgctctgttacccaggctggagtgcagtgggtgatcttggctcactgcaagctctgccctccccgggttcgcaccattctcctgcctcagcctcccaattagcttggcctacagtcatctgccaccacacctggctaattttttgtacttttagtagagacagggtttcaccgtgttagccaggatggtctcgatctcctgacctcgtgatccgcccacctcggcctcccaaagtgctgggattacaggcatgagccaccg

SEQ ID NO: 3163 - DNA, 1862 bp, Homo sapiens
  SIMILAR (312)..(1274): 991254mologous to Homo sapiens mdm2-C,accession number U33201,Smith-Waterman Score=1697.
gcaccgcgcgagcttggctgcttctggggcctgtgtggccctgtgtgtcggaaagatggagcaagaagccgagcccgaggggcggccgcgacccctctgaccgagatcctgctgctttcgcagccaggagcaccgtccctccccggattagtgcgtacgagcgcccagtgccctggcccggagagtggaatgatccccgaggcccagggcgtcgtgcttccgcagtagtcagtccccgtgaaggaaactggggagtcttgagggacccccgactccaagcgcgaaaaccccggatggtgaggagcaggcaaatgtgcaataccaacatgtctgtacctactgatggtgctgtaaccacctcacagattccagcttcggaacaagagaccctggttagaccaaagccattgcttttgaagttattaaagtctgttggtgcacaaaaagacacttatactatgaaagaggttcttgatgctggtgtaagtgaacattcaggtgattggttggatcaggattcagtttcagatcagtttagtgtagaatttgaagttgaatctctcgactcagaagattatagccttagtgaagaaggacaagaactctcagatgaagatgatgaggtatatcaagttactgtgtatcaggcaggggagagtgatacagattcatttgaagaagatcctgaaatttccttagctgactattggaaatgcacttcatgcaatgaaatgaatcccccccttccatcacattgcaacagatgttgggcccttcgtgagaattggcttcctgaagataaagggaaagataaaggggaaatctctgagaaagccaaactggaaaactcaacacaagctgaagagggctttgatgttcctgattgtaaaaaaactatagtgaatgattccagagagtcatgtgttgaggaaaatgatgataaaattacacaagcttcacaatcacaagaaagtgaagactattctcagccatcaacttctagtagcattatttatagcagccaagaagatgtgaaagagtttgaaagggaagaaacccaagacaaagaagagagtgtggaatctagtttgccccttaatgccattgaaccttgtgtgatttgtcaaggtcgacctaaaaatggttgcattgtccatggcaaaacaggacatcttatggcctgctttacatgtgcaaagaagctaaagaaaaggaataagccctgcccagtatgtagacaaccaattcaaatgattgtgctaacttatttcccctagttgacctgtctataagagaattatatatttctaactatataaccctaggaatttagacaacctgaaatttattcacatatatcaaagtgagaaaatgcctcaattcacatagatttcttctctttagtataattgacctactttggtagtggaatagtgaatacttactataatttgacttgaatatgtagctcatcctttacaccaactcctaattttaaataatttctactctgtcttaaatgagaagtacttggttttttttttcttaaatatgtatatgacatttaaatgtaacttattattttttttgagaccgagtcttgctctgttacccaggctggagtgcagtgggtgatcttggctcactgcaagctctgccctccccgggttcgcaccattctcctgcctcagcctcccaattagcttggcctacagtcatctgccaccacacctggctaattttttgtacttttagtagagacagggtttcaccgtgttagccaggatggtctcgatctcctgacctcgtgatccgcccacctcggcctcccaaagtgctgggattacaggcatgagccaccg

SEQ ID NO: 3164 - DNA, 1131 bp, Homo sapiens
  SIMILAR (1)..(765): 981254mologous to Homo sapiens Human MDM2,accession number AX057138,Smith-Waterman Score=1347.
gatcttgatgctggtgtaagtgaacattcaggtgattggttggatcaggattcagtttcagatcagtttagtgtagaatttgaagttgaatctctcgactcagaagattatagccctagtgaaggagggcaagaactctcagatgaagatgatgaggtatatcaagttactgtgtatcaggcaggggagagtgatacagattcatttgaagaagatcctgaaatttccttagctgactattggaaatgcacttcatgcaatgaaatgaatcccccccttccatcacattgcaacagatgttgggcccttcgtgagaattggcttcctgaagatacagggaaagataaaggggaaatctctgagaaagccaaactggaaaactcaacacaagctgaagagggctttgatgttcctgattgtaaaaaaactatagtgaatgattccagagagtcatgtgttgaggaaaatgatgataaaattacacaagcttcacaatcacaagaaagtgaagactattctcagccatcaacttctagtagcattatttatagcagccaagaagatgtgaaagagtttgaaagggaagaaacccaagacaaagaagagagtgtggaatctagtttgccccttaatgccattgaaccttgtgtgatttgtcaaggtcgacctaaaaatggttgcattgtccatggcaaaacaggacatcttatggcctgctttacatgtgcaaagaagctaaagaaaaggaataagccctgcccagtatttattcgcgataagctcatggagcggcgtaaccgtcgcacaggaaggacagagaaagcgcggatctgggaagtgacggacagaacggtcaggacctggattggggaggcggttgccgccgctgctgctgacggtgtgacgttctctgttccggtcacaccacatacgttccgccattcctatgcgatgcacatgctgtatgccggtataccgctgaaagttctgcaaagcctgatgggacataagtccatcagttcaacggaagtctacacgaaggtttttgcgctggatgtggctgcccggctccgggtgcagtttgcgatgccggagtctgatgcggttgcgatgctgaaacaattatcctga

SEQ ID NO: 3165 - DNA, 813 bp, Homo sapiens
  SIMILAR (490)..(783): 1001254mologous to Size marker plasmid pKF339 protein resposible for tetracycline resistance,accession number D45834,Smith-Waterman Score=485.
atgggccctccgccggtgaatgtgctaggctctccgggggtgccccggagttgggtccccatcccaaagaccccatccgctccttcagctgaagagggctttgatgttcctgattgtaaaaaaactatagtgaatgattccagagagtcatgtgttgaggaaaatgatgataaaattacacaagcttcacaatcacaagaaagtgaagactattctcagccatcaacttctagtagcattatttatagcagccaagaagatgtgaaagagtttgaaagggaagaaacccaagacaaagaagagagtgtggaatctagtttgccccttaatgccattgaaccttgtgtgatttgtcaaggccagtatattatgactaaacgattatatgatgagaagcaacaacatattgtatattgttcaaatgatcttctaggagatttgtttggcgtgccaagcttctctgtgaaagagcacagtcaggcaccgtgtatgaaatctaacaatgcgctcatcgtcatcctcggcaccgtcaccctggatgctgtaggcataggcttggttatgccggtactgccgggcctcttgcgggatatcgtccattccgacagcatcgccagtcactatggcgtgctgctagcgctatatgcgttgatgcaatttctatgcgcacccgttctcggagcactgtccgaccgctttggccgccgcccagtcctgctcgcttcgctacttggagccactatcgactacgcgatcatggcgaccacacccgtcctgtggatctacccactagtcaattcaccatcttgttga

SEQ ID NO: 3166 - DNA, 1603 bp, Homo sapiens
  SIMILAR (469)..(708): 901254mologous to Homo sapiens mdm2-D,accession number U33202,Smith-Waterman Score=398.
gcaccgcgcgagcttggctgcttctggggcctgtgtggccctgtgtgtcggaaagatggagcaagaagccgagcccgaggggcggccgcgacccctctgaccgagatcctgctgctttcgcagccaggagcaccgtccctccccggattagtgcgtacgagcgcccagtgccctggcccggagagtggaatgatccccgaggcccagggcgtcgtgcttccgcagtagtcagtccccgtgaaggaaactggggagtcttgagggacccccgactccaagcgcgaaaaccccggatggtgaggagcaggcaaatgtgcaataccaacatgtctgtacctactgatggtgctgtaaccacctcacagattccagcttcggaacaagagaccctggttagacaagaaagtgaagactattctcagccatcaacttctagtagcattatttatagcagccaagaagatgtgaaagagtttgaaagggaagaagcgcccagacaaagaagagagtgtggaatctagtttgccccttaatgccattgaaccttgtgtgatttgtcaaggtcgacctaaaaatggttgcattgtccatggcaaaacaggacatcttatggcctgctttacatgtgccaagaagctaaagaaaaggaataagccctgcccagtatgtagacaaccaattcaaatgattgtgctaacttatttcccctagttgacctgtctataagagaattatatatttctaactatataaccctaggaattgagacaacctgaaatttattcacatatatcaaaatgagaaaatgcctcaattcacatagatttcttctctttagtataattgacctactttggtagtggaatagtgaatacttactataatttgacttgaatatgtagctcatcctttacaccaactcctaattttaaataatttctactctgtcttaaatgagaagtacttggttttttttttcttaaatatgtatatgacatttaaatgtaacttattattttttttgagaccgagtcttgctctgttacccaggctggagtgcagtgggtgatcttggctcactgcaagctctgccctccccgggttcgcaccattctcctgcctcagcctcccaattagcttggcctacagtcatctgccaccacacctggctaattttttgtacttttagtagagacagggtttcaccgtgttagccaggatggtctcgatctcctgacctcgtgatccgcccacctcggcctcccaaagtgctgggattacaggcatgagccactgcgcccagccggtctttttaaacattccccaggactgtacagccaacccatactcacctgacatttgggaactcccccccacggccataactgatctgcagaggtaagaccaagagcaagaatgggggattcacatctaaggtctggtgatggctgatgaaggaagaagaatcagcgaacaaaagcctctaggtctttcttaccacaaacacctctctgcccacctgctttgaaaggggcagaagtatagtgggcgaggctgcccacctgctacagtgaagggatctggagaaatactcacactttga

SEQ ID NO: 3167 - DNA, 2373 bp, Homo sapiens
  SIMILAR (312)..(365): 1001254mologous to Homo sapiens Human MDM2,accession number AX057138,Smith-Waterman Score=95.
gcaccgcgcgagcttggctgcttctggggcctgtgtggccctgtgtgtcggaaagatggagcaagaagccgagcccgaggggcggccgcgacccctctgaccgagatcctgctgctttcgcagccaggagcaccgtccctccccggattagtgcgtacgagcgcccagtgccctggcccggagagtggaatgatccccgaggcccagggcgtcgtgcttccgcagtagtcagtccccgtgaaggaaactggggagtcttgagggacccccgactccaagcgcgaaaaccccggatggtgaggagcaggcaaatgtgcaataccaacatgtctgtacctactgatggtgctgtaaccacctcacaaaattccagcttcggaacaagagaccctggttagaccaaagccattgcttttgaagttattaaagtctgttggtgcacaaaaagacacttatactatgaaagaggttcttttttatcttggccagtatattatgactaaacgattatatgatgagaagcaacaacatattgtatattgttcaaatgatcttctaggagatttgtttggcgtgccaagcttctctgtgaaagagcacaggaaaatatataccatgatctacaggaacttggtagtagtcaatcagcaggaatcatcggactcaggtacatctgtgagtgagaacaggtgtcaccttgaaggtgggagtgatcaaaaggaccttgtacaagagcttcaggaagagaaaccttcatcttcacatttggtttctagaccatctacctcatctagaaggagagcaattagtgagacagaagaaaattcagatgaattatctggtgaacgacaaagaaaacgccacaaatctgatagtatttccctttcctttgatgaaagcctggctctgtgtgtaataagggagatatgttgtgaaagaagcagtagcagtgaatctacagggacgccatcgaatccggatcttgatgctggtgtaagtgaacattcaggtgattggttggatcaggattcagtttcagatcagtttagtgtagaatttgaagttgaatctctcgactcagaagattatagccttagtgaagaaggacaagaactctcagatgaagatgatgaggtatatcaagttactgtgtatcaggcaggggagagtgatacagattcatttgaagaagatcctgaaatttccttagctgactattggaaatgcacttcatgcaatgaaatgaatcccccccttccatcacattgcaacagatgttgggcccttcgtgagaattggcttcctgaagataaagggaaagataaaggggaaatctctgagaaagccaaactggaaaactcaacacaagctgaagagggctttgatgttcctgattgtaaaaaaactatagtgaatgattccagagagtcatgtgttgaggaaaatgatgataaaattacacaagcttcacaatcacaagaaagtgaagactattctcagccatcaacttctagtagcattatttatagcagccaagaagatgtgaaagagtttgaaagggaagaaacccaagacaaagaagagagtgtggaatctagtttgccccttaatgccattgaaccttgtgtgatttgtcaaggtcgacctaaaaatggttgcattgtccatggcaaaacaggacatcttatggcctgctttacatgtgcaaagaagctaaagaaaaggaataagccctgcccagtatgtagacaaccaattcaaatgattgtgctaacttatttcccctagttgacctgtctataagagaattatatatttctaactatataaccctaggaatttagacaacctgaaatttattcacatatatcaaagtgagaaaatgcctcaattcacatagatttcttctctttagtataattgacctactttggtagtggaatagtgaatacttactataatttgacttgaatatgtagctcatcctttacaccaactcctaattttaaataatttctactctgtcttaaatgagaagtacttggttttttttttcttaaatatgtatatgacatttaaatgtaacttattattttttttgagaccgagtcttgctctgttacccaggctggagtgcagtgggtgatcttggctcactgcaagctctgccctccccgggttcgcaccattctcctgcctcagcctcccaattagcttggcctacagtcatctgccaccacacctggctaattttttgtacttttagtagagacagggtttcaccgtgttagccaggatggtctcgatctcctgacctcgtgatccgcccacctcggcctcccaaagtgctgggattacaggcatgagccaccg

SEQ ID NO: 3168 - DNA, 2516 bp, Homo sapiens
  SIMILAR (312)..(617): 1001254mologous to Homo sapiens mdm2-E,accession number U33203,Smith-Waterman Score=521.
  misc_feature (1)...(2516): n = a,t,c or g
gcaccgcgcgagcttggctgcttctggggcctgtgtggccctgtgtgtcggaaagatggagcaagaagccgagcccgaggggcggccgcgacccctctgaccgagatcctgctgctttcgcagccaggagcaccgtccctccccggattagtgcgtacgagcgcccagtgccctggcccggagagtggaatgatccccgaggcccagggcgtcgtgcttccgcagtagtcagtccccgtgaaggaaactggggagtcttgagggacccccgactccaagcgcgaaaaccccggatggtgaggagcaggcaaatgtgcaataccaacatgtctgtacctactgatggtgctgtaaccacctcacagattccagcttcggaacaagagaccctggttagaccaaagccattgcttttgaagttattaaagtctgttggtgcacaaaaagacacttatactatgaaagaggttcttttttatcttggccagtatattatgactaaacgattatatgatgagaagcaacaacatattgtaaatgattgtgctaacttatttcccctagttgacctgtctataagagaattatatatttctaactatataaccctaggaatttagacaacctgaaatttattcacatatatcaaagtgagaaaatgcctcaattcacatagatttcttctctttagtataattgacctactttggtagtggaatagtgaatacttactataatttgacttgaatatgtagctcatcctttacaccaactcctaattttaaataatttctactctgtcttaaatgagaagtacttggttttttttttcttaaatatgtatatgacatttaaatgtaacttattattttttttgagaccgagtcttgctctgttacccaggctggagtgcagtgggtgatcttggctcactgcaagctctgccctccccgggttcgcaccattctcctgcctcagcttcctgattagttgggaccacaggcgcccgccaccatacccggctaatttttttttttttttttttttttttttggatttttagtagagacagggtttcaccgtgttagccaggatagtctcgatctcctgacctcgtgatcctcccgcctcggcctcccaaagtgctgggattacaggcatgagccaccgcgcccagcagaagaaggcatttagaatcagaactcagtgttttgaaacagcactcaaatcttagaaaattaacttcactgattcctggaaaatgcttacgttttaaaacaccaactttattcaaatactaaccccatctgtacattaagaaacaagcaaaatagaagtaaatgttttattcttccaactaaattccagtactacaagggcagtaaaacaatgatacactggaaaaaaaaaaaatgcagcaataaacatttggtaaaaaggacgggtggaataaattaaactcccaaaaaaaaaaaaaatcatacaaacccattctggaaaccccaagaagtcctggaatacagaaatgccctcctccttcactatttccacaggaaagccactgcaggcctatttgcctttaatattgtcctgggggattacattcctaaaattaggtaactgggttacagctcggttgtagtgcacaattaaaatcacactaacttcatctgaagtgtcattctacagttttatttacacaaccagtgaagggcatgttctagaataccagctttaatccttttcaaacattaatataagaagccaaattgtaatgggtaccagcaaaatgnggcccactgggtattaatacagggtagcaaaggtccacatccagggtggtactgacatcaggggaaatttccaaaaccagttgccggctgcctaggagtgggttgcccactgacggaaagctggaaataaccctgtattcaccagaagggggtattggcattgctgcatgtcataattgggacctctggcaaccaactcaaccagggaacaagccagcccacaaatgccaggatacgtgattccatgaaaccatagcctagccagcctgttctcccatatcggtcgcattatttgaatcatgcgtaaacttccacaaaacgccatccatattgttcctgccaagttttgtgttccaatatttccttccatattccttcctcgaactttcctcttcacgttcctttcaacaaacgttccacagatcatccccaacctgcccgtagaggtaaaataggggctgttctttttttaatggtgaggatgctggcagatgaaggtccctgggtgaagctggtccactgaggagaaatgcgatgtggctgtgcatcagaagtacaacacggatctgtctgttggaaactcgtttctaaatgtcttctcttctgcattcgtttatactcttgttttatgttgtacagaatttgttctgtggtgaggcgggaggagacgtcgccgaagggggatggctccattcggagatacttctgcggcgaggcggccgc

SEQ ID NO: 3169 - DNA, 1505 bp, Homo sapiens
ctgggtggaatcgcagtggctgaaaaactgtggcggcccctgcaaggagacccaggcttccctggcttccgagggcccatggtgggcatccaccattcacagcaaggttgggggatgctcagtgcctgggagccatcagtctggaaggcttcctgcaactggcttcttcctgatgccccacctattcctcgcaaagcaaccttggaggcagtaatgcctggcacccagctcttcacagccatgtcagcgtcaggagtgacctcaaaggctctggtactcttccatccaaccccacccgtgtcccactcccagcctaggccctccccaggagtctcctggtgaccggaagcctctttctgatcttcttcactgggatgctggccctttggctgagcaatatccctcaccaggtgccggcaatggatacagatggaagcatccacagagcggccatccagacagtggaggaaaatctggatggattcctttctggtttgggagcggggaaggcttcctgagcaccatgcaaagccaagatcattgctctcactacttacaaactgaaatcttctggctgcagagggcagagtgaccccattgaccaggtcacagatgcatttatgctgtgacagagatgtccctccgggccagggcagcgcagcatgctcctgacacagcttggccaggtgtgctacaccaaggccagaaagagccgctgaagtggcttggacatgggccatgccagctgcacgtggaaggccattcctcccggcactcatttccagtgtttcatatctgcttgtccaaaggcttcccagtcttgggccccaggccaggggggtctggaggaaggcttgcaccacagggtcctccaccaggccatggaactggaagctgaaggcccacacaaggccactgcaactctgctgtgaggacggctggctgattatcaggcccagaatcacgggcttagaaacattaacaggaagtacggtaccgaaaagtggaaactttaaggtgcttattattttcctcctgccttgttcctgtatgtgccgcttcaccggtatcacgtcctgggtgtcgcttcctccgttcttcgttgcactggccaacgggacgcttagtctttcggcaacggggtgaaaccttccttgtgcctgaaaaaacggtacttcgcggtgtggcttcggcgcctgcgcaaaaggccgcggggcgcactccagttcccggcaggccccgcgacgcgcgtttgcgtgctgacgcacgcagttagtcgtgctgacgtgcagcgcggcccaggcggggtgcgagtggcgcagtcggagcccgttgcggcccccggcctggttttcctttcttaaggagtggggggatttttgtgtgaggtggtatggaagtgtgggtgaatggttaagctgaagaattaagtgcaggtcaaaaacatgctgggaggtgaagtatatgacgattatccaaggttcatgtgtgtttctgatgtgcat

SEQ ID NO: 3170 - DNA, 501 bp, Homo sapiens
ctcagtcatgatttcactttatttgtatcgatgacaatattaactcttcagatttataaaatgacaaaacttgataattacctggaaacaatttattattaactaggttaaccctaaatccatcaagaaaaaccacctaacatattcagtgttaaaaagagacattacgactagcctggccaatatggcaaaaccctgtctctactaaaaatacaaattttagcagggtatagtggtacgtgcctgtaagtcccagctactcaggagggttggaagagaagtaatccaattagcattgaaaataagagcgccaatttggaaaatcgaatgtctatgatcattttcttccctaaaacagggaagaaagtgaatgtggaaaatccgattttcagcaatattcgcaggacctaaggcaacaaccacatgcctggggcaactatactttccaaatcctgaatattaaaaaggttttcacatggtaatcatcttaatattttctgt

SEQ ID NO: 3171 - DNA, 7648 bp, Homo sapiens
  SIMILAR (4573)..(4800): 1001254mologous to Homo sapiens fibrinogen beta chain,accession number M64983,Smith-Waterman Score=389.
atgaaaaggatggtttcttggagcttccacaaacttaaaaccatgaaacatctattattgctactattgtgtgtttttctagttaagtcccaaggtgtcaacgacaatgaggaggtgaattttttaaagcattattatattattagtagtattattaatataagatgtaacataatcatattatgtgcttattttaatgaaattagcattgcttatagttatgaaatggaattgttaacctctgacttattgtatttaaagaatgtttcatagtatttcttatataaaaacaaagtaatttcttgttttctagtttatcacctttgttttcttaagatgaggatggcttagctaatgtaagatgtgtttttctcacttgctattctgagtactgtgattttcatttacttctagcaatacaggattacaattaagaggacaagatctgaaaatctcacaaactataaaataataaaagagcagaattttaagataaaagaaactggtggtaggtagattgttctttggtgaaggaaggtaatatatattgttactgagattactatttataaaaattataactaagcctaaaagcaaaatacatcaagtgtaatgatagaaaatgaaatattgcttttttcagatgaaaagttcaaattagagttagtgtgtattgttattattaatagttatgaaacacggttcagtctaatttatttatttgtagaacagtttgtcctcaactattatttttgctgacttattgctgttaatttgcagttactaaaaatacagaaatgcatttaggacaatggatatttaagaaatttaaattttatcatcaaacgtatcatggccaaatttcttacatatagcatagtatcattaaactagaaataagaatacacaataatatttaaatgaagtgattcatttcggatcattattgagtttcaagggaacttgagtgttgtacttatcagactctacatgtaagaacatatagttaatctggttgtgtgtgtaaaaacatatggttaatctggttaagtctggttaatcatattaggtaagaaaaatgtaaagaatgtgtaagacgaaatttttgtaaagtactctgcaaagcactttcacatttctgcttatcaactaaacctcacagagatagtttaatagtttaggctttaaaatggattttgattattcaacaagtggccttcataatttctttaagtgtttttctttaagtatatactttctttaaatattttttaaaatttccttttctctagtaaagccagaccatccatgctacctctctagtggcactctgaaataaaaagaaaatagttttctctgttataattgtatttgtaataagcagatgaatcacatttcttaaaatttgttttagagagggtaagctctgactaggaccatgacttcaatgtgaaatatgtatatatcctccgaatctttacatattaagaatgtatatagtcaactggttaaacaggaaaatctggaacagcctggctgggttttaatcttagcaccatcctactaaatgttaaataatattataatctaatgaataaatgacaatgcaattccaaatagagttcatctgatgacttctagactcacaaaattgcaagagagctcagttgttgctcagttgttccaaatcatgtcgtttgttaatttgtaattaagctccaaaggatgtatagctactgacaaaaaaaaaaatgagaatgtagttaatccaaatcaaaactttcctattgcaatgcgtattttctgcttcattatcctttaatataatattttaagttagcaagtaattttaattacaatgcacaagccttgagaattattttaaatataagaaaatcataatgtttgataaagaaatcatgtaagaaatttcaagataatggtttaacaaataattttgttgatagaagataagactaaaagtgaaattcgaagtggagaggacacttaaactgtagtacttgttatgtgtgattccagtaaaaatagtaatgagcacttattattgccaagtactgttctgagggtaccatatgcaataagttatttaatccttacaataatcttgtaaggcagattcaaactatcattacacttattttacagatgagaaaactggggcacagataaagcaacttgcccaaggtctcatagctgtaagtcaaccctacggtcaagacctacaagtagccgagctccagagtacattatgagggtcaaagattgtcttattacaaataaattccaagtagaatcaacctttaataagtctttaatgtctcttaaatatgtttatataggagtctaatcaccaattcacaaaaatgaaagtagggaaatgattaacaataatcataggaatctaacaatccaagtggcttgagaatattcattcttcttgacagtatagattctttacaatttcgtaagttccaatgtatgttttaggaatatgaggtcattactattcataatctgatacagctttatcctaaggcctctctttaaaaactacactgcatcatagcttttttgtgcagttggtctttctactgttactgaacagtaagcaacctacagattcactatcaccaaccagccagttgatggatcttaagcaaattatcaagcttgtgataacctaaattataaaatgagggtgttggaatagttacattccaaatcttctataacactctgtattatatttctgcctcattccttgtagggtttcttcagtgcccgtggtcatcgaccccttgacaagaagagagaagaggctcccagcctgaggcctgccccaccgcccatcagtggaggtggctatcgggctcgtccagccaaagcagctgccactcaaaagaaagtagaaagaaaagcccctgatgctggaggctgtcttcacgctgacccagacctggtgggtgcactgatgtttcttgcagtggtggctctctcatgcagagaaagcctgtagtcatggcagtctgctaatgtttcactgacccacattaccatcactgttattttgtttgtttattttggaaataaaattcaaaacataaacatattgggcctttggtttaggctttctttcttgttttctttggtctgggcccaaaatttcaaattaggatatgtgggtgccacctttccatttgtattttgccactgcctttgtttagttggtaaaattttcatagcccaattatattttttctggggtaagtaatattttaaatctctatgagagtatgatgatgactttcgaatttctggtcttacagaaaaccaaataataaatttttatgttggctaatcgtatcgctgaattttcctatgtgctattttaagaaatgtccatgacccaaatccttcatctaatgcctgctattttctttgtttttagggggtgttgtgtcctacaggatgtcagttgcaagaggctttgctacaacaggaaaggccaatcagaaatagtgttgatgagttaaataacaatgtggaagctgtttcccagacctcctcttcttcctttcagtacatgtatttgctgaaagacctgtggcaaaagaggcagaagcaagtaaaaggtagatatccttgtgctttccattcgattttcagctataaaattggaaccgttagactgccacgagaatgcatggttgtgagaagattaacatttctgggttagtgaatagcattcatacgcttttgggcaccttcccctgcaacttgccagataagcactattcagctcttattcccagtctgacatcagcaagtgtgattttctatgaaaaattctactatgactccttattttaagtatacaagaaacttgtgactcagaagataatatttacagagtggaaaaaaacccctagcatttatagttttaacatttgaggttttgaatgagagagttatccataatatattcaattgtgttgtggataatgacacctaacctgtgaatcttgaggtcagaatgttgagtgctgttgacttggtggtcaggaaacagctagtgcgtgagcctggcacaggcatctcagtgagtagcatacccacagttggaaatttttcaaagaaatcaaaggaatcatgacatcttataaatttcaaggttctgctatacttatgtgaaatggataaataaatcaagcatatccactctgtaagattgaacttctcagatggaagaccccaatactgctttctcctcttttccctcaccaaagaaataaacaacctatttcatttattactggacacaatctttagcgtatacctatggtaaattactagtatggtggttaggatttatgttaatttgtatatgtcatgcgccaaatcatttccactaaatatgactatatatcataactgcttggtgatagctcagtgtttaatagtttattctcagaaaatcaaaattgtatagttaaatacattagttttatgaggcaaaaatgctaactatttctacataatttcatttttccagataatgaaaatgtagtcaatgagtactcctcagaactggaaaagcaccaattatatatagatgagactgtgaatagcaatatcccaactaaccttcgtgtgcttcgttcaatcctggaaaacctgagaagcaaaatacaaaagttagaatctgatgtctcagctcaaatggaatattgtcgcaccccatgcactgtcagttgcaatattcctgtggtgtctggcaaaggtaactgattcataaacatatttttagagagttccagaagaactcacacaccaaaaataagagaacaacaacaacaacaaaaatgctaagtggattttcccaacagatcataatgacattacagtacatcataaaaatatccttagccagttgtgttttggactggcctggtgcatttgctggttttgatgagcaggatggggcacaggtagtcccaggggtggctgatgtgtgcatctgcgtactggcttgaacagatggcagaaccacagatagatgtagaagtttctccattttgtgtgttctgggagctcatggatattccaggacacaaaaggtggagaagagctttgttcatcctcttagcagataaacgtcctcaaaactgggttggacttactaaagtaaaatgaaaatctaatatttgttatattattttcaaaggtctataataacacactccttagtaacttatgtaatgttattttaaagaattggtgactaaatacaaagtaattatgtcataaacccctgaacataatgttgtcttacatttgcagaatgtgaggaaattatcaggaaaggaggtgaaacatctgaaatgtatctcattcaacctgacagttctgtcaaaccgtatagagtatactgtgacatgaatacagaaaatggaggtaagctttcgacagttgttgacctgttgatctgtaattatttggataccgtaaaatgccaggaaacaaggccaggtgtggtggctcatacctgtaattccagcaccttgggaggccaaagtgggctgatagcttgagcctaggagtttgaaactagcctgggcaacataatgagaccctaactctacaaaaaaaaaaaaaataccaaaaaaaaaaaaaaaatcagctgtgttggtagtatgtgcctgtagtcccagctatccaggaggctgagatgggagatcacctgagcccacaacctggagtcttgatcatgctactgaactgtagcctgggcaacagaggatagtgagatcctgtctcaaaaaaaaaaattaattaaaaagccaggaaacaagacttagctctaacatctaacatagctgacaaaggagtaatttgatgtggaattcaacctgatatttaaaagttataaaatatctataattcacaatttggggtaagataaagcacttgcagtttccaaagattttacaagtttacctctcatatttatttccttattgtgtctattttagagcaccaaatatatactaaatggaatggacaggggattcagatattattttcaaagtgacattatttgctgttggttaatatatgctctttttgtttctgtcaaccaaaggatggacagtgattcagaaccgtcaagacggtagtgttgactttggcaggaaatgggatccatataaacagggatttggaaatgttgcaaccaacacagatgggaagaattactgtggcctaccaggtaacgaacaggcatgcaaaataaaatcattctatttgaaatgggattttttttaattaaaaaacattcattgttggaagcctgttttaggcagttaagaggagtttcctgacaaaaatgtggaagctaaagataagggaagaaaggcagtttttagtttcccaaaattttatttttggtgagagattttattttgtttttcttttaggtgaatattggcttggaaatgataaaattagccagcttaccaggatgggacccacagaacttttgatagaaatggaggactggaaaggagacaaagtaaaggctcactatggaggattcactgtacagaatgaagccaacaaataccagatctcagtgaaccaaatatagaggaaccagccggtaatgccctcatggatggagcatcctcacctgatggggagaaaacagggaccatgacccattccacaacggccatggttccttccagccaccgtatgaccagagaccaatgacggctggtatgtgtggcactctttgctcctgctttaaaaatcacactaatatcattactcagaatcattaacaatatttttaatagctaccacttcctgggcacttactgtcagccactgtcctaagctctttatgcatcactcgaaagcatttcaactataaggtagacattcttattctcattttacagatgagatttagagagattacgtgatttgtccaatgtcacacaactacccagagataaaactagaatttgagcacagttactttctgaataatgagcatttagataaatacctatatctctatattctaaagtgtgtgtgaaaactttcattttcatttccagggttctctgatactaagggttgtaaaagctattattccagtataaagtaacaaacacagtccctagatggattgccacaaaggcccagttatctctctttcttgctatagggcacaggaggtctttggtgtattagtgtgactctatgtatagcacccaaaggaaagactactgtgcacacgagtgtagcagtcttttatgggtaatctgcaaaacgtaacttgaccaccgtagttctgtttctaataacgccaaacacattttctttcaggttaacatcagatcccagaaaacagtgttctaaagaagacggtggtggatggtggtataatagatgtcatgcagccaatccaaacggcagatactactggggtggacagtacacctgggacatggcaaagcatggcacagatgatggtgtagtatggatgaattggaaggggtcatggtactcaatgaggaagatgagtatgaagatcaggcccttcttcccacagcaatag

SEQ ID NO: 3172 - DNA, 950 bp, Homo sapiens
gaattcggccacgagcccaaacccactccaccttactaccagacaaccttagccaaaccatttgacccaaataaaagtataggcgatagaaattgaaacctggcgcaattagatatagtaccgcaagggaaagatgaaaaattataacccaggcataatatagcaagggactaaccccctataccgttctgcataatgaattacactagaaataacttttgcaaggcagagccaaagctaaaggacccccgaaaaccagactgagctaccataaggaacagctaaaagagcacaccctgtctaatgtagcaaaatagtgggaagatttatagggtagaggcgacaaaccctacccgagccctggtgatagctggtttgtccaagattgaatcttagttcaactttaaatttgcccacaggaaccctcttaaatcccctttgtaaatttaaactgttagtcccaaagagggaccagctctttgggacactaggaaaaaacccttgtagagaggagtaaaaaattttaacacccattaggtagggccttaaaaggcaggccacccaatttaagggaaagcgttcaagcctcaacaccccactaccctaaaaaattcccaaaccattttacctggaccccctcacaccccaattggggccaatcctatcaccctattaggagggcctaattgtttagtataagtaaccatgaaaacattctccctccggcataaggcctgcggtcaggttaaaaacactggactggcaatttaacagcccaatatcttcaatccaaccaacaagtcattattaccctcactgtcaacccaacacaggcatgctcataaggaaaggttaaaaaaagtaaaaggaactcggcaaatcttaccccgcctgtttaccaaaaacatcacctctagcatcaccagtattagagcaccgccttcccagtg

SEQ ID NO: 3173 - DNA, 2014 bp, Homo sapiens
  SIMILAR (104)..(1402): 981254mologous to Homo sapiens Human hepatocyte nuclear factor 4 alpha,accession number AAW71582,Smith-Waterman Score=2215.
gcagagagggcactgggaggaggcagtgggagggcggagggcgggggccttcggggtgggcgcccagggtagggcaggtggccgcggcgtggaggcagggagaatgcgactctccaaaaccctcgtcgacatggacatggccgactacagtgctgcactggacccagcctacaccaccctggaatttgagaatgtgcaggtgttgacgatgggcaatggcccttccagtcctcactgcctcacagtggctctgcttggcgcttggcacagtgacatgatgattttgttgccgctgcgtctcgccagattgaggcatcccctccgacatcactggagcatatctggaggggtggacagttctccacagggagacacgtccccatcagaaggcaccaacctcaacgcgcccaacagcctgggtgtcagcgccctgtgtgccatctgcggggaccgggccacgggcaaacactacggtgcctcgagctgtgacggctgcaagggcttcttccggaggagcgtgcggaagaaccacatgtactcctgcagatttagccggcagtgcgtggtggacaaagacaagaggaaccagtgccgctactgcaggctcaagaaatgcttccgggctggcatgaagaaggaagccgtccagaatgagcgggaccggatcagcactcgaaggtcaagctatgaggacagcagcctgccctccatcaatgcgctcctgcaggcggaggtcctgtcccgacagatcacctcccccgtctccgggatcaacggcgacattcgggcgaagaagattgccagcatcgcagatgtgtgtgagtccatgaaggagcagctgctggttctcgttgagtgggccaagtacatcccagctttctgcgagctccccctggacgaccaggtggccctgctcagagcccatgctggcgagcacctgctgctcggagccaccaagagatccatggtgttcaaggacgtgctgctcctaggcaatgactacattgtccctcggcactgcccggagctggcggagatgagccgggtgtccatacgcatccttgacgagctggtgctgcccttccaggagctgcagatcgatgacaatgagtatgcctacctcaaagccatcatcttctttgacccagatgccaaggggctgagcgatccagggaagatcaagcggctgcgttcccaggtgcaggtgagcttggaggactacatcaacgaccgccagtatgactcgcgtggccgctttggagagctgctgctgctgctgcccaccttgcagagcatcacctggcagatgatcgagcagatccagttcatcaagctcttcggcatggccaagattgacaacctgttgcaggagatgctgctgggagggtcccccagcgatgcaccccatgcccaccaccccctgcaccctcacctgatgcaggaacatatgggaaccaacgtcatcgttgccaacacaatgcccactcacctcagcaacggacagatgtgtgagtggccccgacccaggggacaggcagccacccctgagaccccacagccctcaccgccaggtggctcagggtctgagccctataagctcctgccgggagccgtcgccacaatcgtcaagcccctctctgccatcccccagccgaccatcaccaagcaggaagttatctagcaagccgctggggcttgggggctccactggctccccccagccccctaagagagcacctggtgatcacgtggtcacggcaaaggaagacgtgatgccaggaccagtcccagagcaggaatgggaaggatgaagggcccgagaacatggcctaaggcacatcccactgcaccctgacgccctgctctgataacaagactttgacttggggagaccctctactgccttggacaactttctcatgttgaagccactgccttcaccttcaccttcatccatgtccaacccccgacttcatcccaaaggacagccgcctggagatgacttgagccttac

SEQ ID NO: 3174 - DNA, 2407 bp, Homo sapiens
  SIMILAR (100)..(1464): 1001254mologous to Homo sapiens Hepatocyte nuclear factor 4A,accession number X87870,Smith-Waterman Score=2362.
ggggcggagggcgggggcttcggggtgggcgcccagggtagggcaggtggccgccgcgtggaggcagggagaatgcactctccaaaaccctccgtcgacatggacatggccgactacagtgctgcactggacccagcctacaccaccctggaatttgagaatgtgcaggtgttgacgatgggcaatgacacgtccccatcagaaggcaccaacctcaacgcgcccaacagcctgggtgtcagcgccctgtgtgccatctgcggggaccgggccacgggcaaacactacggtgcctcgagctgtgacggctgcaagggcttcttccggaggagcgtgcggaagaaccacatgtactcctgcagatttagccggcagtgcgtggtggacaaggacaagaggaaccagtgccgctactgcaggctcaagaaatgcttccgggctggcatgaagaaggaagccgtccagaatgagcgggaccggatcagcactcgaaggtcaagctatgaggacagcagcctgccctccatcaatgcgctcctgcaggcggaggtcctgtcccgacagatcacctcccccgtctccgggatcaacggcgacattcgggcgaagaagattgccagcatcgcagatgtgtgtgagtccatgaaggagcagctgctggttctcgttgagtgggccaagtacatcccagctttctgcgagctccccctggacgaccaggtggccctgctcagagcccatgctggcgagcacctgctgctcggagccaccaagagatccatggtgttcaaggacgtgctgctcctaggcaatgactacattgtccctcggcactgcccggagctggcggagatgagccgggtgtccatacgcatccttgacgagctggtgctgcccttccaggagctgcagatcgatgacaatgagtatgcctacctcaaagccatcatcttctttgacccagatgccaaggggctgagcgatccagggaagatcaagcggctgcgttcccaggtgcaggtgagcttggaggactacatcaacgaccgccagtatgactcgcgtggccgctttggagagctgctgctgctgctgcccaccttgcagagcatcacctggcagatgatcgagcagatccagttcatcaagctcttcggcatggccaagattgacaacctgttgcaggagatgctgctgggagggtcccccagcgatgcaccccatgcccaccaccccctgcaccctcacctgatgcaggaacatatgggaaccaacgtcatcgttgccaacacaatgcccactcacctcagcaacggacagatgtccacccctgagaccccacagccctcaccgccaggtggctcagggtctgagtcctataagctcctgccgggagccgtcgccacaatcgtcaagcccctctctgccatcccccagccgaccatcaccaagcaggaagttatctagcaagccgctggggcttgggggctccactggctccccccagtccccctaagagagcacctggtgataccgtggtcacggcaaaggaagacgtgatgccaggaccagtcccagagcaggaatgggaaggatgaagggcccgagaacatggcctaagggcacatcccactgccacccttgacgcccctgctctggataacaagactttgacttggggagacctctactgccttggacaacttttctcatgttgaagccactgccttcaccttcaccttcatccatgtccaacccccgacttcatcccaaaggacagccgcctggagatgacttgaggccttacttaaacccagctccctgtgccctagcctggtgcttctcctctcctagcccctgtcatggtgtcccagacagagccctgtgaggctgggtccaattgtggcacttggggcaccttgctcctccttctgctgctgcccccacctctgctgtcaccttgctcagccatcccgtcttctccaacaccacctctccagaggccaaggaggccttggaaacgattcccccagtcattctgggaatactgttgtaagacctgactgggaccaggcaccaggcagggtctaaaaggctgtggtgagggaagacgcctttctcctccaacccaacctcatcctccttcttcagggacttgggtgggtacttgggtgaggatccctgaaggccttcaacccgagaaaacaaacccaggttggcgactgcaacaggaacttggagtggagaggaaaagcatcagaaagaggcagaccatccaccaggcctttgagaaagggtagaattctggctggtagagcaggtgagatgggacattccaaagaacagcctgagccaaggcctcgtggtagtaagaatctatcaagattgaggaagaatggtgtggaga

SEQ ID NO: 3175 - DNA, 1841 bp, Homo sapiens
  SIMILAR (585)..(1283): 921254mologous to Homo sapiens hepatocyte nuclear factor 4,accession number X76930,Smith-Waterman Score=1116.
acacgtccccatcagaaggcaccaacctcaacgcgcccaacagcctgggtgtcagcgccctgtgtgccatctgcggggaccgggccacgggcaaacactacggtgcctcgagctgtgacggctgcaagggcttcttccggaggagcgtgcggaagaaccacatgtactcctgcagatttagccggcagtgcgtggtggacaaagacaagaggaaccagtgccgctactgcaggctcaagaaatgcttccgggctggcatgaagaaggaagccgtccagaatgagcgggaccggatcagcactcgaaggtcaagctatgaggacagcagcctgccctccatcaatgcgctcctgcaggcggaggtcctgtcccgacagatcacctcccccgtctccgggatcaacggcgacattcgggcgaagaagattgccagcatcgcagatgtgtgtgagtccatgaaggagcagctgctggttctcgttgagtgggccaagtacatcccagctttctgcgagctccccctggacgaccaggtttctagttttatgggtagtagttttatgatgcccatttcacagttcaggcaggtggccctgctcagagcccatgctggcgagcacctgctgctcggagccaccaagagatccatggtgttcaaggacgtgctgctcctaggcaatgactacattgtccctcggcactgcccggagctggcggagatgagccgggtgtccatacgcatccttgacgagctggtgctgcccttccaggagctgcagatcgatgacaatgagtatgcctacctcaaagccatcatcttctttgacccagatgccaaggggctgagcgatccagggaagatcaagcggctgcgttcccaggtgcaggtgagcttggaggactacatcaacgaccgccagtatgactcgcgtggccgctttggagagctgctgctgctgctgcccaccttgcagagcatcacctggcagatgatcgagcagatccagttcatcaagctcttcggcatggccaagattgacaacctgttgcaggagatgctgctgggagggtcccccagcgatgcaccccatgcccaccaccccctgcaccctcacctgatgcaggaacatatgggaaccaacgtcatcgttgccaacacaatgcccactcacctcagcaacggacagatgtgtgagtggccccgacccaggggacaggcaggaaagactatccctgtcacccatcccattgccgctggggacagccaggcctgggccttggtttgggagaagcagtccaagtctgcatatcaaataaatgatggaggagatgggtgcccctgtcatggtgtccagacagagccctgtgaggctgggtccaattgtggcacttggggcaccttgctcctccttctgctgctgcccccacctctgctgcctccctctgctgtcaccttgctcagccatcccgtcttctccaacaccacctctccagaggccaaggaggccttggaaacgattcccccagtcattctgggaacatgttggacttgggtgggtacttgggtgaggatccctgaaggccttcaacccgagaaaacaaacccaggttggcgactgcaacaggaacttggagtggagaggaaaagcatcagaaagaggcagaccatccaccaggcctttgagaaaggacgaagaggtgcaactgtaagctgggagaccaatgaagacacaagtgcactggatcagataatggactatgtggaaaaacagtggaagcagagacgcccacaggtggcctgggcagtggtccaggtgaaagatgatggcagcatggactag

SEQ ID NO: 3176 - DNA, 8550 bp, Homo sapiens
  SIMILAR (6437)..(6871): 851254mologous to Homo sapiens Human hepatocyte nuclear factor 4 alpha,accession number AAW71582,Smith-Waterman Score=611.
  misc_feature (1)...(8550): n = a,t,c or g
atgcgactctccaaaaccctcgtcgacatggacatggccgactacagtgctgcactggacccagcctacaccaccctggaatttgagaatgtgcaggtgttgacgatgggcaatggtaggtgggggcagatgtgcccaggtgtgccagtgggggcaggtgtgcctgggtccaggagcagatctttggcactcaactttggggtgggaggagaatgatacaaaatggtaggttggtcctacaggccagcacaggtgttgccaagtgaagcccatgtgcccaggcacagtgatcacaggcattctgggtgaagggaggcctgcaagggccaatttccagcaaaagtcgatcccggctattcctcccaggcccttccagtcctcactgcctcacagtggctctgcttggcgcttggcacagtgacatgatggtgagctcccccttggtgcccagctccagcgattcagcccagcacggccccttcgtgaaccccttgggcctaggttcagagagacggcaagggatgttgtatccctggagatggtggttggagacataaccgcatttctcggtgtctttgggactttcctagggaaatgaaattggcacttagggaaaatggagctctcagggaagttttgctaactacgaagccaactcagcactgtgtgtgttgtgtgtgcgttcgtgtgtgatagtgagtttccatgtaggttgtatgggtggggtgatgccttcaggaacccatttgcatatgtgtgttcatttgtctctgtgtgtgagttctgggtctattttcctttgtattcattgagtgggtctgtgtttgtgtcttaggagttgcccgtgttgatcttgcttatgtatgtaagtgtgtatgtgtgtgtacttgtgtctgtggatgtttgtacatgtgtgctgtgtgtgcgggtcatagagcacatgcgtttgtgcatgcggacctgttggagtgccctgttcttcctgcatctttatcctgtatgggcgttttgtcgtgtgcccatatttgtacctgctgtgtatatatgcagttccctgtgctgcgggcgggggtcagcggtctctggtgtgcacgactgcacagacccaaatgcaggactctgttgttgccactcaccaagtgagattcatatcagcaacatgtccgtttgtctctgagcagattttgttgccgctgcgtctcgccagattgaggcatcccctccgacatcactggagcatatctggaggggtggacagttctccacagggaggtaggggaaaagaggaggcccggaaacccctcctggagggaagagccccatcggtcccaggccagcctcagaggagagggggcaggcagctggctgaggtcagcctgccaccctgcttccttctgtgtcttggagccactcagccagtatgaggctgcagctccagctgaggtctggaatcttgtggtcagctcagctagggtgaggaggcagctgctgggcactgcttgttgtcagctcagcaggtgctcacctgcccctgccgtccagtcacgtgtgaccttgggcatgtcacctcccctatcctggcttctgtatcttctacaaaacaggcttcattcccccaggcctgctggctggacggcttttaggcctgtctgaggaccacgccaggagcgcaaggcaaaaacacaccagagatnccccttgcgagttaggaggccggctcccaccccagaaggtggccaggttttcatgccttcctagagaaagctggggctggtggcctccaccacagggagacgcagaccctcagaaacaagtctgtgaagtcacaaccagccccagtttacagatgtgaaactgaagctccaaaaagtcaggaggtcactgagtggggaggtgatggagtgggaacagcccccagatctggctgaggccgaagccctggagagatccccgcaaggctcccttagatgcctgacattctgctcttcctgaagcctcactcccttctctcctggcgcagacacgtccccatcagaaggcaccaacctcaacgcgcccaacagcctgggtgtcagcgccctgtgtgccatctgcggggaccgggccacgggcaaacactacggtgcctcgagctgtgacggctgcaagggcttcttccggaggagcgtgcggaagaaccacatgtactcctgcaggtgaggagcctcaatttcttcagctgggaaatgggcacacttgggctcatggccccaaggtctgtcttctccctgagtgggtaggtcccagagacagctgcccttcagggccttcaaggctcttctggttttgtaaaagactttgtgaatccaagaagagcatctattctaggaaccacatttactgatcatcaagctactggctgccgtttattgagctcttatcatatgccaggcacaatactaagtctttgtgtgtatttacngtactccagaggtcaaggttcccaactcagctctaacaccaaccagcagagcgacccaggaccacatgttgcctctctgagcctcagttttcccatgtttagcaggacaggactgggctcttagagagttcatagcacctttccagctcctggtgggttcaagagagaactcccgggatgaagagatgagagcactgaggttggggggtcaactggatagccagggccctagttctgtcctaagaggaggaagttgtgtcttctccatccaaccatccaaagccctccccagatttagccggcagtgcgtggtggacaaagacaagaggaaccagtgccgctactgcaggctcaagaaatgcttccgggctggcatgaagaaggaaggtgagcctcggccctccccgccccaccaccactgccccacctgcacccacagctccccgacagtcatttacaactgtagccacactttatgactcagtggcaggccccagggtgactggctaatggctgagaagagggagggcctggaaatctgaccatagggagcggctgggcttggtcttgagaaagattcntcccactcctcatcagtcacagacacccccaccccctactccatccctgttctccctcctcacctctctgtgcctcctcacccgtccagaatgagcgggaccggatcagcactcgaaggtcaagctatgaggacagcagcctgccctccatcaatgcgctcctgcaggcggaggtcctgtcccgacaggtaccggggtgatcctgccacccacccagggatcccccacactacagaggagctcacctcctccacctccattctccccagccaggccctggagcagctgacgggaggggcctcagatattacagaagggacactgagtgcggtttcacatggcccagtttgcagcaagggcaggaatcgaacctggcgccctggggcactttctaattcatcctactgcctgcatcccacaggccaagcagagtcttcaccttcactgagggcctgcgatcagctcagctccgagagaacagagcagtggctcagtggagagaggtggcaaagtggggcccagcccttcccttgctgagtgaccttgggcaagtcacagcacctctctgagccatggttgcctcattgtcagaaaaggatgatgattttttgccctgcttctcctctaaggctgacagactccttggggctctaaagctgnttctccctcatccctgcctcctccctccctccgtttttaccctgagcttccttcagagctggagggcacccactatccagccccctccccacatctgattccagggagggggctctgtgcaggggacagagaatgcgggagggcccggacatctccagcattttcttccctgtatctctcgaagatcacctcccccgtctccgggatcaacggcgacattcgggcgaagaagattgccagcatcgcagatgtgtgtgagtccatgaaggagcagctgctggttctcgttgagtgggccaagtacatcccagctttctgcgagctccccctggacgaccaggtgaggatgggcgtggatggtgggcagtagtgggcagtgggcggggcagccagggggctgctggcccacctgggatatagccgtggactggcttgattttattttatttaacaaaatatgtagtgcacacacgtgtctgaaactttaaatcaccttacaaatattaactcagttagctcctccaacaactctatgaggtaggtactaaggtactattattactgccatctcataggtgaggagattggggcacagagaggttaagtaacctgctcaaggtcacatagctactatccagcatagctgggnatttttacaaagcacccttcataattctccatagctggtccatgggtgggaatttgggacccacagttttggaactttttgggatcatagacctttttgagaatctcaaaaaagaaaaaaaaagcacacagaatgttgcttacagtttcatcaggcacacagaagaggcccagcacgaagcagtttcttgcccaaggacacagcagttcaaggacagagtcagcgcgaggtctctcagctctgagcacatgttctttccccttccaggtttctagttttatgggtagtagttttatgatgcccatttcacagttcaggcaggtagaggcagaggggagcattaagctgacttgcccagcgtcactgagttggctacgggcagccttcccaagggtacagatggcaaacactgttccttctctctttcaggtggccctgctcagagcccatgctggcgagcacctgctgctcggagccaccaagagatccatggtgttcaaggacgtgctgctcctaggtgaggcggctgcctgccctggccagggctccagggagggtatgcctagcatggcactcacccaggcaaggagattcacatggtggcatgcaagggtgagggagactagtcaggagtggccctgtcctcaggcttgcattggagggctccaggactcagttttcaactgggtaccccactcagatgcaaggaaatgtggatgcaagtcaccaaattcccagcattgaagtcagagcacgatcagggttatccctggaattacctgtgcatccttttttcttttgacagagtcttgctctgtcactcaggctggagtgcaatgatgtgangcaaacactacctattttaatataacaatgctatgagggagctcgattatttatcctcatcttatagataagaaaactgaggcacagagaggttaagtaacttatccaactataaccagctatcaggggcagagccatttaagcagggcagtgcagttccagaatctggtcctttaaccttgatgctttggtgcctatcaggtgacctttgaatgtcatcgatcttgtgagtcatgttggtaaatggagcttgggtcatgtgaaagaggtcctagaaagccaagttccaagctcagccggatgactcaaggcagcttatcttctgaatctgggcctcagcttccttacctgtgaaatgggagtcaccatccctgcaggtcctcctcccacaggcaccagctatcttgccaacttaaaagccaaaactagaggagaggggtcaacccaaggtgacttcccatcctccctccctcccaacccttccaggcaatgactacattgtccctcggcactgcccggagctggcggagatgagccgggtgtccatacgcatccttgacgagctggtgctgcccttccaggagctgcagatcgatgacaatgagtatgcctacctcaaagccatcatcttctttgacccaggtacagtgcacacctcctaagccatccctgactctctctccagaacgctctgccagacttctcctattgggttctgtacactgagttcacagcctcatctcatgttaacgacagccaggagaggccgttttcatttaacagatgaggcaagtcaagatttgaagagacaatatggccgggcgcagtggctcacacctgtaatcccatcactttgggaggctgaggcgggcggatcacctgaggtcaggggtcaagatgagcctggctaacatggagaaaccccatctctacttaaaangtggctctgccaacaactggctgtgcgacccaggacaagtcctatctttgcactgtgtctgggtttccccgtgtgtaagatgaggcggttgctaggtgcttattggatgcattcctcaagtcccgccctccatctcctattcccctctcttctggtttagtgctttaggaaatgtggcagaaatctttttctgcctgtgtctaggaaatcataattcatgctggcgtaccctggttgttgaggtccctgaatccttgtgcccacactgctgaagactccttgtgtgacacaagtcaggggacatctgggtcttgactccccagatgctccagctggaccctgctgccctcccttgcccaccctcttccattgtagatgccaaggggctgagcgatccagggaagatcaagcggctgcgttcccaggtgcaggtgagcttggaggactacatcaacgaccgccagtatgactcgcgtggccgctttggagagctgctgctgctgctgcccaccttgcagagcatcacctggcagatgatcgagcagatccagttcatcaagctcttcggcatggccaagattgacaacctgttgcaggagatgctgctgggaggtccgtgccaagcccaggaggggcggggttggagtggggactccccaggagacaggcctcacacagtgagctcacccctcagctccttggcttccccactgtgccgctttgggcaagttgcttaacctgtctgtgcctcagtttcctcaccagaaaaatgggaacaaggcaatggtctatttgttcaggcaccgagaacctagcacgtgccagtcactgttctaagtgctggcaattcagcaaagaacaagatctttgccctcggggaggctgtgtgtgtgtgagtatgtatggatgcgtggatatctgtgtatatgcccgtatgtgcgtgcatgtgtatataaagcctcacattttatgattttgaaataaacaggtaatatgangggacacatagatgctataagtaggtcagttggctgcagcagagatgtgggggatgaggctgaaaggtgaggcgggaccaaatggttgaaggacttgcactccaaggagctttgagagccattgattacatccattatgttactatgtgaccaatacattactcattagaacatttacgtgatctcagagcttccttatatgcaccttgttcctttcaactcacttttgttctcttggttttttggggtcctcttaacaccctcatgaagtctatagatgggaatggtacaccctagtttactaacccaggaataggtacccaacaggcactgccaatattggatgggctggttgattggccacgcctgaggaagatggcgtcccaaggcctgaggtctgcatcccagactctccatcctgatcgaccttctctacctgcagggtcccccagcgatgcaccccatgcccaccaccccctgcaccctcacctgatgcaggaacatatgggaaccaacgtcatcgttgccaacacaatgcccactcacctcagcaacggacagatgtgtgagtggccccgacccaggggacaggcaggtgggcaaactctgggattttaccttgcaaagggtgaggatggggcttaagacaggaggcaggagaaagtggagtctagaaggtagaaccaggatgcaacagttttctgggttccagggtagggaataaagggcaagattgtccatttgttgaggctgtttattcagtaaggtgactgacagcctttactgaatgaagccattgttgggatgaggcaatccactggatgaggtaacccattgggtgaagatgtcttgggtgagaattccattagttgacattgtccattaagtaaaagtggtcattgaagtaaggctgcacagttgggtaaggctatccattagacattagatgagactacccattgggtcaggatgtctgctgggctantttgggagaagcagtccaagtctgcatatcaaataaatgatggaggagatgggtggtaggaccttccagacctcataaaacttaggctttatgatctgggactcacagaaggttgagcaataaaagaccttagggattatctggcttaattaattctctcattttatagaggaagaaattaagtcaaggtggggcagggtgggaggggagaactttcccggggctcttcatttactcccacaaaggctggaattttgagcagcccctgtctgtctgtttgtccttccccacccctgagaccccacagccctcaccgccaggtggctcagggtctgagccctataagctcctgccgggagccgtcgccacaatcgtcaagcccctctctgccatcccccagccgaccatcaccaagcaggaagttatctag

SEQ ID NO: 3177 - DNA, 1636 bp, Homo sapiens
  SIMILAR (71)..(1480): 991254mologous to Homo sapiens dJ1013A22.1 (hepatocyte nuclear factor 4, alpha),accession number AL132772,Smith-Waterman Score=2433.
ggcttcggggtgggcgcccagggtagggcaggtggccgccgcgtggaggcagggagaatgcgactctccaaaaccctccgtcgacatggacatggccgactacagtgctgcactggacccagcctacaccaccctggaatttgagaatgtgcaggtgttgacgatgggcaatgacacgtccccatcagaaggcaccaacctcaacgcgcccaacagcctgggtgtcagcgccctgtgtgccatctgcggggaccgggccacgggcaaacactacggtgcctcgagctgtgacggctgcaagggcttcttccggaggagcgtgcggaagaaccacatgtactcctgcagatttagccggcagtgcgtggtggacaaggacaagaggaaccagtgccgctactgcaggctcaagaaatgcttccgggctggcatgaagaaggaagccgtccagaatgagcgggaccggatcagcactcgaaggtcaagctatgaggacagcagcctgccctccatcaatgcgctcctgcaggcggaggtcctgtcccgacagatcacctcccccgtctccgggatcaacggcgacattcgggcgaagaagattgccagcatcgcagatgtgtgtgagtccatgaaggagcagctgctggttctcgttgagtgggccaagtacatcccagctttctgcgagctccccctggacgaccaggtggccctgctcagagcccatgctggcgagcacctgctgctcggagccaccaagagatccatggtgttcaaggacgtgctgctcctaggcaatgactacattgtccctcggcactgcccggagctggcggagatgagccgggtgtccatacgcatccttgacgagctggtgctgcccttccaggagctgcagatcgatgacaatgagtatgcctacctcaaagccatcatcttctttgacccagatgccaaggggctgagcgatccagggaagatcaagcggctgcgttcccaggtgcaggtgagcttggaggactacatcaacgaccgccagtatgactcgcgtggccgctttggagagctgctgctgctgctgcccaccttgcagagcatcacctggcagatgatcgagcagatccagttcatcaagctcttcggcatggccaagattgacaacctgttgcaggagatgctgctgggagggtcccccagcgatgcaccccatgcccaccaccccctgcaccctcacctgatgcaggaacatatgggaaccaacgtcatcgttgccaacacaatgcccactcacctcagcaacggacagatgtgtgagtggccccgacccaggggacaggcagccacccctgagaccccacagccctcaccgccaggtggctcagggtctgagtcctataagctcctgccgggagccgtcgccacaatcgtcaagcccctctctgccatcccccagccgaccatcaccaagcaggaagttatctagcaagccgctggggcttgggggctccactggctccccccagtccccctaagagagcacctggtgataccgtggtcacggcaaaggaagacgtgatgccaggaccagtcccagagcaggaatgggaaggatgaagggcccgagaacatggcctaa

SEQ ID NO: 3178 - DNA, 799 bp, Homo sapiens
  SIMILAR (787)..(650): 561254mologous to Homo sapiens PRO1438,accession number AF116661,Smith-Waterman Score=131.
tgaccagctgatgcggtaggaggaacacacagcatttgtgagaggtgggggcagcctgcatttctcttcttgcctgtagagaagcctaatgattcagaggggaggccacagggaggatcataacattcttgctgccaccggttcttgagactttgtgggagaggttttaggtggacaagtggcccccaggacatggggcatcaagtatagcctgtttgaccccagcagaccccagacatgtctgtagctactggtctcacctagccccaaggcgtccctcacctggccaccctcatcttgcaaataatgtgtctccgagggtgtttggctctggatggagcttgtccttggagggcagagtgtttgctactgtcccaggtgttactgaaggatttgcttcatgcctagcagtaccttccaggcgatgcattgagtgagggaatgataggcatgctagggaccctgaagataattccaaaacagaagtaaaaacaccggaattcatggcagcatggctggaatatgtacatggtccccatagtgaccacttctcactgacaacacccattggatatgtgaggcccagaggatttatgaatgagaaaatccaaaacaacaagaaaacctctggtctcaatactttacacttatatctactatttaaaaaaaaaaaagttggctgtgcatagtggctcacgcctgtgatagcagcactttgggtgactgaggtgggcacattgcttgagcccaggaatttgagaccagtgtaggcaacatagtgaaacccccgtctctatac

SEQ ID NO: 3179 - DNA, 2244 bp, Homo sapiens
  SIMILAR (1561)..(1887): 981254mologous to Homo sapiens DNA-binding protein,accession number M88374,Smith-Waterman Score=613.
  misc_feature (1)...(2244): n = a,t,c or g
atggtgacaggcaagggagcggcaccagatgccgaaaccacaagggaagatgcctgggaagctggggactgtgtggaggctggggccagcgccaaggagcaagtggaagctgcccgcaaagacctggaccaagccaaggaggaggtgttccgcctaccccaagaggaggaggaggggccgggggctggggatgagagttcctgtgggactggtggaggcacccaccggcgcagtaaaaaggccaaagcccctgagaggccggggactcgtgtcaccccagatcctgctctggagctcccatccaccccaccaccgtccagccttttacgcccccgcctcagtccctggggcttggccccgctcttccgttccgtccgctccaagctggagagctttgctgacatcttcctcacgcccaacaaaaccccacagcccccacccccctcccccccaatgaagctggagttgaagatcgccatctcagaggccgagcagtctggggctgctgagggcactgcgtctgtcagcccccggcccccaatccgccagtggcgaactcaggaccacaataccccagcacttctccctaagccctctctgggccgaagctactcctgccctgatctggggccccctggcccangggagcctcccttctctaccacatttgctcttcacgcattcactttcttctcggaccagcagaaccaggtctccgatgatgacctcgacccatcctttactgtctcaaccagcaaagcctcgggcccccacggcgccttcaatgggaactgtgaagcaaaactctccgtggtccctaaagtgtcgggcctggagcggagccaagaacagcccccggggcccgacccgctgctagtgcctttccccccaaaggaaccaccgcctccaccggtccctcggcctcctgtctcaccccctgcacccctgccggccactcccagtctgccacccccaccccagccccagctgcagcttcgggtctcacccttcggcctccgcacttctccatatggcagcagcctggacctcagcactggcagttgtctgggccgctggggtcgcctccacgggcaggagccacggccaggacgtgcaggccgccccctgctggtccgtttcggaaccgggcgggtggccgcggcgctgcccgggttgggggcatggctttacaacggtgccgagagtgaaaacgaagaggagagccctcggcaggaaagttctggggaggagatcatcatgggagacccggctcagagtccagaatccaaggactcaacagagatgtccctggagagatcctcccaggacccctctgtcccccagaaccccccaaccccactgggtcactccaatcccttggaccaccagatccccctggaccccccagccccggaggtagtccctaccccatctgactggaccaaggcctgcgaggccagctggcagtggggcgctctcaccacatggaacagccccccagtcgtccccgccaacgagcccagcctgcgggagctggtgcagggccgcccggcgggggcggagaagccctacatctgcaacgagtgcggcaagagcttcagccagtggtccaagctgctgcggcaccagcgcatccacacgggagagcggcccaacacctgctccgagtgcggcaagagcttcacgcagagctcgcacctggtgcagcaccagcgcacgcacaccggcgagaagccctacaagtgccccgactgcggcaagtgcttcagctggagctccaacctggtgcagcaccagcgcacgcacacgggagaagagccctacaagtgcacggagtgcgagatagccttcacccagagcaccaacctcatcaagcaccagcgatcccacaccggcgagaagcctncaagctcctctagcctgttgaagcccctgacagtgccaccaggctacaccttccctcctgctgctgccaccaccacttctaccaccacggcaactgctaccaccacagcagtgccagctccgactcctgcaccacagcgcctcattctatctcccgatatgcaggctcgcctgccctggctagaagagctcttccaaagccccttgagagagtccccatccttccaaccaggatccttccaaccactgctgtcacaggaccttagcaatgccgcattgcaggatccaggaggtctcggctggctctcagcagaggccatccagggtcactcagcctga

SEQ ID NO: 3180 - DNA, 11119 bp, Homo sapiens
  SIMILAR (3597)..(6035): 781254mologous to Homo sapiens Human SRCAP,accession number AAB50363,Smith-Waterman Score=3054.
tcccctggctcatccagttccccagcctctagtggggcaggcggcatctccccgcagcacatagctcaagattcctcactggatggacctccaggccccccagatggtgccacagtgcccctggaggggttcagcttatcccaggctgctgacctggctaacaagggcccgaagtgggagaagagccatgccgaaattgcagaacaggccaagcatgaggccgagatcgagactcggattgctgagctgcggaaggagggtttctggtcactgaagaggctgcctaaggtgccagagccccctcgccccaaaggtcactgggactatttgtgcgaagagatgcagtggctctctgctgactttgctcaggagcgccgttggaaacggggtgtggcccggaaggtggtgcgcatggtgatccggcaccacgaggagcagcggcagaaagaggaacgggcccggagggaggagcaggccaagctgcgtcgaattgcttccaccatggccaaggatgtcaggcagttctggagcaatgtggagaaggtggtgcaattcaagcaacagtcccggcttgaggaaaagcgcaaaaaagccctggacctgcatttggacttcattgtggggcaaactgaaaagtactcggaccttctgtctcagagcctcaaccagccattaacctccagcaaagcaggctcttccccttgcctcggctcttcctcagctgcctccagtcctccaccccctgcttctcgcctggatgatgaagatggggactttcaaccccaagaggatgaggaagaggatgatgaggaaacgattgaagttgaagaacaacaggaaggcaatgatgcagaggcccagaggcgtgagattgagctgcttcgccgtgagggagaattgccactggaagagctgctccgttcccttccccctcagctgttggaagggccttccagcccctctcaaaccccctcatctcatgatagtgacacccgagatgggcctgaagaaggtgctgaagaagagccccctcaggtgttggagataaagcccccaccctctgctgtcacacagcgcaacaaacagccttggcatccagatgaagatgatgaagagtttactgccaacgaagaggaagcggaggatgaagaggatactatagcagctgaggaacagttggaaggggaggtggatcatgccatggagctgagcgagttggctcgagaaggtgagctttccatggaggagctattgcagcagtatgcaggagcctatgccccaggctctgggagcagtgaagatgaggatgaagatgaggttgatgctaatagctctgactgtgaaccagaggggcccgtggaagcggaagagcctcctcaggaggatagtagcagtcagtcagactctgtggaggaccggagtgaggatgaggaagatgaacattcagaggaggaagaaacaagtggaagttcagcatcagaggaatctgagtctgaagagtctgaggatgcccaatcacagagccaagcagatgaagaggaggaagatgatgattttggggtggagtacttgcttgccagggatgaagagcagagtgaggcagatgcaggcagtgggcctcctactccagggcccactactctaggtccaaagaaagaaattactgacattgctgcagcagctgaaagtctccagcccaagggttacacgctggccacgacccaggtaaagacgcccattcccctgcttctgcggggccagctccgggagtaccagcacattgggctagactggctggttaccatgtatgagaagaagcttaatggcattcttgctgatgagatggggcttgggaagaccatccagaccatctctctgcttgcccacttggcttgtgagaaaggtaactggggtccccatttaatcattgttcccaccagcgtgatgttgaactgggagatggagttgaaacgttggtgccccagctttaaaatcctcacttactatggagcccagaaagagaggaagctcaagcggcagggctggaccaagcccaatgcctttcatgtgtgtatcacatcttacaagctggtgctgcaggaccaccaggccttccgtcgcaagaactggcgctatctcattctggatgaggcgcagaacatcaagaacttcaagtcacagcgctggcagtcactcctcaacttcaacagccagagacgcctgctcctgacaggaactcccttgcagaacagcctcatggagctgtggtccttgatgcactttttgatgccccatgtcttccagtctcatcgcgagttcaaggagtggttctctaatcccctaactggcatgattgagggcagccaagagtataatgaaggtctagtcaaacgcctccacaaggttttgaggccttttttactgcgccgagttaaggtggatgttgagaagcagatgcccaaaaagtacgagcatgttatccgctgcaggctctccaagcgtcaacgctgtctctatgatgacttcatggcacagaccacaactaaggagacactagccacaggccatttcatgagcgtcatcaacattttgatgcagctgagaaaagtttgcaatcatccaaatctgttcgaccctcgaccggttacctcccctttcatcaccccaggcatctgcttcagcaccgcctctctggtgctaagggccacggatgtccatcccctccagcggatagacatgggtcgatttgaccttattggcctggaaggtcgtgtctctcgatatgagagcagacacatttctgccccggcaccgcctctctcgccgggtactgttagaagtggctactgctcctgaccccccaccccggcccaagccagtcaagatgaaggtcaacaggatgctgcagccagtacctaagcaagaaggccggacagtggtggtggtgaacaacccacgggcgcccctgggccctgtcccagttcgacctcctccaggtcctgagctctcagcccagcccacccctggcccagtcccccaagtgctgccagcatcactgatggtttcagcctcacctgccgggcccccgcttattcctgcatctcggcctcctggccctgtcctcttgcctccactgcagcccaacagtggttctctcccccaggtgttgccatcccccctgggggtcctgagtgggacctcacggcctcccacgccaaccttgtccctaaagccaacaccacctgccccagttcgcctgagcccagccccacctccaggctcctctagcctgttgaagcccctgacagtgccaccaggctacaccttccctcctgctgctgccaccaccacttctaccaccacggcaactgctaccaccacagcagtgccagctccgactcctgcaccacagcgcctcattctatctcccgatatgcaggctcgcctgccctcaggcgaagtggtcagcatcgggcagttagcctcactggcacaacgtccagtggctaatgcagggggaagcaaacctctcaccttccaaatccagggcaacaagctgactttgactggtgcccaggtgcgccagcttgctgtggggcagccccgcccgctgcaaagtagtgccaccaaccatggtgaataatacaggcgtggtgaagattgtagtgagacacgcccctcgggatggactgactcctgttcctccattggccccagcaccccggcctccgagctcttgggcttccagctgtgttgaatccacgccccacgttaacccctggccggctacccacacctactctgggtactgctcgagcccccatgcccacacccactctggtgaggcctcttctcaagctggtccacagtccttcacctgaagtcagtgcttcagcccccggagctgcccccttgaccatcttttctcctctccacgtgccatcctcactccctgggccagcctcttctccaatgccaattcccaactcctctccccttgctagtcctgtgtcctctacagtctcagttccattgtcatcttcactccccatctctgtccccaccacacttcctgccccagcctcggctccactcaccatccccatctcagcccccttgactgtttctgcttcgggcccagctctgttgaccagtgtgactccaccattggcacctgttgtcccagcggctcctggacctccctccttggcaccatctggtgcttccccgtcagcatcagccttgactttaggtttggccacagctccatccctgtcttcatctcagacacctggtcaccctctgttgttggctcccacctcttcacatgttccagggtattgaactcaaccgaggccccagcatgctcacctgtcctggtgccagcttcggctctggccagtccttttccggcagcaccaaatccagctccagctcaggcttcccttctggctccagcatcttctgcatctcaggctctagccacccctctggctcctatggcggctccacagacagcaattctggctccttctccagctcctcctctggctcctcttgcggtcctggcaccatcgccaggggctgctcctgtcctggcttcatcacagactccggatccagctatggctccatcgtctactccaggaacctctttagcctcagcttcaccggtaccagctccaacccctgtggtggctccatcatcaactcaaactatgctaccagccccggttccgtcacctctcccgagcccggcttctacgcagacactggccctagccccagctttagcacccactcttggaggctcatctccatctcagacactctctttgggaacggggaacctccagggaccctttccaactcagacattgtcattaactccagcatcatccctggtaccaactccagcccagacactgtctttggcaccaggaccaccactgggtccaactcagacgctgtctctggctccagcaccccctctggctccagcttctccagtgggcccagccccagctcacacgctgactttggctccagcatcgtcatctgcttcactcctggccccagcttcagtgcagacactgaccttgagccctgccccagttcctaccctgggcccggccgcagctcagaccttggcgctggccccagcctccacacagtccccagcttcccaggcatcttcccttgtggtttcggcatctggtgccgctcccttgcctgtcaccatggtatcccggctgcctgtttccaaggatgagcctgacacactgacattgcgctctggtccccccagccctccctccactgctacctcgtttgggggcccccggcctcgacgccagccccccccaccacctcggtcccctttttatctggactccctggaggaaaagcggaagcggcagcggtctgaacgcctggaacggattttccaacttagtgaggctcatggggccctggcacctgtgtatgggactgaagtcctggatttctgtaccctgccccaacctgttgccagccccatcggccctcgttctcctggccccagccaccccaccttttggacttataccgaggctgcccaccgggctgtactgtttccccagcagcgactagaccagctgtcagaaatcattgagaggttcatctttgtcatgcctcctgtggaggcacctcccccttccctgcatgcctgccacccacctccttggctggccccacgtcaggcagccttccaggagcaattggcctctgagctctggccccgggctcgtcctttgcaccgtattgtgtgtaacatgcgcacccagttccctgacttaagactcatccagtatgattgcggaaagttgcagacgttggcagtgctgttgcggcagctcaaggcagagggccaccgagtgctcatcttcacccagatgacccgaatgctggatgtattggagcagtttctcacctaccatggccatctctacctgcgcctggatggatctactagagttgaacagagacaggctcttgatgtgtcggttcaatgcagacaaacgcatattctgcttcatcctttcaactcggagtgggggtgtgggcgtgaacctgacaggagcagacactgttgttttttatgacagcgactggaatcccaccatggatgctcaggcccaggaccgctgtcaccgaattggccagacccgggatgtccacatatataggcttatcagtgaacggacagtggaggagaacatcctaaaaaaggcaaatcagaagagaatgttgggggacatggccattgagggaggcaacttcaccacagcctatttcaaacagcagaccatccgagagctgtttgatatgcccctggaggaaccttctagctcattctgtgccctctgcccctgaagaggaggaagagactgtggccagcaagcagactcatattctggagcaggcattgtgtcgggcagaagatgaagaggatatccgtgcagccacccaggccaaggctgaacaggtggctgagcttgcagaatttaatgagaacgatgggtttcctgctggtgagggagaggaagctggcctgcctggggctgaggatgaggagatgtcccgggctgagcaggaaattgctgccctcgtagaacagctgacccccattgagcgctatgccatgaaattcctggaggcctcactggaggaggtgagccgagaggagctcaaacaggcagaagagcaagtgggagcttggccgcaaagacctggaccaagccaaggaggaggtggtccgcctaccccaagaggaggaggaggggccgggggctggggatgagagttcctgtgggactggtggaggcacccaccggcgcagtaaaaaggccaaagcccctgagaggccggggactcgtgtcagtgagcgtcttcgtggagcccgggctgagactcaaggggcaaaccacactcctgtcatatccgcccatcaaactcgcagcaccaccacaccaccccgctgcagtcctgccagggagcgagttcccaggccagcacctaggcctcgacccactccagcttcagctccggctgcaattcctgcccttgttcctgtcccagtttctgccccagtacccatttcagccccaaatccaataaccattctccctgtccatatcttgccttctcctccccctccttcacagattcctccttgttcttctcctgcctgcacccctcctcctgcctgtacccctccaccagctcatacaccgcctccagcccaaacctgtcttgtaactccttcctctcctctcttgcttggtccaccttctgtgcccatctctgcctcagtcactaatctccccttggggcttggagggctgagggaggagctgtgtgcccagggattgggcatcttccagagtccctggagctggcttctgtggccagttcagaaacctcctcactttctcttgtgccccctaaagatctgttgccagttgctgtggagatcctgcctgtgtcagagaagaacctttctctcaccccttctgcacccagcctgaccttggaggctggcagcatccccaatggtcaagagcaggaggcaccagattctgctgaggggaccacccttacagtgctgcctgaaggtgaggagttgcccctgtgtgtgagtgagagcaatggcctggagctcccacccttagcagcatctgatgagccacttcaggacccactggaggctgacaggacctcggaagagctgacagaggccaagaccccaacctccagcccagagaagccacaggaactcgttacagctgaggttgcagctccatccacctcatcttcagccacttcctcgcctgagggtccttcacctgcccgacctcctcggcgtcgcaccagtgctgatgtggaaattaggggtcaagggactggtcggccaggacaaccaccaggccccaaagtgcttcgaaagcttccccagacggctggtaactgtggtagaggaaaaggaactggtgcggcggcggcggcagcagcggggagctgccagcaccctagtgccctggggtctctgagactagtgccagcccgggaagcccgtctgtccgcagcatgtcagggccagaatcctcccctcccattggtgggccctgtgaagctgctccttcatcctcactgcccactccaccccagcagcccttcattgctcgccgtcacattgagctgggggtgactggtggtggcagccccgagaatggagacggagcactgctcgccatcaccccacctgctgtgaaacgtcggagggggaggccccccaagaagaacaggtctccagcagatgctgggagaggtgtggatgaggcaccctcatccaccttgaagggaaaaaccaatggggctgacccagtccctgggcctgagaccctaattgttgcagatcctgtcctgggaaccacagcttattcctggggccccagccttcttgggaccccagccagttcacagacccaattcccctcctgttcacctgtggagaaaagaaggcgaggacgacccccttaaagcacgagatttgcccatccctggggaccatttcctctgcaggggatggcaactccgaaagtcggacacagccacccccacacccatcacccctaaccccactcccaccactgctagtttgtcccactggctactgttgccaacactgtcaccactgtcaccatttcaacgtccccacccaaacgggaagagggggccgacctcccaaggaatcctccatcacctcgggcccagccaggttccccgtcttgggaccgtggacaggcatttcttgtttttcgaggagttgttgggattggggaggcgacggcaaccccagggccaagcgcgagagtgagggtagttcctctgatgaggatggaagccgccccctcacccgcctggcccgccttcggcttgaagcagaaggaatgcgaggacggaagagtggagggtccatggtggtggctgtaattcaggatgacctggacttagcagatagcgggccaggcgggttggaattgacaccacctgtggtctcactaaccccaaaactgcgctcgacccggctgcgtccagggtctctagtccccccactagagactgagaagttgcctcgcaaacgagcaggggccccagttggtgggagtcctgggctggcaaagcggggccgcctacagccccccaagtcccctgggggcctgagggttcagtagaggagtctgaggctgaagcctcaggttgaggaggaggaaggggatgggaccccacgccgacgtcctgggccccccgccggcttgttgggaccaccaaccaagggggaccagggcatcctgcgcagcagcgcccctccttccctggctggccctgctgttagtcacagaggccgcaaggccaagacgtgagtggggctgcccctccacctaggctttccaccgtggccactccctccatgaccaggcctgactctgttaaccactacttgaagtcttgagggggaaagcctccagggagacataggggccttctcccttcttcccaccaaagtagggggtaggcaactggttgtcatggaaatggggatcatcacagtccccttccccttcaccccacgtggctgggcagtgttaagggtggcaagatagtctctgtccccacccccttgtacttgattccccagctgtctttcacacagccccccacccttaggggaagggggaggggcttctctacaatgaggtttttttcttttttttttttttttaagaagaaaaaataataaacttagtttctgtatgagcatccgcgtaaggaggcttctgattttctggtggtggtggagggttgggtgggaacttgggcatcgtttttctcctccctcttgttcttgcaaagatcctagcacctgatctctagcccaggactatatgttccaggcagaaatctacccaagaagagggaagattggtgaatttgatgtggtagggtgcctttccccagtcagtttgaagtcacagatatccttttcctctcatttcttttccctcggttcctaaacgttcctcggagctctttgatgcctcagacctttcccttttatccctcttgctcaggagcttcctttcacaactttttccagagggcaggcgtcctatctccagttgctccatcccttgggccctcccctggctcttcatctagccaaactggtttgagtcagccacaccccttcccagctccctgggctcttcacgtggtggctggccactcaaccccacccctgggcttggcttggagccctgagtcagctccatcaccacccaagccaaaccaaagctgaggtatggagccgaaactcacagtccttcaaggcctatagccaggtgatggaggacgaggagaaggcagtggagatcttgggcaacacggaagctgctcatcctccatcccccatccgctgctgctggctccgcctccgctgcttggcagctactagcattatctgtggctgctcttgcctgggagtcatggctctggtgtttgccatcaaggcggaagagcggcataaagcaggccggtccgaggaggcagtgcgcctgtggggcccgggccggtaaactcatcctggccagctttgctgttctggcttgctgtccctcattctgggtccccttgctgctgtggttgctctcctacgccatcgctcaggctgagtgacccctggatggccctctgctaagagccaagccaaaaccccctggatcctgcaatgcggcattgcctaaggtcctgtgacagcagtggttggaaggatccctggttggaaggatggggacctctctcaaggggctttggaagagctcttctagccctttataaaaggagggcagcagctgagactgatgagaggagggcagcctgctctgttctttcagggccccccccacccccatctcccctaccctagcccaccctagggcctctacccagcgggaggggttgaagaccaggcctggttttattagaattcattttgtaataaaagccttttttagtggtg

SEQ ID NO: 3181 - DNA, 525 bp, Homo sapiens
agcctcagtcagatttcactttatttgtatcgatgacaatattaactcttcagatttataaaatgacaaaacttgataattacctggaaaccaattttattattacctgggttacccctaaatccatcaagaaaaaccacctaacatattcagtgttaaaaaagagacattacgactagccttggccaatatgggcaaaaccctgtctctactaaaaatacaaattttagcagggtattagtggtacgtgcctgtaagtcccagcttactcaggaggctaaggcaccagaatcgcttgaatctgggaggcagaggtcggcagcgagcagagatcgtgccacttgcactcctggggcggacacagcgagactgtctcaaaaaaaaaaaaaaaaagagagagacaacaatggagacagattggaacatgtatgccctgagaaataaatcaacagctcccattaaaattctcaatacgctagacagatttaaaagtacaatctggtactttctcttttttgagctgga

SEQ ID NO: 3182 - DNA, 390 bp, Homo sapiens
ggacttcaccatgtcacatcactatcactcagcacacgggacccttgtcctggctcccagggcccttggcaatccgctttcactctacccatctaactacaccttccctttccagcattcgccctctgatccatgcactcagtcctactctctgcctccagaatatgccacacacggttcctcttgctttgacaccactgatggagggcttaatgcatccagggcgcttgctgggagctgtgcgcctgtgtctgggtctttgccctgctgccccactcttggaattccatccccaccactcccccacatgcacaaaagccttcctacctaccctccaactccgaccatctccatgaagcctccttgacctacgtggcacccacgcgtccg

SEQ ID NO: 3183 - DNA, 1989 bp, Homo sapiens
  misc_feature (1)...(1989): n = a,t,c or g
gttacatcgtgtgtattatttaatgtcactattggttagtggccatttttcagaactgaagatggaatggcctgaccagctattaagaatgtggggagacgcagaaattgtgggaaaattccttaatgtttaagggaaagtaactttaagagatttttggaaaagctttatatacattcttttcaaatttcagtacaaatgaaaaagtggttttaatcagtgatttagtagactttgagcaactgtgcacgcttcagtttaatagcatggtttggccagtgtattactctcaagtccttttctcaatcaacttctatcatcaaagcaattgtttcattatagataaataaggacattttttaatttaaaaattcatgtctgagttgactttcataagggatttcattttttcctcaacattcttaaagccttttagtatttgacggttcttttttcccaggacatttgctaggaataacaacgtttcaaatgttttttaatctacttgagcaacactatcgtgtcttacaaaagttgttcatatgtaaatgatcatccacatttcgtggaattgaggccatgttcaggtgctaagggaagttcgccttttacacaggaagattgaggaaaatttcctagatataaatacagataaatcagacgttacagtggtgacgtagtaaccatcatggcaatggaaaggagtccaattcatagcctaaaacttcaaatgtattcttaggagtcagattttactgaatattttacccacaatagctgcctattttgttataataaaatatatataaatatatatataaaactttctttaaactgtaactatgggaattattttctttacatagttgcggcacacacacaaacatatatatatatttaaaatatattttgtttcttttgccacctactcctaactttttgtttgggtttttaaattaaatattaattggaatggacttatctttaatcatgtggaactggaaatggggggcatgggtggtcatgagggagggaaacctttaggggaaattaggattataaggtaaaaagtgtgggcatattctccctcttttctaccaaagggttttcaaatgggttcctgagggtttttttgttggttggtcccgtgttgttactgttgttcttgtcaatcaggtttgattttgggcccttgcccctttccttcctagctctccttttattaataggaaggccaggcaaaagccccattttatgtgtgtgttttcccctcagacagccttccatccccacctgctctgcacctagaattggcacaaatcttcatgggtgaggcaattttaaggaaatgttagtggaaaggtaggaaattattttcacaaatcagttttctctggtccttcatattaataataatatttggcttccccattgctctttggagttgtttattaaatatgtgtttttgacaacctcctcattagtttcttaaatgagtactggtttgtaaagaattatcaacattatccattccatttatgaagaagaggagaacagctaataaactgtattgtaaaaaccccccactgttaaagtgtgtcctggaattttggaaagaaaaaaaaatatattttgccaagcctaacattttccctgaaaacaatttggnggccatccatgtaaccttataaccgaatccccaagagcccgttaggccagccagcagtgtgttacccacattgaaatacacagtgctgcctgttagactaaatgtccgtaggttgttaacccacatagaaacacactagtatgaagaaaactgttgtaaaatctcaagagcttcagaaactgccttacaagaccgcagcataagctattttggaagtatttaccaaatagtcacatgttgtaaaatatccaagtggttataaaaggatgcccatttatatattaaaatttacataacattgttttctggaaaaaaaaaaa

SEQ ID NO: 3184 - DNA, 1423 bp, Homo sapiens
  SIMILAR (1378)..(1295): 611254mologous to Homo sapiens Human secreted protein, SEQ ID NO: 6606,accession number AAG02525,Smith-Waterman Score=75.
tgactctggttgccaaatccactgggcacttcttaaccttctatttgacctctgcgcatttggccctgttgagcactcttcttgaagctctccctgggcttctctctcttctagttctattctagtctttttttattgagtcctcctctttgctgatcccttccaagggttcaatatatatacatgtatatactgtacatatgtatatgtaactaatatacatacatacaggtatgtatatgtaatggttatatgtactcatgttcctggtgtagcaacgtgtggtatggctacacagagaacatgagaacataaagccatttttgtgcttactactaaaggctgtccactgtagagttgctgtatgtagcaatgtgtatccactctacggtggtcagcttttagtagagagcataaaaatgataaaatacttcttgaaaacttagtttactatacatcttgccctattaatatgttctcttaacgtgtgccattgttctctttgaccattttcctataatgatgttgatgttcaacacctggactgaatgtctgttctcagatcccttggatgttacagatgaggcagtctgactgtcctttctacttgaaagattagaatatgtatccaaatggcattccacgtgtcacttagcaaggtttgctgatgcttcaaagagcttagtttggcggtttcctggacgtggaaacaagtatctgagttccctgggagatcaacgggatgaggtgttacagctgcctcccttttcaagccaatctggtgagcagtggtgcaggcggggagccagagaaacttgccagttatataacttgttctttggcttttcttcgatctgtaaaacaaggataatactgaactggtaagggttagtggagagtttttaattaaaagaatgtgtgaaaagtacatgacacagtagttgcttgataatagttactagtagtagtattcttactaagacccaaatacaaatggaattaatttaacccaagtttatgagttggctttttttttcattttccaatttggattttaattaagagtgtcttttcttatgtgattttttttaattgctatttgatatggtttggctatatgtccccacccaaatctcatcttgaattataatccccatgtgtcaagggagggacctgatgggaggtgattggatcacgggggcagttgtccccatgctgttcttgggatagtgagttagttctcatgagatctgatggttttataagtgtttgacaattcctcctttacacacactctctctctcatctgctgccatgtaagacttgcctgcttccccttctgccatgattgtaagtttcctgaggcctcctcagccatgtggaactgtgaatctattaaacctcttttctttataaatgaaaa

SEQ ID NO: 3185 - DNA, 1323 bp, Homo sapiens
cccacgcgtccgatgttattggcatttttaagtgtttagagttttttggggtttggggtggttttttttccttggtttccttttttccttttaattggatgcactgacctggcccaggaaatgaagagattctcttttgatgctattaccaatgttatcataaagtgacagtcacctgtaacaaaaaggtgccaccacacatgatcactgatgttttatttgctcatcaatatttttatttttgtattctggctcagctgcttctctgagtggagttaaggaatgagccacaaagatttttgtagtaagtatattggcattgcattttatattcctctatatttaattttgaaaacctaaaaagaaggattgtgcatcttgagagaaagttgagcaaattgtgatctaagcggaatgttaatttgtgctgcttcttgtgcacgatagcagcagtagtatctctcttgggaaataaacatcccatattatgatgtctatggaatataggtttccttttcttccttccctccctccttcccccacctttctcttttttttttctctctcagcttctcttttcctccttccctcttcccttcctctttctttactttttttggaaatcacttattgtaaataagttgtaatccaaacctcatgtatcaatggggaattttcaaatataaatattaccaatgcattttctggttgttgtctgatttttgattgaagtataatgagaatgacatgtctgttgcttttggtttgaggacttcgctttagcttcataaatcttttggtattttagtatttcattgttttagcaggagagggcagcaaaagttcattttccctgttagtaatgctgtggttcatgatcggttttaaatttagctgtgtgtgtgtttttttaaacagcatctctttgtgagtagaggtaaaaatgaaacatttttgatatgaaaagttgcatatgaaaattataggactgggttcaaccagagcagtgaaggacttctgatcccacatcaaactttaaaatgcccacaaaacaatcttccccctctgggcctaaaacatgctacttcccttttcaaacaccacaaaatacaagctgagtcttaaacacttggaatttaaaatgtttttctttggaaatgatttgctttcttcaaagtggtaacagaaacaaaaatgaaggtgctccccaaaaagaraatgtaaccttcccctttcacagatgtgtgagaggttctgtactgtgggtgcatcataataaagaagcagtgaagagttaaaaaaaaaaaaagaaaaaagtcgagc

SEQ ID NO: 3186 - DNA, 329 bp, Homo sapiens
acagaacctacctaggaataaaaacggggataagataggctgaaaagaaaaaataaacagagtcttagttacctgtgggagtataataaaaaatctaacatttgtgttacccaatccttagaaagagaggaggatgatagagctgaaaaagtagtggaataaataatggcttcaaactttccatatttatcaagagatgtaaacctaaagattcaagatagttaacgaatcttaaattggataaaactaaagaaatctatatcaaaatatattattgatcttctggaaactaaagacataataagaaatcttgaaagtagtcagagaag

SEQ ID NO: 3187 - DNA, 891 bp, Homo sapiens
  SIMILAR (621)..(830): 471254mologous to Mus musculus putative,accession number AK008221,Smith-Waterman Score=162.
cctctccatctttctgccgagtcccatttttcagccaaaaagtggtaactaggagctctaggacctaaacacaaagaaagccctccctggatcttccccctttagctagcaagttcttgttccctcgatccctctttttctcccctcctaatgcagtagagaccaatggaaaagtgtgggatgtgttggaggtcagagggaggttcatcttggccaagtcttaaaggtgacacacgcaagagttactgacccaggcgttctgctcaacgctttatagacactatctccgtagccatcaaaagaggcacctgtggtagatgaatcattatctccagtttgcagatgagtagctggaggcttggatagctaagtaacttgtacgaggtacagaagtgctcagtggcacatctacctgagccccagccgtgtcttgaaggcccatgtgaaaaagcaggcagcattgagaaccggtgaggaactcatactcataatctaggctggggctctttacttatttggtcagtctgatgaatgctctgcatctccaggcttgaaagtacatctccacacagtatttgtgaatgtgtcaaagggttcagacccccaaaagcccatctaatccatatgtccactcaaacatttgtacacaactgttcattgcaccattatccataattgccaaaaggtggaaacagcccaaatgtccatcagctgaggaatgaataaacgaaatgtagtacatccattcaatggaatatgattcagcaataaaaagaaatgaagtattgatacatgttacgacatggaagaattttgaaaacattaggttaatgaaagacgccagccacaaaggactgtatgttgcatgattcgatgtacatgaaatgtccg

SEQ ID NO: 3188 - DNA, 372 bp, Homo sapiens
gacacattgtgctcacagagcctagaagagtgtgacagtagttgagggccacgctgttgtcttagagtgaagtgaggagaacctacattggtttggtagtcatgggagtggaaggagggatgaaatgtgaaagctcattggaggcaaaatcaaaatggcttgctcttcatagtcaactattaagtgaggaggaggaattatttgctgacttgggaagaagtaaaagcttgccatctcaatcagggtaaagcttaagcattgtgtgattctagatagattattgagcagttttgttctatgtatttcatatcccatatcttctagttatgaccctacttctttatttcttgccatagccaaacattttttaag

SEQ ID NO: 3189 - DNA, 700 bp, Homo sapiens
  SIMILAR (58)..(273): 541254mologous to Homo sapiens Human secreted protein, SEQ ID NO: 4718,accession number AAG00637,Smith-Waterman Score=170.
aaggctgataattttatagggttccgttgcatggatagaccacatttattcattcatttatttatttatttatttatttatttatttatttattgagacaatctcactctgttgcccaggctggagtgcggtggcatgatcatggctcactgcagtctgaatctcacattctcaagcgatcctgccgcctcagcctcctgagtagctgggactacaggcacatgacaccatgcctggatattcgtctttctgtgtaactggttgagaaacaggggagtaacagtgaagaaacggtcttagaataaatctggtgacagcagaagagaatatgagacagattgtgctcacacagccttgaagagtgtgacagtatttgagggccacgctgttgtcttagagtgaagtgaggagaacctgcactggtttggtagtcatgggaatggaaggaggaaagaaaatgtgaagctcatcggtggcagagtcaaaatggcttggtctttgtagtcaacgattaagtgagaaggaggaattactggctgacttagaagaagtaaaaaacgtgaaataccgataaaacacaaatctcgtgattttagtcagcgtaaagactaagcattgtgtgattctagatatattattaagcagctttgttccagtattttatatcccatatcttctagctatgaccctatttctttgt

SEQ ID NO: 3190 - DNA, 992 bp, Homo sapiens
  misc_feature (1)...(992): n = a,t,c or g
aatataataattcctttccctttggttagatacccaatagtggaattgctggatcaaatggtaattctatttttagttctttgaaaaattgccatagagtttacactaacttccattctgaaatgggcatttttgaatgaaaaatttaaagactggtttagaagagcacttcaggtgaaagaatataaacttcagcttaatatatcacatatatagtatagataaaataatttgttgtgtagtataatgaggaatgtggttataaatatactattttaagtggatttatacgttgtatttgttctgcttataatgggaaaaaaagtctttacatataaaaatagtggcaaattccatttgtattttttaatctctgaaatttgggaagcagaaaatatcaaacgaagaaagaaaccagagtctcaacctgctggacactattggaagtccatcatttaacatgtttttagtatatacttttagcaggagacatctctgagtcaactgtgttgaggtgccaccacagcgagtttaggcactcagatccctgcatactcatcacattgggccataatggcaaatagaannnnnnnnnnnnnnnnnnnnnnnnnnnnnnnctttcacatagaaatagtaagtgtaggagtgtgggtcagaaagaaaaggtggccctacctctgatggttggcaatgataggatacaatgggagataagctatctacaaatggagtggagaaggatatatatttcaaaggcctaatttgtagtgaaagactagagacaaaggtaatgtgtgtgtcaggagagagtacagatggaatcttgttttgcaaacgtagaatatgtatgtgtttgtaattattgcaaatggaatggtaatctataatggaatggaaaacattgtagatattttcagttatcaaaaagaaaactaaaaaagtatataataattgtatgtatgatatatatatgtgtgcgtgtgtgtatatat

SEQ ID NO: 3191 - DNA, 151 bp, Homo sapiens
  misc_feature (1)...(151): n = a,t,c or g
gtggcttccttcgttattggagccaggcctacatcccagcaaccatgtccaagggcctgcagttggtattgatcttggcaccacctactcttgtgttnngatcagggaaccgaaccactccaagctatgtcgccttaagaccgggttaatc

SEQ ID NO: 3192 - DNA, 817 bp, Homo sapiens
tctgcactacaaaagcaaattttccagtctttattccactcataaccactgctttccccaccaggctaaagtgcttcttagtcttaaatagggtttttaacttcataaggtacaccattgtttatgttttagggtgcaggtccatatagtcgtaatacttaaaacactgctacactgatgcttttgtggctcatggtttcctggttctttgatttaacacctggcttcctggtatctatggctggttaaatatctaaacctgcattattagtgctttacaataataattcccttgactgaagtccagaaatactaaagcacttcttttttattgctgtgaatgccttagacttatcttccaaaataggatacttcgtttctattgcatatataactgaaatattttataaactcactgtaatcaaatcttataaaatctgaatcaacatgaaaagttgtcaatgcttgaatgaatactaaaatcataccccaagatactagataacataaatgaccatgaagtgtcccactgctcaaagggcaacaactttaagaacagaagcaaagagtggtggtgtggaacccaagattcttggcgactagggaatttaaaggttggggaggaggaattcaatgatttgacaagaaatactttataaaaatttgctccatgtattggctaagaaaaatataataaaattttggtagtgaaaattgtatcactaatgtttaccaatattactagtatgaataatacacataaggtagtgacttggaagctgctcaatactttgttgctataacaaaatgcaatatt

SEQ ID NO: 3193 - DNA, 628 bp, Homo sapiens
ttccttttaatgtgttacaggggtctgttccaactaagagcttaggagagttggaagaaaaactgtttttcttcctctacactggcattaggcccaaacaatggtagcgttcctgccatggcccagctaacctgctgacgtcctgacagctccctggatgccccagtcccccaaaattcagtgagctgagcccagcaggaaggtggactcccagggagaccgcaagcaaccatggcaccccagctcagagtggggcttgcaagaagacttgttttccttcaggtgtcattgaaacgtctggcccagttccagcgtccgtgggaggaatgagtgaggaagggagggaggaaggagaagaacccagcaggcagcaggcttggggccagcaccctccgatctgtggtggctgtggttaagctggtgtctccagaaaaacatgagccagggtggtgaaaacctgccagctggccctggctcttgctgtggtagagaggcccaggaaggggcaggaacctcactggaggacgctcctttctttgaagctcaactactacaactccattaaagtgagaagagggggcatcaggttcccaatttgagtaatccatttctgcctctgcctcgtgcc

SEQ ID NO: 3194 - DNA, 1852 bp, Homo sapiens
  SIMILAR (1529)..(1666): 761254mologous to Homo sapiens Human secreted protein ep234_1,accession number AAW69433,Smith-Waterman Score=150.
  misc_feature (1)...(1852): n = a,t,c or g
agatgggccatgcgggatccctgccacacgggtgtgggggcagcgcgctcctccctgcctcggctgctgtgtgtcttagtcttcatgtttccccttggcgtctcctctggtccctgtccatcttgtgcaccatgtgtccctgagggcgagtcacacctgtgtcttgagtctgctgtaaggtgttcagtctacctcaaggggtcatcatggtaagctctatcccacggcatcctccgtccatcaccacacacactggaatgtatcccccccgccctgccccttcgataacctcctgaccttgtctttcctataatcaccacaaactcctagtgcaaattggatgctgctttaaatgtgaaaacaattgttcaaaagctataaaacctgaatcgaaagctgaagctgaatttataagccttgttgcatatgagccaaaagtgcaaaaagctctatataatgaactaacctgccactcgtataaatataaatatatataaatatattaaattccagactgttctacaaaattgtgtatttgtatttttgtgtacgtacaattttctgctaagcagaagggagggtgtagtataggatgctgtgaggaagagatttgggtttaatcctatttctttggttaacttattttttgttaacatcaggatgcctgtctttgtcttattatgtgtatggacactgtttggggaaaggctggcagtatctctcttcctgaggtcccagagggccattaaaaggaattaaacagggggcttaggagggtgttcttgggcccaccaaacacagggtaaggcccaacagagttcgggctcccgtacgtgggtgtggtgggacctggggcctggagccacttgtactcctggggtgggactgagggagggaaagggctcccccacttcaggctggtcactgtatgttgacttccctctgggaagcaaaattccacttgtaaaaatcagcttccaagacaaaagatgatccgattgtcacttctgggtcaccaggaagggacacaggatctctctgaactttgggaacagaccctcatattctgggggccagaattttgcccagaaagcagcaggtggctctgcctggctgtagagcccagctcattggctgtccctgggcttcgtctccctcttccgagtagttgctgcctttcttcagatcaggttaccacaatgcctccccgctgctgacgcttcatcccccacacctccagcccccagttacctgggagcttctcagaaccccactttngcccggtgcttaaaaccaccaagagggggtgaaaagtgggctgccagtaatggcccagaaaccaacccacccggaggccatggctgaaagacaagcttccgggtgttccaggggggttgacggggcccaacccatgtgggcagggtcccccaggccccccacccccactgcgcccatccgccctctggagctcccacagtggtcccccacctaatggggaacccctccctcntaggggagagtgatacctgcacccttcaccccgtaggacctcatatttataacaatgtgttaatggctgtagcaaaaagccccttgtttcctagatgtaaatggtcaaagaaacaagcgctctattgttttgaataaaatagttcaaatgagtccctgtatcgattgtatctcctattctggattagtgccttttggacagtagactgttctgtaattaaaaatgtagtatactgcttttttgtacagttttgttttaataaaacttttttttaatttgtgttctcttttagtattgtacctattagagaatattattgtataactgaaaaaaaaaaaaaaa

SEQ ID NO: 3195 - DNA, 784 bp, Homo sapiens
  SIMILAR (72)..(368): 641254mologous to Homo sapiens Similar to RIKEN cDNA 2310045N01 gene,accession number BC004449,Smith-Waterman Score=257.
  misc_feature (1)...(784): n = a,t,c or g
atttcggcactagggcgtcccaacctccgggcttccggtgccgtttcccggttcgctcggccgcggtcgctatggaggagccggagatgcagctcaaggggaagaaaggtgtcacggacaagttcactgagagcgtctacgtcctggccaacgagccatccgtggcccatgtaccggctgcaggagcatgtgcgttcgctccctccccagagctggcccagcacaaggcagacatgcagcgttgggaggagcagagccagggagccatcttacactgtgggagtacgcctgcagcgccgttgaagaacctggtggacagcagcgtcttacttccgcagcgtgggagggtctgcttcaaacaggccattcagcattccgggaccatatgaattccagttgcccaggggccacagccggaagggaaccaccgaggagcagagccagggagccatctacactgtggagtacgcctgcagcgccgtgaagaacctggtggacagcagcgtctacttccgcagcgtggagggtctgctcaaacaggccatcagcatccgggaccatatgaatgccagtgcccagggccacaggtagctcctgggaccgcccgcccccactgccactcccagctgcaaggaccgtctctcagctgcgctgggaaccgctgcttctcgcttattagaaaactgtctctttccttttgtcctggngtctggtgacctcctcttgtcctgtggcatctataacctgagttcagtcacttaataccgaggtcctgcgctctgct

SEQ ID NO: 3196 - DNA, 1418 bp, Homo sapiens
  SIMILAR (301)..(627): 701254mologous to Mus musculus putative,accession number AK009829,Smith-Waterman Score=345.
agatgggttttagcatgttggcctggctggtcttgaattcctgacctcaggtgatctgcccacctcagcctccaaagtgctaggattataggcgtgacgaccgcacccggtctcattaatgtcctcttgagtgagccctgctgtgaccacttcctccagcctgtcatgggccaggagtgacctagctgcggagggacacgccagatgccccctttgctctggctgggctcaacacttgagcaatgaggaggctgacgctttgtctccccacacccgccccatccctaccacctgtatctagtcacggacaagttcactgagagcgtctacgtcctggccaacgagccatccgtggccctgtaccggctgcaggagcatgtgcgtccgctccctccccgagctggcccagcacaaggcagacaatgcagcgttggggaggagcagagccagggagccatctacactgtggagtacgcctgcagcgccgtgaagaacctggtggacagcagcgtctacttccgcagcgtggagggtctgctcaaacaggccatcagcatccgggaccatattgaatgccagttgcccagggccacaggtagctcctggggaccgcccgcccccattgccatttcccagcttgcaaggaccgtctctcagctgcgctggggaaccgctgcttctcgcttattagaaaactgtctctttccttttgtcctggtgtctggtgacctcctcttggtcctgttggcatctataacctgagtttagtcacttaataccgaaggtcctgcgctctgctgtgtgcctggcccctgggctgggcactggggaccatagcagtgaccgagacagacaggcttcaccaaggagacatacgaccaaccaggtaaacatggccagacaagagccatgtcagatgcgctgtgaagaacactgcggggccccctccctaggaggtggccatgagttaacatgccagacagagacgatcccgggggcagacggagttcccatgtggggcagtggtgagggcagacgctctggggctgggatccctgggagtgttcgagaagcaccgagaaggcttctgtggctggagccggccagctgggggagatggggccagggagatggtctggggctgggatccctgggagtgttcgagaagcaccgagaaggcttaccatggctggagccggccagctgggggagatggggccagggagatggcaggggcctctccctgtcccaggacccagagccaagggaggctttaagcccaggaccaggggtctgaaaacgaaaagcactcacagtccttgaacattggaaagagaatttttgaagagtagcccttctttttgtttttgttggcattctaagttaataaacacgcttatgaacacacaaaaaaaaaa

SEQ ID NO: 3197 - DNA, 429 bp, Homo sapiens
tgtgtcctcactcaagagcaggacagctggctgcactggccaagtgtgtctgaaagttgacaggaacattcattccagcattagaaggaagtgggccaggtgtggtggctcacactagcagctgttattcctgttaatatcctggtcaagcctgttccaggcacctgagtgacacagacatgaagggacacgccctgtccctgcgctcaccctgcaagggcaaggggagagacagcaacaccagggagagctgatgcaactgacccggtgcaactaactgttgtccctggtgcttgtcacagcaccagttagtgcattgagagtatggttcatggaggagaaaatattttcccagccgggcatggtggctcccacctgtaatcccagcactttgggaggccaaggcaggtggatcacttgaggtcagga

SEQ ID NO: 3198 - DNA, 935 bp, Homo sapiens
  SIMILAR (788)..(931): 641254mologous to Homo sapiens Human secreted protein, SEQ ID NO: 6613,accession number AAG02532,Smith-Waterman Score=170.
ggggaaaaaagcaagttttggaggtccatccacatcagcacatacagccctgccttgttcttttggactgctgcatagtatttcatagtttatttaaagcattcctctactaatgggcatttaggttgctttcagttttttttctactgtgagcagtgctgcaatgaatatctttgtataaatttccttgtgcacatgagggaacctcttgggagttattttggaaaaagtacagtgcgagaagttgatagcgaagggttaccttagtaactggagattcgtcacacacacaagatgagccagcctcaagaaccacttgctgaagttgcagaatcagaactcccaccagtcctgcaggagggctccatctggagctgaaattaggccaaacacagtgctgatctgactggttggtaccagtttgcctggcttttgtgagcattgatgtagatctttctaccaggaaacctgcatctagatcctcaaaggctgggttcttcaactgaaactcatagtgaatgcgcccctgtgagtggggctcatgagcagcagaatgtgaggttgaaaggtggccaggtcttgaattggcccccagtgaaacccttcacagatggcgagggagtgggtcctgaagaattggccaggcaaaattgagagtacagttggattaatcttgctatttaaaaagttggtggggcaaagccgagtctaggatatttgagattgggattgcggcttcctgtcttctgtcttcatatctcataagcaggagacttccccaggggagtttaattgctaccaagaagagggtcgggcgtggtggctcacacctgtaatcccagcactttgggaggccaaggcaggcagatcacttgaggccaggagttcaagaccggcccagtcaacatggtgaaaccccatctctactaaaatgg

SEQ ID NO: 3199 - DNA, 962 bp, Homo sapiens
  SIMILAR (164)..(274): 911254mologous to Homo sapiens BM-014,accession number AF208856,Smith-Waterman Score=173.
agagacaggatttggagtacttgctactttcagaaaaagacttcttttgtgggaaaagactctctgaaacttcagtttctcaagtatttgacctccagcccattaagttttacaagacaaggcatggtggatagcagcaaaggattttgatagggaaatctggggcttcttccacttggaagaagctgaccggcgccctctaaacctttgccctatctgtttgcacaagttgcagtgtgctgttattggcttcagcattgtagaaagatataaagtaagttgagggatggatagtgtaaagagggggaagtggttatctgagtagcaaactgatgtatctattatatccttctctagagttataatttatcagaggaaattagtgtaaagataagcaggaagctgtggtttaaaaacatgcgaagaaatgcccttcttaaaaacttcagcttgccttagagtgatttatgcttacagttcaatgagaaatagtggaagaaattttctgcttctcttccatttagggcaagagagcttgactttgcaaaactgaataaatattgatatgtgtggcaaagttcattttttaaaccctataagtgtgaggacaggatttatctttccaaatatgggacagaggtatgatgttcattaggaggaaaaaagtgattttctttaaaaaggaagaaggaaagtacctaatctcagtatgtgtgtgtgtgcccacacttgcccacaaacatcaatatacattcatgtgtttactcatgggtatgactgcattcaggtgactgcacagaaatgtctacacatgtgttttcacatacatatgtctacccatgcctgtgtggacacttatatatgtatatacatacatgtcaaattaatataatgccttgtagaatattcagcaagttgagaaaaaatatcctatcatgctagaaacaaagtataagaatgag

SEQ ID NO: 3200 - DNA, 424 bp, Homo sapiens
atttcagaaattcttttctaatcagaaattctaatcaaacataagtttccaactatgtgttctcttggtcctcagaagtgtttgaatagaaaagtaacaactaacttcccatctttctggtggaagagttaattctgcctggagggttctgcctgggagacatgacagcatgtgtgtgactcctgtgtctgtttctgtggggtcatccctttcgtttcattttgccagggcctggctcaggattttttatggcagtgcctgtgaagacaagcctggccctccatccagtcacacaggaaatccacagagagcatgctgagagcagccagcggctgggctgccatcaggcctggtttatgatgccacaagtgaatggcacgtttgttcctctttatctctgagcattgaaggacttttggttaaa

SEQ ID NO: 3201 - DNA, 1771 bp, Homo sapiens
attagttatgagtaataaatatattttgctttattttcaatttgatatatggaaatttcatcagaagacttgactgcagtgttacttacaacttagaatgacaaaaaattcagctctctggtttttcaaaggtaataaagattatactaactcaatggcttaaataagagcttgttaaccaaacacaaatattttactgacaaactaggaatttaggtattatgaaggagaaaacaattttcacagacacccactctcttagtctaagggatgaggaatttatttcaaagttatacaagtgcaaagaaataagatctagaagcagcaggggtttcaaatgagccaaaaatggaagaaatagaaagttaatgtttactgacatagggaaatcctcataagaggaatgaaaaaaatccgatttccaaagctaggaaaacatgtgggtcctacaagacttgcacgaaaaataattagatgtaaatgttcttaagaagaaaccgaagggagcggttaggatatttcaaatgtaagaaatttaacaaatgtaataagatacctagagaccatggtcccttttttaattaaaccactcaggattttaaggaaagatgatgccttgggagctctgtgcctttggccccgttggtcaaggtaattcgtccaagtgcaggcacacaaactggcctgcaagcacgttcagggggcttattttgtttttaaagagcaacaaccagaaggaaatgtctttaggtgccagggcgtgagcacctcctaagaacacggggcatcttcagagccatggcatggcccagcaggagcaggggtcaccaccagcttttcttctcctttctcaggtggagacagacataagttcgaggtttctggaagacggctgcccacagagggcttgccttctaactcctcatttgaatcttttccatcatcaataccctggccattccttttcccacaggtacagctcagtacaatctggggcttaaaatttcaattctttggtgacctgaagattcttccatgaaaaggattactctgaacttaatttttttttttaaccaaaagtccttcaatgctcagagataaagaggaacaaacgtgccattcacttgtggcatcataaaccaggcctgatggccagcccagccgctggctgctctcagcatgctctctgtggatttcctgtgtgactggatggagggccaggcagaattaactcttccaccagaaagatgggaagttagttgttacttttctattcaaacacttctgaggaccaagagaacacatagttggaaacttatgtttgattagaatttctgattagaaaagaatttctgaaatatccccagcttcactttctgtggtttcggttactcatggtcaactgaagtctgaaaattaaattaaatgggaaatccgttttaacttgctcgccattgtgaatagtgtgatgaaaccttgtgcctcccgctctgtcatgcccaggacatgaatcagcccctcatccagcttctctgaccattagtcacttagtggtcttcttggttttcagatagcaagaagggtgattacagcacgatattttgacagagaccacattcacatagcttttattagttattggttgctgttaatctctcactgttctttgttaagctttatcatggtatgtacgtagagggaaaaagccacggtatagatatgtagggttccatactatccagtctcagggcatccactgaggggtcttggg

SEQ ID NO: 3202 - DNA, 1787 bp, Homo sapiens
  SIMILAR (1077)..(1691): 871254mologous to Oryzias latipes HSP70-1 protein,accession number AF286875,Smith-Waterman Score=930.
atgtgtctcctggtgatcacttactccagtcgtcatgtctacaataacttgactgaggaacagaagggccgagtggcctttgcttccaatttcctggcaggagatgcctccttgcagattgaacctctgaagcccagtgatgagggccggtacacctgtaaggttaagaattcagggcgctacgtgtggagccatgtcatcttaaaagtcttagtgagaccatccaagcccaagtgtgagttggaaggagagctgacagaaggaagtgacctgactttgcagtgtgagtcatcctctggcacagagcccattgtgtattactggcagcgaatccgagagaaagagggagaggatgaacgtctgcctcccaaatctaggattgactacaaccaccctggacgagttctgctgcagaatcttaccatgtcctactctggactgtaccagtgcacagcaggcaacgaagctgggaaggaaagctgtgtggtgcgagtaactgtacagtcaaccatgttccaagggaccttgcagttgggtattgatctgggcaccacctactctttgtgtgggtgttttccagcagcggaaaagtccgagattaattgccaatgtatcagggaaaccgacaccactccaagcgtatgtcgcctttacgggacactgaaccggttggatcggtgatgccgcaaagaatcaaagttgcaatgaacccccaccaacacagttttttaatgccaaacggtctgatttggacggcagattttgaatgaatgctgtttgtccagtcttgattatgaaacattgggccctttattgggtgggtgaaatgatgctgggcaggccccaaggtcccaagtaggattacaagggagaagaccaaaaagctttctatccagaggaaggttgtcttctatgggttcctgacaaagattgaaaggaaatttgcagaagccctaaccttggggaagaactggttaccaatgctgtgggtcacagtgccagcttacctttaatgacttctcagcgtcaggctaccaaagatgctggaactattgctggtctcaatgtacttaggattattaatgaggccaactgctgctgctattgcttacggcttagacaaaaaggttggagcagaaagaaacgtgctcatctttgacctgggaggtggcacttttgatgtgtcaatcctcactattgaggatggaatctttgaggtcaagtctacagctggagacacccacttgggtggagaagattttgacaaccgaatggtcaaccattttattgctgagtttaagcgcaagcataagaaggacatcagtgagaacaagagagctgtaagacgcctccgtactgcttgtgaacgtgctaagcgtaccctctcttccagcacccaggccagtattgagatcgattctctctatgaaggaatcgacttctatacctccattacccgtgcccgatttgaagaactgaatgctgacctgttccgtggcaccctggacccagtagagaaagcccttcgagatgccaaactagacaagtcacagattcatgatattgtcctggttggtggttctactcgtatccccaagattcagaagcttctccaagacttcttcaatggaaaagaactgaataagagcatcaaccctgatgaagctgttgcttatggtgcagagatgaggcaggacaagaaagagttgctgctggatccgattgcagaggacttcttggaggaggtggcttttgacaagaaaaggatgggttttggagggttctga

SEQ ID NO: 3203 - DNA, 1504 bp, Homo sapiens
  SIMILAR (1333)..(1503): 541254mologous to Homo sapiens Human secreted protein, SEQ ID NO: 6613,accession number AAG02532,Smith-Waterman Score=172.
  misc_feature (1)...(1504): n = a,t,c or g
gacccncttaaagtcctaaactctgcnccctaggctggtgtcctccaacccattacttattaccctaaagccgtcactgcacagccctactccccctggcctatcacagcaggancctatctggagagttccacactattcctagggcgaatcagtgagcctaaaaatccccagagaaaacactgtaggaatagaaattccccaagtttaattcccccaagagttttaaaaattatgagcccttttcctagcccccccaccttcccccaacccctcagagaaggacagtaaagaaatccagtgaatcccaggtatttaccctgttgttgaattgtgaggttgtgaggtagacgtgtaacaaggacaaggaagtttggggatctgcttggagaaatgaaggtttattcaaaacaagtggacaggtcaggggtaacggggtgatgagggccacctggcttttgtaatcatgtggggactgtcccctgggaggtgcagcaaaaatccagaacggagacagaagctcacagtctggttttagctgccaactcctatggaagtccatagcgtgactcctatgggaaggcctaccaaatgaggaaatttcaggaatttgctaatgcttgggaggattgaaaatgtaggcagcacagaaatagagtagttggtttaaaacgggaatccaggaaggattggtaataacaaggccacaagatttgggaatttacccttttacagactgggcttttattaacaccccaccctcggtctctgaaacctgcctgattccagggcctaaccagaaccctaagggccaaatttgggcccagatcaccccaccccagtttaattgcccttgggcctaagaaatgcaaagccccctccatgaagcgcaatgcctgcccacttgcccccagaaaggtggggccatgtgcacaaggcagccagcaatagttccttttcctagaaagactaaatagcccactgcctaactagggattccctaggacattcccagcaaggcctcctcacagcatcatatgacgcaaagtaacagccccacgggttgacattggagtgacaggcctcaactcccaatgggttgacattggagtgacaggagtaggcactggaggcactaagggagggtgagtgaagctgattgtccaagttaggaaaggaaaacgaatggagtggagctgaaagtggcccaacccagcgcatggcctgtgaagcagcaaagtctggtcttcatcttcaatatgagtaatgtcctcttaccactccttatctgttactgacaaggtctattaccctttacgagccaccaggcttccctggcctgggcaactctacaaattctttagttaaaaacactacaaagggccgggtgcagtgctcacgcctgtaatcccagcactttgggaggccaaggcaggtggatcatttgagcccaggagttcaacaccagcctgggcaatgtggcaaaaccctgtctctactaaaa

SEQ ID NO: 3204 - DNA, 691 bp, Homo sapiens
cagaaggccagccacctccttagtttttgtttttggttttggttttaaccttggtttattccactgctattttaattcctcagtcattgtgccttcaacagaatgccttagcattcgtggcttcctccctgtatggattcccaatcattcaactaccctgcaaatgcttcctgtccatcttctgtgtgcctagcactgcgtgtaagtccatgggaaataccaggaagctgaagacccctgttaaaactcccccgggagccctgtaattggagagatatgatatatgaatcagtatcacaattaaaaattaaatattccctttttgcctggaccttatcatcccatagaaatttcatataacaattcatgagttatataaaaagtgcagtaaaataatactctaaaagctgccacaaggcatataggatgaagtgccagttgaatgtaggcctatcctgtaagtgctgtgaatgtacagaatggagagatccttgtgaactggagggtcaagaaagcctttggggccaggtacagttggctcatgcctgtaatcccaacactttgggaggccaacgtgggaggattgcttgaggccagaaattcaagaacagtctgaacaacatagctagaccccatctcttcaaaaaaagaaaaaaaattagtctgatgaggtggctgaagtgagctgtga

SEQ ID NO: 3205 - DNA, 684 bp, Homo sapiens
  SIMILAR (204)..(88): 1001254mologous to Homo sapiens Human secreted protein sequence encoded by gene 15 SEQ ID NO:73,accession number AAB64787,Smith-Waterman Score=219.
aatttatatctctatctagacacctcctcattcatagaattgcgtaccaacctcttcatctggatgtctcaccatcctctgaggctaacatgaataactacaacagcagctactgccttctttcttccaccgtatgccactccttccatattttgttagaactaatctggtcagtatctgcaagatcaagcagcaaaatctcatgctttacttagcatttaaaattggtaacttcccctctgtctgaaaactttctgtagttccaatgctgaaatgttgggatactctttttgctgttctaaacacttgctttcagtgatcttggttctatcttcatctgctgcttaagcataaaagctcggtcaacattccttttccatactttttttctatgttcctcttcaaatgtgtacatccaacataaaacatttaactgtatatacttctgtttttctacaatatggtgactgcgttgactgtatttatgtagtgctttaaaaaaaaatcagtaagagccaggcatggtaactcatgcctggaatcctagcactttgggaggcaaaggcaggaggactgcttgagcccaggagtttcagaccagtctgagcaatgtaggaagagcctgtctctacaaaatatatatttttaaaattagccaggcatggtggcatgcatttgtgatcc

SEQ ID NO: 3206 - DNA, 1014 bp, Homo sapiens
  SIMILAR (271)..(113): 711254mologous to Homo sapiens PRO0898,accession number AF130051,Smith-Waterman Score=204.
  misc_feature (1)...(1014): n = a,t,c or g
ggcaggaggaatacattcgaaanggagaaatcggtgcaggactaggggccagggaagaaaatgcagaaattctttgtaccgccaggtgatggnngttacgcctgtaatcccacactttgggaggccaacacgggcggatcatgaggtcaggagttcgagaccagcctggccaacatggtgaaaccccgtctctactaaaaatacaaaaaaaaaaaaaattacctgggcgtgntggtaggcacctgtaatcccagctactcaggaggctcaggctggagaatcgcttgaacctgggaggtggaggtggcagtgaaacggagattgaaccactgccacctcagcccgggtgaacacagtgaagactcccatctcaaaaacaaaacaaaaatcttgaaactgtctcaaaaaaaaaatcttgaaagaagacatagcggggttcttgaaagaagacacagagaaggctcaaggcttctctctgccttgcctcaggagacctggtaccttagctggggctgcaggtgtggagctgagaatagcttggggggtggctgtttttgaaaggagggtgtctgtgcaaatatcacacccagaatttttctcatgttgcgccttgcatcaagagtcccaaagtcctccccagccacccaaactcgtttttctcacttttggtgattattctgtgccccaaatagtgcaactgagcaatgaggtctgagaatgaggaatggacctcagccgccatcccctccccacctccagccgtggtttccgggcctcagagagacggggagaagtcgtcaagtggcagctgatgaaatttggggaagctgtggatttgggctctggatggtcagagaggaggcctctagctccctccaggacagtggttctgtagtcgcgcgaagttgcccaaagaaggtggcaggaggactttcattcgaaaaggagaaatcggtgcaggactaggggccagggaagaaaatgcagaaattctttgtaccgccaggtgaggtg

SEQ ID NO: 3207 - DNA, 360 bp, Homo sapiens
ggcacgaggtaccactgggtagcttaaagagtatttatacactatctcatttgattctcacaacagtcctggaaaatggatgttttaggtatttctacttccctctgttctccctatttctctctctacaccctcttttctttccccttccctttcttatttacctcaatataggacaaagtacgtgtaagccaagtacgtttaacatcacgccatctgataactctcaggtctgccagtcagtgttccttctttttccttctttcttgtactctttcttctcttctattgtcttttcttcttcttctttcactctcgttctcccttctctttcttctccttaatttattctctttcccc

SEQ ID NO: 3208 - DNA, 441 bp, Homo sapiens
  SIMILAR (38)..(427): 751254mologous to Homo sapiens beta-globin,accession number L26462,Smith-Waterman Score=487.
acacaactgtgtatgctaacgccctcaaacatacaccatggtgcacctgactcctgaggagaagtgtgccgttactgccctgtggggcaaggcgaacgtggatgaagtaggtggagaggccctgggcaggctgctggtggtatacccttggacccatagggtgtttgagacctttggagatgtgtccactcctgatgctgttatgggcatccctaatgggaacgctgatgggatgaacgtgctttgggcctctatcgatgggctggctcacctggacaacctcaggggcacctttgccacactgactgagcatgactgagactagctgcacgtggatcctgagatacttatgctcctgggcaacgtgctgatctgtgtgctggcccatcactgtgtcggagaattcagcccatcatggcaggctgcctagtacatagtggg

SEQ ID NO: 3209 - DNA, 492 bp, Homo sapiens
aaaggcttagtgtcgccattgaataaatagcagagaatcttacagagtcgtccctttgaaggcagggttaaacagggtgtaacttggctccttcagttggttggtctggtctcagaatcacacattggtccagaattacacttgccctgctctgaagaagaatgccacctgcttgtcagctttggagtcaacagccctgaggactcaagtccccttttgacagagtggctctggacaagtcacttgcctttccttctccattgtttgtttggggcgtctggacgagggctacaaacagttcctccctttgtttccacggccttgcagaatgtgtgcttccctcaaaagggcataaaggccccctttcttctgctctcatgcgccacggggggttgttctgcagggctaagggtgtacaagctgaggtcagcgccaagctgtgactgagcaggtcgtacgcgtggatcaagcggggagtccgcacccatgctt

SEQ ID NO: 3210 - DNA, 433 bp, Homo sapiens
cgcgccggaatttccgggtcgacgattccgtggtgacaaagctaatcgaggtggcaattggggaaggggttctgggctgccgcaggcacacaggccagagcttcgtggatacctgcagggcccaaaggtccctccctgttttgaagagtgagtgatggctatgaggtagcggccaggctgatcacccctgcgttggctggaggcagaattctgtaaatcctcgccaagtctttctccaggccactggttagctcatctcagcctcctctgggagcatcaacaccaacatggcacaggggactgcagtggtgtgctttggacctgtgtacccacccaaggctaaaggcagagccaggagccaagttacaccctgtttaaccctgccttcaaagggacgactctgtaagattctctgctacttattcaagttgag

SEQ ID NO: 3211 - DNA, 450 bp, Homo sapiens
  SIMILAR (352)..(450): 1001254mologous to Homo sapiens unnamed protein product,accession number AK023200,Smith-Waterman Score=162.
gcctcctggccaaggagcccagcaccagccttttggagaagactctgcagctcccgaggaatggaaagctgttagggaagggaagggggacgttccaggccaagggaggggcacagggaagtttgcgttaggaatttctcatcagaaaaggagatgtgacgggggagaatggattccaaacaatgcccaccacaaggcaggcccaggaacagggccaggaaagggtaggatgtgatgtggtatgtgaagctatgtgaggctgaatctgctgccttcagggggccacactttctaatttgttccctttccttccctcacccagattctctgctacttattcaagttgacacgatgcccttcacactccacctgaggtcccgccttccctctgccataaggagtttgattctacaaaagaaaccaaacatcagaaatacatccagcatggct

SEQ ID NO: 3212 - DNA, 445 bp, Homo sapiens
  SIMILAR (3)..(338): 981254mologous to Mus musculus putative,accession number AK011236,Smith-Waterman Score=567.
  misc_feature (1)...(445): n = a,t,c or g
ccgcaaagaagggtggcgagaagaaaaagggccgttctgccatcaacgaaggnttaacccgagaatacaccatcaacattcacaagcgcatccatggagtgggcttcaagaagcgtgcacctcgggcactcaaagagattcggaaatttgccatgaaggagatgggaactccagatgtgcgcattgacaccaggctcaacaaagctgtctgggccaaaggaataaggaatgtgccataccgaatccgtgtgcggctgtccagaaaacgtaatgaggatgaagattcaccaaataagctatatactttggttacctatgtacctgttaccactttcaaaatgtttacagtcgccaagagcccataaagggagccctcctggnaagtgggttgaggcctgggttttcggctcttcattgcttcctggagntggcagcagatgccttg

SEQ ID NO: 3213 - DNA, 459 bp, Homo sapiens
  SIMILAR (1)..(111): 1001254mologous to Homo sapiens unnamed protein product,accession number AK023200,Smith-Waterman Score=203.
ccagcttttgaaagattctgccaggtcaacactggtcctctacccctgctgggccagagtgagccagaaaagtggatgctgccccctcaaggtgctatctcagagaccaggtaaaaagcttgggttactgtgggttgaagcttgggagtgtccaggtgctgtagccaggtgtctctgtcatccgggacctctctgtccagcctcagggaccttcacagtgcctggcacagaacctcactcatgactgttgctcaggaacgagctgccctccccactgttctgactccttcccctatcacctggcgcctgtcctggctgagatctttgagatcatggagaaagtccagccctggagaaatcccactggctctgccatctgtccactccatcgcccaagccagaaacccgcctgtacaggattaagaagaaaataaaaaacacttgcattaccaacaaaaa

SEQ ID NO: 3214 - DNA, 2463 bp, Homo sapiens
  SIMILAR (1606)..(1998): 891254mologous to Homo sapiens Human secreted protein encoded by gene 75 clone HHGAU81,accession number AAW78200,Smith-Waterman Score=579.
atggctggagagctccgaccagccagcctggtggtcctgcccaggtcccttgctccagcttttgaaagattctgccaggtcaacactggtcctctacccctgctgggccagagtgagccagaaaagtggatgctgccccctcaaggtgctatctcagagaccaggatgggccatccccagttctggaaatacgagttcggtgcctgcaccggcagcctggcttcgctggagcagtactcggagcagctgaaggacatggtggccttcttcctgggctgcagcttctccctggaggaggccttggagaaagcggggctccccagaagagacccagcaggtcacagccaggcgggtgcatacaagacaacagtgccttgtgttacccatgctggcttctgctgccctctggtggtcacgatgaggcccattcccaaggacaagctggaagggctggtgcgggcctgctgctccctcggaggggtctccaggggcaaaggccctgaacaaggctcaaaggctctggcagctgtatcagggctgggcttacagatgcccctcaggtttaaagaactgttgggaatcaaagagctttccaaacctgcctacggggatgccatggtgtgtcccccaggggaggttccagtgttctggccttctccgctgaccagtctcggagctgtcagcagctgtgagaccccactggcttttgccagcatcccaggctgcacagttatgactgacctgaaggatgcaaaggctccacctggttgtctcaccccagagagaattccagaggtccatcacatttcccaagatcctctgcactacagcatcgcgtcagtctctgcttctcagaagatcagagaactagagtctatgatcggcatagacccagggaaccgggggattgggcacctgctctgtaaagatgagctgctgaaggcctctctctcgctgtcccatgcccgctcagtgctcatcaccactgggttccccacacatttcaatcatgagcctccagaagagacagatggcccaccaggagctgttgctctggttgccttcctgcaggccttggagaaggaggtcgccataatcgttgaccagagagcctggaacttgcaccagaagattgttgaagatgctgttgagcaagtgtggggaatgacctgccgagtattcttagcaatccggggcagccctggaccaccagagctggggagagtagtggagtatgaagtggctgaaaggctcagacagcagtcccacctggtcgtgatgggcagggctgcacctggagcacccagcctggcttggagacgcctgccagactccactcagagctgggtcttgtctcttgtcctcatgggagctcagagggtagaatttgctatattggattttacagaacttacattacatttgcatgaagaaagtgttctgaagacgcagatcccgatattaacttaccaaggtggatcagtggaagctgctcaggcattcctgtgcaaaaatggggacccgcagacacctagatttgaccacctggtggccatagagcgtgccggaagagctgctgatggcaattactacaatgcaaggaagatgaacatcaagcacttggttgaccccattgacgatctttttcttgctgcgaagaagattcctggaatctcatcaactggagtcggtgatggaggcaacgagcttgggatgggtaaagtcaaggaggctgtgaggaggcacatacggcacggggatgtcatcgcctgcgacgtggaggctgactttgccgtcattgctggtgagcactcggatggccgcccagtccggccggctacccagggtgtttctaactggggaggctatgccctggcctgcgcactctacatcctgtactcatgtgctgtccacagtcagtacctgaggaaagcagtcggaccctccagggcacctggagatcaggcctggactcaggccctcccgtcggtcattaaggtaacaaaccccagccagccgctcgcctggaagcagcttttaccctggatgagcagcaggcctgaggtcccaagccagcaagctccgcccccaacaccaattccaggctctaacccgcctcctctggggctcctcaaggagatgggacctgcccctcttggaggagaagctggtggaccagacttgcgggacattcacaatgcctcagtgcttaacgggacacctacttggggaatattcccagggcaggtactgagcacccatggtgacatggatgtggaatatgccatcagcccagggcatagcagccatgtggaagaaaaaatgctgggcatcttggtgcagcacaaagtccggagtggcgtctcgggcatcgtgggcatggaggtggatgggctgcccttccacaacacccacgccgagatgatccagaagctggtggacgtcaccacggcacaggtgtaa

SEQ ID NO: 3215 - DNA, 832 bp, Homo sapiens
  SIMILAR (303)..(404): 941254mologous to Homo sapiens unnamed protein product,accession number AK023200,Smith-Waterman Score=157.
tcccgggtcgacgatttcgtagcggatggagctgctacagtcagtgtttggggttggcctcagcttgcagacccgagccctgcagaacaaccccccgtggcgcaggagagcagaagaaagggggcctttatgcccttttgagggaagcacacattctgcaaggccgtggaaacaaagggaggaactgtttgtagcccttgtccagacgccccaaacaaacagagccaagttacaccctgtttaaccctgccttcaaagggacgactctgtaagattctctgctacttattcaagttgacacgatgcccttcacactccacctgaggtcccgccttccctctgccataaggagtttgattctacaaaagaaaccagacatcagaaatacattcagcatggctggaggagctccgaccagccagcctggtggtcctgcccaggtcccttgctccagcttttgaaagattctgccaggtcaacactggtcctctacccctgctgggccagagtgagccagaaaagtggatgctgccccctcaaggtgctatctcagagaccagcctaagggacctttcaaagtgcctggcacagaacctcactcatgactgttgctcaggaacgagctgccctccccactgttctgactccttcccctatcacctggcgcctgtcctggctgagatctttgagatcatggagaaagtccagccctggagaaatcccactggctctgccatctgtccactccatcgcccaagccagaaacccgcctgtacaggattaagaagaaaataaaaaacacttgcattaccaacaaaaaaaaaaaaaaaaa

SEQ ID NO: 3216 - DNA, 529 bp, Homo sapiens
acagctgacagatcagtccaaagtgttctcatccatcccacgactttctagatgctcccagaagagtcatggcctggcctggccctttttcatactgtcttctctatggtttgcagacaccggcaaaggaaagagatattgctgacccatgaacaggagggcacgcacatcccaggggagaaagctgctgaaaagctgtttttcaagttagttttctgaagctcaatttctggctaacgtagccataaaggccatattatcagaagaaataagtgaaggaaaaggagacagaagaatgcttgctgaccacaccctgatcctgaccgagcgaggttcagaaggtccttgctgttagccccaggaggtccgccccactgtcttatctgagtggggctgcaagtgtgcacaggccaactgtgaatgttccccatgaccttggcctcacaagtccagagcaggtcactttccacctctgtccttgggcaagctgctctagtctccttcaagggcacattgccccaactctgca

SEQ ID NO: 3217 - DNA, 1456 bp, Homo sapiens
  SIMILAR (953)..(1144): 731254mologous to Homo sapiens Human signal peptide containing protein HSPP-88 SEQ ID NO:88,accession number AAY87311,Smith-Waterman Score=212.
gctatttggggcctgctgtcaggcagaatgacgttttgaattgggctttctgcccttgttgagttttctcttaagtaaagtccaaagtccaaggggcagatggccagatgcactgcccagtaaggcaggaagccaaagaggcagtgcccagccccacaaaggctgcccgactccctgggacagtagtgtggagtcccagcccaggctgacctcacaccggagcttcctagcttcctttctttgctcaatgcagggcttcttgcaccccctggaaagctaagagatttttttcaaccctaaaagagagtacctttcactgcattggatggatgaacatcagtgccctaactttatccatcatgtaggtcagggaggactgggcactatttggcaggatgtactccaagaatataatcaaaagaattttctgtacaatatttcacttaaagacaagtttttgggctggatgtggtagcttacacctgtgatcccagcactttgggaggctgaggtgggagggtcgcttgagcccaggagttctaagacaagcctgggaaacatggcaagatctcatccttacaaaaaataataatggtgtgtgcctgcagtcctagctactttgggtggttgaggcaggaggattgtttgagcgagggaagttgaggctgcagtgaactatgattttaccactgcactccagcttgggcaacggggtgagaccctgtctcaaaaaaaaaaaaaaagttttctagaataagcaggatgattgtttaatttggaagatggaacaggaaactagagtgcatttaaaatactctgtcttcattttaacatgttgaaagggaaataaccgccatatccccccatgagtttgttttgccttttccatacagacttgtatgtgtcatttgaagtggtttcccagattggagcgaggttattctgatcctaaatgaacagcatttttttgccttagcctctgtttgcccactctgggtatcgtctcctatgggcaaagccattagaaatgcataaaacctcgagacatggtttttggcaaaaactccatgactttaaactagctcttttactactgacctttcacaggggaaaaaatatttcccttgaaaaaaaactggggcttggtcatttttttcccttgtagctttaagcagagacataagtgcccttgccattacacatagtaaactttcttttaaaaaaaaaaaaaaaagattttggagactaccagggtaagattccaacttgtccaaaagctttctggccttacatattttattataaaaattctcaagtctggtaatcttctatgtcagagctagtgatttcaaaaggtttcacaattccccaagacaaaagtgattttcgttcattataataaggttaagtgatatgtgattcatagcaattttgatgtgaagaaggggaggacatc

SEQ ID NO: 3218 - DNA, 1427 bp, Homo sapiens
  misc_feature (1)...(1427): n = a,t,c or g
cgagtggctgccccacaaaatgcctgcttctctgcggaatcctactgttcttcacatgctctctaataccatgggtttcatatccactttctcttgcatgttgaaaaattaaattgacaggctggattctgcaaagatctttggacatttaagtatcttcgaccggtgcgaaaagaggcggcctgaccttgtaagtgggacggggacctgcagcgggtccttccggcgggtgacattccagccggcggttccggggcgaacggactctcccattcccagaacccatggccccaattttgtcccgtaaacccttgtggaaaaaaaacccccggccgcctggtgaacgcctgcctgtgaccttacctcgaaaccctcgattgggcccacaattttggtacctacgcccaaggttgagcctggttccctccccacccctgcctgagatcccctagagcctattcagagccctgaaaaaaaatagtcaatagtgcctcagactggtagctttcaaacagcttcacagttaacggaagctgtgcctgaattggttttggtggcccactgaggtgtttgatgtggtttttatggtccggagagattatagggcaagcgggggcattcattgggctatggatgttttgaagaccattcttttaacatctgattatatttgatttattattttgagtgttgtttggaccatgtgtggatccagactgctattctngaattaaaataagatttgtcaaaactcagtgttttctccatcagacactccatgaaaggtcacaatttctcttgatattaagctgggttgtctttaaacaaccctaaatacacgtctgtttagcccgcaattggaaaggatatatgtggcaatattaacctggtacatgaatatatggggataacattttaatttgaaggtttggaatatatatatttaagctttatttcccagaacagtgagggttaggtcttgggaaaactataacttgcccaaagtagaagacaatagtagtaccatatgcccaaagtggatagagatgaatccatgtcagtaagttagaataacatttcaactgttttctttgctaaaatccacagaaagaccctattgacaacatctaatgtctgtaaaaatgttagagtacttgtcatcttgaatatagcctccccaagagagaacagggtggtattctaagtatgtttctttgtaacatctttagcagtaggacagagccatacgatgtgaaatctgatttttatgtgtgttattcgtttgtctggttttactacctttgcaaaaacaaaataccccaaagatatttaaacaaggttataatttagcatcttccctggatctaaatagtatattatatcctgaaataaatgaaatgattgctattaaaaaaaaaaaaaaaaaa

SEQ ID NO: 3219 - DNA, 3011 bp, Homo sapiens
  SIMILAR (1972)..(2019): 931254mologous to Homo sapiens Human secreted protein, SEQ ID NO: 7222,accession number AAG03141,Smith-Waterman Score=73.
cttcaccaaacacacttgagaactgtaacttcgtcaagcactttctgtcctgaagcttttaccagtatctgctgtcttttgtaattatgcatcctagctaaggcacagaagactgaatgaatgcaaggattcattaactctttgaatttgttaaatactaacagttaaccattagaagtggttcaatgatgtaagagtcacactgcttcaactttttctttgttgtagtttttaaattgtcgatttttagctatttgacagattaaaagcaaaataatcatgccatatttagtcctggagttcaatgtctaaatgttggatgtgaaaaattattgtagtaaacttttaatatgggcaaagcaaccttaagctctattttagccaaatgaaacataatctgaaattatattagaacatttcccttgtcttcaaactgtttggtgtaacagaatattgatatgccagcttggtggatttcaccaggttaatgcacattcttcttccctcctccccccattaatatgtatactgaaaaatgtgcatttgtctgaggaattattttgtttgctaccacttaatgaatctcaaaattttgagtaaatgtacctcagtctaatcagacctttttatgacctttataactacatttaaaacccttaattcctatttctgggtgtttgcgagcctgattgctatcatggaagtaaaaatttattactctaggtattcactagctaaataaaacatagttcttgtttaggcaagcatatgttgttccctcaggctcttttctccagcttttgcagtgtccgggcatccttaaaatactttgaaaatatgggccttgatccatggattaaatccagtatcctaagtgaatgtgttgatgttttattgatccagatctatataagtgggggattacagcatatatctggatattcttatagttatctttttaacatccttatttttttcattaattacatatcaacattaattttgtatcctggaaggcaaattgattttggtataatttaaatgtgtccaaggcatctgtattaattgatttgatgggcataagggttatggaaaataatgtactgccccatggtattactgttccaaaaggagaaagccatgtagaaagataccattaagggtgaaaatagccaataccagtagatttgaataccctgatgttttgccattacttcatttatgtttaccatccatgtttagaaatgttttcatttacctgtggtcttttgtcactttaagctcaaagacctagtgatggatatttctttgaggctttcatttatataattttattttgtacaatgttttttttaaatgtgcaaatactgtattcaagtgaaaaaaatacagtatttgtagataaccatagctactacacagttcttcggtagtcccagtgtagttatatcagtgtttactgaagggaacatcaaaatattaatggtatattataaaataaagactttcttaaaggaaaattgcacctattttacctttttaagagtaagccatgaaatcttgtaacatgtctcttaactatttataatgaaaagtggcatttggggtatagtcaccacagcaatgttctacatccctaaggattatctaaggtaggacatgtcaaagatgactgttgtcattctggaggtccctattagagaatattataaaaggggtgaccttggtaggaagggatctgagtcctccccctgaggttctctttttcttggtgctttattagcaactctgggatatttttataaaactagttacattataaacggggttcaaacatgtttaatttacattaggtttttatgtaacgagtgtcatgggaagcactcagccaagcagggctggattggcaatagactcagacatgcggaataaatgtaattgagagtctattcatggtgaggagtacatcaccagtgcctttaacctggatttctaatcttaagtgaaatgggtgcagcattcctttggaaaaaaaaaatctttttattttcaagtgataattttgtgtttttctcatataagttttctccagagcacccaccttctcttccttcttggtctgtcattatattgcaaaatatttttcctctgaatgaaattatcacaggttggtctcaagcacaaccaactgaatgtctctttaactgtggggaccaaaagggagagagcctggggtctccaagaggagacccatcctcaaatgtttgaatgatcacaaattaagacattatcagcccagtaaatttcttgcttaatgtttttccaaagttctggcttgaatatttcttattaaagctatcttatgtgggtattttattttgaaaggtattatagtttgtatatttaacagtaaggaggaaactgtaaccaaaattagtatttctctatacgtattggtacttgaagattcctttcaaaagaaatcccagcgttttcctaattttagtacttaatttctctttttaatttaaggggatctttctaattcagaaagctgtgttctttttggaatacccgtgcatgggggttaagctgatgttaaaaccagtttgcaataaaaaaaaaatgaatcagccttaaagtcatttaatcatttccaagtgcaatcctgcatccctttaaaaaataagtttaagaaatttaaagagaattgtgttttcattaagttttgcatatcttttgttatgcccatgtaaattccctttttccgtatggattaaaggaaggttatgataaaatgattagttcatttacattcacttgtagcaattacatgagaatttgaattttgtcgtgtttgggtttgttcattccttgtgaatgatggtacaagttaggtgagattttcttgttatggtacccaacactcaccaatttgggccctctttaatctttggggggttccaataaaaattggttccctcaaaaaaaaaaaaaaaaaaaagtcgacc

SEQ ID NO: 3220 - DNA, 523 bp, Homo sapiens
  SIMILAR (81)..(266): 741254mologous to Homo sapiens NADH oxidoreductase subunit MWFE,accession number X81900,Smith-Waterman Score=212.
  misc_feature (1)...(523): n = a,t,c or g
acttacgctttaaaggactcccaggcatggctacgttctaacgggcgggacatagagcaccttctatatgctgacagtacatctcggtcgtggacacatacttgttgatgccgagactggctactgctatcattctctggatcactaactgagtctttgaaaaacgggttgctcattttgggtatcactgtagtctgatggtgagagataggcgcatctctggagttgatcgctactatgtgtcaaagggtttggagaacattgattaaggaagcattttcctgattgatgaaaaaaataactccagttaatggccatctacccctgctagaagggttacagtgtattatgtagcatgcaatgtgttatgtagtgcttaataacaataaaatgaaaaaaagnnnnnnnnnnnnnnngggcgggaagctttatgatgcttgaaggggcccaaatttaaggggtggtcgggcacccctgctttatccctaatgnggagcctgtggcacgccatgtggggtttttt

SEQ ID NO: 3221 - DNA, 2349 bp, Homo sapiens
  SIMILAR (271)..(762): 811254mologous to Homo sapiens FLJ00066 protein,accession number AK024473,Smith-Waterman Score=698.
ggtcgacccacgcgtccgggaagaggaaggggagggatgtggactgggtctgatcacagcccttggccctgcttcatactttggagcttattaagatcaattttgataaccatgtaatttcttagaaccatggcaggtagtattgtgctttaaaaaccagaggctcctgaaagtcgtttacaccaggtggattgataccatggctgtagctgatgcaactaacaagtactggggccagtgatcacaatccagggttggaaacaggagtgaagcccaccagcctgcctggttgatggacagcaggctctgccttctggaggcggcttatatcccaacagcctgaggcagggctctgtgggccaggccggcaggggctgcctctcttggttctgcatggtacattttgccaaccctgaggaccagttcttggggttccaggcctcgggcttcctgcttcacgtgctcaagcccccacagggggctgcgacaccatctggctcctcacagggaggtccagccatgttctctgggctccccagtgagccccctacccctccggctaccccccagaatcccatccttcattcctccaccaagctcctgtgtgaagctgcagcgcccacacgggggaagccctgcactcccagcagcatcttccagccttggcacagaactgatggcaaaggaagggctgggttttcagcttctgggacccgaggaagaccccacctcactcctccttccccagtacatcagactggttaggaggcatcccagaaggggccagccctcatgccccccggtttccagccccctaaaggtaaatgaattgtccttgaactcctgccttggcatttcgcctcggaatcacggcagacttggagtgtttccttccaaggcaggcatcctgccttatgagccaaggtcaaagatttttcaaaatattgtgcattaattcattaaagctactgttaaatatttgctgtttttagattggcgtccgtgctaattctgcagttgtagcactgtatattttatctcatttctgtgccaagaaagttcatctttatgtttttctaatacacaatcttgatcatgtttccaaaataaagcttcagctcctttggtcaatagaagtaagggtgtagccatccagggtctcccgggctctaggcagaccggatcccgcggttcatcccatggttgttgaaatgtacctcgatcagtcatctctggtattcctcactctgggccatgagccattgccatcttatggggcccgatttggggtactctggaattatgttcatgggagtaggacagttactttcttaaatcccaggcaaccaagttgcgttatccttccttataggcttagttttctattaggaggaagtgaaaaaggaaatctgggcttctttaataaggatagttgagcctatggacattaagggagcagcgctgctgggcgggaagattctagatttcactgggtgggtttaagagacccagggatttagttcttactggtgcataagtgttttcccatgctaaccggaaaaccactcacccaggcttcccccacttcccctcaaattttctcagctctgccgctggtctccatgaacggcaaggggaaccaccactcattcactgtcagtgtaggtaagacagaggatgcccttgcaaaaattggggactgaggacagtagcacacggaattggtggatcgtacatttgcacccagagctactaaacgctcagtgaccccagagaccattaattttcccagagtgaaggggatgggggtagagcctaatgggaatttttattatccaggactcatccctaggaaagaatgttggccttctcttccatcccctggcttagcccgtcaggtagaacgcctacctcaccctgaacacccgaccttccttagagaaagcgaagtccttttttgaaatggaggagccgaagggtaaacccccacctagggggcgccccatgatcggctccccagtgcacccccccctaagggtaaagcaggcccgccatatcctagagtcctgatagtcctgtgtgtaccataaggtcctagaagtcctgtggaaacgcccctgaaaccctgtagtattatccttaactacccctcttatgttaaggtttacataagtaggatttctacaccaatgcgtttaattctctacgatctcttcgtattaaaattctcttctggaataagctgtgggaaattttgttacaacctggttgagatcaacctctttacaatgacacaaattgtgacattttataaattagatacttcagtgaaaaaacacaacacaaaac

SEQ ID NO: 3222 - DNA, 928 bp, Homo sapiens
  SIMILAR (19)..(414): 631254mologous to Homo sapiens DNA-binding protein TAXREB107,accession number AF261087,Smith-Waterman Score=377.
cccacgcgtccgtgcaagatggcgggtgaaaaagttgagaagccagatactaaagagaagaaacccgaagccaagaagagttgatgctggtggcaaggtgaaaaagggtaacctcaaagctaaaaagcccaagaaggggaagcccccattgcagccgcaaccctgtccttctcagaggaattggcaggtattcccgatctgccatgtattccagaaaggccatgtacaaaaaggaagtactcagccgctaaatccaaggttgaaaagaaaaagaaggagaaggttctcgcaactgttacaaaaccagttggtggtgacaagaacggcggtacccgggtggttaaacttcgcaaaatgcctagatattatcctactgaagatgtgcctcgaaagctgttgagcccacggcaaaaaaacccttcagtcagcacgtgagaaaactgcgagccagcatttaccccccgggaccattctgatcatcctcactggacgccacaggggcaagagggtggttttcctgaagcagctggctagtggcttattacttgtgactggacctctggtcctcaatcgaggttcctctacgaagaacacaccagaaatttgtcatttgccactttcaccaaaatcgatatcagcaattgtaaaaatcccaaaacatcttactgatgcttacttcaagaagaagaagctgcggaagcccagacaccaggaaggtgagatcttcgacacagaaaaagagaaatatgagattacggagcagcgcaagattgatcagaaagctgtggactcacaaattttaccaaaaatcaaagctattcctcagctccagggctacctgcgatctgtgtttgctctgacgaatggaatttatcctcacaaattggtgttctaaatgtcttaagaacctaattaaatagctgactac

SEQ ID NO: 3223 - DNA, 395 bp, Homo sapiens
  SIMILAR (2)..(379): 331254mologous to Caenorhabditis elegans short region of weak similarity to protein kinase C; contains similarity to Pfam domain PF00130 (DAG_PE-bind), Score=10.0, E-value=0.0034, N=1,accession number AF002197,Smith-Waterman Score=178.
actcatccacctccggctgaagctccaggagctgaaggaccccaatgaggatgagccaaacatccgagtgctccttgagcaccgcttttacaaggagaagagcaagagcgtcaagcagacctgtgacaagtgtaacaccatcatctgggggctcattcagacctggtacacctgcacagggtgttattaccgctgtcacagtaagtgcttgaacctcatctccaagccctgtgtgagctccaaagtcagccaccaagctgaatacgaactgaacatctgccctgagacagggctggacagccaggattaccgctgtgccgagtgccgggcgcccatctctctgcggggtggtgcccaatgagggcaggcagtgcgactacaccggccagtgtatt

SEQ ID NO: 3224 - DNA, 928 bp, Homo sapiens
  SIMILAR (226)..(492): 791254mologous to Homo sapiens unnamed protein product,accession number AK000193,Smith-Waterman Score=358.
aattcccgggtcgacgatttcgtgcggccgggcggatccagcgcagccgggagacagatgcgaggcggcggtcagcaggtgccgaacccacggccaggcttccgtggccagcagccctagaggaatggccatcctgtccctgcgagcccctgggccctggcaggcgatgcaggtgggatgctatggaatatgatgagaagctggcccgtttccggcaggcccactctcaaccccttcaacaagcagtctgggccgagacagcatgagcagggccctggggaggaggtgccggacgtcactcctgaagaggccctgcctgagctgccccctggggagccggaattccgctgccctgaacgcgtgatggatctcggcctgtctgaggaccacttctcccgccctgtgggtctgttccctggcctctgacgtccagcagctgcggcaggcgatcgaggaagtgcaagcaaggtgattctggagctgcccgagcagttcggagaagcagaatgtattccgtggtgcggactcatcccacctccggcttgaagctccaggaagctggaatgaccccaatgagggattaagccaaaacatccgaagtgctccttgagcaccggctttttacaaggagaagagcaagagcgtcaaagcaggacctgtgacaaagtgtaacacccatcatcttgggggctcattcagacctggtacacctgcacaggtgggccgagacccagacgaggagtgaggaatgagagagaccaaagttcctgcctccgctgggctcacattcagatctgagctatccagtgtggtggccactagccaaacatggccagtcaaagttaaattaactaaatatgcatttcctcgttgtactgtctacattggacagggctgttctggatgagaaattaaactagtgaattac

SEQ ID NO: 3225 - DNA, 1632 bp, Homo sapiens
  misc_feature (1)...(1632): n = a,t,c or g
tggtctngcaaattccgggacgacccacgcgtccgaaggaacagcagtacagtactattagaagttaagtttgttgttgttatttcacatttcatttaattgtggataaatgttagacatctgttgaaataagctcatatggtggaaacgacaactatattatgaattattttcagaaatggatctttgaatagcagatcaggatttaaataataaaattatctatgaatcacttttatggtcatacatatatgatacaaatccagagttattggtgcagaaatggctacccgagagcttggtaaatttgccttggtttcttatgttaaatgtattgtgcttcccttctgtctctagaatgtggctcttcagaagacagacaatcgacatttaaatttttccaaacaatgaaaaactaaattaaaaacattgcttgatatttcatttaaaattgcaccttgcttaaggtttactgaataactgaaatgtcagcaatttaaaataaattcaattgtgtgataaaatatctcacctataatagaagaaaaggaaaatcatattatttggcaattttgcagcattgtggttgcctaacaggtatatccagcagatgagaaacagtatgaaaaggattgtattaacatggtacgttttgccctaaggaaaacgatcttgcattctggattcttgcagcaaagtctcagatacttaatacgttttcttgttttatcatctgttctatgattcggcttcactttgtgtggttattgaattatgtaacagagatttggttttcccaaaatgttatcacatttgaaactatgattgctttgtgttcagtccttttggaacacgtagcttccagcttaagggtagaggaaatatatacctaaaatcatcaatacatgaaagaaaaaggatggaaactatgtcctcagttttacttctaccaaaacatccctgtatgtgtgtgcatgtatgttggcgtgtgtgtgtgtgcatgcatattagtaaatgtgtgtctgcatgtgtgtgttggggagtgtatgtgatctgggtgtttgtttatctctgttattattcccctttagctttattttagtcaactctacattatgatgaatttcaaaatgaagctgtattaaaataattgtaatataacaattcaatctcacatgttactgcagatagttaacttttgctgcaatctattgtacatttgcaattttctgtgttagtaaacttagcagaatctggttatttatttttgtgtaggcttaatgttcactgaaagataagtcaattactgttagtaaaaaattaaggtactctcactgcagagatttaaggcctgggcctaatgtgctgtattatgaagccttgtgactgaaaaatatgtttacatatgttgtctatttttttaataaacttttatagctggtctatttgctcagtagctttgatcctctcttgattattgtgactatagtttgcaatggtttattttgtattcaataagaaaaattgtgttaataaagattattgtttaataagccaggtattaacctgctaaatatattaaactgaaaatcactaaatgagtcattcaattaaatacatcaaaaaaggtag

SEQ ID NO: 3226 - DNA, 1607 bp, Homo sapiens
  SIMILAR (1607)..(1464): 601254mologous to Homo sapiens Human secreted protein, SEQ ID NO: 6953,accession number AAG02872,Smith-Waterman Score=138.
aaaaggtttaaaacatttatcactaaaaatactaaatgttctttgaaaacctattaagacatttaaatattcttttatgctatcaaaagacattaaaatattcttttacgctgatcaaaagaaagaataaaagtttaggaaagggaaaaatgcacactttttttaaaaagtttatttctagccctgaaagaacaaaattattgaacaaagtcataaaatacagcagttaatgtcaatgtataacaattaaataattgaatgggattaaattaaaaataaaagacattataaaatttgaagacaacagaaaagacaaaaactacttttggtttatttccatttctattaaaacaagaaaaaaaaaagccaatcgcgttccaaccaaagatgttgaattccacacgtaactgtttctcttattacttctgttctcttagaaacacttctaagttctaagagaacagaagtgtgcttgacagaactatcatccatttctttctgcctctgtcttggcagctttctagagaagtgaatgggaaaagactttcggttctttcaaggccaggcccagcgcttgcctcctcctttcggaaactcccaaccctcatcccacccacagcacctttggcccagagtgttcaatcaaatgtgctgactgagaaaaaaggatcgtgtgtatcctattttttccttatatacacacactatcaaaaaaactgattttaccagtttccatacctactgttgggagcagcggagacaggaagacaatctgctttttgtattactatgaagttccactatgaataaccccatatgagtattaatctggattttagctataatctataatattttgacactgacatttcactagatgtggatctcagtatattttaaaagaatttagactcaaaaatggatgcaaattctttaagcatctattttgtttttttctaattttagctactacctgatcagatctaaaattattctggttagaatacagtatatacatacatgtatttaaggtgagccctaaaagaaatactcataggtggtttagaatcgcttgttagaggcacaggttcgtttacagttgctggttactagactgtacgcagctggacacttctatgttaaagggaagagaatgaatactatgtgccaggcagtcaacacatgaagacagagttgtattagcctcagtgtcttacgcttcacaaattacccgtttactttcaggtaggataaaatgtccccatgtttcatagtttcccagttttaattgtccctaaaagcagcagaagaaaaaagaaaaagagaagataactttaaatctaaaataaaataaataagtactataataatactgtcctaataacacaagaggactattaaggtaactttcagatttaaatgggaattttcattctaaagtgatgacaaaaagggtaaatataaaaggcaattatttaaaaaacatgaggccaggtgcagtggctcacgcctgtaactgcagcactttgggaggccaaggtgggcagactgcctgagctcaggagttggagaccagcctgggcaatgtggtgagactctgtctctac

SEQ ID NO: 3227 - DNA, 508 bp, Homo sapiens
  SIMILAR (1)..(261): 1001254mologous to Homo sapiens PATZ,accession number AF119256,Smith-Waterman Score=477.
ttctccaggcctgatcacttgaacggacatatcaagcaggtgcacacttctgagcggcctcacaagtgtcaggtgtgggttgggagcagcagcggcctgccgcccctggaacctcttcctagcgacctgccatcatgggactttgcccagcctgctttgtggaggtcgtcccattcggttcctgacaccgccttttccctttctctaaaaaaatcattcccagcccttgaaaacctgggcccagcacactccagcaacactcagatctagatcctgctttcatttctggctagtgaagtagacttttgtgtttttgaggtttattagcaggtctgctcaggaaccaaactaatgagtagctttatattgggccaccccaatatatggctttgggggctgaaaaagcagatgtagaccccctccctcggatccttattggtgtgccctttagcactccgcagactctgcggggtgaacaggagtgatgataaaatttttcattctaaaa

SEQ ID NO: 3228 - DNA, 1117 bp, Homo sapiens
  SIMILAR (1)..(267): 891254mologous to Homo sapiens PATZ,accession number AF119256,Smith-Waterman Score=446.
  misc_feature (1)...(1117): n = a,t,c or g
gggagcggcngcacatngccnccatnggaacctcttcctagcgacctgccatcatgggactttgcccagcctgctttgtggaggacgtcccattcggctcctgacaccggcttttccctttctctaaaaaaatcattcccagcccttgaaaacctgggcccagcacactccagcaacactctcttctgcccagccccgccgggatatctgaggcagggctggaccaccccatagggcagcagggcctttacccagtggcctgttggctagcctgggcctccctggagagggttgacaagtggaagggaacaggaggggcatttggcctgagacccctgcttttgggagaggctagcagggtggttcctgcccagcatgcccaagctcctccctgggtgactcggagtctttcccatgtcagagcccccaaatcggggtaagcaaggagcacctttctgggaaccccctatagcatccaagtttctttctggggctctcttgcctttttcccccctttttcacagatggcacccctgggcatctgtccttgcctaggtgattttggaaggttgggtgccttccctgggaactagcccacccagcttatctgcttcccttccccctgggcatcacttccccataggccctggggtttcctagaactgggggcccctggcccacccctttccccccactcccacgagtgagtcggccctcccagagaagacttggcacaattccaacttagagtcaaccccatgcttgccctctgccccttccccactcaggatctagatcctgctttcatttctggctagtgaagtagacttttgtgtttttgaggtttattagcaggtctgctcaggaaccgaaactaatgagtagctttatattgggccaccccaatatatggctttgggggctgaaaaagcagatgtagaccccctccctcggatccttattggtgtgcccttttagcactccgcagaatactgcggggtgaacaggcgtgaagataaaatttttcattcttactcgaacccaatacctaaagtcaggtgtggaattttccacttgttacctggggtgctttttgttaggctttgaataattttcg

SEQ ID NO: 3229 - DNA, 1007 bp, Homo sapiens
ttttttttcatgtttccagaaatctcttttatttctttagatatataaaacactgttactttatattctctctgataattctagtatctgggtctagagtcaatctgttgcttctgctgggtctcatagtgtattgtttccttgtggtgtttatgaatttttaaacctggatctctcattttctttctttctttttttttttttgtagagatggggtctctcactgcgttgcccaggctgctctttttactcctggcctcaagtgctgggattccaggcgtgaaccaccacgcccggctgagatgttccttttccttggaacttgattcaacacaaaatcctgaggcctggtgtgggtgtgttcctctggggcagattctcaactggggacacttctgcccccaaggacacattttcaacatcctgagacatttccgggtgtcatcaccagtgtgcacgcacgtgtatgtacctgcacacgatactgagcacctacgcggatagagcccaggtacgctgctcacatcctgcacggagacttgacccgcccagcgtcctagggcaggttccagggcagggtttgcatgtgccttttgccagccacctaggaccctgccagccggggcctttaaattctcccctcgtggtctccagggccactcactagcctgatttcaagctgtataactgggaggtcgtatttcttttccccgtgcacggaactccaagcctgaaaggcagtttttccgaaggtgccagcctgactctcatttccgcttcaagctgcggggtccagctctatgtgggcggtctcctgatgaagtcaccccgggacagacactgttctgtctcctgcttccagtccagtaaagatgccaggatcccccagggcatggcaggcaccctcaaaggcagacgtggggaggccctggtgggcagaccccagcctgctgacggggggcttctccctgggctgccactggcccacccactgcgctgcagtccac

SEQ ID NO: 3230 - DNA, 1941 bp, Homo sapiens
tttttttttttctccttctgccaaaacaaactttattggcaccaaaaaggaaaacaaaaaaaaacaaaaaaacttcatttatatacagtcagatataaagacatctctttgactcctgtgcatatatttcctcaactcaagattagggcataaaagtcaggcttgttatgccagacatgctcttgccctatcggcagggccaagggagaggattgtcacttgaaagtcgggaacacttaaatcggatcgacagacaacactcggacccacagaccaagagcattcttctaaagccctgggacgtacgctccgaagcgaatcgggaaaggagcgggaaattggaagccaggggtcccttttcgttcttccatgtggaaggagacccagcctctttcatcaagggtatccaaggttaaactttccgtttccccaagcccaccaatccctgtcccagttcctttgcttcctgccctccccaaatagggacattctcctttggtgcccagcccccctttgcacagatcctcccaaggggagtccccatgatcccacaaggcagagaccttcataagcagagggcagggcaggtacacactatcctctcccttatgcatgggctgggacactgactgaggccctgcatcacaagaatcgccaatacccactgggaagccataaccaattaaatctgggaagtacggggagaacattttcaaaaagggggaaggatgggattccctttgatgcccaggggttacaggggcaccttaaaggcacatttttttttttctgagccaacttagctaaaggatcactgcagcttaaatacaggatagagaagcaacaaagccaggcaaatacccattcagagacagtgacaagagcatgctgggggcacgggggaggcggaaggaagagaaagaaggggaggagcctccagagtcccagccccaaccccctctgccattggctaacccttgctccccaaaaatccctgggggtttgaagtgagggaggacttacaggctgggggtgaaaattacacaaggacagcccaaacaaattacaaccaaggacttagcatccagtcctcccccccttaactcccaccccccaagaaaaataccccttatttgtgactagtatttatggaaaatcttgttaaggagacttattctattgtaggtgggctcttaatcccattattacacagcagcttgcctgtgtttgggggactttttcaaattcaggtgattgccggggaaacaaacaagtattttcaaccttccttacggtgcccatgcaggcttttacccaagaccttggttaagtccccagtcacatttactttctgtcttacatcctagaaaagggtgaggaaagaggggaggggagaaaggtgctcaggtgcctaggttaaagcttactggatcagcagccctagactcccaccactgttcccttctctttggtcctgtcctagaacagtgaactaataaattaaggaaaaacaaaattaatgctggcctgtgggaaataatgggggaaggaaggcagggaggaaaagggcattgggaagccctgcttcaagactgaagacagacaaatagacaaccacccagactgcttaagtgtcacagacagcccccaccccaagctcccttccaggtatccccataaatcatttgggcacactccctcttggaattgcaatttccatcttccacttatccctaaggagctggccctgtggagaggtgtgttggttgttttgtttttgccaaaggccctcgctctaggtgctcctgtaaaggtaccttggcccctgatacgggatgaatggatgaacgaagccccagatgctccagtgccaaggaggtcagaccgggaacaggcccccactcccacaccctgggatcggagcttgcttggctcttagca

SEQ ID NO: 3231 - DNA, 599 bp, Homo sapiens
ggatccagatggactgtgtactcctcttcccagcccaggcccaaatctcagctccacctctcattatgaagaccacacccaccatcagctggggcctggaacacatttgtccgtcttatccctggaatcactcccctagtctctaccacaggtatgcaatgggctttggaatgtttttccagagtggtccttgttcctcctgggcttggaaactttccagaactttacctagcttagttgttgccttgtcctctgcctggcccctcactaggggttgaaggttggatctaggtccacctgcccccagctcctatgtagggttctcctcccaagcaagtccttcccccagtccagcagcacaatgctagtgcctcctttgagtcttgtcactgaagccattctgccccagcccacaggtcccttggaggttcatgcctagtgttgacactgagcttgaatgtggccttggctgggttcaggggtcactctcccaagaaggtagccatggccccagctgactttcccttcctggtctctgatttaagaataaattcagttgcttcatctttcgaggcccaggccagggaagtggggtgggg

SEQ ID NO: 3232 - DNA, 370 bp, Homo sapiens
  misc_feature (1)...(370): n = a,t,c or g
tatatgtctgtattttttacacacatgcaaaaatatacattgtgggcacgtgtgtgagagatatgaatgtgtgcttatataaaaatagataaaggtaaccgaatgtattgtacaaacatgatttatttagttgagggtattggagttactttctcattgactctgatgtataaatacaccaaattaatcattatgttatcttatgttaaaaggctaactctgatatcatgtgcattttatgttaacctttggattaacttatattatgctatgttcataaaatgacatgagaaacaggaggttctaagatcagcctctcactttcgagcataaaaataacagagggagacagacagccccagacatgacn

SEQ ID NO: 3233 - DNA, 1272 bp, Homo sapiens
  SIMILAR (1028)..(1234): 951254mologous to Homo sapiens TAXREB107,accession number D17554,Smith-Waterman Score=343.
  misc_feature (1)...(1272): n = a,t,c or g
ctggattctacatcctggtttctggaaaaatgcttatcttagaattagcaaaacatacaagtagaataattaacaatatgccttcagtatcccaactacccagaacagaggttctaaaactaggttgcagtttgaaatcactttaaaaccccaggggatggggagaaggcagcacaggccatcaatttgggaaaagctcttcaaatgatcccataattaggatagggtatacaagtacattatgttgcaactaaaaagaacaaaaacatgaaggcaattttataactttatttgatctgacgatcagcgattagttctcatccacattgactgtctgtagatctgtaaaggaagtaacagtcaatttccatacccacatcacatttcatatttcaactctaaaaaccttttcgtagacgggtctggacattctattttcccacaacctttttacatccccagatatggatcagttttgcattctttagcatcttcccacaccaacaatttaaaaagggtacaatgacgtgtgtcacccctagcttaacagatgaattcacattttaaagaggtaaggacatttttccaaatgaattttaaatggccttaatgggatgggagaacctacctttggaaagtggtaaacaggtacataggtaaaccaaagtatatagctttatttggtgaatcttcatccctcattacggttttctggaccagccgcacaccggattccggtatgggcacattccttcgaatacagataactttagcaccttattcctttggcccagacagctttgttgagcctgggtgtcaatgcgcacatctggagttcccatctccttcatgggcaaatttccgaatctctttgagtgcccgaggtgcacgcttcttgaagcccactccatggatgctgcttgtgaatgttgatggtgtattctcgggttatgcacttcgttgatgagcagaacggccctttttccttctcgccacacattctttgcgggagccattctgcagcgtccaagttggaaagaaaaagaaggagaaggttctcgcaactgttacaaaaccagttggtggtgacaagaacggcggtacccgggtggttaaacttcgcaaaatgcctagatattatcctactgaagatgtgcctcgaaagctgttgagccacggcaaaaaacccttcagtcagcacgtgagaaaactgcganccagcattacccccggggaccattctgatcatcctcactgggacgccacaggggc

SEQ ID NO: 3234 - DNA, 467 bp, Homo sapiens
  SIMILAR (355)..(2): 801254mologous to Homo sapiens putative ATG/GTP binding protein,accession number AJ245874,Smith-Waterman Score=471.
actcatggttggaattcagcatattcattgactgctccatttcccgtctcatgtcaggatcacttgtgttgaccactttaggcagaagcacaaatatcaataaaggaagaaccatcatcataaccattgggttcattagaaagtctgtccagccccacgattcccttttaataaagtaagaaggtggacctgaagatttcatttggagaggatagggcagtctgacaacctctgatgttttgatgtaattcacatatcttgctttaaggaaaccgacgtgctcttctccgtctaccagcactcgggccgccgagatccagtcctgaggcttcacccctggaacaactgcacgcccctcaatcttgaagcgatgtcctatgccgaccccactccctcccgatccctcagcagcagccccgggcacctccgagctctggacatcccccgatagcagcagcagcagcagg

SEQ ID NO: 3235 - DNA, 1527 bp, Homo sapiens
  SIMILAR (866)..(339): 371254mologous to Homo sapiens putative ATG/GTP binding protein,accession number AJ245874,Smith-Waterman Score=155.
tttttgatttctggattaagatgttttaattaatatacataatgtatagtagttcatataatttattaatggcattttctataggacactgtaagttaattgcagtgacatcaatgattgacctcatacagacaaaagatgaaagctgggttttctcgtgtaccaaagtacaaaacatgtgctaaaaaagttaacatacacagttgtaagagatcaaccgtcgggaaggacccaaagttaaagtaagtggcttcacccgggttttccaaagactggaatccccccaagtggtccgttttgggggcaaataccagctctgggacggcctgactacctccctttttgccagccccacttttggcctgttttaactgctgccgctgctaagatttgcccagatgatttttgaaagaagaagagtcttgtccatgaactcagaaacatcagggcaactcatgggttggaattccagcatattcattggactgctcccatttccccgtcctccatgttcaggaatccacttgtgttgaccacttttaggccagaaagccacaaatatccaataaaaggaagaaccatcattcataaccattggggttcattagaaagtctgtccagccccacgattcccttttaataaagtaaggaaggtggacctgaaagatttccatttggaagaggaatagggcaagtctgaacaaacctctgaatgttttgatgtaaattcacatatcttgcttcttcatttttccctttcgaaagtgatatcccactcgaacggggattaaatctgtaagctgggaagatacaacttccaacttacataagatccaagaaggtatatcatgacccacaaaactcccaatctgtctttaaggaaacccgacgtggctctttctcccgtcttaccaaggcaactcggggccggccgagatccagtcctgaggcttcacccctggaacaactgcacgcccctcaatcttgaagcgatctcctatgccgaccccactccctcccgatccctcagcagcagccccgggcacctccgagctctggacatcccccgattagcagcagcagcagcaggacgggaaagaagccccacagagcggccgccatgacagcagctctgcactcagaccggcagccccggaagccctcccagtctcccggccgccaccgccgccgctggcggcttgatgttgtcatcactgcgcgcccgtttctgtcataagctgtgggatccaaccagagggaagagatcatggccgatcgactagcgaggcggaagtaaggcggaagtactgcccttaactcccggcactcccacatcattgcatacaaagggtactgagggcatccccagtctgcagggtcagacccagcccacacagctgagaggagcaaacaaaaccggtagagctggccttggtagtcgccagtcaaaacgaaaattccagatactttgaggaatgtttctggcacctccaggattgaagagtaaccagtttcgtgtaatctcat

SEQ ID NO: 3236 - DNA, 720 bp, Homo sapiens
  misc_feature (1)...(720): n = a,t,c or g
attgtttacaattttttatgagcatggttcctgtgggttttttatttttccaaaagcatcaataattagtcttttttattatggccaagataattttctatttcaaatttgaagaaagtgatgtcaaagatgattcgatattttttcnnnnnnnnnnnnnnnngnnnnnnnnnnnnnnnnnnnnnnnnnnnnnnnnnnnnnnnnnnnnnnnnnnnnnnnnnnaaaaaaattatatactttattacaaatggtaaactcagagtgctccaaatctcttatttacaaacaacactgggcaggatacccaaacaaacaaacaagaaataacttacaaaggcatgaagctgtttattgacagtaatcagctttcatcaaattaaaaaatatatatatgtacatacacagttaacgaaggcaggccagaaagagttcatctgtaggctcagcctcgctctcacaaacctccctcctgccgcccctccgctggctatggcaccatgtgtcagccctgcctcgagacaggacactgtcctcggggtgtccacagcctccctctgggcctgctcccacagctcctcaacagcctgcctaagcccggtggcagctcgggcctccctctcccgggccctcaatcttgcctccccgggaagggcggcccagtgccccatcaggagcaggttggggaggtgacctggcgggcccctcacaagtacattttct

SEQ ID NO: 3237 - DNA, 1595 bp, Homo sapiens
  misc_feature (1)...(1595): n = a,t,c or g
gtgcaccgagtgggaaggacttggtcgcgccctcccttggcgtgggagccaggggagccggccgcctgcggggctggccccctttgcgggacgggctgtccccggcgcggaaccggaacgttggaccttttccgttaacattgacccaagaactgccatggaccctaacattcgatcctcattccagtattaaaaggggggaaggggggagggggttaacaaactgccaatagaagactgtaagattgccctcctgtaagtactcccttaagaacacaaagcggggggaggggtggggaggggcggcaggagggaggtttgtgaagagcgaggctgagcctacagatgaactcttttttggcctgcccttcgttaactgtgtaatgtacatatatatattttttaaatttgatgaaagctgattactcgtcaataaacagcttcatgcctttgtaagttatttcttgtttgtttgtttggggtatcctgcccagtgtttgttttgtaaataaggaggattttgggagcactctgaggttacccatttgtaataaagtatataatttttttatgttttgtttctgaaaaattccagaaaaggatatttaaagaaaaatacaaatwaaactattggganagtactcccctaacctcttttctgcatcatctgtagatcctagtctatctaggtggagttgaaagagttaagaatgctcgataaaatcactctcagtgcttcttactattaagccagtaaaaactgttctctattagactttaggaaataaatgtccctgatggtacccctgatgccctatggtccgggttaatacctccctccctcccccccagcctatcctatatgggaattgcccttaccccaaagggatagtgccgatgtttccaggaggcttggaggaaggggggttgcagtggagagggacagccccactgagaagtcaaacatttcaaagtttggattgtatcaagtggcatgtgctgtgacccatttataatgttagtagaaattttacgaataggtgcttattctcaaagcaggaaattggtggcagattttacaaaagatgtatccttccaatttggaatcttctctttgacaattcctagataaaaagagtggcctttgtcttatgaatatttataacagcattcttgtcacaataaatgtattcaaataccaataacagatcttgaattgcttccctttactacttttttgttcccaagttatatactgaagtttttatttttagttgctgaggttaacattgctgcaatctgaagtgatttgaaaattaagaagcaaagaatttaggaagagtcaaactagaagttgtgatctgaatgaaacagtctcccaatttcattaattctttccctctttctccatctctatctctctctctactacctcacccccaaataaacccctatgcctatggaaactaacagtttagcattttgggtctgtctgtagcttatttcttaatttggttctaaaaaaaatcaacctttgtttaaatatagaataagtctcaaaagatagtaatctaatactatggaaaagattcaca

SEQ ID NO: 3238 - DNA, 600 bp, Homo sapiens
tcctggtctaatcaggcattctaaagaatgtacataaaaggaaccagagttaagaactctgtcctatatcatgaattaacttgcatgtttcaaagaatttgggactatagaacatattttgggattaatatagtctgaacttagtgtagtagttacttctggtttaaaatagtatctcaatttccttttcaccttaaatagacttaaggaacaaatatatgtgtagtttgcttgacgttttacataaaagaaatttaatatatgaattaaattataattgtgtatttttaggatatatcacattaattaaaacagtgaataatgtggtacatacatataatggaatatatttgacctcaaaaaggaagaaaaattttgacacatgctacaatatagatgaagcttgaagacattatgctaagtgaaataagccagtcacaaaagaacaaatattgtattatttcagttatataaagtttctagactagtcaaattcatagaaactaggatgatagttgctagggtcagggagaagaggggatggaaaggtattgtttaatggatgcagagtttcagtttgagaagatgaataaaaaaaaa

SEQ ID NO: 3239 - DNA, 748 bp, Homo sapiens
  SIMILAR (477)..(85): 891254mologous to Homo sapiens unnamed protein product,accession number AK026767,Smith-Waterman Score=650.
tactgttatgaccatcattacgccatgcttggcacgaggcgcagagtgggttcaaaaatggctgtgagggagtcctagcaggtgcccagcctttctctcatcccctgtggctgcaaggccacctttgactcatttccccacaggtgcggggctcctgagagcatcaggagagcctgcttgcctgcagacagggtctgtgtcacagtgacctcccagagccccaagctcgggcctcccacttaaacacagcccccaccagtgctcagcccagcactcaggaaaggagggcctgggaggtgggacgaacacaacacgggagaactgaccatcaccacggccgctctgcatgggtgcccaggccgggagaatgctcctcctgcctgctgctgtgaggaaccatgtcctggaatctggctcagtgtgagggcacccaccgtaagaggaatcagccatgtctttaccattatgtaaagacatcacggctcccctacccagcccttgatatgggaatctattttactcatttttatccctagtatagattatgggtcttgacataagatgctcaatagatgttgagttgaagttgaaaatttaaagtactttacaaatgtgggggttatcccaagacgcagcccccaagccagcagagctcctgagacgcctgtggccaggactgaggggagggatgggaaccaggccttttggcaaacaaggcctgagtgttgctcttgacctggccctggtc

SEQ ID NO: 3240 - DNA, 500 bp, Homo sapiens
ggggaaggctcagaaccaggcggcagggtcaggatcgggagaggaaccagatctaaggatagtggggccctggtctccgcagtaggggttgaactatatccaatataaagcattatccaaggggaccggattagcccccatgggtgacaccaagatgggagcgggggtggggggtgataagagacacaggagacagagtcaggtcccagaggcagcaaggcctacccccaaaattgcagtcaggttgggaagtagaatcatggctaggcccgcggccccgggtctttctcaggctcggtccctggcacgccgcggatgtccggcagcaggcggcagccagccacgatgtccagacgctcggccagcgcacaaaggtccccgcgcgccaggcgcacgctgtgggccgccgccagccccgccgcctgggctgccgccagcctactagccagggcggccacgtcgcggcctgcacggcggtagacaccgctcacggcggccgc

SEQ ID NO: 3241 - DNA, 2003 bp, Homo sapiens
  SIMILAR (596)..(1219): 361254mologous to Volvox carteri f. nagariensis hydroxyproline-rich glycoprotein DZ-HRGP,accession number AJ242540,Smith-Waterman Score=287.
atctttttttttttttttttttgtaaatgcttaagagactaaatcagtccgccataaaaagctccaccccattctccatcttgggggctcagatcttggcttctggatgagatgagggacagggatatcaggctgtgagaggagagtaaatatgaatgcggctgagggaccaaagctgggatctgaaccaaaacacatgcgaaaaggagcagaaagagactgctaaccccagtccctgagccaagtcagaaatccaagtccttttatagcatccaggagccaaatgtagtgaaatccacacatcatatcgttcttatctgcaaagtgctgtcatctggcgctgaaagcaccaggactgggctgaattgggcccgaagtgcctgaagggtgtcactttaggtctggagagtcaagaggagacgccaccttggcctacagagttgagagcgagcatcatcttggcctggaggggtgtgcaggaaatgccaccttggtccagggagttgggaggaagatcccctgccttgggttaagaggggccatcattttgggcccccaaattgcagtcaggttgggaagtagaatcatggctaggcccgcggccccgggtctttctcaggctcggtccctggcacgccgcggatgtccggcagcaggcggcagccagccacgatgtccagacgctcggccagcgcacaaaggtccccgcgcgccaggcgcacgctgtgggccgccgccagccccgccgcctgggctgccgccagcctactagccagggcggccacgtcgcggcctgcacggcggtagacaccgctcacggcggccgccacgtcgtggtccagccgcgcctggctctccgccagccgaagttgcaggagcgagcgcgcgggggcgggcgccggggcctcctccgtgccccaggcctcctccgccgattcccgctgcaccacgagtggaggcaggtccctcggcgcggccgtcggttccggctccggctccggctccgagtcggtctccgcggcttccccagccacccgcagccccgtggggcggccgcgcgtcgggcccgaaggacccaggtacagctcctcctcctccgacgaggacgcagagcgctcggaatccgtctcggtcgcctcccccggcaccaccgtctccggcctccgcaggggcctccgccgacgaccctgggacgccatggcaccgaactggtccaccatgccaatctcagacccggaagcacacgggcccgtgagctgctcgggaccagcgccagagtcgcagaaaggatgacagtccgactggactctgccattgtctgagaccaggagctcccaagtgtctaaaggggctttggtttgctttttccgttcatcctccttggagctcaaccccttggcttcagtctggacgtgtgaatcttcctttagctcaggacatttttctcctgtgatctctctgatgatttcttctcctgcatcgttccctgtatgtcctgcctccctcttggcagtcgctgtgagcatagtgaagccggccattgcacctttgcccattccccgggtgaaacgccagctccagcagggcagggactgagtctgtggcccactgtggctggcattcaggcaacgtggcctgcgttgaccctcaggttggctgcacttgcctgcccgtctcctgcagtcatcggccccttccatgagcctctgctgtgtggccggccctgctgtgcctgaggacactggaggaaagcagatggtgacaccagagggagacagtgcaacaggaagccgtgtcgttgtcacccatgagggcgaggccattgtctgggtggtggttgtgggttctccctgtgctggtgcaagttcctctgggctctcctttccttgtgcatccttgggatgtgtccgctgggtgagctcccgggtctccgtgggcccagtgtgagtgagtgtgggcccgtgtgcgccctgtgatgggatggcgttctgtccagggtccat

SEQ ID NO: 3242 - DNA, 767 bp, Homo sapiens
  misc_feature (1)...(767): n = a,t,c or g
gctgtattactcagcccactttgaaacgtggttttatcacctgttcttgttaggcagcatggtgtctaattttggcttagcaaatgacgctccttggtcttcctggctcattagctgtgcccacgaggctgcactgactgggtcgtaaatgtatctgagatgtccacacggggctgctgctgctcctctgtaatactgaggtccacatgcaaaatcagctttttttcccccgtaattatcagagcagctaggccagggctgacagccaggccagactccagtgggaaggcttctggccctgagtgtggccttccccnagggggtgggttttccaaaggcaggtgggggaactggggaggccttcggggggctggcttgtccattaccctgaaaccaccagatgctcttttgtccataccacagcccagcattccctctggggtttcatcaagttggcatatccttaagccttcagaaaggaactgggccttgcctgactttccctatctggcctcttcccctatcctcctgtggggccaagagccttaggacagtgtctcagaaaagcctctaagtagggggtttttcccatgggattgtggtagtctgatttttcatgatctattcaaatgttaagaaatattttgttttctgtatttttctattctttagaaatttttttataatagataatttcaaacctatataaataaatccttatgtatttatcatttgactttattataaactcataatcaatcttgaaa

SEQ ID NO: 3243 - DNA, 1033 bp, Homo sapiens
  SIMILAR (1033)..(911): 801254mologous to Homo sapiens Human myelin oligodendrocyte glycoprotein gene,accession number AAZ29204,Smith-Waterman Score= 202.
gagcatcatcacgccaagcttggcacgaggctgggcctctttcctcagtccctccttgagtcagggcttgggaatggggtgaagtggggaggatgcttccttccacaggaatctgggagggtcaggtgcactgctctgataggctgaggcttggggcccttatgggatcctccctcatcagcccttctccctggataccaaactttttggctggtttctcggctaacagcaaggctttcctgaaccctttcttatctggggaagggaggttcaggagggagtctcagagcctctgacaaagttagggaaccccagggaagtaatgaagggggcaatgccatcctctggtctttccaaacagggaacaccttccaaagccacttgggtcatttggggtctagaggcttagagaggacaggacatcttggaaagagctgagctcaggccttggtgctgggctgcagccaggaccatttgttttctgggttgcatgggagggggcacttggtccggagaagcttttagctaatggtgtaaagtgctcggtgccatcacagttttggctttctccaggatttatttgtaatcagcttgtcccgatttgggggtggggtgggtgagtagagaattagagacgacactggctagtgtgtgtgtgtgtgtgaagtagagggtagtaaatggagattggtcctggtgtcacaggcagctctgccccctccctccacttccagatgtcccactgctcctcatcaagcttcctggccagggcacacacatgtagacttgaaccccagctcctagttagtgctatgtccattaccacatagccaactaacaaaaggcacctcccacacctgcctgaccctccagggccccctctagaagctcacccgtctggctttattcaggctgggtgcggtggctcatgcctgtaatcccagcactttgggaggcccacgagggccaatcacttgatgtcaggagttcaagaccaggctggccaacatggtgaaaccccttctctactaaa

SEQ ID NO: 3244 - DNA, 2610 bp, Homo sapiens
  SIMILAR (13)..(2607): 831254mologous to Mus musculus inter-alpha-inhibitor H3 chain,accession number X70393,Smith-Waterman Score=3883.
atggcatttgcatggtggccctgtctcatcttggctctgctctccagcttggcagcctctggcttcccgagaagcccctttcggctgcttggggtggccaatggcatcgaggtctacagtaccaaaatcaactccaaggtgacctcccgttttgctcacaatgttgtcaccatgagagccgtcaaccgtgcagacacggccaaggaggtttcctttgatgtggagctgcccaagacggccttcatcaccaacttcaccttgaccatcgacggtgttacctaccctgggaatgtcaaggagaaggaagttgccaagaagcagtatgaaaaggctgtgtcccagggcaagacggccggcttggtcaaggcctctgggaggaagttggagaagttcacagtctcggtcaacgtggctgcaggcagcaaagtcaccttcgagctaacctacgaggagctgctgaagaggcacaagggcaagtacgagatgtacctcaaggtccagcctaagcaactggtcaaacactttgagatcgaggtagacatcttcgagcctcagggaatcagcatgctggatgctgaggcctctttcatcaccaacgacctcctgggaagcgccctcaccaagtccttctcagggaaaaagggccatgtgtccttcaagcccagcttagaccaacagcgttcatgcccaacctgtacagactccctcctcaatggagatttcactatcacctatgacgtgaacagagaatctcctggcaacgtgcagatagtcaatggctacttcgtgcacttctttgcacctcaaggccttccagtggtgcctaagaacgtggcctttgtgattgacatcagcggctccatggctggtcggaaattagagcagacaaaggaggcccttctcagaatcctggaagatatgcaagaggaagactatctgaatttcatcctgttcagtggagatgtgtccacatggaaagagcacttagtccaggccacgcccgagaacctccaggaggccaggacgtttgtgaagagcatggaggataaaggaatgaccaacatcaatgacgggctgctgaggggcatcagtatgctgaacaaggcccgagaggagcacagaatcccagagaggagcacctccattgtcatcatgctgactgatggggatgccaatgttggtgagagcagacccgaaaaaatccaagagaatgtgcggaatgccatcgggggcaagttccccttgtataacctgggctttggcaacaatctgaattataacttcctggagaacatggccctggagaaccatgggtttgcccggcgcatttatgaggactctgatgccgatttgcagttgcagggcttctatgaggaggtggccaacccactgctgacgggtgtggagatggagtaccccgagaacgctatcctggacctcacccagaacacttaccagcacttctacgatggctctgagatcgtggtggccgggcgcctggtggacgaggacatgaacagctttaaggcagatgtgaagggccatggggccaccaacgacctgaccttcacagaggaggtggacatgaaggagatggagaaggccctgcaggagcgggactacatcttcgggaattacattgagcggctctgggcctacctcaccattgagcagctgctggagaagcgcaagaacgcccatggcgaggagaaggagaacctcacggcccgggccctggacctgtccctcaagtatcactttgtgactccactgacctcaatggtggtgaccaagcctgaggacaacgaggatgagagggccattgccgacaagcctggggaagccagctaccagcctcctcaaaacccctactactatgtggacggggatccccacttcatcatccaaattccggagaaagacgatgccctctgcttcaacatcgatgaagccccaggcacagtgctgcgccttattcaggatgcagtcacaggcctcacagttaatgggcagatcactggcgacaagagaggcagccctgactccaagaccagaaagacttactttggaaaactgggcatcgccaatgctcagatggacttccaggtggaggtgacaacggagaagatcaccctgtggaacagggccgtgccgagcactttcagctggctggacacagtcacagtcacgcaggatgggctgtccatgatgatcaacaggaagaacatggtggtctcctttggagatggggttaccttcgtggtcgtcctacaccaggtgtggaagaaacatcctgtccaccgtgactttctaggcttctacgtggtggacagtcaccggatgtcagcacagacgcatgggctgctggggcaattcttccaaccctttgactttaaagtgtctgacatccggccaggctctgaccccacaaagccagatgccacattggtggtgaagaaccatcagctgattgtcaccaggggctcccagaaagactacagaaaggatgccagcatcggcacgaaggttgtctgctggttcgtccacaacaacggagaagggctgattgatggtgtccacactgactacattgtccccaacctgttttga

SEQ ID NO: 3245 - DNA, 853 bp, Homo sapiens
  misc_feature (1)...(853): n = a,t,c or g
gtagaattctagccttaaattccacttcatctctttaataagaaaatacatggaacacatatttgctaaagattcttaacagtcactgattggcacttgaaatactttcatatttttatttactttacctcccagtatggcactttgggttcaattcagtagttgccttaagtttaaaaatactgaatattatagtttacctcttctcttcttttaagagcttacgcaacttttctgcacttgtttctattttctttgttttctgcttttcttccttttcagcttgtttttctcttaattccaaagatttcttttagaacccagatatcgaaaaaaaaccacacgttaaaaatagcagaatatataaaacccagtattcaaaagaccacccccaacgagagaaccaatttaggtaaaaccaaatcaccatagagccagcattaaacagtatttttttaacataaaaaaattagtcatacagatgtttggcattagtcattgaaatggccagaacagcattgaggaccatattgcagttggcatcccctacaaaaaggggagagcaaatgacagggggccccatgacccagagtgcaaaaaaggtttnnnnnnnnnnnnnngtacataaaaattatttttaaagattgaaaaatttaaacaggacacattttacaaataaaattcaaataaagacattccgttaaggtgaagtgaaggaggaatcaccatgttcaaatacaaaccatttaacccaatagcacagcccagttggcgccatgattacataggaaatcattttccagtttgtgaatggggatgagcagcaccagatgtcacagacacagcagcacgc

SEQ ID NO: 3246 - DNA, 677 bp, Homo sapiens
  SIMILAR (14)..(514): 851254mologous to Homo sapiens bK1048E9.2 (novel protein, ortholog of mouse tuftelin-interacting protein 10 (similar to worm C07E3.1A)),accession number Z99714,Smith-Waterman Score=752.
cggacgcgtgggcttcactcctggctcctgggaagcattcatggtcaaaaacatagtgcccaagctggggatgtgtcttggtgagctagtcattaacccccaccagcagcacatggatgcattctattgggtgattgactgggaagggatgatctctgtctctagcctggtgggacttcttgaaaagcacttcttccccaagtggcttcaggtgctgtgctcttggctcagtaacagcccaaattatgaggagatcaccaagtggtacctgggttggaagtcgatgttctcagaccaagtgctggcacatccatctgtcaaggacaaattaaatgaggcacttgatgtcatgaaccgggcggtgggctcctacgttggttgcctacatgcagccagggagcacgggaggaacattgcctatctcacccacacggagcggaggaaggacttccagtacgatgccatgcacgagaggcgggctggccctcaaattggcctattacggtctctggggaagaaccttaagatttgtgccaaaaaagagcctcttgaaatttatttatgggctaatttaaaggagtattacctggcaaaaaccggccagggcccaccaccctttttcttaacaagagccccggagggtttaatcacagcctgggctctctggggataaaact

SEQ ID NO: 3247 - DNA, 2871 bp, Homo sapiens
  SIMILAR (2546)..(2782): 961254mologous to Mus musculus tuftelin-interacting protein 39,accession number AF290474,Smith-Waterman Score=382.
ccggccacggtgcttccgggttctggtgtaggagcggcgtcttctcgcgcggatggtgaagctgaatttggtacgctggaccctcggacagacagcaagagagagacaagcccgaggcctgacttctagcactcctgagtttgagccctatgagcagtggaacctagggaccaccaaggatccagatataattctttcctcagtaatagaaaaaagaatctgggatctaagaagatacctactcattttctaagtgactggccatgtcattgtcccacttataccgggatggggaaggccgcattgatgatgatgatgacgagcgggagaactttgagatcactgactgggatctccagaatgagttcaaccccaaccgacagcgccactggcagaccaaggaagaagccacctacggggtgtgggcagagcgagactcggatgatgagaggcccagctttggaggcaaacgggcccgtgactactctgcgccagtcaacttcatcagcgcagggctcaagaaaggggcagcggaggaggcagagttggaagattctgatgacgaagagaaacctgttaagcaggacgactttcctaaggattttggaccaaggaagctaaaaacgggtggcaattttaagcccagccagaaaggttttgcaggaggaaccaaatctttcatggacttcggcagctgggaaagacacacaaaaggaattggacagaagcttcttcagaagatgggctacgtccctggacggggcctcgggaagaatgcacaaggtatcattaacccaattgaagccaagcagagaaagggaaaaggtgctgtgggggcttatggatccgagcgcaccactcagtccatgcaagacttccctgtggttgactcagaggaagaagctgaagaggagtttcagaaggagctgagccagtggaggaaagacccaagtggaagcaagaagaagcccaaatactcttacaagaccgtggaagagttgaaggccaagggcaggattagcaagaagctcactgctccccagaaggaactttctcaagtcaaggtcatagacatgacaggccgggagcagaaggtctactacagctacagtcagatcagccacaagcacaacgttcccgatgatgggctgccgctacagtcccaacagctgccacagtctggcaaagaggccaaggcccccggcttcgcgctgcccgagctggagcacaacctgcagctgctcatcgacctcacggagcaggagatcatccagaatgaccggcagctacagtatgagcgggacatggtggtcaacctcttccacgagctggagaagatgaccgaggtcctggaccacgaggagcgggtcatctcgaacctcagcaaggtcctggagatggtggaggagtgcgagcggcggatgcagcccgactgcagcaaccccctcaccctggacgagtgtgcccgcatcttcgaaaccctgcaggacaagtactatgaggagtacaggatgtccgaccgtgtggaccttgctgtggccatcgtctatccactcatgaaggagtacttcaaggagtgggatcccctcaaagactgcacttatggcaccgagatcatctctaagtggaaaagcctcctagagaatgaccagctcttgtcccatggcggacaggacctgtcctctgcctttctcccataggttgatatgggaagtctggatgccttttgttcgaaatattgtcacccagtggcagccaaggaactgtgacccgatggtggactttttggatagttgggtgcacattattcctgtgtggatcttagataacatactggaccaactcatcttccccaagctgcaaaaggaggtggaaaactggaacccgctcacagacactgttcccatccactcttggatccacccatggctgccccttatgcaggcacggctggagccactctattcccccatccgtagtaagctgtccagcgccctgcagaagtggcaccccagcgactcctctgccaagctcatcctccagccctggaaggatgtcttcactcctggctcctgggaagcattcatggtcaaaaacatagtgcccaagctggggatgtgtcttggtgagctagtcattaacccccaccagcagcacatggatgcattctattgggtgattgactgggaagggatgatctctgtctctagcctggtgggacttcttgaaaagcacttcttccccaagtggcttcaggtgctgtgctcttggctcagtaacagcccaaattatgaggagatccaccaaagtggtacctgggttggaagtcgatgttctcagaccaagtgcttggcacattccatctggtcaagggacaaatttaatgaggcacttgatatcatgaaccgggcggtgtcctccacagttggtgcctacaagcagccaggagcaagggagaacattgcctatctcacccacacggagcggaggaaggacttccagtacgaggccatgcaggagaggcggaggcctgagaacatggctcagaggggcattggcagtggccgctagctctgtgcccatgaactttaaggacctcattgagaccaaggctgaggagcacaacattgtcttcatgcccgtcattgggaagcgacacgaagggaagcagctctacacctttggccgcattgtgatatacatcgaccggggagtggtctttgtccagggcgagaagacgtgggtgcccacctcactgcagagcctgatcgacatggccaagtgaactgtggcaggtccagaaccagtcagagacttgcccctaagagggatgtactgtaaataaacagtatttttagatcaccttcaaaa

SEQ ID NO: 3248 - DNA, 1347 bp, Homo sapiens
  SIMILAR (294)..(530): 1001254mologous to Homo sapiens HSPC006,accession number AF070662,Smith-Waterman Score=420.
ttttttttcatagtgggcaccatttattggacatttgccatgtatcagaagctgttccaagcactttatttgctttatctcagctcctctcagcaaccctatggggtaggggatatggtatccctgttgtgtagacatggaagctgaggctcagagagtttacattccagggccactttagctaccaggctgactccaaaatccatattcataagtgctagactgtttagctactataaatccctgtaaagtagtgtcactagcctagtaggaccaggatcaaaacaaaacaaatggccacttcagaaatcttgccttcatttgttgccacgatggatgcaagtaatttttctttttggcaggtgctgtgctcttggctcagtaacagcccaaattatgaggagatcaccaagtggtacctgggttggaagtcgatgttctcagaccaagtgctggcacatccatctgtcaaggacaaatttaatgaggcacttgatatcatgaaccgggcggtgtcctccaacgttggtaagtgaggattcccattttggatgtcctggccccaagtttcagattttacacatgtaaatgacacagaatcagagttttctggttcctgtaggcagcctaaaccttaggtcacacttttgcacataggcaacagactctcaccctgctgactggggtacatgggtcagctgggcacccactgcccagggtctaccatgactgaggagggggcatcttccctgagtgggagactgacttaagctggattcagatgatgtcagtctaaccccaggccccgcccttttaaccactgtgctgtgtggccttttaaggctcattcatgcctgagcatgctgcttaggtgacgcatcttacagtgtggagtttggcacgcggtctgacacttggtgattgctcagccttaatcagccccattttacctgttaaacagtaagatctactttataggctaaaagggagagtgagttcatgcttgtgtatagccttcaataggtggtgtctgtgttgtcaaaaacaggcagttcactgttcgtgtactatatctattcccaagttctaggtaagtcattctgcctagatcataagtaagtgagagtatatttatgtttctacatttgggagcctatttcaaccagtcctgtgctccagtgttgctcattagccgattcgcagcattgaaatgggatcgtctagtctgtgttttacagataagcccagcgaggctgagagcctgttcaaggtcacatagttaaagggtggcagttagaactggaatttctatttcctgagtctttaattcttgatatttagaagtcc

SEQ ID NO: 3249 - DNA, 2835 bp, Homo sapiens
  SIMILAR (2110)..(2): 931254mologous to Homo sapiens b34I8.1 (Kruppel related Zinc Finger protein 184),accession number AL021918,Smith-Waterman Score= 3608.
caaaaggcttctctcctgaatgaattctctggtgctgaatgagatatgtgctctggctaaaagtctttctgcattcattacagttataaggtttctctccagtatgagtattctgatgttcagtcagatgagtgctccggctaaaggctttgtcacattcattgcacttatagggcttctccccagtgtgaattcgttgatgctgagttagatgggagctctggctaaaggtcttttcacatttattacactggtagggtttttcttctgtgtgagttttttgatgttgagcaagagatgaacaatgtcgaaaggctttaccacactcagcacactcataaggcttggctcctgtatgaattctcttatgctgtgtaaggtgtatgttctggttgaatgctctcccacactcattacacttgtaaggtcgttctccagtatggatcttcctatgctgaataagggatgaaccataactgaaggttttcccacattcatgacactgatagggtttctctccagtatgaattctttcatgcttagcaagagatgaactccgaataaaagctttcccacattctttacattcataagctttctcttgagtatgagttttctgatgctgattaaggtttgagagataactgaaagcctttccacattcactgcattcaaagggcttttctctcgtgtgaattctccgatgttgagtaagggatgagcagtaactgaaggcctttccacattcattgcatttgtaaggtttttctccagtatgaattttcaggtgttgagcaagggatgaccagtaactaaaagattttccacattctgcacaatcatagggtttctccccagtatgagttttttgatgctgagtgaggtttgagtgctggctgaaggctttcccacattcattgcattcgtacggtttttcaccagtatgaatcatatgatgacggataaaagttgagggcccgttgaaggcctttccacattcattacatttataggttttttctccagtatgaattttttgatgttgagtaaggtgtgtgctcctggtgaaggttttatcacattcatcacatttaaaaggtttttctcccgtatgaattttctgatgttccataaagtggcctctctggctaaaggcttttccacactcattacaagtgtatggcttctcgccagtatgaattctctgatgctgaacaagatgggtcctctgactaaaggctttcccacattcatcacatttatatggtttttctccagtatgaattctttgatgttgagtaagagatggaccctcaatgaagccttttccacactgatcacatttatatggtttatctccagtatgaattctttgatggtttataaggttttcactccggctgaaggctttttcacattcattacatttgtagggtttttctccagtatgtgttctctgatggcgaataagagctgaacaataactaaaggctttcccacattcattgcacttacaagatttctcttttttaactgggtttgaattctgtttgatgcttcttttagtagaggtctcttctggagatggttcttgtgttacaaggtttgaactcacattgacacttttcccaaattcattatttacagggcctttttcccaactgggtattgtcttttcggttacctttatttcctttggcagtgtctgttggtttgcctgctgtctctctaaactgccttcatattcccaactttctagcaagttggaactccaagaatcatctcttttgtgtttttccactattacctctggagatagctcttcttcagaaatgtcaggctctggggctgacacactattttcaagtcttgtctcccagtctaaaagaaaaagaaaattccagtgttctctgaatagagaaaaaataaactgctattgtgggaataatataatgataggtttagaaacttggagtcctgttcattagggaaaaaaagaaagaaacctgcagtaaggggaaagtaccatatcagaattcaatcaccactttgtccattcttcctgggtaaagtccactatcacatccttgaaagtcaccgcttcctgaaataccaaacatatttctgcttagccataagcatttacttaggaaaggggtaaagttagcaatactgacagaaatctcggtctaggactcagatgtctaactccccttgcagggaatctgcaacacgctgaggttgtctaccctaaaagacacaggatggcgtcagcagcatacgtcacacaatcacacatcagagcgttaaagctggaaggtggacaaacagggcggggcccggcacccgacttccccttaggccagaacaaaagaacaaagccctccaattgtctgactgaactgattataagaaatgcacgtctactgaccgagcgcagtggctcacgtctgtaatctgagcactttgggaggccgaggtgggtggatcactaggtcaggagttcgagactcagcctggccaatatggtgacaccccgtctctccttcatcctcttctttctacctcctgtccctccttcctttctctcttctcctttctggtcactttcttcttttcctcttccttcttgtccctcttcctcatttatctacttagtcgacatgatttcttagcttgcgattgtttccctcttttcttagattagtatatggttccaagaagtagtaactcctatgttagctagggctccaaccatggttgaacatagacggaaaccagtgcgtcacaaaggaggctagcgagagttcttttttaaaagggtctgacaaagcg

SEQ ID NO: 3250 - DNA, 1116 bp, Homo sapiens
  SIMILAR (1113)..(958): 801254mologous to Homo sapiens PRO2550,accession number AF130089,Smith-Waterman Score=231.
tttttatttttttttttgttttttcagataatttattgttaaatgaagacatcacaaagcaaaatgggagtggggcaggtgtcaaaggtaaactgaaaacgtcgtgtctgccaaacgctattctggtttcctaaggttagaaacaggaaaagtgtcaaatgaaaaggtactcgctcaaattaagtttttttaaaaggtctgtaatttgaaagggaaaacacttttcacctaaaaatttccctttttcatgaaagccctaatttaaaagacaggggaaaaaagctttttaattaacaaataaacagcatctctcaggggacacttggggaatgtttgttttttaatccagtggggtcctaaaaattcactgctttccacctgcaaaccgaacaccgaatccactgtgggatgggcgtcctctgacccaccctggaagggttctggtttctctccacacacttccttttctggcaactttcagcaaagcaggtttggaagaaagaggattacaaagaactacgactgggctccctagtgaataacttaacacggtaaaccccggttctccatttacattacacattcacaatcgctcactggctacttacttcactgacgtattttcacactcctctacacacccagcatggatttgtctgaacttaacacagtccccctaagacaaaaaaaaatatctccctaaggacctctgaagaacacagcggtgttcaaaggccacgtcctcgcacacaacacccagacctgccacgcagccggtactgtttcctgaactcatccgagcaagcgtctccacggggcaaagcaaggccttgaggatcccgctaacataacttacaaattattgggaggccgaggcgggcggatcacctgaggtcaggagtttgagaccagcctggccaacatggtgaaacccctgtctctactagaaatacaagaattagccaggcgtggtggtggacacctgtaatcccagctactcaggaggctgaggcaggagaatcgcttgaacctgggaggtggaggttgtggtgagccaatatcatgccactgcactccagcctgggcaacaagagcgaaactccatctcaaaaaagt

SEQ ID NO: 3251 - DNA, 354 bp, Homo sapiens
  SIMILAR (215)..(3): 881254mologous to Homo sapiens Unknown (protein for MGC:2692),accession number BC001073,Smith-Waterman Score=332.
  misc_feature (1)...(354): n = a,t,c or g
nagccacattcctgccgcgagcaggagaattattcctcaagtgggtcatcctcctcttcctcttcctcctcctccccagagccatgcaggtgttgctgcaggtgatgagtgacatgctcaaagaacttttccatggttgagcgcacaaaggagcaggaccccccctcacactgtagccgcagattctcctttcggggaactttcccagtaggcggcannnnnnnnnnnnnnnnnnnnnnnnnnnnnnnnnnnnnnnnnnnnnnnnnnnnnnnnnnnnnnnnnnnnnnnnnnnnnnnnnnnnnnnnnnnnnnnnnnnnnnnnnnnnnnnnnnnnnnnnnnnnnnnntgtatgtcg

SEQ ID NO: 3252 - DNA, 416 bp, Homo sapiens
  SIMILAR (279)..(1): 881254mologous to Homo sapiens Unknown (protein for MGC:2692),accession number BC001073,Smith-Waterman Score=448.
  misc_feature (1)...(416): n = a,t,c or g
ggtgtggtagcagtggaagtagacatggcgaatgaggtcagcagatctgtccagagaacaaaagccacattcctgccgcgagcaggagaattcttcctcaagtgggtcatcctcctcttcctcttcctcctcctccccagaaccatgcaggtgttgccgcaggtgatgagtgacatgctcaaagaacttttccatggttgagcgcacaaagtagcagtaccccccctcacacagtagccgcagattctcctttcggggaactttcccaggaggcggcatggccttcaccctacagtccccctgcttggannnnnnnnnnnnnnnnnnnnnnnnnnnnnnnnnnnnnnnnnnnnnnnnnnnnnnnnnnnnnnnnnnnnnnnnnnnnnnnnnnnnnnnnnnnnnnnnctgtatgtcga

SEQ ID NO: 3253 - DNA, 1482 bp, Homo sapiens
  SIMILAR (28)..(1233): 991254mologous to Homo sapiens vacuolar protein sorting protein 11,accession number AF308800,Smith-Waterman Score=2088.
atggtgacacatgcctgtaatcccacaaccattggaaagttggagccatcctacgtgatccgcaagtttctggatgcccagcgcattcacaacctgactgcctacctgcagaccctgcaccgacaatccctggccaatgccgaccataccaccctgctcctcaactgctataccaagctcaaggacagctcgaagctggaggagttcatcaagaaaaagagtgagagtgaagtccactttgatgtggagacagccatcaaggtcctccggcaggctggctactactcccatgccctgtatctggcggagaaccatgcacatcatgagtggtacctgaagatccagctagaagacattaagaattatcaggaagcccttcgatacatcggcaagctgccttttgagcaggcagagagcaacatgaagcgctacggcaagatcctcatgcaccacataccagagcagacaactcagttgctgaagggactttgtactgattatcggcccagcctcgaaggccgcagcgatagggaggccccaggctgcagggccaactctgaggagttcatccccatctttgccaataacccgcgagagctgaaagccttcctagagcacatgagtgaagtgcagccagactcaccccaggggatctacgacacactccttgagctgcgactgcagaactgggcccacgagaaggatccacaggtcaaagagaagcttcacgcagaggccatttccctgctgaagagtggtcgcttctgcgacgtctttgacaaggccctggtcctgtgccagatgcacgacttccaggatggtgtcctttacctttatgagcaggggaagctgttccagcagatcatgcactaccacatgcagcacgagcagtaccggcaggtcatcagcgtgtgtgagcgccatggggagcaggacccctccttgtgggagcaggccctcagctacttcgctcgcaaggaggaggactgcaaggagtatgtggcagctgtcctcaagcatatcgagaacaagaacctcatgccacctcttctagtggtgcagaccctggcccacaactccacagccacactctccgtcatcagggactacctggtccaaaaactacagaaacagagccagcagattgcacaggatgagctgcgggtgcggcggtaccgagaggagaccacccgtatccgccaggagatccaagagctcaaggccagggtgaaggccatgccgcctcctgggaaagttccccgaaaggagaatctgtggctacagtgtgagtgggggtcctgctcctttgtgtgctcaaccatggaaaagttctttgagcatgtcactcagcacctgcagcagcacctgcatggctctggggaggaggaggaagaggaagaggaggatgacccacttgaaaactcagtcaacaaggatataaggaataaatctgccatcctgccatcaagaagtaattgctga

SEQ ID NO: 3254 - DNA, 2364 bp, Homo sapiens
  SIMILAR (2364)..(1837): 931254mologous to Homo sapiens GlcNAc-1-P transferase,accession number AF070443,Smith-Waterman Score=832.
tcaaaccatctggatctctggctcctcagctattccttgaagcttttccatgatgccccctgaaggtggctcaggggctgggggaggctcccctggggcttcagacagcacatagtagacaatctcttgctggccttgggcattggtctgattcaccacgtggatgacagaactggggttgtcctgagaggctgagagggctgtcccttcgctacccttgccctcctcttcctcttccttacgtcctggctcccctggcactgtttctagaataatgccctgcaggctgctctcgttcagcgacgttcccaggcccgatccctcttgtggttgccgcagcagttgctgtgtcagctctacactctcgtagcgaaccagctgcagccgcatatagccatcttcatgttccttgtaccgaaaacggggatgccctgagggccacttgaactggtgcttcttgcgaaggtgcacggtgaggttgttgccccgtgtgaagcatttgtcacacacatgacatttgtaccttggctcagagtctccttcatgtactttgcggtaatgggacttgatagagcagagggatcgggcactgaaggtgcagttctcaaaatcacacctgtaggctggctcctcgctgtgggtatccaggtgcttctggaggtcaataagattcttgcagctgtagtcacaacagtcacatttaaagggccggtcctcactgtgacgaaagcgcatgtggttgcggagggaggaaggcagcgggcaggtcatgtcacacagagggcacttatagtgattcacatggttgcgcatgtggtcccgcaatagccgctctgtggcaaatctcttggaacagtgagaacactggaagtgctgctgatccaatgaggtctggcgacggatgtgatctaagaacttggtattgttggcaaacatgcccccacaggtggggcaggctaccactttctcctgggtatggctgcggaggtgctctcgaagtttactgcggtccttgaaggtgcaggtacagcctttccagccacacagcaccaccgggttgtccttgccgactgcttcgtattcacagaaacagactgtgtgcttccacatgccgataaaaccactcaggattgtcgaaggaattctgtgccaggggcaactcacagtgctcccacagacaacaggaagtggtcagggatatcagggatgacgttccggctctggaagtccaggatgcaggggccaaggtcagcctggctttgctaggcctgcagcccccactgtttcagcttggtgtggtagcagtggaagtagacatggcggatgaggtcagcagaactgtccagagaacaaaagccacattcctgccacaagcaaggagaattcttcctctgtagaaaggggtttaaaaggaagagtctgacactttccaaggctcaggtcaccttccacctgcagcacaagtgggtcatcctcctcttcctcttcctcctcctccccagagccatgcaggtgctgctgcaggtgctgagtgacatgctcaaagaacttttccatggttgagcacacaaaggagcaggacccccactcacactgtagccacagattctcctttcggggaactttcccaggaggcggcatggccttcaccctaccttccaactctaccaggttgaagacaatgatggaagcagaaatgactagtgactggccagcctctaggccgttaattcctgctaggatattgatggcattggtacagaacactgcagcagccccatgtagacatagtacaggattcatgcggggagagatggtaggaaaagaagtagtgccacccaagtccagatgcaggccaagtatcgggcggaaaggcttgggcaccacaatggtcgtgttgccaaagttggtgaaatataccatgaggagaggtagtgaggcagctgtatgtagcagcagcttatggcgccagcgcagattcagtacatcatccgcaaagcccaggaagatcatgcagcagatggcaaggagggcacctcccaggtcccagccacaggcaatcacccccacgaacccacttacttcatggtgggggaatgccttacactgctccttcacaaagcagttcaggaaggggaaagggatgaagcagaagaggatgataaggaaaacagcaccgctgatcactccctgggattctgggatctgctgtcggctggttttgttgaggtcctgaccacagaggcgcgcagcaatgaagtggccccggaaggccgggatgagggtgactgtggccacaaatcccagcagcgagacgatcaaattgatcagcagcggcatgggcaattccgagaaggcccacat

SEQ ID NO: 3255 - DNA, 867 bp, Homo sapiens
  SIMILAR (274)..(861): 1001254mologous to Homo sapiens Human cell cycle and proliferation protein CCYPR-46, SEQ ID NO:46,accession number AAB60498,Smith-Waterman Score=1023.
atggccggagccgagggcgccgctgggcggcagtcggagctggagcccgtggtatcgttggtcgacgtccttgaggaggacgaggagctggagaatgaggcgtgcgctgtcctgggcggcagcgactccgagaagtgctcctactctcaggacaaagcaaaggtaaattctggcaataagtacaatgacaacttttttggattgtactgcatttgcaagagaccttatcctgatcctgaagacgaggtaagagaattggaagttaaacctggggtaaccaaaatatccactgaggatgatggattggtgcggaacattgatggaataggtgatcaggaagttatcaaacctgaaaatggagagcatcaagatagtaccctcaaagaggatgttccagaacagggaaaggatgatgtccgggaggttaaagtagagcagaacagtgaaccatgtgccggctctagttctgaatctgatctccagacagtgtttaagaatgaaagcctcaacgcagaatcaaaatctggctgcaaacttcaggagcttaaagctaagcagcttataaagaaagacactgccacctattggcccctgaactggcgtagcaagttgtgtacctgccaagactgtatgaaaatgtatggagatctagatgtcttattcctgacagatgaatacgacacagttctggcttatgaaaacaaagggaagattgcccaggccactgacaggagcgatcccctaatggatacccttagcagcatgaatagagtccagcaagtggaactcatttgtgaatacaatgatttgaagactgaacttaaagactatctcaagagatttgctgatgaaggcacggtatgttga

SEQ ID NO: 3256 - DNA, 1845 bp, Homo sapiens
  SIMILAR (433)..(741): 991254mologous to Homo sapiens protein serine/threonine kinase,accession number L20321,Smith-Waterman Score=550.
atggagaaggccctgcagaagcgggactacatcttcgggaattacattgagcggctctgggcctacctcaccattgagcagctgctggagaagcgctcccacattacctgcagaaagctttccctgccacccccaggcttcctggtcatccccatgtctccctctgggctcctgcagcacctggctattttctgggtggcagttatcaccacaggcattgtgtctgccatggtggccctgttgaatcccattgaaaacccagacttgaagctggccatcgtcatgctgatcgtccccttctttgtcaacggtttctacagccaggtagccaaacccctgctggtggatgtggatttgcagtacccccaggatgctgtcttggccctgacccagaaccaccataaacagtactacgaaggctcagagattgtgtatttacatgaaaaacacatccttcatcgagatctgaaaactcaaaatgtcttcctaacaagaacaaacatcatcaaagtaggggacctaggaattgcccgagtgttagagaaccactgtgacatggctagcaccctcattggcacaccctactacatgagccctgaattgttctcaaacaaaccctacaactataagtctgatgtttgggctctaggatgctgtgtctatgaaatggccaccttgaagcatgctttcaatgcaaaagatatgaattctttagtttatcggattattgaaggaaagatgattctgacagacagcaaagcatcatgtgggccctggaagccagactggctgggctccatgactcctgagcgggcctctgggaggaagttggagaagttcacagtctcggtcaacgtggctgcaggcagcaaagtcaccttcgagctaacctacgaggagctgctgaagaggcacaagggcaagtacgagatgtacctcaaggtccagcctaagcaactggtcaaacacttgagccacaccgccagctaccagcctcctcaaaacccctactactatgtggacggggatccccacttcatcatccaaattccggagaaagacgatgccctctgcttcaacatcgatgaagccccaggcacagtgctgcgccttattcaggatgcagtcacaggtgaggcttgtgggctagggccggggccagggggctcttcctgggagggcttgggtcccccgagggcctcggggagaactatggagcaattcaccatccacctcaccgtcaatccccagagcaaggtcacgtttcagctgacttatgaggaagtgctgaagagaaaccatatgcagtatgaaattgtcatcaaagtcaagcccaagcagctggtgcatcattttgaggctggtgctcaggaagcccctatcaagaagaagcgcccccctgtgaaggacgaggacctgaagggggcccgaggaaacctgaccaagaaccaggaaatcaagtccaagacctaccaggtcatgcgagagtgtgggcctggggcagcctttgagctcagcattggtgttattgatggggatcctttagagtcgcacatgcaggcatgcaagcaagatcggtcaagcaagcttgtgtccatcatggattttgccgatttcggaaccaccatcaaacaggattttcgcctgctggggcaaaccagcgtggaccgcttgctgcaactctctcagggccaggcggtgaagggcaatcagctgttgcccgtctcactggtgaaaagaaaaaccaccctggcgcccaatacgcaaaccgcctctccccgcgcgttggccgattcattaatgcagctggcacgacaggtttcccgactggaaagcgggcagtga

SEQ ID NO: 3257 - DNA, 587 bp, Homo sapiens
  SIMILAR (31)..(138): 801254mologous to Homo sapiens Human secreted protein encoded by gene No. 5,accession number AAY27571,Smith-Waterman Score=147.
ggagctgaagagacctgggagccgacagacgggtctgggtctgccgcccaggatggagtacaatggtgtgatcttggctctttgcaacctctgcctcctgggctcaagccttcctcccacctgaacctcccaagtagcgggactgcagggtgaaggccatgcgctcttcctgggaaagttccccgaaaggagaatctgtggctacagtgtgagtgggggtcctgctcctttgtgtgctcaaccatggaaaagttctttgagcatgtcactcagcacctgcagcagcacctgcatggctctggggaggaggaggaagaggaagaggaggatgacccacttgaggaagaattctcctgcttgtgggcaggaatgtggcttttgttctctggacagttctgcttgacctcatccgccatgtcttatttccactgctaccacaccaagctgaaacagtgggggctgcaggccttgcaaagccaggctgaccttggcccctgcattcctggaatttccagagccggaacgtcatccctgatatccctgaccacttcctgtgtctgggggaccactggagaaattcttcgacg

SEQ ID NO: 3258 - DNA, 423 bp, Homo sapiens
ataaatcactcaccaggcagcttttgcagtttccggaagttgtgatgagagctgccctctgaggcccctggaggcagttgggctgcatgaatggatgtgattggggacaggagcttgcagcagcccagggcacatccattcctgccagcctgcacctctgccacagttcagctctgccgagatgggattggtgggcatgacgtttgtcaggggaaacatctgtgggagaaaatgacatgggagagcgttagcccacgatgaaggagtgggggaaggaacatatcatcccgaaagagcatcacggcccataggagtatctcagcccctggaagcatctcagcccaagggagcatcccagccctcaagagcatcttagcccatgggagcatcccatcccaagggagtatctcagcccacaggatg

SEQ ID NO: 3259 - DNA, 1958 bp, Homo sapiens
gaaaaggaaaataacaggactttttatagctgtgataaaatgggtaaagaaaaacctccatttaaataaggaaggggagacaaaatggaaggtcctggccttaagtcaaattccagatagtgctttcaatatccaaagcttaggccttgtttacgttataggaatgctatatttttctttatctgccctgtgatttcgcttcgtgtccttcaaagtttttttattgtaattttaaaggaaaaaaacaatgtatttttatttgataactaggcaaaatcatttgccattttttatttcataaatatttatttttctatctcatacaatgatcagttttactttaaaaattctgcatttctcttgcctctcatgtacttcatccagttatttattattgtaaaatgttaactggagatactgcattcaaaaaaaagtcggaccacttaacacttaccaggaatgttagtgtttcagctgttttagtaagtgaccaagtaagctatcaccttgtgatagctaattcaacatctttattgaaaatttgttactttttttaaaggtttttaaaagattacaattttaaaacattttatgtttattttatttttgtgtaaagcaaacacttttaaaataatatcagagtaattattaccctatgaataaggagatagaaatgaaattcagccagttaaatcctcatactctttctcattcaaataatataataatggtttgagactatagaagcaactcaactgtattttaatgaactgccagacacttttcactgtgttctctgctttttactttgtcatttttatataaatgtgaaagcattttgttgttgttgttgttgttcctgctgctagaacacatgcagtttaatttttaggcccacagtgtattatgctttaatgttgtgatgtaaactaatacttctggcctgggaaaacctttctgtttctgtatctttgtcctttggaggccaggcctcattaacaccagtattgttgaataagcacaatatatgacggagccttatcataaggctgcttgacatagacacccactctcctccacattttataaatcattgtttggaagtaaagttagataagagtcaaattaaatgttttgacttgaaaaatatttgacttttgcgttcaaaccactgttagacataagtattttattagacataagtattttattttgggactagacagttgctttacatgtatttaagggaacattgtgattttcagaaagtggctttacatactattgaattgctatttcccaagttactttacaaccaccagcagcataccaataaattacaaaagcagaaaatgaaaattaaccctaggtgttctgatgatagagaaatagctaaattagaaaagaaagatatggatagatgcttttaggaggaaaacctttttagaatggcaatgaccacttggatctaggtcaacatattccaaaatgtgtgaccttgggctttgtgtttactgaactcactctagaaaattctggacctgattcattaaccccgcttttcttctctaatgtgtcctgaagctgagctagatgatgagtaaattctttgctgactgttgctcatcactttctctcaaagttagaacttttcagtataaaaataattagcttttaactgattattaattttctttaatagtttctgtcaaaacttgtctaaaatttgtgttgtgccaaattggaaatacccactataatatggtgcattcaggtttactccacaagtggttaacattttaagtcctagatttttgatgtcttgcctttgtataagcatcgctttggggaataccaagatgattcattattcagtgattattttcttgaaagataactatgatgattggctgtaaaatcttcaccctaataaaggagtgagatctctgtgtaaacaa

SEQ ID NO: 3260 - DNA, 746 bp, Homo sapiens
gaaaatggggggccctgagtccctggcctggaagtgggcctgaggctgtggtgaatggagccaagagaataattaccaggtcagtttcctatggagtttctgggtcagtaatgccaagaccaatagtccagggtcagggtgccaaattcagacagggcaataaaaaagagaaagctctaattcaaattgatcgttctgacagagaaggcaatgcaaagggagttcagtcagacaagccaggactgattcctgagaaaaaaatgcacacagtgccaatttccttttttaactggttcctgccacagctaacatcggggacatatcctaaatctggcaaagctgttgaagaagcccagccaaacagtccacctgccgaggacgttcgggacagggtgagagaccgaatttacgattcaagtctaatgttcttcggacgtgcgcttcggccccagagaaggggagtctcggtccccgttttcaggtctgcgaaggaacacattggcagggtgaaaggaattcctcccacacaaccagctctaaacctgatgacgcgggtggagaaggtgccatcccgccccaaaggggcaacggggaagatccctaggccagaccgccggaccccggttagcctttgggccacaaggagccgagagggagtaggggaagagctggccgcagtcgctcagccccaggatagaagctaccaaccagttaatgcaaaatggtcgctatggcaacacacgtag

SEQ ID NO: 3261 - DNA, 1372 bp, Homo sapiens
  SIMILAR (1169)..(954): 971254mologous to Mus musculus putative,accession number AK010468,Smith-Waterman Score=367.
gcggccgcattctttttttttttttttttttttttttttttttcagtgtaaggactaaaatatttattttttaagacaatttgaacttccattttgttaaattgttcttaattattacttattaataacttcttctttgagtttctctgcaagcaatctcctctttagtaatgtttgcttctcctctcgctcgtcatttctgggtttctctgtcatttcctcctaccctcccccagtgggtttccctttctggctccatatttttgaatctgtttagtcctcatatcctttctcatggacatcaacttactctctcttctgcttgagatagtgttctcgttgccgaagttcttctgttccaagtactgataaagtttgctattggtcccttcaatgcgtcgcatgctctaagcccaggaatcttcaaggccttttttgtgggagggagggaagtttcagacccttttccacttttcttcccaaagggttctattgactgattagcaaaatgcattttaacttctgagggtgggtgtgcaaaatgttcacccatccccttgggaattattcattattgcagcttcactggaatgcactgtgggctcttctgttttaggcctctgataactgttttttcctcttcctttcctcttccgggtcatattcctcttttgattttctaagaacttccctcaggattgtcagtctcttcggtgttcaaggtcactgaccacatcagagccatcggttaagcagtcaggtaatacaccatttctctcttgaattattcggaatggcttgcagctgcatttcaatgtttttctggaccatcattgctttaaagatagtaaaatcttctgctgccaacacaggttgcaaaatggcctgtgatgtatgggtctttgcaagaggagaagtgcatgcttccttgaaattgatcttcattaattccaaatttctttgaggtaaccttgtaacagcttttcaactagttctttgtattcctgatgaatctctgtataggtcaatttgctttcttcttcatcatcaaaaacttcacatttctgttccacaaagtccaagatggggatggaccagtctgggcctcgcaggaaccccgcgatgctctccactacccactccacctcgtcttcttcttccgcagccatcccgccccaaaggggcaacggggaagatccctaggccagaccgccggaccccggttaggcctttgggccacaaggagcccagaggcacgtaggggaagagctggcccgcagtcgctcagcccccaggatagaagctaccaaccagttaatgcaaaatggtcgctatggcaacacacgtagccgcgaattccaccacgctggag

SEQ ID NO: 3262 - DNA, 366 bp, Homo sapiens
  SIMILAR (1)..(237): 881254mologous to Homo sapiens uncoupling protein-2,accession number U76367,Smith-Waterman Score=351.
gcaggcagcaccacaggtgccctggctgtggctgtggcccagcccacggatgtggtaaaggtccgattccaagctcaggcccgggctggaggtggtcggagataccaaagcaccgtcaatgcctacaagaccattgcccgagaggaagggttccggggcctctggaaagggacctctcccaatgttgctcgtaatgccattgtctcagtgctggtggagttgacatttgacagtgtgggaggcctcgtaccagccaggatcccaagcgtcccgtcccttggaaagttcagccagaatcttcgtcctgcccccgacagcccagcctagcccacttgtcatccataaagcaagctcaaccttggaaaa

SEQ ID NO: 3263 - DNA, 513 bp, Homo sapiens
  SIMILAR (328)..(513): 1001254mologous to Canis familiaris uncoupling protein 2,accession number AB020887,Smith-Waterman Score=326.
  misc_feature (1)...(513): n = a,t,c or g
cgcgggcccgggatttgattttgggggccccattaaaaaaattttaccttgccagcccgcggtcgttaacttgggttctttaaaacggcccccccnnnnnnnnnnnnnnncaaggttgagcttgctttatggatgacaagtgggctaggctgggctgtcgggggcaggacgaagattctggctgaactttccaagggacgggacgcttgggatcctggctggtacgaggcctcccacactgtcaaatgtcaactccaccagcactgagacaatgagtagatgagaatgtagaaagagggaaggtggtaggtaaaggagcggaaggaagacgtggtcaagacgagatacatgaactctgccctgggccagtacagtagcgctggccactgtgcccttaccatgctccagaaggaggggccccgagccttctacaaagggttcatgccctcctttctccgcttgggttcctggaacgtggtgatgttcgtcacctatgagcagctgaaacgagcc

SEQ ID NO: 3264 - DNA, 3680 bp, Homo sapiens
  SIMILAR (2475)..(2678): 921254mologous to Homo sapiens Human uncoupling protein 2 gene,accession number AAZ19967,Smith-Waterman Score=332.
  misc_feature (1)...(3680): n = a,t,c or g
ggatgcgacgatttcgtgacatttcgtccctgtctccagtttttctccatctcctgggacgtagcaggaaatcagcatcatggttgggttcaaggccacagatgtgccccctactgccactgtgaagtttcttggggctggcacagctgcctgcatcgcagatctcatcacctttcctctggatactgctaaagtccggttacaggtgaggggatgaagcctgggagtcttgatggtgtctactctgttccctccccaaagacacagacccctcaagggccagtgtttggagcatcgagatgactggaggtgggaagggcaacatgcttatccctgtagctaccctgtcttggccttgcagatccaaggagaaagtcaggggccagtgcgcgctacagccagcgcccagtaccgcggtgtgatgggcaccattctgaccatggtgcgtactgagggcccccgaagcctctacaatgggctggttgccggcctgcagcgccaaatgagctttgcctctgtccgcatcggcctgtatgattctgtcaaacagttctacaccaagggctctgagcgtgagtatggagcaagggtgtaggccccttggcccttttttctcagtgatgattgatcttagttcattcagccatatagttttttaggccccacgatccctaggaagatcaggggaacagagaactggaaggggccctggtcctccacatagttcctaagcacctgggctataccaggctctgagcagggcgtcatcccatcacagtcttcaacaccaccttgggagtaggtagtatcatcccagtgttatagaagaagagactgaggtgggaaggcagtgggtagagtggggacttggccaggggcacacagtagagagccagaaaacacacagtagagagccaggacactcgtctctaaggccagcgttcttccctttcacctccttagtatgccatgccaaccctccattttacacatgacgaaacagagccccagacaaaaggttgtctttcccagatcacatggcaggaagaagtaaagctgacctgagatcccaagtcttaggaatcccagtcctcagaaagccacttctctctgagccttggttttcacatttgtcagatggaaatgattgtgatttctcagggctgttgagcaggtaaatgaaaatgttttatgaaagacagcaccaagtttcattttggtcttagcccttgctatgtccctagcaagaagtagatattcatagggatattttgtttgatgtgaggagttcttacagcaagagcttgtagaaggccaaaagcttctggattctattcccaaaagcaggagatgacagtgacagggtggttttggtgaggagagatgaggtagaaaatgagtgcaagcccgctggccactgaccccatggctcgcccacagatgccagcattgggagccgcctcctagcaggcagcaccacaggtgccctggctgtggctgtggcccagcccacggatgtggtaaaggtccgattccaagctcaggcccgggctggaggtggtcggagataccaaagcaccgtcaatgcctacaagaccattgcccgagaggaagggttccggggcctctggaaaggtgtgtaccagttgttttcccttccccttttcctcctccccgatactctggtctcacccaggatcttcctcctcctacagggacctctcccaatgttgctcgtaatgccattgtcaactgtgctgagctggtgacctatgacctcatcaaggatgccctcctgaaagccaacctcatgacaggtgagtcatgaggtagacggtgctgggtctcacccttcccccatgccaggagcaggtgcgggggtctagctgacaccagaagaccacatcttttcatcctatttgccctttgcagggagagtaagatatctcttacttgccatattgaagccaattgggatgaagctcccactttgcacattgaggaactgaggctagattggcaaaatgactctttcaggtcctcagaagatgtctcagctggagtccctgtctgtttttgtttttttgtttgtttgttttttgttttttttgagatagagtctcactctgttacccgtgtaatctcaagctcactgcaaccttctcctcctgggttcaagcgattcttcgctgcctcagcctcccgagtagctgggactgactacaggtgtgcacacagcacactggctaatttttgtatttttagtagagacagggtttttgccatgttacccagtctggtcttgaactcctgggctcaagtgatccacccacctcggcctccaaaagaagtcctggattacaggcatgagacattgtgcccagctctctgtgtctctttaaaatcatgaaaactcgtagctacttaagtaattctcctgccttctggaatgatgggtgaagatcttgactgccttgcctgctcctcccttggcagatgacctcccttgccacttcacttctgcctttggggcaggcttctgcaccactgtcatcgcctcccctgtagacgtggtcaagacgagatacatgaactctgccctgggccagtacagtagcgctggccactgtgcccttaccatgctccagaaggaggggccccgagccttctacaaagggtgagcctctggttcctccccacccagttcaggcctcttggctatgcatgtctattgtgggtgggagagaaccacctggaagtgagtagcagccaagtgtgactatttctgatcctggtcctggcatttcaccagcattcacctatccccttaattccttcctcccagaattgctaccatcactgtttattaggtgttaaatggagactcaaagggaattcatgcttatagccaagcagctgtgagctcagttcattgagtcctcccagcctcctttgggacagagcaactgggttggattgaataccaggcccagtgagggaagtgggaggtggaggtgcccccatgacctgtgatttttctcctctaggttcatgccctcctttctcccgcttggggttcctgggaacgtggttgatgtttgtcacctattgagcagcttgaaacgagccctcatggctgcctgcacttcccgagaggctcccttctgagcctctcctgctaggtgacctgatcacctttggatttgtctcctaagccgggccatgatttccttttatgcctttttttttattccctccttcccttctctccttccctctttccccacctcttccttccgctccttttacctacccaccttccctctttctacattctcatctactcattgtctcagtgctggtggagttgacatttgacagtgtgggaggcctcgtaccagccaggatcccaagcgtcccgtacccttgtaaagttcagccagaatcttcgtcctgcccccgacagcccagcctagcccacttgtcatccataaagcaagctcaaccttggaaaaaaaaaaaaaaaaaaaaaactgattataagtaaaaggcttacatcttaagagcnnnnnnnnnnnnnncaaaataatttgttggtaactattttatttggggggcttgggtaattttaagcccttcaactaccctttgatgaggcggtgcgtttctttttgaattat

SEQ ID NO: 3265 - DNA, 1969 bp, Homo sapiens
  SIMILAR (1928)..(1785): 721254mologous to Mus musculus putative,accession number AK014175,Smith-Waterman Score=166.
tttttttttaaaatttcaaatatattttattcaaaattctccatttaggagaaaagatatataacaatgtttacacatgctttaataacttatttcactgtacaacttacattctgtataacagtacaataaaccagccaaagaaaataaccagttagcacttaaataagaatctaccatgtaaaaaacacagtatgggacactacaaggtagtatttaaaatattttttaaatgaaccgaagcctacagtacaacagtccaccctagttccagtggttgtcctaaaacatccaagctgtccccacacctttcctgaattcatgatggggaaagcctattatgacctttcacattcgaaccatgtcatttgggttgtgtaaatttgggtggggtgggggggcagaaggggctctattaccctttatcccctttccttataaaatatattttcccccttttatattacttccagaattttaaataaaatatttatttgtgtttgtgtaactacaatgtcaacattgtgttagaattatattaatccagttattttatagccagcaaaatggtcccaaacgcattaagaaaaccaaaagataacttaagctctgccaaagtagcacctaggaaaacagcacttcagtaaaatttctcctgctattcccttatagcctattgcaggcaaacagcaacaacttcaaaaacataggcagaaatgcaagaaggaagtactcaaggaactattttctgtttctgaaaaaaagatcttattagttagtatattctctaaggcattttataatcctcagagtttgcaatgattgcccaaagcaggtacatggtaagaccttagcaagaagaaaacaagatgaaaatgactgacccagtgaaatctgaacttgttcccaagtaattagattttctaaggagaaaaaaggcacaggaggtgcacatttcaatttggctcaaaaataatgaaaattaatttaaaaagttggcaacaattactaaaacataaaatacaatttccttttacagagctcaactacatagaatatcaacaatagcaagaacaataaaataaacaaaacaccctaactgtggttcaccatgaacaaggactatagagaactattagacatttctacagactgaatcccagggactaaatccacaaagtaggatctaataatcaattccaattaaacatctgcttgatcaattttctttctaaagctcatcctatgttcaagctcactttctttctgtggaattgaaatcatttaaaggctctagttttcagttgattgcagaagtattacagtaattctacacaccaaagaatgccaaaagatagaaagtcaactatctgtaaaagcccaactcagatttcaccttgacacatgtaaaccatggaatcatgtatttcaaaaaaacaggtagttgtggtcaagtttacatcctattattatatctttaaaagatagcaataatatttattatattgtaaacataggtctgtatcccaaaagcataaatctaggaaaagagacacccaatgtaatgatgcacctgacatcccctcacaggctcttgtgagaactgtagtgtaacttacttaactgcaattgctgagagcagaattctggagtatgatccaggggaacgtttccccacaccacccgagctactttaccagcgatcatgattgtgatggaataggcttattaagttacacatttaaaaagtcattagaacatctcgttcttgcacactagtgtagaaaggtcttccaaagataaaagagtgtaggcctgggtttaattttctcagccagagccattattatgttaagatcgccctctgctgttaaatcaaggtctatcttcaggttccgaagagatttaaagggccttttttcccttctgcgtatcgtcttctatatattttattagtgtcaaggctttt

SEQ ID NO: 3266 - DNA, 447 bp, Homo sapiens
gccctgctggtgctgggaatagggcgcaagatgtcggcggatgcagctccgaggaggtaggcagtgtttagccggcgtttagtccggcccgtgccaacagtgggtcctctctgccccgtagttcgaggagaccacgcgctgcccctctggcacgatcgtggatgaaccccctggcaactgaaatgggaaaggcagcgcccccgactctggggactggaccgaagtccacggtagtgacaggctgccagaccctgaggagaggacgagaagacccgaggcctctgctacgagcactggcatccgatggaaaattcagacggatttgggacagtatgcagagttctccaagcgacagattaacagaggctcttgaagaataactgcgtaatcacgtgttctgctcaaaagaaggcctgaatgcccagtgccttatttggctttcagggg

SEQ ID NO: 3267 - DNA, 377 bp, Homo sapiens
  SIMILAR (189)..(377): 921254mologous to Homo sapiens inter-alpha-trypsin inhibitor C-terminal,accession number X16260,Smith-Waterman Score=292.
ccagctaccagcctcctcaaaacccctactactatgtggacggggatccccacttcatcatccaaattccggagaaagacgatgccctctgcttcaacatcgatgaagccccaggcacagtgctgcgccttattcaggatgcagtcacaggtgaggcttgtgggctagggccggggccagggggctcttcctgggagggcttgggtcccccgagggcctcggggagaactatggagcaattcaccatccacctcaccgtcaatccccagagcaaggtcacgtttcagctgacttatgaggaagtgctgaagagaaaccatatgcagtatgaaattgtcatcaaagtcaagcccaagcagctggtgcatcattttgag

SEQ ID NO: 3268 - DNA, 701 bp, Homo sapiens
tttttggccactgtgagcaaggacagcttgagtatttctaatgtgaaaatctgaaatataaaatgcttcaaaatcccaaactttctgagcaccgccatgaacgcacaagtggaaaattccacacccgacttcatgtgacaggtcattgtcaacatgctggcacacaacagttgattcaacatccctaagggaaaaataaaatttccttcaggctatgtgcattaagtttcatttatgaaacataaatgaattttgtgtttagacttgggtcccatccccaagatatctcattatatatatgcagacattccaaaacctgaaaaatttcttaaatctcaaacattctggtcttaagcattttggataagggataatctataattgatttaatgtggtactattttctgcaaatgttgttaaatacaaggactgggacaatccaacaagccacataaagcagaattgaacttaacctcaagaatgatgacaaagactattatgagaataaacacttcttatcttatgtgtaaatatacatgcaataatccatgttagtgatgtttgggtgttgctgacatgctcaccaggaagattaaagtgggtgaactctgacttcctcttgctctgctttttctttctttttaatagtacctattaccttctaatatactatactatttatttgtattgtttaatgttta

SEQ ID NO: 3269 - DNA, 698 bp, Homo sapiens
agggagccgttttcagaagcaggtgagcccagtgaaacaatgcagtggagagaggaaccgtgctgtgcgtgcttccctcttccctgcagtccctgaagattgaaggcagagaagatagcctaccctgatgctccactacataccatggggtagaggtcgacttggagggtggggccagtgtggacaatctcattctgcccgctgtgctgggacaggcacatgtctgcccatgggcacactcatgcacatgcatgaggcctctcggcaggtctgggggggctgcatccttccacttccattcccctacttccttccccctcagctcccatcctagcttggccccagtaacatctgggttgccaaggatgggtggctgagagacctcctggaccctccgtagtatgaatggaccctgggtgtgaattggccttctcctggcatccttgcatactggacagtttcagctccatctctgggcttctcagggcccataacagatgctgccctaccctgtccctataacttgggtggttcctctccccaccccagaagaggctccagattccaaaaaacaggtctctccctaacagagggaaacctcccctttcctcccccaatccctcccactccgtatctccctcatttcctccacatcagggtctggcccgctaatgtggaacaaatgagatgtcggaagg

SEQ ID NO: 3270 - DNA, 1041 bp, Homo sapiens
  SIMILAR (779)..(901): 651254mologous to Homo sapiens B-cell growth factor,accession number M15530,Smith-Waterman Score=131.
cacatacttaataatatggaaaggaagagctgtggggaaattaaccctacttacaggtgagatacagttcacatttatagcaacatagataatttggatacatatatcacagataagctagacagttatgtcatctgacatacacttatttgaatagagtgtgatttattggataggttcgattttaaccacctataaatgttttcttttttctggtataaagtaacataattattgcaatacatttttcctgtagtaaatataagttaatactttttttccagttgctcaaaagatttataaatatgtaggttttttactaagaagataattacagaaatcgtgtcttactgtcaatgctatttctaggtgtatgcaaagcatgtatatttctctatctaactgaacaatgctcggcactggaagacttggtgataccctgaaggaataataacatcaatgcaatcaccaccacgaaccttttcccttttctctgctctcactatatgcaggcgctgttctaagtacttttacatggatttctcaacatccctgtcgggtattattattacccccctttttaccccatgggaaaactggaggcatatgggaggataaggcagtctctccaggatcacaaagctagaaattacacccacggtaattggtaaacactatgccacggtattctcgggcaaaatgaacaccttggctacgcaagaattagttttttttccctatataaagtgtttagaaagtatctgctcaaggctgaagcttatggccaggtgtggcggctcatatctatcattttagtattttgggaggccaaggtgggaggatcacatgaggccaggagttcaagaccagtctgggcaacatagtgagaccacatctctacaaatcgggaggctgagatggcttggtttctaagtagctaccctgcctccacacaggagccataatgaaccttttaaaacagaattcagataatatcactccttggctcaaaaccctacaatagtctctcatttcactttg

SEQ ID NO: 3271 - DNA, 528 bp, Homo sapiens
  SIMILAR (226)..(14): 1001254mologous to Homo sapiens Human FLEXHT-52 protein sequence SEQ ID NO:52,accession number AAB36630,Smith-Waterman Score=413.
ttatcgaagggcactgggggtgggtctgctgctgccctggggagtagccgaattgctgctgggaccccgcgggggacctggagtaggagccagggtagccgccaggggacggagacccgaaccggccccccgggaagctgccgccgtgtcgcggagagtgactgctcccgtacggcctagaccggggcccgtacggcggcgtgtggtgcggactcccgtacccgtcggaactgtatcaaccggccctccgcagagaactgctagtcctttaccaaaacagtcctccgaccgcagccaccggagttcgccgcttgcaccgggaccgatgccatctgagacgcacgcgatgctggcgacgctggcgagggtggcagctctgcgcagaacctgcctcttctccggccggggcggcgggagggggctgtggactggccgcccgcagtcaggtaccctccgagattcggtctgggtggctaaagggatccctgccccagcttgcctcctcgggcgcccttgtgatctgcccat

SEQ ID NO: 3272 - DNA, 1180 bp, Homo sapiens
  SIMILAR (277)..(600): 671254mologous to Homo sapiens Human FLEXHT-52 protein sequence SEQ ID NO:52,accession number AAB36630,Smith-Waterman Score=358.
actggaaaggttgatgctgggcttgggcgtccgccctttcttgtcttcttttcttcctcttttcacttaaatgcgctgagtctctcgccaagtcagtgatttaggtaatcccgccgcccctggcggaacctttgtgacgccggaactgatgtgccgtaaggtggctgcggtcggaggactgttttggtaaaggactatcagttctttgcggagggccggctgatacagttccggtgggagaacgcggctgcgaggttttcggctttggctcctgatatgcagcgacagaattttcggcccccaactcctccttaccctggtccgggtggaggaggttggggtaccggaagcaacttccggggaaccccgggcgggggcggaccacggactgccctcccttcgagacgggtacggggagtccgcaccacacgccgccgtacgggcccccggtcttaggcccgtaacgggagcaagtcactctccgcgaaacggcggcagctttcccggggtgcacggttcgggtctccgtcccctggcggctaccctggctcctactccaggtcccccgcggggtcccagcagcaattcgggctactccccagggcagcagcagacccacccccaagggttctccaaggacatctacaccatttggatcagggcgtgttagagaaaaaagaatgtctaatgagttggaaaattaatttcaaagccttcaaatgcttgaagatcccttggggctggcctagaacccaggggatctgtagtggatataagcccaacaatacagcaatactcaaacattcacaggcaaaaaaggaagatactttttgttaacattttttctgaaattcaactggaagcttcatgtgtcaggaacattccttggacaaaaactttaagttgtgttgatataaatttaccccaaagatgatgactttgattggataattagtaaggtctttttgttatttttcatcgtatcaggtattgttgatattagagaaaaaagtaggataacttgcaacatttagctctggaagtacctgccacatgttagagatttaccgttgccatgtgatttaacattcctggttacataatggacatttgtcttttaaatgttttttcaatgttttaaaattaaaacattttgtcttctaaaaaaaaaaaaaaaaaa

SEQ ID NO: 3273 - DNA, 392 bp, Homo sapiens
aatacagcctatggtagtaatgctgagtttgtttttgatactttccgagcaaagattttcagtggcaaagtctgtagcatgtttcttatgttcagggagttgcatatatttttgttccaggtcgtcaacttgagctataaaggagttttcagtaaagctatcatagtcaccaaacatgtccacttcactgtcattaggctcaaccggcagtacgcccgcggttttccgcctcctgttctcagccaccatttactcctcctctttcccctcatctccgggctcgagctcggccgcggagggagcgccaaaaatacaccccaagcttggacggtttcttttggggagagacacccgccggcggatgcgggaaccacattcatccatggcaagga

SEQ ID NO: 3274 - DNA, 621 bp, Homo sapiens
  SIMILAR (477)..(521): 1001254mologous to Homo sapiens inter-alpha-trypsin inhibitor heavy chain H3,accession number X67055,Smith-Waterman Score=80.
atgaccaagaggtgcctcgaccacagaggagaatggctacctggtgctggtggtggaggacatactgaaggcacacgctgtctccaccatgctcctgtcacatgggtcgggatcgaggtagacatcttcgagcctcagggaatcagcatgctggatgctgaggcctctttcatcaccaacgacctcctgggaagcgccctcaccaagtccttctcagggaaaaagccagtctggttaagaggaaggcacacccctaaaggcaatctggactcagaagttctcgctggtctctctccctgccccatccctttggcaggcctcacagttaatgggcagatcactggcgacaagagaggcagccctgactccaagaccagaaagacttactttggaaaactgggcatcgccaatgctcagatggacttccaggtggaggtgacaacggagaagatcaccctgggaacagggccgtgccgagcactttcagctggctggacacagtcacagtcacgcaggatgggtaagctcccctacaaggtctccaaggtggactacagggggagggtgaccatagtggcccccaaccaaaccctggggccctatcagagccagaattggtag

SEQ ID NO: 3275 - DNA, 794 bp, Homo sapiens
gtaggagctgcagttatctggaagcctagatttgtgtctcagtcatgccacttaactgctgcgtgcacaacttttatgtctcggggtttacatttcatatttatatagaaatgtaaataacaaggcaatcaatacctcctaagtgccgattaacagtggtaacgaagacgagagaagtaaacgaaggcgataaaactggtcaactctttgcatctgggaaggatgccaaaagtttgcagtttcaagttccaagtcctccgtacctggtctcccacccctctgtcagtgggcatgtgacgtaggaggtccgggtttagtatcaccacctccaaggacgagacattccggggaatctgagagtagaagggtctgtacctcacccggcagtacgcccgcggttttccgcctcctgttctcagccaccatttcctcctcctctttcccctcatctccgggctcgagctcggccgcggtgggagcgccaaaaattcaccccaagcttggacggttccttttggggagagacacccgccggcggatgcgggagccacattcatccatggcaaggacccagggccctattcagacgtcgttctcagtgacccagacgataagcccatatggaagggagagtgggacgccggagcccgcttctacatccaccttgggaaaagaccccaagctagctctcagggctcacggaccggaagcaagcataaaattatcccctgtacaatcataaaacgcgcgtccgcggacgcgtgggtcgaaactgcagttccggtgcggtacct

SEQ ID NO: 3276 - DNA, 944 bp, Homo sapiens
gaaacattttcaagtcattttgagaggccttacctccagttcaaagctgagcccccactaacctccagaggattcgtggaaaagagtactgccttacacagaatcagtgctgaacatccagagagcatgatgagtgaagtgcatgagagagctttacagcagcaccctcaggctcagggtggtttgctagaaacacgggagaaaatgcatgctgataataacttcactaaaacccaagataggctgcatgcttcctctgatgcattctcgggcctcaggtttcaatcaggcaccagcaggggctatcagaggcaaatggttcctcgagaagagattaaaagcacatcagcaaagagcagcgtggtcagcctagctgacacggcacctaatttctccaggctcctgtctaatgtaactgtcatggaaggttctccagtgactttggaagttgaagtaacaggatttccagagcctacactgacatggtgggtagcctataatgacaagccataaatggaaacaaattcaatcacagagaaaaatcattctgtgagcactaactgaaaggtttagggctagctgattaatattctatgacactgcaactctgcatgattcaatctcacatcagacccctctcattttagtagcagcatagttaatacctttaagaaaaataaaaggtaaccatataaagtactaataatttaacaaatttccaaagcactgtaggttggttgtgcttgttttcttctgtgtttaacattccacatttctaaagattgtgggttgaaattattttttattgtctatttccatataagcatggcatctgcttgctttaactacctttatgcaattgaaaatataagaatttgtttttatttccctttactctcatttacctctttcatctttttcctctttccaacagagtcacacgt

SEQ ID NO: 3277 - DNA, 644 bp, Homo sapiens
  SIMILAR (642)..(514): 591254mologous to Homo sapiens Human secreted protein, SEQ ID NO: 6619,accession number AAG02538,Smith-Waterman Score=133.
  misc_feature (1)...(644): n = a,t,c or g
ctgtgcagtccagaagccagaacttcctctaggaaactgataagtagtttgaggttacttgaaggaaaaaacaaaagcatctccaaaaatagaatgtcttgctctggacatctaaccagatgaaaatatatcatgaatagtaggcaggaggtactggtctgatatttgggtatagaatggaagcatcagttgagcactacaacatccatactgcaaggacagtccttctgtgctcttccccagggnctccattttttttttaagaaattaaatttgtaagatctattaaagactaacatttccaagtttgaagtttcctatttaggatccccagaatttttaaagggcaaggcccactatattaactcagtaccatgttacatcagcacctgttatctgtactcttgaaactgtctcagagcttgtatgttgtctatagtttctttcttatccaatctactctccagagtggcaccagagttacttttctaaaatgcagattacaggcaggcgcggtggctcaggcctgtaatgctagcactttagaaggctgaggcgggtggattgctcgagcccaggagtttgagaccaacctgggcaacagagcaagaccctgtctctaataaaaaaaaaaattaaaaaat

SEQ ID NO: 3278 - DNA, 479 bp, Homo sapiens
  SIMILAR (2)..(46): 1001254mologous to Mus musculus putative,accession number AK016685,Smith-Waterman Score=80.
  misc_feature (1)...(479): n = a,t,c or g
cgagactgttttccctgtagcagataacagaacctacgatgaaatggttgggtgggtgacgtagacgactactcgctgcacgggggctgcctggtcacgcgcggcaccaagtggattgccaacaactggattaatgtggaccccagccgagcgcggcaagcgctgttccaacaggagatggcccgccttgcccgagaagggggcaccgactcacagcccgagtgggctctggaccgggcctaccncgatgcgcgcgtggaactctgagggaagagttagccccggttcccagccgcgggtcgccagttgcccaagatcaggggtccggctgtccttctgtcctgctgcagactaaaggtctggccaatgtcttgccccaccccgccagccgcgatacggcgcagttcctatattcatgttatttattgtgtactgactccatctgccccgtcaaataaaaaaccacaaggttcgaaaaa

SEQ ID NO: 3279 - DNA, 1763 bp, Homo sapiens
  SIMILAR (655)..(1491): 721254mologous to Mus musculus putative,accession number AK016685,Smith-Waterman Score=956.
ggtgccatggcggcagcggcggtgacaggtcaccggtctgagaccgcggaggacgaggaggcctcgaggccgcagtgggcgccgccagaccactgccaggctcagttttgctgccgtgctgggcgacggcgaggacgcaccggtgcgtccgctgtgcaagccccgcggcatctgctagcgcgcctacttcctggggctgatggtgttcgtgcacctgtacctgggtaacgtgctggcgctgctggtcttcgtgcactacagcagcggcgacgaatgcagcgagcccgggccccaacaccgtgcccagggccccgggcccgagcccaccttaagtcccctcacccggctggagggcatcaaggtggggcacgagcgtaaggtccagctggtcaccgacagggatcacttcatccgaaccctcagcctcaagccgctgctcttcgaaatccccggcttcctgactgatgaagagagtcggctcatcatccatctggcgcagatgaaggggttacagcgcagccagatcctgcctactgaagagtatgaagaggcaatgagcactatgcaggtcagccagctggacctcttccggctgctggaccagaaccgtgatgggcaccttcagctccgtgaggttctggcccacactcgcctgggaaatggatggtggatgactccagagagcattcacgagatgtacgctccggatcaaggctgaccctgatggtgacggagtgcttgagtcttcaggagttctccaacatggacctttgggacttccacaagtacatgaggagccacaaggcagagtccagtgagctggtgcggaacagccaccatacctgtctctaccagggtgagggtgcccaccacatcatgcgtgccatccgccaaagggtgctgcgcctcactcgcctgtcgcctgagatcgtggagctcatcgagccgctgcaggttgttcgatatggtgaggggggccactaccatgcccacgtggacagtgggcctgtgtacccatagaccatctgctcccataccaagctggtagccaacgagtctgtacccttcgagacctcctgccgctacatgacagtgctgttttatttgaacaacgtcactggtgggggcgagactgttttccctgtagcagataacataacctacgatgaaatgagtctgattcaggatgacgtggacctccgggacacacggaggcactgtgacaagggaaacctgcgtgtcaagccccaacagggcaccagcagtcttctggtaccaactacctgcctgatgggcaaggttgggtgggtgacgtagacgacttactcgctgcacgggggctgcctgggtcacggcgcggcaccaagtgggattgcccaaacaactgggtttattgtggaaccccccagccggaagcgcggcaagcggctgttccaacaagagatgggccgccctgggccaagaagggggggccccaactcacaacccgatgtgggctgtggaccgggcctaccgcgatgcgcgcgttggaactctgagggaagagttagccccggttcccagccgcgggtcgccagttgcccaagatcaggggtccggctgtccttctgtcctgctgcagactaaaggtctgggccaatgtcttgccccacacccgccagccgcgatacggggcagttcctatattcatgttatttattgtgtactgactccatctgcccccgtcaaataaaaaaccccaaggttcgaaaaaaaaaaaaaaa

SEQ ID NO: 3280 - DNA, 708 bp, Homo sapiens
  SIMILAR (667)..(335): 441254mologous to Homo sapiens ZNF37A,accession number X69115,Smith-Waterman Score=216.
ttaaggggagtaaggaatatgatcaacaggcagcaggtggttagatgagaggtctagcatctcattgtaaccaccctcagccctcttggtgccagcagacacatagccacaactcctctcatcccacaatgcaggtctaactcctccactattacattcatagggtttctcccctgtgtatgttctatgatgtgcaatgagttttgacttcacacagaatgattttccacattcattacatccatagggtttctgtcttatatgagttctctggtgaacaattagggccaacttctgatggaaggttttcccacattcattacatccaaaaggtttctcccctgtgtgtcttctcagatgttttaaacgaggttttcccacattcatgacattcatgatttctccccacgtgtgttctctgattttgagtaagggatgacttttcactgaaggatttctccattcatgacatctgtaaggtctctcccctgtgtgaattctttgatttctaatgaggtctgaattcttatagaaggtcttcccacatccgtgacattcatagggttttccctgtgtgtgttctctgatgtcttgtgtgggctgacttctgggtgaaggtttttccacattcatgacattcataaggtttttcccctggatgtgttctccagatgactctggcttcgaaatttttcctctaatatccat

SEQ ID NO: 3281 - DNA, 2322 bp, Homo sapiens
  SIMILAR (1)..(858): 781254mologous to Homo sapiens putative p150,accession number U93572,Smith-Waterman Score=1064.
atgattatctcaatagatgcagaaaaggcctttgacgaaattcaacaatgcttcatgctaaaaactctcaataaattaggtattgatggaacatatctcaaaataataagagctatctatgacaaacccacagccaatatcatactgaatgggcaaaaactggaagcattccctttgaaaatcagcacaagacaaggatgccctctctcaccactcctattcaacatagtgttggaagttctggccagggcaattaggcaggagaaggaaataaagtgtattcaattaggaaaagaggaagtcaaattgtccctgtttgcagatgacatgattgtatatccagaaaacccgatcgtcgcagcccaaaatcttaagctgataagcaacttcagcaaagtctcaggatacaaaatcaatgtacaaaaatcacaagcattcttatacatcaacaacagacaaacagagagccaaatcatgagtgaactcccattcacaattgcttcaaagagaacaaaatacctaggaatccaacttacaagggatgtgaaggacctcttcaaggagaactacaaaccactgctcagtgaaataaaacaggatacaaacaaatggaagaacattccatgctcatgggtaggaagaatcaatatcatgaaaatggccatactgcccaagggtattgcatcattcacagggtattgcattcctaaaccagaagtgatcctcaaattggagacaggcaaggagccatggatattagaggaaaaatttcgaagccagagtcatctggaggaaccttctgaatataataacaatgggaacagcttctggctgaatgaagacctcatttggcatcagaagattaaaaattgggagcaaccttttgaatacaatgaatgtgggaaagctttccctgagaattcactcttccttgtacataagagagcttacacaggacagaaaacatgcaaatatactgaacatgggaaaacctgttatatgtcattttttattactcatcagcaaacacatccaagagagaaccactatgaatgtaatgaatgtggagaaagtatctttgaggaatccattctctttgaacatcagaatgtttacccattcagccagaatttaaatcccactctaattcagagaacccactcaattagcaatattattgaatataatgaatgtggaacctttttcagtgaaaaattagcccttcatttacaacagagaacacatccaggggaaaaaccttatgaatgtcatgaatgtggaaaaaccttcacccagaatttcacagaacatctgagaagacacacaggggagaaaccttttggatgtaatgaatgtgggaaaaccttccatcagaagttggccctaattgttcaccagagaactcatataagacagaaaccctatggatgtaatgaatgtggaaaatcattctgtgtgaagtcaaaactcattgcacatcatagaacatacacaggggagaaaccctatgaatgtaatagtggaggagttagacctgcattgtgggatgagaggagttgtggctatgtgtctgctggcaccaagagggctgagggtgaggtgtggaagggacagggggaggagatgggcagcattgttgagagattggtaacactgagcaaataaatatgttgagaatgatgacagcaagatttctccattagagaaggtatttataaaaataggaatgaggagagctagaaaacctggagtgtggcattagaatagaactcatatcttttaaatatataggaacaaataaataaattgttgtgtgtgcacatatgcatatattttgtgttcattctactgagaggacctaaacacaatgacacctcagtaacagtaagcacaccaactgccaagttattagttcctaaatactatccacaaaaaaggggaacagggatgattcctagtcagagattgggagaaatacaagatgagcctgaatcatctcatgtacctgacagtaagaaaatactctggctggtctcagtggctcatgtctgtaattctagcatgttagaaggtcaaagtggggtgggttgcttgagctcaggagtttgagaccagcctgggcaacatggcacaattgtctctacaaaaaatacaaagattagccaggcatggtggcatgcacctgtagtccgaggtactcaggaggcagagacgtgggaggatcgcttgagcctgggagattgaggctgcactgagctgtgatcgtgccactgtactctagcctggaagacagagtgagacccgatctcaggaaaaaaaaaa

SEQ ID NO: 3282 - DNA, 1159 bp, Homo sapiens
  SIMILAR (738)..(619): 771254mologous to Homo sapiens Human secreted protein from gene 1 clone HCWHZ93,accession number AAW83931,Smith-Waterman Score =157.
ttttcctgagacagggtctcactctgtcttccaggctggagtgcagtggcatgatcacagctcgatgcagtctcaatctcccaggctcaagtgatcctcccacctctctgcctcctgagtatctcggatgacaggtgcatgccaccacgcctggctaatttttatattttttgtagagacagttttgccatgttgcctgggctggtctcaaactcctgggctcaagcaacacacccacctcgacctcctaacatgctagaattacaaacatgagccactgagcccagccagagtattttctttctgttaggtacatgaaatgattcaggctcatcttctttttctcccaatctccgactaggaatcatccctggtccccttttttgtggatagtatttaggaaataataacttggcagttggtgtgtttactgttactgagctgtgactgcatttatgtcctctcggtagaatgaatcacaaaatatatgtatatgggcacacccaacaatttctctattgttcctatgtatttaaaagatatgagttctattctaatcccacactccagggttttctatgctctcctcattcctatttctacaaataccttctcctaacagggagaaaccttgccatcatcattctcaacatatttgctcagtggtaccaatctctttaacaatgctgccccatctcctccccctgtcccgttccacacctcaccctcagccctcttgggtgccagcagacacatagccacaactcctctcatcccacaatgcaggtctaactcctccactctgggaagggaaggcaaaagagacacataaaaactcaaagaggggaatcaaaagaaagaggaagggaaggccacattgattttttaaaaaataataaatcatcttttgattgccctaataaacatctcttggtgatgatacagtttatggatatgactagactttttttttcaattttaggattttgcatctaaatctatgagactttggtctatagctttatgttttttgtttgtttgtttgttttattggttttggtatcaaggttgcactggcctgaaaaactgaattggaaaagttccaacttttttcttctagaagagtttataaaagcctggtatgctttatttattaaat

SEQ ID NO: 3283 - DNA, 416 bp, Homo sapiens
  misc_feature (1)...(416): n = a,t,c or g
cagggctgagatcccgacagctggcgaggtctgggatggggcggggcctatgggagcggagctgaagccctgggcccggcagaggaaggtcgagatggaccatgttgggccccttctctccccgcccccaggccgcagttcgggggccacgccccggcgtgctcgggtcaccgcgggaagcccttgaaccccctggcgcccggcacccacgtgcggtaaccgcggctcctcgagagctccagggatgcggatctacagtaagggctgtggccagatgaatgaatgcacattntttagtgggcagaaagatgttagaattcatgaattagaatatgcacaaaggagggcgagacgggaggccgtggaagccgcattcttcccctttgcttgtgcgcncacccccgaatgggcgcgtg

SEQ ID NO: 3284 - DNA, 1566 bp, Homo sapiens
  SIMILAR (98)..(214): 1001254mologous to Homo sapiens Human secreted protein encoded by gene 37,accession number AAB44866,Smith-Waterman Score= 209.
gctcttttgggttggtttgttaatttatacaaagagattaccaccaccaccccctccttcagacggcggagttatattctgggttttgtaaaactttatgtatctgagcatttccatttttttttttgggttttgtattatttcttgtaaatgcattgtgaaaaattttattttcggcgttgcaatgcggggaggagaagtcagattatgtacatagttttcctaaaaagcctttcttcctaaaaacgaaaaaagaccccccacccaaaatgtttcgagtcaacaaatttaagagacagagcccattttctccataaatttgtaacatgctatttttatgtgcatgttttatgagttcaaaatgcaatgagggaaatctgacaggggaaattatctgtatgaactaaaagtaaggggaaccccggggaatggggaggacagggttttttcaagggaaccttttttcaatggaaaggggaagggaagtttaaaacctataggggttattttgtagagctgagtgttaatacgggccgagaaataaaagtatcttctgctccggctgtttcactgcggacggctggggctgctgcgcgttaccttgctgcaagcggggcgccttccacctggctgggggtctgcgccacagtttggtccagaggagggaggaggaagggaagaccccagtggtgggaccctggaccaggccatggatgaaggacaaagaccagggcaggtcacgggtttcccaattccccagcaattaagatttcgagcagaattttatcctaaatgtgtttcaaggaaaaaacaatcgctgaaccaaaaacgtactgcagccgagccccctccgtccatcctctgcccctccccctggcttctttctcttgggaaaacgggcaaaataattgtgctggattctcacacacacagaaatatcgaccatcaccctcccccgcgtgaactgggatgcaagttgctaaccgatgtgaacgcaaaatgccttgttcattattcctgacgagatcttgaggttgtttgatgctttaaatttttttaattatattattttctaggtgtttattggtacattgcagttttttttttgaaatttaaaaatttctgtaaaactttgtcttcaagtaatctgacagcattaaatattgcatttaaaaattatactgtagcaaatacatttaaaaattaatcacaacgttaagatgaaattatatttttggaaaaaaaaaaacacttgaagcccagatggaaatacgtttatttcagcagccttaggtttcccctcgctttctcaacacccttccttgtcctggagtatggactgtccgtccaaaagtgagcctatgctataagtttaatgagaaccgaattcagcctgcattcgagaatagctttaagtataatgctgatctgacaattgacgtgtaatttgggaagtcattttgataattttgcttaaaccactcattcgttaaagtgattacaaaaaagttcaagaatgatgtccactgctttctaacaagataataaaccccccccctcttttct

SEQ ID NO: 3285 - DNA, 2852 bp, Homo sapiens
  SIMILAR (21)..(2720): 771254mologous to Oryctolagus cuniculus inter-alpha-trypsin inhibitor heavy chain3,accession number AB050593,Smith-Waterman Score=3535.
tattcagcgatggactttgcatggtggccctgtctcatcttggctctgctctccagcttggcagcctctgcttcccgagaagcccctttcggctgcttgggaaacggagcctcccggaaggggtggccaatggcatcgaggtctacagtaccaaaatcaactccaaggtgacctcccgttttgctcacaatgttgtcaccatgagagccgtcaaccgtgcagacacggccaaggaggtttcctttgatgtggagctgcccaagacggccttcatcaccaacttcaccttgaccatcgacggtgttacctaccctgggaatgtcaaggagaaggaagttgccaagaagcagtatgaaaaggctgtgtcccagggcaagacggccggcttggtcaaggcctctgggaggaagttggagaagttcacagtctcggtcaacgtggctgcaggcagcaaagtcaccttcgagctaacctacgaggagctgctgaagaggcacaagggcaagtacgagatgtacctcaaggtccagcctaagcaactggtcaaacactttgagatcgaggtagacatcttcgagcctcagggaatcagcatgctggatgctgaggcctctttcatcaccaacgacctcctgggaagcgccctcaccaagtccttctcagggaaaaagggccatgtgtccttcaagcccagcttagaccaacagcgttcatgcccaacctgtacagattccctcctcaatggagatttcactatcacctatgacgtgaacagagaatctcctggcaacgtgcagatagtcaatggctacttcgtgcacttctttgcacctcaaggccttccagtggtgcctaagaacgtggcctttgtgattgacatcagcggctccatggctggtcggaaattagagcagacaaaggaggcccttctcagaatcctggaagatatgaaagaggaagactatctgaatttcatcctgttcagtggagatgtgtccacatggaaagagcacttagtccaggccacgcccgagaacctccaggaggccaggacgtttgtgaagagcatggaggataaaggaatgaccaacatcaatgacgggctgctgaggggcatcagtatgctgaacaaggcccgagaggagcacagaatcccagagaggagcacctccattgtcatcatgctgactgatggggatgccaatgttggtgagagcagacccgaaaaaatccaagagaatgtgcggaatgccatcgggggcaagttccccttgtataacctgggctttggcaacaatctgaattataacttcctggagaacatggccctggagaaccatgggtttgcccggcgcatttatgaggactctgatgccgatttgcagttgcagggcttctatgaggaggtggccaacccactgctgacgggtgtggagatggagtaccccgagaacgctatcctggacctcacccagaacacttaccagcacttctacgatggctctgagatcgtggtggccgggcgcctggtggacgaggacatgaacagctttaaggcagatgtgaagggccatggggccaccaacgacctgaccttcacagaggaggtggacatgaaggagatggagaaggccctgcaggagcgggactacatcttcgggaattacattgagcggctctgggcctacctcaccattgagcagctgctggagaagcgcaagaacgcccatggcgaggagaaggagaacctcacggcccgggccctggacctgtccctcaagtatcactttgtgactccactgacctcaatggtggtgaccaagcctgaggacaacgaggatgagagggccattgccgacaagcctggggaagatgcagaagccacaccggtgagccccgccatgtcctacctgaccagctaccagcctcctcaaaacccctactactatgtggacggggatccccactttcaatcatccaaattccggagaaagacgatgccctctgcttcaacatcgatgaagccccaggcacagtgctgcgccttattcaggatgcagtcacaggcctcacagttaatgggcagatcactggccgacaagagaggcagccctgactccaagaccagaaagacttactttgggaaaactggggcatcgccaatggctcagatgggatttccagggtgggaggtgacaacggagaagatcaccctgttggaacaggcccgttgccgagcatttttcagctggctggacacagtcacagtcacggcaggatggccactttctggcttcctctcgtaggctgtccatgatgatcaacaggaagaacatggtggtctcctttggagatggggttaccttcgtggtcgtcctacaccagggtgttggaagaaacatcctgttcccaccgttgactttctaggcttctacgtggtggacagtcaccggatgtcagcacagacgcatgggctgctggggcaattcttccaaccctttgactttaaagtgtctgacatccggccaggctctgaccccacaaagccagatgccacattggtggtgaagaaccatcagctgattgtcaccaggggctcccagaaagactacagaaaggatgccagcatcggcacgaaggttgtctgctggttcgtccacaacaacggagaagggctgattgatggtgtccacactgactacattgtccccaacctgttttgagtagacacaccagctcctgttgggatggatggcccggattttatggcatctggaacatgggcacagagaggggcctgtgggaggggctgggaaaataaagtccaaggtcgagccagaaaaaaaaaaaaa

SEQ ID NO: 3286 - DNA, 1688 bp, Homo sapiens
  SIMILAR (1687)..(1550): 731254mologous to Homo sapiens PRO0113,accession number AF090894,Smith-Waterman Score=177.
  misc_feature (1)...(1688): n = a,t,c or g
tttttttttttttttacaagatgttgcatcactttacctttaattggcatggatttatcagaaccaactattaaccatacgaagtcccattcagtccagctgcaggtataggcagtgacaagtatctaattcttagaagaatcacttactcccacaatctgtccagacacattaatctaaggacaagtttataaatagcaaacgtggattttcaacattgcagtgttctccaagaatgtatatacaagtgtggtagtcctgttgatggggatgtttccccgagttctttctattgatgcgttcaatgctccttggacccccgggtagaagaacagttctttcctttcccnacaagagcagattttccttttgtcaatcccacccatttacaatactctggtggaattagggattaccttattaccatttatggaaacgggcaataatttggattgtaataggctcttcagtaccaattccttgtgtcctcgggaaggtctcggcacattcaggagaggctttaaggtaaaatccattttccgtgcaacaacagccaaacgtcaactattgagtttcagtgtgacacaccctctttgtagcttgctgggttaacccttggccttccaagtccctgaatgatgtaatgagggtggggtgtattggcaatcagtacatttcccttatcgcaatttacagtcattgaaaatcatgctgtcattaatcccagtctgacatacccttttcctaaaatggttcacagtgcagtgtttttgtggccctaacaaaatttttccccatatccattaaaaataaacatttttataaaaaatataacactttaaatgtttacgtcgacaaaaccagttagagtaacctacaccacatgcactatacagtagtaagcacaaaattccacagaatgaagcatcacaaagttctgctcagggtggctattccatctaggtgaaatagctgggattttcaattgcctttttcatttgtttactaaagtatgttttgcttaacataaaacacaccctaatgcaaaataaaactcccccaaaagttttgtttcccaattgcttgccgaggtgggaacctgcccaccgagacagaggcctaatcttttcaatcccatcccaccctttctttgctctacctatgagctgtgaattgggaacccaatgaaccttttaagtaaaatggtatccctgcctttaacaaacatgcctgagttatctttaaaaatatttatcaacaaattacttgtcttattttgagttttcatttaaaaaaatacacacaaaacatctacatgttcacattcattagatcagagtagcatcattctcaaacagtgggtttttatatgacaactaaatatttcatgatgactaaattatttcatacaaattttcttaatgtcatctatgtacattacatcctgttcatttataaacatgttttgtgtgatgctattttgaaactttgactgtattgcctataaatattcttccaaccaaaggaatgtctatacaaaaatttataagggctgggcgcagtggctcatgcctgtaatcctagcactttgggaggctgaggtgggtggatttcttgagtccaggagtttgaaaccagccttggcaacatggcaaaaccccgtctctacaaaaaatacaaaaattagc

SEQ ID NO: 3287 - DNA, 1136 bp, Homo sapiens
  misc_feature (1)...(1136): n = a,t,c or g
cgaattccaattatttaagtaagctgttttttcctttcttttctttcttttcttgttttaacttctgggtgaggttaagattttctaatagttattgttgttgccagagaagcatagaattctgcttgtgtcttagggttagagaaagatttgttatattttgaggtaatttggaaggactttcatacatggtgactagaaacctgatctttttaagaataaaatagggtcactatttacattatatataatatatggctattatagctatattaatctactttaattgtttctaagattattttgtgtaagtcagctagcgtgtgtatagtgtcatttcttatgttttgtatattaacgttttacaaacacaatttgtgtgggtttgtagcatttcttatagcttaaagtatgattcaccattctaagttaaaactaatatgtgaagtcagtcattagtctgcataatctctgtctccctctgtgcgtgtctttctataaagcacatgtgtacacacacacacacaaatatactgaaagctagggtaagttctaaactgaatatcaaaaaccaaaatcaagaacaaagaagtgatattttccaaacaaacatgggattctctgccgggtgcagtggctcagcctgtaataccagcctccactttgggagtctgaggtgggagtattgcttgagctcaagagttggagaacagcctgggcaacatggtgagacctggtctttacaaaaatttttttggccggacgcagtggctcacacctggnaatcccagcactttgggaggccgaggcagggtgatcatggaggnccagagtcgggggccatcctggccaacatgggggaaccccggnttnaccnaaaaattccnaaaatttagcctggggantggtgcngtccnncctggaaggccccnaacaaactttgggggggctaaaggcaggggnaancccnttnganccccnggaggcgggagggttccangtaaagggggngntancngccantaaancnccnagcctggggggnaagnnnaaaaccccccccccnaaaaaaannnnanaaaaanccncgggggggggaaattnccnaanccctttgggacccccctnnanggggg

SEQ ID NO: 3288 - DNA, 1891 bp, Homo sapiens
aatttttttttttttttttttttttgcatccgtttcctgaaaaattccggggtacctccccaactaacaggtaaaatacattttaaaagagtaatattccttccttcctgtcctggaactactcaatgagcacaaagaaaacattttctgtcttccttaacagatttaggtattggtgggtgtggggcacagaacatgagcaaacagcttctgtttatcctctcagccacaaattcgcttttaggtatattttcctatacccttttgcaaattacaaaatcaccttcagaggaactatgggtagatgggattccaatatgcatatctggcaacaatcagcttcaaatcaaaccctttctggggtggctaaagatccagctaattggtgtcatcagcaaaggcctctaatatgtgttttgccgtaagtaatggaaacaagtttttaattggggcctgtttaattagttgactgacagtaagttctatatggtatataacactaattctctagtcttctgggcatatctacgaacaaatacaatccaaatattatgagtaactgggttgtgaccactgcatgcattacactgaaagaaacaccaactcgaagcacaaatatattattcttatatttcggctcagctctcagtggggagagcagctacctcggaccacaatgccatttaaaccagattcttttcaaataaaattctcaatctaagtggaaagccccctcagagaatgccttattcccctactaagcaatccaggcttgtataaaacgtctgataaggcctgtagtgcccattgagtatgagtctgctgtttacattctgcacaggccaggaggggaacagaaggtgtgagccacaggtgctcctgggtctgaccagcaagtctaacccatgaagatctcgagctccaaaaccattctagagcccaccattttgattgttacacatgtgtttcagatgtatgttatggcatatctgaaacagcagagttctcagttttttgtgtgtttgtttttgctaagctaaacaagttttgctagagttcgctaaaacaaggtgctcagagtgtaagctcctctgtcaggaaatcggcagcactggtcacgataaaggagaaatcgtcctttgtcaagcacagaattactccttccagcagctctacatgttcccatcctcaagaaattgcaccaagagtgagctacctgcctatccctggaaaagattcagaagctcctaatccagaatccagggaggagatgagcttcctgtgactcttctcttttactgggatgttcccctgacctctcatcacactttactgtgttgtgaaatattgtttctcttagtttgtaacttgtctggtcttttgactaaacaactatctaaagaatatagaccacactcctgcagggaaagggatgtcttactggagttgtatttggaagctttataagcacatctgagacgttctctagaatcaaaatatttgtctatatttgtttttgcagttttcttacatatcagaacctctggcagcccttgcaagtccattatattaaaagccaaaagccataaatatgtacatcatagttcaaagtataagtaccaagaacaaagaaagttgtaaaaaatgctgtgtttgcatttacaggactaaaaactaagtatgcaacagataaattacaaatgtacatctcagcagcataggggtgattctcttatctttctaaaaaacacactgctgtctataatgacaatccaattgtggaaaattaccaacctcagaagacttaaaggtcaccacccccgcccctactacctttccctttagcctctccccagcaaaataaagaaaagggggaaaaaaataaatcctt

SEQ ID NO: 3289 - DNA, 167 bp, Homo sapiens
gaaccgtccgtgttctcagaaagcccagtggctgattccaatgctttcacgttggttcctggcgtgggaactgctctcctttgcagccccatttcccaagctctgttcaagttaaacttatgtaagcttttcgtggcatgcggggcgcgcacccacgtgcccgctgg

SEQ ID NO: 3290 - DNA, 416 bp, Homo sapiens
  misc_feature (1)...(416): n = a,t,c or g
tcttggactgctcctgaggaggccctcttttccagtaggaagttagatgggggttctcagaagtggctgattggaaggggacaagcttcgtttcaggggtctgccgttccatcctggttcagagaaggccgagcgtggctttctctagccttgtcactgtctccctgcctgtcaatcaccacctttcctccagaggagaaaaattatctcccctgcaaagcccggttctacacagatttcacaaattgtgctaagaaccgtccgtgttctcaggaaacttgcttggaaatccttggctggactatagaagctcagaaggacacagnccggtccttcccttggcctggcctgaattccaatggntggttgngctgattccaatggcttcaacgttgggtcctggccgtgggaactgc

SEQ ID NO: 3291 - DNA, 418 bp, Homo sapiens
ttttttttccaaagaattgtaaaatttattgtataagtattgcagcttttcaaaatgtcatcattgccactaatgattactgatacacaacaagcagtttcttcaggcctgtggattggcatccaaatacagagtcttacgcagcggggacgtgggtgcgcgccccgcatgccacggaaagcttacataagtttaacttgaacagagcttgggaaatggggctgcaaaggagagcagttcccacgccaggaaccaacgtgaaagcattggaatcagcacaatagccatggaatcaggcaggcaggggaggacgggctgtgtccttctgagctctatagtacagcaagatttcaagcagtttccagatggttacggaagcttcgtgttgcacataggaaaaaaaatttctctgaaacgt

SEQ ID NO: 3292 - DNA, 396 bp, Homo sapiens
gaaccacgcatgctgcacacgcgttacgtatcggatccagaattcgtgatttcccgggtcgacgatttcgttgctaccatcacaggacctcgctaatcctgactgatagagataagtatccatttactcctgtaatccttaccagccttcattcattttgctttcttcttccgtctttccctagacaatctcctcccgctgtgtacagcaactatgtggggaactatttgttctatttgttaaacaaaagaagtgatggctagaagatagaataggtggtgctataacatctctgtgatctgaattcctcgccaagcttctcgagcttaggctagctctagaccgcacgtgtggggggtcaagctctcgcccgctgtcttagatagtgtctcttac

SEQ ID NO: 3293 - DNA, 414 bp, Homo sapiens
  SIMILAR (136)..(333): 841254mologous to Gallus gallus muscle derived protein,accession number D89999,Smith-Waterman Score=284.
  misc_feature (1)...(414): n = a,t,c or g
ctcactatagggaaagctcggtaccacgcatgctgcagacgcgttacgtatcggatccagaattcgtgatttcccgggtcgacgatttcgtgggcacgtgaggaagagagagttcccgggtcgacgatttcgtatgaacatcgtactgagcaaaagaagttaaagctcctccaaaagaaacaggtacaaattcaaaaagaaaaggaccagttacaaggtgaacacagcagagctatcctcgctcgaagcaaattggagagtctgtgccgggagctgcagagacacaacaagactctgaaggaagaggcgcttcagcgggcacgtgaggaagagagagatctnnnnnnnnnnnnnnnnnnnncgagcctaggctagctctagaccacacgtgtgggggcccgagctcgcgcccgc

SEQ ID NO: 3294 - DNA, 396 bp, Homo sapiens
  SIMILAR (388)..(20): 911254mologous to Mus musculus putative,accession number AK004438,Smith-Waterman Score=570.
tgtgttctagagctaacctaagctcgagaagcttggcgagcaattcggatttctcctgaagagctggttggattttctccatctgcttggttagaaaatctatcttcctcttgaagaagtccttggcatcctcagctgtcttctctacatagtacccagttcccacatcgatgagcacgtgttccacatcatgcagcttcccagggacatacatagaactcgtcagtgggacgagtaattctttcccctcgttgctcttgttcagcacgttcagacagtccttggcttccacatacttggtctgtaccactttgagctgagcaatggacgtggaccagaactccacttcctggtccagctggttcttgagcatttctagctgcggcagaacgaaat

SEQ ID NO: 3295 - DNA, 911 bp, Homo sapiens
  misc_feature (1)...(911): n = a,t,c or g
tttttttccaaagaattgtaaaatttattgtataagtattgcagcttttcagaatgtcatcattgccactaatgattactgatacacaacaagcagtttcttcaggcctgtggattggcatccaaatacagagtcttacgcagcggggacgtgggtgcgcgccccgcatgccacggaaagcttacataagtttaacttgaacagagcttgggaaatggggctgcaaaggagagcagttcccacggaaagcccagtgtttttgcaaagaatgaaaagggaccccatatgtagcaaaaatcagggctgggggagagccgggttcattccctgtcctcattggtcgtccctatgaattgtacgtttcagagaaattttttttcctatgtgcaacacgaagcttccagaaccataaaatatcccgtcgataaggaaagaaaatgtcgttgttgttgtttttctggaaactgcttgaaatcttgctgtactatagagctcagaacaacttttcaaaatgtcatcattgccactaatgattactgatacacaacaagcagtttcttcaggcctgtggattggcatcccaaattacagagtctttacgccaacggggacgtgggtgcgcgncccgcatgccacggaaagcttacataagtttaacttgaacagaacttgggaaatggggctgcaaaggagagcagttccnacgcnaggaaccaacgtgaaagcattggaatcagcacaacagccatggaatcaggcaggcaggggagataattttctcctctggaggaaaggtggtgattgacaggcagggagacagtgacaaggctagagaaagccacgctcggccttctctgaaccaggatggaacggcagacccctgaaacgaagcttgtccccttccaatcagc

SEQ ID NO: 3296 - DNA, 1627 bp, Homo sapiens
  SIMILAR (1246)..(1395): 821254mologous to Homo sapiens lambda HuHITI-13,accession number X14690,Smith-Waterman Score=230.
  misc_feature (1)...(1627): n = a,t,c or g
ttacaaatgtgacctgattacgaacgtatactactacattttgaacctcgacgtcaagaattcgactcgaggacgatccctgcgagttaattgggggtgggttcccttgcccagggagacacaatcagtatgacagtatctatgacctgcaaaaatgagcaatttagcatgtcagtcatttatacttcattagtcccatagcaaccctccaagagggcccttnnnnnnnnnnnnnnnnnnnnnnnnnnnnnnnnnnnnnggggggttaatttgctcagtctgtttgctcacagactcagcagatggccaagctggtacttattccaagtttagactggccccaatgcccatgctgggaattgctggggatcacagtcctctgtgcctctctcaccacaaaactggaacctcacaaactccctgacactaggcagggcctccccagcccctactgacctgcccacacctccatttggactgacacatttggactgtgccatcacattcccctcagaacagccctgataaatgtaccggtgcatgtgagtacatatatgcatgtgcacgcatatgtgtgcagcctgcgagcacgtagtgggtgggtgtttactatcaagaaacaacagacagccgtgagcctcactcaccccatctatggggtgggaagcccacgggtggcgcatatggttgctgtgagcattactcaagagagagaagatgacttaacggcttgcatttcagtcacatcaaaaagccctgcgccaacgataaaatcacatcccatttgccccaacccccataaagggtttccctggacgtgcccgatttccaaagcctaatgtttgtagtcacatctccacctctatctgccagtgttggggcccctctggggcccagcagcgctaagacaggaggaaggcacggggctgggggagaaggaacccctagaccctgctcaccactgcccttcggcttttcagccacaccggtgagccccgccatgtcctatctgagtgagtacatgctggcagctgccactcctcccactgcttagagcctgcccctgccacatgtccctccaccgtggctactcactcagctctccgggatgggcagatggacaatgtgccctgaggagattgcggggtgggagggcaatggcattagcgagcgggaaggggaggggaggggcataagctgaactcctatgggggtcgtcgggcgcgctcccagggccacttgcttagctcagccctctctccctttgtatctgcagccagctaccagcctcctcaaaacccctactactatgtggacggggatccccacttcatcatccaaattccggagaaagacgatgccctctgcttcaacatcgatgaagccccaggcacaggggctgcgccttattcaggatgcagtcacaggccctcacagttaatgggcaaatcactggcgacaagagaggcagccctgactccaagaccagaaagacttactttggaaaactgggcatcgccaatgctcagatggacttccaggtggaggtgacaacggagaagatcaccctgtggaacagggccgtgccgagcactttcagctggctggacacagtcacagtcacgcc

SEQ ID NO: 3297 - DNA, 1060 bp, Homo sapiens
  misc_feature (1)...(1060): n = a,t,c or g
gaaccacgcatgctgtacacgcgttacgtatctgatccagaattcgtgatttcccgggtcgacgatttcgtagtattgcagcttttcagaatgtcatcattgccactaatgattactgatacacaacaagcagtttcttcaggcctgtggattggcatccaaatacagagtcttacgcagcccgggtcgacgatttcgtagtattgcagctttttcaaaagtgtcatcatttgccacttaatgattacctgatacacaacaagcagtttcttcaggccttgtggattggcatcacaaataccagagtcttacccagcggggacgtgggtgcgcgccccgcatgccatggaaaagcttacataagtttaacttgaacagagcttgggaaatggggctgcaaaggagaagcagttcccacgccaggaaccaacgtgaaagcattggaatcagcacaacagccatggaatcaggcaggcaggggaggaccggcttgtgtccttgggaggaccggnctgtgtcctttctgagcttctatagtccagccaaggatttccaagcaagtttcccagaaaaaccaaccaaccaacggacatttttctttccctttatcgacggggatattttatggtttctgggaagcttcggtgttgcacatagggaaaaaaaattctctgaaacggtacaattcatagggacgaccaatgaggacagggaatgaacccggctctcccccagccctgatttttgctacatatggggtcccttttcattctttgcaaaaacactgggctttctgagaacacggacggttcttagcacaatttgtgaaatctgtgtagaaccgggctttgcaggggagataattttcctcctctggaggaaaggtggtgattgacaggcagggagacagtgacacgaaatcgtcgacccgggaaatctgtattcgtcgacaggcttcacgagcttaggctagctctagacacgcaggggtggggggccaagctctcgcccgctgtcttagatagcgtcacctaaatggccgcacgattcactggccgtc

SEQ ID NO: 3298 - DNA, 873 bp, Homo sapiens
  misc_feature (1)...(873): n = a,t,c or g
caagtttaacatatttttatttctccagtaaaagtaacttcacaacctactaaaaataaaaatttaactgcattcagtttctgttcatttttctattaaagaaagcacaagataaaggatagctgtgttcaagtaaatgtgtaattatgacacagacagaatcaagtacgtacataaaatgttaaaacatgaaaatgtatagttcttttaccatttcctttctgaactcataaaatataatcagaaaaattaaaagaaacatgttttattattgtaaacttatattttatttaattaataatgttttggtgtgttagtaatttctgtaaagtagcactccttaaataagttcctaaaaataatattggagccttgaacatttaatctcagctaaaaaaattattctaaaactgtcatgataaaaaaggttacaaaatttctctttattctagtcctgaattccttctccagaattttaatacaaaacgaattttcaggcacaaatagtcaccagataatgcataccgtaatttagcagacttaaccaaacaataaacacccctacaaaagtgtcactattttatcactttgtgctgtactcttctccctatacatctttaatagtggtcacttctactttacttctagcattcaatttagacatctcaaccccaaatttaataatctgttttatcaaacatttgttttgagaacaaaatttctataaattatctgacaaatcaaagcagaacctttaattgtagaacacaaatgaaaaataatatacaagaaaccttatctcttcaacacccaggtattagccttaaagttaaagagataaggtttcttgtatattatctccgnacgcgtggg

SEQ ID NO: 3299 - DNA, 493 bp, Homo sapiens
  misc_feature (1)...(493): n = a,t,c or g
tgcttttgacactttatccgtttttatttaaaaacatgctaaaaacatggtgttccataaagccaggaccaggatgaaggaacgcacagatacggcaatgcaagcagaaagtgcatctgaaaccaacaagcgtgctcaccctgctctccctcccgtgctgcccgggggnggcaggtgggcaaggagggggcaggaagccccaaggcctcacctcctgagtccccaatcagggcagggaggccaggccccaccctggagggagaggggggtgacacggctcaagctgggggaggggtgcagggggagacttgcaccgtgacacctgcttccaccacccaagagcagttctcagcctgtgcccgctcacatcagacctgattgaantgactctggcaaagggagccgtgagtgagggaattcctcaggggaatttaccccagtgagatcacagtcaggagaaactgaagagaggctgtccaccttcactggcang

SEQ ID NO: 3300 - DNA, 516 bp, Homo sapiens
  SIMILAR (76)..(207): 1001254mologous to Homo sapiens Amino acid sequence of human clone ar54_1i,accession number AAY03227,Smith-Waterman Score=242.
gcaaaagcctagtgcattgggagatggcaacctccctgaaaatcttttctgtttctggagtacttcaggggtcgctctggccccagagcctttgccacagtgctcccaccagcccccacctcatccgtctgtttgcagagcctcatctacaggtccccacgctgccttctttactcactctgcgcttggccgttttgttatttggcttagtctacattgggcggaagtctgtgtgcacagagtgggtgttccttcgagccccttccactcagagggccacacccagcgatgccagtgaagtgtgcacagcctctcttcagtttctccttgcccaccttgcctgccccgggcagcacgggagggagagcagggtgagcacgcttgttggtttcagatgcactttctgcttgcattgccgtatctgtgcgttccttcatcctggtcctggctttatggaacaccatgtttttagcatgtttttaaataaaaacggataaagtgtcaaaagcaaaaaaa

SEQ ID NO: 3301 - DNA, 1171 bp, Homo sapiens
  SIMILAR (655)..(876): 681254mologous to Homo sapiens Human CD53-like transmembrane protein,accession number AAW94494,Smith-Waterman Score=290.
atgtgctgggctccctccaccagaggcggctcccctgccctgcacctccctctcctgctcctgccgcaccctctccctgcccgctgcactggcttcagagccccggctgtccccagctcaccagctggcatctttgggcatatcgctgtcattggctctcccttccccaccgctggagggaacacatcagattctttctccaatggctgttctcaagatgttggcagcccaaggctctgtggctgtgggctgctgggagtgggcatctggctctccgtgtcccaaggcaactttgccaccttctcccccagcttcccttcgttgtctgcagccaacctggtcattgccataggcaccattgtcatggtgacgggcttcctcggctgcctgggggccatcaaggaaaacaagtgcctcctcctcagctttttcatcagtcctgttggtcatcctcctagcagagctgatcttactcatcctcttctttgtctacatggacaaggtgaacgagaacgccaagaaggacctgaaggaaggcctgctgctgtaccacaccgagaacaacgtggggctgaagaacgcctggaacatcatccaggctgagatgcgatgctgtggtgtcactgactacacagactggttacccagtgctgggggagaacacggttcccgaccgctgctgcatgggagaactcccagggctgcgggcgcaacggcaccacgcctttgtggagaacgggctgctatgaaaaggtgaagatgtggttcgatgacaataagcacgtgcttgggcacggttggggatgtgcatcctcatcatgcagatcctggggaatggccttctccatgaccctcttccagcacatccaccggactggagggaatcacgtccacctgggtcccaagatcttcgcctccttccctggggccacggacatcagcagtgggttgggtggcgattatatcatctgtgatcccaaggagaagaaatacagaaaacccaagagagagcctcatctacaggtccccacgctgccttctttactcactctgcgcttggccgttttgttatttggcttagtctacattgggcggaagtctgtgtgcacagagtgggtgttccttcgagccccttccactcagagggccacacccagcgatgccagtgaag

SEQ ID NO: 3302 - DNA, 1379 bp, Homo sapiens
  SIMILAR (1282)..(1112): 701254mologous to Homo sapiens Amino acid sequence of human clone ar54_1i,accession number AAY03227,Smith-Waterman Score=170.
  misc_feature (1)...(1379): n = a,t,c or g
ttttttttttttttttttttttttgctgggcttttgacactttatccgtttttatttaggaaacatgctaaaaacatcggtgttccataaagccaggaccaggatgaaggaacgcacagatacggcaatgcaagcagaaagtgcatctgaaaccaacaagcgtgctcaccctgctctccctcccgtgctgcccgggggcaggcaggtgggcaaggaggggggcaggaagccccccaggggcctcacctcctgagtccccaatcagggcagggaggccatggccccaccctgggactatttgactcactgcagtgggggaggagggaaagtttgggggcacgggggaacacaaggggcttggccggacttttgagaagctgaagggggacaaagattgggacccccaagcaccttcacgcccagtttcccattcctattgccacgttccctgctagttagcacctccaccagtgggtggggcaggggctggagaggaggggacagccacttccatccacccagactgctcttgggccaccaaagcctggaaagatggccatctagttgcgaagtcaaaccaggacacctgcaagagggtccggggcagggccaccttccagagagcctgagacacaggcccatgctggagggagaggggggtgactcggctcaagctgggggaggggtgcagggggagacttgcaccgtgacacctgcttccaccacccaagagcagttctcagccctgtgccccgctcacccccactgcaggatggctgccagaagaaaaggctgaagtctgcagcggatgccccccctgcagtccctcctacaaaccctgagggactttcctgaagacaagtgtgtaaattgcttcaacattcagacccttgatttgaacttgactctggcaaaagggaacccgtgagtgagggaaattctcctccaggggaattcctacccccagtgaaaatccacagtcaggagaaactgaaagaagaggctgtgccaaccttcaactggcatccgctgggtgtggcccttctgagtggaaggggctcgaaggaacacccactctgtgcacagcagacttccgcccaagtgtagactaagccaaaataacaaaacggccaagcgccagagtgagtaaaagaaggcagcgtggggacctgtagatgaggctctgcaaacagacggatgaggtgggggctggtgggagcacctgtggcagaaggctccttgggccagaggccacccctgaagtacttccagagacccagaaaagaganttttccagggaggttgcacatctcccaatgcactaggcttttgctgttgatattaacaaaaattaaaaattgcactcgtgccgaattcct

SEQ ID NO: 3303 - DNA, 641 bp, Homo sapiens
cagcagccaacctgccaacacctactgacactcactcatctcccagagagagaaagagagcgagagagagcgagcgcgagagagcgagcgcgagtgatagcgagcgagcgagcgagaaagagagagagggagagacaaaatacctaccaggaaagggggggaggaagtccaatttttgcaaactattcatttttttttcttgatttttctcactgctttctttgaacaatactttaaagagagaggatcgtattatagataccgcgggggcaaagctaaaaaaggggggaggggggaggaaaaaaattcaagaagcagaaacccctcgcggagttttactggaagaaaaaaacgggtctgaaagattcctcctcttcatcatcatcaaccatcattcattcactacctttgacattccgggctttgattgacagctggagtggcaaaaagccatgaaacacgacagttcggttacatgtgggctgctgacgggccgctcgtaaccttcagttcgggggcttgacaatttttttcttctttttcttctttttcttttctttcttttttttttccaactagatataaatcctctcctaagaggggcctgtcccgatgcctcctctcccttctgtcgtcttctc

SEQ ID NO: 3304 - DNA, 790 bp, Homo sapiens
cagggactgatgcgtccccacagacaaggacttggctcgctggagctctgctgagccgagagaggagggggtagaaaacattcacacttcctatgctctgtcagcaggacagggagcaaaaacgtccccaggcaacgccctcgcctctgggactttctgcctgtcctaaggcccccccaggtaccaaccccgtagctatctgggtctgtttggcactgtggattctcaagggcctagaacccttgcctctgaaactggtccgctggtgcagccctgctgtctgcagctcctgcccatacccccagcccacaccaggccaggcccactccgggctcaccaccctctgcagccttgtggggctctcccagcccctccagaagcccaccccacttctcgccaacccccgatctctaaatgaggcctgagcgtcaccctagttctgcccctttttagctgtgtagacttggacgagacatttgacttccctttctccttgtctataaaatgtggacagtggatgtctgtcacccaagagagttgtgggagacaagatcacagctatgagcacctcgcacggtgtccaggatgcacagcacaatccatgatgcgttttctccccttacgcactttgaaacccatgctagaaaagtgaatacatctgactgtgctccactccaacctccagcctggatgtccctgtctgggccctttttctgttttttattctatgttcagcaccactggcaccaaatacattttaattcaccgaaagcaaaaaaaaaaaaaaaaa

SEQ ID NO: 3305 - DNA, 525 bp, Homo sapiens
  SIMILAR (463)..(311): 471254mologous to Macaca fascicularis unnamed portein product,accession number AB046048,Smith-Waterman Score=116.
cggacgcgtgggcggacgcgtgggcaagaaatgccttctgtctcagggaagcccttaccagaacctctaggtagagttagaggctaactccacggcaccctagagtccatagcatgttgttatcatgtgtgtatcgttgcatgtaaaaatattcctatttgttacgggttgcttgtatgtgtttgtcattaatctattaattcattcagtgaagagatgccaacttgtatactagcctgggaaacctctgtgtcctcagtgcctaatttaatactcctttttctatctaggagtaaaatgaatatgaatgtacatgtctgaggtctctataaattaaaaggtaaaaagtcttaagccaggtgtggtggcatgcacctgtattcgcagatatttgggaggttgaggtgggagcattgcttgaggccagaagtttgaggctgtagtgtgcaatgctcttacctgtgaatagccatggccctccaacatgggcaatgcagtgagaccctgcctttaaaaaaaaaaaaa

SEQ ID NO: 3306 - DNA, 389 bp, Homo sapiens
  SIMILAR (387)..(178): 751254mologous to Homo sapiens Similar to hypothetical protein FLJ10101,accession number BC002945,Smith-Waterman Score= 294.
  misc_feature (1)...(389): n = a,t,c or g
caggtgccgggggcagcgcacaccccacagccaagcggccccctgcccagcctctgtaaacaganccccactccctgagaaacactggcgctcctgccccgagagggccagggtgtccaccgagnctggctgaagccagctgtcccctcccttcttgcagagcaggctccagngatgctgaaggcccagcacctgcagggcccagcctggggaccaccaatgcccggcctcttccagctcagaagcgcacacggcagccacggggcagcggcaaaggcgatggtacagaggcaaatgcctccccaggcagtgacaggcacgcncgcnncccagggcggccactgcccacaaccgcctagagctcnctacgctcaagacgccccagggtg

SEQ ID NO: 3307 - DNA, 554 bp, Homo sapiens
  SIMILAR (351)..(491): 781254mologous to Homo sapiens CDA018,accession number AF271785,Smith-Waterman Score=166.
cttttttaagagcgagcggttttgcgggggcggttggggggggccgccgccaaggggaggccgtctcgcctcccgcgcgccggtagatgggttgtttcattagggaggggggggaggagggtaaccttattatcaaaaagaggtttgtgtctgaggcagaactatgatgttcggcgcaaaaggaggcaagaagaatgggagaatgttcgaaaacctgaagatccagaagaatgtccagaggaggtttatgaccctcgatctctatatgaaaggctacaggaacagaaggacaggaagcagcaggagttacgaggaacagtttcaaattgcaaaaacatgggtaaggggctttagatgaagatgagaccaacttccttgatgaggtttctcgacagcaggaactaatagaaatgcatcgaatagaagaagaactgatagaactgaacgaatacagaattgcgctctggaatgtcggaatttcttatgagaactatgaaggacggggatgagatgctgtactgtaactctattacaatccaagttctagtagttcg

SEQ ID NO: 3308 - DNA, 825 bp, Homo sapiens
  SIMILAR (824)..(729): 961254mologous to Homo sapiens Similar to hypothetical protein FLJ10101,accession number BC002945,Smith-Waterman Score= 201.
gttgtaaaacgasggccagtgaattgtaatacgactcactatygggcgaattgggtacsgggccccccctcgygttttttmtggtmvtmtttttttttcagagtgaaacaggagtgctttatggtctgagtggagtgtttgtgaggagtgcctcccggcgtccgtgcgtmcgggcgtcaccgtgagcgggggcgcagcgtgagggccacgtgtgggaaacacaacccccactcccaggagaggcctcacagtgcgtgcttcggtctcgccagcctvtctagcgtaggggcstggggccgccctttagggtgagtctgcacacccgtgttcagggcbccsgggccggaagcggaaccataggcatgctgcggcccgcagatgagcgcggagggcaaagcaggtgccggggcagcgcacaccccatcagccaagcggccccttgcccagcctttttaaacagacccttcacaggtccctcctggggccttcagtcacatccctgagaaacactgccggcttttgccccgagagggccagggtgtccaccgagcctggctgaagccagctgtcccctcccttcttgcagagcaggctcacactgggcctgaaggcccagcacctgcagggcccagcctggggaccaccaatgcccggcctcttccagctcagaagcgcacacggcagccacggggcagcggcaaaggcgatggtacagatgcaaatgcctccccatggcagtgacaggcacgccccccgccccagggcggccactgcccacgccggcctagagctcctcgtagtcgccacccccagggtggcggccgc

SEQ ID NO: 3309 - DNA, 1245 bp, Homo sapiens
caagtgttttttttttttttttttttaaaaatctaagatttctttattcccttagacagtttctgtacagcgacaccaggctgtgcaaagcccagtcgtcgtcttcactgagcacattccccaggacgcctggtgcagcccttcctgtgccccaggccccaactagccacccctgtgccccactaacaagccctgtgcccttcaacagggaatgaaacccctggcactgaagaaatccctgggaggcaccgtttgctgcgggagcaagagggactgacctttggcttctttgtggctaggaggtgttccaaggcctgggtgaggggggtcccatactgttctctgctgagcccctcttgcacactattgggggatcctgggctggccggtggtaggttgggccggagactcagtttgtccgtcagcttggccatgtccccatttttatggacaggcagcctgaggcccagaggcggaraggatttctccttgcgcacagctgcatcacacttgaactgtccagacctccacgcgctggcctgtttgctccccaccctagtcccgcaggbctgatatggtgcctccagcagactccatggcttcccggagggtgcagggtccccagttcaccctccagcaggagtggcagcagctggggtaccccctagcagtggcatgtggagaagctggggtatgcagaggatccagttctgtgaacacccaggaggcaacacccaagttttcctctgtcccctaaacacaagaccaagaaggtggccccgccacccccccgggtggaggatgtgtggaagttaagaggtccctgggtggccccttggttggccatcagagacccccgggagcccagcctgcagggcaggagcacaatgacgtggccaggatcccagaaaggggctggagtgtctgcctcagtttccaggataacggtgcaatggcctcagccaggccaggtgctggctgctgctgggaataatctctgagcttcgtgactctacagtgtgggcatgagggtccttatttcatagatgagaacactgaggcaagtgcagttctcggccaaaactacccagctgatcagcaaaattcagcccacgtctgatagactccacagctcgcagcatcccagcaggaagcagggcaatcgactcaggggccaatttatgtcccaggtttctgagaaggagccctggggaaggagggcggggtgagcgtcacaggctggag

SEQ ID NO: 3310 - DNA, 1045 bp, Homo sapiens
  SIMILAR (953)..(435): 851254mologous to Mus musculus putative,accession number AK011654,Smith-Waterman Score=774.
cccaggaattttaagaatcaacctgggcaaacatagtgaaacctcccatctcctaaatttttttttaaaagggtcatcatgtaatgtctaggaaggctaagactcacatgcagggaggggccctccctgagccacagcatgaggccccaccaccaacacagtggtcatgggtttggttttagcagagcttgttcaaagagtattccaaggtggctatggggaagaaccaggtaagacttggcagactgttctctccagctccagagtagaagttcatggaagaaatgttccacaatgctacagaaggtgctggtgcccccagaggcagccacgtccctcagtcatcccactcctcgtcctctgccccatccccctgctctcggatctccgctgcagcccccttcgaacacttttgggccatgatgttgtctgtcccaggatgcccctgtctttccatcaccagtgaaattacacttggtcactgttccagcctcaagtttggccaatgaatccaggaagggaccatcgccccgagtcttcagccgtaccccggcccccagctcgagttccatcacctccatctctgactcgggcatccagaacgccactgtgtggtcgggggtgaggctctctgtcagcgcgagcagctttggcttgttgaccagccccttcagcgcatcgggcgtgagcctgtcagtgtcccccttggcttccaccttgtaggaggacatgaggaagcccgtgttcactttcctggtggcgctgaagttgggctcgatttcatttccctgggcgtggaatatacggcgatggatgtgattgggccggatatacagcacgtagtagcgctccttcctgccatgagtgtccaagatgctgtgccgagatacatcgatcagttctccctccagcaggaccccatttcccccatgtgtgggtggcggcgtcccaggcccctggcagccggacgatctgcaccgccttgttccggagcgcgccgtcgtggtagatgcggctcacgaaatcgtcgacccaggaattccgg

SEQ ID NO: 3311 - DNA, 2362 bp, Homo sapiens
  misc_feature (1)...(2362): n = a,t,c or g
aaataagcttccatttttcatatccatctttttttcttttttagtttttttccttttaaatgcttcttttatttcattggttgtacattgggtgagtgaactgaatattacaaccaaaacatagtattgatacaaattagactcctgtttacactgtaaggtaatgaatgagggaattctttaagtgttacagaaagatttagtagaaatgttaccagtggtatggctgaaagaatatttcggtgaagtgctgttatatcctgaaacccaagagtgaaatggtagttcccatacaagtggagagttagtctcttaactacagtatttgttgaactgatatcttcatgtcttggatattggtgatttttgttttttaattaaacaaagcatttaagatttattccatcatagtccagaccttcctggaataataaaccaaaccttttggcaaataatatttatacgggaaaaatagttttagatcctctcaaatcccagaattattctataaaattacattataaataaataaaaagcaaaatctgttgtacatatatttgtacatctatgcatttgccttgcctcctccttattgtaaatggcatatttatgactctttgcatattgtaatcacaattctggaaaatggatatcatagtaacaaatacagtcttctatatttgcttggggttacaggtgatgtttttgatgctcccttattaaagggctgaaaatagttgtgtgctaataattttaagaatcaaaatcatgaaacaaaagaaaaaaaaagaaagacaatgttacaacaattaatcctacaaaaatatttcagtgattcccataatttaccttttagtaatgtatactatgttttcaatgagtttaaatgaattaacaaagaaaaaaacagaaaaaagaaaacaagtttgaatgttttaggcaagttgtagcgtaactacattgttatagttgagaaaattacaaatatcaataatacataaagatgaaactaccaaagtaatacaagttagatacaatacttttccacaaattaaaacaaatgcaacgatacaagcactatgtaagaatacatttagcgtgtgactttcttttagatagggttatccagatctacgatataagataaatagatagtaattcgactttgaccaacatgaattaaaatgcagatttctttttttcctcaaacaaataatgatacggttggtgcatctagttttcaggaacaggcgatgatcccaaatttaaaatattttacattcaatctcaaaaggtcaaaatacttcaatcactaatatgttcacaaagaaaatggatgtttgaaacaattacacataatattcatttataacagctgttttgttttttaaacaataatttaaaaactatgtaggtactgtataggctatgtgcaacatataaaatgtgaaatatgaaatatttggtacgatagtgcttaaaataaactttaaaacaaactttctgaacaaaatttaattgtatcgctattaccttgaagatcaaccaagtatttaaaaaagtaaacaacattaaaatatgtttcatccatatatagtatatatatgtatgtgtatatataatatgtatgtacttgtattaaagttttttatacttttgagacataaaatatgctttaaggtgaaagaattaaaagaactatttttttccatgctgtagtcagttacaaccctttaatccaacttttgaaatgcaaaacaggtaatggattttttaaaaagtgaaactatctactttttgtttacatagtaatttagattaaagtcacagtcaaatttgcagtgactaaactcaaacttacttaaattagaatattatacagatctcctcacctacagcttccttgtttgactaggtttttagttaagaagagttattctgtaacaggcaactggatggtgagtttgaaagactaatctcttagattagactgttggcatgggcctctcaatcttgtcaagctggatgaagtctggcaaaatctaggcacttctacaaagtctctcttataaaacaactttaaaaatatacttggtaaaataaataccttcaagactttgtttggtgggggtatgaagctcataccgtgcaaagtttccttttcaatctatttaatggttaatctagaatcacatgattcaacgtggcatctccaggcaaaccaaacaccacactttgatgtgtccccagtacttgtgcttgaatttccattcaaattttaaacctgcaggacaggtatcggntttacttcacctctcatctttgctgcagcatttatattgtcaagaagtgaaacataccc

SEQ ID NO: 3312 - DNA, 769 bp, Homo sapiens
  SIMILAR (2)..(766): 991254mologous to Homo sapiens RU2S,accession number AF181721,Smith-Waterman Score=1292.
tgagttactttttgacaagtcaacgatgagaaggccttttggtcagaaagcttcttcactacctcctattgtaggatccagaaagtctaaagggagtggaaatgatcgccactctaagtcaacagttggatccagtgacaactcatctcctcagcccctgaagaggaaagggaaaaaagaagacgtgaattcagaaaaactgacgaaattgaaacaaaatgtaaaattaaagaattcacaagaaaccattccaaatagtgatgaaggcattttcaaagctggagcagagaggtctgaaacacggggggcagcagaagtccaagaagatgaagatactcaggttgaggttccagtcgatcagaggccagcagaaatagtagacgaggaagaagatggagagaaggcaaacaaggatgcagaacagaaagaagacttttcaggaatgaatggtgacctttgagaggaaggaggtagggaggctacagatgcccctgagcaagtcgaggagattctggatcacagtgagcagcaggcacgccctgctcgtgtaaatggaggcaccgatgaggagaatggtgaggagctgcagcaggttaataatgagcttcaactggtcctagacaaggaaagaaagtctcaaggagctggcagtggacaagatgaggctgatgtagaccctcaaagaccaccaaggccagaagtaaaaattaccagtccagaagaaaatgaaaacaaccaacaaaacaaggactatgctgccgtggcttag

SEQ ID NO: 3313 - DNA, 1351 bp, Homo sapiens
  SIMILAR (160)..(381): 481254mologous to Homo sapiens keratin 10,accession number M77663,Smith-Waterman Score=152.
ttttttttaccaatattcccattttaatgatgagaaaactaaggttcagagaagtaatttgcccaaggtgacagctgaacatggcagaggtgcaatttgaacccatgtcttcacatcccagtgctgtgctctctaagctccactatgtgggatgttttattaccactggatcgaggagacctccatctaagctgtattgattcttccaattgggctctgttcagatgccagagtaaagttgtcctttatcactgtgttgaggctgatagcaagggcctgcgaagtgtcttagatgagttgactttgaacaagactaacctagagttgaaaatggaaagccagacggagaagctgaattacctcagaaacaatcatgaagaggcgggaactacacaaaatgaatttaaagtttcagtatgtcaatacttgtcaagatatggtggtggtggctatcattataagagacagtcttttcataaaacacagagtaaagaactgatgggcaggcatcggcttctgctgacaattgccaaccggcatgagattgctgagctgaggtggactctccagacactggaactggaactccaggcccaatggcctctggtaagaatgctgcaacagtgagaaccttgagagagactgacttgttgaagatgaagagaaaaccaagagcctccagtccaggttgttgaagagcaaccacgagccaacaccaaggagacaaggaagaagtcgtccttctctcaaccgatgtccgcaagcacaaaagaagagtcccaagatgggcgaagaaagggaaaataactcaaggggagagccagggaaggaaaaatgctccaccaaaaatccctgggctttaaggaatactttgagggaaggggagcaggcccaacaccctctgggcccacagtgacccagctgaaatgaggaactcctaaacagaatgaacctgccagttggagccaacagaggggacatagctggaacaacagagcgaaggggacacagccggagcaacagagtgggaggatgccaaccatttcaactctctccctgagcagcgagtaatttcagggcaagcccagagactaggatccatcctgagaagtcttcagaggttctgacccagagaactcaacaacaggaatacgtcccatggtgatgaaaataaaatgaatcttgtgttcaccgttgtattcctcacgcacttaagttaaaaacctgatgcaaaagtggttaatctccatacatgggtgttagctccatcgttttccaacgttagagataaccgaatgtgacctcaccccgtttagttccggaggcggcggacgcgacggcggaagtttcg

SEQ ID NO: 3314 - DNA, 674 bp, Homo sapiens
  SIMILAR (405)..(1): 631254mologous to Mus musculus putative,accession number AK016683,Smith-Waterman Score=395.
gcgtcgactcaaatcaggtgaaatgtgctgatacatatagaatgggttatacacatcatagctaggtccgtgctgggatgaactggaaagttctacctttcgatctccaaaagatgctctggcagatccttcaagttcttccagatgtgaaggagtttcttgtgtcctgcgttgaatgtaagataacttaaacttgggcaccacaaatggtacttctttgccatcagatggtaatctggaaagcaaaataatcctcaggctacagccaaagctgaggcctgtacagaaaccagaagtcaaatgggagctacagagactagtagcacttttgactatctgggaactgcctctttaaaatctcctccccacagaaaagttgtgtttttctgtttcaccatagaaacatcgctccacagcaactctttataaattctgttgccattacattcaatttccaatatccagcaaaagacacaaacttccaatcttaatattaatctccagcccgcaacggcggggccgccctcacaggcgccccccacagccctgagcgagctgccaggtgggagaagcgcacctgagccaagccacgccgcgcctttccccgcccgggtcccgccgccctcctccgggtctccacgtcccaacgcccgctgggccgcccgcgcggccgc

SEQ ID NO: 3315 - DNA, 471 bp, Homo sapiens
  SIMILAR (156)..(437): 441254mologous to Plasmodium vivax putative,accession number X98485,Smith-Waterman Score=152.
ttttttttttttgagatggagtctcgctctgtcacccaggctggagtgcggtggcatgatgtcttggctcactccaacctccacctaccagggtcaagcaattctcctacctctgtctcccaatttctttctttttttttttgtttttttttggtctgtttctcagattttctctttgtcataggttctaagcagtttgattatgatgtagcttggtattgttttcttcatgtttcttgtgcttggggtttgccatggtgtttggatctgtgggtttatagttttcatcaagtttggaatgttttcaggcgttatttcttcaaacatttcttctttcttttcctctcttcttcatgaactccaattaaccatgtattaggctgactgaagttgtcccacggctcagtgatgctcttttcatctttaaaaattctttttcttgctgtgcggacgcgtgggcggacgcgtggg

SEQ ID NO: 3316 - DNA, 666 bp, Homo sapiens
  SIMILAR (566)..(471): 751254mologous to Homo sapiens Human myelin oligodendrocyte glycoprotein gene,accession number AAZ29204,Smith-Waterman Score= 143.
  misc_feature (1)...(666): n = a,t,c or g
cccacgcgtccggccagctgacagctgctgagtactgttcggttgctgttatctgcatggccagtctcttgagtctcagcctgctgttgacccccagtcgacagtgctcgtcagcagagggtgggcacggcccagtactgcctcagggcccgtctcagtagtcccagagagacggggtatggtatgctcttgtcacttttaaagagtatgtctgtggctcgaggcttggcattgtctctgaagtattattcctagaggcgggtatgctgacactagatcagagggcttggttggttatgtctctgtgaactgaaaagcaaggggcagatttcaatttacaaaccagattttagatgaacttttctaattaaaagtagaattatttacataaatgacactgaaagatgtggtggctcatgcttgtaatcccaacacttcgggaggccgaggtgggtggatcacctgaggtcagttcaagatcagcctggccaacatggcaaaaccccgtctctactaaaantataaaaattagccgggcatggtggcaggtgctggtaatcccaggctactccgganggctngagggcaggaggantcacnttggaaccccagggggttggnagggtngcagttgaagccgnagaattggtacccaangcggccagc

SEQ ID NO: 3317 - DNA, 811 bp, Homo sapiens
  SIMILAR (490)..(606): 481254mologous to Homo sapiens Human secreted protein, SEQ ID NO: 7874,accession number AAG03793,Smith-Waterman Score=100.
gcccacatcccttcttccattacttacaggttattgttaccattaagaacacttctttttcttaaatgagcaggtttatgtcgattattcagagttgttacacaggacatagattggttttatcatgtctatcttaaagtttttctttttcttactcttaccagtcaacctaaaattcttttttccctctgatatctaattgcaggttaagcaacctgaaattcttgcaaaagggcacctttaatttgaattgtaattggaatcctatgctagtgacagggtatggcttttctgtattgttttctaataattatttgaatatgaaacattccacagtaaatcccagacaagagctattgtttttcattttataggtgagagattaagtaacttatataagattatacaactggtaaggttggagctagtattcaaattctgataaatctggtacaaaagtacacattcttctgtaatatttaaatgtgaattctttttgcagtttttgagtcagagtcttgccctctcccccaggcatgagtgcagtggtgcgatcatggctcattgcagccccagcctcctaggctcaagcgatcttcctgcctcatttttaaatttttcatggagatgatgtcttcattatgttgcccagcctggtcttgaactcctggggctcaagtgatccatcccaccttgggcctccgaaagtgctggaattacaggtttaagccaccatgcctggcctaaatatgaattattattattttaaatggagcctgggcaacaagagcgaaactctgtctcccattta

SEQ ID NO: 3318 - DNA, 552 bp, Homo sapiens
  SIMILAR (13)..(549): 701254mologous to Homo sapiens dJ475N16.3 (novel protein similar to RPL7A (60S ribosomal protein L7A)),accession number AL035587,Smith-Waterman Score=612.
atggcagtagcaagacagaagaaaggaaaagggctcaggtttaagcgactggaatcattcctacatgattcctggcggcagaaacgtgacaaggtgcgtctcagacgactagaagtgaaacctcatgccttggaattgccagataaacattccttggcctttgttgtacgcatcgaaaggattgatggcaatctaaaaatgctgcatatagtggaaccttatgtgacctggggatttccaaatctgaagtctgtccgagaactcattttgaaacgtggacaagccaaggtcaagaataagaccatccctctgacagacaacacagtgattgaggagcacctggggaagtttggcttcatttgcttggaagacctcattcatgaaattgccttcccagggaagcatttccaggagatctcatggttcttgcgccctttccacctctcagtggcccatcatgctaccaaaaatagagtgggcttcctcaaggagatgggcacacctggctatcggggtgaacgcatcaatcagctcatccgtcagctgaactag

SEQ ID NO: 3319 - DNA, 431 bp, Homo sapiens
aaagtataattatcttttgggtgatctgttgtctggaaaaagctgttacatgtaaaaatttggatgctgaaatcaaatggctatacccaaatgagcaagaatagtttaaaacatttaaatcagcatctgcataaaaattaatataaatattatttatgcctgttatgtatatataattatattatgcataagaatatatttatccaaatatatactgctagaaaattgtatatgatgtactattttattttatgtaatattttatgtatatatttatttacacataatttatatacttttaaggctgtgtccatttttcatttattcttggtctccggtttgaacaacgctgctttatggcattacactgataattctctctactctttagttctcttccttatcgcttattcatgtgtatcttattccat

SEQ ID NO: 3320 - DNA, 472 bp, Homo sapiens
tttatacctcatgtagcttcagtcattttgcagacttaagaatggcatgtgagattaaacattctctaggaagcatagcagagtatgactgacaactttacatgaattttttagacataatggtaaacaaaaattcagcctaattattagctgtgctttcttggataagttatttagattctctaagctgttgtctcacaagtaaaatggagatatgtctgcctcataggctattaagaggatagcattctcatacagcagtgttacaaatgatgtatcataaaataatagtccaaccacctgccacatttcagaaacaaaaaaagatttatactttacatgcaatagacatacaaaaaattttaaattctgagggaaaaaaatgaaaatgccccacacatttgagtcatttatatattaatcctggagagaaaagctatctttttgaaacctcgggtttaaatttttaatg

SEQ ID NO: 3321 - DNA, 497 bp, Homo sapiens
  SIMILAR (497)..(378): 771254mologous to Homo sapiens Human secreted protein encoded by gene 22 clone HMSJW18,accession number AAY02671,Smith-Waterman Score=162.
tttttttttgcaaacagtatggtgatttatgacagattttcttaatatatatttattattggagcaatcgtttcccatgaatgtaatggtatactttcttggtatagattgtgaaaaaatgttaaaggcagagtcacataattctcagctaaggatttaagataagcactaagcaagatatattcatgattttttacttctacctaagcattcttccttttagtactaaccccttttactcatgtaaaccataactatacaaattccaaactagcgttcctctgacttaatttataataaaagctttatatattacattctattataattcaaggtaaaggggatactactcaaaatttaaaacataatcatagaggccaggcatggtggctcatgcctgtaatcctagtactttgggaggtcgaggtgggcggattacttgaagccaggagtttgagaccagcctggccaacgtcgcaaaaccccatgtatactaa

SEQ ID NO: 3322 - DNA, 451 bp, Homo sapiens
ttctggcagaggccgacctccaaggctctgttctcccctccccgtgtacaaatcctccgggtttcccagcccctccattgccgttggctttttctggtaatgtgctgtgctccacgaccaagccgagaaaggacctagggtggggaagggagggtctcttgattcctaaccgcccccacatactgctccaccgctgaacttcgggtgccggggaggagaaattgggctgatgtgagctccccgtcacccgccatggagccggctgtgtgtgttcatcagatacagttctcccttaaccttgtcctttctctcctgtgtctcagtctccgtcagtctgtctttctccgctcttctctgacccctgtgaggaacctccttaccctgttctggaatcgctgccagactgtagcttttaatttaataaaaataaagtaaaatatgcaactcttaa

SEQ ID NO: 3323 - DNA, 1491 bp, Homo sapiens
  SIMILAR (1189)..(1398): 481254mologous to Homo sapiens KIAA1655 protein,accession number AB051442,Smith-Waterman Score=127.
gtcccaccaggcgcaatgtagccgggcggcgcagaggatttcttttttggtcttgagagcatagagtcccttttcatattcacgtgtactcttaagaaagcgtctgttctccaaactggctttccattctccccgtcctaaatggtgcgtggctgacaccgtagtgttttcaaaactggatatggccaggatgctatagcattgtcagtgcatctccttggaaacaatgccatctttgaatgtgagagataaacctagtttcagcatgtctgcagcagagaccagtacatcaggcttattcccacaggaagcctcctaaagcctgtggcgcggcaaccatttccaggactaaataataatgtgtcagatgcctgtgagtggactgcctggccaaatgactcatgaagatattcacggaagaatagtcaaaaaccaaagaaaaggcatattctagaagcaccttcaattccatcgaggatttttgagcagctgaagaagaaagttctgaaaatatgagtgacaggactccagcacatttttttttttagttgtttcttacattatctttgttaacccatccgcttttgtgtataatattaagttattttccactactgcaatggctagtaatttacttaggctcagagttttactctgtatggacagagaaaataggaggtaacaacagtgggagaacaaataggaacagttcactgggatgttggtccccagaaattggctttcattgaataattcctaaagggtgtcgtgtgctgaattgctttttcatagtgatgtgctgcttcttgttcatactcttatgactttaatttcacctttatctactcccagcctctgtatatgcctacgtttttaaaaataatttttggcactgaagatctgattaccatattttttcagtttaaaaattaaatcctcgcaaatagacctttggtataggtgcattctaccctaggttattttctaggatcaagaatagaacaatttctgttctttccagcattactctttactattcatatgttcttgttcagtgttttgttgttctcatattctaggtggaaatgaagggtaatctctatgttctattttcagttttctaggaaaccagaaaaacatgggtagtagaaatgtatagaaaatgtatgaggtctcttaaccattgtgttaaacttgcattaagcttcttttttagcaatatcgatgtcagtggtacgtgttggtgtgcccttttatcatttattttttttgagacagagtctcattctgtcgcccagactggttggagtgcgatgatgcgatcgcggctaactgcaaccgctgcctcccgggtacaagtgattctcgtgccttgggctcccgagtagctgggatttttagtggagaacaggtttcacatattggcaggcttagttggtggatcaaaggtcaggagattaaaccatcctggccacatggtgaacccgtttt

SEQ ID NO: 3324 - DNA, 716 bp, Homo sapiens
  SIMILAR (716)..(600): 821254mologous to Homo sapiens Human myelin oligodendrocyte glycoprotein gene,accession number AAZ29204,Smith-Waterman Score= 188.
acatcgatacgacttttttttttttttttttttttttttttttcggggaaaaagaatggctgactttaatcagtctataaggaaaataaacatctttagaggccgtgtgggggtgggggagccatgcagcagaggaggcatgccacttcaagcacacccgaggcagaagaaacttctcagagaaaccactagaagggtggacggagggggaggtgggacttacagtcagctttccctgactgggcaaaagggagcagttgcagtattaaaagtggttcctgagtccaccacagcagccagctccggtcaggcagcgggatgggctcccacgccccatggcaggcctgtgtgcaccacagggcagctccctcccttcttggtcctcttctatcctcctgccttacaagagaagcacgtccctgagcacatatggcccagcccttgcccaagctgagccagacaggtaagcagagactttcactgcagtgatgcttctggctcagccccaggagctacccgctgccatgtcttccaggctgcactagaggaaggcagtggagcaggatgctgataaaactagctcctggccgagtgcggtgctcatgcctgtattcccagcactttgggagaccaaggcaggcagatcacttgaggtcaggagttcgagaccagcctggccaatgtggtgaaaccctgtctctactaaataatacaaa

SEQ ID NO: 3325 - DNA, 6403 bp, Homo sapiens
  SIMILAR (765)..(1727): 641254mologous to Homo sapiens eRFS,accession number U87791,Smith-Waterman Score=922.
gatcgccctcaggaattcggcacgagccaagatggcgcataggggttctccaggctgcagttggcgccttatcagtatctaagcggagtgttttggaaggagttaacgggctgtggcatagacgccctctccgccgtcatggcccggcatcggaatgttcgaggctataactacgatgaagattttgaagatgatgatctctacggccagtctgtagaggatgattattgtatttcgccgtcaacagctgctcagtttatttattcacggcgtgacaaaccttccgttgagcctgtggaagaatatgattatgaagatctgaaagaatcttccaattctgtttcaaaccatcagctcagtggatttgatcaagctcgtctttattcatgccttgatcacatgagagaggtacttggagatgctgtgccagatgaaatattaattgaagcagttctgaagaacaagtttgatgtgcagaaggctttgtcaggggttctggaacaagatagagtgcagagtttgaaggacaagaatgaggcaacagtatctacaggaaagatagcaaaaggaaaaccagtagattcccagacatcgcgaagtgaatctgaaattgtgccaaaagttgctaaaatgactgtatctggaaagaagcaaactatgggatttgaagtgcctggagtatcttctgaagaaaatggtcatagtttccacacacctcaaaaaggaccgcccattgaagatgccattgcttctttccgatgttcttggagactgcttctaaatctgctaatccaccccacacgattcaagcatcagaagagcagagttcaaccccagcaccggtgaaaaagtctggcaagctgaggcagcaaatagatgtgaaggcggaactggagaagcggcaaggagggaagcagctactcaacttagtggtcattggtcatgttgatgctgggaaaagtactctgatgggccatatgctttatcttctgggtaatataaacaaaagaactatgcataagtatgaacaggagtctaaaaaggctggcaaagcttcgtttgcatatgcatgggtcttggatgaaactggcgaagaaagggaaaggggagtaaccatggatgttggtatgacaaagtttgaaaccacaaccaaagttattacattaatgtatgctccagtgttcataaggacttcattccaaatatgattacaggagcagcccaggcgggatgtagctgtttttagtttgtagatgccagcaggggagagtttgaagctggatttgagactggaggacaaacacgagagcatggactcttggtccgttctctgggagtgacgcagcttgcagttgcagttaataaaatggatcaggttaattggcaacaagaaaggtttcaagagattactggaaaacttgggcactttcttaagcaagcaggttttaaggagagtgatgtaggttttattcctacaagtggtctcagtggtgaaaatctaatcacaagatctcagtcaagtgaactcacaaaatggtataaaggactatgtttattagaaccaattgaatccctttaagcttccccagcgatctattgacaaaccttttagattatgtgtgtccgatgttttcaaagatcaaggatctggattttgcataactggtaaaatagaagctggttatatccaaactggtgaccgactactggcaatgcctcctaatgaaaacttgtaccgtgaaaggaatcactctgcatgatgaacctgtcgactgggcggcagcaggcgatcatgttagtcttactttggttgggatggatatcatcaaaatcaatgttggctgcatattttgtggccccaaagtacccattaaagcttgcactcgtttcagagcccgaatcctcatctttaatattgaaattcctatcactaaaggatttcctgtgctgttacactaccaaactgtcaagtgagtccgccgttattaaacgattgattagtgtcttaaacaaaagcacgggtgaagtcacaaagaaaaagcctaagtttttgactaaaggccagaatgcattggtagagctacagacacaaagaccaatcgctcttgagctatataaagacttcaaagagctggggaggttcatgctacgttacggtggttctacaatagctgctggtggttgtcactgagataaaagaatgatgggtcagaatttctaccaccgtttctggatacagtgaaatagctaacctctgtttcaagaatgcagttattaagtcaaaggaacaatgtgcaattgatatgtttttagatgagagagaaaaattaaagctaaaattagctgcaaagaagtattaataatcacctctgcaaaaattctaagttgccaactggcaaagaaagtctaatgttaaaaacaactttgcctttgaaacgttaataaatggattttctttgctaagatttatggccaaggtcaaaaataagtatctgaagatactgaatcatcatgaaatgaactctacttctggccaaagcacaatgtatttgcagttttctcttttgaatcaattatactgcacatggtgttaaggaaaagtaactttaattgggtttttcaggcagttgatatttgacctaagcttttttttttttttttttttttttccagttaatgctaagaaaagatttggggaaggttataataaaagtattttgtggtgaccataagaatgtccctccccaaaacaagtaaacttgtgaaagtttaatttggaattagtggaagctgttcctttgaaagccaagatattatttaagttgtaaagccagctaataaaatgccttagtttgagcataatacaaactgtgttttgttctttagacatttatgagattctctgccactaacagtaaatatgatttaggggttttgtgggatctttttcacctaagagtttcctagctctgtcacatgaattcttttttatcctaatggcagatccaatttcatctcattcatttttttaaccataacttgcttttcccattctcacttttagaattatacctatgatggccctttctttatcttgcttaccttatagattataagtcccctgtgagtaagtaagagtcatgtttttctttaaagtttcaacaacaaaccccaaggtttatttatttaacaacaggtattcgttgaggtgccttctgggtgcaaggagctttagagtagattttgacctcagctgaacctggaactctgatctgatagactgtttatgataagcttttttttttattagcagcgtgatttgtatatcgatggcttaacatatacaacagcatttcttctccctgcaccttttcgtgaacctgacattttgaacataagcaataacatctgtatggtaaagtaggcagattatacatgtgttgcttagtgaatgattaccaagtgaacacacttggtatattgctttaccaaaatacatgtgtagttgtcacttcagattcactgagttaagaaagttttatttaaatattaatattaatcaagaatttaacagatatatgtgacagaaatctaacttcaagtgactgaagcagaaagaaaaatttttgaatgacataactgagaaaattagaggtagctctagctttgattccatttagatcgagcagctcacacaatgttagcaaggactcatctccactctgccttccctggtgctggttttgctctcaaactctatatagaactctcggccgggcgcggtggctcacccctgtaatcaaaacactttgggaggctgagtcgggaggatagcgtgagcccaggagtatagaggccagctaaggcaatatagtgagaccatgtctctacagaaaaaatttaaaaacagatcagctgggtgtggtgccacatgcctgtagtcccagcttctcaggaggctggggtgggaagatcacttgagcccaggaggtcgaggctgcagtgagccatgatcacatcactgcagtccagcctgggtgacagagcaagacctgtcaccctgccacccataaaaaacctcttctgtaatgccaggttcttgacaagatgtgataattccacacttacatcctcagatctcccatccagggcaaggacagactaaaagagcatatcttctccagaagtcctagaaacatctcatcattgactatgattgaattttatttattaatacttccctaggatatcctgtgtttgagtgtgaagttaatatcacacaaagcatgtagctaacagttgtgtgagggttggaaattcagggtgctgttaggaaggggaaatggattggggtttaaggtagggggagtaaaaacaagaaaccatccactctgtatattatataagactgtgatcgaattaagaattttagtttacagtttagcataaacaaatagtagtagaaatgaatgcatttattcattccttccttctccaatagtgtttaagtacaatctttttatttgcattttattgatgattgattgtggttgaaaggagtggtgatattatttcgaggatccactgtgtaagaagactgttggcagtggaaggctcgagttgattaagtgacaaagaggtaaagcagacatgcccaagcttggttatgctctgatttcctaccctgttactttcatccataatttatagtacatccattttgtgtcattttgcttcaggtatttcttgtcctgactgtcttcttttttatgattttactgtttcttcacactaatggctttgtcctctgactttgactctttgtgagattcttctgagcagttaacctctaggataatgtggcttgaacacattacagaactatgttttgacttgttagtattattcacacattcatgacaattgagcctctctactgtgagaaatgttttagaggccagtttctaggcatagctgtttttctcccatgagtatgcaaatcaatagttttaaccattgttaaaatgcaatcatagtgacttcagaaaatttggaaaatacagaaaatatagggaagaataaaattaacccacagttctgtcacctaaaggtaactgctgccaatgttttcatgtatttcttttctgtctctccaatgcatttttttacatagttgtgagcgttagccaagttattttcatgttgttatgtaatcaatatttttcaatagaagtattagaggttttttttattgatataaaaataacaattacagatcctgatatatagaagttattcaaaattatacagttttcaaaaaatcaagacaagtaggcccaatacaaactactgaatcatcttctaatttccctctaaaatatttatagaaatatgtaagtagaaaaacattcatcctttcctcgtctaattatgatcctgccatattccaggcacaagagaaagctctggggcttgagtcttaatagggctgatagtccaaccaggggacagggtatcataaagagataattcaaaactttaagattggagggtaggtgatggtagaaaattctgcggcaaacatttgttgatgctcatcatttgttgatgtcatcaaagatcaccagggcataattataatcaaaattagttttattgatgcttgctgcagcaagagagactgcacaccactggggtctatgggtgcttctcagtgggaaggtgtaaggaggggcttgctaagaatttgagcacatgtagctaattttaaggagggctcaagtgagcaagggtttcttctggattgagtgctgtcagaaagtggattgagtgctgtcagaaagtgggagtgattttgcaactgggtatcttaatttttatgttgtgggtgggaggaaaggaaagaagcaacagtcacccatgttagccacaagaagaggttggctgtttatggtttgcacagtgactttgtttttatctgtgctcaggcatgattacagtatctcattttatcccggattacagtgacctcatctgatgttagagatttgagaattgttaaatgttcagcaggagaacgccaccgcctagtgtgaatgctaggtcagaagctgctttttcacactgaaaccatttaagtatgtacaaataagttaatagtgtaaatgtaggtgtaaaatacaatgcaaaacaaaataatgaagtaagtgaattaaattattgcgaccaaatatggggatatgaaatagggaaagaaaagcattaagttacttatagtccataaagggactacattattatgttactctgataatcccataaaacaaagttttaagaatgtttacagtaaccatgaatggaattagtgaaactattcatatcaatgcaaaaaaaaaaaaaaaaa

SEQ ID NO: 3326 - DNA, 450 bp, Homo sapiens
  SIMILAR (444)..(322): 821254mologous to Homo sapiens PRO2852,accession number AF130079,Smith-Waterman Score=184.
tttctttgatgccactggccactgtatctgcttttgtaaaaacctccaaaaagttatacatcaggtatctctagtcagcttcctccgctgcccacctcttgccacagatgagtgatcactgtgaatggtggtgaccaggtgggcagggcaggggcttgtctaagtgccttagcccaggcccctggcccatcgacctcgaaaacagcaatatcgcctccttcttagatccagttaccaagtcagtctagctgggtgggtagtgctcagacagaaaggctggatgggaaggaagtcacatcctaaaagtccaggagggggccaggcgcagtggctcacgcctgtaatcccagcactttgggagaccaaggtgggcggatcacctgaggtcaggagtttgagaccagcctggccaacatggtgaaaccctgtttctactgaatatacaaaaaa

SEQ ID NO: 3327 - DNA, 1142 bp, Homo sapiens
  misc_feature (1)...(1142): n = a,t,c or g
acattatataattatataattgtataacatatacaatataattatttaattgacccctttgaaagtcagttgcagattcgtgaccctgtgttcctagaaacttgtatctcctaggaacaaggtcctttgtcttacatagtctgtcgttcatgacgttgacatttttgaggagagcttacttgctggttatttggtagagtgtccttcagtttgggatgtctgtttcctgaggtttagattcagataagactaacacatattcctttcagtgcgtcacattagtaagcacattatgtcagtttttcctcctgttggcaactgattctgatcacatggttaaaggtcgtggctgcaaaggtttttccatggtagttaccattttctctttgtaactgataactaatttgtggggtattatttaatcttgtctgtcaataaactttcacctgggccaggcgcagtggctcatgcctgtaatcccagcactttgggaggccaaagtgggcagatcaccttaggtcaggatggtctcgatctcttgatttcgtgatctgcccgcctcagcctcccaaagtgcttttaatatatcccactgatttttttagtatttcgttattttctgacaagataatgctctaggcttatcttgtaattttccttggcccagcccaggaatcagcagtttctccaaggagtttctttaataggtatgtagtagtagtatatagtagtttcttagtttcttttagtaggtatgtccatttagaaggctaaaattggcactaggtattcacactgatactggatatcantgcctttgaggcatttcagcagacagaactaggaaaatttatggcaaataagtgtgtgtatatatatgtgggacacatgtatatatgaatacatatttatcatacttttaaatcatgagttcatactgaaacttttaatccaacaccatgggtgcttctttgccttcccccattctgtattggctctcttaccacagcagtaataaccctggctcccattattctcaatatatttcactcatttgctcagtgctaccataaatacaagtttcagaatcactacagctctatcaacaataaaccttctaaagttcacgacttctttgtagt

SEQ ID NO: 3328 - DNA, 1338 bp, Homo sapiens; identical to SEQ ID NO: 1779
  SIMILAR (706)..(1179): 461254mologous to Homo sapiens gag,accession number AF156961,Smith-Waterman Score=344.

SEQ ID NO: 3329 - DNA, 1049 bp, Homo sapiens
  SIMILAR (233)..(868): 751254mologous to Homo sapiens dJ475N16.3 (novel protein similar to RPL7A (60S ribosomal protein L7A)),accession number AL035587,Smith-Waterman Score=755.
ctagaaagatggcggagcaagagcaaagaaaaatccctttggttccagaaaatctcctgaaaaagaggaaggcttatcaagccctcaaagccacccaggcaaagcaggcacttttggcaaagaaggaggtaatggtggggaaccaagagaaagtaattagaatttttatttggtgagttttatcccgcatgtgttggactacatttggtattgacgagctccccccaacggtttgacagaccagcagaagaaaggaaaagggctcaggtttaagcgactggaatcattcctacatgattcctggcggcagaaacgtgacaaggtgcgtctcagacgactagaagtgaaacctcatgccttggaattgccagataaacattccttggcctttgttgtacgcatcgaaaggattgacggcgtgagtttactggtgcagagaaccattgcaagacttcgcctaaagaaaatttttagtggtgtctttgtaaaagtcaccccccacaatctaaaaatgctgcgtatagtggaaccttatgtgacctggggatttccaaatctgaagtctgtccgagaactcattttgaaaccgtggacaagccaaggtcaagaataagaccatccctctgacaagacattacagtgatggaggagcacctggggaaagtttggcgtcatttgcttggaagacctcattcatgaaattgccttcccagggaagcatttccaggagatctcatggttcttgtgccctttccaccgtctcagtggcccgtcatgctaccaaaaatagagtgggcttcctcaaggagatgggcacacctgggctatcggggtgaacgcatcaaatcagctcatccgtcagctgaactagacccaggtgccaaacttgcggtaaattttttatccagtgaagtgggaagcatgtgttttgtttttggaaatttttatcaagtatcttcagagaagattatttccctgctttatcttccagaaactgggaaagggttcaaagaaaagacagttaggctgggccggtcgtggttggctca

SEQ ID NO: 3330 - DNA, 1455 bp, Homo sapiens
  SIMILAR (1051)..(1329): 551254mologous to Homo sapiens Human myelin oligodendrocyte glycoprotein gene,accession number AAZ29204,Smith-Waterman Score= 181.
ctttttttttttttttttttttcaactttttatttagaaaatttattttatttaaaaggtatatatatacataagtcccaagatataaagttctaaacatagatttaaaaagagcaaaatggaaaaaatataaatatgttgctgttcctgtttatatcttttgtgcatttattgtcttttctaaggttgggcatttttctttattttgcaatttgatcccatacttacaggtaaaaaaaaatctaaatattataggaaagggtattaaaggcaaaaggtagggaattccccttcactccatccttctcctcaggatattggggggaatctccctccccaaactttcaaccacataggatgcatttttggtttccaaaccaggaaaggccattaaccactaacctccttttaaagggctgcgggctggaattgggcgagatggaaggaatttatggtagattaaggctggctggtctcccctatagaatttttgaaggggaatccccacccttttttaaaagccacatccctcccctggtccccacacactgaaacctgcccctggtttgtcctcaaacttgccttttaaactattaaggccctgtttgggcagagggcaatattaatttttaaaaaatggtaagatgtttaaaatgcccatttagcctttagcaccctggaatttgaggcagaaaggtatgaagttaggcaaacctttcctggcccataacccccagttttgacaagccctcaaacacaatgtacaatatttaaagacacaaattcattagggtatggggctcaggaacagcttgcctcttatttaaatacttgcgtgcttgtggttttgcacaatggatgggtaattagagtttgcccttggaatacttggcattgattaagactgttcctgaaatttggttatgccttagtcaaaaaattctgtttattgttcttcagcaagaatagatgtaaccactttaaaaatagttacattgctttccagattaagtaaatatttcagttaggagaatacatatttttatttttattttcagtttttgagatggagtctcactctgtcacccaggctggagtgcagtggtgtaatctcagctcactgcaacctctgcctcccaggttcaagtgattctcctgcctcagcctcccgagtagctgggattacaggcaaatgccaccatgcctggctaatttttgtatttttagtagagacggggtttcaccatgttggccaggctggtctcaaactcctgacctcaaaagatccgcccatctcggcctgccaaagtgctgggattacaggcgtgagaccactgcgcccagcatgtttctgcagaatctcttagctttggtgccaatgcagcaacgttagtgcaacaagctgcaggagtggctaggccctcagctcagccacccgctggttatgggcagtgt

SEQ ID NO: 3331 - DNA, 1524 bp, Homo sapiens
  SIMILAR (564)..(869): 771254mologous to Mus musculus putative,accession number AK016154,Smith-Waterman Score=427.
tttcgtgccacggcccagaggctgtgttgaggctaatggcggtgcccacggaactggatggagggagtgttacggagaccgcagtcggaagaggaatcgccagttctggcacctggcgccgccccgttcggaaattttcctcattattctcgcttgcaccctccggagcaacggctccgcctcctgcccccggagctgcttcgacagctctttcctgagagtcccgagaacgggccgattctggggctcgacgtggggcgtaactccggggatctgagtgtggctctatacaaacacttcctctccctacctgacggggaaacctgctcagatgcctcaagagaattacgtctcctctgctgcgacatagatccagtcctggtgaagcgagccgaagaagaatgtccttttcctgatgccttgacttttatcaccctggacttcatgaatcaaaggacccggaaggttctcttgagctctttcttaagccaatttggacgttcagtttttgacattggcttctgcatgtcaataaccatgtgggattcatctgaatcatgggagaccatgggcctaatgggagttccctggcccatctttcctccctctgccactacctccttgtggagccccaaccctggaagtgttaccgggcagctgcaaggcgtctccgaaagctgggactccatgattttgaccacttccactcccttgccatccgaggtgacatgcccaatcagattgtgcagatcttgacccaggatcatggcatggaattaatatgttgctttggcaacaccagttgggacagaagccttctgctcttcagggcaaaacaaaccatagagactcatccaatccctgaatcactgatagaaaaagggaaagaaaagaacagattaagtttccagaagcagtgagatgggagggcaagaagaccaagaaagatattgaaagggttttatattgagaattatgttcattctccttaattccttaacaatcaggcagccgcaaaacctggcaggagcttttggtaaaatgtccaaggcacataattgaaagaatcagtatctgttccccattgtttggaacaaatcttgaggaagaatgaatctgtggagtgatgagctaggatatctggattgagatggcctaggaaaagtggtcctggttatgggttatggagagggctgcttttggggattatttataaagatcaagactaggctagtcttaaaatatgtcagttcctgggctctctgaatcctacctggtttcttcaggcttctggacttgctaggccctgcctttgggcaaaaccttagtaattcaggtctggaatggggcttaggaatctattttctgtttttttgtttgtttgtttttgcattcttctattgtaatatatacataaaatttaccattttaaccgtttttaagtacagtttttcagaacgtggaaatcccatcaaaaaattggattaaaaaattaaaagataaattgataatttttttaaaagt

SEQ ID NO: 3332 - DNA, 667 bp, Homo sapiens
  misc_feature (1)...(667): n = a,t,c or g
tttttttttttttttttgagtcagaaaattattttaatagttacaaaaatttttttttttttttttttacagaatcagtataaaatagcagttgatttctccataattatcagaattatttatacttgaggtcttggctaagtggggctgaaatcaacaaaaggtcttggactgttggctcagaaatcatcctagaaagcccgccctgttgatatctgtcatgcttagctcttatgagatgacccagtccttannaaanaaaaaaaaaaaaaaaattttaacagaatcggtataaaatagcagttgatttctccataattatcagaatttatacttgaggtcttggctaagtggggctgaaatcaacaaaaggtcttggactgttggctgagaaatcatcctaggaagcccgcctgttgatatctgtcatgcttagctctcatgagatgcgccagtccttccacctctaaggagttctcttgtgctcttttactccagtgttggctccaggaccttgggtagagggtgctggtgatatgaggtggtccaggagcaggcccgtaatgctccttcccaaaggaacccagaatcaggtttccgtacactagatccagcaagtttgttcccttcttttgacacccttccagggtggcacagatttcttctc

SEQ ID NO: 3333 - DNA, 1235 bp, Homo sapiens
  SIMILAR (529)..(828): 971254mologous to Homo sapiens Human secreted protein, SEQ ID NO: 4795,accession number AAG00714,Smith-Waterman Score=484.
tcttgaatacgttaagaaagtcttgtttgtgtagaagagtttcaaatcatgtgagtgatgaagggacccttctgttgaaccttggtgtgcattttaggtccattttgggtttactcctttgtgctgcttcatgatgccttaggacaaggacaaggcctaggcctccttgtctcagttccctcctgctctctctgttgccctcctccttccacctggagcatggcccagcatcaggttggcgcatgctgtgatcagctacctccatgcaccacaccaagcaaagctctctgggtgacacagttgccaccaccagggcactgacccttactctgtgttctcctagctcctcctgagggtgctgtaggagacatctgcaaaaaagaagatgctggcaatatgccatcaacctcagaggggagtatttaccttgaaatggctcacttcctgaggaacaaacttgctggatctagtgtacggaaacctgattctgggttcctttgggaaggagcattacgggcctggtccaatatggcggcacccagtggcggtgtgaactgtgaggagttcgccgagttccaggaattactcaaggtgatgaggcctatcgatgacagaatagtacatgaattaaacactacagttccaacgccttcctttgcagggaaaattgatgccagccaaacctgtaaacaactttatgagtctttgatggcagctcatgccagtagagacagagtccaaaaaaattgtatagcccagacttcagcagtagtaaaaaacctccgagaagagagagaaaagaatttggacgatttaacgttattaaaaccaacttaggaaaagagcagacaaagttgaaaatgggtgcagtcagaactgaatgttgtagaagtggtaaatgacaggagctggaaggtgtttaatgaacgctgcccgaattcacttcaagcctccaaagaatgaataaagagagattctttttttttttttttttttttaaggactgggtcatctcataagagctaagcatgacagatatcaacagggcgggctttctaggatgatttctgagccaacagtccaagaccttttgttgatttcagccccacttagccaagacctcaagtataaataattctgataattatggagaaatcaactgctattttatactgattctgtaaaaaaaaaaaaaaaaaaaaaattttgtaactattaaaataattttctgactc

SEQ ID NO: 3334 - DNA, 360 bp, Homo sapiens
ccagcattcccaaattgatgaacatcaaggttgttccatttttcttttcctcgttaataagacagcaataagcttctttgttataataacgttgaccctttcattgtcttaatcgcagctcccaccacagtgtttaattcgtatgaggtacgtgtacaaacattagctaaattgaatacactttttaaaaactgtttttcaagccacgtttcgtaatactagaattaatgaatcaaacagtatgaacttcttatggttcttataacataatactttccaaaagaataatgtcattttataatccacaagatatgagtgcgtgatctcgcccattgcaatacatgccagaattagggttaa

SEQ ID NO: 3335 - DNA, 622 bp, Homo sapiens
ggcacgagtaaactctaatactggcatgtattgcaatgaacgagttcacacactcatatcttgtggattataaaatgacattattcttttggaaagtattatgttataagaaccataagaagttcatactctttgattcattaattctagtcttaagaaacgatgcttgaaaaacagtgtttaaaaagtgtattcacgtttagctacatgtttgtcacgtacctcatacgaattagacactgcggtgggagctgcagattaaaaaaatgaaagggttaatgttattagaagaaagatgtttattgcagtcctattatagaggaaaagaaaaatggaacaaccttgatggtcaacaaatttgtgaatggtgttaaattaatattttggcatattatgcagctttaaaagtgataattgtacatactttaggaaaatgtagagaaaatttaagtaaaaaaaattaattacatcagcactagaattatgtatttaaaaagtcttatagaccagggacagtgctcatgcctataatcccagcactttgggaggttgaggcgggagaattgcttgagtccaggagttcaagaccaccagggcacatagctataccctcatccctacc

SEQ ID NO: 3336 - DNA, 560 bp, Homo sapiens
  SIMILAR (556)..(161): 361254mologous to Homo sapiens PRO2852,accession number AF130079,Smith-Waterman Score=149.
catctaaagctgttagaacaaagaaaatccccgaaagatacatattttaaaagttaatagctttctaataatagagattcccatgctgacagcaacatagatataaaacagccaagaaagaattaattaaggtatatataaaacctagacaaaaagaagaaccaagtataatgaaaaaaatcaagaaacattgacaataatggagactaaatccctcgatggaaagaattataatcataaatgtaagccttaaagagttaactttagatgtagacaagtcaaactgaagcactaaaaacatgttcgaccttatataacacattccttagggggaaaaaaagattttttaatattggaaaaaatatggttaggcatagtggctcatgcctgtaatcccagcacattcagaggccaaggcgggaggactgcttgagcttaggagttcaagaccagcctgggcaacatagtgagaccttgtctctacttaaaaacctaaaaagattagctcgagtatgggtggcatgcacctatagtccccggctactagggaagctgagggc

SEQ ID NO: 3337 - DNA, 1108 bp, Homo sapiens
ctcagtggtatataaaacaatgatacaacttcaaagaatgtgtaaagattttttaaatatttcttttctttttttctctttcttatatcaccatgcctgtggacagaaatgtcttaagatttaacaaaaatacatttatgtcatgtaagcctaaaatgatggtttgcctaggctgaatgtaatcatattttcaatacagtaagtgtgtgctctgtatatctgaagagcgaacctcttttatacccagtacgtaagatgttaggaaataattttggattttcctcagatcattttatgttataaggaaacatttaataggacatttccatccctggcccagggttctcaaatgctaaaagcatggtggatggaaggtccacggagggccggggcaataaaggcaaaaggggacagggaaggagggtaggaagggacttcggggtaggagggaactaaccgaggaaggggccaggccactcttctcttcgggaccagtggaaagcacacagattgtgccccttccgcagcctccctatgtgggtgccgctgcttcctgagaaagccagaaggacaggagtatcatcaggggcaggctagctctccatccacaggaaggcagaggggctgttctaggaagcaggtggagaaggtaaaggagttttcttaccaaagaccagtggtttcggcaggcacagcggacaagatgaagagagaacccaccagcaaatgcagataaagtctaaatgagggcgatggggcagctggtcgtaatcatgagtgaaggaaatggagcataatgtacctctcaggttccaaccacagcctggtgagctgcgaagccaatgggaatgttctctggaaagttctcaagccaggggcgcatgcccagcccgagtcctggtggaggagccctgtgctcgaggagatcagggcggctgtggtagtggagacctccccaaactgctggccaggagacatcagcagtcagtggctaccaaacaggcaagaccaggactgtttctaagcaggctgcgtttggggatgtaaacagagaccagatgcagaaatccccggaagaaaatctctcagtattaaattatggtgcaat

SEQ ID NO: 3338 - DNA, 369 bp, Homo sapiens
  misc_feature (1)...(369): n = a,t,c or g
ccccgcagaaatgcaagttacagacacatatgcttggggcaccaatttgaatctcccaccatccaaggccacatgaacacaaatgcgcagtctcctctgcgatcggtagataaggatgttagcccatgattggactaggatgggagatgacctgagacctctggattctgtaggttgtagttgtctcttcccacccccaagcaacaagtgatgnnnnnnnnnnnnnnnnnnnnnnnnnnnnnnnntcctgtagtgactaacaggatctccctccaggggatttgcagaaaggggagcagaaaacatcccaggggcctttcacagctacttccttgagccccctttcagactgctgtctagacctgtcgc

SEQ ID NO: 3339 - DNA, 593 bp, Homo sapiens
agcctggtcctgagcccgctgaaactgcagttacaggcacacatgcgtggggcgccaatgtgaatctgccaccatccaaggccgcatgaacacaaatgcgcagtctcctctgcgatcggtagcataaggatgttaggccatgattgcactaggatgggagatgaactgagaactatagattctggtaggcttttgttgtctcttcccccccccaagcaacaagtgatgaacacacacacacacacacacacacacacacccacacacacaccctgtagtgactaacaggatctccctccaggggatttgcagaaaggggaagcagaaaacatcccaggggcctttcacagctacttccttgagccccctttcagacagtgctgtctagacctgtcgcagcccaaacatcatcaccctgatatgcagaagctggcatccttacctgaaattcaacaccaagaaatgatctcttctactcaacactgatagaaatacctctaagcaacgtcctcattggcaggggtggagtggggagtttcttaaaaagggagcctctgcctaccacctagagaacctggaaatttccatctgtg

SEQ ID NO: 3340 - DNA, 941 bp, Homo sapiens
  SIMILAR (220)..(369): 761254mologous to Homo sapiens dJ475N16.3 (novel protein similar to RPL7A (60S ribosomal protein L7A)),accession number AL035587,Smith-Waterman Score=175.
  misc_feature (1)...(941): n = a,t,c or g
cggacgcgtgggcaggctctaaaaaccctggaagcgttgcttcttttggcaggaatgggggttagcaggacctcaatggctcactatggctaagtgaacgctgactgggtcctccagcgtgagctagaacagacgtctctatggtcaagtaaacagcgcgcgtgctgtctttcccatgtggtggggttgcgcatgatcagtagctgcaccactagaaagatggcggaggaagagcaaagaaaaatccctttggttccagaaaatctcctgaaaaagaggaaggcttatcaggcactcaaagccacccaggcaaagcaggcactttttggcaaagaaggagcagaagaaaggaaaagggctcaaggtttaagcgactggaatcattcctacatgattcctgggccggcagaaacgtgacaagggtgcgtctcagacgactagaagtgaaacctcatgccttggaattgccagataaacattcacttggcctttgtttgtacgcatcgaaaggattgacggcgtgagttttacttggtgcagagaaccattgcaagacttcgccctaaggaaaatttttagtggtgtcttttgtaaaggcaccccccaggattcaaaaatggctgcgtatagtggaaccttatgtgacctggggatttccaaatctgaagtctgtccgagaactcattttgaaacgtggacaagnccaaggtcaagaataagaccatccctctgacagacaatacagtgattgaggagcacctgggtgagtgctacagcttaggggtcagctggggcagaaagccagggtctttgaagctttgatgtgagattcacggttgtattcttcttggggccccaagagtctgccagagtggccagcttagtatatgctggatacatgttaaataaaggaatctgagcttttgtgtttcttagagaaa

SEQ ID NO: 3341 - DNA, 757 bp, Homo sapiens
  SIMILAR (605)..(474): 531254mologous to Homo sapiens Human ORFX ORF3056 polypeptide sequence SEQ ID NO:6112,accession number AAB43292,Smith-Waterman Score=143.
ctcattgttttgtctacatatagaactaaaattctgtttacttatgtgagtctttggctagagacatagaatttcagtcttgactgtgtgagcttaatttctggcatgtgggtttttattggctgcagaggaaacatctctagcagagatgacctgtccctcaaatgtaggaaatacctgtgtaaacctaacacctgtgactcagaatagaaatggtaccaagtgagtggcttcttagcccatcagtaaagttatcacaccttggcctcccaaagtgctgggattacaggcctgagccactgtgccaggcctttgccatcagtttttaaaggaaatagtcactgagcactggatgctaggtggcaggttttttctttcagcttttttttttttttaaagccatcatactttaatatctttcagcactgtcaggttatcttctggcttctattatttctgttgagaatttagcccaggcatgggggcttatacccgtagtcccagcactttggaaggccacagtgggcagatcacgtgagcccaggagttggagaccagcctggccaacagggtgagaccttgtagctacatgtggtagccctttttcagtacattggccagtccagctcagctggatgtcatttacatatgtgtcttatattttagatacaaaagacttcttaaaagcttagagcataacacaaatatttatttgattgcgccatctaacaaatctgaataaatacatttcacgtct

SEQ ID NO: 3342 - DNA, 799 bp, Homo sapiens
accgctccggaattcccgggtttgccttttgttttgtttttgatgccgcatatagtgaaggggtgaggatattctatacaaacaaaaattgaataatttattcacagaaactattaagattgtattgtggagctcacagcaaggctcagtgggcagcagctgcaacatctcaccggggaaattattttatttaacgtgagtgatgatgtgggccggagaaggtagctgaagctatttataaaacgttgtgtaccttcttccgagctctctcccctttgtgaagggcgcagcaactatacccttgatggatgggagatttacgcaatgtgttttactgggtagagtgacagaccttgggctgtccctgggagtttgaggaatctgggaccttatttcccagggcagagaccactgttcctcagaaatgggacttctgataatgaaacaggttgtccaacattttctaatacgcattctacagaacacaggttccaggaggcatcaggttggtgtgatgcagactaagggttttgtggtcaaatatccttaagaaacaaagttaagtcagtttcctttctgcaaggacttttcagccttcaatgtgtgctgtgcatggtgaatccccaaaaataatccttgagtctgtagcatttcctgaacttacatgaccaggatactctattttgcagatcaccccacagagctagggttccaccgagtatactttgcttaggttgacttagcatatctgaggtcttcaaggataaaaactgccaccccaacacccttccattaaaaa

SEQ ID NO: 3343 - DNA, 837 bp, Homo sapiens
  SIMILAR (618)..(4): 1001254mologous to Homo sapiens ribosomal protein S6 kinase 1,accession number L07597,Smith-Waterman Score=1075.
tcacagggtggtggatggcaacttcctcactcgccgctgggccaggatggatgactcgatgggcttcagctggggggtgggcttggagctgttgagtgcggagtacgtggcagccatggctcccttcacaagctgtaggtcctggtgggacagctggctttggggaagcttgtctttctgggtgacccatggatgctgcagaacctgcttagctgtgaggcgctggtggggatccacgtgtagcatcttggacaccaggtccttggctgtctctgaaactgtgttccaatttcccccactgagggtaaacttcccactgccgatccgggttaggatttcctctggtgtgtcactgggaccgttggcaaatggagtatatcctgccagcatggtgtacagcagaatgcccaggctccagatgtcgcagccttcatcgtagccctggcgcttcagcacctcaggcgccacaaagttggctgtgtagcaaggtgtcatgaggagcccattctcagcccgcagctgtttggcaaaaccaaagtcacagatgcgcaggcactcgggattcccggactcgtccacatacaggatgttgctgggcttcaggtccctgtgcacaaccctaacatgggaggcacagccatcatctgttccagcctcactgtccattgcatccctcaggtgccctgagctcaggccaccaggggctccttcggtaacgatcataaccctatgtctgtggaatgcccgttcaccttcagcacccagtgcagggcctgtaatcccagcactttgggaggccgaggcgggtggatcacgaggtcgggagatggagaccat

SEQ ID NO: 3344 - DNA, 1050 bp, Homo sapiens; identical to SEQ ID NO: 679
  SIMILAR (537)..(4): 1001254mologous to Homo sapiens hexokinase IR,accession number AF016365,Smith-Waterman Score=887.

SEQ ID NO: 3345 - DNA, 387 bp, Homo sapiens
  SIMILAR (274)..(122): 511254mologous to Homo sapiens PRO1722,accession number AF119851,Smith-Waterman Score=114.
  misc_feature (1)...(387): n = a,t,c or g
ctttaactagaggctattaaatcattaataatgtttttgaattatgtaagtctttcaaaacccaggaaaggtaaagtataatccataccatttcaggtggaaaccgtctttggcttaagattattaaagcatggccgggcgccgttcggttgctcatgccttgtaatccccagncactttggggaggccgaggccgggtggatcacgaggtcaggagatcgagaccatcctggctaaaatgacgaaaccccgtctctactaaaaatacaaaatattagccgggcgtggtggcaggcacctgtagtctcagctactccggaggctgaggcaggagaatggcatgaaccccaggaggcaagagcttgcagtgaagccgagttcgagcca

SEQ ID NO: 3346 - DNA, 786 bp, Homo sapiens
  SIMILAR (293)..(406): 841254mologous to Homo sapiens Human secreted protein encoded by gene 81 clone HFIVB57,accession number AAY02730,Smith-Waterman Score=164.
tttaatatttttatttttttttttgaatatcatcagcttacttgtctggcaagggcagaagcctggggttggcctgaactctgccaaacaaatatcaaagtgtatttaatagttaaatttgtgccctttcccttcttgctgcacccatgttgtcacttaacccccaggagttatttattatctttttgttaaagtcaggctcatttggggtaatgtgatgactgtttaggtttacatgaccctcctctcctttccctacccccaaatatgtatatatacatatataaaatatgtatatattttacctatataaaatatatatatatatacacatatatgtatctatattcctttgtttctttgcctgcttatactggccataaaagagggagctgccttcaatgtataaagtataaggaagaagtgcccagggaatgccataaatggaggcttttggatctgaatttggaccatttcactaaagagaacatgagtttgctcagccctttcctcaccagaaggaagggccccggttccccagacttctccacgcgctggctccataaaggccaggctttggccgggctgccacaggggcctgaggagctcactctgggcctacctggtttcagttagagggtcctcctgttatttttccatttaaaaagtatgtcctcagaaaactgtactggaaggatgggtggcaggaacttgtatagttcagcttccaacactttggaacagattaaaaagggaatcttttaaataaaaaagaataaaaataaa

SEQ ID NO: 3347 - DNA, 2167 bp, Homo sapiens
  SIMILAR (71)..(3): 341254mologous to Homo sapiens Human myelin oligodendrocyte glycoprotein gene,accession number AAZ29204,Smith-Waterman Score= 46.
cttaatatttacagtttatactctgggaagagaccttgttaagagaacaaaaagacaagccacatattgaagaaaatatttgcaaaatacagatctgagaatttgtattcaaaatatataaaaaattgttaaaaactaaacaataagttaaacagcccaattaaaaatgcacacagatctgaacagacgcctcaccaaagaagatctacagatggcaagtacacttacaaaaagatgctcaacatactagagaactgaaaaccacaaaaagataggcacagctggttctatatctcttagaactgctaaactctttaacaaatgacaaattgctggaggaaaaacaagaactcttttcattggccggtggaacacagtgtataagaccaaaatatgccaccccaaaatataatggtaggaaaccagaatatgcaaccccaaaatatgtccctttggcttaagaattattccaagctaattattttgaaaaaaaaaaatgctaacaaaggaagttgtgaaaacagagtagaagttacttgtgtaaggaaaatttacatctataaaggaaatcaccatttaaaagctacctctctcgacaccaagaagagaaggataactaaatcactaaagagtcttatcaatggagaatgcatggacttaagtctgtataacgcaccttacccttgtctaatgtgcttttgctggttagctccccactactgcacctcaaatcttctttctttaagttgaagatagtatttatgcttcgaattgaaagccacctgttggagatttactcatttttccctgagtatctcccatgtaaccataagatatacatcgtttttaaacttttctgtttttctcattttaatctgtcagtttttacagagcatcccatctaagaattccaaaaacagaaaattatttttcctccccctattacaagttgaggcatttttttccaaagctaaacaagtctcaccttacaatccaaaaataacattcctaaggtattttgacaactactttgatgttacttccaatcaaaagctaccatgcaattatttacataagccctattcataatgaccaaaggagaaaaacggaatcagaaagtcttacaatagatgactgtatgggaatccactcagacatcaaaagttgttataaagattatttaaatgaaaacatttgagatactgaagataaaagaagaaatcttaccagaacttactttatccaattaaagcagagctcccagaaaaatacagctgccattaaccccatccaaggagtttcttgcaaattcagctgccatgaagacagcgtactctttcgcattagcattgataaatgaaaattaaattctaagctcccaactgactgaacagacccactcttggctgaggggaccccagagtaactttcaaaactgagttctcagctttgctaggatgggatgatggggttaagatacacatcgttataccccctcctttgctaaccatgatgaggctttcttccctaaggatttaacaggaaaccagccctttcaaaagcctccactaccggatatcaacctctcctttcttgcctaataagagaccacccacgatggagaggtttctggcccagcgtacagaggatgcacagagcgagttttcatgtcctcatgcttcaccttttaatgtcagagggctgaaaactccaccctgggatcatgctaacacatgccattttttgtacatgggacccatgaagaagccagaaactcaattgtgcatgcatgcatttctccttccataaatattcatgactcctccctagagcttattaaaataaatgtatttggcccattccaagtcagcataaaattgctatttcctttacctcctccttgaactagtctgtttctggcttctggctggaggctatgcttcccagcctgtcagaaggacaaccctgcaggctacaaccctttataggaaataaatctctcactggttgggtggctcatgcctgcaatcccagcactttgggaggctaaggcaagtggatcacctgagctcacgagtttcagaccagcctggccaacatgatgaaaccctgtctctactaaaactgcaaaaaattagccaggtgtggtggtgggcatctgtaatcc

SEQ ID NO: 3348 - DNA, 1323 bp, Homo sapiens
  SIMILAR (1145)..(1321): 541254mologous to Homo sapiens Human secreted protein, SEQ ID NO: 6613,accession number AAG02532,Smith-Waterman Score=155.
ggaatgcctaataatagcaacccttgtctccctcttctctcctttgcaaatggctcagtgactggaagaggcggactaatagccagagttaaatataaatacaaattaataatacatagagaacagcaataccagaaaaaaagaattctggtaaaatgatgtgaaaaattgacagctccctcactcttaaggttgctgctatatacagtctaggttttctgtttggaaataggtagggtaaaatctaagacctgcacaagggcagtgagagacatttacagcctcctctctatttgtttttttaaggaaaagtcaactcctgaaatgtcccttagctataatcagaaaactaagaatattattctgtgtcaacaatgtatttatggagagaagtaaaaataagttccacagcaacacatttacatgaattatgaactaggattcttggatttcataatcactccaaagctttttggggatggtgtgtgtgtgtgtgtgtgtccgtaattgttcatcattactttttttaacctatctttttgcttgcttaatcttctctgccccagttcttcctgagtatatgaatttgatttctaaaaacaatttattcaacactctatcacccgtattctctctctggctctgctgcaggtctctgcactcctgattttgctccatacttttaaataacaataataaatatacagttttcatttctcatttaaaaaataggtggaaaacaccaaattcactttctgttccattttaattaggtttcagaagtatcttggaaatcaaggtatgctgcaagaggatattaaaataagaatgttagagagtccttttagaaaggcagtcttgggaatttggaaaaggatttttaaagcagctttcatcagctagactgttctccagcctttctttacttcctctttgaaaggacatagccctggtttctttttgacacaaaggaaagctatgccaaatcatgatctgtatgtagaattggtcacaagtatgttgttgcataggctgtacagttgggaattagaaaccaaatgctacccagagacctaacccaattaagctctttgtatttctccttcaagaaataaatcttccttccttctttcttcctctttcttttaattttaaaaaaattcatcctgatttttttattttctatcttatttaaaaaataaaaataggccaggcgcggtggctcacacctttaatcccaacactttgggaggcgggtggatcacttgatatcaggagtttgagaccagcctggccaacatagggaaaccctgtctctactaa

SEQ ID NO: 3349 - DNA, 1888 bp, Homo sapiens
  SIMILAR (1699)..(1583): 971254mologous to Homo sapiens Human secreted protein sequence encoded by gene 6 SEQ ID NO:65,accession number AAB64427,Smith-Waterman Score=225.
  misc_feature (1)...(1888): n = a,t,c or g
attacgaaaaaagggggccaccgggattttaataaggggccccgccaaaaaagggacaatatagcaaatctttgttcaaagggttttattataataaagagttagacgacacatatttttattttatatttatttagggatggtcagtgcattttattgaatcagcacagtacaaaaataaataaaaataagggaccagggaattaaattacagccaaactgagcttcatgactttgtcagattataaaccacacatactcacaaacacactacacatacatacaaaatgagacaaatataaattaatattaacaatacccacagtttgggtcaaagaataggctacaggaaggaaattgcactaaaaaaccaacatacatcacacgtgtgttaattaggcagttttcaaatattacagctatggaattaattctgaggtggaaaaaatgggccacatttccctttttcattggcaggttttaactggttggaacaaaactaagttctaataactggcatgggaaagaatatatcaakccccccaggtttacaaggaaaaagagaaaaaaccaaatcctgaactattattcctgtggcttgttctgtgcatgggtgtaattttcacagccatctgttctaagattatttttcttaagacacggaaatgcvccctggtttgcatgcacaatatcaccgtaaaagcaacaattaaagaataaaggtttttttgtaggtttttttttattgttgatctaaaagtagtcttcatagcagcatggcaaatgggttctttgcttgcacactcaagtatatcaggtgttcctttacacaatactgatgaccagtgcaaggggagagaacacgacaggcttcacactgagggaactagagagttcttcccttagtccccaccacttccgaaatgtccacctcctccgaagaataaaaaaataaattacggagaaagagaaggaaacagacacacaactgggaatcctgtgggatggcaacggtaactggcacagtttcggcagccgggtttccgccagctgaggggtgattacacacatggcggccctccctcctggggatttgggcacttgaccctccctcttccctggccagcaggggccttccaccttctggtcgcacgcggcaagcaggatctgaaagacaggctgtgtggaaacccagcagaagaggaggtgctgtgtgaagtctgtgccagccagccgcaggctccttccaccgctgcaccgattatctgacagtcccaggaacggctctgctgggcctcaggtgcagcaaggcagatgttctccggccgggcaggctcttttccccacctctgggaatgccttccagccaccaggttctgcctccagggactcttaaattgggacttcaatttcaacaacttcctttttgtgtaaatttcaataatgcaatgtgctgaaatcggtagccacctcgaacttaatcctatgtaaagtgaccctctgcctccccaccccaggtccccattccagcacttccccagtggactgggcctggaagacagaatcctctgtagtgtcttcacattggtctttgttctccacagccgagtgatgggccatggagaaaggcttgctccctcttccaagtcccaagccaccaatgcgggagaattagaaagaaaatcaataaagtacacatttgtgtttttacagccagtagggtaaggtggaaaccaaaaccagcagctgcaaatgatcagttgtagaaatcagcaggcttccagagcaatcaggagtctcactccccgtcttgtaattgtctccaagatccggctgtctcactggtccttgctgggcaaggcttcctctttagnagaaactcagacag

SEQ ID NO: 3350 - DNA, 2490 bp, Homo sapiens
  misc_feature (1)...(2490): n = a,t,c or g
aaaaaaaagccccatgtccaagaccacgtttttacaaatttttccccctatagcccccggcnnnnnnnnnnnnnnnnnnnnngagagagagagagagaaagtgaggagggtggagtggttataactgaagactggctataattctcgtacaatgtttatagtttttaaagcaaaataatgttcatgttaaatacatttaattgtgaaattggaaaataacttgcatcttctgtccaaagaaaaatccaaccagaggtctgggatttggcaagaaggctaaaaatctggttttcttcccacggcattatgtagaccaattcaacttaagagctaaccattaaataattatcttgagtatcttagggttgtgttattaaaataaatttggaagtaggtggggtttatactcaatgaaattcattggcgttcacaatgacttttccatcatgtgttaatttcttgtacccttaatatgttattttccaaggacttgaaagaaatggggtaataaataaaagctgcatttctagagaagcctaaccaaaaatagaatattaattttctttaaaaaatttaactatttgaaaaatgtaattcacagcatttaagtagactgcataggtcctcagtgaaaggaccctgaagaagcatttttttaaaccctcatcatagttagcagtgcaaaacatagacttatcagacaaaaatcaactaaaatgttaattttgaaataaataactaacatataaaataaaatgaggccattgttcctctactccgtagatccttagagtctgcaggaaatgtaatgtgacagagcacagcacagttgtcacggagaagtttgcctcatctgaacactgggtgcattgatctgcaacttgaaacttgatgtcagtgttaatcatgatctggcttcccaggttcacagttcaatgatgacaatgatggaaattttctctaaactctacatgaaccgtaggagttgagaattcatttgttttcaatgtactatttcttttattttttttttccagcaaaagataatcccaaagcaaatttgtgctagggttctttgaacttggctcttttacctcatggttgaagatcttgaaagaagtatgtaggataccactgggtgatgtacttgtcaaggccctgaaaagtagcctaccatgccattctcccccactctcaagtaggcacttttatgttatgggaatcaaggggtgggaggtatcattattcctgggtagttatgggtttttaataaatatcattactggcaatatcagacttcaatcttggccagaacttcaaaaaacattattccaatttatgtcttacggaaacacttaaaaaaaaagactatcacttgagaattttctttgcaatttcctgtaaatgaaaacatttgtttaaaaagttcatctatgaaaaagttctcacatatcttaaaaaaaaaattcttctgtacacttgttcccataattatgttgaaattaatggaaaatttaaaaagccaatgtaagacaaaggaaggtaaatactgtacacttgctgagaacctcttccaccataagattcactgttttcccagttctgatcatagaagccatttcagtcttgaacttgcagtagtaaagaagctgtgaaaggcacaaccttgtttgactggagaggccacaggtgcactgaagtgggattcaacacgcatgactcagcatcaaactgttggaccaatcagatcagcttctagtaccccccacacacgctcaccccacggtgttcctttaagtatctataatcctatatggatgttttataaacttgctgtctcacattaaaaaataagtgcatcaagtatctttgtacattcaagtcacttcctaaggcaaattgtctaccatatgtactcccaactgctttggtatttgcttcagttaattggggtggacttgggtgttgctgcatgcaggttaatcgactcagagtggactaagtgggtggacaaatgctgggagcatgccttagatcaatctacttgtgtgtttagagtctgagagttctgaatggggcccaaaccacttgcatggccagtctacactcactacattatgtcagtgtgcagccttcaaactgaaggagcttaattaagatgtgaaaatatcacatgccctcataacaagtgttgttctttttactttcttctagccaacttgttttagaaaattaagactctttttgatgactcagactgacaaaaaatggaaaactttgcctatgtagactaaagaatgcctactgcctgagaaaatgcagacctaattgttggtttattttctcctccttaccccaccctgctctctctttttctctctgggtatctcaccagaactctctgtcattacatctccttctcttgcattccttttctttctcattctttctctctctctctcctgcgttatctttgtgctctcactctct

SEQ ID NO: 3351 - DNA, 370 bp, Homo sapiens
gatcagcatagtacagcgagcaagcgtggtgagccacgcgcagcagactaggcaaacatactcgcagatctaaatcgtcagccatccaggcagtacggatcatctcccaagtgctccggtgcaagcaaagatgtatgcactgtccgagaaccattccagcaacactgcaagagcataaaagtgtaaacaacccaagtgcccaacagagaaccaaaacgtggtccatccacacgccagcacctcatccacacaccagcacctcatccatccacacaccagcacctcatccatccacacagcacctcatccatccacacaccagcatctcatccatccacacaccagcatctcatccatccggacgcgtggg

SEQ ID NO: 3352 - DNA, 1423 bp, Homo sapiens
aataatctgaaccagatatttcatgatcgaaagcattgttggagacagacaatcaacttgtgttttgcctgtagtagcttttcaataatatgtcccaattgttatttaaaacatggcttcatatgacagaacaaggcaatctatcaaatttacaggaagaatcaacatgctggtgagagtcactgatggcttctaacaaatagaaaaagaggaaactttaaatccacggcatacacgtacacacacacatgcacacacacacacaccaaattgaacaaactggaaactctcactctgtgaaaagttgtattctacacatttctgcacagaccacaaggcagtgttatttccctgatgtttgagttgttttgttcttttgtgtgttttgtttatttgtgtgttgtttgttggttttcgtttcttgagtttttgttttgttttcaccacatctgttatttccactagtttttttttggctgtgtcatgacaggcctcatggatggctaacagaggattcttcccttctttttttcccaaaagcaccaaaaaaaaggggctggaggtagtctctgtaggcatctccccaaagtgttaaacaggctacataaggtgaagccaagggaggggttttcactagctttcattttataattatttaaagtcttatgtgtggatacccaagagacaaaaagttatcttccaaaataaataatcacagaagtacttttttaatgaagagcctatctgtttgcattctagaaaattaatttatggtttccattgttttgcatggaagacttttaaagaagtcaatctgcaactaatgctggggactaaaactaactgcataaattgtacttttgaaaacactccttgtaatgcctttttcttcctgatattaaaaaaatgctcatgtgtataaaccatactttgacttcccaaaaatggtgactaggaatggattttgagcctaagacacttttgagctatgcccaggcttctcagccatgcctcagtgtagacacatccatctgccctggaaagagcatggtatgagctgttcaatattccactggaaattccagttgaaatattctgcactaaactattgtttttattgaaattttaagtttaacatttctttgaagattgatgcaagcacaaagcttgattttttaatgcaaaagtatcttactttttggggggaaaataaacaaaaatgaactttcaatttgcattttcatttagtttctcttggccttgaatttcccttgtgacattctgtacatgtgctacaaactgcagtctctgcaggtgcattgatatgttctccctccttttatgagtcactccacttttgtggattacacaaatagagcagcatgacttggaactgttcaaagctgcatgcacattttgtaaa

SEQ ID NO: 3353 - DNA, 1334 bp, Homo sapiens
gggtaaaaggggttctatttgcttaaactcatgctcgtaggcaattttagggctctctggggctctgaatggtttctccaccaccacctttcttccaccaatagaaagatgttgtccttacaaggccatgtctgagaagaccatggtttaactagtaaaagaagctcacattgcagagagctgaataataccaggctcttgactttgtactgtgtgtcacagtcatgattgggacagaaggaaccagtctgctgaaaagtcaagccagcacaaatatttggaaactaattccactgaaactcttgtatcattaaatcatactattgtagtttcagttaatgtaattatttaatatcaggcactaaattaaatagctttgcacaaaattttagaaaagatcaatcttgtaacaaaatttaatattaacagtaaaaagcacctgagaaaagaaaatatcgatctgttgtggtttatatacttgagttattcttagaactttgtggagattgacaaagctctgataaaaaggaagaaaatgttttgaattcaagaatgctagactaatagaaatagcccagtctctctgggccactgctcttcagtatggggtgctctctgtccctccttaacagatggggttgtttggaggctaaaatgagctaagggaagaagctatactgtgcctccaatatcccttatgtgtaattagagtgccgatctgggctgcaggctttattcaatgattcctttcccttacttgaggctttctctgtagagctgttatttctgagcctccattctgggatttacaaaggaaacagaatgatgaagaagtaacaatcagcattttacacacacgcacacacacacacacacacactttttctaatatatgaggctagtctgcagagtccacagcccaggtgtccatttatttccacttcttcacctcccaaagatttagagctccatgatctaccaaggtgaagactgccaatcccaggttggagaagacccgtcagagtgtggaggtgccaaactgagaggcacaggaagcagacagccacatcaaacttttttgatgaactactgcaaattggtgtttgttctaggaaagaaagaggaagaaaaattacacaatgtgaattgaacataagagcagtgctctttacagagtatgagaagggaggatgggggagaatctgattaaaaaaatgattcattccttcacagacactaacaaacatggctaaaaagcacatgtcagaacacagaagcctaggtagatggttgacatttttataacttccttaagtgagtagttaaaccagcag

SEQ ID NO: 3354 - DNA, 801 bp, Homo sapiens
  SIMILAR (801)..(634): 711254mologous to Homo sapiens PRO2550,accession number AF130089,Smith-Waterman Score=191.
tttttttttttttttttatttctggaatggctaatttttatttaattctgtaagttckaaaaaggaaacatatttgaaaaaaacaaatttcaaacaaaaataagcataaccaaatggaaataaaagaataaataaatgtcaatcatgaagtgtgagtgtacacaacggaaagtcatacccaggcttctccacccataacttagacagctacagggcctggttccgagcaatagaaagatgtcaaacatgatttttaaaaataactactaccagttttgaaaagatccctggcgaaagaaaccccaaaatcaacttaataaataactgtacaccaaagggaaagggttgtgttttctttgatggtgtattctctatggcaagagagttttaatattttatcaactgctaagaagataagcataacctctttcctttaaaaaaattccccctcaaagtgtcttctgtccagaatcgatagaagaaggttaagtcagagagtgaagcccttgtgaccagacccctgtagaagagggaatgcttcctaaattccggaagtcgctgcaaggattcagtttaaactttcatgatattctaatcttaccatctcaaaagtagttctgtatcaggggatctaaaacaatgtatatctggccaggcacagtgtctcacacctgtaatcccagcactttgggtggccaaggcgggtggatcacttgagatcaggagttcgagaccagcctggccaacaaagtaaaaccccgtctctactaaaaatacaaaaattagctggtgtggtggcgc

SEQ ID NO: 3355 - DNA, 1732 bp, Homo sapiens
  SIMILAR (131)..(54): 761254mologous to Homo sapiens PRO2829,accession number AF116715,Smith-Waterman Score=116.
gtatttttggaagagatgggtttcaccatgttggccaggctggtcttgattgaactcctgacctcaaatgatccacccaccttggcctcccaaagtgctgggattacaggcatgagccaccatgcctggccagaagatattttaaaaataataataaaaaagataaccttttatcccatcatacacataaaaccactgttaatattctaccaatattttcttcctgtactgatgtatttttacataatcatgatgttgaatgtaatgttttttcactagatttagtaaacatttttcaaagctgttaaatattcttcaaaaacatgatccaatgggctgtgcaatagttcatgtggggatcatccattacactattactagacaaattgtttccacttttcaccattataagtgaagacgctgtgtgaatcgtgtttggaatctgatttttctcaggtgatctacctataagtgcaatcattggatcaagggtagaaatatcttttagtgatcttgctaaatactgcctaactggcctacagaaaatttgctaatcatagtccctctaattgtatataaaagtgcccactttgttatactcttttaaaaaattcttttcactccgttttaaatcaggaaggggctttgtccagttgggtctctggaaacagtgggtcttgcacactgtatttttacatatgtgtattttccagtatgggataaggttcgggctggatatgggtttgggctgtgtcccctaccccaaatctcatcttgaattaatagctccccataatccccacattgtgggaggggacccaagtgggaggtaaattggatcatgggggtgggtttccccccatactgtactcatgggtagtgagtctcatgatatctgatgggttttataaagggcatttcccctgcacatgttctcttgcctgctgcccatgtaagatgtgcttttgctcttcctttgcctttcaccatgattgtgaggcctccctaaccatgtggaactatgagtccattaaacctctttttcttttcaaattactgggtatctcttcatagcagtatgaaaatggactaatacaacagcattcaccagggaagtgactagggaacacagagcttcaagctttgtgagggcacaagggtactgggggccatggataccaaatgggcctcctgggaagccccagcagggagtcccagggtgggtgtttcagcagcaaaatgagtcgtgggccctggggaagggaccctcaagggcttacacagccctgatgatcagtttctgaggggacccctctgggggaacagctccctcctctttcccagagctgactggaaggtctgtctcattctacacactgcatttgttacagaaagggaccaagtggggaaaataaagaacatggaacaggctgagagagagggcagctccattcaaaggacctaggtgtatgccaaaaatgagaatgaagattgaccagcgacttctttggcagagacctgggcaggctggctgatggagagctggggcctgtgaatacagtaagggtggggtccacactgccaccgcctcccctcaagatgccgcttctctggactcagcagcactgggcagtctgcccagttctgcccgtggcttctgctccagagaagcccagtgctgacagtcagagtggaggagtgaggggctgtcccagcataagccctggctgct

SEQ ID NO: 3356 - DNA, 552 bp, Homo sapiens
  SIMILAR (552)..(1): 961254mologous to Homo sapiens bA541N10.1 (novel protein),accession number AL133355,Smith-Waterman Score=915.
cccttctcccatgtgatttggtttctggcagtcctgctgaatgatccggtggatctttctgtgcaggtctttgtcttctctggttacatagtataggttatcaaaaccatcatctttctggaaaacaagtcctttttcctgcagcagttgtatagcattcttaaatatactatgaattgccttggaagtggtgtccttcttaaaattcacttggtcggagcaggcactgtgaatcacaggctgattggcaagggacagcaaagactccaccatttccagctcctgctggtaaaagctctgcactctgttctccatgaggaattctttggctttttcactcagcaaactcgtgagactggggaggtccagggcgcctggattgcttagtgcctcttctttctctagggctgagctgtgaaaaggctggtcataaactttcctgtagatagtgggcagctcaagcatccttgcaatttgaatgttccacactgggtcgtccactttatagtaagcggccgcatgaatctctcgctcttctctgtatgtgaggat

SEQ ID NO: 3357 - DNA, 2429 bp, Homo sapiens
  SIMILAR (973)..(866): 971254mologous to Homo sapiens bA541N10.1 (novel protein),accession number AL133355,Smith-Waterman Score=181.
ttttttttgtcacgctgtggatctcctgtttattcccatctctgggcaggcctgtaaagagcatcgacccaggtctcaaccccactgctggtaactgagccacagaaactgtaagcaagtgacactcatccagggagaactactcccctaaaccggttcttagccagcaagagaggcccacaggaaggtctctgataacctgaagttttgaaaagcttagacctgtgtgatcaggccatatgcccctcagttcccgaaatgttcactaccctgtggtgtccctttgccatggaaggaggactccaaccacacacatcagttaaagctgccaacactgtttcctccccatttctgctctgcgaacaacgcacagtccagccaggagctcaacagggagggttttcttgttgtgtcatggctgagatcaaagtcattgtacaccaaggacatagtggacagaagggagccaacaacatttatgccaaatcccattcccaagatgactatattttatagtttattatgaggtaactgcctccagacagataagcccctgcatgatgctgaaagtcagagcctgggggtgaatgccaccttatctttgtcctcctcagctggtctgcggtgtctcttgctcagaacgctgtgtagtagtgctccattcgtcgctgacaatgtcactctcggtcctccaggagctccagaacttgctgcagcacagcctcgctcaggccggggcgggatgctcaggcgagcacaggccaagatgtgcaggaagtgacagcccttctccatgtgatttggtttctggcagtcctgctgaatgatccggtggatctttctgtgcaggtctttgtcttctctcggttacatagtataggttatcaaaaccatcatctttctggaaaacaagtcctttttcctgcagcagttgtatagcattcttaaatatactatgaattgccctggaagtgggtgtccctcctaaaattcaccttacggcacctgagaacaactcctagaccaactggttcatgaatttgtccaacaggccttttaactgctgagtcaaaaagatcctggtatgtaccggcttggtcggagcaggcactgtgaatcacaggctgattggcaagggacagcaaagactccaccatttccagctcctgctggtaaaagctctgcactctgttctccatgaggaattctttggctttttcactcagcaaactcgtgagactggggaggtccagggcgcgtggattgcttagtgcctcttctttctctagggctgagctgtgaaaaggctggtcataaactttcctgtagatagtgggcagctcaagcatccttgcaatttgaatgttccacgctgggtcgtccactttatagtaagcggtggcatgaatctctcgctcttctctgtatgtgcggatactgcctttgactcggatcgtgtccccgatctctatctttgttttctgctcaatggtcctcttgttagcttcttaagttgtgacggttaagctgagctcttcttgctgcacttggagcagctgatacagactcagtattcaactttttccagcagatgcagtttataactccagtgctgtcatccactccataactgtagaaagcatctctttctctcactccaatgacagttcccaagacatctacctgttttattggatgtccattgtacaaaaatacacctggcacctggcgggactccttcatgtccaggatatccctgatgtagagttttgcaaaggctagaaacacaggatccaaaccccacaagagggaaggggtctcctcttcacaccggctggatccaggctgcatcaagaggcagggctgtggcttccagctaactctgaaaggttctgcatcactgagtcaagcatctagatgggacacagaaatgaggatgcaatgcgtttaacgtgggtcaaagtggcccgggccctgacgctgctcccaggtgggcgtccaggactccaggaggggtgaacgcagggatctagggccctgtcaaactccatgccacggggcgtgttaagaggcgttcctcacgtcaggacgcatgcgttccttacggctctcccgctgttctccttcccacaaagctccaacttcggaacggctaaacatcaactttcactctgggaagatacgtctgtacaggcgtagcagaaaccgcttggggtcccgggaggaacgggcgccctcgcagccctgcacgtgttggggcatagtggatgggtctgactgtcgctctgccataaactttccgcttttggggatgagccaagaaaaggaggaaaaaagatactaaaaaatgcacccacttgtagcccctcccgccgcctgcagctccaggagccctgcgacctggcccttccggcgctcggagcacgaaa

SEQ ID NO: 3358 - DNA, 321 bp, Homo sapiens
  SIMILAR (1)..(87): 961254mologous to Homo sapiens butyrophilin, subfamily 3, member A2,accession number AF257505,Smith-Waterman Score=133.
aaaatggcaagttacctggctttccttctgctcaactttcatgtctccctcctcttggtccagctgctcactccttgctcagcacagccctaccccgccccagtatcatgcgatggtcccccacaccggttccctgaacccctcttggattaaggaagactgaagacttactttcctcctccctgtgttaactggggctgttggggacagtgcgtgatttctcagtgatttcctacagtgttgttccctccctcaaggctgggaggagataaacaccaacccaggaattctcaataaatttttattacttaacgctgaaaa

SEQ ID NO: 3359 - DNA, 980 bp, Homo sapiens
  misc_feature (1)...(980): n = a,t,c or g
atttgaagacttcgtagacatctggccagngcggnggaattccaattaataaaaaattggcttctccgatactcctcctgtcaagaatgattcctctgggttccctgaccttttgttctaatcatagctgctgctcagcgctctggatccctaagtgcgagcagaaaccatgtgttactcattgctgcacccctgccctaatctgcatgtgttccatgttaagtagctgctgaattgcaggggtcggaattgaggtctttgcttaatgcaagcatctgtcttatttcctgccctgtagatcgcccacatcacagaaatccgtaatcttattctccacagcttgaacaaccctttgtggctggaacctaccaggattgaaaagttttcacccagggggaaagtgacaagcctccatccaagggtaaagaaaatgagccctagctcacccaagaactcccaccccccagaggaagtgggatctgcttcttccagttttttgagggagcccagcccaggggggtcccagcacagcccctaccccgcccccagtatcgatgcgatggtccccccacancgggttccctgaaccccttttggaattaaggaagacttgaagactaagccccttttctggggaattactttcctcctcccttgtgtttaacttggggctgttgggggacagttgcgtgatttctcagtgatttcctacagtgttgttcccctccctcaaggctgggaggagataaacaccgaacccagggaattctcaataaaatttttattacttaacctgcaaaacanaganttaataggggcaggggggggggcctttttaggggatccttgggggggccaaattttaccggggttggcaaatttttatttttttccttttggggggcctttttaaaacctttttggggatttttgggagggacctttttttttggggggggaaatattgggccaaattccct

SEQ ID NO: 3360 - DNA, 1404 bp, Homo sapiens
  SIMILAR (805)..(1041): 551254mologous to Rattus norvegicus nucleoporin p58,accession number U63839,Smith-Waterman Score=222.
atggactgggaaggcagccttcccttggtgtttaattattgcagggatgcctctctgattattcacccacgtttcaaaggtgtcagaccacgcagggacgcctgccttggtccttcacccttagcggcaagtcccgcttttctgggaaaggggcaaaccatcacggacgccgagcttcgggtaactctcacagtggaggactcagcccgcctgcacccaggtgaaataaacagccatgttgctcacacaaagcctgtttggtggtctcttcacacggatgcacgtgaaaccacacacctgcaacgaactcattttcaacaaagctggctagtagtatcaggcccagaatccagcaaagtccacagtcagctcagtcaggacccagacataggctccactaccatagccattcatgtgatgggcacaactaggacagaggtggttgccaatacctcttctccaaaaccctcgctggccaacacacaagcagctgatcatccagaggagcacgctggcagaagagcacaccgacaggcacgggcacgctggcaggccatccaccggtgggatgaggcggagatttccagggcagtcggaggagagccggggctgccaagcacgggggtggcccgactccaggtgaaaaccatctcccctctggcttccccatcttctgagagctacttccactcaataaaaccttgcactcattctccaagcccacgtgtgatcggattctcccagtacaccaaggcaagaaaccctgagatacagaaagcctttctgtccttgcgacaagctattggcagaaaaagtaccagcaaggccacatttggatttggaaaaataaataaaccttcagaaatcttagtgcaagctttggcagctcaaataacatctgcatttaacttcagcaattctggcatcacagtacccgttggttggacatacaggatgtctaatcctgtctctgtaggttttggaacaggagggcagctctttcagttgaagaaacctccaactggaaacaaaacaagaaaaatgatggcctgccagtgtctgcgaatgtctgctggtgtattcttccgctggtgtgttcttccgctgggagacttcaggaagcttacactcatggtggaaggtgaagagggagcaggcacattccatgatgaaagaagcaatgggtggaatgtagtcagtttgaatgagtggagttcactcttacaggcgaaggagtggccagctgattctggccttcacacactccagtttccaccttgttcgttcatgcaccacctcccacaaagagttgagagctgcggactgagtaagccaggcacccctgttgtgagtcccacgagagggtcagggaaatatcctgcttcactgatacagcaggattaa

SEQ ID NO: 3361 - DNA, 771 bp, Homo sapiens
atggcaaagagcttttcaggcagtggaaagagcgtgtgcaaaagtcccaaaggcaaaaataacacatgggagaccaggatgattggggatggtggactccaggaaggaagtctgacaatgaaatttgaagatgggaaatacctttttggatttaacatcattgagggagatttctgtgaagacagcaattttcaaactggagagtcagtgtcagatgtgtattttgaaaatgtaagtgccctgcagagagagtccacgggctctggcattgcccaggaaagaaatgatgagggcttagaatcaggtagggctgtcctgtgcattgaagaatgtttatcagcatccctggcttctacctctcaatcgtcaatagaacaaccattgcccacaagttctcacaaccaaaacaaaacaaaacatgactccagacattgccgaatatccccagtgggcaatatggacatcgctgaaaacaactacaatagttttaaggccgagctaggtcctaattcttcctcagcctccactcctccaccctataatctttttatcgcctcccctcctcacacctgctccggcttacagtttcattccaccatcacagacgccgagcttcgggtaactctcacagtggaaggaaacagaatgtctgtggtcagaagttccttcttgggactaaaccagttgaagctggcaaaatccatgatggcagcttactcgatctttgaagaacctctagcttcattatactccaacttccatactaaatga

SEQ ID NO: 3362 - DNA, 511 bp, Homo sapiens
  SIMILAR (55)..(414): 481254mologous to Homo sapiens Human cell cycle and proliferation protein CCYPR-46, SEQ ID NO:46,accession number AAB60498,Smith-Waterman Score=233.
gccgcttttcccgcctccgccggggccgagccgctgttcggctgacagttgaggatggccggagccgagggcgccgctgggcggcagtcggagctggagcccgtggtatcgttggtcgacgtccttgaggaggacgaggagctggagaatgaggcgtgcgctgtcctgggcggcagcgagctccgagaagtgctcctactctcagggctcagtaaagagacaagcactatatgcctgtagtacctgcaccccagagggagaagaaccagcaggaatttgtttagcttgcagttatgaatgtcatggaagtcacaaactatttgagctatacacaaaaagaattttccgttgttgattgtggaaacagcaagttttaaaattttggaatgcaattacttccctgacaaagcaaagtgtaaattctggcaataagtacaatgacaacttttttggattgtactgcatttgcaagagaccttatcctgatcctgaagacgagattccagatgag

SEQ ID NO: 3363 - DNA, 506 bp, Homo sapiens
  SIMILAR (313)..(498): 911254mologous to Homo sapiens My001 protein,accession number AF059317,Smith-Waterman Score=277.
  misc_feature (1)...(506): n = a,t,c or g
aagaggtcgttcgatttganaccggtccggaannaccgggncgacgatttcgtgcggcggcggtgatggctcctccgggctgcccgggtttttgccccaacttcgttttagtctgctccttcttggagcgctacgggccgctgctagacctgcctgagttgccgctccctgagctggagcgggtgctgcaggcgccgccgccggacgtcggcaacggagaagtaccaaaagaattggtggagctccatttgaagctgatgaggaaaattggcaaatctgttactgcagacagatgggaaaaatatttgatcaagaaatcgaaacgagttggctgagactcttgcactcctgaaagcacaaattgatcctgtactattgaaaaactctagccaacaagacaactcttctcgggaaagtcccagcttagaggatgaggagactaaaaaagaggaagaatcacctattcatgaggaacagaangaaagtgaaaagataaaaatgacgag

SEQ ID NO: 3364 - DNA, 1173 bp, Homo sapiens
  SIMILAR (348)..(166): 421254mologous to Murine leukemia virus gag-pol polyprotein,accession number U13766,Smith-Waterman Score=102.
ttactgaataccaagagcctgaaaaactgcttgggtgatttgactaataatggccagtccgttatcgggctgtatagaggtgggaaggccaaaccgaggaattatatctgtaagacttgtctggtttttggacagataaaatgggggaattgtaaggagagttagaggctttaaaaggccatgctgtaacaggcgagtgataacaggctttaatccttttaaagcgtgctgcgggatgggatattggccttgagtggggtaagggtgattaggttttaatgggatggtaaggagtgcatgatcagtcgctaaggagggagtagaagtagaggtatcccatacttgtgggttaaagtggggagatataaggggaggatgtgaaggaggctttggactgggggaaaaggcggcaatgaggtgtggctgtagcccaggaatagtcagggaagcagataatttagttaaagtgtctccaccctccgtattgattaagaaggggacggacttaccctccactgtgagagttacccgaagatcggcatccgtgatggtcttgactatgcctttagctccagccacctttttaagaggaaattgctgggcaggtgggggagggctagtcacggaatgaaactgtaagccggaccaggtgtgaggaggagagatgataaaaggattatagggtggaggagcagaggctgtggaagaattgagacctagctcggcctggcgaggaggagcctggggaggaggggagaggtcagattggtctggaggagtggtacactcctgcccaaatactgtgcttttcccacagtcttcacaactgccagaccaggagatcccctcccatgcctggctcagtgggtcccatgcccatggagccttgctcactgctagcgcagcagtctgagattgacatgggatgtgggagcttagcaggtgaggggcgtctgccactgctgaggcttgagcaggtggttctggtctggattccaggtttctcatgattaacatgaggattttgattgtatgctttctgagttcttttacagatttaacgcagaatgttggtatgtctataaaagtagtatggaagagtggaaagaacatgggctctgcatcgaagagaaaagttgagggcaaatctgggagctctgtgactttgggcat

SEQ ID NO: 3365 - DNA, 3315 bp, Homo sapiens
  SIMILAR (2482)..(2405): 421254mologous to Paenibacillus polymyxa levansucrase,accession number AJ133737,Smith-Waterman Score=50.
  misc_feature (1)...(3315): n = a,t,c or g
ctaaacgctatccgatttgggataaagaaaaggagcattaaccttgactatgcatttagctccagccacctttttaagagtaaattgctgggcaggagggggagggctagtcacggaacgaaactgaaagccggaccaggtgtgaggaggggaggtgataaaaagattatagggtggaggagcagaggctgaggaagaattgggatctagctcggcctggcaaggagcagctgcccgctttccagtcgggaaacctgtcgcgccagctgcattaatgaatcggccaacgcgcggggagaggcggtttgcgtattgggcgccagggtggtttttcttttcaccagtgagacgggcaacagctgattgcccttcaccgcctggccctgagagagttgcagcaagcggtccacgctggtttgccccagcaggcgaaaatcctgtttgatggtggttccgaaatcggcaaaatcccacattgttgcctttggcttgcggcactgcgaagtgagagtaagtgaatgtcacatcgtttggatcaagacccatttgcagcacaagccctgttttgttcagcggcttgtaagggccggttaaagagtttgatacataaccaagcatgtaaatatcgtttgagttaataccatcgatcgtcatttttgaaccgcgtgaatcagtgaacaagtaccatttgccgttcattttgaaaacattcgcgcgctcgatttcatcagttaccgtgtttgaagtgatcagcggcttcattacttttttcaatgtgtaatcattatttaactctatgataccgagggcgccgttcgctaactcagcatcgcgttttttagcgctctgctgaagcttctggctttctttacggaagaagttcgtgccgccgccgtagtacgctttgttaaataaagattcttcgccttggtatccgttttctgttcccgtgttggcttcgaatacaaggtatttatggcctttgtcttcaacgtagtgagggtctctcagcgtatggttgtcgccggatgtataattgccttcatcgataaactgctgaacgttctttgcagtgagtgttacagctcttaaaggtggcaagtccagagttgtttgttcctccccgtgggtttgtgatcttgccggcttcaggaatgaagcctcagaaccagttgaagagcgttgatcaatggcctgttcaaaaacagttctcatccggatctgacctttaccaacttcatccgtttcacgtacaacattttttagaaccatgcttccccaggcatcccgaatttgctcctccatccacggggactgagagccattactattgctgtatttggtaagcaaaatacgtacatcaggctcgaaccctttaagatcaacgttcttgagcagatcacgaagcatatcgaaaaactgcagtgcggaggtgtagtcaaacaactcagcaggcgtgggaacaatcagcacatcagcagcacatacgacattaatcgtgccgatacccaggttaggcgcgctgtcaataacttcatcaaatttgcccattaactcagtttcaatacggtgcagagccacacaggaaggaataatgtcaagccccgccagcaagtgggctctattgcataagtgacatcgtccttttcccaagaagaaggcaggagatgtcttctgctgatatgaagaactgtaccctccgcgaacattgagctgctcctggggtcggtactctanagaatcccctgttcccgtgttggcttcgaatacaaggtatttatggcctttgtcttcaacgtagtgagggtctctcagcgtatggttgtcgccggatgtataattgccttcatcgataaactgctgaacgttctgatatgtttttccgtctccgtcaaaaatcgttttgtgatcttccactccgttgattttgagtgtgtcatcagattttgacacatttacctgcgctgttgtcaggctttgtttgccgtaatgtttaccggaatagtcagtgtagaataaacggatttttccgtcagatgtaaaggttgcagaaccggaccattcttgcgtctgatctttcaggatcggatcgttggcgtcgaacttatcgctgtctttaaagacacggcccgcgtttttccagctgtcgattgagttgtcgccgaccttttgataaaacatgtagattgatgtgtcatcagcgtctttcgggcttcccgcaagagcaaacacaacgtgatagccgttgtattcagctactgttccgtcagcgttttgcagcggccagctgtcccacacatcaagtccttttgcagactcaatatttttaatcgttgattgatcgaattgaggcacttggtatttttcgttttgctgctgtttagggatctgcagcatatcatgggcgtgtaatatgagagacgccgtacgtttctttgtatgctgcttggttattttctttcgcgaaggcttgagtcgctcctcttgccccttccccagaaaagcgggacttgctgttaagggtgaaggaccaaggcaggcgtccctgcgtggtctgacacctttgaaacatgggtgaataatcagagaggtgtccgtgaaatgattaaacaccaagggaaggctgccttcccagtccgtgaccggcgccggagttttgggtccacggataaaacgtgtcttctttgtctcagttgaagagcgttgatcaatggcctgttcaaaaacagttctcatccggatctgacctttaccaacttcatccgtttcacgtacaacattttttagaaccatgcttccccaggcatcccgaatttgctcctccatccacggggactgagagccattactattgctgtatttggtaagcaaaatacgtacatcaggctcgaaccctttaagatcaacgttcttgagcagatcacgaagcatatcgaaaaactgcagtgcggaggtgtagtcaaacaactcagcaggcgtgggaacaatcagcacatcagcagcacatacgacattaatcgtgccgatacccaggttaggcgcgctgtcaataactatgacatcatagtcatgagcaacagtttcaatggccagtcggagcatcaggtgtggatcggtgggcagtttaccttcatcaaatttgcccattaactcagtttcaatacggtgcagagccagacaggaaggaataatgtcaagccccggccagcaagtgggctttattgcataagtgacatcgtccttttccccaagatagaaaggcaggagagtgtcttctgcatgaatatgaagatctggtacccatccgtgatacat

SEQ ID NO: 3366 - DNA, 344 bp, Homo sapiens
  SIMILAR (222)..(160): 591254mologous to Homo sapiens unnamed HERV-H protein,accession number U92818,Smith-Waterman Score=67.
tcagtcttcagccgctaagccgagaagatctgggaaggagtcagtcagagagccttgggccagagttccaggggctctgggagtggctgccaggtgagttgaacagtccgatttgcagtggggtcccacacagatgggacgtggcttaggaggaatcctgggctgccggcagtccttggcctggtggtcagatttctggcacttgtagcaagctcctttgaaacatgggtgaataatcagagaggcgtccctgcagtgatttaacaccaagggaaggctgccttcccagtccgtgactggcgccggagttttgggtccacggataaaacgtgtctcctttgtct

SEQ ID NO: 3367 - DNA, 431 bp, Homo sapiens
  SIMILAR (397)..(218): 621254mologous to Homo sapiens pot. ORF VI,accession number X03145,Smith-Waterman Score=169.
cttgactatgcctttagctccagccacctttttaagaggaaattgctgggcaggtgggggagggctagtcacggaatgaaactgtaagccggaccaggtgtgaggaggagagatgataaaaggattatagggtggaggagcagaggctgtggaagaattgagacctagctcggcctggcgaggaggagcctggggaggaggggagaggtcagattggtctggaggagtggtacactcctgcccaaatactgtgcttttcccacagtcttcacaactgccagaccaggagatcccctcccatgcctggctcagtgggtcccatgcccatggagccttgctcactgctagcgcagcagtctgagattgacatgggatgtgggagcttagcaggtgaggggcgtctgccactgctgaggcttgagcaggtggtt

SEQ ID NO: 3368 - DNA, 471 bp, Homo sapiens
  SIMILAR (20)..(259): 951254mologous to Cloning vector pCMVLacI lac repressor,accession number U64448,Smith-Waterman Score=358.
ggattttgccgatttcggaaccaccatcaaacaggattttcgcctgctggggcaaaccagcgtggaccgcttgctgcaactctctcagggccaggcggtgaagggcaatcagctgttgcccgtctcactggtgaaaagaaaaaccaccctggcgcccaatacgcaaaccgcctctccccgcgcgttggccgattcattaatgcagctggcgcgacaggtttcccgactggaaagcgggcagctgctccttgccaggccgagctagatcccaattcttcctcagcctctgctcctccaccctataatctttttatcacctcccctcctcacacctggtccggctttcagtttcgttccgtgactagccctccccctcctgcccagcaatttactcttaaaaaggtggctggagctaaatgcatagtcaaggttaatgctccttttctttatcccaaatcggatagcgtttag

SEQ ID NO: 3369 - DNA, 866 bp, Homo sapiens
cgttgacacagcagcatatcctgacagccgacactaatctcttatgcaatgattatggtgcaggaaatggaaaaatcaaaagcattggttttgtggtgcacgcctgtatccgagctactcaggaagatgcctctagccatgactcaaccattcgcttcctaatttgttgcttccaaaccactctaggagctggaaagcaaaacaaacatgtgaaaacacttttaaagagagatacaccaccaggccaaggcaagactaatggtgaagtggagagaaatctctcttttcctacctctcctggaaacagaggcagctgcaatgggtggtggggtaaaacccagaaaactgggttcacttcgctggagtatgggaggagcctctctgtcattaggtcttttctggggcaagtgacagcaactccctcatctacagaaactggtgccaatgcacttcagtcttcagcagctttccaggtaaaaaacatattcaaagcagtaaatggtgtcagcggttattttgaagggaagccgacagtagagccttcagtctgtggtggaaggcttgagagcccctggcaaaccgccggtgtaagtccaacagtccaaaagctaaagagcttgaagtttgatgttcgtgggcaggaagaatcagtatgggagaaagacgaagcctgcctgcacccaggtgaaataaacagccatgttgctcacacaaagcctatttggtggtctcttcacagggacgcgcataaaaagaaacacagaggacaccctgccggttccgaagcagtagaagtcaacggcgggtctgcgaaggcagcaaacagcaatggtggacagcgagccaaagctcagctcaagccataa

SEQ ID NO: 3370 - DNA, 1583 bp, Homo sapiens
  SIMILAR (788)..(15): 881254mologous to Bacillus amyloliquefaciens precursor (AA - 29 to 443),accession number X52988,Smith-Waterman Score=1185.
  misc_feature (1)...(1583): n = a,t,c or g
tctanagaatcccctgttcccgtgttggcttcgaatacaaggtatttatggcctttgtcttcaacgtagtgagggtctctcagcgtatggttgtcgccggatgtataattgccttcatcgataaactgctgaacgttctgatatgtttttccgtctccgtcaaaaatcgttttgtgatcttccactccgttgattttgagtgtgtcatcagattttgacacatttacctgcgctgttgtcaggctttgtttgccgtaatgtttaccggaatagtcagtgtagaataaacggatttttccgtcagatgtaaaggttgcagaaccggaccattcttgcgtctgatctttcaggatcggatcgttggcgtcgaacttatcgctgtctttaaagacacggcccgcgtttttccagctgtcgattgagttgtcgccgaccttttgataaaacatgtagattgatgtgtcatcagcgtctttcgggcttcccgcaagagcaaacacaacgtgatagccgttgtattcagctactgttccgtcagcgttttgcagcggccagctgtcccacacatcaagtccttttgcagactcaatatttttaatcgttgattgatcgaattgaggcacttggtatttttcgttttgctgctgtttagggatctgcagcatatcatgggcgtgtaatatgagagacgccgtacgtttctttgtatgctgcttggttattttctttcgcgaaggcttgagtcgctcctcttgccccttccccagaaaagcgggacttgctgttaagggtgaaggaccaaggcaggcgtccctgcgtggtctgacacctttgaaacatgggtgaataatcagagaggtgtccgtgaaatgattaaacaccaagggaaggctgccttcccagtccgtgaccggcgccggagttttgggtccacggataaaacgtgtcttctttgtctcagttgaagagcgttgatcaatggcctgttcaaaaacagttctcatccggatctgacctttaccaacttcatccgtttcacgtacaacattttttagaaccatgcttccccaggcatcccgaatttgctcctccatccacggggactgagagccattactattgctgtatttggtaagcaaaatacgtacatcaggctcgaaccctttaagatcaacgttcttgagcagatcacgaagcatatcgaaaaactgcagtgcggaggtgtagtcaaacaactcagcaggcgtgggaacaatcagcacatcagcagcacatacgacattaatcgtgccgatacccaggttaggcgcgctgtcaataactatgacatcatagtcatgagcaacagtttcaatggccagtcggagcatcaggtgtggatcggtgggcagtttaccttcatcaaatttgcccattaactcagtttcaatacggtgcagagccagacaggaaggaataatgtcaagccccggccagcaagtgggctttattgcataagtgacatcgtccttttccccaagatagaaaggcaggagagtgtcttctgcatgaatatgaagatctggtacccatccgtgatacat

SEQ ID NO: 3371 - DNA, 516 bp, Homo sapiens
  SIMILAR (196)..(170): 771254mologous to Homo sapiens unnamed HERV-H protein,accession number U92818,Smith-Waterman Score=41.
ctaagccgagaaggagtcggtcagaaagccttgggccagagttccaggggctctgggagtgtctgccaggtgagttgaacagtccgatttccagtggggtcccgcaaagatgggacacggcttaggaggaatcctgggctgcaggcattccttggcctggtggtcagatagatttctggcacttgtagcaagctccctgtccccggaaaagcagggaaggggtagagacaaggagagaaggggttggggtacttgccccttccccagaaaagcgggacttgccgctaagggtgaaggactgaggcaggcgtccctgcgtggtctgacacccttgaaacgtgggtgtataatcagagaggtgtccctgcaatgattaaacaccaagagaaggctgccttcccagtccgtgaccggtgccggagttttgggtccacagataaaacgtgtctcttttgtctcggatttgaaattggtgagatgtttcttgggctggtcggtctgaggacctgaggtcat

SEQ ID NO: 3372 - DNA, 1398 bp, Homo sapiens
  SIMILAR (1398)..(1012): 1001254mologous to Leishmania major probable levansucrase precursor,accession number AL160371,Smith-Waterman Score=675.
ttagaccttagcctctagagtttctgattcactaggctggggcagaagctctacaacgtacatttctaagcgttcatcagatgtggctgttgctgctgctctgggaaccacattctgagaaccgtcgggcagtagcttatccgtataggttattttcaggaaaataaagaaaccaacatctgtggctgggtctacatagaatatcccagtgaaaaggactgagtgtgttaagagtccattagggcgaaaaggtgcttcccacctcacgtgggctttccgggatccctgtgttttgacaaacacatttactgttccttcaggaggagcttctagagttcgattttccaccagtgggcccagagcacaacctttggccgtgcatgcttggactctgaaggaatgtaaactccaaggagcaaatccgtaagcacgatagctgagttctgaggaattgtggattaatataccatctagatataatccataactcgtgataacaccttgggccagagttccaggggctctgggagtggctgccaggtgagctgaacagtccgatttccagtggggtccggcacagatgggacgtggcttaggaggaatcctgggctgcaggaattccctggcctggtggccagatttctggcacttgtagcaagctcctggaggaggaggttctggaggaaggcctggccgctgcagttcaggcatttggaagttcttgtgtgctggagatgtggctggggttcgtctcacagtggaggcaaggaattgcaacttttttctattattgtacaccttgaaggcgaggttaattaaatccttgactatgcctttagctctagccacctttttaagagtaaattgctggtcaggttggggagggctagtcatggaacgaaactgtaagccggactgggtgtaaggaggggaggtgataaaaggattatagggtggaggagcggaggctgaggaagaattgggacctagcttggcctggcgaggagcagtcttttgataaaacatgtagattgatgtgtcatcagcgtctttcgggcttcccgcaagagcaaacacaacgtgatagccgttgtattcagctactgttccgtcagcgttttgcagcggccagctgtcccacacatcaagtccttttgcagactcaatatttttaatcgttgattgatcgaattgaggcacttggtatttttcgttttgctgctgtttagggatctgcagcatatcatggcgtgtaatatgagagacgccgtacgtttctttgtatgctttttggttattttctttcgcgaaggcttgagtcgctcctcctgccagaagtgcagtcgtaaaagtcagaactgtggcttgttttacaatttttttgatgttcatgttcat

SEQ ID NO: 3373 - DNA, 933 bp, Homo sapiens
  SIMILAR (219)..(82): 511254mologous to Human T-cell lymphotropic virus type 2 gag protein,accession number X89270,Smith-Waterman Score=147.
ctaagccaagaagatctgggaaggagtcagagagccttgggccagagttccaggggctctgggagtggctgccaggtgagttggacagtccgatttccagtggggtcccacacagatgggatgtggcttaggaggaatcctgggctgcaggcattccttggcccggtggccagatttctggaacttgtagcaagctcctcggggaggaggttctggaggaacacctggctgctgcagttcaggcgtttggaagttcttgtgtgctggagatgtggctggggtttgtctcacagtggaggcaaggaactgcaacttttttctattattgtacaccttgaaggtgaggttaattaaatccttgactatgcctttagctccagccacctttttaagagtaaattgctgggcaggagggggagggctagtcatggaaggaaactgtaagccggaccaggtgtgaggaggggaggcgataaaaggattatagggtggaggagcggaggctgaggaagaattgggacctagctcggtctggcgaggagcagctggccccttccccagaaaagtgggacttgccgctaagggtgaaggaccaaggcaggcgtccctgcgtggtctgacacctctgaagcctgggtgaataatcagagaggtgtccctggaatgattaaacaccaagggaaggctgccttcccagtccgtgactggcgccggagttttgggtccacggataaaacgtgtctcctttgtctcggatttgaaattggtgagatgtttcttgggctggtcggtctgaggacctgaggtcgtaggtggatctttaggatcctggttctccttttgcttctccattctttttctttccccatctcttccctcttccctcctcctcttcctcttccttctccttttcctctcctccttctcctccat

SEQ ID NO: 3374 - DNA, 1078 bp, Homo sapiens
  SIMILAR (619)..(657): 1001254mologous to Homo sapiens My001 protein,accession number AF059317,Smith-Waterman Score=64.
aacggtcgacgatttcgtacggggaggagagaagggggcggatttagggcttaaagtgaaaggcgccgagggccgctctgtctcccgtctgactcggttctcgactgctccgggccgccgatgtattgtgggatcgcggagccgtccctaagacgctgggatccgcagaggagcccacttgagagcgcctcctgtcgtctgttaggttgccttgccatccctcggcaccccaacttcccccgcccccccatcgcctcctcctccatcctccagatcaaaatggcgacggcggcggcagcggcggcggtgatggctcctccgggctgcccgggttcgtgccccaacttcgccgtagtctgctccttcttggagcgctacgggccgctgctagacctgcctgagttgccgttccctgagctggagcgggtgctgcaggcgccgccgccggacgtcggcaacggagaagtaccaaaagaattggtggagctccatttgaagctgatgaggaaaattggcaaatctgttactgcagacagatgggaaaaatatttgatcaagatatgccaagagtttaacagtacctgggcatgggagatggagaagaagggctatcttgaaatgagtgttgaatgcaaactagcactcttaaagtacctctcgtgagtgtcagtttgatgacaatctcaaattcaagaatattattaatgaggaggatgccgatactatgcgtctgcagccaattggtcgagacaaagatggcctcatgtactggtaccaattggatcaagatcacaatgtcagaatgtacatagaagaacaagatgatcaagatggctcttcatggaaatgcattgtcagaaatcgaaacgagttggctgagactcttgcactcctgaaagcacaaattgatcctgtactattgaaaaactctagccaacaagacaactcttctcgggaaagtcccagcttagaggatgaggagactaaaaaagaggaagaaacacctaaacaagaggaacagaaagaaagtgaaaagatgaaaagtgaggagcagcctatggatttagaaaaccgttct

SEQ ID NO: 3375 - DNA, 734 bp, Homo sapiens
gaactaaggggctccttccccagttaagggagacaaagaagagagtgaccattcagtgctcaatctcctcccatcgagctggggacccaggaaagaacaaggttggaagcaaagaagtcacaggatgctcgcacattaagatcagctcagttttgcaagattacccatgggttctagaaggcaaagccagtgagtgttgcacttgcatctctgggtctgagacaggcagatacaaagggtgtgagctggaagatggacactgtttcctgtactcacatgtaatagggattgaagaacagaagcagagaggtgtccctgcaatgattaaacaccaagggaaagctgccttcccagtccgtgaccggcgccagagttttgtgtccacggataaaacgtgtctcctttgtctgtctcagaaaatgaaaggaattgaaattaagagaagggagagattgaagagtggaaaggagaaagtgtggttgagggacagagagaggctggagaagagaacgattttgagggcttcagtatttaaaggagaaaagccggctgcaggagaaagagggaaggtatggtcatgtgactcaatccacgtgttgcaagagaaagggagcaggcctcagatatcagtcctctgcatcctcaatcacaggaaatacagtcccaggttctccgtgtggtccttaaagcctccatccatgaagcttgaggtaaggaggaagtgtcagagataa

SEQ ID NO: 3376 - DNA, 1332 bp, Homo sapiens
atggatgctggtacagtggccagaggggactgggaagtgaggaaaattgccatggtccagggtgttaactcccgggtgcttctggtttgccccatggatgagcacagtccacagacaacaccctcagacagagagacacaggaaactgacctgggagggagtgtcagcaggacacctcctcagtgggttaagaaagaattcaagagcgagccagtggtagaagaaaacagctgtattgagatggcaattttcatgcgtgtccgtgtgaagagaccaccaaacaggctttgtgtgagcaacatggctgtttatttcacctgggtgcagattacaacatgccccttgatagatcctgataaatctacaggatcaaaatgctataaattagtatcatacaattttcagacgattaacacccatgaaagcaggaggaaaattacttcagagaaaagcacagaaatgaaggaagaaatgaaagttctatatacgttctatgacctcgagcaggtggctgtcttcttgctgcgtctccacatggctttttctctgtgcgaaggcatccctgatgtctctctcatagaagagcaaagaaagcccatggagtctatagttatggtacaacttttagataggcctgacacggtcaggaaggcgatgagggtcagcaggaggaagaattggcgctgcggcggcatgcccggcgacgacccagttctcgccggcgaacgaaaagaaggcgaggaagaaatagatgcagcccacgatcggaaattcccagtcggtatccagaccgactgcatagatgcccttggccgaaagccatcccatcacccaactcgtcggcaccgtgacgacgccgcgggtaacgccattgtcgatacggcacccgtggcggtgccgatcggccaatgccggagcaatgatattgaccatgaagcaactggccatagttatgcgagtatatcagcatcaggtcagacgatcgatgcgtcccggccggaacggggcgcgatccggaatgagtgccgttggggcatactactcatcctgtattcgggttatgaccgcacttcagtcttgtaccggggacgacgaagctgtcttgctatagcctcgctcagcagcaacatgcttgtgcgcatgcgagatccaaaatcgcagcgattggcacgcgagcttgccaaccctcgtgatcaactcacacgaaggagagccctgatgaaagcgttgcgttttcatgccgccaaggatctgcggatcgaagatacccccgaaaccgatcgcgaaacgtctcaagggcaggggattgtgcggaatcgacctatcaattaa

SEQ ID NO: 3377 - DNA, 860 bp, Homo sapiens
  SIMILAR (726)..(448): 431254mologous to Plasmodium lophurae histidine-rich protein,accession number X01469,Smith-Waterman Score=231.
agacaaaggagacacattttatccgtggacccaaaactctggcgccggtcatggactgggaaggcagccttcccttggtgtttcatcattgcagggacgcctctgattattcacccatgtttcagaggtgtcagaccatgcagggacacctggcttggtccttcacccttagcggcaagtcctgcttttctgggggaggggcaaagaataaaatacctaggaatccagcttatgagggatgtgaaggacctcttcaaggagaactacaaaccactgctcaatgaaataaaagtggacaaacacaaatggaaaaacattccatgctcatggataggaagaatcaatatcatgaaaatggccacagtgcccaagagaagcttctctatgccttccacaatatctcccttaaacaatcctccagcttatctctgtctcagaactttcctaataatgaaaacaatgatggcagcaaagaagatgatgatggaggtgatgatgatgatgactgtcaggcctctgaggccaagccaaactcagcctgcctgcacccaggtgaaataaacagccatgttgctcacacaaagcctgtttggtggtctcttcacacggacacgcatgaaaatgacaatggtgatgttggtgatgataatgttgatgatgatgttgatgatgatggtggtgatgatggtaaagatgatggtgatgatgatgatggtgatacggtgatggtggtggtgatgatgatggtagtgatggtggtgatgacgataatgatgatggtgttgacggtggtgatgatagtggtggtggtggtggtggttgtggtagtggtggtgatgatgttagtcaccatttattga

SEQ ID NO: 3378 - DNA, 1125 bp, Homo sapiens
  SIMILAR (721)..(1122): 951254mologous to Homo sapiens p40,accession number U93570,Smith-Waterman Score=659.
atggatgaagctggaaaccatcattctcagcaaactattgcaaggacaaaaaccaaacaccgcatgttctcacttacagagaagcttctctatgccttccacaatatctcccttaaacaatcctccagcttatctctgtctcagaactttcctaataatgaaaacaatgatggcagcaaagatgatgatgatggaggtgatgatgatgatgactgtcaggcctctgaggccaagccaaactcagcctgcctgcacccaggtgaaataaacagccatgttgctcacacaaagcctgtttggtggtctcttcacacggacacgcatgaaaatgacaatggtgatgttggtgatgataatgttgatgatgatgttgatgatgatggtggtgatgatggtaaagatgatggtgatgatgatgatggtgatacggtgatggtggtgatgatgataatgatgatggtgttgatggtggtgatgatagtggtggtggtggtggttgtggtagtggtgcccactcagaacaactttgtttgtcagtttggatgcttcaccttcgccaccttccaaagagagtctttgccaggctggcttcagtggctttgtaatgcagaattaagagaatgtatagaggaaagctgtcagtcactcctgctgctgaacagcaacactgtattggctccagctgctaagcctgagggtccagaggtggcttcccctcacctgcagaaaataaccaatacagagaagtgcttaaaggagctgatggagctgaaaaccaaggctcgagaactacgtgaagaatgcagaagcctcaggagccaatgcgatcaactggaagaaagggtatcagcgatggaagatgaaatgaatgaaatgaagcgagaagggaagtttagagaaaaaagaataaaaagaaatgagcaaagcctccaagaaatatgggattatgtgaaaagaccaaatctacgtctgattggtgtacctgaaagtgacagggagaatggaaccaagttggaaaacactctgcaggatattatccaggagaacttccccaatctagcaaggcaggccaacgttcagattcaggaaatacagagaacaccacaaagatactcctcgagatga

SEQ ID NO: 3379 - DNA, 786 bp, Homo sapiens
atgactctaaaatctctttttaagacctcagaaagatcaaacgtggtatcacagaatacgattaggtcagacaaaacatcttttaaaggaattgaaggtgtacacatatcttctatatgcaacaatcagcttctaggacgtttaaaggcactgtcctcagcaatcttagcagaagctaaagagacaaaggagacacattttatccgtggacccaaaactctggctccggtcacggactgggaaggcagccttcccttggtgtttaatcaatgcagggacgcctctctgattatacacccacgtttcaagggtttcagaccacgcagggacgcctgccttggtccttcacccttagcagcaagtcctgcttttctggggaaggggcaacggctgaagactgacactgcccgattgccttggaagcccccagaccatcatagacgccgagcttcgggtaactctcacagtggaagggtacagcctccctcccggctgccttcgtgggctcatgttgagtgtctcaggcttttccaggagcacggtgcaagctgtcagtggatctaccgttctgggatctggaggacagtggttttcatgtgcgtccgtgtgaagagaccaccaaacaggctttgtgtgagcaacatggctgtttatttcacctgggtgcaggtccattatccactctatgagaataataaaacccagttaagagcacttcgaatgattcacgtagagtccctagcttgtggtgtaagggagtcttcaacaaatgacaactattattga

SEQ ID NO: 3380 - DNA, 618 bp, Homo sapiens
  SIMILAR (132)..(10): 921254mologous to Homo sapiens unnamed HERV-H protein,accession number U92818,Smith-Waterman Score=205.
tcagagaggcttgggccagagttccaggggctctgggagtggctgccaggtgagttgaacagtccgattttcagtggggtcccacacagatgggacgcagcttaggaggaatcctgggctgcgggcattccttggcccagtggccagatttctggcacttgtagcaagctccttgactatgcctttggctccagccacctttttaagagtaaattgctgggcaggtgggggagggctagtcacggaacgaaactgtaagcaggacccagtgtgaggaggggaggtgataaaaggattatagggtggaggagcagaggctgaggaagaattgggacctagctcggcctggcgaggagcagcttgtcccttcctcagaaaagcgggacttgccgctaagggtgaaggaccaaggcaggtgtccctgcgtggtctgacacccttgaaatgtgggtgtataatcagagaggtgtccctgcaatgattaaacaccaagagaaggctgccttcccagtccgtgactggcaccggagttttgggtccacggataaaatgcatctcctttgtctctcctgagatcaggagtttgagagcagcctggccaaaatggcgaaaccccat

SEQ ID NO: 3381 - DNA, 1771 bp, Homo sapiens
  SIMILAR (1)..(300): 761254mologous to Homo sapiens Human secreted protein, SEQ ID NO: 7534,accession number AAG03453,Smith-Waterman Score=387.
atgggcaaggacttcatgactaaaacaccaaaagcaatggcaacaaaagccaaaattgacaaatgggatctaattaaactaaagagcttctgcacagcaaaagaaactaccatcagagtgaacaggcaacttacagaatgggagaaaatttttgcaatctactcatctgacaaagggctaatatccagaatctacaaagaacttaaacaaatttacaaagaaaaaaacaaacaaccccatcaaaaagtaggcaaaggatataagcagacacttctcaaaagaagacatttatgcagccaacagacaaatgaaaaaatgctcatcatcactggccatcagagaaatccagatcaaaaccacaagacaaaggagacatgttttatccgtggacccaaaactccggtgccggtcacggactgggaaggcagccttcccttggtgtttaatcactgcagggacacctctgtgattattcacccacgtttcaaaggtgtcagaccacgcagggacgcctgccttggtccttcacccttagcggcaagtcctgcttttctggggaaggggcaagccgagctaggtcccaattcttcctcagcctctgctcctccaccctataatctttttatcgcctcccctcctcacacctggtccggcttacagtttcgttcggtgactagccctcccccacctgcccagcaatttactcttaaaaaggtggctggagccaaaggcatagtcaagcggctgaagactgacactgcccgatcgccttggaagacccctagaccatcacggacgccgagcttcagaaaagcagaacggactaaaggtcttttaaaaatacacctcaccaagctcagccaccaacttaaaaaggactggacaatacttttaccactttcccttctcagaattcaggcctgtcctcggaatgctacaagactggctactggccaattgggatatccttttatcagtcaaagctatgtcctggtcaatggatttcaaactgttgaggatctatgtgaagctgcagaccttcgagtgagtgttgcagaccttcgagtgagtgttacagctcttaaggtggcgcgtctggagttgttcgttcctcccggtgggctcgtggtctcgctggcttcagcagtgaagctgcagaccttcgcggtgttacagctcataaaagcaaaaagatgggactggggcaccttggagcagggggcggcgctcatcggggaggctcgggacgcacaggagcccacggagggggtgggaggctcaggcatggcgggctgcaggtccagagacctgccccgcgggaaggcagctaaggcccggcgagaaatcgagctcagcactggtgggctggcactgctgggggacccagtacaccctccgcagctgctggcccgggtgctaagtccctcattgcccggggccagcagggctggccgactgctccgagtgtggggcctgccaagcccacgcccacccggaactccagctggcccgcaagcgccgtatgcagccccggttcctgctcgcgcctctccctccacacctccttgccccttccccagaaaagcgggacttgccgctaagggtgaaggaccaaggcaggtgtccctgcgtggtctgacacctttgcaacgtgggtgaataatcagagaggtgtccctgcaatgattaaacaccaagggaaggctgccttcccagtccgtgactggcgccggagttttgggtccacggagaaaacgtgtctcctttgtct

SEQ ID NO: 3382 - DNA, 954 bp, Homo sapiens
  SIMILAR (285)..(401): 741254mologous to Homo sapiens unnamed protein product,accession number AK024120,Smith-Waterman Score=141.
tggctcagcggtaagcccaaggtccagcacacgaatcaggaaactgatggttcttgggttagcaggaatccgcccagagaacagatgaaagtaacaggtaccaatatcaaaactgcagtgactcaccagaaacactacgtgcttgccactttgcttagcggtttgttgagtccaacaactgcgtgggtcccggactcagcccgcctgcacccaggtgaaataaacagccatgttgctcacacaaagcctgtttggtggtctcttcacacggacgcacatgaaaaccactgtcctccagatcccagaacggtagatccactgacagcttgcaccgtgctcctggaaaagcctgagacactcaacatgagcccacgaaggcagccgggagggaggctgtacccttccactgtgagagttacccgaagctcggcgtctatgatggtctgggggcttccaaggcaatcgggcagtgtcagtcttcagccgcttgactatgcctttagctccagccacctttttaagaggaaattgctgggcaggagggggagggctagtcatggaatgaaactgtaagcctgaccaggtgtgaggaggggaggtgataaaaggattgtagggtggaggagcagaggctgaggaagaattgggacctagctcggcctggcgaggagcagcttgccccttccccagaaaagcaggacttgctgctaagggtgaaggaccaaggcaggcgtccctgcgtggtctgaaacccttgaaacgtgggtgtataatcagagaggcgtccctgcattgattaaacaccaagggaaggctgccttcccagtccgtgaccggagccagagttttgggtccacggataaaatgtgtctcctttgtctctagtgttcctatctctgattcctcttcaatgcatgattcacgctgctgccagagggtcacagcattccacat

SEQ ID NO: 3383 - DNA, 1183 bp, Homo sapiens
  SIMILAR (150)..(1): 721254mologous to Homo sapiens Human secreted protein, SEQ ID NO: 7420,accession number AAG03339,Smith-Waterman Score=170.
atgtgggaaagtttggaacttcctggaaacattttcaatggctttgaccaaaatgctgataatgatatggacgatgaaattcaggctgaggtcatctcagatggagatgaggaatttgttgggaactggaataagcctagagacttggtgccctgcatcctagccactctagccttgactaaaaggggacaagatacagctcagaccatggcttcagagggtgcaaggccaaagcattggcagcttccaggaggtgttgggcccgtgggtgctcagaaatcaagaattgaggtttgggaacctttgcctatatttcgcaggatgtatggaaaagcctgtatgtccaggcagaagtttgctgcaggggcagggttttcctggtatgttcctgtggcagttgttggagcaaaagttcacgatgtgaacctccatatgctgtcctttccatccaagtggaagctgcacacatgcatgaaatttggtgccgtgactcagatcgtgacctcccttgggaggtcctcctgttctttgctccttgagaaagatccacctatggtcctcagaccgaccagcccaagaaacatctcaccaatttcaaatctgacaaaggagacacgttttatccgtggacccaaaactccggcgccggtcacggactgggaaggcagccttcccttggtgtttaatcattgcagggacgcctctcttgattattcacccacatttcagaggtgtcagaccacgcagggacgcctgccttggtccttcacccttagcagcaagtcctgcttttctgaaggaaaggcaagatttaattaaccttgccttcaaggtgtacaataatagaaaaacgttgcaattccttgcctccactgtgagacaaaccccagccacatctccagcacacaagaacttccaaacgcctgaaccgcagcggccaggcattcctccagaaccaccttccccaggagcttgctacaagtgccagaaatctggccaccaggccaaggaatgcccgcagcccaggattcctcctgagccgtgtcccatccgtgcaggaccccactggaaatcggactcttcaactcacctggcagccactcccagagcctctggaactctggcccaaggctctctgactgactccttcccagatcttcttggcttagcggctgaagactga

SEQ ID NO: 3384 - DNA, 1609 bp, Homo sapiens
  SIMILAR (1022)..(1522): 441254mologous to Sus scrofa domestica polyprotein,accession number U77600,Smith-Waterman Score=379.
ctctgagcccaagctaagccatcatatcccctgtgccctgcacgtatacacccagatggcctgaagcaactgaagatccacaaaagaagtgaaaatagccagttcctgccttaactgatgacattccaccattgtgatttgttcctgccccaccctaactgatcaattgaccttgtgacaatacaccttccccacccttgagaaggtgctttgtaatattctccccacccaccccacgcccgcacccccgcacccttaagaaggtattttgtaatattctctccgccattgagaatgtgctttgtaagatccaccccctgcccacaaaaaattgctcctaactccaccgcctatcccaaaacctataagaactaatgataatcccaccaccctttgctgactcttttttcagactcagcccacctgcacccaggtgaaataaacagccatgttgctcacacaaagcctgtttggtggtcttttcacacggacgcgcatgaaatttggtgccgtgactccgattgggggatctcccttgggagatcaatcccctgtcctcctgttctttgctcagcacaagaaacatctcaccaatttcaaatccggtaagcagactctttttactctcttctccaacctccctatccctcaacctctttctcttttcaatcttggcgccacacttcaatctctcccttctcttaatttcaattcctttcattttctggtagagacaaaggagacaagttttatctgtggacccaaaactctggcgccggtcacggactgggaaggcagccttcccttggtgtttaatcattgcagggatgcctctctgattgttcacccacgtttcaaaggtgtcagagcacgcagggacgcctgccttggtccttcacccttagcggcaagtcctgcttttctggggaaggggcaagctgctcctcgccaggccgagctaggtcccaatgcttcctcagcctccgctcctccaccctataatctttttatcgcctcccctcctcacacctggtccggcttacagtttcgttcggtgactagccctcccccacctgcccagcaatttactcttaaaaaggtggctggagccaaaggcatagtcaagcacgctttaaaaagattaaagcctgttatcactcgcctgctacagcatggccttttaaagcctataaactctccttacaattcccccattttacctgtcctaaaaccagagaagccttacaagttagttcaggatctgcgccttatcaaccaaattgttttgcctatccaccccatggtgccaaacccatatactctcctatcctcagtacctccctccacaacccattattctgttctggatctcaaacatgctttctttactattcctttgcacccatcatcccagcttctcttggctttcacttggactgaccctgacacccataaggctcagcaaattacctgggctgtactgccgcaaggcttcacagacagcccccattacttcagtcaaacccaaatttcatcctcatctgttacctatctcggcataattctcataaaaacatacatgctttccctgctgatcgtgtccgattaa

SEQ ID NO: 3385 - DNA, 733 bp, Homo sapiens
  SIMILAR (615)..(731): 971254mologous to Mus musculus putative,accession number AK015938,Smith-Waterman Score=210.
gcatctggaccggaactcccgggtcgacgatttcgtgatcgagctccctggctgccggctcgccttctgcgtggagatctttcggtttgggtttcgctgactgctcttggcccggggtcattttgtcggcgtcgggtgccctctcttgcccagctggggcacagcgaggcggccccttctcccgacgacgttcgatggagtagggtcccagaccgttgtcccgaagagcgagatcgagcttggccccctcccccccctccttccctccctccttccttccgccgcaacatggctaacaacagccccgcgctgacaggcaactcgcagccgcagcaccaggcggctgcagctgcggctcagcaacagcagcagtgcggcggcggcggcgctaccaagccggcggtctccggcaagcagggcaatgtgctcccgctctggggcaacgagaagaccatgaacctcaaccccatgatcctgaccaacatcctgtcgtcgccttacttcaaagtacagctctacgagctcaagacctaccacgaggtggtggacgagatctactttaaggattgactcagtcttgcagcgaggctcggagcagcccagggtcgcaggtagaggtcacgcacgttgaaccatgggagaaaggaagcaggaaaacagcgggccagacagggatgtgcggaggggttcgaggtgttggaacaggaggaattgtttctacagcattttgcct

SEQ ID NO: 3386 - DNA, 1114 bp, Homo sapiens
  SIMILAR (207)..(52): 1001254mologous to Homo sapiens Amino acid sequence of a human tissue repair protein,accession number AAB07448,Smith- Waterman Score=252.
tcaagttttggcttcatctctattttgaactccaatgggaataaaagcaaactgacttttatttgcagccactttggcaaacagggcttgagacaccttggcccttttcatctcctgttggatctcgtcataaatggcagctgtgatgttgatgttggcgccgtccaccttaatagggaggtctgttgtcggtgtcgaggttttggccactccaacctcaatcactttctcctttccactcttcaatctctcccttctcttaatttcaattcctttcattttctgggagagacaaaggagacatgttttatccgtggacccaaaactccggtgccggtcacggactgggaaggcagccttcccttggtgtttaatcattgcagggacggcctctctgatcattcagccacatttcaagggtgtcagaccatgcagggatgcctgccttggtccttcacccttagcggcaagtcccgcttttctggggaaggagcaagctgctccttgccaggctgagctaggtcccaattcttcctcagcctctgctcctccaccctataatccttttatcacctcccctcctcacacccggtccggcttacagtttcgttccgtgactagccctccccctcctgcccagcaatttactctgaaaaaggtggctggagctaaagacatagtcaaggcttctttggcaccagccttggctcaaggggtcccaggtacacctcaggccactgcttcagagggtgcaagccttaaatcttgggagtgtctatgtggtgttaaccttgcaactgcacagagtgcaagggtgaaggaagcttgtcaggaagcttgtcagtctctacctagatttcagaggatgtatgagaaagcctgggtgcccaagcagaagactactgcagaagtggagctctcacagagagcctctactagagtagttctaagaggaaatgtggggttggagtccccaagcagagtcttctctatagcactgtctagtggagctgtgggaggggttcactgtccttcagaccacagaatgatagagccagcagctttcaacctcagtatgaaaaatccacagaggcaaagctgcctaagggcttag

SEQ ID NO: 3387 - DNA, 1463 bp, Homo sapiens
  SIMILAR (867)..(1379): 471254mologous to Sus scrofa pol protein,accession number AF038601,Smith-Waterman Score=400.
tctgacctaaaatctaagcatcttattttcttctgcaatgccgcttgaccccaatacaaactcgacagtagttccaaatagccggaaaatggcactttcaatttttccatcctacaagatctaaataattcttgtcctaaaattgacaaatggtctgaggtgcctgatgtccaggcattcttttacacatcagtcccttcctagtctctgtgcccagtgcaactcgtcccaaatcttccttctttccctcccacctgtcccctcagtcccaaccccaagcagtgctgagtctttataatcttccttttctacagaccaatgtgacctctcccttcctccccaggcatgctccttgccaggccgagctaggtcccaattcttccatcagcctctgctcctccaccctataatctttttatcacctcccctccctcacacctggtccggcttacagtttcgttccgtgacttagccctcccccacctgcccagcaatttactcttaaaaaggtggctggagctaaaggcatagtcaaggttagtgctcctttttctttatccaacctctcccaaaatcagttagcgtttaggctctttttcatcgaatataaaaacccagacaagttcatggctcatttggcagcaactttgagacgctttacagccctagaccctgaaagaaaacattcgtttatgcactcttttttagttatccccacctgcccagttcccttattaggccaagacattttaactaagttatctgcttccctgactattcctggactacagctgcatctcattgccacccttcttcccaaaccaaagcctcctttccgtcttcctctcatttccccccaccttaacccacaagtatgggacatgtctactccttccctggcaactgatcacatgccccttaccatcccattaaaacctaatcacccttaccccactcaatgccaatatcccatcccacagcaagctttaaaaggattaaagcctgttatcactcgcctgctacagcatgggcttctaaaacctataaactccccttacaattcccccatttcacctgtcctaaaaccagacgtggcttacaggttagttcaagatctgcgccttatcaacaaaattgttttgcctatccaccccgtggtgccaaacccatatactctcctattctcaatacatccctccacaatccattattctgttctagatctcaaacatgctttctttactattcctttgcacccttcatcccagcctctcttcactttctcttggaccgaccctgacacccatcaggctcagcaaatgacctgggctgtactgatgcaagtcttcacagatggcccctattatttcagtcaagcccaaatttcttcctcatctgttacctatctcggcataattctcgtaaaaacacacatgctctccctgatgatcgtgtccgattaa

SEQ ID NO: 3388 - DNA, 1201 bp, Homo sapiens
  SIMILAR (1023)..(874): 701254mologous to Homo sapiens Human secreted protein, SEQ ID NO: 7340,accession number AAG03259,Smith-Waterman Score=164.
ttcccggggagtcggcctcggggctctgctctcctacctcagtctgccctaccctggaatggggaaaatgcggacatgccactcagtccggccgcgaacagtgctccagaactcagagagttttccagacgggtggagatcgcgttccctgcccgccgaggtcccatcgcttccctgctgggaagacaaatgaggcgctttagccgtctccacggccagcccctccctcataacccgagattctttgtgggctcttagtccatagctgcctttgagggtggtgtagaccttgctaaccaggacggcccagtaggcagagctcatttttattcctgtctgcaatcgtgcaaaaacgcctcttatggaaaagccagagcgccgggagtcagcaaaacacactaaagattgggcagtcactggggagaacactcagcccgcctgcacccaggtgaaatatacagccttgttgctcacacaaagcctgtttggtggtttcttcacacggatgcatgtgacatttggtgctgaagacccaggacaggaggactcctttgggagaccagtgccctgttgtcgccctcactccgtgaggagatccacctatgatctcaggtcctcagaccaacccagcccaaggaacatcttgccaatttcaaatcggaagataggagtgtcaggcctctgagtccaagctaagccatcaaatcccctgtgacctgcacgtgtacatccagatgacctgaagcaactgaagatccacaaaagaagtgaaagtagccttaactgatgacattccaccattgtgatttgttcctgccccacgctaactgataccatatattcttcccccgcccttgagaatgtactttgtacacctatcccaaacctataagaactaatgataatcctaccaccctttgctgactttttttttggactcagcccgcctgcacccaggtgaaataaacagccctgttgctcacacaaagcctgtttggtggtctcttcacacggatgcacgtgaaaccacacacctgcaacgaactcattttcaacaaagctggctagtagtatcaggcccagaatccagcaaagtccacagtcagctcagtcaggacccagacataggctccactaccatagccattcatgtgatgggcacaactaggacagaggtggttgccaatacctcttctccaaa

SEQ ID NO: 3389 - DNA, 1040 bp, Homo sapiens
cctaagagagagagattaagtaacttgctgagggtggcacacggccagtgtgttcacagagctagaattggagccgtgtcccctggctcctgagtctgctcctaaccactggcccatgctgtacatcactctgtgcctcttccagcctagggctgtgtctgttcccagttttcccgtcataaataacaccgatgtgccccctctagatttatgtgcttgagataaatttctagaaatggaactgcttgcttaaggaaaaacaataaacagagcaatagatgctgacgcagccatcggaatgggttgaatttaataacgccaagatgctgctccagatcattatgctgctgcttacacttcggggctgattcagagctttggttcctcgttatgaatttataccaggctcttggcccttttcctgcctcatgcatggggtcggcaaactgtagcccacaggatcaaatctcgccactgactgcttctgtaaatgaggcctcactggcacaacctgggcccatgcatttacacactggctggtggtgctttcacacagcacagagctgagcggctgtgagaggctgtgtggccccgcagagctgggaacctttactctctggctcttttaaaggaaaccttttgctgatcactggccttaagaaaagtacaggaaggtaacaaccaagacaagtaaagctgagtccacgacgtggtttaagttcacttagcccacaattacttcctaagtgcccacaggtacgagggtcctgtgccggctaagtgcctacaggtgccaggtcctgcgcctggcaacagcggggaacagggtgattctccagctccaggtgaggtcgcagaggcagctgaaacgtgctgttctttgatccaaagtgacgccactgagtttgtgtgattcaacgtaaggactggatgagttctgatgttagaaaagtgtccacttctaaatgctacagccaacctgggatctgtgccatgagggccaaggccgcacaatgaggaattccaccacactgacaggg

SEQ ID NO: 3390 - DNA, 354 bp, Homo sapiens
  misc_feature (1)...(354): n = a,t,c or g
ggaggaggccgaagttgttcccatttatccagtattggaaaatatttgacccccttggctgaattcttttgcagaactactgtgtgtctgttcactaccttttcaggtttattggttttatttttgcatgaattaagacgttttaatttctttgcagacaaggtctatatgcggagtcagagatgggactgaatggggagggatcctttgtgttctcatggttggctctgactttcagctgtgttgggaccactggctgatcacatcacnnnnnnnnnnnnnnnnnnnnnnnnnnnnnnnnnnnnnnnnnnnnnnnnnnnnnnnnnnnnnnnnnnnnnnnnnnnnnnncatttg

SEQ ID NO: 3391 - DNA, 994 bp, Homo sapiens
tttttttttttcacatttagctgtttttaatgcttaaaagctctgtacaaaaaaaaaaaaaatcacaaatgaatcctcacaacacccctgtgaggtaggtaggcaagtattattctcccattttacagatggggaaactgtagcacaagaggtgatgtgatcagccagtggtcccaacacagctgaaagtcagagccaaccctgagaacacaaaggatccctccccattcagtcccatctctgactccgcatctaaaccttgtctgcaaagaaattaaaacgtcttaattcatgcaaaaataaaaacaataaacctgaaaaggtaggtgaacagacacacagtacgttctgcaaaagaattcagccaagggggtcaaataatttcccaatcactggataaatgggaacaacttcgggcctcctccccttttcaaatatcatgaccaatgacacatcctttttttttttttcctgcagaagtacacgagcctaaccaaagacaggctttcctggtcccagtgagccaagcaaggtggacagcctcctcactgttcagctcctgggtttcagcaagcaccagtccccagctggaagagctgcaaggctcaacgcaaacatggcacttctctgccacctgttcccagcagccttcccgctgtgtggaaacagtggatcccagcagccttttaactcagcagggtctggccttttctgctcccaccggaaggcaggctcaaagatgctcagcaaggatggcctggaacccaggtgatcccctcccaccaccctcagtgcacccttgcacacctcactgtccatgaggaccaccccagcaaccaccctcagctagcactccttggggctcctgctgcagcaggtgggggcaccaggccatcctgggctgccgggacagagagagatgccgggggacctgcagctccaggccttggcttcctctgtgcctcctgcccaggttcccagacaagtggagcag

SEQ ID NO: 3392 - DNA, 1523 bp, Homo sapiens
aaaaatgacaacccagaaccactaaaatgtgtttacatgtgaaagaatcatcacgttgatttacgtcaaagaacatcatatttgtttatcttaatgcttggcatagttggttttaaggttttagaaatatttttgaatttattattaaacaataggaacgtactgtacagaatatttcaaaactgctaccaagaaaacaagtacaaattctacctagcaatataggtttcttatcaacataccttttttcctcactggtttcaaactgacaaaggtgtagggagaaaataattgaatggtttctgaaggccacactagccctttagccaagagttctgcttctgaattacatagaacatcttggtccacagacaatggaatggatttttggagagagtgtcaatttagggctaaagaaatacagggtgagaatgaagccctcaacaaaagctccaaaagggcacagaaactggtaagtgacctaaatatggagagacaggtgaggagaaaatacatagtaaatgctggctcgttattgcattttattctctcccttctctcatccattcatcttcttaagactgccttctgtgtccttttgcagggaaattatcttaccctttaacatttgctccttcactattttaacaaaaagcctataagaaaaataataaattccaaggctattacctaaaagcttgaataaaaataacaacaagccctatgctcccaatcagtaaactcgtttccttggaataaaatcttcatttgtggaaatggaatgatgtctcttagtagacagtgttcatttagggtgtgatactttcacttttagaagcaggaaaaaattccctaaatattaataaggtaaaaagtaaggactttccttctgagggattattgctttatggacttgactttgtttatccttatagtatatcactgccttacataactgtggatatgatgcccagtttctaatgatttgtccaaaatcgtctgagaaaaccaggccaatacaaatatagtgaaaacctcttgaaaatacaattattatagacccacataaataaagtctaatctgaagtctgatagctgattttatgttgaatatacgtcttttaaaaagtgttcttattgaacataaaatgtaaaataacattctggaaacaagtataaatattacatttattctgagtccagatactttctaaactgtagaagtgcaggatggatttgacttatccattagtaatacagactcatgaaaagttatgctgcaaaaaatgctgaacctcctctgataaatgatctttaagatggagagactgaggaagctaagtgaatgttcatgttcactgctgtaaattttccttataattggtaaaaaggctacccataatagaattcacattttcaatgaatttatagtttatcatcaaatagagtaaatgaattaagatttcatttttaaaaataaagagacatatttatttgtaataactctctttttttggtaataa

SEQ ID NO: 3393 - DNA, 607 bp, Homo sapiens
acccacgcgtccgcggacgcgtgggttaagtttaccaaatgtaaacaaaaattcatgaagatgagtattgccctctcccaaaaaaggtttaaagattagttgaacttccctcaactacacctaaagcaaaggggaattttagtaagtgtgtgtaccttgtttctttcagacacatctagaatgtttttctttcaccgtacctccaaaagaggcaatttagaaagtattaagtagtgacttttgttcagttccattttgtgtgtgtgtgtgtgtgtgtgtatgtgtgtgtgtgtgtgtgtgtgtgttaaccttgctttaaaacagtagcatatactatggtcattgaacttaatctctctggcgttagaaatttactttacaaaattgtgttaagacttttggaaaaagaaaatgaaactgctgtggtaaaaaccaagtttgtttcaaaaaagtaggcaattatttggctgttacattttctttgaaaactgcaataatttatatatttgtattgctctgcttgggaactgtatatatgcttgtctactatttttaattttacaacaataaaataagtattttgttatctgctaaaaaaaaaaaaaaa

SEQ ID NO: 3394 - DNA, 726 bp, Homo sapiens
  SIMILAR (719)..(537): 561254mologous to Homo sapiens PRO0113,accession number AF090894,Smith-Waterman Score=139.
ttttttttttttttgccattctggtatgaattttatttcggagtaatcaaatggtcctagaggatgtgaaaaaggttttctgtacagaattagagctaataaatgaggaaaaattaatagccttagaaaatcaccattctgtaatccctagtgaaacaagcaattcataaaatgataatcaacggatagtaaaacaacttggtgaaaaattgaccggaaactttatgatgctgggatgaggctatcaccatctgaaaataaaagaagcctgggagctggagtggacagtggaggagagctgtccaaccagaaacacccgtgccatgtagaataagttaaaaataaatctgtggtgttaaatcactgaaatatgggagcaattcattacagaagttggcttaccataaaagtataccatttatatatattaaaacacataggcacataattacatatattttcaaagatacatacatatccaaacatatactgacacagggagaggaatgagaatagggatgagggatcaaaagaagaggccaggcacagtggctcacacctgtaatcccagcactatgggaggctgatgcaggaagacttctcaaggccaggagttcaagaccaggctgagcaacacagtaagacccaatctctaaaaaaaatttttttttaattagctggacatgctcgtgtgcacctgtagtcctactcagaaggctgtcgacc

SEQ ID NO: 3395 - DNA, 1031 bp, Homo sapiens
ttttttttttttatttctgttaaaaagtttatttattaaaggaaccattattgcttttgtggcctttcctgaacccttgttttgcattgtgggtttactttgctctgcactgcttcatctttaactgtcttctgggaattttactgggcagtcacacaccattgctctgaaaacttcctattgtaacttagacggaacattgttgtaaaggttatccttgtgctgccatattagttaagggcaggttgattgctgtaactgacaatgaccaagtttcagtgacaatgcaatagaaatctatttcttgatcacataatgggccaatgctaccagatatccctgccccaagtggtgattcagggacccagagtcctcctatctgtggcaccaccatctgtgttggggtagaggagagggagagagagaaagagacatacacacattcacactcacacacacacagcaaatttgtttgtctctgtctttctttattttttatccttcctgctccattgtgcgctctgtctctcttgatggatgtagaggtgcagtgctaatcctatccttcccactggtccatatgcttcccagactttcatgattctcccatcatgcaccactgtcatctccctaccctgtcattggctcctcttcccccagtatagtcagacactctacagtctgtttactgaactaaatgggcagattactgttacctcagccaagattacttacacctccaaaatctgatctcgtagtcaaaactggagtacaggacgttgaatatgttacaagtgtcttcatgaagctctcaaataagggctcacataatgggggagaccaaggtattttcagactctgctatcctgagactctattgtcactgttgtttttggttttaggagtgtccaatccagctcatgtctttttgtaaccccgtatacagcccttgtaatcaataaaatatgcgcacaagatatctagatagacctggatggtagtatcttgctggcctcgaattgaattactga

SEQ ID NO: 3396 - DNA, 1183 bp, Homo sapiens
  SIMILAR (1)..(513): 981254mologous to Mus musculus putative,accession number AK015938,Smith-Waterman Score=890.
gctaacaacagccccgcgctgacaggcaactcgcagccgcagcaccaggcggctgcagctgcggctcagcaacagcagcagtgcggcggcggcggcgctaccaagccggcggtctccggcaagcagggcaatgtgctcccgctctggggcaacgagaagaccatgaacctcaaccccatgatcctgaccaacatcctgtcgtcgccttacttcaaagtacagctctacgagctcaagacctaccacgaggtggtggacgagatctactttaaggtcacgcacgttgaaccatgggagaaaggaagcaggaaaacagcgggccagacagggatgtgcggaggggttcgaggtgttggaacaggaggaattgtttctacagcattttgcctgttatacaaattatttaccctgaagttaactcgaaagcaagtgatgggtcttataacacacacagactctccatatattagagcgcttggatttatgtatataagatatacacagccccctacaggatctgtgggactggtttgaatccttccttgatgatgaagaggtatgtcaacaagggtaataatttgttttcttctgattactctcatatttttattatcttttatttattggtggtttaatgtcttcaagaacttcctgtagttaaatttatttcagtgaagatacttttggaaattaaatgtccttttactgagacctgatggcttttatgtattttagggtaaatttctgaagttttattttcttgttttaaaattgtttaaatgtgtttggtaactattggaaaattttctcttcttaattatgttctgtgtattgtattgatcctgaattgtatagttaatagtgacttttcaagatggggcatgctcaagatcgaacagataataaaagatatgcacatagaatactaattgtagcttttttttcttctggaacatttcagttcttcaccctctagcttcttccaaatatcagtattcccacttgcatagaagtgcagaattgaagagttgggtgttacataaataggctaagtggttggatgacttgctcaaggtgacaaaattttaagtccagttttctgactcctagtacaccacacacacctttaaaaaagaaattttttaaattgtaattcgagtctccctaatttgaaatctgaaat

SEQ ID NO: 3397 - DNA, 2934 bp, Homo sapiens
  SIMILAR (1891)..(2130): 761254mologous to Homo sapiens Human secreted protein clone rd610_1 protein sequence SEQ ID NO:36,accession number AAY94915,Smith-Waterman Score=313.
  misc_feature (1)...(2934): n = a,t,c or g
gggctcgtcagatatattaattttacacttcagttttgattggtgagaaagtacccattctcttcaaataatcaaagataattattattttgttttgtttttggaatcaacagggaggcgcaaagtataaagttgctgctaacatatatacatatacatccatattttataagggtgtctatgtatatatagacagtgtgtccacacaaaaaatagatacagttatcagtcagtcagttcttccatgatttagtttttttaaacgtagaaaagctattgtaaacgtctctttccatttattcttaattttttgacatattggtatttctttaaagggaaatgaggaatgcacatcagtgattgattgtcaaacctcaccccctgatttcctacctaatctacccccacctaaccaatcaatcacatccacaaattgttttgtttgtttgttagtcaggcttccaacagagttcaatatttctaacactctagtgcaataaaaattattattaaatagctaagaggtgtgcatgtgggaaaggtcagtgcatatccctttaggaggggagaatgttgtaatatatcagctatcgagttgtttaaaaaaagtgtattcaatcgtatattgtctatagtatgtgctatgaaatttgcatttatgatatgtaacaggggcaaagccaaattcatgttactctgttcagtcagaaacattttgtggcatacagcattcctgggaagtgctgtactttgtttcgttttggttttagttttgcatttagagtgccttataattgatgcctattttaatagcatttctttttagcttttggttcgtatttccattcactgttcgtatctgttactttctattaaagcattatctgtttaccacatgtacaaaaactctttgaataatatgcattcctagttttcagccaagtcggggatgttagtgattgtaccagcccaaagcacttggataatcagggcccttcttccttttataatcaatcatcaacatcagaaaaagctacttgttttatttatattcccttccaaatccgctctggaacatgcggtaactgccccaaacttattttagtacccaaatacccatggccaactttggaatatatttgatattcccattaggatttttcctaaaaggggaaataaactatatatatatatgtatcttacccccaattcttccaacagaatttctataggaagccatggatgatgncatggcataagtttgccacatattacatgattttaaataatcctcaaaatacccaaggaactcttaaagagttttggtatgagtatactactttggtttaattttagcttcatggatgttctgcatggaaggatttttgttttccacattttcccattgctagcagagtgaaatccaagagaccaaacatttgcaagcattgtatttgagcacttttgtaaaaaacaaagaaaaaggaaaaaaaaggaaaatatatataatactaaaaaaaagtatctagaaggctacctcaaaaagagactctctaacctacatcagaaccagagaagaatgtgcactatgtgggtctgttatcattattttcttttaggtggtatctttttggagatttatccaagtgccagattactcagcgctataattttcttttagttaaacaaagggggtcagacagacattgcatcatcccagacatgccttgttggacatgtagaatccgatggagcactgcacaccacaatgattgggcccaatgagccagccttcctctcccctgaaaacaataactgccccatttggcaaagggaaagatggacaataatccagaagaagaaaatgaatgggatgcatacccatagacggaacgaggcggagactattgcgggaatccttactgttcaggagctgttccctagaactaactcccttactgtcattgatgtgcattcccactctgtgcttttctgtacaaccattcaagttttaatttcccaggtgaaccatctttatctgccattaccacaagctttcaagtttccagttattttcatcatcataaccagtacggggctattatttacctatgtacgtgtagttatgtataattttgtaattagttacaatggtaaaaaaaatcaaaatatataaaaagtgatttgtacagaactttattttagctcttttttaaaaatgatttgcatggttagaaaacggcgaggacagccaggggagggaagggcctctagggaactttgcactttctatacctttgtactatgcactgccctattgattctacacccaataatgatattacttgaacccatctgtaagaaactgcttcggaaattcatttgtgtgtatgtaaataacacaacatagaaacaggaagggaaaaaagtctgcagtaatgcacgtattttttttctttcctgtttattttcggttttgctttaagtccttttatttttaattccctttttgtttttctttttgggttttggttcctttttgggtttatgggtgcccctggatactccagcagaagatcagaaaggctacagattccattctatccatccgttatgtggctttgccatcccagcttggagtgtcctttacaaagataataacagttgtgttcctttgcctctcgttttggatgccatagactgaaaaattaaaacaaataacttgtaaaatggcttgttaaaaaatacaatttacctctaattaagtagtacggccgtaaatggttttacagaatgaaaggcgtgctttttattttccttacttctttacattggtggcgaaagaagtctgtatgaaaatcagttctttgctgacacaagttccatttgttacaaatgaattctaataaaaatgtcagtgttatgcaaaaaaaa

SEQ ID NO: 3398 - DNA, 419 bp, Homo sapiens
  misc_feature (1)...(419): n = a,t,c or g
naataaaacccaaaaaaaacttcctaatgcatgcaaatgtgtattatacagctgttaagtaacatacatatcaccttaataaaaatcaagatgaaatgttttagaatctattttatcaaaagtggctctgnnnnnnnnnnnnnnnnnnnnnnnnnnnnnnnnnnnnnnnnnnnnnnnnnnnnnnnnnnnnnnnnnnnnnnnnnnnnnnnnnnnnnnnnnnnnnnnnnnnnnnnnnnnnnnnnnnnnnnnnnnnnnnnnnnnnnnnnnnnnnnnnnnnnnnnnnnnnnnnnnnnnnnnnnnnnnnnnnnnnnnnnnnnnnnnnnnnnnnnnnnnnnnnnnnnnnnnnnnnnnnnnnnnnnnnnnnnnnnnnnnnnnnnnnnnnnnnnnnnnnnnagatagatcggagatgggttggagga

SEQ ID NO: 3399 - DNA, 213 bp, Homo sapiens
agggatctttgaagttgatggaaatgttctaaaatcagactgtggttgtggttgaacaagtctgtaaatttaccaaaatgcgttaatacacttaaaacagctgaatgttatgatctgtatttagtaaagctctttttaaaatatggctctactactgctagagacattgatatcaaagatgcagagtttgaataattgtttcaggaaaagttt

SEQ ID NO: 3400 - DNA, 1384 bp, Homo sapiens
  misc_feature (1)...(1384): n = a,t,c or g
ggccctaaaaaaaattgtaagtctacattattcaattataaatctaatgattttagaaaaatgcaatgcaacatgattttattttaaaaattatacttgggtaaaaacaattgcaataatcttctggcaccattgggtagctggcatttaaatataatttaagagttagtatataatattttcaaaaagctaacaacatcctaatagaactgttcagatgacaagagtgtcttcttgcttttcagatttggccactgatcgaagttttacccataagggaaataacatagtatcaagcaatagtaaaattatcagtttgacatggatgggttttgaaatacttaagacacaacataaaatttagttcaggggtctttagattgtaaagaaattgactgaaagtatgtttattatgctataaatgaagttgtttataacagcgaaaaaggttctcctttaaaaaaaaaacttatctgtagtactgaatatataaacttttcctgaaacaattattcaaactctgcatctttgatatcaatgtctctagcagtagtagagccatattttaaaaagagctttactaaatacagatcataacattcagctgttttaagtgtattaacgcattttggtaaatttacagacttgttcaaccacaaccacagtctgattttagaacatttccatcaacttcaaagatccctggtgccatttgtagtcctccaacccatctccgatctatcttgtttctatgacttgccttttctggctatttcatataaatgggatcatatgacatgtggtttcctatatctgacttttttcatttagcataacgtttttgaggctcatccatgttgtagtactcccatgccatgttgtgggcctacataatattccattgtatggatatacccacattttgccttatcagttaatggacatttaggttttgtcctactttttggcattaatagtgctgctgtgaacaatcatgtataagtctttgtatcagagccacttttgataaaatagattctaaaacatttcatcttgatttttattaaggtgatatgtatgttacttaacagctgtataaatacacatttggcatgcattaggaagttttttttgggttttattcatcctgtagtgatgtatctgtgacctcaacgagtaggcacttctgtactgtactggtttcttaaagtttcttttatcccgcccccacccccaacctcagcctcaagtatgtaannnnnnnnnnnnnnnnnnnnnnnnnnnnnnnnnnnnnnnngaaaaacaaaacccccttttgcccccaggctggaatacgggggcgtaatttgggatcattggaccctttgctttcgggatcaaggcg

SEQ ID NO: 3401 - DNA, 445 bp, Homo sapiens
  misc_feature (1)...(445): n = a,t,c or g
ctctggttaaaaaaaaacacgggtnnnnnnnnnnnntccccaccgttattcccaccccttggggagcccaaacgggatgattcccccggggccgggggtttgggnnnnnnnnnnnnnnnataaaaaaccccccttttttcttaaaaaaccaaaataacccnnnnnnnnnnncccagcccggtattcctggcccctgggggggttagggcggggaattccctttacccccgaggcccagggttccattaacccagatttggccccttccctcccccccggggcaccaaaagggaaccccctttccnnnnnnnnnnnnngatagcaaactgctttcttctttctgacaagagccttttgctggaggaagcctgggggcaggttgtgggccccagtcctcttgaacccactgttgcccctaagccaaacccaaggggcaaggcacaga

SEQ ID NO: 3402 - DNA, 573 bp, Homo sapiens
ttcagaatgtttttagctttattaaagacatattatagtagacaaacaagtagacaaacacatgctctataaaatatacattctgatgtgtgacaaaatataaacagatactaagaaatgactacactgaacaatgacttggcttgtatctctgtttaggtacatctagtattagggctgctcagactagtattatccaataggggaaaaaaataatagtggaaagtagagggtagaaataagtctcaccattgtaaagaggccacagtaaacagcaaagagacattccaagagtactcgaccatctgatgatcaatttctctttcaagatagttacagtttgtagatcactttactcctttatctgaaaacaggcacaagtcaagctgtttcttcaccttcaccctattccatcttcacacacacacacacacacacacacacacacaaaacctaccttactactgacaaaaccttcagatgattcttgggttttcaggtggtgttaagtgcagcttgtaacatatctcttagttccaaacttgttacttttgtcaatgaaccagacaattg

SEQ ID NO: 3403 - DNA, 4823 bp, Homo sapiens
  SIMILAR (403)..(2409): 671254mologous to Homo sapiens dJ127C7.1 (KIAA0250 protein),accession number AL137800,Smith-Waterman Score=2180.
  misc_feature (1)...(4823): n = a,t,c or g
atgtcttttcttggcatcctgtgcaagtgtcctctacagaatgagtctcaggaggagtcctacaatgcctatcctcttccagcagtcaaggtctccatggactggctaagactcagacccagggtctttcaggaggcagtggtggatgaaagacagtacatttggccctggttgatttctcttctgaatagtttccatccccatgaagaggacctctcaagtattagtgcgacaccacttccagaggagtttgaattacaaggatttttggcattgagaccttctttcaggaacttggatttttccaaaggtcaccagggtattacaggggacaaagaaggccagcaacgacgaatacgacagcaacgcttgatctctataggcaaatggattgctgataatcagccaaggctgattcagtgtgaaaatgaggtagggaaattgttgtttatcacagaaatcccagaattaatactggaagaccccagtgaagccaaagagaacctcattctgcaagaaacatctgtgatagagtcgctggctgcagatgggagcccagggctaaaatcagtgctatctacaagccgaaatttaagcaacaactgtgacacaggagagaagccagtggttaccttcaaagaaaacattaagacacgagaagtgaacagagaccaaggaagaagttttcctcccaaagaggtgagaagggactatagcaaaggaataactgtaactaagaatgatggaaagaaggacaacaacaagaggaaaactgaaaccaagaaatgcaccttagaaaagttacaggaaacaggaaagcagaatgtggcagtgcaggtaaaatcccagacagaactaagaaagactccagtgtctgaagccagaaaaacacctgtaactcaaaccccaactcaagcaagtaactcccagttcatccccattcatcaccctggagccttccctcctcttcccagcaggccagggtttccgcccccaacatatgttatccccccgcctgtggcattttctatgggctcaggttacaccttcccagctggtgtttctgtcccaggaacctttcttcagcctacagctcactctccagcaggaaaccaggtgcaagctgggaaacagtcccacattccttacagccagcaacggccctctggaccagggccaatgaaccagggacctcaacaatcacagccaccttcccagcaaccccttacatctttaccagctcagccaacagcacagtctacaagccagctgcaggttcaagctctaactcagcaacaacaatcccctacaaaagctgtgccggctttggggaaaagcccgcctcaccactctggattccagcagtatcaacaggcagatgcctccaaacagctgtggaatccccctcaggttcaaggcccattagggaaaattatgcctgtgaaacagccctactaccttcagacccaagaccccataaaactgtttgagccgtcattgcaacctcctgtaatgcagcagcagcctctagaaaaaaaaatgaagccttttcccatggagccatataaccataatccctcagaagtcaaggtcccagaattctactgggattcttcctacagcatggctgataacagatctgtaatggcacagcaagcaaacatagaccgcaggggcaaacggtcaccaggaatcttccgtccagagcaggatcctgtacccagaatgccgtttgagaaatccttattggagaagccctcagagctcatgtcacattcatcctctttcctgtccctcaccggattctctctcaatcaggaaagatacccaaataatagtatgttcaatgaggtatatgggaaaaacctgacatccagctccaaagcagaactcagtccctcaatggccccccaggaaacatctctgtattccctttttgaagggactccgtggtctccatcacttcctgccagttcagatcattcaacaccagccagccagtctcctcattcctctaacccaagcagcctacccagctctcctccaacacacaaccataattctgttccattctccaattttggacccattgggactccacataacagggatagaaaggactgcagatcggtggaaaaactgataagccagccatgggtgggtttggcattgattatctctcagcaacgtcattctctgagagcagttggcatcaggccagcactctcgagtggcacctggacaggccatggcccttccatggaggattcctctgctgtcctcatggaaagcctaaagtctatctggtccagttccatgatgcatcctggaccttctgctctggagcagctgttaatgcagcagaagcagaaacagcaacggggacaaggcaccatgaaccctccacactgaggccaaagtggcaacctgggaatgaaggctccataaaccatggcatgttgggtttgcaggactggcccacacagtcccctgcaggtggcagccctcttttctgtttctcgctgtcaagagggtgtaagtattccaccagcccgctgagtgtgcccgaaattgttccaagtgcaacaaaaagaaaaatccatcaggaaactgctccgtccccccggggccctccggagggagagagagaggaactgctgtttatctcactcagttacttggtatcaccgcctctcaccttctccatcgtgcatgtccccagccacatgggaagtgaaagctgagaagggaaggcagatgggagaagccaatgggaacttctcagtccttttttcctctttggggaataaaataggaatccattaatgattgctttgctgactgagaatgtagttgaaattattcttaaacatcttttattattattactctcaggcgcaaaatatcacactgaattctttcatactcccgtgtgcttctagtcaatgtgcagcaaggaaagccccgttcactgctcctgtgataagcttgtggtgacaggatggggaaccgacctcttcacccagtggaaatgttccataagggagagttcaaggcctgtcagcaggctctggtaggccttcctctggccaggagactccagcagggaatgcccttccactctgtaggttgctcgagccccaatcgaggataacagtgtgggtggtggtgctgggctggactagcaggtagactgctgtaggattttcaaattacgttttttgatttcctgtaccattttacagtccgcacagcaagcagtcttcacagaaggcaggctagtcccatttcacagccttgacacgttcttaatagggtaggaagctttccagttgttggttattttttttctttgggttggtttttgtgccccccattctacttcccaccctcctgccccatctccatcccttcttttacccaatgctgtatgctagtaattgtttttattcctaatgtgtgcaacatcacatctccccaaggaaggcaacagcatggggggtccaggcagttggggggcccaaaaggacagttttgaaggagggaagggaagcagccagtatctgcggtagcccacagaggggccccagggcccctggcccagctggcagttttcccagccttccacttttcagagtgaaatttcaaaggcagcacgggacatgtggcccatcaggcacaggaaggaaaacacgacgtcgtccattttgggaaggaggacggaaagaaaagggaaaattaaactctttgtatgatatttattaggaggaaagaggactgaaaatgttcttgtgtagaaacagaaggacagcatttctgttagtcatttcctgggaaaagttaatattttaagtgggaaaattatggaaacaatctaattgttcaattgctgtgctagtggtagggtttattttctgggaggtctctcctttgtgtgtctgtatgtttgtgtacacacacgtgcccatctgctgtcccagaggggaggggttgtgtgtgcgagtgtatgggagttagtgtggaacttaagagctggaagacagctgttagagcaaagcacatccagggagccccagttgtcactgcagtctgggcaaccccagcaatgaaaaggggtgagataaccgctcattgctcttcagagagagtggttgggagcccccccccccccccccgttatgccttacattattgcctcttttagtttgacatggtgtttgggttttgtttttttgaaaggtctgaaaaggtgaagccccctacccaatggccaatatgaaaccttttgtgcttctcttcagccccttccctgtgtccacctttctctccctctttccccaagccctttccccctacctacccttaacccccaagattggtgtggtttggaagctcctggcattccagggcaagcctgccaaacatccccagtgtttggaaactggtcaactgaattccttggcgcccccaagaacaaagcctaacccaggtttaccccatcctcaactccccagtaaataccccagctccctatcctaaagncccccattctgccatgaagaatttggtgtttggaatgttttactgactcttggggcgggattcctcgccttatcatcctcactgtgggagtaatgagggggaaggagaatctttatcagaaactggttttgtgtagtaaacttttttttgtgggttttttgttttgttttctggggtttgttttttgttttttgtctgtggcaagaccctgcagctgctggaaaatcagctttgcctttaattaaaccgatgttctctccaaccaaaaaaaaaaaaaaaaa

SEQ ID NO: 3404 - DNA, 803 bp, Homo sapiens
ttttttaaatttataaacatttaaattttattacagaaatttaaattttttgattctgaaaaagtcatatatgtatgcaacattttttatcatttatttatatatttatgcatctttccttttagttttgacagagattttctattttatcattatttcaaaagaactcttacctgtatttatttatcaagtatatttcccttgttttttcctaggatattaatttatttacttatcttctaaaaatcctccatataatctgtttattttgcttcctttctataatttcttcaataattagttctgttctattttccattaaaatatttaaatcttgtatgaatttttgtcagattagaaatttagggcgtttcttaatttctctatactctagcttttgactttttttttctgacctaagaggtatttatagcacattttacattttttattttgactaatcatttaaaacggatactaatcatcaatttaaataaaaaactggactatagtgacaaaaattacaaatgagcctaactaatagagtatcagctgtgtttatatgtataagcatgcacagattttggtaaatatgcacataatatattggcgaccttatttttatcattcttaactcattgggcagcctaaacgttggggaaaaaataaaatacaataatcagatggtgtgaataagaaaattgttctaatgtttgtaaaccaagcaactgttttaactgctcccctcttcctgattgacttctaaaagggagtgatccatattgggtcctatcatatacgtc

SEQ ID NO: 3405 - DNA, 1081 bp, Homo sapiens
gcgatttttcatttggcaaatggcataattatttgaaagtgacaggaatctcctcagaatgaagaatagagcctaataggtctctaactgttgaactcatgaaagaagatagtgtatgagacttaagccatgagtttttgtatcattttcaattagaagactactagcctgtgagctcagagtttaatgtaaatgaatctagatgattttgaagaaatgattattcgttcaccagatcactcattgtacattctaaaaagctcaaatgagtcttctagatactcttactcatcctgtctggttgctatgtttaaaattatgtggtgctgtgtaggtgaaactttaagaatatttttgaagcatatgtaatatatgcactgctatttgtgtgtgtggtgtgtgtctttgtatatatgtaacaatgtgtgtatgtgtgagagcaatagagaggaaactcaaagaggagtgtttgtcttaagacctgttcatactgggatattggtgagacttctcacttctggttggaggtttcacatatggctcaactcaagtcattaatctctttttaatttttactcttgaattccttaaaactccgctcattaatgaaatggttttaaaaattatgacaaaaaattactctgtctaaccacttggccttgtctgctaccagtttgttaaaaattattccccccaaccagtaattccaccagtactacttgatttgtgttatatttcctatgtacatgtacagcctttgttttgcttgcttgtctatttttactttcccttttttgggtcaaatttttcttttgctttgtttgaagaaggaatatacagaagtaaaatcttgtcttctctgctgattctttaattaatatgagccggatactttccactgtcttcttggcactttcaaggatttcttaaatgctgatatatggactcttagaatggaatttttgaagaaaaatctcaaagcctgtatcgttcttgaaggtcacatgtacctattgtgaaaatgtgaagctgtatttctgaagctgaaataaattataacatttgaaggaaaaaaaaaaaa

SEQ ID NO: 3406 - DNA, 980 bp, Homo sapiens
gatagcctggcacctttccctcctgggggatttcccggacacccctaagggcttcttgcttctctcaaccctaacctttgaggagggactaatgattgggtggggaagcttaagtcttgctctgttgcaaagcccaggccccctgggctgttcgtctatctatggtttaagatgctttcaaaaaactggggcattctccctccccaactccagaggggtggcttgaagaaagagaaaccaacgaaggggccaactgtataaatctggggaacccatgaatagggtcaaaggtgtgagcccccgcccctgcccccatcctttggatgagatagtggctaggagcctccattcccacctgctttccagaaggctgggggccctgcctcccccagcccagggcccccaggcccccactaagaccccacaggccctgcaagtgaatggaaaatggcaaccatgggcaaccgtcctccagagatggtttcccaggcttgaaatgggctgaagatgaagcatctgcgagagggtcatttttttttaaactttggagcaaggagaacccgaggctgggccctcagtcagcacagctggcttttctgccctggtctccaaggcaccgccaaaattacttactgttcacaccagctgcgggcaccggaggggcgcacgcggggctggggtgggttgggggttgctgggcatttccttgggtttagccctgagggatctgcccagctggggactcaggaaaaaagtctcaggctaaatggggacagtctgtgagacacgagcagggaacaatcacgagaaccggcacaagtcatgcaacaaaacgaggagagagagagaaacatgattagtggagagagagagaaagagagaaaatgtgaacaacacggaaaagaacacccatgcctggcccctggcgtcacttcatttctccgctacttcccccacagcccacctgaggacaacaaaga

SEQ ID NO: 3407 - DNA, 531 bp, Homo sapiens; identical to SEQ ID NO: 2441
  SIMILAR (392)..(430): 761254mologous to Homo sapiens U6 snRNA-associated Sm-like protein LSm8,accession number AF182294,Smith-Waterman Score=47.

SEQ ID NO: 3408 - DNA, 1140 bp, Homo sapiens
  SIMILAR (1139)..(891): 611254mologous to Homo sapiens Human secreted protein, SEQ ID NO: 7871,accession number AAG03790,Smith-Waterman Score=251.
ccgcccctcagccccccccaaagtgccgggaatcacacccgttccatttgttaaagccaatttgcctaaaaactgaccgaggtttattccattgcctatacagccagtgtttgattcagataaatatccttaatagagtcacatttccttcatgtcatgccctttaaggttgttccccaaatagtcataaagaacagaggatacctcaggtatgtaagatcttagagcccaagagagagtatggaaatggatgttcagctggtatttactgtcataagtgggattaggaattgtgggtttagggaattaaaaacaaccaacaattctacttggcttttaatctcttcagttatgagtgaagcatatttgcttgtaagggaagagataaggtaaaggaaatgaaataaagaaaaaaaatttggtggttggtatggggaattcaagaaagataaaattttgtagaaataaaaggcttgatgagctggattagaaacccagcacagttggaaaaattgacagttttcaatcaccaggcatatctttaaagtgaataaactgagattcaattaggacagggaaggaagtgaacaggagagataatggtatagcaaaagggagtccaaggagaagaagtctcagtgggagttttggaaaaccaagagaggcagcaagataccggaaagagcgtagacggtacaatgaacggtaagcaaagcataatttcccaaaatagtcttgatcagtatttcctgtaaaaatgtttgatttaagcattttggccctttccataagcaccatttaatggtcctctttaaaatacagaatgtactttttaaagatggaaatacgtttgaggtcaggcgtggtggctcacgactgtcatcccaacactttgggaggcccaggagggcagattgcttgatgagctcagtagtttgaagccagcctgggcaatgtggtgaaaccctgtctcttaagaaaaatacaaagattagccaggcatgatggcacgtgcctgtggtccaagctacttgggaggctgagttgggaggatcacttgagcccaggaggttgaggctgcagtgagccattatcatgttactgcactccagcctgggcgacagagtgagaccctgtttc

SEQ ID NO: 3409 - DNA, 930 bp, Homo sapiens
  SIMILAR (2)..(148): 671254mologous to Homo sapiens Human breast cancer related protein BCRB2,accession number AAW48351,Smith-Waterman Score=176.
ttttgtatttttcgtagagacggggtttcactatgttggccagactggtctcgaactcctgacctcgtgatccgcccgactcggcctcccaaagtgctgggattacaggcacgagccaccccgcccagcctatgtagagtatttttacagtgctttactgtaggcaaagtccttgtacttctactctcttattttacttgtgagtgatttcaaatcagtgaaaaagctaaatagccacatatacacctggctatatcattaaaataacacagaatgttaaaatttctcctctgttatatttcatttatttaattggataagccatttttaaccaagtttaatttaattatggtgatcataattaatagtgattggaagaatacaactgtaaaacagttctatggtttgtataccttatttgtcttatatgtgttaatagaaaacatctcagtaatttcaaaactagtaatacgatatgggaacagtatgttatagcagaaagggccctgggcttgaaatcattattcagttcatgtttgtattcctacttctcttataatttggactatttaataggtattatcaaaattattttaaaaagtatttatttttatatgacatgtacacacacatgtgcattataaaaagccacacaatacttcaattatcttccactgatggatatattatctatagtgattgttacagaaaaataaatcttcaaaatgataaaacaagagtacagcctactcaagtcatagctatagaaatcaggtatatttacttaattttcagattctcagtttcaatcatccagtatatagcgataaaaccctggtttacagctttccagagttattgaaatcacatgagttggcagtaaattgcccctataagcgaacgcgtgggtcgtcccgggaattacggacg

SEQ ID NO: 3410 - DNA, 464 bp, Homo sapiens
  misc_feature (1)...(464): n = a,t,c or g
attgtacagttcagtcatacgtangnncnnnngggnnganccacgcgnnccgccacgcgtccggggggctcatgtatgcaggaggctttggcttttgtcctctgcttgagcactcagggggacggggaccccaaaacctggcccgggggatagggggtggggagcaaggtggctcctcccaaacagtagcttacaagccccaagactcatgacctgcagttacttgtaaaccacctccaggcccggcacaaacccctccccactcccactcccaccttataaagatccttctaatttgattttgagtctaagcctgttgggaggggcagggcccaacagaaaggctggggaggcaaacagagggatctggggaaagggcaccagactggggccagggatcccaagaccaagtcctggcaaaagagaggggcctgctatgagggtggtggagaccagatgccctt

SEQ ID NO: 3411 - DNA, 3438 bp, Homo sapiens
  SIMILAR (897)..(1178): 561254mologous to Homo sapiens BM-003,accession number AF208845,Smith-Waterman Score=264.
attttatatttggcttatgaaatgtattaatttgcttcttctggtcaaagataaagtggaaggatgatgagatttttaaaaaattaatgtatcccttgcttctaattctacctacaaagtggaatagtgtgctagttactatatagttcccagtgtatagcttttgactcttttgaagtggtaactagtagttttgttttagaattttgctttcagcttttatcctgagagtggggctcactgaacctctctcctttctaaaatctgtggaaattacttttggtaactaaggcactgcagtgatctcaggtaagagagtaaaaaatttgcctttatttgtttttaatgttttgggacgtttcaggttttggttgggtggaaacagagttggggcaaacaaaaagaggctggttaagagattcagaggcaaaggttggttggccatgctaaatttcaggtgcctgttgcacctccatgtaccaacagtaagtagacagatagcagattcttagggaagaagttaagctagagaagcagtgtggtgtggtgtaaagaattctgggcattcaattaagaggtgtgggctctgagaggctaacactactactaacttgctctgtgactttgaccaagtcatttgacctctctgggccccatctttattggaaaatgtcaagtagatggtctctaataaatttttgtccagttctaacattatgtgattctaaatgtatttatactgaccttcttaacttgaactctttgttttttcagcatttagtatgagaacctatgtttgccatatttgtagtattgcttttacatctttagatatgttccggtcccacatgcaaggaagtgaacatcaaattaaagaatccattgttatcaatctagtgaagaattcaaggaagacacaagactcttaccaaaatgagtgtgcagattacatcaatgtgcagaaagccagaggactagaggccaagacttgtttcagaaagatggaagagagttctttggaaacccgtagatacagagaagtggtcgattccagacccagacatagaatgtttgaacaaagactcccatttgagactttccggacatacgcagcaccatacaatatttcacaagcaatggaaaagcagttacctcattcaaagaagacatatgactctttccaagatgaacttgaagattacatcaaagtacagaaagccagaggactagatccaaagacttgtttcagaaagatgagagagaactctgtggatactcatgggtacagagaaatggttgattctggacccagatcaagaatgtgtgaggcaaggtttttcacatgaggcttcccagacctaccaacgaccataccatatttcaccagtggaaagccagttacctcagtggctaccaacccattcaaagaggacatatgattctttccaagatgaacttgaagattacataaaagtgcagaaagccagaggactagagccaaaaacttgtttcagaaagataggagatagctctgtagaaacacacaggaacagagaaatggttgatgtcagacccagacatagaatgttgggagcaaaagcttcccatgtgagactttccagacctatttcaggaccatatagtattttcacaagtagtgggaaaaccagttacctccattgctttaccagctcatggattagcaaacagagacttagattctattagctactgttcaactcaccagaggactgtttccccagaaaaaacccagtacccttggagcctttaatcagcaagaaaataactctgggctcatacagtgtagaatctgaagtttacaagcacctctcttcagaaaacaatactgctgaccattaagccaggtcataaccgggaaacatcagaagagaaaacgacacctagaagaaggcaaagaaaggccagagaaagagcagtccaagcataaaaggaaaaagagttatgaagatacagatttagacaaagacaagagcatcagacaaaggaaaagagaggaggatagagtcaaggtcagttcaggaaagcttaagcatcgaaaaaagaaaaaaagcccatgagtgtaccctccgagaaagaagaacgtaagcacaggaaagagaaaaagaaatctgttgaagaaaggacagaagaggaaatgctttgggatgagtctattcttgggattttaaatgtttagttttgtttacccaaggttgaattgaaaaaaaaaaaacagtcaatatggatttatggaaaaggaacacctgatgaagaaaaggagaggtagatacagtcagtgtcacttcaggacacttaggttttttttggataaaaatttaaattgaattaaaagaaggaaaaaaaaagcccagacttaacctctgagaaaagaacataagaactcaaggagaacataagagaaaaggaaacctgttacagaaaagacaagaatctgtgttttggaatgagtctattcttgggtattgaacttttagttttgtttgcccaaggattaattgagggaaatcagctaaggaaaatggactttagacaaaagcaagaggatccagatgaaggaaaggagaggtagatacagtcagtgtcacttcaggaaagctatttaaaaaaacttgaaatttaattgaaagaagaaacaacaacaaaaaagcctaaacctagcctctgaacaacactaacatgagaacacaagaacttaagagaaaaagaaacctactcaagaaaagacagaagagacagtgatttgggatgagtctactctaggattttcaactttttagttttgttccttcaaagttgaaggaaaaaaagtttggttttataaaattcatgttattgtaatttttctaggtggatggctattttaatctctaaaaaagccaagtgaagtaaaagtattcagtatgccttttcctcaagttactttccttcattttcttaaaaaagaaaaaaaattattaaatgtttctcacatatttcacatataaagtaatttccctaaatgaagttgtctctacttctgctcatcaaattgctgtgatagtgaattatttattcatgggagataatttattttaaaggacagaattaccaagcgttacaaaatcagttctttccttggttttgtgttagtgttggtggtattttattgttgtttttctggtgtttatggtgtctcagctttctccaaggaatatgtatgaaataacttaaactgattttttctttgttaaatctaatttgcagtgtatttttgcattttctagttctgaaagtggaaaatgaaacagtctataataaacttagatgatatatagttttaaaacggtctcaaaaagtactgatataaggtcagtctatattctggaaatgtttatattaaagtaatttaatttctaa

SEQ ID NO: 3412 - DNA, 430 bp, Homo sapiens
  SIMILAR (167)..(238): 911254mologous to Homo sapiens dJ470L14.3 (novel protein similar to the Arp2/3 protein complex subunit p21-Arc (ARC21)),accession number AL133174,Smith-Waterman Score=116.
  misc_feature (1)...(430): n = a,t,c or g
accggaagcgctccgctgtacctggatcctgctcctctgggttgaaacccgggcgccgccaagatgccggcttaccactcttctctcatggatcctgataccaaactcatcggaaacatggcactgttgcctatcagaagtcaattcaaaggacctgcccccagagagaaatgaagctgataggaccttgatatatataactctctacatttctgaatgtctgaagaaactgcaaaagaagtgatgagagcctatttacaacagctaaggcaagagactggactgagactctgtgagaaagttttcgaccctcagaatgataaacccagcaagtggtggacttgctttgtgaagagacagttcatgaacaagagtctttcangacctggacagtgaagggagcccgggcagccaccgtctccagagccct

SEQ ID NO: 3413 - DNA, 549 bp, Homo sapiens
  SIMILAR (1)..(435): 631254mologous to Homo sapiens p21-Arc,accession number AF006086,Smith-Waterman Score=443.
atgccggcttaccactcttctctcatggatcctgacaacaaactcattggaaacatggcattcttatctatcaaaagtcaattcaaaggacctgcccctagagagacaaaagatagagatattgtggatgaagccatttattacttcaaggccaatgtcttcttcaaaaactatgaaattaagaatgaagctgacaggaccttgatatatatacctctctacatttctgagtgtctgaagaaactccaaaagtgtaattccagaagccaaggcaccagtccagttgctggggtcatagtggactgtgaggttcatggcagttccagctcccatggaacttatgttctgatttctgacttacacaagagcctagaacagaaagaaagtaaaatccagcagctagcagaaactataaagaaacttgaaaaggagttcaagcagtttgcacagttgtttggcaaaaatggaagcttcctcccaaacatccagaataaactgctgcagtctctgtaccccagactgagttacagcatgtcctacaaggcatga

SEQ ID NO: 3414 - DNA, 592 bp, Homo sapiens
ggcacgagaaaaaagcagctgcacatctcagagtggggcttgtgccttaggacagggtgcagacggaaaaggagactgaggagactgtgcatttggagaatgggagttttgatgtgatagtggctgtcctaccactgcattcagcagataatcagaagacaaagatggaatgcatacattgcacatcattgttatgttttgataactgtttttaagtcttctttttctccctgtagaatgaagctgataggaccttgatatatataactctctacatttctgaatgtctgaagaaactgcaaaaggtaattaaacttggatgattgtatatcatgaaaacaaattgctgagaggcattgaccctcccagtcatctgggatttgttgagactttaaagacaagtagaaaatatttcctctgacttacagcatggacttaagagaaaaatttgaatttagttacctgaacttgtagtataattgactgacacaaagataaaagtagtggtgttttaaggctttgaatatattttctcaagacagaaatcttgacagaggaattccttttaagccctttgattcaaaggttcttg

SEQ ID NO: 3415 - DNA, 902 bp, Homo sapiens
  SIMILAR (97)..(729): 541254mologous to Homo sapiens dJ470L14.3 (novel protein similar to the Arp2/3 protein complex subunit p21-Arc (ARC21)),accession number AL133174,Smith-Waterman Score=492.
gcgctacctcgcccaggcttccagaccggatgcgctccgctgtttctggatcctgcgtcctctgggttgaaacccgggcgccgccaagatgccggcttaccactctttctctcatggatcctgataccaaactcatcggaaacatggcactgttgcctatcagaagtcaattcaaaggacctgcccccagagagacaaaagatacagatattgtggatgaagccatctattactttaagggccaatgtcttccttccaaaactatgaaattaagaatgaaagctgataggaccttggatatatataactctctacatttctgaaatgtctgaaggaaactgcaaaaagtggcaattccaaaaagcccaaggtggaggaaaggaaatgttttacgctggggattcactaatttttcccatttcctgggagagcctgggtttttcccactttaacggcaattttttgccaaacctggcaaacaaacaggaagatgaagtgatgagagcctatttacaacagctaaggcaagagactggactgagactttgtgagaaagttttcgaccctcagaatgataaacccagcaagtggtggacttgctttgtgaagagacagttcatgaacaagagtctttcaggacctggacagtgaagggagcccgggcagccaccgtctccagagccctgggcagcattttccagcaagatgtacacaatcttttgcctttatttcgtaaagttttatacagaagagagaagagcatgtctttacttgaaaaactcttgatcaagaatttgggtgggagaaaagaaagtgggttatcaagggtgatttgaaattttctgcagcattaaacgtggcgcttaataagaataagtaataataaagaaatttctaacaaa

SEQ ID NO: 3416 - DNA, 872 bp, Homo sapiens
  SIMILAR (750)..(634): 611254mologous to Homo sapiens Human secreted protein, SEQ ID NO: 7795,accession number AAG03714,Smith-Waterman Score=131.
gcccaaacaccagtcctattacaggtttcgtttaccaatttcttagttcaaccaatattatttggagagccaaataaacttggcttgcacctccgtgcaattctttcaagatttcgttgtctatttttcactcaattgcaactcagtctctgaactcagggaccgatccagtttataatgttatcagtcacttactagcagtacagatctcaggatagctccttcaaatcccagcttctcaagaagagatagggctctagtctaaattagttatatttttcttatgcgtcatctttctgctggtggtgtcacacagaggcacttggcttactctggctttgttggtaaggttattgtgtctgcttggtgaaacagagggagctgacaggtccaatgggtcttttgttggcgctggcactcttgccgttgtaacacacggtacccaaagtcttaaggccttggcactttatagcaatgtagaggggtcagaaaaacctggcagagtcctcttgatcgtggatccaatgaagtctgtcttgggaggacattaatcaggacccaattgctgtgaagaagctgatgctcagttggctgaagagtctgggaatgcgtcacatacctcgtttactgtttgagtgaggcccaggcgtgcgtgtcacgcctgtaatcccagcactttgggaggctgaggtgggagaatcgcttgaagccaggagttcgagaccaacctgggcaatacagtgagaccctgtcgaaattctggcgaagttttaaatcgtaaaactgttagtatcaggagagcccttcgagtattctctccgctccacaccgctcggctgcacccagcggccgccgctcgtgccgctcgtgcc

SEQ ID NO: 3417 - DNA, 375 bp, Homo sapiens
  SIMILAR (369)..(262): 911254mologous to Homo sapiens PRO2852,accession number AF130079,Smith-Waterman Score=170.
ttacgaatgaggcaatttattaacccagcatggtttgttctaatgcttcttgttggcagctgccacctgtgggaaaagatggaagaataaaagttagtcaagggggtctctgctggggcactttgtaacagctacctaactacccaccacaggtgggcaccccgattttgtggtttcaaatgcatctatctcatctaattctcactggggggtattcccccatttcacagacgtggaaactgggtctcaagggagtggccaggcacagtggctcacacctttaatcccagcactctggaaggccgaggcaggtggatcacctgaggtcaagagttcgagaccagcctgaccaatatggtgaaaacctgtctatac

SEQ ID NO: 3418 - DNA, 685 bp, Homo sapiens
  SIMILAR (433)..(573): 931254mologous to Homo sapiens FRG1,accession number AF146191,Smith-Waterman Score=227.
gacgtacccagtcagggaatgtttactttgcctccacttctgttcctccccgccctggtgctgctccgggtcacatactcgtcctgagccggcttcagcctctccgcgcagaagtctcccggagccgacttctgagagtcgagtactcctatgtgaagactaccaagctcgtgttcaagggaaccaaggcgaagagtaagaagaagaagagcaaggataagaaatgacaaagagaagaagatgaggaaacccagcttgatattgttggaatctggtggacagtaacaaactttggtgaaatttcaggaaccatagccattgaaatggataagggaacctatatacatgcactcgacaatggtctttttaccctgggagctccacacaaagaagttgatgagggccctagtcctccagagcagtttacggcctgtcaaattatctgattccagaatcgccctgaagtctggctatggaaaatatcttggtataaattcagatggacttgttgttgggcgttcagatgcaattggaccaagagaacaatgggaaccagtctttaaaattggggaaaatggctttgtcgacctcaaatagctgctttattaggatacagtgaagcagaggacatagaagcaaaaagtaaaacagcaggagaagaagaaatgatcaagattagatcctg

SEQ ID NO: 3419 - DNA, 800 bp, Homo sapiens
  SIMILAR (773)..(387): 991254mologous to Homo sapiens S19 ribosomal protein,accession number M81757,Smith-Waterman Score=660.
  misc_feature (1)...(800): n = a,t,c or g
cacccaaaggggccctgggtctcttccttcaaaccccaaatggaacctgtttgccttgggaaggcccgactggctgccgggtaaacagccacccaatcaccctgggccccctcacccaagggaagggaggaagcgcctcttcctcatgcccctgaagaacaatcaagagacccnnnnnnnnnnnnnnnnnnnnnnnnnnnnnnnnnnnnnnnnnnnnnnnnnnnnnnnnnnnnnnnnnnnnnnnnnnnnnnnnnnnnnnnnnnnnnnnnnnnnnnnnnnnnnnnnnnnnnnnnnnnnnnnnnnnnnnnnnnnnnnnnnnnnnnnnnnngagacccagaccaggattacgaatgaggcaatttattaacccagcatggtttgttctaatgcttcttgttggcagctgccacctgtccggcgattctgtccagatctctttgtccctgaggtgtcagtttgcggccgccatcttggtccttttccaccattttcagcccctccagggcttggaggacccggcgggccacactcttggagcctcggctgaagtggctgggcatgacgccgtttctctgacgtcccccatagatcttggtcatggagccaaccccagcgccaccccggaggtacaggtgccgcgctgtggaagcagctcgcgtgtagaaccagttctcatcgtagggagcaagctctttgtgcttggccagcttgacggtatccacccattcggggactttcagcttcccggactttttgaggaaggctgctcgtgccgaattcctgcagcgcgggtctagggc

SEQ ID NO: 3420 - DNA, 537 bp, Homo sapiens
atatgtgtatatatataaaggtattgaaagcagagtctccagagctatttgcacaccctccatggcagcactggtagacaaaaggtggaaaaaacccaaatgtccactgatgtatgaatggataaacaaaatgtgatatacacatacaatggaatactacacagaataaaaaagaaaatattgtagcacattgtcacatgctacaatatgagaaaatttgagggctttatgctaatgagataagccaatcacaagaggacaaatacggtatgattccacttacataaggcatctaagctagtcaaatacataggtatacaaagtacacagtggttagcaggggtgaagggagggggcaaaagggaattgttgtccaatgaatatagtttcatttctgcaagataaaaaagttctggacatctgtttcacagcaatgtgattatacttaacactactaaactgtacacttaaaaatggttgagatggtaaattttgcaacacatgtttttttaccacaataaaaagcaaaacaaaaac

SEQ ID NO: 3421 - DNA, 875 bp, Homo sapiens
cccaaaaaaaaaaaagggaaatatttacataatttccatggaatgaagccagcagtcgctcccatcccacccctcgcttggcgctgcacccagaaataaggccagacatttttttttttttttttttttttttttttgcggaggaaacgaggttgagggtgtgagtggctctggagatgcaccccagtctcaaaataaaattaaaaagaaaaatttctgttcaatctttgaaaaaaaaaaaaggaaaaggacctgtaatcccccgttcaataaatagaaaaaaagttcccaaatgatggggttttttgcccttaatatacaaaaagggaaaagatgggggggggacttgggggggggatgttctcccttctccctccctgggtcaaggtgggggaaagaaaggatggccaaagagagagggcggcagggacttaggtgcagagagaaaggcaggtaagtgccgggaaaaatggaaacagagtaagatgaaggggcgaagcagaaagacaggaggcgaaagggtgaaaaagccagaaaaacaccaagatacaggtctctttcctttccagatcgggggtgggggtctccggctctctcgcgtctgtgtcccccaaccccaggttggaaggggcagtgtgagcctcgctcagttcctgagttgtacgtccagtgactagcaggtgagaagagagggcagcgaggacttccccaaccctgagcccaccctgggaccctagtgcccaaggaaatgggggtcctggccggataggataagggggtgaggtatgaggctgaggcctgaggcctcttcaattccttcagtgggggtgagccaatggtcctggctgggcagccactttggaggtggcataatg

SEQ ID NO: 3422 - DNA, 1964 bp, Homo sapiens
ttttttttttttttttttttttttgcaactggacttttattgggcagttacaacaacaaatgttttcagaaaaatatttggaaaaaatataccacttcatagctaagtcttacagagaagaggatttgctaataaaacttaagttttgaaaattaagatgcaggtagtgcttcctgaactaatgccccacagctccaagggaagacatgtcctatttagttattcaaatacaagttgagggcattgtgattaagcaaacaatatatttgttaagaactttgtttttaaattactggtccttgacattacttataaagagtcccctaactttccgatttcctaaaactatgtaatacaaaagtatagtttccccatttgataaaaggccaatgatactgagtaggatatatgccgtatcatgctacttcattcagtgtgtctgtttttaatactaataaggcagtttgacagaaattatttctttgggactaaggtgattatcatttttttccccttcaaaattgtgctataagtgctgatagccacaggcagattgcaaagaactgataaggcaacaaaagtagagaattttaggatcaaaggcatgtaactgaaaggtaacaacagtacataagcgacaactggggaaggcagcagtgaaacatgtttgtggggttaagtgagtcattgtaaataaggaatttgcacatttattttctctgataacctgcttccatgttgccacctggaggctctttgttgtgctggtagaagcccatttgcccttactctggatgttccaaatgtttccctttccaggagctagtcagtctttcagtcatctgttttatatgtctcctgccttctcagacagtccttctactctcttttattgttcatgaaagaccttcaaattgaagtaaagcccatatttcaatataaagatatgaaagaaggctaatatcctatcagtgatattctcatccatcttgtcatgaaggccataccatgataactatcacatgtaatgtaaatttgtttattcatctctcttattcatttattcatcttttttcatttgtttattcatctttctcccatttgctcctgtcttgatttatccactagctcactgattatgcaagccttgtagttcatatatgtcatgggttaacatacaatacagcatatatttcagacataagtgtttcagaaatattgtacagaagatattgtactctattaaaatgtgattcagggacaagggagtggtgcttggtgataaaagtatactgccatagttgctgaggaagggcagcaacagaaatcagacttctagttgatatggatctggcaggcatctctgtcacacccctgggaaatagtggcccagggcacagaaggaacctgaaattaaaatatttagatacaaccaaaactcacttgtctgtccctatgtatactgaaaaatttagtggggcatgctgctttacctggctttgtgttttcaccattgtacttattttatatacctaattgtacattttaagcagcagatgaccttgcagcaaaaatgtcttggtgtgagatgcaaaatgaatgaaaaacaaccacacctaggcttttgtcactcaacctaaactactcttcatgacctggaaatgttttatacttatgggaaactttctgcccttaaccttataacttcagatccttgtatgaatgggtttggttgtttttctattatataaattgtagattgcaagtacaatgggacagtacaaatcccgggactcggtaaaattagagttgaatgatgaggtgtccaaaggcaacgaaaacatggcatatttcaaataatgttttccttgcttatgtaacttggagaattcactctatttgattgtgggtttcaaagtattagtgttaaaattagaggtagattttctgcctgcttacaagac

SEQ ID NO: 3423 - DNA, 561 bp, Homo sapiens
  SIMILAR (559)..(434): 711254mologous to Homo sapiens PRO2852,accession number AF130079,Smith-Waterman Score=155.
cacttccctctctcagcagttgatttcatctgatgctctgtccaaacagaatggtagaaaaaaaacatcagagaaatgcagtgggtatagaggcaaatccaaacaaagtgcaggtgatagtggtgacattccgccttctcttgatcagaaggtgtcagcagctggagcttatccccatatgaaccccagggtcaggtaaatggaagacttaagaacacgttacccaacttacctctgcccttctgggttcctcaaggagggggtctgctgtggttaagtaaaacgtctgcggagctagtttccttcatggcagagagatgcgcaagctagtctcacttcaccagcacctcttatttaccccaaagcaacaccttttaggaaacgtcctttcaggaggcagctttggaataaggggctaattcaaagtaagttaacacaaaggctgtacacagtggctcacacttgtaatcccagcactttgggaggctgaggcaggcagatgacttggggccagaagttcaagaccagcctggccaacatggtgaaaccccgtctctacta

SEQ ID NO: 3424 - DNA, 377 bp, Homo sapiens
  misc_feature (1)...(377): n = a,t,c or g
acaagttccatagtaatttatggatgcccaggttacatttaaactatacatatacataatatatacatacgtgtgtacttatatgtatatatacacgtatgtatagatgtgtgaatatttgtttatatacatatatgcacgtatctatatgtatatataaatgcattattacacatacatttctctcaccccttaatgcatttttctcaatgcagaatatttagatgctaatcaaaaaaatgatctcttacttgcacttgagactatggttgactaatgctctataaatccgaagagagttcggactataagtatttaggctatctattatgttgggcaaaaataagtaacccaatggtagataaatgaattcaacn

SEQ ID NO: 3425 - DNA, 566 bp, Homo sapiens
  SIMILAR (1)..(168): 851254mologous to Homo sapiens putative p150,accession number U93563,Smith-Waterman Score=261.
agaataaaatacctaggaatccaacctacaagggatgtgaaggacctcttcaaggagaactacaaaccactgctcaacgaagtaaaagaggacacaaacaaatggaagaaaattccatgctcatgggtaggaagaatgaagagcttgaaaatggccatactgcccaagaagaaaacgtaggcaataccattcaggacataggcatgggcaagggcttcatgaataaaacaccaaaagcaatggcaacaaaagccaaaactgacaaatgggatctaattaaactaaagagcttctgcacagcaaaagaaactaccatcagggtgaacaagcaatctacagaatgggagaaaatttttgcaatctacccatctgacaatgtgctaataaccagaatctccaaagaacttaaacgaatttacaagaaaatatcaaataaccccatcaaaaagtgggcaaaggatatgaacagacacttctcaaaagaagacatttatgcagccaaaagacacatgaaaaatgctcatcatcagtggtcatcagagaaatgcaaatcaaaaccacaatga

SEQ ID NO: 3426 - DNA, 600 bp, Homo sapiens
  SIMILAR (119)..(229): 721254mologous to Homo sapiens putative p150,accession number U93570,Smith-Waterman Score=135.
atgagtgaactcccattcacaattactacaaagagaataaaatacctgggaatacaacttacaagggatgtgaaggacctcttcaaggagaactacaaatcactgctcaatgaaataagaggacacaaacaaacggaagaacattccatgctcatggattggaagaatcaatatcatgaaaatggccatactgcccaagctatatgtagaaagctgaaactggatcccttcctcacaccttatacaaaaattaattcaagatggattaaagacttaaatgttagacctaaaaccataaaaaccctagaagaaaacctaggcagtaccattcaggacataggcatgggcaaagacttcatgactaaaacaccaaaagcaatggcaacaaaagccaaaattgacaaatgggatctaattaaactaaagagcttctgcacagcagaagaaactatcaccagagtgaacaggcaacctaaagaatgggagaaaatctttgcaatctacccatctgacaaagggctaatatccagcatctacaaagaacttaaacaaatttacaagaaaaagacaactccatcaaaaagtgggccaaggatatga

SEQ ID NO: 3427 - DNA, 570 bp, Homo sapiens
  SIMILAR (1)..(420): 921254mologous to Homo sapiens putative p150,accession number U93564,Smith-Waterman Score=686.
atgggcaaggacttcatgtctaaatcaccaaaagcaatggcaacaaaagccaaaattgagaaatgggatctaattaaactaaagagcttctgcacagcaaaagaaactaccatcagagtgaacaggcaacctatagaatgggagaaaatttttgcaatctactcatctgacaaagggctaatatccaaaatctacaatgaactcaaacaaatttacaagaaaaaaacgaacaaccccatcaaaaagtgggcgaaggatatgagcagacacttctcaaaagaagacacctatgcagccaaaaaacacatgaaaaaatgctcatcatcactggccatcagagaaatgcaaatcaaaaccacattgagataccatctcacaccagttagaatggcgatcattaaaaagtcaggaaacaatagaaacacaaccaccagagaatattatggacacttctatgcatatcaaccagaaaatctagaagaaattgataaattcctggacaaatacatcctcccaagacagacttcaggaagaattggaatccctgaacataccagtgatgagctctga

SEQ ID NO: 3428 - DNA, 31296 bp, Homo sapiens
  SIMILAR (3878)..(5707): 1001254mologous to Homo sapiens CARD4,accession number AF126484,Smith-Waterman Score=3218.
atggaagagcagggccacagtgagatggaaataatcccatcagagtctcacccccacattcaattactgaaaagcaatcgggaacttctggtcactcacatccgcaatactcagtgtctggtggacaacttgctgaagaatgactacttctcggccgaagatgcggagattgtgtgtgcctgccccacccagcctgacaaggtgccccggggacagggacgggcatggcattgtgtggaccccgggagctagaagaggcctctccctgctgatctgagtgaagagcgtgggagtttagtccagcgggcagggctgcattttggggtactaatagcacacaaatgcctgggttagcaggttgcacagtcaggtattttacttctgtgtttgtgtctggagcaaaccctgacatctcagttctcattgctgtgtgtattggttcccagacacttcatttttagatcccctttaaattaggagggaaaaagaacataagcataagagcatccccagcagcgatgttcattcagtgcctctgaaggctggagggctgcttgttgctgggtgagactcggaggggaaccgactcagggtcaggaatgatgacatcccacggtgggtccacagtgaagaatcttccccgctccactgtgggacgccttaacagcccttacttccacttacgctttgcgttatctcctgaaaaataaaatggagaccacaaattccttcttggttagaggaatgacacaactcatttatgacatgaccccgctgggactcagaagagaccaggacggtttctgggggaagcagtagcacactcgtgtgctttgttctcttctcttgatttgttttcccacatttttaacaagaaaaaaagccgtttttaatatatggcctatcgccctcctactgtgtggcccaggtgcctacctcattatgcccaaggggtggttctcacctctccactctcattcctgcacagcagttgtgtcaggttaagagggacaaggagaaggctgggcaccgtggctcacgcctgtaatcccagcactttgggaggccgaggcaggcagatcacctaaggtcaggagtttgagaccagcctggccaacatggggaaaacccgtctctaataaaaacacaaaaattagtcgggcatggtggtgggtgcctgtaatcccagccacttgggaggctgaggaaagagaattccttgaacctgggaggtggaggttgcagtgagccaagattgtgccattgcactccagccctccagcctgggtgacagagcaagactctgtctcaaaaaagaaaaaaaaaaaaaagaggtagagaagtccatggctatttgtctgtcctttttatttttaggctcatggaagcctcctggtttcttagagctgagtggttttatttcttgctcaggaggtcatttcacagattttcgggctccaatatgttgactgtcacagcagctggggggatggcatagctaccggctgtactaagaactcagagccctgccctgagcctgcctgagggtccttatggtaggaggatgcccctcatgccagcccgtgccctcatgcttgtgtcacctccaggtccgcaaaattctggacctggtacagagcaagggcgaggaggtgtccgagttcttcctctacttgctccagcaactcgcagatgcctacgtggacctcaggccttggctgctggagatcggcttctccccttccctgctcactcagagcaaagtcgtggtcaacactgacccaggtaggagtcagccccagcaagaccgcaggcaccagtgcaagcagggccctggggggtttggtaatggctgggccagccctgagtgccacctcaggaagcaggcccaggtgctattttgattttagaaaggaacagctgaatcctgtctcccaagtgcagcccaggtggctgcgattgaactgcccacacctcgatggtctggtttatagaggggcctttggaagtatgggaatggcctgtgttctgaccccttgctttcttcctattctgacatatgtagacattttaatggttgcacaaattcaaggttgtatttttttttcttttaaaaaaatctttagctggacatggtagcacacacctgtagttccagctactcaggaggctgaggcaagaggactgcttgagccccagagtctaaggctgcagcgagctatgattgtgcccctacactccagcctgggtgacagagtgagaccctgtctctaaaaaaggaaagaaaaaaattaaaaagccttgccaggtttgattctaggcaaagtattctgtcaccgttgagtgccagtccttatttccaaactaatggaagaccccatcagttaactgattagttcaataagtattttttgctgtatccaccacatgccaagaccctacactgtgctggatgtcagggagacagtggtgagcagacacagacagggttcctgccctcagggagcttcaagtcagctggaagagaccaccagtcagcaatctcaaaaatgtgtcaggacagcggcagtccaaggcatgtgagaacatatcattagggccaggatctgctctggggcaggagtcttctttccctgcttttgaactctccactttgagacagctgttggtaacataccagcaccaaggacctaagtcctgccttttaaagaatccaatatgttgttggaaacagaagcacaagacaggtgtgtgcttaggggaaacaaggccagccggcagagtgtcagtgctaggctccagcttccacagcccctgcaggtgcctgccagccactgctagcttctgactctgtctgctccttcctgtctccccttgtttccttcccccatgaaaaaaaaagaaagtattcccatgaggaatcattctttcgaaagacttctctgttggttccgttagccagctactttactagcttttacagtgtaattcactctacaagcagtctcacacaaaagactacatattgtatgattctgtttatatgaaatgtccagaaaaggtaaatctatagacaaagcaaatcagtagttgcctacggcccagggattggctacaaataggctccagaaaactctgggaagatggtagagatgttctagacctggactgtggtgaggtttgcacaactttgtaaacttactaaaaattactgacaaatatataacactccctaacactttgggaggccgaggtgggcagatcgcttgaacccaggaatttgagaccagcctgggcaacatggcgagaccccgtctctacaaaaaaacacaaaaattagttgggcttggtggcatatgcctgtgtcccagctacttgggaggctgaggtgggaggattgcttgagcctgggagtttgagactgcatgattgggtcactgcaccctagcctgagtgacagagcaggaccctatctctaacaacaaaaaagcagtgttggtggaggagggccagcgtggccatctggcctggccctcgagtgcgaggggcttcagtgtttagctgcagttcagtgatgacactgtgcggaggaataagggtggcctgtctcagacactgatcccagctgaagtttgtcaccttctttctggcaaatctgaggtcaagcagagagatcaaagcctggggccctcagggtcaggaatgctggctctgtgacgctccccaggtcctgcatctgaggagtggctgcgctggcctcagggcccaggttgtgaattttgtttatgcactcgcctctcctctttgagacctccctgtttgatgctgtttctgcctctctcctcaccctgctgctgtgccctgccaccccctccctccagtgagcaggtatacccagcagctgcgacaccatctgggccgtgactccaagttcgtgctgtgctatgcccagaaggaggagctgctgctggaggagatctacatggacaccatcatggagctggttggcttcagcaatgagagcctgggcagcctgaacagcctggcctgcctcctggaccacaccaccggcatcctcaatgagcagggtgagaccatcttcatcctgggtgatgctggggtgggcaagtccatgctgctacagcggctgcagagcctctgggccacgggccggctagacgcaggggtcaaattcttcttccactttcgctgccgcatgttcagctgcttcaaggaaagtgacaggctgtgtctgcaggacctgctcttcaagcactactgctacccagagcgggaccccgaggaggtgtttgccttcctgctgcgcttcccccacgtggccctcttcaccttcgatggcctggacgagctgcactcggacttggacctgagccgcgtgcctgacagctcctgcccctgggagcctgcccaccccctggtcttgctggccaacctgctcagtgggaagctgctcaagggggctagcaagctgctcacagcccgcacaggcatcgaggtcccgcgccagttcctgcggaagaaggtgcttctccggggcttctcccccagccacctgcgcgcctatgccaggaggatgttccccgagcgggccctgcaggaccgcctgctgagccagctggaggccaaccccaacctctgcagcctgtgctctgtgcccctcttctgctggatcatcttccggtgcttccagcacttccgtgctgcctttgaaggctcaccacagctgcccgactgcacgatgaccctgacagatgtcttcctcctggtcactgaggtccatctgaacaggatgcagcccagcagcctggtgcagcggaacacacgcagcccagtggagaccctccacgccggccgggacactctgtgctcgctggggcaggtggcccaccggggcatggagaagagcctctttgtcttcacccaggaggaggtgcaggcctccgggctgcaggagagagacatgcagctgggcttcctgcgggctttgccggagctgggccccgggggtgaccagcagtcctatgagtttttccacctcaccctccaggccttctttacagccttcttcctcgtgctggacgacagggtgggcactcaggagctgctcaggttcttccaggagtggatgccccctgcgggggcagcgaccacgtcctgctatcctcccttcctcccgttccagtgcctgcagggcagtggtccggcgcgggaagacctcttcaagaacaaggatcacttccagttcaccaacctcttcctgtgcgggctgttgtccaaagccaaacagaaactccttcggcatctggtgcccgcggcagccctgaggagaaagcgcaaggccctgtgggcacacctgttttccagcctgcggggctacctgaagagcctgccccgcgttcaggtcgaaagcttcaaccaggtgcaggccatgcccacgttcatctggatgctgcgctgcatctacgagacacagagccagaaggtggggcagctggcggccaggggcatctgcgccaactacctcaagctgacctactgcaacgcctgctcggccgactgcagcgccctctccttcgtcctgcatcacttccccaagcggctggccctagacctagacaacaacaatctcaacgactacggcgtgcgggagctgcagccctgcttcagccgcctcactgttctcaggtgaggctgccaggcaaggggagcaacaggtgggccgggcgggccaggctcggagggcatcgggaatggcatcatggaccaggatcccccaggactcatgaccatggcccttggaatgtccagaccttttctttcttagcagggcagaggtcaaggtgcaaagcttcgaggcaggtggacctggatcagccacagctgggtgcccttgaacaaagtgcttaactctcagagcctccacgccctcatctggaaaaagaagatgctcataatcctatcaattatggccacagggaccaatgttagttgagaatgggtgaagtgcattacaaatattacctaatggaatgctctttacaaccctgtaacttaggtactgttattgtctctattttggcagataaggaagtagaggcacagagaagttaatagcttgctttaggtcacacagctcagacatagcagtgccagaatgcataaagaaccttccttttaagattaatgtaaggctccgagatagccctcaaaaagtttctggaatatgggagcttttattactgcagagaaagcagaccttgtgccagttggcactggtgactttctgtgatcaacgctagcagcccttcacactgctagagacctcagttaaaatgctgactcgtggttgttttcctgttccatagtttacgggaaacagagcccagtctgttttcttctattagcatttcctatgtaaaataaaccttgtaaatctctacagggggttaaatttgccattacttgactcatgcatttctaaaaagcagtagggatttggaactgactcccagtgcctgtcacaccagtgtcagagtgtaaataattgcatggggacatggggtgcagggggtcgaaggctgccctagcctgggaattggaaaacctggagtctgttctctgtactctcagccagtgactctccctctgtagccccaggcagtctcacactcagtgccaccctctgtccatcttttttttttctcccccaaatggagtcccgctctgttgcccaggctggagtgcagtggcgtgatctcagctcactgcaacctccgcctcctgggttcaagcgattctcttgccccagcctcctgagtagctgggattacaggcacacgccaccatgtccggctaagttttttgtatttttagtaggacggggtttccccatgttggccaggctggtcttgaaatcctgacctcaggtgatccgcccgcctcggccttccaaaatgttggggttacaggcatgagccgccgcacccgacccctctgtccatcttttcaatgggaaactccacaccagtgtggtggccctgcccttcctgctgtccccaggtgaagctttccttcacaccagtgcaagaaaaaacagcttgtaggaaagcagaggatatgggtaaccacgggaagcacactcagttctctggctgcatcagttaggattagttttagctgagagcgaaaaccccaaatgttggtgagttacaagcttatttctctcatgtaaaagtctagaggtaggtagttcaggactggtatggagtctccatgaccctccggagcccaggctctcttctgccttcctgttctgccatcctcactacccggctttcccatcttggcccaagagggctgctcaaactccagccatctagtcgacactctagctatcagtaagaaggaagggcaaagattgagagcatgcctcaatcttttaagaacacttcttggctattactaattatattgctgcttagatttcagaacttaatggtatgggcagaatttaatgagatgggcccagctaaaagatgggggaatctattgctaagaaagtatagatattgggaatgtctagcagcctgtgctgtcttgggctggccatgccatgtacatacacactatttcccagcaccaagctggggactctgagggaaagggtccagagtgtctgacttgatcattttgatgtggcctaaaaatcaagcttttaattgttcagccttttacttgttatcaaggtcagcttgtgggtctaattgggcccaaggcttgtgtttctaagtaaagttttattggaacgcagccatacccatttatttacttactggctgcttcacactacacagttgagtagctgtgacagagaccacatggcccacagagcctaaaatatttgctgtctgacactttacagaatgacatgagcagtctcctttgacagtgggactcacagccttttccagtgacaaatcagggttagcccatgtgtttctggatggggggaagctgttggcattttgggtataacagttcttgtgagacctgtccagcattttgcaggacacctaacatcattggccctgcctgcaagatgacagggcactccctcctccagtcacaaccactaaaagcagcccctgacatttccaaacccatgccctccaccatacgagaaccaggtacagggtctggctgacacataggtcacacgcaaagggtggatgtcagaggtggctggcctcacacgtcctccctgtgtccttcacggtcgtgtgaggagccaggggctgtgctgcagcctcgctcatgggctggtgcaggatgggtctggcggccccacgttggccaggctttgtaaggggctatttggctgattgctgtggccattctccaggggcgtctatacctgagaaaactccagggcctgaaggcttctggatctttgtaagattaatggtccttcataatgagtgcctgccctgactcgtaatttttttgctgttttatttcagactcagcgtaaaccagatcactgacggtggggtaaaggtgctaagcgaagagctgaccaaatacaaaattgtgacctatttggggtatgtctttctccagaacactgggccaactacctagtaataatacagagctgcagggaattcacattcccataggtccctggatgatcggcacggatggcccagggctgggaagagcgctggcccaggagttgagagtcctgggttctctttgtggctcggccagtcatgaagtcttgctgagcctcagcctcctcacctgtaaaactgggatcccagtataggcaagtaggcttacaactggttattgggggatgcaacgagaatataaggggatatatttaataaatgctagaatcctgtttacatattagtctggactattttgggtccataatccctcatccagagcctttggggcaagacccgaatggggattctgagtgcatgctatggcatgacgtggccgcaggggtctaaggcagtgccccattttcaaacactttcatatttctcccgcagaatgtatgaaacagtcaaaccaagtgtggtaagaaagactataagtagctccacatcagttgccaaaagaattgtgagaaactttgggcattcagagcctttgaggttttggagtctgagagaagggattgcgggccagccccacacaactggtggctctgcaagctggagcagttgttcagtttcttggggcctcagtggccttcgatgttaatgaggacatggacgcaaacgaccccgggccacactcggctccagggctctgtgtggctgtggaaccctggaagcctgagcttagctgcctttcaacttccatctgctgtactattgaattggcattgagcggtgagatggctgaaaggtagacatcgagaagttttaatattcagaatcttttcttctcaagacgctgaatgtaatcttagttgtaaatacccatcacctgccagtcaccgagcactcatgcaccagggctttgcgttatgtcctaagatcctcataaccaccctgcaaggggactatcatcattacctctgtattacagatggagaaactgaggcacagagaggtaacgtgacttgtctcaggccataaagctggggaaagtagtggagctggttttgaacctgagctgtgagacctcagagccctaaactctggtgcctgtgtgttcccctttcaacccagactttggaaatcagtagacaccatatgcttcaaaaaacaggggctattaaaatgacatcaggagccagaaagtctcatggctgtgctttctcttgaagtttatacaacaaccagatcaccgatgtcggagccaggtacgtcaccaaaatcctggatgaatgcaaaggcctcacgcatcttaagtaagtggggtaggcaccaggttccttagtatattctcttgatcacccccttctgttgttcaaagattaaatgtcacagtaaagagctttcatcctaaagccttccacttgtcccagggccatgttggtcaagtaaagatacctctgtgtgatctgtgaggcttggattctggaagggcctcccgttattggtagggggaaaggttggcattttgatttcattaactactaggccgaagaaaggactaactctcaccctttctggtggtctttttgccccaagggagtttcctgtcgggttgcaaggaagagcttgggcccttgccctgctgtaggtgtgccctgcgcagggggtgacagtgcgccaggcttggagcctctggtcctgccctgacagtggccacataccttgacccttggcagtcaaagtgggacctcccaggtctcccgagggaagtcagtgatgctgctgaggtcaattagaggaccccagggagggctcaggtccctgagcttctgcagagactgtggaccatctcctggagaggaaccctgactgactgtcctcagggcttcagttccctccctgacaggaggcccaggccatggctcttgtggatcccagaagaaagtgtacggttcccaagatggggctggaaggggctctgtgctggggaggagggtgacccacattggagcccctgcatagctggaggctgactgtgtgtgactctctctgcagactgggaaaaaacaaaataacaagtgaaggagggaagtatctcgccctggctgtgaagaacagcaaatcaatctctgaggttgggtgagtagaaggggatggatgtatgtggtacaacctgctgtgtgtgtggggggcgggccttgctgttcttttcatacatcagtacaccagaaggaccactggggctcgctgtcggggagagatagtggagagctttcaccatgctgcgaaactgaaaccgtgcccattaagcaataactccccggtccccctcccccctgcctcttgcagccaccctgctacttactctctctatggttttgactactctacctcatgtaagtggaatcatacagtatttgccttttggggatggctgatttcactagcatcatgtcctcaagattcgtccacatggaagcatgggacaggatttcctttttttttttttttttttttttttttgacagagtctcgctctgttgcccaggctggagtgcagtggcatgatctcggctcactgcaacctctgccttctgggttcaagcgattctctcgcctcagccacacgagtagctgggattataggcacccgccaccaatcccagctaatttttgtatttttagtagaggcggggtttcaccatgttggccaggctggtctcaaactcctgacctcaaatgatccacccacctcggtctcccaaagtgtcaggattataggcgtgagccaccgtgccccgccaggatttccttcttttttaaggctgagtaatactccattgcatggctatgccacattttgtttactcattcatccaagaacagacactggcttgcttctatgctttggctgttgtgaataatgctgctgtgcacatgggcatacaaatgtctcttcaaggactgccttcaattcttttttttttttttttttttttttagattctttttttttttattatactctaagttttagggtacatgtgcacattgtgcaggttagttacatatgtatacatgtgccatgctggtgcgctgcacccactaatgtgtcatctagcattaggtatatctcccaatgctatccctcccccctcccccctccccaccatagtccccagagtgtgatattccccttcctgtgtccatgtgatctcattgttcaattcccacctatgagtgagaatatgcggtgtttggttttttgttcttgcgatagtttactgagaatgatggtttccaatttcatccatgtccctacaaaggacatgaactcatcattttttatggctgcatagtattccatggtgtatatgtgccacattttcttaatccagtctatcattgttggacatttgggttggttccaagtctttgctattgtgaataatgccgcaataaacatacgtgtgcatgtgtctttatagcagcatgatttatagtcatttgggtatatacccagtaatgggatggctgggtcaaatggtatttctagttctagatccctaaggaatcgccacactgacttccacaatggttgaactagtttacagtcccaccaacagtgtaaaagtgttcctatttctccacatcctctccagcacctgttgtttcctgaactttttaatgatcgccattctaaaactggtgtgagatggtatctcactgtggttttgatttgcatttctctgatggccagtgatgatgatgcatttttttcatatgtttgttggccacataaatgtcttcttttgagaagtgtctgttcatatccttcgcccactttttgatgggggtttttgggtttttttttttgtacatttgtttaagttccttgtagattctggatattagccctttgtcagatggatagattgcaaaaattttctcccactctgtaggatgcctgttcactctgatggtagtttcttttcctgtgcagaagctctttagtttaattagatcccatttgtcaattttggcttttgttgccattgcttttggtgttttattcatgaagtttttgctaatgcctatgtcctgaatggtattgcctaggttttcttctagggtttttatggttttaggtctaacgtttaagtctttaatccatcttgaattaatttttgtataaggtgtaaggaagggatcaagtttcagctttgtacatatggctagccagttttctcagcaccatttattaaatagggaatcttttccccattgcttgtttttctcaggtttgtcaaagatcagatagttgtagatatgtggcattatttctgagggccctgttctgttccattgatctatatctctgttttggtaccagtaccatgctgttttggttactgtagcccttgtagtatagtttgaagtcaggtagtgtgatgcctccagctttgttcttttggcttaggattgacttggcgatgcgggctcttttttggttccatatgaactttaaagtagttttttccaattctgtgaagaaagtcattggtagcttgatggggatggcattgaatctgtaaattaccttgggcagtatggccattttcacgatattgattcttcctacccatgagcatggaatgttcttccatttgtttgtgtcctcttttatttccttgagcagtggtttgtagttctccttgaagaggtccttcacatcccttgtaagttggattcctaggtattttattctctttgaagcaattgtgaatgggagttcactcatgatttggctctctgtttgtctgttgttggtgtataagaatgcttgtgatttttgtacattgattttgtatcctgagactttgctgaagttgcttatcagcttaaggagattttgggctgagacgatggggttttctagatcaacaatcatgtcatctgcaaacagggacaatttgacttcctcttttcctaattgaataccctttatttccttctcctgcctgattgccctggccagaaattccaacactatgttgaataggagcggtgagagagggcatccctgtcttgtgccggttttcaaagggaatgcttccagtttttgcccattcagtatgatattggctgtggttttgtcatagatagctcttattattttgaaatacatcccatcaatacctattttattgatagtttttagcatgaagggttgttgaattttgtcaaaggctttttctgcatctattgagacaatcatgtggtttttgtctttggctctgtttatatgctggattacatttattgatttgcgtatattgaaccagccttgcatcccagggatgaagcccacttgatcatggtggataagctttttgatgtgctgctggatttggtttgccagtattttattgaggatttttgcatcaatgttcatcaaggatattggtctaaaattctcttttttggttgtgtctctgcccggctttggtatcagaatgatgctggcctcataaaatgagttagggaggattccctctttttctattgattggaatagtttcagaaagaatggtaccagttcctccttgtacctctggtagaattcggctgtgaatccatctggtcctggactctttttggttgataaactattgattattgccacaatttcagctcctgttattggtctattcagagattcaacttcttcctggtttagtcttgggagagtgtatgtgtcaaggaatgtatccatttcttctagattttctagtttatttgcgtagaggtgtttgtagtattctctgatggtagtttgtatttctgtgggatcggtggtgatatcccctttatcattttttattgtgtctatttgattcttctctctttttttctttattagtcttgctagcggtctatcaattttgttgatcctttcaaaaaaccagctcctggattcattgattttttgaagggttttttgtgtctctatttccttcagttctgctctgattttagttatttcttgccttctgctagcttttgaatgtgtttgctcttgcttttctagttcttttaattgtgatgttagggtgtcaattttggatctttcctgctttctcttgtgggcatttagtgctataaatttccctctacacactgctttgaatgcgtcctagagattctggtatgttgtgtctttgttctcgttggtttcaaagaacatctttatttctgccttcatttcgttatgtacccagtagtcattcaggagcaggttgttcagtttccatgtagttgagcggctttgagtgagattcttaatcctgagttctagtttgattgcactgtggtctgagagatagtttgttataatttctgttcttttacatttgctgaggagagcttcacttccaagtatgtggtcaattttggaatagctgtggtgtggtgctgaaaaaaatgtatattctgttgatttggggtggagagttctgtagatgtctattaggtctgcttggtgcagagctgagttcaattcctgggtatccttgttgactttctgtctcgttgatctgtctaatgttgacagtggggtgttaaagtctcccattattaatgtgtgggagtctaagtctctttgtaggtcactcaggacttgctttatgaatctgggtgctcctgtattgggtgcatacatatttaggatagttagctcctcttgttgaattgatccctttaccatcatgtaatggccttctttgtctcttttgatctttgttggtttaaagtctgttttatcagagactaggattgcaacccctgcctttttttgttttccatttgcttggtagatcttcctccatccttttattttgagcctatgtgtgtctctgcacatgagatgggtttcctgaatacagcacactgatgggtcttgactctttatccaacttgccagtctgtgtcttttaattggagaatttagtccatttacatttaaagttaatattgttatgtgtgaatttgatcctgtcattatgatgttagctggtgattttgctcgttagttgatgcagtttcttcctagtctcgatggtctttacattttggcatgattttgcagtggctggtaccggttgttcctttccatgtttagcgcttccttcaggagctcttttagggcaggcctgctggtgacaaaatcggtcagcatttgcttgtctgtaaagtattttatttctccttcacttatgaagcttagtttggctggatatgaaattctgggttgaaaattcttttctttaagaatgttcaatattggcccccactctcttctggcttgtagggtttctgccgagagatccgctgttagtctgatgggcttccctttgagggtaactcgacctttctctctggctgcccttaacattttttccttcatttcaactttggtgaatctgacaattatgtgtcttggagttgctcttctcgaggagtatctttgtggcgttctctgtatttcctgaatctgaacgttggcctgccttgctagattggggaaagtctcctggataatatcctgcagagtgttttccaacttggttccattctccgcatcactttcaggtacaccaatcagacgtagatttggtcttttcacatagtcccatatttcttggaggctttgctcgtttctttttattcttttttctctaaacttcccttcttgcttcatttcattcatttcatcttccattgctgataccctttcttccagttgatcgcattggctcctgaggcttctgcattcttcacgtagttctcgagccttggttttcagctccatcagctcctttaagcacttctctgtattggttattctagttatacattcttctaaatttttttcaaagttttcaacttctttgcctttggtttgaatgtcctcccgtagctcagagtaatttgagcgtctgaagccttcttctctcagctcgtcaaaatcattctccatccagctttggtccgttgctggtgaggaactgcgttcctttggaggaggagaggtgctctgcgttttagagtttccagtttttctgttctgttttttccccatctttgtggttttatctacttttggtctttgatgatggtgatgtacagatgcgttttcggtgtggatgtcctttctgtttgttagttttccttctaacagacaggaccctcagctgcaggtctgttggaataccctgccgtgtgaggtgtcagtgtgcccctgctggggggtgcctcccagttaggctgctcgggggtcaggggtcagggacccacttgaggaggcagtctgcccgttctcagatctccagctgcgtgctgggagaaccactgctctcttcaaagctgtcagacagggacatttaagtctgcagaggttactgctgtctttttgtttgtctgtgccctgcccccagaggtggagcctacagaggcaggcaggcctccttgagctgtggtgggctgcacccagttcgagcttccccggctgctttgtttacctaagcaagcctgggcaatggcgggcgcccctcccccagccttgctgcggccttgcagtttgatctcagaccgctgtgctagcaatcagcgagattccgtgggcgtaggaccctccgaaggccaggtgtgggatatagtctcgtggtgcgccgtttcttaagccggtctgaaaagcgcaatattcgggtgggagtgacccgattttccaggtgcgtccgtcacccctttctttgactcggaaagggaactccctgatcccttgcgcttcccaggtgaggcaatgcctcgccctgcttcggctcgcgcacggtgcgcgcacacactggcctgcgcccactgtctggcgctccctagtgagatgaacccggtacctcagatggaaatgcagaaatcacccgtcttctgcgtcgctcacgctgggagctgtagaccggagctgttcctattcggccatcttggctcctccctccaattcttttgggtatatatccagcagtgggattgctggatcacatggtaatttttaattttttgaagaatcatcatactgttttccacggcagcagcaccattttatgttcccaccaacagttcattctagtttctccacatccttgccaacacttgctattttctctttttgacagtacccatcctaatgagtgtgaggtcctgtctcattgtggttttgattcttgaggctttttaaagctttttgtttcattataatttttattggattacaaaaggaacacaggtaattttatttggaaactatgaaaaataataaaaattatcttctcagaaaatgattcttgttaacatttaagctcagttaagctctctcactttctctcccttctctctctttgtacaacttttaaaaaatatagtaggggtgagactatatgtatctatactatagtaggggtgagactatatgtatccttcctttttcacttaatctcatgccttgagtagctttccactttattaaaaatgtgatgccattcaattgtatagtaaatacatatatgtaagcaaaacactgaaaactcttattctgggttccagcaagccatacctggaatggtgtaagcaggtagtttgcttggtgtgaacgtgttgttgaggcagctgccattgtgttgtgagtgggccacacgaacttgttctgttgtgtgtagacagtgtgtgctgatcctattaggaacagccaacgctttgtgtgagccacacacggttctaagtgctttgcttctgttaactcagtgaatcctcacaactccatgacggaatgctctaattatccccattttatagatggggcaactgaggtccaagagactacataatttcccgaagttcacacaggtagcagatggcagagccgggtcaggagtccaccatcttaccacgcagactgttttagccagagactctccggatctgctgtaggggacagaatacagctttatcgccgcacctgtccaccaagatggccgtagccacagagcttggttgggtaacgtcctctttatgtgacaggaacgttgctgatggggtttctgaaggtacttcctgctctttgtctcctggaagactgtgtcttcaggaatgtctctgaccctgcccagagttgaacggatgctgggaacccagcacctgcacacggccttccctccaggactctgcgcacctctgtgctccacaggagacatgcaggtgctttctctcatgagctcaggctcctgggctgacagctctccgaagctcgtggtgaggctcggtctctaactgtgccacttgccgatggcctctgttcacaaggcttcccctgctcttcgatcttgcatcaccccttgaatttgaaatccagagcagcccactcagagaccagtgtgaggaattagtgtccaggccacagatccagggactgggcacaaacatctgcctgttgagtaggaactgagctgtggccattggcaaaaaaggaggggtgagcatggctgtttcttggggagctaacattcactatcttgtctcctccctcaggatgtggggcaatcaagttggggatgaaggagcaaaagccttcgcagaggctctgcggaaccaccccagcttgaccaccctgaggtaactgtggccctgctgtctccaggggccaacctggtccctcccagctgctctaggtttgctggggaagggtgattcgtgctcctaatagaagaggaatttgcatgtgtgattttccttactcttgtcaaacctttctttgatgcataagaggccatctagtaaagcacattcttctctttttttaactttaagttctgggatacatgtagaagatgtgcaggtttgttacataggcaaatgcatgccatggtgatttgctgcacctatcaacctgtcatctaggttttaagccctgcatgcattaggtatttgtcctaatgcttgccctccccttgccccccacccccaacaggccctggtgtgtgttgttcccctccatgtgtccatgtgttctcattgttcaactcccacttacgagtgagaacatgcagtgtttggttttttgttcctgtgttagtttgctgagaatgatggtttccagcttcatccatgtgccagcaaaggacatgatctcatttttttttatggttgcatagtattccatagtgtgtatgtgccacattttctttatccagtctatcactgatgggcatttgggttggttccaagtctttgctattgtaaatagtgctacaataaacatacatgtgcttgtgtctttatagcagaatgatttataatcctttgggtaaatacccagtaatgggattgctgggtcaaatggtatttctggttctagatccctgaggaatcaccttaagtgtttattcagctcagtgaattctgcatgtgtcccacaccagccaaccaccacccccatcaagacagaggacatttccagcccctcagccatccctgcatgtcccttgctggtagagggagggtttcctaagtgcagatgaaacttaataagatgctggccagcagattcctgccccttccttgtcctcaggatgatgctggaaaagagggactcttcctctctataaatggggatgcacctacccagcccccgcttaggctgctggccaaatcttgggaccttggtatgtccacggctctgctgctgttcttcctaccactgaaaaagagtccaagaaggtggggacagtagcagaagagactttgccaggtcttgcagatggggtaccttgatggggccagcctttagaaggacagcttgccaggcctcgccagcctcctgcccatgtgcagaaacctgaggtgccgaccccagcccactgttgtgtgagcaggctgtgctgatgacccatttcccgtccagcctgcccttgtgctctgtgtgtgggctctggggcagcagcgcctgggcactactgctgcagctgaacacttctgcatcctgccccgagtgagcctgggctggggccacagccaggcagaggcttcccagctgttctgatgttgaagctaagattgaatgtagatgtgtctttaataattcaccccaagtgtgttccttcctagtcttgcgtccaacggcatctccacagaaggaggaaagagccttgcgagggccctgcagcagaacacgtctctagaaatactgtggtaatagctcgagtcatttcatttgtttgtttgtttttctgtgatagggtcttgctttgtcgtccaggcttgagtgcattggtgtgatctcagctcactgcagcctccacctcccaggctcattcgaacctcccgccttggccttccgagtcctgagactataggcatgcaccaccacacccagttaattttaaaattttttgtagagatggggttttgctatgttacccaggctggtcttgaactcctgggctcaagcagttctcctgccctggcttctcaaagccctgggattgcaggtgtgagccactgcacctggcacagagtcattttggagggtttaggtcccaggaattatcccaggggctgcacatggcctggaatcttaacagaaaaggtgtctcccaattggaaaggctctaggcctttcagttaagttgataatttcctcctagagaagagaatagccacttctacaagcataaacaggtacaggaggaggaagtgggctccgggagcctggatctgaggccttggccttctaggccccaggagaactagaacgctggccatgcaagctatccaggtatccttggataccttcagatgtgcttagcagaggccaacttccacacacttggctcaaaattttctcccttcctcctcttcatctgccttcccccaggcagcctcctccttccccaggtcttcacatcagggtttggcctttatgctccatccagctcatctgtcacttgtcacctgaagcccacagtcctcgctccctctctgcactctagggcacttactaagtggatgtggcctcctgagagtgttttttgttggtgttcccttttttatggccacttaatgttttattttgctttatttgtatttacatctctgtatcataaattccatacaggtggctgggagcagtgactcacatctgtaatcccagtactttggaaggctgaggtgggaggatcgcttgaggccaagagttcgagactagcctgggcaatatagcgagaccctctatctacaaaaaaaaaaaacattccttacaggttaagtgagggagttgtattacaaccctccctatcatctactcagagcccagtgctcatttgatcttgctaaattagttactgagaataatgacaatatcctcttcatgagagagttttgacattaggcctgctgtccagtaagtgcattttaaattctttcccctcaacaaatcatttaacattttgaaaagtagtttatgttttttggaaaaaatgtaagacactaaaggaggacatgaaagtacctcctaaagttcctgctaaaaggaggaagtgaaagtacctccctttgtgttttccaaaataacctttcctttctagccttttgttctatgtatgttcaaagatatgcaaaacagaatagcattcaagcagtggctctaaaaatattgtaatcacatactttacatgtctcctttagggtttctccatcttgatgctgttgacattttggtccaagtgattctttattatggtagggctgtcctgtgcatcatagacggtttagccgcatctctgccctgtacctcccagtggtgaggatcaaaaatgcctccggacatggccaggtgccccatggagagtgaaatcacatggatagtagtaatgtcaacacctagaagccctcaagtgctgactgcatgccatgtgttattctacactttttccctgtgttaactcactcagcctcacaaccactctatacgatctctactgttaacgttcaccagtgagaaaactcagacccaaagaacttaagcctgttgcccgaggtcaccctgctggtgggtgatacaaacctgcccaggctgagtccggagtagatgtcaatgctgtgttcttctccctcctcattctacctcattctccctacaagctgcacaacatctcgaatagatatcacaatatatttcatcagttgtttctgatctaaatttgttcagattttacattaggataataccacaatgcatgctgcaatgtataaagctttgtgtgtatatccttgcacactgtagggtaaatttctagaagtctgattgtcttaaaatgaagcacattaaaaatttgggcaggcacatccaaactgcccttcaaggaatttttttttttaaatgttctttctgttctattcttcttcctaatgattctttcgtccactggcacaagtgggtcctaccctgtttacaccaaggagctttggtgctttatccagaccacttctggttctaaggaccattgagagacttcctgaactttcagtcacttaacttgggtccctcacaagttaactgagagcaaagtactgaacacattttaatgtgcagtcagtgactgtttcaggtcttcaaactaacttggataacacactgtcagtggtgttcaagggaccctgggactagaggagaactgagaagcaggcattggccctttgttttccgtgggcccccatcttccatgaaatctgagggctcagcaaaggtggggagggagggtgggctcctctacaggtagctgggctaagaaataggagcccaggtacaggatttgcattaaaaatgagtcccattgaccttctgtggggctgacaggctgggcttggagcctggctgttttctgggttctcagcaagtgatcatctgcatagctggagagccttgggctgagctcccgctcctgtgaactctaaaacaatgtctgccaagtaggctctcttgagtaaatacttccttttttttccttaggctgacccaaaatgaactcaacgatgaagtggcagagagtttggcagaaatgttgaaagtcaaccagacgttaaagcatttatggtaactcagagagccttacaatttcagactgtgctacttttcaaaagtattttttgagataaaatttacatactgtaaaattcactctcttaaagtatacaattcagaggtttttagtgcaaccatcaccacctaattctagaacattttcactcctcctccccactccaaaaagccctggtatccattaagcagtcactccctgtcctcctccccagaccctggcaaccactaatccgctttctgtctctatggatttgcctactctgggcatttcatataaatggaatcaagcaatatgtgaccttttgtctctgtgttctagcatgtttcattcctttttatggctaaatgataattcactctaaggaaattttgcagtttattaatcagttgatgggacatttgggttgtttctactttttgactattatgcgtaatgctactgtgaacactcctgttcatgcttttgggtgaacatatgttttcatctcttttgggaatatacctgggaatagaatttctgggtcatatggcaattctgtaactttttgaggagccaccaaactgttttctaaagtggatgtactattttacattctcgccagcaatgtatgtggattccaatttctccacatcctcaccaacacttattattgtccatcttttaaaatctagttatactagtggatgtgaagtaatattgtggttttgatttgcatttccctgatgacaacaatgttgaatgtctttttatgtgcctactgggagtctgtatagcttctttggagaaatgtctccatatcctttgcccattttaaaattgggtttgtcttctaatgctgagttataggggttctctatatattctgggtgctagacctttactagatacaggttttgcaagtattttctttctttctgtggagtttttcctctttcttgatagtgacctttaaaggacaacagtttttaatttttgttttttttgagatggagtcttgctcttgtcacccagacaggagtgcagtggcatgatctcagctctctgcaacctccacctcctgggttcaagcgattcttctgcctcagcctcctgagtagttgggattacaggcatcagccaccatgcctgtctcattttgtatttttaatagagatggggtttcaccatttaggcccaggctggtcttgaactcctgacctcaggtgatccacctgcctcagcctcccaaagtgctgggattacaggcgaaaagccactgcacctggccaatagtttttaattttgatgaagtccaatttatctatttttttctttggttgcttgtgctttcagtgtcttatctaagaaatgattgcctaatccaagatcacaaagaactccacctaagttttctgttaagcgttatagttgtttcccctcacatataggtctgcaatccattttgagttaatttttgtatagtgtaaagtgagggttaacctcattctcttgcacgtggatatccagctgtcccggcagcaccacgtgttgaacagattatcttttcctattgaatggccttgacacccttgtcaaaaatcaattgaccataaatgtatgggtttatttctgaattctctgttctggtccattgatttatatgtctctcctatgccaggaccattgctgtagctttgtgtagtacattttgaaatcaggaggtgtgagttctactttgttcttctttctcaagattgtttagaccattctgggttctttgcatttcttatgaattcagactcaccttgtcaatttctgcaaaaagactagactctgctacatattgttttttctttcctttttagcctgcagaattatttgatcccattccctaagtgcaggccagcctctccagggagagcagagctaggacagggtcagaaagagagtcttggctgctttgtgcattcccaacctgcactggccctagtgaaggcagcccgagtgggtggatgtgcctggacactgcaggctttttaggggcattaggtgctctccttcctggcctcctgccacatcttggttggaggctgccttccctgccttcaaaaaagcctaagtggtgactagaaaacagcagagtgtaactgaatacagaacttggtgcccacttcctggttctatttttgtcccttttgaaagggaaggtcattacctctgccattgaacccaggggccctagcccttgtggggtatggctgggagcaccagatcctggctgcagcccagccaccagtggtcctgtgtgcttgggcagtaacagtgacaagagctcccttccccctggacactgtgcctaataccctcctcttgaaatctcacacacccagtggatggggggcactcttatagttattctcagtttacagatgacacaactgaggcacagacagatgcgtttatttcttcaaggttctgtagctgaacagtggggagggagggtttaagaggagctgcacccgctctgcaatactgcctctcacgagggagtcctcttcattcatgacagcatagggccctcgtcttcctggtaagggcttccttcttgggtcagtgccaggatttctaagggtcatgtttagcaggagcctattctacaaacagccaggagcagggaatgactctgtgatgaagcggagacactacagcctcttgatgcatttatttcctggttgggttagaagcgtagctgcccaagggagcatttcaggagaggcctggcttcctagcgatagctgaaaactttgtttcatttgaatcactgctacccagaacaatggggtgcattctcagagtccccattattaaagcttttccactgagccccatgagaactattcatgagaactatttcatggcagcataactgtttctcctccctccctcttgcatgttggtagcctcttaactttaaaacctgccttgcctttccctagctacctggaaggagacgtcagacttcctgtcccatggtgtgtttcttacaatttgttgttcagattggtggtctcccaaatatatataaaaatataaatggagtctcactctgtcacccaggctggagtgcagtggcacgatcttggctcactgcaacctccacctcccagttcaagcaattctcctacctcagtctcccgagtagctgggagtacaggtgcacaccaccatgcccagctaatttttttgtatttttaatagagacaggttggccaggatggtatcgatctcctgagctcgtgatccacccacctcggcctcccaaagtgctgggattacaggtgtgagccactgcacccggccccaaatattttgattatgcacctctgcagtgaaaaatgcaaacacacacatcagttcatgtattacattatgttcactataaaaacaaacagaaaatttaaaaaatatcaagctatcctttactctagtggatcttacctggacacttttagccagatacaaagtcacatggactcagttcttcccctgaccaacttgtctcttatcccaaaacacccttgcaactcccttacgaaggggtcaaatttgatccagtattatggattttatacaagttatgttcttctttcaggcttatccagaatcagatcacagctaaggggactgcccagctggcagatgcgttacagagcaacactggcataacagagatttggtaagatcccagcgtttgtcacagtaataacaccagtgactgtttactcaccaccactgactgtgcaaggcacaacgcagggtggtttctgtttattcctccagcaaccctgcacagtaatggtattacctctgttttacagaggtagacagaggcccagaccagtgaaataaggttgcccaaggtcactacgagagaagctagaattcagcccagaatgcctgattccatattctgtgctctcctgccctgggcccccgccctcatctaccttcattgggtgggatgggggaagtggccagtgaaatgatttcctagtggaagtaaatccccctgggactcagcaattgagagatgactgtgttggccaggagtttggagctcattcttccccttttctgggttccgtaagacatttccaggctgacttgaactgacctgtgctctttgtctacttcttttttctgctttgagaacttccttatgctaatagaagaaaaaaagtttgctttactgtgacattgagcgccatgccacttctttcttgcctcccataaggcacagacactccccactcagcagctcccttaacaacttaattgcctgggtgacgtgggactgggtggatgctgggagaggggccttattaactatgtcctcctttcatgactggggagaatttcatagccaattaaaaaaaaacaaaaaacagctccttggccaacacaggctcctcatacagtgttttttaaactttgctttagaacttgtttggaacttgtcataaaatcgatcagtttggtgaattgcaaccaacaatatttaaaaagaaaacagaacagaacaaaatatcaggatgcaatgtgcatggtatgaaagtatcatttcattcatcttagttcatgcttgcatgtgagtgggtgtgtgtttgcataagtgttggttcacaacataaaatgtaattcttatttagggttgtagacaaaaggtttttttttaaaaaaaacactgttggctaggcatggtggctcatgcctgtaataccagcactttgggaggccaagatgggcagatctcttgagcacaggagtttgagaccagcctgggcaacatgcgaaaccccgtcactacaaaaattagcccgacatggtgctatgtgcctgtagtcccagctactcaggaagctgatgtgggaggatggatgcatgggagatcaaggctgcagtgagccaggatcatgccactgcaatccagcctgggtgccagagaccctgtctcaaaaaacaaaaaagaaaaaaagaaaaacaccatcatagagaatagagcccagatctaaacagacacctgtggcctgtgtgcctgcgaagcccagcctgcccagcagcctgggaagcactggagggcactggaactgtttgcatgggtgtttgccctcaggccactccgtttctgctgattcttaagttttgaggacagcaggcagagggggagaggaaggagactgccagactacagaacagtttgcagagcacagttggcttccacttttctctgtagctggtcaggcgggtagtaaagacctacagttgctttaattctgtcaagtttcaaaatctgcattgcttccctcttgagggtcaccattcctacacaaggaaccattttagtagggccaggagacttcagcttcaaggcctgcacttgtgtcagggtggagaggggaactggccaccaattcagagagggcaggacaggcggcatgggtgctggtcttgggagtgtcttcacttaggtccctggcttgttctgggagcctccagagcatgctcctctgtgtgtgacttcatgggactgggctctgagaaggctgtggctttgttggccctgccagggactgccacaccaggccacagggttgtggttgagctggccggggagccacgttcagggagcagctctgcttggagccaacacttacagagtaagccttctccttggacttgttaactgtactgacacttatttctacctcattcctttctgaaaataacttggaagtctgaagtcccttgatgagttctgtctttaagaacagaaattagaggtgaacaatgaacactgtaaattacagaaatgtatcccactccagtataacagctttctgtgaggctatctcctccagactgtggctctgggagggtggggcctgagtcaaggtcctagggactagtgctgtgtcttcatttattccttgaataacgaaacgcttgagcatcagggactgtgctagcaccaaaaatccagtggtgaacaacatggcttcatgggttcactgtctagaaagggagaagcacattaaagaaaaaatcatttgcgtaattatttaattacaactgtgatgggtactatcacaaaggggaaggccaagagggaacctgatttagatgaggttgcagggaaggcctctctgaggaagcagcacttacactaagccatgaaggatgaataggagctagtcagctgaggtgagtattctgcgtagggaacagcatgtgcaaagggtctggggcaggagggagtgtggtgtcctggaagaactgccagaagctgctgtgccccagggttcagacagtgtggaagaggggactacaggaggctgaggagataggcagggactggaccataaaagatctgtgggtcatgatgtgcattttggtctttatcctaaaagtgatggaaagtcagtgaacagtttgaagcaggagaggcatgtgatcagatctgcaatgcaaaaagaccaattcttggctcttctaggaaactgaattggagaaggccagagtacgtggaaatgacctgtcagtaggacattgtactgatgcagggaagagatgatgggtgctcagaccaagatggccggccaaagacatagaggttccagggaggcattctagattcttaggaattaggggagaactttgtgatacaaggaacatggggatgagaaggaaggtgtccaggttgacccccaggttactaacctgctcagcaggatgagagtggtccattcactaagccaggggaccctaggaggtgtggctactttgaggtgtgggggagaggtccaagtgaggatgccaagcaggtaactgcctccacggacatacaaacaaggccgtggcattgatgagatcgggtggggaaaagggcttagccccaaacctggaggaaatctcagatgtagaggtcacatggaggagaatataggaaaggaaattgaagtagagtgctcagatgcaggagaaaaatcagcgcatataaccaagccaaggggagggagtgcctcaagaaggagggagaggagaggtcaggacagccaaaatcctgagggccaagaaagacaagacctggaaaatgtcattaaattcaggcttatggaggctacaggtgaccttagtgagacccagtgaacagagggatggcagctggagaggatccatgctaatatgaaggaactatctgcaaagggtatgttccttaatttcagggatacatgtgtattgtgtgatacacgagtgtgtgctatgaacacaccttgggaaggagtgtgcgaggatccttaacattttacctgtgtacttttgtcttcctccttttcaacagcctaaatggaaacctgataaaaccagaggaggccaaagtctatgaagatgagaagcggattatctgtttctga

SEQ ID NO: 3429 - DNA, 662 bp, Homo sapiens
  SIMILAR (467)..(529): 901254mologous to Homo sapiens FRG1,accession number AF146191,Smith-Waterman Score=103.
ggtgaagacggaggcgggttctggacagacgtaggctgtcagggagtgtttacttcgcctccacttctgttcctccctgccctggtgctgctccaggtcacatactcgtcctgagccggcttcagcctgtccgcgcagaagtctcccggagccatggcctagtactcttatgtgaagtctagcaagctcgtgctcaagggaaccgagtaagaagaaaaagagcaaagagaagaagagaaaaagagaagaagatgaagaaacccagtttgatatgttggaatctggtgaacagtaacaaactttgatgaaatttcaggaaccatagccattgaaatggatgagggaacctatatacatgcactcgacaatggtctttttaccctgggagctccacacaaagaagaatcgccctgaaatctggctatggaaaatatcttggtataaattcagatgaacttgttgttggcgttcagatgcaattggaccaagagaacaatgggaaccagtctttcaaaatggtgcctgtgcagcagtattcactgtgataggaagtgagaagcagtctgagtgttcattgctgagggaatcaagggcaaaatatcatggatgcactcatggacaaataagcagcagtttgaagcaacaccctagatggatgtaca

SEQ ID NO: 3430 - DNA, 1865 bp, Homo sapiens
  SIMILAR (369)..(226): 601254mologous to Homo sapiens Human secreted protein, SEQ ID NO: 7795,accession number AAG03714,Smith-Waterman Score=157.
gtgcacttcccgaattgacccatgcgtccggcagtcggaatctatgaaggacagggagcagctctggtctgtcaatctcagccacctgtttgatatcacagagaagatactcggaggattgttggaatgtatatagtttagtaagaagtgggtaagaaagagggtcttaattactgagcacttattatgtattaggttctttgccagatgtttttacatatataaactcatttcagaaaacttatttaaagtaaatggggccgggtatggtggttcatgcctggaatcctagcactttgggaggctgaggtaggaggactgcttgaggccgggagttggagaccagcctgagcaacatagtgagaccctgtctcaataataataataataataataatagtaataatgaagtaaatgggataaggaaagaaggataattatctttaaaggttgattcccaccctccctccccagttacttaaggaactaagtgagtacatctccagttgcccatgaaagcataagtttgttttcctcagctgaggcaagtggtagagtatacaggataaccgaagtaacatgtaaaaggcaggaccgcacataaaggtgtacatggctattgtttcacctggagaaaccacatgattgggacctgaaggtttactgactgactacaggggctgattgtgaagcacgaggaaccccatgtgtgtggagactgtagggtgagagcacacaattattagcatcatttctgagtgatctcacagattttttttcttgtgtttgttttgctttttgacaactgcttctcccacgttccttgcaattctattctctcaccttcactttactatttgtattcgatggaccaggataattcaggcaaggttaccttgtaaacttgaattggccacacaccatgttgtcacccagctggctatgaagtgaataatggtactgaaagttatacctgaagacctttctcagatctattttaagtcttaagtctgaccaaccatggaaaatattcgacatgaattaatgtagagaactataaagcatttatgacagctcccaagaaaaatcatctactctatgcaggagatatgtttagagacctctcagaaaaacttgcctgggtttgagggtacacagtaccattttaatcttctgaaaatatctgtattcctgctctttttctgctgtcactgtcaatcctggctatattttttcactatcctattaaaatattactgtctcctttatctgttcaatgtccatattttaaaaaaatcttccttgtatgagctattctgatccaaataatttctctgatatttctctatatggctcccacaacaatttcattgttgttagcatatctatttctccatacattgtaaaactgtaatccttatggtatttctaaaacataaagaggagaattaagtcagctgcagaacaatggggctgattcttctgctttttctctggaaaatctttcattgcttttggtggaaatttacctagaggttacaaccacaggatgtagcttggtctcttatttgcctttttgggaaaccaattaagattaatacaggataaaggaaaaaagcaatctattcattatataacacagttgtttgtattacttgttccctgcaaaggcaaatctgttgaatgcttgcattttggaattcttttctaataggaacaaccaaaaaagggcttcttatggtgcagcaggaaaaaagatcatttttatagctttgcattcttaacatagcatttaaagagcggcatgaattagaggaaagacatggaacacacaggtagtcggtttgagatcatcggcttaaaag

SEQ ID NO: 3431 - DNA, 2551 bp, Homo sapiens
  SIMILAR (1790)..(2449): 931254mologous to Methylomonas aminofaciens transposase,accession number AB026428,Smith-Waterman Score=1071.
ggggcaaagggatgtgcttacaaccaagcgggatgatcaagcccacaagcccaatggcttaggggatgccagagaaacaagatggaaggatcccagatccctgaatgaccttgtggagccgaacagcctacgttgctccatggctgtaagacctgcccaaagcccacacaagaggccaggaaaaacgagcatcttcaaaaatcaataccatccagatctcagaagttctaaggccacaggaaaggaaaacttcaaagacaagaaaaacaagtacctggatccctgtacatttgaagaagaacggctcctctattgccgcttcctggacaacaagctattgttatcccgtggcaaaacctacatgtgtaaggagccaggctggttccgcctcatctttgcagatgagctcccccggctaaaattgggatccccattccaggtcacctcatacaacctagagaccaggccagacctaaaggaattgttagggtcctgtcactgtggcccaggaatctgtgaagagaatactctgggcctggattcagacagggagtcccctgcccccgacatcgagcgcgcacccacactctggaccaacccagcatggcctcccagcccactctcgggttccaacgcccaaacatctcgcatggctggctccgacatctcccaacccgccgccaggaatcagcgcagagggagatgcgtcttctgtgacgggtgtggggcgaggaccctgaccccagctctgggaagtgaactgtacggagaagagagctctcaatcgtcagctctgcctccgcccctcatgcggcttcacttcagtccggatgccggcgatgggagcctcacagacatagcaggcgtccagcaggacggcggcgaatccacagccagatacccgcactcgatgaggccttggaatcccgcaagtggggcggctaccgcgcacgaagaaccgaaacggccttctacagggcggaggacgtctcgcgagagacggctccaggtttccaggcagaggaagtgtgatcggcgccaagggattcgagatggaagggcagaggcttttgcaaagtgcacagagggaggcctgaacggcttcctcctctgcaaagtagtggatcccacctacttggcggagctggaggaggcggtgctggcactcggtgggcgcccatcacgtgtaggtttttctccgcccggaaacgccctgcggcgacttacgcgtggtcctcataccaccctcggggaggtaggtttcattactgccatctttaacaaggagaaactgaaaaccagaaaggctagggattttgccgatttcggaaccaccatcaaacaggattttcgcctgctggggcaaaccagcgtggaccgcttgctgcaactctctcagggccaggcggtgaagggcaatcagctgttgcccgtctcactggtgaaaagaaaaaccaccctggcgcccaatacgcaaaccgcctctccccgcgcgttggccgattcattaatgcagctggcacgacaggtttcccgactggaaagcgggcatgaatgtgaaagctgcctttgtccaaccggcgacctacccatccgtgggagtgacatctctgtcttttatcagtcgagcttccaggactacaatgcctaccaaaaagataaatatcataaggccaagaacaccttggggaaaaaggtccgaggccttgtgctaatcaaccctcagaatcctctgggtgacatctactccccagactcactgatgaaatacctggaatttgccaagaggtatgagttctaccccttgagactagagcaatgttcaaagaaagctcatgaccaatttctagccgaccttgcgagcattctaccgagtaacaccacaccgctcattgtcagtgatgctggctttaaagtgccatggtataaatccgttgagaagctgggttggtactggttaagtcgagtaagaggaaaagtacaatatgcagacctaggagcggaaaactggaaacctatcagcaacttacatgatatgtcatctagtcactcaaagactttaggctataagaggctgactaaaagcaatccaatctcatgccaaattctattgtataaatctcgctctaaaggccgaaaaaatcagcgctcgacacggactcattgtcaccacccgtcacctaaaatctactcagcgtcggcaaaggagccatgggttctagcaactaacttacctgttgaaattcgaacacccaaacaacttgttaatatctattcgaagcgaatgcagattgaagaaaccttccgagacttgaaaagtcctgcctacggactaggcctacgccatagccgaacgagcagctcagagcgttttgatatcatgctgctaatcgccctgatgcttcaactaacatgtggcttgcgggggggatcctctagagtcaactggcgggaagagaatggagactacacatatgtggaaagagtgaagatacccttggatcatgggaccttgttaatcatggaaggagcgacacaagctgactggcag

SEQ ID NO: 3432 - DNA, 1564 bp, Homo sapiens
  SIMILAR (868)..(1284): 871254mologous to Mus musculus putative,accession number AK007557,Smith-Waterman Score=645.
tttcgtcacagactgcggagtgggtcaagggctgggaaggcctgccccaagtcctaccgggtttgcacggccgcgcccggttccgcccgcaagtgcgccttcctgacttactgctgggtgcgcggggctgggggtgcgagtaccacccctgaagtctcttcctgagcgacctccggggcctcattctaggcctccttaaagagaaggatctaaattaggaaaaggaagtgccccttatccacgaccaagctcttccacctgcggagctcgcttaagtctgcacctcaaccgttcggaaaagtgactgcccttgtttactgaaggaaaaactgggggctcagaaagataccatggagtagtttgaaacaggaacaaaatcttcctgaaagcttcggaagcaagaaagccttttttgggtcaacatggaggaaaaaagacggcgagcccgagtttcaggggagcctgggctgccccctgttaaaagccaggccattgctcagccagctaccactgctaagagccatctccaccagaaagcctggccagacctggaagaacaaagagcatcatctctctgacagagagtttgtgttcaaagaacctcagcaggtagtacgtagagctcctgagccacgagtgattgacagagagggtgtgtatgaaatcagcctgtcacccacaggtgtatctagggtctgtttgtatcctggctttgttgacgtgaaagaagctgactggatattggaacagctttgtcaagatgttccctggaaacagaggaccggcatcagagaggatataacttatcaccaaccaagacttacagcatggtatggagaacttccttacacttattcaagaatcactatggaaccaaatcctcactggcaccctgtgctgggcacactatagaaccgcattgaagagaacactggccacaccttcaactccttactctgcaatctttatcgcaatgagaaggacagcgtggactggcacagtgatgatgaaccctcactagggaggtgccccattattgcttcactaagttttggtgccacacgcacatttgagatgagaaagaagccaccaccagaagagaatggagactacacatatgtggaaagagtgaagatacccttggatcatggtaccttgttaatcatggaaggagcgacacaagctgactggcagcatcggagtgcccaaaagaataccactcttagagaaccgagagtgaacctgacctttcggacagtctatccagaccctcgaggggcaccctggtgacgtcagagctttgagagagaagcttcactgaaacggagcaaaccttccactgagaagccacttcaagaggctggtgctgctagatctcatgatgtggctgttgggaagatggtggggtttgtttgccagcttggagtcctattaaatgaaagccagcaactcatgttggtaataggtctactgtgggaacagttatccctaaccacagctcaaaatcgctatcatctttaggcaaattaaaatctatgtggcagtgcaaaaaaaaaaaaaaaaa

SEQ ID NO: 3433 - DNA, 906 bp, Homo sapiens
ttaacaacattggtccatgactcttaggccaaaactcccaatcctgttaaaccggtgcccattggttgcaagataccccaactggagccttctgcctagggcagaacgcagagccacgtatcgtggggtgcttggtatactgcaaatccgaggcactgcattcagagatgagccaagtttgtcgctgttaatcctaaatgccacaagccagagaacagcaaagtcaaaacgctggtcagccgtggtaaagaatccatttcccccgagtgagcggtccctcccaatcgaatcccaaattcgcagtagccagccgcggcttcttctcgctgtctctctcctctgcacagcctgaccccctcccacccccgcttggagaggcactcgctctttcactccatcccgtgcccagacgctccaccgaaaccgtggcgggggattcttcggagctgcagctggggctacggtccccgcaacagccgctagctggactcgccttcctcgcccgcctcttccttctcttcccccctccttaacggtgcaaatccaaacccaattagaacgacaggcgccggagctcggtggacagccaaatccacctcgtcgggcgcgagagcgcacatcctctcgccggtcttcgcgtctgcgtctccctcccgctgttggcgcgttgcttcgggcaagtactgcaaggtgttccggggctctggattccaagcccaggtggttcactggcgtctcagggagacggagagaggaaagacacatgggtgtggtagtgatgagagtcagggtggaagcccgggttagctcgtaagaatccaaaatataagggctcttaggtgatccacccacctcggcctcccaaagtgctgggattacaggcgtgagccaccgtgcccagcccat

SEQ ID NO: 3434 - DNA, 2297 bp, Homo sapiens
  SIMILAR (946)..(1248): 591254mologous to Homo sapiens Human myelin oligodendrocyte glycoprotein gene,accession number AAZ29204,Smith-Waterman Score= 255.
tttttttttttttttttagtattaaatgtatatttttaataaagcccaatagtgagttttacttataggagctttaaaagatacaaaatgtagagttcccagtttggaagcattgtaacttatacacacaatgtccctgctgaatgcccctagcaaggcaccccacgccccaaccatgcaaaggacacacacgttcacacatgcacacacatgcgctttggcgacgacccctctgccaagcgcagcaccctcggaattaccaagtgttcagagcaaggcggtgcccggggaacacagcacctacatgggagaccccacacaaacggcttcaacacagtcttcacagccccatgggaggatgcaatttaggaaaatgtctttcctttaattaggaggaaaaacaaactgggaaagtggacaattaagtgaccgtcaccctgtgcctggagccatccaaggattgaccctctgtccccaaggtgaggccctttgggagaggcacctattaaaacatggggtacttccagtataaatggaaactccggaatacagggtactgtggacacattactgaaaggaaatagaaaactatcttaacaagtagaacagcccatagacaactttaacagagattgagtgtgcacaccgtgacagctaacacagacaagagccacgcagggtatgtgcaaagcacgtgcctgaaaatggtctatatacaaaacagttctttgtaaacatggtgaggtgaatgctcagaaccacggcaaaagatcataaattcaggcagcaatgcatccccacacagcacaaaagacaacacctgaggcctgggaagagcctgacaacacagtactaaaaactcaggtggctgggctcagacaccctacgggtcctctcaaattagtgtgtgtgtttacatacatacatacatacatatatatatattcttttttttttttcttgttgagacggaatctcactctgtcacccaggctggagtgcagtggcacaatctcagctcactgtaacctccgcctcccgggttcaagcgattcttctgcttcagcctcccgagtagctgggactacaggcgcacgccaccacacccggctaatttttgtatttttagtagagatggggtttcaccatattggccaggctggtctcgaactcctgaccttaggtgatccacctgcctcggcctcccaaagtgctgggattacaggcgtgagccaccacgcccagcctctttttggtatttttatatataaatttacttatatctgtagaaaaacgagaacataaatgtgttattacaatctttgctggaaaagcttatatggagttagaaagaataaaccatttattagtagttaacatatattaaaatggtttaatgatttaagaaaatataaaaaaaatattaatactgtcaaactttcataccagaaaatattatggatttttctcagactttttcaaagatgaaatatgaaaaatttaaataagttttatataaagaactttctgtaacctcaattaatatacagtgggatatgtctattctatatagatatatttattattatttctcaatttaagcaccattcaattcttctggatccattctgggctgggaaaatatccctaaatccacagggatgttatctatttaatgggcacatgttaactggaaaatgagggtgggattttttttttaaggaaaaggacccttaaattaatttctatcctacatcttaattggtttgtcttctgagccagctcacaatgtcaatgcaatttctagtgcaggtgtctctgagtgccccttgaccaaaacccccaaggattgtggcagtgtccctggcccatgtgtcggaaggatcgaagggcagcaggtgcagccttgctctgcacatgggacagcagctgggctggtccaccgccacgcaccttcagcagtgtacctccggcacaagttccaccattctgcttcaataaagctgggaaaggccgcagtcccagggtgctgctgggtggcgaggaactgtccacccccagaaaccccaggtgactgcttccaatcacaaatattcaatattttgcccattttgtataagcttaaatatagatagtgttaaacaaacctccagccagtatatctgttatcttaaaatattcaatgcattttaggcaggagatgttttaactaaaaacctacatgaaaaaaaaagctataaaatacagtgattggtgtggtcatcactcaaggtgtggaggagggaggagagggtttc

SEQ ID NO: 3435 - DNA, 718 bp, Homo sapiens
aacacaagccaccccagttctcccttctgacaacaggcaagtggaccctagtagaccttccagaaaagccttagagagcacccccaaatgctcacatttgtcagctgtaattccaccctcagttaaaacctgattctcaatgtgacttggccaacgcagcttgcaaagcaagaacgtcttcatctaaggttgaaaacatcagttgtttgggttgtgagaaaagaaaagcccacaaggtttccgaggcttggtgctgtttctcactgtcctcagctcctgattctgcagctggttctctctccaagcactagcaaaaccctgccctaggagcccccagactctgagagcccatgaccaaaaagaaaaggaaagccaagttggggaagaacaggggcccccaatctccacagccctccactctcgccagagggcccaccctgggctgcctggaaccccctaaagttgccacccccgcaacacagtagtggggcagttcctagcagcgcctgcagcccatgggctggctctgtacccgcagcaccgccaagcgtctgttatcttatttactggaatctgcacagccaggctctagctcaccggtgactaaggagctgcagccattattaccaggcagatggcagactccctaaaagcagacattaaacaataaaatgccaccacataccttgcccacaaaataaaatcaaaacaaacacct

SEQ ID NO: 3436 - DNA, 609 bp, Homo sapiens
  SIMILAR (268)..(474): 981254mologous to Homo sapiens DNA polymerase delta smallest subunit p12,accession number AF179890,Smith-Waterman Score=386.
atggccaaggtgaaagaggaggtgactagagaagaaggtgtggagggtgcttcccagctctacctggctctccccacaaacctcatgagcagcttcctcccttgtgcccacgtgtaccagtggcttagccctcttccagtgcagaacacccagaccccagagcagggaaaggaggaggcagaggcctctgagcaggcagcagcccaggagtctgtgccccaccctcccagtatccctggaaggaagaaccggatgggatctctggagggggaggagccccagccccgcgacgaggaggaagcggagctggagctgctgaggcagtttgacctggcctggcagtacgggccctgcaccgggatcacacggctgcagcgctggtgtcgggccaagcagatgggcttggagcctcccccagaggtgtggcaggtgctgaagacccaccccggagacccccgcttccagtgcaggctcccagagtccccggaagagcctgcgcagctgaagcagagtgcttctagatggagagtggtcactggggaaaaggacctggccatcaccttccaatacctgctgcctgtctccctgacccatgatctggcaagttag

SEQ ID NO: 3437 - DNA, 983 bp, Homo sapiens
  SIMILAR (634)..(464): 491254mologous to Mus musculus putative,accession number AK010477,Smith-Waterman Score=123.
tttttttttttttttttccaggctcaatattctttattgataagcattagtgaaccccttgccctgggagctcagccagtcctgctctcagattcctggccttaggtgggagagcatcttttcctcatggatcaactgtccatgtctgactgtgcctaacttgccagatcatgggtcagggagacaggcagcaggtattggaaggtgatggccaggtccttttccccagtgaccactctccatctagaagcactatgcttcagctgcgcaggctcttccggggactctgggagcctgctggttagatggaggagttgagcctctgacacaaccaggttaaacctgccaagggttcctccacagccgggctgagctgagcaggagcaatgggctctcgcttctgtcctgaggttcttgggtggtgagcaagagagctaagggcaggaggtcttacgtggtgcctcataggggatagagatcccagagcctgcactgaaagcgggggtctcgggggtggttcttcagcaccttccaccacctctgggggaggctccaagcccatctgcttggcccgacaccagcgctgcagccgtgtgatcccggtgcaggtgcccgtactgccaggccaggtcaaactgcctcagcagctccagctccgcttcctcctcgtcgcggggctggggctcctcccctcagagacctagctcgggtgccagctcccccttgctgtgcccagcgggcccctccctcctcttcacaaccgggtaggaatcagtgatgagccgcttccggcccatggcggccacccaggcaggcagagaaggaggcatctgcggggaagaggagagaccggccagtgggcgcgagaaagacagctgctgagagagacagacggggccaggccagcggcgggcagacaagatgacccagacaaaccgagagaggaagtcgccggggtccagggagggacgcctcccacgaaa

SEQ ID NO: 3438 - DNA, 1432 bp, Homo sapiens
tgtggtggaattcgtcaggtctgcaggggtgagaacctgatccgacagtgggacagcaggaggccatggggggatctgaggcagggaaggtgctcacgagaggacctgagaaggaagagatggctgtggtcctggaggctcagggatcaggcctagggcctgtgttccttcggcctcagcatacctctgaagcggtatgcccagcttctctgggcaggccctacaatgtgtgagaaacagcctcagaacaccacctcttttcagggtagttacccaaaatacacacgtgggagtttgccagagttgaggcagcttttaaaggtggagcttttcaaaaagggaaactgggagcacttacagcccaggtctatgttactggtaagaagtggtttgtctcaggaataatgtaccctgtggagagtactttgtgtcagcctcactgagaacaaaaaaagcactcctttccccatgattaacactcatgtgtcaggaaagtacagtcaatgtatgctaaaaatccacttgaacaattagctcgcttttttccctcatttgctttcagagtaaatgtgctttcagagtattaggtcggcctaatatatgatacattttaagaaggggaggaaagcgcattgtataccctgatgctgggacccaatagaagacaggccccctggctggcctttggttctccctggagctgacaaagggaaggggcttggaaagcagccactgtccccgcctagtttgggcctttacagacacacctttccttttggcagctgctatggcacggattctctatgccagcacgaagctggaaaacctgcctacctggctggtgaaatgagggtggcagctggaggaaacaggcatcttaggagactagaaatgtccttcaaagggacttcagtgagtgctcaggggaccaggggtgactgtgttaagaagggttagaggttgagagggagccatgagcttggggtcatcaccccagtgagaccatccaggcacacagctcccaggcttgggaggccgcctccagtccaccaggaccctcagggagctgtgacttcattgaagctgggtctaaaggcttccttcaaggctcagcaaactgggttttcaaagatttttgatccctgaagctaatttacacgttatgtggggccatggcaaagacttggccctgaagtggacagaaagaggctgtgctgagtgatgaatgagactaaacagtgttctcatgcttggtgattttgatgagaacatactacataagagttaagagcattataattccctttatcaccatataaacatgtcacttatccggaaagcatacaatttatttgtacatgagaatgtaaatttaaaaattttctgaaaactagattaaatcttgagaagcaattttcaagtaaaaaaaaaa

SEQ ID NO: 3439 - DNA, 336 bp, Homo sapiens
  SIMILAR (21)..(266): 751254mologous to Mus musculus putative,accession number AK014294,Smith-Waterman Score=329.
cgacctcgatgtatgtcgggcctgtcgcaaaggatctccttcatccctctgcagaagaggagaacaggaaacacacgatgaagcgcctggcgcagagccccaattcctacttcatggaggcgaaaagcccatgatgctataaaatcaccacggcctttacccatgcacaaacggtgggttggtgggttggctgctccactgtcctctgccagcctacaggaggagaagccaggctgacagaacgatgtgccttcacgaggaatcagcgcttctagcactctgagtcaggatgagcgggaaaccatctccataaacgcatttttggataaaaaaaaa

SEQ ID NO: 3440 - DNA, 380 bp, Homo sapiens
  SIMILAR (101)..(379): 781254mologous to Homo sapiens Human protein clone HP02545,accession number AAY94870,Smith-Waterman Score=359.
gggccacctgcgagtgtgcgcacggactctggacacccgcggcggcgagctgagggagcagtctccacgaggacccaggcggaccctctggcgccatgcggccctccccggcctgctggaggccagggcgcgtacgcccggctgctcctcctccagtgccttctcgctgccgcgcgcccaagctcggcggtacggcagtgccccagattcgccttttacaagtccacctctcagagaagaaataatgtcaaataacttttccttggagagtcataacatatcactgactgaacattctagtatgccagtagaaaacaatatcactttagaaaggccttctaatgtaaatctcacatgccagttcacaacatctggggatt

SEQ ID NO: 3441 - DNA, 526 bp, Homo sapiens
ggaatcctaaagtgttttgcccaattgtacatctggaaggagaaacaaggtgcaattagcccacttcctccccactcctgtttgggaccagcccatctgaagagacattcattctgttctgcttctatgggatcaggctctgcctctgcaggatgaggcctggcccagtagagcaatgcttgagacagggtaaatctgtccagttctagagttcagtgataagaagcttactggccttaagatgaaacccatattctcttgctgagcacagtggcacacatctatagtcctagctgcttgggaggctgcggcagcaggattgcttgagccaaggagttaatcaaggctaaagtgtaccatgatcatacctataaatagtcactgcactccagcctggcaacacatgagaccctgtctcctaaaaaaaaacttctccaatagttttatcagcaaataaaggtgttttttaggcctctatattagtttattcattcttcatcttagttatattcacaacccacaatgg

SEQ ID NO: 3442 - DNA, 612 bp, Homo sapiens
aagtccttgggaagtcaagcatgagcatcacaatagtttggaaagctaatctgcaccccagcaaagtgaagtttcccaagttaagcctcaccgcatggcaaataggtgcttaggatgcaggatgcaggttcgtggccccggccctgtctggctcccctgaaatcacaccacagaggcagctgcctttcgtaaacacaaggcaggcagtgttagctggtccaactagacctcattctttctttcacctggggcctgtgcacggaggctgctgacatgagtggactcccacgtgtgtggtgaacgagaagttcaaagtgacactttgcattcttcccttcttctccactctcctcttcccgctccaggaaaaataaaggaagatgattgttttggtacaggaaaaaaaaaatgaatactaggtttttaacttgtgtcccgggttgggtaaagaatgacaactattctatagtttgtatagactttcccttagtggtcattgctatatgacataagaaagtcagtgcctgggccaggcactgtcacaggcctgtagtcccagctacttgggaggttgaagcaggaggatcgcttaaggccaggagttcaaggtta

SEQ ID NO: 3443 - DNA, 1169 bp, Homo sapiens
aaatttactggctattatcagaataaaggttggactcattttgcttatcccagtcattaaaatgttgtgatctgtttctaacatatttagcatttcatttttaaaatgagatgtgccattatcataacaaaggcaactattaatgttcctagaaaaaatgatgtaaaggacttactcctagtcaatattaacacttaatcccactttcttttttccaccaaatggcctcagtacattgccaagagagtgaaatttggattcctcacagtactcagaacacaatatgatatttgtcagctaactttccatcatgtctttggtaaaattgctcagttaaatataattggccatctacttattaaaaaacaattcaaataatctgtacagttaccataatttgacaacaaattactttaaatttagcaccatcttagaaatcttcttaatataaacyyactgattgaaatgtgtttatactttctatcatatttcaaactgttttactttccttgcatttaggccaattaaaacacaaactacatgttagaatgaataatttaaaggacatgctgctgtttcagcataaaaaatggtaaagtctttataaatagaatacttatgatagccattaacgtattgaattgtttaattaacctagttgtgattttccgaatttaagacgttttcttactacatgtgttaaattgttacctataatatcttcctggaaaaatagaagtatttggtaaggtttttataaatgcacaatttatgtataaatataattggaatctgggatgactcttagtaatctactattcttaattcaacgatggccaccagctacctgacacattttgtaaatttagcatctgtgtatgtgtgttcgtgtatgtgtgtgtgcgtgcatgtgcacattactgcatttattctcaaatggatttataatttagtgtttttgtacaagtacttgagctattcatgtaatgggataagttgccataaagatgtacataaatgacccttaatttggcacgttttcacatttaattttttaaaatacagcttttcatatacagttcctaccctttcatttctagcctggtacttcattacttgttgaaaaagtcaagtttgtatgaagccagcataaacatcaaaatataact

SEQ ID NO: 3444 - DNA, 806 bp, Homo sapiens
tttcatcatttagaagactcaataatagaaatatttgatgctttcctgaccttaaggaaaaaaaaaagaaaaaaaaaacataatggaaatatgccaatattctccaaattatttcacatggtcaatccaatgaaaatctcaacatctttattttttgtttttgtggcacaagacaatgcacagaatatgcaaaggtgtaggcaaaggcaatcctattgaacaagatgagaggagatgctttgtcagataacaatgattataaagctgctgctattaagacagtgttgtgttagcccaaggataaacaggccaatggaacagaatagagtgttcagaaatagatccacacatatcagtatgtatgatataagatagggcacatcagtaaagactgaatgtctcaataagtagctctgggataacggcatccagatggaaaaggtaaagatcttaaaaaaaaataagattctaagtagactgaaaacttaaatgtgaaaggaaaaaaattctaaaactgttagaagatactgtaaaagaatataactttaatatcaataaattaataaaactgactacattgataaacttctgtttatcaaaaggcccaacagaataaaaagactgtgagaaaggatatttgcaagacacctaaaggacaaagtactcaagatcataaaaaacaaggagtgcctataaacaggtaagaataggacagacagcccatttgaagagtattggtgagattgtggggaaatgggcactatcatatatttatgttagaagaataaattagttccatacttttg

SEQ ID NO: 3445 - DNA, 1236 bp, Homo sapiens
  SIMILAR (850)..(1119): 821254mologous to Mus musculus Pro-Pol-dUTPase polyprotein,accession number Y12713,Smith-Waterman Score=393.
atgattgaagctgtgttatgttttgttactgagttacattcagaaggactgctgatcacacgacaagcaatgcaactcaaggcagaagaaattgccaaatcccccagaacaaagcagaaaagcgcctcgtgtgatctggaacaaagacgttttataatcagatttatcaagctgcgaagagggagttttagtgaacggaagcagcagcattctgtcaccaggaaatactcctttatccagaattgggttctagaaaaagacaataaagctttgaatacccgtgttatatacaacaggttcctgttcatgatgtataagattaagcaaaacactgatgatggtgactgtcgcttattgtgcagttaccatgttctggacaggcactgttgtaagggctctacctgcatcgacccatttttcctcatgacaaactattggtgcaattatcatgcccatttcatagatgaacacacagaggcacagagagctagaaatgggaagcaaggggatgaatgtgaggttgggggcattgagtcaagaagaagatcaggcaattctggagctaggtatgtacatgattcttctcctcctacttcaggaatccactcaaatgccaggccctcagtgaggcttttcctagccaccttatcgaaaatagcattcctcttaactgtttcattactctatgaaatgaccgtccatatctatggaggtttttttcagtctttttctaccctttccttaaatcttagacttaaacttccgggtggtgatttccaccacactcccgttcaactctcctatttggcctgtgcagaagacagatggatcttcgagaaagacagtggattttctaagcttaaccaagtggtgactccaattgcagctgctgtaccagatgtggtttcactgcttgagcaaattaacacatttcctggtacctggtatgtagccattgccttggaaaatgcccttttctccattcctgtccataaggcccacaagaagcaatttgcctttgggtggcaaggccagcaatatgcctttactgtcctacctcagggttatatcaactctccagctttgtgtcgtaatcttattcggagagaccttgatcgccgtgcttcctcaagatatcacactggtggcgggggcggggcacgggtggtggtggcggggaggccctgggcctggcccacaaagccatttttctcttctaggcctctgggcctgtga

SEQ ID NO: 3446 - DNA, 524 bp, Homo sapiens
  SIMILAR (522)..(418): 821254mologous to Mus musculus putative,accession number AK018420,Smith-Waterman Score=142.
tttttcacgttgcacggtgtttctttaatggaaagacagccaccgacctcagaagcagcccctccttgcgctggaccagaaggataaggggagacctagccaccagtgggccagtgggggtgaggggcttctaggaaaaccggtgtctgggactctggcggttgatggtgtcatctgcgcgggatgctgggcctccacctcccaacctcctccgggacagtacaggtttgggggcaaggcctgagcagggcaggctggggagaccgctgtccctggggttttgtgggcaggggctgggtgcaggccggacagacagaaagcagtcccagctcaaggcagaaggccagagggtgtggagtgaaagggacaggcgaagccaggttcggagagatggagggaacaggccaccaagctcagaagcgagaaaggtctgaggaagcacaagacacacacacacacacacacacacacacacacacacacacacacagaaagagagagagagagagagagagagagagagg

SEQ ID NO: 3447 - DNA, 1347 bp, Homo sapiens
  SIMILAR (1208)..(1104): 801254mologous to Mus musculus putative,accession number AK018420,Smith-Waterman Score=131.
ggaattcccgggtcgacgatttcgtgtgggtggctcgccagccgggacgaagggaaatgaggaccaccgctccggggcgcgagtaggcgcgtggagtccgggggctcagccgccgcgcctcttcctcctgcagctggagactgcaacagcggcgggtgcaccggcagcagcgacgaccctgcgcgcaggtggcagtgtagaagccagaccgggagcttccagaagtggtttctgaaagagtcaaatgtacatgagtaagcaagcacaggaatctgaaaaaccacaggaatgaaatgcagataactctttagaaaacttttgtaggaaaagcgcctcgtgtgatctggaacaaagacgttttataatcagatttatcaagctgcgaagagggagttttagtgaacggaagcagcagcattctgtcaccaggaaatactcctttatccagaattgggttctagaaaaagacaataaagctttgaatacccgtgttatatacaacaggttcctgttcatgatgtataagattaagcaaaacactgatgatggtgactgtcgcttattgtgcagttaccatgttctggacaggcactgttgtaagggctctacctgcatcgacccatttttcctcatgacaaactattggtgcaattatcatgcccatttcatagatgaacacacagaggcacagagagctagaaatgggaagcaaggggatgaatgtgaggttgggggcattgagtcaagaagaagatcaggcaattctggagctaggtatgtacatgattcttctcctcctacttcaggaatccactcaaatgccaggccctcagtgaggcttttcctagccaccttatcgaaaatagcattcctcttaactgtttcattactctatgaaatgaccgtccatatctatggagagcccctccccagaaggcaaaggatcacccagctgctggaaggtgtaggtaccctcaatggctcagtagccagtgtagatcctgtctttcgtaatcagcagctacatctggctactgggtctctgatggcatcttctagcttctgcttcagtgtcctgagagagattattgggcagtctttaataatgaaaactttaccttgaattacacacacacacacacacacacactcacacactcacacacacacagagagagagagagagagagagagagagacagagagagaggagagagtcaagttctagggtgttaagtccaacattatcagctggggcttgggaaccttcaaggttttatgaatgatgaggtctatttgctttcaatactacaagggggaggaatctggatatttatccatgtttta

SEQ ID NO: 3448 - DNA, 1550 bp, Homo sapiens
gaaaaataacacagctactcctcactgcaaaaacatatccatgcgtagaatcaacaactccagtcatgggaccaggaggagctctgggactgcagacacattccttggatgttgattttttttatgatctagtaaaggaataggtaaagtctttgatgtcagtgaagtggcaacatagccaaaaagttgggtaccttttaggaaatgatgttgtaagtctccttaatgtatcctgaggtaagtttcctactgggcagcagattttgtaaggaattacttttaaggaatttcattctttttgtatgggtcatgggagctcccaaccattttttaatagggaaagtctttttgtaaaatttgttgtccgttttaatgtccatttctgtctttattaacttgatccaaggatgattgggagggcaaacaggtttacaaattcatttctgtgacttttaaaaagttgacaatgttgtcagatttaaaaccagtgtgggctagtaaaaaggcagctcactcaatgtggggtgggctcccctattcctttacggctccccctatccctaccccacaagcctttcggttattaaaatactaccaatcttgttataaggattactgtgggagtagttcaagtactccccgggccttctgagctggtggaatattttatttcagactgaaaacagagagcactctccttgggaagggaaagcggagcttggctggagtgagagatgggagcctcatgggtgtacaacttgagggtagttaacttcattcacttctcccaaggcacttcgatcccagctttcacccactgggtgtttgctttgcttggaactgtttcaagcctttttattaggccttaccattaagtatttaggatatggtgtcctttttctgtttttggggggggggagttttgttgtgtttttttaaagtaagtgcttaagtattaaccttgggggtgtcccctctgtatgtttcgaaggggttttggttctttttgcttctgttttcttaaaccatgttttcccactcccccacttgggccattttggaaagctggtcaagcctagccaggttttctgggatgtcgggggagccccagatgacccctatcgggctgcaatacctagcctaagggtaaaggcctagaaaccctacacttgtcacttttactgagatttcctgagtatactttttcatattgcccttaatgagccagtaaatgtgtttaatgcatttgtttcctttgccacagacattttgtcaaatattacaactctacttttttatggcacatattagcacataagcctttattccaagaggtatttattttctcacttgtaaaaaaataatgtttccacgtaaagaactctgttatatcctagaggactctgtcttttatattcgggactaataacgactttaaagcaaaaaaaaagtagagttttaatatttgacaaaatgtctgtgcaaagaaacaaatgcataaacacattactgctacattaaggcaatatgaaaagtatactcagaaatct

SEQ ID NO: 3449 - DNA, 359 bp, Homo sapiens
  SIMILAR (354)..(247): 501254mologous to Mus musculus putative,accession number AK002688,Smith-Waterman Score=81.
gcacatagcccaggaaggccgagctgaggatatttgaaaaagtctctgtgacagatgcaatggctgaagacatggagaaactgaggccccggctaaagaaggtccacatcagagaattggtgctcgccatctcaataatgcctaagacgcataaacccatgctcaccttaagagtcacgtggagagaaatgctcaggctcaagggacttaaaatgagaggtagagggtggatgtaggaggtgtagttcttccccgagagcgatccgcctggaggtgcggagggaattccgcgggggtgtcagggtacgcggtcgcggactcggcgccgcccggaggccccggcctctcggccatgttgc

SEQ ID NO: 3450 - DNA, 458 bp, Homo sapiens
  SIMILAR (442)..(5): 821254mologous to Mus musculus putative,accession number AK002688,Smith-Waterman Score=633.
ggagcttcctgtggattagggtgagtccgcagagaataaggaacactcctccccaccacaagacctcctggcactctccatacagcacatagcccaggaaggccgagctgaggatatttgaaaaagtcactgtgacagatgcaatggctgaagacatggagaaactgaggccccggctaaagaaggtccacatcagagaattggtgctcgccatcacaataatgcctaagacgcataaacccatgctcacctcgctgccgaaggccagcttggcggaggcggcggccagggccccgaacgcgccggcgcacagacagttgaatacgccccaaaagcggcgccgcatcgcacccgcctggaggtgcggagggaattccgcgggggtgtcaaagtacgcggtcgcggacacggcgccgcccggaggccccggcctctcggccatgttgcctgcgaattcc

SEQ ID NO: 3451 - DNA, 328 bp, Homo sapiens
  SIMILAR (28)..(216): 601254mologous to Mus musculus J1 protein,accession number Y00225,Smith-Waterman Score=180.
  misc_feature (1)...(328): n = a,t,c or g
cacgcgtgatgtctcacagaaaggtgctccgctcccagacgggggtccctcggcttcctgcctcggaagcgcagcagcaggcatcgtgggaaggtgaatagcttgcctaaggaggacctcgtacatccgctacacctcacatgctacctggaagactcacctgcattcgctgacatcgtgcgaaatgtctacaagacaggaggctctgccatgaatannnnnnnnnnnnnnnnnnnnnnnnnnnnnnnnnnnnnnnnnnnnnnnnnnnnnnnnnnnnnnnnnnnnnnnnnnnnnnnnnnnnnnnnnnnnnnnnnnnnnnnnnnnccaa

SEQ ID NO: 3452 - DNA, 1172 bp, Homo sapiens
  SIMILAR (553)..(521): 1001254mologous to Homo sapiens Human transmembrane protein HTMPN-49,accession number AAY57925,Smith-Waterman Score=69.
ttttttttttttagttttaacttacaaaaaacgtatttattaatccagttttcctcttcttgccataatacataagcatgacacagatggcctgatacatcagcatggaactgtcagaaagccccaccagtcactgcttctagagttacatgactggcttttgtttggcaacaggacaataattacagcgtggtttcaagtaccatacacaaagcagaccaaccccagggatctccagcatctgcgaaggcttcactgggggtaggccctgggaggaaggaatccaaagcactgtacagatgattcaaaacacttccggtagaacacttgcttgcagcttgcacctctcctttacagagccagagcctgctccattcaggaggcctgcttcccttgggctgatgggtcagaaggctggcacaactgggatcgccctagggacacagtcccacatgacattcccaaggctgggccaccatcatgatcttttccagctggtccgtctagccaagtggtgctactgctgcttgtgtggaaggggcttccaggtggggtgggagcttcctgtggattagggtgagtccgcagagaataaggaacactcctccccaccacaagacctcctggcactctccatacagcacatagcccaggaaggccgagctgaggatatttgaaaaagtcactgtgacagatgcaatggctgaagacatggagaaactgaggccccggaataaagaaggtccacatcagagaattggtgctcgccatcacaataatgcctaagacgcataaacccatgctcaccttaagagtcacgtggagagaaatgctcaggcacaagggacttaaaatgagaggtagagggtggatgtaggaggtgtagttcttccccgagagcgaactagcccaaccggagaaaaggttttaggtccctggtaagggaagaggcctcagtccccgacgtctcttaccacctcgctgccgaaggccagcttggcggaggcggcggccagggccccgaacgcgccggcgcacagacagttgaatacgccccaaaagcggcgccgcatcgcacccgcctggaggtgcggagggaattccgcgggggtgtcagggtacgcggtcgcggacacggcgccgcccggaggccccggcctctcggccatgtt

SEQ ID NO: 3453 - DNA, 482 bp, Homo sapiens
cctatgctttcctctccatgaatgccttcttcatctgcccagttactccttcctcatgaggtgagtcctgtcctgtcctgtcagctgtgcttcctaaagatcactagagtctgttcatacctctgggccactgtcatccttggcctcgattactgcaatagcctgataccttgccttgtgtcttatttccttctcagcctttctctgccttgtatcagtgttgtcttcagaacacagatcttattacattattaattttttttctaagcgacaaggtcttggcatgttgctcaggctggacttgaattcctgggcttaagcagtcttcctgcttcagcctcctcagtagccgggaccacaggcatgtgccatcatacccagctacattattaattttaagtggccctcccaatgccttcctgataaagtccacactagttctcaatgatctagtcattgcattccctgtcactagaattaca

SEQ ID NO: 3454 - DNA, 524 bp, Homo sapiens
  SIMILAR (39)..(1): 921254mologous to Homo sapiens Hydrophobic domain protein isolated from PMA-U937 cells,accession number AAB12145,Smith- Waterman Score=62.
agctggcctctggtcaatgtagttaaccacacttgtctttgcaggaactcctggaaagaagagaagaggaggtaatcaatggcgctgaagtcctcactactcttgttcaggcggaactggaggaagaccacgtcccgctttttcacttcccggggcccctggacaatcagggcagatttcacagtctgattggagaaggggtccgtgtagttgatcctctgggtggtgcaattcatgtcacccggctggccagggcttgtcagaggaggaatgacctcgtaatggtcttacagctgagcaactgggcctgaccggggtacaaggcaatacctggggcatcatagcgatccacttccttgtaagacacagacatgacagggtgcttgagtttctcacgaaagtctgtgatggtccggtagaccaggaagacgccacagccatgacagcggatgctgctggaggcggactcgctgtccaggcctggtaagatacccggaccttggactctgaccgtccctcgtgcc

SEQ ID NO: 3455 - DNA, 504 bp, Homo sapiens
  SIMILAR (503)..(3): 991254mologous to Homo sapiens Hydrophobic domain protein isolated from PMA-U937 cells,accession number AAB12145,Smith- Waterman Score=874.
tccactgcttcccgcccatcctcctccttggtctttaccagtgacatcttgacccaggtgcggaagcccccagagaacttccagctggaataggcactctcacaggcctgcgtgaagcctaccctgtttgggctttgcaggaactcctggaaagaagagaagaggaggtaatcaatggcgctgaagtcctcactactcttgttcaggcggaactggaggaagaccagctcccgctttttcacttcccggggcccctggacaatcagggcagatttcacagtctgattggagaaggggtccgtgtagttgatcctctgggtggtgcaattcatgtcacccggctggccagggcttgtcagaggaggaatgacctcgtaatggtgcttacagctgagcaactgggcctgaccggggtacaaggcaatacctggggcatcatagcgatccacttccttgtaagacacagacatgacagggtgcttgagtttctcacgaaagtctgtg

SEQ ID NO: 3456 - DNA, 2252 bp, Homo sapiens
  SIMILAR (1318)..(764): 1001254mologous to Homo sapiens Hydrophobic domain protein isolated from PMA-U937 cells,accession number AAB12145,Smith- Waterman Score=948.
gtattaacttttatttacctgttaatgaaatcatcaaaatacaatgagtaggcaccttctatgtacatctgtcctagtgcttttgagtgttaatctaaactcatacatcaacaaacattctagccggacaagtaggtggctactcagtccattaagaaacttaattactagtttctagtaggccttaaagtctcatttaacatttaacaaatcaaagagcatgtcagaggctggacatcaatgggcagatgatgccaaagtcatagggttttgcctttgtgtacagtgcataggctccaaagcatggacctgtcacgtcttggatactcagggaattttttgggaaaaaggaaaatcacactccttttggtccactttttaaaaagtggaaaagtaggagccttccattacccctagtagagcttaacctaaatacaatacaatgaaccaaacaggaaagaaaaggcaccttcctacaaaccctattccaaaagtcattggccagctctttaaaaaagtttattaattaatttcaaatatttaaataacttgtaggttttatcccatttagtctcttctattaggctctacaccgcctcttttgggacggggttagaagttccagttttacatgctgttcctcccagcaaggccccatttcttcaagtgagtacaggattgttgatagctccgtttacaaagtggaagtgatgacagctcccattgatgtggacagttctctaaacaacgcgaggtgacttcagcttatgtggctcgttgcctgacctcttcttttaaggtatctctttctaattttgatcatccattttatactcagtttggcaaactctgctgctttaaataatgccaagaaggcgccacagagaagagcaattgtgttccaaggattggcagtgactatatcttggactttctggatgaaaggatctttccattcaaagaccacaaaaaacaattgagcactttttttggcagctggcctctggtcaatgtagttaaccacacttgtctcctgccggaactccactgcttcccgcccatcctcctccttggtctttaccagtgacatcttgacccaggtgcggaagcccccagagaacttccagctggaataggcactctcacaggcctgcatgaagcctaccctgtttgggctttgcaggaactcctggaaagaagagaagaggaggtaatcaatggcgctgaagtcctcactactcttgttcaggcggaactggaggaagaccagctcccgctttttcacttcccggggcccctggacaatcagggcagatttcggtcccaccctgcagggttccaccactgctgcagagcagagctgcgggcccttccccttcttccttttccaaatgggagctctactgctctcatcatattcttcctccactgctatatgcgcactgtcaggaatccctgagcaatactcagcaaaggctggaggcctcactgtcctccctgaatgcaagtgagccaaccacagccaagtgtccacatggcacagccgcatgtctccttggggactaaggccccacactgagtgagtggaagaaggactcctaggaaaaaggaaacttggggccttgggttgcggggctaacagagcagctgcccagacccagctcaggcagacaggaattaccacagtctgattggagaaggggtccgtgtagttgatcctctgggtggtgcaattcatgtcacccggctggccagggcttgtcagaggaggaatgacctcgtaatggtgcttacagctgagcaactgggcctgaccggggtacaaggcaatacctggggcatcatagcgatcccacttccttgtaagacacagacatgaccagggtgcttgagtttctcacgaaagtctgtgatggtccggtagaccaggaagaacggccacagccatgagcagcaggtagatgaagatgagtaggaccgagaagacgttcttcaggcaggccttgctgaagcggatgctgctggaggcggactctctgtccaggcctggtaagatacccggaccttggactctgaccgtctccttgtcctgctcgtctgccagctctgagttctcaaccacctggaccaactcctcactcagctcctggtaggatgtggagcgctcctgccggatcatggcactgaccagagcttcggcacacctgagactcgccccagcccgcggcgcacggacgcagcactgcggacgc

SEQ ID NO: 3457 - DNA, 612 bp, Homo sapiens
ttttttccaattttaccaaattctttattgaacaaaaaatcaacagcaaacattgtcaaacaggaagttcaaacagggcaggtgggtagggctgaccatcctctccttgcagtcccacctctctctggaacaggcttcaacactagtgagggcatcaaaacccctgttctggtgggtaaggagggtcaggcctttctagggaagggacactcagagccagcttcatctgtaggccccaaagaggagtcacgggctgggccagggggctctggagctgcaagggcgctagacaaacgctgcagagggcgggggatggagctcttggtctgggggcacagtaaggcttggagctggtgactcatggtcgccagggattcgaggtgccggagcagggctttggtggggacaggagtccctgtggaagtgctggccacgggcaaaagccatgaccagctggtgctactgaatagggatgctgggactggcgcaagcctggctctgggggccactgccctcgcccaggatgctgccagttttcaggctctggccagagcctccccctgcctctggggggcctctgccaagcagagattccccttggagctatactgc

SEQ ID NO: 3458 - DNA, 698 bp, Homo sapiens
cttcccgggtcgaggattttgttccgccgcgggctctgcccgctcgcctgctttcttggtggggtagaggggagcggggccgacacaggactgcagttgacagcagatggctgaaagctcggaaagcgaaatcgtggataagcaggggaactgtggcatcccatttaaaattgcttctgaagagaagcatgaggttacatctgtaatctccctgcagcagaggcaactgcataagaaaccaaaagacacacctgctccatgccagcttcgataatttctttgtaccttcggcgaaagaagcccatctgaaaggcagaaagaaagagaagctgagttagaagtgctgaagaatcagccattgtgacccccaggcagtctgtccctggcctaagccaccacataaaaagtcagaccatctgctggaagaaccacatggagaggccctgagtcaacatggagaggaagaaggacttgactgaatccagccttccagctgtccctaccaaggtgccaggcatgagaatgaagctgtcttgaactctgaagaccagcttagccaccagatgccaaacactgagcaggctttgttctccacccacaaaccagaggctgtctcagcaggaaggagttggagttggagaaaaaggagaattaagaatctatctggcgatgtggattaaataaacaacaaattggca

SEQ ID NO: 3459 - DNA, 2160 bp, Homo sapiens
  misc_feature (1)...(2160): n = a,t,c or g
tcccaagnaccctcctaaattttgaaaaagtttgaagccaaagtatacagttcaccaagatgtacgtttaacacgtaaccccagacataactgcatgcaccctggccataatgccttacccaaaaataaaagtcataaataaccttttaaaaagccaccatgctagggttcaacaggtagcatacagcacacggatcgtctggggatctgctatgcttccgcatgaaaaacagaatgttcccaggagtgctgttgggtttttgttttaaacctcattgcctttggctcaagggcagtagctacatgatttggtgaaggaggacttcctagtggatcttctacaaggtctaccatacctctgagtacccatgatgctgacagttttcctaaagaactgcctgaggaaacctcagtgctgagttattcggaatggatgcctgtcagttgccactaagccagtggaccctgccccttcctgctagtgtccccttgtttctaaacatcatggcctcttctttgtgacagctctatggcccacttggaggatgttccaaactctccctgagtccctatgtaaattaagccataagcaaaactttttttaaaaaaaggggcactgttttaactcccattttttacaaaggtcctttttccatatttaaaaaccatttcagttctctgaacagttggttaaaaccacattgaagattcaactaaaagctgaaggaaactgaaataatactgctcaggagaatatcttataggattccacagtgaaaccatggaagcaggaaggggagaaagtagaacatcctgtagaattttcaaataatattctggaagggtaacacagatgtactgatccaccccatctgcttcccctgagagcatagagagggcttctgagctgggaaggagcttgtgaactgcccaagttgagagagcgctaacaatatgcttgacttctctatcgctgcacaaaatgcttaactccccagtcgcagtagcccgcctgctactcagcacgatcagaccaacaaaggcatcatccttccccagacaggttcctggggaggctttcagtatctgctggtggtgatgccaaggctggttttcttaaaacctgcctttataaagtcttagtgacctcctgggtatacagctgctcatgtgggtccaccctcgcagaatcaagcagaagcaaataggtcccagctctgagactgcccacaggagtctacccttctccagtggggctttgctggtgggcagaacatgggcctgcgaatcacccttgtacactgtcaccaacgcacctacaccccggcaggaggcaagttagttgctctaagtgcatgtggccaaagcttgttatggcgcctttccaagaaatatcacctaagaatcctaaatgattcagtaaagaaaacatggctttatgaacaagagtccatcaaaggaaagctgcaaatggcatcccattcaaaaagtccacatgccagtgcattttgccaccctgagacaaaatgtccctgaagtgttctctggggagcctccagcaccttgctcagtgcctgactcacagcaggggcctcataaatggctgttaataagtgataaagcccacgcaagtctgcttttcttgctgcttttgataaaactcataagcgacctttgagtgccagctgctttctttgcctcgtcctgctccctgtagctacctctgtgcctccatcccgcagttagatgcaacatccctgatttccaggatcagcttagttcatgccattgacccttgatttttttggtctattcccatgttcaccagcaagagaagcatgaggttacatctgtaatctccctgcagcagagtcaactgcataagaaaccaaaagacacacctgctccatgccagcctaagccaccacataaaaagtcagaccatctgctggaagaaccacatggagaggccctgagtcaacatggagaggaagaaggacttgactgaatccagccttccagctgtccctaccaaggtgccaggcatgagaatgaagctgtcttgaactctgaagaccagcttagccaccagatgccaaacactgagcaggctttgttctccacccacaaaccagaggctgtctcagcaggaaggagttg

SEQ ID NO: 3460 - DNA, 550 bp, Homo sapiens
aggttgtgtaataatacctacctcatactgttgtgaggtttaagtgcaataacatataccaaacatatggcacatactaaatctttaggatgaggaaagatgtagggcaagaaagcaaaagcagaagttagaactggggaataaggtagagtcttacttgttttgttttgtttttttgagacagagtctcgttctgtcgcctaggctggggtgcagtggcgccatcgtggctcactgcagccttgagcctcagtgagctatgagcttgaggctgcagtgggctatggtggtactactgccctccagcctgggcgacagagtagggccctttatctaaaaacaaaaacaaaaaacttcttaaatctctcctgatgaaggacaggattggtttggggatgaggttgagcctgtagtataagtcagatggtcttgggtgtaaagattaaaaggcctggagggatggatgaccgaaggcaggatttttgtcacaatgtttaggcccattttataatcttaattatggtagatataattgctgtatgacttttat

SEQ ID NO: 3461 - DNA, 2563 bp, Homo sapiens
  SIMILAR (260)..(436): 541254mologous to Homo sapiens Protein encoded downstream of hhc_M oncoprotein,accession number AAR13556,Smith-Waterman Score= 161.
atagacattttagaacagtcttgtggttctgataaagaacgtttggaggttgtacacacgaactgtgtgtttgtgtgtgtgtatgcgtaggtgtttgtatgtgtgttttcttcatacttatgccccatctgaatatgtgggaattagatccttggatcatttacaaaagaaagaaagagaattttcctagcagcttggactgcatgtgtgcaccaccatgcccagctaatttttgtatttttagtagggatgggttttcaccatgttggccaggatggtcttgcagtagaatcacttgaacccgggaggcggaggttgcagtgagctgagatcccaccactgcactccagcctgggcaacagaatgagactctgtctcaaaaaaaaaagaaaaagaaaagaaaatgagaaacgaaaccaagaccaaatggacctgcagtccttttataacctaatttcagaagttacattctatcactatctcactgtattctttttattagaaatgagtcactaagtctgggtcacacttaagtggaaggtaattaattaaacttcacctcttaaggggagctgtgtcaaagaatttggagacatatctacatagactacatccatctacatggactacaacaatgtcttttttcaaatgttaccttcccaatagagtttaccctgactactcatttaaagttgtaagctccatttgtcccccctgcaccttagcactcccatttcatcttaccatcctctactttttattttttctatagcacctagtttccaacatattgccataaaatttacttattttattatacttactgtttatggtctatctcctgtctgttagaatgtaagctcaacaaggacaaagatgtatgttttgtgcactggtctagcccaagtgcctagaacagtgcctccacacatagtaggcactctataagtgtttgttgaatagaagaagaaatcatatcttcccactcttttttattttcctcctcttatgaataggccagcaaataatcacctattggtagccttagacataggcagccttacatgtaaatagatgagtagcctatattcccattctaccacctgccttatttgtttgacatttatgttttctgaaaggcagtcccaacttcgggatgaagtgtatataaaccttgaatcttttattattgagaaatcccagaacctctctttttttagagccagttaagagactaacacctcaaaagtcaaaagaataagtacctaacaaaatcctggaaagaaaattagtcttagagtcacaagggctccacttccacagttagaagggctacccttttaccatgtacctgttgttcaatatgtagagaaagccataggattcagggtggtttttttttagtgtccatgtgggcatcgtaaaaaaggataagtctagatgcatgagaatatgctccctcctattatgtgtgtcagttctccgacctagaaaaacttgcagttaattcatcctttcggtattcggtcaggtgcatgcgggctgaatgaggttctgtgagcatataaggtatgataatattgccatcaaagagcttatagtgcttagtgaatgataataagggccatagtagtggagtgattagaaaaagctttctataaatggcaggacgtgaactgggctttgatttaggctttgattgaaaactatgtggaagacattttaggtgggaagcacttgggcaaaggatggaaaataagaataagaatggatgaggattagtagaaaataaagttagcaagataataacttgaggctaaattgtgggggccttaaatgttgggctggcagattagtgttttattctgaaggtggttttcagttttttttgttttttttttttttttttttttgcctgtaacacatttatttctccatttagttcaattgttaacgactgtcattatgtgctgtgattctcaagtggggacacatctcctaggagggagatggggcacattctccttgcacttattaattactgttgcagatagtgggaagccattgaaagttttgactggagaattgacatatgaaggtgatctttaggaatattaggctcttggtcatatgcttatgtgatttgaagaatagtgatgccattgatagactaggaagatcatgggtggggtcggtttaaccgtgggcatataaaagaattgttttccttactgaaaatatgaatgtaccagtatttgagctctggaatgaaaatctccagggaggaaggtatggctgtgcatgtttctcaactatattttgttttttctgaatttcaccttctctttggggttttctcactgtgaatcctgtagtaaccaggggttaccacttctttttttttttttttttctcaagaagagctaaaaagacctctttctttattttccttttgcaaaggcttataagggcttatgttttcaaaaggaaatttattaaaaattttaaagtaattttttaaaaaaattgttaaaattttgagagagaaaaaaaaaaaaaaaaa

SEQ ID NO: 3462 - DNA, 637 bp, Homo sapiens; identical to SEQ ID NO: 490
  SIMILAR (47)..(412): 991254mologous to Homo sapiens gamma-G globin,accession number X55656,Smith-Waterman Score=637.
  misc_feature (1)...(637): n = a,t,c or g

SEQ ID NO: 3463 - DNA, 1042 bp, Homo sapiens
  misc_feature (1)...(1042): n = a,t,c or g
catgaacccctggagcacagccatcgtggccttctgagcccttggcccccctgcggggaggaggtggagcagcgggcgtccccgaagtgagggccaggcccttcccggctgcgaggacgcccagagaccgcgggcgctgagcgcgttgggcagactggttgcctctgggcatcgcaaactgcccccgggcgcatctggcttatctggagacctgggagcttgaggctcattggaagaggacgatcgttaacttttgtgtttgtgtatgtctgtgtatgtaagtttgtcttgtggcattaagactattttgctcttctggaatgcaccactccttcaacagggctttgcagtgagcggcggtagacagggactttcctctgccggctgcgtggagaaggaagcggctaaaaggtttgggccggggagttccccattcgttctccggggagggagggactttacacctacccctcaccggaaagctagacccgcttcagggccagggagtggcgtttccgcagcacgatttcctaagacgagagggatttagccaagagcacagacttgggatttccttctgtccctccccacctttctctcccaatgaagaaacgtttataatcctgtggattactctaggaaaggggccgtatttaacggcccctttggcctnccccgcaggggagaaaaagccttgaccgaaccttcacagaaggagttccaagcctgggaaataatgggagtttataggagaaaagatatatttttaaaaaggttctagggtcagaagtacctacacaggtgctgtttaaaaagtgttttaattgaggagttttacagacagaagcccgaagttgggaaagaccttatggttttgtagatatggtgactccagtctttgttgtataaaggttgggggagctgataaggtttttgtacagtattttctccttcgttgtattgatttttgtataaaaatgtaacgttctacgtgtctaacacggtattaaatattttgaagccccaaaaaaaaaaaaaaaaa

SEQ ID NO: 3464 - DNA, 677 bp, Homo sapiens
  SIMILAR (521)..(405): 761254mologous to Homo sapiens PRO1438,accession number AF116661,Smith-Waterman Score=151.
cactatgaaaaatcataacatgctgatgattaacaaccaagacagtccccatcttcagttcaggctagtaaacaagacagacaccacacataacttgtttcccttttaaaattaacatctctgaagtatgcagcgtgaagcagggcatacagaactaaaggtaattaaaagcagaagactgcctttcctttcttaccctcatatcactcttattagggggtagggaacagatgtagtattatgaggaaactggggtaggaatttataggaataatatatgggtgggtagacctggggcaaacattcaccctccctctgggacatcccttaatttacaaactattaaaaaatgaattagatgcacgcaagcttttgccttaacatcagtggtttcaggcccaggcacagtggctcacgccagtaatccaagcactttgggaggctgaggtgggcagatcacttgaccccgggagttcaagaccagcctgggcaaaatggcaaaaccctgtctctacaaaaacttaggtaggcatggtgacttgtgcctgcaggccaggctacttcagttggctgaggtggaaggattcacttgaaacccagggaggttccagggttacagttgagttcgttgatttgcatcctttactccagactgagttaacagagtaagaccctgt

SEQ ID NO: 3465 - DNA, 363 bp, Homo sapiens
ggcacgagaagatgggcgcccagctgtccatgctgctggaagggtctggtgggggtgaataggctacggagcctgtgtggccaccatgcctgtggcctcagccactttgtgcaaaggactgcagaggcgtggcaaggccatgatgtgtccgtccaccgaaggcctccctggttttgagcccctcctctgcagggaatgcttccagcattttcatggattacaaatgtcttagcccctgccctttcaagcagttccttagctcccctccccagtccacagagccatctcctgcctgtgagttaggcctaatcaacgtaaatctgtcctccaggccctcccttccctccagatgaggtgcgcaag

SEQ ID NO: 3466 - DNA, 559 bp, Homo sapiens
ggcacgaggactctgaagagaacttcagtctgaacctaggaggggttgacctgtggcttatcaggatgtgaacattgggcaccctattttctattttggttatttactttatctatctatctggctgtccgtccgtccgtccgtccgtccatccatccatccatccatcctatttatatatctgtctatctagctagctagctatgagataggggcttgctatatggcgcaggctggccttgaactcctgaacttacacaatcctgcctcagcctcctaagtagttgggactacatataagcgtcctttataacagctctccttcctaccctcctccctctttatttgtttgttgacttattttagagacagggtctgtctgtgttttccaggctggagtgaagtagctatgtacaagtgtgatcatagcacactacagccttgacctcctgggctcaagcaatcctcccacctcagactccagagtacctgggtgtggtgatgtgcacttgtactcccaggtcgacgcggccgcgaatttagtagtagtagcggccgc

SEQ ID NO: 3467 - DNA, 2175 bp, Homo sapiens
  SIMILAR (775)..(635): 511254mologous to Homo sapiens Human secreted protein, SEQ ID NO: 6619,accession number AAG02538,Smith-Waterman Score=134.
tgtttaaaagtttcccactcaaatgcacacttgaaaattgggtccctcagcctcattactgaactaaataagtgaagaagttgtatctttggggtaaaactttccagggccacttaattttttaaccagttaagtacgcatcttcctggtggttcagactttttaagtcagtgctaaagctgaaaagcgccttctaaatatgactgtgagtttagtttgtatcttacatttagtaactgttctgttgggccaggactatgactttaattactatgtgcttattcatcccacactctgcactagaatacaccatagctactatagcattgtggcaggcactcatttttgtggactcattccatacttctgctggcatatttcgtttaaaatctagctaaagattttcatagtactgtgttaactagccagggctgaaaagtgtgacaggatatcaaattgactttccttggggaaaatgttgctttggcaatagtgaagtccaaccccttcatttacagaattagtgattactcatcaatttttgaaagttgtagattaagtagttttatttactaaattcttaaccactttgaagatttaagccagttgaaatgaaacattggctggatgcagttggctagcacctgtaatcccaacactttgggaggccaaggtgggaggattgcttgaggccaggagctcaagaccagcctgggaaacatagatttgaaatcttttcaaaaatgtataaaaatttaataaataaataaatgaatccttactcaaccataattatggctttaaaacccaaccaacagtaaacacttacttgaagccaaaacagtaaattttgaatgaaatttgaattatgcttttggaagctgccatgtcttaattcttgctggattttggatttccaattttggaagtttttatcaaaaactgtccagtcatgagtataatcaggtagcagcctttaaggatctaagtttcattcctataaagaacaggaggtgctggtatttcttgtcttagcaagtgatctgatgcaggtctaaatgggggttagcatctatactatggcttaaaagtttcctccttggtcaccatttgggaggtgatggcttcaaagctaagctttgctctcatgtgacccttctttatcttaatacccaataagatataaacctctcagagtcaacccagtgtagactcaaagggtcttagcttcatctatcagataagatctatctgatttatacaaagaatggtgctgtttttatatacatactaaaaaaatctaattctcaaacaattttcttaatatttatgccagcaaggtcaggaaagactattttgtcctgtttaactttagtagtgaacaaactgctagagacatctgtcatccttaacaggccactgtggtccttatatactgaccctcctttccaattaacgtcctttaatcccatactagttccataagagacttgggcacataaaagcagtattttttttaatgccctggtaaactggcccagaaaaaaattattggccatggtggacctgtttcctatcccacctcttttctatgggctatattagtctatacatggccagtttccgttacatactccatttccaaagagcccccaaacccctgggatagtagcactaccatgaattttagggtcacaaaacatttccttctgaaggaagcagctgcctcagcagtgtcactttagtgaccactgcccaggcttacttcactttgcctccccctacacatcactgccctctttctgccaccaaacctcactattccagcaatgatgcctcccctggtgtctggaaaacccatctggtgcactaaaatgctatgcaacaccaaatggcttcttcccctaatattgctcaacaatgtaaattcttcaagaataaacttcatgctatgttaacatcaatgtatggttacagcttcctttttttttttttcccttttaaaatgaagcaaaccacctccattaaaatccatgttttggggcttgtttttgtctctcaagtgtgaaatataaatcatgtttttatgatttttgtaaatctttttacaccttgtttttgtaagcaaaagtttcttattaaaagaataaaatgacaaaaaaaaaaaaaaaaaaa

SEQ ID NO: 3468 - DNA, 637 bp, Homo sapiens; identical to SEQ ID NO: 490
  SIMILAR (47)..(412): 991254mologous to Homo sapiens gamma-G globin,accession number X55656,Smith-Waterman Score=637.
  misc_feature (1)...(637): n = a,t,c or g

SEQ ID NO: 3469 - DNA, 770 bp, Homo sapiens
  SIMILAR (96)..(494): 631254mologous to Homo sapiens gamma-globin,accession number M15386,Smith-Waterman Score=344.
  misc_feature (1)...(770): n = a,t,c or g
gacactcgctttttggaacgtctgaggttatcaataagctcctagtccagacgccatgggtcatttcacagaggaggacaaggctactatcacaaagcctgtggggcaaggtgaatgtggaagatgctggaggagaaaccctgggaaggctcctggttgtctacccatggacccagaggttctttgacagctttggcaacctgtcctctgcctctgccatcatgggcaaccccaaagtcaaggcacatggcaagaaggtgctgacgatccttggggagatgccataaaagcacctgggatgatctcaaagggcacctttgcccaagcctgaagtgaacttgcacttgttgacaagcttgcatgtgggatcctgaagaactttcaagcttcctggggaaatgttgctggtgacccgtttttggcaatcccattttcggcaaaagaatttcacccctgaaggtgccaggctttcctgggcagaaagatgggtgacttggagttggccagtggccctggtccttcccagattaccactgaagctcaattgcccatgaatgcagagcttttcaaggatatggctttattcttgcaagcaattacaaataataaatctatttctgctaagagatcaccaaannnnnatnntnnnnnnncccccggattttttatttagcgggccgcacctttttccccttttagggggggtaaatttatattgggccttgggccggggttttcaaaagcggggggannnnnnnnnnaaagagccc

SEQ ID NO: 3470 - DNA, 653 bp, Homo sapiens
ggggacaggcctgccactttattttccgttctgcacaggcgggcggcagtaggctgagaatttggagggctaaacaactgggactctggagagtctgtgctctaataatgcctgctttggagcactccttccccacccgcctgctccaggggaatagcgtccctggtcctagcatttcactagatacctcgggcctttgaaccgctgtgcttgggagggaggaagaggatagacaggtccagggctcccctcacttgggaaggccctagtagaaggcattccttctgagtctcctggccctacagtttctcacccctgctgttccccaagacctgacccggaccaatcagctgcatctctgcaccaagtgccaccccccaccgtgcactgctcgcacctcacgctccccatgggctggcccggaccccagtgaggtttggacctctcgggacagccaagaccttggaagccatgacctgtgtgttcaaggcttggcggaagagaccctgctccccgggggatggagaaccccgcccttcaccacttccttaatctgatgcattaaaggaacccgccaaaaccccggggagtgttgcccgggatattcccaccaggagaggcataggcgatattagtattaaattctagcttcg

SEQ ID NO: 3471 - DNA, 176 bp, Homo sapiens
  SIMILAR (175)..(2): 891254mologous to Human herpesvirus 6 U88,accession number X83413,Smith-Waterman Score=359.
cacacacacacacacacacacacacacacacacacacacacacacacacacacacacacacacacacacacacacacacacacacacacacacacacacacacacacacacacacacacacacacacacacacacacacacacacacacacacacacacacacacacacacacaca

SEQ ID NO: 3472 - DNA, 188 bp, Homo sapiens
  SIMILAR (188)..(3): 881254mologous to Human herpesvirus 6 U88,accession number X83413,Smith-Waterman Score=382.
cacacacacacacacacacacacacacacacacacacacacacacacacacacacacacacacacacacacacacacacacacacacacacacacacacacacacacacacacacacacacacacacacacacacacacacacacacacacacacacacacacacacacacacacacacacacacaca

SEQ ID NO: 3473 - DNA, 403 bp, Homo sapiens
tctggaattcgcggccgcgtcgacgcaaagtcccttttaccatataagggatcttgtgatggggtgattatcctggtttatcctggaatgcgggagggcctgtgatgatggaagcagagactggagatctttgaaggtggaagaaggggcttgccagccaaggcggctattagaagctgaaaaagacacggaaatataatagattctttcctcagggcctccagggaggaaccagctctgccatccctgggactttaagcccagtggaacttgattttcacacttctggcctccagaatttttaagagattaaatgtggctgggcgtggggctcatgcctgtaatcccagcactttgggaggtcgaggcagatggatcacttgaggtcaggaatccgagacta

SEQ ID NO: 3474 - DNA, 763 bp, Homo sapiens
  SIMILAR (413)..(294): 511254mologous to Homo sapiens PRO2987,accession number AF116719,Smith-Waterman Score=58.
  misc_feature (1)...(763): n = a,t,c or g
gacactcgcttctggaacgtctgaggttatcaataagctcctagtccagacgccatgggtcatttcacagaggaggacaaggctactatcacaagcctgtggggcaaggtaaatgtggaagatgctggaggagaaaccctgggaaggctcctggttgtctacccatggacccagaggttctttgacagctttggcaacctgtcctctgcctctgccatcatgggcaaccccaaagtcaaggcacatggcaagaaggtgctgacttccttgggagatgccataaaagcacctgggatgatctcaaggggcaccttttgcccaagcctgaagtgaactgcactgttgacaagcctgcaatgtgggatcctgagaacttcaaagctcctggggaaatgttgctggtgacccgttttgggcaatcccattttcgggcaaagaatttcacccctgaaggttgcaaggcttcctgggcagaaagatgggtgacttggagttggccagtgcccttgttccttccagataccactgaggctcactggcccatgaatgcagagcttttcaaggataaggcttttattcttgcaagcaattacaaataataaatctatttctgctaagagatcaccaaannnnnatnntnnnnnnncccccggattttttatttagcgggccgcacctttttccccttttagggggggtaaatttatattgggccttgggccggggttttcaaaagcggggggannnnnnnnnnaaagagccc

SEQ ID NO: 3475 - DNA, 118 bp, Homo sapiens
  SIMILAR (4)..(81): 881254mologous to Leishmania major extremely cysteine/valine rich protein,accession number AL390114,Smith-Waterman Score=150.
cacacacacacacacacacacacacacacacacacacacacacacacacacacacacacacacacacacacacacacacacacacacacacacacacacacacacacacacacacaca

SEQ ID NO: 3476 - DNA, 227 bp, Homo sapiens
  SIMILAR (226)..(2): 881254mologous to Human herpesvirus 6 U88,accession number X83413,Smith-Waterman Score=463.
cacacacacacacacacacacacacacacacacacacacacacacacacacacacacacacacacacacacacacacacacacacacacacacacacacacacacacacacacacacacacacacacacacacacacacacacacacacacacacacacacacacacacacacacacacacacacacacacacacacacacacacacacacacacacacacacacac

SEQ ID NO: 3477 - DNA, 157 bp, Homo sapiens
  SIMILAR (156)..(1): 901254mologous to Human herpesvirus 6 U88,accession number X83413,Smith-Waterman Score=323.
cacacacacacacacacacacacacacacacacacacacacacacacacacacacacacacacacacacacacacgcacacacacacacacacacacacacacacacacacacacacacacacacacacacacacacacacacacacacacacacac

SEQ ID NO: 3478 - DNA, 133 bp, Homo sapiens
  SIMILAR (132)..(1): 901254mologous to Human herpesvirus 6 U88,accession number X83413,Smith-Waterman Score=274.
acacacacacacacacacacacacacacacacacacacacacacacacacacacacacacacacacacacacacacacacacacacacacacacacacacacacacacacacacacacacacacacacacaca

SEQ ID NO: 3479 - DNA, 169 bp, Homo sapiens
  SIMILAR (169)..(2): 891254mologous to Human herpesvirus 6 U88,accession number X83413,Smith-Waterman Score=346.
cacacacacacacacacacacacacacacacacacacacacacacacacacacacacacacacacacacacacacacacacacacacacacacacacacacacacacacacacacacacacacacacacacacacacacacacacacacacacacacacacacacacac

SEQ ID NO: 3480 - DNA, 143 bp, Homo sapiens
  SIMILAR (139)..(2): 911254mologous to Human herpesvirus 6 U88,accession number X83413,Smith-Waterman Score=287.
acacacacacacacacacacacacacacacacacacacacacacacacacacacacacacacacacacacacacacacacacacacacacacacacacacacacacacacacacacacacacacacacacacacacacaccac

SEQ ID NO: 3481 - DNA, 89 bp, Homo sapiens
  SIMILAR (88)..(2): 961254mologous to Leishmania major probable (hhv-6) u1102, variant a DNA, complete virion genome,accession number AL390114,Smith-Waterman Score=187.
cacacacacacacacacacacacacacacacacacacacacacacacacacacacacacacacacacacacacacacacacacacacac

SEQ ID NO: 3482 - DNA, 166 bp, Homo sapiens
  SIMILAR (166)..(2): 901254mologous to Human herpesvirus 6 U88,accession number X83413,Smith-Waterman Score=345.
cacacacacacacacacacacacacacacacacacacacacacacacacacacacacacacacacacacacacacacacacacacacacacacacacacacacacacacacacacacacacacacacacacacacacacacacacacacacacacacacacacaca

SEQ ID NO: 3483 - DNA, 190 bp, Homo sapiens
  SIMILAR (190)..(2): 881254mologous to Human herpesvirus 6 U88,accession number X83413,Smith-Waterman Score=391.
cacacacacacacacacacacacacacacacacacacacacacacacacacacacacacacacacacacacacacacacacacacacacacacacacacacacacacacacacacacacacacacacacacacacacacacacacacacacacacacacacacacacacacacacacacacacacacaca

SEQ ID NO: 3484 - DNA, 218 bp, Homo sapiens
  SIMILAR (9)..(218): 611254mologous to Leishmania major extremely cysteine/valine rich protein,accession number AL390114,Smith-Waterman Score=221.
  misc_feature (1)...(218): n = a,t,c or g
gtgtggagtgtgtggtgtgtatgnagtgtgtggtgtgtgntgtgtgtgtggagtgtgtggagtgtgnagcgtgtggagtgtgtggagtntgtggagtntggtgtgtgtggancntgtggagcgtntggtntgtgtgtgtgtgtgtgtgtgtgtgtgtgtgtgtgtgtgtgtgtgtgtgtgtgtgtgtgtgtgtgtgtgtgtgtgtgtgtgtgtgtgtg

SEQ ID NO: 3485 - DNA, 600 bp, Homo sapiens
  SIMILAR (167)..(364): 751254mologous to Octopus dofleini alpha tubulin,accession number L10110,Smith-Waterman Score=266.
ggcacgaggcgacccaatgggagtccccgccaggagacacaaccggcggctctccggggatttataaggtcccgccagcaaccgcgcgttgggattcgtggtgttgctggagacccgtatggtgtctgcagtcagcgaccctccaacttcaactactggatcaaccatgtgtgagtgcatctccatccatgtgggccaggccggagtgcagatgggcaatgcctgctgggagctgtactgcctggagcacgacatccagcccagtggcaccatgcccagccacaaggccctgtggagcagtgataactccttcaacaccttcttcagggagacccagcctggcaggcatgtgtcctgggctgtctgtggacctggagcctgctgtcatagcacaatgaagtcgctgtagagggaagggaccactgaaggtgccacctgctctccccgtctcaagcccaggcaggacctggccttagaagtgggtctctggtcgggaggctgaggcaggagaatcgcttgaacccgggagacagaggctgtggtgagccaagatcgcgtgattgcactccagcctgggcaacaagagtgaaactccgtctc

SEQ ID NO: 3486 - DNA, 206 bp, Homo sapiens
  SIMILAR (23)..(100): 881254mologous to Leishmania major extremely cysteine/valine rich protein,accession number AL390114,Smith-Waterman Score=150.
acagcacacacgaacacagcacacacacacacacacacacacacacacacacacacacacacacacacacacacacacacacacacacacacacacacacacacacacacacacacacacacacacacacacacacacacacacacacacacacacacacacacacacacacacacacacacacacacacacacacacacacacac

SEQ ID NO: 3487 - DNA, 185 bp, Homo sapiens
  SIMILAR (184)..(20): 891254mologous to Human herpesvirus 6 U88,accession number X83413,Smith-Waterman Score=327.
caccccacacccggcactccacacactccacacacacacacacacacacacacacacacacacacacacacacacacacacacacacacacacacacacacacacacacacacacacacacacacacacacacacacacacacacacacacacacacacacacacacacacacacacacacacac

SEQ ID NO: 3488 - DNA, 394 bp, Homo sapiens
  SIMILAR (388)..(188): 501254mologous to Leishmania major probable (hhv-6) u1102, variant a DNA, complete virion genome,accession number AL390114,Smith-Waterman Score=193.
  misc_feature (1)...(394): n = a,t,c or g
ggactnaggaggaggctgcacagcgggagagcagctggtccagaccagcccttncagcccccactcagccggcagccagatggccccgcaagcctccagggatggcccctagccacaggccctggctgaggtctctgggtcggtcagtgacatgtaggtaggaagcactgaaaatagtgttcccagagcactttgcaactccctgggtaagagggacgacacctctggtttttcaataccaattacatggaacttttctgtaatgggtacaatgaagaagtttctaaaaacacacacacacacacacacacacacacacacacacacacacacacacacacacacacanacacacacacacacacacacacacanacacacncatggcncttac

SEQ ID NO: 3489 - DNA, 1833 bp, Homo sapiens
  SIMILAR (57)..(839): 1001254mologous to Homo sapiens CD40 surface protein,accession number L07414,Smith-Waterman Score=1335.
catgctgcctctgccaccttctctgccagaagataccatttcaactttaacacagcatgatcgaaacatacaaccaaacttctccccgatctgcggccactggactgcccatcagcatgaaaatttttatgtatttacttactgtttttcttatcacccagatgattgggtcagcactttttgctgtgtatcttcatagaaggctggacaagatagaagatgaaaggaatcttcatgaagattttgtattcatgaaaacgatacagagatgcaacacaggagaaagatccttatccttactgaactgtgaggagattaaaagccagtttgaaggctttgtgaaggatataatgttaaacaaagaggagacgaagaaagaaaacagctttgaaatgcaaaaaggtgatcagaatcctcaaattgcggcacatgtcataagtgaggccagcagtaaaacaacatctgtgttacagtgggctgaaaaaggatactacaccatgagcaacaacttggtaaccctggaaaatgggaaacagctgaccgttaaaagacaaggactctattatatctatgcccaagtcaccttctgttccaatcgggaagcttcgagtcaagctccatttatagccagcctctgcctaaagtcccccggtagattcgagagaatcttactcagagctgcaaatacccacagttccgccaaaccttgcgggcaacaatccattcacttgggaggagtatttgaattgcaaccaggtgcttcggtgtttgtcaatgtgactgatccaagccaagtgagccatggcactggcttcacgtcctttggcttactcaaactctgaacagtgtcaccttgcaggctgtggtggacgtgacgctgggagtcttcataatacagcacagcggttaagcccaccccctgttaactgcctatttataaccctaggatcctccttatggagaactatttattatacactccaaggcatgtagaactgtaataagtgaattacaggtcacatgaaaccaaaacgggccctgctccataagagcttatatatctgaagcagcaaccccactgatgcagacatccagagagtcctatgaaaagacaaggccattatgcacaggttgaattctgagtaaacagcagataacttgccaagttcagttttgtttctttgcgtgcagtgtctttccatggataatgcatttgatttatcagtgaagatgcagaagggaaatggggagcctcagctcacattcagttatggttgactctgggttcctatggccttgttggagggggccaggctctagaacgtctaacacagtggagaaccgaaacccccccccccccccccgccaccctctcggacagttattcattctctttcaatctctctctctccatctctctctttcagtctctctctctcaacctctttcttccaatctctctttctcaatctctctgtttccctttgtcagtctcttccctcccccagtctctcttctcaatccccctttctaacacacacacacacacacacacacacacacacacacacacacacacacacacacacacacacacagagtcaggccgttgctagtcagttctcttctttccaccctgtccctatctctaccactatagatgagggtgaggagtagggagtgcagccctgagcctgcccactcctcattacgaaatgactgtatttaaaggaaatctattgtatctacctgcagtctccattgtttccagagtgaacttgtaattatcttgttatttattttttgaataataaagacctcttaacattaaaa

SEQ ID NO: 3490 - DNA, 645 bp, Homo sapiens
  SIMILAR (123)..(287): 601254mologous to Mus musculus nuclear localization signal binding protein,accession number S79410,Smith-Waterman Score=180.
gctactactactactactactaggttcgcggccggtcgactgaggcagacagctggttggcggggcgcggaatgagagattagaaccctctcgcggtcatcccagtcgttatggcgacgggatgtgcgctggatcagtggctcttgtctgaaaggccatgcgagtgaccatcagctctgtcagcactgatgcacacacacacacacgcacacacgcacacacacacatacacacacacacacacacacacacacacacacacacacacacacacacacacatacacctaaaatggcctaaagcagacatccatgtaattacagttgcaaaatgaaaacattttggaaagaacattgtatcatagttcattcatttgcagtggatctttgttcctttttactgtggtaattttaaaaatgagtgtcaagtttgaaattagatctgctaagttggggttttgctgcttgaactctgcactgggtcctcaaataaaccgatgtgaatgtagttttttccccctgtgtgaagaagcagttacaccccaacaataggaggaaaaatctagaactatttcaagttttatctttttgtatatgaaaataaaataataataaaacaaaaaaaaaaaaaaaaaatcgcggccgc

SEQ ID NO: 3491 - DNA, 478 bp, Homo sapiens
  SIMILAR (122)..(205): 1001254mologous to Homo sapiens TFAR19,accession number AF014955,Smith-Waterman Score=133.
  misc_feature (1)...(478): n = a,t,c or g
acccgccgcctgcttcccagccttgacgcccgagcccatgccggacngaggagcttgaggcgctgaggagaccagaggctggccgagctgcaggccaaacacggggatcctggtgatgctggcccaacaggaagcaaagcacagggaagcagaaatgagaaacagtatcttagcccaagttctggatcagtcggcccgggccaggtgtatcagaacaaggtttaatagaaatccttaaaaaagtaagccaacaaacagaaaagacaacaacagtgaaattcaacagaagaaaagtaatggactctgatgaagatgacgattattgaactacaagtgctcacagactagaacttaacggaacaagtctaggacagaagttaagatctgattatttactttgtttattgtctatatgccttttaaaaaaataaacttgttatgcaaaataaaacatttgggtaagttgttttagtatcat

SEQ ID NO: 3492 - DNA, 1002 bp, Homo sapiens
  SIMILAR (786)..(902): 891254mologous to Homo sapiens TFAR19,accession number AF014955,Smith-Waterman Score=170.
ttttttttttttttttttatcgtgcataacaagtttatttttttaaaaggcatatagacaataaacaaagtaaataatcagatcttaacttctgtcctagacttgttccgttaagttctagtctgtgagcacttgtagttcaataatcgtcatcttcatcagagtccattacttttcttctgttgaactgggaggaaaattaaatgagtgtcagaacatttctaataaagcataactcagattttccgagaaaagatttctaccaattttaggcaagacatttgtgtctttaaaggcaacttaggcgtgaactaaaagggtgggaatgggagtcaaggggcctataaaaattaggaaccctcccccaacaggattcagcctttctccccaaactttcacgggtttgacaaaaggggaaatgtctctgggctgaaaaatatgtgtggtagatgtatactcaacattaatccttaaaagtatccatcttttcatttgccacaagcatctggggacacttactttcactgttgttgtcttttctgtttgttggcttacttttttaaggatttctattaaaccttgttctgatacctaggagaaccagaaaagataagaaaaacagtacttttttaaacaaagaatttacctctgcagatggaatcactttgtactctttttgaggtgtggggaaagagctcaggaagagtacaaagtgattccatctgcaaaggtaaattctttgtttaaaaaagaactgattttcttatcttttctggctctcctaggtatcagaacaaggtttaatagaaatccttaaaaaatgatgccaactaacagaaaagacatcaacagtgaaattcaacagaagaaaagtaatggactctgatgaagatgacgattattgaactacaagtgctcacagactaaaacttaccggaacaagtctaggacacaagttaagatctgactatttacttgcgacatgtgctatatgcctttaaa

SEQ ID NO: 3493 - DNA, 600 bp, Homo sapiens
  SIMILAR (58)..(423): 541254mologous to Homo sapiens TFAR19,accession number AF014955,Smith-Waterman Score=245.
tggtggaattcggctgcgagagtgaccgcggctgctccagcgctcgactccgagcccatggcggccgaggagcttgaggcgctgaggagaccagaggctggccgagctgcaggcccaaacacgggggatcctggtgatgcggccccaacagggagccaaagcacagggcaagcagaaatgagaaacagtatcttagcccaagtttctggatccagtccggccccgggcccaggttaagtaaccttagccaccttgtaaagccctgaaaaaacctaaagccagtagacgaattacctttattacagatggcaagatatggacaacctaagtgagaaggtatcagaacaaggtttaatagaaatccttaaaaaagtaagccaacaaacaaaaaagacaacaacagtgaaattcaaccagaagaaaaagtaatggactctgatgaagatgaccgattattgaactacaagtgctcacagacttagaactttaaccggaaccaagtctaggacagaagttaagatctgattatttactttgtttattgtctatattgcctttttaaaaaaataaacttgttatgcaaaataaaaaaaaaaaaaa

SEQ ID NO: 3494 - DNA, 527 bp, Homo sapiens
tgttgctgaccttcacttttatttaaatatagtgatcttttaagagaataaacaaaaaatactttacacagcaaatattttacataaatgtaaacatgcatgtctacttcataattaagcaaaaaaaacttttaggcacaagattttaaaaataaagaatgagacaatgaaaccaagactggaataacagaagtaacaaaaactcacatttcctaactcttcaattggtcttgtcttccaacctattggttaaggcctgagtttcagaaatcctaccttccttgccaaatagaaacatccactttggctgtatataacattatccacataacacactaattctctttcaaaataatgtaataaatataccattcatacacacacacacacacacacacacacacacaccctgctgaaccagcctctcaaataggaaaataaggattttggaattttcaagttttcctacaaccaaagcacatacacacacattaacaccttacatagaaaaaatgattctgctacag

SEQ ID NO: 3495 - DNA, 398 bp, Homo sapiens
tttacataggaaaatacagtctttattggtcttctgaaacaacaaaccagaaatataattttgcctttaaaaatcttctgtctcaggctaaagataccaccattgacaatgccctcccctccccccagtccctttagaaaatccccagatctggtaccagcccacacgccaaaagaaggaagactgtggccatggccagggccgcctgggggtcccagtaaggcagcccatgccaggcgtcctctgtccacctgccaggactgacctcctcaaagggaaatcctcccagggccccagcccacctcacccacccactgccgcatgagcagggagggtcggagtgggggcacaggagctagggcctgccaactccctctgctcagacccttggcttcagg

SEQ ID NO: 3496 - DNA, 398 bp, Homo sapiens
  SIMILAR (292)..(363): 251254mologous to Homo sapiens Human transport protein TPPT- 18,accession number AAB60098,Smith-Waterman Score=45.
cctgctttcgcgacatggccttcaattttggggctccctcgggcacctccggtaccgctgcagccaccgcggcccccgcgggtgggtttggaggatttgggacaacatctacaactgcaggttctgcattcagcttttctgccccaactaacacaggcactactgcattaggtggtctcttcagtcagcctacacaagctcctacccagtccaaccagctgataaatactgcgagtgctctttctgctccaacgctgttgggagatgagagagatgctattttggcaaaatggaatcaactgcaggccttttggggaacaggaaaagggtatttcaacaataatattccgccagcggaattcacacaagaaaatcccttttgccgatttaaggcagtg

SEQ ID NO: 3497 - DNA, 1295 bp, Homo sapiens
  SIMILAR (1000)..(863): 951254mologous to Mus musculus piL,accession number AF229032,Smith-Waterman Score=243.
  misc_feature (1)...(1295): n = a,t,c or g
tttccctaggtataccatgccacatttatttatagtaacaaatgtattctagttttagtcctcacatagggtgccaagtaagatagggcaatccaagagacatagtcctaaccccagagtagcatgtaatcccttcttagcatccctctttgaaaactgaagatagtacagctgagggaactgaacaggttcccaggatcatagagaatcattaagctgaagcaaacaaagaaacaaacaaaaggcaaactagaagaaaagcaggattcaatgggttctgcaccttcttagtctatcattgctttggaaacattctccggttttacattactacagaatatggtccagatataaagttctactgtgtcataagacagctgattttcagaattacatgactgactagaaaaaaacaattttggatttaactggatacagtaatctgaggacaactgcagttgtcaaccttttcttcctttcattcaatgataaaagatacaaaaaagtgcaacagatgtttctagctatttgtggaatgaaggacatttaaataaattttttttttttttaaataatagacagattctcactctgtcacccaggctggactgcagtggcacaatctcggctcactgcaacactcttgccttccaggttcaagagattcttgtgcctcagcctcccgagcagctgggagtacagacccctgcccccatacccggctaatttttgtagcaaattactcatttgtctgtctactttttattataaagattgtggcaactctgcttaggactctggatttttctgccccaattaaggtaaaaaaagnnnnnnnnnngcaaccaccaccataatattacccaggaaaccagctgtgttctgtagaaggccggcctatcagattcaagttgcaagccttatacacagtaagtgtctcatgcacatatccatgaggattcacataagctgccatcggcccacataaggataaactaaaacaaagaatcaacatggagaacacgtcaaaacgagaagtctaattttattaaatgcttagaattttattgaagttcaccaagaaatgaggtatgagctatacagtttttaatccttcagttttatataataccaggatcttagtatgaaaatggggtgggggtacagctggcagacaggcctgttttgtctaaatgtctaaatgttttctgtgatgacccaaaggaaatagtacttgtttttaaaaccctcctcaagacagacattgtaaagaatataaaactcaaatgcttcta

SEQ ID NO: 3498 - DNA, 972 bp, Homo sapiens
  SIMILAR (569)..(351): 541254mologous to Mus musculus piL,accession number AF229032,Smith-Waterman Score=162.
aatcttaggaaataatctcatcatttccaaagatgtcttcatgtcccatcaatgacatgctaccagacatatcagattccacaggataatggcaccaagctacccaagtagatgtttctggtattctagactgccgttcatgcttgtttccctaaaggtatacttaaaaggtttcaaatacagtttcacttagaaactgcaaccctccaagtaaatgttatgtttacttaggtattaatgttatgtttacttaggtatgtatcagaggcaataatttccaaaggccagatcttagaatataaccaatttgttagataactaactttatctctatcacatctgtttacaaagcaaagtattactttgtcgtggacttatttcatcttcaagtgtctgggatcgtgggcaacagagcagatcgcggttaagccccaaaatttttgaggtgacatgtcttttttggtggcccgttaaacttcccatcccaatatgggcttggcaccagattcttaccactggggcaaccaggtccaggcatacccaggaaaccagctgtgttctgtagaaggcccggcctatccagattcaagttgcaagccttatacacagtaagtgtctcatgcacatatccatgaggatacacataagctgccatcggcccacataaggataaactgaatatttcatttttggttgttatttctgtttcttgacattgtttacagcaaagggaagtacatttattcataatgtctaattcacagcgaagtcgctggatagcactgccaattttaaggagctgaattctcaatacatcatcaataggaagacaagcagctactctgtaagaaaaatcttcaagacatggtttttcaagttttaaacttaggagtcagataagcatcagagaacttacaaatcggataatatccttttgaaataaacccttctctttaaggttacacattttat

SEQ ID NO: 3499 - DNA, 3555 bp, Homo sapiens; identical to SEQ ID NO: 2664
  SIMILAR (1)..(1071): 1001254mologous to Methylomonas aminofaciens transposase,accession number AB026428,Smith-Waterman Score=1893.

SEQ ID NO: 3500 - DNA, 1022 bp, Homo sapiens
  SIMILAR (373)..(528): 941254mologous to Mus musculus putative,accession number AK002988,Smith-Waterman Score=230.
agggattgagccttgacggctgtggaattcggcacgagggccatcttagcggctgctgttggttgggggccgtcccgctcctaaggcaggaagatggtggccgcaaagaagacggtgagtgaggcgggccaggcccggaagacgattcacgtggagagatgtcttggccagggcgggcagatgtgagcccacgggggtgacagcatgcctgctggcatttggagggccccagaaggaatcccagtggccctctcaatgacttggggtcctcgacttcggaagtttaaggggctcggcttcaaaaagctgggtccggttttgaggcggttgcaggcgaggcccttaggtccgtatttaatgtttgctttgtagaaaaagtcgctggagtcgatcaactctaggctccaactcgttatgaaaagtgggaagtacgtcctggggtacaagcagactctgaagatgatcagacaaggcaaagcgaaattggtcattctcgctaacaactggccagctttgaggtaatcgaagagactgaacgtgcttcgcctaccgcgaattcatcgtgaacgaatatacaggagtgtaaacttgtaatctgagtaccatgaactcgaacactttgcaggataattacggtagcgattgtggtgtttggcccttcattcccgtctccccgacccacccccaaatcgtgtgctccccttctgtgagcttatttttggaggagaaatgtgtgtgtgtggcaagagtgaaaacagaacatcgaggtttaatggaaacacagacacattactgttttttccatgtattttgtgtcctgcttttttggttcttttagctttgaggtgctttaatgatgcttcattgtgtgaacttgttttagtgtcaaaaaactaggtaagaaaagttgaggctgggctatggagttgcaggctatcatagaatcacctagtttagcccgctaaatcagttctgagtcaagatttatgcttgactcactgttttgaaattgaacttagggg

SEQ ID NO: 3501 - DNA, 659 bp, Homo sapiens
  SIMILAR (365)..(466): 521254mologous to Lupinus luteus ribosomal protein L30,accession number AJ223316,Smith-Waterman Score=94.
  misc_feature (1)...(659): n = a,t,c or g
gctctgaggaattcggcacgagtaccgaccgaggtttacgcagcgcggggagctttgcgggttgccatttgtaactccggatcctaaaattcctgtcctgttctctgtctcttctaggttgggggccgtccccgctccctaaggcagggaagatgggtggcccgcaaagaagacgaaaaaagtcgctgggagtcgatcaactcctaggctcccaactcgttatgaaaagtgggaagtaccgnccctggggtacaagcgagactctgaagatgatcagacaaaggcaaagcgaaattggtcattctcgctaacaactgcccagctttgaggaaatctgaaatagagtactatgctatgttggaaaaaaactggtgtccatcactacagtggcaataatattgaactgggcacagccatgcggaaaatactaccagagtgtgcacactgggctatcattgattcaggtggactctgaccattcatttagaaggcatgcccagaacagacttggtgaaaagttaaacctttttcacctacaaaaatttcaccctgcaaaccttaaaccctgcaaaattttcctttaataaaaattgcgtgtgtttaaaccagcaaagaagaataagaagatttggcccccagtagggggtttataaagcgag

SEQ ID NO: 3502 - DNA, 1723 bp, Homo sapiens
  SIMILAR (88)..(813): 411254mologous to Homo sapiens Human gene 42-encoded protein fragment, SEQ ID NO:358,accession number AAY86443,Smith-Waterman Score=297.
ttttttttttgaaagggaaacaaaatggtgctttattttattttatttattttaaaaaggcgctacagtggcaggacgctgctggggatggggacacacagtgtaagtggtagattttccaagacttcccctccctattgtcctccgagttcctctcttcctggtcctatcagtagcataggattcaacaaaagccttcatggaatgcctctttatttctgaaaaggcaacttctacccctccctttcccatttccaagacttggaaatccttcataagctatctcacttccatgtttgaaccagggaccactggattgtaagtctgaaaatctggggtgtcctaccccataaccagggccaaggatattctgcccccaatggctaaagtctctggaatatttgcctttctggtaccattcaatatatttgggggatatatacatctatatacatctttctatatatatattatctctgtttctttcttcttagataaacctttcatatatgtcatatcctaatttcccaagcctccccacttcttgtttgcgagcctaagcaagactcaagagtttcatgaattcaactgggtcccctcagcatcaattctttcctcatcctcctcacccccgggtatcttcccccccatcagttgtttcgccccgtccttctgaaaatctcccccctttttaacacctgtgccctaccgaaatctcccctttttaacaactgtgccctaacaactctgctgatattcccaagtcccacagttgggtatgggggccccatttcctcacccagaccctggctgccttcctaaagctcggccctattgccctaaaagaggatttccaggtccagaggagacagactatagtcctaaagaaccatttagagttaaggtagggggtagttgttcccctgtagggggcttgtgggagaagatgccagatcgcattaataggacagtgtgatttaaagtgcaacttaaagcaaagcctgggtaataatggaggagattccaaaagggtaagtcagaaaatgttttcttctcactgtttcatccaagagtctagaggcttgagtctgggggcttagaatagacagcaggggaatgggaagaaagcatagcatggccaaatcaaccagatggaggttaacttgccaatggataggaaggtatagacacacacacacacacacacacacacacacacacacacacacacacacagcagtacatcttgtccctacacactgaaaagaaataaggtaaagtcctaatgttgaaataaagttgaagaaacgccagaaagctggcctcttggcccttctgttcccctgtttccagatttttccaagtttttgtggttccttgtttttatgcccaactagaaggtaatggtggggtttactgtagatggacaccgaagggtctttgttttcaagatatcgttagttgagttcgaggagagatcaatataacaagaccttgtgcaattatagttggtggtgatcatgggtctagcctcaaaattttgtgtttctctgcaaggctctgtacatagatgcatgtatatattctgtagcttgtaacaattggctgagaccaccttaaactgcaacttgacttatagtgggactatgcagtaccactatgtgaggcttccttggtaccaaagtgagaccagaaagcactctagggatttggggctttggcc

SEQ ID NO: 3503 - DNA, 1410 bp, Homo sapiens
tttcattttttaaaacttttattattagtttttattacacaagtaatacatgttcattgtagaaaaattagaaaacacagaaaagcaaaaagaaaaaataatcacccataatcccactacccataactactattaacattttagtgtatgtccttctagctttcttatgcatatatatacatacatagatatatttatatataattttcttttttacaaatattgtgtcatactatacatactgttttataacatgtgtttttcatttaatatatattgtgaacatcattgtttattccctgaaaaattttacagacactacatgctcattgtggaaaattagaagttacagatatgcaaaaagaaaatataattgctccaaatctcacctcccagagataaatgcttttacactttggcaagtatcctttcagactctttaatgcacacatgcatacatatatttttaaaaagggatcgtactataaatattcctctataacttcctttttcatctaacaatatagctcgtacatttcaataaatacacatatggtgcttattcttaactggtacacagtattccattgaaaggatgtaccatatttaaccaaccctataaagtaggcttatttacatttttctgcttatccaaataatgctgctataaacatcctttcttgcatatactttttgaataatgaataaatacatcttagctcattttattttctgacccatttaaaggagaatttccctaaagtggaattactaggcatgcaggaaaactatattaccaaaatattttttcagaaaggtggaatcaatttacattcctgttgactctgtaagaggtttatttctgtacttcctttttgtccctgggaattttaattctttataccgtttgcctttctgacatataaaaaggaatatctcatattaacttgcattttttattactagtaaattaaaacactrttrtcatatttattattagtaggttattttagtttattgtgcattgccagtttgtgttcttggtccaattttctgttggaaagtttgattctccttgaattataaaatgtcatttattcattcattattcactcattcaataagtatgttttcagcatttgctttgtgtagcactgtgttaggtgttatggatacaccaataagcaaaatagacatggttgctgccttcttatacttccaatttaatagggataaacaggcaattaaacaagcaataatgaaaacgttcaataaggaaagaatgaaatggaaccccttggttgagaaggggattgtagatcatggaaatgtcccaaaagtagtcatgtttaagctcttaatatgtatttgagatctatcctttttgtagcatatattgttttctcaatt

SEQ ID NO: 3504 - DNA, 2024 bp, Homo sapiens
tttttttttttttttttttgtatgtgtgtcatttcaaacaaaaatagccctgaagcaaccctagttttcctgtggaacagttaatgcgtgccaaagtactgatgtggtagctctcccaaaattccctcatgttattcatgaaccttaaaaccttggaaaagaaagattgtaaacagatgcaccattggggtctacagtccccacctactgatttctttttctgataccagttgcagacaataatttatatggcttgctatgactaaatgtttctgaaggaaatatttgggtaaaactttgccatgaactgcaacatgggcctctgaattcctctcctttcctaattttattgtcacattctgagaaaataaacagggcatctattatgctaaagagaaagtataaactcataaacaactacattctatctgcctttaaccccccaccaggcaaaatacacacacacacacacatacacacacacacacacacacacacacacacagaatctcaaaaagtaaagtctacctgagaaataacatgaatcttcccccaacagtacacaaatctttgccagagagaagaacactgctattttctttcacattcagagtgagaattttcttgccccaacttgctttcctttcattttaatttgacagttcctcaagctaatccaccatggcccccacataaacaagaagagttcttgatgctgtgaagtgagagaaaaataacatgagtcattttctgttgcctccacatctgatagaattggaggagcctttactttgggatatgaatacaatcaatcttttctagcctggaaaaggaagtatcctaagaaaggctaaactctcagagaaggggcagatggtgagttattccccaaatgatatctctgaaatccttaaataatcagccttgtctttaggaagttatatagtgaaatgagcttgttcaaggaaggctttaacagtactgtgaaggaggtcatcccctccagattatcagaataaattatgaaacttcaccctgaaccagtgactaagccaaatagataaagcatccccctgtctccttgtattttttagagcattctccatggctagatactcaaagtgaaaaatgctaatggcaaaacttctaaaaaacagacaccagcaaaaatttaaggaagatatgcctcaaaacacgtctcaaaagcggctctcagtctctcagctcagcacccagcaagactgcatgcaactgcccagagagtgggctctattatttgtctggccctgtacagttcaccttctccaatttcacatcataatttaaaatctcagtggtaacccaatttggactctcatttcgaaagctgggatgctttttgtctactgaacagtagtccgaaacagaggtgttgcttttctacataagaaaaacaaaaattgagcccaatcttttgtcatcaagattgcctctgtatgaggcaaaagttaaagagaaaagagaagctgagagagcctgaacttgagcaaaatatttgtgaattttctaggatttggggtatgccaccttaatccggattcctttccgggagtggatccaaaatacttttaagaaaatcatgtatagcattttgtccagatacactgcaagtgattgttgcttggagatctatgaaaaataacatttgagaaaattttacttgccaagtagtcactaatacagagtacttataatagtggcttgtcatcacaaacacctgggattttttaggggctgtaaatgacagaatactgtgactttggcattctggcctcaggattcattatcaagggtttcattttcattcagaaacatttctccgtgggaatcccactcacacgtatttttgttggcacttgggcctattaaaggtgtggtctagcatttgcttttcactcatcttaagattattttcccatgtacaaatgctggtcctggcatgaacagggtaccacttaaaaatcattatcccttcagatgctccc

SEQ ID NO: 3505 - DNA, 963 bp, Homo sapiens
aaccaactagaaagagaaccaaaataggactgactctcaaagcacattgctagcatccaccaaaaagcaaagtggtagagaagcagtgagtgggattaggggtgagagaagatggagaacattaggacaggcaagataggcaatggttagatggaagctaaaaaataagaaaaggaagcagctatggtctcaggggaaagagaactgagagaggagtctcgaagtcctggattcttgctgtctacctaccagctaggtttccttataatttagtaaaacctacttaacctccagagaccctcagtttccttccttttgtaatgtgacctccacaggacccagttatagagaagaaataaaatagttaagtgaaaatacttcgtaaaccatatagttctaatgaaagtgtcaagaatgagaagaatggagaagttagaaaaaggaagagtggggaagataacctgtcaaggataaataagtgatagataccattcagcttccattaaaagccacgcaagcagcatctgaagttgggtttttttaaaaagaagagaaaaaggcaatcatgcatactggccgggttcaacttagatacacgagctattgggccaccgaggaaaacggtgtggtagtaagcatcttgctactaccgcaagctggtggcatccatgagctatgggactggaaaaatttcacactgaggccaatttttctaactataaagttaaaaaggtctatatcctctcccttatttcagagggattgtgtggaaaattaccaataagaagagtcttgaatttattgcaaatattttcttcaacaaaatcagactctttaatgtgttaacggtctggttttgggccaggcacagttgctcaggcctgtaatcccagcactttgagaggctgaggctggcagattgcttgagcccaggagttcaagatcagcctgggcgaacatgca

SEQ ID NO: 3506 - DNA, 1241 bp, Homo sapiens
  SIMILAR (869)..(570): 441254mologous to Homo sapiens Secreted protein 76-28-3-A12- FL1,accession number AAY59709,Smith-Waterman Score=137.
  misc_feature (1)...(1241): n = a,t,c or g
ttttattatttatagtaaactttattttccattgatatttcacttaacataatttcaaagtcagtctgtggtctaagatgagcaaaagaacagatattgtaaaatctcctaaaagactttttttcaccactgttcctcagagcagggaatggggtttccagagccctgaaaggctgacaccctaacatttttacccttgaggatttacctacaggatacagaaaggaaaaggacaaccatcaatatacaaggaatcaagctcttatggaggggtcttatttaagcttcttgtgtttacatacttcgccaccttcntgtagggtttgttaattcatggactggattttcccacctcttctggccaaggtttgggtgtcctttttttttaggggtaaaatgttcaggatggccaaaaatgctggcacttaattctccttaattattattggaaaaattaagtgggaaggatgcaagatttttaattcttccatccagtcttaagctggaaacatgaacttctgctaaatgggggtctggttgaacatactaactccaacttttggcgaccaatcagcaaaactgggcaccttgcaatttaaacctgcaaggcatgaattttcccagagtggtagaacctcattccccataatgcccagcccaaggttaccagatgtagcttaggaaaacccaaacggttccttggatccttgagacagctggtaagccacccaggccggcttagactgccaaagagcagccctgccagccagggtacggcacgctgcctgcttttacatacccaatgaatcccaccagaagcaaccagtgctccgttagccaaagccaaaccaatgcaaaggcactactgagccagtgtcctgcatttttctcttctctgtccagacaggagactaccccagggcctgcacctgcagaaaacaagcggtctcacgaaggccccggctgtctacaagggcgcgcaagccgcaggaatgactgcgaggtgtcgccgtaaatgcagcggcgggcgctctctagtcccggtggcggggcgaggagaggggagcggctctgttgtgcctgcccagtgtaccgggagaggggcggtcagagaatggggacggtgcgggcggggcttgagccgccaagtagcagcatgcgccctgcattcagcgggtggagagtggggcggggcatcgcggcgagctcctgagtccagggaacgcggcggggaatctctg

SEQ ID NO: 3507 - DNA, 258 bp, Homo sapiens
  SIMILAR (1)..(210): 541254mologous to Homo sapiens Human secreted protein, SEQ ID NO: 6168,accession number AAG02087,Smith-Waterman Score=167.
atggccttcaattttggggctccctcgggcacctccggtaccgctgcagccaccgcggcccccgcgggatttggtgggcttgagactgccaactccaccgccagtgggtttaattttgggggtttcggattaactgctaatcctgcagtgaactttaatattgggaatttcggtgtttctactacctcggcgactccgttcaattttggtaacagtctggcaagtgcagagaaacaagtcttatacgaacagcagtaa

SEQ ID NO: 3508 - DNA, 922 bp, Homo sapiens
  SIMILAR (2)..(538): 991254mologous to Homo sapiens HTRM clone 2765991 protein sequence,accession number AAY73364,Smith-Waterman Score=913.
acgtttggaccttcctagtaacttgccaggacttatcctcacatctgaacattgtaatgaaggtgtacagcttcctctgtcatctctgtcccaggatagcaaacttgtgtatattcagctgttatgggataatatcaaccttcatcaggaaccaagagaacctctgtatgtctcatggaggaattttaattctgaaaagaaatcatctctcctgtcagaggaacaacaagaaacaagcactttagtagaaaccatcaggcagagtattcagcacaataatgttcttaaacccatcaacctactttcacagcaaatgaagccaggcatgaaaagacaaaggagtttatacagagaaatcctcttcttatcattagtgtctctaggaagagagaatattgatattgaggcatttgacaatgaatatggaattgcatacaatagtctgtcttcagagattcttgaaaggttgcagaaaattgatgctccaccaagtgccagtgtcgagtggtgcaggaagtgttttggagcgcctctcatttaaatagagattcactagaatgttgacacacaaggcttggggattagatttcatctggaaacattcaagttttttttttccaaatcggtaagaactggtgaatacgggaattgaagtaactcttggggacaatatataatgaattatgattcatattgcattaccttgaaatatgaagtgccatttgaatgtcccagggcttattaatattgaagattttcaacccctgaactgcttttctgcctctgtggaaaactactttgggattcttcagtatttgtagtagtttgatagaaataatgaggaaccatattcattctaggcattgtttatatttgaagttactgagtttgaggaatggcaaattaaatttgcctaaccccc

SEQ ID NO: 3509 - DNA, 1130 bp, Homo sapiens
  SIMILAR (926)..(1108): 781254mologous to Homo sapiens HTRM clone 2765991 protein sequence,accession number AAY73364,Smith-Waterman Score=241.
agcttctaaagaaagtgataccaagtgtcactagaatcagccttacgtcttttttttctctgtacatcagtgcatttcttaagttttcctgtcatctttaacaactgagtcatgaagctcacttttagtgtttcatttgtaacattttaatgctcacaaaccaaataaaggtgaactgtcctttgctattgggttaaatagtaaagagaccacaccaccttttacatttgttttgtgtcacgggttttagacccctaacttactgagatgataaatctgttactttgtcaagtgacaaaagatgagagaagactctgcttttgtaaattttatttagaaattagagttaaaacagttatgtattgttgaaatgtaataaagttaagccatttttgttactagtgtgaagctttatgcccattaactatgtttttaactttaatttggaatagaaacctgcaggaagttacaaaaatagtacagaattcaatgtagccttcacacagcttcctccaaatgtgacacctcatataactaactgtaatgtaatattaaaaccaggacattgacatagttatattactattaactagatgacagaacttaartgtcttcaccaattaaaaaaaaatgcatctgtgtttttatgcctatttgccccattgactttttaaaacatattttgttttataggagtttatacagagaaatcctcttcttatcattagtgtctctaggaagagagaatattgatattggtaagttggttaataaaagattatgaaaggaagttttacattttattttcaaaagtaatttttaaaaatgtagctggtatgtataaaagatttaaaagatttctacttctaaatatatagttcaaatacatataatttgactcaataccaatttgaaatgaacggctgttgtctttcttaacaaattacaacttcatttttgaaaatttctttcagaggcatttgacaatgaatatggaattgcatacaatagtctgtcttcagagattcttgaaaggttgcagaaaattgatgctccaccaagtgccagtgtcgagtggtgcaggaagtgttttggagcgcctctcatttaaatagagattcactagaatg

SEQ ID NO: 3510 - DNA, 1222 bp, Homo sapiens
cagaggctgaaatctagaacttcatcccgggcaatgaggttctcacagaaggtgcagttttataactaactacgtccacttatatatattcacactctacatatatatatatatatatatatatatatatatatatatatacacacaaatgcacagtccccctgctcactccgttacctaactgtacgtcttttcatgtttataaactatacagaaaactgtatttgctgaactaaggattgtattggtgatttctagcaaaacacacagtgatagaatttttgtctagaatcccaaactgggcaacgatagtctccaagggacctgggccttgccaagggcctgggggcaaggtgtcggcgggacggtgaggaagggggaggcagcaaggagtcactttgggggaccaatattcttaggatatttaggagcatcaccttgtttttatatggcaacacaagcctgtctgccaccctggagcgccctgtcacccctgctgtcgtagctgttggcttcagggtgagaagtgagaagcagcttattgtatatgagggagccaggccccgagggtgagcgagatggagaaggggaaggaaggggctttgggatctggaaaccagcaggccaggcagcatccacagtgttagtccaaagggtcggaccgtttcgtcagccctagcgtttggtcattgacggcctgaacgggccaaggagactccgggcttaaccccaggcctcccccacggttcaactgctaaatttttccttgagggctgtttggtgttttgaacccagcaagggcccctttgtaggacagcaagagggaggccgtcgcggggccttagcagaaggggaaccaatgcagggcatttccatgaaacccatctccaggcacttcctgccatcacggaaaaccctggccctcccagccgtacctggggatgctcagggtgcaggcagaggctcgggaggccggactcaggggtcagaagcagggactggggcaggcgagcccggacagggaagaggggctccgatcaaagccggccgtgctgctggccgggggccgaggtgggtacaagctcgctttgtgctttgcacaaacctgaatcccccaccagagaggatgtgtgtgaggagccagaaacgctgaatccaattaagagagaaaaataataataacaataaatgatcttggacaagaaaaaaaaaaaaaaaaaaa

SEQ ID NO: 3511 - DNA, 1020 bp, Homo sapiens
ccaaaaagggaaaccctctttcataggcatttctctcactggagacccactctcttggtcattcctttatgactgagagtctcagaagaagttgtgagtgtgaggtaaaagagccaagcaagcattttggaatgatggggataaaatgttgcagtggcttccctctctggggcccatacctggaagaagcaatcccaggtttgcttcgtatctgcaggtctagagacatcaatggaggcagcaattggagatctcagtgtgtttccagggtctctgactcaactagagggcatccaaggcctggtggagcctgtgcaggcctgagcttcctcgtggagcagcaggtaggcagctcattcccagggacctggtcatccttcctaccataggagccacctgccaaagcccacccagaggaatcccgagcgttcacaaatggaggcgccctcaccaaagccactggaccagcctgtccctgagaagagacacagaggggcttcagcaatgagaagaagaaaaccaatttcttttggctttttagcagagatgctccatgtcttggctgtcagagaaattgagcttacaaattgccctcaccctgaacccaacttggcaacggggaagatgacctggttgaggtctagttctggcttttgtgaatcgaaccgtgtgacgtagaacagcacagcatcaggccaggaaggcgcctgatgagaccgtgttctcagcctgagagcgcgctcaagggcaggtgggagatggagccttctcagagctcagccactggctcttgggctcccaggttcatccctcaaggagctggggacctgagggctcagggcccacctctggctgcctgggggaagtgctgccagtctggtgtggaaagggtccaagtcagaggcctttgcctccccccttcctccagcagggccaataagagaagtaatggctcaaaagaacgttgccccagcgctttcaagtaggtgagtggaccaaacccctgcatgcttttcaggc

SEQ ID NO: 3512 - DNA, 427 bp, Homo sapiens
agtacctttatgatttcatttccttctttatccatctggtattcattttgacaaatggtgtgagctgggaaataacgtgtattatttatttatttatttcccggatggttactcaattctttcatcactgttaaaaagcacgtatttgtgtgtgtgtgtgtgtgtgtgtgtgtgtgtgtgtgtaactattcctaaagtgaacatcttgaacagctggacactgaaggtaacgcagctctagactttgggtcatcattagaaataccagcttaacaggcagaaatatcagcttaacaggcagatgtgggcactttctaacagatgtgagcttttgaattcaaacggattgacattttgacattcaaatccagctttgcaggctcactgctgggtgccaactttgaggcaaaccaatggttcccccctg

SEQ ID NO: 3513 - DNA, 1849 bp, Homo sapiens
gcaaccgcattcttttttttttttttttttttttgatgtaacatttgttattttattggaaaaagctggtattaacatatttatagttttattcaacaattgttttaatttgtgagacatcatagttttaaaagtatgcacctatgagttacagagtccaaactgatctgtgctgacaaacttgaccaccatgtatcccacaccaccacccccaccaccaccaccaccaacagctttgttcctaagagaagagcttaatttaaaaccaaacccaaaaaacccccaacaacttcacaatgactatgtgaacgcccgtacattcgagagtaccaggaaatgtaagcagagccaggatgcaagtctgtgactattacactggtccttccaccgtttctgggttttggtccctcccctcgacaaccttttcttaacacacatttggtctttcacaatttggcctttggacatcattaattttccagggatccagagacatacttttcttcaaagaagatcttttcctttcttttttcttctttttggtttggtacccaaagtttaaaacagaagtaaggaactaggaactgtattaagacctccttttgaaggacatgtaagatttgtactttgaagatggtaaatgttaaatctatgatgtgacagtaacctctagctgcaaatacaagtttcttctcttaacatttgactcacaaagggagatggatcgtagcaaatatccaagtaatgggtaaggccctcagagctgggttttggctttaacacgctatctatacaattgaccacattctcgaacctctttacaagggggaaaaaagtaatccaatcctttgattgttaaatttaattagaatagatatgtacatataatactgtccaggtcaactggattttatagtgatatataaacaaacattcttcattcacgttgattaaaaaaaaaatcaatgatccatttccctgtgtaaatgttatatggccagaagtgagtacacatgcactttgtgcttttacacacacaaaagtatactgtaatccactgagaataacctcagctgggtctgtttcctgggttatgttatatcttgtaaaaaacaaaacaaaacaaaaccaaaaaaaaaagtttggatttggctgggtctctgctccccactttctgaatcaaaatgccaaactacgtggctctgctgcaagtccatgagcaaagacgactcagaggggtgggcaggtttggtatcaccagaacaggagcatctaccatggaaacaccaccttctctgtggccctcaatgtcaagaggggcaagagttcccgagggatgtgccctctgggactgtgtggtccttaaaagtaaaggtatcctaaaatggtcagaacatgcaatttcctttcaaaggcagttcaagtgcattggctcaaggagggtgcaagccccaggatgaagtggagtcctggggagggccgcactcctgaagccaccaagcagagcgaggagctccggggggtcttctctgtcttccatcctgcgtctcagttctcccggacccttgtcgtcgccaagtctgccatgtcctacttcacaagacagaggcattcctttccaaaccttccatttgaatgtcgctctaacatgagccgcccacgagatggactggagagaaccttgtgtgaagacccggacgggttcctgacaccactgcacggcacctgccatgggtgacctgtgcatccgctcagagcctcagcttcttctcgtggacagaggggatcctaagggttcccgcatatccccagcatccagcccagagcctggcacgcttcgagaagttcc

SEQ ID NO: 3514 - DNA, 557 bp, Homo sapiens
  SIMILAR (24)..(449): 1001254mologous to Homo sapiens alpha globin,accession number V00488,Smith-Waterman Score=733.
  misc_feature (1)...(557): n = a,t,c or g
cacagactcagagagaacccaccatggtgctgtctcctgccgacaagaccaacgtcaaggccgcctggggtaaggtcggcgcgcacgctggcgagtatggtgcggaggccctggagaggatgttcctgtccttccccaccaccaagacctacttcccgcacttcgacctgagccacggctctgcccaggttaagggccacggcaagaaggtggccgacgcgctgaccaacgccgtggcgcacgtggacgacatgcccaacgcgctgtccgccctgagcgacctgcacgcgcacaagcttcgggtggacccggtcaacttcaagctcctaagccactgcctgctggtgaccctggccgcccacctccccgccgagttcacccctgcggtgcacgcctccctggacaagttcctggcttctgtgagcaccgtgctgacctccaaataccgttaagctggagcctcggtggccatgcttcttgccccttgggcctccccccagcccctcctccccttcctgcacccgtacccncgtggtctttgaataaagctgatgggc

SEQ ID NO: 3515 - DNA, 732 bp, Homo sapiens
  SIMILAR (84)..(320): 961254mologous to Homo sapiens Human transport protein TPPT- 18,accession number AAB60098,Smith-Waterman Score=408.
ctacttggtctcctgctttcgcgacatggccttcaattttggggctccctcgggcacctccggtaccgctgcagccaccgcggcccccggctgggtttggaggatttgggacaacatctacaactgcaggttctgcattcagcttttctgccccaactaacacaggcactactggactctttggtggtactcagaacaaaggttttggatttggtactggttttggcacaacaacgggaactagtactggtttaggtactggtttgggaactggactgggatttggaggatttaatacacagcagcagcagcaaactagcagtaggttatagttgcatgcccagtaataaagatgaagatgggctagtggttttagttttcaacaaaaaagaaacagagattcgaagccaacaacaacagttggtagaatcattgcataaagttttgggaggaaaccagacccttactgtaaatgtagagggcactaaaacattgccagaatgatcagacagaagttgttatttatgttgttgagcgttcgccaaatggtacttcaagaagagttccagctacaacgctatatgcccattttgaacaagccaatataaaaacacaattgcagcaacttggtgtaaccctttctatgactagaacagaactttctcctgcacagatcaaacagcttttacagaatcctcctgctggtatgtttctagaatcacagagttcaaa

SEQ ID NO: 3516 - DNA, 669 bp, Homo sapiens
  SIMILAR (59)..(442): 521254mologous to Homo sapiens Protein sequence of the di- alpha haemoglobin gene contained in pSS1,accession number AAW54282,Smith-Waterman Score=228.
  misc_feature (1)...(669): n = a,t,c or g
atcgagaccatattccatgtggnggaattccacagactcagagagaacccacccatggttgctgtctcctgccgacaaagaccaacgtcaaggcccgcctgggggtaaggtcggcgcgcacgctggcgagtatggtgcggaggccctggagaggatgttcctgtccttccccaccaccaaagacttacttcccgcacttcgaccctgagccacgggttttgcccaggttaaagggccacggcaaagaaggtggccgaacgcgctgaccaaagccgtggcgcacgtgggacgacatgcccaaacggcgctgtccgccctgaagcgacctgcacgcgcacaagctttcgggtgggacccggttcaactttcaagctcctaaagccacttgccttgcttgggtgaaccttgggccgcccaccttccccggccgagtttcaacccctggcggttgcaacgtcttccctggggacaaagtttcctgggctttctgttgaagcaccgttgcttgaaccttccaaatacccgttaaagcttggaagccttcggttggccattgtttttttgcccctttgggcttccccccagcccctcctcccctttcctgcacccgtacccccgtggtctttgaaataaagtcttgagtgggcggcaaaaaaaaaaaaaaaaaaa

SEQ ID NO: 3517 - DNA, 1633 bp, Homo sapiens
  SIMILAR (525)..(596): 1001254mologous to Homo sapiens Amino acid sequence of human CuZn superoxide dismutase,accession number AAR05283,Smith-Waterman Score=139.
  misc_feature (1)...(1633): n = a,t,c or g
atggcgacgaaggycgtgtgcgtgctgaagggcgacggcccagtgcagggcatcatcaatttcgagcagaaggcaagggctgggacgggaggcttgtggttgcgaggccgctcccgacccgctcgtccccccgcgaccctttgcatggacgggtcgcccgccagggcctagagcaggttaagcagcttgctggaggttcactggctagaaagtggtcagcctgggatttggacacagatttttccactcccaagtctggctgctttttacttcactgtgaggggtaaaggtaaatcagctgttttctttgttcagaaactctctccaactttgcacttttcttaaaggaaagtaatggaccagtgaaggtgtggggaagcattaaangatgactgaarrcctgcrtggattccatgttcatgagtttggagataatacagcaggtcgggtgttgtgtttctttttagaatgtatttgggaactttaattcataatttagcttttttttcttcttcttataaataggctgtaccagtgcaggtcctcactttaatcctctatccagaaaacacggtgggccaaaggatgaagagaggtaacaagatgcttaactcttgtaataatggccgatcatggttctggagttcatatggtatactacttgtaaatatgtgctaagataattccgtgtttcccccacctttgcttttgaacttgctgactcatctaaaccctgctcccaaatgctggaatgcttttacttcctgggcttaaaggaattgacaaatgggcacttaaaacgatttggttttgtagcatttgattgaatatagaactaatacaagtgccaaaggggaactaatacaggaaatgttcatgaacagtactgtcaaccactagcaaaatcaatcatcattgtacttctgaaatcaggtgcagccccatctttcttcccagagcattagtgtgtagacgtgaagccttgtttgaagagctgtatttagaatgcctagctacttgtttgcaaatttgtgtcctactcagtcaagttttaatttagctcatgaactaccttgatgtttagtggcatcagccctaatccatctgatgctttttcattattaggcatgttggagacttggcaatgtgactgctgacaaagatktgtggccgatgtgtctattgragattctgtgatctcatctcaggagaccattgcatcaytggccgcacactggtggtaagttttcataaaaggatatgcataaaacttcttctaacatacagtcatgtatcttttcactttgattgttagtcgcggtttctaagatccagataaactgtgaaaaagctttgagtagtagtttctacttttaaactactaaatattagtatatctctctactaggattaatgttatttttctaatattatgaggttcttaaacatcttttgggtattgttgggaggaggtagtgattacttgacagcccaaagttatcttcttaaaattttttacaggtccatgaaaaagcagatgacttgggcaaaggtggaaatgaagaaagtacaaagacaggaaacgatggaagtcgttygrcttgtggtgtaattgggatcgcccaataaacat

SEQ ID NO: 3518 - DNA, 854 bp, Homo sapiens
  SIMILAR (532)..(759): 1001254mologous to Homo sapiens Human superoxide dismutase coding sequence in plasmid pYLBC-A/G-SOD,accession number AAT65097,Smith-Waterman Score=385.
ttttttggttttgtagcagttagggaatattgaactaatacaagtgccaaaggggaactaatacaggaaatgtcatgaacagtattgtcaaccactagcaaaatcaatcatcattgtgaaacataggaagcttctgtagataaaaaaaaaaattgatactgaaaactagtcgagactccatttatatgtgtatgttttctgaaagcctttcagaaaaatattaaatttaaggacaagatttttatatcagaggccttgggacatagctttgttagctatgccagtaattaacaggcataactcagtaactgagagtttaccctttggtacttctgaaatcaggtgcagccccatctttcttcccagagcattagtgtgtagacgtgaagccttgtttgaagagctgtatttagaatgcctagctacttgtttgcaaatttgtgtctactcagtcaagttttaatttagctcatgaactaccttgatgtttagtggcatcagccctaatccatctgatgctttttcattattaggcatgttggagacttgggcaatgtgactgctgacaaagatggtgtggccgatgtgtctattgaagattctgtgatctcactctcaggagaccattgcatcattggccgcacactggtggtccatgaaaaagcagatgacttgggcaaaggtggaaatgaagaaagtacaaagacaggaaacgctggaagtcgtttggcttgtggtgtaattgggatcgcccaataaacattcccttggatgtagtctgaggccccttaactcatctgttatcctgctagctgtagaaatgtatcctgataaacattaaacactgtaatctt

SEQ ID NO: 3519 - DNA, 1044 bp, Homo sapiens
  SIMILAR (153)..(665): 361254mologous to Cavia porcellus copper-zinc superoxide dismutase,accession number U39844,Smith-Waterman Score=157.
tttggggccagagtgggcgaggcgcggaggtctggcctataaagtagtcgcggagacggggtgctggtttgcgtcgtagtctcctgcagcgtctgggggtttcccgttgcagtccctcgaacccaggaccctcggccgtggcctaagcgattttggcgaccgaagccctgtgtgcgtgttgaaaggccgacggcccaagtgcaggggcatcatcaatttccgagcagaagtgcagggaaagtaatggacccagtaaaggtttggggaagccattaaagggactgacctgaaaggccctgcatggattcccatgtccatggagtttggaagataatacagcaaggctgtaccaagtgcagggtcctcacttttaatcctctatcccagaaaacaacggtgggcccaaaaggatgaagagagccattgttgagaccttggccaatgtgactgcttgacaaagaatggtgtggccgatgtgtctatttgaagattttgtgaatctcactcttcagggagacccattgcatccattggcccgcacactggtggtcccatggaaaaagccagatgaccttgggccaaaggtgggaaatgaaagaaagttcaaagaccagggaacgctgggaagtccgtttggccttgtggtgtaaattgggatcgcccgaataaacattccccttggatgtagtctgaggccccctaaactcatctgtgtatcctgctagctgtagaaaatgtatcctgataaacattaaacactgtaatcttaaaagtgtaattggggtacctttttcaaagttgctttaaagtacctgtagtgagaaactgatttactgatcacttggaagatttgtatagttttataaaactcgagttaaaatgtctgtttcaatgacctgtattttgccagacttaaatcacagatgggtattaaacttgtcagaatttctttgtcattcaagcctgtgaataaaaaccctgtatggcacttattatgaggctattaaaagaatccaaattcaacctaaaaaaaaaaaaaaaaaa

SEQ ID NO: 3520 - DNA, 1742 bp, Homo sapiens
  SIMILAR (380)..(541): 701254mologous to Homo sapiens Human secreted protein, SEQ ID NO: 5264,accession number AAG01183,Smith-Waterman Score=202.
agatcgtcagtgcctgagaaagaacattgacttactctatatcaattgaggggaaagcgcagtaccgtcatcttcaatgccttgtaagcataaaagagaataggctgcccatataagtcaaaggaaaatgagcccaggccttgctatgaagcagtgtgtgaatggacaatgttgaatgaatgtctggctcagtgatggagagccaggttcatctttgaaatctagggctctctcactcatgaagcagactcctagtcctggagtgactgtgtacgagagcgttggttgtgggtgctgtatgtgaaccgcatgcaagcttgatttcaccttcagggggctgataacctagtaaatcatcaaaatgagatcataagtgttaatgtacactggacatgaaaacaaagactggtttagcagcagacattggtttactctgcagcctgtgttatctgtttcccccatttccacctcctttcccccaacccaatccttttttttttcttttttgcttttcttttctttttttttagtttttatttactttacctagtatgcctttttttagttgcttctcaagtcagaaaacttttcacggaacggtttcccctgtgcatttgcaccaagatgaatgtttgatgctaatgaaaagctttccatatcatcaaaactaatttgtgtaggatttttgccatgaaaaaaaatccataaatttccccctcaaaataggactgtgttggcaggtacacaagttgcccctaatagtataaaaacagtaaaatgtgccttaaaaggcccatcccttttccattttccagagataacataaagatctttgccatgaggtaaatcctacagcatagttcatttttagattttgttgagtcctgtaaagaagaagaagaaaaaagtttcagttgtggtagaataccgtgctgtgtttaaatgttacttgttttcaaactttgttttctatgaaaatgatatggaaacttctaaaatggaatttggtgcatatgtactgctgaataaagaccgatgaagaggtttgagtagatgtacaaatcaagtaatggtttgaacacctttaataatatgcctaatctgttcaattgttttaggaatctttttatcttaggatgtagggccagccctggaaccaatctatttggagcccactttagggggaggaaactttgtatttttttaaaacttgcccttaaagttatggccagtgggggtttttattaattgggggataataccctcagttttgagggttatgcacactaaattaaatgtgaccataaattaatttgtaccaaaaaagaacccctttataagggtgggctcattgtaggggaaatccctgtgcccttccccctttgagccacaagtgttggccatgaaccaaccagtttggcctataagaaaccataccccagattaggcccacccttagccatcctatatcctaccttgtgtttaaaaatccaactggtaattcctgaaacactgtagaatggataaaaattattttgtgatcataactctttgttgaactagagtatttttggcagcattccttgtcatcagaaacatggttaaagtttaaaactagaagcagcagaaaactagcttgtaaaatttatccaagtagagtgcaggcttaggctgtcttggggaaataaacattaaaacttaaaaaaaaaaaaaaaaaaaaaaaactcgagggggggcccggt

SEQ ID NO: 3521 - DNA, 615 bp, Homo sapiens
  SIMILAR (2)..(361): 871254mologous to Homo sapiens Human secreted protein, SEQ ID NO: 5477,accession number AAG01396,Smith-Waterman Score=541.
aatggctggtaagcaggccgtttcagcatcaggcaagtggctgatgggtattcgaaaatggtattacaatgctgcagaattcaataaactggggttaatgcgagatgatacaatatacgaggatgaagatgtaaaagaagccataagaagacttcctgagaacctttataatgacaggatgtttcgcattaagagggcactggacctgaacttgaagcatcagatcttgcctaaagagcagtggaccaaatatgaagaggtctttgctgttccagctctgcactctgcttcctacttagatgaaaagatcagcccattgagtgtccctccagatcccaagaagagcttctgtgaagcaaactctcacccctttgaactgcattcgaaacctaggcaaaggaaaatttctaccttgaaccgtatctgaaaggaggttattcgggaaagaaaagaaagagaagaatgggcaaagaagtaatcatgtagttgaagtctgtggatgcagctgttatgaagatggttaaacttgaaacaaacaattttaagaattatttggtctgaagatgttttactttaaataaatgtctattgtaatggaaaaaaaaaaaaaaaaaa

SEQ ID NO: 3522 - DNA, 522 bp, Homo sapiens
agaagagcttctgtgaagcaaactctcaccccttgaactgcattgaaactaggcaaaggcctgtggacattcatttctttttcttcccgaaaagacctccccccccctcataccccttcaaagccaaccctatccacacccctcaccccacagatttgaccattttaaaaagcagatagtcccttaggttgaagaatatgttttcctaaaattggaaattccaaaagtaattgccttttttccttgttattgaagaccctgttgagtgtttgggatatatcagtacgtgatggtaacatataatatttcattcattctttaggaaaatttctaccttgaaccgtatctgaaagaggttattcgggaaagaaaagaaagagaagaatgggcaaagaagtaatcatgtagttgaagtctgtggatgcagctgttatgaagatggttaaacttgaaacaaacaattttaagaattatttggtctgaagatgttttactttaaataaatgtctattgtaatggcaa

SEQ ID NO: 3523 - DNA, 900 bp, Homo sapiens
  SIMILAR (52)..(396): 391254mologous to Homo sapiens ubiquinone-binding protein (QP),accession number M26730,Smith-Waterman Score=150.
gcggccgcctactactactaaattcgcggccgctcgacaaatggctggtaagcaggccgtttaaagcacacaggcaaaggggttgaatggtttttcaaaaaatggtattaccaatgctgccaggattcaaaataaactggggttaatgccgagatgatacaatataccgaggatgaagatgtaaaaagaagcccataagaagacttccctgagaacctttataatgacaggatgtttcgccattaagaggggcactggaccctgaacttgaagcgatcagatcttgcctaaagagcagtggaccaatttttgaagagaaaaatttctacacttgaaccgtatctgaaagagggttattccgggaaagaaaagaaagagaacgaatgggcaaagaagtaatcatgtaagttgaagtctgtgggatgcagctgttattgaagatggttaaactttgaaaccaaacaatttttaagaaattatttgggtcttaagatggttttactttaaataaatgtcccattgtaatgggctggaggttttgaattccaaaccttatactgaataactactgaatccctttactgttaaatttttttccaaactttcaagatatatttagttgtgtttaactgctacttggagctcagaagccactttatcagttttcctcactggttggatagcctatcagtttatggaaggatataacttccgtaagttacatccttatggaagctactgaataaaagaagggggtatgcaccccctagtttgccaagattgagaaatagcctcttcactggtatgcaaacagatttgattttgcatcctatcatttaaaaaaaaattatgtctgcaccccaacataggcatacttaagtaatatacatactcctgtgc

SEQ ID NO: 3524 - DNA, 314 bp, Homo sapiens
  SIMILAR (3)..(314): 1001254mologous to Homo sapiens fragile X mental retardation syndrome protein,accession number L29074,Smith-Waterman Score=551.
atgccactgttcttttggattatcacctgaactatttaaaggaagtagaccagttgcgtttggagagattacaaattgatgagcagttgcgacagattggagctagttctagaccaccaccaaatcgtacagataaggaaaaaagctatgtgactgatgatggtcaaggaatgggtcgaggtagtagaccttacagaaatagggggcacggcagacgcggtcctggatatacttcagaatctgaccacagagacgaactcagtgattggtcattagctccaacagaggaagagagggagagcttcctgcgcaga

SEQ ID NO: 3525 - DNA, 340 bp, Homo sapiens
  SIMILAR (338)..(297): 851254mologous to Rattus norvegicus SH3 domain binding protein,accession number U25281,Smith-Waterman Score=82.
ctaggggtcgggcacgtctgccaaggcttttcgatcaatttgggggcccttgccgccggtacaccggcatggttccccacgttcctcggtccaacgggaggccccggtcttggcactggcgaacccagggtgtacatacggaacaaggttgctaacacgggggttcccggggctcccgggccttccattgggggggtaaccgcccctgctactgactactgccatcgtatagcgccgattttggcggcgcggcggcggcggcggcggcggcggcggcggcggcggcggcggcggcggggcggcggcggcggcgtcgccggcggcggcggcggcggcggcg

SEQ ID NO: 3526 - DNA, 681 bp, Homo sapiens
  SIMILAR (392)..(556): 871254mologous to Homo sapiens Human transport protein TPPT- 18,accession number AAB60098,Smith-Waterman Score=237.
  misc_feature (1)...(681): n = a,t,c or g
ggcacgagaggggagcgcgctgcgcgtcgcaggagtaacctacttggtctcctgctttcgcgacatggccttcaattttggggctccctcgggcacctgcggtaccgctgcagccaccgcggcccccgcggnaacacattcttgttgtttggaggtgggtttggaggatttgggacaacatctacaactgcaggttctgcgttcagcttttctgccccaactaacacaggcactactggactctttggtggtactcagaacaaaggttttggatttggtactggttttggcacaacaacgggaactagtactggtttaggtactggtttgggaactggactgggatttggaggatttaatacacaacagcagcagcagcaaactacattaaggtggtctcttcagtcagcctacacaagctcctacccagtccaaccagctgataaatactgcgagtgctctttctgctccaacgctgttgggagatgagagagatgctattttggcaaaatggaatcaactgcaaggccttttggggaacaggaaaagggtatttcaacaataatattccgccagtggaattcacacaagaaaatcccttttgccgatttaaggcagtaggttatagttgcatgcccagtaataaagatgaagatgggctagtggttttagttttcaaaa

SEQ ID NO: 3527 - DNA, 543 bp, Homo sapiens
ttaagcagaatggaaagactaagatcgtttaacaataacaactttttttttctttttttcttttgttttttgaagtgtgggggtttggttttgttttttgagtcttttttttttaagtgaaatttattgaggaaaaatatgtgaaggaccttcactctaagatgttatatttttcttaaaaagtaactcctagtaggggtaccactgaatctgtacagagccgtaaaaactgaagttctgcctctgatgtattttgtgagtttgtttctttgaattttcattttacagttacttttccttgcatacaaacaagcatataaaatggcaacaaactgcacatgatttcacaaatattaaaaagtcttttaaaatactgtagataattaaccaaggtagaatgaccttgtaatgtaactgctcttgggcaatattctctgtacatattagcgacaacagattggattttatgttgacatttgtttggttatagtgcaatatattttgtatgcaagcagtttcaataaagtttgatcttcctctgct

SEQ ID NO: 3528 - DNA, 3772 bp, Homo sapiens
  SIMILAR (1694)..(1972): 861254mologous to Homo sapiens FMR1,accession number M67468,Smith-Waterman Score=413.
gacggaggcgcccgtgccagggggcgtgcggcagcgcggcggcggcggcggccgcggcggcggcggaggcggcggcggcggcggcggcggcggcggaggcggcggcggcggcggcggcggcggcggctgggcctcgagcgcccgcagcccacctctcgggggcgggctcccggcgctagcagggctgaagagaagatggaggagctggtggtggaagtgcggggctccaatggcgctttctacaaggcatttgtaaaggatgttcatgaagattcaataacagttgcatttgaaaacaactggcagcctgataggcagattccatttcatgatgtcagattcccacctcctgtaggttataataaagatataaatgaaagtgatgaagttgaggtgtattccagagcaaatgaaaaagagccttgctgttggtggttagctaaagtgaggatgataaagggtgagttttatgtgatagaatatgcagcatgtgatgcaacttacaatgaaattgtcacaattgaacgtctaagatctgttaatcccaacaaacctgccacaaaagatactttccataagatcaagctggatgtgccagaagacttacggcaaatgtgtgccaaagaggcggcacataaggattttaaaaaggcagttggtgccttttctgtaacttatgatccagaaaattatcagcttgtcattttgtccatcaatgaagtcacctcaaagcgagcacatatgctgattgacatgcactttcggagtctgcgcactaagttgtctctgataatgagaaatgaagaagctagtaagcagctggagagttcaaggcagcttgcctcgagatttcatgaacagtttatcgtaagagaagatctgatgggtctagctattggtactcatggtgctaatattcagcaagctagaaaagtacctggggtcactgctattgatctagatgaagatacctgcacatttcatatttatggagaggatcaggatgcagtgaaaaaagctagaagctttctcgaatttgctgaagatgtaatacaagttccaaggaacttagtagtaataggaaaaaatggaaagctgattcaggagattgtggacaagtcaggagttgtgagggtgaggattgaggctgaaaatgagaaaaatgttccacaagaagaggaaattatgccaccaaattcccttccttccaataattcaagggttggacctaatgccccagaagaaaaaaaacatttagatataaaggaaaacagcacccatttttctcaacctaacagtacaaaagtccagaggggtatggtaccatttgtttttgtgggaacaaaggacagcatcgctaatgccactgttcttttggattatcacctgaactatttaaaggaagtagaccagttgcgtttggagagattacaaattgatgagcagttgcgacagattggagctagttctagaccaccaccaaatcgtacagataaggaaaaaagctatgtgactgatgatggtcaaggaatgggtcgaggtagtagaccttacagaaatagggggcacggcagacgcggtcctggatatacttcaggaactaattctgaagcatcaaatgcttctgaaacagaatctgaccacagagacgaactcagtgattggtcattagctccaacagaggaagagagggagagcttcctgcgcagaggagacggacggcggcgtggagggggaggaaaagggacaaggaggaagaggacgtggaggaggcttcaaaggaaacgacgatcactcccgaacagataatcgtccacgtaatccaagagaggctaaaggaagaacaacagatggatcccttcagaatacctccagtgaaggtagtcggctgcgcacgggtaaagatcgtaaccagaagaaagagaagccagacagcgtggatggtcagcaaccactcgtgaatggagtaccctaaactgcataattctgaagttatatttcctataccatttccgtaattcttattccatattagaaaactttgttaggccaaagacaaatagtaggcaagatggcacagggcatgaaatgaacacaaattatgctaagaattttttattttttggtattggccataagcaacaattttcagatttgcacaaaaagataccttaaaatttgaaacattgcttttaaaactacttagcacttcagggcagattttagttttattttctaaagtactgagcagtgatattctttgttaatttggaccattttcctgcattgggtgatcattcaccagtacattctcagtttttcttaatatatagcatttatggtaatcatattagacttctgttttcaatctcgtatagaagtcttcatgaaatgctatgtcatttcatgtcctgtgtcagtttatgttttggtccacttttccagtattttagtggaccctgaaatgtgtgtgatgtgacatttgtcattttcattagcaaaaaaagttgtatgatctgtgccttttttatatcttggcaggtaggaatattatatttggatgcagagttcagggaagataagttggaaacactaaatgttaaagatgtagcaaaccctgtcaaacattagtactttatagaagaatgcatgctttccatatttttttccttacataaacatcaggttaggcagtataaagaataggacttgtttttgtttttgttttgttgcactgaagtttgataaatagtgttattgagagagatgtgtaatttttctgtatagacaggagaagaaagaactatcttcatctgagagaggctaaaatgttttcagctaggaacaaatcttcctggtccaaagttagtaggatatgcctgctctttggcctgatgaccaattttaacttagagcttttttttttaattttgtctgccccaagttttgtgaaatttttcatattttaatttcaagcttattttggagagataggaaggtcatttccatgtatgcataataatcctgcaaagtacaggtactttgtctaagaaacattggaagcaggttaaatgttttgtaaactttgaaatatatggtctaatgtttaagcagaattggaaaagactacagatcggttaacaaataacaacttttttttctttttttcttttggtctttgaagtgctggggtttggctttgatatttgagtcttttttttttaagtgaaatttattgaggaaaaatatgtgaaggaccttcactctaagatgttatatttttcttaaaaagtaactcctagtaggggtaccactgaatctgtacagagccgtaaaaactgaagttctgcctctgatgtattttgtgagtttgtttctttgaattttcattttacagttacttttccttgcatacaaacaagcatataaaatggcaacaaactgcacatgatttcacaaatattaaaaagtcttttaaaaagtattgccaaacattaatgttgatttctaggttatttaatccggggtatgtaatagtattttttatacagaaaattggtaccttccacacatcatctgtaagctgtttggttttaaaacactgtagataattaaccaaggtagaatgaccttgtaatgtaactgctcttgggcaatattctctttacatattagcgacaacagattggattttatgttgacatttgtttggttatagtgcaatatattttgtatgcaagcagtttcaataaagtttgatcttcctctgcta

SEQ ID NO: 3529 - DNA, 4440 bp, Homo sapiens
  SIMILAR (220)..(2115): 1001254mologous to Homo sapiens FMR1,accession number S65791,Smith-Waterman Score=3304.
acggcgagcgcgggcggcggcggtgacggaggcgccgctgccagggggcgtgcggcagcgcggcggcggcggcggcggcggcggcggcggaggcggcggcggcggcggcggcggcggcggaggcggcggcggcggcggcggcggcggcggctgggcctcgagcgcccgcagcccacctctcgggggcgggctcccggcgctagcagggctgaagagaagatggaggagctggtggtggaagtgcggggctccaatggcgctttctacaaggcatttgtaaaggatgttcatgaagattcaataacagttgcatttgaaaacaactggcagcctgataggcagattccatttcatgatgtcagattcccacctcctgtaggttataataaagatataaatgaaagtgatgaagttgaggtgtattccagagcaaatgaaaaagagccttgctgttggtggttagctaaagtgaggatgataaagggtgagttttatgtgatagaatatgcagcatgtgatgcaacttacaatgaaattgtcacaattgaacgtctaagatctgttaatcccaacaaacctgccacaaaagatactttccataagatcaagctggatgtgccagaagacttacggcaaatgtgtgccaaagaggcggcacataaggattttaaaaaggcagttggtgccttttctgtaacttatgatccagaaaattatcagcttgtcattttgtccatcaatgaagtcacctcaaagcgagcacatatgctgattgacatgcactttcggagtctgcgcactaagttgtctctgataatgagaaatgaagaagctagtaagcagctggagagttcaaggcagcttgcctcgagatttcatgaacagtttatcgtaagagaagatctgatgggtctagctattggtactcatggtgctaatattcagcaagctagaaaagtacctggggtcactgctattgatctagatgaagatacctgcacatttcatatttatggagaggatcaggatgcagtgaaaaaagctagaagctttctcgaatttgctgaagatgtaatacaagttccaaggaacttagtaggcaaagtaataggaaaaaatggaaagctgattcaggagattgtggacaagtcaggagttgtgagggtgaggattgaggctgaaaatgagaaaaatgttccacaagaagaggaaattatgccaccaaattcccttccttccaataattcaagggttggacctaatgccccagaagaaaaaaaacatttagatataaaggaaaacagcacccatttttctcaacctaacagtacaaaagtccagagggtgttagtggcttcatcagttgtagcaggggaatcccagaaacctgaactcaaggcttggcagggtatggtaccatttgtttttgtgggaacaaaggacagcatcgctaatgccactgttcttttggattatcacctgaactatttaaaggaagtagaccagttgcgtttggagagattacaaattgatgagcagttgcgacagattggagctagttctagaccaccaccaaatcgtacagataaggaaaaaagctatgtgactgatgatggtcaaggaatgggtcgaggtagtagaccttacagaaatagggggcacggcagacgcggtcctggatatacttcaggaactaattctgaagcatcaaatgcttctgaaacagaatctgaccacagagacgaactcagtgattggtcattagctccaacagaggaagagagggagagcttcctgcgcagaggagacggacggcggcgtggagggggaggaagaggacaaggaggaagaggacgtggaggaggcttcaaaggaaacgacgatcactcccgaacagataatcgtccacgtaatccaagagaggctaaaggaagaacaacagatggatcccttcagatcagagttgactgcaataatgaaaggagtgtccacactaaaacattacagaatacctccagtgaaggtagtcggctgcgcacgggtaaagatcgtaaccagaagaaagagaagccagacagcgtggatggtcagcaaccactcgtgaatggagtaccctaaactgcataattctgaagttatatttcctataccatttccgtaattcttattccatattagaaaactttgttaggccaaagacaaatagtaggcaagatggcacagggcatgaaatgaacacaaattatgctaagaattttttattttttggtattggccataagcaacaattttcagatttgcacaaaaagataccttaaaatttgaaacattgcttttaaaactacttagcacttcagggcagattttagttttattttctaaagtactgagcagtgatattctttgttaatttggaccattttcctgcattgggtgatcattcaccagtacattctcagtttttcttaatatatagcatttatggtaatcatattagacttctgttttcaatctcgtatagaagtcttcatgaaatgctatgtcatttcatgtcctgtgtcagtttatgttttggtccacttttccagtattttagtggaccctgaaatgtgtgtgatgtgacatttgtcattttcattagcaaaaaaagttgtatgatctgtgccttttttatatcttggcaggtaggaatattatatttggatgcagagttcagggaagataagttggaaacactaaatgttaaagatgtagcaaaccctgtcaaacattagtactttatagaagaatgcatgctttccatatttttttccttacataaacatcaggttaggcagtataaagaataggacttgtttttgtttttgttttgttgcactgaagtttgataaatagtgttattgagagagatgtgtaatttttctgtatagacaggagaagaaagaactatcttcatctgagagaggctaaaatgttttcagctaggaacaaatcttcctggtcgaaagttagtaggatatgcctgctctttggcctgatgaccaattttaacttagagcttttttttttaattttgtctgccccaagttttgggaaatttttcatattttaatttcaagcttattttggagagataggaaggtcatttccatgtatgcataataatcctgcaaagtacaggtactttgtctaaaaaacattggaagcaggttaaatgttttgtaaactttgaaatatatggtctaatgtttaagcagaattggaaaagactaagatcggttaacaaataacaactttttttttcttttttttcttttgttttttgaagtgttggggtttggttttgttttttgagtcttttttttttaagtgaaatttattgaggaaaaatatgtgaaggaccttcactctaagatgttatatttttcttaaaaagtaactcctagtaggggtaccactgaatctgtacagagccgtaaaaactgaagttctgcctctgatgtattttgtgagtttgtttctttgaattttcattttacagtttcttttccttgcatacaaacaagcatataaaatggcaccaacctgcacatgatttcaccataattaaaaagtcttttaaaaagtaatgccaaaccataaatgttgatttctagttatttattctgggaatgtatagtatttgaaaacagaaattggtaccttgcacacatcatctgtaagctgtttggttttaaaatactgtagataattaaccaaggtagaatgaccttgtaatgtaactgctcttgggcaatattctctgtacatattagcgacaaccagattgggatttttatgtgaccattgtttggttatagtgccaatatatttggtatgcaagcaggttccaataaaggtttgatcttcctctgcgtaaattgatgttgatgcaatccttacaaatgattgcttttaaaattttaagctaggaaaagaaatctatagaaagtgtcctgttaccaaaatgtaactgttacccattgggaaatttcacagtcataggaagttagcctttatctacccaactttcaagaaggttctttaataaagcggaaaaactcgaaccaaatgggtacaaaacccacagtgtaccattaaaatatgcactaagtctcttttttacaaaggctgtattcagcaaggcgctaacttgcttaaatgtgaattactaacttctaaaactgtactttgattcacatgttttcaaatggagttggagttcgattcatattacaataatttgtgtgctaaccgatgtatgtttttcaggttcaaagtctatgatgtttttacaaatctatattaaagtttcaaaaattctgaagcattgtttatctagatgtaaatttttatttaaaaagttgcacccatccaaaaagcaaaaaaaaaaaaaaaaaa

SEQ ID NO: 3530 - DNA, 534 bp, Homo sapiens; identical to SEQ ID NO: 1
  SIMILAR (38)..(421): 1001254mologous to Homo sapiens alpha globin,accession number V00489,Smith-Waterman Score=657.

SEQ ID NO: 3531 - DNA, 611 bp, Homo sapiens; identical to SEQ ID NO: 241
  SIMILAR (134)..(454): 961254mologous to Homo sapiens alpha globin,accession number V00488,Smith-Waterman Score=536.

SEQ ID NO: 3532 - DNA, 675 bp, Homo sapiens
  SIMILAR (114)..(194): 701254mologous to Papio cynocephalus anubis alpha-1 globin,accession number X05289,Smith-Waterman Score=97.
  misc_feature (1)...(675): n = a,t,c or g
atcgagaccatattccatgtggnggaattccacagactcagagagaacccaccatggtgcttgtctcctgcccgacaagaccaaagcccaacgccccccgcggctaaagctcggggcgcacgcctggcgagtatggtggcgagcccctggagaggatgttcctgtccttccccaccaccaaagacttacttcccgcacttcgaccttgagccacggtttctgcccaaggttaaagggcccacggcaaagaaggtggccgaacgcgctgaccaaacgccgtggcgcaacgtggacggacatgccccaaacggcgctgtccgcccctgagcggacctgcaacggcgcacaagctttcgggtgggacccggttcaactttcaagctcctaaagccacttgccttgcttgggtgaaccttgggccgcccaccttccccggccgagttcaacccctggcggttgcaaggcttccctggggacaaagtttcctgggctttttgttgaagcaccgttgcttgaaccttccaaattaccgttaaagcttggaagccttcgggttggccattgtttttttgcccctttggggcttccccccagcccctcctccccttcctgcacccgtacccccgtggtctttgaataaagtcttgagtgggcggcaaaaaaaaaaaaaaaaaa

SEQ ID NO: 3533 - DNA, 2043 bp, Homo sapiens
  SIMILAR (1332)..(733): 331254mologous to Escherichia coli ferrichrome-iron receptor precursor,accession number U70214,Smith-Waterman Score=202.
atggaattagatctcagagcatgtggcaagaataagagaaagaacctagaagagtggaaggaagccattttgcccctcatctacaataggcataggttcttgcgtgggaatgggccacgtgtcgctgccgaagacgttatgcagatcgaggcgccccaatccgtgaatcatcctttaggctacaaggtggaaagatcgtgggtgaagagggtaccagacgttgagggcaacggggtacaacgtttgaacggccatctggagaacgaggtgcaagaatggtaccaccaggcacgaggaaacgcagaggattcctgcatggtaggagctcataattgtgcacggagagcacagtatgacgacgatatgacagcgacaacgatgatgaccgaagtcatgtttgcgtcttatctttcgttccttgttcatggtatctgcccgtttaggaggttggaggcgagggactttatgtacctctccctggaggctctcggtgcctccagtgaccccgatgcctcactgccttccggaccccaaaaggatctaagactgctgaccagcatgctgtggaaggccactcggaccagggaaagagaaattagaaaaacatttgatacgacttctagctcggtacccaatgttcgtgtattcctgcataacagccaacttgtgaaatgggcacggaaatcgtgccccaaaagagaaattagaaacggaaggttgcggttgcaacgacctacgttctgcgccccagaagcagccataagtgttaaagcagctggcgacgattcacgatcgaacaggttgttaacatgcagcgccacgttggagccagcatgccgactcgcgccagatcataacgtactaacgcatccacgaccgtatacttcccactttaaaggagttagccggatcaccataactggagccagtaaacgaccaccggtgcccagcgtcagacctgaaagcggaccgtcaaagaagtgtagtcagcccacaacgaagccatgtgttttggcacctgtgcaagcgattgcctttataggtagtatcggtggtgtattccgcatcggtgtaagtaaagaaccgactacgttaacactcgccgacagcgccgatttcgcttcgattctacgccacattaaagaactccagcgcctgctcggcaagaaaacgatgaaaatgaactcctcaaagaagccgttgaatatggacgggcaaaaaagtgatagcgcacgcgcccttattgcccggggatggggattgcacgtcattctcagacgaccgatgactggatggatggccgccgcagtcgtcacactgatgatacggagtgcttctccgtatacaccatgttatcggagagctgccaacgtatggtttcgtcgggtatgggcgctgcttcgcagacaggcagaacttgatggccgcatccttagcactaagttggaagaaatgggctctttggccagcaatgtctccccgccatggctatacctgcaggtgccgggatgttggtttttctcacatgaagtacttccagggtccaccacactgatgactcctgttattggtcagtggacaacagccatgaaatgggaaacactaaaacagcttccctctttccttacacagcctcttggcaaccaaagctcatttccaagggagagcacagatgatgagaataagcaggctgtggctgaggaagtcactggtctgaaagcttttggtgtgtggagtcggttggctggagatggctatatctgtggaaaggatgtggacatcgacagttacccgacgaagaactgccatgctctgccaggaactgtaaaaaggaataaaaaacattctggacaactgcccaaaatttcccaatcgtaccaacgggacaaggatggtgatggtgtgggggatgcctgtgacagttgcctgatgtcagcaaccctaaccaggacagccacactcgggctcttacaatcaggggtcataagctgctatgtcacctacctcaccttccagctctgtccagcaaacctgcagaagtag

SEQ ID NO: 3534 - DNA, 1647 bp, Homo sapiens
  SIMILAR (1328)..(1645): 441254mologous to Plasmid F 100 pct identical to sp:P19777,accession number AP001918,Smith-Waterman Score=165.
atggtgctcatgcctgtagtttcagctattccggaagctgaggcaaagagctccttaattgaaaatgatgtgtgcctaagcgcaaaagagaaccacaagtctaaaagggccataacacggacagcggagaggttcccgactgagttccccacgacacccgcggaaaacagcgcggaccggtctacgacacgcccagcaggcaagcctacacaaattggtcaactccactcgctgctcggatcgcgccagtacctcctgctgctaacccgcagggagttcttctcaaatcggcaggaccgcacctgcttctactcgcccgcactacaacctgcaatcgttaagtcccgattgcgagtccgcaaacaacgcaccgcatggaataaaaatccttttttttacgatttccacggcgaaaccaaaagctcatcagaatcaatgctgccagctaccgaaaataatgaccagattaagcgcattatttgtaaacagctcctccagataattgtcgtcatgccggaacccctggcggggctattttaccgcgacaattcattcagatcatcaatgtcagggaaggaagtagcaacattagctaaggaagtgaattcagcagtaagcgccgtagaccagaaaagagattttcttgtcccgcatggagcagattctgccatgcaaaacatggtggaagtcatcgagccgttttaccccaaggctgaccatcaatcgctggctggccgaagcaggcgtatgatgactcaaggcaccttggtcgatgccaccatcattgaggcacccactcgaccaagaacaaagagcagcaacgcgatccggagatgcatcagaccagaaaggcaatcagtggcactttggcatgaaggcccacattggtgtcgagccaagagtggcctgacccacagcctggtcaccaccgcggccaacgagctgacctcaatcagctgggtaatctgctgcatggagaggagcaatttgtccagccgatgccggctaccaaggggcgccacagcgcgaggagctggccgagtggatgtggactggctgatcgccgagcgccccggcaaggatggacgaaaaatgaaggtgtaccgtgctggcaaacgttgccgccatttttcgcccaatatgccccgattttccatccccatgacgacaactttccctttacaccagaacatcttttcacaggttgtgtttaaagttcccttccgggttcacgtcattctcagacgaaccgatgactggatggatggccgccgcagtctcacactgatgatacggatgtgcttctccgtatacaccatgttatcggaagctgccaacgtatggttatcgtcgggtatgggcgctgcttcgcagacagcagaacttgatggtatgcctgcgatcaatgccaaacgtgtttaccggacatgcgccagaatgcgctgttgcttgagcgaaaacctgctgtaccgccacgaaacgggcacatacaggcagagtggccgtgaaagaaagcaatcagcgtggtgctctgacgggttcgagttctgctgtgataacggagagagactgctgtcacgttcgcgctggactgctgtgatcgtgaggcactgcactgggcgtcactaccggcggcttcaacagtga

SEQ ID NO: 3535 - DNA, 1512 bp, Homo sapiens
  SIMILAR (537)..(602): 771254mologous to Plasmid F 100 pct identical to sp:P19777,accession number AP001918,Smith-Waterman Score=96.
atggggagtaagcttagtcagccgttgtctccgggtgtcgcgtggcagttgcacgtcattctcagacgaaccgatgactggatggatggccgcgcagtcgtcacactgatgatacggatgtgcttctccgtatacaccatgtatcggagagctgccaacgtatggttatcgtcgggtatgggcgctgcttccagacaggcagaacttgatggtatgcctgcgatcaatgccaaacgtgttaccggatcatgcgccagaatgcgctgttgcttgagcgaaaacctgctgtccgccatcgaaacgggcacatacaggcagagtggccgtgaaagaaagcatcagcgatggtgctctgacgggttcgagttctgctgtgataacggagaggactgcgtgtcacgttcgcgctggactgctgtgatcgtgaggcactgcatgggcggtcactaccggcggcttcaacaacgggttaacggcagcaaagaacttgcagaggcgttcgagcattataacgaatggcatccgcatagtgcgcgggttatcgctcgccacgggaatatctgcggcagcgggcttgtaatgggagaggtaccagagaatgctatgcatgatgcaaacatccgcgttgccatcgcgggagccggggggctatgggccgccaggttgattcaggcggcgctggcattagagggcgtgcattgggcgctgcgctggagcgtgaaggatcttctttactgggcagcgacgcggcgttaccgtgcaaagcagctcgatgcggtaaaagatgattttgatgtgtttatcgattttacccgtccgaagcgttgggttaacgtcatgcttaagctgctggagaaagcagccaaagtgatgggtgctacaccgatatcgaaattattgaagcacatcatagacataaagttgatcgccgtcaggcaccgcactggcaatgggagaggcgatcgcccacgccctgataaagatctgaaagattgcgcggtctacagtcgtgaaggccacaccgtgaacgtgtgcctggcaccattggttttgccaccgtgcgtgcaggtggtgtcgatggcgacaaccgccgggtttacaactgacacattgcccgctggccgctctttttgccggtactgcttttatgttcagccttatcggcggttgcgccgggtcaacgggcggtggcctgaaggtgatccgatcctgctgctgtttaagcaggggaacctgacgaaccgacaatacccagcgaatcacgccatgttccaggacaatggattccagcagctctgccgcgtcggaaggtacggcggcaactgcggaatgatcatctcaacgtcagggtcgacggcgttccagcaggcggcgaccattccagtcgagatccagctcctgatgaatatgccgcacagcaagtatttgacgtgcggaaacttcgccagcacggtatccattcgcccgcgttacgcagactgtgttgatcgagccaaactacacccgcagtag

SEQ ID NO: 3536 - DNA, 1134 bp, Homo sapiens
  SIMILAR (672)..(364): 981254mologous to Escherichia coli 37KD protein, similar to YI22-ECOLI,accession number D85613,Smith-Waterman Score=539.
ttatagggccatgtagcttcttaatggtattttctcctctcttttcttcctccgttcgtttgttcggtccttccttcttttctcccttttcgctcccttgtcgttctctctctttcttgttgtggtgtctctctgctttgtgtgtttcgccctcgcttttccccctgcgtttcctcttgctgtgccgtctttctctgtcccttcggtctcctttccttcgtcgctttgtcgtactttcagcgttatcctcgttactgttgagtcgtcggtatatctgaatggagatacgacaatcagcggagaattccctctggggtttaccggggttattcgggtacaggataaagctttgctggaaattggcagtggcgtatgcggatgccattcgttataatgctcgaacgcctctgcaaggttctttgctgccgttaacccgtctggtttgggcatgatactgatgtagtcacgctttatcgttttcacgaagctctctgctattccgttactctccggactccgcaccgccgtgttcttcggttcaagtcccaacatccgggcgaactggcgtgtttcattagcccggtagcatgaaccattatccgtcagccactccactggagacgacggaagatcgttgccgaagcggcgttccaccgctcccagcatgacgtccgtgtactgtttcaactgtgagcgttgtcttgtctcttgttcccttcttttgttgtcttctcttggtcctccttgccttgctgtgcttcttgctcctttctttgctccgttcttctgagtgttcttgctgtgcgtcgtcgtcgctggtctccctgccctccttcttcttctcgtgtcttctctcctctttctcgttctcctctctttctgcgctgcatctgcttgtttcggatttctctctgtctgacgcgtcttgtaactggaactgatagaaggttttgtttctttatcgcttcgcccctcggtgtctctcgcctcgttctgttgggttttggggtctttcgttgcctgccgctgtcttccggttgtctgcggggttcgccgtttggtgttccgctgtgttcggggggttgtttgggttggctgccagtgtgttcccgtcacgggtttcttcctttgcat

SEQ ID NO: 3537 - DNA, 459 bp, Homo sapiens
  SIMILAR (115)..(219): 941254mologous to Bos taurus cleavage and polyadenylation specificity factor 30 kDa subunit,accession number U96448,Smith- Waterman Score=171.
catcgacgtcctctgtacccggccggaattgcccggatgacccgaggcgaccgcacgcgtactggctgcactagaccgaaggggagccgtaccggaggggccgtcggcgccgccatgcaggaaatcatcggcagcgtggaccacatcaagtttgacttggagatcgcggtggagcagcagctgggggcgcagccgctgcccttccccggcatggacagactcctgactcccaggcccccatttccaccgtctggggactccttttaccctcactcggactcaggagttcactgcctcggatctttggccctctgcggctgttcaaagagtcgggcgctgctgtctgtgaattctttttgaaagctgcctgcggcaaagggggcatgtgtccgtttcgccacatcagtggtgagaagacagttgtgtgcaaacactgcttgcgtggactatgcatgaatg

SEQ ID NO: 3538 - DNA, 3530 bp, Homo sapiens
  SIMILAR (1245)..(616): 981254mologous to Escherichia coli 100 pct identical to sp:YI5B_ECOLI,accession number AP002527,Smith-Waterman Score=1079.
ctaggcagtgtggtgatccgggcagtgtgagtgctccaggcagtgtggtggtctgggcagggtgagtagtctaggcagtgtggtgatccgggcagtgtgagtgctccaggcagtgtggtggtccgggtagggtggtagtcttaacagggtgagtggtccgggcagtgtggtggtccgggcagtgtggtggtccgggcagggtgagtggtccggacagtgtggtggttcgggcagtgtgaatgctccaggcagtgtggtggtccgggcagggtgagtggtccggacagtgtggtggttcgggcagtgtgagtgctccaggcagtgtggtggtctgggcagggtgagtagtctaggcagtgtggtgatccgggcagtgtgagtgctccaggcagtgtggtggtccgggtagggtggtagtcttaacagggtgagtggtccgggcagtgtggtggtccgggcagtgtggtggtccgggcaggttgagtgctccggacagtgtggtggttcgggcagtgtggtggtctgggcagtgtggtggtccaggcagggtgagtggtccgggcagtgtggtggtccgggcagtgtggtggtctgcgtagggtgttggtcccagtagggtggtgagccttttaatttcaggctaattcttctgctgtggtagtattcaatatattccgtaacagcatccttcagttcgcttatattactgaactcatcaagataaaaacactccgactttaaggttccaaagaaacactccaccacagcattatccagacaattgccttttctggacatgctttgtttaataccatgttctttaaggatattttgatatcttctcatacgatactgccatccctggtcagagtgcagaacaggatgctcgtgaggattaagctttttgaatgcctgatcgagcatattctcaaccatgttcatcactggtctttccgaaaggctgtaagaaataacttcgttgttgaagagatctattactggagacaaatacagcttgcgcccattgactgcaaattcagtaacatcggtaacccacttctcgtttggccgcgtagccttgaaatctctttggagaacattaggggcggtttgccctacctctcctctgtaagagcggtatcgcttgaccttaatcgctgctttaagtgagagggttcccatcaggcgctgaacagctttatggttaatctgtttcccttctcgatgaagagacagcgttaccctaccggtatccgtatcgggctctattctcgtgataaatctcactaatacgctttttaacgtccgcatacttgtcaagcttggtgagagctttttcgtgggatgagctaaggctttcagcttttttagatacataagccgcgtttcaagaaatcgaacttgcctttcaagatcctcaatgcgtcggtcttttgacagctccaatgctgatgccgctttttctggatcaactgatattgcaatgtttcttttggtgccaatcttgagcgcgcgtaaaccagcttctccgcgctcttcatagaccttcagccacctggctacagaaccactaccagcaagcataaagtgagcagcagcctgattaagggacatgtgctgctcgatcacagctttcacgaccttaatacgcaactctggatcagcactaacgcctttaggtttgggaattaaacctttttctccatgtttttcatagagggcaacccatgtcctgacctgggttcgggggacaccaaaacgtgccgagatgatcctgggatcctctagagtgacctcagcagcaacccccacgaagctctctgctattccgttactctccggactccgcaccgccgtgttcttcggttcaagtcccaacatccgggcgaactggcgtgtttcattagcccggtagcatgaaccattatccgtcagccactccactgctcccagcatgacgtcctgtactgtttcactgttgaagccgccggtagtgaccgcccagtgcagtgcctcacgatcacagcagtccagcgcgaacgtgacacgcagtctctctccgttatcacagcagaactcgaacccgtcagagcaccatcgctgattgctttctttcacggccactctgcctgtatgtgcccgtttcgatggcggtacagcaggttttcgctcaagcaacagcgcattctggcgcatgatccggtaaacacgtttggcattgatcgcaggcataccatcaagttctgcctgtctgcgaagcagcgcccatacccgacgataaccatacgttggcagctctccgataacatggtgtatacggagaagcacatccgtatcatcagtgtgacgactgcggcggccatccatccagtcatcggttcgttccccatccccgggcaataagggcgcgtgcgctatccacttttttgcccgtccatattcaacggcttctttgaggagttcattttccatcgttttcttgccgagcaggcgctggagttctttaatctgcttcatggcggcagcaagttcagaggcaggaacaacctgttctccggcggcgacagcagtaagacttccttcctggtattgcttacgccagagaaataactggctggctgctacaccatgttgccgggcaacgagggagaccgtcatccccggttcaaagctctgctgaacaattgcgatcttttcctgtgtggtacgccgtctgcgtttctccggcccacttcgttgaccatcgggatcatcatgcgggcggataatctcttcttcgctgaaatcgcgcttcggctggctcacttctgccagcaggtcttcaacggcggcgtcttcttctttcttcggcttacctttgctgtcttctttataacgccagaaaccgaggccgttcttctgaccaaagcggttggcatcaaacagcgcgtcgatggcatcgcggtaatctttctgcatccgctgcgggaagcctgctgccatgacagcctgagcgtgatgcgcggtatcaatgcccacaacgtccagcagatatgccgggcccatcggccagccaaactgtttttccatcactttgtcgatcttgcggaaatccgcgccgtcgcgcagcagctggctgaaaccggcgaaatacgggaacagcacgcggttaacaaagaagccggggcagtcgttaaccacaatcggcgtcttgcccatcttgctcgcccaggcgacaactttcgcgatggtttcgtcggagcttttctcgccgcgaataatttctaccaacggcattcggtggaccgggttaaagaagtgcatcccgcagaagttttccgggcgttccagcgcgttggccagttcgctgataggaatggttgaagtgttagacgccagcacggtattccgactgtgcctgtctgtcgtctttttctctgttttcttatccttggttctatcccgcgctgcggttttctgtgtgttggagtccctcttctctgcccgctttcccgctattattgctccttgctgggggtcttgtcgatcgt

SEQ ID NO: 3539 - DNA, 1761 bp, Homo sapiens
  SIMILAR (520)..(1086): 861254mologous to Escherichia coli K12 putative regulator,accession number AE000300,Smith-Waterman Score=822.
atgaagcagattaaagaactccagcgcctgctcggcaagaaaacgatggaaaatgaactcctcaaagaagccgttgaatatggacgggcaaaaaagtggatagcgcacgcgcccttattgcccggggatggggaacgaaccgatgactggatggatggccgccgcagtcgtcacactgatgatacggatgtgcttctccgtatacacccatgttatcggagagctgccaaacgtatggttatccgtcggaacgtggtacctggtgtcccaggcaacgagtgcactaacacgagacctggccgagtgaggcaagaggagtggaacagcctggtggtgacactactggtgagggagtcagcagggtcaacactaagcagcagtaggaggtcagtgcccgccgagcgcaaggctaaaacgcggctcctacagctctgcgaccgtgcccagcgtcgctgctccgcaccagaccccaaagtctgtagtggtttcacgggaggggcggagtttacgccagactcaaatgatctcacgtcacgggatctgacgacacagatcttcgcctggccacaagaagccaaatctgcccgtgctgtcagcggcctgaacatccttaccctgatgaataatgatatggcgctgatacagctgcatcatatatcgcaacgggctaaatcccgccccttacgtgataacgcggcggaatttcttcaggtggtcgcagaaaatcgcgggctaagccaggaagagctagcggacagattagtcccaaccctgggccttgatgatccgcaggcgttgagttttgattttggtccccggcagtttaccgttcgcttcgatgaaaatctcaacccgcaaaacgttcgccagaaaagcgttccccgtttgcgcgccgatgacgatcaactgaaagcgcccgaggcactggcccgactaaaagggctaaaaaaagatgctactcaggtgagcaaaaacctgctcccgcgtcttgaaacggccctacgtaccacccgacgctggtcgctggcagatttcattctctgtttgttaatcatcccttacccgtctgaaatgacagcagaaatgcgcagtgaatttgcacagctttttgccgattacgaaattatgccgccttttcgccagttgtcgcgccgcacggtgctgctcacacctgacgagtcaaccagtaacagcctgactcgctgggaaggtaaatccgctaccgttgggcaacttatgggaatgcgatacaaaggctgggagtcaggctatgaggacgcatttgtctataacctggcgggcagtgatgcaactgcccgttatcaacacgacttaccagcggggaaagcgatgatcgtgcaaaaagagctggttgctatttacgattatgagctgtcgcacctgctgcaatacgctgtggttaacgcgccagtgagacggatactgcccatccagctcttgtggcagcaactgattcagcccggcgagaaactgaaatcgatccggcgagcgatacagcacattggtcagacacagattatcggtatgttcatacagatgccgatcatgatcgcgtacgaaacagaccgtgccaccggtgatggtatagggctgcccattaaacacatgaatacccgtgccatgttcgacaatcacaatttcatgaaaatcatgatgatgttcaggaaaatccgcctgcgggagccggggttctatcgccacggacgcgttaccagacggaaaaaaatccacactatgtaa

SEQ ID NO: 3540 - DNA, 1950 bp, Homo sapiens
  SIMILAR (1311)..(883): 981254mologous to Escherichia coli acetate kinase (EC 2.7.2.1),accession number M22956,Smith-Waterman Score=726.
tcagttgatcgtcatcgcgcgcgccaaaccggggaacgcttttctggcgaacgttttgctgatcaagataaccgggttgagattttcatcgaagcgaacggtaaactgccggggaccaaaatctaaactcaacgcctgcggatcatcaggcccaggttggactaatctgtccttagctcttccggtccggctgatttttttcgccatcaagttctgcctgtctgcgaagcagcgcccatacccgtacggatgaaccccagtaccgcttgggccagtctgcttccggataaccactggtgtataccggacgaagccaccagtccgatatgcactccacgttgtgtaccggacctcgccgtgcgggcccatgccatccgagttcactcggttcgtctgagaatgacgtgcaactgcgcacgcgacacccggagacaacggctgactaagcttactccccatccccttggtttctgccgggcgcgcgacagcagtaagacttccttcctggtattgcttacgccagagaaataactggctggctgctacaccatgttgccgggcaacgagggagaccgtcatccccggttcaaagctctgctgaacaattgcgatcttttcctgtgtgtacgccgtattgcgcgagatccgcggggagttttctccagaagaaccgcccccgccgctaaatccgccgctatctgagcctccagcggaaccgctgttgtctgaatgataacttctaccagatgctcttttcttgcggtttcctgccggacaccgttgccagggggcaggtgtaagttccgttctcacccgtttgtcaccattttcccgcttccttgggtaacatagaagtgcctggtgccgtgcgcgccgtaacggacggatgccgtgctctttgaccaggttgtaagccagcgcgtagaggtaagactcttccggcatagtctggtggaacgcggtgtcaaatacagcaacgtttttgtctttcagctgtgggaaagatttcagagcttcttcgataccgatcaggtgagccgggttgtgcagcggtgcaaaagaagctgcatctttgataccctgaataacagactcatcgatcactacggagctggtatacttttcgccgccgtgtacgatacggtgaccgatagcagtcagctgcgcagacagttctggtttttgtgccagaatagtattaacgataaagttgagcgcttcgctgtgagcggcgcctgcacctaaagccgcttcctgtttattgccgtccattttccatttgatacgtgcttcgggcaggtggaaacattcgggcgggtcatggtcctggtgaatattacgcctgatgcagatggcaccacccttacactgaccacctgtgtcggtttgggtacgatttgatgttacctgatgcttagagcttttcggtaccccgatggtccctcgactcccatactccgggcccatgggaggtaaataccgttcactaatcctcgcttcattcgccagcagcgcatcaccagtatcggaaagcactacatggccgttttccagcacgtagccgcgatccgccagctttagcgcctggttggcgttctgctcgacgagaaagatagtcatcccctgctcgcgcagctgctcgatggtgtcgaaaatttgctggatgataatcggcgcaagaccgagcgatggctcatcaagcagtagcaaacgcgggttgctcatcagcgcacgaccaatcgccagcatctgctgttcaccgccggacatggtgcccgcccgctgaatacggcgctcatgcagacgtggaaacagctcatacacccactttatgcgctcctggaactggtcgcgttcagcaaaaaaaccgcccatcgccaggttctcttccaccgtcatccgcgagaagacgcgacgcccttccgggacaatcgccaccgcttcgcgcat

SEQ ID NO: 3541 - DNA, 1449 bp, Homo sapiens
  SIMILAR (1431)..(544): 971254mologous to Plasmid F 100 pct identical to sp:P19777,accession number AP001918,Smith-Waterman Score=1542.
ttaagctctgttggtggtttgtctattgcgatggtcattccgggtaatgaaatcaacctctccgcaggggtaatgcaaacctttaccgttctgatgtcccatgtggcaccagaaattgagtggacggttcgcgtgatctccgcactgctgttgctgggtgttctggcggaaatcgcctcctggattgttggtccttctcgcgggatgtatgtaacagcgcagaaaaacctgctgccagcggcattcgctaaaatgaacaaaaatggcgtaccggtaacgctggtcatttcgcagctggtgattacgtctatcgcgttgatcatcctcaccaataccggtggcggtaacaacatgtccttcctgatcgcactggcgctgacggtggtgatttatctgtgtttttctctcgtgctcttgtgctcgtctcgcgctctgctgtgcgtgtctgttgtctgttggggagaaaacgcgctcgcagatggtccccggtaattccttgcgcacaggatatagtaataccagcgttattgtcgttagtggtgagtcgtcggtatatccattacaagcccgctgccgcagatattcccgtggcgagcgataacccagcgcactatgcggatgccattcgttataatgctcgaacgcctctgcaaggttctttgctgccgttaacccgtctggtttgggcatgatactgatgtagtcacgctttatcgttttcacgaagctctctgctattccgttactctccggactccgcaccgccgtgttcttcggttcaagtcccaacatccgggcgaactggcgtgtttcattagcccggtagcatgaaccattatccgtcagccactccactggagacgacggaagatcgttgccgaagcggcgttccaccgctcccagcatgacgtcctgtactgtttcactgttgaagccgccggtagtgaccgcccagtgcagtgcctcacgatcacagcagtccagcgcgaacgtgacacgcagtctctctccgttatcacagcagaactcgaacccgtcagagcaccatcgctgattgctttctttcacggccactctgcctgtatgtgcccgatttcgactgcgcggtacagcaggttttcgctcaagcaacagcgcattctggcgcatgatccggtaaacacgtttggcattgatcgcaggcataccatcaagttctgcctgtctgcgaagcagcgcccatacccgacgataaccatacgttggcagctctccgataacatggtgtatacggagaagcacatccgtatcatcagtgtgacgactgcggcggccatccatccagtcatcggttcgtctgagaatgacgtgcaactgcgcacgcgacacccggagacaacggctgactaagcttactccccatccccgggcaataagggcgcgtgcgctatcacttttgtggccgtccat

SEQ ID NO: 3542 - DNA, 2631 bp, Homo sapiens
  SIMILAR (2631)..(1900): 991254mologous to Escherichia coli O157:H7 putative transport protein,accession number AP002564,Smith-Waterman Score=1249.
tcatccgccggtgccataggatggcactatcccagtgcggcatagcatcctgtaacgctcggcgacaatacgtaccgcacgcacatcaaacagctcatcaaaggcgaggttctttttctgcattttacgccagatgctgtagatgtgtttcggacgaccatacacttccgctttaacgccttcagctttcatctcagcgcgcagatgaccaacgaactcttcgatgtagtgttcgcggtcgagacgccgttcatgcagcagtttggcaattcgtttgtattcggttggatggaggtaacggaagcagtaatcttccagttcccatttcagttgtccgattccgagacggttagccagcggtgcgtagatgttggtacactcttttgccgccagtacacgttcatcttccggcgcatcttttacttcgcgcagatgagcaatacgctccgcctgtttgatgactacgcagaggaaatcatcgaccatcgccaataacatccggcgaacgcaatcgacctgctcggaggacacagaatcagtgtgcgtcgctttcagctggcggatcgccgccatatcacgcacgccgtgaataaggttaacgaccgacttaccgacgctctcacgcagcacatcttcgatgactacgttggcatctggatttgccctatgcggatgccattcgttataatgctcgaacgcctctgcaaggttctttgctgccgttaacccgtctggtttgggcatgatactgatgtagtcacgctttatcgttttcacgaagctctctgctattccgttactctccggactccgcaccgccgtgttcttcggttcaagtcccaacatccgggcgaactggcgtgtttcattagcccggtagcatgaaccattatccgtcagccactccactggagacgacggaagatcgttgccgaagcggcgttccaccgctcccagcatgacgtcctgtactgtttcactgttgaagccgccggtaaagagattttcttgtcccgcatggagcagattctgctggagcagcatcaacgggcccgccaatcgttcaagaccatcaatcgctggctggccgaagcaggcgtcatgatgactcaaggcaccttggtcgatgccaccatcattgaggcacccagctcgaccaagaacaaagagcagcaacgcgatccggagatgcatcagagcaagaaaggcaatcagtggcactttggcatgaaggcccacattggtgtcgatgccaagagtgggctgacccacagcctcttcaatagtttcttcgccggtagcgatggtgcccgcattaatatccattaaatcaaaccagcggttcgccagctcggtgcgggttgccattttaatgacgggtaccgccatcaggccgtacggcgtaccacgaccggtcgtaaacacttgcactgtgatacccgaagccacctgttgcgtgccacagacaaaatcgctggctggcgtcgcggcgtaaattaatccgcgtttagtcgggcgttgaccgggcgacagcacttcaacaattgcgcttttacccgatttagcaatggagccgagtgccttctctaccacgtttgccagaccgcctttcttgttgcccggcgaagggttggcgctgcggtcggtttttcccatattgagatagttatcgtaccactccatctcctccagcagccgttggccgacctcttcgttcacgttgcgcgtcggctgtccagcacgatgggaattcgcgatcaacgcccacttcccggttaacttctgaacaacatcacccgttggcgccgcagcgcaccagtagatcagacgcatagccaatcggcggggtttgccgttacaccagaaaacgcattcgtggccagtagcggacctagcagacatcgtcatcagcgctgaacatcccacgaaaaccagtgctgcattgaaggagtgcagttcacttaccaggtagccaatcaccagtggagtgacaatggaggcaacattgccaaagacgttaaagacgccgccgcagaggccaacaatctctttcggcgcggtgtcagaaatcaccggccagcccagcgcaccaaatcctttgccaaagaaagccagcgccatcagcatgaccaccagcgtggtgttgttggtgtagttacataagatgatggtggaagccagcaacattcccagcacaatcggtagcttacgtgccagggtcagggataaaccgcgtttgatcagataatccgagaagacacctcccagcacgccgcccgcaaaaccacacagtgctggaatcgaggcgaccagacccactttcagaatcgacatgcctttttcctgcaccagataaatcgggaaccaggtgaggaagaaccaggtgatggtgttgataaaatattgtccgaaaaatacgcccagcatcatgcggttagagagcaattgcttgatgtaatgcagtttgggtccgcttgctgccgcactgcccggctttttgtggtccatatcgaccaccgcgccattttcagagataaacttcagctcttccgcagacatacgtgggtgatctgtcgggttatgaatcaacttgatccacagcgccgtcagcacaaaaccaatcaaccccat

SEQ ID NO: 3543 - DNA, 7521 bp, Homo sapiens
  SIMILAR (5302)..(5195): 361254mologous to Escherichia coli Anaerobic dimethyl sulfoxide reductase chain A precursor (EC 1.-.-.-) (DMSO reductase),accession number D90801,Smith-Waterman Score=41.
tcactctgccacttttttcttcgccgcacgcttcgctttggtcgctgcagctattttctgcgttttcgccgatggctttttcgcttttctcgcgtctttcttcgccgctttcggcttcgtttttttctcaccgcggaaggcgctgtctggctcaaagtttacctttttaccgacctgacgacgcttgccgccttttttacctgcatcgccttttttcgctttctcgcgcgccgttttaccgacgttgcgcggtgcgcgttcgctggagatcaggctaaagtcgattttgcgctcgtccatattaaccgcttcgacgcgaacttccacgcgatcgcccaggcgataagtctggccgctggattcccccatcaggcgttgccctacctggtcaaagcgatagtagtcattgtccagcgaagagacatggaccagaccatcaatgaacaagtcgtccagacggacgaagaagccaaagccagtgacgttcaccagcaaacgcagattctccagcacgcgtggcaggttcatcttcaccacatcccgcgcctgagtcgcgtccataatttttaaatcgaacaacacttcatcgcacaatttcgccagcggtaatagcttgctggctggtgcgtctccggcagtttcaatggcgcatgacacaccccacagccgcagtcgctgtaaaaaacgggtagcaaactccgcctgcattaacacttcgccgccagaaagcgtgacgccgccgccggacgtgcgaaagaaaatgtcatctttcatcacttcccgttccagagcgtcaaggctgatatcgcgaccaatccgttcaaacgccccggaggggcattcatccgcatcacgcaaacatttcgcacagtgcagacatttcgcctctctgcgtaccgtctggattttgccggagatcgactccggattagcacaccacgggcaaagatgcggacagcctttaaaaaagaccaccgtacgaatgccctcgccgtcattcagtgaataacgctgaatgttgaaaatgcgcgccacatcatcgcggcgcgtttccacaacgttacagctgatgcgctgtccggcggatgatgtcatcctggatctccttcgacagttcgacaaagaaggcgcttccagggtcgccggagtgaatttcacgttcagcaacgtaccgttagacagcagcgtgttatcgagcttactgactgacttcagtaccgctgttggcccttgtgcgtcctggcccagcatgggtgacaagccgccgtctgccagctgttctccggcaaaacgaccgtctggcgtcgcgccaaccaccgatcccaacgggacgtgagcagaaacggtatacgatcccggcgtgaagtagccgccgcgcgggttctggtatttttccacttctttgcagtagtggcgcaacagttcggcgctgatgttatccacctcgtcgatatcgtaccgatttctcgggacaggcttttcgatctggacaagattgctgtgcgacgggtttccctttgccagcggtgaagggcggtgagaggtcagaatattgatactgccgccgtgatcgacccggtcaccaaacatatccgctttaagccacgcaccttgcccgatggcggtaacgccaggcagaatacgcggagtcacttttgcggcaatcagcatttctccattattgttaaatacccgcacggtatcgccatgacggataccgcgtgcctgagcatcaatggggttgatccacacctcttgtgggcaggcctgctgtaacacatcaatattgccgtagctggagtgggtacgcgctttgtaatggaagcccgttaactgcagtggataggttttccgcaggggatcgtcccagccatcaaaacctggggtatacgcaggaaggggatgaataatttcatcttttttcaattcccaggtatctgcaatcttcgccagtcgttcagaataaatttcgattttccccgaaggtgttttcaacgggtttgcctgtggatcttcacggaatgcgcggaaagcgacgtagtgttcttccgggcattttttcttaaagatcccggtcgttttcatctcctcgtagtcgggcatctcagggttacgttccttcgttttcgcatggagatatttgatccattcatgctgactgcgaccttcagtaaaggtttgataaacgtctggtcctaagcgtttggcgacttcactcagcatccagtagatgggtttgcgttcaaattttgctgaggttgcgggttgggcgaggatcacatagcccatattccctgcagattcatgagagataaggtcttcttgctctgttggcatcaggtcgggcaacaggatatcgcaatacttagccgaggccgtcatgaagtggtcaatgccaacaatcatctcgcacttgctgtcatcctgaagcacctcatgggtgtgattgatgtcgccatgttgattgatcaatgtgttactggcgtagacaccataagaaactgatgggacatccagtactgtcctgtgtgtgggttcttctgccttgcgttgctcggtggcggctgtgcttcgtgcttgtcggtcctttccggccttgttgttctctcgttctctgctccgctgacggtctcttgcctctccgtcgctcctgccttcgtcgtccttcgtcctctttctgtcgtcttccgctgctccgtcctctgtctcctgtctgctccttctgtgttccctcgttcgcgtcgtgtcgtgctctgcttctcctcctccttcttccgtctcttcttcccccggtagtctgtttgtcacagcaagaagtttacgccgccccaggtgaccagcgccagcaaccacggcgactgcatcaataacgcgctgccaccaaaaatcccggcgcaaatcaggaccaaatcgctgatagcacaaagtaaggcaatcataatgtggtactgacgacgtatgccctgattcatcacaaaagcattttgtggaccgagcggtaggatcatagccgccccaagtgcaagacgcagctttgtcttctttcacccgcttaaagttcacatccatttgcgggtacgggaagctgataccggcggcatcaaattcacgtttaatacgctccagcacatcccagtacacgttttgcagatcgccgctgttgctccagacgcggaccacgaaattaatcgacgatgcaccaagttcgttcaggcgcacagtcatttcgcgatctttcaaaatgcgatcttcagactggataatattggtcaggatctgcttaacctgatcgatatcggaatcatacgccacgccaataataaattcgttacggcgaactggctcgcgggagaagttaataatatttccggcaataattttaccgttcggaataacgataattttaccgtctgcagtacgcatggtggtggagaaaatctgcacactcagcacagtaccggctacgccgcccaggtcaacatattctccggcacggaacgggcggaacatgacaagtaacacgccagcggccaggttagacagtgacccctgcaaagccagaccaacagctaagccttcttcagtatgttgttctgggccttcgcacaacagggcggtagctcgattagcctttatatcgaccgcttcgttaaccgcgatatgtttggttataccgttccgaccgcgatgttccagtcgattaatgccttcgcagttatgctgtgcggtgtgttcctggcgtgggtggtaaaagagagtgtcgcgggtaatcgtaccgtgcgcatctgggggaaatttgctcttggccttggcctgatgagcgccggattctgcattctgaccggcatctacatgctgctttctggcgcgatcgcgaactatctggcgggcgtgattgccgatcagacatcgcaggcttcgtttgatgcttccggggcgatcaactactccatcaatgcatattttgtcccggagaccaaaatcgtccaggcaccatttggagacgcatattactccatcacggggtacaacacggactttagtaatcacctgatcataatgtttaccagaaacagggaaagacgtggtgtaactgcgccctaatgaagagacaaatctttcgctacacagagacatcattattccggtgacggatgaatcgtgccggaacgcagccgcagaggtgcaaactttgaagacctgaccccatgccgctatactgccgccatcacttaaaaacaggatacaacaatgaacgacagtgaatttcatcgcctggctgatcaactctggctgaccattgaagaacgcctggacgactgggatggcgacagcgatatcgactgcgaaatcaacggcggcgtactgaccataccttgaggtccataacgcacgataatgctgaccatgtgcgggatgctggcaggttccatgaccgatcctccggcgctggcgtttgctaataatcttcatccaaccagcggtgcggcggcgctctcttacgccactgtctatccgttggtaatgttcctggtattcgctggcatttctgaacatcactgaataattcaaaaactccccgctctcgctatatgacaacgaggtgatccgcagcagtggcgtgtgttccgctaccttcatttgccgcgccagcagtggaacagttttaccggcatatagctgtcttccagcatcagcggtttcccttccacaaaacgaacgcgacgggagaagtagatctgctcgttgatttgaatccgtaactggctggcaatggccggaggcgcaggggccaatgatttcaaaaatcagcacctggctggtgaccgtttttccctgccgttttaacacctccaccagcccggtcagactggcggtttgatgcagtacatctttgcgcaccagcggcatccggcgagaaggaccgacggcgtccgcagaaggtgaattggcgtggtgttcggttaaatactcaacctcgccgctttgcgcatgggcacaagcaattcgattatccagcacaaagcccaaccattctcctgacggatgccagttaaatgcagactgaatatccgttttgttatgggttaactggcgcggctcgccgccctgtggcgagataagccacagttgcacaatgccgttatcatctcgcattaaaaacgcgatttgtgtaccctgcggattacagcgcacccagtggcgcgggacgttgactaaccccggataagcccgatggtgggtaaaggttaaacgtcgctgcacgacgccacgcggtggcgcgggcagggttgtttccgttccgcttaacggcgcatcacctgccgctttccagccagcttcatcttgcggtaactcaacgataaacagctccggcactttctcgccctttggcgaaagtgtgtcgccaataaatgccagcgcgtgatttcctacccatccttcttcataagcacgattgatttcatcactgccaggctgtggcgtgggcgtggttttgctcaccagcacgcaccagtggctaccgctgtattcacgcggatgctgcttttgtacgttgaccgggccaaacggcgcagcaacaccgacgtttcgcaaatccagcgccggatcgagttcatgcattacatggtcgttataggtaaagctcaccctttcaccgttcgggcaaagacatgcacatgctgccgccgcgcagcactcctggcgtatacggcgcggtaatccagtcggccccttaggacccacgccgaccgtaagcagctgttccttaatgctggtaaacgcattgttgaattgaccaaacgttattacgagcaaaacgacgaaagtgcactgccgcgtaatatcgccagtaaggcggcgtttgaaaacgccatgacgctggatatcgcgatgggtggatcgactaacaccgtacttcacctgctggcggcggcgcaggaagcggaaatcgacttcaccatgagtgatatcgataagctttcccgcaaggttccacagcgaagctgatgataagagatctattactggagacatatacagcttgcgcccattgactgcaaattcagtaacatcggtaacccacttctcgtttggccgcgtagccttgaaatctctcttggagaacacaatggggtccgtccgtgacacagctttatggttaatctgtttcccttctcgatgaagagacagcgttaccctacggtatccgtatcggcctctattctcgtgataaatctcactaatacgctttttaacgtccgcatacttgtcaggcttgctgagagcctttagatgataataaaacgtactgcgcggtatctccgcagcctttttcgtgggatgagctaaggctttcagcttttttagatacataagccgcgtttcaagaaatcgaacttgcctttcaagatcctcaatgcgtcggtcttttgacagctccaatgctgatgccgctttttctggatcaactgatattgcaatgtttcttttggtgccaatcttgagcgcgcgtaaaccagcttctccgcgctcttcatagaccttcagccacctggctacagaaccactaccagcaagcataaagtgagcagcagcctgattaagggacatgtgctgctcgatcacagctttcacgaccttaatacgcaactctggatcagcactaacgcctttaggtttgggaattaaacctttttctccatgtttttcatagagggcaacccatgtcctgacctgggttcgggggacaccaaaacgtgccgagatgatcgccagagaaataactggctggctgctacaccactgttgccgggcaacgagggagaccgtcatccccggttcaaagctctgctgaacaattgcgatcttttcctgtgtggtacgccgtctgcgtttctccggccctaagacatcaatcatctgttctccaatgactagtcgttggttatcgagtaagacgattttcaacggtaactgcttgcgttttacggtgcccagctcttgcacattcatcatgaaagagccgtcaccggagatacagacaacggtatcgttcggtcgcgcgacttgtgcgccaaccgccgccggtaaaccaaaacccatggtacctaaaccgctggaggtgatgaaattttccgggcgagtgtgggcgatgtgctgcgcagcccacatctggtgctgccccacatctgtggtcacgacgcaatccgcaggtttacgatccgacagttgttttaacaacaacggcgcgtagatagcgtcaccgggatggtcgtaacgccaggaatgttcatcacgcagctgcgcgcagtgttgctgccagagcacaacgacatgcaggcatgcgaagcaacgctcgctcgcactggcgcacaaacccttggccaaacttgctggcaacggcataacgccacgtttgcgccagatttgccgataaccatcgaactcttcgactaccacatcccacgcatgttcgtcattgttcagcgtttcgatatccagcgcgttcagccccat

SEQ ID NO: 3544 - DNA, 1971 bp, Homo sapiens
  SIMILAR (1078)..(1034): 801254mologous to Plasmid F 100 pct identical to sp:P19777,accession number AP001918,Smith-Waterman Score=65.
tcaggtctggttgtgattggcgatggcaataccgttaatatgaatggtggacttgaactgattggagagaaaaacgcgcttgcagatgggtcgcaggttacttccttgcgcacaggatatagttataccagcgttattgtcgttagtggtgagtcgtcggtatatctgaatggagatacgacaatcagcggagaattccctctggggtttgccggggttattcgggtacaggataaagctttgctggaaattggcagtggcgccattacaagcccgctgccgcagatattcccgtggcgagcgataacccagcgcactatgcggatgccattcgttataatgctcgaacgcctctgcaaggttctttgctgccgttaacccgtctggtttgggcatgatactgatgtagtcacgctttatcgttttcacgaagctctctgctattccgttactctccggactccgcaccgccgtgttcttcggttcaagtcccaacatccgggcgaactggcgtgtttcattagcccggtagcatgaaccattatccgtcagccactccactggagacgacggaagatcgttgccgaagcggcgttccaccgctcccagcatgacgtcctgtactgtttcactgttgaagccgccggtagtgaccgcccagtgcagtgcctcacgatcacagcagtccagcgcgaacgtgacacgcagtctctctccgttatcacagcagaactcgaacccgtcagagcaccatcgctgattgctttctttcacggccactctgcctgtatgtgcccgtttcgatggcggtacagcaggttttcgctcaagcaacagcgcattctggcgcatgatccggtaaacacgtttggcattgatcgcaggcataccatcaagttctgcctgtctgcgaagcagcgcccatacccgacgataaccatacgttggcagctctccgataacatggtgtatacggagaagcacatccgtatcatcagtgtgacgactgcggcggccatccatccagtcatcggttcgttccccatccccgggcaataagggcgcgtgcgctatccacttttttgcccgtccatattcaacggcttctttgaggagttcattttccatcgttttcttgccgagcaggcgctggagttctttaatctgcttcatggcggcagcaagttcagaggcaggaacaacctgttctccggcggcgacagcagtaagacttccttcctggtattgcttacgccagagaaataactggctggctgctacaccatgttgccgggcaacgagggagaccgtcatccccggttcaaagctctgctgaacaattgcgatcttttcctgtgtggtacgccgtctgcgtttctccggccctaagacatcaatcatctgttctccaatgactagtgtggcgtagaaatcgaagcgaaagcggcgctgtcggcgagtgttaacgtagtcggttcttatacttacaccgatgcggaatacaccaccgatactacctataaaggcaatacgcgttatgatctggcgcgagtcggcatggctggctccaacgtggcgctgcatgttaacaacctgttcgatcgtgaatacgtcgccagctgctttaacacttatggctgcttctggggcgcagaacgtcaggtcgttgcaaccgcaaccttccgtttctaatttctcttttggggcacggatttccgtgcccatttcacaagttggctcgtcactctcactcgctctctgctcgctcgtagctctccgttcttgtctgttcgcgtgtctctcgttcgtcctgtcttcggtccgttcgttccgtccgggctctcgtgccgttcgtctggttccggctgtggcgtgctgtgcgctagtctggctgcgtcgtcgcctgtttgtggtccgccgcctgtgcctctctgcctgtcttctcctcgtctctgcttcgcgcttgcgcat

SEQ ID NO: 3545 - DNA, 1137 bp, Homo sapiens
  SIMILAR (324)..(368): 861254mologous to Plasmid F 100 pct identical to sp:P19777,accession number AP001918,Smith-Waterman Score=66.
atgattgatgtcttagggccggagaaacgcagacggcgtaccacacaggaaaagatcgcaattgttcagcagagctttgaaccggggatgacggtctccctcgttgcccggcaacatggtgtagcagccagccagttatttctctggcgtaagcaataccaggaaggaagtcttactgctgtcgccgccggagaacaggttgttcctgcctctgaacttgctgccgccatgaagcagattaaagaactccagcgcctgctcggcaagaaaacgatggaaaatgaactcctcaaagaagccgttgaatatggacgggcaaaaaagtggatagcgcacgcgcccttattgcccggggatggggatcgtcacactgatgatacggatgtgcttctccgtatacaccatgttatcggagagctgccaacgtatggttatcgtcgggtatgggcgctgcttcccagacaggcagaacttgatggtatgcctgcgatcaatgccaaacgtgtttaccggatcatgcgccagaatgcgctgttgcttgagcgaaaacctgctgtaccgccatcgaaacgggcacatacaggcagagtggccgtgaaagaaagcaatcagcgatggtgctctgacgggttcgagttctgctgtgataacggagagagactgcgtgtcacgttcgcgctggactgctgtgatcgtgaggcactgcactgggcggtcactaccggcggcttcaacagtgaaacagtacaggacgtcatgctgggagcggtggaacgccgcttcggcaacgatcttccgtcgtctccagtggagtggctgacggataatggttcatgctaccgggctaatgaaacacgccagttcgcccggatgttgggacttgaaccgaagaacacggcggtgcggagtccggagagtaacggaatagcagagagcttcgtgaaaacgataaagcgtgactacatcagtatcatgcccaaaccagacgggttaacggcagcaaagaaccttgcagaggcgttcgagcattataacgaatggcatccgcatagtgcgctgggttatcgctcgccacgggaatatctgcggcagcgggcttgtaatgggttaagtgataacagatgtctggaaatatag

SEQ ID NO: 3546 - DNA, 1608 bp, Homo sapiens
  SIMILAR (1285)..(1241): 801254mologous to Plasmid F 100 pct identical to sp:P19777,accession number AP001918,Smith-Waterman Score=65.
ctacgggagcacgaatgtaggccggataaagcgtttacgccgcatccggcaaaatgcccaatactcattcaggctttgggcaacgttgttccttccagctgctaccgccgcaatccgccgccgggtcagctcctcgcgaatctccacacctttaaatcccgcttcaacgacggcttttgtcggcactgactgcgccacttcccagcgttcgcgcaaccagcggccttgcgggtagtccgctgattcaaaaccggttctgccgcgcacgtcagcctcgctggtcagcgccagttgctcgacacgctgcggtttacgccaggcatcgatggaatcaaataatttgacgatggtttttgggttcagcattgggaaggtgtggatgagatcgtgaaactcagccaccagtctggctaaatcgcgaatttcatttggcacgcgcagacgctggcatagttgttccactaacttaacacccgccgggccatgaccatgatgacgcggccagagttctggcggcgtcagcctatgcggatgccattcgttataatgctcgaacgcctctgcaaggttctttgctgccgttaacccgtctggtttgggcatgatactgatgtagtcacgctttatcgttttcacgaagctctctgctattccgttactctccggactccgcaccgccgtgttcttcggttcaagtcccaacatccgggcgaactggcgtgtttcattagcccggtagcatgaaccattatccgtcagccactccactggagacgacggaagatcgttgccgaagcggcgttccaccgctcccagcatgacgtcctgtactgtttcactgttgaagccgccggtagtgaccgcccagtgcagtgcctcacgatcacagcagtccagcgcgaacgtgacacgcagtctctctccgttatcacagcagaactcgaacccgtcagagcaccatcgctgattgctttctttcacggccactctgcctgtatgtgcccgtttcgatggcggtacagcaggttttcgctcaagcaacagcgcattctggcgcatgatccggtaaacacgtttggcattgatcgcaggcataccatcaagttctgcctgtctgcgaagcagcgcccatacccgacgataaccatacgttggcagctctccgataacatggtgtatacggagaagcacatccgtatcatcagtgtgacgactgcggcggccatccatccagtcatcggttcgttccccatccccgggcaataagggcgcgtgcgctatccacttttttgcccgtccatattcaacggcttctttgaggagttcattttccatcgttttcttgccgagcaggcgctggagttctttaatctgcttcatggcggcagcaagttcagaggcaggaacaacctgttctccggcggcgacagcagtaagacttccttcctggtattgcttacgccagagaaataactggctggctgctacaccatgttgccgggcaacgagggagaccgtcatccccggttcaaagctctgctgaacaattgcgatcttttcctgtgtggtacgccgtctgcgtttctccggccctaagacatcaatcat

SEQ ID NO: 3547 - DNA, 4671 bp, Homo sapiens
  SIMILAR (1644)..(1877): 501254mologous to Homo sapiens protein kinase C gamma,accession number AF345987,Smith-Waterman Score=160.
atgagtgtacgaagtcctgagacctggggcaactccaccaataccagacctggggcaactccaccaaaccagacctggggcaactccaccaatgaccaggcctggggacaactccacaatgaccagacctgggacaactccaccaatgaccagacctggggcaacccaccaatgaccagacctggggcaagtccgccaatgaccagcctggggcagtccaccaatgaccagacctggggcaacttcaccaatgaccagacctgggcaacctggggcaagtccaccaatgacagcctgggcaactccaccaatgaccagcctggggcaactccaccaatacagacctcggacaactccaccaataccagacctggggcaactccaccaataccaggcctggggacaactccaccaataccagacctcggacaactccacaatgaccagacctgggacaactccaccaatgaccagacctggggcaactcaccaatgaccaggcctggggacaactccaccaatgaccagacctggggcaactccaccaatgaccagacctgcggcaagtccaccaatgaccaggccggggcaactccaccaatgaccagacctggggaaaacctggggcaactgcaccaatgccagacctgggacaactccaccaatgaccagacctgggaccaactccacaatgaccagacctggggcaagtccaccaataaccagacctggggcaagtcaccaatgaccagacctggggacaactccaccaatgaccagacctgggaaactccaccaatgaccagacctggtggcaactccaccaataccaggcctgggacaactccaccaatgaccagcctggggcaacctgactactggctctacacgcgcgccctcatctgcaacaccaccaacctacggcccggcggcgacgacgggacccctccacctgcgggggctggcggccctcggagaagaaggaccccggcggcctcacgcactcgggcctctggagatctgctgcctggaagggaaagcctcctcaagaaggtgcccctgagctgcctgctgcaggtaaagtactacatcagcaaagaatgtgagtggaatgttccacagcatgggcagaggactagagactacaactcccatgatccctgcggctgctcttctcacaactggactccagacttcacggggtctcatggaaatgtagtcctcatcggcttccgcatcactttccttgttttttttccacgcatttccagacttttcaaccaattgagaggtgggaagcgccttgcattattgaagccaacaacaccctctttcttacagagggttgaaaagaggcgtctgcgtgaagatcaatctttcccggaggacacggactacgaccacgacagcgcggagtatctactcatgggggcagtcattgagcaccagctgctactgctgagaacagagctgcgagatgaacgtgaccggcgctgtgtgcgtagcgtgccctccctgtgcggtgtggaccacacgagcgccgcgggcgcctgcagctggagatccgggctcccacagcagatggatccacgtaactgcaacctgaagccaggggatgtggagcgccggctcagcgtggagggtgggactgggaccggacctcccgcaacgacttcatgggggccatgtccttggcgtctcggagctgctcaaggcgcccgtggatggctggtacaagttactgaacaggaggagggcgagtattacaatgtgccggtggccgatgctgacaactcagcctcctccagaagtttgaggcttgtaactaccccctggaattgtatgagtggaggacaagttacaaacccagacattcacaacgaggagcaatgctgctgtaatgggacagcctcaggcactggggcgtccctggcacagcctgagtcagagaaacttcctagagagtcccaccgaccccaagcgctgcttcttcggggcgagtccaggaccctgcacatctccgacttcagcttcctcatggttctaggaaaaggcagtttgggaaggttggattcctgggatcttgaaaaaggactgatcgtccaggacgacgatgtggactgcacgctggtggagaaacgtgtctggcgctggggggccggggtcctggcggccggccccacttcctcacccgctccactccaccttccagaccccggaccgcctgtatttcgtgaggagtacgtcaccgggggagacttgatgtaccacattcaacagctgggcagtttaaggagccccatgcagcgtgagtctcggccaacagagaatggtcgggttctacgcggcagaaatcgctatcggcctcttttccttcacaatcagggcatcatctacagggacctgaagctggacaatgtgatgctggatgctgagggaccatcaagatcactgactttggcatgtgtaaggagaacgtcttccccgggcgacaacccgcaccttctgcgggaccccggactacatagccccggagcctcctcagttgtcggccctggaagtgcccagcggcggcagcgccagacgcgccccgttagctcagcgtcgctagcatccgcagccgccaccaggccccgcccagcggccgcagccagccagccgcgcccgggacgactgcagagcgcgccctccaaccccacccagccctcagacccttcagctgccgctgtcgtctttgcttcagccgcagtcagccactggctgccgaggcgttcgatccctagagggaggagcctgtccaaacggacgctaacggcctcctccccctcaggtgctcttacagcctgttccaagtgtggcttaatccgctccaccaccagatctttctccgtggattcctctgctaagaccgctgcccctgggctccttcgcctgctgcagctggtgtctacctgcgtggccttctcgctggggctagcgtgggcgcctggacggggtccatgggcaactggtccatgttccctggtgcttctgcttctccgtgaccctgatcatcctcatcgtggagcttgcgggctccaggcccgcttccccctgtcttggcgcaacttccccatcacttcgcctgctatgcggccctcttctgcctctcggcctccatcatctacccaccacctatgtccagttcctgtcccacggccgttcgcgggaccacgcatcgccgccaccttcttctcctgcatcgcgtgtgtggcttacgccaccgagtggcctggacccgggcccggcccggcgagatcactggctatatggccccgtacccgggctgctgaaggtgctggagaccttcgttgcctgcatcatttcgcgttcatcagcgaccccaacctgtaccagcaccagccggccctgggtggtgcgtggcgcttcctgtcggggctggccttgctgtctgtcctcctctatgccaccgccttgttctctggcccctctaccagttcgatgagaagtatggcggccagctcggcgctcgagagatgtaagctgcagccgcagccatgcctactacgttgtgcctgggaccgccgactggctgtggccatcctgacggccatcaaccactggcgtatgtggctgacctgtcacctggaggtggctggaaggccagtggactccacatttagggagagtgttacaagaggactcggattcccccaccttcccttcggctttgggaatccaggaaacccgccccgaacccctgaaaagtcccagagaagtcccaacatccgggcgaactggcgtgtttcattacccggtagcatgaaccattatccgtcagccactccactggagacgacggagatcgttgccgaagcggcgttccaccgctcccagcatgacgtcctctctccgataacatggtgtataggagaagcacatccgtatcatcagtgtgacgactgcggcggccatccatcagtcatcggttcgtctgagaatgacgtgcaactgcgcacgcgacacccgagacaacggctgactaagcttactccccatccccgggcaataagggcggccgcgtaccagtttaatagcgcgatcgaggtcaggccgccaatcactggcgtaccggtgcctggtgcaaaagcagatccaggcagtcgatatcaaaagtcaggtaaaccggcatatcacccacatctgtttcacttgggcgataacgtcatccacgctgcgatcgttcacctgcaggcgtccagcacggtaaagccgttgtctttatcaaactcgtgccgtggtcaaattcacaaccgttcgcataggtatcgtgtgggcgtcaaagtgtaccagcgccattttgccgaaatgcttcgcatagcacgcagcagcggcagcgtaacaaagtggtcaccaccgaaagagagctacgcttaccggcagccagcagcttctcggcgtgcgcctgcagcttttcctcatctcacgggcatcgccaaaggcatataccagatcgccgcagtccagacgttcagacgctcacgcatgtcgaaattccacgggaagcggttgtgtcccaggccagattcgtcgaaacctgacggatcgctgccggaccgtggcgccacccgcacgagccagaagtggccatatcgaacggcacgccagtaa

SEQ ID NO: 3548 - DNA, 811 bp, Homo sapiens
  SIMILAR (276)..(773): 951254mologous to Homo sapiens skeletal muscle ankyrin repeat,accession number AJ304804,Smith-Waterman Score=823.
gacggcaccatggaggactccgaggcggtgcagatggccacagcgctcatcgagcagcggctggcacaggaggaggagaatgagaaactccgaggagacgcacgccagaagctgcccatggacttgctggtgctggaggatgagaagcaccacggggctcagagtgcagccctgcagaaggtgaagggccaagagcgcgtgcgcaagacgtccctggacctgcggcgggagatcatcgatgtgggcgggatccagaacctcatcgagcttgcggaagaaacgcaaagcagaagaagcgggacgctctggccgcctcgcatgagccgcccccagagcccgaggagatcactggccctgtggatgaggagaccttcctgaaagctgcggtggaggggaaaatgaaggtcattgagaagttcctggctgacggggggtcagccgacacgtgcgaccagttccgtcggacagcactgcaccgagcttccctggaaggccacatggaaatcctggagaagcttctagataatggggccactgtggacttccaggatcggctggactgcacagccatgcattgggcctgccgcgggggccacttagaggtggtgaaacttctgcaaagccatggagcagacaccaatgtgagggataagctgctgagcaccccgctgcacggtgcagtccggacagggcaggtggagattggggagcactttctatccctgggcctggaaaataatgccagaaacagggaaggggatactgccctgcattgacgctgggagggttaaccgctacccaattcttcaaa

SEQ ID NO: 3549 - DNA, 1636 bp, Homo sapiens
  SIMILAR (193)..(525): 991254mologous to Escherichia coli 37KD protein, similar to YI22-ECOLI,accession number D85613,Smith-Waterman Score=549.
atgcgcgacttcgcgggctgccctcgtagttctgtttccgagaccgggaatcgccgtcccaacgctggtcacaaccaagagtggaacggtgggaaggatgagactcacgacactaaccagtctcgaactcgtcactacggcgtcagaaatttttccacgattcccaactactttgagggcaacccaaagtgggggccggagaaacgcagacggcgtaccacacaggaaaagatcgcaattgttcagcagagctttgaaccggggatgacggtctccctcgttgcccggcaacatggtgtagcagccagccagttatttctctggcgtaagcaataccaggaaggaagtcttactgctgtcgccgccggagaacaggttgttcctgcctctgaacttgctgccgccatgaagcagattaaagaactccagcgcctgctcggcaagaaaacgatggaaaatgaactcctcaaagaagccgttgaatatggacgggcaaaaaagtggatagcgcacgcgcccttattgcccggggatggggaacgaaccgatgactggatggatggccgccgcagtcgtcacactgatgatacggatgtgcttctccgtatacaccatgttatcggagagctgccaacgtatggttatcgtcgggtatgggcgctgcttcgcagacaggcagaacttgatggtatgcctgcgatcaatgccaaacgtgtttaccggatcatgcgccagaatgcgcctgttgcttgagcgaaaacctgctgtaccgccatcgaaacgggcacatacaggcagagtggccgtgaaagaaagcaatcagcgatggtgctctgacgggttcgagttctgctgtgataacggagagagactgcgtgtcacgttcgcgctggactgctgtgatcgtgaggcactgcactgggcggtcactaccggcggcttcaacagtgaaacagtacaggacgtcatgctgggagcggtggaacgccgcttcggcaacgatcttccgtcgtctccagtggagtggctgacggataatggttcatgctaccgggctaatgaaacacgccagttcgcccggatgttgggacttgaaccgaagaacacggcggtgcggagtccggagagtaacggaatagcagagagcttcgtgaaaacgataaagcgtgactacatcagtatcatgcccaaaccagacgggttaacggcagcaaagaaccttgcagaggcgttcgagcattataacgaatggcattcgcatagggcaaatccagatgccaacgtagtcagcgaagatgtgctgcgtgagagcgtcggtaagtcggtcgttaaccttattcacggcgtgcgtgatatggcggcgatccgccagctgaaagcgacgcacactgattctgtttcctccgaacaggtcgataacgttcgccggatgttattggcgatggtcgatgattttcgctgcgtagtcatcaaactggcggagcgtattgctcatctgcgcgaagtaaaagatgcgccggaagatagaggcagctatagttttaacagggaagttttaacaaaacaaattgttagaagttataggccacctcacacaacaggcagatgggaaacagccgtgtgtaccgcagaatga

SEQ ID NO: 3550 - DNA, 1698 bp, Homo sapiens
  SIMILAR (1368)..(934): 821254mologous to Escherichia coli K12 short chain fatty acid transporter,accession number AE000311,Smith-Waterman Score=576.
ttaggcctggtgtatgcgccggtaatgaacgtaatgtacagcgcggcagaaggctaagcgtggaaagaagagtgcggtgtgcgcaagcagattcaggtccgcgatgcgcgcccgccgctggtggtgatcagccgttcccatgcggatgcggagctgaaagagtatctgcaacagcttggcgaacatcagaccacgtccatcggctcttcgctgaaattctgcctggtggcggaaggacaggcgcagctgtacccgcgcttcggaccaacgaatatttgggacaccgccgctggacatgctgtagctgcagctgccggagcgcacgttcacgactggcagggtaaaccgctggattacactccgcgtgagtcgttcctgaatccggggttcagagtgtctatttactatattcagatggcagagacgtgtatttcctattatgccatcgctggaccggttttcgtcttcttttcctgtgtgagttttctcgggccctttttctggggtgggttttttccccttttccggtttgtgcccatgtgagctctcagcgactgtgctggaggtggcccccccattgttaccgggtaaccggatgtcttctcgtatcaccatgttatcggagagctgccaacgtatggttatcgtcgggtatgggcgctgcttcgcagacaggcagaacttgatggtatgcctgcgatcaatgccaaacgtgtttaccggatcatgcgccagaatgcgctgttgcttgagcgaaaacctgctgtaccgccatcgaaacgggcacatacaggcagagtggccgtgaaagaaagcaatcagcgatggtgctctgacgggttcgagttctgctgtgataacggagagagactgcgtgtcacgttcgcgctggactgctgtgatcgtgaggcactgcactgggcggtcactaccggcggcttcaacagtgaaacagtacaggacgtcatgctgggagcggtggaacgccgcttcggcaacgatcttccgtcgtctccagtggagtggcgggaaggtgtctttgttcgcaacattgatgaagaattcggtaatgagtccgcccagaccggaatgctccatcatcagttggatcccagcgtagaaggggaattgcaccagaataccggcagtactgcgtgctgccgcgctgatagcacgcatataagccattggcgttttatgtagcagcagacccgcaatcataaacatcaggttgacggtattgatggtgatgttgaagccatgttcgctgaagtacatcgcaaggtaagcgataccgagtgcgccgatgatcaacgtcagaatgcggctttcttccagtcgctcggatggtggggcatctttcggtagcacgtcagacggttttggcatcatcatgcgggtgataaatggcatcaccacaatcaacgccacagtgatgaaaatgttaaaaccacggggatcagcaccggcgatatgctcaaccgggttgcccggtgttgcagccaacagaggcattgatccagagaagccgccaccccaggtgagaaaaccaatgtaggcgcaggcaatgagcaacggataatcagaaccggggactcgccgggcgacttcacgggcaaacattgcgcccaccaccaaaccaatccccagttgagacacaagcgatgaaccgaagaagaccagcaggtccagcttcat

SEQ ID NO: 3551 - DNA, 4017 bp, Homo sapiens
  SIMILAR (1387)..(2124): 931254mologous to Escherichia coli 37KD protein, similar to YI22-ECOLI,accession number D85613,Smith-Waterman Score=1213.
atgaccaaaaaactccatattaaaacctggggctgtcagatgaacgagtacgattcatcgaagatggccgatctgctggatgccacccacggctatcaactgaccgacgtggcggaagaagcggatgtgctgctgctgaacacctgctcaatccgcgagaaggctcaggaaaaagtcttccatcagttgggtcgctggaaactgttaaaagagaagaatccagacctgattatcggcgtcggtggctgcgtggcatcgcaagaaggcgagcacattcgccagcgcgcccactatgtcgatattatttttgggccgcaaacgctgcaccgtctgccggagatgatcaactccgtgcgtggcgaccgcagcccggttgtagatatcagcttcccggaaatcgagaagtttgaccgtctaccggaaccgcgcgccgaagggccgaccgcgtttgtctccatcatggaaggctgcaataaatattgcacctactgcgtggtgccttacacccgtggtgaaaagttgaaccagtttattacttttaccggtcggattcagcgcactgttatgatgtttcccatagtcaacaatgccgccgcccgtaacaactgggcaacgttcggtgttacagtacccactttcgggttgggcatcaggccgcgcggacccagaaacctggcccagctggccaacaacgcgcattgcatccggagaagcaataacaacgtcaaagttcatttcgcctttcttgatctgccctttagcagcttcagcgtttgcaccttgggtaaatacggctacgcgaacggaacggccagtaccgtgcggcagtacagttgcaccacgtacgttctggtcagatttacgagcgtcgatgccgaggttaacagctacgtccacgctttctacgaatttagcagtcgccagctctttcagcagtgcgatagcttcgttgatgtcgtactgtttggttgcatcaactttctcgcggataacacgcatgcgcttggtcagtttagccatttcttagtcctccactaccaggcccatggaacgtgcagtaccttcgatggagcgagtcatcgcttcaatgtcggcaccagtcatgtcggcagctttggtctgcgcgatttcctgcagctgagcgcgggaaattttacccactttgtctttgttcggcttaccggaaccagacttgataccagccgcttttttcagcagaactgctgccggcggggtcttggtaacgaaagtgaaagaacggtcagcgtaaacggtgattactaccggaatcggcagacctttttcgatggaatcagtttttgcgttgaacgctttgcagaattccatgatgtttacgccctgctgacccagagccggacctactggcggactcggttgcacgtccttctcagacgaaccgatactggatggatggccgccgcagtcgtcacaactgatgatacggatgtgcttctccgtatacaccatgttatcggagagctgccaaggtatggttatcgtcgggtatgggcgctgcttcgcagacaggcagaacttgatggtatgcctgcgatcaatgccaaacgtgtttaccggatcatgcgccagaatgcgctgttgcttgagcgaaaacctgctgtaccgccatcgaaacgggcacatacaggcagagtggccgtgaaagaaagcaatcagcgatggtgctctgacgggttcgagttctgctgtgataacggagagagactgcgtgtcacgttcgcgctggactgctgtgatcgtgaggcactgcactgggcggtcactaccggcggcttcaacagtgaaacagtacaggacgtcatgctgggagcggtggaacgccgcttcggcaacgatcttccgtcgtctccagtggagtggctgacggataatggttcatgctaccgggctaatgaaacacgccagttcgcccggatgttgggacttgaaccgaagaacacggcggtgcggagtccggagagtaacggaatagcagagagcttcgtgaaaacgataaagcgtgactacatcagtatcatgcccaaaccagacgggttaacggcagcaaagaaccttgcagaggcgttagagcattgtaacgaatggcgggaccgacacgaaagctatgacatgattacaattcttgctcgaagggagcttcctgaggacaaagatgctatggggacaaggatccccgatattcgttacagcctgtcggatcgtattcgttattactggccgcatagtcggattaaaaatagcgtcgaaacgatgatggtgaatcttgaaggcgtggacatcccactgggcatgattagtcagtatcttcccaaacaatttgaacgcattcagtccggggaattatcagcaataccgcatcagctgattatggataaaatttatgatgttttgcgcgcctatcgctacggctatcaggtggatcaactgcaagccaacggcgtggcggcggcgtgccttaactcgacgcaaacccgcgaacagcaacttgaagtgatgacaggctgccgcaccgggcaaattcgtctgctttatatcgccccggaacgcctgatgctggataactttcttgagcatctggcgcactggaatccggtgttattagccgttgatgaagcgcactgtatctcccaatggggccacgatttccgcccggaatatgccgcgctcgttgcgccagcggttcccgacgctgccgtttatggcgctgaccgccacagccgacgacaccacgcgccaggatatcgtggggatcccaaagaggcgtttattcatgccgattacacgctggtagtggataccgcattaaccgggcggcgactgggcgcgcagcatatgttggtagtcagtgcgatgggtgccaataaagctatccagctgcacccgctggtttgtgcggcatataacgccgacttcgatggtgaccagatggctgttcacgtaccgctgacgctggaagcccagctggaagcgcgtgcgctgatgatgtctaccaacaacatcctgtccccggcgaacggcgaaccaatcatcgttccgtctcaggacgttgtactgggtctgtactacatgacccgtgactgtgttaacgccaaaggcgaaggcatggtgctgactggcccgaaagaagcagaacgtctgtatcgctctggtctggcttctctgcatgcgcgcgttaaagtgcgtatcaccgagtatgaaaaagatgctaacggtgaattagtagcgaaaaccagcctgaaagacacgactgttggccgtgccattctgtggatgattgtaccgaaaggtctgccttactccatcgtcaaccaggcgctgggtaaaaaagcaatctccaaaatgctgaacacctgctaccgcattctcgatttcatgtacaccgggcgttttcgccctatgcagcggcgttttctggtgcattctgttggtatcgatgacatggtcatcccggagaagaaacacgaaatcatctccgaggcagaagcagaagttgctgaaattcaggagcagttccagtctggtctggtgctcagggatcatttgtttgatgagatgttcttgcatagttctgaggaatcaccagcatcaggctcaaacatcacagacattgtgtatcgcttatcatctggcacctgcctctgctccacaatgcctcaaggcttattgacagtagtttatggagtatatcatgacaaaggcaaaggtaagaacgacaacaaacctctctctccggaaacctggcagcatctgaaaggcctggtgaccaggcagctttccggcaaacgtctgttcgttgtcgacgctttctgtggtgcgaacccggatactcgtctttccgtccgtttcatcaccgaagtggcctggcaggcgcattttgtcaaaaacatgtttattcgcccgagcgatgaagaactggcaggtttcaaaccagactcccgggagatgtaccgcgaggaaaccaatagaaaggagaagtga

SEQ ID NO: 3552 - DNA, 2136 bp, Homo sapiens
  SIMILAR (645)..(10): 1001254mologous to Escherichia coli K12 homolog of pectin degrading enzyme 5-keto 4-deoxyuronate isomerase,accession number AE000368,Smith-Waterman Score=1127.
tcatgtggacacgcaggcgtcatcatccatattgaaatagaaataaacttccatccggcgctcgtgggtgtgacacggcatggtgttccacaagttacccggagccagctccgtcagccccatactcaattggcaggtttccagtacatccgggacaaaatatttgttaatcgtgcgacggttactggtgaggttatcgcctaacgtgactggagatacttcgtccggtgtgacttttttggtgggatacgtcgtatgcgcgggtgcgcaattgtaataaaacttcgccggagtgccggtatcaatactggcaaagacaacttcttttgcacctttaccaacatacagggcgtcgcggtgaccgatttcatagcattggccatcgacagtaatcgtaccggcaccgccaatattgataacacctaactcgcgacgttcaaggaaatagcttacgccgagttgtttaccaacttccccgccaacggaaaccgttttagttatcggcataatgccgccaacaataattcggtcaatgtggctgtaaaccatggtgtactcatcggcgacaaataccttttcaaccaaaaattcattgcgcagcccttgggtatccagcgtttttgcgtgcgcactgtggatgctctgttcgtccggactccgcaaccgcccgtgttctttcggtttcaagtccccaacatcccgggcgaactggcgtgtttcattagcccggtagcatgaaccattatccgtcagccactccactggagacgacggaagatcgttgccgaagcggcgttccaccgctcccagcatgacgtcctgtactgtttcactgttgaagccgccggtagtgaccgcccagtgcagtgcctcacgatcacagcagtccagcgcgaacgtgacacgcagtctctctccgttatcacagcagaactcgaacccgtcagagcaccatcgctgattgctttctttcacggccactctgcctgtatgtgcccgtttcgatggcggtacagcaggttttcgctcaagcaacagcgcattctggcgcatgatccggtaaacacgtttggcattgatcgcaggcataccatcaagttctgcctgtctgcgaagcagcgcccatacccgacgataaccatacgttggcagctctccgataacatggtgtatacggagaagcacatccgtatcatcagtgtgacgactgcggcggccatccatccagtcatcggttcgttccccatccccgggcaataagggcgcgtgcgctatccacttttttgcccgtccatattcaacggcttctttgaggagttcattttccatcgttttcttgccgagcaggcgctggagttctttaatctgcttcatggcggcagcaagttcagaggcaggaacaacctgttctccggcggcgacagcagtaagacttccttcctggtattgcttacgccagagaaataactggctggctgctacaccatgttgccgggcaacgagggagaccgtcatccccggttcaaagctctgctgaacaattgcgatcttttcggaactacgctccatctccagcgccgcgttggtcatcgcttcactgcgccgggcatcaataagcgtagtgcggttaaccagcgccgcctgatcgctaagcgcattcaggctttgccaggcttgccatgccagcaccaacaggggcagcagaatcagcaaaaatgccagcattaccagtagtcgtaatgagcggggaaaaacgggccagcgtttcaaggtgttactctcgtcagacgcgaatagcctgatgcccaactgcttacgcgcattgcggaaaatgcgcatccatgggccatcctcgccccagttttccggatgccaggagttgctgacagtacggaaaacacgttccgggtgcggcatcataatggtgactcgaccactttcagtcgtgactgccgtaataccgttcggtgaaccgttcgggttagccgggtaggtttcagtgactttgccgaagttatcgacatagcgcagtgccaccagccctttgctttccagtgccgccagatgcgccgcatcacgcacttccacgcgcccttcaccatgagagacagcaatcggcatttgcgagcccaccat

SEQ ID NO: 3553 - DNA, 2664 bp, Homo sapiens
  SIMILAR (1687)..(1622): 901254mologous to Shigella flexneri TnpF,accession number AF141323,Smith-Waterman Score=101.
gaaggacgaacgaaagaacacgaaagaaagaaagaaagaaagacaacgacaacgaaagacaacgaaagaaagaacagaacagaacagaaacgaaagaaagcacagaacagaaagaaagaaagaaagcaacgacacgaacagactgaagacagaaagaaagaaagaacgaccgaacgaacgaaagaaggacggaaggacggaaggaaggaaggaacggaaggcacggaaggaaggaaggaaagaaagaacacaacagggaatcttcagacaataaatcagaaggttcaaactcccttagcctttgttactgctggggaagaccaggataactatctggaacctgtctggagaaagaggaccaccaatcatcggcatggcggcggtgatagcgcctttgagataaaacccgtattattgcgcgctttccgtacgactaaagtgattttcatgacgcaaacatttatccccggcaaagatgccgctctggaagattccatcgctcgcttccagcaaaaactttcagacctcggctttcagattgaagaggcctcctggctgaatcccgtgcctaacgtctggtctgtacatattcgcgacaaagagtgcgcactgtgttttaccaacggtaaaggcgcaaccaagaaagcggcgctggcttctgcactcggtgaatatttcgagcgtctctcaaccaactacttttttgcggacttctggctgggcgaaaccatcgccaacggtccgttcgtgcattatcccaacgaaaaatggttcccactgaccgaaaatgacgatgtgccagaagggctgctcgatgaccgtctgcgcgcgttttatgatccggagaatgaactgaccggcagcatgctgattgacctacaatccggtaacgaagatcgtggtatttgcggcctgccgtttacgcgtcagtccgacaatcagaccgtttatattccgatgaatatcattggtaacctgtacgtctccaacggtatgtccgcaggtaatacccgcaacgaagcacgcgttcagggattgtctgaagttttcgaacgctacgtgaaaaaccgcattattgctgaaagcatcagcctgccagagatcccggcagacgtgctggcgcgttacccagcagtagttgaagccatcgaaacgctggaagcggagggtttcccaatcttcgcttatgacggttcgcttggcggccagtatcagccactccactggagacgacggaagatcgttgccgaagcggcgttccaccgctcccagcatgacgtcctgtactgtttcactgttgaagccgccggtagtgaccgcccagtgcagtgcctcacgatcacagcagtccagcgcgaacgtgacacgcagtctctctccgttatcacagcagaactcgaacccgtcagagcaccatcgctgattgctttctttcacggccactctgcctgtatgtgcccgtttcgatggcggtacagcaggttttcgctcaagcaacagcgcattctggcgcatgatccggtaaacacgtttggcattgatcgcaggcataccatcaagttctgcctgtctgcgaagcagcgcccatacccgacgataccatacgttggcagctctccgatacatggtgtatacggagaagcacatccgtatcatcagtgtgacgactgcggcggcatccatccagtcatcggttcgtctgagaatgacgtgcaactgcgcacgcgacaccggagacaacggctgactaagcttactccccatccccgggcaataagggcgcgcaaaacccttggaggagattcatgcaccatgacaaactgtggctctgaagaggctgtggccacaaatgcattgcagccaatgcctaaatcccaaacccaccttggtgagctgcaatctcttcttcgcacttataactttgatgttattgatggtgtgaattatcagattgatgttacccagcccgcccgttatgacggcgagtgccagatgattaatgccaatgcggaaaggattaagaacctgacctttaatggcaagccgattgatccgaacgccatgttcctggttgccaccaataactatcgcgcttacggcggcaaatttgccggtacgggcgacagccatatcgcttttgcttcaccggatgagaaccgctcggtgctggcagcgtggattgctgatgagtcgaaacgtgcgggggaaattcacccggcggcagataacaactggcgtttagcaccgatagctggcgataagaaactggatatccgtttcgaaacctctccgtcagataaagccgcagcgtttattaaagagaaagggcagtatccagagaataagatggtgaataccactgtttctcttgtattgcttaaatatcccatggtaccgtgtgaatttgctgtggcacctggggcatttgagaaccaagtgggtaagcagtccagagaagcacagcttaaaactgttgcaaatattgaaagcagtttcaggtctgctccagtttcagaaacaagagaagcaagattcaggcaaacgatttggggaaaggagtcttcctattgtctttgtggcaagacaggacagcagaaatatttgtcaccagtgcctgttgatgcttgggttggaaacacgacgttgcatcctattgacaggtga

SEQ ID NO: 3554 - DNA, 2373 bp, Homo sapiens
  SIMILAR (1369)..(2136): 941254mologous to Escherichia coli 37KD protein, similar to YI22-ECOLI,accession number D85613,Smith-Waterman Score=1302.
atgtccaaaagcgcgaaccgaatcaaaccgaaaaaaaacactcaaataaacaacacacaatcaaaagccaccagaacatacaacaccaacacgcagtacaagccggggaaatgtcgaacccagggatggattccagtttgtcgagcgtaccgccagtatgaccgaggccgcgaccagagatcatcggaatatagccgccgcaggctgcgaccatcggccccaacatcagcgaagtcacatcgccgacgccaccggtggagtgtttatcaacaatcgggccattcagatgcaggcttttccagtcgagaacggttcctgaatctcgcatcgccatggcattgtcatatcgtggaagaaaatggtcatcgcgagggcggcaatctgcccttcggagatagtgttgtcgcgaataccgttgataaagaaacgaatttcttcatcgctcagcgcatgaccatcacgttttttacgaataatttcttgtgcgagaaacaagctgctggcgctcttaccgtcgccgtgacccagcgctttcagcaggcttgccagcaggctggaagcgccaaagcggtagtgacgcgcatctgcccagtcagcaccgaacagttcatctgcaatggcgagatatttctgcgcatcttccgcagtacgcacgccgcccgccggtttgaaaccaacggttttttctacgcccatatcacggatcacttccatcatgatgcgcgcgctttccggcgtcgcgttcacagccactttaccggtagaggttttgatgaagtccgcacccgctttgatggagatttcagacgctttacggatcagcgcttcgtctttcagttcgccggtttcgatgatcactttcagcagtacattcgctgccgcgcaagcctctttacaggctttcaccaggtcaaaaccaacctgctcgttacccgccatcagcgcgcggtacgggaacacaacgtcaacttcatcagcaccgtaggcgattgccgcacgggtttctgccagcgcgatgtcgatgtcgtcgttaccgtgtgggaagttggttaccgtagcgatacggatttcggggtgccctgctctttcagagtttgcgagcactcggataacgcgatgatagatacagataggagggtttgccgagcggagtttgggctgatgacacaggccatcacttctcgtcggtgcagcagcaaacaggttgttcctgcctctgaacttgctgccgccatgaagcagattaaagaactccagcgcctgctcggcaagaaaacgatggaaaatgaactcctcaaagaagccgttgaatatggacgggcaaaaaagtggatagcgcacgcgcccttattgcccggggatggggaacgaaccgatgactggatggatggccgccgcagtcgtcacactgatgatacggatgtgcttctccgtatacaccatgttatcggagagctgccaacgtatggttatcgtcgggtatgggcgctgcttcgcagacaggcagaacttgatggtatgcctgcgatcaatgccaaacgtgtttaccggatcatgcgccagaatgcgctgttgcttgagcgaaaacctgctgtaccgccatcgaaacgggcacatacaggcagagtggccgtgaaagaaagcaatcagcgatggtgctctgacgggttcgagttctgctgtgataacggagagagactgcgtgtcacgttcgcgctggactgctgtgatcgtgaggcactgcactgggcggtcactaccggcggcttcaacagtgaaacagtacaggacgtcatgctgggagcggtggaacgccgcttcggcaacgatcttccgtcgtctccagtggagtggctgacggataatggttcatgctaccgggctaatgaaacacgccagttcgcccggatgttgggacttgaaccgaagaacacggcggtgcggagtccggagagtaacggaatagcagagagcttcgtgaaaacgataaagcgtgactacatcagtatcatgcccaaaccagacgggttaacggcagcaaagaaccttgcagaggcgttcgagcattataacgaatggcatccgcatattcgctatcggaatcaggatgaccatgagctacaaattacacacgggacaagattctatgtggaattgtgtggtgagtcgcttccggctgagggcacagggcttaccccacttaggacgcacgctagattccaggtagatcataacgcattggtttccaggcgtgtcgtaagatcttgtacctgctgcttgtaccaggtgccgaagctgcgctcgccagacactatagcgcaaacagccctctctctcgctatatcatatacgcacacagcctctggtcactag

SEQ ID NO: 3555 - DNA, 1776 bp, Homo sapiens
  SIMILAR (1028)..(996): 811254mologous to Escherichia coli 37KD protein, similar to YI22-ECOLI,accession number D85613,Smith-Waterman Score=44.
tcaggtctggttgtgattggcgatggcaataccgttaatatgaatggtggacttgaactgattggagagaaaaacgcgcttgcagatgggtcgcaggttacttccttgcgcacaggatatagttataccagcgttattgtcgttagtggtgagtcgtcggtatatctgaatggagatacgacaatcagcggagaattccctctggggtttgccggggttattcgggtacaggataaagctttgctggaaattggcagtggcgccgtctggtttgggcatgatactgatgtagtcacgctttatcgttttcacgaagctctctgctattccgttactctccggactccgcaccgccgtgttcttcggttcaagtcccaacatccgggcgaactggcgtgtttcattagcccggtagcatgaaccattatccgtcagccactccactggagacgacggaagatcgttgccgaagcggcgttccaccgctcccagcatgacgtcctgtactgtttcactgttgaagccgccggtagtgaccgcccagtgcagtgcctcacgatcacagcagtccagcgcgaacgtgacacgcagtctctctccgttatcacagcagaactcgaacccgtcagagcaccatcgctgattgctttctttcacggccactctgcctgtatgtgcccgtttcgatggcggtacagcaggttttcgctcaagcaacagcgcattctggcgcatgatccggtaaacacgtttggcattgatcgcaggcataccatcaagttctgcctgtctgcgaagcagcgcccatacccgacgataaccatacgttggcagctctccgataacatggtgtatacggagaagcacatccgtatcatcagtgtgacgactgcggcggccatccatccagtcatcggttcgtctgagaatgacgtgcaactgcgcacgcgacacccggagacaacgggtgactaagcttactccccatccccgggcaataagggggcgtgggctatcacttttttggccgtcatattcacgggttcttgaggagtcctttccacgggtcttgccaaaagggcgggacttaacccgccagggggccgtcaaggggagctgcccctccggggggagttccaccagagacggttccccaaacagatacggtccactccggggagaaaaccccccccacatcactggtcgcagggcgcgaccccgcgcccacacattggggggaggacagtgaattgagaaggagtttgtaatccttttcttgatgatacaaacatctgattgttgccaaaaatgacctcctaaactggttttgcttgttgggctcgtttcttttgtgctgctgccggtgtctgtgttcctgttcttgtgtttggtttttcggatcttggctgtcttgtgtgtcttggtgtctccggtatctggggtggagttccggtgcgtgatcccttcgtgggtgtggagggtcttggaaggatttccctggatcatcggcatccaagggatctccgatgtttccttggcaaattcatgttgtgttctagagtgcttctcgatcgcatgtgtactgcctctccgtttggtgtggggcctatatggattttgtctgcctattgaattgccagggaagtttgcccgttttaatacgaaatgtggtatcctacggtctttgtttggtaactttggcccaggtttgaatggccctaccttggattgctttggggtgttgaatgatgcaacgtgcaccttgtgtgcccccat

SEQ ID NO: 3556 - DNA, 1680 bp, Homo sapiens
  SIMILAR (1680)..(721): 991254mologous to Escherichia coli IS5 39.3kDa protein,accession number U70214,Smith-Waterman Score=1662.
ctatatttccagacatctgttatcacttaacccattacaagcccgctgccgcagatattcccgtggcgagcgataacccagcgcactatgcggatgccattcgttataatgctcgaacgcctctgcaaggttctttgctgccgttaacccgtctggtttgggcatgatactgatgtagtcacgctttatcgttttcacgaagctctctgctattccgttactctccggactccgcaccgccgtgttcttcggttcaagtcccaacatccgggcgaactggcgtgtttcattagcccggtagcatgaaccattatccgtcagccactccactggagacgacggaagatcgttgccgaagcggcgttccaccgctcccagcatgacgtcctgtactgtttcactgttgaagccgccggtagtgaccgcccagtgcagtgcctcacgatcacagcagtccagcgcgaacgtgacacgcagtctctctccgttatcacagcagaactcgaacccgtcagagcaccatcgctgattgctttctttcacggccactctgcctgtatgtgcccgtttcgatggcggtacagcaggttttcgctcaagcaacagcgcattctggcgcatgatccggtaaacacgtttggaattgatcgcaggcgtaccatcaagttctgcctgtctgcgaacagcgcctatacccgacgataactcatacgttggcagctgtatcatttggtccgcccgaaacaggttggccagcgtgaataacatcgccagttggttatcgtttttcagcaaccccttgtatctggctttcacgaagccgaactgtcgcttgatgatgcgaaatgggtgctccaccctggcccggatgctggctttcatgtattcgatgttgatggccgttttgttcttgcgtggatgctgtttcaaggttcttaccttgccggggcgctcggcgatcagccagtccacatccacctcggccagctcctcgcgctgtggcgccccttggtagccggcatcggctgagacaaattgctcctctccatgcagcagattacccagctgattgaggtcatgctcgttggccgcggtggtgactaggctgtgggtcaggccgctcttggcatcgacaccaatgtgggccttcatgccaaagtgccactgattgcctttcttggtctgatgcatctccggatcgcgttgctgctctttgttcttggtcgagctgggtgcctcaatgatggtggcatcgaccaaggtgccttgagtcatcatgacgcctgcttcggccagccagcgattgatggtcttgaacaattggcgggccagttgatgctgctccagcaggtggcggaaattcatgatggtggtgcggtccggcaaggcgctatccagggataaccgggcaaacagacgcatggaggcgatttcgtacagagcatcttccatcgcgccatcgctcaggttgtaccaatgctgcatgcagtgaatgcgtagcatggtttccagcggataaggtcgccggccattaccagccttggggtaaaacggctcgatgacttccaccatgttttgccatggcagaatctgctccatgcgggacaagaaaatctcttttctggtctgacggcgcttactgctgaattcactgtcggcgaaggtaagttgatgactcat

SEQ ID NO: 3557 - DNA, 3568 bp, Homo sapiens
  SIMILAR (2750)..(3562): 991254mologous to Escherichia coli O157:H7 (p)ppGpp synthetase I,accession number AP002562,Smith-Waterman Score=1411.
tcagcacgaagagattgaggcagtgagccagaagcttctgctgagcaggtggatccgcgcgatgaaaaagttggaatctcgaagctcagctggctgaagcccagacccgtgaacgtgacggcttttgcgtgtaaaagccgaaatggaaaacctgcgtcgtcgtactgaactgatattgaaaaagcccacaaattcgcgctggagaaattcatcaacgaatgctgccggtgattgatagcctggatcgtgcgctggaagtggctgataaactaacccggatatgtctgcgatggttgaaggcattgagctgacgctgaatcgatgctggatgttgtgcgtaagtttggcgttgaagtgatcgccgaaataacgtcccactggacccgaatgtgcatcaggccatcgcaatggtggaacctgcttatctattgtccttacgtcgagaatatcgattcgtactcgccaatacgcacgcgggtgcctgcgacagggatctcttccatgcctcaagaatgacgccattaaccgtgcgggcatcatcttccggtagagccagttaaaggctttgttgatttcccgcacgttggcggtgccatcgatatcaccgaaccgtcgttttgcggcgtgacctcttcggcaagtgttggcgcatcgacgtagtgaaatcgccgacaatctcttccagaatatcttcaacctcaccagcccctgaatgtctccatactcgttgacgaccaggccgacttttttttgttgcgctgaaactttaccaactgcgtgctgagcggcgtaccttcggcacaaaatagatctcgtccgcggcgcgcagcatggtttctttggtgactcttttttctccgacatcaaacgccaggcttcacgtactcgcagcatgcagcaatttttcgacgcgtttgccgagcgattaccctgtttcgccatatgtcgcagacgatagcggttgaggtcatcattccggtttcggacccggaaaaataggctgcatatccgcagcgaagcgtcctgtttgcgtgttatctcttgctgacggcagcgttcgacgaaatagtcatataacgcctctggcgatccggtgatgcacctttggagaaacttgggcgcatcccccgttcgtatcataatgagctgatatgacgggaacatggtgatataaagcgcgaaacctttcttcctgcttcgaacaggagtgcggcgacaaacgcgccgacaatcgcgtcgggttaggtacgcggatggtaggaacaatgctgtacagcaaccagaaggaatccacgacaacagcaacggaaaaatacgcagcacgttgtcgatgacagcatgttcaggcccgcatcgtgttccattctgcgaagcttggacccatcggtttttcgtcactttctcggtgtgcgggatgatgggcgtgctgctggcgtaccggcgcggattcgttctgcataacagcctgttcctgattgcgcacttccatacgtgatcatcggcggcgtggtcttcggctgcttcgcagggatgacctggatcgtgaaaagcttcgacgaggacgtggattactacgtccggtggcagagaatcgaaaaactggaaaaccagcatttcgatgagattatgcctcgctgggcgtttaaacgcttttacgttaaccaactgcgttggcagcattttcgcgccggattgttcggataacgtttctgccagtcggcgatcccggctttcatcagtcgggatcgttacggttatcaaaccagacgcgctgcagatccagccagcttgcagaatattttcgtcggcgttgatcaccagcgtattcgcctgttcagtgcacgaaggcgagtaattgccagttgatcctggtatcatcagagctttgctgcatcgctgaagataaaaggcagaatcagcctgcgccgtgccctgcatataagcgtggactgatcgggagtatgggtgccacaaccggcgaaaatcaggggtcattctcagacgaaccgatgactggatggatggccgccgcagtcgtcacacgtgatgatactgagatgtgcttctccgatattacacctatgttatcggagagctgccaacgtatggttatcgtcgggtatgggcgctgcttcgcagacagtcagaacttgatggtatgcctgcgatcaatgccaaacgtgtttaccggatcatgcgccagaatgcgctgttgcttgagcgaaaacctgctgtaccgccatcgaatacggggcactatactagtggcagatgtggcccgtgaaagaaagcaatcagcgatggtgctctgacgggttcgagttctgctgtgataacggagagagactgcgtgtcacgttcgcgctggactgctgtgatcgtgaggcactgcactgggcggtcactaccgccggcttcaacagtgaaacagtacaggacgtcatgctgggagccggtggaacgccgcttcggcaacgatcttccgtcgtctccagtggagtggctgacggataatggttcatgctaccgggctaatgaaacacgccagttcgcccggatgtcgggacttgaaccgaagaacacggcggtgcggagtccggagagtaacggaatagcagagagcttcgtgaaaacgataaagcgtgactacatcagtatcatgcccaaaccagacgggttaacggcagcaaagaaccttgcagaggcgttcgagcattataacgaatggcatccgcatagggcaaatccagatgccaacgtagtcagcgaagatgtgctgcgtgagagcgtcggtaagtcggtcgttaaccttattcacggcgtgcgtgatatggcggcgatccgccagctgaaagcgacgcacactgattctgtttcctccgaacaggtcgataacgttcgccggatgttattggcgatggtcgatgattttcgctgcgtagtcatcaaactggcggagcgtattgctcatctgcgcgaagtaaaagatgcgccggaagatgaacgtgtactggcggcaaaagagtgtaccaacatctacgcaccgctggctaaccgtctcggaatcggacaactgaaatgggaactggaagattactgcttccgttacctccatccaaccgaatacaaacgaattgccaaactgctgcatgaacggcgtctcgaccgcgaacactacatcgaagagttcgttggtcatctgcgcgctgagatgaaagctgaaggcgttaaagcggaagtgtatggtcgtccgaaacacatctacagcatctggcgtaaaatgcagaaaaagaacctcgcctttgatgagctgtttgatgtgcgtgcggtacgtattgtcgccgagcgtttacaggattgctatgccgcactggggatagtgcacactcactatcgccacctgccggatgagtttgacgattacgtcgctaacccgaaaccaaacggttatcagtctattcataccgtggttctggggccgggtggaaaaaccgttgagatccaaatccgcaccaaacagatgcatgaagatgcagaattgggtgttgctgcgcactgggaaatataa

SEQ ID NO: 3558 - DNA, 4944 bp, Homo sapiens
  SIMILAR (268)..(1524): 991254mologous to Escherichia coli Probable ATP-dependent helicase dinG homolog,accession number D90825,Smith-Waterman Score= 2135.
atgacccgcgacaacccagtcatcccacgctttattcatcgccgcgaagtcgtttttatcggccaggaaaatggtggcatccagaatgctcgatttattgctgccctgtttttccagcacggcgtcaatctgtgccagcgtgttggcggtttgctcaaaggcatcggcgtcgaggttttccggtacaccagtgtagtagagcgtgttgttgtggattactacatcagaccagcgggcttcagcatcgatacgaacgataggggtagtgtgacggacgattttgcaccagacggtcagctggcgaaagcgataccaggctttaagccgcgagaaccacagcgacagatggcggtagccgtcacccaggcgatagaaaaaggccagccgctggtggtggaagcaggaaccggtacgggcaaaacctacgcttacctggctcctgcgctgcgggcgaaaaagaaagtcattatctcgaccggctcaaaagcgttgcaggatcagctctacagccgcgatttgccaacagtctcaaaggcattgaaatatacgggcaacgtggcgctgctgaaagggcgctcaaactacctctgcctcgaacgtctcgaacagcaggcgctggcggggggcgatctgccggtacaaatcttaagcgatgtgatcctgctgcgctcctggtctaatcaaacagtcgatggtgatatcagcacctgcgtcagcgtggcggaagattcacaggcgtggccgctggtcaccagcaccaacgacaactgtcttggcagcgactgcccgatgtataaagattgctttgtggtcaaagcacgtaaaaaagcgatggacgccgatgtggtggtggtaaaccatcatctctttctggcggatatggtggttaaagagagtggatttggcgaactgatcccggaagcggacgtcatgatcttcgacgaagcccaccagctaccggacattgccagccagtattttggtcagtcactctccagtcgacaactgctcgacctggcaaaagacatcaccatcgcctaccgcaccgaattaaaagacacccagcagttacaaaagtgcgctgatcgtcttgcccagagtgcgcaggattttcgtctgcaactcggtgagccaggttatcgcggtaacctgcgtgagctgttagctaatccgcaaattcagcgggcatttttactgctcgatgacaccctggaactttgttatgacgtggcgaaactgtcactggggcgttccgccttgctggatgcggcatttgagcgcgccacgttgtatcgcacacggctgaagcggctaaaagagatcaatcagccgggctacagctactggtacgaatgcacttcgcgccattttactctggctctcacgccgctcagcgtggcggataaattcaaagagttaatggcgcaaaaacccggtagctggatcttcacctcagcaacgctgtcggtgaacgacgatctgcatcatttcacctcgcggcttggcatcgaacaggccgatagctgttctataggaaacagctatgtttttagactagtcattggagaacagatgattgatgtcttagggccggagaaacgcagacggcgtaccacacaggaaaagatcgcaattgttcagcagagctttgaaccggggatgacggtctccctcgttgcccggcaacatggtgtagcagccagccagttatttctctggcgtaagcaataccaggaaggaagttttatctgctgtcgcccgccggaaaacaggttgttcctgcctctgaacttgctgccgccatgaagcagattaaagaactccagcgcctgctcggcaagaaaacgatggaaaatgaactcctcaaagaagccgttgaatatggacgggcaaaaaagtggatagcgcacgcagtcagccgttgtctccggggtgtcgcgtgcgcagttgcacgtcattctcagacgaaccgatgaaagtcgccatttttgctccatgtgtgggccgaaattctgctcgatgaaaatcagccaggaagtgcgtgattacgccgccacgcaaactattgaaatgggaatggcggatatgtcggagaacttccgtgccagaggcggagaaatctacctgcgactgtacccggtggtggacagcgtacagtggatcgaacgtctgttggatgcaggcgtacgtactctccagctacgcatcaaagatcggcgcgatgaagaggtggaagccgatgtcgtggcggcaattgcgctgggccgccgctataacgcgcgattgtttatcaacgattactggcggctggcgatcaagcatcaggcgtatggcgtccatttggggcaggaagatttgcaagccaccgatctcaatgccatccgcgcggcaggcctgcggctgggcgtttcgacacatgacgatatggaaatcgacgtcgcgctggcagcacgcccctcttatatcgcgctgggacatgtgttcccgacgcaaaccaaacagatgccttctgcaccgcagggctggaacagctggcacggcatgttgagcgactggcggattatcccaccgtggcgattggcgccgccaaatcctgctcgacgatatcgctctggacgggcagcaaaactgctcgacagccaggagaaaagcggtaccgccgcgctggagcgtcgtgaaactaagggctatgaagagatggtgaacaacggacgtaccgcgttcgtgactgcgccgttattaacgtcgctggaaggcggcgtaccggttgttgtggatgggcaaattattggtgccgtgggcgtttctggtttaaccggagcacaggatgcgcagagccgtttacgcattgacgccaattttaaacgttttgtggatgaagaagttttaccgggaacagggctggacgctgcggcgttctggcgcaattttgatgagatcgttcatgatctggcaccagaaaatcgtcagttgctggcagaacgcgatcgcattcaggcagcgcttgatgagtggcatcgcagcaatccggggccggtaaaagataaagcggcctataaatctttcctgcgtgaactgggctacctggtgccgcaaccggagcgcgtgacggtggaaaccacgggcattgacagcgaaatcaccagccaggcggggccgcagctggtggttccggcaatgaacgcccgctacgcgctgaacgcggcgaacgctcgctggggctcactgtacgatgcgttatacggcagcgacatcatcccgcaggaaggggcgatggtcagcggctacgatccgcaacgcggtgagcaggttatcgcctgggttcggcgtttcctcgatgaatctctaccgctggaaaacggcagctatcaggatgtggtggcgtttaagctgcaaatcgatgccaatgggcggattggcaaaaacgatccggcgcacatcaacgatgttatcgtcgaagctgctatcagtaccattctcgactgcgaaaattccggtcgcgcggttaatccggagataaaatctgttgtaccgcacctgctgggcctaatcaagggactcttcaagagaaatggggaaaaacgttcgccaatcgtcggtaaactgattacgatcgccataaacataacttgccgtagcttccaaaattgctctggcttcgcaactatgatccgttcatggtctttcggtgaagttaaaaagccggaaaccatcaactaccgtacgttcaaaccagaacgtgacggccttttctgcgcccgtatctttgggccggtaaaagattacgagtgcctgtgcggtaagtacaagcgcctgaaacaccgtggcgtcatctgtgagaagtgcggcgttgaagtgacccagactaaagtacgccgtgagcgtatgggccacatcgaactggcttccccgactgcgcacatctggttcctgaaatcgctgccgtcccgtatcggtctgctgctcgatatgccgctgcgcgatatcgaacgcgtactgtactttgaatcctatgtggttatcgaaggcggtatgaccaacctggaacgtcagcagatcctgactgaagagcagtatctggacgcgctggaagagttcgatgggggcggaacaatccaggctctgctgaagagcatggatctggagcaagagtgcgaacagctgcgtgaagagctgaacgaaaccaactccgaaaccaagcgtaaaaagctgaccaagcgtatcaaactgctggaagcgttcgttcagtctggtaacaaaccagagtggatgatcctgaccgttctgccggtactgccgccagatctgcgtccgctggttccgctggatggtggtcgtttcgcgacttctgacctgaacgatctgtatcgtcgcgtcattaaccgtaacaaccgtctgaaacgtctgctggatctggctgcgccggacatcatcgtacgtaacgaaaaacgtatgctgcaggaagcggtagacgccctgctggataacggtcgtcgcggtcgtgcgatcaccggttctaacaagcgtcctctgaaatctttggccgacatgatcaaaggtaaacagggtcgtttccgtcagaacctgctcggtccatacctgcgtctgcatcagtgcggtctgccgaagaaaatggcactggagctgttcaaaccgttcatctacggcaagctggaactgcgtggtcttgctaccaccattaaagctgcgaagaaaatggcatttgaaccggtaatgatcgaaggtaaagctatccagctgcacccgctggtttgtgcggcatataacgccgacttcgatggtgaccagatggctgttcacgtaccgctgacgctggaagcccagctggaagcgcgtgcgctgatgatgtctaccaacacaacttgggggccagagctagatcctgacttcaaaccaaccaaccaaccaaccaattatccataa

SEQ ID NO: 3559 - DNA, 1532 bp, Homo sapiens
  SIMILAR (1067)..(1135): 911254mologous to Homo sapiens muscle disease-related protein,accession number AF204674,Smith-Waterman Score=117.
agctgatgcaacccagccacctcccggcaatccgcttacttgcaatcaagggttcaggtgcaagcagatgctgactcagcctgttccattaagagctaagaagcaagaagaaattggggcgccatggggaaagcccgcagatccccgccagggcaccacaggcattgtgagggatgcttcaaccgccactgccacattcctgtggaacccaacacctcctgcctggtaataagctgccacctgctctgtggtgccaccttccacatgtgcaaagaggcagagcaccagctcctctgccctttagagcaggttccgtgcctcaactccgaatatggctgccctctgtccatgtaccgccacaaactggccaagcacctgcaggcgtgccccgccagcgtggtctgctgctccatggagtggaaccgctggccaaatgtggactctgaaaccacccttcatgaaaacatcatgaaagagacccccagtgaggagtgtttggacacagccctggccctgcaggatcagaaggtcctcttcagatccttgaaaatggtggaacttttcccagaaactagagaggctactgaggaggaaccaactatgaatggtgaaaccagtgtggaggaaatgggaggagcagtgggtggagtggatatcggtttggtaccacatggtctgtcagcaactaatggggagatggcagagctaagtcaagaagaacgggaggtgctagccaaaaccaaagaagggatggacctggtcaagtttggccagtgggaaaatattttcagcaaagagcacgcagcctctgctttaacaaattcatcagcgagctgtgagagcaagaacaagaatgactccgagaaagaacagatttccagtggccataacatggtagaaggagagggcgctcccaaaaagaaagaaccacaggaaaatcagaagcagcaggacgttcgtacagccatggaaaccacagggcttgccccttggcaggatggtgttctggaaagactgaaaacagctgtggatgcaaaggactataacatgtatctagtgcacaatgggcggatgcctgatacactttggtcagatgcctgcttgtacacccaaggagagagactttgtttatggcaacgctggaggctcaggaagttaagactgtttacaccttcaaagttcctgtgagctactgtggaaagcgagctcgacttggagatgccatgttgagttgtaagccaagtgaacacaaggcagtggatacttcagatttggggatcactgtggaggacctgcccaaatcagatctcatcaagaccaccctccagtgtgctttggaaagagaactcaaaggccacgtcatctctgaatccagaagcattgatggactgttcatggattttgccacacaaacatacaactttgagccagaacagatttcctctgggacagagctggctgacctaaccgctgccaccccagggggactccacgtggagctccacagcgagtgtgtgaccaagagacacaac

SEQ ID NO: 3560 - DNA, 2316 bp, Homo sapiens
  SIMILAR (896)..(1060): 1001254mologous to Homo sapiens isolog of yeast sui1 and rice gos2; putative,accession number L26247,Smith-Waterman Score=285.
  misc_feature (1)...(2316): n = a,t,c or g
gggggccccagtcactgagccgccgccgaggattcagcagcctcccccttgagccccctcgcttcccgacgttccgttcccccctgcccgccttctcccgccaccgccgccgccgccttccgcaggccgtttccaccgaggaaaaggaatcgtatcgtatgtccgctatccagaacctccactctttcggtaagctatgggaaaggtcgcgggcccgggtggggcagcggggccttccgggcccggagacgtgttccgggaagttgccaagcgctccgggccttcgtaagctcgggcaggggaaacttgaccagggtcgcagggcagcgggatcaaggcctgggccccggggtcggaccctgagcgcgaccggaaggagcaggcggtaggtcagcccttgggcgggcccggcgtctcagtggcgcatttactaatggctcctgggcctcctcgggccacacccgcccctcccgtcaccattgcgtcacgtccgttacgtcaccacccgttgtcacggatccggagggaaaggcggtgccagccctaagtggcaagcgggtgcaccaatgggggtgggaggcttagccccgcctcgggagctcgggttccggcgggttgcatcagctgggtggggcaccgcctggcagcccggactcccccgacatgtgatcggcttcccagggagggcgggaggcccgggcgttccccgagcctggggaagctggccgtcccggactgacctgctcggggagagccagcaaaggacacattcggcctggcccaagccctgacgatttcagtgttgttttctgcacgcgcaaaacacctggggaccgaggggatggcagtggcatcctatctttgacagctctgaacgagcttaacctttttttcagacccctttgctgatgcaagtaagggtgatgacctgcttcctgctggcactgaggattatatccatataagaattcaacagagaaacggcaggaagacccttactactgtccaagggatcgctgatgattacgataaaaagaaactagtgaaggcgtttaagaaagtaggtcttcagtgagattttgggaaggtcataatggatttgtccacaagggggtgccagctgtgttgtatgtattgttagcggaaggggtgataaatgcgttcatgctcttgctaggcctaattcgttttcctttgtgcttgcagaagtttggcctggcaatggtactgttaattggaggcatccgggaattatgggaggaagttaatttcaggttacagggtggacccaacgcaaggaacatatggccagtttccttgttggagattgggattgggctaagggacggttcaggttgaaggtttctggggtttttaagtggtttgtgggttcattgaaggtttaagtgaggatttatttcccttgcaatggagtagaatttcccttctctcccttggccacagggttaaaaacctcacagctttgtataatgtaaccatttgggggtccgctttttaacttgggactagtgtaactccttcatgcaataaactggaaagagccatgctgtctagtcctggaagtccctcattttaaacagaggtcaagcaataggcgcctgggcagtgtcaagcctgaaaccaaggcaataccgtcatgttttcagccnaggcccaggagccctaaggttacaaacaactatgggccgggaacctccttcaggttttccctctggcagagtttccctacccctaaggggattgtttaccacctggaacagtcctcggtgaattttgaggagggagagggtgggggttaagggcaggaaggcaccagctgttacttacttagaaggggagcttttgggtgggtagatccccctggtgtctccaacctgactaggtggacagagctcaaagaggccctcttaaccgctagcgaggtgataggacatctggcttgccacaaaaggtctgttcgaccagacatatcctagcttaaggggatgttccaaacatcagaatgtgaggccaacccttctatcagagttaaacttttgacaagggaacaaatctccaaactgatccgatcagtcgatgtagctagctgtagagcttgccaacttaattagcagcagcttgcccaatgccatgtgaagtaacaaactggtttttggtttttttttgccccttacagttttgaatgttatcgtgtaactgtatttaaacccttgatttaagataagaacttgttttcagaaataaaaaaaaaaaaaaaaaaaaaaaaaaaaaacctgcccgggcggccgctcgagc

SEQ ID NO: 3561 - DNA, 2681 bp, Homo sapiens
  misc_feature (1)...(2681): n = a,t,c or g
ctggaatgtgatgtcttggtcctcttaaaagcagatcagccatgactgaaactcaaggcttagctggtatctatgttgtgctacattaggtgactagaagccacttcttagtgtaatcagctcctgtttccctgtgagccttagttatattttaattcagtggctttgagtcaaggccggttctaattgaggggacccagtgtgcttcagtgttaagagtggggcaatgaagagtgaaccccaatggaagagtgatcccaactttgggaaactatctggtcattcatggaccttaaaaagctgccatggtggtcaaatggcatgtgtttgcacaaaaatgaccgatgtgtttaaccaaagctttgaaatgtgatgaagccaccaacataagcacttgcctaacagaaatcagtatttcttcctacttagaaggcttggggcccagggtaatgaggcaccagatgaagataagatctgcatcaaggaattaaatttccagtttgtccttggggttctttctggcttatgttttttcccccccatctggtaatagtcctcttctgaggattgaaagggagggcacaggaagtttgcggaggaaaggacccagttcccccagtctttgccaccattgcaccatggttgtctcggagtcccttcacctgacctttttagtcagctcagatatttttgtagtttgagaatagacctattcaagagctatcagggttaaaagctgcactgaccaaagctgtacttttaaaacacaacccctgggctagtgatgtctctacttgctctatgagccttttgccagcctcagaataggcgaggtaaccttgaatttcagggccctggaaactctagctgaaacctgcctttcctaatgctcacacaagcaccaggtaccctgagcttatactgagtccagtggttcctattttatgtgtgtgtgtatgtgtgtgtgttgagtaacatgaaacttgggcagtagcagagagcactgaagnttcacatgcaagttctaatctaaagttaagcagtctcttatttgtttcgggactctgatttgactctttttctgatgctttcggcatgtctgcagcctgttctcctagcctgctgcttggagtcaggttgagcatcagtgagatgaagacagtaccttttcctctcacattggcagaatagcacgcactagatgcctgaccttgagctctagtctcccctttaaatcttaccttggcagtaacacattattcctcattcaataatttcaatgctgaaactgaactctattactgaatgccttccaatcagagttcctgatggggggatgcctgtgggggatgggcccacnccctgggggccctggcagatggggtgagttgggtaaggaagatgatgccttagttcctgatagatgctacagatgtagtttggcatttcagtttttgtccagtttgattttcactggggtttgagttcacagcaagctgtgtatgaacttgtgttttgtggtgacacatttaattaatccaattgctaaaaccctgaatctgcttattcttcagcttcacctctgcactaaccccttacccttatggtacgtcaggattttaactagtactgctttgttgactttgggaaatggtgccactcaaaagcaacttcctaacttgaggaataactcctttgtagtttactttctggtactggttggtgccttgtattgggatacagctatattcttagctcaaatgtcctctttttgagagcaaagtagttatccaatggtgagacgaggaccctggacgctcatgagaggccattccttcctgggtgttcggaccagggctctgtgttcagggaaaaccttctgggtggactttgtaagaatccagtttccaaggttagatttcacatccttaatcctgcagaggctagaatttcacagctcgctttggaacatattccaattcagccagttaaaatcagagggccaagtcgtggggggagggggccggtgttgaggagaggtatttttaaagatctggcaacttttcaggattatttgtggagaactctaaggttaagatcaggaaataaaagactgtgtgtgtgtgtgtgtgtgcgtgtgtgtgttcaagtgcctaaatcttgtttacctatcactttaaaaaaataattgaagtgtaagctaaataaaatgccttggagtttttccctggggctagtgagagttggtgcaaattccttgtgtgtgtttgccataggaaggtgagatgaccctcctactaaagaggaagtagcccaaatacagatcctgtgggtgtttttaaaaaaacctcaaccctatctggtgttttattttaatggataaaaatgtaatttttcctaaggtagcaaccttatttcccaaattaatatagatgaaaaatagatacccaattagactaaaattggaaagctttttgttcctatatttgccatagccctttggaaatatttcttagtgcctaggaggtctggggattcctctttcgtggtggtcactaaccttacttgatgcagataaaatcacttgtcaatgcaaaatgtgttagaacttgataaagctttgagtttgagaaataaaggtatatttaaaatttaaataaaacttgtcatttatgctcaaa

SEQ ID NO: 3562 - DNA, 15985 bp, Homo sapiens
  SIMILAR (13210)..(13356): 951254mologous to Homo sapiens HSA,accession number AAR32563,Smith-Waterman Score=250.
gcacaatgaagtgggtaacctttatttcccttctttttctctttagctcggcttattccaggggtgtgtttcgtcgagatgcacgtaagaaatccatttttctattgttcaacttttattctattttcccactaaaataaagttttagtaaactctgcatctttaaagacttattttggcatttatttctaaaatggcatcgtattttgtatttgtgaagtcttacaaggttatcttattaataaaattcaaacatcctaggtaaaaaaaaaaaaaggtcagaattgtttagtgactgtaattttcttttgcgcactaaggaaagtgcaaagtaacttagagtgactgaaacttcacagaatagggttgaagattgaattcataactatcccaaagacctatccattgcactatgctttatttaaaaaccacaaaccctgtgctgttgatctcataaatagaacttgtatttatatttattttcattttagtctgtcttcttggttgctgttgatagacactaaaagagtattagatattatctaagtttgaatataaggctataaatatttaataatttttaaaatagtattcttggtaattgaattattcttctgtttaaaggcagaagaaataattgaacatcatcctgagtttttctgtaggaatcagagcccaatattttgaaacaaatgcataatctaagtcaaatggaaagaaatataaaaagtaacattattacttcttgttttcttcagtatttaacaatccttttttttcttcccttgcccagacaagagtgaggttgctcatcggtttaaagatttgggagaagaaaatttcaaagccttgtaagttaaaatattgatgaatcaaatttaatgtttctaatagtgttgtttattattctaaagtgcttatatttccttgtcatcagggttcagattctaaaacagtgctgcctcgtagagttttctgcgttgaggaagatattctgtatctgggctatccactaaggtcgtcactggtcacatggctattgagtacttcaaatatgaccagtgcaactgagaaacaaaaacttaaattgtatttaattgtagttaatttgaatgtatatagtcacatgtggctaatggctactgtattggacagtacagctctggaacttgcttggtggaaaggactttaatataggtttcctttggtggcttacccactaaatcttctttacatagcaagcattcctgtgcttagttgggaatatttaatttttttttttttttaagacagggtctcgctctgtcgcccaggctggagtgcagtggcgcaatctcggctcactgcaaactccgctcccgggttcacgccattctcctgcctcagcctcccgagtagctgggactacaggcgcccgccatcacgcccggctaatcttttgtatttttagtagagatggggtttcaccgtgtgccaggatggtctcaatctcctgacatcgtgatctgcccacctcggcctcccaaagtgctgggattacaggagtgagtcaccgcgcccggcctatttaaatgttttttaatctagtaaaaaatgagaaaattgtttttttaaaagtctacctaatcctacaggctaattaaagacgtgtgtggggatcaggtgcggtggttcacacctgtaatcccagcactttggaaggctgatgcaggaggattgcttgagcccaggagtacaagaccagcctgggcaagtctctttaaaaaaaacaaaacaaacaaacaaaaaaattaggcatggtggcacatgcctgtagtcctagctacttaggaggctgacgtaggaggatcgtttggacctgagaggtcaaggctacagtgagccatgattgtgccactgcactccagcctgggtgacagagtgagactctgtctcaaaaaagaaaaaggaaatctgtggggtttgttttagttttaagtaattctaaggactttaaaaatgcctagtcttgacaattagatctatttggcatacaatttgcttgcttaatctatgtgtgtgcatagatctactgacacacgcatacatataaacattagggaactaccattctctttgcgtaggaagccacatatgcctatctaggcctcagatcatacctgatatgaataggctttctggataatggtgaagaagatgtataaaagatagaacctatacccatacatgatttgttctctagcgtagcaacctgttacatattaaagttttattatactacatttttctacatcctttgtttcagggtgttgattgcctttgctcagtatcttcagcagtgtccatttgaagatcatgtaaaaattagtgaatgaagtaactgaatttgcaaaaacatgtgttgctgatgagtcagctgaaaattgtgacaaatcacttgtaagtacattctaattgtggagattctttcttctgtttgaagtaatcccaagcatttcaaaggaattttttttaagttttctcaattattattaagtgtcctgatttgtaagaaacactaaaaagttgctcatagactgataagccattgtttcttttgtgatagagatgctttagctatgtccacagttttaaaatcatttctttattgagaccaaacacaacagtcatggtgtatttaaatggcaatttgtcatttataaacacctctttttaaaatttgaggtttggtttctttttgtagaggctaatagggatatgatagcatgtatttatttatttatttatcttattttattatagtaagaacccttaacatgagatctaccctgttatatttttaagtgtacaatccattattgttaactacgggtacactgttgtatagcttactcatcttgctgtattaaaactttgtgcccattgattagtaacccctcgtttcgtcctcccccagccactggcaaccagcattatactctttgattctatgagtttgactactttagctaccttatataagtggtattatgtactgtttatctttttatgactgacttatttcccttagcatagtgcattcaaagtccaaccatgttgttgcctattgcagaatttccttcttttcaaggctgaataatattccagtgcatgtgtgtaccacattttctttatccattaatttgttgattgatagacatttaggttggttttctacatcttgactatcatgaatagtgttgcaatgaacacaggagagctactatctcttagagatgatatcatggtttttatcatcagaaaacacccactgatttctatgctaattttgttacctgggtggaataatagtacagctatatattcctcattttagatatctttgtatttctacatacaataaaaaagcagagtacttagtcatgttgaagaactttaaacttttagtatttccagatcaatcttcaaaacaaggacaggtttatctttctctcaccactcaatctatatatacctcttgtgggcaaggccagtttttatcactggagcctttcccctttttattatgtacctctccctcacagcagagtcaggactttaactttacacaatactatggctctacatatgaaatcttaaaaatacataaaaattaataaattcbgtctagagtagtatattttccctggggttacgattactttcataataaaaattagagataaggaaaggactcatttattggaaagtgattttaggtaacatttctggaagaaaaatctctatatcttaatagtcacttaatctatgatggattgtgttactcctcagttttcaatggcatatattaaaacatggccctctaaaaagggggcaaatgaaatgagaaactctctgaatgtttttctcccctaggtgaattcacctgctgcttagaagcttattttctcttgatttctgttataatgattgctcttaccctttagttttaagtttcaaaataggagtcatataactttccttaaagctattgactgtctttttgtcctgttttattcaccatgagttatagtgtgacagttaattcttatgaaaattatatagagatggttaaatcatcagaaactgtaaaccaacgattgggaggggaagcggatttttaaatgatttcctgaccaagcttaaccagtatattaaatcctttgtactgttctttggctataaagaaaaaaggtactgtccagcaactgaaacctagctttcttccatttagcataccctttttggagacaaattatgcacagttgcaactcttcgtgaaacctatggtgaaatggctgactgctgtgcaaaacaagaacctgagagaaatgaatgcttcttgcaacacaaagatgacaacccaaacctcccccgattggtgagaccagaggttgatgtgatgtgcactgcttttcatgacaatggagagacatttttgaaaaagtaagtaatcagatgtttatagttcaaaattaaaaagcatggagtaactccataggccaacactctataaaaattaccataacaaaaatattttcaacattaagacttggaagttttgttatgatgattttttaaagaagtagtatttgataccacaaaattctacacagcaaaaaatatgatcaaagatattttgaagtttattgaaacaggatacaatctttctcaaaaatttaagatagacaaattctttaatgtattccgcagatatgtatatatggttgttataattgatttcgttttagtcagcaacattatattgccaaaatttaaccatttatgcacacacacacacacacacacacacttaacccttttttccacatacttaaagaatgacagagacaagaccatcatgtgcaaattgagcttaattggttaattagatatctttggaatttggaggttctggggagaatgtcgattacaattatttctgtaatattgtctgctatagaaaagtgactgtttttcttttttaaaatttagatacttatatgaaattgccagaagacatccttacttttatgccccggaactccttttctttgctaaaaggtataaagctgcttttacagaatgttgccaagctgctgataaagctgcctgcctgttgccaaaggtattatgcacacgaatagaaaaaaagagtttattatccaacctgattttgtccattttgtggctagatttagggaccctgagtgtctgatacaaactttcccacatggtcaaaaaagccttccttttatctgtcttgaaaatctttcatctttgaaggcctacactctcgtttcttcttttaagatttgccaatgctgatctgtcagaggtaatcactgtgcatgtgtttaaagatttcaccactttttctgctggtgatcactatagtgaaatactgaaacttgtttgtcaaattgcacagcaaggggacacagttcttgtttatcttttcatgataatttttagtagggagggaattcaaagtagagaattttactgcatctagatgcctgagttcatgcattcattccataaatatatattatggaatgctttattttcttttctgaggagtttactgatgttggtggaggagagactgaaatgaattatacacaaaatttaaaaattagcaaaattgcagcccctgggatattagcgtactctttctctgacttttctcccacttttaaggctctttttcctggcaatgtttccagttggtttctaactacatagggaattccgctgtgaccagaatgatcgaatgatctttccttttcttagagagcaaaatcattattcgctaaagggagtacttgggaatttaggcataaattatgccttcaaaatttaatttggcacagtctcatctgagcttatggaggggtgtttcatgtagaatttttcttctaattttcatcaaattattcctttttgtagctcgatgaacttcgggatgaagggaaggcttcgtctgccaaacagagactcaagtgtgccagtctccaaaaatttggagaaagagctttcaaagcatggtaaatacttttaaacatagttggcatctttataacgatgtaaatgataatgcttcagtgacaaattgtacatttttctgtattttgcaaagtgctgtcaaatacatttctttggttgtctaacaggtagcactctaatagaggtcaaaatcagaatatcaatgacaatttgacattatttttaatcttttcttttctaaatagttgaataatttagaggacgctgtcctttttgtcctaaaaaaagggacacatatttaagttctatttatttataaaatcttggactcttattctaatggttcattatttttatagagctgtaggcatggttctttatttaattttttaaagttatttttaatttttgtggatatagagtaggtatacatatttacggggtatatgagatattttgatctaagtatacaacatatataatccctttatttaattttatcttccccccaatgatctaaaactatttgcttgtccttttctgtcttatagttaaattcagtcaccaactaagttgaagttacttcttatttttgcatagctccagctctgatcttcatctcatgtttttgcctgagcctctgttttcatattacttagttggttctgggagcatactttaatagccgagtcaagaaaaatactagctgccccgtcacccacactcctcacctgctagtcaacagcaaatcaacacaacaggaaataaaatgaaaataatagacattatgtatgctctctagaaactgtcaattgaactgtatttgctcatcattcctaccatctacaccaccaaaatcaacccaatttatgaaaaaaaaaccgccccaccatacaattctacacagataaacaggctatgattggttttgggaaagcagtcacctttacctgatttaggcaactgtgaaatgactagagaatgccgaaaattagacgtttacatcttgtcatagactttgcagatagtgctggatctttctttttataagtaagatcaataaaaactccctcattctgtagaagttatgatttcttttctaagagacctttagaagtcagaaaaaatgtgtttcccttgcgaaaaaagataactggagtttgtgtagtacttcccagattataaaatgcttttgtatgtattatctaatttaatcctcaaaacttcttcaatttagcatgttgtcatgacactgcagaggctgaagctcagagacgctgagccctctgctaacaagtcctactgctaacaagtgataaagcccgagctggaagtcacatctggactccaaacctgatgcttctcagcctgttgccccttttagagttcctttttaatttctgcttttatgacttgctagatttctacctaccacacacactcttaaatggataattctgccctcaggataagtgattaccatttggttcacaactcgaactaatgaattttaaaaattatttctgtatgtccattttgaattttcttatgagaaatagtatttgcctagtgttttcatataaaatctcgcatgataataccattttgattggcgattttctttttagggcagtagctcgcctgagccagagatttcccaaagctgagtttgcagaagtttccaagttagtgacagatcttaccaaagtccacacggaatgctgccatggagatctgcttgaatgtgctgatgacagggtaaagagtcgtcgatatgctttttggtagcttgcatgctcaagttggtagaatggatgcgtttggtatcattggtgatagctgacagtgggttggattgtcttctgtgctttcgtctgtcctatcttcaatctttccctgcctatggtggtggtacctttctgtttttaacctgctataaattaccagataaacccattcactgatttgtaactcctttcagtcatgctctaactgtaaatgaaggcttaaactgaagtagaacagttacaaggttttacttggcagaacatcttgcaaggtagatgtctaagaagatttttttttctttttttaagacagagtttcgctcttgtttcccaggctggggtgcaatggtgtgatcttggctcagcgcaacctctgcctcctgggttcaagtgattttcatgcctcagcctcccaagtagctgggattacaggcatgcgccaccacacctggctaattttgtatttttagtagaggcggggtttcaccatattgtccagactggtctcgaactcctgacctcaggtgatccacccgccttggcctcccaaagtgctgggattacaggcatgagccaccttgcccagcctaagaagattttttgagggaggtaggtggacttggagaaggtcactacttgaagagatttttggaaatgatgtatttttcttctctatattccttccctaaattcactctgtttgttagatgtgcaaatatttggaatgatatctcttttctcaaaacttataatattttctttctccctttcttcaagattaaacttatgggcaaatactagaatcctaatctctcatggcactttctggaaaatttaaggcggttattttatatatgtaagcagggcctatgactatgatcttgattcatttttcaaaaatcttctatattttatttagttatttggtttcaaaaggcctgcacttaattttgggggattatttggaaaaccagcattgagttttaatgaaaaaaacttaaatgccctaacagtagaaatataaaattaataaataactgagctgagcacctgctactgattagtctattttacttccgtgggaatgtttttgtagtcctatctccatctccaggtttaggagcaaacagagtatgttcatagaaggaatatgtgtatggtcttagaatacaatgaacatgttctgccaacttaataaaggtctgaggagaaagtgtagcaatgtcccttcgtgttgaacaatttccaccaacttacttataggcgccccttgccccgtatatctgtgaaaatcaagattcgctctccagtaaactgaaggaatgctgtgaaaaacctctgttggaaaaatcccactgcattgccgaagtggaaaatgatgagatgcctgctgacttgccttcattagctgctgattttgttgaaagtaaggatgtttgcaaaaactatgctcaggcaaacgatgtcttcctgggcatgtacgtagataagaaattattcttttatagctttggcatgacctcacaacttaggaggatagcctaggcttttctgtggagttcctacaatttccctgctgcccacaatgtttcttcctccttccctttcccacgctttcccaatttttgacatcgttaattcgttgaatacattgtcataacataatacatgttcacggcaaagctcaacattccttactccttaggggtatttctgaaaatacgtctagaaacattttgtgtatatataaattatgtatacttcagtcattcattccaagtgtatttcttgaacatctataatatatgtgtgtgactatgtattgcctgtctatctaactaatctaatctaatctagtctatctatctactctatgcaatgatagcaaagaagtataaaaagaaatatagagtctgacacaggtgctttatatttggtgaaaagaccagaagttcagtatcctggcaatatggtaggcaactcaattacaaaataaatgtttacgtattgtcagaagttgtggtgataaactgcatttttgttgttggattatgataatgcactaaataatatttcctaaaattatgtaccctacaagatttcactcatacagagaagaaagagaatattttaagaacatatctctgcccatctatttatcagaatccttttgagatgtagtttaaatcaaacaacctgttaataaaaataacaagtatcattcatcaaagacttcatatgtgccaagcagtgtgtgttttgtgtagattatgtcatatagttctcataatccaccttccgagacagatactatttattttttgagacagagttttactcttgttgcccaggctggagtgcaatggtgccatctcggctcactataaccttcgcctcccaggttcaagcgattctcctgcctcagcctcctgggattacaggcatgcaccaccatgcctggctaattttgtatttttactagagatggggtttcaccatgttggtcagactggtctcaaactcctgacctctggtgatatgcctgcctcagcctcctaaagtgctgggattacaggcatgagccactgtgcccagccgacagatactattattatttccattctaccgagaaggagactaaggctctgatcatttaaataagttgcctaaggtgatgcagtgatataagtagcagagctaggaattgagccttggtaactttaactctggaccccaagtccttagctactaagctttactgcatggggtttagtcaaattaagacttttggaatatgcgttacttttgagattagctttgtgatattttttgtgctcatttgtccaacaaagtctattttattttcatcttaattcgctttttgtatgaatatccaagaaggcatcctgattactctgtcgtgctgctgctgagacttgccaagacatatgaaaccactctagagaagtgctgtgccggtgcagatcctcatgaatgctatgccaaagtggtaggtttattgttcgcaaaaaatgtagttctttgactgatgattccaataatgagaaagaaaaataatgcaagaatgtaaaatgatatacagtgcaatttagatcttttcttgagatcgtttcaattctggaatcttaaacatgaaagaaaaagtagccttagaatgattaacaaaatttagactagttagaatagaaagatctgaatagagcaatctctacacacttttgatctttttttctctttttcacaatcctgagaacaaaaaaaaattaaatttaaatgttaattagaagatatttaacttagatgtaaagtgagttaacctgattccaggattcatcacgtactagaattagtatcttatggtaaattatagaacctatccctttagaatattttcaaatctttttgaggatgtttaggaatagttttacaagaaattaagttaggagaggaaatctgttctggaggatttttagggttcccactagcatatgtaatggtttctgaactattcagaatcagagaaaactcatttttcctgctttcaagaagctactgtatgccaggcaccatgcacaaacaatgaccaacgtaaaatctctcattttggagagcctggaatctaactggaaaggtgaactaataataatactatgtacaatcatagccatcatttattaaacttttcttctatgcaaggcactgtttaatttccttagcttacctggtttacagagcagctctatgagatgagtgccatctttgcccctattttagggataaggattccgaaatgtggagatggtaagtcaaattgcacaactgaagcatgacttacatgacttggctcaaatactggtcattgaactccagagcctgaatattcttaaccacttacatgatgcaagctgaccaaataaatagttcgaatgtattgtgacagagcggcattgatattcatctattcatgtggctttgagtaggaagaagaaaggatatcattctgaccagagcggtgaaaaacaacctgcatctgatcctgaggcataatactattaacacaattcttttatgtttcagttcgatgaatttaaacctcttgtggaagagcctcagaaatttaatcaaacaaaattgtgagctttttgagcagcttggagagtacaaattccagaatgcgtaagtaatttttattgactgattttttttatcaatttgtaattatttaagacttaatatagagccacctagcatagaacttttcagaatgaaaatacattgcatatttctaatcactctttgtcaagaaagataggagaggagagataaaatagttgatggggtggagaggtctatatttgwatgtagtctaaaaattgttctcttaagattggaagtatgtaggctgggagggtaaataccaaatcttggtatatcagaactgagcatgtcccttgacggttaagaaatagttaatgggcaaatagagcatggcaatattttgtagagcagcaagtagtaggccttgaatagatgtcgctcaaaaagtaatatgtaagctgaacacaaaaatgtaacaaatgaatttagatacatatttgaatattaaattcaggttgtttgggagatgcacctagtctttgatggttaaacctttccctccatagaagagacagagacagaatggcttgctggactaatgtcccaattcaatagagtcttatctacgaaggttaaaaacaagaagagacatattatacagtagatatttcttgtgtggctcatacacatggtgctcttctgattatggattttagagataataacagtgaacaagacatagtttctttcctcgagtagattaaagtcctacattgacttttaatggtgactggcattcttaatacatgattattatatattaggtactatgtcacattaattataatactttactatttttaatttaacccttgaactatccctattgagtcagatatatttccttccattttctacttgtatctttcaagtttagcatatgctgatacatatgaagctctctccaggttttattgaaagaagaaattaatcaatttattactgtccctgaattaggcaactcactttcccaagattatgcccgtggtacaggtggaactcaaagccaagtttaactagttgttcaggagaatgttttctaccctccactaacccactactctgcagatggagataatatgatgaatggaacatagcaacatcttagttgattccggccaagtgttctctgttttatctactatgttagacagtttcttgccttgctgaaaacacatgacttctttttttcaggctattagttcgttacaccaagaaagtaccccaagtgtcaactccaactcttgtagaggtctcaagaaacctaggaaaagtcagcagcaaatgttgtaaacatcctgaagcaaaaagaatgccctgtgcagaagactatgtgagtctttaaaaacatataataaattaataatgaaaaaattttccctttagatattgctaatgctacctttcataagcagaaggaagtaatgtgtgtgtgtgcatgttttgtgcatgtgtgtgtgcatgcacgtgtgtgtatgtgtgatattggcagtcaaggccccgaggatgataattttttttttttttttgagacggagtctcgctttgttgtccaggctggagtgcagtggtgccatctcggctcactgcaacctccgcctcccaagttcaagccattctcctgcctcagcctcccaagtagctgggactacaggtgcatgccaccatgcctggctaattttttgtatttttagtagaaaattttcagcttcacctcttttgaatttctgctctcctgcctgttctttagctatccgtggtcctgaaccaggttatgtgtgttggatggagaaacgcccagaaggggacagagtcaccaatggctgcacagaaatccttgggtgaacaggcgaccatgcttttcagctctgggaagtcgaagaaaacatacgttccccaaagagttttaatgcttgaaacattcacccttccatgcagatatatgcacacttttctgagaaggagagacaaatcaaagaaacaaacgtgaggagtatttcattactgcatgtgtttgtagtcttgatagcaagaactgtcaattcaagctagcaactttttcctgaagtagtgattatatttcttagaggaaagtattggagtgttgcccttattatgctgataagagtacccagaataaaatgaataactttttaaagataaaatcctctgttataatattgctaaaattattcagagtaatattgtggattaaagccacaatagaataacatgttagaccatattcagtagaaaaagatgaccaattaactgataaatttgtgcacatggcaaattagttaatgggaaccataggagaatttatttctagatgtaaataattattttaagtttgccctatggtggccccacacatgagacaaacccccaagatgtgacttttgagaatgagacttggataaaaaacatgtagaaatgcaagccctgaagctcaactccctattgctatcacaggggttataattgcataaaatttagctatagaaagttgctgtcatctcttgtgggctgtactcctcgtctaggcttaagagtaatattgcaaaacctgtcatgcccacaccaatctctccctggcattgttgtctttgcagatgtcagtgaacgcgacccagcagctcccatgagtttgcatagccttattttctatagcctccccactattagctttgaagggagcaaagtttaagaaccaaatataaagtttctcatctttatagatgagacccattttaaataaagtccaagataattaaatttttaaggatcatttttagctctttaatagcaataaaactcaatatgacataatatggcacttccaaaatctgaataatatataattgcaatgacatacttcttttcagagatttactgaaaagaaatttgttgacactacataacgtgatgagtggtttatactgattgtttcagttggtcttcccaccaactccatgaaagtggattttattatcctcatcatgcagatgagaatattgagacttatagcggtatgcctggcccaagtactcagagttgcctggctccaagatttataatcttaaatgatgggactaccatccttactctctccatttttctatacgtgagtaatgttttttctgttttttttttttctttttccattcaaactcagtgcacttgttgagctcgtgaaacacaagcccaaggcaacaaaagagcaactgaaagttgttatggatgatttcgcagcttttgtagagaagtgctgcaaggctgacgataaggagacctgctttgccgaggaggtactacagttctcttcattttaatatgtccagtattcatttttgcatgtttggttaggctagggcttacggatttatatatcaaaggaggctttgtacatgtgggcccgggatcttattttacacacaattgtcttacaaaatgactaaaacagcactttgtttttatctcctgctctattgtgccatactgttgaatgtttataatgcatgttctgtttccaaatttgtgatgcttatgaatattaataggaatatttgtaaggcctgaaatattttgatcatgaaatcaaaatattaatttatttaaacatttacttgaaatgtggtggtttgtgatttagttgattttataggctagtgggagaatttacattcaaatgtctaaatcacttaaaatttccctttatggcctgacagtaacttttttttattcatttggggacaactatgtccgtgagcttccatccagagattatagtagtaaattgtaattaaaggctatgatgcacgtgaaatcactttgcaatcatcaatagcttcataaatgttaattttgtatcctaatagtaatgctaatattttcctaacatctgtcatgtctttgtgttcagggtcaaaaacttgttgctgcaagtcaagctgccttaggcttataac

SEQ ID NO: 3563 - DNA, 311 bp, Homo sapiens
  misc_feature (1)...(311): n = a,t,c or g
atcatggatcattgttattagctttgtggctttgtgaaattctaaaggaatcaaataattcatcatgatttaaattttctagagattttgatttttttataatgtttctttcctgtagatcagtgtnnnnnnnnnnnnnnnnnnnnnnnnnnnnnnnnnnnnnnnnnngttccccactctttctttctcctttgctttttcttctctttcatacatatatgcgtgcctagatctaggaggaaacgtgttaaaaattgttttaaactacatcttgaaaatattgaagaatttgtttaagcaaaggggtcagc

SEQ ID NO: 3564 - DNA, 3212 bp, Homo sapiens
  SIMILAR (17)..(565): 911254mologous to Homo sapiens rap2,accession number A08695,Smith-Waterman Score=866.
  misc_feature (1)...(3212): n = a,t,c or g
ggtgaaggtgagactcatgagggaatacaaggtagtggtgttagggagtggaggggttggcaaatctgcccttactgtgcagtttgtcactgggactttcattgagaaatatgaccccaccattgaagatttctaccgcaaagagatcgaagtggactcttccccctccgtgctggaaattctggacaccgcaggaactgagcagtttgcctccatgagagatctctacatcaaaaacggccaaggtttcatcctggtttatagcctggttaatcaacagtcttttcaggatatcaagccaatgagagatcaaattgtcagagtgaagagatatgaaaaagtcccactaatcctagtaggaaataaagtggatctggaaccagaaagagaggttatgtcttcagaaggcagagctctggctcaagaatggggctgtcctttcatggagacatcggcaaaaagtaaatcaatggtggatgaactttttgctgagatcgtcaggcaaatgaactattcatccctgccggagaagcaagatcagtgttgtacaacttgtgtcgtccagtaaagaagataacctcaatcatggccataccgagcagataaaactcagaggaaatttgcacagatgctgctttggagaactttacaacctgggttgcagaactgagccttggtaaacctgtctctattacagcatgttgccatacatctatttaagtgcataaggtctttggccttcaagatccatcgaccttaaacaggaatgcttagcacgtttaccatacgtttaaaatccattctttatcaatcagtccttttatagctttctaagttcttattgatggctaatatacaagggttaatttttaatattttaattgatttctttaatcagtttctcgacttgtatttattaaatactcaaactcagtattacctactcaatgccttttaaaagaaagttataatggagaaaaaattgagccttaaacaaatggttacttctgtatattacctcgtaccagtgcttcatcctatttgtaaaatctttctcctttaaaattattggttaatactttgagactttgtttacgtgtggcagtgttgtaaaaagaaactaaagatcacattttacctgtatggatggaatatcccttttcttcaagtgcagtttgtgatgtgttttgttttttttttttttttttttgtaattaacatgttctgaaggttacaattgatatttgaaattgactgtagagcatttagttgaagagttaagcattcagtttccataaggttttcacatgtgttaatctcatttccagcattgaattgcggcagtaacattttcctttctgtgaagtttctaaattaagttatgacctatttagcaatgcctttgaaaagggatattgtatccatggtaaattaattgtatacctaaacagagatagctcatctttgcctatcaggcttgtaattgacatctagtagacttctgcacatgtaaaattgaattcaaataaaatcatacacactttctagttcttaatatttgtctttctgaataatagtttaaaagcaatattttggttaaagttttcttggcaccaatcacaattgctttttagttatttctcaagaagcatggtcgtaattagagacaaaatctgtgtaacaggagggagaatagcgccaagtctctgggctattttttatttttgcaaatgtgctttctaatagccattgccttccatgttgtttacctaatcagcatatttttgtctgaatacttgaacattttaacagtaacgcaggtgtagaatcagaaaggaaacttatgcagagtaatattttggttcagttttaacatcgtgacaatgagggctttttctagcaatgatttttaaattgtgtaagtttgacagtattttattgttgggtttttatttgattttagttgtgtgcttttcatttgcagaagttagtaactgcagctcacctactgcaccaaagttctcgattttaggagcccagctttagtcatttgaacatgcttctaaataaaataaaacaaaaccaaaactatacttttgatctataataagagctcaataactttgtcaaggaaagctctaatatatgcagtgatggtttatgaaagggtgtggcaattttaaatttatattgtgtgtgatgttcaaataaagtggtatctacattcatgtgatttatgggtcagcatgaccattaattactgagtagaaattgactaaactttgatttactttcttgtaaatcgtggagcatttgattcctgagctaatagcgtcctagtggactcttgttcttaaattttgaattttatggggagattgtaaagatagaggcaattgaaacattgttccttatttatgaactgcttgaagtgaatacttaatttaagtttgcactttaataccaaacttaaaacctaacactcatttaaaagtaggttaagtgatcatgggatcattgttattagctttgtggctttgtgaaattctaaaggaatcaaataattcatcatgatttaaattttctagagattttgatttttttataatgtttctttcctgtagattgtgttcttgtttctctctctctctctctctctctctctctctctctctctctctctctctctctctcaaaattacagtgttcattgtcattgacctcagcagcaaatttgacttgaattcacttaggatcgcagggaatcagggggaaagtgattttaaaggtggtntccccccagcacattttaaggaaaaggggacccaaaagttattttagccttccctcaatagattgcatgttgccttattaggataataaattaatattaaatgcaatatatgtcttgtctttattatggcatctatttaggagttgttcaaatcactgcagtagggctctgcaaataaaataatgtaacctattattaagggtttaaatgtcttgtacttttacaagtgaaaggtaaattttcaaataccaagtacaaacattgaacaattacctataaagatttgtaaaagtaaaatttttccaatagatttcattcttgtcattttgtaagacgaccctgcagtccacctgtttgtaacttttttaataaaatagacatctgtattactgaaaaaaaaaaaaaaagggcggccgct

SEQ ID NO: 3565 - DNA, 608 bp, Homo sapiens
ttttttttttttttacaagaatatttagagtaactttattatgtgtaatacctctaacctggaaatgacccttgttaattaattaacaggagagcagatggataaattgtgtgtattacaatagaatactcctcagcaagggaggaggtcatacacaacaacgtggatgaatcccaaaaacctgacactcaaaactctccacaatctggtcctaacattcattagttccatagtcacttctttcccgctaatcacaccatggtctattttaattctagaagattgtcaattatctttgatcagaagcattaaagttctgacctattttccgttcttctatgtcaaaagtgatctgctatctttcctaaatattttgtattttcttatccccaaacctttccccatatcattcctcctacctagaatgcccttgctgctctcctatgcttatccaaagccccatctttcaaggacaagttcaaaacctacacttacccaccagaatgctttggggctgtcatagcactcattctggacagcacgcacatggcactcagttacaaaaatgccacatatggttaggtctttttttacccacgtctcgtgcc

SEQ ID NO: 3566 - DNA, 615 bp, Homo sapiens
  SIMILAR (123)..(149): 771254mologous to Homo sapiens Human secreted protein, SEQ ID NO: 5301,accession number AAG01220,Smith-Waterman Score=40.
acgagggctccagtcaggccaatacgctccgctcacggaaggaaaacagaaataacttgctggcttgtctggagtcacatgtacttaggtgacaatttacagaaagtcatctctgcagcttgatgggcgacaaccccttttcaaccaaaaagtaattcaaaaatggcagaactgtttatggaatgtgaagaagaggagctggaaccatggcagaagaaagtaaaagaagttgaggatgacgatgatgatgagccaatctttgttggcgagatatcaagttcaaaaccagcaatttcaaatattttgaacagagttaaccccagctcatattcaaggggactaaagaatggtgcactcagtcgaggtattactgctgcattcaagcctacaagtcaacactacacgaatccaacatcaaatcccagtgcctgcctcaccaataaaattttcatcctgagtctagatcttcagatagttctgttattgttcagcctttttctaaacctgtaagtgtttctaaaactatacggccagctcagggatccattggatgttgtttatcaatatcaacagtacccagttacaattctggactgtcataagtagtcatccagt

SEQ ID NO: 3567 - DNA, 657 bp, Homo sapiens
  misc_feature (1)...(657): n = a,t,c or g
attgaaaatgatatgcgctgacaacaccaaacgcggagctaggcactaggggatgtcccagtcttttgcattaaaaaatattgtgacaatcttttttaaaataatttttatcttcatcaaagcagcctatggtttaaatgtcaaaaagaactaaaaggggcctctctgggtcagcttcttaatacagagggtgaacctcagaggcccagtcaacaaaggtctttgggtctggatgttggggttggtctaatcaattaaattcaaactttccactcattctcatttttagcctcatccctctttctgccgtagctaggcctctatgtgctgagccctgtgtgagcatagggagttgccccttccacttctctgttcaatcaggaaccatttcacatttgctttgcatcttccccaaaaaatgttggacgtccctcggttatatcctttttttcctcattctctgtaattcttagttttcaggagggaggaggaggatggangtatatgttagttactgccttactgggaatccttttttttaatgtattatcagctttccctttttaggcaggactacctttatggaggttatgtgcttcttcctttaagccatcctttctactctgaaataatagtgatattagggagtagctgggg

SEQ ID NO: 3568 - DNA, 969 bp, Homo sapiens
  SIMILAR (1)..(966): 831254mologous to Homo sapiens 26S protease (S4) regulatory subunit,accession number L02426,Smith-Waterman Score=1397.
atgtcagtaggaaacttggaagagatcatcgatgacaatcatgccattgtgtctacatctgtgggctcagaacactatgacagcattatttcatttgtagagaaggatctgctggaacctggctgctcgattctgctcagacacaaggtacatgcggtgataggggtgctgatggatgatacgggtcccctggtcacaatgatgaaggtggagaaggccccccaggagacctatgtcaatactggggggttggacaaccaaattcaggaaattaaggaatctatggagcttcctctcccccatcctgaatattatgaagagatgggtacaaagcctcctaaaggggtcattctctgtggtccacctggcacagccactttcttgagagtggttggctctgaacttattcagaagtacctaggtgatgggcccaaactcgtacggcaagtatttcaagttgctgaagaacatgcaccatccatcatgtttactgatgaaattgaagccattgggacaaaaagatatgactccaattctggtggtgagagagaaattcagcaaacaatgttggaattggaactgttgaaccaattgggtggatttgattctagggaagatgtgaaagttatcatggccacaaaacaagtagaaactttggatccagtacttatcagaccaggccgcattgacaagaagatcgagttccacctgcctgatgaaaagactaagaagcacatctttcagattcacacaagcaggatgacactggccaatgatgtaaccctggacgacttgatcatggctaaagatgacttctctggtgctgacatcaaggcaatctgtacagaagctggtctgatggccttaagagaacatagaatgaaagcaacaaatgaagacttcaaaaaatctatagaaagtgttctttataagaaacacgaaggcatccctgaggggctttatctctag

SEQ ID NO: 3569 - DNA, 963 bp, Homo sapiens
  SIMILAR (751)..(927): 981254mologous to Homo sapiens 26S protease (S4) regulatory subunit,accession number L02426,Smith-Waterman Score=291.
atgtgggagagtttggaacttcctagagacttggagggctcagaagactttttgaatggctttaaccaaaatgctgatgtggacaatgaagtccaggctaaggtggtctcagatggagatgaagaacttgttaggaactggagcaaaggcaaatctggtgaaacattatatctccgccttcgtaaagcaggcaataaatttctgccgggtggtattttacataatattgtcattaaacatggtctatctttagcggaagaagcagacggtaataagtcaaataggggtgaagaattatctgaatctgaggagaagttgttctatacaagtatccacgaagctaatcagttaaataaaactgtaaagtcagcccagatcagtgaatcagatttcaattttccatctgtttcaagtgagtcacatcctacagattcagggtcaatcttatgtgagtgcacagtccagaggccagcagtgcaaggaccaggtgccagcagagccacactcctgctgcagcctctagtggagaatcctcccttgcttccaccttctagtggctgctgccactccttgtggctgcatcgccccaatctctgcttccatttccacatggccttttcctctgtctatccatccaaccaagtcctagcaatgacaacaggactctcttgtagtgacagcagcaaggaggttctggaggagacaagcaagagtggagaacgggctgtcccacattcggcagattttttgaagaagcgcatctttcagattcacacaagcaggatgacgctggctgatgatgtaaccctggacgacctgatcatggctaaagatgacctctctggtgctgacatcaaggcaatctgtacagaagctggtctgatggccttaagagaacgtagaatgaaagtaacaaatgaagactacattgacttttctaaaatagaaatcagggaaggttaa

SEQ ID NO: 3570 - DNA, 2212 bp, Homo sapiens
  SIMILAR (1746)..(1922): 931254mologous to Homo sapiens 26S protease (S4) regulatory subunit,accession number L02426,Smith-Waterman Score=267.
  misc_feature (1)...(2212): n = a,t,c or g
catgtttagtaggtagctccgcatagctcttctcttgagaatgagcaatctcagggggctctccctatggccacagttcgtgctgtgcgtggcgttccaagcatgctttaggctatgctctcacaggagccagctaacatctgcacagtaactgtgaacgtctggagagactggtcagttatgaataaccatgtcttgagcacccgccctgatccaggaccatctggactctagggacacagttgtgagcacaagtctctgccctggaggagctcacaggttgtagggatcagataccaaacatggaaacagaataaatgatacaatttcagacacagaaactgctatgaaaaaatatgatctgtaacttggctgatgggagcnnnnnnnnnnnnnnnnnnnnnnnnnnnnnnnnnnnnnnnnnnnnnnnnnnnnnnnnnnnnnnnnnnnnnnnnnnnnnnnnnnnnnnnnnnnnnnnnnnnnnnnnnnnnnnnnnnnnnttgatgtctagtgagggctgctctctgcttccgagatggcacctattctgcagaggagacaaatgctcaggggacaaacaaaagagcaaaaagggcctacactagttccctgcagcattttttataaggaatacatgctgtataaggcctttttctctttttagaaggaactcatgctgtattaagctctgcctcatgcctttagccctttccaaaaggcctcatcttttagccacacagtagggattaagtttcaacacataaatttggggaaatacattcagaccatggcaaggggtgctgaatttattttttccgagcataattgagggagtgccatgtgagttgaaacaggaatgtttgttaaggtgttttgtcacaatgaggtctttgctgtaattccccttgagcaggcgatcagttgggttttcattccttcccttttttttttttccaaagatatgactccaattctgatggtaagagagaaattcagcgaacaatgttggaactgctgaaccagttggatggatttgattctaggggagatgtgaaagttatcatggcctcaaaccgaatagaaactttggatccagcacttatcagaccaggttaaatttgctttggtttcatcatggagattaactctgtgtatatatttgtgtttaagtgtgctttgggaggcctataaaatgatacataaaaaagcatatactgcagtgaaacttaggataatttacaaaaaaataggtcctcttgagatgagggttaaaacagagcatgatatggtctgtgcaccttggccctttgaattccagtcttatgtcttgtcttttcttttccataacattccctttttagcctcaagaacttgctgctttttctggaagaaataattcatgtgatggtaggatttgtcctttttacattcaggtagcatcagaagaaacagtgatttgtttgctgtcttttgtaatgtttttaacacaataggtctgcccagtttcactcaggaattgctcctttcatttatttctgaaggtatcaaagcagagagagtttcttttaaatgaagagaattcaaatgtagaaatctacaaactacaaaaatatatgtttactttttaaaatttagacatccttcccacagaattctgtccgactgaaacttcgtatgtaaggagatggggctgaggcctctgaggccatggccgagcctggggtttgggatgttgggtgtgacttccaaatctctttgtacctgcaggccgcattgacaggaagattgagttccccctgcctgatgaaaagacgaagaagcgcatctttcagattcacacaagcaggatgacgctggctgatgatgtaaccctggacgacctgatcatggctaaagatgacctctctggtgctgacatcaaggtgagagcctagccgtgtcagcttatttctgggaatgtggccgtcaatcaggaaagagtctatatgtgctcttgggatggtggttggcctggacaggtgggtgtctgtattttaatcatcatattggtttacgattacatccaaatggtatatgtgttgatattgaagtcattcttaatgcatcattttatgcagtgaatgacgctaaatcacctggagccacaaggctgagtcgctggtactaagccttaggcccaggtgactttctcaaggtgtcccgggaattccgg

SEQ ID NO: 3571 - DNA, 1668 bp, Homo sapiens
  SIMILAR (719)..(1417): 381254mologous to Homo sapiens 26S protease (S4) regulatory subunit,accession number L02426,Smith-Waterman Score=208.
aattccggcggaagtggtggaggaacttccggcagcggcagctcaagtggccaaggcaagatgggtcaaagtcagagtggtggtcatggtcctggaggtggcaagaaggatgacgaggacaagaaaaagaaatatgaacctcctgtaccaactagagtggggaaaaagaagaagaaaacaaagggaccagatgctgccagcaaactgccactggtgacacctcacactcagtgccggttaaaattactgaagttagagagaattaaagactatcttctcatggaggaagaattcattagaaatcaggaacaaatgaaaccattagaagaaaagcaagaggaggaaagatcaaaagtggatgatctgagggggaccccgatgtcagtaggaaccttggaagagattattgatgacaatcatgccatcgtgtctacatctgtgggctcagaacactacgtcagcattctttcatttgtagacaaggatctgctggaacctggctgctcggtcctgctcaaccacaaggtgcatgccgtgataggggtgctgatggatgacacggatcccctggtcacagtgatgaaggtagaaaaggccccccaggagacctatgcagatattggggggttggacaaccaaattcaggaaattaaggaatctgtggagcttcctctcacccatcctgaatattatgaagagatgggtataaagcctcctaagggggtccatccttttggtcccacctggccacgggtaaaacctttttgcccaaggcagtagcaaaccaaaccctcagccactttcttgagagtggttggctctgaacttattcagaagtacctaggtgatgggcccaaaacccctcccgggaattgttccggagtttctgaagaactggccccgtccctccggtttattgatagaattttgcccccattgggacacaaaagatatgacctccaattcctggtgtgagaagagaattacagcgaacaatgttggaattggaactgctgaacccagttgggatgggatttgattcttaggggagattgtgaaagttatcatgggccacaaaccgaataggaaactttgggatccagcacttatcagacccaggcccgcatttgacagtaagattgagttgccccctgcatgcatgaaaagacgaagaagcgcatctttcagattcacacaagcaggatgacgctggctgatgatgtaccccctggacgaccctgatccatgggctaaagattgacctctcttggtgcttgacattcaagggcaatctgtacagaagctggtcttgatgggcctttaaggagaacgtagaatgaaagtaacaaatgaagacttcaaaaaatctaaagaaaatgttctttataagaaacaggaaggcacccctgagggggtggtatctctaatgaaccatggcttgtcatcaggaaaatggttgggagatttctcaatccctgaaagggatgaggttggggggagttgcccagaggaatccctgttcccactgattttttattagcaaaacatcctgtgtcttttggaataacaagtgtaaagtgcccattgggtggcctgttggtcactgtgcatcagtctgctttcccaataaagcgtgctctttcccaaaaaaaaaaaaaaaagaacaaa

SEQ ID NO: 3572 - DNA, 667 bp, Homo sapiens
gaggacaccactcaccacagatagccacatgggggttgcactatgcataagagagagcaaccagggactgtggtatgtaagcttttctgaatcaagaaggtgtgatagcccctgattcccttgaaaggatgcaactggcttgtttttaatttttgagacagggtctcgctctgtcactcctgctggagcgcagtggtgcaattacagctcactgcagcctgaactttccaggtttcagggatcctcctacctcagcctcccgagtgggctggggaccataggtgtgcgacacccacacccagctgtaactgggcttgtttgaaataaactctgtgtgtaggaaatgaaattcaaacttggctacaaataaattaataaacaggaactcttgcttagtcctcttgattaaaagggtagttaggctaggacacattatacaaaagagcagagtgggaagggggatttgtactcagaccatttgaggtaatactagtatcaccagatatgaaggtagcacatgatattgaccttaaatttagggctcacaccataatgtggctgacatcatccacagtagtcttggtgaattaaaaagcaatccaaaattatcacagaattccaatggttcctaatagcagtggtagtaccaagtcattatactcgtgcc

SEQ ID NO: 3573 - DNA, 1670 bp, Homo sapiens
ttctctagaccagcgtggtggaattctaaactgctgtccagattgttaatttcatttatatttattttaattaatttgttttgaatatggacaaagccttttctggggtgtgtgtgtgtgtgtatgtttgttttttaagtcgtcattattcattcgtattctttttctgtgtaatgtaatcatataaagttactttggacagagacccagttaattttctcttttgataggatacatggtttagataaggtataaagtgtccctttttattctagaggcttttcctttaattcagagattagtggagataataacatcagtcaaggctaatgtggtacatggaacttgctaatggaggttggacattctgtttcagtcttacatggatattgtttcattggtgttgaggaagaaaaaaattagatactaccatgcattgggacagcataattctaatattacattgaatatggctttttaaaaataagtattaaaaagccaatcgttttctccatttatctatcttttttgtttgtttttaatttggttgattgatatgcacccaggccgtcttatttttacttgttaaatgtctgtctaggaagaactgtgattggaaaggaattaattattatacaaataaatctggtaggatatgagtggagtaagtttgcttgaaacagaagtatattttctactttgaatcacctcaccagagtcatctgtcaagaattatgtataacaatttatctttattgcctacatacaacatactttttctgaattaagataacttctatttgtgagttgaacttcattatctgccattttgtgggaatccaaccttacattctttgggtgggactagagctgattgtcaccacaagggtatatgacaactctgttctaagacttatacctattatatagggttatacctttttttcttatgcctcagctctgtacctgacaatttatgattcagtggagccaagctagaaggaacaaaggtcatctaacactgtgatggggatgaattcctgagttttacctgcacaatgaggtggtgccccggaattcacaacagagtagtgattgatagagcataagatggctgctccagatgactcttgggtttagtgtacttgtgattgaacaagattttttatctatgaagcttgattctacaaccaaaataatagaaatggggggggggggggaatcatgtctgcttatgctttttaaaagcttatagtttaagttaaaaggtaaaatgtaaaaaactgattaaacctatacaagtctggccaatgagctctgcatgaggaaatggaaggaggaatattgaaaatgattcctaggaaagtgaacgtaagaaaggaaaatgggttttcccttttctgatcatgggcctctggaaagtattccatggcctttacccagcattcagtataaaccagagataaggacatatgtacttacgtgtgtctgtgagtgtgtgtgtgtctgagtgttattctgaacagcttgtaaatattgtagttgtttaaaatggaaaataaaagctgagttcttttggcaaatatattgcatcaaaaatacagtattgacagtggataaaacactgaggaaataaattttttttcattttgcaaaaaaaaaaaaaaaaa

SEQ ID NO: 3574 - DNA, 2945 bp, Homo sapiens
  SIMILAR (331)..(149): 751254mologous to Homo sapiens Human secreted protein, SEQ ID NO: 7231,accession number AAG03150,Smith-Waterman Score=213.
  misc_feature (1)...(2945): n = a,t,c or g
gacatcattaacggattttttttttttaacagcaaaaatggaagataattaaatgcagcacagtagttgtaaaacagatttcattgtgttatacatcacttcataaagtaagcatagttcccagttcttgcacattatgctttttgcagcattgtaccacagaataatgactccctaataactcagctgaaaaatatttagatctacttgctctaagaataaggtcaacattaaacattctcaggatgaaaagcttgctggatgaaatagtgcaccatcaggaataaaggcatgcaatatatttacagtcagatgaaacaagtgtgtccataaatcaaccaaaagaccatctcctcctttagggaaatacatggtattgcttagcccagtaccaataagttaacgtcgtgtgaaataattttgggtaattctggccctccttgaatctcatacagcccaaaccaacccagaaggcttaccccgctgggttgatggtggcttatccatttggcatctgggaaacttctcttattttgctgggatatgggctgtctagtgggtgggcttactggacttggcctaagaaaaaataagtccatcattcagattaatctgggaggctaattctaaaatcggattttatgagaattgctagatttggggctaggttaacctcatttccaaaagaaaaactcttactggagagaaaccatcatgtgggctcattctattgtgtttatatatttcacagtaaaatgattcagtcttgccaggttccatattaggaggattagaactacatcactcaatattttcttttgtctggtctaaaaatattatcaagttaaattatggacttatggattttttccattccaggacttcatttgcggggagccttcagaaaaaacaggtcacttgcagtaatatagaaggactaaactgtgattctggaagacccgggtttcccctttcctgtcccacccagtgagtcctttgtgtgtctgttaacagtgatttctggctcagtgaaatgtgataatgacttcatatttgtgaagagctaagtatcctgatattttgatcttttcaagcagataatttcaggcagaaatgatatagcttgtcttttgttaggtctcactaggggaaaaaaaaatcgctcacaagagccttgcctacctcaacaagaagtgtctctacttatacaaatggcatggtttccttttctggttactgggtccacaggtggcctcgcccatttgactttgagtttgcaaataaagtacatccttgggtttccttatctttaaacaagtaaagataaattaggttaaagtgggaagaaggttcacaggatgagaacatcaatttcagctcacagcaggtatgggtctaaagtgcctctttgcaggaaagaaagccaccaccagcagtccacctgctctcaggggaagggaccaggcattggaaaggctgcctcgggagaagtgactcaacaaaatcataagccggatgtagctttgtttcctctttctaatacgggcatatttattgccatctcaattgaagccgtgcttcaattaatggaagaaaatgcacatgaaagttctgccagaaactaaaatggctcattgtaggcaggatgtgttattaatatttaatatctatccaaccctgttctggcagggctgttctctcctcagtacttaccagagagggagtagagctaatgcacagccatactcctccccttttcatgaaatagtttcatctttacctagaggtcacgctacagatgaagagtaaaatgaaagactgaatatgatcaatactaattaaaatgggggggaggtattgaaaagagtcctaaaatgggcctacaaataatggagatacattggactcttccgtcattaacaagatttagaataggctgggaaatttcctgtttggaactgtgaactgtgacgggtgtggtccaacagaaaaaacactggagagtcatggataccgaaatacaatctgagaagttacggaaagcacacaatgccctagggcaagcttgtccaacctgtggcccgcatgaagtccaacacaaatttttaaactttcttaaaacagtctgagatttttttttttttttttgcaattttctatttttatttttttaagctcatcaactatggttagtgttagtgtgttttacatgtggcccaagaaaattcttccaatgcggtccagggaagctaaaatattggacaccccctgcctaggggaacattgtttcgtctacttggttagttcgtcctaattgcattttacctgcagtccaaaggttattttaggatgataggaactgcaaggaaccccaaacccaaaggaaaggaatcgttgaagtgggttgggggagagggagggtcatttctgaggatacatttcnggggggggaaatacaagtttgaggaggagggagctggggaggttacctgtggttgccaagtgtttttcctttgatggggaaggagtaagttggcaaagggaccaggaatctgtgtgtacatttcctggctcctgtttcccttaaccaccatcccttcaggggcattctctgggcacctttggggtcgggtaagatgctctctactgccctccgttttagctgcctttatctcgtctatatggcacttttctgcgtgaaaagacatttgccttacagggatgaaactggacttgcaagagtttgctgtagaaggtgttcaagtcaaggaagatgctcagaaatgaccactgagagggtggcatcagtgctgacttaaaaaaaaaaaaaaatctgacctcacatgttcatttttccaaaagtagagaggctcagtttctagcctctcaaaccataaggaagtaatcaaaatgagagtagatggaaatcatctcttaccttaagg

SEQ ID NO: 3575 - DNA, 1231 bp, Homo sapiens
  SIMILAR (1174)..(455): 1001254mologous to Homo sapiens CD7 antigen protein,accession number M37271,Smith-Waterman Score=1251.
aaaaggaagcacagaagcctttatttctggtacggctgggtgggggactggtctcctcccgtcctctgccgggctgcctgggggttgggggcctgctggtgggtgggccggcactgacaggagagggccgcgtgccaggcccatcccacagaaaagccctccttggccatggtcgggagatgcagccaaaggacagtcaggcttcctcccggtggcggcgtgggctgggcagggaaggcttcccggaggaggcatcattgtccactgagaagcaccgtggggcctggccactgcctgtgtgtctgcttggagctgggcacggctgggcccttcaaactctgctgcagccgtgggaggacagcagggtgaggggtgtggcagggtggggggcatggtggggcagggaaggtgctggggggaccacaggcgggacgtgcaggggcccactgggtcactggtactggttgggggaggacagcgtgttgcagcggctgtgcgacatgtcctcgtacaccacacatgccgccgaattcttatcccgccacgagcacagtttctttatctgtgtcctcgccagcacacacgccacccccaggcccagcccgaggaggaaggagatcaccgccagggccgcagggagggcagaggctgctggcgggtcagggagggcagaggctgtctgcgggtcagggagggcggagcctgtcggtggggcagggagggcagaggcccttggtggggcgtccgagcatctgtgccatccttgggactgttcctctgtcaccaggaccagggtgccggagccgtagacattgacctccgtgatggcctggcaggtgtaggtgccagtgtccgacagctgcaggcggtgcatggtgatagtcaggttgtcctgggaccctgagaagtcgatgcggccccggaaccgtctgtccgtagtgggcaccaccccgtcctcgtagtaaatgatgtcttggggctgtggcccgagctgcctcaggtagatcccacgcaggcccccgctggtggagcaggtgatgttgacggaggctcccacggggacagtcgtgcagtggggagactgctgcacctcttgggcagccagggccccaggcaggccgcgagccagcgccagaagcaggggcagcagcaggagcctcggaggcccggccatgttccccacacccagctctcccagccgggcgagtgcagctgagcctctctgggtcta

SEQ ID NO: 3576 - DNA, 1860 bp, Homo sapiens
  SIMILAR (344)..(472): 1001254mologous to Escherichia coli NikC,accession number X73143,Smith-Waterman Score=203.
atggtgttagccgacccccggaaccctccgggaagcccaccgggccccacgcggggcgccaccgacccggtccccaaggcgcgcgccgggggacgcggacgccgggccgatcagtggccggcggcggcgccccacgaggcggtgccgggttcggtcccaggcggggccaccaacgaacgtgaagccgatcatatggaagttcctgttcccagtgggacagtatcaggtgaaaggacagctgaatcgatagaagacactggggagtctgtattcaaggagtactttgaattggaagattctaaattccatccgtttcattcgacggtgtcctggggtgtttccgcgcgatattttctcgcggctgatggcagcgacccgcgtgtcgctcggttcggtaatggcctgcctgctgctggtgctgacattagggctggttattggcggcagcgccgggttgattggcgggcgcgttgcagagaatgcgccaacgtagcagaaaacaacggctttgttttgcttgcatggactctgaaagtttacaataggcccttccgatttggcacagtacccaaccggtattgcagagaccatgaagaccgggaggacgacaacaaaatttccgataataagaggaataaaaatataagaggagagatacgagaacaggatatcatcaaacaacaatacgggagcgtccctcggcgcctttgcgggcccgaggaggagcggctggcggatggggggagtgtgacccaccctgggtcccgagaagcttctgccgcgtttgggcccggcttcccagtgtgttggtacgcgtggtccgtcgggagctgggtgtgcgcgcccggcgatttctttcgcgtgtggttccctcctcggcgagtcggctctccgccggctcccgtgttaagtagtgaccggagccgacgaccgtgtttgagtggcacggggtcgggcccgcctggccctgggaaagcgtcccacggtgggggcgcgccggtctcccggagcgggactgggtcggaggatgtccgagaatcacgagggacggtggtggtggcgtgtccggttcgtggctgcggtcgctccggggcccactgtggcggtgccccctcgctaccgagctgccaccgcagctccggaagccgagagcacgatctcaaagcggccgccagatggagcccgacaaccgccgcggacgtcagcgagacagatccggctggcagggcgggccgtggaccgcgaaagcgaaaccgggagtcgagaagctctttccgaggccgaaaacgcaggccctctgccccaaccccacacaaacggtgcccaaaacgcgtctatgccttgatcccgacagagtcagaagacaacccacggcgtatagtcaagttcgaccgtcttctcagcgctccgccagggccgtgggccgaccccggcggggccgatccgagggcctcactaaaccatccaatcggtagtagcgacgggcgttacgcgacccccgacggtcggcgtcccccacttcttagaggcaagtggcgttcaccacccgagattgacatacaggtctgtgatgcccttagagtccggggctgcacgcgcgctacactgactggctcagcgtgtgcctaccctacgccggcaggcgcgggtaacccgttgaaccccattcgtgatggggatcggggattgcaattattccccatgaacgaggaattcccagtaagtgcgggtcataagcttgcgttgattaagtccctgccctttgtacacaccgcccgtcgctactaccgattggatggtttagtgaggccctcggatcggccccgccggggtcggcccacggccctggcggagcgctga

SEQ ID NO: 3577 - DNA, 343 bp, Homo sapiens
caatctctgccaagtttttattccttttctctttcattcgcttctttatgtcttcaagactatcttgaaaggactttttcaggcatctttccttggccatcttttgcttcttcctctttcagggactccaggaaggccggggggaggtggggctggcggaagtggacgcggcgaccctcctgccgcaggcgcgtccagaacgataccttggccactacttctgcaacagctatcttcctcctcctcacatttcaaggctcttcgaagctctccagccacggctagccccgcgcactgggccctccaggaccgtaccaccgtccgccgtcgcctggaactaccg

SEQ ID NO: 3578 - DNA, 368 bp, Homo sapiens
  SIMILAR (1)..(297): 521254mologous to Homo sapiens unnamed protein product,accession number AK024334,Smith-Waterman Score=220.
atctgtcgttttaatccttatgtctttttggcagctaaggcggaccagctccaggtaaggactactcaattgaccttaaatcttgctggttatatcactgcattaatcatagcacattgcaaacatgtaatatctctactttgatatctgggtcacattcctgggctatggattctcattaatctgtctgagccttgtgatgccacccctgtttggcactttgtgaaacttcttctaactaaacttactcatcatgcctgtagagcctcaggcattcataatttttgctattgtttctttggtcacactaatcacttctgctgtaatgtcctctgtagctttgcatagttctgttcaaatggctcagt

SEQ ID NO: 3579 - DNA, 1677 bp, Homo sapiens
  SIMILAR (1145)..(471): 961254mologous to Homo sapiens CD7 antigen protein,accession number M37271,Smith-Waterman Score=1128.
tttttttttttcaaaaaaggaagcacagaagcctttatttctggtacggctgggtgggggactggtctcctcccgtcctctgccgggctgcctgggggttgggggcctgctggtgggtgggccggcactgacaggagagggccgcgtgcccaggcccatcccacagaaaagccctccttggccatggtcgggagatgcagccaaaggacagtcaggcttcctcccggtggcggcgtgggcttgggcaaggaaggcttcccggaggaggcatcattgtccactgagaagcaccgtggggcctggccactgcctgtgtgtctgcttggagctgggcacggctgggcccttcaaactctgctgcagccgtgggaggacagcagggtgaggggtgtggcagggtggggggcatggtggggcagggaaggtgctggggggaccacaggcgggacgtgcaggggcccactgggtcactggtactggttgggggaggacagcgtgttgcagcggctgtgcgacatgtcctcgtacaccacacatgccgccgaattcttatcccgccacgagcacagtttctttatctgtgtcctcgccagcacacacgccacccccaggcccagcccgaggaggaaggagatcaccgccagggccgcagggagggcagaggctgctggcgggtcagggagggcagaggctgtctgcgggtcagggagggcggagcctgtcggtggggcagggagggcagaggcccttggtggggcgtccgagcatctgtgccatccttgggactgttcctctgtcaccaggaccagggtgccggagccgtagacattgacctccgtgatggcctggcaggtgtaggtgccagtgtccgacagctgcaggcggtgcatggtgatagtcaggttgtcctgggaccctgagaagtcgatgcggccccggaaccgtctgtccgtagtgggcaccaccccgtcctcgtagtaaatgatgtcttggggctgtggcccgagctgcctcaggtagatcccacgcaggcccccgctggtggagcaggtgatgttgacggaggctcccacggggacagtcgtgcagtggggagactgctgcacctctgggaggacctgggctgtcaccatcagtctggccagaaggacagagaatgtcctccctgcaggggacagtggtggggatggtggggccctgagacagcccagggctgacatgtcgccaaagacacggtgccttacggggcatggagcagatctgggcaccggctgtggtgttgggggaggtgctgtcctcgtgttccgagactgtgggcttcttcctcccaaagcagcggccctgcctggacagccccggccactccccaccgggtccaccctttttccttctcttaaatgagtcctcagacactggaggccgctcagcaccccacccgcttcctgggggctgtgctgtggctcagactgggggctctgagctcatggggcagggagagctccggagctgtggccatggagagcctgggaagctcttaccttgggcagccagggccccaggcaggccgcgagccagcgccagaagcaggggcagcagcaggagcctcggaggcccggccatgttccccacacccagctctcccagccgggcgagtgcagctgagcctctctgggtcta

SEQ ID NO: 3580 - DNA, 949 bp, Homo sapiens
gtagtgggtgttgagcttgaacgctttcttaattggtggctgcttttaggcctactatgggtgttaaattttttactctctctacaaagttctttttcaaacttttccttacggtacttgttgactattcggtctcggggccggtatttagccttagatggaagtttaccacccgctttgggctgcattcccaagcaacccgacttccgggaagacccgggcgccggcgcgccgggggccgctaccggcctcacaccgtccacgggctgggcctcgatcagaaggacttgggccccccacgagcggcgccggggagcgggtcttcccgtacgccacatgtcccgcgcaccgccgcggggcggggattcgagcgctgggctcttccctgttcactcgccgtttactgagggaatcctggttagtttcttttcctccgctgactaatatgcttaaattcagcgggtcgccacgtctgctcgtgccgaattcggcacgaactgtgatgcccttagatgtccggggctgcacgcgcgctacactgactggctcagcgtgtgcctaccctacgccggcaggcgcgggtaacccgttgaaccccattcgtgatggggatcggggattgcaattatttccccatgaacgaggaattcccagtaagtgcgggtcataagcttgcgttgattaaggccctgccctttgtacacaccgcccgtcgctactaccgattggatggtttagtgaggccctcggatcggccccgccggggtcggcccacggccctggcggagcgctgagaagacggtcgaacttgactatctagaggaagtaaaagtcgtaacaagggttccgtaggtgaacctgcggaaggatcattaacggagcccggagggcgaggcccgcggcggcgccgccgccgcgcgcatccctccgcacacccaccccatgtatt

SEQ ID NO: 3581 - DNA, 443 bp, Homo sapiens
  SIMILAR (118)..(372): 851254mologous to Homo sapiens Human secreted protein encoded by gene 18 clone HSLFM29,accession number AAW67824,Smith-Waterman Score=393.
  misc_feature (1)...(443): n = a,t,c or g
cagccaaccgagggcgttcctgtcggggctgcagcggcgggagggagcccagtggaggcgccctccganngcgccactgcccatgctgaccacccagccctccggctgcttgatgtnatgagtaacaccactgtgcccaatgccccccaggccaacagcgactccatggtgggctatgtgttggggcccttcttcctcatcaccctggtcggggtggtggtggctgtgggtggaccggctgcgcatcacctgctccccatgtacagctatgacccagctgaggaactgcatgaggctgagcaggagctgctctctgacatgggagaccccaaggtggtacatggctggcagagtggctaccagcacaagcggatncactgctggatgtcaagacgtgacctganccccttnccccacccttcaaaagcctgggggttcttgaa

SEQ ID NO: 3582 - DNA, 979 bp, Homo sapiens
  SIMILAR (745)..(428): 701254mologous to Homo sapiens Human secreted protein encoded by gene 18 clone HSLFM29,accession number AAW67824,Smith-Waterman Score=319.
tttttttttttttttagccacaaaacattttatttacaaaatatatactgaatactatacatctggccccatcaccatggaaacaactccaaagcctgcctggggatttgtgcccaagcccagcccaggagggctagagaaagcaaaggtgtctaccagccgccgccatcccagaaggaaagcctcttcccatgagtgcctgtgggtgggccggtgagctcaacacccacaaagggcagaaggcctgggggcagtgaggtgatggtgagggcatgggaagcagatgctgcttagggtgggtggagggagaaatggagacccagcacccagcaggggtgagccaggtgacagcaggggaagcagatggcagggccccaggcagtccaggaccccaggctctgaagggtggggcaagggggtcaggtcacgtcttgacatccagcagtggcatccgcttgtgctggtagcccatcttccaaagcatggtacccctttgggttctccccatgtcaagaagagcagctccctgctcagcctacatgcaagttcctaaagctgggtccatagctgtacatggggagcaggtgcatggcgcagcccggtccacccgctttttcttctgtacatacattaccacagccaccaccaccccgaccagggtgatgaggaagaagggccccaacacatagcccaccatggagtcgctgttggcctggggggcattgggcacagtggtgttactcatgacatcagcagccggagggctgggtggtcagcatgggcagctggcgcttcgggagggcgcctccactgggctccctcccgccgctgcagccccgacaggaacgccctcggttggctcccgggccccggaaaagccgtcaggcgcgtgatcaaaggacccggggaaatgggccgggcctcagcacccggacgcagccaatccggtagcggaaagccggtggcctggagatttctg

SEQ ID NO: 3583 - DNA, 6577 bp, Homo sapiens
  SIMILAR (6453)..(6418): 1001254mologous to Homo sapiens Human cerebral protein- 1,accession number AAW82841,Smith-Waterman Score=68.
aattgttttatttatttattgagacaggatctcagttatccaggccggagtacagtggcacaatcatagctcactacagcctgaaattcctgggctcaagcaatcctcccacctcagccttcctagtagctgggatcacagataagagccactgcacttggcccaaaaacatatttaaaatgttaatactttagattggtttcagtcatgttatagggaataatggaacgtatttataccagagtattaacaatgtagaaggacccttgaaacgaagccaaaaagataggagctgtggcaattaaggagacttccaagaagtctaatactaagtagggcatccctgcttaatcaataacacttcatttcgtgaccatgagacaagaaaactacagagacttcatccctaacatccttcagctccagaaccaatgccaaatcacctaactccaggttatatgacaaaaaaaaacatctgtttaggacattctttagtgggatttgtttttctggtcacagtcacaatgacggatttaaaaaaaaaagagtatctcaacttcctattgggagtacatgttttcccctgattttaaactcatgggacaaaaagaaagtgttgactggcatctggcaagataattaaatatctgaaacaccctgaaggaaacaaagagggtactgtggtcaagagtaaggtggacaggataccatagaagatatatccagtgtatataatgataactgctaaaacaccctcaaaactcactagcagaatgtaatcaagtttattttcttgttcaaagtccaatatggatgtttttggtcaagtagctattatgccctaaatagtaactcaggtattcagacttcttctatgctatgactccatcaccgtcaaaacatgtgcttcaaggttaccttgaagaggaaggaggaagagaataatggaaatggctcagccaccctttaactgccttggtctagtattgaaacatcacttccactcattttccactgttgagaactactcacataggcctagatgcatggagctgggaaatgcagtttacctgtgtccagaaagaggacatttgggtgagcatctggccagtttcttccacagaagcaaaggtaatagtggtatgaattcaggaagatgaaaatgagctcactggggaaagagtattcaaggaagatggagcatgtgcaaagactctcagtacaaacagtttggaaagcttgaggaataaaaagcaagtctgtgtggctggagttttgtgaaaggggaggagtgggttaagatgcagatggtgatggtgacggaggcctgggcaagatcacacggggcctgaaaagtttgtcttttgttctcgaggcagtgagaatccattgaaggattttaagcagagaagtgacataagctgatttacattttaaaaagatcacatggctgtgtggaaaattaattgctttagggacacgagtagaagcaattagaccaccagtaagacagttactgcaggaagttgggtatccctaaaacccagatggctggtcagagaattcacctgggaaggaggatgaccaggggatgaaaggttctaattactggtctctgtgaaaagctgtagagagttttgtgcagttacataaatggttgggtttggagctgagcggtgtctctgccaagatcatgttgtttcttttagaactgtgttcccttaggactggactatattatgggaacagaagctggagcacaccaataactgcagaagcagtaactatttatttggagaactctcaaagggatgctgaacaagcatgaggcacggataaccaaacccaattttattcttgtctcttaccaccctccaaattttattcactgggaggtactctccctgctatggaaaaaagctgcagcgaggttgtgatgttcttaatagatagtcctgtgatcagtttaaggaacaaacataatctcaattaattagaatgtctaatcctgtgtaacaataatctgcacctgttgcagttttaaatccctttttcctctcccagctctgccccagctaagtctaggagcctgcactgggaaagggaggagtgattggtatgctcttccctctcctcggctcctctctacctaatcactgctgattgctctgggcccaagtgatgaggagaggtaaacagataaatcattttgccctgactgggtatttctatgcactgtgggcctgaaagatatttcctctcccctattctcactctcaaatgataaactgggttcctggtcccccctgaaaaaaaatcaaagcaatcagaaatgaacttctggggccctatcaggaactctggaagagggctttcataatggagcaacctcttaccactgccatttacctcaaacaggcccctccacattactcagcaatccttaccccactgcattctgagttctctctcatctcaatagcactcgacagctaacaacctgcccatcctcccataaaaaaaaaaaaaaaaaaaaaaacactggctgggcacagtggctcatgcctgtaatcccagcactttgggaggccgaggcaggccgatcactcgaggtcaggagttcgagaccagcctggccaacatggtgaaaccccgtcactactaaaaatacaaaaattagctgggcgtggtggcatgtgcctgtattcccagctactcgggagtctgaggcaggagaagtgcttgaaccagcaggcagaggtttcagtgacctgagatcacgccaccgcattccagcctgggccacagagcaagactctgtcttaaaaaaaaaaaaaaaaaaaaattaactctcctggttttactcctacatctctgggtgaaccttctcctcttccatcaccttcactgcttcattttcctttacccatccatgacatgctcctcagttctattctgagccattttctcttctcattatcttaccctgaatatctcatctattctgactttaattaccacctctaggctgctgattcccagacccccagcacagatttcacgcatgtcccacttcctaaaatccaacactttgaatggcatcaccagcctacccacagttgagcaacctggaacttacttcagattcctctcttaccaacctcaacatcccaccaattctacctaatgaagttctcctgtctgcctacttcttccatcatgactagtcaacagtgccctcatcttgtgccctagtacctgggtttctataacacccctgttctcatctatcccactcaactggaccctgtcattccttatctctccctaggtgaataagtacactggctatatctcaaatgacaagctccgggaatacaaagataaacatggcttgagaaaacaacagccaaatgcacaaaggaatcacaatgcaatatttagaagctgaagtagcactcttcacatagtactttgagagtacagatgaagaactgattttgctttgggagtagaataggaaacaactaggctgttcggaaagatgagcaaactgccagtccgatgaatatccagcagaaagaacagtacgtgtagaggcactgtgtagtgcctgcctaatgattcacagcccagcctccaaacatgccctctggactacagcctgtttcaaaacctccatccccttattagaggcatccaactggctcagggcatagaacctatgatctcccaatgggtactgtcaggtattcctggaaacaagtacaagaggccatatctttatacctgggcacatggcagataccttttgggggaggcctagaatctatcattcaaactcaccttccctcagcaccttgcctatagctttcccaggacatgctgatctgagtccactgcaaggcagagatagtggacagactcttccgccaatgaacagcccaatgcccccaagcccacatggcatcaacaagttgtttatgaacagagacccagctccctcactacccctccaaggacagaagctcagaatctattaaaagtcattaaatagcctatgaagcaggcctgttgaaaggtctagcctctcccagaggcttccttagtcaacaaatccattctttacccctcagcctccaaccagcctagggaagatcttcaaaaaacaataaggcttacaacacataatagtcatagctagtttactgagcacctcctatgttcccagccctggctacagatttctccagttaacccacacaaccaccctgcaagacaaaaattctaccattttccaaatgaggaatgtgatatacagagattaaatgactttaagtgcctctgggtagcaggccaagaattaaatccaggtctacctgattccaaaatctgtgctctcagctatatacatcccaaagtcccacaggacaataggtgttgggagtggcttgatgctatatggttccaaaaatggagatgaggggagaggggaaagataaaccactagaaatgctcggtatggggacaaccaaacagtctcaagttggtggctcagactgatgtcttgagccaagatgttggtggacaaccagttgcctcagagtcaaacagcaacagctgcctgtctgcaaccttgaaggcctgggcaaactgaagctgaaggagcagaagctatgggtgagcagaggaagctgatctgtagacagatcagatgacagcagagtggagatggcaggacaggaaggccatgtggcttcttagttggaaagaagagcaaaacctaaagatgccttgaattccaaaccatctagttttcataacacctgaagtgtcatgagacagatatccccatgttctcacaataaactctttattgtttagctagccccagtgactttatgcatcttataaccaagaagccttcagtagagcaagtctgagccagaggttttatcacactttgtcctcagggtccaccaggaaccaggtcttggctcacagccaggctggaaacagtcttcacagttctgagcctggagtttgagatctgcctcccctttcaaggaagatccagaggtcacctgcgcttgtagagacatggctgaagctgcaggcctgaaagctgagccttgggccctaccagagggggcccagtcttttggaaatcaaacaagaagaaatggctgttggtcaggtccttggagacaatcttgaagcctagcttggtcacagcccgcagaaaggttcgaacatcctcaaagcggctgctgacctcagccactttcaggagaccccctggcttcagtactctatttgcctcctctaggaagtccctgatgttggttcccatcagtgaaaggcaaaacacagccacatccacagactcatcctccagaggaacctgggccatgtcacacacagtgaccctagggtccagagaagccaagtcaaagcaatgcacagggttccggatacttgaagccaagcggcaatccccacagccgaagtcagccaccactagggatgcaggccgctggcgaagatccctggcgatgcggtccactggctgcagtggccacttcttcacttggctctggaagccgcggtggtagagaagaaaagcctcagggtcttcctggaagagacgctgtgcagcactgctgggccctgagtacaactgttcattgaggtagcgaaatcgggccccatccagccgctgtgccatgcgggctcgcaaagcccctgcccgagcctcatggctgtctgtcctgggaacaggagacacctctgtcttctctgtgggggcctcagctggggcctggtctggcacctgaggtggctgaaacttgttcttacatcttctcttattcttttgccggttccgccactgcttgcggcttaatgtatgagggggtttaggggaagtggacccagggctttgctttggtggatcatttgtagtactacccttccaggctttgggacctgtttggtcaacattgtccaggtgctgggctgaatttataggggcatgtttctggcatttcctctttcttttctcatcttcagcagagtcactgccaacaagagcctgtttgtggcattttcttcttcctttctacttcttcctcagagtcactgcaaggtgggccctgtttttgacatttcttcttccctttcttccctacttcagcagaggcactggcaaatgatgcctttttggggcatttcttcttcctttcctcctcctcctcctcagagtcacttatacataggctggggggatgcttggaaagagatgctgcctctagggcccgtaatgtggccaagagctggcggcgcttggagcccttgttttgcgaggaggccgcaggcggaggtcgtgagattacgggcccaaggcccgggctaacttggggccgcctcggcccactcaggctcttcgaacatgagggtcgggagggcagggtcgccgagtccccgctcttctccacgtgcacagcgctcctctggaagtcggagcgctcagacctgccagaaccgaccacgaaatcgtcgacccgggaattgcgga

SEQ ID NO: 3584 - DNA, 488 bp, Homo sapiens
  SIMILAR (100)..(62): 691254mologous to Homo sapiens Unknown (protein for IMAGE:3621638),accession number BC004388,Smith-Waterman Score=46.
ccaagaacatacaaaagaccgtagcgacaaccatttctgacgccttcaacttttaaattcaaattacgtgaaaccaccaagcctcagtgggggtttccccagaggaatccaagaccccccggccggttgccaagccgccggaatttcagcaggagaggaaggctcacccatcccaaccgcaatgcgatgcccgggagactggagaagctcaggcaggcttggaagccaatccccggcatacagcagctctcgggaatgcagagccctagagcaagaccaagcggcctcggccgacactgagagcctccagggagaggtcaggtctctctttctgtcctatttctcccttcgacttccctcccagcaggctgctattgagcattcagcaatcgccagacaaagcccttctggtctgcagaacgcactccggcaagcccaccgggagaaccaaagccgcctcctcgcccctgtggggaaaatggcgctcg

SEQ ID NO: 3585 - DNA, 351 bp, Homo sapiens
  misc_feature (1)...(351): n = a,t,c or g
cggacgcgtgggatacttcatgaagtaattttgactcatgcagtnnnnnnnnnnnnnnnnnnnnnnnnnnnnnnnnnnnnnnnnnnnnnnnnncagtgtttcatcaggtccttccatctctgggagttttttcaacccatatttctagaaattacagctgccagtttatagtagtttgagcagaggatgatttgcaaaaataaaaataaagttattttactctcnnnnnnnnnnnnnnnnnnnnnnnnnnnnnnnnnnnnagggggggcgggnnnnnnnnnnnncacaacccccccccgccggcgcggaaaaaagcaattttttttacctcccaaacaataaacacgcccc

SEQ ID NO: 3586 - DNA, 2381 bp, Homo sapiens
  SIMILAR (2238)..(2125): 1001254mologous to Mus musculus putative,accession number AK003478,Smith-Waterman Score=196.
cttcccccggggaaagactgggccatgtgggtaatttcctccgagcctaataataaataaggctctttaaggtttaaaagtgttcaattcggggctagaggccactctggtcctcaggcacatgcagttccctccccgcaaccctaaaaaaaccctccctcctgccccaaaaggattagagttgttccccggccttcatgagccctaatacctataaaaccaagcagctactccctgtcaagggcattaattgtagtaaatggggaactgtgtgtttgcataactttagtaaaggctgcctaaaaactgttctatacaacaaaattttgcaagatatgtgtccactttaatgtatctttcacattgaaaacaaaagccaatatattttataattacagcctataatcctaagtttttaaaatatataaccatagatgttatatttccccttcaggaactgtagtagtgttcttaataagggctcactgttagtcaaatcttcatctccaaataatacaaatttgaatgttcaacaggtcattcaaataaacatcatataactcaaaattaagacattcatactatagaaaccagtctttaattactaaagttaacatatattattgcaaactaacatagctcaatctatatttgctacactcctaaagtggccgcttatcagtaatggggaaacatttattattgacatgcattactgtgaacaagaaaataaatagggttttgaaaatatctcttaaaaatttaattttaattaacaaaaataaccattcaggttgctgaacattaaaatggccaatctattgaaaatggcttcaataattgcttttaaaaatgaatacaaaactaaacagtgattaaggtgctagcctcatcaataggacaattaaaatctaaaaacattagtgttgattttctataataaacttaagccaaaaacaatgacctcaatatttacttaagacttcttgttttcatacttttctcctcattaatataaaaacaaagagctcaaggcctcaccttggtttattcactgctggttttctatgtgctgaaactagactgtcaactctgtaagagcttggaccaagtctgtcttgttcaccactatgtcctacagcactctgcacagtgcctgggaaataggaggtgatcaacgaatatctcaataactgaatcaatgcaagaggagagtaaaataactttatttttatttttgcaaatcatcctctgctcaaactactataaactggcagctgtaatttctagaaatatgggttgaaaaaaactcccagagatggaaggacctgatgaaacactgaaacacacaaatacacacacacacacacacacacacacacacacacacacacacacacgactgcatgagtcaaaattacttcatgaagtatgagatgtcaacattatgtaaataaaatttaatattgaaaaagtgatctgggaaccccgtgaaattttaacccaaaaaattttggaggaaatcacaatgggttaaagaaaacaccacaaaatctcatttgttcagataatcatttgaatgtttacatacatttttggttatttatttataactaatttaatttacatttcctcatattaacatatcctcttatttagtatgtaatcaaattatgtcagtgagaaaaatcctcatagtacccttgagttgctgattctgagaaaacactaaacatgaacatgtacaaaagagggcatttggaataaaacagcatgtgcattttttttaatatttgcacagtttgatctttgcatttctgtcgggaggaaaataggaaccaaacccggggggttacccatggctaagataatgggttcatatgactggccataaaagtaggtacatacaaacaattgaaaacaaatcacacccttagggttccatggattaccgaggatggatttcccctgccctaaggtgctttattatatttccttaaaaaataataggagcagcagcttatccacaagtctcccacaagtgcatttaatgatggaatcaaaacaacacaacagattcataaggatgagagaactgcagaacaaacccagaagtcagttttatgcttcttcttgttctggataattcagaattttgcggtgtgcctgtcgtaaatattgctgctgtttgaagtaaactttaaatgctccttttatggcaacaaacgcaattccaccctaaaataaaaaggaaaattagctttttataatgcagatttagagaaacagagtaataaaaataattttatttagatcacaaaagacgtaggctttgatgctaaactaattcagatgactgcaaatgaaacagttttcttttt

SEQ ID NO: 3587 - DNA, 373 bp, Homo sapiens
  SIMILAR (245)..(313): 341254mologous to Homo sapiens RNase 4,accession number D37931,Smith-Waterman Score=35.
ggcacgagcaaaatttcatctttgcgttttctactggctccccatcatcgtactagggaggaagaagcgggtgagaaacaaaacttctttccattgtcctgcccgtttctgcggacttgttctgaggccgaggcacctctaagatactgatggctctgcagaggacccattcattgcttctgcttttgctgctgaccctgctggggctggggctggcttatccctcctatggccatgatgtgctgtatccatcgagtcgttgcggataacgggcaccttgaggagaccttagtcatggtatcgctgcttgtccgtgatgattctactacgcattatttctcgtgatgactgcgagcgtctcatcgggctggcg

SEQ ID NO: 3588 - DNA, 1386 bp, Homo sapiens
  SIMILAR (664)..(1098): 931254mologous to Homo sapiens mammalian ependymin related protein 1,accession number AY027862,Smith-Waterman Score=734.
atgccaggacgcgctcccctccgcaccgtcccgggcgccctgggtgcctggctgctgggcggcctctgggcctggaccctgtgcggcctgtgcagcctgggggcggtgggagccccgcgcccgtgccaggcgccgcagcagtgggaggggcgccaggttatgtaccagcaaagtagcgggcgcaacagccgcgccctgctctcctacgacgggctcaaccagcgcgtgcgggtgctggacgagaggaaggcgctgatcccctgcaagagagagatctttcgcgaggagggtctcttggggatagcatggtccgggactgggaggggcgctgcgcccaccgagggcggcctgctggcgggggactcagtaacacccagcgaggcggtggcagaatgcattcccaagatgtggacacaaaatggagccatgtggagcaaaagtggaagtgagaacacaatcttggagattgtcgtagtggtccaggtgactgaccaggcatctgtggcccttgatgccacacagggccatgctgggcctttcccagcacagctgtgctggcagctgctccccgggtctctccatggagcactggagtcctcaattctaacagaaatgatagaactgagtagcataaaaagctgcaagccaaaaatgaaggaaagtttattagaacaaaggaagcttattgtaactctattatttgaatatattttgctgtataaggatggagtgatgtttcagattgaccaagccaccaagcagtgctcaaagatgaccctgacacagccctgggatcctcttgacattcctcaaaactccacctttgaagaccagtactccatcggggggcctcaggagcagatcaccgtccaggagtggtcggacagaaagtcagctagatcctatgaaacctggattggcatctatacagtcaaggattgctatcctgtccaggaaacctttaccataaactacagtgtgatattgtctacgcggttttttgacatccagctgggtattaaagacccctcggtgtttacccctccaagcacgtgccagatggcccaactggagaagatgagcgaagactgctcctggacactcatccattatcttggctgtgagctccttgggtacgggtaccttcaaaaagaggtgaagaagaaggagcaggaaggggaggaggaggacacgaagaagaagaggaagaagaagaagaagaagaagaggaagaggaagaagaataagaggaggaggaggaggaagaggaagaggaggaagaggaagaggaagagggagaaggagaaggagaagagaaaaagaagaggaagaagagaagaagaaagagaaggaagaggaatggaagaagaaaaaagaaggatgtag

SEQ ID NO: 3589 - DNA, 2333 bp, Homo sapiens
  SIMILAR (1)..(672): 1001254mologous to Homo sapiens mammalian ependymin related protein 1,accession number AY027862,Smith-Waterman Score=1214.
atgccaggacgcgctcccctccgcaccgtcccgggcgccctgggtgcctggctgctgggcggcctctgggcctggaccctgtgcggcctgtgcagcctgggggcggtgggagccccgcgcccgtgccaggcgccgcagcagtgggaggggcgccaggttatgtaccagcaaagtagcgggcgcaacagccgcgccctgctctcctacgacgggctcaaccagcgcgtgcgggtgctggacgagaggaaggcgctgatcccctgcaagagattatttgaatatattttgctgtataaggatggagtgatgtttcagattgaccaagccaccaagcagtgctcaaagatgaccctgacacagccctgggatcctcttgacattcctcaaaactccacctttgaagaccagtactccatcggggggcctcaggagcagatcaccgtccaggagtggtcggacagaaagtcagctagatcctatgaaacctggattggcatctatacagtcaaggattgctatcctgtccaggaaacctttaccataaactacagtgtgatattgtctacgcggttttttgacatccagctgggtattaaagacccctcggtgtttacccctccaagcacgtgccagatggcccaactggagaagatgagcgaagactgctcctggtgagcctgtgcatagggaagcggcagcatcggatgtcagccccctgcggccccagctggagatggatatgagactagtcaagatgtgaatgctaattggagagaaatataattttaggaagatgcacattgatgtggggttttgatgtgtctgattttgactactcaagctctgtttacagaagaaaattgaatggcgagggtgtggccatatgaactgactagatggctaatatggacactttgggtatttctaatgcctgttcagggctggttttctgcatgcacgggtatacacataatgcagtgccatgccactagggaagggtcagtaagagaagtttgccttggagtcaagtatttattgttgacattattcagaattagtgataataaaaagcagagtgattttggtcaattttattattaaattcttaaaattccctgcagagaatgccccctttattgctggcaccagggtgggcattgctccccactgggcccctacttccaacccctgtccctgcactcccttgggttgccaaaaaaatgataacttaaatcccttccagacttaagaaatttatgggcatggcccaattgatattaaacatttagaaggaaatgaaaagctaaaataggaagtaattattcctctaaagaaacattttggagcaaggcagtttagagaatcctaatgtctacactggcatagcacgagccatgtaagcttcttttttttctatgcaagagtattgatgtatgtgctgaatcttcacagacttgtcaatacacaggcagtattctaaaatagcactgaacagggagtcaggagactattgtctcctaaaacccaggactagagttccctcgtactgtcactcctttggtcattaaatgcactgggcttgcccgcactttggccttcctagaacgctgcttcataacctctctgtctgacttctgcatctccttccaggtcagctcattcacaagagttgctcccaagcctggatgagttgccaccttgcatcttggagcatgccattcctcaccaataattattaagctgtgtgataatttcctgctttcaggacactcatcccattatcttgggctgtgagctccttgggtaacgggtaccttgtatgtttaattttatatccctaagcacaaagccaagtgcctggccacataggtcagtgcccctaagtaatttgtagagtggaagaatgcccagcctctcttgtccctggtttccttatgtgttgaatgtggttgagtttgtccattgctagggagagacttccagtaataaaatttacgtattctagatgcttcgtactgttatgttttatctgcccatttatctttcttagttaccaggagaaaatgtgtgacacctatattataatgaaaacgaatcttattacttatagtttatctatattaaacaaatttaattggcatttaaagcattctttgatattgttgcttttgcaataaatatggataatcttggttataagggagttaaaacaatgctgtaataaataaagtgtttcatgtgatcaaaatcaaatttgttatcctctctcaaaagcctgctctccctcttaccttccctaaactccagtgtccatttgccaaggccagaagctt

SEQ ID NO: 3590 - DNA, 393 bp, Homo sapiens
  SIMILAR (99)..(176): 1001254mologous to Homo sapiens Human secreted protein sequence encoded by gene 2 SEQ ID NO:61,accession number AAB34093,Smith-Waterman Score=163.
gagaattgtcagagctgaaagttcctttggttgctcacaactcaggtatgcacccatgtggcagccaggcagcggagccctactagactgccagtctcatgcacccagacctgtggccagattgtggcctctggctgcctcaggcattttcctctttgcattgggttttcctgcattagtaactacagctgcaacagacatcctccacattgtgcacactggttttgcctttgtcctcaagagttgatatgaaacttgtgggtgtgggaggatggagagagaactctaacacaaaacatcttattaaaattgtacttgagagacaaaaaaaaaactctgttgtattttgacagaattatttttattaaaatacacatccatgagcaaaaaaaa

SEQ ID NO: 3591 - DNA, 2050 bp, Homo sapiens
  misc_feature (1)...(2050): n = a,t,c or g
ttttttttttgactgctcatggatgtgtattttaataaaaataattctgtcaaaatacaacagagtttttttttttgtctcctcaattacaattttaaataagatgttttgtgttaaaagttcctctctcccatccctccccacaccccacaagtttgcatgctaatgcccaagtatcaactcttgaggacaaaggcaaaaccagtgtgcacaatgtggaggatgtctgttgcagctgtagttactaatgttggaaaactccaatgcaaagaggaaaatgcctgaggcaggccagaggccacnaatctggccacaggtctggggtgcatgaagactgggcagtctagtaggggctccgctgcctgggctgccacatggggtgccataccctgaggttgtgaggcaacccaaagggaactttcagcttcttgacaattctctgcctcatcttctttgtgcttgcttaaggagtgggaaggcgctaggtggcccaggcagtccccacttctgtctcgtggtgtccattttgatggcctgcacccagccacagacccatgaggatgggaatgggggttctggcttgctatgagtgccagtttttgctctggaaggagtgaccatttggtgccgcaaggggaaagtgagtagggaaggctgctccccagggccggacaaaccaagaaagccaggtcttcctcctgcctccatgggtcaggtccagcccttcaccagggctcccccaggtgcctttcccactctaggctcctggaagcaggctggtaggactggatgtgcataaggggcacctctggctggcaggcaggcaggcctggactctcagcaagagagtgggctcaagcagcttggttttggccctctccacagcttgtggggcaaaggcttatgtcccaaaggtgagctgcccaactgggacagagagcccctctggagaggaacagagtaaacaacttggaactcagctgaaaacagtgaagataaggcaacagaaaaatggggaggtggcccatgggtaaccaagtgcgagccaggcagacacccaaccccatgcagcaacacagctgtccccgaagcctccctgggccctcctcaagccactcccacaacctaagctcaggcacccgtccctcatcccctgacacaccccctgaaaggtagcaagcttcctcaagatactgcctggaagggcaacatcagccctggaaccctcatggggtttatctgcccattcggtttcaggactaaatagtgttgcccaaacccacagggataagggatagtcccggctctgctactaatttgctatgtgactttagccaagtcacttaatctcctgggcctgtttccttatttgtagcaagagaggaatgggggagatgttcactgaaccccattccagctgcaaaagcctgtggttttaatccaatcctgctaggctatgatcatttaaacagcctgatgtctccaacttctgggtttgggagctaggtagccccaggctgtcacaagagatgaatttcctttacagacaggacgcctcctaacaggccatggtctatgggtctgccagccccaaggaccaagaaaaagcagcagctataggatcatttcccaaggcagaattctgacagcacagggcccagggccactggccccatcaccagcagttggtccaattcaaacatttttcttgttgcccagctgtgggcccagtgaggcctggtgagcaatgggtatctcaggccacaccatccattcccatgtccaccaatatggagcagtagcttgcaaagcccagattcaggcagggactgaaagttcaacttccggccttgccatggctgaccttactctttgcatgggcggcttgtgcactcccctcgcaatgtgaagcacatatgcaaattccagccgtcctgctgctcctctgtgtagacttcctccctttcctcctccagggcagccagtcctctccacaggtgggccaccccaagtcccgccgacgatcgcagttagtcgtttcgtgcttggt

SEQ ID NO: 3592 - DNA, 482 bp, Homo sapiens
  SIMILAR (383)..(475): 801254mologous to Homo sapiens proteasome subunit z,accession number D38048,Smith-Waterman Score=119.
  misc_feature (1)...(482): n = a,t,c or g
gcggctgtgtcggtgtatgctccaccagttggnggcttctcttttgatnactgccgcagaatgccgtcttggaagccgattttgcaaagaggggatacaagcttccaaaggtccggaaaactggcacgaccatcgctggggtggtctataaggatggcatagttcttggagcagatacaagagcaactgaagggatggttgttgctgacaagaactgttcaaaaatacacttcatatctcctaatatttattgttgtggtgctgggacagctgcagacacagacatgacaacccagctcatttcttccttggcagcaatggctgtatttgaagataagtttaggccagacatggaggaggaggaagccaagaatctgggtgagccgacncatccgcagctggcatctttccaaccgacctgggctccggaagcaacattgacctctgcgtcatcagcaagaacaagctggatttctccgccc

SEQ ID NO: 3593 - DNA, 567 bp, Homo sapiens
  SIMILAR (52)..(171): 921254mologous to Homo sapiens proteasome subunit z,accession number D38048,Smith-Waterman Score=183.
  misc_feature (1)...(567): n = a,t,c or g
gatccaagagcaactgaggggatggttgtggctgacaagacctgtcaaaaatccactggccgtcttccagagnttgtgacagcaattcggatgctgaagcagatgcttttcaggtatcaaggttacattggtgcagccctagttttagggggagtagatgttactggacctacctctacagcatctatcctcatggatcaactgatatcgcagctggcatcttcaacgacctgggctccggaagcaacattgacctctgcgtcatcagcaagaacaagctggattttctccgcccatacacagtgcccaacaagaaggggaccaggcttggccggtacaggtgtgagaaagggactactgcagtcctcactgagaaaatcactcctctggagattgaggtgctggaagaaacagtccaaacaatggacacttcctgaatggcatcagtgggtggctggccgcggttctggaaggtggtgagcattgaggcccagtaagacactcatgtggctagtgtttgccgaatgaaactcaactcaataaaaaacaaaaaccaaattggaaaaa

SEQ ID NO: 3594 - DNA, 1062 bp, Homo sapiens
  SIMILAR (193)..(342): 1001254mologous to Homo sapiens proteasome subunit z,accession number D38048,Smith-Waterman Score=254.
atgcggaaaaagtttcttggcagtactattttggacctgcactatagtggatgccgagcactcgggtacagctgtggtgaccattacgtggccgacgtggacctctttgtgccttttacaagtgctgcccatttgtcatgtagcggtaaatggaactgcacattggagtccagggacacattgtgcgatgcggaggaggaagccaagaatctggtgagcgaagccatcgcagctggcatcttcaacgacctgggctccggaagcaacattgacctctgcgtcatcagcaagaacaagctggattttctccgcccatacacagtgcccaacaagaaggggaccagccccgaggaagtgagcaccaccttctgcaggcttgcttccatctcccactgcacacacaactccacatcaggagtaattcacaaggaaggaatggaacgttcagaaccagcaggtattcactgtgggctgcactcaaccttgcggaagctcagtgggctcctgatggggtggggcagcacggggccagagaacgctggcactggggttggggagtgttggtggctggcttggtggcttccagcaaatcagtctgtcttggaaatggagctaaaccagatgacctctaatgagcccacgaagtccctcgggcctttagcaggaaggcaagccacctttcaggcccagagctgtgttggggaaccgggctttgccgagctccagccctccagcacacggtcttgcagtccactggcacgtaaggcggaagctctgaatgcatgccgcaaaaatcgggcactgtcaccacagtgcccgtgtgtccaggggagaggatgggtgttccgggagcacaaggccatggcacagccagcagccttctggcagttcctgaaggacagcaagtttgacagagatattaccccagctggggctagagcagaggaacagcttggccggtacaggtgtgagaaagggactactgcagtcctcactgagaaaatcactcctctggagattgaggtgctggaagaaacagtccaaacaatggacacttcctga

SEQ ID NO: 3595 - DNA, 1942 bp, Homo sapiens
  SIMILAR (1151)..(1306): 981254mologous to Homo sapiens proteasome subunit z,accession number D38048,Smith-Waterman Score=261.
gtcgaccaggctccctgaaagcagggaatctggttcatttttgtcctcgttgtatatagagcttgaacttggtgttccccaggtccagtaccactgccgttgctgcctgccttctgtttcactgctgttttctgagtgcctcgtgtgcagcctgtccttcagccctccctgaagctctgctgaccagctgtgttccaggttccttttcacgtgctcttaagccagccttaccttgcattgtacttacttgggtcaggtgcccctgctagactcttaagcccctagggggcagggatctgggggcgtcatccacctctgcagccctagcttctggtatagcatgtgataggacatagcaggtgatgggggctctcggataagaaagggatgagtcccatctgttccacccagtaactattaggggatgggggatttgtgtttaaaaggtggggccaaaaggagagagtgattcaaagtaatggattacttcaagtgaacctataggttccttagtaggagagagagattattctgggcaagaggtcccgcccttggtctgccagcatttccccagaactaccggcttgtgttttggtgttagtttcttcctcctacagtgctgactttctcaagtaactttcagctattgttggacattctttaatcaggggatagttagtaaactgcagtcagtgggccacatctggcccactgcctgttgataatagagttttattggaacacagttatacccattttttaatgtatttgtgtgtggctgttttgtgctagcgtgacagagttgagtaggtgtggtagagacttttggccacaaagcctaaaatatttactacctggcccttttaaagataagttactaaccctctagtaactgtcagcccattgttttgtggtgattgtctgatgtggtcaagaggcggtgcatgcataaaaagttttaaaggcctggctcgggaactttgggtaacatcatcaaggtactttgagatcttttcctcatctgtgagatgggcattaaaaacaacacctgtctcgcgggaggtcttgcgcactgctagtggacgtacattgcggatgtcagagcaggccctagtttggccggggacattattgccgccgttctgtttctcaggaggaggaagccaagaatctggtgagcgaagccatcgcagctggcatcttcaacgacctgggctccggaagcaacattgacctctgcgtcatcagcaagaacaagctggattttctccgcccatacacagtgcccaacaaaaaggggaccaggtgagtgaaggagccgaagttcttcctgggtccccgggcgtcgggggccacccttggtatctccatggcatctggatggagttttcctggttctttccacattaagtacatccagtgttcccaaatcaacctcccacacagaccttcggcttgttacttgctttatgacagtgggctgctgtcaggtgtaggaaagtgatttaatttgatgggagaggtggagggtggcccaggaaagagccctaggctgggaggtggggccggagaggtttggatcatctgctgtcctttctcaagtgtcttaaagaatcccctgatttctgggagaaggtgcatttttcagggcagccccagcactttccctcagagtgccccgagattcctaactgggtgtaagtcagcaatgctaacagcctcccagaggtggccttgggagctagtgtgtgtgtgctgtgctacagggagttgtgccattgagcctgagcctacatgctgagtgggcccctcggctcagtggtgcagcgcagactcagagcagtgggagaaggttctagttgatttgctgagcagaactgggaggtttccaaacctggtggctagcatgtgtcagaggagcagctcgtttgcagctcgtgcc

SEQ ID NO: 3596 - DNA, 1078 bp, Homo sapiens
  SIMILAR (103)..(780): 461254mologous to Homo sapiens proteasome (prosome, macropain) subunit, beta type, 7,accession number BC000509,Smith- Waterman Score=370.
  misc_feature (1)...(1078): n = a,t,c or g
gctttcttgggaagatggcggctgtgtcggtgtatgctccaccagttggaggcttctcttttgataactgccgcaggaatgccgtcttggaagccgattttgcaaagaggggatacaagctttccaaggccccgaaaaactggcacgaccatcgctggggtggtctataaggatggcatagttcttggagcagatacaagagcaactgaagggatggttgttgctgacaagaactgttcaaaaatacacttcatatctcctaatatttattgttgtggtgctggggacagctgcagacacagccatgacaaacccagctcatttcttccaaacctgaagctccactccctcttccactggccgttcttcccagagttcgtgacagccaaatcggatgctgaagcagatgcttttcaggtatcaaggttacattggtgcagccctagttttagggggagtagatgttactggacctcacctctacaagcatctatccctcatggatcaactgaaaaagttcccttatgtcacccatgggtttctggctccattggccagcaatggctttatttgaaagataagtttaggccccagacatggaggaggaggaagcccaagaatctggtgagcgaaaanggnnccccccaatttnntcngcccagctggngcatcttcaacggacctgggctcccggaagccaaacattgaccctctgccgtcatcagcaagaaacaagcttggattttctccgccccatacacagttgcccaacaagaaggggaccaggcttggttggccggttacaggtgtgagaaagggcactactgcagtcctcactgagaaaattccactcctctggagcacttgagggtgctggaaagaaacacgtccaaacacatcggacaccttcctggaatggcatcagctggcgctggctgggcccgcggtttctggaacggtggtgacgcattcacggcccagctaagacactcactgctggctaagtgtttgccgaatgaaactcaactcaataaaaaacaaaaaccaaattgggcagctgaaaaaaaaaaaaaaaaaa

SEQ ID NO: 3597 - DNA, 520 bp, Homo sapiens
tagtcgtgtgtacatcattgggaatggagggaaataaatgactggatggtcgctgctaacataagtttcaaaattgaacattccaagacaaaggggtgcctgaagcccgtgccctgtccttcagatcttcacaagcacagttcccctgggaaggtggagccacccagcctctcccctgaataactgggagatgaaacaggaagctcatatgacacacttgatcgaatatgacagacacttgaaaatcacggactcatccccctccagcacctcttacctgttgcccgccgattcacagccgggattgcagcttgaaaggattccctgggggcctggttccaaccggcccacttgtggactctgaggcctcctgcatttgcgggtgggtcttgccctgtgatatttttggtcatgggctggtctggtccggtttcccattttgtcttgggcaagtctctgtgtgtcttaaatcccttgtcctttcaattaaaaagcaaaacttaaagaaaacagaaaaaaa

SEQ ID NO: 3598 - DNA, 1812 bp, Homo sapiens
  SIMILAR (1042)..(1629): 961254mologous to Plasmid F Protein B,accession number M12987,Smith-Waterman Score=941.
  misc_feature (1)...(1812): n = a,t,c or g
atgcccagtccttctccacttttttttgttgctactatccatgactgtcaggaactgttggaaactaccgaaactggcccatccgatcttcaagatgtgcccctagagaaggcggacgccaccgtgttcacagacggtagcagctttctcgagcagggagtacgaaaggccggtgcagctgttaccacggagacagatgtgttgtgggctcatgctttaccagcaaacacctcagcgcaaaaagctgaattgatcgccctcactcaggctctccgatggggtaaggatattaacgttgacactgacagcaggtacgcctttgctacggtgcatgtacatggagccatctgccaggagcgcaggctactcacctcagcagaaaaggctatcaaaaacaagaatcccccgtcttcaaagcctaacagatcaagcagctctctggggaacaacctgcgaccagatggctccatgtacatgcaccgtagcaaaggcgtacctgctgtcagtgtcaacgttaatatccttaccccatcggagagcctgaacttggaatccagttgtgtgaccaaaaagttatctccagaaaaggaaatttatgaaatggaatcactccagtgggagaatatggggaaacgtatcaaccatcaccttcaatacaatggtcttggagacaatatggagtgcaaaggcaacttagagggtcaagaagcaagtcaggaagggctttacatgtgtgtcaaaattacctgtgaagaaaaggccactgaaagtcattcaacctcttctacttttcatcggataattcctaccaaggaaaaattgtacaaatcaccgaaccccagccaggacaccgggtattcccagcaccatacaagaactactttttcgaagaggcaacccaaaaactgcgagcggttccccgtggagggccgcccactcaccttgccggcgcagacaagctncggatattctggctcaaagccagatgtgattaccttactggagcaagggaaagagccctgcgtggtggcgagggatgtgacaagaagacagtgccccgctgccccgatggtggattcgttaattgcgcgcgtaggagtaatggctcgcggtaatgccattactttgcctgtgtgtggtcgggatgtgaagtttactcttgaagtgctccggggtgatagtgttgagaagacctctcgggtatggtcaggtaatgaacgtgaccaggagctgcttactgaggacgcactggatgatctcatcccttcttttctactgactggtcaacagacaccggcgttcggtcgaagagtatctggtgtcatagaaattgccgatgggagtcgccgtcgtaaagctgctgcacttaccgaaagtgattatcgtgttctggttggcgagctggatgatgagcagatggctgcattatccagattgggtaacgattatcgcccaacaagtgcttatgaacgtggtcagcgttatgcaagccgattgcagaatgaatttgctggaaatatttctgcgctggctgatgcgganaatatttcacgtaagaatattacccgctgtatcaacaccgccaaattgcctaaatcagttgttgctcttttttctcaccccggtgactatctgcccgtgccgcaagccaaaggcaacaatgtggttatcacaagctacatgacaaacagaggcttcttcgaggataaaaaggcaacatttgcgccaagcttcttaatgaacatcaaaggcaataaaacatccgttgtcaaaaacagcatcctggagcaaggacagctgacagtcaactaa

SEQ ID NO: 3599 - DNA, 1088 bp, Homo sapiens
  SIMILAR (400)..(756): 471254mologous to Homo sapiens BC331191_1,accession number AC007842,Smith-Waterman Score=208.
  misc_feature (1)...(1088): n = a,t,c or g
ctgcgcaggcccagcagctaagatcgggtccggcgctccagaacagaacgatccctgaggctcccttgctcgaactgtgggacttaccctactatggtccgagcctaccctatttcattatactcaagtaacgccccagaaattccagagaatctcacacaaagaggttgagtcttgccgtggtgccttcaggggaatgtcatcccgggctagaagagctgcaaaaggctgtcaggncttctcagaactttgcttctccagcagaataatcctgcggaagactgagcagttcttgtgagtgtaaaaccattggcccatgcatttggtgacgttcagggatgtggctatagactttctctcagaaggaatgggagtgcctggacactacccagaggaaaattgtcaagagatgtgatggttggagaattataataacttgggtctcactggcaggatattctgggctcaaagccagttgtgattaccttactggagcaagggaaagagccctgcgtggtggcgagggatgtgacaggaagacagtgccccggtttgttatccaggcataagaccaagaaattatcttcagaaaaggacattcatgaaatcagtttatccaaagagagtataatagaaaaaagtaaaactcttcgtctgaaaggatccatttttagaaatgagtggcagaacaaaagtgagtttgagggtcaacagggacttaaagaaagatctatcagtcaaaagaaaatcgtctctaaaaaaaatgtcagctgatagaaaacgtccctcttttactctgaatcagagaattcacaatagtgagaaaagctgtgactcacacttggttcaacatgggaaaatagattctgatgtgaaacatgattgtaaagaatgtgggagtacttttaataatgtctatcagcttactctccatcagaaaattcatactggtgaaaaatcctgtaaatgtgagaaatgtgggaaagtttttagtcatagctatcaacttactctgcatcagagatttcatactggtgagaaaccctatgaatgtcaagaatgtgggaagacctttactctttacccac

SEQ ID NO: 3600 - DNA, 1812 bp, Homo sapiens
  misc_feature (1)...(1812): n = a,t,c or g
ttttttttttttttttactttttaaaacatttatatttatatatataaaaaaattaaatatatataatatatagggggtttgagactaaaaatatagtacataatattttttaaaaaaaggagaaaaaagtagaataggaaaaggtgtgagggacacacagatgcacattgctaaaatcctacaatggtttgtcctaacaaaaataatatcttttttttctcttctcttaattatcatcacngggatccatttattttggggggcttgggtgggaagaaaattcaactggagctaggaaatggaggttgcaatgccaagaatggcctggggtagaaaatgtgacccacagggaacccctgggccctcttctgggtgaaattgggacttctccaaaattttctggggtcactgttgcctaacaaggttgtgtgggagttttaccgtattgggattttgggctgctctcttccccagagttagggtattctcaggggggacagcatctgaagagctccaaaagcaaacagaagagctcagggcccatcgatactcaacaaggccagtggttggggccagccaaaaacccagggtagggacagcagactggcaggaatgagtgacagttctatgcaaaatggagttattattattattgttattattaataagggcaggtttgtaccagaactgcccagctatggcctgtgacttctgcgcagcaattatttctcccagggacagggcctgaagctacctcacagtgatgccaaaaaaatgggattccccactaacccccacacacacccccttcctaccaaaccacacatctctcagtcctctaccagcagacccagaggtgaacgtcaggaaccacgactgacaaagatgagacaaatgcctttacacaaaaagcctggaccttgaggaagaggaggagaaataccatagggggataggaggaggaccaagagcaagggaaatgggatatttaaatgctaattttacagcatcttcacaaaaataaatgcctttcaattacatcccttggcctgtgcacttcagtgttcattatggcctcgccagggtcaggagcttcactaatccttttgggcaattctcaacatgcacagtggcctgtagaggcaccaagcagtggcctggctcaggtcagacagcactaacttggggaagccaggatttctgaggccagggtgcttggggaggaactggagttcagcagtagggacagaaccttccacacagcaaagaacaaggcagttcgctccaaacgggtcttggctttaatgtggttttcttcaaacccaaatggctgaacattgctatgaacataggtcatgtatattgagacactgattccgttttatggagccctgtggctcctgacaggttaacgagagggcacgaaactccagtgcgacgtgctccattttgaaagcagataaagctcccctcatcagagtgaagaggaaagtagccctgctggaataaggggagagcgtaccgcttgaagacagggtgctcagatgttttcattccaagcaagacagtgataacagcacagcactgctcccatccctggcccctttcctttctcacttactagggctttttgcttcatgcaaactctgtggctggactttgagggatccagaatttaggatatagggcgggtccttcacgagggaagtgaccgtggctcagccaaaaatcacaagatcctcctcaagattccagaatgtattccaaagctgttgtacccctttccctccaccggctcccctttgcaagct

SEQ ID NO: 3601 - DNA, 1875 bp, Homo sapiens
  SIMILAR (538)..(882): 481254mologous to Homo sapiens heparan sulfate N- deacetylase/N-sulfotransferase,accession number U17970,Smith- Waterman Score=250.
atgaggaagcattgctgtgtgctgctcacctgctgggctctacagacgctggtgagcctggcattcggggccccaagtgcttgggctgagcaccgtgcttgttctgaattggcattcgtgaacatttgcgcgctggatgccagagaggtcctggttaaactctcagatggaaggagagaagccccatctccactgccccagccccactggccagactcccctgccgccttccacgccaccctcaagccgcaagtcctgcccacacacaggattccacagagcgcctctgtcctctggccatctggaggcagggtgggagctaacacacgtctgcaggctgaagaaggacagcgccgggtcagcacagccgtgcaggggcttctgtttatccctgatgtctgctttcctgtggctttttctttaggagaagaaaaccgaaaacacttgtcaagtgtttctgttttctgccgtgctgtgtgcccccgcccctggcgctgtgcagggaatgggcagtctgctttcatgggggaacaaccgctgcctggtccctggctgtacgccacccacatcgagcgctggctcagtgcctatcacgccaaccaggagctgctgtccctgacccttgttatttccctgataaggcacctggccaacaaagccaaagtcttgaataattatgagagagagaagttagttaggtttgatccaaagaaaggattttggtgccaactgcttgaggaggaaaaaccaagtgtctgggcaaaagcaagggccggaaatatcccagatggacttggattcccgagccttcctgaaggactattaccggaccacaacatcgagctctccaagctgctgtataagatgggccagacattcccacttggttacgagaggacttccagaacaccaggcatgcacacgtgcccacatgtatgcacaacctatacacatggtgacttggtcaacgcagatcattttcactgggttaaaatggaagatttcccagatacagcagaggcctatcctagggcagccacgggggcatctcaggcctcacatgatgggatgagctctcagtttcccaaggatgggaacctgagctacccaccccaccacagccccagtggcgacctcgtgccaggcacacagcaggacagggtgggtgagaaccccaccccaattctgaacagagccaaagtccaggagagacagccatcggccaaaggcagcagtacagccaacgccacctgggcccagctgctgaggagaaggaggagagaggttcgccgtctgggcagctgccctctggcccgctgccggcctccctgcccccaccccagctccccaaaggccaggaacatctggctgctggctagctccaggaaggctcttcagtcccaccattcggtaggtcccgagttcttgtcctgtgtccaggaagatgaggccaggcccaggttagagggcctcatggcccagtgggcggttctgagctgctgtgttgctgcaggtaccaatgctgaggacgctggggatgatctgctgcgtcctgtacgaggcttggaagcaggtgtggacatccgcgtgaccagcacggaggagtacccccacctgaagccagcccgcaccgccgtggcttcatccacaatggcatcatggccccatggaaggaggagccaagaggttcctagtggctgtccacccccagcgagggacactgccaggggccggcacaagtaccaggctcgaaggtcctcaggattcattggcatcaggttccctgctgtatggcgcagtgcaagccagcatgcaggactggcagagacacacctagccagctcctacgatcgcgtagccaagtctttgcagtaa

SEQ ID NO: 3602 - DNA, 2091 bp, Homo sapiens
  SIMILAR (616)..(2088): 991254mologous to Homo sapiens dJ977L11.1 (KIAA1229 protein),accession number AL136382,Smith-Waterman Score=2466.
ccgactcagagcacaagaaggattgccacggtttccattgcagcagccgtggcgcctctgaccctttttttatatcgcggcgacggcgggctgtcgtcacgacgacgtgcggacgcagcggcgggggccttatgtggagaagtcgctgtgaagccacctataaatccatttactgaatttatggagaaggctgtaaatgatggaagtcattcagaagaactcttttgccatcttaaaactatatcagagaaagaagatttaccacggtgtaccagtgaaagtcatctcagctgcctgaagcaggacattctaaatgaaaagactgaattggaagcaacacttaaggaagcggagttggtaactcattctgtagaattgcttttgccactatttaaggacaccattgaaaagattaattttgaaaatgcgaatctttctgcattgaatttgaagatttctgaacagaaggaaatattaataaaagaattagacaccttcaaaagtgtaaaactagctttagaacatcttcttagaaagagagactacaaacaaacaggagacaatttatccagcatgttgctagaaaatctaactgataatgaaagtgaaaatactaatcttaagaagaaggtatttgaaaaggaggcccatatccaagaactttcttgtttgtttcagagtgaaaaggcaaatactttgaaagcaaaccgtttttcccaatcagtaaaagtagtacatgaacgactacagatccaaattcataaaagggaagctgagaacgataagttgaaagaatatgtaaagagcttagaaaccaagatagccaagtggaacctgcaatcaagaatgaataagaatgaggctatagtgatgaaagaagcaagtaggcaaaaaactgtagctttaaaaaaggcatctaaagtttacaaacaaaggcttgaccattttacaggagctattgaaaagcttacttcccaaattagagatcaggaagccaagttgtctgaaacaatttcagcttccaatgcctggaaaagtcattatgagaaaattgtaatagaaaaaaccgaattggaagtacagattgaaacaatgaaaaagcaaatcattaatcttttggaagatctgaagaaaatggaagaccatggaaaaaattcatgtgaagaaattcttagaaaagttcactcaattgaacatgaaaatgaaactctgaatcttgagaatacaaaattaaagcttagattcccatgtagaattactgagtcaaagaatatgaacattttgattgttcttgatatgctttgctacatttcttctgaaaagactacacttgctgctttgaaggatgaagttgtatctgttgaaaatgaactctcagaattgcaagaagtagaaaaaaaacagaaaacccttattgaaatgtataaaactcaggtacaaaagttgcaagaagcagctgaaatagtaaaaagcagatgtgaaaatttgctacataaaaataaccaaataacaaaaaccaaaaataaaaatgtagagaagatgagaggccagatggagtctcatctgaaggagttagagcgtgtctgcgattccttgacggcggcggaacggaggcttcacgagtgtcaggagagtctgcagtgctgcaaggggaagtgtgcagaccaggaacacaccattagggagcttcagggccaggttgatggaaatcacaatcttctgacaaagctttctctggaagaggaaaactgtcttattcagctgaagtgtgaaaaccttcaacaaaaattagaacagatggacgcagaaaataaagagcttgagaagaagctggcaaaccaagaagaatgtcttaagcacagcaatcttaagtttaaagagaaatctgcagaatatacagcattggccagacaactggaagctgctttagaagaaggaagacaaaaggttgctgaagaaatagagaaaatgtcatctagagagagtgctttacaaattaaaatattagatctggaaactgagcttagaaagaaaaatgaagagcaaaatcaacttgtttgcaaaatgaacagtgatccagagactccatga

SEQ ID NO: 3603 - DNA, 701 bp, Homo sapiens
atgaggaagcattgctgtgtgctgctcacctgctgggctctacagacgctggtgagcctggcattcggggccccaagtgcttgggctgagcaccgtgcttgttctgaattggcattcgtgaacatttgcgcgctggatgccagagaggtcctggttaaactctcagatggaaggagagaagccccatctccactgccccagccccactggccagactcccctgccgccttccacgccaccctcaagccgcaagtcctgcccacacacaggattccacagagcgcctctgtcctctggccatctggaggcagggtgggagctaacacacgtctgcaggctgaagaaggacagcgccgggtcagcacagccgtgcaggggcttctgtttatgccctgatgtctgctttcctgtggctttttctttaggagaagaaaaccgagaaacacttgtcaagtgtttctgttttctgccgtgctgtgtgcccccgcctcctggcgctgtgcagggaatgggcagtctgctttcatgggggaacaaccgctgcctggtccctggctgtacgccacccacatcgagcgctggctcagtgcctatcacgccaaccaggagctgctgtccctgacccttgttatttccctgataaggcacctggccaacaaagccaaagtcttgaataattatgagagagagaagttagttag

SEQ ID NO: 3604 - DNA, 4112 bp, Homo sapiens
  SIMILAR (424)..(2958): 941254mologous to Homo sapiens heparan sulfate-N- deacetylase/N-sulfotransferase,accession number U18918,Smith- Waterman Score=4213.
tgaagaggaacctcacgccactgcctggagctccgccttagccccgtgggccccacggagtgagcggcatgcagcacccccgggcctgtccagtgtcctctggcctgctgccctgcacccccagaaggccctgacgccctggggcacttctgctctgcacaggaccacgcgggggtttgccatggtgacataaaggggcgcggaggaaggaaggagcgtgaccagcctgtggactgcgcccctggctgggaggaaggactgggggcccagatcctccactcccagtgccccacaagggcgtacgcttcctaagtctctgtgaatttgttggtcagtggacgattctcgtgtctcctcctgtgtggggccttggggtagccagggcaggccgggcctccggtggccaaggtctcggaggccaggatgcctgccctggcatgcctccggaggctgtgtcggcacgtgtccccgcaggctgtccttttcctgctgttcatcttctgcctgttcagcgttttcatctcggcctactacctatatggctggaagcgaggcctggagccctcggcggatgcccccgagcctgactgcggggacccgccgcctgtggcccccagtcgcctgctgccactcaagcctgtgcaggcagccaccccttcccgcacagacccgttggtgctggtctttgtggagagcctctactcgcaactgggccaggaggtggtggccatcctggagtccagccgcttcaaataccgcacagagattgcgccgggcaagggtgacatgcccacgctcactgacaagggccgtggccgcttcgccctcatcatctatgagaacatcctcaagtatgtcaacctggacgcctggaaccgggagctgctggacaagtactgtgtggcctacggcgtgggcatcattggcttcttcaaggccaatgagaacagcctgctgagtgcgcagctcaagggcttccccctgttcctgcactcaaacctgggcctgaaggactgcagcatcaaccccaagtccccgctgctctacgtgacgcgacctagcgaggtggagaaaggtgtgctccccggcgaggactggacggttttccagtcaaatcactccacctatgagccagtgctgctggccaagacgcgctcgtctgagtccatcccacacctgggcgcagacgccggcctgcatgctgcactgcacgccactgtggtccaggacctgggcctgcacgacggcatccagcgcgtgctgtttggcaacaacctgaacttctggctgcacaagcttgtcttcgtggatgccgtggccttcctcacggggaagcgcctctccctgccattggaccgctacatcctggtggacattgatgacatcttcgtgggcaaggagggcacacgcatgaaggtggaggacgtgaaggccctgtttgacacacagaacgaactacgcgcacacatcccaaacttcaccttcaacctgggctactcagggaaattcttccacacaggtaccaatgctgaggacgctggggatgatctgctgctgtcgtatgtgaaggagttctggtggttcccccacatgtggagccacatgcagccccaccttttccacaaccagtccgtgttggccgagcagatggccttgaacaagaagttcgctgtcgagcatggcattcccacagacatggggtatgcagtggcgccccaccactcgggcgtgtaccccgtgcacgtgcagctgtacgaggcttggaagcaggtgtggagcatccgcgtgaccagcacggaggagtacccccacctgaagccagcccgctaccgccgtggcttcatccacaatggcatcatggttctcccacggcagacctgcggcctcttcacacacaccatcttctacaacgagtaccctggcggctccagtgagctggacaagatcatcaacgggggcgagctcttcctcaccgtgctcctcaatcctatcagcatcttcatgacgcacctgtccaactatgggaatgaccgcctgggcctgtacaccttcaagcacctggtgcgcttcctgcactcctggaccaacctccggctgcagacactgccccctgtgcagttggcgcagaagtacttccagatcttctccgaggagaaggacccgctctggcaggacccctgcgaggacaaacgtcacaaagacatctggtccaaggagaagacgtgtgaccgcttcccaaagctcctcatcatcggcccccagaaaacaggcaccactgccctctacctgttcctgggcatgcaccctgacctaagcagcaactaccccagctctgagacctttgaggagatccagttttttaatggccacaactatcacaaaggcatcgactggtacatggagttcttccccatcccttccaacaccacctccgacttctactttgagaaaagcgccaactactttgattcagaagtggcgccccggcgcgcagcagccctcttgcccaaagccaaggtcctgaccatcctcatcaaccccgcggaccgggcctattcctggtaccagcaccagcgagcccatgacgacccagtggccctaaagtacaccttccatgaggtgattaccgccggctctgacgcatcctcgaagctgcgtgccctccagaaccgctgcctgggtcctgggctggtacgccacccacatcgagcgctggctcagtgcctattcacgccaaccagattctggtcttggatggcaaacttgcttcgcacagaacctgccaaagtgatggacatggtgcagaagttccttggggtgaccaacaccattgactaccacaaaaccttggcgtttgatccaaagaaaaggattttggtgccaactgcttgaaggaggaaaaaccaagtgtctgggcaaaagcaagggccggaaatatcccgagatggacttggattcccgagccttcctgaaggactattaccgggaccacaacatcgagctctccaagctgctgtataagatgggccagacacttcccacttggctacgagaggacctccagaacaccaggtagccgtggccaccacagccagactgaacgtttgtgaaagctgggacatcccaccacacgctgagccagacctgcagagtgggaagctggaccagggcagctgcgcacttatgagcaatactctgtggaggtctggtggggctgggggagcacccaggcggatctgcaagcacctcggagcacccaccgctgggtctgcggcctaagggacctccctcgccagcagaggtccattccgttcccagctgctcctggggaggccgcttcctggtaggagggagtccacgagactcttttctgtccctcactgtgttccgccgactgtcccctctcgtcacccatcactccctgcttccgcagggcgcccctcagtattcgctgccatatgtccctgtcctccaggctgtaggggaggagagcctggccgggggagacagactggacatttccctgtttcgagccaggctcttccaaggggccagctgggtccccggagtcagtcctaggctggatgggagggtggccccctcaagaggactcccagcctccacatctggttcctaccttcacatctcaccctcccgttctggggaagaatttctggttcctacagtatccactccatcctcaaggcttcccgcagggccttggggcactgccttgccatcgggcccagttctccgggccccacctgcacccctttcttccccctgggatatgatgtgtggtgtttcctgtggtaaaagactgaggcaggccaggggtctgccagtaacatgttcccatgtacagacacggtccccacaccctcccagcctcaggcccaggcagacatgggcgagctggtgagactgccagccacggctttgcttagccacctgtggccgagggctctcagagacccccttaacctcccaaatactaagaagctaaaatattttaatattttgtttttttttttcttggtgccagagtttataccctgggtgctggggtcgcactgtgttatatatatatatatatatatatataatgtgta

SEQ ID NO: 3605 - DNA, 1250 bp, Homo sapiens
  misc_feature (1)...(1250): n = a,t,c or g
ggcacgagtggactacctacctgtaggctggattctagatgtggaatgacaataccagccctggactacctacctgtaggcnnnnnnnnnnnnnnnnnnnnnnnnnnncagagagagagagatatagagagataccacaagtaacacaaagcatcatacctgggactgggaaggttaatgtttaaacattttaaatgtggcattggtttgttgaagacagtcaagcagtaggtgctgcaggctttgttgaggctaaaaagctgttggtctttattaggtgatggcaaaacaatggatcacattttcatgtgctgtgtcttgggaggcaaatgatgagaatgtaggattggggaaaatggtaaggaaaatccaaaatgttcatgttttctaaccccttcttgccaatcttaaaagaaggacaaacaggctagattaagcaagtctacagttacaattggaaggaaacacagccgtactaaggaagtactctgtctgtggcctgcagtctagttttgactaggtccngttattttgagcttttgaaagagtaaagggttacaagtgctcgtattacccctgaagtagttaccagcagtgactgcaaggaggtaatcttatgggatgaaactataactctgtattaaccatcatatatagcatatatgtgtatatgtatgtgtgtgtgtgtatatgtgtatataaatatatgtgtgtgtatatacacacatgtacacacaccctacaacccagtgatttcaaaaaattaaacatttgtttagctcatgaatctgtgggttgggtgaacatttctattggtcttggctgggctcacctgtacccagtccagctgcagggtctagctcttcttatcttggctgggatctccacacatgtctaggatcagctgctttactagttctaggattgtcttggctgagacaagggtggactacttcagttctcctccactgccttatccttcagctggccagcccagaaatgttgccatgtttacagcataagagcaagcaagaaagaataatatgcaaccacttttccaagcctaaggtgaaagggcgggcagaacctgtggtgttaggaggcaactcataccagcccatgggtctactgtttaattttcagaaatttggcaagctgattgttaacacagctgttgtttaatttatgtacttgtaattaaataatttacattaaaacaaagataataggtactcaaaaaaaaaaaaaaa

SEQ ID NO: 3606 - DNA, 502 bp, Homo sapiens
  SIMILAR (496)..(380): 761254mologous to Homo sapiens Neuron-associated protein,accession number AAB01372,Smith-Waterman Score=138.
ggatggaaacttttctggatttctgcttccttgccagagtaatgggaagattggactcatgctgtctgccttctttaaaattctgtgccctttctttgaaaagaatatttatttcagcctaatgaggtgttttgtgtttattttttatctttttaagctaaatctcccctgagagtatagatattgatgctagtggctgctggttttagttccccttccccttataatggctttgtttttccctattgcttgtgttcgatttagggctatatggccagtgttttttagtgtagtttttttattttcctcaagttgttttttttataccccctcaaggacttgagttggtccttgtaaaaaaaaacaaaaaaaaaagtacactggatagagaggaaagcaggcaggagaatcacttgaactcaggaggtggaggttgtggtgagccgagattgtgccattgccctccatcctgggcaacaagaacgaaactctgtctcaaaaa

SEQ ID NO: 3607 - DNA, 1158 bp, Homo sapiens
  SIMILAR (922)..(1131): 941254mologous to Mus musculus putative,accession number AK021267,Smith-Waterman Score=320.
atggatgaagaaattcgggttcatgacgagaggcttgctcagaagcacaccaacaggggaattgcagggctgacccctgaacctcagtcgctgcactttgagttggtggctctgactgtcacactcaaaactgaactgagtctaaagggtttagtcctgttttattctcttcgtgggtcgggaaagaggttaaagaagacacgcaagtatgatatcatcaccactccagcagagcgagtggaaatggcgccactaaatgaagaggatgatgaagatgaggactccacagtattcgacatcaaatacagagcccgcaggcctgccgtggccagatctgctctggcgcagctatggcgatcaggtccctgccctcagctccgattcttggtctttaaaatcttcactgctcctctccagttcctgtgcccccacccttcatcctcgacattgaccttccagcaagatgcagtggaaggcctgatggtggaatcagacctgggttttcgacaactgcagctgaatctcatggaaaagctggattcctctgccttacgcagaaacacccgggctccatctgccaggtgcttgccactggtcctggcagaaatggcggctgctgaaagtgaccttccaaatccttggtggcacttcagcgccacaggctctccaataaaaaccctttacacacaaaccatgagtaccttgggcttggatgttttctgtggtgccggccagcggggcaccttttgtgaagacagagttggaatcaccatccatggaaaatacttcctggaaacgttttggaatagaaagggaagaagaaatagaaatgaggtgaaggagagcggcggcggcggcgcgggtcggcagcgggagggcgcgcggcggggcggaggcggaggcggagtcggcgccgagaacatggccggaggcaaagctggaaaggacagtgggaaggccaaggctaaggcagtatctcgctcacagagagctgggctacagtttcctgtgggccgcatccacagacacttgaagactcgcaccacaagccatggaagggtgggtgccactgctgccgtgcacagggctgcgattccggggtacctcactgcagaggtgctggagctggcagtgcctccacttgtaaaatgggaataa

SEQ ID NO: 3608 - DNA, 499 bp, Homo sapiens
tttgtgtgtaaagggtttttattggagagcctgtgccctagaagtgccaccaaggatttggaaggtcacttttcagcagcccgccattttctgccaggaaccagtggcaagcacctggcagatggagcccgggtgtttctgcgtaaggcagaggaatccagcttttccatgagattcagctgcagttgtcgaaaaccctgtgtgagccagcagttccagttcaaaggttgagggggcgaacagctgcgaggtggccaggctcccgtgagtcaccactcaggcctgtatttgatgtcgaatactgtggagtcctcatcttcatcatcctcttcatttagtggcgccatttccactcgctctgctggagtggtgatgatatcatacttgcgtgtcttctttaacctctttcccgactcttccaagacaaaagcagcacacagtaaatccggcaacagcaaatgccccaagacctgttcctccagctctcgggtgtgtttgc

SEQ ID NO: 3609 - DNA, 1721 bp, Homo sapiens
  SIMILAR (1267)..(1395): 951254mologous to Homo sapiens Human secreted protein encoded by gene 19,accession number AAY04311,Smith-Waterman Score=219.
tttgattttaaagaagtttttttaagacaattgttgacaatagtaaaagagatcaggaggatcaagaatctaaaacaagcctgaaggatgtccaactgtgtatttagaatttccgacattcttctctactggatctacacattggaccccatctgatcctttgctgcttttttggcttggtcaggtcctggcctcattttggcgttacctgtgtcagagttcaaggtggatgtgcttagagctggtcagccccttccagacctggacacgtctgtggctccttttctttcttcctttttttttttttttttaaaaaaaaaaaaggttcagcagaaatcagcgtggctagttcacaaagaatttccagtatcagggaaaaactgtgcgtgtgtgtgtgtgtgtgtgcgcacgtgtgtgcgtgtgcacgtgtgtgatacctataaaacagtttctccttctctgaagggaaaggaaagtgctaggcagcctgtgattagcaacattctttgtgcttttttgttgttcctctgctctgtcacagttctacgttgtttgccttaggaaatgtaatttttaaaaaccattttaaaaatgaacggtgatttggctggctggaaaaaatcacactgtcaggggactatatttgaagccagtctagacggggctggactaggaacccacctggacccaggagaccccacaggacccaggaggtccctgccggaaggcagaggttcaggtgagagtggctcacctctgagctggtgaagtgaggacttgcctgtgacatgacccaaggatctgctgctggcttctggagacagggccttgggctgacttctcaggttgattgaggcctcctgactagcggtgttcccaggctagaggtgattggctgcaacaaagatgcttctattagtctattagcagtgccttcggggaccctgggattttgctctctctagaaaggtgttttttatttttttattttttatctcccccttttttcctggctttgctccagggtttgtgtatttgcctgtttattgtcctgctctttttttttttttggatgaaaactccagcctttcctgactcacctccatcttcggttcttcagttttctgagaagagttgggatatgtgggaaggggcatgggagctcggcagcctccgcctgccaggaagggcagttttcgcctctgcaggaaagagcagagcccgtgggaagccctgggtgagggtggcgcagccggcccagcacgcatggtattgccagccacggggggcctgcgtgtagtctctgctccctgcatttcaccttctttgttgactttccttctctgttttcccccatctgtttgccagaggggtgggactggcaacaggaacagccgtggctgctttatctctcctctccacggtgtactcaggcctgagctcgtgactcacgggagcctggccacctcgcagctgttcgccccctcaacctttgaactggaactgctgggttcacacaggggttttcgacaactgcagctgaatctcatggaaaagctggattcctctgccttacgcagaaacacccgggctccatctgccaggtgcttgccactggtcctggcagaaatggcggctgctgaaagtgaccttccaaatccttggtggcacttcagcgccacaggctctccaataaaaaccctttacacacaaaaaaaaaa

SEQ ID NO: 3610 - DNA, 828 bp, Homo sapiens
  SIMILAR (5)..(265): 251254mologous to Homo sapiens WDC146,accession number AB044749,Smith-Waterman Score=49.
atgggggtcagcccccccacccgccagccgcccgtccgggagggaggtgggggtgtcagccccccgcccgccagccgctccgtccgggagggagtgtgtccacgggcacaggctttcctcctggcaggtggcagccggagacctcctgggtgtcctgccgccactgtggacctcacctcagtgctgtctggggccttcccagaccagtcccctcccagcgggacccaacccccgccagcctcagctttcagagttcccccggccgaaagaattcctcactccaaggacccagaaaacgaagccaaattaaggacttccacccagccccagcctttcagattccgccttaaagccagacctctagaccccagtttctccttattctctaagacgagtagtattgcctggacgaggaacgccctacacagtgcctcgcaaaggctgactgtcatccctgtgtcatttgaggtttcagaagaggagccccgccgaggcatgagggccgtgctccccccagaggaagggatggttttcctggtcctgaagactttggtccagaggagaattttgatgcttctgaggaagcggcccgaggacgagatctcagaggtcgaggtcgggtacccacgagttcagaagagagccccgccgaggcatgaggccgtgctccccccagagaagggatggtttcctggtcctgaagactttggtccagaggagaattttgatgcttctgaggaagcggcccgaggacgagatctcagaggtcgaggtcgggtaccccacgagtccctgggccgccccaaccgcaaacgcgtgcaggagatg

SEQ ID NO: 3611 - DNA, 1015 bp, Homo sapiens
  SIMILAR (1)..(981): 751254mologous to Homo sapiens WDC146,accession number AB044749,Smith-Waterman Score=1342.
aatggcccccgggcccccttcagccaagagggacagagcacaggccccccacccctgataccacgcctagggcagcacggagcacaaggtcgcattccccctctgaaccccggacaaggacctggccccaacaaagatgactcccgcggccctccaaaccatcacatgggcccgatgtcatagaggcggcgtgaacagagcggcggacctgagcatgggcccgagagggggcctttgaggcgcggccataactgcaggggtccccctgataggcgaggccctgacccatactttcccgatgacttctgaagaccaaatgacttccaccctgacaagcgctttggccaccggttacgtgaatttgaggggcgaggaggacctttaccgcaagaagagaagtggaggcgagggggccctgggcctccgtttccccctgatcacagggaattcagcgagggggatggccggggtgcagcccgaggccctccgggggcatgggaaggccgcaggcccggagatgaacgtttcccccgggatcccgaggacccacgttttcgagggcgcagagaagaaagtttcagaagaggagccccgccgaggcatgagggccgtgctccccccagaggaagggatggttttcctggtcctgaagactttggtccagaggagaattttgatgcttctgaggaagcggcccgaggacgagatctcagaggtcgaggtcggggtaccccacgagggccaggtcatgaacattttcgtgatactccccgccctgatcatccccctcacgacggtcattccccagccagcagagaacgctcctcttctctccaaggcatggacatggcatccctacctccccgaaagcgcccctggcatgatggcccaggcacttctgagcacagagagatggaggccccaggaggcccttctgaagaccgaggaggcaaaggccgagggggcccaggacctgctcagagagtgcccaaatctgggcgttccagctccttag

SEQ ID NO: 3612 - DNA, 3875 bp, Homo sapiens
  SIMILAR (274)..(981): 1001254mologous to Homo sapiens WDC146,accession number AB044749,Smith-Waterman Score=1305.
  misc_feature (1)...(3875): n = a,t,c or g
atggctacagaaattggttctcctcctcgttttttccatatgccaaggttccagcaccaggcacctcgacagctgttttataagcgacctgattttgcacaacagcaagcaatgcaacagcttacttttgatggaaaacgaatgagaaaagctgtgaaccgaaaaaccatagactacaatccatctgtaattaagtatttggagaacagaatatggcaaagagaccagagagatatgcgggcaattcagcctgatgcaggttattacaatgattggactccagaaggaagacgcttggtcactggagcttctagtggggagtttaccctgtggaatggactcactttcaattttgaaacaatattacaggctcacgacagcccagtgagggccatgacgtggtcacataatgacatgtggatgttgacagcagaccacggaggatatgtgaaatattggcagtcgaacatgaacaacgtcaagatgttccaggcacataaggaggcgattagagaggccagtttctcacccacggataataaatttgctacatgctctgatgacggcactgttagaatctgggactttcttcgttgccatgaggaaagaattctccgagggcatggtgctgatgtgaaatgtgtagactggcatccaaccaaagggttagttgtttcaggaagtaaagatagtcaacagccaatcaagttctgggatcccaagactgggcagagtcttgcaacacttcatgcccataaaaacacagtaatggaagtgaaattaaacctcaatggcaattggctactcacagcatcacgtgatcatctctgtaaactttttgatatcagaaacctaaaagaagagcttcaagtcttccgaggtcataagaaagaagccacagctgtggcctggcatcctgttcatgaaggactttttgccagtggagggtctgatggttctttgttattctggcatgttggcaaattctggactcgaaaccgaccaggtgataaaatgcgagatcgatataatctaaaccttttacctggaatgtctgaagatggagtagaatatgatgacctcgaacctaatagcctggcagtaattccaggaatgggaataccagaacaactaaaattagctatggaacaagaacagatggggaaagatgaatcaaatgaaattgaaatgacaattccaggtttagattggggaatggaggaagtgatgcaaaaggatcagaaaaaagtacctcagaagaaagttccttatgcaaaacccattcctgctcagttccagcaggcttggatgcaaaataaagttccaattcctgctccaaatgaggtgctgaatgacagaaaagaagacattaaattggaagagaagaaaaaaacacaagcagaaattgtttatagaaatggctacattacaatatactaacccacaacttctggagcaacttaaaattgaaagacttgcacagaaacaagttgagcaaattcagcctcctccctcatctggcacccctctcctcggaccccagccttttccaggacaaggtccaatgtctcagattcctcaaggttttcaacagccccatccatctcagcagatgccaatgaacatggctcaaatggggcctccaggtccacagggacagtttaggcctcctggaccccagggacaaatgggaccacaaggtcctccactgcatcagggaggtggggggccacaaggattcatgggaccacaggggccccagggcccgccccaggggttgccacggcctcaggacatgcatgggccccaaggaatgcagaggcatcctggacctcatggccctttgggacctcaagggccacctggaccacaaggtagttctggtcctcaaggtcatatgggtcctcagggtccacctggcccacagggtcacataggcccccaaggcccgcctggccctcagggtcacttgggcccacaggggcctccgggtactcaaggtatgcagggaccacctggtcccagaggaatgcaagggcctcctcatcctcatgggatccaaggcggaccagggtctcaagggatccaaggtcctgtgtctcagggacctctgatgggattgaatccaagaggaatgcaggggcctccaggcccccgggagaaccagggtcctgctccccaagggatgattatgggccacccgcctcaagagatgagaggacctcaccctccaggtggactactgggacacggccctcaggaaatgagaggtcctcaggagatccgaggcatgcaggggcctccaccccaaggatcaatgctgggacctccccaggaattgcgagggcctccaggctcacaaagtcagcaggggccgccccagggctctttaggacctccaccccagggtggcatgcaaggaccccccggacctcagggacagcagaacccagcaagagggccacatccatctcaagggccaataccattccagcaacagaaaacgcctctgctaggtgatgggccccgggccgccttcaaccaggaaggacagagcacaggccccccacccctgataccaggcctagggcagcagggagcacaaggtcgcattccccctctgaaccccggacaaggacctggccccaacaaagtttcagaagaggagccccgccgaggcatgagggccgtgctccccccagaggaagggatggttttcctggtcctatgaagactttgtgccaaaggagaaatttgatgcttatgaggaagcggcccgaggacgagatctcataggtcgaggtcggggtaccccacgaggaggaaggaagggtttacttcccactcctgacgagttccctcgctttgaaggagggcggaagccagattcctgggatggaaacagagagcctgggccaggtcatgaacattttcgtgatactccccgccctgatcatccccctcacgacggtcattccccagccagcagagaacgctcctcttctctccaaggcatggacatggcatccctacctccccgaaagcgcccctggcatgatggcccaggcacttcttgagcacagagagatggaggccccagggaggcccttctgaagaccgaggaggcaaaggccgagggggcccagggacctgcttcagagagtgcccaaatctgggcgtttccagcttccttaggacggagagcaccacgatgggattaccacagagattgaaccttttgggggccctccagggagttggcaccccttctcgagggggccggagtggcagtaactggggtagagggagtaacatgaactctggcccgccgaggcgaggangctttcacggggtggttggaagggggtcggtagaaagctggaactgagtaccctggaggccctctctgggacaagtatgtaaagaactttcttgtggacctcacccaagagaaacaaaaggaagccctgccacccattgtagcccctgaactccttttcctgggcaccctgaatccccaggaacccctcaatgagggtcttcaagatgaagatgactgctgcccagctaaccagcctggctggccctgtccctgtccaccctcattgccccaactccccatgttgttttgtgaagataaaagctgggatctttttctttttttttaagtctcacaagacatggggcatctccacaaatttaagttcctgtccatttggaaatttgtttctatgtgtacaggttggcagaaaaaaacaaaatttttgtgttgattccaaattgtgatttacgcaagaattgacagaaaactagttgtgaagtgcttgccttaaggaaacctttggtttccatcgcatcccatctgccaaggaatg

SEQ ID NO: 3613 - DNA, 964 bp, Homo sapiens
  SIMILAR (962)..(672): 571254mologous to Homo sapiens PRO2550,accession number AF130089,Smith-Waterman Score=245.
  misc_feature (1)...(964): n = a,t,c or g
ctgctctatcgcgagacttgagcgggcactcatctgcggcaagcaggttctaggaattcgcctggttcccacctcgcgtcccttgccttccttcctagtctacccactgtagtgccccctgcgtcccgctccctcctagccgactcagagcacaagaaggattgccacggtttccattgcagcagccgtggcgcctctgaccctttttttatatcgcggcgacggcgggctgtcgtcacgacgacgtgcggacgcagccggcgggggcctttcagcttatgtggagaagtcgctgtgaagccacctataaatccatttactgaacttatgagagaatgctgtaaatgatggaagtcattcagaagaactcttttgccatcttaaaactatctcacagaaagaagattttaacacggtgtanccagtgaaagtcatctcagctggtattctcatcagtatcaggggaaatctaaatttccgattctaggatttcctgttttgtctataatataaattatttgaatcaaatacagcattcttttaagagtatcttttccaaatctagtatttatttattaaaatatatttaatctgattacaagtgtactcatctagcagaattcaactagttttttttgaatcttaatgaaagcaattaaaaatgaaaaccctggccgggcgcaatggatcatgcctgtaatcccagcactttgggaggatgaggcaggtggatcacttgaggtcaggagttcaagatcagcctggccaacatggtgaaaccccatctctactgaaaaaatgcaaaaattagccagatgtggtagcgtgtgcctgttgtcccagctacttggaaggctgtggtagaagaatcaccttcgcctcccaggttcaagtgagccgagataatgccactgcactcctgggtgacagagcctgggtgacagagcgagactccatctcaaaa

SEQ ID NO: 3614 - DNA, 2544 bp, Homo sapiens
  SIMILAR (323)..(520): 661254mologous to Mus musculus putative,accession number AK021073,Smith-Waterman Score=266.
tccagtttccaaaacaacctttatcctgtttgaaagacctaatacaatgcattaaagcacacttaaaacaagacatagctcccattgaatcctataactttgaacgaaatgtcaaggaggcacactacccccaccccccaccccagttgccttgtgaaggcaaagttacaactgaccgtgacatcctccctctcgtcaaaagaccaactttattttaacaatgtcatataaacagatttttaaaaacattgaacagattgtacgctttaaaaaatacacaggtataaatgagtttttttttgttttgatttttttaaatacatatacatatgtggcgtatatatacatatatgtatatacatatatatatacacatatacatacatatatacacacacacacacatatatatatatatatatatatatatatatatatatatatatatatacacacacacacacacacacacacacacatatatatatatatatatatatatatatatatatatatatatatatagcagcatcctgggcagcaaatgctatctcatggagacaagtttcatgttaagtgggatagtctttccaattgactcaattctatttcctccccacccataataccagtattttatagaactagcttttttaaaaaaataagaattttggcattttggaactttgtcccatgtgagacattgtgcttttaaactgcccctttctaaaaatgacccctaaactcaaacagatctcagtgtctgcgtttcaactaacttggataccatacatagcaaaagcacaggttgttaaaaccagcagattttttcttccaaaggaacatcagtaggacttcccaaacatgttactagttcataaccagctatatgacaaagcaattggttccccacagtgacagctcacataaacacattttgactctgacacactgaaaacaaggatttccaagctaagcaagtcatcagaccagctccctaaaaggagtaacttttaaaaacacaaaaaagccaaagaaatatgaacttctcacttcacttacaaacaattttcacctttgtaagtcaaaacgtgagcatcatccccgggacccatcccatacacataagtaaggattgtactatccgttcgcttgttatgatcgttatgtacttgaactcaacaactactgtggatctgttttggctgaaaggtgtactggaaacacagtccatgcacatataccataatatacattttatccaaaggcccatgaagttatccagaggtggcaaaacacatgctttttttggcccttttccacatggttatggatcctctccgtgtgtgtaaatgtgaggtccccaatggctccccacttcctacgccccaatccacagcctccactggcagcttagcttcctggctttatccttttaggatggctacactgggtgggaaaaactgaacgccatggataaaaaatccatataatccaggagtgccctcctgactgtatcctattccatattccagcccgttccagacaatattgttaggactgtcctgatgaaatcccaaagtggccggctagcaaagtatcctaaaacgacaaatgcggtgggcaagctacactgtaatcaaaaaggcattgggcagaataggtctggtgtaactcaagtccatatggaatgatgaaaccctactttgctgttcaatgaaaagatctattgcacttatgtttgtgagatgcaaaaaataaggcaaatgcctaaatacccgtatcatcttgcaaagaaatgttgaagcacaaagattcacaaaactgtagcttttaatgaaaatattcaatctcagatcttatattttagaaataaaaatttgtatgtaatagcatacatgtgctaccaaaaaaatacccacaaacctagtttaaaaactgttaactaattaactgttagacttgtgtatgatctagaaggatatcacaataactttaaaggcagagacgcagactaaaaccagggaaatcgtcagttgtctggcgatgagagggaaatggtcagatcagtagagtcaagtttgagggctaacagtccttgctataagactgacttttgcttaagtatgagtagttttcatgtaaagaggacaaataatacattccacagatttttcactcagctggcaaggactgatttctttccaaaagggaacaacattaaaaaacaaagtaacagaaaaccctcaccctagtacttaaacagaaatatagctgtgggtaaatctaatatggagaaagagtaatttgaaattgcaagatttcatttagtctattagggtagtgaccatattatggttgctaattagtctttatgcctcccaacacatgtacagttcctactgaacataccagcttttgcatatctaaatcaggaagagagacctctcactcctgccctaaatgggaaacatgatgctaacgtttccttctcccccccgtagtgaagcacatacaatgattagaatgaatgagaaggactgc

SEQ ID NO: 3615 - DNA, 456 bp, Homo sapiens
  misc_feature (1)...(456): n = a,t,c or g
ccgggtcgacccacgcgtccggtggggagccatgctcaccgtggcaaacacaggaaccccatgactcgcccctcacctggcgtggagctgcctggtttgggctggagcagagctggtttcctggaatgttcctttggcccacatatggttctggcccggngagctctgntgtcagaggctcacgggacagaaccacatgctagggtctagggcccctgtctactgatagtcagtttgctgtgtcagaaagcacttctgaaagcagatatgagtcaccagacaggcaggatcttacaaaacttacgggcctcttttgtctgggtggaggccccatgccgttcataagctggccactggaccggatttgcttgctaaggggaagagcccacatcagttttttaaagaaaccaatggaatctgcgcccccacaagcattttggtaacgcaagcccttgg

SEQ ID NO: 3616 - DNA, 1984 bp, Homo sapiens
  misc_feature (1)...(1984): n = a,t,c or g
cttcagggccctggcattgaaccccagcccctgtcccagagccttcccctctggtcccacccccagaagcnacgcacaccttcctttccgcccagctttatctttccttgagctgtgacttcaccccagcatgtgctcagagttgttacaaattttctctgccaaaattaagctgacagagattggccaacttttcaaaccaagtccttttcaatcccaactgttgtctcccccctcttcgccttgggaacaggcccaatgcctggcccagtgcaaaccttccaggatagacacatggtgaaccagagcacgcccaggcttcctgcaggtggcagtgtcgaagcaagtgtaagatgtctgtgggaaaggagaagctccctgcaaatgaacgttctgcaaaacagaaggctgaaggggtcttccccaggcatgtcccagtcactaggagctgcccaccggtgggcttgagtgcccaggctctaggctttgtgcagaaagtcacccggggcggggggcggtaagggagagtctaaaatgggtctctctcaactgcagtcagtgctcctggaaacacggttctcacagacagcacattattctacgtcacaagttctagggtttcaaggacttagccatccaacaggcctcaccataaaaggtaaaagtggacaacccctgaggtcacgctgtcccaggtggcgaacaggccacgcatgccaaaatcctccatagcccactcccggctccagcacccagccaagagggtcgggcccatcgggttctcgaacatacttggttatcagggagggacaagcctgaacaaagtttcacaatctggcccaatgagtgtgggaggcccctggaaacaggccaatcctgcaagccaccccacccttactaacttcctgaagcatgggaagcttctcgagaccaggccaaggtttcctttcccttccatggcacccacgcaaaaggcatttcctgcagtgcctgccaggtccccccttcagccacacagtcccaggtctgtcagggattaaagggccgagcaggaaaaggggtggtaaggagctcaagggcacgcactgggaatggcctcacaaggcagccttgagacgcacaggtgctacagctgaccacccatccaccatcaggcatgtttgcaaaacgaacgcgaggcatgcgttagacagatgcatgtgggggctgcagattccagtggtttccttaagaaactggagttggctaatcccactcagcagacaatcccgcctcagtggaacaccctatgaaaacgccatggggcccatcatgcaagaccaaagaggcccgtgagtttttgtaagatccttgccttgtctggtgacttcaatcatcttgctttcaagaagtgctttcttgacacagacaaactcgactatcagctagacacggggccctagacccctagacatgctgttctgtcccgtgagcctctgacaacagagctcaccgggaaagaaccatatgtgggccaaaggaacattggcaggaaaccagctctgctccagcccaaaccaggcagctccacgccaggtgaggggcgagtcatggggttcctgtgtttgccacggtgagcatggctccccacgcactctccctcagagcagacaagtaggctgaccacagagctacaaaagtcacctgcgtttcactaaaccaagcgaatgtctctttcccctctcctcccccgccgcccccaattacatttttaagcaaacaagcaggattctggctttgatgctcgttcttgacatcggtcactcttgctaccaaaacagggacacagggtggagggtgagcacctctccccaacacaggataaaactcatctccggtgcagaaatgattgctaaagacctttctcatgtcaacccgaaggccacacccagccccctatggaatcagatgggaaacaggcctacgaattgcttcatacttatcc

SEQ ID NO: 3617 - DNA, 1868 bp, Homo sapiens
cttttacttttcttaaacttaggcttcatttacaaaatgttttatttaagcaaggaacaatgtaatactcaataatgacctaaaacacctttttgaaagggtttgcacttggaagagagtttatgttctgttgaaaccaactttgatagggtcctcacctttccgttaaggaggtgccgcactacaagtttcaaattatatggaaaaacctaaaattaaccctctgttggtgatctcataaaatggttttgaccttttggtatcttaatttctatctaaactttatcagaaaattttctttgaatatatcaattagttggctggtgggaattttccctttccacattaataaatgcctttctgtgtttctgaatcagaagcaaatgattagggaaaaatatatgtccaaaccaagacaaggattaagttttaaaacagttaaggaaccatttaagtccacattggcttgtcagccagcaattgtcatggaagctatcatttttaagagtgccactgtgtggatttttttttcaagtggttattacattaaaattacctcatactgaggtttttgcactgaaatatcacagtttcaaatttcatggttaatgttgtgcgtatgtttgtatgtttttaaaggaaacttgcattttcaatagttgatcctaaatttcataaactgcacttctttactctggtaaagctgatgtttttgtgcttattgagaattgccgtagtacctttgaatgtcaaactttatttagaaatataaaacttatcctttatgatataaatggttgagtgtatgtacccagtatttctaattaaatttcacatgctaaattaatgaaagtaacaagattgtaattttttaaagtcagttgattaaatgcaataaatattggttgctcaaatatgccacaaataactcgaaatttttcatttactttcaacagcataagattctttaatatttaggattgactgttctttccagttaagcactgaaggattatgtcttgtagcttccccaagagaaggggaaggaaaaaaaagcactatgttaaggataatacagaactcttttgaactattttggtagtaccttttaccatactgtttgctttttgatttgggtaaatatcttaagagcaaagaaaacaatacaccaaatgaaaatgctttgaaagtaaatgaaaacagcgcttttgaaaggctggtatagtatgaccctgggagtcagcctttgtgttacagcgaaaatgttggtgctataaattctgattgtttacagatgttgattctgcttatgctccaaagtgtgcatgatgtattttacgtagtactctgagggaagtctctttataaaacctacctaccacttagtattaaatttgtttgaatttatatcttttgttactgtaaattcagcttattccaattaggtgggccacagatttaaactgataccacattccacaaaaacccaattccagtgtataagtattgaagtataagcagtcattgcagcttgatgcccagatcatgtatgtaataacaagtggaagttaatagggccttcctaatactgtatgggtactcctaagaattatttcattttggatataaagaagttatgaggcctcctgtcacattcacagctggttctccaaaataatttggttgtttcaaaaacaaatggtaatcatttggttggattcttcagtatcatgactagatcatggtggttttaccatagttgccaagtggtgggaggtagcatacctgaaaatgtacgtgtgtgtttgttgtattttttcacattttgtgaacaaagcacatttattaaaaattttaaattttctagt

SEQ ID NO: 3618 - DNA, 328 bp, Homo sapiens
  misc_feature (1)...(328): n = a,t,c or g
aaaaccctctataaaatttaataaactgtataagtnaactataatgttttatacttnctttttggtgtcttaaaaatttaaagaagcgaggnacatgccatttggtgagtaccgttggaagctattttaatttctaggaaaagccccaaatatcactccaaatagattttgtttgcagatctcagttcagaatgcacacacacacacacacacacagagatgtatttatctttccaaattggattctggtttcagagatagagagttggtataaataattgaaaggntaaatctaaaaccccctgacagtccgccaaattcaagaaca

SEQ ID NO: 3619 - DNA, 1408 bp, Homo sapiens
  SIMILAR (228)..(94): 551254mologous to Mus musculus putative,accession number AK018420,Smith-Waterman Score=130.
atgccatttggtgagtaccgttggaagctattttaatttctaggaaaagccccaaatatcactccaaatagattttgtttgcagatctcagttcagaatgcacacacacacacacacacacacacacacacacacacacacacacagagatgtatttatctttccaaattggattctggtttcagagatagagagttggtataaataattgaaaggataaatctaaaaccccctgacagtccgccaaattcaagaacagaagtggttgccaactctctaacaacaatgtttggggaagctgattccaaagtaggctgaggatgagggtcataaggcatactgtgaaaccccaagattcttcttccctggtagaattacaatagttactcttgataaatataagtattccatgtcttgccctctttcctcactctctgcttatccttttagacctaagtttcattggaaatagcctgaattagaagaaagcccatccggaatctttattagccccctctaatgattagtttccaggctgcgttcatacctttaacctctcagtgtcaaagtcctacctaggcctccccacaacagagagggccgtaacagcaatccctgcccctcctttacctcccaggcctcttgcagaggagcccagttgataacaccatggtgaaagttcctttggctgtcctcttgtagaaggtgctgcagtgcaaagtatttaatacggtctttaggacaaaattaactgtcatgatttgggaccagtttggttgagcttgtcagaagacatttcatttgtttcatttctgcacttctctatgaattttgggatactatatttctgtgaaggacttattgtatagaccacctccaaaaggggaaggaaacttccccgtattaccacttcttccggggaatatagctgtagtatttcctccactggtattattggataccctgtgtaccggaaagtatgccagttattccaggttaatgtttccatattaaaagaatgtaatttgtaaaatgtaacatggatcagtagttacccttttttccaagcctctgaagaagttcagattacggtgttagacttaagttacagtgaaaactgttttaatactacttttgtggctagcaaaggttgtgcatcctatttaaaattatttacaggatgctctaaataaaggggcattaaagataggtttagctcttaattttagaaattgtgacactactgatgtctgtcaaacagttattcttcagaagttctttgagatgtcaaaaataatttttgtttaattcagagataagtaacccctgctttattgattcactattacaacaaaccctaattttgtcattaaatattttaactctgtgatgaaaaaaaaaaaaaaaa

SEQ ID NO: 3620 - DNA, 881 bp, Homo sapiens
  SIMILAR (703)..(867): 721254mologous to Homo sapiens HSPC141,accession number AF161490,Smith-Waterman Score=187.
  misc_feature (1)...(881): n = a,t,c or g
tgtgatacatttgaaggcgtcggaaancccaggcccacctgagcctgctgccctgacccgtggccccagctgagcacgcaggctttttggggttttcccagggtcggcggcagagccctccctccagggcccattgtgttcctgcattcccccatggagcacacgccagacctgaggggtgggacggacacccccaggcatggccggctgtctcctctccctgccttgggaggccttgctgggctctagctgtcctccagcactttgggccctgggcccccagaggcagtcagtacctgggtggagctcagagtccccacctgtgctcttcacaaaaaccaccagcagatgagacccacgtgcgtccctctgggcgcctcaggccccaggatccaccatcaaggtttgcttgcctgtggaggtcgcctctccccaggggagcccccaagggcggtcgggatggtgggtttggcatccccaggcactgcctatccctttcccacactcgcatttggtgtggctggtggctggatgcccaaaaccgggtatcgggttgaagggtccaggtagtgccagcaggggttttcttttctccaggcctatggtcctgcccagcacgccatttcaattgagaaaattcaaagccaagtaccccgactacgaggtcacctgggctaacgacggctactgagcactcccagcccggggcctgctgcctccagcagccacttcagagcccccgccttttgccttgcactcctgtttgcagggctggccctgcctgctcctgcggcagcctctggtgacgtgctgtccaccaggccttggagacaggctagcctggccacagaattaaacgtgttgccacaaaaaaaaaaaaa

SEQ ID NO: 3621 - DNA, 1564 bp, Homo sapiens
  SIMILAR (568)..(852): 971254mologous to Homo sapiens Human histidine protein phosphatase,accession number AX035705,Smith-Waterman Score=494.
acgccacgcgccctgccgtaccttcgcctccagccgctgctgtctgggccctgcaggagctgggaaaaaccgcagggaggtcttcaggccgatatgcaagtctcccagccgaaggggcaggggacctgaacaggggaagcagagcacctgggcctggccagagctgacacctggctaggagaggaaggaccaagggacggggcgttcccaggtgggagcctggagggcaaagcgtggtgcgagcagcctcgcgggccgcctaactgccccgttccaagggtgccaccggaccccgctggagaggaacttctccgttggctgatatcatcaccacccattgccgattccacgtttcctttaagcggggctggcggagccgcaaggcggcaaggaactggattgcgattggtcagcacgtgcctcggtccgcggtacaattggctgaggcgctgggccttgggaagcattccccgacgggattggtcgtcgctctcgcagagcccgcctcccgcagtacaagcggcccccggttggggttgggaaggaggggattccgggagaagaaacatggcggtggcggacctcgttctcattcctgatgtggacatcgactccgactgcgtcttcaagtatgtgctgatccgagtccactcggctccccgctccggggctccggctgcagagagcaaggagatcgtgcgcggctacaagtgggctgagtaccatgcggacatctacgacaaagtgtcgggcgacatgcagaagcaaggctgcgactgtgagtgtctgggcggcgggcgcatctcccaccagagtcaggacaagaagattcacgtgtacggctattccatggtgagccgcagccccgtcccgccctgccggaggccccagtaccagcttcgaggcccacctgagcctgctgccctgacccgtggccccagctgagcacgcaggcttcctggggttctcccagggtcggcggcagagccctccctccagggcccattgtgttcctgcattcccccatggagcacacgccagacctgaggggtgggacggacacccccaggcatggccggctgtctcctctccctgccttgggaggccttgctgggctctagctgtcctccagcactttgggccctgggcccccagaggcagtcagtacctgggtggagctcagagtccccacctgtgctcttcacaaaaaccaccagcagatgagacccacgtgcgtccctctgggcgcctcaggcccccaggatccaccatcaaggcctatggtcctgcccagcacgccatttcaactgagaaaatcaaagccaagttcccccgactacgaggtcacctgggctaacgacggctactgagcactcccagcccggggcctgctgcctccagcagccacttcagagcccccgcctttgcctgcactcctactatgagggctgaccctgcctgctcctgcggcagcctctggtgacgtgctgtccaccaggccttggagacaggctagcctggccacagaattaaacgtagttgcccccccaaaaaaaaaaaaaaa

SEQ ID NO: 3622 - DNA, 692 bp, Homo sapiens
  SIMILAR (143)..(679): 471254mologous to Homo sapiens HSPC141,accession number AF161490,Smith-Waterman Score=242.
  misc_feature (1)...(692): n = a,t,c or g
aatccgagnccccntngttttgagnanccctagtccagngnggnggaattcccgggaggaggaacatggcggtggcggacctcgatctcattcctgatgtcggacatcgactccgacggcgtcttcaagtatgtgctgatcccgagtccactcggcatccccgctccgggcatccggcctgcagagagcaaggagatcgtgcgcggctacaagtgggctgagtcaccatgcggacatctacgacaaaagtgtcggggcgacatgcagaaagcaagggctgcggactgtgagtgtnctgggcgggggccgcatctccccaccaagagtccaggacaagaaagattcaccgtgtactggctattccatgggcctatggtcctgcccaagaacgccaatttcaacttgagaaaatcaaaagccaagtacccccgacttacggaggtcaccttggggctaaaccgaccggctacttgagcactccccaagcccgggggccttgcttgcctccaagcaagccactttcaagaagcccccggccttttgcctgcaactccctcttgcagggctggccctggcttgctcctgcggcagccttctggggacgtgttgtcccccaggccttggagacaggtctagcctggccacagaattaaacgtgttgccacacctgccggcttctgaaaaaaaaaaaa

SEQ ID NO: 3623 - DNA, 917 bp, Homo sapiens
accccaaacctcagcagtttaaaacgattttcttttctctggatttaatgggttcaggacacgtttggcaggacaggtatcacgtgtgtttgtccaggcagttggaggcatgtgaagactcactgagacgtacagggaagctcttggggctggacactgatgttggctccccctgaggtgcatgccccaagctgagaagactcaaggttccagccagagcctggaatcactaaaggcttgtttgctcacaggtctggctcctgggctggaagggcttagggaccaggactactaaactcaggtgcttcccatgttcagattcaggtcgaaaacattttccatcaccctccaaagtcctcttgtgctcagctgtggccggctcccatttctgcccagcaaccactcatctgcttctctctgtaaatgtgccttttctggacattccatggaaagggaactgccacatgagtggtctttcctctggcttgtctcactcagtgtcccacctttgggactccttcacggtgtggcaagggagtcagcagcctgctcctcactgtcgctcagcccgtcactgcatggagagcgtgcacacttcattttatctgctgaaactctgttctcactcttgctctgctgttttcccttcatgtccaccttcctcccccaccctctggtgtgacagacactgctggggcccttccaacaggcggtcctccttcccccacttccgttactggcagaggtcctgcccactcccatgcttcacagctccctccagcccctggtgaatttgcaccattgaatgagtcctgcagaggctgggcaggcgaagccttcctggaaaaggtttccttgctaatatgaagcaaggagcaatgcctttgcagtagatgcagtcctgcctgcttgaattc

SEQ ID NO: 3624 - DNA, 1017 bp, Homo sapiens
  SIMILAR (127)..(357): 771254mologous to Homo sapiens src-like tyrosine kinase (put.); putative,accession number M14676,Smith-Waterman Score=303.
atgcttctcaaacttcagtgtgcacacagatcacctggggaaactttcaaaatcaattctgattcagttggcttgggtgaggcctcagctgacagctcttacaagctcctggttgatgcgaatgttgcagagagagctgcaggtctctgctgccgcctagtagttccctgtcacaaagggatgccaaggcttaccgatctgtctgtcaaaaccaaagatgtctgggaaatccctcgagaatccctgcagttgatcaagagactgggaaatgggcagtttggggaagtatggatggagaaagctgatggtttgtgttttaacttaactgtgattgcatcgagttgtaccccacaaacttctggattggctaaagatgcttgggaagttgcacgtcgttcgttgtgtctggagaagaagctgggtcaggggtgtttcgctgaagtgtggcttgagatcccagtttatccattgaagaaaggtagtaaaaggtttgcgaagccctccttccccgtgggagaggtgccctactgtgcatgccgggagttggctgtgggtcatgggcccagtacccctcacccaaatgattcttcccaaccatcaagaaaggaaggagattggtgggaagcccgctccttgacaactggagagacaggttacattcccagcaattatgtggctccagttgactctatccaggcagaagaaagagctgaaaatgaggcacaggtctcagcacagggtaggaaggatccgggggatgggagaaacaaggctctacagcttgtgggaggctctgtggcacgagtcctcacagccactcacgggagtggagcaggagggatggacacaacttgccgaagggatattgaatatgaggaagggaggaaaagaaaacgtacaaaaaagaaaagggaactggaaagccaaatgccaagagggctctgctgtggcctgtcaggaggaccagctgtccagtatggacacaatttaacaagagagacaatggtagaaaagtag

SEQ ID NO: 3625 - DNA, 430 bp, Homo sapiens
  SIMILAR (126)..(251): 1001254mologous to unidentified SEGMENT ALPHA OF HUMAN APOMYOGLOBIN,accession number A50313,Smith-Waterman Score=228.
  misc_feature (1)...(430): n = a,t,c or g
gtgagggctagagaaaggaaaagattagaccctccctggatgagagagagaaagtnaaggagggcangggagggggacagcgagccattgagcgatctttgtcaagcatcccagaagactgcgccatggggctcagcgacggggaatggcagttggtgctgaacgtctgggggaaggtggaggctgacatcccaggccatgggcaggaagtcctcatcaggctctttaagggtcacccagagactctggagatactatccatgctctttctcactgttgtcataggatcattatgccctctcttcatgactgatcgagtcatcgtcttattatttatctcctttttatatcatcattattgttatgactcttatcacctttttcttacttataatattctatatcgttcttgtttatccatgctgccagg

SEQ ID NO: 3626 - DNA, 2395 bp, Homo sapiens
  misc_feature (1)...(2395): n = a,t,c or g
cggcgtagtgcccttctgccctgcctgacgatgtatcgaaaagatgagagtgaaggagactttgtgcagcaggaaacgggtaggtgaggtgttgggcagttgtgggaacttctgagagtattacagagtggtagaatcggtaagaactcttgatttggacttcgctttggtgggaactgtgtgcctatacctgcctgtgtgtgtgcaagtgtgcaggttcctttgtatgtatgtgtacgtgtgggaacctgtgtttgtcatatttttcttcatttcacaaaggctttttttgaagcagtggcagtatgcttttgtttcaagaacacatgaaattcttttaacaccagattagtgtgttaccccaaatgaacggttctagccctctattaaggaaataaaggggaccataaggcattttgggctgcttatgggctgtgtgttactacttacaagagtcttgaaaattatacagaactttgccttctttttttaatgtcttccacaatgttgtgactgattataaccctgtttcccctcagagaagagctatggctcagggatctgtgttgactctggcatttagtggctttgtgaaggaaagaaaccattaaatgacctgacaaaaactgactcatgtctttaaagtagttgaagccacttttaggaatgttactctcggttgcttttgtctaattcttaatgggcttaaagccaaggaaaaccatagtattaaatcttttttgtgtaccctatggctagtgttttaaatgggcagttccgttgtggataaagtatccagtcacttcaagttttctgtgaaaagtttttaattaggttaaaaataattttggcatacgtctctactcagtttataaaagcagttccacaccatgcaaacaaaaactctaacagcaaagggttatcttggacctgatggttacttgaatctgagagaaagtcattacttactactgcactcctgcttttgtgggaaaaattttcttcttccccagaagagttaacagttgagtgttcagctcctgacttacctttaatttagaggcaatattattactgtttaagtgattatttgcttaacacaggttttattttgtctttttgctggtagattatacaagggacaactttagtgatgaggcatgtggatgatttggtgggagtagggtatatacttagtggaatgggtttattttatggaagagaattccattggaggtggaggattggaagtatattgtgaagtgggatttgaacagcacatatgctctgggtttgctcaaataactgcaagtttatgcttacatctaaaattttggtttcctgttaccctaaacgggagcttctagaattacgaaggcccatacctgccacgatttataaaataatggttttatccctggcccccaaatccatccaggttcccccgggttttaaggagaagtgggtctaattagacagggaatagaagttgtggtggaggtgatttggggatagactaggtttcccttatgcaagtggatatgagcttcctcatagaaaaccagacctactgtaattagaccagtaaccctcctaaccctcaccctcccaagccccaagtaatatggcccctgcctgggttaccctggtgactaccatttcccccagattccactcctaaattccaaggtagtgacccaaataaatttgggaaaggaggggggtcaaggaggaaaagcttgttgaaaaatcttttctcctatttaagagaaatatatgccctagagctgctccagcacccttggtttctgattttttttaatattgaatatggattagaagaatgaaatcagatgacacctgactgcaaagaatgtttcatnaagcgaaatagccttcttacattttggtataaagctgtgaacttcgtaactttgtaaagcaagcacataaagccaatacaagagggaaaataaagtactttttacttaattgacggtttactttcgttaccttgtctggcatattcaaggccagccctttccacgttgggcttagccgaggaagaaggaaactgggtggaaaacacaggatgcctatagatatgccgcaggccatggtccagagaagtttagcaaacaaacagctgcgttcagggttttgtcccacggtcatgcgacaggtcagttagtgagcagaggagctaggatagctcaatctccactccattattcaggtaaccggcccctcccgttgtacatgacccatttattcttgatgtcttttacagcaacaactattcctctgccttccttttatgtcttggaaagtatctgagccattcttatgctcaagaaatagcaataggcatgattacaaaattcaaaaaaaaaaa

SEQ ID NO: 3627 - DNA, 2595 bp, Homo sapiens
  SIMILAR (202)..(720): 411254mologous to Arabidopsis thaliana putative protein,accession number AL049638,Smith-Waterman Score=297.
  misc_feature (1)...(2595): n = a,t,c or g
ctctccgaannnccgggcgacccacgcgtccgcggacgcgtggcttggaggtcaaataatagtaggaaaagttcagcagatactgaattttctgatgagtgtactactgcagaaagagtactgatgaaatctccatctccagcattacacccacctcagaagtacaaagatagaggaattttacatcctaaacgaggtactgaggaccgatcatatcaaccttctctgaaatctacagacagcaggagttacccaagtcggggtgctaggccttctcctcggggctcaggaaagggctcaaaatctccttcgccaagaccaaacatgcctgatcgatacttcataatgaagagtagcaatttgagaaaccttgaaatttctcaacagaagggtatctggactacaactactagtaatgaacggaagctaaatcgagccttttgggaaagcagcatagtttacttggtatcttctgttcaaggatctggacatttgcagggattctctaggatgtcttctgagattggaagggaaaagagtcaggactggggctctgctggactaggaggagtatttaaggtggagtggatacgaaaagaaagccttccctttcaatttgcacaccatttactcaatccatggaatgacaacaagaaagtgcagataagcagggatgggcaggaactagaacctctggttggtgaacagttgctccagttatgggaacgtcttcccttgggagaaaaaaacacaactgattgacactcagaactcttagctgtggaagaacatcatgcctatttataaccactgaatgcactgactttcaaaaactgaggtggggtgtgtgttacgaatgggctttttaacacttttagagtgttgctttagaactaccatcttcatatacaggagaaaggaagcatttaaatttttatagtgattatagagaatgattatatgatgtttgtaatgaataaaatagtagtttcattatttggcacaatagcagtttattttaaacaaacaatttgaagttaaacatttcatttttaaaaaccctgaatcacagttcttattgatgactttttaatgcagagtaagttgtttaagaaaggcctgaataaatcagaacatttgagccccattttagaagagtcaacttttaagattatcattagaaaacaaatacgtcaacccctatgaaaagaagcggggaaaacaacaacaagggcaacaacaaaaaaccagtgaaattttacaaggggtcccttttaaaaatagtgtgtgctaactaagggctattcattctgccatttttaacttgagacacatttaagaataaagttggatgttctttttctgtgattatgaaatgcaataaaatctgaataaagggcaaagtttcttcctggatcagattagattaagtgcttagttttattcctaattctggccccttttaacctgatgtgtaccttactctttcctccctctcttcctcccttcctcctctccccactcctttcctgcatttctccctccctccttccctcgtcacatctcttatatgagcacagtaattatgacctttttgttttgggctacaacttgattgaaacaagttcaaaatttaaacaagttcatacaagtttttaaaaattctcaatgggtaggttggttggtgtgcggtctttccaaactaaagcctgcaagcgccacaattctaagtgccgccttccattttttttcagtatgttttcactggcttatgttttcagatatgattttcctttttcgcatatatggtttaataaatgggggataattttttttttgtaaatccgtgcttgtgccaagtctcatatttctttgccatctcagaattatctttttaccaccactgtttataaaatttccttagagactttttgaagggaaaatagagcaacagggaaaaatgaaagaaatgtcttggttactgagctctaaatagacaggtttgatggcacttctcatgatacattttagttattcttataaaagcaaacaggcaaacatgagtgtaaattaaagagaaaaagaaaactctggttttatatttgagaacacgtgaaaaatcatgggtcaacataaaatcttgagaaccttctactttctctgggaaagcattatatagtggtgcattagtttagaaagtcagctatgattttgcctatagttctagttattagctttggggttttcttgtactttaagacatacctgtaaattgaacctatttgaattatattccacctgtatgtgtattatggctcttttcctattagaacaaacttgtgtttccctgataatgtgtacaattttttaggcatgtacttaatagttcacaatgttctaaatttggaaggacttaaaaaaaaaaacttgtttaaatttccatctgttttgtaatatcttagctctatatgtaaatgatgggtttgttggtatttaaaatgaatacaacttgaatgtaattaaagtgctgttttttggaagcggataaactttaaatatacttattaaaatgaaattctatattataaaaaaaaa

SEQ ID NO: 3628 - DNA, 410 bp, Homo sapiens
  misc_feature (1)...(410): n = a,t,c or g
ctagagtggtcctgcagcagcccctggcaatgagctgtctgatgatgagtcccaaggtacattgttctactgttttatacccaggtagaagttacacagcaatttagcaatgttgttaacagacatacagnnnnnnnnnnnnnnnnnnnnnnnnnnnnnnnnnnnnnnnnnnnnatataaacgcgcacttaaaattcaaagtttattttttatcacaagcacctttgaaatgtacgtggaaaacgtcggctgctcgtgagaatcatgtgtgacttacgttccttatgttttatggaactctcggaacaggggtttgtttttgcttannnnnnnnnnnnnnnnnnnnnnnnnnnnnnnnnnnnnnnnnnnnnnnnnnnnnnnnnnnnnnnnnnnnnnnnnnnnnnnnnnnn

SEQ ID NO: 3629 - DNA, 828 bp, Homo sapiens
  misc_feature (1)...(828): n = a,t,c or g
gagagagagtcttgctctgtcacccaggctggagtgctggagtgcagtggtgcgatctcaaaaaaacgaaaacaaaaactaaacaaaaacaaaacactgttccgagagttccataaaacataaggaacgtaagtcacacatgattctcacgagcagccgacgttttccacgtacatttcaaaggtgcttgtgataaaaaataaactttgaattttaattgcacgtttatatcaaaacactcacacacacacacacacacacacacacacacacacaattctgtatgtctgttaacaacattgctaaattgctgtgtaacttctacctgggtataaaacagtagaacaatgtaccttgggactcatcatcaggcagctcattgccaggggttgctgcagggaccactctagggaccccaggaccctgcagtcgagcatctctgaggggtccaggtccaccctacagctcagggagaaaatgacatcactacttgtcttgaaatctacagaggaacaccaaccacagaattagggtctagattgggtgcctgtaggtaactcagtcaattaaaaacagctctgaaacccagacaacctgattatgaaatccttaccttattttgtcaaatgagcaacacagtatgaataataacttctcattttaaaacaggtaccatgatttnnnnnnnnnnnncttgcaagatttcatctttaccagcccacgctctggttggtgggggttaaactccaaggcgtctctgctgctacaggagtcactacccctcagcgttgtctttgtaccacttgccaccaccagatggcactgccg

SEQ ID NO: 3630 - DNA, 1955 bp, Homo sapiens
ttgctgttcccgaccctccaccggagggccgctgacttcagcgcaatgggactaatctcgcactccttaaagcaggtgtagctgatttcaacttggaaggtcttcattttttcccaaaaagcgtgaaaaacccgtttttagaaacagagatttgcaacgttcagaagaggtttcagagctaagaaagacagagagagggccgccttggacagtgggctctatcagtgaatgcgtccagtcttagcaacggcatgtctccatgcagtagttttttgccgcttcccattgtatcaccacatggtaactgctatcaacagttcagatccttaataacatggcagcttgaatgttctgttactttcagagaaagtatgccttgaattctctccccaactcaggtacaaacgcttgaatttcaaactcatactggtttacaccccagagtggaatgcttctcaagatttcgtgagcagctagacacaggaacccacagccccagatacagaacaccagactttcagaagcagcaaagccctgtcctgctgggcatggaccaagcactatccgcaaatggtctccagtgagactaaggcaagctaacaaggaagaggatacagcacaactcaagccagattgcccacctcctccttcctccacatcctctttctagcaaaagcgaacactgcagataagagatagcccactaatgtagcagatacagtgtgcccaggggcatgtttccaagacacactctactaagcacagctctgggcagctccagaaccacatcccagataataactcaaatattcaaaatagtagaaacctgtcccaacattggcctctgtcacagagagaagggattgttgttacgcttgacaggaacatgcaaatcccatttgaggagcccacaatgagaaacagaaggtgaggagacagtgctaacagccctggcatctttcttgccagtgaggaggtgggaaccaatggcaatgcaagcttttcccctgcagcataagggacagagccacacgtaaggcacctggaattttacagtgggacgccagttctgagagtggccggtcttggtgattaaggaacccactccacaggaggaatggtctctccccctctctcggggctgaatccaaggccagcacacaggggtaagctaggaccttctcagtgagaaagctgccagcatgtggcattgccaagactctggcctgggacaaagcactgggccaaggttcggggccactcgccctaaagcccacacagggagcagcactggtggtggatggaaagaagtttctgtggccacacactgtctcttccatccctggcccccatacggcctttctcccaagcacatcaggacactctcctgtcacaggtactgtgacacctcacagtcacttaccagatacctgggcctttcctagtgacatccttctactgatgctaactggaccctggccacatcaatcgtctcatcagagggtttgtggagtctgtccactaagggtctgaggacaatagcagcccacagatgtgcaagtgaacttttttgagaacgcatcactctgacaggccacatcagcatattatgccctttctgaacacctaaaacaattctagctagcagtctgaaggctcagactgcattacgtaactctgatccaccaggaaagttccagaaactacttcagtagaaaggtagataggaaaaccctcctaaacaagaaatgtacaaagagcttcggaggcaaatccccatcaaaagccaatcctccaggctgtgcagtgcagagaaaagtcaactctctcctttagaaagctgctgctgattagtaagcatatcctcgcaacataagccagatcggacgtgtgggcggacgcgtgggtcgtcgctggaattgcggattgcggccgagtgccatcgacagtcagat

SEQ ID NO: 3631 - DNA, 2211 bp, Homo sapiens
  SIMILAR (401)..(288): 1001254mologous to Homo sapiens Human secreted protein sequence encoded by gene 32 SEQ ID NO:91,accession number AAB64697,Smith-Waterman Score=207.
tttttttttttttttttttgactgtataattttaatatttgaaaaattgcatccagaaattaatacaatacagatttgtacaaaaaaggaaggacgtaaaaacttctaatcatacagacaaaaatatgactgactaagcaaagattttaaaaaaggacaggatgtttaaaaaatactgataaatactgtgtaatgctttaatttactgtggcagatacaaaaatcaataattcattaacagattatatatgtaaaaaaagtaactacatgaattttctagctttttaaattaataaaatgtaacagtagtggtttttattttttaaatgaggtattattacactgtaaaccaaaaacagagcacaaataaataaaggcaatgtgcaatttagtgataaatggattatacatttcaacttaacaacagataacaaaaattctctagttatttatggacttcgtcatctaaaaatttggcttgcttgtgtggacttcttatttaaaagtgacacagctaatcgatatacaagcacatcattaaacatgcagaccaagccaacacaatttttccatgagtcatctctaccagataaaaactgtttacattttatttaaaacacttaaatctggtttcttatacatgtttcttttgtgcttataagtggtaacctacattaaaaagccgatgtctctagtgcaagcagtgtaagagagaagcagttttatttgcatatggatttaaaaaagagcaaaataaaacaaaaccaggatgccttttaactctcttaggctttccaagatttttaagaagaaatacccttgaaataatatacccaaatggaagagcagaatcacttccatctccaagagaatagtaaacaaagtgaccccttttcctcaaagatttgtgggttggcttcagaactgttggagaacaagctgattagttcctccaccctggaagaattctgctggttgggtgcaggaagcatagcaagaaaatagcctagcccagaaagattttggggaaagtattatttgcatatgaaccatatgctggtactaaatgctggtttcattattattgcaaatataacttcagagttttctgaaggaaagctgttaaagtatggtaaagaagtcttggtttggcaatatttgtaacatgctaataaaactgcttcatttgctgtaaattaaaaaaaacatttactgtctgacttaaaatgcagtttctttttacatactactttattagaaactctaaaaaaagggtactttgaatttattatattcagaatccagtgaaaaacaaacattttggccaaaacgttgaattttatttttatactaagctatatcattttgacataaatgtttttaattgatttcacttttgtcaaatactttaacctatctttttcaaaaattagtgttttggtacaactggtgatcaaaaaatgtagatataagtcttgtacatgattcaaaagatttataaaagcagttatattcttttgtgcttgtaactgacatacttcatcaatgattatttagggctgagttcttttctaatatcttgagccttaagaagaaatgatcattatacaaatattacagagtacacaagtaactagtttactgccaatgtgcatgcagactaacaacacttaaaagaatataaccttgaatccaattagtctgaaaatactcttgtacaatcatctttgttgatttgtaaaagctgtacacacatctaaaaccctaaatttactttgtaaaaataaatctttagcaataaatggccctatcaaaattccaattatttccaggttattaggtagttatttacatgcttttcagcaactgctgagaagaatcttataggtcccaagccagtatatcaaaaatccctgtaaactgcatttgcaatgatactgtgttgtataccactatatgaaaatatggctacatgccttatgttaaagataatgtagctgtttgctttgctactgtgtgctagcagtgctagcagtgtacaatctgccactgggttcaactataccataaattcattcttcactgtactttgctttcccagtggaatgcctgtgacaaactacttgtggagaatgataaagtgctatataaaagaggaactggaccatacctgtctctgccatgtggacttttcctcactcaagcgatttc

SEQ ID NO: 3632 - DNA, 707 bp, Homo sapiens
  SIMILAR (225)..(151): 841254mologous to Mus musculus putative,accession number AK018175,Smith-Waterman Score=129.
  misc_feature (1)...(707): n = a,t,c or g
gatgtcctgagtatagggaaccagggccgttgaaaatcagtaaaggttgattacctggggcgagaccgggtgactgtggcagtgcaggtgaaggtaccctggaccttctcagttcgctggcacataaggctccgccaataaagcgtggttctctctgtcacacacacacacacacacacacacacacacacacacacacacacacaatgattggagggctatatgatccagcattagcttcctggtgtgccaagcatgcttgatcgggaattttttttttattattattattttttagctgtagctgaaggcatttctcggatgtggagaggagaatggaaatcgcagaaccaaatcagtttgccctgccatatttggctgtggtctgtcattgggcatttctgatggtgcttttctggattcaggaagagctgattgtcctccgagggttgnnnnnnnnnnnnnncagtttcaaaaccctgaatccggggccttatagtccccccaattatcaatttttttctcccttccctcgcccaggggagggggggaaacacttttcactgcaaagttggctttaaagttttcccatcttgcgggcattatcccttgatattaaaattattttctcagttaaatccacctcctgctgaaaagctgggggaaattaaggctggggggtttttttcttgacctttttgggaggg

SEQ ID NO: 3633 - DNA, 1249 bp, Homo sapiens
  SIMILAR (297)..(241): 421254mologous to Mus musculus putative,accession number AK018175,Smith-Waterman Score=40.
aggttaattacctggggcgagaccgggtgactgtggcagtgcaggtgaaggtaccctggaccttctcagttcgctggcacataaagctccgccaataaagcgtggttctctctgtcacacacacacacacacacacacacacacacacacacacacacacacaatgattggagggctatatgatccagcattagcttcctggtgtgccaagcatgcttgatccgggaatttttttttattattattattttttagctgtagctgaaggcatttctcggatgtggagaggagaatggaaatcgcagaaccaaatcagtttgccctgccatatttggctgtggtctgtcattgggcatttctgatggtgcttttctggattcaggaagagctgattgtcctccgagggtttgaaaaaaaaaaacagtttcagaaacctgaatccagggccttatagttctcctcattatctatcttcttctcccttccctcgcccaaggggagtggggggaaacacttttcactgcagagtttgctttaaagttttcccatcttgcgtgcattatcccttgatattaaaattattttctcagtttaatccaactcctgctgagaagctgtgtgagatttaggctgtggggtttttttcttgtactcttttggatggtgttgcatttttcactcttaacccgagggtgtgtttcagcttatgttcgttctgtttcatgcaggtttatagcacggtagagtagaaggcggcttctgatttttagggtatttttagaattcattcctgagtgaggggttcagacacccagtctcctcggaacaggggtgaggggtcaactgagctttgttgagaagcctccagttaggcttcgggcgggtctcccatgttatattgtgtgtttacctgagcttccccactggtaagaagatgacacatttgtccatcgtcctgtgtatctgctttccagaggacaccggagcattctcctggggtcactccccacatggctgcctcacatagctgttttgcaacagcctttattgccaacacccttggaagaacatctcctgtagaagtacaagttttgcaatatggactttggaagtggttttgtgatgttcgaattttctgttagcctattgctcaagcactacagaatgtacatagtccctttggccatcctctcaccccagaatatcctaataaacattgttttcttttttaaaaaaaaaaaaaaaaaaa

SEQ ID NO: 3634 - DNA, 357 bp, Homo sapiens
  SIMILAR (9)..(353): 701254mologous to Bos taurus xenobiotic/medium-chain fatty acid:CoA ligase form XL-III,accession number AJ132751,Smith- Waterman Score=459.
cattgttgaaataccccattaaccacttttggggggtatcatctatatatcgaatgattctgcagcaggatttcaccagcatcaggttccctgccctggagcactgctatactggcggggaggtcgtgttgcccaaggatcaggaggagtggaaaagacggacgggccttctgctctacgagaactatgggcagtcggaaacgggactaatttgtgccacctactggggaatgaagatcaagccgggtttcatggggaaggccactccaccctatgacgtccaggtcattgatgacaagggcagcatcctgccacctaacacagaaggaaacattggcatcagaatcaaacctgtca

SEQ ID NO: 3635 - DNA, 2651 bp, Homo sapiens
  SIMILAR (580)..(2193): 911254mologous to Homo sapiens src-like tyrosine kinase (put.); putative,accession number M14676,Smith-Waterman Score=2599.
gccgcgctggtggcggcggcgcgtcgttgcagttgcgccatctgtcaggagcggagccggcgaggagggggctgccgcgggcgaggaggaggggtcgccgcgagccgaaggccttcgagacccgcccgccgcccggcggcgagagtagaggcgaggttgttgtgcgagcggcgcgtcctctcccgcccgggcgcgccgcgcttctcccagcgcaccgaggaccgcccgggcgcacacaaagccgccgcccgcgccgcaccgcccggcggccgccgcccgcgccagggagggattcggccgccgggccggggacaccccggcgccgccccctcggtgctctcggaaggcccaccggctcccgggcccgccggggaccccccggagccgcctcggccgcgccggaggagggcggggagaggaccatgtgagtgggctccggagcctcagcgccgcgcagtttttttgaagaagcaggatgctgatctaaacgtggaaaaagaccagtcctgcctctgttgtagaagacatgtggtgtatataaagtttgtgatcgttggcggaaattttggaatttagataatgggctgtgtgcaatgtaaggataaagaagcaacaaaactgacggaggagagggacggcagcctgaaccagagctctgggtaccgctatggcacagaccccacccctcagcactaccccagcttcggtgtgacctccatccccaactacaacaacttccacgcagccgggggccaaggactcaccgtctttggaggtgtgaactcttcgtctcatacggggaccttgcgtacgagaggaggaacaggagtgacactctttgtggccctttatgactatgaagcacggacagaagatgacctgagttttcacaaaggagaaaaatttcaaatattgaacagctcggaaggagattggtgggaagcccgctccttgacaactggagagacaggttacattcccagcaattatgtggctccagttgactctatccaggcagaagagtggtactttggaaaacttggccgaaaagatgctgagcgacagctattgtcctttggaaacccaagaggtacctttcttatccgcgagagtgaaaccaccaaaggtgcctattcactttctatccgtgattgggatgatatgaaaggagaccatgtcaaacattataaaattcgcaaacttgacaatggtggatactacattaccacccgggcccagtttgaaacacttcagcagcttgtacaacattactcagagagagctgcaggtctctgctgccgcctagtagttccctgtcacaaagggatgccaaggcttaccgatctgtctgtcaaaaccaaagatgtctgggaaatccctcgagaatccctgcagttgatcaagagactgggaaatgggcagtttggggaagtatggaatggtaccctggaattggaaacacaaaagtagccataaagactcttaaaccaggcacaatgtcccccgaatcattccttgaggaagcgcagatcatgaagaagctgaagcacgacaagctggtccagctctatgcagtggtgtctgagggagcccatctacatcgtcaccgagtatatgaacaaaggaagtttactggatttcttaaaagatggagaaggaagagctctgaaattaccaaatcttgtggacatggcagcacaggtggctgcaggaatggcttacatcgagcgcatgaattatatccatagagatctgcgatcagcaaacattctagtggggaatggactcatatgcaagattgctgacttcggattggcccgattgatagaagacaatgagtacacagcaagacaaggtgcaaagttccccatcaagtggacggcccccgagcgagccctgtacgggaggttcacaatcaagtctgacgtgtggtcttttggaatcttactcacagagctggtcaccaaaggaagagtgccatacccaggcatgaacaaccgggaggtgctggagcaggtggagcgaggctacaggatgccctgcccgcaggactgccccatctctctgcatgagctcatgatccactgctggaaaaaggaccctgaagaacgccccacttttgagtacttgcagagcttcctggaagactactttaccgcgacagagccccagtaccaacctggtgaaaacctgtaaggcccgggtctgcggagagaggccttgtcccagaggctgccccacccctccccattagctttcaattccgtagccagctgctccccagcagcggaaccgcccaggatcagattgcatgtgactctgaagctgacgaacttccatggccctcattaatgacacttgtccccaaatccgaacctcctctgtgaagcattcgagacagaaccttgttatttctcagactttggaaaatgcattgtatcgatgttatgtaaaaggccaaacctctgttcagtgtaaatagttactccagtgccaacaatcctagtgctttccttttttaaaaatgcaaatcctatgtgattttaactctgtcttcacctgattcaactaaaaaaaaaaaagtattattttccaaaagtggcctctttgtctaaaacaataaaattttttttcatgttttaacaaaaacc

SEQ ID NO: 3636 - DNA, 412 bp, Homo sapiens
  SIMILAR (2)..(106): 681254mologous to Homo sapiens Gene with similarity to rat kidney-specific (KS) gene,accession number AC003034,Smith-Waterman Score=126.
ggaatgtggggacgtctgcgacaccggggacagagcatctgtggatgaagagggctacatctggttcctggggaggagtcatcacactatcaatgcctctgggtggtgaaggcattgattgtcctgaccccacagtttctgtcccatgacaaggaccagctgattaaggagctgcagcagcatgtaaagtcagtgacagccccatgtattgggtgttaggaatccataatacagtgaacccataattgactgcaagcatcactttcaaagcatcatttcaggatgagaatttaagtgccaagtgaattcaaggaacagtgcaaaggatccatggcctcagtcaccatgaagaccctcccaagagccagccctactgggaacatataaatgagtggagacctggaatacgaaa

SEQ ID NO: 3637 - DNA, 849 bp, Homo sapiens
  SIMILAR (106)..(333): 1001254mologous to Homo sapiens Gene with similarity to rat kidney-specific (KS) gene,accession number AC003034,Smith-Waterman Score=403.
atgtatgcaaatgtacatagcagctttactctaaatagtcaaaacctgaagacaacaatccagatggctttcaacaggctctatgtgaatgctgagcttatagcaggtgacccagagaagacagctaaagtggaatgtggggacttctacaacactggggacagaggtaagatggatgaagagggctacatttgtttcctggggaggagtgatgacatcattaatgcctctgggtatcgcatcgggcctgcagaggttgaaagcgctttggtggagcacccagcggtggcggagtcagccgtggtgggcagcccagacccgattcgaggggagagtaaggggtggaggcagaatggcatctcagcaatgtggctcccgaacatacatgcattgaaaacgggtatccttttgagggacagccgaaattaccgtggatcccctgacgctagtgtcctcgtttccagaagctccctgtcccgtggaaaccttgggtctgacagcatagggcaactggcagccagcattcagcgacagtcccccgtcgcagtagcagtccgaatttgggttgatcagacccaacacaaggccgtggaggctacaaagtccggcggagtcaaaggaatcagaaaagacaagttaagagtgcataaggtgggtccaggggaccaacactggtatggaggctgtgaagaccccaagctctgggagcccacactatttattggtgatcaaacaaagaagcaggtgacattgttgaaataccccattaaccacttttggggggtatcatctatatatcgaatgattctgcagcaggatttcaccaggtatggtagaagtggcttgtaa

SEQ ID NO: 3638 - DNA, 1171 bp, Homo sapiens
  SIMILAR (370)..(915): 991254mologous to Homo sapiens Gene with similarity to rat kidney-specific (KS) gene,accession number AC003034,Smith-Waterman Score=940.
ctcagttgaaaactgcattattgtgagcatgaacaccgctgaccctggcagccagggcatcacacacagtaggtaggaaagaatacctagaggctgcactgggagccctctctagcaagtggtgcttttcattttttttgatcactgttttccaacttgaagacacattggtgacatctactaactcatgaaacatagacccttggcttgagtttcacatttgcgtattttaaaggcttttgacagttttattccattttctgatgtttcctctgttatttcatccacactggtgtcccatgcataaaccagacagtgcttgggaggggcagaagggctgcggcctcctgcagtgtatgattcacaggcctcttgctacaggtcattgatgacaagggcagcatcctgccacctaacacagaaggaaacattggcatcagaatcaaacctgtcaggcctgtgaagctcttcatgtgctatgagggtgacccagagaagacagctaaagtggaatgtggggacttctacaacactggggacagaggaaagatggatgaagagggctacatttgtttcctggggaggagtgatgacatcattaatgcctctgggtatcgcatcgggcctgcagaggttgaaagcgctttggtggagcacccagcggtggcggagtcagccgtggtgggcagcccagacccgattcgaggggaggtggtgaaggcctttattgtcctgaccccacagttcctgtcccatgacaaggatcagctgaccaaggaactgcagcagcatgtcaagtcagtgacagccccatacaagtacccaaggaaggtggagtttgtctcagagctgccaaaaaccatcactggcaagattgaacggaaggaacttcggaaaaaggagactggtcagatgtaatcggcagtgaactcagaacgcactgcacacctgaggcaaatccctggccactttagtctccccactatggtgaggacgagggtggggcattgagagtgttgatttgggaaagtatcaggagtgccatgattccaatgttttccttcttttaaattaaattcagttgctctgcttcctccaagtcctctgtatctttagaatttccgcaggtgagcactcaataacgcaagtaataaaatactgatatcaacaa

SEQ ID NO: 3639 - DNA, 416 bp, Homo sapiens
gtcacagactgggaaggcagcctttccttggtgtttaatcattgcagggacacctctctgattattcactcacgtttcaaaggtgtcagaccactcagggacgcctgccttggtccttcacccttagcggcaagtcctgcttttctgggggaggggcaagtaccacaaccccttctctccgtgtctctaccccttctctgcatttctgggggaggggcaagtacccctcaaccccttctccttcacccttagcggtaagtcccgcttttctagggggcaagaacccccaatcccttatttccacaccccgacctcttatctgtgtgccccaatcccttatttccacaccctgacccctttcctgcttttctggagggtaagaaccctcgaacccctcggacgcgtgggtcgaccgc

SEQ ID NO: 3640 - DNA, 467 bp, Homo sapiens
  SIMILAR (427)..(218): 691254mologous to Homo sapiens env protein,accession number AF108843,Smith-Waterman Score=224.
tcttttgtgattcttcagttacttcagcccatctgggcgtatatgtgcaagtcacaggggatcgatggcttggcttgggctcagaggcctgacattcctgccttcttatattaataagaaaaataaaacaaaatagtgttgaagtgttggggcggcgaaaatttttggggggtggtatggagagagaatgggcgatgtttctcagggctgcttcaagcgggattaggggcggcgtgggaacctagagtggggacgttagaagaaacatttgttgtatagaatgattggtgatggcctggatacggttttgtatgaattgaaaaactaaatggaataagagaaggagaaaaacagatataaaaggactaagaattgggaggacctaggacatctaattagagagtgcctaaggaggttcagcatagtcctgccagcaaagattatttattatacttcaagagttaaga

SEQ ID NO: 3641 - DNA, 481 bp, Homo sapiens
ctgactgactccttcccagatcttctcagtttagcagctgaagactgacactgcccaatcgcctcgaagccccctagaccatcacggacaccgagcttcgggtaactctcacagtggaagtatacacccagatggcctgaagtaactgaagaatcacaaaagaagtgaaaagccctgccccaccttaactgatgacattccaccacaaaagaagtgtaaatggccggtccttgccttaagtgctgacattaccttgtgaaagtccttttcctggctcatcctggctcaaaaagcacccccactgagcactttgtgacctccactcctgcccgccagagaacaaatgtcctttgactgtaattttcctttacctacccaaatcctataaagtggccccacccttatcttccttcactgaatctctttttggactcagcccgcctgcacccaggtgaaataaacagccatgttgttcacacaa

SEQ ID NO: 3642 - DNA, 553 bp, Homo sapiens
  SIMILAR (1)..(39): 691254mologous to Homo sapiens calbindin D28K,accession number S46006,Smith-Waterman Score=41.
  misc_feature (1)...(553): n = a,t,c or g
atgaaatttggtgccgtgactcggatcgggggacctcccttgggagatcaatcccctgtactcctgttctntgctccgtgagaaagatccacctatgacctcaggtcctcagaccgaccagcncaaggaacatctcaccaattttaaatcaggacaccactgaaaatcggactgttcaactcacctggcagccactcccagagcccctggaactctggcccaaggctctctgactgactccttcccagattttctcagcttagcagctgaagactgacgctgccggatcgcctcggaagccccctagaccatcacggacgccgagcttccggtaactctcacagtggaagactcagcccgcctgcacccaggtgaaataaacggccatgttgctcacacaaagcctgtttggtggtctcttcacacggacgcgtgtgaaatttggtgccaaaacccgggtacatcttcctgaatcaggcttctgagaactgttccactttgcagtcctgttggatctatatcttgagaaataaattaaagagcttttccctcc

SEQ ID NO: 3643 - DNA, 5130 bp, Homo sapiens; identical to SEQ ID NO: 96
  SIMILAR (2614)..(4473): 941254mologous to Homo sapiens putative p150,accession number U93572,Smith-Waterman Score=3044.

SEQ ID NO: 3644 - DNA, 1671 bp, Homo sapiens
  SIMILAR (525)..(4): 801254mologous to Homo sapiens Human secreted protein encoded by gene 3 clone HNHCT15,accession number AAB38012,Smith-Waterman Score=675.
tcagtttgccagtattttattgaggatttttgcattgatgttcatcggggatattggtctacaattctctttttttgctgtgtctctgccaggctttggtatcaggttgatgctggcctcataaaatgagttagagaggattccctctttttgtattgattggaatagtttcagaaggaatggtaccagctcctccttgtacctctggtagaattcggctgtgaatctgtctggtcctggactttttttggttggtaagctattaattattgcctcaatttcagagcctgttattggtctattcagagattcaacttcttcctggtttagtcttgggagggtgtatgtgtcgaggaatttatccatttctcctagattttctagtttatttgcatagaggtgtttatagtattctctgatggtagtttgtatttctttggtctttgatgatggtgacgtacagatggggttttggtgtggatgtcctttctgtttgttagttttccttctaacagtcatgaccctcagctgcaggtttgttggagtttgccggaggtccactccagaccctgtttgcctgggtatcagctgcagaggctgcagaacagcgagtattgctgaacagccaatgttgctgcctgatcgttcctctggaagttttgtctcagaggagtatctggccgtgtgaggtgtcagtctgcccctcatccagatgctggcgcccaaggcggaagccacttgaggcacacctggtccagccacagcctcccacattgctcgcgcctgtgctggtgctcctggctgtgtgctatggctggtccccacgtccacttgctcacacactctttgctgcttcacgcctggctcaccatggggtggataggcaaaacaatttggttgataaggcgcagatcctgaactaacttgtaaggcttgtctggttttaggacaggtaaaatgagggaattgtaaggagagtttataggctttaaaaagccatgctgtagcaggcaagtgataacaggctttaatctttttaaagcgtgcttccactgtgagagttacccgaagctcggcgtccgtgacggtcttgactatgcctttagcttcagccacccttttaagagtaaattgctgggcaggtgggggagggctagtcacggaatgaaactgtaagccggaccaggtgtgaggaggggaggtgataaaaggattatagggtggaggagcagaggctgaggaagaattgggacctagctcagcctggcgaggagcagctggatttgaaattggtgagatgtttcttgggctggtcggtctgaggacctgaggtcgtaggtggatctttctcatggagcaaagaacaggaggacaggggattgatctcccaaaggaggtcccccgatccgaatcacagcaccaaatttcatgcgtgtccgtgtgaagagaccaccaaacaggctttgtgtgagcaacatggctgtttatttcacctgggtgtaggcgggctgacgatgtcaccagtggaggcagcagaatatcaaagatggctgcctgctccttcttctggaagctctgtcccaaagggacaccaacctgatgctggcgggaatggtcctgtgtggcttccgggtaggctgtcactctaccctgtttttcctcgctctccat

SEQ ID NO: 3645 - DNA, 1710 bp, Homo sapiens
  SIMILAR (1318)..(1677): 751254mologous to Homo sapiens Human secreted protein encoded by gene 3 clone HNHCT15,accession number AAB38012,Smith-Waterman Score=440.
atggggaaaaaacagaacagaaaaactggaaactctaaaaagcagagcacctctcctcctccaaaggaacgcagttcctcaccagcaacggaaaaaagctggatggagaatgactttgacgagctgagagaagaaggcttcagacgatcaaattactctgagctacgggaggacattcaaaccaaaggcaaagaagttgaaaactttgaaagaaatttagaagaatgtataactagaataaccaatacagagaagtgcttaaaggagctgatggagctgaaaaccaaggctcgagaactatgtgaagaatgcagaagcctcaggagccgatgcgatcaactggaagattgcttattaaaaaaactccattctcatcaggctaatccagaatttgatttaataactgagcatctaactctttgtattagaatatcaattcaaataaaagcttaccttagcctctcaaaggcccaatcctctctaagccatcggcctccaacataccttgcatatctcttcaatgggttcaggcttttcaaaaatctgaaagcctacctgcacccaggtgaaataaacagctttattgctcacacaaagcctgtttggtggtctcttcacacagacgcacatgaaatttggtgccgtgactcggatttgaaattggttcccacgctgcccctaatcccgcttgaagcagccctgagaaacatcacccattctctctccataccaccgcccaaaaattttcgccgccccaacacttcaacactattttgtgttatttttcttattaatataagaaggcaggaatatcaggcctctgagcccaagccaagccatcgcatcccctgtgacttgcagagaataaaatacctaggaatccaacttacaagggatgtgaaggacctcttcaaggagaactacaaaccactgcgcaatgaaataaaagaggatacaaacaaatggaagaacattccatgctcatgggtaggaagaatcaatatcgtgaaaatggccatactgcccaagcctctgctggtgatacccaggcaaacagggtctggaatggacccccagcaaacttcaggagacctgcagaagtgcctgactgttctaaggaaaactaacaaacagaaagcaatagcatcaacatcaagaaaaaggatgaccatgcaaaaactccatctgaaggaaaaactcatcaacagcaaagaccaaagaaccaacgacaaaaaccacatgattatctcaatagatgcagaaaaggccttcaataaaactgaacatcgcttcatgctaaaaacactcaataaactagaaattaactcaagatggattaaagatttaaatgtaaaacctaaaaccataaaaaccctagaagaaaacctaggtaataccattcaggacatagtcatggacaaagacttcatgactaaaacaccaaaagcaatggcaacaaaagccaaaattgacaaatgggatctaattaaactaaagagcttctgcacagcaaaagaaactatcatcagagtgtacaggcaacctacagaacgggagagcatttttgtaatctatccatctgacaaaggtctaatatccagaatctacaaggaattagctattccagggaagggcaattcctccaatgtcagcaaggacagtaagatgtcaaagcatcagaaaatgcaaggggaaaacaagcacgattaa

SEQ ID NO: 3646 - DNA, 1053 bp, Homo sapiens
  SIMILAR (766)..(897): 951254mologous to Homo sapiens src-like tyrosine kinase (put.); putative,accession number M14676,Smith-Waterman Score=222.
tttttttttaatggaaaatatccaagaagcagcccaggagtatctgacatggtggaatggaatcagttagaaagcgaagaaatcactaaaaaaagttacttctttttttccccaccagttataatcttcaaccttactagtttataacagtttaatgtcctatagaaggatcctccactaaagttataattttaagtatagtcatatagagagatccctaatcccctgggtaatctagatactaaaggtggggaagaacagtcatattgacattctttaatccaaaaccactgtttggaaattagtaaggatatttttcaggcattcccaaaaacatgttattagcacgttggagctggaaaacgtttttcttcctcagtgagtacagaaaccaaagcagtctgtcgtgtatgtctatgtatagactgtatcgtacctgggctcatggagtagtctaaatttaaaacgtcctctcttctacctccaatgaaaatgtttccgtgtgtggcgtctgatcttccaccgtgtgtgtggtcgtctgctggtgtagcgctgtttaaggagcgctgtgtgctgctagtgttccacgatgtgtgtggtcgtctgctggtgtagtagcactgtttgaggagcactgtgcgccgctagtgtgggtttacacttatgagtgttgtcattacatgtgttctgctcttctctccctctcctgcccctgccctgctccatcagagagagctgcaggtctctgctgccgcctagtagttccctgtcacaaaagggatgccaaggcttaccgatctgtctgtcaaaaccaaagatgtctgggaaatccctcgagaatccctgcagttgatcaagagactgggaaatgggcagtttggggaagtatggatgggtatgctgagactcaattactctcttattagcttccccgtttggaagatcccaaacaccaaagatggaaggtgaaaataaagactgcgtgaccgggaagaaagtttgaattactaatagtggggaataataatttcagttttggttttaacctcgtgc

SEQ ID NO: 3647 - DNA, 663 bp, Homo sapiens
  SIMILAR (1)..(432): 551254mologous to Homo sapiens Human secreted protein encoded by gene 3 clone HNHCT15,accession number AAB38012,Smith-Waterman Score=358.
atggccatactgtccaaggtaatttatagattcaatgccatccccatcaagataccaatgactttcttcacagaattggaaaaaactgctttgaagttcatatggaaccaaagaagagcccgcatcgccaagtcaatcctaagccaaaagaacaaagctggaggcatcacactacctgacttcaaactatactacaaggctacagtaacttttccaaaaacatacaatgctatctccaagagagaatctgactcagcccgcctgcacccaggtgaaataaacagccatgttgctcacacaaagcctgtttggtggtctcttcacacagatgcgcatgaaatttggtgctgtgactcggatcgggggacctcccttgggagatcaatcccccgtcctcctgctctttgctccgtgagaaagatccacctacgacctcaggtcctcagaccgaccagcccaatgaacatctcaccaattttaaatcagcttagcagcttaagactgacactgcccgatcgcctcagaagccccctagaccatcacggacgccgagcttcagcccgcctgcacccaggtgaaataaacagccatgttgctcacacaaagcctgtttggtgttctcttcacacggacacgcatgaaaatgacaaaaacaagcaatga

SEQ ID NO: 3648 - DNA, 798 bp, Homo sapiens
  SIMILAR (430)..(795): 531254mologous to Sus scrofa polyprotein,accession number U77599,Smith-Waterman Score=358.
atgattcaagagcatgcagacaaacaggtgcagaggctgcagggagtgcttttgggctccatccccacagcagcatcaagggcccgcctgcacccaggtgaaataaacaaccatgttgctcatacagagcctgtttggtggtctcttcacatggacgcgtatgaaatttggtgccgtggctcggatcggaggacatcccttgggagatcaatcccccttcctcctgctctttgctccctgagaaggatccacctacgacctcaggtcctcagatcgaccagcccaagaaacatctcaccgatttcaaatccgggacacctctctgattatacacccacgtttcaagggtgtcagaccatgcagggacgcctgccttggtccttcacccttagcggcaagtctcgcttttctggggaaggggcaactcaacgccaatatcccatcccacagcaagctttgaaaggattaatgcctgctatcactcgcctgctacagcatggccttttaaagcctataaactctccttaccattcccccattttacctgtcctaaaaccagacaagccttacaagttagttcaggatctgcgccttatcaaccaaattgttttgcctatccaccccatggtgccaaacccatatactcttctatcctcaatacctgcctctacaacccattattctgttctagatctcaaacaagctttctttactattcctttgcacccttcatcccagcctctcttcgcattcacttggactgaccctgacacccatcaagctcagcaaattacctag

SEQ ID NO: 3649 - DNA, 825 bp, Homo sapiens; identical to SEQ ID NO: 86
  SIMILAR (670)..(554): 741254mologous to Homo sapiens unnamed protein product,accession number AK024120,Smith-Waterman Score=141.

SEQ ID NO: 3650 - DNA, 933 bp, Homo sapiens; identical to SEQ ID NO: 2068
  SIMILAR (715)..(852): 511254mologous to Human T-cell lymphotropic virus type 2 gag protein,accession number X89270,Smith-Waterman Score=147.

SEQ ID NO: 3651 - DNA, 585 bp, Homo sapiens
  SIMILAR (262)..(360): 751254mologous to Homo sapiens unnamed HERV-H protein,accession number U92818,Smith-Waterman Score=129.
atggcaactgcagttcacttacccgcttctcaacccggtacgcaccagaaaatcattgatatggccatgaaggcgttggatgccgggcaacagcccgcattatgggcgttggcctcaacagattttacgtcacttaaaaaactcaggccgcagtcggtaacctcgcgcaacagccgggcagtgacgtcatcgtctgaacgaaagggagggacgcctgattattcacccacgtttcaaaggtgtcagaccaccaggagcttgtacacgtgccggaaatctggccaccaagccaaggaatgcccgcagcccggattcctcctaagccgtgtcccatctgtgcgggaccccactgaaaatcgactgttcaactcacctggcagccactcccagagcccctggaactctggccaaggttctctgactgactccttcccagatcttctcggcttatcggctgagactgacactgcccgatcgcctcggaagccccgtagaccatcacggacccgagcttcagtttctcaattcatccaaaaccatatccaggccatcaccatcattctatatgacaaatgtttcttctaa

SEQ ID NO: 3652 - DNA, 771 bp, Homo sapiens; identical to SEQ ID NO: 3361

SEQ ID NO: 3653 - DNA, 1151 bp, Homo sapiens
  SIMILAR (608)..(519): 641254mologous to Plasmodium lophurae histidine-rich protein,accession number M15317,Smith-Waterman Score=153.
acaataaaatacctaggaatccaacttacaagggatgtgaaggacctcttcaaggagaactacaaaccactgctcaaggaaataaaagaggatacaaacaaatggaagaacatttcatgctcatgggtagcaagaatcaatatcgtgaaaatggccatactgcccaagagaagcttctctatgccttccacaatatctcccttaaacaatcctccagcttatctctgtctcagaactttcctaataatgaaaacaatgatggcagcaaagatgatgatgatggaggtgatgatgatgatgactgtcaggcctctgaggccaagccaaactcagcctgcctgcacccaggtgaaataaacagccatgttgctcacacaaagcctgtttggtggtctcttcacacggacacgcatgaaaatgacaatggtgatgttggtgatgataatgttgatgatgatgttgatgatgatggtggtgatgatggtaaagatgatggtgatgatgatgatggtgatacggtgatggtggtgatgatgataatgatgatggtgttgatggtggtgatgatagtggtggtggtggtggttgtggtagtggtggcaagcaggaaagcatttctatttttgattaatggagaggagagtgaactagagtctcatttaacaggctttgccaacatcccaaatcatcacttaaccgtccaacacatttatacacctacgttgccaagtggagagacaaaggagacacgttttatctgtggacccaaaactccggcgctggtcacggactgggaaggcagccttcccttggtgtttaatccttgcagggatgcctccctgattattcaaccacgtttcaaagcggcaagtcccgctattctgggggaggggcaagtacccctcaaccccttctccttcacccttagcggcaagtcccgcttttctggggaaggggcaagagcttactacaagtgccggaaatctgaccaccaggccaaggaatgcccacagcccaggattcctcctaagctgtgtcccatctgtgcgggaccccactggaaatcggactgttcaactcacctggcagccgctcccagaacccctggaactctggcccaaggctctctgactgactccttcttggcttag

SEQ ID NO: 3654 - DNA, 581 bp, Homo sapiens
  SIMILAR (237)..(79): 461254mologous to Human T-cell lymphotropic virus type 1 Gag,accession number S74562,Smith-Waterman Score=153.
tcagtcttcagctgctaagccgagaagatctgggaaggagtcagtcagagagccttgggccagatttccaggggctctgggagtggctgccaggtaagttgaacagtccgattttcggtggggtcctacacagatgggacgcggcttaggaggaatcccgggctgcgggcattccttggcccagtggccagatttccggcacatgtagcaagctcctgtgggaggaggttctggaggaacgcctggccgctgcggttcaggcatttggaagttcttgtgtgctggagatgtggctgcggtttgtctcacagtggaggcaaggaattgcaacttttttctattattgtacaccttgaaggcgaggttaattaaatcttgccccttctccagaaaagcgggacttgccgctaagggtgaaggaccaaggcaggcatccctgcgtggtctgacacccttgaaacatgggtgaataatcagagaggtgtccctgcaatgattaaacaccaagggaaggctgccttcccagtccgtgaccggtgccggagttttgggtccatggataaaacctgtctcctttgtct

SEQ ID NO: 3655 - DNA, 531 bp, Homo sapiens; identical to SEQ ID NO: 2048
  SIMILAR (313)..(450): 531254mologous to Human T-cell lymphotropic virus type 2 gag polyprotein,accession number AF139382,Smith-Waterman Score=160.

SEQ ID NO: 3656 - DNA, 513 bp, Homo sapiens
  SIMILAR (25)..(507): 441254mologous to Murine leukemia virus gag-pol polyprotein,accession number U13766,Smith-Waterman Score=295.
atgaatcttaatagaaatgcacttgtgctgactctgttttcggactcagcccgcctgcacccaggtgaaataaacagccatgttgctcacacaaagcctgtttggtggtctcttcacatggacacgcatgaaatttggtgccgtgactcggatcgggggacctcccttgggagatcaatcccctgtactcctgttctttgctctcacgctttaaaaagattaaagcctgttatcactcgcctgctacatcatggccttttaaaacctataaactctccttacaattaccccattttacctgtcctaaaaccagacaagccttacaagttagttcaggagctgtgccttatcaaccaaattgttttgcctatccaccctgtggtgcccaacccgtaccctcttttgtcctcaataccttcctccacaactcactatgccgtgcttgatcttaaagatgcttttttcactattcccctgcacccctcatcccagcctctctttgctttcacttag

SEQ ID NO: 3657 - DNA, 949 bp, Homo sapiens
  SIMILAR (262)..(936): 931254mologous to Homo sapiens Similar to peptide N-glycanase homolog (S.cerevisiae),accession number BC000963,Smith-Waterman Score=1089.
ctgattggggccctgaatacggtcgacatttcgtcagctccttaggctcggcgtccccggccgtggctgagctctgccagaacaccccggagacctttttggaggcctccaagctgctgctcacctatgctgacaacatcctcagaaaccctaatgatgaaaaatatagatccatccggattggaaacacagccttttctactagactcttgcctgtcagaggagctgttgaatgtttatttgaaatgggctttgaagagggagaaacacatctcatctttcctaaaaaagcttcagtggagcagctgcaaaaaattcgtggacctgattgccatagagaggagtagcagactggatggctcaaataagagccacaaagtaaagtcatctcagcaacctgcagccagtacccagcttcctacaacaccatcttcaaatcccagtgggttaaaccagcacacaaggaaccgtcaagggcagtcatcagatccaccatctgcttcaacggttgctgctgactcagccattctagaagttcttcagtccaacattcagcatgtgctggtctatgaaaatcctgctcttcaggagaaagcgttggcttgtattccggtccaagaactaaaaaggaaatcacaagaaaagttatcgagagctagaaaattggataaaggtatcaatataagtgatgaggattttcttttgctggagcttttgcactggtttaaggaagaattttttcactgggtgaataacgttttgtgcagcaaatgtggtggacagactaggtctagagatagatcattactgcccagtgatgatgagctgaagtggggtgcaaaggaagtggaagatcattactgtgatgcctgccagttcagcaatcgattcccaagatataataaccctgagaaacttttggaaacaagatgtggaccgtggtgcgagt

SEQ ID NO: 3658 - DNA, 419 bp, Homo sapiens
  SIMILAR (329)..(198): 861254mologous to Homo sapiens calbindin D28K,accession number S46006,Smith-Waterman Score=207.
  misc_feature (1)...(419): n = a,t,c or g
tcagccgttaagccgagagtatctggaaaggagtcagtcagagagccttgggccagagttccaggggctgtgggagtggctgccaggtgagttgaacagtctgattttcagtggggtcccacacagataggacgtggcttaggaggaatcccgggctgcgggcattccttggcccagtggccagatttccggcaagtgtagcaagctccggatttgaaattggtgagatgtttcttggcctggttggtctgaggacctgaggtcgtaggtggctctttctcacggagcaaagaacaggaggacaggggattgatctcccaagggaggtcccccgatccgagtcaccgcaccaaannnnnnnnnnnnnnnnnnnnnnnnnnnnnnnnnnnnnnnnnnnnnnnnnnnnngtagtcggatcg

SEQ ID NO: 3659 - DNA, 435 bp, Homo sapiens
  SIMILAR (154)..(29): 781254mologous to Homo sapiens env protein,accession number AF108843,Smith-Waterman Score=156.
cgagccacgcgtccgcccacgcgtccgtggtgatggcctggatgcagttttgtattaattgagaaactaaacagaagagacaagatctgaatgaaagaaggagaaaaataggtattaaaggactaagaattgggagtactcaggacatccaattaagagagtgcccaagggggttcagcataattatttgcttggttggcaagtttttggactctatccttgagtttttttatgttgtcatataccaggccagattgatttaggtaaaaacaacactcttcatttaaaaatatacagagtcgtcctttttcagcaatgagtaaattgaggccttggcgattttggaggaaagagaattgcaaagccagcaattatttgttaaagaaggattagaaacggctaggagagagtcagtgagattgatagtgtgatgga

SEQ ID NO: 3660 - DNA, 1020 bp, Homo sapiens
  SIMILAR (211)..(420): 641254mologous to Homo sapiens calbindin D28K,accession number S46006,Smith-Waterman Score=213.
atggccccaactaactgcaagggctctaggaaatgtggcagaccacatgaacagatgccccacccttatctccctttgctgactctcttttcggactcagcccgcctgcacccaggtgaaataaacagccgtgttcctcacacaaagcctgtttggtggtctcttcacacggacgcgtatgaaatttggtaccatgactcggattggggggacctcccttgggagatcaatcccctgtcctcctgctctttgctccatgagaaagatccacctacgacctcaggtcctcagaccaaccagcccaagaaacatctcaccaatttcaaatccagaaaagtagaacggactaaaggtcttttaaaaacacacctcaccaagctcagccaccaacttaaaaaggcctggacaatacttttaccactttcccttctcagaattcaggcctgtcctcggaatgctacaagtgacttctgcttttcaaaaatttaccctcctttgacaaatgagccaaaggcgctggttgcctctgagtccttggaccctaaaaggactgcacagcaatcaaagggagagggcaccttgccagccaagagtgtgaatctcctcctagagggcaagagtaagagggagaaagcagggaaacaggaggaaatgcttccatattacccatcgcaacttcaatgcatgttgctagaggcagttttggaacccaggatgtcaactgggaaaatattgtggtattccaggatggaacagagacaaagtgacaaatttggaaactacttagaagcttgttatagcaatgattcaatcaatggcaagatgcactataaaggcttaaaaatgagtaaaaatatgaccaccagagacatcttcatccttacaatgaaaacagctcacaattatgactacctgccttgttttgcagctcagcataaaagtggtgttgcaccaaaccctactggagcagccttcatgattagaaagtactccacaccttggagagctgaggagacatga

SEQ ID NO: 3661 - DNA, 1080 bp, Homo sapiens
  SIMILAR (464)..(544): 401254mologous to Feline leukemia virus gag-pol precursor polyprotein gPr80,accession number M18247,Smith-Waterman Score=43.
atggaagtctatacgcagaaagcatactggagggtgcccctgggatcaaccgtgggggaccaaggaggtcatggccggttcattcatccatttgccatcaaaattgaacaagggagtacaaacagatgccccagtggatcacctgctaccaagtatgtccttctctgcctccatggtgaaaaagtagacctacttcctgctgatcagcaaagtatattctcaccaggaagaagcacacaggggcacttaattagcataacaggtgtcctgatgaacaggcattcgacgtacatggataaagaaaaagtgaaaatggtcactgctttgtggacagatgaagaactgtccaaactcacctggacgcgcatgaaatttgatgccatgactcaattgggagacctcccttgggagatcaatcccctgtcctcctgctctctgctccgtgagaaagatccacctacgacctcaggtcctcagaccgaccagcccaaggaacatctcaccaatttcaaatccacaaccaatcatgcaccccttaccatcccattaaaacctaatcactcttatcccgctgaatgccaatatcccgtcccacagcacgctttaaaaggattaaagtctattatcactcgcctgctacagcatggccttctaaagcctataaactgcccttacaattcccccattttacctgtcctaaaaccagacaaggcttacaggttacttcaggatctgcgccttatcaaccaaattgttttgtctatccaccccgtgttgccaaaaccaaatactctcctatcctcaatacctccctccacaacccattactctgttctggatctcaaacatgctttctttactattcctttgcacctttcatcccagcctctcttcgctttcacttggactgaccctgacacccatcaggctcagcaaattacgtgggctgtactgccacaaggcttcacagacagcccccattacttcaatcaagcccaaatttcttcctcatctgttacctatctcggcataattctcatgaaaacccacgtgctctccctgctgatcgtgtctggctaa

SEQ ID NO: 3662 - DNA, 501 bp, Homo sapiens
  SIMILAR (7)..(132): 851254mologous to Homo sapiens calbindin D28K,accession number S46006,Smith-Waterman Score=197.
ctcggattggcggacctcccttgggagatcaatcccctgtcctcctgttctttgctccatgaaaaagatccacctatgacctcaggtcctcagacccaccagcccaaggaacatctcaccaattttaaatccgatcttctcagcttagcggctgaagactgacgctgcccgattgattgcctgggaagcctcctggaccatcacagacgccttgggtaactcttacagtggaggacaggaatgtcaggccggcctctgagcccaagcatgcatgtatacatccagatggcctgaggcaactgaagaaccacaaaagaagtgaaaatggctagttcctgccttaactgatgacattaccttgtgacattccttctccgggacagtgagtctccggagctccccactgagcaccttgtgacccccgcccctgcccgcaagagaacaaccccctttaactgtaattttccaccacctacccaaatcctaaaaaacggccccact

SEQ ID NO: 3663 - DNA, 1398 bp, Homo sapiens
  SIMILAR (1)..(387): 1001254mologous to Leishmania major probable levansucrase precursor,accession number AL160371,Smith-Waterman Score=675.
atgaacatgaacatcaaaaaaattgtaaaacaagccacagttctgacttttacgactgcacttctggcaggaggagcgactcaagccttcgcgaaagaaaataaccaaaaagcatacaaagaaacgtacggcgtctctcatattacacgccatgatatgctgcagatccctaaacagcagcaaaacgaaaaataccaagtgcctcaattcgatcaatcaacgattaaaaatattgagtctgcaaaaggacttgatgtgtgggacagctggccgctgcaaaacgctgacggaacagtagctgaatacaacggctatcacgttgtgtttgctcttgcgggaagcccgaaagacgctgatgacacatcaatctacatgttttatcaaaagactgctcctcgccaggccaagctaggtcccaattcttcctcagcctccgctcctccaccctataatccttttatcacctcccctccttacacccagtccggcttacagtttcgttccatgactagccctccccaacctgaccagcaatttactcttaaaaaggtggctagagctaaaggcatagtcaaggatttaattaacctcgccttcaaggtgtacaataatagaaaaaagttgcaattccttgcctccactgtgagacgaaccccagccacatctccagcacacaagaacttccaaatgcctgaactgcagcggccaggccttcctccagaacctcctcctccaggagcttgctacaagtgccagaaatctggccaccaggccagggaattcctgcagcccaggattcctcctaagccacgtcccatctgtgccggaccccactggaaatcggactgttcagctcacctggcagccactcccagagcccctggaactctggcccaaggtgttatcacgagttatggattatatctagatggtatattaatccacaattcctcagaactcagctatcgtgcttacggatttgctccttggagtttacattccttcagagtccaagcatgcacggccaaaggttgtgctctgggcccactggtggaaaatcgaactctagaagctcctcctgaaggaacagtaaatgtgtttgtcaaaacacagggatcccggaaagcccacgtgaggtgggaagcaccttttcgccctaatggactcttaacacactcagtccttttcactgggatattctatgtagacccagccacagatgttggtttctttattttcctgaaaataacctatacggataagctactgcccgacggttctcagaatgtggttcccagagcagcagcaacagccacatctgatgaacgcttagaaatgtacgttgtagagcttctgccccagcctagtgaatcagaaactctagaggctaaggtctaa

SEQ ID NO: 3664 - DNA, 1293 bp, Homo sapiens
  SIMILAR (757)..(1209): 481254mologous to Sus scrofa domestica polyprotein,accession number U77600,Smith-Waterman Score=372.
atgggaaaaggccgtcgatcgctctggcttcttcctgctgatgggggaagtagcgggaatgggaacgaactccaagggacatctccccatgactatttttccattgcaattaagtccacgcacattgggttggaataccccaccagtagacagagtaacagagtcagcccccagtccaagagaattaggcagccacttgggctgccttctggatccatcactgaaagggggccaccaaacaacaggcagaaagggtacactcgccagcagttttgccacgagagtacaccgaacaaaggagacagggtcatttataacctgacatgtttactctactgctgtgtccggtttccattggctggaacaggaccacacattctgtatttgtcccgattggctagcaacttagaacttttcaaaagagacaaaggcagaggagaacaaaggaaggaggaagtaacttgtttccacaagttacttgctgagaaagagaacaacccccctttttcctttatctacccaaatcctataaaacggccccacccctatctcccttcgctgactctcttttcggactcagcccacctgcacccaggtgaaataaacagctttatggctcacacaaagcctgtttggtggtctcttcacacggacgcacatgaaatttggtgccgtgactcggatcgggggacctcccttgggagatcaatcctccgtcctcctgctctttgctccatgagaaagatccacctacgacctcaggtcctcagactgatcagcccaagaaacatctcaccaatctcaaatccgcatgctttgaaaggattaaagcctgttatcactcgcctgctacagcatggccttttaaagcctataaactctccttacaattcccccattttacctgtcctaaaaccagacaagccttacaagttagttcaggatctatgccttatcaaccaaattgttttgcctatccaccctatgatgccaaacccatatactctcctatcctcaatacctccctccacaatccattattctgttctggatctcaaacgtgctttctttactactcctttgtacctgtcatcccagcctctcttcgctttcacttggactgaccctgacactcatcaggttcagcaaattacctgggctgtactgccgcaaggcttcacagacagcccccattacttcagtcaagcccaaatttcatcctcatctgttacctatctcggcataattctcgtaaaaacacacgagctctccctgctgatcgtgtctgattaa

SEQ ID NO: 3665 - DNA, 818 bp, Homo sapiens
  SIMILAR (1)..(210): 941254mologous to Homo sapiens Human secreted protein, SEQ ID NO: 7284,accession number AAG03203,Smith-Waterman Score=348.
atgagtgaactcccattcacaattgcttcaaagagaataaaatacctaggaatccaacttacaagggatgtgaaggacctcttcaaggagaactacaaaccactgctcaatgaaattaaagaggacacaaacaaatggaagaacattccatgctcatgggtaggaagaatcaatatcgtgaaaatggccatactgcccaagctctgctggtcaacagacacagctgtgttcctcgtcaacaaacagcaacaactgcctgccatatcgggggacctcccttgggagatcaataccctgtcctcctgctctttgctccatgagaaagatccacctacgacctcaggtcctcagaccgaccagcccaagaaacatctcaccatttcaaatccggtggctgaagctaaaggcatagtcaaggttaatgctcctttttctttatcagacctctcccaaaatcagttagcgtttaggctctttttcatcaaatcacccttacctgggtcaacgccagtatcccatcccacaacaggctttaaagggattaaagcctgttatcacttgcctgttacaacatgtccttttaaagcctgtaaactctccttacaattcccccattttacctgtccaaaaactggacatgccttacaggttagttcaggatctgtgccttatcaaccaaattgtcttgcctatccacgccatggtgccaaacccagaaaccttcataccccttaccgtcctcaatccttaggaaaggtagaactgattaatggtcttttaaaaacacacctcaccaagctcagcctccaacttaaaaa

SEQ ID NO: 3666 - DNA, 504 bp, Homo sapiens
  SIMILAR (168)..(284): 921254mologous to Homo sapiens calbindin D28K,accession number S46006,Smith-Waterman Score=194.
taaaacggccccacccttatctccctttgctgactctcttttcggactcagcccacctgcacccaggtgaaataaacaaccatgttgctcacacaaggcctgtttggtggtctcttcacacggacgtgcatgaaatttggtgccgtgactcggatcaggggaccttcccttgggagatcaatcccccgtcctcctgctctttgctccgtgagaaagatccacctacgacctcaggtcctcagacggaccagaccaagaaacatctcaccaatttcaaatctggtaagcggcctctttttactctcttctccaacttccctcactatccctcaacctctttctcctttcaatcttggcgccacacttcaatctctcccttctcttaatttcaattcctttcattttctggtttttacaaaagagacatgttttatccatgaacccaaaactccggcgccggtcacggactgggaaggcagccttcccttggtgtttaatcattgc

SEQ ID NO: 3667 - DNA, 1035 bp, Homo sapiens
  SIMILAR (616)..(1032): 521254mologous to Murine leukemia virus gag-pol polyprotein,accession number U13766,Smith-Waterman Score=339.
atgtggattccaccacagtttatgacttgtaccttccagtgtggcaggtcgagctgcaccttggcccatttgagccatgactggggtagtcaagaaatgctgcactggaatatggggagcagaaaattgaagcagccctgggacgtcttggcactcagagcctgtgatgggaagggtggcactgactcagcccccctgcacccaggtgaaataaaaagctttattgctcacacaaagcctgtttggtggtctcttcacacggatgcgcatgaaatttggtgccgtgactcggatcggggggacctcccttgggagatcaatcccctgtcctcctgctctttgctccatgagaaagatccacctacgacctctggtcctcagaccaaccagcccaaggaacttctcaccaattttaaatcagtcccaactccaagcgttgctgagtctttccaatcttccttttctacggacccatctgacccctcctctcctccccaggctgctcctcgccaggccaagccaggtcccaattcttcctcagcctctgctccccgaccctataatccttttatcacctcccctcctcacacctggtcgggcttacagtttcattctgcgactagccctcctccacctgcccaacaatttcctcttaaaaaggtggctcaagttaaaggcatagtcaagcacgctttaaaaagattaaagcctgttatcactcgcctgctacagcatggccttttaaagcctataaactctccttacaattcccccattttacctgtcctaaaaccaggcaagccttacaagttagttcaggatctgcgccttatcaaccaaattgttttgcctatccaccccgtggtgccaaacccatatactctcctatcctcgatacctgcctctacaacccattattctgttctagatctcaaacatgctttctttactattcctttgcacccttcatcccagcctttcttcgctttcacttggactgaccctgacacccatcaggctcagcaaattacctag

SEQ ID NO: 3668 - DNA, 328 bp, Homo sapiens
  SIMILAR (157)..(327): 751254mologous to Homo sapiens KIAA0645 protein; match to PID:d1032581 (PID:g3327104),accession number AC005004,Smith- Waterman Score=205.
cctggacagggtgcagacttcaactgcccatccagaaccatcaaagggctttacatctatacgtaggcaatgacactttttatggccctacttggaacaactaaagggacttgcacatgaagactataacctctaaagtctactaactgactatcacactaaagcggctctgtgggcagggactatgagctacatgagaaccccttagtgggccctaacatcaagcttggagactttgtagacatatcgcaccccaacgatgaatacagccctctgcttttgcaggtcaagtctcttaaggaagatttacagaaggaaactatcagtg

SEQ ID NO: 3669 - DNA, 390 bp, Homo sapiens
  SIMILAR (288)..(1): 961254mologous to Homo sapiens My030 protein,accession number AF061733,Smith-Waterman Score=478.
ttttttcctttcttgttttttcttcgccgcttctcgtttttctttgtgaacaggactgttttcaccattgtagaaaacatctactttctcttgtaggattttccgagctagctttctgttctgatcaactgatcttgtctgatggcactttacaacgatgcctgaggggatgtgcttcagcaccacgcagttgctggttttgttggttgcctggccccctggaccgtgtcctttcacaaactgctcttcgagttcattctcatccaaggaaagcagtggtgtaggaaaatgaaataaacccacggtgctcataaggaacgtggctctgctggctgaggacctggtctcaggacccgactcgtgccctcaacgttctagggatatccaaat

SEQ ID NO: 3670 - DNA, 875 bp, Homo sapiens
  SIMILAR (7)..(273): 421254mologous to Homo sapiens gag,accession number AF156961,Smith-Waterman Score=160.
tctgacctaaaatctaagcatcttattttcttctgcaatgccgcttgaccccaatacaaactcgacagtagttccaaatagccggaaaatggcactttcaatttttccatcctacaagatctaaataattcttgtcctaaaattgacaaatggtctgaggtgcctgatgtccaggcattcttttacacatcagtcccttcctagtctctgtgcccagtgcaactcgtcccaaatcttccttctttccctcccacctgtcccctcagtaccaaccccaagtgtcgctgagtctttctaatcttccttttctacagacccatgtgacctctgccttcctccccaggctgctgctcgccaggccgagctaggtcccaagtcttcctcagcctctgctcctccaccctacaatctttgtatcacctcccctcctcacacctggtccggcttacagtttcgttccgtgactacccctcccccacctgcccagcaatttactcttaaaaaggtggctggagccaaaggcatagtcaaggttaatgctcctttttctttatcccaaatcagatagtgtttaggctctttttcatcaaatataaaaatctagcccagttcatggctcgtttggcagcaaccctaagacactttacagccctagcccctaaaaggtcaaaaggccatcttattctcaatatacattttattacccaatctgctcccgacattaaataaaactccaaaaactggaatctggccctcaaaccccacaacaggacttaattaacctcaccttcaaggtgtgaaataacagaaaaaagttgcaattccttgcctccactgtgagacaaaccccagccacatctccagcacacaagaac

SEQ ID NO: 3671 - DNA, 3424 bp, Homo sapiens
  SIMILAR (2528)..(2971): 901254mologous to Human endogenous retrovirus tripartite fusion transcript PLA2L,accession number Z14310,Smith-Waterman Score=699.
ggacacctctctgattatacacccacgtttcaagggtgtcagaccatgcagggacgcctgccttggtccttcacccttagcggcaagtctcgcttttctggggaaggggcaactcaacgccaatatcccatcccacagcaagctttgaaaggattaatgcctgctatcactcgcctgctacagcatggccttttaaagcctataaactctccttaccattcccccattttacctgtcctaaaaccagacaagccttacaagttagttcaggatctgcgccttatcaaccaaattgttttgcctatccaccccatgatgttactaggggagatatcagtcaccaaggccttggctggctccctgataaaagcccttgcagtattccacactgcagaatccccaggctatgctctcctggattcttactacctgctccagaaagggagtgtttgcatctccatcctccaagaagaggaagcattttcttggccggggaaaggagagtgtcgagataagtcctgggcctctctgggcctaatacccgcatttccccagggaggacagtggaaacaggccctggggcttctggaccacagctgcctctgctttggggaattaggcaccaggttggcagccccagcatccttcagcaccttcccaataacaaaccgagagcgggagagaaaaactgacaagctgattccaaaattcatgtggaaatgcaagggacccagaataaccaaaacaatcttggaaaagaatgaagttggagaatttacacttcttgatttcaaaacttaccacaaatttgcagtaatcaaaactatgtggtactggcataaggacagatacattgatcaacagaatgacattgaaagtccagaaataaattcatatgtttatggtcaactgatttttgacaaagactcagcccgcctgcacccaggtgaaataaacagtcttgttgctcacacaaagcctgtttggtggtctcttcatatggacgcgcatgaaatttggtgccgtgactcggattgggggacctcccttgggagatcaatcccctgtcctcctgctctttgctccatgagaaagatccacctacgacctcgggtcctcagaccgaccagcccaaggaacatctcaccaatttcaaatccggaccccactggaaatcggactgttcaactcacctggcagccactcccagagcccctggaactcttgcccaaggctctctgactgactccttcccagatcttctcggcttagtggctgaagactgacactgcccgatcgcctcggttgaagccccctagaccatcacggatgccgagcttcgggtaactctcacagtggaaggttcccacggcgcccctaatcccgcttgaagcagccctgagaaacatcgcccattctctctctccataccaccccccaaaaattttcgccgccccaacacttcaacactattttgttttatttttcttattaatagaagaaggcaggaaatgtcaggcctctgagcccaagccaagccatcgcatcccctgtgacttgcacgtatatatacgcccagatgggcctgaaagtaaactaaagaatcaccaaaaagaagtgaatatgccctgcccccaccttaactgatgacattccacccacaaaagaagtgaaaatgggccggcccttgccttaagtgatgacattaccttgtggaaagtccttttcctggctcatcctggctcaaaaagcacccccactgagcatcttgcgacccccactcctgcccactgagcaccttgcgacccccactcccacccgccagagaacaaaccccctttgactgtaattttcctttacctacccaaatcctataaaacagccccacccttatcttcccttcgctgactctctttttggactcagcccgcctgcacccaggtgaaataaacagccatgttgctcacacaaagcctgtttggtggtctcttcacacggacgcacatgaaatttagttgtatccataaggcatatggaggagactaattcctcttccaaagacatgtaccagagtcctggagaggctgagggctggaggtggaagaaaggctctgacaggggtcagaatctgttcaggaaacatagcaaatgcctgatacttttaattagagaaaggtttgaatctccacattcatatatttgcagtccagtgacctttcagtttttttatgcccaaagtgtcaagcatgttaatgttaccattgactgcctccctgaaggtgcagctaccaggggaactgccaggacttcaaagcccacaaccaaaagccagaaaacactaccaagtacaagccccggacactggacccagagcacaccctgggcatctgctctgagatcctctccctggacagagacagctgctccttcagaaacagaggagaccctgaacacaggcaggcctcctgagcttccagccagggccacagccacatggttcagtgcctcccacactctcccagccttggctaccaggagggtggccagaactcagtggttgacagctgacagacagacgtgggcttccatatcgtccgtgccctgggctcagaccatcagtgagaaaaaacctggagggtctctctgggaaactcgttcttccccaccgactactgcagggaccgaggaagccatgaacactacaagccttttggcgcctgctgctgagataatggccacacctggcagcccatcccaggccagccctacctcgggagcattcacccatggcacacagactccgagtccaaccaaggcaacagcccccagatatccacaaacaggtgatctctctgcagagtggccattcactgctggtgaagagccagtcctggtcccaagaccccatcaagtttcaaggtgtcctcagccactcttcaaggtgggagctatggcagctgctcctctcaccctggctattcagaggctcaacccatgcctgatggagctgtgccaattcttccagcaatgcctctgcatgagccagaggagtcccaggacagaggacatgagatactgtcttgaatactattcctggtttctgaagaatgcaacatatatctgtcagagggtgaaaagggtgtcccactcgcacaccttaaagcaaaagtgccttgagaatatctgcaagtctgtgtgaggccttgaaaataacactagggcataacaattacttcaggggatacgccatccaccctggctcttgtcccaagtgggctacatttgaagaattcacccaggctccagctagatcatcagttaatttaaagtggttattcttggaagtagcattttttttccctctcctgtgaatctgtgcaaaacattgaaggtagaagttttcttgttaaaaaaaaaggaattc

SEQ ID NO: 3672 - DNA, 6161 bp, Homo sapiens
  SIMILAR (1)..(906): 561254mologous to Homo sapiens zinc finger protein,accession number U68536,Smith-Waterman Score=818.
atgtctgcaaaattgggaaagtcatcatcactcctaacacaaacttcagaggagtgtaatgggattctgacagagaagatggaagaggaagagcagacctgtgatccagactctagcctccactggagcagcagctacagcccagagaccttccgccagcaattcaggcagtttggctaccaggattcacctgggccccatgaggctctgagccggctctgggaactttgtcatctctggctgaggccggaagtgcacaccaaggagcagatcctggagctgctggtgctggagcagttcctggccatcctcccaaaagagcttcaggcctgggtgcagaagcatcatccagagaatggagaggaaactgtgactatgctggaggatgtggagagagagcttgatggaccaaagcagatcttttttggacgaaggaaggacatgattgcagagaagctagcaccttcagaaatcactgaggaattgccaagtagccagctcatgcccgtgaagaagcagctccagggagcatcatgggagcttcagtccttaagaccacatgatgaagacatcaaaactacaaatgtgaaatctgcttcaaggcaaaagacttctttaggcatagaactgcattgcaatgtttccaatatccttcatatgaatggctcccagagttccacatatagaggaacctatgaacaagatggtaggtttgaaaagagacaaggaaacccttcttggaaaaaacaacagaaatgtgatgaatgtggcaaaatctttagtcagagctcagcccttattttacatcagagaatccacagtggaaagaaaccttatgcatgtgacgagtgtgcaaaggcattcagccgaagcgcaattctgattcagcatcgacgaacccatactgactcagcccgcctgcacccaggtgaaataaacagtcttgttgctcacacaaagcctgtttggtggtctcttcacatggacgcgcatgaaatttggtgccgtgactcgaactggggggacctcccttgggagatcaatcccctgtcctcctgctctttgctccatgagaaagatccacctacgacctcaggtcctcagactgaccagcccaagaaacatcttaccaatttcaaatccgatgaagactgaccctacccaatcgccttggaagcctacaggaccatcacagacactctgggtaactatcacagtggaggttcaaaacctccttcacatcctccccttgtatctccccaccttaacccacaagtatgatacctctactccctccttggtgaccgatcatgcaccccttaccatcccattaaaacctaatcaaccttaccccgatgaatgccaatatcccatcccacagcacactttaaaaggattaaagcctgttatcactcacctgttacagcatggccttttaaagcctagaaactctccttacaattcccccattttacctgtcctagaaccaaacaagccttactggttagttcaggatctgcgccttatcaaccaaattgttttgcctatccaccccatgctccttcagctgtactcactctttgttgagtctcccacagttaccatttttcctggcccggacttcagtccggcctcccacattattcctgatgctacacctgacccccataactgtatctctctgatccaactgacattcaccccatttccccatatttccttctttcctgttcctcaccctgatcacacttggtttattgatggcagttccaccaggcctaatcgctacacaccaacaaaggcaggctatgctatagtacaagccactagcctgcctctcagaacctctcatttcctttccatcgtggaaatctatcctcaaggaaataatttctcagtgttccatctgctgttctactattcctcagggattattcaggccccctcccttccttacacatcaagctcgaggatttgcccccacccaggactggcaaattagctttattcaacatgtcccaagtcaggaaactaaaattttaatctctcccactctaggttcccacgccgcccctaatcccgctcgaagcagccctgagaaacatcgcccattctctctccataccaccccccaaaaattttcgccgctccaacacttcaacactattttgttttatttgtcttattaatatcagaaggcaggaatgtcaggcctctgagcccaggccaggccatcgcatcccctgtgacttgcacgtgtacatccagatggcctgaagtaactgaagatccacaaaaggaagtaaaaacagccttaactggatgacattccaccattgtgatttgtttcctggccccaccctaactggattcaatgtactttgtaatcttcccccacccttaaggaaggttctttatcatctcccccacccttaagaagtttctttgtaattctcctcacctttgacaatgtactttatgagatccacctcctgcccccaaaacactgctcttaactccaccgcctatccccaaatctataagaaccagtgataatcacaccaccctttgttgactcctttttcggactcagcccgcctgcacccaggtgaaataaacagccatgttgctcacacaaagcatgtttggtggtctcttcacacagacgcgcatgaaatttggtggatcaggggacctcccttgggagatcaatcccctgtcctcctgctctttgctccatgagaaagctccacctaccacctcaggtcctcagactgaccagcccaagaaacatctcaccaatttcaaatccgaagcgtttaggctgtttttcatcaaatataaaaatccagcccagttcacggctcgtttggcagcaaccctgagacgctttacagccctagaccctaaaagagaacaaccccctttgactgtaattttccattaccttcccaaatcctataaaacggccccacccccatctcccttcgctgactctcttttcggactcagcccacctgcacccaatgaaataaacagccatgttgctcacacaaagcctgtttggtggtctcttcacacggacgcgtatgaaatttggtgccgtgactcggatcgggggacctcccttgggagatcaatcccctgtcctcctgttctttgctccgtgagaaagatccacctacgacctcaggtcctcagacccaccagcccaaggaacatctcaccaatttcaaatccgggagagacaaaggagacacgttttatccgtggacccaaaactccggcgccggtcacggactgggaaggcagccttcccttggtgtttaatcattgcagggacgcctctctgattatacacccacgtttcaagggtgtcagaccacgcagggatgcctgccttggtccttcacccttagcggcaagtcccacttttctggggaaggggcaagctgctcctcgccaggccgagctaggtcccaattcttcctcagcctctgctcctccaccctataatctttttatcacctcccctcctcacacctggtccggcttacagtttcgttctgtgactagccctcccccacctgcccagcaatttactcttaaaaaggtggctggagccaaaggcatagtcaagcggctgaagactgacactgcccgatcgccttggaagacccctagaccatcacggacgccgagcttcagaaaagcagaacggactaaaggtcttttaaaaatacacctcaccaagctcagccaccaacttaaaaaggactggacaatacttttaccactttcccttctcagaattcaggcctgtcctcggaatgctacaagactggctactggccaattgggatatccttttatcagtcaaagctatgtcctggtcaatggatttcaaactgttgaggatctatgtgaagctgcagaccttcgagtgagtgttgcagaccttcgcagtgagtgttacagctcataaaggtggcacacccagagttgtttgttcctcccagtgggttcgtggtctcgctgacttcaggaatgaagctgcagaccctcacgaccagggaatggatgagaatcctactgattttctggaacggctaagaggggccttggtaaagcacatgtctctatctcctgatttagtcgagggacaattaatcctaaaggataaatttattactcaggcagcccctgatattgagaggaagctgcagaaacagaatgggccatctctcagggacatatttttcagtccccagaatggctacaattggaggatggcaagcttttatctaccagttgcgaacaaatggaaaattcttaaaagcctttaccagatcttacacctaggcccagattgggagggaccttacactgtatttctttctactcctatggcagtggaggtcactggaatagactcttggattcattacacccaagtgaaggcctggaaagctgatggagccacctctgtcaacccagaagagcacccaaagtaccaaggtgaaataaacagccatgttgctcacagaaagcctgtttggtggtctcttcacacggacgtgaatgaaatttggtgccgtgactcggatcgggggacctcccttgggaaatcaatccccggtcctcctgtgttctttgctccgtgagaaagatccacctacgacctcaggtcctcagaccgaccagcccaaggaacatctcaccaattttaaatcaggagcttgctacacgtgccggaaatctggccactaggccaaggaatgcctgcagcctgggattcctattaagccgcatctcatctgtgtgggaccccactgaaaatcggactgttcaactcacctggcagccactcccagagcccctggaactctggcccaaggctctctgactgactccttcccagatcttctcggcttagcggctgaagactgatactgcccgatcgcctcagaagccccctagaccatcacggatgccgagcttcaggtaactctcacagtggaagaaggcaggaatgtcaggcctctgagcccaagccaagccatcggcattccctgtgacttgcacgtatacgcccagatggcctgaagtaactgaagaatcacaaaagaagtgaaaaggtcctgccccaccttaactgatgatattccaccattgtgatttgttcctgccccaccttaactgagtgattaaccctgtgaatttccttctcctggctcagaagctccccaactgagcacctttgtgtcccccacccctgcccaccagagaacaaccccctttgactgtaattttccattaccttcccaaatcctataaaatggccccacccctatctcccttcgctgactctctttttgcactcagcctgcctgcatccaggtgaaataaacagccatgttgctcacacaaagcctgtttggtggtctcttcacacggacgcgcatgaaatttggtgctgtgactcggatcgggggacctcccttaggagaccaatcccctgtcctcctgctctttgctccgtgacaaagatccacctacgacctcaagtcctcagacccaccagcccaagaaacatctcaccaatttcaaatccggctgctcctcaccaggccgagctaggtcccaatccttcctcagcctctgctcctccaccctataatctttttatcacctcccctcctcacacctggtctggcttaccgtttcgttccgtgactagccctccccctcctgcccagcaatttactcttaaaaaggtggctggagctaaaggcacagtcaaggatttaattaacctcaccttcaaggtgtacaataatagaaaaaagttgcagttccttgcctccactgtgagacaaaccccagccacatctccagcacacaagaacttccaaacgcctgaactgcagcagccaggtgttcctccagaacctcctccccgaggagcttgctacaagttccagaaatctggccaccgggccaaggaatgcctgcagcccaggattcctcctaagccacatcccatctgtgtgggaccccactggaaatcggactgtccaactcacctggcagccactcccagagcccctggaactctggcccaaggctctctgactccttcccagatcttcttggcttag

SEQ ID NO: 3673 - DNA, 2713 bp, Homo sapiens
  misc_feature (1)...(2713): n = a,t,c or g
tttttattatttatttatttatttatttatttagagacagagtctggctctgtcacccactgcactccaacctgggtgacaagagcgagactccgtctcaaaaaaaaaaaaagaaaaaaactgcaggcaaagttggatttgcggcctatgaataaaaccattactttaaaaagtaatacccccaaaaaagttacacctggaagtttcatcttcatgcctttgtgtaatattactataatgggtgaaatggatggattttaaaaaaaacacatcaggaactggncacatcctcttgggatgatggggtccttcagtcaccttgtgaggcccatgtactttattcccgttgatacagcctgtgcttattaaacatgtgggggggccctccttgtgtgagctgcttgaatggccaggtacccccattcttttgaatattcccaatggcagtcaatcttggcctttaagaataaatttaaatatttggaaatagtccttaggatccaagtttgatcaatgaaaaggatgcttaagctgagtttggggtcacataagaagtgcagttataaagaaataagacatgttgggcatggcagtacacacctgtagtcccagctgcttgggaagccaaggcaggaggatcacttcaacccaggagtttgagtccagccatgggctaacactagggaaaccccatctcaaaaaaacaaaacaaaggacttagtttttatgtggctcataagtgtctctaagttataccaaaagtttgagcacaacagtagtagcagaatgcttagaataaaggcttgacttttaagctgacttttggaaggaccatacccacatagaggcatcttttctgctgtggtaattttttaaattaatacattgctttaggattacatctcaaagtaaataaaaaaatcaatatttaatttgtttttttcctgcaaataaattaaatgctgggaccataatgattatttttgcatagtaatagctggtgaagaagttgttttaaaattaaattgccaaaagtattacctcttggaaaaatttattttcccaaagtttttcccatatgtccatgaaaaccccctaatcctggaccctttatgaacacagtggccattaacactgatgttgggaaagccatgtgtgaagatctgtggcccctggtcgggagtccatatgcccttaaaaatgactgcgagtcagtgtgaagtagtataaagtggagtccctacgtgggaaaaagcaggctactgaggacaaaaacctcccaaccctccccaccttgttttccactggggaatggagaatttggatatgaggaaacttcaaccttggcaggaagtgtgggatttccctctggaaatttaaatgttttcacacatttttgtaccttttgtaaccttgtggtatttactttcacatggctttttaaaaaattattttaatgaacttctatcacactatatgaatgatatgggggaaatactgaactgctcatatttccttttttggcaataaagcactgttatatgtaaatgtaagtgaaaaagaggttcaagactatacaacagcttatgtgtagtatatgttgacatccctaaggtattttgaaacatgaggtgacagacaaggacctcaaatttccagggaaatatttatttcacaacattaggagtgtagctcttcataatgaaatatcttctttctgctaaagattacaatttttcatttagggaactgtgaatattttctgtgagggtttacagaaactagtgtatccttttcactatgttgaaaagacaatctgaactttagctatttatatttcagtattaacacaccttcactgattgagagtcttgagcccttctctacttttataaagtgaatcctatttccaagtcatccatgtcttttgaagtctgtttcttatataagtatttattactttactgtttagcataaataggagacagaaaaggataataaactactaggtcctttattcctattaaaataaatttataaatcccttgaatcaactgaattctaagctttttgaagaggttgctgatgtagtgtgatcaaaagaatctaaggagaacctcctctccaaaatctgattggagctgttcaccctctcaaggacaagataaagattgacttcagagatatatcacatcaagctagaggaaaaaaaaaaaacctcaaataaaatttttcctcattcgaagggatccagggtatccttgggttatgtaggagggaatcatatttgttctaatttacctgaatgtacttgtgtgtgaatccaatcttgattctaaacaccaaatcttgtcaacagtagagaagtatagtaaggagttcctgttgtcaatcaaataagggtgtgaaacatttagaatgctctgtgttacacttgaaccatgtataaatgtaacctgtgtatcttttttttaattagcttttctgaatttaaattatattgtttttctttgtattgttagcaaaatgcatcagaactggattttttttctcatctgaacataatataaaatttgaaagagtattgtgatattaagcactttaacatacatatcagacaaactgacgtgggtttttcaggtttgggagtacatttaaatatgacttttcatgctttgttctttccaaataaaactgtgggattgataaaaaa

SEQ ID NO: 3674 - DNA, 1799 bp, Homo sapiens
  SIMILAR (1)..(303): 1001254mologous to Homo sapiens Human peptidase, HPEP-7 protein sequence,accession number AAY90290,Smith-Waterman Score= 531.
  misc_feature (1)...(1799): n = a,t,c or g
agcgacatagagactctggatattcctgagccaccacccaattctggatatgaatgtcagcttcgtttgcgcctttccacaggcaaagacctcaagcttgtggttcgcagcacagacacagtattccacatgaagagacggttgcatgcagcagagggagtggaaccaggtagtcagcggtggtttttttctggcagacctctcactgacaaaatgaagttcgaagagctgaagatcccaaaggactatgttgtacaggttatagtgagccaacctgtgcagaacccaacaccagtggagaactgaactgagccctgttggccagctcccacatccctctgctcctttttatggttcttgttgtcatttcctactctgcggcgtgaaatctatttcactgctctaaattccctatgaatggatttagttctgaggaattaccagtgaaaaattccatctgtgatggagaccaacaaaaataataaaacacaaagagccaggctttgagactcatgtaattacaatttctaatttgaaaggcagttaagaaatagataaccatttattttagaacactcaacaactatgtaatggctatatttcagtgacttggactgtaaatgaaacattgcatccatgaaggacagcaccaagcacctttttgaatacagaatttttttagaaaaatatatcaaattatataatttccagaaaccataaataatggatataaaacttaacctttttgttttgttttgttttgttttgttttgttttgttttgttttggttaatggaaactgaaaagagcagtatttgaggttgcttctattctggttttttattcttaggctcaattaatatttagccataaatgagtaggagactgggcaaattgtgctttagtgttgcttttcctcatccccacatcttgagctccttatttacattcacactaattttgggggccttccagcacatggtgggccgggaacccttttgggttcgatgtggcacacaaatgaacaaaaactttgatgacaggagcaatatactgatttaccctaatatctccacctctaaacataaaaaaaatctcctttgggattaatgctgtggtcttcacttgaatttagattcaatcatcagcaaatttaaattagatatagccacaatctttaaaatgattgcataaaaataaggaagtagttaaagctctcagaaacatgatgttacaattacagatatatttaatcaggcaataggaaattcaataccatttaaacattacatttaaactaattagcanacaagcttgaggtctttgcctgtggaaaggcgcaaacgaagctgacattcatatccagaattgggtggtggctcaggaatatccagagtctctatgtcgctctttccccctaacatgttgattggcggtgccaaagcaatacactggaagctgatatctgttcccccagttcaccgtaagcactctgtaagtgcaccatgtggtaatgttaatgtttgcaccatcaatgattgcttgtgccagttcatgatcattgctctcaaaagcatgtgcagcagccttcaaggcatcccaaatctctttccggccttcaaaagctggtgctgtatcccaaaattcatccctcttgctgcgtagttgtccatctgtcataggataatcgcttttccattttggtttctcctttttcaaaggctggttatgacctagagcaactncggtgccctccgagttctcgttgaggctgcccgaggagtcgtgctgggcgccca

SEQ ID NO: 3675 - DNA, 4201 bp, Homo sapiens
  SIMILAR (911)..(1009): 1001254mologous to Homo sapiens Human secreted protein encoded by gene 7 clone HCUIM14,accession number AAW74737,Smith- Waterman Score=174.
tgaaacaagctaggccaacttggacattggaggatggattagaacatactagctgctccatcatagactatccttactaagcagaagaccttaatagtgcctaaaagtttagttttgaaattggttttttcctaacttttctttgttaaatttatttttattatcttttttaatcttagaagtaatcagagtttgacagctctttagtaactgttaataaaagaatctttcatcacacggataagcaatagattgtgtgggaaataataacacaagagtaaagatgctgaaggactcttctcggaactcaaagtgacagttttgaaggttctggcacagtaggaaaggatcacaacccatataaatggctaatgttgaatttctctggaacactgtcacatatggggcatcaatttggaaaactctcaattgaggccccttccctaagattacaacattgataacctgtctttttctctctcttctttactatccggccaagtctactattccaagtttaaatattgttcagaaagttgtcagccttgttagtcagaaaaactcccatttagagccatccaaactagcataagaaattccttaagcactcaaagcattatctctgttttaagtaagaaactaaatccagagcttttaacaggtacttagaaataagtattgggtaatcactaagaggacattgactgcaccaaaccaaagctatagaaagaaatgattgactttttaaaatatattcacattaactgtcctaggatacttctcttgaggctttggaaaacttcttccttgaaatttgcatatccactccagttctgtcaccaaagattttaatcttcagatcgcaatttcctctctcccagaaaaaagtactacaacaggctcaagggatatgctttggtggtcaagggattacactatggttttccttctgttcacaatggtatttacaggagaccttgtcatcagaggacgtactgaactatctttatgactttggatttgatcagaggtttaaaaaatagaaaaaaataaacaacactacttgacactgtaaatgatctttaatagagtcatgacctggagactgatgcagagaaagaaacttccatggaagagagtgagctaaatcatttagaaccaaacaaaggtctctggtgaaacatagggcagcatgtacacagtgcagatcagggttctgtatggccagagccaacagcagtgaccggtgggagagtcagacaactggccaatgaattcaagtgttgaaaaagccacagtctggattttgttgtgatttctggagtggttgaaacgcccatgcccatggcaaggaaaatgcttggaggctgatctgttgtgatagtgcctttcttgtcgtagtgagtactagattaataatttattcagttacgcttttctgtaccattgcctccagtcttctgaaggaggtttgaagggacagtatccacttaggatgaagggacaggatattgctctggaatgctgtgatttgatgatatttgcactagattctaaactctcctttaaactggagcaactgactgagagaaaaaccaaggacagctcaaagttaaaagaaaccaaaagcagtattttctgacagataccatttctttttctccttctttttttcctggaagaaaacttcacactagttggctaccgagctcaactcttaccagttctttctctttattttttgtttccatatggaaccatctgtgtgaattagtcatcagttaggtatagttaacgtaaagagcccctgccattgaaactttgcacaccttctctgctttattgaaggcaagggccagtgggcagtgatagcaggggagggaccctccagaaccacccagccctccaggaggccaataagcatggatatcatgtcaggagctgagctgacatatatttactcagaggacattggggtctgtagctaatcctaaagaatgctccgcaacagaaggaaaccaatgcattgtagaaaacaaagggagatggtgcccgaagtctgcctgtttctcttctcttttctttcccatctcaccaccatgtcctctctaacagaattatatttcatctcatatattatatgttactagaaaagtcatttggttccttggtttctctctttatcagtgggctggaaattcctccaaattaaatataaataccagtagcagctcccctgtgtccagccagtttctcaaatgctgtccacctggtcttactgtccacctaacataacttggaggctttggctggctcaaccacctgttcactttattttgttttcatttccatttgaacttgaagtgaggctatggaaaggtggaaatcatgggcaaggtttggaggctgcaattctagggcatagcttgtcaggagtttatattatctaaaatatatctttctataccccttttcattttaatctgttgccctgattataatttctttatatttgtggttatttttataagaatagagtccatttgctatgtctatttgagtactttttttctattgtccccacatggatgcagtaccaacctgttaatgaaatatctttttattatattattaatatgtaattctactggtagaccaaaaatataaaaacaaatttgttcattttaaagatataaagaactagggagtaaaagattaaaagttgaaggaaaagacagaagagcagtggttaactatgttgagttagaaaatctaagaagtagccttacctgtttttttaaccagtgcttgccaatcataccatagttggaattatgtaatcttggctccttcatacttatgttctataattcttgtttgtctatttgttttctttgatgtaattgaggttgcacatcatgctattcttggcaatgcctgattctattgtattgtacttttgttagtcatttcctttagaaagatggggggaaacgtttatttcttcttttaatttaaaatttgtttaatgcactggaaataaaattggacatatttcactgtttaaaaaatcagaaacaaaacaaagcaaaaccatgagggaaaaaaacagcaaataagcaacaggggaaaacagctatgaaaaaaatatatttgtactgaatacacatacaaactacatcccacatgaaagattaatatcatcaagtaagaaaaatacatagtttaaactacaatgctgaaaatataaaaggaacctggtagttcaatggggatggagaaaacagagcattcctctgagagcagagatcttgtcattattgcaattaatgcccaaacaggttaaatgtggaagaaagtatggaggaaataaccccagccttcctcataccactggatttccacatcaccttttaacttatgcttgagctcccttttgagaaaaaatatttaaaaacaaattggctatgtaacaaatttgtgtgtgtgtgtgtatatatatatgtatatgcttatatatatatatatgtatatgcttgagaaagtggtttttcaagatgtatgtgtacagtacacacatggacacgcttcagtcctctgacttcccatgtgctacctcatgtgtttctcttctcatgaggatttgcaatggatagttgtacaacctggggactgtcagtgactcattggtatcagcatatgctaaagaagctcttgaatccaatcttgaaacctgatctcccttcgtcaacattccccaataccaaactggcccgtttacccatacaaatgcacagtaaagggaagaacagcggtatttttcctagccaactgactctatcatttgtttaatgtttgctggtttttttctggttttgttttgttttagagcaagggtgggagtgggctgtaacttcacaatcctaatacagtaaatgttttgcatcttccatgttttatgcaaaaacagacatttaaatcaataaataattgtgccctagactgaaggttaatgtttagggggaggaaaaaaattgttggaattttttctacatttttttgtgaagaatcttttttggaaaggaaggatacatatttttgttgtgtaatattttctatttttgaatgcattttattggtacaagactgtttttttggtgaagacattatttaaaaaaacagtcttgtaccaatagtcgac

SEQ ID NO: 3676 - DNA, 1516 bp, Homo sapiens
  misc_feature (1)...(1516): n = a,t,c or g
gatcagtgtccgtatgtaaggccttgagaggaccctgcaggcagtcagcaccagcctcagcaactgtgcagagacctacaggcccacagccagtggctgtccgcattgccctgtgcccacaagcaacagtccacagcccttggtggcttctgttccttgtcccctcggcttctcttccgcagccatcaggactaggtttgtgcaggaaggtgatgcccantggaactctcctcacacctggcagcttcatggatgttgtatctgaactaaggaccagaggctgccagatgtttctggctcctcacgtgtccttcaggacagaacagaagcacaaagactcagccaagagttctctttattcccttttgatcctcccccaaggtgagggcttaggcagctgtagaaccccaggaaagaacggaatccaggcaatctgtttagagaccccccactccaaatttatccttttcctttccttcccctaagatgtttccagggccctctggtgcccacactgtcctcttccttccacttgggggtggggaaatccttccttgcgaggtcaaggccattttctcttaaaaaaagtggccttgaattgaggccaaggcccttgaagaaggagccaccagttggaggaaaagggctccaaagccttgctttttaacacccctgcaaaacccccaccctcccaagatggttcacaaaaggtgagaaattcaggtacgaaaccatcaatggacaacttgaaaatgcatgttcctcaggcctatgcagttccccagagactcttgacaccggtctctgctgaggctcccagcctcagtttcccccacagcagcacgggccccactgtgctgctcttcaggtccccacagccctgcctttggttcctggacatttggtattctgccctccactctggtactatcagagtagggcaggctctggattaaagcttttagccggtctaaagctactttcttcaaagacagtgggaggagaggttgctggggcatcagccctgcttcccacagctccttaggcaagagcttacccagcagctgtgagcaccaagctggccagcagaggctgggggaggactttcaggccaacacctgcccccagctgagtttgggactgtccttaagcgaggtctggagagaggcagcggcagcagccggacggggagcaggccaagccggaaccacagcctgcaggtgtgggtgtgtgtcatgtgctgagatgccagggcaccagcaagggggatatgttggcagtgatgtctggcttcggagggtacagtcctggctcccagacaaggggcggggagaacactgtgtccttccagaggctgtaccacactcccactgctgtcacccttcactgaagcctcgagcctcggtagggcctccctcttctccctgtcctatcaagacttacagcaaggtcccaggttgacagggagacagatatcaagggcatagaaaaccctgcaaggaggcctggcatggta

SEQ ID NO: 3677 - DNA, 5448 bp, Homo sapiens
tcacatgagcaggacttcgctaaagcgtttgcagtatccagaaaggcttcctcctcgaggctcactttgctcctttctctggtttttggccttcaggaccataaggcccctttccaactggctggcattaaagatgggcccactctggcccgatcctggcaccagcaatgggatgttgacctgtctgctgagtcttggagcccaccactgggctgctggcttctcgagaaatattcggcatggctgtccgtgtgaaggattgccaggacccgtgtcctccgttgctcgcactggggtctctggtgtgaacacccccgacagcagccctccgcccactctgccccctgggagccctcgctggatcgtctcgtctcctgcagcagcactggcaggcgagggctctcgttcatattctcaggccgcaagtgcaatgcctgaggggatcaggcttttctactccaggcaaacctgccccatcttgtcgcttttaggacctcccacaacctggttccccacacatccatagttctgcctccccagcttctcctccccacttgtaaatagtatttattagcttgccgaggcttcctgctagcaaccacactgaagagatcgatgcctcctttcaagctagccaagttttctgcgagccttcagagctaggagggcaccctaggctctgggatcccgtgtctttccagacaatgttttgtttcctttcctttgttttttcttttaactggaataattaccattgaaaaagaagttcctttgagcatgtatgtgtctgcctctaggatgagctcagagcgagagatgacacaatgcctcactcaggccccgggctccctggccacaagctttttctatcctgttttcatgacagagaaggggaagccctgttctgacaacagacatttcagacaaccttgctggctttccacacctgcctggccccctcctccctccacacttccactttgtcctcctcgtccccctacctcaacaaagcagggtggggtaggtgacatttgtggtatccccacttttaacctttggtagtcaaggtttggctactttgcagctcgcccaaagagatacaacctaatccccaacctacttttagttttttttgtttttttttttatggttaaaagtaacttttgtagtttaaaaaaatctttcctctttcatataaataagaagtggaaattgcctttttattgtgtaatgtagaaaaccctcaagtgttttttccgagcttgggaaagattttgtgtaggaaatgtgcatagagtttgtattttatttttattagcagctgaaatgcctttggttttggcttctctctctccctctctctctctgtctctccttctctctctccccccaccacccacccccacacacgtcatctgcattgttattggagcctgtacttagagggattaagcccacaccctggcttccattccatatcaggtacaggatttgatgttattaacatttgtcgtcatacctcataagtcggtccctgccttgtctgtctaggcccatttggggctccctgtgagtgattcccctctctctgctatgctggagacggttccagcctggaaagcggccaagttcatcttctcactgtgagtggaagctggatcgggcccccgtagtcctggcagccctgttgtctggagggttcttgttgtccctcccattagccagggcggagactgtctgagctgtgcaggaggagggttgctagtaggttctgcttctgcttctctctgctccactgtctgcagcccagatcctgttgggcctggctggtgtctggtaaccatgggcctccactgacccatccctctcttttaaactgtcaggtcattatcaggcataggcagcctatagggcccaaagaaggcaaaaagataagatttactcaagtagcatttgggcaatgaggaaggaaaggtttcaaatttaggggcagaagtgagagaatgagccaacccatgtacctgctgcaactgaaccagactgggttttcaaggctcccagacgtagagtaggaaacgtgctcttctaaatgaggagggagaagataaaggaaacttctagcccctgtccttagtgctttgaggattttattttctcccttactacgcttgcttgacgtcactctctctcgacctccaaacagcaggactctttctctgggaaaccgtccttccaaaacggaatctatgtagacaatgggacattaggcagagagctcagatggcccttttaagggggctccaagaaccaacatcactgctcttttagataaacctctgccctccactccttgcttgagtgggttaaaggaactaacagttgtccctttaggaggacaaaatggggtcaagaggacacagaagagttgtatagcaccagattggttccaaataattaatggatgtgtgcacattttctgttcagggattaagaccagaatatcagtggatttgttttccccaccaagtggcctcttagactagtcattaacttatggttagctctaaagatttcaaatagtggcagacagtgtcttctgaatgtaagttttgagaaatacgagtctgtcagagcggccataagccataaagagtcaatctcttcattatatttttcatcatgtaaacaagtttcccatttccctttcttagattgcaccagtgaaggagatgttttgcaaagattcagagaactaatttttcactggataagacctgagtaacccagaccccccaccgtggttcttttcacagccctcgactttgcacttaaaaagggatattgtaaatgaaaggctgcagtgccagttttaagaaagaatttctgtgaagtgtgaggactctggagtctagctcacataaagagagtgttatataaaaatccgacagctgaactaggttgctcttttttggcagggagtggggatgagatttgacaccaatatgggcaaaattagataaccttttggttaatataaatgattttgatttggaggcctaatttgtagattgtgaaagcagcttttagtttaacttattcacagaccccttataattaccatgtttttttttttcttcctaaatctcttggttcagcttgtgaatcttacgtgcccgtaaagttggggatgttgaattggctcttctttgttctggcagtgagtcaagtgtccagcattttttcataagtgttttttaaaattgttctccagcattttatggctcctccctcccatgtcctcagacccagcaaaagcgtagaggcagaattagaggcctctccaggccagctcctctgcccacatgtcatacaaggtgtgaatttgagcacagtccagaaatggagacatcccacccccagttgaataatggcccattcatgccaaccttgccaacacggagagggcagagatgcactagaagaccttcatcctccccttcctctgccccaagtcactacagttggttctattgaagccagtctttaagaaacctgggttaaagacaccagcacttctgcttgctgggctggctggacctgtgaagccatgggcaggtagtgccctcttgagagtcattttatttggccaccttcaggtgacgactatccatagacacatgctaggataggccccgctgggagggcagttacaggagagagtaggtggtggtgacgtgagggctgtgaaggatccagagacaagacttagatgtttcgttcattcactcattcattcagttactcctaagactttttcagtttcataaggaaaaagtgttgcctgaggccctagggaatattggggaatagaagggattgagggaaacattaataatagtttattcaaaaaggacccaaatgcttatacttctctctcccttcttctctctctgacacacacacacacacacacacacacacacgtgcacattcctcccttacatgctcatttgtgccttaaatgtgccttataggtaaatccaggatgactgaggaatccctcgtcactgggagattttgtatatattcttttattattagattgagttgggtgtggggaaaaatttttttcctgaaggctcaaaagtggtttcctaaaagtgagccactatcagatttgcacatcaggagaaaagaaatagggttaccgtccattaggaaaatcccaagtttgcaggagtgcaatcacatcaaaaaaacaaccagccagggattaaaggtattataaatcctcataggcgggaacatttctcaggggcaaagggaacctgggcttcatttggaaggatttaatggttcccatggccttttgtgggtcaaacgggtcaggcactttaacacagggaaaaaactagggtgttgttttgttttgttattttgggacaacataaaattcagggaatgttttatttagccttggtttctaggaagggaaggggaaataatatttcttgagcatttactaggggtgttgcgtgctgtgctaacgtaaattttaagccctttcagtctttatagaatacggaaaacaagggtgactctttaccacaggatgaataaagaactaagtaatatggggaaatgcagcaatttctggacttagctgagcccgattccttcctgtggagcacactgtaagcttttcaaggttctctggggcaaagaattacagcacctgtcccctggcaatggccctgctgtgtgatgctcatcgcttcccttccgtgctgggagcagttcccccagggtgttccatcttcctatcctttttgttccaatcttctgtgagttccagctaagcaggctttacatctgggggaaagggaaaaccagggggttttaggctcctgttcctctggctcccccatcccttcggctcacccagctggagtgaggaaccatgaacctttttggcacccatgtaccccatgggcttacactactttggaaaaatcacccttttccagataaaaccagtttatggaggttccataggggaaccacccagcacctctttgacaaaaactgtgagtggacccttttttaaaacaatgctgaagcagggccctggagcttataatccaacgggtgagctttaatgtctatggttgacagttaggttttgcctctcttttgtaacaggttaccgtagacccagcagtgtttaaatcctaaatacgttgtgagtctgttatctgtccctatcgcgttttttaaaccgcctttttattctttatcataaaataagtaaataccaaaaaaaaaaaaaaagctttgtaggacacttgtacttagtttgggaaaaaaaaataaattgaaattgttatgcttttgtatttccatttcttgcaaataaatattttttcttaaatagtaaaaaaaaaaaaa

SEQ ID NO: 3678 - DNA, 775 bp, Homo sapiens
  SIMILAR (629)..(775): 871254mologous to Homo sapiens My030 protein,accession number AF061733,Smith-Waterman Score=225.
cgtgcgcagatcagggatcgcgattgcgaatcctccgctgaggtgatttggatatccctagaacgtcgagggcacgagtcgggtcctgagaccaggtcctcagccagcagagccacgttccttatgagcaccgtgggtttatttcattttcctacaccactgacccgaatatgcccggcgccgtggggactccggctttgggaggagctgacgttgctatccccaggaatagctgtcactccggcccagatggcaggcaagaaggactaccctgcactgctttccttggatgagaatgaactcgaagagcagtttgtgaaaggacacggtccagggggccaggcaaccagcaaaaccagcaactgcgtggtgctgaagcacatcccctcaggcatcgttgtaaaggtagatcacagtaggccgctgaggggagaggccccgcccaagggttccacagcctccagagatttctcccaagtgtgaatgggatcaagccgaagtgcattatttttctggcttgggccaccctctaccagccaggcagtagagagcaccgcagatctcgtcccatccctgagccgttcctccctaaggcagaacctcctacaacagcctgggaagcctgtttccaggatcttttggagccaggtgccatcagacaagatcagttgatcagaacagaaagctagctcggaaaatcctacaagagaaagtagatgttttctacaatggtgaaaacagtcctgttcacaaagaaaaacgagaagcggcgaag

SEQ ID NO: 3679 - DNA, 2081 bp, Homo sapiens
cagacacaagtagtacataaatattattttacaaccaacaatatttaatatttccacattgaaagaatagatggggataattaaaaccttttaataggggttttaaaaagacaggaaacataaacccctaaattaatacataaaagaaaagaattttaaacaagagcttattgtgatgacattactcataacttttacctttaaaaccttttcttgggtagctattcaaaaagtaaagaccacaagtttggttgccccagatttcttatgtttttgtatatttaagctctttatttattgaaacagatgtgtccattaattcatttgggggcattactattatcgagtaaaatttggattttttttcccctcaggtcataggggaaatcagctccacctggaatttctaaggacccagttttagtcaatattttcaagtaatcatgacctcagaaatagtcttaattaagataacaaatattagccatcaaaatggaaccaagacgaagattctaatgtttgtaaacagtcaatccatatttatgaatattagcatatattggtgaatagtttaaggcaaaaggttctagcagatgtaatctatttccatcaacatgttaaatgttataaaagtctagaattattggataacatgaaatgattcccaaaatggaattcctgtgttacagaatttactagaaaagtgctgtgaaagtataattgaaaaataaaggtgcatccgccgaaataattgtggatagaacaagcttttgaatatttacatggattaatgaattatttgcccaaattctcctgaagttatacctagttcccattaaattaatggacaccgtgtatatgagcatatacctttctttagaactatgttttgtgataagtccatttttactcacaggaatttacttaaacttgtacatatattaattatatatactaaatgacaatgcccttatctgaaacaaatccatcgaataatatcaaaacgttataagtccttctttaaaaagtaaaaagtaaaaaacaacgtcagttacatcatttacatttggtatcccacctaaatagagacacagcttttgaaatctacaatattttacattttggtcatcatttaatgctatttgcatttctctttaacattttaatagtatttgtgatatatcatgtttaactgaaagctttgggttatatattttaaaggaatatcttactttttgactaaatagttctgtaagggcgtaatatttgaaaaattagcttgttacctgaagcaactatcctccttaatcattttaaaataatgggtaaagatgcatctttgtaaatatattctgaaaacttggttagtgtattagaaacagacaccagaaattaaaaaaattatttctaggactggcatacactacagtgaattacttcaaatgttactctagagcatttttaaaaatacgcagaatcctgctgttctctgtgagatgatccctttttccgatgatgaaattaaacacgtttaaaaagtcttttaaatattatatatagcattccagaattgatgaattataaaacattccagatccttctgtttgggtaaaaatctatcttttagtttgtgatagtaaaataagcaatctaccagccagggttgaaatatatagtattttaactactgttctatatatttcaaaattcatgttttctatctgtcctagagaaacttagccttctatgaagtgaatcagttaatgatattattgctttggagataaaattggcctcagagtatgatagcctgtaagtaaatgcttcattacccacatatccctacccaccccccccaaaaaaacctaccagtagtctagtacagtagtgagcaatcttaaattaaaagctattgttcacacagagcagaggaagataattttcatgttaaagcagttttcaacatcaaacatctaaggagttataaactataaatgaattacctttaaaccctggtcttcacagttacattgctttctgaatgctttttggggtgacattatgctaccacatttttaaac

SEQ ID NO: 3680 - DNA, 1548 bp, Homo sapiens
  SIMILAR (380)..(270): 621254mologous to Mus musculus putative,accession number AK016814,Smith-Waterman Score=129.
  misc_feature (1)...(1548): n = a,t,c or g
gaataccaagtcactacagaataaaagattttaaaaatgcaataaggtggcaaatgcattgtatggagggaatttctccggtgttttagtctggggaatttttgccatgtgggttaattgtggcccattcctttaatttaaagttggaactataatcttaggtagaaaaccttttttataagaagtattatttgacccacttcagggtatacattcaatactggggtaaaaatttcagacctatctcaggaacacagaaatatttggtgtcctgataagcactttctaagactattgatgtggccaggaatttggaaagacgacacacgcacgcacacacacacacacacacacacacacacacacacacacacacacacagttttttccttccctgtgatgaaaaaggcctgtgaaaacccttaaagtatttgccttgccttcttgttttgtttagttgataatgaaatgtgtaccaaccctcaaatttgcctgcccagaatactaaaaatagaaaaatacccacaaaactgtcatgtctttagttctttccccccgaaaactcagtaaaaaggtgttcccagggatgaaaagatcattttttgctgcatgctaaatcttgcaggaaaaatgattttttagtacggattctgtaggaaatgaatctttgatataatgtaaatgctggctgtttngttttcaagtgggtgaatgtgttgtttaataattgggctgttttgcttttcattttggccaataagtaatcaagtttgtagaaaatgttagcattctgactacttaggcatctgtagtaatttctctatgtataggggataattttttagtggggcagagatcctgttctagttgcctgttaagcaaaatctgccctcccaattggaaaaagccaaagaggattgttagaggggaaaagcctgttggccttgcagtctgcattgcagccagcgttgtccagagagtacacgctcagcacttagcttctactgtgtgttgtgggtctgggtgagtgttgtttcccctgaggcgctctatttatttatttattatccaatccaatccagtggaccctggaccacatagtgtgataggtgcagcattccttccctgtgggaaagaattaaagatggttccatttcctaggctacggaacaggaatggggctcctaaatggttttccatagactggctgttaaaggcccaaaaattttggtaaatcaatgcctatattatgctcttgaactattaaaacagcccataattattgtccccaagatagatagaatatagtcctttttcaaaagatgattatacgtgggctgggtgacagaccattaatgactgactctggagagtaagtcatacctgcactctgtggacttgatggttctttttctagagcaaacagagcgtggcattttgttttgacttgttcttccttggggtcaaatttatatatatatatatataaatttttgtttgggcgaccaagatctaataatttaaacccagaaaaaaacatgaaaaaaa

SEQ ID NO: 3681 - DNA, 5452 bp, Homo sapiens
  SIMILAR (111)..(4700): 1001254mologous to Homo sapiens synaptonemal complex lateral element protein,accession number Y08982,Smith-Waterman Score=7871.
tgtgttgctcgctaaccagtcccccataacagtagactggagcccagagcctgcttacttgtcaggtgtttattttgtcttgcttttttttttttttaaatgaagtcaaaatgccaataagaccagatctccagcagttggaaaaatgcattgatgatgctttaagaaaaaatgatttcaaacctttgaaaacacttttgcaaattgatatttgtgaagatgtgaagattaaatgcagcaaacagtttttccacaaggtggacaaccttatatgcagggaacttaataaagaggatatccacaatgtttcagccattttggtttctgttggaagatgtggcaaaaatatcagtgtattggggcaagctggacttctaacgatgataaaacaaggactaatacaaaagatggttgcctggtttgaaaaatccaaggacattattcagagtcaaggaaattcaaaagatgaagctgttctaaatatgatagaagacttagttgatcttctgctggtcatacatgatgtcagtgatgaaggtaaaaaacaagtagtggaaagtttcgtacctcgcatttgttccctggttattgactcaagagtgaatatttgtattcagcaagagattataaaaaaaatgaatgctatgcttgacaaaatgcctcaagatgcccggaaaatactctctaaccaagaaatgttaattctcatgagtagtatgggagaaaggattttagatgctggagattatgacttacaggtagccattgtagaagctttgtgtagaatgaccacagaaaaacaaagacaagaactggcacatcagtggttttcaatggattttattgctaaggcatttaaaagaattaaggactctgaatttgaaacagattgcaggatatttctcaaccttgtaaatggcatgcttggagacaaaagaagggtctttacatttccttgtttatcagcatttcttgataaatatgagctgcaaataccatcagatgaaaaacttgaggaattttggattgattttaatcttgggagtcagactctctcattctacattgctggagataatgatgatcatcaatgggaagcagttactgtgccagaggaaaaagtacaaatatacagcattgaagtgagagaatcaaagaagctactgacaataattctgaaaaatacagtaaaaattagcaaaagagaagggaaagaattgcttttgtattttgacgcatcactagaaatcactaatgtaactcaaaaaatttttggtgcaactaaacatagggaatctatcagaaaacaaggtatttcagttgccaaaacgtcgctgcatatactttttgacgcaagtggatcacagattctagtgccagaaagtcaaatctcaccagtcggagaagagctcgttagtttaaaggaaaaatcaaagtccccaaaggaatttgctaaaccttcaaaatatatcaaaaacagtgacaaagggaatagaaataatagtcagcttgagaaaactactcctagcaaaagaaaaatgtctgaagcatcaatgattgtttctggtgcagatagatacactatgagaagtccagtgcttttcagcaacacatcaataccaccacgaagaagaagaattaaaccaccactgcaaatgacgagctctgcagagaaacctagtgtttctcaaacatcagaaaatagagtggataatgctgcatcactgaaatctagatcatcagaaggaagacatagaagagataatatagacaaacatatcaaaactgctaagtgtgtagaaaacacagaaaataagaatgttgaattcccaaaccaaaattttagtgaactccaggatgttataccagattcacaggcagcggaaaaaagagatcatactatattacctggtgttttagacaacatctgtggaaataaaatacacagcaaatgggcatgttggacacctgtaacaaacattgaactatgtaataaccaaagagcaagtacttcgtcaggagacacattgaatcaagatattgttataaataaaaaacttactaaacaaaaatcatcctcttcaatatctgatcataattctgaaggaacaggaaaagtgaaatataagaaagaacaaaccgaccatatcaaaatagataaagcagaagtagaagtttgcaggaaacacaatcagcaacaaaatcatcctaaatattcagggcagaaaaatactgaaaatgccaagcagagtgattggcctgttgaatctgaaactacttttaaatcggttctcctaaataagacaattgaagaatcgctgatatataggaagaaatacatattgtcaaaagatgtgaatactgctacttgcgataaaaatccatctgctagcaaaaatgtgcaaagtcatagaaaagcagagaaagaattgacttctgagcttaattcctgggattcgaaacaaaaaaaaatgagagaaaagtcaaaagggaaagaatttaccaatgtagcagaatccttgataagccaaatcaataaaagatacaaaacaaaagatgacatcaagtctacaagaaaattaaaggagtctttgattaacagtggtttttcaaacaaacctgttgtacaactcagtaaggaaaaagttcagaaaaaaagctacagaaaactgaagactacctttgttaatgttacttctgaatgcccagtgaatgatgtttacaattttaatttgaatggagctgatgaccctatcataaaacttggaatccaagagtttcaagctacagctaaagaagcttgtgcggataggtcaattagattggtaggtccaaggaatcatgatgaacttaaatcttctgtcaaaacaaaagataaaaaaattataacaaatcatcaaaagaaaaatctgtttagtgatactgaaacagagtacagatgtgatgacagcaagactgatattagctggctaagagaaccgaaatcaaaaccacagctaatagactatagcagaaataaaaatgtgaagaatcataaaagtggaaaatcaagatcatccttggaaaagggacagccaagctctaaaatgacacccagtaaaaatatcacaaaaaagatggacaagacaattccggaaggaagaatcagacttccacgaaaagcaaccaaaacaaaaaaaaactataaagatctctcaaattcagaatcagagtgtgaacaagaattttcacattcatttaaagagaacataccagtaaaggaggagaatatccattccagaatgaaaacggtaaagctaccaaagaaacaacagaaagtcttctgtgctgaaacagaaaaggaactatcaaaacaatggaaaaactcatctctactaaaagatgctatacgagataattgccttgacttatctcccagatctttatctggcagtccatcatctatagaagtaacgagatgtatagagaaaataacagaaaaggattttactcaggattatgactgcataacaaaatctatatcaccttatccaaaaacttcatcacttgaatccttaaatagtaacagtggagttggaggtacaataaagtcacccaaaaacaatgagaaaaacttcctgtgtgcaagtgaaagttgttcaccaactccacgaccactgtttttggccagacatactccaactaagagtaatactattgtaaatagaaaaaaaataagttctctggtacttacacaagaaacacaaaacagtaacagctattcagatgtaagcagatatagttcagaagaacggtttatggaaattgaatctccacatatcaatgaaaattatatacaaagcaaaagagaggaaagtcatttagcatcttcattatccaagtctagtgaaggaagagagaaaacgtggtttgacatgccctgtgatgctactcatgtatcaggccccacccaacatcttagtcgcaaaagaatatatatagaagataatctaagtaattccaatgaagtagaaatggaagagaaaggagaaaggagagcaaacttgcttcccaaaaaactgtgtaaaattgaagatgcagatcatcatatccacaaaatgtctgaaagtgtatcttcattatcaacaaatgacttttctattccttgggagacctggcaaaatgaatttgcagggatagagatgacttatgagacttacgagaggctcaattcagaatttaagagaaggaataatatccgacataaaatgttgagttattttactacgcagtcttggaaaacagctcagcaacatctgagaacaatgaatcatcaaagtcaggactctaggattaaaaaacttgataaattccaattcattatcatagaggagctggagaattttgaaaaagattcacagtctttaaaagatttggaaaaggaatttgtggacttttgggaaaagatatttcagaagttcagtgcatatcaaaaaagcgaacaacagaggcttcatcttttgaaaacttcattggctaaaagtgtcttctgtaatactgatagtgaagaaactgtttttacatccgagatgtgtttgatgaaagaagatatgaaagtgctgcaagacaggcttcttaaggacatgctagaagaggagcttcttaatgtacgcagagaactgatgtcagtattcatgtctcatgaaagaaatgctaatgtgtgaaatctagtttttatcaccatactttatctaattattattctctgtatataactgaggaaataaggaatagtccctaccaaaggggaaaaatatacatgtcaccgaaggcaaggggtacccttttatagggaaccctcaaatttaaaaaaaaatgtcttttaatggatgagagggaaccactataacatgagtccaagcccagaagacttctgtctatacaatatttttttttaattttggagataaaagctttaagaaactttttgagttaattatactcataaaatgagtttctttaataaattaaattttattgtgtaaaatgtattattacataaaatgtgtttttgaatcaatgcagtttggggatgaatataattaaaatatgtttaataacttagaattcaactaataaaaatttagccacacttacaagggggaggaagtccctagtttaaaatgtataactgagtggtagatcagtactttcagcacactgttggaaacatttattcagatatggctctaatgtattaggaagcactaaatggcctaaaaaagctactacattgcctaaatatgttaattcaatatagaagtcctatttcataaccaggctgtttgacaaatacttttaatctagtagtcattgtaatatcttgctagattaatttataaaaatgagtatacatttgatttgcttttaatgaagttgaaataaatgcttatgtcacttgaataaatataaa

SEQ ID NO: 3682 - DNA, 1899 bp, Homo sapiens
  SIMILAR (316)..(672): 921254mologous to Homo sapiens unnamed protein product,accession number AK022490,Smith-Waterman Score=580.
cgacccacgcgtccgggcttatggagcatggcatcatccagcatgtgtccaacaagcacccatttgtggacagcaatcttctctaccagttcagaatgaacttccggcggaggcgaaaactgatggagctgctcaaataaaaagtaccccctccccccagggaacctcatgcagtcccttctgcctgaggaagcagagccatgccatcgggaaatctccagcttttatgtcagtgagccccagcaaggagatcaagatcgtgtctccagtgaggagaagcagcatgagcagctgtggcagcagcggcatacttcagcagcagccccaccctcagcagcagccccccatgtgctctgcaaccccaagtccgtgctgaagagacctgtcacctctgaggaactccttactcccggggctccgtatgcaaggaagacattcacgattgttggtgacgcggttggctggggttttgtggtgcgaggaagtaagccatgccacatccaggctgtagaccccagtggccctgcagccgcagcaggaatgaaggtctgtcagtttgtcgtctctgtcaacgggctcaatgtcctgcatgtagactaccggaccgtgaacaatctgattctgacgggcccacggacgattgtcatggaagtcatggaggagttagagtgctgagctcctgggcctcccagccctccagtggcctgtgggtgagggaagccagaatgacacaaagcaatgcaaagacaagattgccatgcaaatggatggttttggacatacgagtcttctccgcacatacatgtctaaagttgagttttatacactgaatgtggaagaaccgggtatcatatcttttttaaaaaatgtcagtgtagaaaacatttgggaaaccattttcctacatgatagaactgcgcttactatatttctatttgtagctctcattcattgatcctgtatcttaattagcagaaaggcgctgaaatgcttctatagcccaaacagcgacatgctaaagtccccttcttcagagtcaatagagtagttgttaaaggttttaaattgtactttctccaaaattagcatgcagctatttaatagggaatctagatttcaccaagattcaaatcaaagcaacatttaaaggaataagacctgttcactagcattttcaagggggttctaaagcattcaagtgcttaaaagccataaaaaatgacttcttaattcctgcctttagtgtcaacttttaagttaatacaggtttcaaattgtggcattaggaaaaaaaaaaaaaccttgtgatgctatggttgggggtagttagggagagactacatgaaattgtgtgcccctattttctttctgatcctaaatcattttgttttataaatcagctatagcatctttctagaattaatcctgaatatgttgaatgttaaaatagagaagtttgtatataccccataattaaaaatccaaccccttctgggcaagatttcactttgaaggtgtctgtttttaagggaaggctaaaactttgctgatatgtgataaaacttgaactctaaattgcctccttagcctgaatttttactagctttctagtgtaacatattctaaggacatgacatgctgcttatttggggggattatttttcaccaaaatgatcatcttgtgttgtaacttttcagctcacttgtatatacgcatgttttcatttttggtctagaaaatagtgcattttggggctcagcgtgcagaggaaattcctcaaagtgccaaattaggcagtcaggaaatactaaattcttcattccaaataatggatctgaatgatgacgttaattttttatcatgcattaacaaaataaaatatgagaattgtaccacaa

SEQ ID NO: 3683 - DNA, 1138 bp, Homo sapiens
  SIMILAR (874)..(542): 411254mologous to Homo sapiens pp21 homolog,accession number AF125535,Smith-Waterman Score=128.
gccgcgtcgactttttttttttttttttttgcttcttttttataaaacttttcattcattctagcaataataatcgtgtgttaattttaggaatatagaaaatacaaacaagcaaaaaggagaaaaatcattcattaatcccaccaccgaagaggctgtaccttccttccacccttcacaagttatcgtccatatatggtaatatacaaatgtacctttttaccctttccaaaaaatatgatattcacatattacttagccctttttcccattttatatccttacccaagaacctcttttttacaaatgtgtaaaagttcttttattaaaacgacagaggacttgtaggattgggttcaaaatacaataaacaatggagattgcagataacaagagatacatctaaaaccattaattagcaacaggttataagtagaaatatgggccaaagggaatatccagggaaaggctaaataaaagggcaagcctatatgggtattggttaatatcaggataaaaatcaagggtaaactacattaaagtaggggtaaggatgggtttcggattaaccttccaacgcatcactaataagtttgtttctgactctccttatctcatctatttcatccacttgtctaaacgatatcttcaattgcttaaatgcctgttgtgtaaatcttcctttaaaactccctgggagagattggaatcaagccttttcttctaaaagttcctttttgctttggcctccctcctcctaagcttctcctcctcttcgtggctttttcctcaaggctttgggctcttccctcatgctttgggttaactcctcattttcctggttttccttcccattttttgacgaggatttcatcttgtatctgtctacctctcttccttccttcttttctttcttgcttattcttctttgaatacaattgacttctggcaactgatcggggtcagtttcttcctcctccttttctagctttgggtcttgctggaaacaacagccctgcagataaactgcaaaattcccgcaagtttgactccttccacgggcctcagggaccaaccgcctgcgctgctgaaggaagctggtatccagacgggaacaaggaccagattaccaggactt

SEQ ID NO: 3684 - DNA, 829 bp, Homo sapiens
catacataatggagtaatgtccaatagtttatagtttaatcttaatttgccactattagctagcagtgaaattgagctgctagtgccccccactcacccaatacagggaataacattcatcgaagctgtgaccccagtctttttttttcctcttttttgcttttccccttgcctgtttcccatctgctttttctccaaggtaaagctggactgatttcagtggatgagaatgcagtgataagcaaatctttaaatgttacccctaaatgggctccttaaaatagaatgtagcttgtaaagatataagttaactgccctgcaagttagtggccttctaactcctcccagtggtggtgtataaacccctgaaaattccaaatataatcctaaaagcagaaagactgacatttaggggaggggaaaggatggataaaaagaacaatactcaacctaccagcctccaaagagaagtcatgcaattgtgaatacatgtcaaccaactgttattaatattccagccaaatcacactgaaaataaaaaatctgggtaagagctgtagtgggaaagccacattagcccaccttttaatggtatatatatacacacacacacacacacacacacacacttcttattaaaggtctatttacaaatatgctaggtaaaagacaaacatttttccataatacacagtgctgcttaaagaactgcttcagacatctccagaatatttcagtataacatgcatgacattttaaacacaatattttatatcaatgagtcttcatatttagccattaaacttaaattccaacaaaaatatttttc

SEQ ID NO: 3685 - DNA, 378 bp, Homo sapiens
  misc_feature (1)...(378): n = a,t,c or g
nnnnnnnnnnnnnnnnnnnnnnnnnnnnnnnnnnnnnnnnnnnnnnnnnnnnnnnnnnnnnnnnnnnnnnnnnnnnnnnnnnnnnnnnnnnnnnnnnnnnnnnnnnnnnnnnnnnnnnnnnnnnnnnnnnnnnnnnnnnnnnnnnnnnnnnnnnnnnnnnnnnnnnnnnnnnnnnnnnnnnnnnnnnnnnnnnnnnnnnnnnnnnnnnnnnnnnngagagagacagacaaaactttagctagtctaaaaaaaagagtaaaaactcaaataaataaaattataaatgaaataagaggtgttacaactgataccacagaggtacaaagaataataagagatactctaaataatccagtcgggcggtcgacgggccgcgaa

SEQ ID NO: 3686 - DNA, 522 bp, Homo sapiens
  misc_feature (1)...(522): n = a,t,c or g
tgtcctctacctcccctgctatctgtcccacaggctgtgacgccaggccacggggtggaagctgaacattagggacaatgaagggacaagacggagcgtgggcacctgactccgtgccagcctccggggagctggtaccttagccttgggctgctcatacccatcctgggtgggaaatcagctgatactgtgtctaagccgctgatgttttgataggtcagagtcaacacatccagcatccatgctggcctccttttagtaaaccttcctgtgctccaaaggtcggacagccagcgctgcctcttccagaccccctggcggtgagggctctgcatgtgctcacgtgaaggtcacgggtgcgggtgaggcagaggctgaggctgtgtttggctgagtggccactgttgctggacaccgctgcgtggccacagaggggcatcactgtagggtcacaggtttctttctgcagaccgcacgcgtgggtcgagccgggaatgccggtccagtcatcggngctcgatg

SEQ ID NO: 3687 - DNA, 424 bp, Homo sapiens
cccacgcgttcggggacaggacagacatcaaggcttagactggtgacctcatctgtcaggggcgggcagctgcccgtaacggagctgtggtttgacacgagctgccagcccctaagcccgtgctcctccccagcttgtctgcccaaggtgtaggagaactggtgaggtggtggtggtgggcctgggtcacccattcttagttctctccttggtcatgggtctgctgctatggccactggaccagctcggcacaggtgggctccaggcctctgcttccctcagcgtctgtgtctccagtctccacatggcctctctgttgcctactccagggaggccttctggcctacaccatcttccatacccagaggctttgtgggccatttcccatcctccttcctattccctcacttcattcatccacctg

SEQ ID NO: 3688 - DNA, 753 bp, Homo sapiens
  SIMILAR (115)..(642): 421254mologous to Homo sapiens My030 protein,accession number AF061733,Smith-Waterman Score=248.
  misc_feature (1)...(753): n = a,t,c or g
ttcagggatcgcgattgcaagtcctccgctgaggtgatttggatatccctagaacgttgagggcacgagtcgggtcctgagaccaggtcctcagccagcagagccacgttccttatgagcaccgtgggtttatttcattttccccctaacccactgaccccgaattattcccgggcgcccatggggactcccggctttgggagaaagcctgaacgttgtttatccccagggaatagcttgtaactcgggtcccagattggcagggcaagaagggcctacccctgcactggctttccttggatgagaatgaactcgaagaggcagttttttgaaagggacacgggtccagggggccaggcaaccaacaaaaccagcaactgcgtggtgctgaagcacatcccctcaggccatcgttgtaaagtgccatcagacaagatcagttgatccagaacagaaagcttagctcgggnaaaatcctaccaagagaaagtagatgttttcttcaaatggtgaaaacagtccatgttcacaaagaaaaacgagaagcggagaatgaataatcgagataggaataatggagcaaaggaaaccctggaagaaaatatgctatttcatctgctgtgcgagtcatgccaaagggtctttgtgaggagaatgaagagagcgcctgtctactatggtcggactgtccctagtcctgacggtagtattgctcatggagaataccacgttttgctggaactgaacactgag

SEQ ID NO: 3689 - DNA, 460 bp, Homo sapiens
gaaaatgtacaatatatttctgagtgaaatagggaccgaacacaataccttggtggacagttcagtgatgttggtgaatgggattatggagggaaaatgtacaatatatttctgagtgaaatagggaccgaacacaataccttggtggacagttcagtgatgttggtgaatgggatagaatataattccaaagagaggcagtggctatgagcaaaactgctaaaacagcggcaattgcttgcattattctgtacatttctttttgagggtgcagaagtgggaaggaaggcagggttaggagtgattgaaaataaatgagagaggccgggcgcagtggctcaggcctatattgccagcaccttgggaggctgagtcgggaggatcttttgggcccaggagttcaagaacagcttggggaatatctggagaggcctcctcttaaaaaaaaaaaaaagaaaag

SEQ ID NO: 3690 - DNA, 1450 bp, Homo sapiens
  SIMILAR (966)..(1376): 971254mologous to Homo sapiens choline/ethanolaminephosphotransferase,accession number AF068302,Smith-Waterman Score=695.
ttttggcagggtgcactccttttattaaaaggccagaacacatcctggttcactgttgcaagaccactgggatgcattaggtgaatctaacttagcttgtgacacaagttaataaagttgaatctggtttttttgttttttttaaggttgatggctgaagtgagattaatttctaaatagtctcaactcttgagacttgctatattgcttataatgaagaggaaaaggacactttcattactttacgtatttatgtaattggagggaatggaaagtttttgggaatatgaatcaaatattagactgttttcttattttagtttgtatatgttttaattgttttctctctctacccattaaagattccagtgctgaatattcaaatgaaaatttttcctgcactttgtactgtagcagggaccatattttcctgtacaaattacttccgtgtaatcttcacaggtggtgttggcaaaaatggatcaacaatagcagtaagtataccttaagattttcaacacttgtttacactaggacttggttttgttgtcattttgttttttatttcaaatgtataaaatcatttgttaatttataatttatacttagcctttaaagaaactaatgttcaaaacttcaattttatatatacttacccacatttatatgctctatatattcatacttttatgcatacacacacacaaacacacttattcacatgttttctaaagtatgagctgctttgtaaaaataagcctggtctcttaagtgaaatcctcagtttgtgcctaatgaatttatgctgctacttttcattagctcttctagtttgtgatttatagaaattgctgcctatcaggcaccatgaggttcctgaaagtttgagttgaactgtgaactgttctgcagcagatccatgtagtatctgatgagtactgaatactattaactcttctcttcactctgtacagggaacaagtgtcctttctccttttctccatattggatcagtgattacattagctgcaatgatctacaagaaatctgcagttcagctttttgaaaagcatccctgtctttatatactgacatttggttttgtgtctgctaaaatcactaataagcttgtggttgcacacatgacgaaaagtgaaatgcatttgcatgacacagcattcataggtccggcacttttgtttctggaccagtattttaacagctttattgatgaatatattgtactttggattgccctggatttctctttctttgatttgatccgctactgtgtcagtgtttgcaatcagattgcatctcacctgcacatacatgtcttcagaatcaaggtctctacagctcattctaatcatcattaatgatgtaaattggtatataggaacatccatggttttcctgccaggaaagaaaggtaacatattaagggagt

SEQ ID NO: 3691 - DNA, 1828 bp, Homo sapiens
  SIMILAR (192)..(1226): 991254mologous to Homo sapiens bA112L6.1 (CCAAT/enhancer binding protein (C/EBP), beta),accession number AL161937,Smith- Waterman Score=1840.
  misc_feature (1)...(1828): n = a,t,c or g
ggcactaggactgggaaggggacccacccgagggtccagccaccagccccctcactaatagcggccaccccggcagcggcggcagcagcagcagcgacgcagcggcgacagctcagagcagggaggccgcgccacctgcgggccggccggagcgggcagccccaggccccctccccgggcaccccgcgttcatgcaacgcctggtggcctgggacccagcatgtctccccctgccgccgccgccgcctgcctttaaatccatggaagtggccaacttctactacgaggcggactgcttggctgctgcgtacggcggcaaggcggcccccgcggcgccccccgcggccagacccgggccgcgcccccccgccggcgagctgggcagcatcggcgaccacgagcgcgccatcgacttcagcccgtacctggagccgctgggcgcgccgcaggccccggcgcccgccacggccacggacaccttcgaggcggctccgcccgcgcccgcccccgcgcccgcctcctccgggcagcaccacgacttcctctccgacctcttctccgacgactacgggggcaagaactgcaagaagccggccgagtacggctacgtgagcctggggcgcctgggggctgccaagggcgcgctgcaccccggctgcttcgcgcccctgcacccaccgcccccgccgccgccgccgcccgccgagctcaaggcggagccgggcttcgagcccgcggactgcaagcggaaggaggaggccggggcgccgggcggcggcgcaggcatggcggcgggcttcccgtacgcgctgcgcgcttacctcggctaccaggcggtgccgagcggcagcagcgggagcctctccacgtcctcctcgtccagcccgcccggcacgccgagccccgctgacgccaaggcgcccccgaccgcctgctacgcgggggccgcgccggcgccctcgcaggtcaagagcaaggccaagaagaccgtggacaagcacagcgacgagtacaagatccggcgcgagcgcaacaacatcgccgtgcgcaagagccgcgacaaggccaagatgcgcaacctggagacgcagcacaaggtcctggagctcacggccgagaacgagcggctgcagaagaaggtggagcagctgtcgcgcgagctcagcaccctgcggaacttgttcaagcagctgcccgagcccctgttcgcctcctccggccactgctagcgcggcgccggcaaaactttggcactggggcacttggcagcgcggggagcccgtcggtaattttaatattttattatatatatatatctatattttgctccaaaccaacccgcacatgcagatggggctcccgcccgtggtgttatttaaagaagaaacgtcctatgtgtacagatgaatgaataaactctctgccttctcccctctgcccctctcccaggcgccggcgggcggggccggtattcgaagtttgatggcaattcggttttaaacatggtgtttgggaaaaaaaaaancggcgcggtgtgggtacacgggacttgacgcaacccaccgtgtaactgtcagccggggccctgagtaatccgcttaaagatgttcctacggggctttgtttgctgttgatgttttgttttgttttgttttgttttttggtctttttttttgtaattataaaaaataattctattttctattgaggaaaagaggccgtctgtatatttttggggaattcttttcccgtttcaagcattaagaacaccttttaataaacttttttttgagaatggttacaaagccttttgggggcagtaaaaaaa

SEQ ID NO: 3692 - DNA, 1831 bp, Homo sapiens
  SIMILAR (954)..(1124): 501254mologous to Homo sapiens PRO0113,accession number AF090894,Smith-Waterman Score=127.
  misc_feature (1)...(1831): n = a,t,c or g
gtttgtttcttttagtacaggaagatataaatgcaaatgtgcaaaaaaaggaagaaggaaagatggcncaagttcacctgtttggtacgtacagggtccacagctctgcagaaaggggagaaacctggtagacagagggcctgacgcaccatagcattgagcacattttccactgcttaattatgtgtgagattttcccttttaaaataaatctatggtctgtgaaatagtctgtataaaaatatgaagccttgaataggccagtcatagcagttccgtcttgaatagaactcaattttacaagcacggagtgagagtatcattccactgcaaactcttttatttccacaacatattagatctcattctgctttagtagagttacctcttaagtacgactattagtcatttcattaatatgaaaatctgggaaggcccacattaaaataccaacataattgctggctaccaagataaaattatttaggcagattccagccccaatggttcaatgataacaaaactacaaaacatgggacatcaaattcattaataaaattattaagtcacctcttccatcgaatgatgagatttttcttattcactgtttcccatcagggaaaaaagaatcctcccacctcatgcctttttttttttctgatgccaggaattagtattcattgcctctttaagaggccaatgcaaaaaaaggtagaaaaagccctagcccagagagttgggattgccagttgtagtccctgggttgccttgctggggggtgcctaagtcagtgccataacctcagtttttctaatctgtgtaacatggggatagagtatatgatttccaaggtcactttcacctctgtgattgagcctctaagaaagccaaatcttttcactttgtaatcatgacatttttaaaagatggagttaatatgaatgggaaacttttttttttttgagccagggacttgctatgttgcccaggctggtcttgaactcctgaactcaagtgatcctctcacctcagcctctcaaatagctgagactacaggcacacaccactgcacctggctaaagactatattcttaaagaataaaagtactgcacttcacctctatctcctggtatctcttcaattcaaacacaccattaatgactacaatattttatttaaggccgggcgcagtggtagttggctacaactggaacagtttatcacctcagggtatttgagggcaaggaagatacagaaaaaaaaaaaattaggggtatgcaacacagtttaagtgctcagaaataaattttaccacagtgagaacgaaaccacaatgacatgttactaacactgtgcagacgtcatggttgaatgcctgcgttctgttccttcctggtggcagccgccttggttcattagttctcatgtttgcagctccttcacatgccccggagcttcccaagtgtgccactcaaaggaaacagcaccagtgagtggaggccagcagacccacccggcccaaaacagagccttctcagttatgagacttttctacgagaagggacttcaaagtctaaacagaccagagagagttaaaaagatcctgctgcttcttagggaagttcaaaggtacattctgacacctaagtgggaaacaattctgttttaggaaaagtgccaactgcaatccgggtacaaaatttcaacaaaaagaaaagtaaaactgaatgatctccccctcattccctaattcatagaaaaatagtaggtgtgacttttgtttcaaagcaagctgaaaaatggttaaatggacaatttacaaacggtatt

SEQ ID NO: 3693 - DNA, 382 bp, Homo sapiens
  misc_feature (1)...(382): n = a,t,c or g
ggggtgtcccggcaggtctgcgtcatcacgacccagtaacgctgctggctgtgtcctcatgccctcttcctctggctggccagtcatctttgtcacttctacacctttgagtgtgtacaggctgaatgttgagtgatgcccccccaccctctcnnnnnnnnnnnnnnnnnnnnnnnnnnnnnnnnnnnnnnnnnnntgttattaggcacagcagctccatcctgctccctgagaatggcagtgcaggcacagagaagagcagttgggaagacaggcaggtggtctaccctgtccccgcacacttcacaggcactccactgcttggcaggaattctgcatggcatctgccacgcatgctcacagggtgaaaaatcaagctgtc

SEQ ID NO: 3694 - DNA, 646 bp, Homo sapiens
tgagagggtgggggggcatcactcaacattcagcctgtacatactcaaaggtgtagaagtgacaaagatgactcaaccaacaggacttcccatgactggccagccagaggaagagggcatgaggacacagccagcagcagttactgggtcgtgatgacgcagacctgccgggacacccccgtgggctcgaggcattggatgggcctgagagctgaagcaggggcacttgcaggaatggcacttgaagccacctgcctggctttacagggcagcctcctggaagcctccatgaaacgcagctttccctgggccacacactgcctggctccacaaaggcgaacaacacagcctgctttgccccggatattcctggttttggcattaaatgtccacagcctgagaaatccttcagtctcgggcaaatgggacgtttggtgaccctaccaccatgtatctttgattttagactcccctgaccaatgggagggctgcaagcactggctgggcctggcggaggtggtctttggtcatctctgtggtggctgaagtcccattagcctggcagggccccctctccttaccaccagaaatggatcctttcccaaggctgcttccctcccttccttcccttggaaaacatacgaaa

SEQ ID NO: 3695 - DNA, 1982 bp, Homo sapiens
  SIMILAR (1957)..(1745): 981254mologous to Homo sapiens PRO0845,accession number AF130048,Smith-Waterman Score=399.
caggattataaaaaaactaaacctattttacgagcaaccaaattaaaagcagaagcaaagaaaacagcaataggcataaagactcaccacggatgttgaccctgatctggaccaagatgaagattagctaagcaacaatcaatgcatgaaagagaaataactttacgaaagcaccttttgggaccaaaactttcaatactgaaactggaacatctttaattctttctgctaatattttcagattgcagacatatgatttttgatagttgcataggatgtcaggaaaagaaccttacctagcaatgcagtatagtatgtgctactggatacttttatatatctttctgctttgacagccaccctatacatggtacatttagatgaaatgggaaccaggatcctaaatttttcaaatgtcattgccgaatttatgtgtataattcccatcacttcctgatgagtaagtcctatttttggttcctatatacatccataagttagtatatattccttatttacagaaacatgcctcaaatcacattcagaaagaacaaaaagtcatgggaaattttttattttacaacaaagccctgctttctttctggacgtattttacatcattagagagactatctgcacatacatctaccataatctttttccttctttgccaactgttcagtgcacatgtgctgcatcagaaatggcacctggatgacagaagctcaaagagtcacatatgtctctaaaatagagttcttttcctcttgggctgtctgaactggtgtaaatagaagctcagttgatcttggttttaattaacttattactctattaatataaccttggaattctattctaattatgttgttctggctgcttgtagtatcagttcgcccctcttgttagggagatatgtaacaatctgtcatttaattgagcagtctttttcacataacagtaatagcaaaaatcctacctactcagaatcatcttcttaggttgtctcctaaatctgaaccaatccagtggttttataaaattacattttgtctcttgagatttaatcgaattagaactctttagggagaaaataaataatagaagaaaatatatgcctcatatttcatatgtaattatctgttgatataatttttcaatgtattttgtatttgtggggagccataatgacctggtacatttcaatatttttactgggtaattccaattttttaaatatggtttttacatggctggaacacataaaccttagaaaactggaaaatacgtgtccacagaaagagttattagctactaccttatgtaaagatgcatagaaaatgaaattgttgggaaacatgtgcacaaagtgttttatattatatacattgtatttatggaaggaataaataaaatattaaggattgttttcctgctagccaagagaagaaatccttgggaaatatctaaggagtatatggggctttataagcactgtttctaaaagatattctctggtacttttgcaaaaagtcgactgtgactgtgtagcattatgttctgtagaatttttttcaagtagcataatttatttcattggtgtgaaaacagccaaaggttccaatatcctcacaaatcatttatgccaaacatctgaaggcaaaatttagccggtgttatttactagattctcccctttgaactcacagactcaagagacagaccaagagttcttatatactcaccacagcggaccaatccaagtggcatttttaggaaagggtgcagcatttaatgccatgtggtatgtctgttcgtcaagtgggtggcaagggaatatccaagctggcattttggatatgatgggccttttactttcctgagtgacatgccacatgtcaagaaatactgctccccacccccccactcccatcacatttacgtgaacaattttcatttagttatttcccgttccatatggg

SEQ ID NO: 3696 - DNA, 393 bp, Homo sapiens
  SIMILAR (389)..(3): 981254mologous to Homo sapiens putative ankyrin-repeat containing protein,accession number AJ278120,Smith-Waterman Score= 649.
ggtggctgctgtggctgctgcatctgtctacactcttcttccactctcagcagaagtctctggatctcacggttgttgggacacagcttgatggcctcgttcaggtcctctaaggctgctgcgaactgtctgctgctgcgttttgcccttgctctcgcatagtaagcttcataagatttcggtttcagctccagggccttagtagcaaattcctccgccattccaaaatcgttcattttcctgcgacaccgagagaggttgaggaggagagacacctttagttcccggaaagttttcaagtcctcaccaaacccttctctagggaacttcttcagggcgtactggtagcgctgggcagcttcctttactttacctttcttataaaacacgaaa

SEQ ID NO: 3697 - DNA, 499 bp, Homo sapiens
  SIMILAR (6)..(179): 511254mologous to Mus musculus putative,accession number AK008963,Smith-Waterman Score=137.
cagctgaagacaaaaaagtggcaccaaaagagcttgtggaagagacagacaggcccagcccagagcccagcaatgaagctgccaagccaagaaatacagagaaggacagtaatgctgagaacatgaattctcaaccatgagaaaacagttactactcccacagaaaaaaaggagagtgtatctcctgagaataacgaagaaggtggaaatgataccccaagacaatgaaaatcctggaaatacaaattgccatgatgttgtactagtacagtgaattatcagaaaacccagaagccagtttaggctagagaggaaaaaactacgtgtatcatttatcctaaagaacagagatgaggtcaatttcaaattttagccatctgtttgtgatttctgtcataagcattttgttgtttgttttttttattttggatgacaatgaattgaatatctaataaggagatttaagataagacccaataaatgaatgtattctgtaaaa

SEQ ID NO: 3698 - DNA, 1617 bp, Homo sapiens
  SIMILAR (487)..(1383): 811254mologous to Homo sapiens putative ankyrin-repeat containing protein,accession number AJ278120,Smith-Waterman Score= 1212.
atgtccctgcacggcaaacggaaggagatctacaagtatgaagcgccctggacagtctacgcgatgaactggagtaaaggtaaagtaaaggaagctgcccagcgctaccagtacgccctgaagaagttccctagagaagggtttggtgaggacttgaaaactttccgggaactaaaggtgtctctcctcctcaacctctctcggtgtcgcaggaaaatgaacaataactccagttcctgtgttcacattttgtcaagcagacagttcgcagcagccttagaggacctgaacgaggccatcaagctgtgtcccaacaaccgtgagatccagagacttctgctgagagtggaagaagagtgtagacagatgcagcagccacagcagccaccgccgccaccgcagcctcagcagcagttgccggaagaagcagaacctgagccacagcatgaagacatatactctgtacaggatatattcgaggaggacccccctcctgtgggaggacagggcaaagaatacccaagccctcccccttcccctctccggagaggccctcagtatcgggccagccctccagctgaaagtatgagtgtctatagatcccagtctggttcacccgtgcgctatcagcaggaaacaagccggccctaccagatgcctcagctccctgtggcagttccccagcaagggctcaggctacagcctgccaaggcccagattgtgagaagtaaccagcccagcccagccgtccattcaagcaccgtcatccccacaggagcctatggccaagtagcccattcaatggccagtaaataccagtcttcacaaggagacataggagtcagccagagccggttggtttatcaagggtcaattgggggaatcgtaggggatggaaggccggtgcagcatgtccaagccagcctgagtgcaggcgccatctgtcagcatggaggattgaccaaagaggatcttccacagcgaccttcctcagcataccgaggtggcgtgagatacagccagacaccacagatcggacgcagccagtcagcatcctattacccagtctgtcactcaaaactagatctggagcgctcctccagccaactaggttcccctgatgtgtcgcatttaatcagaagacctatcagtgtcaaccctaacgaaatcaaaccgcacccgccaactcccaggccgttgctgcattcccaaagtgtaggccttcgcttctctccatctagcaatagtatctcctccacctccaacctaactccgaccttccggccatcttcttccatccagcaaatggagatcccactgaaacctgcatatgagagcaacattgccttttataacaaaaccaacaatgcacagaatggccatttgctggaggacgattattacagcccccatgggatgctggctaacgggtctcgtggagacctcttggagcgagtcagccaggcctcctcctatcccgacgtgaaggtagctcggactctacctgtggctcaggcataccaggacaacctgtacaggcagctgtcccgagactctcggcaagggcagacatcccctatcaaaccaaagagaccgttcgtggagtctaatgtttaa

SEQ ID NO: 3699 - DNA, 410 bp, Homo sapiens
  SIMILAR (178)..(408): 1001254mologous to Homo sapiens putative ankyrin-repeat containing protein,accession number AJ278120,Smith-Waterman Score= 407.
aaaggtaaagtaaaggaagctgcccagcgctaccagtacgccctgaagaagttccctagagaagggtttggtgaggacttgaaaactttccgggaactaaaggtgtctctcctcctcaacctctctcggtgtcgcaggaaaatgaacaataactccagttcctgtgttcacattttgtcaagcagacagttcgcagcagccttagaggacctgaacgaggccatcaagctgtgtcccaacaaccgtgagatccagagacttctgctgagagtggaagaagagtgtagacagatgcagcagccacagcagccaccgccgccaccgcagcctcagcagcagttgccggaagaagcagaacctgagccacagcatgaagacatatactctgtacaggatatattcgaggagga

SEQ ID NO: 3700 - DNA, 975 bp, Homo sapiens
  SIMILAR (1)..(741): 941254mologous to Homo sapiens putative ankyrin-repeat containing protein,accession number AJ278120,Smith-Waterman Score= 1196.
cggccctaccagatgcctcagctccctgtggcagttccccagcaagggctcaggctacagcctgccaaggcccagattgtgagaagtaaccagcccagcccagccgtccattcaagcaccgtcatccccacaggagcctatggccaagtagcccattcaatggccagtaaataccagtcttcacaaggagacataggagtcagccagagccggttggtttatcaagggtcaattgggggaatcgtaggggatggaaggccggtgcagcatgtccaagccagcctgagtgcaggcgccatctgtcagcatggaggattgaccaaagaggatcttccacagcgaccttcctcagcataccgaggtggcgtgagatacagccagacaccacagatcggacgcagccagtcagcatcctattacccagtctgtcactcaaaactagatctggagcgctcctccagccaactaggttcccctgatgtgtcgcatttaatcagaagacctatcagtgtcaaccctaacgaaatcaaaccgcacccgccaactcccaggccgttgctgcattcccaaagtgtaggccttcgcttctctccatctagcaatagtatctcctccacctccaacctaactccgaccttccggccatcttcttccatccagcaaatggagatcccactgaaacctgcatatgagagcaacattgccttttataacaaaaccaacaatgcacagaatggccatttgctggaggacgattattacagcccccatgggatgctggctaacgggtctcgtggagacctcttggagcgagtcagccaggcctcctcctatcccgacgtgaaggtagctcggactctacctgtggctcaggcataccaggacaacctgtacaggcagctgtcccgagactctcggcaagggcagacatcccctatcaaaccaaagagaccgttcgtggagtctaatgtttaa

SEQ ID NO: 3701 - DNA, 444 bp, Homo sapiens
  SIMILAR (254)..(382): 971254mologous to Homo sapiens putative ankyrin-repeat containing protein,accession number AJ278120,Smith-Waterman Score= 208.
ttttttttttttaaaggtagaattttacaatagatttattattattgtctccaaatattgtgaggcaatttaaatgtgtctttattcattatttttctttagaacttttctttatggaaaaggtggcaaaaatcattattcttagaagtaaagtagcaattacattaatgaaacacaaggatatgtcacgtttaacatggagcgctggagaggaccagaaccacctatcctcaatctttgttctctgcccttagccctaacagctgcagccggaagtggcaaactggaggtgtgccgtttgctcttggaacaaggggcggcagtggcccagccaaaccgccgaggagcagtgccactattcagcacagtgcgccagggccactgtgcaggtaagcagggcgaccacttccagtccctcaggcaggactgagttctaggtgagga

SEQ ID NO: 3702 - DNA, 7947 bp, Homo sapiens
  SIMILAR (1100)..(4414): 971254mologous to Homo sapiens putative ankyrin-repeat containing protein,accession number AJ278120,Smith-Waterman Score= 5547.
agatgaagattttatcattttaattgatggattaaatgaagcagaatttctcaaaccggattatggggatacaattgtattgtttctgagtaaaatgatgggaaagtttccttcttggctcaaaataattgtaacagttaggaccagtttacaggaaattaccaagctgctgcctttccataggatttttttggatcgactagaagagaatgaagccatagaccaggacctgcaggcttacatcctgcaccggatacacagcagctcagagatccagaataacatttcacttaatggcaaaatggacaatactacatttggcaaactcagttctcatctcaagaccctcagtcaagggtcctatctatatctgaaacttacatttgacctcatagagaaaggctatctagtgttaaagagctctagctacaaagtagttcctgtttcgctctcagaggtttatttactccagtgcaatatgaagttcccaacccagtcttcctttgaccgggtgatgcctctcctgaatgtggcagtggcctctctccacccactgactgatgagcatatcttccaggccatcaatgctgggagcattgaaggcacactagaatgggaggattttcagcagagaatggagaacctctccatgttcctaatcaagcgcagagacatgactcgtatgtttgtacatccttcttttcgagaatggcttatctggagagaagaaggagagaaaaccaaatttctctgtgatccgaggagtggtcacacgttacttgccttctggttttcccgccaagagggaaaactaaaccgacagcagactattgaactgggacatcacatcctcaaagcacacatttttaagggtttgagtaaaaaagttggtgtatcatcctccatcctccaaggtctctggatctcttatagcacagaaggtctttccatggcactggcgtctttacgaaatctctacactccaaatataaaggtcagccgactgctgattttgggaggtgccaatattaattaccggacagaggttttaaataatgctccaattctatgtgttcagtcccatcttggttacacagaaatggtagccctgctgctggagttcggggccaacgtggatgcctcttctgaaagtggcctgactcccctgggatatgctgcagcagcagggtacctgagcattgtggtgctgctgtgcaagaaacgggccaaggtggatcatttggataagaacgggcagtgtgctttggttcatgctgcactccgaggtcatctggaggttgtcaagtttttgattcagtgtgactggacgatggccggccagcagcaaggagtatttaagaagagccatgccatccaacaggccctcattgctgcagccagcatgggttatactgagattgtctcctacctacttgatcttccagaaaaagatgaagaggaagtagagcgagcacagatcaacagctttgacagtctctggggagagacagccctaacagctgcagccggaaggggcaaactggaggtgtgccgtttgctcttggaacaaggggcggcagtggcccagccaaaccgccgaggagcagtgccactattcagcacagtgcgccagggccactggcagattgttgatcttttactcacccatggagctgatgtcaacatggcagacaagcagggccgcactcccctgatgatggctgcttccgaaggccatctaggaaccgtggactttctgcttgcacaaggtgcctccattgctcttatggacaaagaaggattgacagccctcagctgggcttgtttgaagggccatctctcagtagtacgttctctggtggataacggagctgccacagaccatgctgacaagaatggccgtaccccactggatctggcagctttctatggcgatgctgaggtggtccagttcctggtagatcatggggccatgatcgagcacgttgactacagtggaatgcgccctttggatagggcagtggggtgccggaacacttctgttgttgtcactcttctgaagaaaggagccaagataggtccagccacatgggcgatggccacctccaagccagacatcatgatcatcctgttgagcaagctgatggaagagggggacatgttttataagaaaggtaaagtaaaggaagctgcccagcgctaccagtacgccctgaagaagttccctagagaagggtttggtgaggacttgaaaactttccgggaactaaaggtgtctctcctcctcaacctctctcggtgtcgcaggaaaatgaacggggaatctcagaactccccctggacctttatcgtctccctggattttggaatggcggaggaatttgctactaaggccctggagctgaaaccgaaatcttatgaagcttactatgcgagagcaagggcaaaacgcagcagcagacagttcgcagcagccttagaggacctgaacgaggccatcaagctgtgtcccaacaaccgtgagatccagagacttctgctgagagtggaagaagagtgtagacagatgcagcagccacagcagccaccgccgccaccgcagcctcagcagcagttgccggaagaagcagaacctgagccacagcatgaagacatatactctgtacaggatatattcgaggaggagtacctggaacaggatgttgaaaatgtttccattggcctccagacagaggcccggcccagccaggggctcccggtcatccagagcccaccctcctctcccccgcatcgggactcagcctacatctccagctcacctcttggctctcatcaggtttttgacttccggtccagtagttctgtaggctctcccactagacagacctatcagtccacctcacctgccctttctccaactcatcagaactcacattacaggcctagcccaccacacacttccccggctcatcagggaggatcttaccgtttcagcccccctcctgtgggaggacagggcaaagaatacccaagccctcccccttcccctctccggagaggccctcagtatcgggccagccctccagctgaaagtatgagtgtctatagatcccagtctggttcacccgtgcgctatcagcaggaaacaagcgtcagtcagcttcctggcagacccaaatctccattatccaaaatggcccagcggccctaccagatgcctcagctccctgtggcagttccccagcaagggctcaggctacagcctgccaaggcccagattgtgagaagtaaccagcccagcccagccgtccattcaagcaccgtcatccccacaggagcctatggccaagtagcccattcaatggccagtaaataccagtcttcacaaggagacataggagtcagccagagccggttggtttatcaagggtcaattgggggaatcgtaggggatggaaggccggtgcagcatgtccaagccagcctgagtgcaggcgccatctgtcagcatggaggattgaccaaagaggatcttccacagcgaccttcctcagcataccgaggtggcgtgagatacagccagacaccacagatcggacgcagccagtcagcatcctattacccagtctgtcactcaaaactagatctggagcgctcctccagccaactaggttcccctgatgtgtcgcatttaatcagaagacctatcagtgtcaaccctaacgaaatcaaaccgcacccgccaactcccaggccgttgctgcattcccaaagtgtaggccttcgcttctctccatctagcaatagtatctcctccacctccaacctaactccgaccttccggccatcttcttccatccagcaaatggagatcccactgaaacctgcatatgagaggtcatgtgacgagctgtcgccagtgtctccaactcaaggaggttaccccagtgagcccacccgatccaggaccacaccattcatggggatcatagataaaacagcacggactcagcagtacccccacctccaccagcagaatcggacctgggcagtgtcatctgtggacaccgtcctcagtcccacgtctccaggcaacctgcctcagcctgagtccttcagtccaccatcatccatcagcaacattgccttttataacaaaaccaacaatgcacagaatggccatttgctggaggacgattattacagcccccatgggatgctggctaacgggtctcgtggagacctcttggagcgagtcagccaggcctcctcctatcccgacgtgaaggtagctcggactctacctgtggctcaggcataccaggacaacctgtacaggcagctgtcccgagactctcggcaagggcagacatcccctatcaaaccaaagagaccgttcgtggagtctaatgtttaaaagacgttttgttggagtgagacccatatgttttcactgcacattttcaggcttggtttccacattcgaggtagttctctggcttaatttctcatgtagtttctgtgtggtgttcagaggtggcagcccacatgctgaaatcctttgcatgcagccgactgggaagcggcctcccgggagccaggacttcagtttctcttgtctgtgcccagccacatgctctctccctctcttcagatgccaacgaggagattttcgtgctgtgtgctttaacccagggagatcagacacactggtcagctttttccaggagacaatcgctttcactgatgttcttgttgtgtaattgtctttttccttttttaaaaaataaggtgttcttgttcgttttcttctagaaactttagaaagagtgcgatgcccctttgcctttgcatccttagccagtgtcacccacacagccagccgcagcgcattctcatgctgtggcccctccccagaccgccagcgccctgcagccaccaggtctgcagtgtgcattaggattattgctggtcttcctagggggtaaaaggatcagagagagaagaattaagtgctaaattggaagaaaaccccaatatagttatgtaaaatgtcactacattgattttccaagaggcattgtaggaacatgtcaaaaacagccagccctttaaatattgcagtcagccaaggaaattagatgagaattgtggctattaagagaattcactgagagttattctctagatttttagccgacaattaaccactaaaagctactgcttttccagggtgggggagggaatgaatacatagaaaaacaaaaaagattgttctggattctcagtgaaaggctataggaagtctgttctggagacatctactttttagatcctgatacatcactgagtgtcatactccactaaaaggaaactctaaccgaaggctggctggtgtgacaatcccgttagttggatcttcacctacagccagattttgctctagtggccctcttcctgtaaacccagatggcgtcatacagaaattgtttctttcagaagcagattggaatctcttgggaccatgagactgagtcccaatatttccacccagggtcatgcccgttgttgtctacttccattttgagatctatagtttgattatctattattacaggaactgtttcttttctttttctaggagtgtttatgagagtgtgatattttaaagtcagacgcagcaaaaactgtttcagggtgaagaaagacccctttcagccctgttttgcagccctgggtgggggcatgagatagacagcaagcttctgatcttgaagcttgtctagaagacacatcttctaggtctcgtggtcatttggtaggctgacctttgagtgagcgaggccactattgagtggatagcaagaacattggaaccagagcctcggcacaggcctggcactggctgtacatcagctcttacaactaaacaactcaactaagcaactgaaacgaaacaaaggagcattcgttctctgttgttaggaatcattctgctctgttagggaagggctgcaggaagggcagtttcctgaataaaaatctggctgcgaccagtcccatgtgtctggtaagtaagtaagtaagtaagtgccctttgaagggatcattaagacacagggagcatgaacctgagatcagaagcatttctttactaatttagattctgcgaaatagacggacctctccacccccaaacctaaaacaggccaggacttgtctctgtgctgaaagcaaatagcaagactaactcaagccccagcctctttccacactccctgatacctaaggactgctttctcagctagaccagggtgggcatcagcgacgccttctcagctagaccagggtaggcatcagcgtcctctctccatctctatacccctctctctcacatcaggaagatgaaatgtgtagctctagcggcaacctctagccaggagcccagtggcctctcagattgctttttggccaggtctcagcactgctggcatctttacatcttactccttaaaaccgcctctcgctgaggagccactgcattttgaagaatttctcagtgtctgtcaggaaagtactcctgctcatttggaacgccacacaccacccgcactcacctgtccaggcgaatgagcaggtcctgtagctttacaaatatgccgctgatgccgcttctccccagggtctctcagttttccaggacaaaaagatttagggcctataccctatgggcaaaacacctaaaatgtcaacagtcaaaatgccattctttttggccatcataagagggagtaggtatcactgctgcatgccagttgtttttgactagaatatgccaaccagagcttgttggggcaggagacgtttttccttacaagcagactgcctgtgccctgtgccctgtttgctacttcactgccatggaatgatccgagtactgtatctcagagctgccccttccccagcagcaaacactcgctgagtccacgtctggcttcaggtgggaggaaatgtttcagatgaaacttactcaattcataccaccctgaaatggaggacagaggtgacaaacttcagtttaataggtttctcaccaagttgtatgttccattggcccaggattcttgcactaatgggtttctatcacattatgtctataaatgggtgcactttactgtttgaatttgtaactgaagtactggatatttaagtgtgagtaatgtcttcattagaaaatagcagaaccgctcttgtcttttagtgtatttttcaagaaaaaaggaaaggaaagacatcaagcagtggatcacaacatttatagcacaagaaataacttgtatataagcatcaaaaagattaagaattttttaatatgaaaaatatttgcagggattttaaagtgcttttccagcaatgttcttagggactcctgagacacggttactttatctactggatcagtaaggcacacaattaacaattaacaattaatgtttatttacaaagtaaagggaaaacctgtgtaacatgagaatttggcatgacaaaatggagaccattttgtatctgctgttgtatcttgtccgggttgcagacgtgcactattaaagtcccaagttaatagagcacaaacccttctcgctcctcccccatgtgcccctctttttagatgtgtataacttaaactcgatggctcaggaaaattccactaattagaatcatgtacagtaccccaggtcgttgtccagatatacaagtttgctaatgtagttaagcctggattattaaacacttttcctaaattattgtaaacagaacagcttagagaaaggtattctcagtccttaatattgtatagtagtttatgagcccctctctaaatattggtatttttatattccagagatgtacccaatagaaaaaattaaaaattaatcagtatctaat

SEQ ID NO: 3703 - DNA, 639 bp, Homo sapiens
catcttgtttttaaaagaagtagcctcaaattaaactccttaaactctgatgccctggggatgagaacaactagcttggatctcgtgccgtgtaattcaatgtttcattccgctgcctccatcatgtaatagaatcgctttccagaaaggcagttaactggaagcagcagaggctcccagccgtgagaggactgctcaacaatgccccccatcgccgcccccccacccctcgcacccccttgtgttttcccctcctgaggggcccccaagggttaatggctttccatgtcctaggtgtgggggacagaggaagggagaggcagatcctggggccgggagaggatggcctgggtcttgaatctgggagtaattaatgcccaccccaaagaaaaaggccctgcccaggtcccaatgttgtccttagatctgatgatgctgctatttacaaaacactgatcgtccgaaagcttgaatctgttcctcctcgaatgaccctgtagatgcctgacctccaccgtacctccacatcactattcatgtccttctaggaaaatgtgcacatgcctcacgcactatgtgggaagggtgtgtttttaaattaataaagtgtgtcaccattagccatacgaaaaaaaaaaa

SEQ ID NO: 3704 - DNA, 431 bp, Homo sapiens
  SIMILAR (360)..(1): 851254mologous to Homo sapiens unnamed protein product,accession number AK001898,Smith-Waterman Score=529.
  misc_feature (1)...(431): n = a,t,c or g
ngtttccagggaggcgaaggtgagcaggccgaccccaagagacatgaaccagtctgcgtaatagtgataacacaccagcaaggccccgatggcaaagcacaggaggacgaaatggaaaaactcatcatctttctttatattcagtcttcttaactgagaggcctccacttctccacttgctgggtcagagcctctccttcggagtcctgattccccagagggtaccacctctccaggagcatctccatagagttgaagctcatccttcaaaacgtcaggctccccatgcccaggacagtctacatcttctgtttctctgtggacttgactgttgtcctgaggctgggaggaggatgctgaagtctccatggcttttcctgtggtccttcagcttgtctgggcagcaaggggagctctgtgtagactatgtg

SEQ ID NO: 3705 - DNA, 458 bp, Homo sapiens
  SIMILAR (455)..(141): 771254mologous to Homo sapiens unnamed protein product,accession number AK001898,Smith-Waterman Score=412.
gaaggaaaagtgttctgtttattggtctggcttggtctcctgtgcgtctctcagaatgctgctctgcccttgtgggctcaggggtcgcagtggtggtcacactggggcctgcctctgctgcccacctggaagtggcctcagtcagtcttcctgaaccctgtcagcctaaacttctggaagagggggatgaagccttggaggacgctgtggatacggtacactagtccgaagtagatgccaacggtttccagggaggcgaaggtgagcaggccgaccccaagagacatgaaccagtctgcgtaatagtggtaacacaccagcaaggccccgatggcaaagcacaggaggacgaaatggaaaaactcatctccatagagttgaagctcatccttcaaaacgtcaggctccccatgcccaggacctgaggaggaggaggatgaagaagatgaggaggatga

SEQ ID NO: 3706 - DNA, 542 bp, Homo sapiens
  SIMILAR (386)..(177): 981254mologous to Homo sapiens unnamed protein product,accession number AK001898,Smith-Waterman Score=336.
tccccagagggtaccacctctccaggagcatctccatagagttgaagctcatccttcaaaacgtcaggctccccatgcccaggaccgggtgagccgttcccgtgggggtatccagcccccaggctccgtcgatgttttccggttgctctgggttgctggtcctcatcattgctctctgaggaggaggaggatgaagaagatgaggaggatgaggaggaagaggaggaggaggaagaagacttgtttctctcatattgttcttgggaaaagagtccagccttcccatcttgcttgtggaaatctgtctctccatagtctacatcttctgtttctctgtggacttgactgttgtcctgaggctgggaggaggatgctgaagtctccatggcttttctcttagtttagctgcattaccacattggaaagagcaatggaaaggagtccgacacatgaaacaactgtttcctgtgtatctgagttcctgtggtccttcagcttgtctgggcagcaaggggagctctgtgtagactatgtggatgctg

SEQ ID NO: 3707 - DNA, 448 bp, Homo sapiens
  SIMILAR (127)..(2): 801254mologous to Homo sapiens unnamed protein product,accession number AK001898,Smith-Waterman Score=155.
  misc_feature (1)...(448): n = a,t,c or g
ctccacttgctgggtcagagcctctccttcggagtcctgaattnccccagaagggtaccacctcctcccaggagcatctcccatagagttgaagctcatccttcaaaacgtcaggctccccatgccccaggacctgaggaggaggaggatgaagaagatgaggaggatgaggaggaagaggaggaggaggaagaagacttgtttctctcatattgttcttgggaaaagagtccagccttcccatcttgcttgtggaaatctgtctctccatagtctacatcttctgtttctctgtggacttgactgttgtcctgaggctgggaggaggatgctgaagtctccatggcttttctcttagtttagctgcattaccacattggaaagagcaatggaaaggagtccgacacgtgaaacaactgtttcctgtgtatttgagttcctgacgaaa

SEQ ID NO: 3708 - DNA, 2155 bp, Homo sapiens
  SIMILAR (388)..(1113): 661254mologous to Mus musculus putative,accession number AK008963,Smith-Waterman Score=776.
atgaagaagaagaagatgaaggaggaggaggagaaagagaagaaagaggaggaagaagaggaggaggaagaagaaagaagaaaggaggaagatgatttctgtaacaggacaagtccggccggcggcagcgagggcccggggcaggagtcggagcagcccgcgcagcccccggagcaagccggcgggcggcccggcgccagccccgcgccggacgaggacgccgaggcggcgggcgccgagcagggtggtgattccactgaagcaactgccaaaccaaagagaagtttttatgctgccagggatttgtacaagtaccgacaccagtacccatggaaactgagccagttccacagcagtgtgagtcacagaaggaaggagatagactgcaaggctttcaagtggcaggaccttgcattctttggtgaactaactcgaggcaagaggtcccagcacaactatttaagaatcactcgtattcttaaaagccttggtgagcttggatatgaaagttttaaatctcctcttgtaaaatttattcttcatgaagctcttgtggagaatactattcccaatattaagcagagtgctctagagtattttgtttatacaattagagacagaagagaaaggagaaagctcctgcggttcgcccagaaacactacacgccttcagagaactttatctggggaccgcctcgaaaagaacagtcggagggaagcaaagcccagaaaatgtcttcccctctcgcctccagtcataacagtcaaacttctatgcacaaaaaagccaaggactccaaaaattcctcctcagctgttcatttaaatagcaaaacagctgaagacaaaaaagtggcaccaaaagagcctgtggaagagacagacaggcccagcccagagcccagcaatgaagctgccaagccaagaaatacagagaaggacagtaatgctgagaacatgaattctcaacctgagaaaacagttactactcccacagaaaaaaaggagagtgtatctcctgagaataacgaagaaggtggaaatgataaccaagacaatgaaaatcctggaaatacaaattgccatgatgttgtactaccccgcagccccgcgcccgccgccgcctcttcaatgggcaacctgctcggcggggtcagcttccgcgagcccaccaccgtggaggactgcgactccacctggcagaccgactcggagcccgagcccgaagaaccagggccgggcggcggcagcgagggcccggggcaggagtccgagcagcccgcgcagcccccggagcaagccggcgggcggcccggcgccagccccgcgccggacgaggacgccgaggcggcgggcgccgagcagggtggtgattccactgaagcaactgccaaaccaaagagaagtttttatgctgccagggatttgtacaagtaccgacaccagtacccacagaacttcaaagatatccgatatcaaaatgacttgagcaatcttcgtttttataagaataaaattccattcaagccagatggtgtttacattgaagaagttctaagtaaatggaaaggagattatgaaaaactggagcacaaccacacttacattctatggctggttgcccctgacagaacaaggcttgaacttctatgccaaagaactaactacatatgaaattgatgaatcctcaaaaacaaaagaagcaattataagattccctccctgggcttataaaaatgatgctagaattttttggaataaaactgactgataaaactgggaatgtttgctcggggtgtttactggcaggaaagttttcagcatctgaatgagtcccagcacaactatttaagaatcactcgtattcttaaaagccttggtgagcttgggatatgaaagttttaaatctcctcttgtaaaatttattcttcatgaagctcttgtgggaggaatactattcccaatattaaggcagagtgctctaggagtattttgtttatacaattaggaggacaggaaggaggaaagggaggaaagctcctgcggtttcgccccaggaaacactacacggcctttcaggggaactttatctggggggacccgccttcggaaaaggaacagttcggagggggaggccaaaggccccgggaaatgt

SEQ ID NO: 3709 - DNA, 1818 bp, Homo sapiens
  SIMILAR (484)..(1044): 991254mologous to Escherichia coli No definition line found,accession number U00039,Smith-Waterman Score=983.
atgacgctggtcgcctatgaacgctattttaacgccgaagacgactacacccgcgaaagcgcgctacaggaacatatcgcgtcggtgcgtaaccatatccgtttgctgggacgcaaagattatcaacaagagtcagcagcctacctcgatcgagtatcggctcatatcagagatccccgttacccgtgggaactccgacttatgatctcggcacctggcagcggcaatgacaccgtcatattgaagctcacatgggcgttcacagtctctgtcgggacagcccttacctggaattggaacgctcagtgtgccaacttccaattgagcggatatattccgcgacatgggccctgtaataaccatttcccgggagaaccggaggactgggccatcttcacttccccacaaaaaggacacaccgggcgggaaaaaagggggataaaaattatgcggggaatatcaaaggtcgcccaaagatgtcctgtgtttaaaagtgatgctgcccggactcgacaaagattatcggcgcgtaagggcagaactttaccgcctggccggggtaaatttcctcactccacaacggaatctttcaggaatacgttctggctcaaaaaaataatggaacactgttttaatatggttgaccagcaaaccaccacagcgcaaactaacgctaattttttacagatcaggttcacgactatgtccaaaaagattgccgtgattggcgaatgcatgattgagctttccgagaaaggcgcggacgttaagcgcggtttcggcggcgataccctgaacacttccgtctatatcgcccgtcaggtcgatcctgcggcattaaccgttcattacgtaacggcgctgggaacggacagttttagccagcagatgctggacgcctggcacggcgagaacgttgatacttccctgacccaacggatggaaaaccgtctgccgggcctttactacattgaaaccgacagcaccggcgagcgtacgttctactactggcggaacgaagccgccgccaaattctggctggagatgtcgatcacattgcgacgcgacacaaggagcgggggctcatccagcgaagggatcatccagttctttttcgaagaaacgcaagacgagaatggctttaatatctacattctcgacgaaagcaaccgggttgaggtatatcaccactgcgaaggcagcaaagaggagctggtacgtgacgtcagtcgcttctactcgtcatcgcatgaccgctttacctacggctcaagcttcatcaacttcaacctgccgcagttctatcagattgtgaaggttgatggtcgtgaacagcaaatcccagaaggtttcgccgctgcgatcacaaatccactcatcgcctttcaggtcaaaatggtagccgccctgtttggttgccagccatacctggtgcagcggctcctggcggttgataatgattttgctgccattctcaaaggtaatggtcagtacgccgccgttgatttcgcagtcgatatcgctgtcgccatcccagtcgtccaggcgttcttcaatggtcagccagagttgatcagccaggcgatgaaattccctgtcgttcattgttgtatcctgtttttaagtgattgcggcagtttagcggcttggggtccgggctccaagttgtgcctctggggtgggttcgcgggaatatccggacgcatcgccaggttccaggagcgcataaagtgggtgtatgagctgtttccacgtctgcatgagcgccgtattcagcgggcgggcaccatgtccggcggtgaacagcagaggaactga

SEQ ID NO: 3710 - DNA, 1287 bp, Homo sapiens
  SIMILAR (1)..(561): 981254mologous to Escherichia coli glutamate decarboxylase- beta,accession number M84025,Smith-Waterman Score=1001.
atggataagaagcaagtaacggatttaaggtcggaactactcgattcacgttttggtgcgaagtctatttccactatcgcagaatcaaaacgttttccgctgcacgaaatgcgcgacgatgtcgcattccagattatcaatgacgaattatatcttgatggcaacgctcgtcagaacctggccactttctgccagacctgggacgacgaaaatgtccacaaattgatggatttatccattaacaaaaactggatcgacaaagaagaatatccgcaatccgcagccatcgacctgcgttgcgtaaatatggttgccgatctgtggcatgcgcctgcgccgaaaaatggtcaggccgttggcaccaacaccattggttcttccgaggcctgtatgctcggcgggatggcgatgaaatggcgttggcgcaagcgtatggaagctgcaggcaaaccaacggataaaccaaacctggtgtgcggtccggtacaaatctgctggcataaattcgcccgctactgggatgtggagctgcgtgagatccctatgcgccccgttcggctgcagcaatctgttcctcatgtgttggtggtggaatttcagaccatgcaggaaaaccattttctccagcgatacggatttttcctttcggcggtaatccggaaaactcaatatacacttggtcatcaacttcaacagcatcatctgggcatgagccagctttcgtgtaatcctctttcatctccacggggtataaccagatggtgtcttggcgaaaggttgtctcgttcttccaccagagttgaaggaatcctccgcggcagaatcagcccggacggtttccaggagcgcataaagtgggtgtatgagctgtttccacgtctgcatgagcgccgtattcagcgggcgggcaccatgtccggcggtgaacagcagatgctggcgattggtcgtgcgctgatgagcaacccgcgtttgctactgcttgatgagccatcgctcggtcttgcgccgattatcatccagcaaattttcgacaccatcgagcagctgcgcgagcaggggatgactatctttctcgtcgagcagaacgccaaccaggcgctaaagctggcggatcgcggctacgtgctggaaaacggccatgtagtgctttccgatactggtgatgcgctgctggcgaatgaagcggcctactgggtgagtggcaatatgttgaatttgcacgatcttgtaggcctgataaggcgtttacgccgcatccggcatgaaacgatgagcaatctgtag

SEQ ID NO: 3711 - DNA, 1650 bp, Homo sapiens
  SIMILAR (703)..(1401): 991254mologous to Escherichia coli livF,accession number U00039,Smith-Waterman Score=1176.
atgttcattctctggtatagtgccagcagtacttttggcaaggattcagacatcgtgatgggcgtaagagcgcaacaaaaagaaaaaacccgccgttcgctggtggaagccgcatttagccaattaagtgctgaacgcagcttcgccagcctgagtttgcgtgaagtggcgcgtgaagcgggcattgctcccacctctttttatcggcatttccgcgacgtagacgaactggacccgaattttggtgaaaaagggaatatggccccgttggattgtttcgggcgtacccgtgctgtggcctctcgggtgaaacttctgggaatcgaagaagttattgagctgaacccgccgctgttcgatctgttcctgaaacacgacgccatgcacgatccgatggtcaacgaatcttactgcgaaacctttggctgggtgagcaaagagaacctggcgcgtatgaaagagctgacctacaaagcgaacgacgtgctgaaaaaactgttcgatgatgctggtctgattctggtcgacttcaagctggaatttggtctgtacaaaggcgaagtggtactgggtgatgagttctccccggacggtagccgcctgtgggacaaagaaacgctggagaaaatggacaaagaccgtttccgccagagcctcggtggcctgatcgaagcctatgaagccgtcgcccgccgcctgggtgtgaggcataagatggaaaaagtcatgttgtcctttgacaaagtcagcgcccactacggcaaaatccaggcgctgcatgaggtgagcctgcatatcaatcagggcgagattgtcacgctgattggcgcgaacggggcggggaaaaccaccttgctcggcacgttatgcggcgatccgcgtgccaccagcgggcgaattgtgtttgatgataaagacattaccgactggcagacagcgaaaatcatgcgcgaagcggtggcgattgtcccggaagggcgtcgcgtcttctcgcggatgacggtggaagagaacctggcgatgggcggtttttttgctgaacgcgaccagttccaggagcgcataaagtgggtgtatgagctgtttccacgtctgcatgagcgccgtattcagcgggcgggcaccatgtccggcggtgaacagcagatgctggcgattggtcgtgcgctgatgagcaacccgcgtttgctactgcttgatgagccatcgctcggtcttgcgccgattatcatccagcaaattttcgacaccatcgagcagctgcgcgagcaggggatgactatctttctcgtcgagcagaacgccaaccaggcgctaaagctggcggatcgcggctacgtgctggaaaacggccatgtagtgctttccgatactggtgatgcgctgctggcgaatgaagcgtcggagagaaaattatggctggagatgttatctcccccaaaagacgactctaaggatccccaggcaaaactgtttatcaccgcagcaaccgaaggtcggggaatggatgccctgcgcgagcatctgcttcagttgccggaacgcgagcacgccagccaacatagtttccgcctcgcgattgaccgcgcatttaccgtaaaaggtgccgggctggtcgtcaccggtacggcgttaagcggggaagtgaag

SEQ ID NO: 3712 - DNA, 1608 bp, Homo sapiens
  SIMILAR (835)..(1365): 971254mologous to Escherichia coli livF,accession number U00039,Smith-Waterman Score=869.
cccatgtatcttttcctgtgtcctccactggcccttgtccagtgcgccctgaaggacccacgcagcaagtactcactaggaggacgaacaaccctgattataactttacagggctcaggaaagaaaaacaacatccctcatccatcttctctttcagaaagggtcatgacagccaaggatggctttgtaagcagatgccatctgctgatgcagccgaagcagcagaaatggtccctgatgtatcccatggaaggagaggtgctggagaatggttgctggcccactctacaggacagcttgctatgcacagcgctggtggacaagctcttggtgtttctgggcaggtgtttctgcacagcagttgaggtggtgatgctggtgacatgcaggacagcagctgctgtttctgcttttctcatcgtgggcagggttagcagccccgtgtgcagagccgtgagcgtgcagccctggactctgaccgctgaccacactcccggcagatactgcctcaagctcgtctgccggcagctctgcttgtgtccatcgagcacaccactgacagaagtcttctgtagtaaagaagccttctttatcatcctagattgtagcaatctgccccatgccctgttacctgtggactcacccaagggcttgagtaaatgcagcaatccaagagagaaagcaaggaggaagctgcagggccattaccacgtggcctctgaagtcagctttgtgccagttagaaggttccccaagggtgaaattggtgccaaccaacccggcacgcacaggaagttttaccaccttactcactatcgccaaaacttgaagcagccagatgtccctcacgggcgaattgtgtttgatgataaagacattaccgactggcagacagcgaaaatcatgcgcgaagcggtggcgattgtcccggaagggcgtcgcgtcttctcgcggatgacggtggaagagaacctggcgatgggcggtttttttgctgaacgcgaccagttccaggagcgcataaagtgggtgtatgagctgtttccacgtctgcatgagcgccgtattcagcgggcgggcaccatgtccggcggtgaacagcagatgctggcgattggtcgtgcgctgatgagcaacccgcgtttgctactgcttgatgagccatcgctcggtcttgcgccgattatcatccagcaaattttcgacaccatcgagcagctgcgcgagcaggggatgactatctttctcgtcgagcagaacgccaaccaggcgctaaagctggcggatcgcggctacgtgctggaaaacggccatgtagtgctttccgatactggtgatgcgctgctggcgaatgaagcggtgagaaggggcgatgaactgaccgaggaccggtcccgttcgctggacggggaactgatccgatctttaccctgtggtgcctcctatggcgggctgtccctccggccgtggagccggggccatattccccagtcccatcaatcatcagagtcagtcagagtcatgttcataaacaccagtaagggtgcatccatcatcagcagttcagcaacaatgccaggcccattgccaaagcatttgggcccatag

SEQ ID NO: 3713 - DNA, 831 bp, Homo sapiens
  misc_feature (1)...(831): n = a,t,c or g
tggtcgaggtcggacggtatcgataagtttttttttttttttttaattatctgctgcttgtgatcggttgctagtggaggaagaagcgaatgcgcaggtacgttgagactttgccagcccaggaggagggaagttccttggacaaaacttaggagaaacatttggtttggaaatcttaaaagatctttaggagaaaaacgtttgagtgttttctccctggagccaggatttaacagaacagagaacgatagaaccgtagtgcttgttcattttaccacctcattctttatgtggacgtttgatttaatgtgggagggaaaggcaactctggtttgaggtgtattccactcctgtgtctgcttttcaggctgaagcgcaaaagaagaaagatgaggcagaggtccaagtaaaccgctagcttgttgcaccgtggaggcccacaggagcagaaaacatggaaatgccagacgctgggggatgctgggtacaagttgtgggactgcatgctactgtctagaagcttgtctcaatggatctagaacttcatcgccctntgatcgccgatcacctctgagacccaccttgctcataaacaaaatgcccatgttggtcctctgccctggacctgtgacattctggactatttctgtgtttatttgtggcccgagtgtacaaccatattataaatcacctcttccgctgttttagctgaagaattaaatcaaaaaaaaaaaaaaaaaaaaaaaactttatcngattaccggccnaccctccatgaatgantgaatggtccnacccccggggaaatttcccgggaccccggtncccctg

SEQ ID NO: 3714 - DNA, 664 bp, Homo sapiens
gcacgaggcgccattttttggggtgagtgttttttggttcctgcgttgggattccgtgtacaatccatagacatctgacctcggcacttagcatcatcacagcaaactaactgtaaccctttctcctcctttcccctgtaaaaaacctctgccgcccatgaaagccaagctagtggaggaaagaaagcgaaatgcgcgaggctgaagcgccaaaagaagaaagatgaggcagaggtcccaagtaaacccgcctagctttgttgcacccgtggaggccacacaggagcacgaaacatggaatgcccagacgctggggatgcttggtacaagttgtgggactgcatgctactgtctagagcttgtctcaatgggatctagaacttcatccgccctctgatcgccgatcacctctgagacccacctttgctcataaccaaaactgcccatgttgggtcctcttgccctgaacctgtggacattctggactatttccgtgtttaatttgtgggccaattttaacaaccctataattaaatcacctctttccgcttgttttagctgaagaattaaagcagagagagagaaaaagagaaaagtgtggcccgatataggccgttttcaagcggccgcagtttaagagtacaaacaacacggaataccgacg

SEQ ID NO: 3715 - DNA, 497 bp, Homo sapiens
ccctgtctctaaaaaatagtgaagtccaagatgtattaagcaaaaaaaaagtaaatcacagaactaaaaatatagtgtgatatatttttagtttatacctaattgtttcactttatatattttccacagtgtttgaattttttgccaatgagcaattattacttttgtaattaaaaagtcataacaatgagaagagagcctgatatcttttaaaaattagggcctcctgatgaagctgcacctgaaatggctcttcagagtctccgctttgtacatcctggaatccattttcttcacctagaggtgaccagatttataaaaactgactgattgaccaaactgaccaaagactgatttataagatgtcaatgttttgatttacactgtgatattgaaagaggctctgtggcttatgtctgtaatctcagcgctttgtgatgctgaggcaggagaattgcttgaggccaagagtttgagaccagcctgggtaacaaagt

SEQ ID NO: 3716 - DNA, 909 bp, Homo sapiens
  misc_feature (1)...(909): n = a,t,c or g
tttttttttttcatttttaaaaacttttttgactttttttttttttccttaatctcaaaaggcggggggcgtcggcgggcagaggcaggtagcagcaacagctagtagcaaagatgcttctctctctctcctgggcccggcaggctggggggcactgcaaacgggggctccggcccggccacctccccggcccccgggcgcccccgcctgaagccccccaaccccagcctggacctcactcccgttctcttgcacacacgcacacacgcgtccacgcaacttcaccatgagaatggaaataacaatttcgcattgtttttcttttttttttttttctctttttttttttgtaccaggccagttaaaaaaaaaacccccccaaaaaaggaaacacaaaaaacccccaaacaaccaaaccaaaaaagctttgagctgtgtcctttcatattggagtcaacacgaccctcctcaaatatcattttttttttgtttgtttgtttcctgaaacgcgaagaattccaccagttatctttggcaacacttttatcacgaccttaattttaaagaataaaaaataaaatcgattcacgtctatatacagtatgtgattgcgcggagtctggggagggcggggctgggctgggggggtcccggctctgggcccatgcagaggctgtggcccccagggacggcgcgggtagttaaggcaaagtggggcgggcaggacaggcgaagctgaggtgcgggantaagggaacgagggtttagtgcaatccccgaggtctgtgtaagtgtcgcggtgggccgcagcccttgttcctacggaagtcccagagggctccaccccccaagtccggtcgcctccactggctaggacgacagctgtgattttagagttggttttattgc

SEQ ID NO: 3717 - DNA, 401 bp, Homo sapiens
acatatgtataaccctcagttttcaaagtgaattaacatcccacgtgaagttcatcttgacaccgcaaggaccagactgacattctaaatgcaataaaccaataatccagttccttctacacctacacccgccctaatgcctaccctgaaccttgctctttctataaaaggaaaaaaacaaagcgacgttcttattgctccaaacatcatccttgcacaccaaactagacggcctccattctcgaaacgttgaagacattcttcctcacctgtatattttcacaaatattcaaataatcaatagcacaagaattgtcaaatttaccaagtttctagtttttgcaatctcataaccgaaacaggcaaacctttacctcagagtaaaggctcggacgcgtggg

SEQ ID NO: 3718 - DNA, 1401 bp, Homo sapiens
  SIMILAR (1)..(345): 991254mologous to Mus musculus putative,accession number AK008301,Smith-Waterman Score=607.
atgacaaagaaaagaaggaacaatggtcgtgccaaaaagggccgcggccacgtgcagcctattcgctgcactaactgtgcccgatgcgtgcccaaggacaacgccattaagaaattcgtcattcgaaacatagtggaggccgcagcagtcagggacatttctgaagcgagcgtcttcgatgcctatgtgcttcccaagctgtatgtgaagctacattactgtgtgagttgtgcaattcacagcaaagtagtcaggaatcgatctcgtgaagcccgcaaggaccgaacacccccacctcgatttagacctgcgggtgctgccccacgtcccccaccaaagcccatgtcaggcgctggtcggggcaggagccacctggatgaggggagagagggtgcaggagatgaggtgggagagttaagtctgcagcaggagattgacaaggaccctctgggtggtgcactgggggcaggatccaggggaacaaagacaacagggatgcaggcaggcattggaggaggagagcaggtgctcgtcttttgggatagctccttgcccgctgttgtagacagctgcttccatccagtgccctctccagacaccagcgctgctctcagctggtgccttttgtcattttcacgtacaccccagcagccgagtcctggcaattttaggcctgagcacttgcctcttctcttcctcagtaccgtcctaccccagtctgtggcccagacccaggcaagtggtaaatatttaccttcacgctggagccaagatcgctgcggggagtcccgtgaagcaccactgccctctaagaccttggaaggggaaacaccagaaggtgtgggtgctgagctccgctgcgtcagactgccaggacctgagtggaactcagtgctgaaacctgggttctcactgcagctggatagcagctctgcccggatggccctagtcttcgtgtacggcaccctgaagcggggtcagcccaaccacagggtcctgcgggacggcgcccacggctccgcagcctttcgggcgcgcggccgcacgctggagccctacccgttggtgatcgcgggggagcacaacatcccgtggctgctgcacctgcccggctcggggcgcctcgtggagggcgaggtctacgcggtagacgagcggatgctgcgctttctggatgacttcgagagttgcccggccctgtaccagcgcacggtgctgcgggtacagctgctggaggaccgggccccgggcgcagaggagccgccagcgcccaccgcggtgcagtgcttcgtgtacagcagggccaccttcccgccggagtgggcccagctcccgcaccatgacagctacgactccgaggggccgcacgggctgcgctacaacccccgggagaacagataa

SEQ ID NO: 3719 - DNA, 486 bp, Homo sapiens
  SIMILAR (253)..(474): 831254mologous to Mus musculus putative,accession number AK009436,Smith-Waterman Score=346.
acccagtctcttccccaactctccccacccctggtgctctccgccccgcttgcctcccgttcttccccgcccgctccatccgggtcgctgacggctgtctctggactggacagcagtggcgtccgcttttctctaaggaacccgataagaactccattttctgttgatgtggagacatagggtacctccaactttccggggtttcagaagagaattttttattgaaactggaagaccaaaataattacaagcatgttgtgctggggaaatgcatcctttgggcagctaggtttgggtggaattgatgaagaaattgtactagagcccagaaaaagtgacttctttataaataaaagggtccgagatgtaggatgtggactcagacatactgtgtttgttctggatgatggaacagtgtacacatgtggatgtaatgatctaggaccagttaggtcatgaaaaatccagaaagaaaccagagtttcg

SEQ ID NO: 3720 - DNA, 1152 bp, Homo sapiens
  SIMILAR (271)..(1143): 931254mologous to Homo sapiens similar to mouse heat shock protein 105 kDa beta,accession number D86956,Smith-Waterman Score= 1426.
atgacaaagaaaagaaggaacaatggtcgtgccaaaaagggccgcggccacgtgcagcctattcgctgcactaactgtgcccgatgcgtgcccaaggccaacgccattaagaaattcgtcattcgaaacatagtggaggccgcagcagtcagggacatttctgaagcgagcgtcttcgatgcctatgtgcttcccaagctgtatgtgaagctacattactgtgtgagttgtgcaattcacagcaaagtagtcaggaatcgatctcgtgaagcccgcaaggaccgaacacccccactcgatttggcaaatgaaaaaaaagttgaccagcctccagaagctaaaaagcccaaaataaaggtggtgaatgttgagctgcctattgaagccaacttggtctggcagttagggaaagaccttcttaacatgtatattgagacagagggtaagatgataatgcaagataaattggaaaaagaaaggaatgatgctaaaaatgcagttgaggaatatgtgtatgagttcagagacaagctgtgtggaccatatgaaaaatttatatgtgagcaggatcatcaaaattttttgagactcctcacagaaactgaagactggctgtatgaagaaggagaggaccaagctaaacaagcatatgttgacaagttggaagaattaatgaaaattggcactccagttaaagttcggtttcaggaagctgaagaacggccaaaaatgtttgaagaactaggacagaggctgcagcattatgccaagatagcagctgacttcagaaataaggatgagaaatacaaccatattgatgagtctgaaatgaaaaaagtggagaagtctgttaatgaagtgatggaatggatgaataatgtcatgaatgctcaggctaaaaagagtcttgatcaggatccagttgtacgtgctcaggaaattaaaacaaaaatcaaggaattgaacaacacatgtgaacccgttgtaacacaaccgaaaccaaaaattgaatcacccaaactggaaagaactccaaatggcccaaatattgataaaaaggaagaagatttagaagacaaaaacaattttggtgctgaacctcccacatcaggaatggtgaatgttacccctaatgaggaaaatttctgttaa

SEQ ID NO: 3721 - DNA, 402 bp, Homo sapiens
  SIMILAR (15)..(194): 981254mologous to Mus musculus putative,accession number AK008301,Smith-Waterman Score=303.
tccgtgcctccaagatgacaaagattagaaggaacaatggtcgtgccaaaaagggccgcggccacgtgcagcctattcgctgcactaactgtgcccgatgcgtgcccaaggacaaggccattaagaaattcgtcattcgaaacatagtggaggccgcagcagtcagggacatttctgaagcgagcgtcttcgatggtaagtgggtcaccggcgcgaactgtgtgaggatcccagtatcttaaagccttcgcccaacttcgcccttttggaggctctgtttcgttggagcctctcaggcaatttccacgtatttaaggttgttactggtagaagagaattctcttgtttgccgttttgattcttttctgggcagagggtgactttgtgatagagtgcacagcg

SEQ ID NO: 3722 - DNA, 918 bp, Homo sapiens
  SIMILAR (261)..(644): 401254mologous to Mus musculus ribosomal protein S26,accession number U67770,Smith-Waterman Score=136.
  misc_feature (1)...(918): n = a,t,c or g
acataacctcgattttcttccgccatccggctaaatagtcccatgtgcactttgttccatggataaataaacactaggaacgcatttccaccctagatttcagcagaaatgctgaattgtaaaggaatatttgagtaaagtgagttgccgttcttgaagcccgtctcctaaggattctcccggtgtccgcgtagggatctcatgctatataggagggccctgccaggcaccgtctcctctctccggtccgtgcctccaagatgacaaagaaaagaaggaacaatggtcgtgcccaaaaagggccgcgcgccacgtcagggggnngccncccttaaaatttttnccccngggnccntgccacctaactgtgcccgatgcgtgccccaagggacaaggccattaagaaattccgtcattccgaaacatagtgggaggccgcagcagttcagggacctttctgaagcgagcgtcttcgatgcctatbtbbcttcccaagctggtatgtgaagctacatttactgtgtgagttgtgcaattcacaagcaaaagtagtcaggaaatcgatcttcgtgaagcccggcaaagacccgaacacccccaccccgatttaagacctgcggggtgctggccccacggtccccccaccaaaagcccatgatctgggtccagaatactgcagacatcagacatgtgttaactgggtttgctgccggcaagccaccatccttgggaaggagttgtgtgggcaaatcaggaagttgccctctcagcagatgtctccaggatggctgccctcaggttattcctgttggttgtataaatataagacagaagccaccactgctttgcaatcacgtggggaagtgtatcatccgctccaagctctgtggagcagacctcctggccgggatccactga

SEQ ID NO: 3723 - DNA, 1170 bp, Homo sapiens
tgaagctgcagtagcttggttaaacaaaaacaaaaaaaaaactgagagaaaacctatcagaaggactaaaagtacgccttgcttcagggttggctcaggtggtgaacttcatgctgggcatctatgcagagccaccttttggattgcatggttggactgagatctattgggagaaattatatatgtatatatatttatacaacttatgtatacatatatatatgtatacacacagacacacacacacaccaccaacaaccaccactacaccacacatgcttataacaggcactagaataaagagggacaacaaaatacacagccagagcagcaagccttagcaattaagaatatacaatatgccggaattggggttctgtgcctcctagcctaggaaacttaaaagaaatatccttttgacacaaaacacaaaatgttttccaaaacaattgacataatgatacattacgcctttgcagtgagctaataataagctaacctttgtgcacaaataacattatatatattatatatctattctgcataggtattttgactttgtgcaggacagaaagttgtgtagggtatgactgttctacttttcagttttctttttttttaatatattttattttctctagaaattacctcaaacaaaagccagcccttcctatccttgcccttgtccttaatgcctttaaaataacccaaacgggagatcctaacctccccaaacgggtccattatattattaaatacccaaccttgggttaccagtaaagtgccctttacctttagcctgatggttctggtaacccttgtgcctttttaaagcacatttttaatgtttggtgcaaaagttgtcccagtgtctcttgttcccttcactagagaacatgccttagaggtatgtttgtaggtatttttgtttagaagaactatttcatgcgctccattttatttattataataggtaaaaagaaaaaaaaaggttgtaattcatcacccatgtaaacatgctcatgaagttgaaagtaattaaaatttgatacactgatatcaatttatttatgtaactaaatcactgttttataaaccttgtaaatgatccaacaatttttgttttgattaaacactagttttttgaaagttgaaaaaaaaaaaaaaaaa

SEQ ID NO: 3724 - DNA, 1178 bp, Homo sapiens
  misc_feature (1)...(1178): n = a,t,c or g
tagtaagaaaacaaacattctggctcactagagttcagaaaagtaataatttgagccaaaggaatttgaattaagaaaatagaaactaggtttcatgtatttaaaaaataggagagtgaatagggacgtcagaatgccatgaagttatcttcctcttccttatatcccctaagtttgggttgcaaataacttgccaattcctaataacctgaattatgttgaaatagtgttttcagggaaatgatgaatgtttgaatgtttgtgtggtaatcaacataacaatgctaacaaaattcccacttagattttttaacttttaaaagtcagcgtggttttgataatttgatattgtaaatgcccacacatacacacacacacacacacacacacacacacaagcacatgttaattaaactgatagggtggggtgaggcaaattgttttcagggaagatggcacattttagaaaagacttgnccccagatgatccttcccatattgctccccccaatgtcatttatcgctcatgcccaatcctcctcttgttacctgtggcctatggtaaaattcctttaacaagcttcattgtgtcccaagtatttcagagacttttaaaagctgggcatgacatagcgttttgtgctgttaagaccttagcagagtcaggtagtttacggggtaatattcaaccttgtgcatctgaatctgtcatggattcccttcactcagcactttgccactaatttgtattacactctgtgggccatataatacttgcacattatgcaaaaaaaaatgttgatagtatctccttgccacacaatatgcagagttgacaaccttttgaaaaccagggtaactaatatgtatgtcccagttgtgtgggcgttgggtaacaaagtctgtacatattatgtataaaatgtgtattggttagcatttagtactaagaaattctgagtttaaaataagtgatttttttcaaagtagcgatatctatatctgtgtttatctaaaaatactggcttgaatagaaaacattctcagatgattcaagattgagtaaaaatgagaatcccatacattccattattaaattctgccctattcccaattgttagcatctggctgatattaaggtctttgattgtcacaatattctcaataaatgagacatt

SEQ ID NO: 3725 - DNA, 1170 bp, Homo sapiens
  SIMILAR (37)..(666): 1001254mologous to Homo sapiens bB383K5.1 (novel protein),accession number AL390039,Smith-Waterman Score=1071.
tttcgtcccaagttggaggtaggggcctgtggaaacatgaagagggtaaacagctgtgtgaagagtgatgagcatgtcctggaggagctggaaacagaaggggagaggcagctgaaaagcctccttcagcatcaacttgatacttctgtctccattgaggaatgtatgtctaagaaagagagctttgctcctggtactatgtacaagccctttgggaaggaagcagctgggactatgactttgtcccaattccagacactgcatgagaaggaccaggaaactgcttctctcagggaattagggcttaatgaaacagaaatcttgatctggaagagccatgtttctggtgaaaagaagacaaaactgagggcaactcctgaagcaatacagaaccgtcttcaagatattgaagaaaggatctcggagcgtcagcgcattctttgcctgccacagagatttgcaaagagcaaacagctgacccggcgagaaatggaaatagaaaagtctttatttcagggagctgatcgtcactccttccttaaggctctttattaccaagatgaaccccaaaagaagaacaaaggtgatcccatgaacaacctggaaagtttttaccaagagatgataatgaaaaaacgtcttgaagagtttcaacttatgagaggtattatacctgaagaaccttagccctcgggtgactgaaagagatcttgtgtcattgttcgctcggttccaggagaaaaaaggacctccaattcaattccgaatgatgactggacgaatgaggggccaggcttttatcacctttcccaataaggagatagcatggcaagcattgcatctagtaaatggatacaaactacatgggaaaatattggtgatagagtttggaaagaacaaaaagcaacggtcaaatctccaagcgacttctctcatatcatgtgctacaggtagcactacagaaattagtggtagctagaatatatataaattgtgggtcctggatggtctttcttgaattggaatcttggatctaggatttatgtatagacaccagtttgtttggagttgaagaggaaaaactaactgagggaggggaaaaaagtaatttcagcttttggagagaactggtagaaaacattttctattatataattgaagactatatag

SEQ ID NO: 3726 - DNA, 1925 bp, Homo sapiens
  misc_feature (1)...(1925): n = a,t,c or g
attttggctcagttctttattttatagttagcaaatgaaattagaaadctgctttggcacaggtcaaaggtggctcccatatactcactagttttcctcaggattatcaatactcattatcaaaatgtacttttgcttggttacccattaaagttsccckccaatgtaaatgacaggggttaagggtgggtatgggtgntgggggaacctgcggcatacacacaattttttaaatcttttagatgtaatgcaattaacccatatcctaatattccttttaggaaaacacaagaaacacaaaacatgcctccaaagatcaagaaatcgagttatacttttccataagggcaccacccatttaccctggataaattgtaaataaatatgtaagggaataatcaatagggagtcttgaggttttacaagacattcctgtttagaccacttggagtactgcaaaagaaaaaacaaacaagatacagctttcataacccatcatatccttgcccagtgcacatcatttgttgcatagtggtgactggatatgatccaggccaagacaagaccaaaattcaaaaaatacattaacagccattcttcctcatactacagtaggagataccacttgggacattcatatccaaagaagtaatggtatgacttaaaaaaaaaaggaggaatttcaaaaggagtacttaaggacctgctataaaagcaaccttctacacacatatggagctaattcacatgtgaagctttattaaatctggttatatgtgggacttcaacagctcaatttttccacaatttccacttttcaaatcccatgccaaactgtcactttttcccttaaaaagtggataaacccatcttttgaaagacaggtcttctcagtttttctgttcatcctcctactgtaagtactggctgatattcacacacatgtactacagaattaaaatactgacaagcaagtagtttcttggcgtgcacgaattgcatccagaacccaaaaattaagaaattcaaaaagacattttgtgggccacctgctagcacagaagccgcagaagcaaagcccaggcagaacccatgctaaccttaacagcttcagcctgcaacagaaagcgcaagaagcaaagccccaggcagaaccatgcttaaccttaacagctcagcctgcacagaaagcgcagaagcaaagccccaggcagaaccatgctaaccttacagctcagcctgcagagaagcacagaagcaaagcccaggcagaacccatgcctaaccttaacagcttaagcctctgtccctttaaaaaaagagagagacagacagacacatggggtcttcgcttgttgacccaggcgggactcaaactcacaggttgaagcaatcttcccacttcagcctcctgaccacaggtgcactctacttcacctggctgccatgttttttattattaaagtacattatgggtaatcacaggtttaatgtttgccgtttccattattcaaggtatgacatgcaataatttataattttactgaggcacaaatttgaatcatgcaggcaaagctggtgtgcagcagcttaatgaggaagtcatgcatctacacatcaacatggctttgctgcagtacctatcaggaagcaaaataaacatctgtggaagaaaaatctcctgtcttctcccccagctagaaagctaactactggtgctgtatttgtacttttaaacttggggatctgcatagttctaatgacttagcttttaagaataccacaggcctaccatatttccatttttctttctataacctttgccagagttaaaatactaatgatgaagaattgcaacttcagttgcagtttagaggagataagggtagaaagacattttaaatcatgtcttaatacaaaatatt

SEQ ID NO: 3727 - DNA, 996 bp, Homo sapiens
attttctgctttgctttattcaagcccaatgctttatcagcacagccagccaaaaatttacaacccatacacagactatgtaaacctttagttgcacatacagtaagaccagcaggtacacactatacacatttttaattaaaaaaatgactaaccactgattttgtcaccacacttaacaacgacctgatatggcacagagtgatgtgtaccaaacatggaaataccaacttgggcgacggtttgaatcttgttaacttcagtgcaacccacaccccccaaatgcatgtaaagtttgcacacatggttttttcaaggccagcctgtctttgtttccctctcctctgcatttacccaagatcttggctctgagacagaaaactcccactctcaattggttcattccgtcctatgcaattaagcaacaccacaatccagtaaatgcaatggctcaattatttatcttctggccgactttaccaggtatttggaaaaggacaatgtcaagaggtttatttctctctctagagctggcttgacgggttgatggggattttattttgtctttttttctcttttttacaaggcggggacgtggggggagcataatttaacctagaaaaagatgcgagggaatttagaaagagtaccggtctgtcaatttccctacaggaaacttgattcttatgcaataaagcctacccacgaccagccagcccgtaaggctgcaggcgacagacacacctattcctgcctccaaaagggcacagctgtctcctgaaggagcgggaacagggcaagcggaggaagtggctcagcgggagccgccgaccgggcggggaggaggcgctttccgaccccccactcgcgccggtgatccccgtcggcgtgacagtcgctccggtggccggaacgtccccagggccccagggagcaggaaatcgggggactgtccctcactcctgccgccgcaaccgagtgcgccctcgccccacg

SEQ ID NO: 3728 - DNA, 461 bp, Homo sapiens; identical to SEQ ID NO: 470
  SIMILAR (240)..(461): 1001254mologous to Homo sapiens lympholine LAG-2,accession number A00142,Smith-Waterman Score=386.

SEQ ID NO: 3729 - DNA, 1026 bp, Homo sapiens
  SIMILAR (981)..(790): 821254mologous to Homo sapiens Human secreted protein encoded by gene 5,accession number AAY76128,Smith-Waterman Score=279.
  misc_feature (1)...(1026): n = a,t,c or g
cccncagggctccaccccccagcgcccaaggttccaaggcaaagcagagactgtctgccttcctttgggagagggacccccaagcttctctgggaccagggcccttcaccgttcttgctccacctccgcggcagagttcccgctcttcccccattccttggctttcattcagagggggaaggtggaaaagcaccaagccccaatttaataggtcagtgacatgaccataaaaaagaaccccccaaatttagtcaccaaaaaaataagacctacagagataaggtggcttggcttattaagagtcaaggaatcaaggtaccaaaaaatacgggagatggctgggaagagttagagacagctgcagatgcagcttttgcagacttcttgcccgagctgtggggttgggggaggagggagcagacctgagaaattaaaggaaatagggggtggtgggaggattcaaggaaggctggagggatgtgtaagttaggagctcccagcaacatttcttgaagcccaggttctgaaccctggggttgcccagcttggcctctcagatgaacaggggagaccttttccatcaaatacaagcttttaagcttcacaccatcttgcctgcctttccgccttcctgctggaacaatggagaccaagcagctcgggatgcatgtgactctgggcagagggaaccctggtctggggaagcatccgagaatggcttcagcacactccccctaatggaatcagagactgggcaaaacagaggatgtggagaacggggcagcctcagcctgctcccaccagggtcaacatctcccggccctcaccgaccccttttcccagattcacaacaaaactgatgtgggctctaggaacagacccctttacacacacacacacacactcacactcttttgcacacatccacagctgcacccatgctatgtacaggaacacacatacacatactctcttccacatacatcaagaccatttttaaaaggttccaaatctacccctaaaccc

SEQ ID NO: 3730 - DNA, 4338 bp, Homo sapiens
  SIMILAR (496)..(582): 1001254mologous to Homo sapiens Human granulysin P522 active fragment,accession number AAY08326,Smith-Waterman Score=160.
catggctacctgggccctcctgctccttgcagccatgctcctgggcaacccaggtaaggccttcccctcgggatcgatcctgatggcccacccagcctcgcactctcaggctggctgaacctggagcttggactctgtgggcacccaggtgcccctgcctccccccggccttctcccccgtcatggaggcctggccctcccctcagagccaggcttagtccggtgtgctgcccagcctgtcactggcctggccaaggaggagagacaggccagggattctggtcctaactctactggccacactgtgtggcctgagacccccctttccctcccaagcccctgcctccgcatctgcgtggtgaaggccattggccctcatcggtggatctgcggttcctcgggcctacactgtctaggattgtgcggggctggtgagagaacaagatctcttccgtgttcaaggcagacttcctgccccctgcaccctgctctctcccaggccttgaggtcagtgtgagccccaagggcaagaacacttctggaagggagagtggatttggctgggccatctggatggaaggtaaaaaaagaaaatcccttgaaaggagattgagggaagtttctagacaaaccgacccccaaatctgtgttgctgggggaacagaggagaagagagagtctcgccctcctggctttctagaaggaacgtgagaacacgtgtttgtgctgagagtgggtcagagcggctccagggcaaagcatgtggacaggtatcctggccccctgcaaggcccagctcctgtcctaggccctggtcacctcctggactcccaccagccaggagaacgggctttccctctccttccgcctgcggaggggaagctgaagtctggtcttcctcaggtctggtcttctctcgtctgagccctgagtactacgacctggcaagagcccacctgcgtgatgaggagaaatcctgcccgtgcctggcccaggagggcccccaggtacgtgttggctctctgctcacctgccacagtccctctcctttccctcctccctggtggctcctggggtgaggtctggagctctctaatggtcaggaggtgggagtggaggctgggctgtttctgacgatgctggttttgttgaattcatgtctggccaggagggctacaggtatctggcagactcctccaggaggatcctctggggtctcaccctccaaggagcctggggctgcagaacccaaataggcagactcccctgggagttcctcaataggagaggggcaagtgcagggctgggaaagtactggggttgtgggaggctgtttctggggtgtctcagagcctctaagacaagcaaaagggtgggtaggggccaggcagccagttcaggccttcagtgtatccacgctctgggaagagatcacggacattcctgccggcctcagaaacacaaagggcccctttcctgggcactttcacgcgctcccagagtgtctgagagaccatcataagggctttctttcctgacagggtgacctgttgaccaaaacacaggagctgggccgtgactacaggacctgtctgacgatagtccaaaaactgaagaagatggtggataagcccacccaggtgaggccaaggggctacagagcctcctgtctgctgctcaatggaggggccagcctgtgaccaggtcggggatcggggagcccgggggcaccttgcacagtgatcctgggggagggcttcctagaagggaatctgtgagtccccgtgtgtctgtggatgaatttcagagaacttgtgaaattgtgactctctggaactgtgtaagtcagacggcagagtatacatggttttcatcatgtatcctcaaagagggcttgtcccagagaagttaggaatcttcccctaaagccctaacatttgtgtccaaggcagagtttgagaagctagttccccaagaggcctgggtcaggactgataaatcccagatctgctacttccaagctgcatggccttgggcaagtcacttccactttctgagcccctgttatcttatctttgaaatgtgatggataatagtccctatcttgcaagttgtcaaacccttttttttttttttccttgagataggatcttactctgagacccaggctggagtgcactggtgtgatcttggctcactgcaacctctgcctccctggcccaagcaattctcctgtctaagcctcctgagtacctggggctccaggtgtgcgccaccatgcccagctaatttttgtacttttgtagaaacagggtctcactgtgttgcccaggctggtctccaacttctgagctgaagcaatccacctgccttggcctcccaaagtgtgggattataggcatgagccactgcacctggctgctgaagctttttaaaagagctgagggctgggatgtgcttagctccacgtccagcactgagtaaatgcttaacgaatgactgtgttactaccaagaattattgtttcactctccctccttccctctcctctgctgccccaaactactcagcatcctggcactgcaggctcgcacttagccctggatacccagattcatcctcctcccctgggatggcatagaagagactttaaaaccaaatgagccaagactccaagctctgaccacacctcccacccccaccagtcttctctatgcaccccctctatatctggagcccccagccaggttctggaccaaggtagctacatggcagagcatttaatgtgtgcctggcagccatgggcaccattctccacacagaaggcagggacaggtgcacaaggggctgagaccccagcagggctaactgtccttgtctcaggagccctacctggccagtcttgggccaggccttggggactgggagtaggggctgacccgtctgtacagtctctggccccatggcaccaggtgccagctcctcgcacccagtactcccattgctagggctgctggaacctgcagggttggcagagctgggcaggactcaccctataaccatgtccactgtggtgctgctgctgcagagaagtgtttccaatgctgcgacccgggtgtgtaggacggggaggtcacgatggcgcgacgtctgcagaaatttcatgaggaggtatcagtctagagttatccagggcctcgtggccggagaaactgcccagcagatctgtgaggacctcaggttgtgtataccttctacaggtgagtgcagaggtgacagcagggatacctcctgagggttggagacagcttcccccaggatatatcaaagctgcctccttactcccccatctcccagcatgggaaagtgtggagaattgagcagatggactttagctagaaatgtttgagaaatactgattagagcttgggcttcagacacaggtggttgtggagtaaaatctggtctccatctctccctggctgtgtgaccttaagcaaataacttgacctctctgagcttcagtttcttcatctgtgaaggagagatagcaatcctgatttttgagattggaatgagaattgaaggaggtcaccgtgtgtgtggacctgaccctggggaaatgtcctcagactgaggctattcaaggtcatcagaccctcagtcaaactccaacccagcccagcacatggcccctggggtcgggagctggggccatatcctcccccacaatcctgggccctgagatctgggctagggaacccttcaggcaggggagcatgaggcctttccctccatggctgcccaggctgtgctgagagaacagatctcggctgtaggaaacggggccagaaaggggcctcggtgattggctctggcagctcagctggcacttgccaatagctctgggattttatgctggcagatcgggggtccccaccatttcctgtcattggagcttgtggcttttctattcaaggccccacagcctgctcaggctgccgactggcttccaggatgtgcctctgggtgtgttcagtagggtcaggtggctctgggaccttaagcaagtaacattctgagtgcctgcttctccttgaggacccaccacatctgcccacagctagctgttctctccgctccaggtcccctctgagccctctcaccttgtcctgtggaagaagcacaggctcctgtcctcagatcccgggaacctcagcaacctctgccggctcctcgcttcctcgatccagaatccactctccagtctccctcccctgactccctctgctgtcctcccgctctcacgagaataaagtgtcaagcaagattttaaaa

SEQ ID NO: 3731 - DNA, 438 bp, Homo sapiens
ctgaggagctgctgcgagggtccgcttcgtctttcgagagtgactcccgcggtcccaaggctttccagagcgaacctgtgcggctgcaggcaccggcgtgttgagtttccggcgttccgaaggactgagctcttgtcgcggatcccgtccgccgttttcagcccccagtctcatagcggagcccactgagcagggcaccggcatggccaaagccggggagatcggcatcgacctgggcaccacctactcctgcgtgggggagagccatcccggtaatgaaaaaatcatccgtttttaccaaataaacctttctttttaaatctacgtgttcttataaacaccatacggtttatttgtcatgtctctataatctaaatacagctttgtttttataacatcatcttgtttcttgaatattcttagcgtttttattccaac

SEQ ID NO: 3732 - DNA, 1870 bp, Homo sapiens
  SIMILAR (1516)..(1665): 881254mologous to Homo sapiens Secreted protein 51-41-1-F10- FL1,accession number AAY59705,Smith-Waterman Score=237.
tttcgtcttggcgggaaggcgccggccgctaagaagccgaaagatgtccaggtcgggcgcggcggctgagaaggcggactccagacagcgaccccagatgaaggtaaatgaatataaagaaaatcaaaacatcgcttatgtgtctctgagaccagcacagactacagttttaataaaaacagctaaggtctatcttgcccccttttcactcagtaattaccagctagaccagcttatgtgccccaaatccctatcagaaaagaattctaacaatgaagtggcgtgtaagaagactaaaataaagaaaacttgcagaaggattatacctccaaagatgaaaaacacatcttccaaggcagaatccacgctgcaaaattcatcctcagctgttcatactggaaagaacaagctacaacccaagagaacggcagatgcgatgaatctcagtgttgatgtggaaagtagtcaggatggagacagtgatgaagataccacaccatccctgaatcccagctccacacccccctccccccccaacccaggtgagatttcaatggaaaaagtgaaggtaaagcgttatgtgtccggaaaaaggccagactatgcccctatggagtcctcagatgaggaggatgaagaatttcagttcattaagaaagccaaagaacaagaagcagagcctgaggaacaggaggaggattcatccagtgacccccggctacggcgtttacagaaccgtattagtgaagatgtggaagagagtaggaatggggttcaccatgttggcggtaaccagcgtgagctcgcccgccagaagaatatgaaaaagcagagcgactcggttaagggaaagcgccgagatgacgggctttctgctgccgcccgcaagcagaggtagccccagggaggggagggaaagggacggtggagacctgggttagaccaagggttatagaaggaaagagagctacctcagggcttgaatgcggactagtcgtgaggagcacagtgcattgcttcctctagggatttattttctgcccaccctccaaattggtagctcacagccttacaggaaaggacgggggcgggcgcctgccctcagtctgatttctgagcgtccctgggcctgaccttatgggcaagggcagggagcttcacatttcatatacaggtgtggttaccgtttcccactacttttggccctccttgctgatcgggtctcctcccttctcccaacctcctcactggtgttgctgggtgtgggcctcaatacagaatatagacccttgggcctgtgtcaccagacttctgaccccttgggcaacagccagatggagactggacgcctttagagcctcagctctcttcctcttgttctcctagggtgggagtacagcacccaaacgctgaacttagtcccatccacttccatcttatcctttgtgcccttcatccccctgcatcgtgtgctttttgccctctgccacctcccagtgccccatcatatctacccccaagggactcggagatcatgcagcagaagcagaaaaaggcaaacgagaagaaggaggaacccaagtagctttgtggcttcgtgtccaaccctcttgcccttcgcctgtgtgcctggagccagtcccaccacgctcgcgtttcctcctgtagtgctcacaggtcccagcaccgatggcattccctttgccctgagtctgcagcgggtcccttttgtgcttctttccctttcaggtagcctctctccccctgggccactccccggaggtgagggggataccaccttaccagtgtagatgattcctgaggggctcaccccgaagtcttaaaagtagcttcggaattaaagtctaac

SEQ ID NO: 3733 - DNA, 438 bp, Homo sapiens
caggggtcggctgcctcccgcctgtgcctttctggggcccaaggccccgttccctgggaatgggtgaggggccaggccttcccgaccatcctgctttccccagcttccagaccctctcccctcttctgtgtttctcctctgggtctttgtcacatccagccgctgcctacttgctgggcacagctcgcctgacccccagctctgtgctgtcccacaaagaacccaaggctctcctgctcaacctgaccttggccggaggcttatttctccttctctgcttctgccccacagccctctccctcaaggccctctccctcaaggccctctccctcaaagcccttgctgcttcaagccttgggaattcatggccaagcacagaccacatcttcccagagcagatgtggcacagactcggggtggggaaaaagaagaagcaag

SEQ ID NO: 3734 - DNA, 498 bp, Homo sapiens
  SIMILAR (7)..(156): 781254mologous to Homo sapiens dJ885L7.5 (putative novel protein similar to D. melanogaster CG14701 (Tr:Q9VGQ9)),accession number AL035669,Smith-Waterman Score=214.
gccagtggagataacttcctcaccaccaagaaagatttgaagaatggggaagacgtggcaacgtgtcctagctgctctctcattataaaagtgatttatgacaaagatcagtttgtgtgtggagaaacagtcccagccccttcagccaacaaagaattagttaaatgctgaagaagccttcaggaatccaaatcctgaacatttggaatgagcccagatagaaatatcgaatgcaaagctactggcttcacagagacaaccatttatgatttgctgttctgtaagagtgtggattctttctatcaactgctgatatcatcttcaggaagcaagtccataacatgacatatctggacttgcttcctgaagatgatttcaaaacagtgctttctttcccttggtttcatcattttcatatcttaaaccaaattacttcggtatctgacaacagcatcatctacctcagtcattaggatttcttaataaaaaagagattgt

SEQ ID NO: 3735 - DNA, 1019 bp, Homo sapiens
  SIMILAR (82)..(300): 861254mologous to Homo sapiens dJ885L7.5 (putative novel protein similar to D. melanogaster CG14701 (Tr:Q9VGQ9)),accession number AL035669,Smith-Waterman Score=349.
aggccggttccggcgaagttaaaccctcggagctggcctcggactgctggggcgttaccccttcggccacccccgctgaccatggcagtgtttcatgacgaggtggaaatcgaggacttccaatatgacgaggactcggagacgtatttctatccctgcccatgtggagataacttctccatcaccaaggaagatttggagaatggggaagacgtggcaacgtgtcctagctgctctctcattataaaagtgatttatgacaaagatcagtttgtgtgtgggagaaacagtcccagcccctttcagccaacaaagaattagtttaaatgcttgaagaagcccttcggggaatcccaaaccctgaacatttggaattgagcccccagataagaaatatccgaatgcaaagcctactggccttccaccagagacaacccatttatgatttgcctgttcctgtaagagtgtgggattcctttcctatcaacctgcctgatatcatccttccgggaaggcaagtcccataacatgacatatcctggattttgtgccttagaaccttaaattggaagcattcttaattatgcatctaaatttaaaaagaagataatttcaaaaacagtgctttctttccccttggttttcatcatttttcatatcttaaacccaaattacttcggtatctgacaacagcatcatctacctcagtcattaggatttcttaataaaaaagagattgtatttttgacttggttattaagattattaaaattagcccttcctttgaaatatgacatcagctttgctgttctaaatttaaaattagttgcttcatcagtaccacatttccagtttctataccaagccagtctcctcagttttcccattagaatggacatgttctgttcagcgtgtcatttctgtaatgcttcatgcagagagtttggtcatagtattaaagagaaaatacagtgaggtcacaatgtctccagagctaaaagttagtgaacaagacagat

SEQ ID NO: 3736 - DNA, 651 bp, Homo sapiens
  SIMILAR (257)..(325): 691254mologous to Homo sapiens Human secreted protein, SEQ ID NO: 6834,accession number AAG02753,Smith-Waterman Score=79.
atgcagaaggaagactgtgtcattgttttggtgaagttggcagtagaaggaatggcaccaactcaacaaatccacctctttgtggccattacctttagtgggtggcctaggcaatgcacaggctcatcattcaaggctattgacctctttttggatccagattctgttatgcagcaaatttattctttccactttggtatcatgtgtaattttgacaatcatgccttccagaacttgatggcagtgattgacaatattaagcaggacagggacatggatgaagctggaagtcatcattctcagcaaaccaacacaggaacaggaaatcaaacaccacatgttctcactcataaatgggagttgagcaatgagaacacatggacccagggaggggaacatcatacaccagggccctgggttcttggtctcgctgacttcaagaatgaagtcgtggaccctcacggagtgaagccacagaccttcactgtgagtgttacagctcttaaagatgatgtgtctggaattcattcattcctcctggtgggttcctggtctgccaacttcaggaatgaagccgcagaacctagtgcactattcacaatagcaaagatatggatcaacctaagtattcatcaacagatgaatggataa

SEQ ID NO: 3737 - DNA, 514 bp, Homo sapiens
gaaacacaccaatacacttctaaggacagcatagaccaagatctaggtttcatatggatgaatttattcttccctttgaggcaagacaagaaggaaagaaagtattgggaataatgctgccctcccatcctcaagggccagtgggaactctaatattgattggttttcacagaattccatggactttaactgctgaaccaatgatgcactgattttgtcacttgtaccagctaacgcatctgggaggcaacaaaacaatactctcctgaggttaatgtggaccaaaaactagatttcatataaaagagtttattccttctacttgaggtgagactttaatttgggcatggtgactgtttcccttgctgccacttgactcaatcccaggagcctcagtagaggatataatattacacaagatgctcaaaatggtggaattgctcagtgctcccataaatatacatttataattttcatttgccacacggtaaactgaaaaatacagactatatta

SEQ ID NO: 3738 - DNA, 431 bp, Homo sapiens
  misc_feature (1)...(431): n = a,t,c or g
nagcctttggaaggatggcgaccttgctgacactggggacagcctcgtgagacacatttcagatttctggcctggaaacccggcatgatacagatgtactgtttccagcgtgaggctgtggaaagccatagcagcagccacagaaacactgaccccgttcttggggccaggacaccactccgtcccggggagaacgcagtcccaactcctcgggaacaccagggctgccacctcccggaggacaccccttccccagccagcctgtcaggccacagctactgcctccaactcctgatcttggcccggggcctggaggccaagcagggatacagggctccttctgggtctccaactcaagacggtgccaactctaggctctgaactccttgcgccttgcagaaccaccacttctctctccccagtgaggcaag

SEQ ID NO: 3739 - DNA, 2516 bp, Homo sapiens
ccaaatcatagatcaagatattttatttatgtatgtcttttaaatgaagagtggttaggatagtcctgattattgcacataaatattgcctttcactagattattgttttgggccaaattttagactattattttaaaaaagagtaccttagtttaatccaacctttccagatatttagaaattattgaaatgtatattttgtgaagatggtcttatgaaagttgttgagctagaaacatgtccttcaccagtggaattcttagaagctttccttgggcttcactgggtgctaatagaccatgatcgtattgctctgtatataatggtacaaattttgttttataacacttagtcttaatagaatgggaatattttatcttactaacgtagtcattagctggccactctctgtgtccattggaccttatagggtaaagggagggcagtgcgtatttgaagcctgtgcacgtgacacacaaagggcttagcaacctccgtgttttcccagcacaggatacccattcttcctgaatgtttcattgttaaattagattgtgtgtgtgtgtgtgtgtgtgtgtgtgtattttatattaacatacagatgtatgtattttagttgcattttttttcttaaaatgttattttttctctttttcttttatgtcaggtgatgatagagcccctagggaagcaaaactgtccatgcccttgccttaactttcagatacgataaaaacaacatttataaaatacctgtcttagaaatattagctaaaattatgttggggaaagtatgtttgaaaatagaattgtaagctaccacattgtgataaatattactaaatttgtttattgacttgtcaggaagcaagagaatgaattaaagaaaactccagagaatgagctgacaacctactccctgggtcagtggctctccatgcctacctgtggtctcttggacacccttgcagaagatgacttcctggggaactcttctgggagtgaatgttatcagcaaattcccaaaacaacaccccttagacaaaaagccctcctcaccctatgcattgcctagacccacccactaaaaggtgatggccacaaaagaggtggatttgttgagttggtgccattccttctacttgccagctttcaccaaaacaatgacacagtcttccttccgcatgggaggactcttctctttccctgtgttggcagtgggatgcctccgtgcagataagaaatgcttaactgagaaatgctcatgttgggatatcatcgatgagactttaatttgggcatggtgactgtttcccttgctgccacttgactcaatcccaggagcctcagtagaggatataatattacacaagatgctcaaaatggtggaattgctcagtgctcccataaatatacatttataattttcatttgccacacggtaaactgaaaaatacagactatattaaaaagaaactgcatgatttttttttcaaaaattcaaagcatatttaaataatatataaattaaatgccctcctctcttccaattctgtccctatagttttcctctattaagtgaactaccatgcattttttagtggatagatgcacacaaaacacacaagccattatggggaaggatccacgtgtgtggccatattgtaacacatttttctgcaaatcacctctttcatttaacagcccttattcaatggcctttttctttttcagtagtacatacacatctgtgtcatttgttgaatgacgacatgaatgttttgtagataaaatataattaaatgttttaagcatttctcactcatagatatttatgttagcaccaaatttctgtgcaatgaaccctcccctatatatcagtaattttgccatttgtcctataatatccataataaattacttatcagttgaattactgggattaagtatgtgcacactttatatttatattttgaaaattattgcaagattgccttcaaaaatgtggttaacaactttatcttcaaatggcaaggaatgagattgccagctttccctacagcctcgacagacaatggattttataaatatttaacatttttgccaatgtgatcacccaaactattgtcttaaattgtatctcttttgtttttgagtttggtcattttttcatgtttattagccatctgtattttttaatttcttctttatgtccaattttgtgggtgggaggaggatttagtcttcttcctgatttcggaagagctcgatttactatttcgggaaataagatttggattgccaaccattatagctattttttacacacttttcaactttgtttttgttataagaatgtgtatgattgttacatgtccaagtataaccatgttcgcttttatggcttctgagtttcatgtcatttttggaaagatatatatattgagtccataaaacccttcacctatgttaaaaaaaacaaaaaacaaaaaagtcttaaccatctaccttcccc

SEQ ID NO: 3740 - DNA, 699 bp, Homo sapiens
  misc_feature (1)...(699): n = a,t,c or g
gttttttaatccagtgtaatgtttgccttttactttgcaaatttagtccacttaggattacttatatatttggaattagttcctccattctatttttttatttctatacatgtcatctgttttatgtaatttttttctcatttattgtgtggtttggttttgggttnnnnnnnnnnnnnnnnnnnnnnnnnnnnaattgaaccaggtgtttttgttttgccttcttgtgtttgtttttctcattcgttgttcccccataattagtttggaggttaacacaccatgtgtccccctcagaattttctcctttttcaaactcgggcaccttatctaaaggtccggggtttcacccagacaaaattgccttcctcccaggctcccagaagctcctataagctctttaatcacttcatatcctcacctcccaccagagactgcaaccatccacagtcactgtccctctgcactgagacccagctccagagcagatggcagcatggtcatcctgtcctgggtggtcctcctaaagccttcccagggagcagacagccagagagcaagcagagtgtctgggctagatgacagcaaggaggggacacctatctttattttcaaaacagatatccccagaggcttttagcataaaagcccacttagaactaactgtgcccccggcctacccatacaccctagagattc

SEQ ID NO: 3741 - DNA, 414 bp, Homo sapiens
  SIMILAR (10)..(339): 521254mologous to Arabidopsis thaliana contains similarity to histone deacetylases; Pfam PF00850, Score=13.3, E=5e-10, N= 1,accession number AF149413,Smith-Waterman Score=302.
  misc_feature (1)...(414): n = a,t,c or g
ctacacacaacccagctgtaccagcatgtgccagagacacgctggccaatcgtgtactcgccgcgctacaacatcaccttcatgggcctggagaagctgcatccctttgatgccggaaaatggggcaaagtgatcaatttcctaaaagaagagaagcttctgtctgacagcatgctggtggaggcgcgggaggcctcggaggaggacctgctggtggtgcacacgaggcgctatcttaatgagctcaagaggaaggtgctgaggccccttcggacccagacaggaggaaccataatggcggggaagctggctgtggagcgaggctgggccatcaacgtggaggccatcangcggaaggtggagctggagtggggcacagaggatgatgagtacctggataaggtggagaggaat

SEQ ID NO: 3742 - DNA, 2202 bp, Homo sapiens
  SIMILAR (829)..(1458): 561254mologous to Arabidopsis thaliana contains similarity to histone deacetylases; Pfam PF00850, Score=13.3, E=5e-10, N= 1,accession number AF149413,Smith-Waterman Score=593.
atgggggagaaacttgctcctggtaacatgtttgaaggactggatcaagctgtgcttgaagtccacccttgtactctgggctccggcacatcagagtcagaagccccagatgaaacctctctgggctggcgaggacactggaaggtcaaggccacctggggggacatccccagtgctgccactgtggaaagagtgggcctggggctctccattcatccttcagccttcacaccaaccctactgggggcccctaccaccaggcccattttccagattgagaagctaaggataggagacaaatccctcatgatgcaggctccgggggctcaggcccaggcaatgctcaactcccacgaaaaggccacatattatacaattgcatttatgcgaaacgtccagaataggcacatctatagatccaaaatgtggattaatggcttccagtggatgccgggagggaggaaatgggtaatgactgctaaaaggctacacacaacccagctgtaccagcatgtgccagagacacgctggccaatcgtgtactcgccgcgctacaacatcaccttcatgggcctggagaagctgcatccctttgatgccggaaaatggggcaaagtgatcaatttcctaaaagaagagaagcttctgtctgacagcatgctggtggaggcgcgggaggcctcggaggaggacctgctggtggtgcacacgaggcgctatcttaatgagctcaagtggtcctttgctgttgctaccatcacagaaatcccccccgttatcttcctccccaacttccttgtgcagaggaaggtgctgaggccccttcggacccagacaggaggaaccataatggcggggaagctggctgtggagcgaggctgggccatcaacgtggggggtggcttccaccactgctccagcgaccgtggcgggggcttctgtgcctatgcggacatcacgctcgccatcaagtttctgtttgagcgtgtggagggcatctccagggctaccatcattgatcttgatgcccatcagggcaatgggcatgagcgagacttcatggacgacaagcgtgtgtacatcatggatgtctacaaccgccacatctacccaggggaccgctttgccaagcaggccatcaggcggaaggtggagctggagtggggcacagaggatgatgagtacctggataaggtggagaggaacatcaagaaatccctccaggagcacctgcccgacgtggtggtatacaatgcaggcaccgacatcctcgagggggaccgccttggggggctgtccatcagcccagcgggcatcgtgaagcgggatgagctggtgttccggatggtccgtggccgccgggtgcccatccttatggtgacctcaggcgggtaccagaagcgcacagcccgcatcattgctgactccatacttaatctgtttggcctggggctcattgggcctgagtcacccagcgtctccgcacagaactcagacacaccgctgcttccccctgcagtgccctgacccttgctgccctgcctgtcacgtggccctgcctatccgccccttagtgctttttgttttctaacctcatggggtggtggaggcagccttcagtgagcatggaggggcagggccatccctggctggggcctggagctggcccttcctctacttttccctgctggaagccagaagggcttgaggcctctatgggtgggggcagaaggcagagcctgtgtcccagggggacccacacgaagtcaccagcccataggtccagggaggcaggcagttaactgagaattggagaggacaggctaggtcccaggcacagcgagggccctgggcttggggtgttctggttttgagaacggcagacccaggtcggagtgaggaagcttccacctccatcctgactaggcctgcatcctaactgggcctccctccctccccttggtcatgggatttgctgccctctttgccccagagctgaagagctataggcactggtgtggatggcccaggaggtgctggagctaggtctccaggtgggcctggttcccaggcagcaggtgggaaccctgggcctggatgttaaggggcggtcaggaaggggtacaggtgggttccctcatctggagttccccctcaataaagcaaggtctggacctgcaaaaaaaaaaaaaaaaaaaattg

SEQ ID NO: 3743 - DNA, 1690 bp, Homo sapiens
  SIMILAR (132)..(605): 941254mologous to Homo sapiens transcription factor,accession number Y11514,Smith-Waterman Score=727.
cccgtcagaccttcctgacctcccacctggttctctaggggcagggtggacaggaagcagctcagcccagcctgggagaggccaagggctgcctcctatcagagagcgcctgctcgctgtgcccccgggttatgacgacccccaataaaggaaacaaggccttgaaggtgaagcgggagccgggtgagaatggcaccagcctgacggatgaggagctggtgaccatgtcggtgcgggagctgaaccagcacctgcggggcctgttcaaggaggagttcgttcagctgaagcagcgccggcgcacgctcaagaaccgcggctacgctgccagctaccgcgttaagcgggtgacacagaagggggagctggagaagcagaaggcggagctgcagcaggaggtggagaagctggcctcaaagaacgccagcataaagctggagctcgacgcgctgcgctccaagtacgaggcgatgcagaccttcgcccggacggtggcccgcagctccgtggcgccagcccggggcccccttgccgccggcctggggcccctcgtcccaggcaaggtggccgccaccagcgtcatcacaatagtaaagtccaagacgcctcgcccgatcgtagggacgcgcgtctgcccaggcagaatactttgcggggccactaggcacatggcgaatttggctgccctgtccctctgtttccttctcttctctttcctccctctcttccccacccttctctcttccctgcaaagcacaacctgtaccccaggggcgccgggctgagcccctttgatcttcgtcattgtcgtcgtgtgttttggtattgttgggattggtcagttcggcggtgacgtggggtcgccccaaccccttttgtaccagggccatgcaggcttggagtccagagttggtgctgtgggaacggactagagagagttgcgggagagagaaggagcaggcacgctgggcctcgccgtgtccccgagcagtgagggtcccagtgttccctccactcccgagtggccacaggctcgcgggctgggaaaggattcactctctttaagccccaggggagcagctcagcttagccccagcatgaagagatgggctctgctctgaaaagtaagggcgggcttgaaggccctgatgggtggacccacccagccttgggcgcagtggtgctgggggcgtgcagctgggcccaggggctgtgcactcagggcctgaccccgtggcactggaaccaggacccaaatccgctggtctgtgccgctttaaacgtgagggtgggtcccagtgtgcccctgcggatgggtccccgtgtcactgtttacatgacctatttgtgtggttatatagccctttatttaaaagaggagaagttcccttttacaaagttattaaattaattatatgtttaaaagttaaagaaaaaagagctgcagagtatttataaaactgtcttttagaaaaaaaacaagcaagaagaccatttgaccatatgaatggaaaagggaagaaagtataatagaaactttgctagttaaaaaaaaaaagaaaaaaaaagaaaaaaaatccctttcttgtaaacttacggacacctctttgtggctgttggagtttagtttttatatacacagagttatcagacattatttataaaacttagtttaaaaaaaaaaaaaaag

SEQ ID NO: 3744 - DNA, 1713 bp, Homo sapiens
  SIMILAR (593)..(1405): 891254mologous to Homo sapiens Similar to RIKEN cDNA 2810432L12 gene,accession number BC006115,Smith-Waterman Score= 1270.
cggcacgagggggccccggagatggcgcctccaccgggatgagctagccagcctgggcaataccagaggcggccctcggcgcgcgcaggggaccgagctggtcgccccaaccgggtttgatttctgatgactctggcctgagttccaggatggttttttcttgggaccagacatgaacaaaagttgacctcatgagcacttcaacctctccagctgccatgctcctccggaggctgcggcgactctcctggggcagcactgctgtccagctcttcatcctaacagaggagacgtttggcctgctgggccccctgggctggcaccgacttctacactcttacttctatttgcgccattggcatctgaaccaaatgagccaagagttcctgcagcaaagcttgaaagagggtgaggctgccctccactattgtgaggagcttccctctgccaatggctcaacgcccattgtctggcacgccaccccccggcacctggctggcgatcaccatcatcactgtggacaggcagcctggcttccactacgtactgcaggctgtgtcccagttccaccggcttcttcagcaatgtggcccccagtgcggaggggcaccaactcttcctgtgcaacgtggagcgtagtgtgagccattttgatgccaagttgctctccaagtatgtccctgtggccaatcgctatgagggcactgaggatgattatggtgatgacccttcgaccaactcgtttgagaaagagaagcaggactatgtctattgcctggagtcatccctgcagacctacaacccagactacgtcctgatggtagaagacgatgctgtaccagaagagcagatcttcccagtcttggagcaccttctgcgggctcgcttctctgagccacatctcagagatgccctttatctcaagctgtatcaccccgagaggctccagcactacatcaatccagagcccatgcggatcctggaatgggttggtgtaggcatgttgctggggcccttactaacctggatatacatgaggtttgccagccgcccaggggttagctggcctggaatgctcttcttctccctgtatagcatgggtctggcggagctggtgggtcggcactatttcctggaactggggagggtgagtccttccctgtacagtgtggttcctgcccctcagtgttgcaccccagccatgctcttcccggcacctgcggcccgccggaccctcacctacctgtcccaagtgtactgccacaagggctttggcaaggacatggcactgtactcgctggttgaggggccaagggagagagggcctatgtagtagagccgaacctcgtgaaacacatcgggctcttcttccagtctccggtacaactttcatcccagtctcctcttagggtgccaagagatgcctttctgaagttggccacttcttgaagattcaaatatttatctctttatttaggacatggttgcctgcaaggtatttcactgtttactgttgttaggagatatagggcactggggggcagctgagggaaccttcaatatgtttaaggagccttggcttttgggtaggcctcctggggaagggagccagccagttttgcccacaggttcccgggacctctccctccacacaggccacactgcctcatggcagtctgacccacccagttgagggttgcatttggaacactg

SEQ ID NO: 3745 - DNA, 1710 bp, Homo sapiens
cacgcgtgcgcccaaatgtggctcaggacagcgtacgggcatgttggctgttaatcatcccaggctaagcctccgtgggcactggctggtgccgcagccatggcgtatggactcagttagaaccaggtagaaagtcagcgacaccccacagaaggccactgcggctaggtaaacacctgagaaagaaactgctccagaagagatgacgtgggcttccaggagcatggaggaggtggcacttgaacttttaggaaactccttagatgagataaagtgggggttggaggtggcgaaaagagggtaaccctgggaaagtcagtcacaacccatggcagaagactgcaggagaggcaggggaaggggcttcggggaccacttgtggacagagctctgaaagcacccttggccaaagcccctcctgaggtgacagagcgtgggaggaggctgcactgggcctgcgtgccatcctcacccctgtttccccactggcgccaggccctgccttcttggtacctgtgccaacaggaggagccctcaccagccgatcttgtcactctccgtggtgattgtgtcttggccagctgtggcccctagtttctagcagcgtttctcagtgtcctttggcccttctgagaaggcaggcggggaggcacacggtgccttgtttctttccccattttgtccagttgctttgcaaagaagaagaatgagtaggagtgaacccgagtgaccttcacccgccctgtcccccacggtcaggacagggcttgaggcctctctgggcgtgagcgaggaaaccaggctgctctaacttctgaagagtgggctctggctcaagacttcaatcggccagaagcccacagagatcaaagcactagcaagttcagctgtcctggccctcgggtagaacccacgggcgtgcctgggtgcggctccacccacatgccccactgtcagcccaggcaggagccttcctggccgggctcaggatctgcctgcagcccagccaggccatcacccagccccgatgcatcctggcactgcacgcttactcttcacaagcacttatacgcggatggcctccgagaccctgcctccctggtctgctgaggtcaggccaggtctcccacggagccgggcagctccacaccccaccacctggcaccgttaggtttcagatctcccgtgtggtgtttgatgtcggcttttgttcctaccttgggagtttggattgtttcctctggtgtctttgcttaccttcctcactgttctacctcctggccagggtctcagcttaagcttccctgggtgtggggtgtttttcaaagccttccagccacagctggtctcccctcaggctggacggctccgggggtgacagggcttcaccctctgcctgcagacccctggtgggcacatctcacaggcttccgtcttgctgagttgggtacggaggcagaaagtgggtttgtggaggaaagtcagagggaaatctgcttcagaaaggaagggtctttagacacaaagactggaaggcccttccccgcccgcacggaagctgccatcgtgggtctcatgcacgtcaagaccttcccacatccaaactcaggcttccaagcaggggatttttgactttgggattgacaaaggcttttatttggtaaatatgctcttaatatgcaactttgagaataaaatagaaacatcatg

SEQ ID NO: 3746 - DNA, 456 bp, Homo sapiens
  SIMILAR (160)..(243): 671254mologous to Homo sapiens unnamed protein product,accession number AK024120,Smith-Waterman Score=93.
  misc_feature (1)...(456): n = a,t,c or g
aggaggggaaagctagacctgcagagtgaagaaagctggtaatagatgtctgacaaactaaagaaagacttgtgttactgtctgcacactggaaattcttcctggttgtgagacaagacctcagacttatctgagctaaggggaagaaagactgcaacagtgttgggcctgtgggtacacagaagtcaagaattgaagattggaaacctccacctagatttcagaggacatatggaaatgcctggatatctaggcagaagtctgctacaggggcagactcnactggagaacctctactagggcagtgtggaaagaaaaggtggggttggagactccacacagagtccccactggcacactgcctagtggagctgtgagaacagggccaccattctccagacctcagaatggtagatcaaatgacaacttgcaccatgcaccaggaaaagccacaag

SEQ ID NO: 3747 - DNA, 668 bp, Homo sapiens
  misc_feature (1)...(668): n = a,t,c or g
tttttttttttttttttcttggtctctcctcagtttaatggtggttagtgagattgccaaaccccctccccattcccctccccaccccgtacaaaatgtgtgtgtggttttttgttttttgtttttttgttttttaacaagaaaaagggggcaaaagccaggaatggggagaggggggtgcaatctgatattttcatacagactttggatttttttaatatattatatataaacccataaagccccggaatcctccccaaactcctttccccctccccgggggactctggaggagagatggggaaggcccccccaggagtgggtggacagagagacaaatatggatgggacagacgttgggggagaaggtagagagaaggggagcccaggaacctggggaagggggattggagaaaaaggttggggctgtctccctcactgcccccatcaaaggttttgacacaaagacacagaatccctatttccacgccctccccccacccatccccccaccgtgcaaacatggctttgcaaagaagtgcccagagctctgtggaactcttacaatggctggaaaggggtctaggacccccaaagaaatctgtgttcccggacgcgtgggtcgacgcgnaattcaggtcgtcagtgaggctttcagggtcacgtct

SEQ ID NO: 3748 - DNA, 1105 bp, Homo sapiens
tttttttttttttttttagccaagaaaggtaagacattttattttacatacaaaaagggtgcaaactgagtcctttcctccccaaactggggaagaggtatacttaaaagatcacatttgtgttttccatggtgccctaggaaatgggctactctgagatcacatatcagaacccattttccattttctccaaagaaggctacttcctctgcagagaagattttcctaatgggtgcacaaatatctctcctggggagggaaccatttcaaatacacttgaaattgacattcatgtttaaaaatacttacaaatttcatttttcacagctgaggctttgtgaccagtgccagggggtttatggaaacattattacatccttaaaaaaaaaaaggtaaaaaaagaggcatttaacaataatcagacacatccacacattaaaactggatttccactgctggatttatacattatccagttggtttaaaaatcgcaatcaacatcccaacatctttttaagagtacaatgggcaaagatcaaagacagataaataataatataataaattagagcatgtaatacatcctatgggaattgctgaatcaacattattttccattggggggtatatatttttggtttatctttatcttttctgctggtattttttttctctgcttgataaaatggggctcattcctaaagccagcttgctgagacactaatttcagaagctcacttgtcacttgtttaacctctgagaaatactcaggaacacatggttccccagcagcttgggctgggtctttaatggaagtgaaatgcacatagatgaacacacgcactcacgtgcgcacacacaccacacacacacacagacacgcagtcacacacttccatctgtaaatatatttctccccaaaggaaatggctcatctttcctgaggacattcctaatagactgataaggcttctaaaaaagggcttttgggtgcaagggctggcctggggatttgggtctgggagctcatggaactgaaaatgtctcacctgtactgaaagagggggttgggttggggacattcagaacagctgtcctcttgtgg

SEQ ID NO: 3749 - DNA, 754 bp, Homo sapiens
  SIMILAR (531)..(710): 961254mologous to Homo sapiens RNPL,accession number U28686,Smith-Waterman Score=311.
  misc_feature (1)...(754): n = a,t,c or g
gcaaggggaacgttccgggacgttctcgctacgtactctttatcaatcgtcttccggcgcagccccgttccctgttttttgtgctcctccgagctcgctgttcgtccgggttttttacggtttaatttccaggacttgaactgccatgtcctctgaagaaggaaagctcttcgtgggagggctcaactttaacaccgacgagcaggcactggaagaccnaccacttcagcagtttcggacctatctctgaggtggtcgttgtcaaggaccgggggacctcaagcggtccagggggttttggtttcatcaccttcaccaacccagaagcatgcttcaagttgccaatgaagaagccaatgaaccggagaagtctcctggaatggtccgtcagatcccgttgttggatcatgcaggcaaagtctgcttcgggggaaccagagggaggtgggcttttgggggcccattgggggttgggttcgcagctaacttttaagaaggttgttgggggaccagggnttattggggaattgtcatttgccatgagagccatgaacggagagtctctggatggtcgtcagatccgtgtggatcatgcaggcaagtntgctcggggaaccagaggaggtggctttggggcccatgggcgtggtcgcagctactctagaggtggtggggaccagggctatgggagtggcaggtattatgacagtccgacctngagggtatngatatngatattggacgttccagagac

SEQ ID NO: 3750 - DNA, 1037 bp, Homo sapiens
  SIMILAR (21)..(149): 741254mologous to Homo sapiens Human secreted protein, SEQ ID NO: 7870,accession number AAG03789,Smith-Waterman Score=166.
tttttttttttttctgtcatctgtcacccagactggactgcagtggtgccatcatgtcttactgcagcctcaaactcctgggctcaagtggtcctcctgcttcagcttcccaagtagctgggactacaggcatgtgccaccacccccagccaaaacatccatattttctcttagaatggtttacattatgatgggggatggggagctgggggagggctgtacattcccaaaagaaagtagtgttataggaaatccaaatgcgcttcagtgattcactccttaaaagcagcctgggtatgttggcagattttgtttgcatttgtcttgcgtatttaaagtctcaggaaatctagtcttggtccaaaacactggagaaaaaaataacaccagacaaaacacatttgagtaacttgaagtagcagcatagaataggcccaactaagaagttggaggggcaaagagaaagccgacagaatcagcttctcctggaaagtgaaagcatcaagttctatttatggtagacagagggtccttatttgctttgccgtggtgtctatgtgggcctattgaggggatggtagttacttgaaggttcacatatgtaagcgtgtggacccagcacagtctgtgacctgattccagatcctcaagagtggagaaggaaagaaatatgatgatttcctatgcttgaccctaacccaaccccaaaactgctagggattcaacagtgagtaagatgtatggcaataagagaacagataacttcttcaacaatgtggcatgccgtttgtgtaggatgttcaggaacttacatatgtgtggaatattcactcccacctttacacacggcacacacactggcaatcacatgggcatttaaaaaatatattgtgtatggggaacttgggcgagggtcagtcaggacctggagctgtaattcataggccttatttgccacttctttgcgttgtgtatacattgaatggctcatagattttaagagattttttttttgtwagtwtttttctattttcact

SEQ ID NO: 3751 - DNA, 378 bp, Homo sapiens
  SIMILAR (180)..(335): 1001254mologous to Homo sapiens metallothionein,accession number X64177,Smith-Waterman Score=325.
ctcttggccaagctcctgagagcatgtccctcttccctgtgcctctatgtcagagttgagggtcctaaggctcaaggctgtcctgctccacatcaccccgttggtcacgaggctgctggctgagccccaattctctaaccaggctctgagcagccggattggatgggaagcattggataggtggctcctgcgcctgcgccggctcctgcaagtgcaaaaagtgcaaatgcacctcctgcaagaagagctgctgctcctgttgccccctgggctgtgccaagtgtgcccagggctgcatctgcaaaggggcgtcagagaagtgcagctgctgtgcctgatgtcgggacagccctgctgtcagatgaaaacagaatgaca

SEQ ID NO: 3752 - DNA, 379 bp, Homo sapiens
  SIMILAR (189)..(371): 1001254mologous to Homo sapiens metallothionein,accession number X64177,Smith-Waterman Score=380.
agctccttcttgccaaccaaccatgagctcccagattcggcagaattattccaccgacgtggaggcagccgtcaacagcctggtcaatttgtacctgcaggcctcctacacctacctctctctgggcttctatttcgaccgcgatgatgtggctctggaaggcgtgagccacttcacctcggcttgcaatggaccccaactgctcctgcgaggctggtggctcctgcgcctgcgccggctcctgcaagtgcaaaaagtgcaaatgcacctcctgcaagaagagctgctgctcctgttgccccctgggctgtgccaagtgtgcccagggctgcatctgcaaaggggcgtcagagaagtgcagctgctgtgcctgatgtcg

SEQ ID NO: 3753 - DNA, 444 bp, Homo sapiens
  SIMILAR (357)..(229): 531254mologous to Homo sapiens MT-1l protein,accession number X76717,Smith-Waterman Score=118.
  misc_feature (1)...(444): n = a,t,c or g
aagtcctaagatgaaatttaattgcccattccacatatttccatagaaaaaaagatgttagcaaaacgggtccagggttgttacaaaaaaaaaaaaaaaaaaaatcccaggtttaatataggttgcctctatttacatctgaagagcacagctgtccctggcatccaggcacagcagctgcacttgtctgacgtccctttgcagatgcnagcccctgggcaaagctactgcacagcccacagggcagcaggagcagcagctcgtctgtgtcaggacggtgcgatttgcgactctattgcgatttgccaggagccggcacaggcaccaggagccaacaggcgagcaggagcagttgggagtccatttcgaggccaaggagaagccaggagttcccgatccaagaggaaaacacgcagcgggacagatgaaaagcggccggaatta

SEQ ID NO: 3754 - DNA, 403 bp, Homo sapiens
  misc_feature (1)...(403): n = a,t,c or g
nccctatttccaactagggtggtattaaattaaaaggttataatcctccgggaaaacccttaggacctaggttggggattttttgttaaaggttccaccaaaaaaatgggtcccttaaaaaaaactggttaccaaaaaaaattttggagtttcccagggattaagggaccaaaaaagccaaaggcctttgaagccaaaaatttgggtcccaggggtccagcccattattcccacccctttggagggttaaaccagaggattggtttaacccggggggttccaggcccgcctgggccacataatgaggccctgtttttttttnnnnnnnnnnnnnngaaaaaaattagcaaaatggcagactaaaccctgccttatcagtaattggcattaagcataaatggat

SEQ ID NO: 3755 - DNA, 358 bp, Homo sapiens
  misc_feature (1)...(358): n = a,t,c or g
gttggcgcttccacgcccccaacattttcagaaggtgnnnnnnnnnnnnnnnnnnnnnnnnnnnnnnnnnnnnnnnnnnnnnnnnnnnnnnnnnnnnnnnnnnnnnnnnnnnnnnnnnnnnnnnnnnnnnnnnnnnnggagctgcagtattgggggagttaaaatcgttcccnnnnnnnnnnnnnnnnnnnnnnnnnnnnnnnnnnnnnnnnnnnnnnnnnnnntaaaacaccacccagatagatacacatactccttcagacttacagacctaagctgcatttatggggtagtgatgaggtttagaacatatacatattttgttaaaattccccagatgattcttggtatgaacgac

SEQ ID NO: 3756 - DNA, 451 bp, Homo sapiens
  SIMILAR (449)..(156): 831254mologous to Homo sapiens PRO2550,accession number AF130089,Smith-Waterman Score=439.
ccaggctctaagattcactttgaggtggaacttaaaaccagtgtactgtatgtatgcattggtaatagctacttttgcttcatagcttcataccaacaaaatatatttattagaatagtatgaaagtactggaggagctgaaagaaaaacacccaaggctgggcgtggtggcacacgctcgtaatcccagcactttgggaggccgaggcaggtggatcacctgaggttgggagttggagaccagcttgaccaacatggagaaaccccgtctctactaaaaatacaaaattggccgggcgtggtggcgcatgcctgtaatcccagctactcgggagggtgaggcaggagaattgcttgaccctgggaggtggaggttgtggtgagctaagatcgtgccattgcactccagccttggcaacaagagcgaaactccgtctcaaaaaaaaaaaaa

SEQ ID NO: 3757 - DNA, 1142 bp, Homo sapiens
ttttttttttttttttttgtcatttcataccagcaattttatttacacaataagaacatacaggtatcgtcagagatcatctctacatttcagatcttgactcagtttaagggccaacaaaggaaggcttttctctttccgttgtttcttgcctctgttttttcgttcgtacaaagtgtgtagtactagcaagtgcattaccatagcatgtctttaattttcaatttgaaatctgatgtgctggagaaaagtgcatcgtaagtttttgtttttgtttttttttccccttacaaattcaaaggactagaataatgatagtcatctgggaaaaagtaaatcatgaatgggctataattttgaaactggatgcctaatggatggcagtggatttttaagtgtgggtaacaaacgttttggggagcatggtatcccccggtcaagaatgggaccagtaacagattcaaagtagtaccatatcgtatcagactggatgtggggggtttttatgtttgacatcagttgggtggagcctgttgttccttagtaaattgatgccataagctaaagttaacatattcatattttccctgccaatagtccttcataaatacctggtcataaactgaaaaaaaagtaatatctgcaatataaatgtgttgtctattagagacggggctagatgtcttaaggatttctaagtacatcttaaaatttataatatagtcgttcataccaagaatcatctggggaattttaacaaaatatggtatatgttctaaacctcatcacctacccccataaatgcagccttaggtctgtaaagtctgaaggagtatgtgtatcctatctgggtgttgttttattttttttttttgagacggagtttcgctcttgttgccaaggctgggagtgcaatggcacgattctcaggctcacccacaacctccacatcagtctggatacggatatgggtactactttggaatctgtttactaggtaccatcttggacagggggatacatggctccccaaaacgttttgtttacccacacttaaaaatcactgccatcattaagcatcagtttcaaaattatagccattcatgatttactttttccagatgactatcattattctagtc

SEQ ID NO: 3758 - DNA, 434 bp, Homo sapiens
  SIMILAR (228)..(1): 891254mologous to Homo sapiens NADH dehydrogenase subunit 3,accession number D38112,Smith-Waterman Score=346.
tggtagcggtaaagcgagggcaatttctagatcaaataataagaaggtaatagctactaagaagaattttatggagaaagggacgcgggcgggggatatagggtcgaagccgcactcgtaaggggtggatttttctatgtagccgttgagttgtggtagtcaaaatgtaataattattagtagtaaggctaggagggtgttgattattaaaattaaggcgaagtttatttggttttgtcaaagttttacgaaaatatatgatatatatttatactaaaactatataatccttagatttaggaaagcaatcagttaatgtctttagcacactaaagcagtattaaacacaggtacaagttggaaattgtagaaaactgaaagaaaacaagacaaaatgtctatggtagggaataaaagagtttaagatattatgt

SEQ ID NO: 3759 - DNA, 745 bp, Homo sapiens
tttttttttttacaggcacagaaactcatcaattttaatttgggataacaaagggtctcccaaattatattggaaaaataaatcccaagttaatatcactcttgtaaaaaagttgagcacacttttcacaaacaatttatgtaaaagagaagaaaatacacataattttacataatatcttaaactcttttattccctaccatagacattttgtcttgttttctttcagttttcttacaatttccaacttgtacctgtgtttaatactgctttagtgtgctaaagacattaactgattgctttcctaaatctaaggattatatagttttagtataaatatatatcatatattttcgtaaaactttgacaaaaccaaataagcaagccttggttttaagtccacgctcctgccactggtttacaaaatttgatttaatgatcaaaaaactattggttgtcactcttctgttacaacaatcttccttgtgaactgccacccagtttttacataataataacaagcaatagaaaaaccaaagaaattatgttaatcttagctcttcctttgcaagtgtcttttcttcttacacccagtgcttagaaataggcactcctcaaccagtgttcactgaattcaactgctgaaattgtaacagttaaattatcaacacaactcttaataaataaacattcctttgggaaattgtgggaaatcaaaacacttttaagtttatacaagtattca

SEQ ID NO: 3760 - DNA, 429 bp, Homo sapiens
  SIMILAR (2)..(193): 731254mologous to Mus musculus putative,accession number AK009937,Smith-Waterman Score=254.
gggtggaattcgatttagcttttccacatatgagaacgaaattgcacagtgcgaagtctttcatcagtgcgagcagtggggaaattattttctgcattctgggcatttgcacgccaaaggcaaagaagaaaaaatgtccaaatcattaaagaactacattactattaagccatcgactacagtgacagcgccatgctccaagctcagcagctgctcctggggctgggctctttcctggaggacgcacgtgcctacatgaaggggcagctggcctgcggctccgtcagggaagcgatgctgtgggagaggctctccagcaccaagagggccgtgaaggcggccttggcagatgattttgacacacccagggtggttgatgccatcctgggccttgcacaccacgggaatggacagctcagggcgtccctg

SEQ ID NO: 3761 - DNA, 2351 bp, Homo sapiens
cacaaataacctgcaataacttgaaatgcatacccttttgaacacttccttttctcatgtataaattaaaatgtttgctgcattttgcaaaatgtcaattctctaaaaatgtgtccgtatatttctgtacctgcagtgtagtaaaggtttagacgaaaccccataattatagtggcatactgtcacttaggtttcaagcagcaaaataaacagtgcagctcagaaattgtagtttggttcttgatgtgtttttattacatttggagttgttttgttttttagtaccttcgaaatttcaaattattttatcttcagttaatgattttaaaaagcctgggggcaaataagttggttatttgctttcaagtttttaaaagtagtctttattgatagagtaaggagaactactttctaacaaaacacgtgcatagttatgacagtgatgctttaaaggaataaaattctttttttttaaagagtgatattccttttcaaaagaatactaactctcagaatgttcactttaaacgaatatgccagaacatagacagctaaatgaatgttactctgcatagtgatcatgctggaaggttatttcctaatgccagcaatctaccattgcccaaaacctgctgagtttactcttttagaattgcattcaaagttaatttgtcacacacactaaactttatgattatacattgttttaaaaaatatagtattaggaagcttgattatttttagttaccattacttggcaccaaatgaaagtttccaaaacttccacctaacctttgaggtaatgcagaaagtatataactggctttgaaggcaatcccaaaagagttttaaaggttttttgagcagtggcagtatacttaggagaatgaactgtggccttccaaggtaactaccttgaaggaactcagctcatttgaatgtattgagttttggatgtatttgtttcattttttaaaaagttcacattattttatagtgtcgaaaggaagaactaggattaacataaatttctttggtttttctattgcttgttattattatgtaaaaactgggtggcagttcagaaggaagattgtggttacagaagagtgacaaccaagaattttttgatcattaaactcagattttataaacagtggaaggagcatggacttaaaacaaggcatgcttattcggttttgtcaaaattttacgaaaatatgtgatatatatttatactaaaaatatataatccttagatttagaaaagccaatcagttaatgtctttagcagactaaagcagtattaaacacaggtacaagttgggaaattgtaggaaaacggaaagaaaacaaaagacaaaatgtctatggtaggggaataaaagtttaagatattataaaattatgtgtattttgctcttgttacataaatcatttgtgaaaaggtgtgctaaactttttttacaagagtgatattaattaggatttatttttcaatataatttggagacccttagttatccaaataaaaatgatgagtttttgtgcctgtattcaaatatgtatgcatgtgataacccttgaaagctaaagcccttcttaacttttgagttgatggaattagaattcaaagatttgaatgaaatgatttaacctttatcctccaattcttacagtgcccagttctcctgtgctatctttgctttgtacaatagtgcatcttccactttctagagagaaagcatgcacttgttatttggaaaactgggctaaatatataacagtatccaaagttataccataataatttattgtaattgtgtattacatagctttgtttacccagatataggtgcgttcttttttttctgttagtcatctgtgacttttgttctggaatacaggtttttaaatatatcttaacagtctgactaacttaaaataatttattcttcccttaaaacatttttctgtgtttttgtgcatcaaatattgtagagttgaaatcttagagattgcttatcgaaatataaatttaggggaagttaaaaatcgattggcaaatttgtagcatttattcactgattaaatcttttccacttttgtgaaaaccataccagtggtttacatcatattgtaatgtgttcatctcattcttctttttatccctaaacctagctaaaagttactgcaaagaaatctttggctgccacaagtagatgctctctactaccagagctggatttccattactcactcttgctcttacattaaagttgttgattaaataaaaaaaaaaaaaaaaaacatttgcggccggtccaacatcagaatggtacctcgtgccg

SEQ ID NO: 3762 - DNA, 2310 bp, Homo sapiens
  SIMILAR (2070)..(2189): 771254mologous to Homo sapiens Campath-1 antigen,accession number A23013,Smith-Waterman Score=147.
  misc_feature (1)...(2310): n = a,t,c or g
ggttataggaacagagttttatttatatgatctggtactagacttcttaatataactgttacactgtccttgtctttcctactcaaagacagtatcatctgaagttgcctaataaggtcatgtgagtcaagaactttatctgtgggagctgatttgcaccattttacctttttttttttttttttttgagacggagctttgctctgtcaccaggctggagtgcagtggcgcgatctcggctcactacaacctctgcctcccgggttcgagcgattctcctgcctcggcctcccaaacttctgggattacaggcgtgacgaccgcacccagccaccattttatctctctaaagtctggtcccagtattaaacctattctttagtaaactcatattactgttctaaattgaagaaattatttattactctgtacttctagactcaaaattctttatcaaagatagtctcaaagaggtagtacaagtcctgtttaactgcactttttcacattcacagtgcttcctctgatatctttccttacatcattatacactgttgatatcattttactcttctttctcttctacatttcttaaattttgggttcttttcctgtacatgtgttttagcggggcccttttctttgaactttgtttaattagcctgtacatttttgtttcttttaaggtagaacagatctttttttgtttctccttttaagtctactggttttaaaagaggtaaatgtatccatagaccacagtgccttggctttttcctctgccagcacatggagcacgggattagatgcacaaacctatttagggaactattttggtagatgtttgagtttatacagaaattgcagctggtattttattttgctgtacatttactcaacttgtccattagtatttaactatttccagagtttgtttaggagtaagaattgacccattcgttagtttaccatattttttcctgggataaaaaggagccagaaataaccctaattgctaaataattaattatgtaagcccacctaggtcctgcataagatctcccctcacatacttcacaatatatatgtgtgtgtgtgtgtgtgtgtgtgtgtgtgtgtgtgtgtgtgtgtatttggctaaaaaattatactgccaaaattactgattataaatacttgactacactgattgatgggacaaaatgattaaagtattttcagggatcttattccatatgtcaccaccaaagatttctacagtgttataaagtatataaatattccaaatttctgtggttaaatatttttttctttttttbtccttttttagaataacacagtctgtgctttccaaaaatgcttgaacttttatgttgttaagaaatatataatgatatcttacattaaggcatgagtcctaatttggtattaattggggatgggaccaaattttccatttggattatccaggaaaaattaaggaggttatatatttaaaaggcaattttctgtgttttcttctttgtaaggttgactccatttgtgaagccaattagggcaaatttttgaggaaggatccattgttattgtgggtttgcagtatatatttcttaggtaaatatccacttaaggattaaatttttcaggaaaggaaaattataggcttttttcccaaaatatttttaaagatttaatcttctttgtagtatgcctacagattttaataatattaactctttttttaagacattgaccatgacttaacattttgcctttctaacaccttttaaatctatgtactttaatagttaagagaaaataagtttgcagatttttaataatctgtttgtaaaaggctatctctaagcctagtatgtgggtaattttacaggtgtgttttttgataactttaatataaaataaactcattcttatttgtggcaaaaaaaaaaaaaaagatcacctaaaaagctgctaccaagacagccacgaanatcctaccaaaatgaagcgcttcctcttcctcctactcaccatcagcctcctggttatggtacagatacaaactgggactctcaggacaaaacgacaccagccaaaccancagcccctcagcatccancaacataagcggangcnttttcnttttcttcgtggccaatgccataaatccacctctctgcttcagttgaaggtgacacgtctcanccttaaccctgtggcccctgaaacagctgccccatcactcgcaanaaaatcccccccacctttgggaagggtgnatgccnacatcccccnttnntnnaattt

SEQ ID NO: 3763 - DNA, 2900 bp, Homo sapiens
  SIMILAR (347)..(664): 1001254mologous to Homo sapiens Human peptidase, HPEP-7 protein sequence,accession number AAY90290,Smith-Waterman Score= 555.
tgatccctagtccagtgcggtggaattcggagttgctctaggtcgtaaccagcctttgaaaaaggagaaaccaaaatggaaaagcgattatcctatgacagatggacaactacgcagcaagagggatgaattttgggatacagcaccagcttttgaaggccggaaagagatttgggatgccttgaaggctgctgcacatgcttttgagagcaatgatcatgaactggcacaagcaatcattgatggtgcaaacataacattaccacatggtgcacttacagagtgctacgatgaactggggaacagatatcagcttccagtgtattgcttggcaccgccaatcaacatgatagaggaaaagagcgacatagagactctggatattcctgagccaccacccaattctggatatgaatgtcagcttcgtttgcgcctttccacaggcaaagacctcaagcttgtggttcgcagcacagacacagtattccacatgaagagacggttgcatgcagcagagggagtggaaccaggtagtcagcggtggtttttttctggcagacctctcactgacaaaatgaagttcgaagagctgaagatcccaaaggactatgttgtacaggttatagtgagccaacctgtgcagaacccaacaccagtggagaactgaactgagccctgttggccagctcccacatccctctgctcctttttatggttcttgttgtcatttcctactctgcggcgtgaaatctatttcactgctctaaattccctatgaatggatttagttctgaggaattaccagtgaaaaattccatctgtgatggagaccaacaaaaataataaaacacaaagagccaggctttgagactcatgtaattacaatttctaatttgaaaggcagttaagaaatagataaccatttattttagaacactcaacaactatgtaatggctatatttcagtgacttggactgtaaatgaaacattgcatccatgaaggacagcaccaagcacctttttgaatacagaatttttttagaaaaatatatcaaattatataatttccagaaaccataaataatggatataaaacttaacctttttgttttgttttgttttgttttgttttgttttgttttgttttggttaatggaaactgaaaagagcagtatttgaggttgcttctattctggttttttattcttaggctcaattaatatttagccataaatgagtaggagactgggcaaattgtgctttagtgttgcttttcctcatccccacatcttgagctccttatttacattcacactaaattttgggtgccttccagcacgttagtggccagggcacccttctggggacactaggggcaattaattttcatcaattacagtcaggtctcttgagtttcaacagatactcagttgaaaagtcgctgtcatcttgctgcataagtattttgaaaggtctgtataacgaagccatttttatatccaggcttagaaggtcactactatatagtaccttcattgatctatctattctgcttggaacttttcatagctaagtataacccccaaatgcatggttcctggggtcaggagacaccaaaatcaattattaggctgtttcccactcaagtttattaaagtaagatgatttcctccactttgcatggcggggtgtaaggaaagcctattttatctgtgcctgggagaactgtgcctattttcagtcttttagggggaaatttcacctcaaaatttttaagtgtgaaaggtttactggtgtcacataaacattagcagtgagaccaaataatgaaacattgctttataccttagtgctttccagttcactgttacctctagtcatggtagatgacaattttccctccctcatccttttgtcgccaaagacgccaattttaaggccccttttgcaagttagattaggggactgaaaaatccagggagataacctgattcttctatactatgactggagtaaagctgcccaagagttaggttgaatttggagcccttttaaaagttggttccattaagtgagaaggggggcctaacatgtgaccactgtgccccctgagaatcccatgagatggaaaagtacagacaagaaggcacttaacgcctgttcctcagttggaaaatgtcagcccctccacacctgtttggatgtgaagtgccattattaattttaatgacaaaatgaaactgcctaattagtttaaatgtaatgtttaaatggtattgaatttcctattgcctgattaaatatatctgtaattgtaacatcatgtttctgagagctttaactacttccttatttttatgcaatcattttaaagattgtggctatatctaatttaaatttgctgatgattgaatctaaattcaagtgaagaccacagcattaatccccaaagggagattttttttatgtttagaggtggagatattagggtaaatcagtatattgctcctgtcatcaaagtttttgttcaatttgtgtgccacatcgaatagcagcacttctcaaagtttgtcaactggaaaaaaagtgtttaaaactgtttttttcttaagcagatttggtgatgtcatcaatatctatgatatcgattggtaaaaggtctttctttgttgaggatttgagctctctttttaagagtttattttattttaaaggaacatatgctttgaataacaattctctgggcatgtttaactaacctaggtgggaaaaccatggtggtgtttaattgtaaatagattgatataagattggaccagtacttgatgtgtataattttagtatgtagggttcaccgcgctttttttaaaaaaaaaaaaaaaggttcaatttttaaaaa

SEQ ID NO: 3764 - DNA, 456 bp, Homo sapiens
  misc_feature (1)...(456): n = a,t,c or g
ttcctgggtcgacccacgcgtacgcccacgcgtncgcccacgcgtncgcccagacagccactgtttattttctcctccccagctcacccacgcctctccaagcctcccaacagaagacagaggtcccccacagccagagacatttcctgaagacatggggaacacagaggcagaaacagcccatccacccaggagctgtcccccacactgccgggagccggcacccagagccgccaggtaaaactgaggccacctggttcaacatcacctttcacagaaggggaagcagccacagaaagaagggcctcgttaagaagtggaacctgggacccccaagcggtgtctctcagtaaggccctcatgtgaaggaggcaggggttgggacaagtgctaagtatgcaagactcaagggaagagctgctggagccaggagaagcacctccctcccggcccctc

SEQ ID NO: 3765 - DNA, 1332 bp, Homo sapiens
tttcgtgccagggagccgcaggcaagggactaaggggaggggggctcagtgccagctgcttaaaaatgcccctgtggcagcgaggggcaccagttggctgggtctaattagttgagaagcagtgacacccccaaccactccccaaacaggctggctcccgtctccaggccccaaggagccacacctggaccagaccccaggaaaggcaagggcgctagctggtgggagccaccccgccatgctgatgtcagagaagcaagaattctggagaagcagcctcctgggaccagaggagggccagcagcaggcagcccggagacagaactctcacccacgcctctccaagcctcccaacagaagacagaggtcccccacagccagagacatttcctgaagacatggggaacacagaggcagaaacagcccatccacccaggagctgtcccccacactgccgggagccggcacccagagccgccaggtaaaactgaggccacctggttcaacatcacctttcacagaaggggaagcagccacagaaagaagggcctcgttaagaagtggaacctgggacccccaagcggtgtctctcatcctgactggggatccagagtaggagggagcctttggtggggtaagtggaatggggcggggtggggggtggccatagacccctcttctcagtaaggccctcatgtgaaggaggcaggggttgggacaagtgctaagtatgcaagactcaagggaagagctgctggagccaggaaaagcacctccctcccggcccctctgcccctcctcatagcccagctgcactgactcctcctccaggaagccttctcagcttccccaggggtgggaacctttttgtcctccaggtgtgcttggctgtcctttcttgggctctctctctctctctctcctcatcccacttgagtctgccccctattcaccttgagaggggaatttttcttctactcaatctgaccgaggccctccaggtcaaggacagcgaggctctcagtcccacttccccttggcacatagaagaggcagtgcgctgaagggacaggtgaaatgattagaccctgcccccaaaccaaggcctggccaattggacagggcatgagacattcagcgtagaggttaaaacgagggccctgggttaggaaccccagctcagttctcagctctgtacccttggaaaattcccttcccatggagctttgtggatgcacaaggacttgcacaaagaaaacattcaatatccaggactataaaattccacaaatgattgtgcttattacattcattatcacgatgattattcca

SEQ ID NO: 3766 - DNA, 2385 bp, Homo sapiens
  SIMILAR (234)..(725): 1001254mologous to Homo sapiens MAFF protein,accession number AJ010857,Smith-Waterman Score=821.
cttacaactccgcgcggcctcggccccctgcgccgcccgccccacaacaaaactcagcgcagcgctcccgggcgcccggttcagagcgacctgcggctcagagcggaggggagactgaccggagcgcggatcgggacagcggccgggacagcggcgagacgcgcgtgtgtgagcgcgccggaccaagcgggcccagaagcgggtctgcagcccagagggcaccttctgcaaacatgtctgtggatcccctatccagcaaagctctaaagatcaagcgagagctgagcgagaacacgccgcacctgtcggacgaggcgctgatggggctgtcggtgcgcgagctgaaccggcatctgcgcgggctctccgccgaggaggtgacacggctcaagcagcggcgccgcacactcaaaaaccgtggctacgccgccagctgccgcgtgaagcgcgtgtgccagaaggaggagctgcagaagcagaagtcggagctggagcgcgaggtggacaagctggcgcgcgagaacgccgccatgcgcctggagctcgacgcgctgcgcggcaagtgcgaggcgctgcagggcttcgcgcgctccgtggccgccgcccgcgggcccgccacgctcgtggcgccggccagcgtcatcaccatcgtcaagtccaccccgggctcggggtctggccccgcccacggcccggaccccgcccacggcccggcctcctgctcctagtgcccgcccccgccatgcctcagccacgcccctccggcctcagctccctccccaaagtgcctgagcgccgcctctgtgcccaggtcccatttctctgcagcactggccccttggtgcacacacattcccttcgtgggccctgtcttcctcttgcagccccccaaactgggaccgaatgaccctgggaaggggaagttgggtaggttggggatggggcagaggtctggatctgggatcgcccttggctgaaagtttagcctttttagattgagagatacagagccggcttagagaacagctgttgggggagaagagggcacccctcatcttggaaactgctcttattgtgccaatatgccctccaaaccctcccaggattcaaagctaggtttggctgtctgtgacttacgggaccgtcctgctgagaaattgcactgaagagatgcccccacctctggttgggcctgggggtgcctggccttccgaaactaaaagagtgggtgggaagactagtgaaacccagttcacggatggggaaacaggcctgaggtcacatttcacttagtggttgtgttgggaccaaaacctgggtgtcctcactgctgccctgagtccagccatggttttcagggggacagtggacagggactcagaaatgtggtgggagggcctccctggcttgggagaccgctctctgcaagggagggggagagaagcagagggagagagaaggtgacacggatggaagagtgggaaggagctggcctggctcagccctaggctgtccctgcagccagggtgtccgggggctggccagtcagagaaagggggccatggactgctgtggcaaatagggagaccaggagacagaccctgcagtcctactacagtctggagtggggtcctaagaagaagggtcccacctcaacccctgtcagtgtccactgtggggtgggggctgacccctgcctttgattgtcattctcctggggaagcccagtctcagtcccctcccccaacactgtccacactgcccctccccactgtttatttattgcacggatctaagttattctccccagccagagcccgagcttctgctccctgggaaaagttggcgtattgggcctgagctgggctttatattttatatcttgcaaataaattacatttttatcttagatttagggaaagccggagagcaacaacaaaaaatgtttaagccggggcgcggtggctcacattctgtaatccccagcactttgggagtccaaggagggggatcgcttgagtcccaggagtttgagacccacccctggacaaacatggtgaaacccccgtctcctacaaaaaatacaaaaattagcccatgcatggtggcctcatgccctgtagtccccagcctacttgggaggctgaggcaggaggatcaccttaagcccagaaggcagaggttgtagtgagctgagatcgcacccactgcactccagcctgggcaacatagcaaaatcctgtctcaaaaaaaaaagttaaaaaatattgcccggctcctagaatttatttatttcctgacttacagcaagcgagttatcgtcttctgtattttgtagactttctaaataaagtcaaattctttctttttccacagaaaaaaaaa

SEQ ID NO: 3767 - DNA, 957 bp, Homo sapiens
  SIMILAR (938)..(813): 571254mologous to Homo sapiens Human secreted protein, SEQ ID NO: 7795,accession number AAG03714,Smith-Waterman Score=140.
  misc_feature (1)...(957): n = a,t,c or g
agcgtcccccaactgagnccaagttttgcangcacgngctnggaannttncgnccnnnnnnnnnnnnnnnnnnnnnnnnnnnnnnnnnnnnnnnnnnnnnnnnnnnnnnnnnnnnnnnnnnnnnnnnnnnnnnnnnnnnnnnnnnnnnnnnnnnnnnnnnnnnnnnnnnnnnnnnnnnnnnnnnnnnnnnnnnnnnnnnnnnnnnnnnnnnnnnnnnnnnnnnnnnnnnnnnnnnnnnnnnnnnnnnnnnnccatccttaaaccattttttgtatagccaaggaaggtcttgaaatagagttggcatagtagaaagcataagaccagaagtcagaactgaggcttttgtcctggcttggagactaaagagctgtgtggccttcagcacatcttactgtatctcagttgtccactctaatgtgaaagtgtttggaatagatgatctctgaagttctgtcagattctgtggttctattatgaaacaaaagccctgccagtcactgagattaataaagtctaaacagcgcaaatggagacgaagttagtcatggtgtcagggaaggctttgaatggaaggaacaagatgctggatctgcatgtgtgaatcggcatgcacaaaccaggcacactaatatagctgaatttctaaagtaagtaaaaaaaatgtttaaatgcatgaatgtagtgtgggaagttaaaataagaaaaaaaaaatttaaagattgatttttacatcctattgctcctaaggaagatttatttacaggaaataaagttttcttctcatggaggcactgaaagaaaggctcataaaaattccctgaaaagttcattggtgcagggcttggtggcatgtgcctgtgttcccagctagtgggaaggctgaggcaggaagattccttgagcccaggagtttgaggcaagcttggacaacacagtaagaacatctctctaaaa

SEQ ID NO: 3768 - DNA, 1732 bp, Homo sapiens
  SIMILAR (1425)..(1727): 361254mologous to Homo sapiens Human myelin oligodendrocyte glycoprotein gene,accession number AAZ29204,Smith-Waterman Score= 127.
catgctccttattaaacatcattcacaattttttttaaaaactaagcaaaccaacaaacctctttagaaaacaaaggacaaatgttttaataatcaagatccaaccagccaaaattttagaatgtgaaaaaattgacaagaataaaaaataaaaactttctcatgtttcatatttaccacttccacatatggcttcatttcccaagcttgtatattagtgttatctattataactggagatcttccctgatcgatagcttgttttgctgaaataaaatataaatttaaaaataaaaaaacaaattaggttaaaaaccacacaaaagttaaacatttaattattaaagaaatgtactacgtcccctgtaccttaaaacccaaaactgtgcaatcctccttcagtccagtatccatgaaaaaaagaactcccactagattgaaagggaattaaaggacacaaccatatgccaggtgcattctccagacctggatgctggccttggacaaactggctctgaaaggcattttggctgaacttacagcctaataaaggcttcaagtcctaggactaactttcacttatgggaaatataagagatgaacaatttacatctgaatatagactaagtaagagaagaggtgaaaaattattttgacacggaaggatggaggttattaaatgaaaatggcaagttacaagacaatagttaaatatgatcctatttaagtcaaaagatagagctggggaagacttatggagatattaaaattggtcgcctgtaggtggtaagaatattttcatttaatattttatctgtattttctcttttttgggaaagttaccgcagatgattatctgtattttctaattttctacaatgtacaaataatgcttttgaagtaaggcttatgtttttgaaaagttatggatttaagtcattacttaccagcaaaactttatatgccaagtagctaaaaatcatagttcaactgactttgtgggatatttcttaggaactatgggtcctcaaattgtgagttgctgtaggaatgggaacttttctggaactattatctccccatcccaaatgcccatcttttgcactatggaggataaggaatcactgttcacaagggctggggtgttgggtagctcacacctataatccccagcactttgggaggccaaagacaggtggatcaccagaggtcaggaattcaagaccaccctggccaaaatggcaaaacctcatctctattaaaaataaaaaaattagccaggtgtggtggtatgcgcctgtagtcccagctacttgggaggctgaggcacgagaatcacttgaaccttatgaagtggaggttgctgtgagccaagatcacgccgcagcactacagcctgagcaaagagtgagactctgtctcaaaaaaaaaaaaaaggccaggcatggtggttcacacctgtaatcctagtccttagggaggccaaggcaggtggatcacaaggtcagcagttcaagacccccatggccaagatggtgaaaagccatctctactcaaaatacaaaaattagctaggcatggtggcaggcgcctgtaatcccagctacttgggaggctgagcaagagaactgcttaaacctgggaggcggaggttgcagtgagccaagatcgcacccctgcactccagcctgggtgacagagcaagactccgtctcaaaaaaaaaaaaaaaaa

SEQ ID NO: 3769 - DNA, 480 bp, Homo sapiens
  SIMILAR (215)..(475): 681254mologous to Mus musculus putative,accession number AK009937,Smith-Waterman Score=301.
gacgacagatgctcagagttgagtggagccttgcccagagcccagcgctcgcgggctgtacccatccctgccagacccagaaagaggcccagctgcagggaatcagggaagcccagggctgggtgggtgtcggcccagagcccaaccacggggtggggaggggggcatccacaatccacagtctccgggggacgtaaccgcgccctgctggcttcagtacgtttcaggagacggcagcgaggctaccttgcatggtgtggtggacgagctggtgcggttccggcagaaggtccggcagtttgcgctggccatgcccgaggccacgggggacgcccggcggcagcagctcctagaaaggcagcccctgctggaagcatgcgacaccctgcgccggggcctgactgcccacggcatcaacatcaaggaccagaacagtacaacatccacgtgggaactgctggatcaaaggacaaaagacca

SEQ ID NO: 3770 - DNA, 636 bp, Homo sapiens
  SIMILAR (169)..(576): 581254mologous to Homo sapiens GAP-like protein,accession number AF251038,Smith-Waterman Score=407.
atggcattaaggaagaatgaagtttttgaaggttgggatggacgaaaaggtgtttctcatggagagggatgctttagcaaaggctcaaacattggggcatatttaggcaagagccaagaacagtttgaagggaacatcagaggaaataggcaaataatagtaaataatgaatcaaaactaaagatatctgaagaggacctaactcccaggatgcggcagcgaagcaacacactccccaagagttttggttcccaacttgagaaagaagatgagaagaagcaagagctggtggataaagcaataaagcccagtgttgaagccacattggaatctattcagaggaagctccaggagaagcgagcggaaagcagccgccctgaggacattaaggatatgaccaaagaccagattgctaatgagaaagtggctctgcagaaagctctgttatattatgaaagcattcatggacggccggtaacaaagaacgaacggcaggtgatgaagccactatacgacaggtaccggctggtcaaacagatcctctcccgagctaacaccatacccatcattgtgagtagaataccttcccgtggctggtacaacacctttccgcttgaatgggccctggatatatga

SEQ ID NO: 3771 - DNA, 706 bp, Homo sapiens
gctgtgtctcacaaaccttttggtgtgcttaaatggcctaacaatcaccaatcactaaatgaaccagtctctgatccacctttagtgcctccttctccctgcaggctcctaccacctccactcactccccctacctctcctcagatactcttctctagttctgctgctgccactgtcactgctgtctcagctcctgtctttctgcttcagtccttcccacctcaatacctccagatttagaccatccacattttccttcttaagacccggctcaggtcttatcaccctcaagttctgaacattgaaacaaatcctacttgggctactactaaagttccagtgttagggctaggttcctcagccccaaatctaccttctttctcccaagtcttacttaccattatttactattatttgcctatttcctctgatgttcccttcaaactgttcttggctcttgcctaaatatgccccaatgtttgagcctttgctaaagcatccctctccatgagaaacaccttttcgtccatcccaacccttcaaaaacttcattcttccttaatgccatctgctccttgcccctgcttttttctccatttttgcagcacttggctgtactttattatgcaggaatcaaatctgcccttctattagattatctgagtatacgacctaatgcttttactaaaagcaagggacgcgtggg

SEQ ID NO: 3772 - DNA, 1612 bp, Homo sapiens
  SIMILAR (35)..(367): 991254mologous to Homo sapiens Membrane-bound protein PRO1383,accession number AAY66697,Smith-Waterman Score=578.
tttcgtccacgcttctcccgctccgggccccgcaatggcccaggcagtgtggtcgcgcctcggccgcatcctctggcttgcctgcctcctgccctgggccccggcaggggtggccgcaggcctgtatgaactcaatctcaccaccgatagccctgccaccacgggagcggtggtgaccatctcggccagcctggtggccaaggacaacggcagcctggccctgcccgctgacgcccacctctaccgcttccactggatccacaccccgctggtgcttactggcaagatggagaagggtctcagctccaccatccgtgttgtcggccacgtgcccggggaattcccggtctctgtctgggtcactagccgctgactgatgtatgtgccagcctgtggccaggggctttgtggtcctccccatcacagagttcctcgtgggggaccttgttgtcacccagaacacttccctaccctggcccagctcctatctcactaagaccgtcctgaaagtctccttcctcctccacgacccgagcaacttcctcaagaccgccttgtttctctacagctgggacttcggggacggcacctcctctctgccacgactgggggtcccggagaacactggtgaatcagccactagccctgcctttgtggtgtcttcacctaatagaggaggccattggtgcccaaaacagccatttaaggaaggccttctctggcctcggtttgctcatctggaaaatgggccagctgacctggagccctggctggctctaggctgtgatgacaggacccagatggtgactgaagactccgtggtctattataactattccatcatcgggaccttcaccgtgaagctcaaagtggtggcggagtgggaagaggtggagccggatgccacgagggctgtgaagcagaagaccggggacttctccgcctcgctgaagctgcaggaaacccttcgaggcatccaagtgttggggcccaccctaattcagaccttccaaaagatgaccgtgaccttgaacttcctggggagccctcctctgactgtgtgctggcgtctcaagcctgagtgcctcccgctggaggaaggggagtgccaccctgtgtccgtggccagcacagcgtacaacctgacccacaccttcagggaccctggggactactgcttcagcatccgggccgagaatatcatcagcaagacacatcagtaccacaagatccaggtgtggccctccagaatccagccggctgtctttgctttcccatgtgctacacttatcactgtgatgttggccttcatcatgtacatgaccctgcggaatgccactcagcaaaaggacatggtggagaacccggagccaccctctggggtcaggtgctgctgccagatgtgctgtgggcctttcttgctggagactccatctgagtacctggaaattgttcgtgagaaccacgggctgctcccgcccctctataagtctgtcaaaacttacaccgtgtgagcactccccctccccaccccatctcaatgttaactgactgctgacttggagtttccagcagggtggtgtgcaccactgaccaggaggggttcatttgg

SEQ ID NO: 3773 - DNA, 1819 bp, Homo sapiens
tttttgtagttcaatacttttttctttttaattcatactgtacttccatggctctagctactttacattaagatttggctgggcagccttgtgtgtttctaggtacctagcagtaagttttctgaccttgcgcacagcgccaggcaaagtacagttatagatccaaatacagatggccagacaactcgactgcactcgaccccgtgttctttcccatagatggcccagtgcaggtgttgcggctgctccctctgcctcaccccactccaccccacgtcaggattatccaggggccactatggccttctggacccatccctccccaacttgggaggtctaggttgagttggggggaaaaaggcaccatgggtttgggaagatggtctggtccatgcagagagtggtctggcccttgagtgcagggtaggaaaatgtggggagccacaagctattgttggcaaaaatggctgttttgactatgcaatctcagcacgtggcacccaagccccaggccgatgccccagacagagccagctgcccttgcttggagcagaggccacccttttgcttctgcaatgtcttattgtattgagagaagcaaggaggggctgaagaacgacaatgttctttaagccttcagatgttggggagatcgtcagcatcagctcctcctggccggccaaggtgctgctccattagctgccaagactccagtcctggctccagggcctgttgaggatctccagtcacaagaccccggagctgttgcacagaacatcaaaacagggagctggttgggcccttcacagccatggccagagcagaagtgaggtaacaaggctgggcagagaggtgggaagggagctctctaaatagtgtgccaagtttctgctctgcactatgacagcaagcaggggccttaaaagatggccttccaggaaaatgctcctctcagacccaaaatgcatcttctagaagaaaacacagaggtgaagaggattggggccaacctgctggaggttgggggaatgaaagtcaaggatgtcaaggatgtcaagtggtgaatgggatgattgtcccatagcctagagacaagtggcgaaggtggggagagtcaggaaggggcccccggagattcctcctggaggaggcaggcagggtatgaggttttagggaggcccagagccctgccatctgggggaagggagaagagtgctatttctcctgggggcagtaggagaaaagggctggctttggctgcccctgaaagagctttaaagaaagtggccatggtatgaacacagaaagtacccttctgggaccacaagcatccagaaagatacttcccctagtcctttctcccaggatctcatcttagggatactgccctggaaattgtaataggtattagttccaagtttgggtggggggcagggacacggagagaatccacttctcacaaaagcattcctctttgagctctctttgtcctccccatgtcattccaggttcttagtgtcagtgttctaaggcaaacccaagggttttagccaaagcttcatactaaatccaaaccctatcttaacaaaagagaagtgctagaaccagaagtggctactctccactgtttcttctaccaataaagaggaaggatggatagatgaaaggctgaacagaccctagagatagaagatgagctccattgaaaagaatgttcttctcccaacttagagaaagtccaaaggaagatcccttcacaaactaggccaaagagaaagaaacccttctaagtgaatactgagcaatacatcaagctcga

SEQ ID NO: 3774 - DNA, 961 bp, Homo sapiens
gttccacaaacaaggacagaaagatctttcatacaccaagcatcaggtggagtcctgagaacagtattgccttcgttgtatggataaatgagcccaagagtaaagcctgtgtggatcagcctaacaaacctcagaatcaagctttgaaaagatcaaactgaccccatgtaacttacatgtatggcagaagaaaactaaggctctttaaaaaaataaaacaaaatcctgcacagaagataaaattaatgcctagcattcaatcaaaaattagcaggcatacaaccatgcccccataactagggcaatcaatcaatagaaatgacagaatcaatcaacagagatggatctagaagtgatcagagattacagaattcacagacaaggacattaaaagctctcttacagaaatgctccctatactaatagaaggaaagcatgaatgttataaggagtgaaacagaagatataaaaaggactcaaatggaatctctagaaatgaaaatacaaaatggatggatgagattaacagaactgcataacagttacaaccataatctacaatgtctaagcacatggctatgccatgctctctcccttaacactcatgcagtctaggtttaacaaataactgtttcatgcccatcatcagttgcaggttgatctacagtcatccagttgtctaaagatctttctccactccattcctaaggaagggctcatgagaacaatacttcctaagttacagctcactgagaagtttgtgtgtttttcatctgaaaagtcggttttgctggaacaaaaaatgctttactcacattttcttttcttgagtgccttaaacaggatactcaatttcttcttcataaagaattgtcatctgctgggctcagtggctcactgctgtaatcccaccactctgggaggccaaggcaggtggactgcctgagctcaggagttcaag

SEQ ID NO: 3775 - DNA, 636 bp, Homo sapiens
ggggctcacagggttcccgcagatgctcaggccggccaggaatgcatctctggctctctgttcccacggatgtcactgcctcagccagcctcccccagagcccgccagccgctaagccggggccacacctgggggtgatttcatgcctcacctccagtaggcaccttggtttctttgggctaatctctggctcccttgcgctaactcttgctctcacccagctaatccctgcctcaccctgactgccccaggggctgaccactaacaaccaacctggccctgtctgggggttccaggctcctggcctggccctgaccagttcttaattaacctttccttcaccttgactaactcctgccttcctggtctgttcctttcagcagaaactaatgggttgtggatttttttctgactaacaacaggtctaacattcctcgttactgttaacagcttggatgtcggcatggctgggaaggggctaacacagctttgaacttggctaacacaggtttgaacttggctaacacaggtttgaacttgactaacacagggaaaagcatagctaacaattttgggcgtggtggctgctctgagtcagaacaatcagaagtcggtaaagatggtagttttctaaag

SEQ ID NO: 3776 - DNA, 483 bp, Homo sapiens
caagtgcctgatttgtcaaatgagagctttgtcgtttcttcagatgctgaccagtatctgaattcagtatctctgaattacaggagaggagaaaatagatgaaatactgctgtcagtaccacggttgctggctcttgtttagcttctgagtcagctggggcacccctgccatctgctctcagtgtggggctgggtgtccctgcaccatggaacaagggcaggtcgtgtcttcccggaaggcccagcacgggtgaagatttgggggcagattttattcccaacccaaccctgggtctatacattgggatatgtgcaggttcccattcgtttcctggggagccatgtgtccctgaggccagagagtctcctcacccagctcagactgaatgcttttgtttttgtttcagggcatttgcacgccaaaggcaaagaagaaaaaatgtccaaatcattaaagaactacattactattaaaaaaaaaaa

SEQ ID NO: 3777 - DNA, 1641 bp, Homo sapiens
acagagcatttttccattttaataagattaacagacctactcaaggtaattttattctgtgtattgtaagtagggataagacgacttagaagacgtgttacatacgaaaaatgtacaaggttaaacttgtctgtactgaattacaaaacctgcacgagcatgttaataaaagagcacacttaaaaacattctcgaccattatttagcctctaaaaattactgaagttcaacagtagtaaatagaggaagctcttacatatatatatatatatatatatatatatatatgatttaatctactggcagttttacttaatgtaagtatttaaaaggtcacattgctattgaatgagtctctagatcaattttagaattgtctctcaaaacttaagtcaaccaaaatattatttcaaatagtaattccaattctgaagaattttaataccagcaaatatattatggcctcatagtagtaactgaaccaactttccaaagtgcctggtagctgtccagatgaattaggctgctttggaaaactgtactgtctctacagccattgagaagccattcagtgccctggtaggggcatgagactttccagaattcacacagcagtctatgatccctcaaatgtaagaggacagggggtcagcctattttctcttctcagtgaatgtggagggcccaagcaatatgacttgcaaccctaagctagaagcttgggatctacagtaaggaggaaggagaattaaagtagagaaagaaaatgtataaggagaaagggaaaagaaggaccaaagagggaaaagaacaaaccccaaggatgcctgctaatggcaggaagtggtaaagtgcctataactacaacttacaagccacccactaattctaatgccattcatttgcctactcccaataataagaaaagctggctttactggaatatagaatctagagcaacattacccgcctcatgttagtgagtaactagtattctaaagttgtttgccatacatatcaagttcttctaacctttgaagcaaaccaaaacacttcaaaactcagggctcccagggctgctgctccagattcccagcattcagcatgcttcattatgtggagaaagacatttcaagacaagctgtatctatacaccttcagaaggaacaaagctctaagaaggtgggattatgttaacacatagtacatggtttagcgtttctccacatttcaaactcaaaatagctcaataactatgctgctacatgagcattgattctgaatgttcataatataaacttcaatttgaagcaacaatgttacacagttcagctgttattaccaacctactctgtaagttaaaatacaaataaaatattaattttattgagtaactaaaaataagttcccactgacttaaaatcgtcaaatggctaactctctctcaactaagaggagcaccacagatggaagcagagaggccaactgaatataaaataaaatttgtcaatccactctataatctgcacttttaaaatccccttttgcatatatgtatgtataggatcacagttgcccaccaacattatgtcaagtctgccctaaagatgacaatttactgtaacgttaacaatttatgca

SEQ ID NO: 3778 - DNA, 1608 bp, Homo sapiens
  SIMILAR (1)..(1605): 1001254mologous to Homo sapiens T-cell-specific T-box transcription factor T-bet,accession number AF241243,Smith-Waterman Score=2942.
atgggcatcgtggagccgggttgcggagacatgctgacgggcaccgagccgatgccggggagcgacgagggccgggcgcctggcgccgacccgcagcaccgctacttctacccggagccgggcgcgcaggacgcggacgagcgtcgcgggggcggcagcctggggtctccctacccggggggcgccttggtgcccgccccgccgagccgcttccttggagcctacgcctacccgccgcgaccccaggcggccggcttccccggcgcgggcgagtccttcccgccgcccgcggacgccgagggctaccagccgggcgagggctacgccgccccggacccgcgcgccgggctctacccggggccgcgtgaggactacgcgctacccgcgggactggaggtgtcggggaaactgagggtcgcgctcaacaaccacctgttgtggtccaagtttaatcagcaccagacagagatgatcatcaccaagcagggacggcggatgttcccattcctgtcatttactgtggccgggctggagcccaccagccactacaggatgtttgtggacgtggtcttggtggaccagcaccactggcggtaccagagcggcaagtgggtgcagtgtggaaaggccgagggcagcatgccaggaaaccgcctgtacgtccacccggactcccccaacacaggagcgcactggatgcgccaggaagtttcatttgggaaactaaagctcacaaacaacaagggggcgtccaacaatgtgacccagatgattgtgctccagtccctccataagtaccagccccggctgcatatcgttgaggtgaacgacggagagccagaggcagcctgcaacgcttccaacacgcatatctttactttccaagaaacccagttcattgccgtgactgcctaccagaatgccgagattactcagctgaaaattgataataacccctttgccaaaggattccgggagaactttgagtccatgtacacatctgttgacaccagcatcccctccccgcctggacccaactgtcaattccttgggggagatcactactctcctctcctacccaaccagtatcctgttcccagccgcttctaccccgaccttcctggccaggcgaaggatgtggttccccaggcttactggctgggggccccccgggaccacagctatgaggctgagtttcgagcagtcagcatgaagcctgcattcttgccctctgcccctgggcccaccatgtcctactaccgaggccaggaggtcctggcacctggagctggctggcctgtggcaccccagtaccctcccaagatgggcccggccagctggttccgccctatgcggactctgcccatggaacccggccctggaggctcagagggacggggaccagaggaccagggtccccccttggtgtggactgagattgcccccatccggccggaatccagtgattcaggactgggcgaaggagactctaagaggaggcgcgtgtccccctatccttccagtggtgacagctcctcccctgctggggccccttctccttttgataaggaagctgaaggacagttttataactattttcccaactga

SEQ ID NO: 3779 - DNA, 819 bp, Homo sapiens
  SIMILAR (253)..(813): 991254mologous to Homo sapiens T-cell-specific T-box transcription factor T-bet,accession number AF241243,Smith-Waterman Score=1032.
gtgtacatcgcagcctttgctgtctcggcctactcctccacataccaccgagccggctgcaaacccttcaaccctgtcctgggggagacctacgagtgtgagcggcctgaccgaggcttccgcttcatcagtgagcaggcagtcacggcaatgaactgggtttcttggaaagtaaagatatgcgtgttggaagcgttgcaggctgcctctggctctccgtcgttcacctcaacgatatgcagccggggctgcatgtacacatctgttgacaccagcatcccctccccgcctggacccaactgtcaattccttgggggagatcactactctcctctcctacccaaccagtatcctgttcccagccgcttctaccccgaccttcctggccaggcgaaggatgtggttccccaggcttactggctgggggccccccgggaccacagctatgaggctgagtttcgagcagtcagcatgaagcctgcattcttgccctctgcccctgggcccaccatgtcctactaccgaggccaggaggtcctggcacctggagctggctggcctgtggcaccccagtaccctcccaagatgggcccggccagctggttccgccctatgcggactctgcccatggaacccggccctggaggctcagagggacggggaccagaagaccagggtccccccttggtgtggactgagattgcccccatccggccggaatccagtgattcaggactgggcgaaggagactctaagaggaggcgcgtgtccccctatccttccaggggtgacagctcctcccctgctggggccgactaa

SEQ ID NO: 3780 - DNA, 1377 bp, Homo sapiens
  SIMILAR (481)..(858): 961254mologous to Homo sapiens T-cell-specific T-box transcription factor T-bet,accession number AF241243,Smith-Waterman Score=658.
atgggcgtttcccatcgagggagggggcgctggcatgagctgctccccaccctgctggcaggcaaagcaccaaggactggggctgaaagcccacacatccctcagacccacctagcctctgggagcccccgaggctgcaagtgctcaggggttaactcctgtgagtgcagcgcgggtgccctggccgaaggagacttgaaagaaaggaacccctccttcaatggaaaaaccatcatgttgtcttgtaagaaaatgtcatggaatggcacaaccatttgccagtctgggaaggagtggagtgtccaggtgggcattaggctctctgatccctcatgcacaaccatttgccagtctgggaaggagtggagtgtccagatcacaatcgaagcaatgaaaagtgacattgatgaggtggctttacaagggatagaattctggtccaatgtctgtgatgaggaaatggatttggccattgaagcttcagagatgattgtgctccagtccctccataagtaccagccccggctgcatatcgttgaggtgaacgacggagagccagaggcagcctgcaacgcttccaacacgcatatctttactttccaagaaacccagttcattgccgggactgcctacctgaatgccgagattactcagctgaaaattgataataacccctttgccaaaggattccgggagaactttgagtccatgtacacatctgttgacaccagcatcccctccccgcctggacccaactgtcaattccttgggggagatcactactctcctctcctacccaaccagtatcctgttcccagccgcttctaccccgaccttcctggccaggcgaaggatgtggggggatcctctagagtcaaccgcgaggtcagcaaggattttgccgatttcggaaccaccatcaaacaggattttcgcctgctggggcaaaccagcgtggaccgcttgctgcaactctctcagggccaggcggtgaagggcaatcagctgttgcccgtctcactggtgaaaagaaaaaccaccctggcgcccaatacgcaaaccgcctctccccgcgcgttggccgattcattaatgcagctggcacgacaggtttcccgactggaaagcgggcaggattttgccgatttcggaaccaccatcaaacaggattttcgcctgctggggcaaaccagcgtggaccgcttgctgcaactctctcagggccaggcggtgaagggcaatcagctgttgcccgtctcactggtgaaaagaaaaaccaccctggcgcccaatacgcaaaccgcctctccccgcgcgttggccgattcattaatgcagctggcacgacaggtttcccgactggaaagcgggcagtga

SEQ ID NO: 3781 - DNA, 2112 bp, Homo sapiens
  SIMILAR (922)..(1152): 761254mologous to Homo sapiens T-cell-specific T-box transcription factor T-bet,accession number AF241243,Smith-Waterman Score=308.
atgcaggagatacatggagcgctggatagccctggagacacggacagtgacatgaagatgcagagacagacacaaacacgctacagagacaaggcaagttccgaggcccacagcccacgcgaccctctcgcgcgcggaggggcgggtcctcgacggctacgggaaggtgccagcccgccccggatgggcatcgtggagccgggttgcggagacatgctgacgggcaccgagccgatgccggggagcgacgagggccgggcgcctggcgccgacccgcagcaccgctacttctacccggagccgggcgcgcaggacgcggacgagcgtcgcgggggcggcagcctggggtctccctacccggggggcgccttggtgcccgccccgccgagccgcttccttggagcctacgcctacccgccgcgaccccaggcggccggcttccccggcgcgggcgagtccttcccgccgcccgcggacgccgagggctaccagccgggcgagggctacgccgccccggacccgcgcgccgggctctacccggggccgcgtgaggactacgcgctacccgcgggactggaggtgtcggggaaactgagggtcgcgctcaacaaccacctgttgtggtccaagtttaatcagcaccagacagagatgatcatcaccaagcagggacggtcagctttagtggtggtagtggtggtggtagcggtggtggtgaagagaaaggctaagccattggagctggtgatggaattggtgctggtggaggtggtggttgtagtgacggtactactggtggtggttgtgacggtgaaggtggtggctgtagatggtggtgcccgtgctggtgctggtggagatcgtggttatcgtgatggtggagggggcagttgtagtgacggtggttgtgatggtggtgatgggtggcggatgttcccattcctgtcatttactgtggccgggctggagcccaccagccactacaggatgtttgtggacgtggtcttggtggaccagcaccactggcggtaccagagcggcaagtgggtgcagtgtggaaaggccgagggcagcatgccaggcaaagccctacatccaccagggtttttgtccccggggcttgaatgtaaaagaggtgaactgtccacaggaacccgcttgtacgtccacccggactcccccaacacaggagcgcactggatgcgccaggaagtttcatttgggaaactaaagctcacaaacaacaagggggcgtccaacaatgtgacccagatgattgtgctccagtccctccataagtaccagccccggctgcatatcgttgaggtgaacgacggagagccagaggcagcctgcaacgcttccaacacgcatatctttactttccaagaaacccagttcattgccgtgactgcctaccagaatgccgagattactcagctgaaaattgataataacccctttgccaaaggattccgggagaactttgagtccatgtacacatctgttgacaccagcatcccctccccgcctggacccaactgtcaattccttgggggagatcactactctcctctcctacccaaccagtatcctgttcccagccgcttctaccccgaccttcctggccaggcgaaggatgtggttccccaggcttactggctgggggccccccgggaccacagctatgaggctgagtttcgagcagtcagcatgaagcctgcattcttgccctctgcccctgggcccaccatgtcctactaccgaggccaggaggtcctggcacctggagctggctggcctgtggcaccccagtaccctcccaagatgggcccggccagctggttccgccctatgcggactctgcccatggaacccggccctggaggctcagagggacggggaccagaggaccagggtccccccttggtgtggactgagattgcccccatccggccggaatccagtgattcaggactgggcgaaggagactctaagaggaggcgcgtgtccccctatccttccagtggtgacagctcctcccctgctggggccccttctccttttgataaggaagctgaaggacagttttataactattttcccaactga

SEQ ID NO: 3782 - DNA, 1318 bp, Homo sapiens
  SIMILAR (811)..(716): 931254mologous to Homo sapiens Human secreted protein encoded by gene 34,accession number AAY00291,Smith-Waterman Score=150.
ttttgttattttttttttaatttaaagaaaacttctttattaagtaaatggacagttggtacacagatattgcaaaaatttcgaggcgggtacatgaatgactgaaattcaggagacgcggggagttagcacagaaacactttcctcattcagagctcttttggctgcgaagaaacagacacccaatcaaaatcagcttcagcaaaatgaagagaatgtatcctgaacaagggacgctcacagggcctaaaggaagagtgctgggccccctgggaggactgagggaagccggcaggtccctgggaggcggtgcccggctgctctccaggcgcctgtgattcctctggtccctgccttggctatgccgtatcttccctctgagccagagcccattttctcctacccacattccatgcaaggtgccccatccccccgcaacacacacagacaaacacacacacatggacacagtccacagctcccagggtttcctatgtgttcaggtaagggacctgcaaagcctgaacagcctcccctaaatctagatgcccacctctcatcctttcagctcccatcagaggatcaaggggcccaaattcgcagaaaaggggagggtctaagatgagcagtcaccctgccaagaggtgtctgcctcaacattagtggcgtataacaatcccatgaggtagctttaacctcataggtaatgaccctaagaggtaggaaattcagtgcctggtccctcagcaggaaatgacacagccaagacttgaaccgggcttgtgtgatgctgcactagcccccgggtcatcccatcagccaagtccagcccacagctaccatcccagactccagcaggttacaggtccatcgagaggcatttctcaaaatcagcaatccggtgtttgcccggtacaccaggaaatgagtatcccagcttcacagggacactgactggaaggaaggaagacttctctgaaggagcacagagctctagaaaccagagaagtttcctctgagccccttgggtctgaggctgccaggttcacactgcagatacttgtctcagggcaggagaggaggctcatttgcatatacttgccaaaaatcacaagcagacatctagagatccccaggagaagctgacacctggctgacacctgctgacagtaactgctcctcccacctcctggaagctatgttaggaggaccctcccagagggcaagggaggagagaactgacagacccttctacccaggggcctcatgtacttcccagcccatgtgcctggaattccaccacgctggtcagagcggc

SEQ ID NO: 3783 - DNA, 397 bp, Homo sapiens
tgaatttcagactctcgtgtcctatcctaggctgaccatttcccatgcaccagtcccatttcccctgagtcgggcactaagctctgtgaggccagtcactccatcctctgttctgggatcttgcccaggtgccagaagagtgccagtgaacttgcggatatggaagattgtacacgcagagtgagatgggagtgggagggccaatctgatacagaagggggtgaaggcaatcctcctctggaatgtctcttccctcttcagtctgggttctgcctcagccacgaactgggaaggagtgaggaacatcccaacggcaatgagagtatcccagtgactccaaacaggaggaatcagtgttcagaaagtcaggcactaagctttactgaaacctactggg

SEQ ID NO: 3784 - DNA, 1680 bp, Homo sapiens
caatgagcaggggctgggagtagagggtttctggggcctcagggttctgggaaagcaacagctatcagagagagaagggccagaccccatagcctcttagattcctggcagtagaaggagaaggatgggtaaattgacctctgaagtccctgaccattagcatggtctaggatcctttctagaaggaagatctgaggctctggtgctcagggggatggcttgggccttttctctcaaccttggctgagcctaccccttactttgccaaagacttgaggaccctgtatgtcttggagttcagtcccctcctctgtggggctcaggtgattgaaattttgggatgaaacatttctctacttcaagaccacctctccctgcaaacaccacacacacatggcatgcatgtacgcacatgcgcacacacacacgcacacacctcaataatttctctcaagtttcctgagtctccagaaaaacagcactaacgctggacctgtctactctcagaacccggcacagattctctcttgatctccttttggaatctgagattcttagaagacaggatagggttaaatttagtagcagctcagttctagctaaatcactagaggaagttaattaactttaagccttcatttctccagcactaaaatgggagtggagagttggggtggaaataagacatccttaaaaggttaaattgtctgcaaagcacctagcccagtgccgagctcccagtaggtgttcagtaaagcttagtgcctgactttctgaacactgattcctcctgtttcggagtcactgggatactctcattgccgttgggatgttcctcactccttcccagttcgtgggctgaggcagaacccaggactgaagaggggaagagacattccagagggagggattgccttcgtcaggggtaagggggtggggctgctcagggggccctaccctttcacccccttctgtattcagatttggccctcccactcccatcttcactctggcgtgtaacaatctttccataatcccgcaagtttccacttggcactcttatgggcacctgggcaagatcccaaaacagaggatggagtgactggcctcacagagcttattgcccgactcatgggaaatgggactggtgcatgggaaacggtcagcctaggataggacacgagagtctgaaattcaaggcacccagctttgaagtggtttgagaagctggaaaccaaaacatgggcctaaaagaagatagggccaaaatacaagaacgaggaatctggaactgaatgtggagaaagttagcccacggaagccatgaaactgtatccctgcacaaagtccctccttccccgcctccctaattcattcatgcccaaaaggccttacgtgaaattcccagcccagagtactcatgacttgagagacgtggacagagccagcttctaccttgcctggccgtctctcccctgtcttaatgtctgctcttgctctaagctccagaagagtggcgggccatgtatcttcaatatgtttttgctgtatgggcaggttgtcttattatgtgatcaacagatgtccaggaactaatgagtggaatttaatattattgtcaaataaaacttgatttgtccaaaaaaaaaaaaaaaaaaaaaaaaaaaaaagtcgtatcga

SEQ ID NO: 3785 - DNA, 2571 bp, Homo sapiens
  SIMILAR (1348)..(1160): 981254mologous to Homo sapiens Human secreted protein, SEQ ID NO: 6223,accession number AAG02142,Smith-Waterman Score=316.
cgacttttttttttttttacatatgcaaaataatcttgtttattagaaaatgaacattcacaatgtaaagtagaaattaaattacaaataagtcttcaatggtcaaaaatggtgcccagaatttcttctcaaaataagttaatctattcttaaacagatgcaggtaagtagtttatccttgtcaaaacaaaaaattaacagatttcactttatgtaagagataaggtttatatgaacaagaagagtttatttttaaatgtaaagctgaacaagatagaatggagatgctttgtgaagttataaatcccttcaaaatatgaaaatcatcctttcaagtttaaatttgttttcaaaaacatattttctcttcttaaatatgtactactcttaacaatatatccataccttaaaatctcctgttgtcattttctctttatacgccaacttggcctactcaagaagacatcaaacatggtgattttttttcctcaaactttatctccttgctcttttcccaatcccatgttacttcctttcgccttcttttgtgccaagatgagcaaggtataatcctccaaagaagaaaatgctccaaagaaaatgtttgtttcccaggctggtcttgaattcctggcctcaagcaatcctcctgccttggccttccaaagtgctgggattacaggcatgagacactgcacccaacctataaagtgcagattatatagtgtttattctcagatttgaaactatttctaacttaaagtagaaaacatttggaaaagtgtttagaaatatttttgcattttcttaacagtgcttatcaatatacatagttatctactagttccttttatcagcattcaacttatgtagaggtagaagttaaacatacagtgttatttagccaacttcaggtaaactcagtaaattgttagattaaagccattttgcctcaaatacttattagcctgactagtttggggctgtcagggatcatccaaattaaaaatccaactaaaattctgcagctctacacaactatgcagacgctagattgaaaactgttgtgttcctccccgccactactgagagatgggaaaaattaaagtaaattaattaatgttttactaattaaatgtttttctccagtttaagggggttgaaaaatagcaataattttaagaaaccatttactgttttgtatatatatatataaaataacacatatctggattatgtttctaatgtgaatttttggcatttgaaaaaaagtaggtatacatattaggctaataggcagtgaagtatcttgatctcttaatcctctgtattgctcaaatattagcattatccatactcatttattaatgtaggggttacttagtgaaaccctgaactaaaataaggcagaggtgtagtattagaagaaagactcatagaaggcaaggtaggatgttaggcacgctaaatggaaaatatgtgttataatttttatttcataagtgaacttgataatagaaaatgcatttttttataaataaaaagtaggtgtctgaataaaaatacctctacttgggtagaggtatttaaaattctataattttgttctgctatggctaattcttacagaaccctctttctggttccactgtatattattttaatgacacttctgcagtgggtattaagaatacagcttcacatttattcatcattgtccattcactcattagttcatgcaaccacaaaaaggtattataagaataatatttcatttctgaggtaaggaaattatcatctagtatgtttttatataacctactattcacaatgacatgtagaattctctctgttattcaacatatgttcttgttcttcaaaatctgcaatatctgtagtctgattcttggagactggctcaccgcaattgtctagcagagctttagaccagggaagtgccacacagcaagtagtttccatcacagtcttaggctagtttattcctgaaatcctcccatatcttacaggaaagagccaatgaggtcttttgtaaaccactcccaggagggtgatggtgagcactattattccacacaccaggctgaatgcccatcgtggtccccagtgagcatacacttggctgatgaacataggcccaagaatccgggctccacttccagatgctgttacccagcccatgtatacaccctgttgggggtgaaatggaggacaagcagattgatattggggtttagttatttaaaagcaaagaaatggtattaccaaactacagcaaacttacaagaatcatttctgcatcttttacttttaaattaaacataaaatgcctcctataaatatagcatttaatattaagtcagattaaaaaaaataaaaggagtgtaaagggaaaaacttactgtctgctgaagccctgggaataataaaattgattaaaataccttttaaagctaacatttattttgtacctgctacatgccagtcactgaggtaggtgctttaaatacatcatttgtaatgttcacacccacgcgtccgcggacgcgtggg

SEQ ID NO: 3786 - DNA, 1613 bp, Homo sapiens
  SIMILAR (158)..(622): 791254mologous to Mus musculus putative,accession number AK009937,Smith-Waterman Score=656.
tgcgggtgtcactctttattgcggggtccacactgtgggtgctggggcccctcccactgagggaaggctgagcctctagccagggctgacatgttgaggactacgcgcggcccaggcctgggccccccgctgctccaggccgcgctgggccttgggcgggctgggtggcactggcctgcggtccttgtcggcgagcggcgggcgcgggcgggcctggctgcagcccacgggccgggagacgggtgtgcaggtgtacaacagcctcaccgggaggaaagaacccctaatcgtggcgcacgccgaagccgcctcctggtatagctgtggaccaactgtatatgatcatgcgcaccttggccatgcttgctcatatgttagatttgatatcattcgaaggatcctaaccaaggtttttggatgcagcatagtcatggtgatgggtattacagatgtagatgataaaatcatcaaaagagccaatgagatgaatatttcccccgcttccctcgccagtctttatgaggaagacttcaagcaggacatggcagccctgaaggttctcccacccacggtgtacctgagggtaaccgaaaatattcctcacataatttctttcattgaagagaatcattgctcgtgggaacgcttattcaacggcaaaaggcaatgtctacttcgatctgaagtctacaggagacaagtatggcaaattggtcggcgaggtccctggtccagtcggagagccagcggactctgacaagcgtcatgccagtgacttcgccctgtggaaggcggccaaaccccaggaggtgttctgggcctctccctgtggacccgggaggccgggctggcacatccgagtgctcttgccatcgctagtaatggtatttggaaagtcaacttggatatccattcaggtgggatagatttagcttttccacatcatgaaaacgaaattgcacagtgcgaagtctttcatcagtgcgagcagtggggaaattattttctgcattctgggcatttgcacgccaaaggcaaagaagaaaaaatgtccaaatcattaaagaactacattactattaaggactttctgaagaccttttcccccgatgtcttccggttcttctgcctgcggagcagctaccgctcagccatcgactacagtgacagcgccatgctccaagctcagcagctgctcctgggggctgggctctttcctggaggacgcacgtgccttacatggaaggggggcagctggcctgcggctccgtcagggaagcgatgctgtgggagaggctctccagcaccaagagggccgtgaaggcggccttggcagatgattttgacacsccagggtggttgatgccatcctgggccttgcacaccacgggaatggacagctcagggcgtccctgaaggaacctgaagggccgagaagtcctgctgtgtttggtgccatcatctcttactttgaacagttttttgaaactgttggaatttctctggcaaatcaacagtacgtttcaggggacggcagcgaggcttaccttgcatggtgtggtggacgagcttgtgcggttccggcagaaggtccggcagtttgcgttggccat

SEQ ID NO: 3787 - DNA, 753 bp, Homo sapiens
ctttattaaaaataagctgtccaaaattatttgacctttatggaataaaccaacaagctcatgcagcaggcttcgtttcctctgtggtaggtttttttttcagctactgatgtcttggttggtagctgctgccctttttcccaccagaggtttctcctgcttaaaaacaacaaccttctttcctttcttccctaccacaggcttcttgactgcaaccccctttctcatctgatttggcctctagtgctgctggtgctgctggtgctgctggtgctggtgctggtgctgctgctgctgctgccaccgccgccgctgccttatccacctggagtttgtggttgctggcctggcaaagcctgcacaggaaaacaaaaacaagtaagtaggcaagccatcaagcagaaaaccaatttcaaacttctccaagttataaaaccagcaaagaagggacttttgtgggcagaaagtgccaactttttagatatagtgataaggaaagttgaaaggactgaagaccaacggatgacagtgcagccgactgaagggagtgggatgccagaagaggtggccgtggagatcagcagcagcgaaagcgctctgggcttagaagaggaaaagggctgcgtgagcccaagagcttgcatcggaaggctccaggaagagcatctgcaaaaaagaggattccacgggatgacccccgacaactcttggaattctaaaatcctatacccttgcccgcacccattcgtgtag

SEQ ID NO: 3788 - DNA, 458 bp, Homo sapiens
  SIMILAR (243)..(458): 561254mologous to Homo sapiens Human secreted protein sequence encoded by gene 55 SEQ ID NO:225,accession number AAB56131,Smith-Waterman Score=166.
  misc_feature (1)...(458): n = a,t,c or g
cccacgcgtccgggctgccctgacagcggagcattttgcagcactccagagcctgctcaaggcctcctcgaaagatgttgtcagacagctgtgtcaagaaagcttttccagttcagcccttggcttgaaaaaactcttggatgttacatgttccagcttgtctgtgacccaggaggaggcagaggaactgctccaggctctgcaccgcctcactaggctggtggcattccgtgacctgtcctctgccgaggcaattctggctctctttccagaaaatttccaccaaaacctcaaaaacctgctgacaaagatcatcctagaacatgtgtctacttggagaaccgaagcccaggcaaatcagaatccaagaagatcccagcctatgcggagacaaaccctccatctcagctgtcaccgtggagctgagcanagaaacactggacacccatgtagatggn

SEQ ID NO: 3789 - DNA, 492 bp, Homo sapiens
  SIMILAR (1)..(162): 981254mologous to Homo sapiens Human secreted protein sequence encoded by gene 55 SEQ ID NO:225,accession number AAB56131,Smith-Waterman Score=265.
gtccccacctgcctgctccagatgaagatccaagaagatcccagcctatgcggagacaaaccctccatctcagctgtcaccgtggagctgagcaaagaaacactggacaccatgttagatggcctgggccgcatccgagaccaactctctgccgtggccactggagagcagaagcccccatctttgaaaagctcctgagtgcaacttaattaccaccatggcaggaacacatggagggaatcggacaggtgatgccagcagttcctgctcctctgtcagggaagccaggcagagcccacagagcatggtccatccagagtgttccctgagccccctccaccatactggaacccctcttcagtgtaggaagtctgaaatgggtgctaattcccttcttcatgaaaccagggccctcttccttcatctaatgcagccactcctaggtgaagaagtgggaataattggaaataaacaacagttctaaaacttcaa

SEQ ID NO: 3790 - DNA, 1352 bp, Homo sapiens
  SIMILAR (1122)..(793): 541254mologous to Homo sapiens Human secreted protein sequence encoded by gene 55 SEQ ID NO:225,accession number AAB56131,Smith-Waterman Score=198.
ttttttttttttttttgaagttttagaactgttgtttatttccaattattcccacttcttcacctaggagtggctgcattagatgaaggaagagggccctggtttcatgaagaagggaattagcacccatttcagacttcctacactgaagaggggttccagtatggtggagggggctcaaggaaacactctggatggaccatgctctgtgggcctctgcctgggcttccctgacagaagaaccaggaacctgctgggcatcaacctggtccgatccctccatgtgttctgggattgggaaatgaactaattaggagctaatgtrrggaaataaacttacttattgggatagggctgcatgatttggggcctgaaatttctcaaacagctatgcaggagggcagctgactgatgcaaattttccctcacccctgccaatggtggtaattaaagttggcactcaggagcttttcaaaagatggggggcttctgctctccagcttcagaaagagaaagaagatgagtgagaacagcggggtatctggctggcttcttcgcaatccaactgtaccttgtggatgcgcagtagccccctgctgtccccaccatcctgcctgttgtcagctgcagctgcaagggcagcctgcatatggggagacatttatcactcatgagcagctgggtcatggcagtggccctggcagctggctggatcatttactggccacggcagagagttggtctcggatgcggcccaggccatctaacatggtgtccagtgtttctttgcctcagctccacggtgacagctgagatggagggtttgtctccgcataggctgggatcttccttggatcttcatctggagcaggcaggtggggacggccatgcggcctgaatgctgtctgaagaaggttttgaatatcccactctccagtcccagatcgaacccaggcgtggacagagagatctgcatttgcctggggctttcggtttctcccaagtagacacatgttccctaggatgatctttgtccagcaaggtttttgaaggttttggtggaaaattttctggaaaagagagcccagaattgcctcggccagaggacaggtcacggaatgcccaccagcctagtgaggcggtgcagagccctggagcagctgcaagataaacggaaccacctgtagttcctctgcctcctcctgggtcacagacaagctggaacatgtaacatccaagagttttttcaagccaagggctgaactggaaaagctttcttgacacagctgtctgacaacatctttcgaggaggccttgagcaagctctgcctggcttccctgacagaggagca

SEQ ID NO: 3791 - DNA, 1329 bp, Homo sapiens
  SIMILAR (610)..(1329): 1001254mologous to Homo sapiens Human VIP2 receptor gene,accession number AAC85220,Smith-Waterman Score=1264.
atggtcggaccacgcagccagcctgacacagccaatcgcgctcccacaggtctgacacagctgatcgccctccaatcgccctcagcccacaggcctgacacagcccatcatgctccacccacagacctgacacagccaatggccctgcacccacagcctgacacggcgatggccctctgcccacaggccccgaaacgccgcacccacccggtgctcaatgaatgcacagtgaatgaccgagtgaacgacccgcccaacatccaggtgcctcggccaccgggtctgctctctgctcctcctcctcccccgatccttcacctcacactcctccaggcatcaccggacatgcgtctttatggactggtgttcttatttctgtcaggtggaactcgccagcgctgctcacctgagctgctagtgagggcagctggcatgtgcgcgccctctacctgcactcgtgttctgttcacacaaagggacagaggccagagccctgggcccctgcagggcccctgccacccatacctcgccccacacatgacctcctgccggctcttctggttctttgctggccggcagaccactgcgggggttcccgtgttgaagcaggtgggctgcaagctgagcctggtcttcctgcagtactgcatcatggccaacttcttctggctgctggtggaggggctctacctccacaccctcctggtggccatgctcccccctagaaggtgcttcctggcctacctcctgatcggatggggcctccccaccgtctgcatcggtgcatggactgcggccaggctctacttagaagacaccggttgctgggatacaaacgaccacagtgtgccctggtgggtcatacgaataccgattttaatttccatcatcgtcaattttgtccttttcattagtattatacgaattttgctgcagaagttaacatccccagatgtcggcggcaacgaccagtctcagtacaagaggctggccaagtccacgctcctgcttatcccgctgttcggcgtccactacatggtgtttgccgtgtttcccatcagcatctcctccaaataccagatactgtttgagctgtgcctcgggtcgttccagggcctggtggtggccgtcctctactgtttcctgaacagtgaggtgcagtgcgagctgaagcgaaaatggcgaagccggtgcccgaccccgtccgcgagccgggattacagggtctgcggttcctccttctcccgcaacggctcggagggcgccctgcagttccaccgcggctcccgcgcccagtccttcctgcaaacggagacctcggtcatctag

SEQ ID NO: 3792 - DNA, 3943 bp, Homo sapiens
  SIMILAR (188)..(1504): 1001254mologous to Homo sapiens Human VIP2 receptor gene,accession number AAC85220,Smith-Waterman Score=2343.
gtgcattgagcgcgctccagctgccgggacggagggggcggcccccgcgctcggggcgctcggctacagctgcggggcccgaggtctccgcgcactcgctcccggcccatgctggaggcggcggaaccgcggggacctaggacggaggcggcgggcgctgggcggcccccggcacgctgagctcgggatgcggacgctgctgcctcccgcgctgctgacctgctggctgctcgcccccgtgaacagcattcacccagaatgccgatttcatctggaaatacaggaggaagaaacaaaatgtgcagagcttctgaggtctcaaacagaaaaacacaaagcctgcagtggcgtctgggacaacatcacgtgctggcggcctgccaatgtgggagagaccgtcacggtgccctgcccaaaagtcttcagcaatttttacagcaaagcaggaaacataagcaaaaactgtacgagtgacggatggtcagagacgttcccagatttcgtcgatgcctgtggctacagcgacccggaggatgagagcaagatcacgttttatattctggtgaaggccatttataccctgggctacagtgtctctctgatgtctcttgcaacaggaagcataattctgtgcctcttcaggaagctgcactgcaccaggaattacatccacctgaacctgttcctgtccttcatcctgagagccatctcagtgctggtcaaggacgacgttctctactccagctctggcacgttgcactgccctgaccagccatcctcctgggtgggctgcaagctgagcctggtcttcctgcagtactgcatcatggccaacttcttctggctgctggtggaggggctctacctccacaccctcctggtggccatgctcccccctagaaggtgcttcctggcctacctcctgatcggatggggcctccccaccgtctgcatcggtgcatggactgcggccaggctctacttagaagacaccggttgctgggatacaaacgaccacagtgtgccctggtgggtcatacgaataccgattttaatttccatcatcgtcaattttgtccttttcattagtattatacgaattttgctgcagaagttaacatccccagatgtcggcggcaacgaccagtctcagtacaagaggctggccaagtccacgctcctgcttatcccgctgttcggcgtccactacatggtgtttgccgtgtttcccatcagcatctcctccaaataccagatactgtttgagctgtgcctcgggtcgttccagggcctggtggtggccgtcctctactgtttcctgaacagtgaggtgcagtgcgagctgaagcgaaaatggcgaagccggtgcccgaccccgtccgcgagccgggattacagggtctgcggttcctccttctcccgcaacggctcggagggcgccctgcagttccaccgcggctcccgcgcccagtccttcctgcaaacggagacctcggtcatctagccccacccctgcctgtcggacgcggcgggaggcccacggttcggggcttctgcggggctgagacgccggcttcctccttccagatgcccgagcaccgtgtcgggcaggtcagcgcggtcctgactccgtcaagctggttgtccactaaaccccatacctggaattggagtcgtgttgtcattgactcgatttaaactccagcatttagataatcttgtgcaaaatgtgtttcagccgtatagtggatccacttttttttttttttttttttgagacggagtcttgctctgtcgcccaggctggagtgcagtggcctgatctctgctccctgcaagctccgcctcccgggttcacgccattctcctgcctcagcctcccatagctgggactacaggcgcccgccaacacgcctggctaattttttgtatttttagtagagacagggtttcaccatgttagccaggatggtctcgatctcctgacctcgtgatgggcccgcctcggcctcccaaagtgctgggattaaggcgtgagccactgcgcccggcccaagagaataggggagccaaggaggaaatgtggaaacgcagttgtgtggcccagcacgagcctgggcgaccaccgggtgacatccgtcccacatcagggcggcctcccaggtcccataagggtagccccctcatctgcaggacagagggaagccagtcagggcccccccggacgttaggaccaggagaaatcaacaggagggcagcccgtcctctctcttggggcgcccacccggcccggctgagccctgccccacccaactccacagggctgttttgcctccccacggaaggcgggctgaggagacaaccagatcaggagagcaaggtcatgaaggaggggacctctccacacaggtgttccgtgggaccctcagcagctctggctctgcctcaggaggtcacctgccgccctgtgggagccgcagagcctgacgctcagccccaggccagctgcggccaggcctgcgggcccctggtgatggggttacgtggggtgcgggatacagctgagtgggaaccggaaacctattctctttttaacaaaaataatcttaggataagaattattttaacaacatataaaactgtttcaagccctcctccccagagctggcgctcagcagccctagcggctgctccttcaggcgaagggtggtttgcagatgtggggagggtgtctggggacgttgctgagctggctgcagaagggtggggatatcagggcacagtctccatgtgtgtgccaagccctggcccccacagcgctcgatggacctcagcaagctgcccagccctggcccaggtgccccgactgtgggactcagttgttctgagcacatttgactccacttttcctttaaaaatgaatgtcttgttcctgtgcattggtggcatcacagaccccagctggggcgcgatgtcaaaggtcgggacagctgtgccgggaggcagccacagggaagctcacacatcctgtcagtgtcaccttggtttgcaaaacccatatccccggtaaaatgaggccggacagaggggctgttaggacagcaaagcagcagtgtccagagacccctcaatccccaaaggtccgcaccctgtcctgcacaccctgggccacgccggccacacccctctgctgcaacaagctcatccctggacttctgggagaatgaacccgaggttggtttggggagacaggtgaggcggttggatctacagaacaacccaccatttctgggggccgcagaggatccatcacagacggatactggggagtaaacggcccaggccaggtgcccaggaaaggacggctgagcatgtggagcgagagggaggcaggtggacgctgcagaccccaggttcagtgcggcccctcggctgttcctcccctgtagggtttggacagacccacccccagccttgcccagctttcaaaggacaaaagggagcatcccccacctactctcaggtttttgaggaaacaaagatttgtggtaactgaaggtgttgggtcagtggccaggtgccgacactgagctgtgacccagaggggacgctgaggaagtgggcgtgagtggacatgtcaggtggttaccaggcactggttgttgatggtcggtggttgggtgtgggcagtcatcagtcatcaggtgtgctcaggggacaatctcccctcaaccgcacatgtgccactgttcagcggagctgactggtttctcctggtagagggccggctgtatcctgacagatgcctggtgagcaggggaagcaggacccagtggtcaacaggtgtctttaactgtcattgtgtgtggaatgtcgcagactcctccacgtggcgggaatgagctgtgtaaatacttcaataaagcctgacttcacatctgca

SEQ ID NO: 3793 - DNA, 2793 bp, Homo sapiens
  SIMILAR (736)..(1257): 941254mologous to Homo sapiens unnamed protein product,accession number AK001162,Smith-Waterman Score=852.
gcccctgctggacagcaaatacgtcctctgtgtgtgggatatttggcagtcttcagggtcacagaaggttctgatatgtgagtcccaggtcacgtgttgctgcttgagccctttgaaagcatttttactgtttgccggaacagcgcacggctcagttgtcgtctgggatttgagagaagactcaaggctgcattactctgtgacgctgagcgatggcttctggacgttccggaccgccacgttttccaccgatggaatccttacctcagtaaaccaccgaagccctcttcaagcagtagaacctatctcaacgtccgtccacaaaaagcagagctttgtgctttcacccttttctactcaagaagaaatgtcaggtttgtccttccacatcgcttccttggatgagagtggggttctcaatgtatgggtggttgttgaattaccaaaggcagacatcgcaggttcaataagtgatttaggtctgatgcctggagggagggtcaagctggtacatagtgctctgatccagttgggtgacagatcctaatcactttattattggcacagacatggtgagtagtattttaaatttaatcctattactcattctccttgttttcctgacttacctgataaatatcttgatttaggattaacttactcttttcttttataaagtttaaattgtttgaggaacagtagctgtatccaatctcgtgtgtaatgcactcgttcagtcactcttgggcttcttcttcacagggtctcataagccatggcacaagacaagatttgagagtggctcccaaactattcaaacctcagcaacatggtataagaccagtgaaagttaatgtcattgatttttcaccatttggagaaccaatatttttggccggctgttcggacggaagcatcaggctgcaccagctgagctccgcgtttccgctcctgcagtgggacagcagcacggacagccatgcggtcaccggcctgcagtggtccccaaccaggcctgccgtgttcctggtgcaggacgacacatccaacatctacatctgggacctcctccagagcgatctgggtcctgtcgccaaacagcaggtctcccccaacaggctggtggccatggctgcggtgggtgagcctgagaaggctggtggcagcttcctggccctggtgctggccagggcgtctggctccatcgacatccagcacctgaagaggcggtgggcggccccggaggttcacagttgcgtggaaaggaagtggagtggacacacggcctctcgagtccacacccactcaccgtccttgctgctgttttgcaacccgcttgatgattggtctagaagttttgagactgaggctcctaagcattgggtgttttttgagccatatagaaatgtgaagttcgtgaagaaagaaacatccaaaaaggccaacgatctgcccctcagcctcacccccagggaggagctggcccggtgcttgtgggcccctcccagcccgtctgttgagggccccatgacagcagaggcagtgccgtggaacgaatcatcgcacagcagcaaaggtaggagggaggggcccgagccgcacagacggcgcagttcagcggagcaggaggtgcaggcggcgcggcttcagggaaaggagcggaaagctagaggagagcatgggaggagcatcaaaggccgggagaatggggcaaagcaagacaagcctagacaagccccacctactgttagtgtctttagacaaccttctcctccctccagagaaagtgcccattctagtgggacacgattccagctgggctgcagccacacggagctcaccggaggccacctggcaagcctctgtgattatctgctgcagacgccgaggcctggagtccctgagcatcgagcctccccggggagcaaatgcactcggcactcccacagccacaccctaggtcgtggagagggtgtggtctgcacctgcccgtcagccacagacacgccccaggtcgtggagagggagagcaaccccctagacgaagtgaggcggggacacgccggggagcacaggctgctgagccagagcctgagcacagtcggagccgagagcatcagcagcaagagcactggctgggcccctctgaacgctcctgtgaggacgttccttggggaatcacttggaagtgctttcagctcagcctccatagccctgcggacctcagtgaagcgcaggcataagtgggcccggccacacacgaatggggcccggcaacccccagggggcaaaggcaccccaccagggggaaaggaacacccctatgagatcaaggcgccccccccatgtgtgtcaaggtggctgtcctcgccgccgccaggcaccccgagctgcaccactgtgaggaggtcatggctgcccagtgccctaaagcactgctgcgtcctccgacgcgagatggctgtgtgccaccgactgtccaaatgccctgccaatgccatcgtgaagcatccgtgtgaaggaaaaagtccaccttaccgtgcgctgtggcatcgatcaggcgtgtggacagtcgcaggcacgcagcggtctcccaacatcagggcacaccgcgatcagactcttcgtaataattatacaatactaattccaaatggaaactggaggcatggagcctatgccggcgtctccagcttctccagaggtaggaatggacactcaggtctccactgcatgctggtggatttgggagagtgtgatccatccaagccatgcgaaaatctgcacgactga

SEQ ID NO: 3794 - DNA, 3283 bp, Homo sapiens
  SIMILAR (2438)..(2746): 751254mologous to Homo sapiens VIP2 receptor,accession number X95097,Smith-Waterman Score=396.
cccctgaagcaaaataaatgaatatgacatgtatatcagaaactttgggaaaaaaaataccaagcaggcatatgttcagtgtaacgaagataatgttgaaagagacattcaaacggaggatatagagaccagggaagtgtggacccagcacccgggagaaagtactgttgtatctggaggcagtgaacaaagagatacctctgatgctgtagttatgccaaagattgatactccaaggttatgtagctttctgcgggctgcttgtcaggtgatggccgttttgctggaagaggatcgcttggcagctgaacccagctggaatcttagggctcaagacagggccctgtattttagtgacagctcatctcagctgaacaccagtctaccattccttcaaaatcgaaaagtatcctccttgcacacctcccgagttcagaggcagatggtggtctccgttcacgacttacccgagaagagctttgtgcccctgctggacagcaaatacgtcctctgtgtgtgggatatttggcagccttcagggccacagaaagttctgatatgtgagtcccaggtcacgtgttgctgcttgagccctttgaaagcatttttactgtttgccggaacagcgcacggctcagttgtcgtctgggatttgagagaagactcaaggctgcattactctgtgacgctgagcgatggcttctggacgttccggaccgccacgttttccaccgaaatgtcaggtttgtccttccacatcgcttccttggatgagagtggggttctcaatgtatgggaagaggacggcctcccgcgcgctgcctgcttcctcaggaagaggacggcctcccgcgcgctgccggcttcctcaggaagaggacggcctcccgcgcgctgccggcttcctcaggaagaggacggcctcccgcgcgctgccggtttcctcaggaagaggacggcctcccgggcgctgccggcttcctcaggaagaggacggcctcccgcgcgctgccggcttcctcaggaagaggacggcctcccgcgcgctgccggtttcctcaggaagaggacggcctcccgcgcgctgcctgctttctcaggaagaggacggcctcccgcgcgctgccggcttcctcaggaagaggacggcctcccgcgcgctgcctgcttcctcaggaagaggacggcctcccgcctgctgccggtttcctcaggaagaggacggcctcccgcgcgctgccggtttcctcaggaagaggacggcctcccgcgcgctgcctgcttcctcaggaagaggacggcctcccgcgcgctgccggtttcctcaggaagaggacggcctcccgcgcgctgccggcttcctcaggaagaggacggcctcccgcgcgctgccggcttccacaggaagaggacggcctcccgcgcgctgccggcttcctcaggaagaggacggcctcccgcgcgctgccggcttcctcaggaagaggacggcctcccgcgcgctgccggcttcctcaggaagaggacggcctcccgcgcgctgctggctttatctgggctcctgaggttctcctttgagtgtcatcacacccacacttgcgactccttcccgccacagagggagacctcagagtggacgtccagtctctctgtgcgggccaagtgtacacagttttgttccgtcacaacttccacgacaggccagtgtgaggtttttgagctggtgctgactgaaaactgtcagctgcccaaggacctgggagctctgctccccactcctggtgcatcaattagagtgcgctcagtagtcacattgcagtccgcacacttctcgtactacatgcgagacagcagtcgcacatgtagcgagaggagcttcaccatgagcgacacgctgtattcattgcgccaagagacgttctcactcgacacgatcagcgcacagcattactattcaccagcgccggacgaggtttgccagaggccacgaggtggctatactgctcaaattgttgatcgggtagccatgcaaccggcatatctttcccataaaggtaatgaattttggggcactacacaaacactgaatgttaaatttctgccttcagatcctaatcactttattattggcacagacatgtgggacagcagcacggacagccatgcggtcaccggcctgcagtggtccccaaccaggcctgccgtgttcctggtgcaggacgacacatccaacatctacatctgggacctcctccagagcgatctgggtcctgtcgccaaacagcaggtctcccccaacaggcaaacagagaaacagaacaagaagaaacggatgtttggaaggaaggagtttagatacaagcaaggatttaacacttttagagttacgttacaatctctgacaatgacttacccgttgcatgtggttgagaagcaggtgggctgcaagctgagcctggtcttcctgcagtactgcatcatggccaacttcttctggctgctggtggaggggctctacctccacaccctcctggtggccatgctcccccctagaaggtgcttcctggcctacctcctgatcggatggggcctccccaccgtctgcatcggtgcatggactgcggccaggctctacttagaagacaccggcgcgcctttatcggttgtatggcgggtgaccacggcgcctaaaacggtgttagatgcgcggaacgccgggcaccttttgttcgtgtttatatcccgggataccccgggccaccttaagttcagtttttatattcaggttgaacgccccggccacctttatgatccagcaccccgagtgcacactgtgagaggtcatgctgccagtgccctaaagcactgctcgtccgcgacgcgagatgctgtgtgccaccgactgtccaaatgccctgccaatgccatcgtgaagcatccgtgtgaagtaaaaagtccaccttaccgtgcgctgtggcatcgatcaggcgtgtggacagtcgcaggcacgcagcggtctcccaacatcagtgcacaccgcgatcaggtgtgtggacagtcgcaggcacgcagcggtgctgcagcagcagggccaccgcgatcagggcgctgggtgcccttccagggtgacctcacgggtgcccactgcagttcctgcttctccccacgggaactgagcgtgccgctgggaacacagcactcactgtgcacagttctgcacatggacttatgtggacaccacctgcttgcattcatcccctcctcctcatctctcccttgctga

SEQ ID NO: 3795 - DNA, 648 bp, Homo sapiens
  SIMILAR (1)..(84): 531254mologous to Homo sapiens PRO2550,accession number AF130089,Smith-Waterman Score=65.
tttttttttttttttttgaaacaaaattttgctcttgttgcccaggttgaagggcaggggcaccacctcagctcactacatcccagctgggttgacaagagcaagactctgtctggggaaaaaaaaaaaaaaaagccaggcccggggactcacacccgtaatcccagcactttgggaggcccaggtgggcggatgacttgaggtcaggtgttctgcccgcctcggcctcccaaagtgttgggattacaggcatgagccactgcacccagccattgtttctaatgcttataacttatttttatctcttaatgcatcagctggggcagtcagtacaacatgaacagtgataaaggagatatttttcttgttcctgacttaaatgggaatgtttctaaaattccaaccactacctcagtgtaagacaaaaggtaggtacccctacaaaataaatctggtgacgtatttaccctctaaattaagtgttcaagtactcattagctcattaagaaatggctaggccagaaaatgatcaggttagttctcaagtccttatcccagcacaatgaaacttaaagtagtatttccatagcgcaatagccatttaagtttctgctgcaacgagggtctataaaacaaaagcaatgtaat

SEQ ID NO: 3796 - DNA, 1810 bp, Homo sapiens
aggatacacagtaaaacagtgatatcttggagacaagttatcaaatccccccacactgagcagatgccagacaacagttgagtgcgcaggaaggacacaccaggaccaggcagttgcttcaggcgcttttattaggttccactgcaggggctggggtcaatgtaatgcaaaatccaagcccagtgatgcaacacctgtgagccgaaacagagccgaagcaggagcacctgtgtcccaggagcagctggttggagggagccagggccaggccccaccgtcctctcgggaccaggagactggcagccgctgtgttcacctgggcaggtgtgcacccagtcacccccacttggattatgggtgctggtaacattgagagggttgtgtccacaccaaagggcaggttgaagatgccgaggttggggcttgagacctcccttcccacaaagaggaggtggctgagcttcccaagggccttgaactctcaacagcagggcttcaccccccaaagcctgtatgcttagctcttgactctctttgggacaataaaataaagtgcagttactgaacaaagagtaactcaaaaccagaatcagacaaaccgccaatgcttttcctttagctaaaagacaaaagaaaacatgaatgatgtgaatgccggaacttccagagtaagggaaatgctggtggaggacaacggaaactataatagcgtggtggataaggacgaagcgaagtgggaagaggaacttggcaacgcggctctctctagaagtccgtgctgtccagcctctgcccagtggtgggggaaggccttggactcacagggaagcaatgcaggaagccttggccacctaggctcacagctcatctcaggaccagaggagacagcagaggacaaaacttcagtgtgacagctgctaggagggagagcagacagcccgcggtgggcaagctgggagttgcatccgcagcagtccgcttcaaccaggctccttctccaacccttcctgaccctccacaaaagctcggccgtgaccagacacaacccaactggcccctggtcccaaagagcaagatgagctgcttgggccttccacttggtgtcccatgcccaggcggacctggaggtgtcagccatggccctgaccacttcagaagccaacaggcaaatgttctctgttcatagtgccaagaatgtgggtcacgtgggcttaccccccaggatggacacagaagtccctaagcagtctgcagctgggccagcctctgctcgtgggtgcagagcagcccagatgtggccatcattaaggcaaagaagcatcgagatgcccaccactccccgggtaagagccaggccccggcctggccacgccacagaggaacgcagagcacacaagcaggaccccaccacgtgcgtgttccagatcgcccagtctccctctattggtacactatcaattgtgcagtgccccagggaggtcccaaatggccctcacaagaggcacagcccctaacgccctcagccaggcggtgcagtgggacgaaccagcgtattggggagggccagcgcatcggcaccggtgacccagctctcccacccaggccatcgcagggcagcctcagggcaggcgccaccactgctcctgctcagcccgcagtatctgcagttgctgcagctgtgtggcttggtagaaaagtctcaggcactgaggtttacttcaagggagaactgactggtgcccccgtccacactcatcaccctggacacaacctcggggaattccaccacactgggctactcaggcgtcac

SEQ ID NO: 3797 - DNA, 833 bp, Homo sapiens
  SIMILAR (601)..(527): 561254mologous to Mus musculus putative,accession number AK009937,Smith-Waterman Score=74.
tttttttttttttttttggttgccttactttaatgctgacctagcagccccgacaggaagctttaacataaagccttgaccctgaaaagcatgggtgcgtcttgtcgtgagcaggttcatggctgtgctccatcctcagcccgctgatttttggtcttttgtcctttgatcacaccagttaccacgtggatgttggactgcttctgtccttgatgttgatgcccgtgggcagtcaggccccggcgcagggtgtcgcatgcttccagcaggggctgcctttctaggagctgctgccgccgggcgtcccccgtggcctcgggcaatggccagcgcaaactgccggaccttctgccggaaccgcaccagctcgtccaccacaccatggcaaggtagcctcgcttgccgtctcctgaaacgtactggtgatttgccagagaaattccaacagtttcaaaaaactgttcaaagtaagagatgatggggaacaaacacagcaggacttctcggcccttcaggttccttcagggacgccctgagctggtccattcccgtggtgtgcaaggcccaggatggcatcaaccaccctgggtgtgtcaaaatcctctcgccaaggccgccttcacggccctcttggtgctggagagcctgagggaagaggagagaacagtcacagcagagggagctccactctccccaggcggcccccacaccagtccttccccagggagagacgctgggggctctaatctggggactttctctaggtcatattcccaaagacttgagttcctgagtagcagaaaattatgtaacatcaactgcaaactgtcatg

SEQ ID NO: 3798 - DNA, 424 bp, Homo sapiens
gggggcagcctgtgtcaccttcttcacgtccttcccgctcattgactgccctcgcccacgccgcctcaggaccctgttctgccccaaagcccggagggcggagagcccggcgaaggatgagttggccagttccccgtcgcggcccggcagcttaaaggctaagggaaaaggggtttcacgaaggagcggggttctttttaataggggacatatcggttgggaagactcgctcacccgcttcccggctccagcgccccagttccctgtccctcttaccgtagttcccctccccctccacacccagaaatagcccgcgacaccaggaggccgccagcttccccaggagcggggagggggacgcccggggtagaggagggtcccatttacatgctctttagcctgccaactcgtgctggcctggcaa

SEQ ID NO: 3799 - DNA, 2783 bp, Homo sapiens
  SIMILAR (1539)..(1408): 751254mologous to Homo sapiens Human secreted protein, SEQ ID NO: 4400,accession number AAG00319,Smith-Waterman Score=162.
  misc_feature (1)...(2783): n = a,t,c or g
ttttgcgattgctttaaagaaaggtttattggctacatacatcctaagaatgtactgtaaatggagcaagatctaaataaaagcttttcaaatataaagcggttaaagttaactaaaccactagcaatgtttgaaaacagaactctaaaaacttttttttcattttttttttgtgtggttggctcttaacactaaaaaaaaaaaaaagttcacatttcaagttataaacttacttacctcagtagtgtacatgaaatggttttgaaacaataggaacagataagtcccaaataggaggctcactgatacttaattggccatgtcaccaatgtttgtttttaagggagtttggtggttgccatgttatcattttttttattctttctttctttttctttctttctttctttctttgctttcttttctttcttcctcttcttcttcttttttgcaaataatttacaggcatatgtaaaatacagtaagaatactgggtcatagtttcatccagtgaaactctgtgacaatccttcactagaaggagaagtacttttttcacacagtcaggggatgaggatctgatccgaattacattttgtccgagtcactcattcccacagatttgaagtttgaatgcagcttgtggggtacatcatcaaggaacattggcacaattattttaatgtcatttaaaagaatggatgggaaagggaatgttaggcgggtgcttaaagggcctcaggtagggcacttcaataattttataggaataggttaaaattaaatattggctttacacataaaaaactcatcctcatttccaagatgagggggaaaaaggcatttggggaatctcttaatttaaaacaaaacaaaagtacttggcctaagggcatgatccctcttatgaatccacaagaattcagccatcaacaaaaatcccgtgagtggaaaattgtatggatctctaacatgacataaataacgcaactgcgttttacttgctaccttattgcacacctcacttccttgattgagcctttaaaaaacaattccaagttgatattttttttttaaaaagtagatgacaatcttaacattttcctgtattttacattcactctgctaaacaaaagcctttaaacaggcacaaaacactgcaacaatacattaacttcctaataaaacaaacctttttaataacattgaaataaaatggtttcattttgcattaaactacataccatgaacttctccaacataaaaggactaaaaacaagcattagaagatatttacaaactatctttaaacttatacaggtctctcctcctcctcctggaatgtgcacacccccaatccacgttcacccagttcaagtgcacagcaaaaggaagagaggcccattttaataaacataatgtttccaacacccttgaggaccatggacagttttgcaagaaacatggtaaggcaactagaagcataactttctggctggaaaagagtctctgggggttcttgntcttacggattaacatacatttctttgtccctacaaactcatacttccaaaaatgaataaaagcatcagaaatgggcattaaagttttacattgggcaattaaatagctatgcaaaggtgtcttatgcaactcgattaaaaccttgtgcttactttgctactgaaaatagcacacgttagaagacaatacttccccaaccatacaaaaaaaaaaaaccaaaaaacaacgaaaccaaccaaacccccaaccaaaaaccccaggaaaaagtataaaaaccccccatttcttatatcagagctacttatcagtcctaggcttgccaaacattgcggtgggattgggaatctggggaggaggggacagggtgagagatgtgggagtggggggcatgtttaaggctaaggcacatggagaatgagccccggctaacggtggcaaaggagagctttccagtgtttggactcagaagtgcggcatagtcttttcaatggtggcttaaggagagatccagtgtttaatttcttttaaaaaatagtaccgacatgatgatacatggtaacaccatcaacccttaattccagcaggtaatacagaggttttactcattttaaaattgcactttccagtataacctttaaaaataattgcttttgtagtatttttttaaagcactactgtttgtatctttaaatattgtatatatttttccaaaatagttccctaggctcctcaagtgtgctttttttaatatatagttgatatattatgggaaggtactacaaaatagaaatctctggagtgcagaagttaagaaaataacccttcatactgaaaatatatccttaaaaaaacaacaacaaaaacctctatacaaatgtagtacagccttaccaaatttttaccaagatggaatgaaggcacggaaccattgccaagtcttttggaaatgtatgaaccgtaggcatgcctaagttgaaaaatagtcttaaaaaacgtagtgaaaacttcatgtatataaaataattcagaaataaatctgctaacattcttccactttcaggttgcatgtgtgaatccaacatgtttccttcttcataaatagtcaagccgttccttcagtggtgtttgtgtggtctgtcttcgtgctggtcaccagccctcagtatgtcagggtagacgtccggggatggggacctgaatgggcaagcagcaggggaaggcctgaaggtatggtagcctgcgtatcctccataccacgg

SEQ ID NO: 3800 - DNA, 430 bp, Homo sapiens
  SIMILAR (299)..(424): 751254mologous to Homo sapiens Human secreted protein, SEQ ID NO: 4877,accession number AAG00796,Smith-Waterman Score=173.
caggggcgtgcttgcggcaaccctgtaaccgccggtgcgcaagttggaggggcaaggggctgccgtgtcctggtctggaggcggcccaggctgccttggtgattctggcttcgcggcctcatggcttgcggccggtttgcgcaacggcctgcgaaccaccaggcgcgtccccgccggcttgggtccgccccgaagcccagtccctcggcctggcccgctatgccctgcacactggcggagtctggcgtggcgcaacccggcgtggggttcggccccgccaggtggtcagcccttcctcggagtccaggtggctgggggcgcttcggagagtggccagttgccaaaacaaaggggatttggtgatggaggctttgttagaaggaatacaaaatcgagggcatggtgggggatttttgacatcttgtgaagg

SEQ ID NO: 3801 - DNA, 1486 bp, Homo sapiens
taaaaacctacggaaaaccagaaatcttggtagtggaagaaatgtgtaaggtcaccccaatcggtagattttaatgaacgttgtggaatgttgggaagaggggatgttaagttgaatgcagaatttcactaagtacttagtgtaagtttaaggatgtagctctttttatctaagaattcaatgtaatggccaaaaggcagatttactgtttaaaaatttgaataattttacatgacattcttgaaattctaagaagttttatgtgtagaacattttaaaaattcatcagattattaaagggaaaataaatgattaatgataattttggaaggttaatgtgagctagacttaagtaaactttggttcatttgtgttcattgaatgttttggaaatgaccaaaaaatgtaaatggccttcactcaagtttgagtgtttaaagttgaaagatgtgctctactaaaagttatagtaattctaacctcacattgaaatgagacagtattccttgttatacaggctgaatttgaagattagagaggatctaatgtttacttaggtaaaggggcataggttttgtagttaagatgaccagacagctaaaagctgtgatgggaagtatggactgctcctatttatagtctcagaaaatggacctttaggtctctatccgtattggcaattattagaagaaagttacacccttttgaaactacaaaagctgtcttggaatttccccctcttctccctatttatgtccccttagaatattttagggagcctataattattttctaaccaaggaaaaacttaagtctctttaagaagcaattacttttcataacatcagattgaataacccaccttgctgttcagcccacatcctactgggaaacaaaagggtaaggaacccattttctggttcttgattgtttgggtctgaattttgtttttaaaactaagctaagtttaatgttttttaaaatgctgtttggaatatgaatagattccccgtaaaatgatttttcctaagttttatgccttaagtaaatattcagtgctcacgtctgtgcatcatagtgcttgcgtttaatatgatttattgtagaatctcaacttttcttggtgtttgttgtctttgaaacattgtcttggtcgattagggctggtgttttcacatttctgtggtcaaggtggatttcttatgtgtgcctttttgcttactttgtatatgaattttgtaatttaaattggcaagtaagttatatatatgtatttaccataaatagtattaaaagatgagaaactgttagactgaagttctgttgtaacataaccattatttccatcacagtaggaagaccggcaaacgcagaaaacagattacagtcttttatccattttttgaaatccaaaaactacgaaaacaaaagattttttgttgttgagctaattaaatgtgaaccctggccagaaaaaaaaaaaaaa

SEQ ID NO: 3802 - DNA, 1676 bp, Homo sapiens
gggtcgacccacgcgtccgaattgaccggtgctaaagtctcctgtttatccataaaatgggtacattatgggcagtgtaatacaagctttcttttcattgcctagtactttaccagcagaccacagttttgccctggctagaccaaccctcagaacaaaatcatcattccttgtatttatatttgtatctgagatagtaaacaagatggctggccaggtcaacatggcaccttaacttatttttttaataggtaaaacttcttcaaaagtagcttgctttgtataagaactaagctatcagtatagatatagctatccttggagcttatgtttcagacaagaattatttactaaaataaataataaacaagataatgcattatacaatttgggcatttctcgtttctcaagtgtatgcatcatggtaaatataaactaaccacaagataggtagattgattcatttcattttaatctccttgtgtaattcagtacctccataattgttctaatcttcttcccactgtttacaaattaccagttaattaactcgtgaaagaaaaattcacatatcagaataaaaataaatgtatactcactttatcaaaatcaccactgctgtctttccttaatactagcagtggaaatgtaagtggcttactctacaaattttggtgctggcaaagtacataggcaaactggttggggagctgctctagttacattcctcccttcttattccctttttctcttcctccactttattgcataaccatattccctggtaccccaaagccattcctacccaccagttcctaatttgactcccacttgtaataactcctttaaaaaattccatgtttaaccatatgaccctggcttggcttactcatattctccctccctctccccttcctttctctctcttccagaagtcatttgcctggtttgaaatattttgtagggattgcttattatattattttagctgatgaacctcaggacaatgtctacacacacacacatacatacacgcacacaaaatctcagctgttgaagagtgggcttggaatcagacttctgtgtccagtaaaaaactcctgcactggaagtcattgtgacttgagtagttacagactgattccagtggaacttgattctaattttctttttgattctaattgaatgtgtctgcttaccttgtttccttttaattgataagctccaagtagttgctaatttttggaccaactttaaatggggtttcattcacttcttttacttaatgttttaagtaatagtacccaataaatttccattaaccctgttctccaaggggtttagctacccatttctgccatttttaatttttatttaattttatttgcttgagcacactgatcaaccactgaactgccttcttccattgtcctgcaatgatataagggttacatttttgtgtatatggctttcatagttgggatttcagagcactgataccagatattttcagtttgttctctgggggaatttcgatttgcatctatgtttttagctatctgtgataacttgttaaatattaaaacgatattttgcttctattggaacatttgtatactcgcaactacctttctgtaaacagctgcagtcacaaaataaaacactgaaagttttaa

SEQ ID NO: 3803 - DNA, 2741 bp, Homo sapiens
  SIMILAR (461)..(619): 491254mologous to Paramecium tetraurelia cyclophilin-RNA interacting protein,accession number AJ409115,Smith-Waterman Score= 157.
atagagaaaaaataaattaccagtatttattattagaaaagatagaaagacagacaaatcagtggaggaattaaaacagagaaactggagtttataaaacagagcccaatccttgccttctctccctccactcaaatagaaaaggagaatggagaaagagaaagaaggtattaggctacagtttataagagagatgaggaaaaaaatacatttgggaatagagggaaagggtcaaaaggggtcacatttggagaaatatctgaaaatgagaaggagcagaatttttggaaacattttttaaagtctggcaacgctaattaagctgttgatctaaggatttgcaaattgagaggtgcaattattttccaaatgatttgtgacactcttattaattagaatatatattttgtgaatattgaaatctgagccaaaactagttagctttattaatatcttagggaaagaagagagaaagaaagagggagggagagagagaaagaaagaaagaaagaaagaaagaaagaaagaaagaaagaaagaaagaaaaagaaaagaagaaagaaagaaagaaaaagacaggaagaggaagagagagacagaaagaataaaaaaacagcaattctgaggatgagaataaattaatggtaggtattacatatgcatgtacatatatatatatctgtacacatatatatgtaaatatgatttggaatacatcaggattgtgaacttccacttgggatagcataaaagcaaaatataccatacaatttttcattttactcacaaattttactcacaaattctcctaaagacatttcactaggtcagtacatttccgagaaagttttaaaaacgtttcttcttttatagtccctaattatcttacctggagtgttatcaaaatgtcatacaactggaaaatgcaattattattataaaaatatctctgccttctcttgtgtaatgaaatttatggcattaggagatgacatttcaagagattttagaggtcaatgtagagactccccccattcttcttaattgaacaaacatgcataaatctagggtttcaggtagagagcagatgggaatctacaggaaactgtcttccatagtgtatgaaaaccgtgtttgttgtgtggtgaagcaaaaggaaactatgaagcgcacagtcaatagattcagctagtgagtcccagcactcctttcaggccctcactaggattagcagcccagatgtcatgccaaggccactggtgcagtacaaagacagttcagtgacaagttccatcccataccatgggaaagagggttaaaacttggtgggctggttttttgccacagcatgacccagagacattctcaataaatggcactaggaatgatgagttttagaggggcctaaaatgttccaaacttgatactcaccactgtacctttaaagcacaaccacagatattggtaaaaatggaacagaattacctcaatacctctttaactcattctgaatgaattcattttgatgacagacattttttgtcaccatttggaataagaactacaacagcttatgattgaggtgaggaactgcagtcaaatggcttaggttcaaacacgagttctgacacaaatctaggtaattttgggcaatattttaaaatcttagtttattcaccaattaataggagtaaaaattacccctacttaatagaattattatgaagatttatataagtaaatcatataaagtgcttagcacagtgtgactggcccacatggaacatttaatacttggtctgcagtatatgaagaaaatggtgtacatgttaacttaaatggtttcattatttctcttcaggatttttaaaatgtgggatcagaatatatgttactattttgaaaattagaaataataagaaaaccagaatgtatacattaaaagtcatgcctaaatttccaaagagtagtttttttaatgccagagtttaaataaaatattattttccagagagtaacttttctaaaggtcctaaattctgaaaagagagaaaactactgttataaacaagtttattactaaaagatgcaatattcattactatgatttattattattttgtacatgtaaaccttgataaataaacagcatctcaacccaagtttattactcattgcacagttcaaagcaactatgactctcaaaatagcaacagaaggtggggagggtcttttccctttgtttatatagtatttgctaaaaatgaactttactattttgtggctttatagggttacaccatttcattctaaagagaaacaaaaagtaaaccattggccatgtggctttcaaacagtatttcaaagagaatattactgaaatatttttgtgctgttacagtcttaatcaaacattattacaaagatcagatacggaaaaaatagaggagtctcccccttaattgttccctttgaaataaattgttttaaattattacagaagttatagctgtatgtacatgcacatttgtatatttacaagtctcatgtacttaatctcaatattgcaaattagctaggtttactatagagttaacggcttttatctagcattaacaatcttggagtacaacccattttccaacaactaaaacttaattgaagtcatcaatgggacacatgccaaggactccaattcataaactaataaaatgtaagtccgtcattgatgagtaccatta

SEQ ID NO: 3804 - DNA, 1218 bp, Homo sapiens
  SIMILAR (979)..(1215): 861254mologous to Homo sapiens Novel protein kinase, SEQ ID NO: 165,accession number AAB65638,Smith-Waterman Score=346.
atgactcttaaggagcatgctgccttcaagcatctgtttaacaaagcacatcttgcaccgcccttaatccatttaaccctgagtggacacagcacatgtttcagagagcactgggttggggatattgtacatagagatctgaaactggaaaatataatggttaaaagcagtcttattgatgataacaatgaaataaacttaaacataaaggtgactgattttggcttagcggtgaagaagcaaagtaggagtgaagccatgctgcaggccacatgtgggactcctatctatatggacagaggttggaacagtttggagggctcagaacaagacaggaaaatgtgggacagtttggagctccctagagacttgttgaatgtctttgaacaaaatgctgataatgatatggatgatgaaattcaggctgaggtgctttcagatggagatgaggaacttcttgggaactggagcaaaggtgactcttgttacgttttactaaagcaactggcagcattttgcccctgccttagagatttgtggaactttaaacttgagagagatgatttagggtatctggtggaagaaatttctaagcagcaaagcattcaagaggcaacttgggtgctgttaaaggcattcagttttataagggaagcagagcataaaaatttggaaaatttgcagcctgacaatgcaatagaaaagaaaatcccattttctgaggagaaattcaagctggctgcagaaatttgcataagcaaccaggaggcaaatgttaatccccaagacaatgagaaaaatgtctccagggcatgtcagaggtcttcacagcagcccctcccattacccagagtactaggaggaaaaagtggtttcgtgggctgggcccaggattctcatgctgaaatctatacctttggaagaatattgggaaaagggagctttggaatagtcattgaagcgacagacaaggaaacagaaacgaagtgggcaattaaaaaagtgaacaaagaaaagtctactgcttatgaaaagcaatttcctgcaaccagtaaggacaactttgatatgtgcagttcaagtttcacatctagcaaactccttccagctgaaatcaagggagaaatggagaaaacccctgtgactccaagccaaggaacagcaaccaagtaccctgctaaatccggcgccctgtccagaaccaaaaagaaactctaa

SEQ ID NO: 3805 - DNA, 693 bp, Homo sapiens
  SIMILAR (16)..(417): 981254mologous to Homo sapiens Human retinoid binding protein,accession number AAW68550,Smith-Waterman Score=715.
  misc_feature (1)...(693): n = a,t,c or g
ccgagatccccgaccatgcccgccgacctcagcggtacttggaccctgctcagcagcgacaacttcgagggctacatgctggccctaggtattgactttgccactcgtaaaatagccaagttgctgaagccacagaaagtgattgagcaaaatggggattcttttaccatccacacgaacagcagcctaaggaactactttgtgaaatttaaagttggagaaaaatttgatgaagataacagaggcctggacaacagaaaatgcaagagtttgggtatctgggacaatgacaggctcacctgtatccagaagggagaaaagaagaacagaggctggacccattggatcgaaggagacaaactccacctggaaatgttctgtgaagggcaagtgtgcaaacagacattccagagagcctgatccacatccagcagcagagcccacttgtggctgcagctttatgccaaattatattgcagactgaacagacgtttatctatcccatttggcgacgaggactcgtggctggagagagccacacagcgtgtaacctgaagtcatctaaattatggggaaactgctcagcttcaataaacctgtccaaatgnnnnnnnnnnnnnnggggcggccgttttaaaggatctcttggggggcccaagtttacccggggctggaaaggtattgtttttttct

SEQ ID NO: 3806 - DNA, 404 bp, Homo sapiens
  SIMILAR (90)..(404): 1001254mologous to Homo sapiens putative anion transporter 1,accession number AF279265,Smith-Waterman Score=528.
tgtttggcctccatctgagcagccactctgggccactgtccctcatctatacagtgctggaggtctgctggaagctgccccagagcaagctcatcggggccacaggcatctcctatggcatgggtctaaagcacagatttgaggtagatgtcgtgggcaacatccctgcagggctggtgcccccagtggcccccaacacccagctgttctcaaagctcgtgggcagcgccttcaccatcgctgtggttgggtttgccattgccatctcactggggaagatcttcgccctgaggcacggctaccgggtggacagcaaccaggagctggtggccctgggcctcagtaaccttatcggaggcatcttccagtgcttccccgtgagttgctctatgtctcggagcctg

SEQ ID NO: 3807 - DNA, 506 bp, Homo sapiens; identical to SEQ ID NO: 2734
  SIMILAR (20)..(334): 1001254mologous to Homo sapiens putative anion transporter 1,accession number AF279265,Smith-Waterman Score=541.

SEQ ID NO: 3808 - DNA, 901 bp, Homo sapiens
ggagaatagggcaaatgtatttattttggtgggagtaaaggggataggatgtttcttaatctctttaagcctcagcttcttcatcttgcgttgttggaggattaaatgagatttaaatgagtgcaaagttcaataaatcatacacatcaattctccaacagcatacacatttcaggcattttaggagccccatctcatgaaggaaatccatactactgtggcagatgggggtggggaggcactttccactcaacacctcagttcaactctggccagtggcacctgccggggtggcttggggcttgccacctggaggcccagctccagggacacccttcacagaatatcctgtgggaacggcacccccctccaagcacaacagggccccttgagttttcaggtatcaagacaggagacgacacgacatgagcagtgggctaccattattaagcacttagtgtaaagcccagcatggtacaaaaatctggtagatgggtagtttatctccaatgacacatggggacaagaggataaattatcttgcccaaagtcacacagccagtgagtcgttggaagctggattcaaacccagacgtcagattccagagtccattctcttcaagggtggacttgaccccaccctgaacccaagggcccaaaattgagggctctctttgagcccacctgactttcctccagggtcaaggctggctgggtcccctggagccctctcctccacccccacacccagaggacaggctgcatcaggggtcttcccacccccaccccataccaaggctgctggagaggagcctggcccaaggtggcgctgcccctcttggacctccaagaatgccgcatggagcagcccctcagggctgtagtccctctacacctacat

SEQ ID NO: 3809 - DNA, 4128 bp, Homo sapiens
  SIMILAR (2)..(3736): 901254mologous to Rattus norvegicus MEGF2,accession number AB011528,Smith-Waterman Score=6043.
gccctgcccacctcacgcagactgccgggacctctggcagaccttttcttgcacctgccagccaggttactacggcccaggctgtgtggatgcctgcctcctgaacccctgtcagaaccagggatcatgccggcacctgccaggagccccccatggctatacctgtgactgtgtgggtggctatttcgggcaccactgtgagcacaggatggaccagcagtgcccacggggctggtgggggagcccaacctgtggcccctgcaactgtgatgttcacaaaggttttgatcccaactgcaacaagacaaatgggcagtgtcactgcaaggagttccactaccgaccgcggggcagtgactcttgcctcccatgtgactgctaccctgtgggctccacctcgcgctcatgtgcaccccacagcgggcagtgcccctgtcgcccaggagcccttggccgccagtgcaacagctgtgacagtcccttcgcagaggtgacagccagcggctgccgggtgctctatgatgcctgccctaagtccctgagatctggtgtgtggtggccccagacaaagtttggcgtcctggccacagtgccctgtccccggggggccctgggattgcggggtgcaggtgctgctgtgcggctgtgtgatgaggcccagggttggctggagcccgacctcttcaactgtacctcccctgcctttcgagagctcagtctgctgctggatggcctagagctgaacaagacggcactggataccatggaggccaagaagctggctcagcggctacgggaggtgactggccacactgaccactattttagccaagatgttcgagtcactgcccgcctgctggcccacctgctggccttcgagagccatcagcagggcttcgggctgacagccacacaggatgcccacttcaatgagaatctgctgtgggccggctctgcactgcttgccccagagacaggggacttgtgggcggcgctggggcagcgggcccctgggggctccccaggcagcgcgggactggtgaggcacctggaggagtatgcagccacactcgcaaggaatatggaactcacatacctgaatcccatggggctggtgacgcctaatatcatgctcagcattgaccgcatggagcaccccagttctccccggggggcccgtcgctaccctcgctaccatagcaacctctttcgaggccaggatgcctgggatcctcacacccatgtgctgctgccttcccagtccccacggccatccccatctgaagttctgcccacaagcagcagcatagaaaactccaccacctcaagtgtggtccccccaccagccccgccagagccagagcctgggatctccattatcattctcctcgtttaccgcaccttagggggactgctccctgcccagttccaggcagaacgccgaggtgccaggcttcctcagaaccccgtcatgaactccccggtggtcagcgtggctgtgttccacggacgcaacttcctaaggggaatcctggagtcccccatcagcctagagtttcgcctgctacagacagcgaatcggagcaaggcgatctgtgtgcagtgggacccacctggcctggcggagcagcatggtgtgtggacagcacgggactgcgagctggtgcacaggaatgggtcccacgcacggtgtcgctgcagccggacagggacctttggggtcctcatggatgcctctccccgtgagaggctggagggcgacctggagctgctggctgtgttcacccacgtggtcgtggctgtgtctgtggctgcgctggtgctgactgcagccatcctgctgagcctgcgcagcctcaagtccaatgtgcgtgggatccatgccaatgtggcagccgccctgggggtggcagagctcctcttcctgctggggattcacaggacccacaatcagctggtgtgcactgcagtcgccatcctcctgcactacttcttcctcagcaccttcgcgtggctcttcgtgcaggggctgcacctctaccgcatgcaggttgagccacgcaacgtggaccgcggcgccatgcgcttctaccatgccctgggctggggcgtccctgctgtgctgctgggccttgctgtgggcctggaccctgagggctatgggaaccctgacttctgctggatctcagtccacgagcccctcatctggagctttgctggccctgttgtcctggtcatagtgatgaacgggaccatgtttctcctcgctgcccgcacatcctgctccacagggcagagggaggccaagaagacctctgcactgacccttcgcagctccttcctgctgcttctgctggtcagtgcctcctggctctttgggctcctggcagtcaaccacagcatcctagccttccactacctccatgctggactctgcggcctccagggcctggcggtgctgctgctcttctgtgtcctaaatgcagatgctcgggctgcctggatgccagcctgtctgggcaggaaggcagcgcctgaggaggcaaggccagcacctgggctgggacctggggcctacaacaacacggctctctttgaggagagtggcctcatccgcatcactctgggcgcctccaccgtctcctctgtgagcagtgcccgctccggccggacccaggaccaggacagccagcggggccgcagctacctcagggacaatgtcctggttcgacatggctcagccgctgaccacactgaccacagcctccaggctcatgctggccccactgacctggacgtggccatgttccatcgagatgctggcgcagactccgactctgacagtgacctgtccttggaggaggagaggagtctctccattccatcttcagaaagcgaggacaatggccggacgcgggggcgcttccaacggccactctgccgagcagcccagagtgagaggctcctcacccaccccaaagatgtggatggcaatgacctcctgtcctactggccagccctgggggagtgcgaggcagccccctgtgctctgcagacttggggctctgaaaggcgcctggggctggacaccagcaaggatgcagctaacaacaaccagccagacccggccctgaccagtggggatgagacttctctgggccgggcccagcgccagaggaaaggcatcctgaagaaccggttgcaatacccactggtgccacagacccgaggtgcccctgagctgtcctggtgccgtgcagccaccttgggccaccgtgctgtgccagctgcctcttacggtcgcatctatgctggcgggggcacgggcagcctttcacagccagccagccgctactcttctagagaacagctggacctgctcctccggcggcaactgagccgtgagcgactagaggaagcccctgcccctgttctacgtcccctgagccggccagggtcccaggaatgcatggatgctgcaccaggccgactggagcccaaagatcggggcagcaccctgccacggaggcagccacctcgggactaccctggcgccatggctggccgcttcgggtcacgggatgcgctcgacttaggggcaacctcgagagtggttgagcacgctgcctccgccccgccgcacccgggaccttgacccacagcccccacctctgcccctgtctccccagcggcaactctcaagggaccccctcttgccatcccggccgctggactctctgtctaggagctcgaactctcgggagcagctggaccaggtgcctagccggcacccctcacgagaagcccttgggccactcccgcagctgctcagagctagggaggactcggtcagtggccccagccatggcccctccacagaacagttggacattctttcctccatccttgcctctttcaactcctcggccctctcctctgtgcaatcttcaagcacacccttgggccctcacaccactgccacaccttctgccacagcctctgtgcttgggccctccacgccacgttctgccacgtctcacagcatctcggagctgtcgccagactcagaagttcccagaagtgagggtcactcctgaggggatgacggcgtggacgaggaacagctga

SEQ ID NO: 3810 - DNA, 12438 bp, Homo sapiens
  SIMILAR (173)..(7885): 911254mologous to Rattus norvegicus MEGF2,accession number AB011528,Smith-Waterman Score=12428.
gatttcacacagtaccccctcccagagctatgagaacgctcatgggcaccaaaatttcagaccaaaatccgggacacggttcagaactagtggtcaggaagggggaacaagagatctggaaggacagaaaaaggctgggagacggagctgggacagcgccctagaaggagggagccaggaggagctggggggcggtgggcaccagggctgggacccaggcttagctgccactacggggccaagggcgcatatcggtggcggagccttagctctttgtccggagtcttccggggtccgggaggatggggggcctggcctgggggtcagggagcctatcttcgtggggctccgagggagaaggcaaagcgcccggaatagtcgagggccccctgagcagccgaatgaggagctggggattgaacacggcgtccagccattgggcagccgcgaacgagagacaggacagggaccagggtctgtgttatactggcgcccagaggtctcctcttgcgggcggacaggacctttgcaaagaggtagtctgtcaccaggggctctgtcctcaggggtcccgggctcggggaacagctcgcccctcccttcagactttttgattcggcaccacggtcccaagccggtgtcctcccagcggaacgctgggacaggctcccgcaaaagagtgggcaccgcgcgctgctgtggggaattatgggcaacagggagcaagggtcagggcgagagagccacgacatccggagcagaaaggacagccccccggcggaactgtcttccaggggcctcgggatctggccccgagctggattcagcaccacgcacggcgaggacagctcctgcatcaggttcagcaccccgcgagtctcggacagctcccgagccggcgcccaagcgcatgcgctcccggggtctcttccgctgccgcttcctcccgcagcgccccgggccgcgtcccccgggactcccggcccgtcctgaagccaggaaagtaacctcggcgaaccgggcacgctttcgtcgcgccgcaaaccgccacccgcagtttccgcagtacaactaccagacgctggtgccggagaatgaggcagcaggcaccgcggtgctacgcgtggttgctcaggacccggacgccggcgaggccgggcgcctagtctactcgctggcggcactcatgaacagccgctcgctggagctgttcagcatcgacccgcagagcggccttatccgtacggcggcagctctggaccgcgagagcatggagcgtcactacctgcgtgtgaccgcgcaggaccacgggtcgccgcgcctctcggccaccacgatggtggccgtgacagtagccgaccgcaacgaccactcgccggtttttgagcaagcgcagtaccgggagacccttcgcgagaatgtggaggagggctaccctatcctgcagctgcgtgccactgacggcgacgcgccccccaacgccaacctgcgctaccgcttcgtggggccgccagctgcgcgcgctgcagctgccgccgccttcgagattgatccacgctccggcctcatcagcaccagcggccgagtggaccgcgagcacatggaaagctatgagctggtggtggaagccagcgaccagggccaggaacccgggccgcgctcggccactgtgcgcgtacacataactgtgctagacgagaacgacaatgctcctcagttcagcgagaagcgctacgtggcgcaggtgcgcgaggatgtgcgcccccacacagtcgtgctgcgcgtcacggccactgaccgggacaaggacgccaacggattggtgcactacaacatcatcagtggcaatagccgtggacactttgccatcgacagcctcactggcgagatccaggtggtggcacctctggacttcgaggcagagagagagtatgccttgcgcatcagggcgcaggatgctggccggccaccgctgtccaacaacacgggcctggccagcatccaggtggtggacatcaatgaccacattcctatttttgtcagcacgcccttccaagtttctgtcttggaaaatgctcccttgggtcactcagtcatccacattcaggcagtcgatgcagaccatggggagaatgccagattggagtactccctaactggtgtggcacctgatactccttttgtgataaacagcgccactggctgggtctctgtgagtggtcccctggaccgtgagtctgtggagcattacttctttggtgtggaggctcgagaccatggctcacccccactctctgcctcagccagtgtcaccgtgactgtgctggacgttaatgacaatcggcctgagttcacaatgaaggagtaccacctacgactgaatgaggatgcagctgtgggcaccagtgtggtcagcgtgaccgcagtagaccgtgatgccaacagtgccatcagctaccagatcacaggcggcaacacccggaatcgctttgccatcagcacccaggggggtgtgggtctggtgactctggctctgccactggactacaagcaggaacgctacttcaagctggtactaactgcatctgaccgtgcccttcatgatcactgctatgtgcacatcaacatcacagatgccaacactcatcggccggtctttcaaagtgcccactactcagtgagtgtgaatgaagatcggccaatgggtagcaccatagtggtcatcagtgcctctgatgatgacgtgggtgagaatgctcgtatcacctatctcctggaggacaacctgccccagttccgcattgatgcagactcaggagccattacattacaggccccattagactatgaggaccaggtgacctacaccctggctatcacagctcgggacaatggcatcccacagaaggcagacactacttatgtggaggtgatggtcaatgacgtgaatgacaatgctccacaatttgtggcctcccactatacagggctggtctctgaggatgccccacctttcaccagtgtcctgcagatctcagccactgaccgggatgctcatgccaatggccgggtccagtacactttccagaatggtgaagatggggatggagattttaccattgagcccacctctggaattgtccgtacagtaaggcggctagaccgggaggcagtatcagtgtatgagttgactgcctacgcagtggacagaggtgtgcccccactccggactccagtcagtatccaggtgatggtgcaggatgtgaacgacaatgcacctgtcttcccagctgaggagtttgaggtgcgggtgaaagagaatagcattgtgggctcagtggtggcccagatcactgcagtggaccctgacgaaggccccaatgcccatataatgtaccagatcgtggaggggaacatccctgagctgttccaaatggacatcttctctggagaactgacggcactcattgacctagactatgaggctcgccaagaatatgtgattgtggtgcaggccacatctgctcctttggtcagccgggccactgtgcacgtccgcctggttgaccagaatgacaacagccctgtgctcaacaacttccagatcctcttcaacaactatgtatccaaccgttcagacaccttcccgtcgggcattattgggcgcatcccagcttatgaccccgatgtctccgaccacctcttctactcctttgagcgtggcaatgagctgcagctgctggtagtcaaccagaccagtggggagctgcgactcagccgaaagctagacaataaccgcccactggtggcctccatgttggtgactgtcacagatggcctgcacagcgtgacggcgcagtgtgtgctgcgcgtggtcatcatcacggaggagttgctggccaacagcctgaccgtgcgccttgagaacatgtggcaggagcgcttcctgtcaccgctgctgggccgcttcctcgagggcgtggctgcggtgctcgctacgcccgctgaggacgtcttcatcttcaacatccagaacgacacagacgtagggggcaccgtgctcaatgtgagtttctcggcgctagctccacgtggggccggggcgggcgctgcagggccctggttcagctccgaggagctgcaggagcagttgtacgtgcgccgggcggcgctggcggctcgctccctgctcgacgtactgcccttcgacgacaacgtgtgcctgcgagagccctgtgagaactacatgaaatgcgtgtccgtgctccgctttgactcgtccgcgcccttcctggcctcggcctccacgctgttccgacccatccagcccatcgctggcctgcgctgccgctgcccgcccggattcacgggagacttttgcgagaccgagctcgacctctgctactccaacccatgtcgcaacggcggagcctgcgcgcggcgcgagggaggctacacgtgcgtctgccgcccgcgcttcaccggagaggactgcgagctggacaccgaggccggccgctgcgtgccgggcgtctgccgcaacgggggcacctgcaccgacgcgcccaacggcggctttcgctgccagtgcccggcaggcggcgccttcgagggcccgcgctgcgaggtggctgcgcgctccttcccgcccagttcgttcgtcatgtttcgcggcctgcggcagcgattccaccttacgctgtccctctcgttcgcgacagtgcagcagagcgggctgctcttctacaacgggcgcctgaacgagaagcacgacttcctggccctggaactcgtggctggccaagtgcggctcacatattccacgggtgaatccaacaccgtggtcagccccacagttccagggggcttgagtgacgggcaatggcatacagtgcatctgagatactacaacaagccccggacagatgccctagggggtgcacagggcccctccaaggacaaggtggctgtgctaagcgtggatgattgtgatgtggccgtggctctgcagtttggtgctgagattggcaactactcatgcgcggctgctggtgtgcaaacaagctccaagaagtccctggacctgacgggccctcttcttctgggaggtgtccccaacctccccgagaacttccccgtatcccataaggacttcatcggctgtatgcgggacctgcacattgatggccgccgagtggacatggcggcttttgtcgcaaataatggcaccatggcaggctgccaagccaagctacacttttgtgactcaggcccctgcaagaacagtggcttctgctcggagcgctggggcagcttcagctgcgactgccctgtgggcttcggcggcaaagactgtcagcttactatggcccatccccaccatttccgtggcaacggcacactgagctggaactttggaagtgacatggctgtgtctgtgccatggtacctggggctggcatttcggacacgggcaacgcagggggtcctgatgcaagtgcaggctgggccacacagcacgctcctttgccagctagatcgggggttactgtctgtgacagtgaccaggggctcgggccgtgcttcccatctccttctggaccaggtgactgtcagtgatggccggtggcacgatctgcggctggagttgcaggaggaaccaggtggccggcggggccaccatgtccttatggtctcactggactttagcctcttccaggacaccatggcggtggggagtgagctgcagggcctgaaggtaaagcagctccacgtgggaggcctgccccccggcagtgcagaggaggctcctcagggtctggttggctgcatccagggggtgtggctcggctccacaccctctggctccccggccctgctaccccccagccaccgagtgaatgcggagcctggctgtgttgtgaccaacgcctgtgcctctgggccctgcccacctcacgcagactgccgggacctctggcagaccttttcttgcacctgccagccaggttactacggcccaggctgtgtggatgcctgcctcctgaacccctgtcagaaccagggatcatgccggcacctgccaggagccccccatggctatacctgtgactgtgtgggtggctatttcgggcaccactgtgagcacaggatggaccagcagtgcccacggggctggtgggggagcccaacctgtggcccctgcaactgtgatgttcacaaaggttttgatcccaactgcaacaagacaaatgggcagtgtcactgcaaggagttccactaccgaccgcggggcagtgactcttgcctcccatgtgactgctaccctgtgggctccacctcgcgctcatgtgcaccccacagcgggcagtgcccctgtcgcccaggagcccttggccgccagtgcaacagctgtgacagtcccttcgcagaggtgacagccagcggctgccgggtgctctatgatgcctgccctaagtccctgagatctggtgtgtggtggccccagacaaagtttggcgtcctggccacagtgccctgtccccggggggccctgggtgctgctgtgcggctgtgtgatgaggcccagggttggctggagcccgacctcttcaactgtacctcccctgcctttcgagagctcagtctgctgctggatggcctagagctgaacaagacggcactggataccatggaggccaagaagctggctcagcggctacgggaggtgactggccacactgaccactattttagccaagatgttcgagtcactgcccgcctgctggcccacctgctggccttcgagagccatcagcagggcttcgggctgacagccacacaggatgcccacttcaatgagaatctgctgtgggccggctctgcactgcttgccccagagacaggggacttgtgggcggcgctggggcagcgggcccctgggggctccccaggcagcgcgggactggtgaggcacctggaggagtatgcagccacactcgcaaggaatatggaactcacatacctgaatcccatggggctggtgacgcctaatatcatgctcagcattgaccgcatggagcaccccagttctccccggggggcccgtcgctaccctcgctaccatagcaacctctttcgaggccaggatgcctgggatcctcacacccatgtgctgctgccttcccagtccccacggccatccccatctgaagttctgcccacaagcagcagcatagaaaactccaccacctcaagtgtggtccccccaccagccccgccagagccagagcctgggatctccattatcattctcctcgtttaccgcaccttagggggactgctccctgcccagttccaggcagaacgccgaggtgccaggcttcctcagaaccccgtcatgaactccccggtggtcagcgtggctgtgttccacggacgcaacttcctaaggggaatcctggagtcccccatcagcctagagtttcgcctgctacagacagcgaatcggagcaaggcgatctgtgtgcagtgggacccacctggcctggcggagcagcatggtgtgtggacagcacgggactgcgagctggtgcacaggaatgggtcccacgcacggtgtcgctgcagccggacagggacctttggggtcctcatggatgcctctccccgtgagaggctggagggcgacctggagctgctggctgtgttcacccacgtggtcgtggctgtgtctgtggctgcgctggtgctgactgcagccatcctgctgagcctgcgcagcctcaagtccaatgtgcgtgggatccatgccaatgtggcagccgccctgggggtggcagagctcctcttcctgctggggattcacaggacccacaatcaggtgcaggatcagggccagggaacttgtgtcctgatgaccctactggcccaggaggcctggggccaaaactcagggtcagagctggtgtgcactgcagtcgccatcctcctgcactacttcttcctcagcaccttcgcgtggctcttcgtgcaggggctgcacctctaccgcatgcaggttgagccacgcaacgtggaccgcggcgccatgcgcttctaccatgccctgggctggggcgtccctgctgtgctgctgggccttgctgtgggcctggaccctgagggctatgggaaccctgacttctgctggatctcagtccacgagcccctcatctggagctttgctggccctgttgtcctggtcatagtgatgaacgggaccatgtttctcctcgctgcccgcacatcctgctccacagggcagagggaggccaagaagacctctgcactcaggacccttcgcagctccttcctgctgcttctgctggtcagtgcctcctggctctttgggctcctggcagtcaaccacagcatcctagccttccactacctccatgctggactctgcggcctccagggcctggcggtgctgctgctcttctgtgtcctaaatgcagatgctcgggctgcctggatgccagcctgtctgggcaggaaggcagcgcctgaggaggcaaggccagcacctgggctgggacctggggcctacaacaacacggctctctttgaggagagtggcctcatccgcatcactctgggcgcctccaccgtctcctctgtgagcagtgcccgctccggccggacccaggaccaggacagccagcggggccgcagctacctcagggacaatgtcctggttcgacatggctcagccgctgaccacactgaccacagcctccaggctcatgctggccccactgacctggacgtggccatgttccatcgagatgctggcgcagactccgactctgacagtgacctgtccttggaggaggagaggagtctctccattccatcttcagaaagcgaggacaatggccggacgcgggggcgcttccaacggccactctgccgagcagcccagagtgagaggctcctcacccaccccaaagatgtggatggcaatgacctcctgtcctactggccagccctgggggagtgcgaggcagccccctgtgctctgcagacttggggctctgaaaggcgcctggggctggacaccagcaaggatgcagctaacaacaaccagccagacccggccctgaccagtggggatgagacttctctgggccgggcccagcgccagaggaaaggcatcctgaagaaccggttgcaatacccactggtgccacagacccgaggtgcccctgagctgtcctggtgccgtgcagccaccttgggccaccgtgcagtgccagctgcctcttacggtcgcatctatgctggcgggggcacgggcagcctttcacagccagccagccgctactcttctagagaacagctggacctgctcctccggcggcaactgagccgtgagcgactagaggaagcccctgcccctgttctacgtcccctgagccggccagggtcccaggaatgcatggatgctgcaccaggccgactggagcccaaagatcggggcagcaccctgccacggaggcagccacctcgggactaccctggcgccatggctggccgcttcgggtcacgggatgcgctcgacttaggggcacctcgagagtggttgagcacgctgcctccgccccgccgcacccgggaccttgacccacagcccccacctctgcccctgtctccccagcggcaactctcaagggaccccctcttgccatcccggccgctggactctctgtctaggagctcgaactctcgggagcagctggaccaggtgcctagccggcacccctcacgagaagcccttgggccactcccgcagctgctcagagctagggaggactcggtcagtggccccagccatggcccctccacagaacagttggacattctttcctccatccttgcctctttcaactcctcggccctctcctctgtgcaatcttcaagcacacccttgggccctcacaccactgccacaccttctgccacagcctctgtgcttgggccctccacgccacgttctgccacgtctcacagcatctcggagctgtcgccagactcagaaccgagggacacacaggcactgctgtctgcaacacaagcaatggacctgcggaggcgagactaccacatggaacggccgctgctgaaccaggagcatttggaggagctggggcgctggggctcagcacctaggacccaccagtggcggacctggttgcagtgctcccgtgctcgggcctatgcccttctgctccaacacctcccggttttggtctggttacccgggtatccctgggcgtgactggttcctgggtgacctgttatccggcgctgagagtggccatcatgcagattgcgcagggcttggcctacgccctcctggctggattgccccccgtgtttggcctctatagctccttctaccctgtcttcatctacttcctgtttggcacttcccggcacatctccgtggagagcctctgtgtcccgggaccagtagacacagggacctttgctgtcatgtctgtgatggtgggcagtgtgacagaatccctggccccgcaggccttgaacgactccatgatcaatgagacagccagagatgctgcccgggtacaggtggcctccacactcagtgtcctggttggcctcttccaggtggggctgggcctgatccacttcggcttcgtggtcacctacctgtcagaacctcttgtccgaggctataccacagctgcagctgtgcaggtcttcgtctcacagctcaagtatgtgtttggcctccatctgagcagccactctgggccactgtccctcatctatacagtgctggaggtctgctggaagctgccccagagcaaggttggcaccgtggtcactgcagctgtggctggggtggtgctcgtggtggtgaagctgttgaatgacaagctgcagcagcagctgcccatgccgatacccggggagctgctcacgctcatcggggccacaggcatctcctatggcatgggtctaaagcacagatttgaggtagatgtcgtgggcaacatccctgcagggctggtgcccccagtggcccccaacacccagctgttctcaaagctcgtgggcagcgccttcaccatcgctgtggttgggtttgccattgccatctcactggggaagatcttcgccctgaggcacggctaccgggtggacagcaaccaggagctggtggccctgggcctcagtaaccttatcggaggcatcttccagtgcttccccgtgagttgctctatgtctcggagcctggtacaggagagcaccgggggcaactcgcaggttgctggagccatctcttcccttttcatcctcctcatcattgtcaaacttggggaactcttccatgacctgcccaaggcggtcctggcagccatcatcattgtgaacctgaagggcatgctgaggcagctcagcgacatgcgctccctctggaaggccaatcgggcggatctgcttatctggctggtgaccttcacggccaccatcttgctgaacctggaccttggcttggtggttgcggtcatcttctccctgctgctcgtggtggtccggacacagatgccccactactctgtcctggggcaggtgccagacacggatatttacagagatgtggcagagtactcagaggccaaggaagtccggggggtgaaggtcttccgctcctcggccaccgtgtactttgccaatgctgagttctacagtgatgcgctgaagcagaggtgtggtgtggatgtcgacttcctcatctcccagaagaagaaactgctcaagaagcaggagcagctgaagctgaagcaactgcagaaagaggagaagcttcggaaacaggcagggccccttttgtctgcatgtctggctccccagcaggtgagctcaggagataagatggaagatgcaacagccaatggtcaagaagactccaaggccccagatgggtccacactgaaggccctgggcctgcctcagccagacttccacagcctcatcctggacctgggtgccctctcctttgtggacactgtgtgcctcaagagcctgaagaatattttccatgacttccgggagattgaggtggaggtgtacatggcggcctgccacagccctgtggtcagccagcttgaggctgggcacttcttcgatgcatccatcaccaagaagcatctctttgcctctgtccatgatgctgtcacctttgccctccaacacccgaggcctgtccccgacagccctgtttcgccctcactcgctgtctcctcagatgtgaaacagttggaaccagagctgcttctcaggaataatttgctctcaggaatacccgagaaggtacagggcagcgtgggtgccaatgggcagtccctggaggatacagagtga

SEQ ID NO: 3811 - DNA, 378 bp, Homo sapiens
  misc_feature (1)...(378): n = a,t,c or g
cggccaccagctgagtttttgatcaacactgtagccatgttttctgtgttgatcactaaaagtggaccctatccaggaagaaatgtatataaggggtgtgtctcataaaggaaataaaagattcttggagcctctggtccatgaaatagtatctaaaactttcactcattctttcttctgttccccaaacatcccattctccttttgggaagggaccttctgactaagtttggagccacaatttctctaaatcaggacagaatagaggtgttctgagcccatggcactgccatgctggccctagttcctggggaagttccagacttggggcctcatatgactccttggctaatgcggnactagataattgtatagcat

SEQ ID NO: 3812 - DNA, 940 bp, Homo sapiens
ggatgacagagtgagaccttgtctcaatgaaaaagcagggggcactgggaggggagaaccaaatgccctatcctccagttctcagcatatagaagggagctctctcatctgctagccactcctgcctcactgtgccatgctttctgtaatgcactctgggtccagggactgcttggcaggaggtgggaagaacaagaagtttagggccttcccagtttcttatggcctgtctggagagggaactagcgcttactgagtttttacgatgtgttacacaccatgtaaaggcctttacctacattatttcttataacccaaacagagagcaaataagtatccccattttttagtcacatagagttccagagttgccacagttacatcgcaaagtcaggatttgaatccagtgcagaccgcaaacaccatggttttctctccaaagcagagcagctccagaggtggaggtgactggaatgtcctagattcagtgggaccaggagctgggggtgcttagcagaggctcctcatctcccccccagggtcttgtcaagtccagaagtccctaaaccccttcaaattaaactatcccctcctaatcccccagctgaacccctgggtaataccctccccaccaagaggtatcctgtgtggaaccctggcccctattttagggattaggtgatggagataaatttcccatggcaaacggccctcgtccccgttcgtttgcagagcacaacaatcccagattaaggtacagagtttgggttttatttggagattagttggtattacaggtgatggtgataccaaaacccaatgctgctatacctgcctccatcccagatctgtcaggttgtctccacagccccacatcagagggcatcccaatctgatcctttgtgaaaattaaatcaacattaagccccaaaaaaaaaaa

SEQ ID NO: 3813 - DNA, 1023 bp, Homo sapiens
agtgtggtggaattcccactctctgtgaggtgaaaacccatttcaagggctgcagccagggtgaggcctctgtggacccctatggacgtggctggccacagaaagctgttaaagaaatgagggtggggatttctggggcataaggacaggaaaagggacacatacgtgtcaaccaccatttcaactgcaccccctccttcgagaggatgccatggccacactcagctgggccctaaggtgggctgagccagaggaaggcaggcaggagctctgtctcccggccttctccactggagcctgaagcacctcctgcccaggccagcaaggtgcaggaagcgtcccacctagagacctctgcagacttgaccacacaccccagggcaagcaagggccccactcctgagcctacctctgatcctacagttccaagagacagaagccaaccttgcccctcccttctggaccccagagtgccctgtgggcactattactgctaacgtttgagtgccagctctgtgccgggtgccattctgggcagtcgcaccagctaccactaccacctgtagcagtcctgcccccgttcacagaagacattcaggagcccagcctgtgggggcagttcacatctgggatctcaagtcctaacacaaccaagcaatcctcgctttacagatgatgaaattgagccgccatggtggggaagcccaacccaaatgtgtcatctctgctgtgagctagacagcacagtggctgtgggcctggagggcagggctgcctgatgggcagccatcctgggaatgtctgcaagggtctggtgcttggtacagaccagtgagtctggggaattggggtctccaccaagatctgtgggtgcacttggcatgtttgctgcagaaaaggccccagaatgggctggcttgaactggaaaaacacactttctcatcccttttggaccacgagcttcttgagagcaaagcatgtgtttgatattcctttgctcaccctcaggccttgggttgcaa

SEQ ID NO: 3814 - DNA, 1099 bp, Homo sapiens
  SIMILAR (882)..(1094): 681254mologous to Homo sapiens Human myelin oligodendrocyte glycoprotein gene,accession number AAZ29204,Smith-Waterman Score= 272.
tttttttttttttttttgggatttcattatctcagtttacttttatttgcttgtttacacacacgatctgtgtgtacataacaagtggcaagagccattctctaaatacaatctggtacccagactatgacagatgcacgtggaaaatgaggcgtcagtgagtttattctcaacatagaaaggcaaaataagcatggcagtattctatgatcacagatgcccccagagcctgggggttaaccgacacttttcaacataatacaggacaattgtaacaaaagacccagactccaaatggcacccaaaatatatttcgtttctctgccttctctagagcgagtcagaaagttctaaagggcttactcaagaaaaaggaggcagggagacttatggcctgctaagcaccagatgctgagcactttacatgcaccatttctcttcatctccacctgacagacgatgaaaacgaggtttgccatgatcacacagctatcaggagtggtggccaagatatgaacccacatctcatgtttgccttgaacccccaaaccctttcacttaatgtcaggcctgtttccacataggaaatagaaaagcatgctccccaaggaagaggcaagggggttaagcatggacaaagtggcggaagcctcatcgatacagaaggctctgcaattgaacactttcccacatacagttaatttagtgctgagcccgcatcagacccacgtgggataaatatctggagatttaagtgtcacaaatgaacttcctggggtcaccctgtgcctattcccttttggtgctgaacatgacactttggagagccttttttttttttgagacagagtctcactctgtcgctcaggctggagtaatagtggcgtgatcctagctcactgcaacctctgcctcctgggttcaagcgattctcctgccccagcctcccgagtagctgggattacaggcgtgtaccaccacacctggctaatttttgtatttttagtcgagacggggttttatcatgttggctaggctggcccaacctcaagtgatcctcccatctcagcctcccaaagtgctaggattacaggtgtga

SEQ ID NO: 3815 - DNA, 2168 bp, Homo sapiens
  SIMILAR (32)..(409): 831254mologous to Homo sapiens DEAD-box protein,accession number AJ278110,Smith-Waterman Score=541.
aacgacgtcggacgcgccccttcttggaacaatgtcccaccacggaggagctcccaaggcctctacgtgggtcgttgctagtcggcgaagctcgacagtgtcccgagcgccagagaggaggccggcggaggagttgaatcgaacaggtcctgagggatatagtgtcggcagaggtggtcgctggagaggcacctctaggcccccggaggccgtggccgctggtcacgaggaactgccgctgtgttttgctttgaagagccactttgttggcgcggtaatcggtcgtggtgggtcaaaaataaagaatatacaaagtacaacaaacaccccaatcccaattattccaggaccacccagaatcattagtcaaaatttttggcagcaaggcaatgcaaacgaaagcaaaagcagtgatagacaattttgttaaaaagctagaagaaaattacaattcagaatgcggaattgatactgcattccaaccttctgttggaaaagatggaagcacagataacaatgttgttgcaggagatcggccattgatagattgggatcaaattagagaggaaggtttgaaatggcaaaaaacaaagtgggcagatttaccaccaattaagaaaaacttttataaagagtccactgccacaagtgccatgtcaaaagtagaagcagatagttggaggaaagaaaattttaatataacgtgggatgacttgaaggatggggagaaacgacctatccccaatcctacctgcacatttgatgacgcctttcaatgttatcctgaggttatggaaaacattaaaaaggcaggttttcaaaagccaacacctattcagtcacaggcatggcccattgtgttgcaaggaatagatcttataggagtagcccagactggaacaggaaagacattgtgttatttaatgcctggatttattcatctggtccttcaacccagccttaaaggtcaaaggaatagacccggcatgttagttctaactcccactcgggaattagcacttcaagtagaaggagaatgttgcaaatattcatataaagggcttcggagtgtttgtgtatatggtggtggaaatagagatgaacaaatagaagagcttaaaaaaggtgtagatatcataattgcaactcccggaagattgaatgatctgcaaatgagtaacttcgtcaatctgaagaatataacctacttggttttagatgaagcagacaagatgttggacatgggatttgaaccccagataatgaagattttgttagatgtgcgcccagataggcagacagttatgaccagtgctacatggcctcattcagttcatcgcctcgcacaatcttatttgaaagaaccaatgattgtctatgttggtacattggatctagttgctgtaagttcagtgaagcaaaatataattgtaaccaccgaggaagagaaatggagtcacatgcaaacttttctacagagtatgtcatccacagacaaagtcattgtcttcgtttctcgaaaagctgttgcggatcacttatcaagtgacctaatacttggaaatatatcagtagagtctctgcatggagatagagaacagagagatcgggagaaagcattagagaactttaaaacaggcaaagtgagaatactaattgcaactgatctagcctctagaggacttgatgtccatgacgttacacatgtctataattttgacttccgacggaatattgaagaatacgtacaccgaatagggcgcacgggaagagcagggaggactggtgtttccattacaactttgactagaaatgattggagggttgcctctgaattgattaatattctggaaagagcaaatcagagtattccagaggagcttgtatcaatggctgagaggtttgaggcacatcaacggaaaagggaaatggaaagaaaaatggaacgacctcaaggaaggcccaagaagtttcattaatgtcttctgtactagtggggtagagaattcaagattttttagaaatatagtaagacagaagtattggacatgttggcagtatgaagagaccggactgatttgactgattcttaaaataatagtgtttgaaaatatagaatccagtgttttatactttctttaataaaaatagaagtatttaaacttaaa

SEQ ID NO: 3816 - DNA, 1125 bp, Homo sapiens
  SIMILAR (509)..(1015): 401254mologous to Mus musculus putative,accession number AK006481,Smith-Waterman Score=214.
ggactatgggacttatgcctgggagactccttccttcaacaactctagtgctggtggaggacctgagagatcatctacagaagttcaatcccttattttgttaaaaagagaccggataggtaggggagggaagagaagtgactcaagtttgacaaatccaaacctgggctcccctctcctgcgcctcgcccgctattctttccactcggccagcgtgactccaagacgcgccactacccttctactagccggctgcccggcctctcctccacttaccctggccactggggcgctcctctcatcagtgtcccaggcccagaagccccgcccacgccaggcataggccccgcccctgtatcccaagaccctgcctcctcttgcggtggggggaaagcggcctcttactcctaggcctttcggtttgcgcgagcgggcaggaaagcgtgcgtgcggctaagagagtgggcgctctcgcggccgctgacgatggaagaactggagcaaggccctgttgatgcagccatgggcgtggctacagcttgcagagaactccctcttggccaaggtttttatcaccaagcagggctatgccttgtgtggtttcagatcttcaacaggtgtggcatgaacaggtggacactagtgtggtcagccagcgaagccaaggagctgaacaaagcggctcactgcttcctcctgcagctttcctctgtcatttggataatctccttcgccccattgttgaaggacgctgcttcgccctagcgaagctaccttgctcctgtgattgttttggcaagatgcactgattctacgggtgcgaagtgagctctctggcctccccttctattggaatttccactgcatgctagctagtccttccctggtctcccaacatttgattcgtcctctgatgggcatgagtctggcattacagtgccaagtgagggagctagcaacgttacttcatatgaaagacctagagatccaagactaccaggagagtggggctacgctgattcgagatcgattgaagacagaaccatttgaagaaaattccttcttggaacaatttatgatagagaaactgccagaggcatgcagcattggtgatggaaagccctt

SEQ ID NO: 3817 - DNA, 304 bp, Homo sapiens
ttttttgcctggcaataaatattttaatttgtttcatttttatgatgacaaataattttcaagtttatttccttatttaaatacaaagctaaaccacaaacaggtataatcaagacattgtgtctcacatttacactcccatcggatcctcttccaatttgctgaccactgaccaggctagcggggggtgggagggaagactttcttaggtagcaccgtcgtgaggcccgagacaaggcctcgacagcaggtctggaactttcaaccccagcaggatgagggggaatgggggtggatgtcaggt

SEQ ID NO: 3818 - DNA, 844 bp, Homo sapiens
cctcgccgggatgtttccaagctcttgtttcccctaacgtctcaacaggcgctcactgaagtgtatgaatattttttaaaaaggtttttgcagtaagctagtcttcccctctgctttcttagaaagcttactagccgctgggccccaagcacgggcgcgggcatagatttcctcttccacaagctgccgcttttctgggcaccttgaagcatcagggcgtgaaatcaaactagatgtgggcagggagagtgttgcttacctgccctgctggggcagggtttcctgaaactgggttaattctctatagaaatgtgaacactgaatttattttaaaaaataataataagaatttaaaaaaattaaaaataaaaaaaaccacagaaaacaactttacatgtatataggtcttgaagtgagtgaagtggctgatttttttttttttttttttttgctttttttttgctttttgtacaaacagattgaaaatggtactctaatcaaaaatacagttttgcactgggaccagaaattacttacctgacatccacccccattccccctcatcctgctggggttgaaagttccaaaacctgctgtcgaggccttgtgtttgtcagacacccagtgtcctcctgcaaggacgcaactgtgagctgaggtgtgagctcaggagccatgacctggtgtctcctgcccaccctggtcccaggtaaatgtgaatggagacaggtatgagaggctgtcctcgtctttgattcccccccaaccccacctcgggcctcacgacggtgctacctaagaaagtcttccctcccaacccccgctagcctggtcagtggtcagc

SEQ ID NO: 3819 - DNA, 811 bp, Homo sapiens
ttttttgcttttttttgctttttgtagaagagattgagaatggtactctaatcaaaaataaagttttgtagtgggaccagaaattacttacctgacatccacccccattccccctcatcctgcgtggggttgaaagttccagacctgctgtcgaggccttgtgtttgtcagacacccagtgtcctcctgcaaggacgcaactgtgagctgaggtgtgagcctagggagcccagggacccctgaccccggccgctgctgccagcctcagaaaggcacccaggtgttgcaaggggagcacacagggcccggcagcccccagggaatcaaggataaggggctaagggttttcaccttaactgtgaaggcaggaggaataggttgactgcttcctcccggccctttcacagaactgattctcacacacttgtcccttcagtccagggggccggggctcaggagcccatgacctggtgtctcctgcccaccctggtcccaggtaaatgtgaatggagacaggcatgagagcctgtcctcatctttgatttcccccgcaacccccaccctcgggccttacgacggtgttacctaagaaagtcttccctcccacacccaccccccgctagcctggtcagtggtcagcaaattggaagaggatccgatgggagtgtaaatgtgagacacaatgtcttgattatacctgtttgtggtttagctttgtatttaaacaaggaaataaacttgaaaattatttgtcatcataaaaatgaaacaaattaaaatatttattgccaggcaaaaaaaaaaaaaaaaa

SEQ ID NO: 3820 - DNA, 730 bp, Homo sapiens
  SIMILAR (15)..(191): 521254mologous to Homo sapiens Human secreted protein, SEQ ID NO: 4438,accession number AAG00357,Smith-Waterman Score=170.
ttccccgagacaaagtctcactctgtcacaggctggagtgcaatggcaggattacggctcactgcagcctgaaactcttgaactcaagcgatcttcctgcctcagcctcccaagtagctgggaccacaggtgtgtgccaccatgcctggccactgctatttttcttaatgaaagaggaaatgtacagaattgacattaagactaaatgcaggaaaaattgattcagtagacattttaatggaatttccctcaggttttaacaaatcagtagtttatagtaaccaaatcttaacacacacttattattacaactatattaacataatttattttctattcgggaggtaccatatctgaattaaagtacaagtcccatcttaatggagaaaattgattgctgaagcaaaaaggtacagaacaaaccattcaatttcaatggtcacattgtgaagaagcttaccactcatttaatttgaccaaaaatgctattattgaagataattgatgacataatcctagtatatccctgagtaacggcagataaggatttaaggttgaggatattccccaaatgctctttcctcttgagttcttctatttcccatatgcatcccaaatgccagataaggctagcatggaaagttaaaccttttgcacccaacatagccaaagcaggcacccatatccacacaaaacttaccatcatactattgccctgttcctcacgaaa

SEQ ID NO: 3821 - DNA, 301 bp, Homo sapiens
cggcacgagggagaacccatgcaacttgccaccacagagccaggcccgcggcgactggctcctggtgggtattaaagacgagtcgggaaagaagagcagggttgcctgctgaggaagcttttcacagcatgagaccttccgcaggctcaatcaaaccttcaatggccccgaaagacatcttgattgaaacctcatgagagactctgagccagaaaacccagcaacttagaacccagatacctgaccatcagccactgtgtgaaataataaatgtttgttgttttaaaaaaaaaaaaaaaaa

SEQ ID NO: 3822 - DNA, 679 bp, Homo sapiens
aaaacaacaaacatttattatttcacacagtggctgatggtcaggtatctgggttctaagttgctgggttttctggctcaaagtctctcatgaggtttcaatcaagatgtctttcggggccattgaaggtttgattgagcctgctcttctttcccgactcgtctttaatacccaccaggcgccaaccgccgcgggcctggctctatggtggcaagttgcatgggttctcccatcaggacctcccgatgagcctacgaggtcggttataatactgtcgccacttcagagggaggaaacagagcccggagggttggggaacttcccgaggtcactgaactggtgtcaggcccagattggaatccaaacacatcccagcccatgcccggctccccagcgccggctcccaggcgtcttcccgggtgccagcggcacccgcatccattcaaatgctgcccagtccccgctcctcagtcgcttccctttaatacgcgcccgcatctccccccgacccctcagggtcaggcctctcggtgacttttcctttttctctggcagaaactgaggggtgagaccgatggttgtgtcccgaacgagggcagattgcctagagctcgtcagacagggacccaagggcgagtctggcagggcgtggtagctccgcgccgctcccacgcgtccg

SEQ ID NO: 3823 - DNA, 677 bp, Homo sapiens
  SIMILAR (622)..(527): 751254mologous to Homo sapiens Human secreted protein, SEQ ID NO: 7795,accession number AAG03714,Smith-Waterman Score=152.
atcaggacaaagagcctatgaatatatcactgatgtatataaaccctaaggcggttaataaaagctaactgtttagtgttatccatttaagggaacaggaggaattgcataacttttagattagtcatagtggtgctcctaagggatatgctgttgtatatttgtatagccagggcacttagccttccaaaccaatttatataccatgttcttcaactgtgggtgagatttagcctcaagatttgatttactatatgtaagtacattacttgatttctataaagaatctttagtggaagaggttattctgaattatttatcaatatgattaatacccagttagaaattattaatgatcttcctttatactatacataggataacttttaacttgtcgcgtacagttgttgctctgaggatcttaattttgttactttctaggctacatgaagctatctttttaaaaagtgtactcttcattttcactgttattgtgtacttagcataaaaaactcaaatctaggccaggtgcgagtggctcatgcctgtaatcccagcactttgggaggctgaagcatgcggatcacttgagcccaggagttcaagaccagcctgggcaacatggctaatgaatactaagcatagttttgatgtctttcatattaaagactttctca

SEQ ID NO: 3824 - DNA, 452 bp, Homo sapiens
  SIMILAR (12)..(164): 661254mologous to Mus musculus putative,accession number AK014668,Smith-Waterman Score=174.
tttcgtcagaaatggctgcaagtggccgaggtctctgcaaggctgtggccgtctctcccttcccggcgtggagacgagataacacggaagccaggggaggtctgaagcctgagtatgatgcggtggtgataggagcaggacacaacggactggtggctgtgagtacctccccacttgatcccacttcactggccctgggcgtgtggctctcagcagcctgggaaggagtgtgaagaagcaggtgggataagggccttgagagagaaggaaaaggcagcctagtcgatgctctctgctctccagtgctgactgggggctgggtcgaatgctcatctgcagccagctgaggacatcacaggctcctttcctccccttcccctaatggggaaaggtggtttccccatggcctgtgagggagtcagggagcttccagaaacaagctgacaaggtgg

SEQ ID NO: 3825 - DNA, 1522 bp, Homo sapiens
  SIMILAR (16)..(192): 591254mologous to Mus musculus zinc finger protein 276 C2H2 type,accession number AF178935,Smith-Waterman Score=159.
cgagtcggtacagggaccccagctggggctgagaccaagaccctgcccagcacggatgtggtccatcctacttcggacagcgacgcggtggggcccaggacggacttgacacctcagccaagcctgcccctttgcagggcaccagggcagttgggggagaagcagcttccatcttcaacctcggatgatcggagacggcttgagtgaagatgaaaatgacacgaagcaaaatgcccagtcttcggacgagtcctttgagccttacccagaaaggaaagtctctggtaagaagagtgaaagcaaagaagccaagaagtctgaagaaccaagaattcggaagaagccgggacccaagcccggatggaagaagaagcttcgttgtgagagggaggagcttcccaccatctacaagtgtccttaccagggctgcacggccgtgtaccgaggcgctgacggcatgaagaagcacatcaaggagcaccacgaggaggtccgggagcggccctgcccccaccctggctgcaacaaggttttcatgatcgaccgctacctgcagcgccacgtgaagctcatccacacagaggtgcggaactatatctgtgacgaatgtggacaaaccttcaagcagcggaagcaccttctcgtccaccaaatgcgacattcgggagccaagcctttgcagtgtgaggtctgtgggttccagtgcaggcagcgggcatccctcaagtaccacatgaccaaacacaaggctgagactgagctggactttgcctgtggccagtgtggccggcggtttgagaaggcccacaacctcaatgtacacatgtccatggtgcacccgctgacacagacccaggacaaggccctgcccctggaggcggaaccaccacctgggccaccgagcccctctgtgaccacagaaggcccagggcggtgtgaggtctgtgggttccagtgcaggcagcgggcatccctcaagtaccacatgaccaaacacaaggctgagactgagctggactttgcctgtgaccagtgtggccggcggtttgagaaggcccacaacctcaatgtacacatgtccatggtgcacccgctgacacagacccaggacaaggccctgcccctggaggcggaaccaccacctgggccaccgagcccctctgtgaccacagagggccaggcgcctccccgaccacccgatcgcgcagctcctgaggcggctgcagtgctccgtgtacagcgccctgtatcccgccgtgagcagagcagccgcgccagccccaggctgctgccccccgacccccaaccccggaagccgacggctgcggccctcgcagagcctccattgcatgctgtccccgcccgagcccagcgcagccccgcggccccaggacagtccccccacgcccccactccaacccggccccgtggggtctccctcacccctgggggacaccgcatctggattgccagacaaggacagctcgttcgaggacctggagcagttcctggggacgtctga

SEQ ID NO: 3826 - DNA, 917 bp, Homo sapiens
  SIMILAR (756)..(914): 1001254mologous to Mus musculus zinc finger protein 276 C2H2 type,accession number AF178935,Smith-Waterman Score=300.
  misc_feature (1)...(917): n = a,t,c or g
tacgccctgcttggcacgagggcggcgtcatccaggtcgtgtggggctgcgaccagggccacgactacaccatggataccagctccagctgcaaggccttcttgctggacagtgcgctggcagtcaagtggccatgggacaaaaaaaagggcttcccggttgcccccaccacgaagggttaaaccctggggattccccctcagcccttccaagttagagggacagggaccccaagggggtttaagaccaaagaccctccccagccggaatgtggccaagcttctttcggacagcaacgcgttggggcccaggtcgggcttcccacctcagccaagcctgcccctttgcagggccccagggcagttgggtgagaagcagcttccattttcaacctcggatgatcgggtaaaagacgagttcagtgacctttctgagggagacgtcttgagtgaagatgaaaatgacaagaagcaaaatgcccagtcttcggacgagtcctttgagccttacccagaaaggaaagtctctggtaagaagagtgaaagcaaagaagccaagaagtctgaagaaccaagaattcggaagaagccgggacccaagcccggatggaagaagaagcttcgttgtgagaggtgatgcctgcaacgcgaggctcgccctgcctgtcggggccggggctccatgcatgctcttcattgcagggaggagcttcccaccatctacaagtgtccttaccaggggctncacggccgtgttaccgaggcgctgacggcatgaagaagcacatcaaggagcaccacgaggaggtccgggagcggccctgcccccaccctggctgcaacaaggttttcatgatcgaccgctacctgcagcgccacgtgaagctcatccacacagaggtgcggaactatatctgg

SEQ ID NO: 3827 - DNA, 5453 bp, Homo sapiens
  SIMILAR (32)..(4396): 1001254mologous to Homo sapiens Fanconi anemia complementation group A protein,accession number X99226,Smith- Waterman Score=7496.
agccgccgccggggctgtaggcgccaaggccatgtccgactcgtgggtcccgaactccgcctcgggccaggacccagggggccgccggagggcctgggccgagctgctggcgggaagggtcaagagggaaaaatataatcctgaaagggcacagaaattaaaggaatcagctgtgcgcctcctgcgaagccatcaggacctgaatgcccttttgcttgaggtagaaggtccactgtgtaaaaaattgtctctcagcaaagtgattgactgtgacagttctgaggcctatgctaatcattctagttcatttataggctctgctttgcaggatcaagcctcaaggctgggggttcccgtgggtattctctcagccgggatggttgcctctagcgtgggacagatctgcacggctccagcggagaccagtcaccctgtgctgctgactgtggagcagagaaagaagctgtcttccctgttagagtttgctcagtatttattggcacacagtatgttctcccgtctttccttctgtcaagaattatggaaaatacagagttctttgttgcttgaagcggtgtggcatcttcacgtacaaggcattgtgagcctgcaagagctgctggaaagccatcccgacatgcatgctgtgggatcgtggctcttcaggaatctgtgctgcctttgtgaacagatggaagcatcctgccagcatgctgacgtcgccagggccatgctttctgattttgttcaaatgtttgttttgaggggatttcagaaaaactcagatctgagaagaactgtggagcctgaaaaaatgccgcaggtcacggttgatgtactgcagagaatgctgatttttgcacttgacgctttggctgctggagtacaggaggagtcctccactcacaagatcgtgaggtgctggttcggagtgttcagtggacacacgcttggcagtgtaatttccacagatcctctgaagaggttcttcagtcataccctgactcagatactcactcacagccctgtgctgaaagcatctgatgctgttcagatgcagagagagtggagctttgcgcggacacaccctctgctcacctcactgtaccgcaggctctttgtgatgctgagtgcagaggagttggttggccatttgcaagaagttctggaaacgcaggaggttcactggcagagagtgctctcctttgtgtctgccctggttgtctgctttccagaagcgcagcagctgcttgaagactgggtggcgcgtttgatggcccaggcattcgagagctgccagctggacagcatggtcactgcgttcctggttgtgcgccaggcagcactggagggcccctctgcgttcctgtcatatgcagactggttcaaggcctcctttgggagcacacgaggctaccatggctgcagcaagaaggccctggtcttcctgtttacgttcttgtcagaactcgtgccttttgagtctccccggtacctgcaggtgcacattctccacccacccctggttcccagcaagtaccgctccctcctcacagactacatctcattggccaagacacggctggccgacctcaaggtttctatagaaaacatgggactctacgaggatttgtcatcagctggggacattactgagccccacagccaagctcttcaggatgttgaaaaggccatcatggtgtttgagcatacggggaacatcccagtcaccgtcatggaggccagcatattcaggaggccttactacgtgtcccacttcctccccgccctgctcacacctcgagtgctccccaaagtccctgactcccgtgtggcgtttatagagtctctgaagagagcagataaaatccccccatctctgtactccacctactgccaggcctgctctgctgctgaagagaagccagaagatgcagccctgggagtgagggcagaacccaactctgctgaggagcccctgggacagctcacagctgcactgggagagctgagagcctccatgacagaccccagccagcgtgatgttatatcggcacaggtggcagtgatttctgaaagactgagggctgtcctgggccacaatgaggatgacagcagcgttgagatatcaaagattcagctcagcatcaacacgccgagactggagccacgggaacacattgctgtggacctcctgctgacgtctttctgtcagaacctgatggctgcctccagtgtcgctcccccggagaggcagggtccctgggctgccctcttcgtgaggaccatgtgtggacgtgtgctccctgcagtgctcacccggctctgccagctgctccgtcaccagggcccgagcctgagtgccccacatgtgctggggttggctgccctggccgtgcacctgggtgagtccaggtctgcgctcccagaggtggatgtgggtcctcctgcacctggtgctggccttcctgtccctgcgctctttgacagcctcctgacctgtaggacgagggattccttgttcttctgcctgaaattttgtacagcagcaatttcttactctctctgcaagttttcttcccagtcacgagatactttgtgcagctgcttatctccaggccttattaaaaagtttcagttcctcatgttcagattgttctcagaggcccgacagcctctttctgaggaggacgtagccagcctttcctggagacccttgcaccttccttctgcagactggcagagagctgccctctctctctggacacacagaaccttccgagaggtgttgaaagaggaagatgttcacttaacttaccaagactggttacacctggagctggaaattcaacctgaagctgatgctctttcagatactgaacggcaggacttccaccagtgggcgatccatgagcactttctccctgagtcctcggcttcagggggctgtgacggagacctgcaggctgcgtgtaccattcttgtcaacgcactgatggatttccaccaaagctcaaggagttatgaccactcagaaaattctgatttggtctttggtggccgcacaggaaatgaggatattatttccagattgcaggagatggtagctgacctggagctgcagcaagacctcatagtgcctctcggccacaccccttcccaggagcacttcctctttgagattttccgcagacggctccaggctctgacaagcgggtggagcgtggctgccagccttcagagacagagggagctgctaatgtacaaacggatcctcctccgcctgccttcgtctgtcctctgcggcagcagcttccaggcagaacagcccatcactgccagatgcgagcagttcttccacttggtcaactctgagatgagaaacttctgctcccacggaggtgccctgacacaggacatcactgcccacttcttcaggggcctcctgaacgcctgtctgcggagcagagacccctccctgatggtcgacttcatactggccaagtgccagacgaaatgccccttaattttgacctctgctctggtgtggtggccgagcctggagcctgtgctgctctgccggtggaggagacactgccagagcccgctgccccgggaactgcagaagctacaagaaggccggcagtttgccagcgatttcctctcccctgaggctgcctccccagcacccaacccggactggctctcagctgctgcactgcactttgcgattcaacaagtcagggaagaaaacatcaggaagcagctaaagaagctggactgcgagagagaggagctattggttttccttttcttcttctccttgatgggcctgctgtcgtcacatctgacctcaaatagcaccacagacctgccaaaggctttccacgtttgtgcagcaatcctcgagtgtttagagaagaggaagatatcctggctggcactctttcagttgacagagagtgacctcaggctggggcggctcctcctccgtgtggccccggatcagcacaccaggctgctgcctttcgctttttacagtcttctctcctacttccatgaagacgcggccatcagggaagaggccttcctgcatgttgctgtggacatgtacttgaagctggtccagctcttcgtggctggggatacaagcacagtttcacctccagctggcaggagcctggagctcaagggtcagggcaaccccgtggaactgataacaaaagctcgtctttttctgctgcagttaatacctcggtgcccgaaaaagagcttctcacacgtggcagagctgctggctgatcgtggggactgcgacccagaggtgagcgccgccctccagagcagacagcaggctgcccctgacgctgacctgtcccaggagcctcatctcttctgacgggacctgccactgcacaccagcccagctcccgtgtaaataatttattacaagcataacatggagctcttgttgcactaaaaagtggattacaaatctcctcgactgctttagtggggaaaggaatcaattatttatgaactgtccggccccgagtcactcagcgtttgcgggaaaataaaccactggtcccagagcagaggaaggctacttgagccggacaccaagccccccttcaaacccaaaggggggggaggaccctccgaccttcccatgcgggtgcacacaaagggtgaggctgacacagccactgcggagtccaggctgttaaaggtgctcatcctcactgccgtcctaaggtgggttcgggcttcaccgcctggccctctgtggtcacagaggggctcggtggcccaggtggtggttccgcctccaggggcagggccttgtcctgggtctgtgtcagcgggtgcaccatggacatgtgtacattgaggttgtgggccttctcaaaccgccggccacactggtcacaggcaaagtccagctcagtctcaagccttgtgtttggtcatgggtaccttgagggatgcccgctgcctgcactggaaccaacagacctcacacctgggggacagaggcagataagaaggtgcgagggccacagccctgggagggggtcctgactcacacttactgcaaaggcttggctcccgaatgtcgcatttggtggacgagaaggtgcttccgctgcttgaaggtttgtccacattcgtcacagatatagttccgcacctctgagaggggagagtccagtgagtccaggcccctgatgctccaacctcccggggggacgacgatgacaatgtgaaaccatcacagctgggaagacatttctgcacatggttcaccatgcagtgggcccaagcaaggggcctatgagggcctcgtttattaagatctttaaactgctttatacactgtcacgtggcttcatcagctgtgtgcatttcaggatggtttttaaagaaacctcagaaagctatttccttaa

SEQ ID NO: 3828 - DNA, 2381 bp, Homo sapiens
  misc_feature (1)...(2381): n = a,t,c or g
ccactcccacataaaatgctcatagtttgggagaggaaagagggaagattctctcttcttttaacagagagatgattgctctgtatacccattgcttcctccctgaggctgtccccaaagtgaaccacttgnatggagtggtcaaaatcataaggttgtagcaagccaaagatacgtaattgtgacagaaagcacataagcaataagcagaaaaccacgaagtgcatgctgtgatgcctgtgactccttacatcccgctcagtgccatgtcctcttttgtgatcttccagaaagctccagggattcatttgagttccacatccaagtaacagatgaattatattcatgttgtaatgcattttgtgggagtttacaaaaccagtgtctgttaaaactttgggaaaatgtcttaagaaaacgttggtgcttgggtgatgctttatttgtttaattatcaagaacaaattatggcaatgctagtttctgcttaaccaaaatactctgtgtatatattatacatatataaatacatgggattgtgtatgtctatatgtgtttaaagcttactatgtcttcattttggcttccatgactatcttttatacatggaattccttaagattgagaatatgtcactgagtgaatgatacctgcagacagtcagttgatatatgtagagttcagaatgactggttttctcatgtgcctttggccatggattcctcaacactggattgtataacagaattttggggggggagcttttaaaaaataatgactgagtctcccaccagaaccgattacatcattctcttgtggcgggaccccaggtagaattgccttttcttttaaagttctccagatggagctaatatgcaacaaagttgaaaaccactgatcctgggggtgtcttgttaattttgaagtaaaagtgtacagaagacgtagtggtatgagaaaggtccatttttaagacagttacctgttgtgctgctgttacaatatataatgaaaccaagtcacgggagtgaactttatcaatcttttttgattgntanaaagtaaaaaacgtagttcaccactttcaggagagaacttcatagcacaatgtctttctataagatattcttaatgatttagtattttacaacatttgtttaccatattttgatatacccatttttttctatctgccccagttttattaaaaaaactatatattattttctaaagaaacaatcatatttttatacaaaattatgttttcaggtaacgaaatagatgtagggtacagtggaacataagcagtgttacccctgggctgggagtcagtattatacaacaaatggtgagctggaacatgccctgtctgtgctgtccctcctggtgctggggtcgcggatggtggtaggcaacattggccttaatccacgctaggttcacctggacactttaaaagggaaaaaagttcccatagagttctgtggtcaccaaattggtttgccttttaccaaatacctttaatagaaccaaagtttgaaaatttggaaaggatgggaagtatctcagtctctgcataagaggattaaagtatgaaaggatcatttaatgactgttttaccttataagtcattaagtaatccacccatttcttatggatgatgcttaagcctgggtgaggttttgtactctaaggagcccagatccataatgcagtgcatttccttagcccttagagtttcttgcaaacatttaaaaaaaaagacatatttaagaaagaaagataaagaaaaaacatatttaattactgtaaacaggtactgctttatgtttattttctctctacttcaaccaaaatcagatctttgaggttttgctgacattgttggtggttttgcacatgttctttctaattggatttatgaatagttctatgggttttcaaagatgaatcatgctaagaacacttctgctttttgatccactgtttgcagcagaattatatatatgtataggaaaaatccactttgaataatcccatgttttgtatttgggaaattgtttttaaaaataaaaaggaaaggaaatatataaagctgttatttattcctgcatttccttacatatctatcgccttgtcagtatacccgttttggtatatattgcctctgcacatctacatttgtatatgcaacagtgagctttatatctacataaactgtaaataatcctttctgtgaaaggatcatcatatcaagatgataccaaaagtatgtaaaaagaaacctgcattattttgtaattatttcttatagatatttcatggtaagattagcagtcaataaagttacttttttgcctttaaaaaaaaaaaaaaaaaa

SEQ ID NO: 3829 - DNA, 1603 bp, Homo sapiens
  misc_feature (1)...(1603): n = a,t,c or g
aaatctcggggtgcctttactgtaacaagttatgctcggctctcttttattttacaagaggatggtgagggagagaatggaagaacagagggggcggacgtataagacatttgacactgcctatgtctgatttctctttctttctttctttctttctttctttctttctttctttctttcctttctttctttcttgcaagctgtgatcggatgcaatctttgtgggacattttaaatggaagggttcattgatgtgtattgcttgccaagccaaaatgttgcctttggggaaaagggagagaggtgttcatgggagtgcagggaaaggaggttttggggcagagattttgacttaaaataaccagacttcttctgggctgctgaaaagagggcaaaagttttaaatttgttcaagttttaaaactatgttcagttattgatttggccacttctgaatattattttgggatttcccctttcatgcttattttgttcagaatcctaatgaatagaggttgctggactcagggtaaaagcaggatgaactggagatgggacatacaaggtacttttggaattgccatagattacacctataatcagagtaaatgtcatcaacaaataatcaaaatattttttacatttgctcttctaaaatcagagcctattttaaatataaaagaaagtagatgtgataataatataaactacagtcacattaagttgatattaaattcaaaatctaacatagatttgcactgttgggtgtgtgttccgaatcagtgggttttcccactgatggttgatttcgggagccaggcttcaatgtttaattctattgtaatgtggttatttagcctgaatggttttataaggtggaaaggcaaaaaatttaattcccgaagaaaactagtgttttactatgactgtggtaaacatttccaaagcccacctggtgggaaaatacaaagttttaatgctgtgtgttttttttgtttttgtattttgtctcatcgacaaaactgggcagaaaaaaacggctttcgtatatttttcctgctgggtgggtcagaaggaaaggccgtgaagctaaaggtctcccactgagacgctgttctgcaaggagccgacctcacgtgccgccgccgccagagaagagagcacctgttcatctcggctcactgtgaggcctgnagctccagcgcctggcaggcgaggggcccgcaagccatcccccccacagcccacccgagaggggccatccctgccagggaaatccatatcccgacatgccctgtgccccacagcagaccttaagacctgccctcctaaaatgtcccatgaagcccattgtcccagtagagctgttagtttttaacaccagtgaagtattaccttttggttaaaaggatgcatgtgtataggtgtatgtgtgtgcgtgtgtgtttgtgtttttggacttgtgtggagaatgaagaaagggttccatttaggcatttgcaaatattcgatggcatcatgaaaagacaaaaaaatcctataaaatatatcatattttgctatgattttgtgtgtacatgtaataaaattattaagtataaaa

SEQ ID NO: 3830 - DNA, 732 bp, Homo sapiens
  SIMILAR (409)..(495): 481254mologous to Mus musculus putative,accession number AK014668,Smith-Waterman Score=65.
tttcgtgcctggggcagaaatggctgcaagtggccgatgtctctgcaaggctgtggccgcctctcccttcccggcgtggagacgagataacacggaagccaggggaggtctgaagcctgagtatgatgcgggggtgataggagcaggacacaacggactggtggctgcagcgtacctgcagagactgggggtgaacaccgccgtcttcgagaggcgccatgtgatcgggggtgcagctgtcactgaggagatcatcccagggtttaagttctcccgtgcgtcctacctgctcagcctgctgaggccgcagatttacactgatctggagctgaagaaacatgggctgaggcttcatcttcgaaaccactactccttcacccccatgctggaagagggtgcaggcagcaaaggtgcccaggtgccttctgctgggcacagacatggcaagaaaaccagaagcagatcgcccagttctcccagaaggatgcccaggtctttcccaaatatgaggagttcatgcatcgcttggcattagccattgaccctctgctggatgcggcccccgtggacatggcggccttccagcatggctccttgctgcaaaagaggagggcgctctccaccctcaagcccctgctgaaggcaggccgcatcctgggagcccagcttccccgatattatgaggtcctcacagcttccattaccaaggtgctggatcagtggttcgagtct

SEQ ID NO: 3831 - DNA, 903 bp, Homo sapiens
ataagtgaacatttatttatttttaaatttctctctaggcaaacaatggaatgtattggtggtttgctggtgaaccgtttatagagaattcaactccatccatggctggaagagggtctgctgccttccgcagaggtggtctggttctccccacaaatgccccgacagctgaagtgatgctgagatgcacttcttcaggcaggaggatttgctccatgtagcttttcctatacacagggagggcgtttacagctctgcttcatagcagcggatgctgcaggggtatgaggggctgacccttgctgggacaactgagcacagatgaatgtgtcactgagaaggaattccataacacatgtgactttcaaagtttttattgagtccaaatggactgtagatacagtgaggatgctgctgccttttgtgccaatgaattcaggctccaagatccccaggacacccccattctgtctccatctcttgcatctgctttcctttgcaggttgacctcattttcctaatcccattgcccccatgaaagctggaaacccatggcccagaggtaacccttgggaaagagaaaatctcatctcctaacctttgagtggaaaatgcctaaggaatggttctgaatggctcagctggaccccatgcctctccttggtctaatcatgggagccaaagggatgggtcacttacagccagcttggggcatttgccccgttgctgtggccacatgcccttaacagaagggcagaaatgttcatggggtcagcaaagagagcagcctcctcaaagttcagaggagtgtaggcacaggtcccacagagcagcgccacaccatccttgtgctctacatcctagtacaattgagttggggaaggtgttgattgttctcgtgcc

SEQ ID NO: 3832 - DNA, 552 bp, Homo sapiens
  SIMILAR (552)..(334): 611254mologous to Homo sapiens CoREST protein,accession number AF155595,Smith-Waterman Score=214.
  misc_feature (1)...(552): n = a,t,c or g
ttggaagcacaagcttcttttattttaaacaaaacaaaaccaaaaaccaaaaaccaatgaggctaccaaacaggcatctttatttgtaaacagcttaacactgaaaataaaaataagactatgaaagaacaatacactctccattcttctagaatcagaacttagcatgtcattatgacttaagagtcacgagagatgcaccactgaagaagtgtattgtcaacctttcatgctcaatttagctagtcctcttgacaaattaaccttacagaataccacacaaaatggtgattcctcaactcatattagctcaaattccatacacaaacacacctcctcttcttcatcagtgctcttccctgatggcacattagaagcactttttgtctcctcccctaaagtagaagcatcaccattagaagcctgngttccttgttctgcttcccactcctgcaatacctcctctaagttaaaccgacgcctgtagtttacaaagaagttcttcacttggccaacagtcttgttgccaattacatctgcaatagcttgaaa

SEQ ID NO: 3833 - DNA, 3116 bp, Homo sapiens
  SIMILAR (34)..(327): 521254mologous to Mus musculus 1A13 protein,accession number X83587,Smith-Waterman Score=245.
  misc_feature (1)...(3116): n = a,t,c or g
caggcttctaatggtgatgcttctactttaggggaggagacaaaaagtgcttctaatgtgccatcagggaagagcactgatgaagaagaggaggcacagaccccacaggctcctcggacactgggtccatcacctcctgccccatcatccactccaacaccaacagcccctattgccactctgaaccagcctccaccacttcttcgtccaacactgcctgctgccccggctcttcaccggcagcctcctccactccagcagcaggctcggttcatccagccccggccaactttaaatcagcctccaccacctcttattcgccctgctaattccatggccaccccgtcttaaaaccaagaccggtgttgttcacgggttggtgggtcaacaagccaccatcacttattggaattcagacagattcacagtcctcactgcactaaaaattaaattggacacagctgcagtaacttttcaccccatcattataccagtgctcatctgactgatgaaaaagaggaaagaataatcatttctagatactgaggctgcgaactagttctgtgggaagtggactagcataagtggatgtctaagaaatttttcagttcactagactaaaatgttttacaacaaaaagcctccagttaagcctcctttctagagtatatgttcagcaatgttgatctcataaaaggaaaaacaaaagatttaagtattctatataccaagtttttgttttgtttttactgtatttattttattgagggtcctttatattcctgcctcttcatagtcaaggctcttagtacaggaatattgacttaggaattgtgaaaactccttaaggttcttaagttaagggatggtttggcttttttcctttaattttttaaaaaccattttcctatgttaggagtgcaagaatagccagcatttccgattttgacatatgttcattttatgcatatttaagaaattatagctgcatatcccttctttcaaaaaatgttgcttttttttttaaaggaattttaatatattcctttaaaagaaagcaatttaatcaatggcaagccaattatataaaacccccaaagaatgtactgaacctactaaccctttaacatacagtttagggtcctagcgcagagtccttgttttaaaggtcattgactcatcatctgtcagtaatgagaggattggaagaataattttgcatacaaatgaggacttaatttgttgaaatataatctctttaagttccttgaaaatggagttggttttttttgtttctaaatgctatctgcttttaactagtagttgcctacatctggggacttcagagaagaattatattttgttagttaagtagacacagtggttatggaagcatttctttacagtaccctttacgtgtttggtttctgaacttaaaattgccctcatacttaataatatggtctgcatttaatatgaaaggtgttttattgataaatctattgtactatttggatacatttgtgtattccttgcagccaacctgtattcgtgggattggtgtagggttaaatcatcaacattatttcataaaataagaatttgttctgtgttatctaaagatgtatcagtatattgtcacagttgtgctgttaactaaaaatgctgagacccctttttatagaaaaacaaaaagacatcaagtcttcttaattcaacccataatcattaagtacttaacaaagaatattttacaagtgatagtatttcaacaatgtgtaattaatatttttgatacagtgatttcatattggaatcattatttgtgcaaagggacagacagatcacttagattgctatactagtggacataggctaaatgtttgcacattcacattcttatcacgtgtagaatacttcacaaaatagtcaacatctaaggccctaatttatgttttgaaagatcatgtgttcccaaagtattccctattgttgggctccacagccttaaagtgctatagatttaaattcattgattagttttaatttttaattttaggactgtgtatttccataaataccctacggtactgggcatatttggaaactctttttccaggttaggtccttttctttctcattgaatcatcttaaatagttcttggccctgaatttagctgatttaaaattcttaatattcaagaatttatacttattttttccttaaaagccacaggggacagttaaatatcttaaaatatctaaaacattttttaaagcacttagattgtcttacgtatgtggcatactatacctttacagcgtttaattggtcttgtctcttgtcagtaggaccttcagtacacagtatgtggggatatggtcaagtccaaagttgggtcaagcaccccagcatctgtcccagctgttcaagtatattggtgattccattaaaaaaatcctcctcctatccccagacatgggcccaaagttgctgtatcctgagggggtgtgcccggtaattggatttacatgcattagagcacacagtagaaaaacgttagcttcaattagtaatatgacacatgtatatagtgagatgtctttattgtgtgctttgccatattttgtaaatattttgccacgtcattatttttcttttttgtttangccagtgtttggccctggaagagtgatatgcttgctgcttaatcaaaggattaaagatttaaagatgtctatgtcttctatttttatataatttcatgttctatgaggaatttagtacctcttcactgtgaaattcgaaataatggatttttataaaaggcaaaactagaaatcttttaatggacaattttcattaatttcagggttatcatttttggaggaaatctacaccaaagtgggtttttttaaaatttacctaactaaaaataaaccacactgtggatacatcttataaaactaatggaaacaatgtttttctatatgatttaattctagtgtaatatggatgaggtaagagtaagttatgatcaaactttttatgttcttaataagcttgcaattgagtaaaatagaatataaaataaaggtgaaataatataaaaaaa

SEQ ID NO: 3834 - DNA, 386 bp, Homo sapiens
  misc_feature (1)...(386): n = a,t,c or g
cacactgttacaaatctggggggggtttctttcttctgataattctagagcctgttaccatagaaaggcatttcttcaatggctggttgtagttagttcatgtttttcaatcaaatttgcaaatgtatttgttgctgtatagtgattgttttgcaaaataaaattgcttgtcacctaactgcttnnnnnnnnnnnnnnnnnnnnnnnnnnnnnnnnnnnnnnnnnnnnnnnnnnnnnntnggggggggccccttttaaaaaatccctgggggggcccaaatttccccggggggaaaaaaattattttttttctttttgggggggtttttttaaaggggggcccggccccgttttttaccacccgggggggggaaaaattttttttg

SEQ ID NO: 3835 - DNA, 1745 bp, Homo sapiens
  misc_feature (1)...(1745): n = a,t,c or g
aggtgcaattccttaaatagtgattaaatttctctagaaagaagttaacagctcattagaaaagttttaacctgtgaaataagtatttttctcaacattcttttaagtttttatataaggtaacactaggtaaacattctgcatactagaagtcagtttattacaaatacatgtcaaaaataaagattatacaaggcaccaaactactagatttggcattaaaacaaatgtttatttctaatcacaacaaaattataatgaataaatgttcttgctttgtatggaaatacaattctttattaaagttaacagaaaggaactgatcgtttgtaccagtaaaagagagaaacacacaggttaaatatcttcttgtggggttaaggggtagaacctatcttgccttcactctcaagataacgactcaaattaagctttttgagcaccactcttgtggggacacacataccgctgatctaggaatgaaatcttcgtggtctcaattctaggatctactatgccagtttctctctggctttagcctttgagaacctgtataagaatacgtaagtaatccagagctgtgaagagtttaaaggccaacttctccagtgaactcaacctctgggtcacttgcaaccagaaattggatacctcataatgatgcaggaaagacccgagttcatgatgagtttcaaaggccacgttcatttaggaaccaactctctctggatttacctgctgagttccagcagcgtgatgggctgacatcccacctacaagtatgacacctgtgtaacaccagctaggtacgggctggagaaggctgaagagagaatgccattaaatggaagaatgtactgattgtggtgacccttctcccacacacacacacacacacacacacacaccctacagtaatacagcaagccgtggaataatccngcccaatatataacattcccatccagtattttattaaggaaattaaccctgaatggtggttgatttttgacatagctgcaattacagttttccttcctatttttcaagcccacaataaggaaaataaactactcatggtcctaaatactagygataaagtagattcatggccttggtaaggaaattttaagccattccttcaaagattgacgtgctaaaattaggcattgatgttttgagttttttttacacctaggatttttagccttgggtgtgtaggtgtaggccaagactctctgcagggataaagcttattttcaaactcagaaaataaaatgtcaatcataaaaatctacttcaactttagcaaaaagaaaaaaaaaatcaacataaaagtatactctggtatgctggggattccgagggttcccaacacactgttacaaatcttgtggggggtttctttcttctgataattctagagcctgttaccatagaaaggcatttcttcaatggctggttgtagttagttcatgtttttcaatcaaatttgcaaatgtatttgttgctgtatagtgattgttttgcaaaataaaattgcttgtcacctaactgctnnnnnnnnnnnnnnnnnnnnnnnnnnnnnnnnnnnnnnnnnnnnnnnnnnnnnnnnnngggggggccccttttaaaaaatccttgggggggccccattttacccggggaagaaaaaaannnnnnnnnnnnnnnnnggggggctttttaaaaagggggccggggcccgtttttaaaaaacgggggga

SEQ ID NO: 3836 - DNA, 1288 bp, Homo sapiens
  misc_feature (1)...(1288): n = a,t,c or g
atgcaccagtgtcatggctgataagacactaccaaggcaccctcattctaacatcaaggctgcgtgacagctcacctcaccttctgactaacccagtgcttctgtgctaagggcccccttaaacctctaccttcattatgtgcttggcacaaaggaatgatatatcttagatttggaaatggaatattcttccccaatcttactgtagtctaaggaccctttcacagaccttctattaacccatagcttactcagctttagttcctgggtaaatcaaatctgtgttttgcaaactacgatgtaagttcagttgcttctgattctagcagagctcagtgaaactctttgcttacagacatgctcatttttattaatgtcacacacggtattctccatgtgaaagacagaatttctttcatcctatttaccaatcccttcagatccttgtgaggaaccaacagaacagcttcaaaaaattaaaagggttttttctttcccttcacaaataggcacatgcttacttatatggcaaggttagaaaatccacaatgacaaaaccatgtggaaggacaaagagaaaaagacgcagaaggacttcctcttccagccaagatggacttgccctcccaccatgaccaacgagaaaactgaaactgggatagaatatttgagaaaactgttttcagagattggaacacaggcagaacaggactgtgatatttgagaacaggaaaacactgggagggcaaatctcatacacacttgtgttttcctgcccaatgggcgntttctcgaccacacagagagaggtagagacctcccagaaattgaggcaatgtcactgtcactaaagctgagagtcttacagtgctaacatgttgggagtttcacagaataaggtactggagaagagggaactacatacaggtgaggcctcaaaagagtacgcaaaagttctctgcaggtctgtggccaagggctgggggtgggggaagatgggggggctggggataagatacttggtgaaaaagaattggaaacaaatgtatgtaaaatgcctcctaatttacttcataagcatatgaagttatatacacaattttaaacaatggcctataaactgaaaaatattatacttatcaagttatttaacttgggatagagctggctttagaataagtcttcagtgaaatggttcatacttgaataatacccaaaaacaaatcttaaagttttaattattattataagtcaaaattaattcagatgcaaatatgcataatcacaa

SEQ ID NO: 3837 - DNA, 1002 bp, Homo sapiens
ccacagccggagcagctctgagagcgggggcttctgagcccagacagactcagcttggtgcccccctggcactgggagaggcgaggggcgggccccaggaccccagtggggagggggctatatctccttgcccccaaggcttacaaagaggtctcagggccagtgcacgggcagatgggaccggggaagactttgagggtgggcatccagtggacaaggagaagccagatgtgctgcttctacgggtgtcctctcccacctcctgtccacccactgtgcccggggaacaaagagccgttacgaacacaggaatctccccatcccccttcctgctgatgccaactcaccaggcttgggactgctgccggtggatggtaccagagtccatgatctgctctgtcaacttcaacttagctcagtgcagccagggacaaccttgcaaggtgccagccctgggagcccctcttccgcactacacagctccctccactcctctcttatcactgggcagacggaggaggtggtacagcacatggggtttgggagctagacagaaggaagaacagcctaacccttggtgtacccccatccaagctggggagctgcatccttttgagctggctgcaggaggacccctggcttagggctggtggctggccccacagcctcccccaagctcctccactgacccaggagtgcccagacgggtggcccccaaaatcccagcctggggagctaggcacctcactcttggtctgacctctccaggccaggctctcctcaccccatgccctgggccaaggtcctaccagccatgactactgcatgacaagaggtggggggtacagacctcaggtacatttgaccctgaggttaaaaggggttcaggtcaagaggtgggagaggaaaggggtagatgggaggtggaatctgtaggaaagagaaaaagcaaagtcgttcactgactgagaaccccccaggaagtggagacgggtccctggg

SEQ ID NO: 3838 - DNA, 1640 bp, Homo sapiens
aaaactttttttttttttttttttggagatgaaaactatcatttatttcaattgaatttagtttcattaaaaaattctatgataacattaaaacagaaacaggacgtttatatgactgtctttaacctcaaaagtccaaataaacatatagacattttgaatatagctatcattttaacaaacctcattatgatcactgttgcaatttcagtcacctaaaatacggaaccatgactattaataaacatttactgtgtgtgggtttgttgggactgaacattaaccatacgtgtatttctaaggtactagggagttggaacagctactacgggtcaatggtattttgggcagttggctgtgtgtggggtgtgtggctttttagggcttcactcaattaaaacatcgggttggctctctgcctgatggggcaaaaaacttggctataccgaaggacaaatatatgtataccaaaccaaatgcacacgtgtgcatggtctatatacatatatgcaatttccagggaggtgacaccttattctgagaggtccatgagactccacttcaaaccataatagtaaaacctttagtaaactgaactcaacatattacagccaccatcatcaggaaaaattaaagacatcatagttcaaataaagtacaaaaggtcccaggaagtattgtggtttgttgattcattcaacagaaagcccaaatgacaatgctattagtggtcaggagtaaactaacctggacaggctcatgaaaatgaacccctggatgcatcctgagaacgtactgcataattatagtcaatgcttgcaataattttcagtttgtctcatcacgttagcagagccctatccatgcaatttagaaaggatttcaaatacagccccaaaccaaaaaggcttacggtcaacagagggttagccttccattaatgagaaatccaaaaaagaataatgccacgtatttcaggaatgtcggttagaaggtttggccttcttgggaagtgtcacaatgctgagtctaaaactgccaaacagttaacccgtgtccccaagtccatgccaactcctaaaaggaggaagggacgggcccacatttgtgtcccttcaagtatccaaagcacccttttaagggcttcccattttggagaaagtagtattttctcttccttctcttttagaacatatgataaaatattgcccttctatcctttaaccatgtatccatttttttttttgatggggagtaagggggtacacactccgtactacaatgtcacaaactttttctttttgttgttcctattggttgtaactgtactattttgtaacaagaagccttcaggggaaataatggatcctagttatgtcaaagaaaacaatgagacaaaatggcaacttcacagtcttcaagtaaatagaatccctgatataaatggaaattaacatgtaattttgggggcaataaaaacaacaacaaaaacctgtgacaactctgtcctactcctttaaaaatgagccttgactctgtagtctcttaaggcacaaaacctgatagacggcatttaactggtggcctgcacctctgatttggattttaaaaaacaactattgacatttaaaaaaaaaaaa

SEQ ID NO: 3839 - DNA, 610 bp, Homo sapiens
  SIMILAR (444)..(608): 721254mologous to Homo sapiens Human Brainiac-3,accession number AAY06462,Smith-Waterman Score=200.
gagctccgcgcacctgggcgccatccgccctggctccgctgcactagctccacgcccgtaccccggcgtcacgctcagggaccggcgatgctctgcgggctgtgctggctggtctcgtacagcttggctgtgctgttgctcggctgcctgctcttcctgaggaaggcggccaagcccgcaggagaccccacggcccaccagcctttctggggctcccccaacaccccgtcacagccggtgtccacccaaccacacagtgtctagcgcctctctgtccctgcctagccgtcaccgtctcttcttgacctatcgtcactgccgaaatttctctatcttgctggagccttcaggctgttccaaggataccttcttgctcctggccatcaagtcacagcctggtcacgtggagcgacgtgcggctatccgcagcacgtggggcagggtggggggatgggctatgggccgacatctgaagactgatgctcctcctatggctggcatgatgcgctaccccgacccagctgatggcctatgagagtagggagtttgatgacatcctccagtgggacttcactgaggacttcttcaacctgacgctcaaggagctgca

SEQ ID NO: 3840 - DNA, 614 bp, Homo sapiens
aagataagatgcgagggcctcagtagattggataaaggcgagcgcggagggcaaggggcacgatggccttaccagggtctcagtacagccaccaaggacacctacgacgcctttcacatgcaggccctgccccctcgctaacagccaggggatttcaccactcaaaggccagacctgcagacgcccagattatgagacacaggatgaagcatttacaacccggttcactcttctcagccactgaagggccagaagatgaacagactgaccttgatgagctgtgcacaaagtggcataaaaaacatgtggttacacagtgtgaataaagtgctgcggagcaagaggaggccgttgattcacttcacgctttcagcgaatgacaaaatcatctttgtgaaggcctcgcaggaagacccaacacttgggacctataactgcccagcggacagtggcaggacaggaaaaacccgtcaatgtactaggatactgctgcgtcattacagggcacaggccatggatggaaaacgctctctgctctgctttttttctactgttttaatttatactggcatgctaaagccttcctattttgcataataaatgcttcagtgaaa

SEQ ID NO: 3841 - DNA, 465 bp, Homo sapiens
attgaaaaatcgatagccactcgagagtggcggaattccgaagctggtgcagccaaggctcctgcccgtggggccagggggattattcctgggcctctggaggctgggtgggtggtcacagggctgtgctgcagagacacctgttggcctctgggttggctcctgcccacacaggctactgacccactctttgttttctgatttgctttcacgccagggtctcagtacagccaccaaggacacctacgacgcccttcacatgcaggccctgccccctcgctaacagccaggggatttcaccactcaaaggccagacctgcagacgcccagattatgagacacaggatgaagcatttacaacccggttcactcttctcagccactgaagtattcccctttatgtacaggatgctttggttatatttagctccaaaccttcacacacagactgttgtccctgcactt

SEQ ID NO: 3842 - DNA, 1719 bp, Homo sapiens
  SIMILAR (179)..(670): 981254mologous to Sus scrofa CD3 zeta chain,accession number AF153830,Smith-Waterman Score=831.
gggggagtgcgaatttcttggcctgtcggcaggtgctttctcaaaggccccacagtcctccacttcctggggaggtagctgcagaataaaaccagcagagactccttttctcctaaccgtcccggccaccgctgcctcagcctctgcctcccagcctctttctgagggaaaggacaagatgaagtggaaggcgcttttcaccgcggccatcctgcaggcacagttgccgattacagaggcacagagctttggcctgctggatcccaaactctgctacctgctggatggaatcctcttcatctatggtgtcattctcactgccttgttcctgagagtgaagttcagcaggagcgcagacgcccccgcgtaccagcagggccagaaccagctctataacgagctcaatctaggacgaagagaggagtacgatgttttggacaagagacgtggccgggaccctgagatggggggaaagccgcatagaacgaagaaccctcacgaaggcctgtacaatgaactgcagaaagataagatggcggaggcctacagtgagattgggatgaaaggcgagcgccggaggggcaaggggcacgatggcctttaccagggtctcagtacagccaccaaggacacctacgacgcccttcacatgcaggccctgccccctcgctaacagccaggggatttcaccactcaaaggccagacctgcagacgcccagattatgagacacaggatgaagcatttacaacccggttcactcttctcagccactgaagtattcccctttatgtacaggatgctttggttatatttagctccaaaccttcacacacagactgttgtccctgcactctttaagggagtgtactcccagggcttacggccctggccttgggccctctggtttgccggtggtgcaggtagacctgtctcctggcggttcctcgttctccctgggaggcgggcgcactgcctctcacagctgagttgttgagtctgttttgtaaagtccccagagaaagcgcagatgctagcacatgccctaatgtctgtatcactctgtgtctgagtggcttcactcctgctgtaaatttggcttctgttgtcaccttcacctcctttcaaggtaactgtactgggccatgttgtgcctccctggtgagagggccgggcagaggggcagatggaaaggagcctatgccaggtgcaaccagggagctgcaggggcatgggaaggtgggcgggcaggggagggtcagccagggcctgcgagggcagcgggagcctccctgcctcaggcctctgtgccgcaccattgaactgtaccatgtgctacaggggccagaagatgaacagactgaccttgatgagctgtgcacaaagtggcataaaaaacagtgtggttacacagtgtgaataaagtgctgcggagcaagaggaggccgttgattcacttcacgctttcagcgaatgacaaaatcatctttgtgaaggcctcgcaggaagacgcaacacatgggacctataactgcccagcggacagtggcaggacaggaaaaacccgtcaatgtactagggtactgctgcgtcattacagggcacaggccatggatggaaaacgctctctgctctgcttttttttctactgttttaatttatactggcatgctaaagccttcctattttgcataataaatgcttcagtgaaaatgcaaaa

SEQ ID NO: 3843 - DNA, 523 bp, Homo sapiens
ttggtggaacatgggggcttaatttggacacatatgggctgttcttgattcccttttggaaccaaattgctacatattatacacacatatattttgttaattctgcaggcctagggacgctgcagtctgagactgcatgactcactgcttgcagccctttagctggtgcatgccgttcaatgccacgcttctttttcagcactgtaaaacaatgtcagctaaccaagctcctccgtacagacatgtggtttttaaacataaaacaaccaaaaaggaaaaagaaaaaagggaaagaagaagcctaccccagaaccctttctccatgtgtctcgactctaagtgcacgggaatgcaattgctgccaagtgttaactcattcaaacctttggaaatggtggctctctgtgctcagtacccgggccaccaaggcattcatagggccggaccagctccaggatgctggctttcaaagcaaaaagataagtgcccctccttgtttgttaaggctgtggtctcagtcctg

SEQ ID NO: 3844 - DNA, 968 bp, Homo sapiens
  SIMILAR (810)..(956): 971254mologous to Homo sapiens Human secreted protein fragment encoded from gene 64,accession number AAY07915,Smith- Waterman Score=253.
atttatttatttatttatttttatttgagacggggtctcgctgtggtatgatcatggctcattgcagcttcaaccttccagccaagtttaatttttacaccaatgattcatttctgcttttacaggtgattactttatctcactagaaaaaaaaaatgtaaaaatctaaacaaaaagtgtccaaaacttacaataagccttaatctcgaataattaccatgacatgtgttacttgtgtgcttattgctgtacagccttctttggctttctgacaagagcaactgctgagcagaagcacttcagcctcgtctggcatttgatgaatttgattaatgtgtgctatggtaagtctattcccctgtataattttatgggagaggccatgtgcaagtctgaatttaaaaaaaaagaaaagaaaaagccttgtgcagaattattacctactcaatacattatatatatgccagagatggctaaagcagctatatgtcaaggtctgcaaaaacatgaagaagctggcatggaaattaacacgttggtggtctgcaatgtgttcaaagttggtgtttttaatgacacttaaaaatagttaaaatatgtaatggctgatttctgaccagactaaactctcagcctgtctaatgttaggcagcttgatctaatcaatctcatccttttcttttcctcagtccaatcttgcaattgctatgtcagtttcagttcacaataataccagtgcagacatggctccttaagattttctccttttccctcacgcgggtcccaattctaaattcccaagggctgacatgattgacatttgccatagcctgaggagggagcatttccttttgtggtctttccttggtttgttttattaggcagtgaatggcaagtctgtctgtgtttctttgcttcaccccaaacaccttggcaaaaatgaaagccttctaatttaactgtgtcct

SEQ ID NO: 3845 - DNA, 416 bp, Homo sapiens
  SIMILAR (2)..(97): 1001254mologous to Homo sapiens Human secreted protein sequence encoded by gene 41 SEQ ID NO:99,accession number AAB51770,Smith-Waterman Score=171.
  misc_feature (1)...(416): n = a,t,c or g
agctatgaggcacctcctacgtctgttttctggctgtggtgacttgggatttttaaccttatatatctttttcctttactcaaaacaaaacaatttttagcacactgnnnnnnnnnnnnngccaaaggtttggggcttttttaaggcggaactgtatcccagggtgctttttaggacttaatagggaaatcccaaagtcggagctcctttacctggagttcaattagcccttagggccaaggaaacaggaaaaaaggctttttgggactggaaaggggacatgcaggggcagggggtcgggagcccttttcccctgctgggaaacttcagggggggagaaaagcatttgcccctgggatcatttggggggttcccaacccacagcttaatataggggtgggcatgccctggcctcn

SEQ ID NO: 3846 - DNA, 782 bp, Homo sapiens
ctaagtttcccagcaggggaaagggtcttccaaccccgtgcacctggatgtccccttttcagttacagaaagcattttttcctgtttcctaggccctaagggcttattaaactcaaggtaaaggaggtccgcctctggtttttccatattaagtcctaaaaagcagcctgggattcagggctgccttaaaaaggcccaaaacatttggctttttttttttttttcagtgtgctaaaaattgttttgttttgagtaaaggaaaaagatatataaggttaaaaatccccaagtcacccacagccagaaaacagacgtaggaggtgccctcatagctgccatgcccctaccacatgtgtcagcaggaagtcaggcttttctttcaaggccaagacactaggaacagtgctggagcagggtaggtcaggaggcatttactctcatgggcattgcgttgcaggctcactcacccagacagcaggagaaacagggccatgggaaggacaacacgtgggtctacagacttcattaagtagttctctgcctctccagtttttaaggatgggccattaaggcatggccacccttcacccacaagaaggtcagaggtagggtagagaggagggagctgacactacaggcacccaggacaacctggcttcaagggctcagcatgggaggtggcacaaggcctgaggaggtggaaattggaacgcattgaggaatacttcccctcttggcccccgtctgttttagggggaggaaggagattctgggagagggaa

SEQ ID NO: 3847 - DNA, 486 bp, Homo sapiens
  SIMILAR (283)..(2): 891254mologous to Mus musculus putative,accession number AK009497,Smith-Waterman Score=411.
ctagtcgtttgtagttgataatgagaagaaggaagttcagcacgtacgtgacgatgcagatgatgcagaactccttcagcacaaagtacagaatgtaggccaggtacagggaccccacgaccgacatgatggaggacgtcatgagtatcaaaagcgccacagcgcttgctgtcatgccaagtaataactgtagtatataaaatataagtccagagacactgtttggctggtttaatacaccatcctttccaaaaatggaacccaaaagaccaaatcctcgaccccatctggaggcaagggcggcggagcacttcacccagggccccaggtcgcagagggcccggtgctcggggtcccgctccttctcccgctccacgtggttaggcgtagatggagagcaggattccggcagcgcaccccgcataccgggccgcccgctcccaccaaggcaaaaactctcttagcaggacgggagccgccacgaaa

SEQ ID NO: 3848 - DNA, 597 bp, Homo sapiens
  SIMILAR (363)..(139): 901254mologous to Mus musculus putative,accession number AK009497,Smith-Waterman Score=348.
  misc_feature (1)...(597): n = a,t,c or g
tttaaaaatcagtntgagattcttagggaaagtgtctgttgtgnnnnnnnnnnnnnnnnnnnnnnnnnnnaacctgctgcaaaataaactgaatggaaaggggcttgagactgttagggtggagtctgtcgggcgtcagtcctgcttgggttgcagctgccgcttccaggcctcgttcaagtaaactagtcgtttgtagttgataatgagaagaaggaagttcagcacgtacgtgacgatgcagatgatgcagaactccttcagcacaaagtacagaatgtaggccaggtacagggaccccacgcccgacatgatggaggacgtcatgaggatcaaagccgccacagcgcttgctgtcatgcctggaggcaagggcggcggagcacttcacccagggccccaggtcgcagagggcccggtgctcggggtcccgctccttctcccgctccacgtggtaggcgtagatggagagcaggattccggcagcgcacactgcataccgggccacccgctcccaccgcggcaccgacactcttagcaggacgggagccgccatcttcccgcggacgcgtgggcggacgcgtgggtcgaccctga

SEQ ID NO: 3849 - DNA, 481 bp, Homo sapiens
  SIMILAR (30)..(464): 571254mologous to Homo sapiens Similar to H5AR gene,accession number BC002480,Smith-Waterman Score=361.
ccagcagcgcgtaaggcggcaccggggccatggctccctgggcggaggcgagcactcgcgcatgaacccgctgcgcgcggtcgtggctcacgctgaccgccgccttcctgctgaccctactgctgcagctcctgccgcccggcctgctcccgggctgcgcgatcttccaggacctgatccgctatgggaaaaccaagtgtggggagccgtcgcgccccgtcgcctgccgagcctttgatgtccccaagagatatttttcccacctctaataccatctcatttctgtggaatgatatatctgccttctggcctttctattttttctgttcctgacaccactcttttcatatttacgttttttatttcactcacaccttgcgtcttgctttcattttcttgtttaattaacccatcacccgcactctttttaatgctttgatgtccttagtctctctacgttctcgtatcgcccgttaccccg

SEQ ID NO: 3850 - DNA, 734 bp, Homo sapiens
  SIMILAR (732)..(616): 691254mologous to Homo sapiens PRO1902,accession number AF118082,Smith-Waterman Score=138.
ctggcaaaattatgttagtaatataaacatcaaaaaattcttcataccagtgaatcacaagtcctcactgcaacagacataacaaatccaactcctaaaataaattatatgtagttttgaaggtagaggtgacataaaagtaggctgtatattcaaatcctacaataatattcaattttttccaattatcttttgaacagcaatttgcaaaatatatttacagtttcccttaagttatttaataagtagacttagaaaaattactagtaaactaacatttttggaaaattttcttaatttcttttgattaaattatctcgcctctgttttattagacaaatatcttatcagcccatgaatcacatgttgtgagtattttaaaatatctgtttccttccttagtccctaccaccaatgacaaaaaaacaaaatagtaacttgcctaataagtaatgacttaattcttcaaaaaacatcaacaaatttaaaagaaaggccaaacatggttgctcaagcctgtaatcccagcactttgggaggtcaaggtgggtagactgcttgagctcaagagttcgagaccagcctgggcaatgtcacgaaaccccatctctacaaaaaattacaaaaatcagctgggcatggtggcgcatgcctatagtcccagctacttgggaggttgaagtgggaggattgcttgagcccagaaggcagaggttgcagtgagccgagattgt

SEQ ID NO: 3851 - DNA, 876 bp, Homo sapiens
  SIMILAR (22)..(540): 431254mologous to Homo sapiens KIAA1607 protein,accession number AB046827,Smith-Waterman Score=388.
atggcaggagggctgggtgcaccagaagtaactgcagcacttctccacagtgtggagaaggcacactttgacgagctgttatttaaaaaacctcatccaccaaagcgagtgagaagtcgactcaatggagacaatgcaggaatctctgtcctaccaggatctacaagtgacaagatcttttttcatcatctagacaacttgaggccttctctaacacctgtaaaagaactcaaagaacctgtaggacaaatcgtatgtacagataaaggtattcttgcggtggaacagaataaggttcttatcccaccaacctggaataaaacttttgcttggggctatgcagacctcagttgcagactgggaacctatgagtcagacaaggccatgactgtttatgaatgcttgtctgagtggggccagattctctgtgcaatctgccccaaccccaagctggtcatcacgggtggaacaagcacggttgtgtgtgtgtgggagatgggcacctccaaagaaaaggccaagaccgtcaccctcaaacagtgtgagatacactggctgaacacatgcagtgatgatgaatcaatggagtatatgctggaccataaaatggactcttggtaccgagtgcacctatgtctaatcatgtgtgcatgtgaggaggtgctggctgactgcatcagtggaacccagtcaaagcataaaagagccacagtaactcaatgccactctgctattacagccttcgcaagatacttatcctgcacagctgttgctgtagttctctggggaagtgtattgtctgccctagtaggtggctcaacaccatatggaacctgccaaggcttggagcttccaccctctgaagccacagcctga

SEQ ID NO: 3852 - DNA, 2141 bp, Homo sapiens
  SIMILAR (651)..(782): 1001254mologous to Homo sapiens Human 5' EST secreted protein SEQ ID No: 489,accession number AAY11889,Smith-Waterman Score=231.
tgtggtggaattcgccaggggaaaacattctgcttttaggtagtttcaaaattcaggggagggagcctgaaatttttgccatgattggtttgttagaaagagcaggcatcagactacttctgataaaattgtttggaaggtcacgacctcgcaaaaacttttcaagagcaacaaggaagaattctgctgtgaagaacacagtgtacggatcctccgcatattatctcaacagaggacagtagctcaggaggcagcttcaaacggtgacctgtggcctgggccatctcttcgtcatgtgcttcacttttccctgtttccctgtgaactggcttccatggttctgtagggtagtgagtcggagttgtggctgcagcagagcaggagatgcttgcccgagtgggagcaacccacccccgtgtccccaatgcctcactcctggcttctagtgcagccctttgtagactcacctcgcaagaaggaagatctgcctggagacctgatcccagtccagctttttgaccataggtcatctttgtccccttgctcctttgcatcatgtcataaaatttgaggatatcagctgattattttttcttccaagaatgaaaatcaagcagaattgattcctacacgaaaaaaaaagcacacgaatgccaaacctttcctttggtggactggacactaaccagatgagagtaaattttttatccgtggacgtatgtaagctactgctgctgtgtgctctccacagccatatttattgtattaaacaatcagcactaaaccttcaaaaattgcccagtgttcctagttaaatgttcagaggggagaaatagatatattttaaataatgttttgctaatgaaaagagtaaatatttttgtttaaatcagcaaaaactttccattattttatatttcccgtcctactatacctaaaacaaaagattgccggttatacctggggtccactggatgcagtccagccagcacctccctcacatgcacacatgattagacataggtgcactccgtacccagagtccattttatggtccagcatatactccattgattcatcatcactgcatgtgttcagccagagtatctcacactatccatacaaatctaaaattgatactggaaatgttattataggaggcagtgatcgcatttaaaatcaggccaccttacaagtttaattttcaacatctcatggtttttatttggtcccattacaggcctccaaatgttgggtcataaaaaaaatttaggctaccaaagtttaaagaataaaatggaaattttataagaaccttacattaaaaactccggtagtttgcatgagtaagaactccttgagatacacagatccccccacatttgtatttaaaataattggggaggcattgaaatccagaattataaggaaagcattactgaatatgtgtgttattaaaatcaatattattattaaacaaaatagggaggctaggaaatatttggggatcacagtaatagcttttctccaaatatacttttaggaattggaatgtacattatcctattatgtaaaaaagcaaattattaattttaatggagctctcgattgacctttttagcatacttttatagcatgtatattaaaatagaatatattttagcaaaagattgccataaaaccctgacttggctcattttgatatttgcactgtgaagagggcttaaattccaatgtagcaatgtggtggcagacaaatgaaaaactaggaagttctttcacagtaatgcctagttgttccaaatttgctatatttggaggtgctctactggtacttcctgcttgactctctgacctgtgggatgcacattcttcctcagcgctttttccttgttgtggtgacgtacattcactatctgagagtgaaagaccacacacacccctctttttaaaattattgtatctcttccttttcactttggtttgaacaaagatagtgtcaccttgttccgtgaaaaagaaaaagcataaacagtgtatatttagggtatatgggtgatagcttatgatgtgtgtcaatcagttctctgaatcttttactgaaactgagacaggaaaataaaactgaaacaaatcataaa

SEQ ID NO: 3853 - DNA, 557 bp, Homo sapiens
  misc_feature (1)...(557): n = a,t,c or g
ggacatacaaagtgtaggatgtcgaagaagctaagaaaaacggtcaagcacacgcgccgcccgcgagaacagtaaagcagaaggaagagaacgcagcgaaaccggagagagctgttaaaattatcgtggtaannnnnnnnnnnnnnnnnnnnnnnnnnnnnnnnnnnnnnnnnnnnnnnnnnnnnnnnnnnnnnnnnnnnnnnnnnnnnnnnnnnnnnnnnnnnngtcaatgggaggccccagcctgagccctgagcagctggccagccaggagctggcatgtgagtgagaggcatcctagtctcctgctgctccaaagacaatgcccgctgaacaggatggcaggccacatcagcagtccatacagaagtgaagctgtcgtttcttcccctggagcaccagtgaggacaggccccagctgggagccaggcaaggtgggtgagctctgtgctaaccacactgggagctcggataagcgtgagggcaaggctggagaggtccgggacccctgcgtgttgcttcccactcctgccaggctggcacgcccccattcttca

SEQ ID NO: 3854 - DNA, 731 bp, Homo sapiens
aaatcttttcatcaccattatttattatatatgaaccaggtttgcaggacaagtcacactcaacacccttacccaacaggaggggcgacggaggctcaaagagggagtgtagggggaaggatgtcaatgggaggccccagcctgagccctgagcagctggccagccagggaactggcattgttgagtgagaggcatcctagtctcctgctgctgcaaagacaatgcccgctgaacaggatggcaggccacatcagcagtccatacagaagtgaggctgtcgtttcttcccctgggagcaccagtgaggacaggccccagctgggagccagggcaaggtgggagagctctgtgctaaccactctgggagctcgggtaagcgagaggccaaggcttgaaaaggtccggaacccctgcgtgttgcttcccactcctgccaggctggcacgcccccattcttcaccatccctagcacagagcccagggccagggggcagagggcggggctggctcaggagcagggctggcccgtcccatagcgccactcacattgccccttcccctctctcatcccagctctggtcacttagatggtgccatgacaggctatgaaatcccccccctcggcagccaaaagtgcaattcagaccctttctttgctctccgttttgccttttcggacggggacaacctataaagcttctccagcaatttccagaagcccacgcgtccg

SEQ ID NO: 3855 - DNA, 1768 bp, Homo sapiens
ttgtaaatgaaccaaattattactgctaccactatcagggtgtaaatagaagactaatacttaattaaaggcaccttcctaccattagagcagaagacagctcctatagttttgtattttggcagctatgagatattttcatgggaatgtcaacatggtcaagcactttgtaccaagttattaagtaacataatttttaaaatttaaagaatgtgtcttcaactaaaaactttattctttagcatttatttatatttctctgtagggtgttatccctgtgacattgtctctttagtttgctctttcaagagatacttacagatgttgagatggctgccctgcatttccagctaatctcttctgctctaaatatttaaaaacagttcttctcaaacattttcattcagatagctttctgaaagttccctatccctctttaccataattttttaaatgtagccacattgtaatagtaaacttcatatataatgagtgcttcatatttttgttatgggaaagcaatatattatgcagcgcggggtgtagaaacattcagatccctcttcctttactcaaatacagtttcaaaaggaagactcatgagaaatttcataaaatacaagtttttagatgtttatgctttgcctttctttttaaaggtgttttcctgctttgtagtctccaactcccgaaatttaaaatatgggaaactaaagtggttttatttgtgcttaacccaatttaaactcaatgtaaaatgttatatatgcatcagtacaggcattttcaacatattggcaacatattttaaatgaaaacactaaaacaattcttaggtatgaggacaaaactgtaagggaaaaagagtgttaataccatgatggcattaacataaaatatcaaacacacaaagtcattaaaatggaaaatttacagttttacctgttcatatctagtgccccacagtgtgtgtcaaccaaagggtgcagtggctaccttcggcctgttggactggtacaggttacaatatgtcctcttccattgcaaattaaagtccaaatagagaaatacttaggttttagaacacatcagaggtatttctgctgtatttttcaccttaaaaattgacacagagtttactaatagaggagtagagattgttgaccatttttaaaaaaccgatagccactctttttcttttatgtttaaaactgaagttttgccaaatgggaaaattacctgttacctctaccatccttaatgtagtaactttagaatttaaatttttatattactattttcctttttgttgttcacatagtcttaaggcacctatacttttaaattgactttttcatttgatattatctatatgtatgtagttgtgaataatgaattattttaaattataattacctttaataccccctaatttaatttagaagtatttcctcctattgcctgaatacctaaagtagttttaaattttattaatggataaatcccccgggagggggattatttaggtgaaataatatgaagaactttatgaccttatgtttgcccttattgcattccccaaagagttgtaacattttacagtgttaccatttgagtaggggttttatatgttgttgctaatttagtaaacataggagagaaatcaaagtttttctgatttgcttttatgtgatttatctgtatactttgttcatttatataaataaatgtcttaatggtttctatacataaaaaaaaaaaaaaaaaa

SEQ ID NO: 3856 - DNA, 960 bp, Homo sapiens
  SIMILAR (1)..(957): 1001254mologous to Homo sapiens Human neurotensin receptor type 2,accession number AAW80598,Smith-Waterman Score=1689.
atggaaaccagcagcccgcggcccccgcggcccagctccaacccggggctgagcctggacgcccggctgggcgtggacactcacctctgggccaaggtgctgttcaccgcgctctacgcactcatctgggcgctgggcgcggcgggcaatgcgctgtccgtgcacgtggtgctgaaggcgcgggccgggcgcgcggggcgcctgcgccaccacgtgctcagcctggcgctcgcgggcctgctgctgctgctggtcggcgtgccggtggaactctacagcttcgtgtggttccactacccctgggtcttccgcgacctgggctgccgcggctactacttcgtgcacgagctgtgcgcctacgccacggtgctgagcgtggcaggcctgagcgccgagcgctgcctagccgtgtgccagcccctgcgtgcccgcagcctgctgacgccacgccggacccggtggctggtggcgctctcgtgggccgcctcgctcggcctcgccctgcccatggccgtcatcatggggcagaagcacgaactcgagacggcggacggggagccggagcccgcctcgcgagtgtgcacggtgctggtgagccgcaccgcgctccaagtctttatccaggaagccatcgtggtcatgtatgtcatctgctggctgccgtaccatgcccgcaggctcatgtactgctacgtacctgatgacgcgtggactgacccactgtacaatttctaccactacttctacatggtgaccaacacacttttctacgtcagctcagctgtgactcctcttctctacaacgccgtgtcctcctccttcagaaaactcttcctggaagccgtcagctccctgtgtggagagcaccaccccatgaagcggttacccccgaagccccagagtcccaccctaatggatacagcttcaggctttggggatcccccagaaacccggacctga

SEQ ID NO: 3857 - DNA, 410 bp, Homo sapiens
  misc_feature (1)...(410): n = a,t,c or g
aggttggttggcccattttgtcccccccccaaagtaagggtcctttccaaaaattcccaggtaggtttttattcggccccctataaggaaaaaactttttccttgcctgcccgggttaactttggcccccccaagggtcctttaaaacggccgccccnnnnnnnnnnnnnnnnnnnnggttgagcacagggtactttattgatggtacatgacaaggtgcggctccctaggcccctcccctcttcaaggggtctacatggcaactgtgaggaggggagattcagtgtggtgggggactgagtgtggcagggactccccagcagtgagggtctctctcttcctcttgtgctcttgctggggctggtggtccaggggtcttactccttggaggccatgtgggccatgaggtc

SEQ ID NO: 3858 - DNA, 435 bp, Homo sapiens
  misc_feature (1)...(435): n = a,t,c or g
cccacgcgtccgcaactttaattttctgaagtataaattatttatgtaaattcattgtttttgcatatttcttaggacatgcatctttaagctttatcattgcccatatgtacagaaagagaataaagacatatgtttatggatggnnnnnnnnnnnnnngggggggccgttttaaaggatccttgggggggcccaagtttacccgggcttgcaaggtaaaatttttttccttatagggggccgaattaaaacctacttgggaatttttggaaaggacccttatttttggggggggacatattgggccaacctccctccagaaatttaaggctttagggnnnnnnnnnnnttttaaggggaaaaaggggtaaaacaacctccatatccttgctgttggaaagttttctttacggagtttgattaatgaaaatttt

SEQ ID NO: 3859 - DNA, 422 bp, Homo sapiens
  SIMILAR (422)..(249): 1001254mologous to Mus musculus putative,accession number AK002405,Smith-Waterman Score=298.
  misc_feature (1)...(422): n = a,t,c or g
ttttccctaaagccttaaaattctgtagggaggttggcccaataagtcccccccccaaaataagggtcctttcccaaaattcccaggtaggttttaatacggccccccaaaaggaaaaaaatattaccttcccagcccccgtaaactttggcccccccaaggatcctttaaaacggccccccccnnnnnnnnnnnnnnnnnnnnnnnnnnnaacaactggtcatcaatttattaaaatagttgacttaagcatctgcaatggtgacttccacctcaactcctggctcaatactgatggaagtaatctgcttaacaatctcagaaggactgtgcaagtcaatgagtcgcttgtgaattctcatctggaaacgatcccacgtcttagaaccttcaccacaaggagtttttcttgtagtgattct

SEQ ID NO: 3860 - DNA, 1858 bp, Homo sapiens
  SIMILAR (1665)..(1835): 681254mologous to Homo sapiens PRO2822,accession number AF119900,Smith-Waterman Score=211.
atcgataatggggatagattttcatctgtttatttttagagagatcttgtacttaactcactagtctgggatgttttatttatgtcacctaatattaactattgctaaatttcactttaataaaaaagtagatacaaagactcattttacttagcaagactgcaaataaaactaagacataaattcacatgttagtattgtccaaaacaattcctccagctatcaacccacggcaatcaatccagcagtatcatttatagaatgattactaaaacaagaatcatttctcagttacaaatggggtcattaagcccttggggtcatttgaaagtagaagtagtttgcctacttaatcatcagtctacacaaaggcagaaataaaaaggaatggaaatacaaacacaaaatgattggttattacctgttttataaggaaacaagaaaaaaaaaacaggtggctagaaacaacaaaaaagcagtggctggaaccctactgaatagagcttaaagaagtactggttacattcacagacacagtagccactagccaagatatagtttatctccatcaaacttaaatagataaagtcagtaagtatgaccatcttactttcactatttacgctctttaaatagtaaaggtatcggtttgaaagatacataggaaccatagggaacagtggaatggatccatttattaaaacagctcccttttccctgaatccaatatattggctaaaattcttttcaggtaaccctccctttttatatggatcacagatccctccacatctgttttattttagttatataaaaacttattaataaactttggtttccttgcattcggtccttatattttaaaaagtgattaaaaacagtactgaatatgaatcacttctcgcaaagtttaatgagtgagaaacattcaaccaaggtgatttttccttggaaaaccctacaaaaactgaattttataaacagttacttattttgatagatgttccatttataaatagcagccattacttcactgtctacaaaattgcaggctgtcacattttacatgtttagaatccaaatgttttaggattagatttttcttagtaagagttaaaataaaaacaaagttaccacagacaggttacgttgtcctatgcaaataaaacagctggattttcatggattttgctatttaggacagataaggaggacaacccattggggattggacactaatgtgttaggaataacatattttttggtttaaggaggggaaatgataggaaccttgggggtgggggccgctgcagcaggactttgactctactggaggctcttctgtgcctcatgggaaccaactatcgcaggatgttagtacccggagaggcccctcaagttaagaccctgaaccaaaatgtgcctaatccagaaaaagctgaacctatcccctgcctccccggttcctactgtggtgaaattggtgttttcctgaaggtcctaggcaacaagagcctccagagtaagaaggagtagacattttcggggaagtgggatgctgggcatgtcatgttgctctaacaagtgattaatagcacggaaatgggaggaagatgaatgtattttaaatggatactccctatgctagtcttgggaaatgaccttcttttcttgagacggagccttgctctattgcccaagctagagtgggatggcatgatcttggctcactgcaacctctgcctcccgagttcaagcaattctcctgcctcagcctcccaagtagctgggattacaggtgcctgacaccatgcccggctaatatttctatttttcgtagagatgggctgtgccgaaa

SEQ ID NO: 3861 - DNA, 438 bp, Homo sapiens
  SIMILAR (26)..(301): 941254mologous to Homo sapiens Similar to KRAB-zinc finger protein SZF1-1,accession number BC006247,Smith-Waterman Score=456.
  misc_feature (1)...(438): n = a,t,c or g
gtacgacggacccttctgggctgaggcccgtttcacacacggtgctgctacctcgtttgcttcgtgcgtgcgtgcgcagatgtgggccccgcgggagcagctactgggctgggctgcggaagctctgcctgccaaggattctgcctggccctgggaagagaagcctagatatctgggaccagtgactttcgaggatggggctgtgcttttcactgaggcagagtggaagagactgagccttgagcagaggaacctataccaagaagcgatgctggaaaatctcaggaatctgggctcattgnnnnnnnnnnnnnnnnnnnnnnnnnnnnnnnttctggccctggacctgaacctgggattttggctttgaagttggacttgcgcggagatataactttgaccctgcgccttggacgtaacccttgactgggattggcc

SEQ ID NO: 3862 - DNA, 400 bp, Homo sapiens; identical to SEQ ID NO: 715
  misc_feature (1)...(400): n = a,t,c or g

SEQ ID NO: 3863 - DNA, 378 bp, Homo sapiens
  SIMILAR (1)..(102): 1001254mologous to Mus musculus putative,accession number AK002998,Smith-Waterman Score=185.
  misc_feature (1)...(378): n = a,t,c or g
aagcgcaggacaggctgcattggggccaaacacagaatcagcaaagaggaggccatgcgctggttccagcagaagtatgatgggatcatccttcctggcaaataaattcccgtttctatccaaaagagcaataaaaagttttcagtgnnnnnnnnnnnnnnnnnnnngggggggccgttttaaagaacccttgggggggccaaagtttacgggggctggcaaggaaaaacctttttccttatagggggccgaataaaaacctacctgggaattttgggaaagaaaccttactttgggggggggacaaattgggccaacctccctccagaaatttaaggctttagggnnnnnnnnnnnttttaaagggaaaaaggggag

SEQ ID NO: 3864 - DNA, 1871 bp, Homo sapiens
  SIMILAR (37)..(1266): 1001254mologous to Homo sapiens neurotensin receptor 2,accession number Y10148,Smith-Waterman Score=2130.
  misc_feature (1)...(1871): n = a,t,c or g
gagtgagagggagggagcgccggccgcgggagcgggatggaaaccagcagcccgcggcccccgcggcccagctccaacccggggctgagcctggacgcccggctgggcgtggacactcgcctctgggccaaggtgctgttcaccgcgctctacgcactcatctgggcgctgggcgcggcgggcaatgcgctgtccgtgcacgtggtgctgaaggcgcgggccgggcgcgcggggcgcctgcgccaccacgtgctcagcctggcgctcgcgggcctgctgctgctgctggtcggcgtgccggtggagctctacagcttcgtgtggttccactacccctgggtcttcggcgacctgggctgccgcggctactacttcgtgcacgagctgtgcgcctacgccacggtgctgagcgtggcaggcctgagcgccgagcgctgcctagccgtgtgccagcccctgcgtgcccgcagcctgctgacgccacgccggacccggtggctggtggcgctctcgtgggccgcctcgctcggcctcgccctgcccatggccgtcatcatggggcagaagcacgaactcgagacggcggacggggagccggagcccgcctcgcgagtgtgcacggtgctggtgagccgcaccgcgctccaagtctttatccaggtgaatgtgctggtgtccttcgtgctccccttggcactaactgctttcctgaatggggtcacagtgagccacctgctggccctctgctcccaagtgccgtccacttctaccccgggcagctccacccccagccgcctggagctgctgagtgaggagggtctcctcagcttcatcgtatggaagaagacctttatccagggaggccaggtcagcctggtgagacataaagacgtgcgccggatccgcagcctccagcgcagcgtccaggttctcagagccatcgtggtcatgtatgtcatctgctggctgccgtaccatgcccgcaggctcatgtactgctacgtacctgatgacgcgtggactgacccactgtacaatttctaccactacttctacatggtgaccaacacacttttctacgtcagctcagctgtgactcctcttctctacaacgccgtgtcctcctccttcagaaaactcttcctggaagccgtcagctccctgtgtggagagcaccaccccatgaagcggttacccccgaagccccagagtcccaccctaatggatacagcttcaggctttggggatcccccagaaacccggacctgaatgtaatgcaagaatgaacagaacaagcaaaatgaccagctgcttagtcacctggcaaagcaggtgagcaacctcatcactaatcattcaagcttcgcagccagggcgacttctatcaacccctgctctgctgagaaccatcaagcgcagggaagccacgtgacccctcctagcctcaggctccctcgtctgtgtagtggagataaagaacagcacccatctcttagtgttgcctgagactaaagtgcttagcacagaacctggtgcgtagtagatgctcaataaatttttgctggcacgnnnnnnnnnnnnnnnnnnnngggggggggccgttttaaagaacccctgggggggccaaagtttaccggggcaggcaagagaatagttttttccttatagggggccgtattataacctacctgggaattttgggaaagaacccttacttctggggggggacttattgtgccaacctccctccggaaatttaaggcctttgggaaaaataaaatttttaagggtataaggggtaaaacaacctccatacgctcgctgtttgaaaagttggnncnnncnnccacacannnnnnnnnnncccgggg

SEQ ID NO: 3865 - DNA, 639 bp, Homo sapiens
  misc_feature (1)...(639): n = a,t,c or g
catcaantnnnncnttcccnnnnnnnnnnnaaaacccaagtccccggggataaaattttcataaatcaaaccccgggagccaaactttccagccgccaggctatgccggttggtttaccccttttaccctttaaaattttttattttccctaaagcctttaatttttgtagggaggttggcccaatatgttccccccccaaaggaagggttctttcccaaaattcccaggtagcagattttcccgttccggcgtttttaaaacacgggccgggcctaggttttaattcggccccccataaggaaaaaaattttaccttgcaagcccgggtaaaatttgggcccccccaggggtcctttaaaacgggcccccccnnnnnnnnnnnnnncagtggaaaataacttttgaagtaggtcttattaacaaaagtaatggtcaactaaatattaagaatcaacatttgttgggagtgatgtaaatacaaagtcatttggagactatgagtgaatgaagatggacacaaggatacaagaacaggtctcatctaagagctccttatactcttgtttcctttctcaaccacacactaacagggaaaacacactttgtctttgcgttctgtggatgacacttttcgcgg

SEQ ID NO: 3866 - DNA, 2414 bp, Homo sapiens
  SIMILAR (91)..(1353): 991254mologous to Homo sapiens forkhead transcription factor HFH-4,accession number AJ272064,Smith-Waterman Score=2275.
cggcgggactcagcgggccagagagcgcggcgggccacccccggctcagcccgtggatgctgaccgccccctcggagagtccccgcagacatggcggagagctggctgcgcctctcgggagccgggccggcggaggaggccgggccggagggcggcctggaggagcccgacgccctggatgacagcctgaccagcctgcagtggctgcaggaattctccattctcaacgccaaggcccccgccctgcccccgggggcgaccgacccccacggctaccaccaggtgccaggttcagcggcgcccgggtcccccctggcggccgaccccgcctgcctggggcagccacacacgccgggcaagcccacgtcgtcgtgcacgtcgcggagcgcgcccccggggctgcaggccccaccccccgacgacgtggactacgccaccaatccgcacgtgaagcctccctactcgtatgccacgctcatctgcatggccatgcaggccagcaaggccaccaagatcaccctgtcggccatctacaagtggatcacggacaacttctgctacttccgccacgcagatcccacctggcagaattcaatccgccacaacctgtctctgaacaagtgcttcatcaaagtgcctcgggagaaggacgaaccaggcaaggggggcttctggcgcattgacccccagtacgcggagcggctactgagcggcgctttcaagaagcggcgactgccccctgtccacatccacccagcctttgcccgccaggccgcgcaggagcccagcgctgtcccccgggccgggccgctgacggtgaataccgaggcccagcagctgctgcgggagttcgaggaggccaccggggaggcgggctggggtgcaggcgagggcaggctggggcataagcgcaaacagccgctgcccaagcgggtggccaaggtcccgcggccccccagcaccctgctgcccaccccggaggagcagggtgagctggaacccctcaaaggcaactttgactgggaggccatcttcgacgccggcactctgggcggggagctgggtgcactggaggccctggagctgagcccgcctctgagccccgcctcacacgtggacgtggacctcaccatccacggccgccacatcgactgccctgccacctgggggccttcggtggagcaggctgccgacagcctggacttcgatgagaccttcctggccacatccttcctgcagcacccctgggacgagagcggcagtggctgcctgcccccggagcccctctttgaggctggggatgccaccctggcctccgacctgcaggactgggccagcgtgggggccttcttgtaagaggccaggccctgccccacctctggacagtgcccaagtcagggtccaaaactgccccccaacacaggtccacagacaccccaccacctatgcaggggctgggccagggctccaaggcttgccccaaaggccacatggccaccagccccagctgccatcagattcaagcccaggaggctgaaaacgagggcccaggaccagaatcgctgcctcctttccccagccccaccttgtacacacagtgtttcattgttccgtgttttcccagccccagaaaccggctaaaggaccctgcaccatgagagccgaggcctggaggagcccgggtcaggctggggaggaacagaactgggccctcccagagcacctccgcttcccccctgcttccccaggtctctatccagagagagtccccaggtacaacaaatgctaattagatgacagcaaattaaccccctggaggcttctcctggcagagcctccctggggccggggcaggctgtggatggggcggagcagggcagaagatggactgggggagggggcaaagagaggagaccaaaatgaggtggtggccacagggtggggcaaaggagatcctctctaaaggccctctggggtctttgcctggccccatccccttagggggcgggggaggggacgtaaaatccctaaatctttaaagcccgacttgaggcttgagagcaagctggaagtttgggtttggtggtttgggggccggggcagcccaagctgtatggggccaggacagacagactaatgtaagtgaagtgtagctgtaagctgaaggcttaaactgggagggatgccgagcttgctggaactactgggaccaagaagcggctgtaccccacgcccctgcctgcactcctcgggggcgtggggcgtgccttgctccacccggactccctgggctgcgtcccacatcccaccctcctgccccgtggggcaatttaacctttttcatgaaagttatttacaactcaaaagtttttaaaaataaaatttttaaaaatctaaaaaaaaaaaaaaaaaaa

SEQ ID NO: 3867 - DNA, 470 bp, Homo sapiens
  SIMILAR (1)..(150): 981254mologous to Homo sapiens phosphoprotein ULIP6,accession number AF264015,Smith-Waterman Score=247.
ggcccagaaggaatcgagatcagccgtccagaggagctggaagctgaagccactcatcgtgttatcaccattgcaaacaggactcactgtccaatctacctggtcaacgtgtccagtatctcggctggtgacgttatcgcagctgctaggagtccacagtaggtctctgtcaagccgatgtcgtgatgagggcttttctgatactgacccagaagccacagaaccacaaggaaacccaaaccccctccagctgctgaggcgcaggcacagcctggggtcggatggagcctccagcaccccagcacccaggtgacttccccactcccctgtaaatgtcatggtgctaagactgtgtcaaccccaagacgacacatggtcctgtgctttggccaccgtttgaggcaaaaactaaacagcccgacacgttgtgttctggtgcaggtttgtattaaactgtagctacttctaaa

SEQ ID NO: 3868 - DNA, 1890 bp, Homo sapiens
  SIMILAR (348)..(446): 881254mologous to Homo sapiens phosphoprotein ULIP6,accession number AF264015,Smith-Waterman Score=151.
tcacaggccagccaagtaggtccctctccaagtgcctggcccttcctgcagcttcacactcatccctctgcctagcgtcttcttcccaaatccagtccaacactcatcagtgaagatctctgctgcatccagtgtctccatttctgctttcaccttgggtgcccaccaggtgatccccacgtggagggcgtaatcacagcagaccttggggtcggccagacctcggcacttctcataagcgtccacaagggaggtctccttgtcgggcaggacgtggccgatgatcatggtggtgcctccgacgagtgctgcctgggggatgtcgctgttgtcgtgcacccctctgtgcttccttccctgcaggctctcagatcgatgaccatgttccaaagcgagcttcagctcggatcctcgctcctcccggaggcaggtcgagtggcatttggtaaaggcattgccaagccccccgagtgaggacgcaccgccgccaccagcccgcaactctccagccgaagcttccccagtcatgccgcagaacttcctaatatccgccaaacccaaccctctggcctcgttgtaaggccaagcaatacggtctgcctggaactcctggtgcccccttggccagcgtctccttgcgcccgccaaccaccccggggggtcacatgccccagaagggtagctgggcgggctcgaagctggtgccaggcgcgtgtaaatcgttttgttttgcacgtctggttgcgccagtagtctggtttgacttgttcgtgcatccttctctctctggaccagcttcttgtagacagtgtctgggaaggacctcaggggacagaacttgccggtgccctcggcgcacatgaagacgccgttctcatacacgacgcgcccccggctgatggtgaccagtggcacgccgtggcagcgcatgttctcatacaggttgaagtctcctccctggacctgcgtgctggctgagatggtctttgtggcttctgggtcccacaccaccacatcagcatcggctccgggaataatgcggcccttgcggggatacaggttcagaagcttagctgcgttggaactggtaacggccacaaaacggttctcatccatctttcctccaaccactcctctctcccagatgacgctcatgcggtcctgcacgccactcactccatgtgggatcttggtgaagtcttccttgcccatagctttctgctttgtggtgaaaggccggtgatctgatgccacgatgttcagagtgtcattggccagcaggctcatgaggtaggttgaggtgttggtgtccagtctcaggggaggcaccgtgacataggcagccgcgtgggaccagtcctggtggtagtagtgtaagcctgtcagcgtggcatgtgcagtggtggtctccgccagcacaaccttcccagagcactggtgtgtgcagggtgctgttggcagatggagcttgacggtgggtgaacaggcatgcagggccacgaatgccacgctaaagagcagtctagactgttttctggacaggcagttgctgtgagcagcttcaagagaacggttgtggtaggacagggagggccgtagcagggcttgcatcttagcagctgcgataacgtcaccagccgagatactggacacgttgaccaggtagattggacagtgagtcctcaaggtgacagtccttaagcggagaatgcagggctggcagtcagggcaaggttgcaggaactgcatgatacggggaggcagagaacagcctccagcaccagagcccaccgggaagcccagccctgtttgcaatggtgataacacgatgagtggcttcagcttccagctgttagaaacaaaggacaggaggaaaccaaacttcaccat

SEQ ID NO: 3869 - DNA, 450 bp, Homo sapiens
ttcccaggcctgggtcctcacccctgttccaatggctgccacttgccatgagccccttcgccacctctgctccccggctgaccacctctgtcctctcagcccctgagtgaggaaagggggagtgaagggagaagtgagggtgtggacgcagctcacactgcacggttagcccccaatgggtgactagtcttggctcaaacacagaatgtgcatgaggttgtttataagaaagatgagaaaaaaaatctatcttcctgtgcaaaacaaagcaggctgcctaccaggaaagtaagtcttctcattggttaaactctcaggtgggatctacaatagatgtcaccccagacctcctctccacaggtggggtagatagccaaggttgggagggtcatcacagacacttctggggtcacctcgtgccaagcttggcgtaatgagtggttacgataa

SEQ ID NO: 3870 - DNA, 1365 bp, Homo sapiens
ggcgaggctggtgccaggcgcgtgtaaatggttttgttttgcacgtttggtttgcgcagtagtttggtttgacttgtttgtgcatcctgtgaaaaataacgggtgcttgtgtcactagcatagaatagcgacaggaatagattttttttctcatctttcttataaacaacctcatgcacattctgtgtttgagccaagactagtcacccattgggggctaaccgtgcagtgtgagctgcgtccacaccctcacttctcccttcactccccctttcctcactcaggggctgagaggacagaggtggtcaacccggggagcagaggtggcgaaggggctcatggcaagtggcagccattggaacaggggtgaggacccaggcctggggaaagccaccaggggatggggggaaaccattgacgccgcctcctgggtggcagtgcacaccatctctaaccctgtcaaccctcaactgggtcaatgggccttgggcaaaatgtcaaagagcccagcagcagcgggtggtggcccagctgggcaagagcatcccttgcttgggctaggaaagctttacctttctctgagtgcctccgcctgagagattgtgtgacccggtggcaccaggggaaccacgtcttggagtggtccacttgtaggccatgcgcttcaaatccaccccccagtcccctcataggcccctacccttgcccgggagcttcctagatagaaatcagaaagagattcaaggagccaaatgagcggtcagcccccaccatgcactccttgccccgtgcagagcatccagccagcttcagtcaccagccccacttggctcctggttggaacagaaagggtctcatggttgcactgaatgcagctcctcaaaactgggccttgtacttgctgaaataaaatactgttgtttttgccttaagctgctctcctaggtttgtggggttaaagttgccaagaaaattgtgctactgtgtgtgcgtgtgcgtgcgtgtgtgtagtgctaggagtccacaagtaggtctctgtcaagccgatgtcgtgatgagggcttttctgatactgacccagaagccaaaagaaccacaaggaaacccaaaccccctccagctgctgagggcgcaggcacagcctggggtcggatggagcctccagcacccaagcacccaggtgacttccccccctcccctgtaaaatgtcatggtgctaagactgtgtcaaccccaagacgacacatgggtcctgtgctttggccaccgtttttaggcaaaaactaaaacagcccgacaagttgtgtttctggtgcaggtttgtatttaaactgtagctacttctcaaaaaaacccacgcgtccg

SEQ ID NO: 3871 - DNA, 1086 bp, Homo sapiens
  SIMILAR (1)..(1083): 1001254mologous to Homo sapiens KRAB-zinc finger protein SZF1 -2,accession number AF114817,Smith-Waterman Score=1958.
atgattgattttcaaatgttgaaccagctttgcagaactataataaacccaagtgtgataccctgtctcaagtattgcggtgatcaaataggaccagtgactttcgaggatgtggctgtgcttttcactgaggcagagtggaagagactgagccttgagcagaggaacctatacaaagaagtgatgctggaaaatctcaggaatctggtctcattggaatcaaagccagaagtccatacctgcccttcttgccctctggcctttggcagtcagcagttcctcagccaagatgagctacacaatcatcctattccaggtttccatgcaggaaatcaactccacccaggaaatccctgcccagaggatcagccacagtcacaacatccttctgataaaaatcacaggggggctgaagcagaagatcaacgagtggaaggaggcgtcagacccttgttttggagtacaaatgaaaggggggctttagtgggtttctctagcctgttccagagaccaccaataagctcttggggaggcaacagaatattagagatacagctcagtccagcccagaatgcaagctctgaggaagtagacagaatttccaagagggcagaaaccccagggtttggagcagtcaggtttggggagtgtgcactagcttttaaccagaagtcaaacctgttcagacagaaggcagtcacagcagaaaaatcttcagacaaaaggcagtcacaggtgtgcagggagtgtgggcgaggctttagcaggaagtcacagctcatcatacaccagaggacacacacaggagaaaagccttatgtctgcggagagtgtgggcgaggctttatagttgagtcagtcctccgcaaccacctgagtacacactccggggagaaaccttatgtgtgcagccattgtgggcgaggctttagctgcaagccatacctcatcagacatcagaggacacacacaagggagaaatcgtttatgtgcacagtgtgtgggcgaggctttcgtgaaaagtcagagctcattaagcaccagagaattcacacgggggataagccttatgtgtgcagagattga

SEQ ID NO: 3872 - DNA, 1892 bp, Homo sapiens
agaaaccaatctgactcccaaccaatggtttgcgatattaacaaaggccacaaacagtacacctgggccagcaaacagtgtgaaactgacaaaactccaagggggaaacatctagcaaataaatcaaaaagccaaagatcaatgctggtgaatattagccatactagaaaccccttaaatatgctggctactatgatttgttttaaaattattgtttagtccatatattaaagagcccagctggatgctcttacagttaaaaaaactgtgtagcccacattactgttttcaacgtcctgtgtggaaagttgctatcactgtacaattttgcttgagcctttattttacaccagggctttccctctaactcagaattgcacgtaagaaggctatttaaaaagtccgataaaaatttgcacaaatcagacttaagaattgagtcagtatgctgtacactttctcccatagtatgttgattaaggaaagggacaaatagaagtgctgccactaaactttcagttgaggaataattgactggaattttttatttctttaaagtagttatcccaggtcaagttaagaccaagagcttaggcattaagccttaaagactgatcttctcttctccttgaagaaatgtcaatatctatagagtcttttccaactattaacctcaagcgcttagctggaggaagaggaataaaatcgtcttcaaagtcatcatcatagtcatcctcctcttcatcgccctcagaagaggaggaatcatctgtactttcttcctcatactgactatagtcatccacctccattcgagactccaagagagaaagaggatcactgcagcacaccccattttcatgaagcccctctgtataagaccccctattttcctcatccccgttttagctggatttttaattttgtagaactactgcctgatcctgagttaaatccattattaagctttgctacatagagattgttatcgttgtcatggtctttggcttaaacttgatgcttatttgggaagagttcattccaatcattctcttggtccatttgttttgctgctgctatcatgacgcctacgaagagtcaatttgggaatcccagagttattttctaggattaactgtgcatcataccttgtgattcgcctcttctttttactttttgcagttctaaagctgtcttttgttttgaaagctatctgatgtcacaactgaacaaccgacggggtgaaggagcacagtctgtgtagctcacaggcacgcccacagtgccactgtgctcaccctggtcagaatggggacccatcaaatctggtaccgcgtcgtcttttccaggaaactccggccctggagttaggttcctgtacgttttgcaaactgtttcacaagttttccttgtcgtgacttctttttggacatgcctgtgtcactcttatgacactttgcctcccctttttgtgcagtctcatgagccagttcttcctcctgcagcacaggagctggctgcagctgttcaccactgtcggggcaaggttccgtcacactgcttttatagccattcaacgtatttggttcaagcttgatgtcagaggcctccttcagatttgttcttgtcctcactgaccgccgagttatgtaggtgcagggcgagctctccccctgcgaatgagcacctctcacaggattctgtctgtgttctctcgccgcgtgtctagtcaagcacccgctggcaactgcggcttgggctggtccctctggctccttatcttttttaatgggcaaatttttatacagaactactttaggctctttcagtactaagtttcccatttcgagttttcaagaagcattcttttgctccagccgcttgcaatgatt

SEQ ID NO: 3873 - DNA, 411 bp, Homo sapiens
  SIMILAR (344)..(228): 1001254mologous to Homo sapiens Human secreted protein, SEQ ID NO: 4383,accession number AAG00302,Smith-Waterman Score=222.
tttttttttagatgaactcatttatttgacatattaaattagccaaagaaatatatatgtaaccagataaaaccaatcacattctcatactacttgaacacatagcagtggtcaaaaataatggattgtaaaatggaccccaggatttaatgcaaaacccaccccatacgagaaaagtttcaggcttctaacttcactgaatccagtactaaacgtgcttctttatattcctcagtttctggatcatcgcagttcggttgtctataaatcagccctgggccatgtggggctgagtggcagccccagagctgagcaagacaaaggagcaggacgagggacttcatggctgccccagagaggccctgccaggcgtccaggtggttggaggcttcgggaccaacccaggtgctc

SEQ ID NO: 3874 - DNA, 458 bp, Homo sapiens
  SIMILAR (410)..(174): 741254mologous to Homo sapiens cofactor A protein,accession number AF038952,Smith-Waterman Score=265.
  misc_feature (1)...(458): n = a,t,c or g
agatgaactcatttatttgacatattaaattagacaaagaaatatatatgtaaccagataaaaacaatcacattctcatactacttgaacacatagcagtggtcaaaaataatggattgtaaaatggaccccaggatttaatgcaaaaaccaccccatacgagaaaagtttcaggcttctaacttcactgaatccagtactaaacgtgcttctttatattcctcagcttcttccaagtctttttcattttcctgctttttaatgtcataattttcaccgtcttcagctctcattttttcaatcttttcttcttgttgttttgcctctttttcatacatcactttttctttgaccaaccgcttcaccacgccggtcttgatcttgatctgtctcacgcgaggatcggccatggtccctcgagacgccgcagaaggaggggcggagagngcctcgtggcc

SEQ ID NO: 3875 - DNA, 670 bp, Homo sapiens
aaaatcaaacaaaatttcctgtgtactttagataatattatttccatttgtcctgttatcattacaatatattagtaaaagttgccctgtatatcagtattatggaaaaactcaatctttaaatatcagaaaatgaaagatgtattttgtttcctttagtgtagggtatgtaatacccattagcaagcaggcaattcatttgtttaattcaaagattatatttaactctgttgtgacatcaggaaggccttctttgtcattgtggaataggtcagtgggattattttgggcctggaatgctgtcatatatgtaacatgttaggtaaatcttcctttttacttttctcttttgtatgatgatgatgggtcaacaaaatgagaataaactttttctgaggtttttatttaattaatgctggtagctttagaagactgttattcacttattttatgagaatatatacagtgaaacaaaaccaccagttatttcttcctttccttgtaaagaaggaacagaatgtgggaaacctgtggaattacaatatatttagatgaggcttgggattttttacttttaattttttagttattaacattaatggtttgtaatatttgagtaaataacaaagtactgaaacttgaaaaggataaacttaatttttattgtatt

SEQ ID NO: 3876 - DNA, 764 bp, Homo sapiens
  SIMILAR (414)..(268): 591254mologous to Homo sapiens cofactor A protein,accession number AF038952,Smith-Waterman Score=126.
tacactactaaattgcggccgcgcgaccgactcactatacgccacacctttatttttttttttacagtataaaatacacaattttattagatgaactcattttatttgacatattaaattagacaaagaaatatatatgtaaccagataaaaaacaatcaccattctcatactacttgaacacatagcacatggtcaaaaataatggattgtaaaatgggcccccggggttttaatgcaaaaaccaccccatacgagaaaagtttcaggcttctaacttcactgaatccagtactaaacgtgcttctttatattcctcagcttctttccaaggtctttttcattttctagtatccgttgaagatccaaatatgcggcttccaaacctgcgctggcaatctgggatcatcatcctgggaatcttgtaaggatctctgccgtgcatgtcgtgtcgttgtgcactgagccggtcagtttatacacgcgtctgtgactaggcgagaagaccctagggcgattacccgatgcattaaatcgagctctgacagtaggtggcgaccagtgcactgacggcatacgtggtttaagctgctttttaatgtcataattttcaccgtcttcagctctcattttttcaatcttttcttcttgttgttttgcctctttttcatacatcactttttctttgaccaacctggacattgtcacctgtgtgtgacacctgccacttgtgtcagacaccttgggatcatgaggaaatcctgc

SEQ ID NO: 3877 - DNA, 429 bp, Homo sapiens
aaattttactccaaccatgtgtacaatgttggaatcagatgaaatttatagtgaatgaatgtatgtgggtttggggtttccactcctcttcagcctttcctcccgttagaacaaggaaggttttttttttttttaagggagggcccttttaaaatatgtaagccccccttcaagcctttggaattcggttccccccgacccaaattccccccaaccctgccctttaaaaaaaaaaaacccaggcggacttgggaccccctaagaaacaagaaaaaattttccccaaacttttcttttaaaaaaagaattggggatttggacccaccccacccagggtaaaaagggaccccggccggaaaagcccccttttttggggtggggaagccccccctgccccaatttgggttcctggaatccccccactggaaa

SEQ ID NO: 3878 - DNA, 1264 bp, Homo sapiens
gagtaaccttgtgttaagagtgccatgtggcatgagaaatgggccggttttggctcatgttgtgatattctagattcaggtatttccctgagcagagaggctgaaatgctgaaaatttttcatttgatgaccctgatggttcctttccctgacattgtaaaaaacaaaatggctcctttgctttggcaagaaatactgaaggtggtggcttttttctgtttgttttgaaatgaagtcttgctatgttgctcaagccagtcttgaattcctgaacttctggtctcaagtgatcctcctgactcagcctccagagtagctgggactacaggcacatgttactgcaccagccttcaacgtgattttttttatttcattcaggtgacaaactcatgctgaggttcccaattttttgtctcagagctaggatattccttggggttttgagccgcagtgtctgcctctgttcaagtatccaggctcaggtacagacctttcagtgcaggcggcgggaggcgcgaacacggaggaccccactcaggcatactgccgcccgggcggcgcctgacagattgcctccttgggatcggcggacatgccctgggcgctccagctccgcgcgccccagacacaggctatgattggcctggctgaacgtcaatcagggctcggcgccgtggaggcgggaggaacgctgtaggcagaggccgcttaactccctacggggttattctccgcctcttctagggtaggcaggtgttcccgagtcccttagggggggtccccgcggcggcctgaaatgctcggcgccaggttgtcgcgcccttgagctggctgaagtagacattgactctggagagtttgcgtttttcctggtcccagaaccgtggtcccgatactgcgcttcccgctcctccagtcccagctcccaggctccgtcttctcccgcttggcgctggagaaacaccggaagagagagtcgcagagtgactgctgtggccctgcgacctgactgccaccttccaggactctagccctggctccttctaaccttcccgcccctcagtgccccagagaggctggtttgcggacaattattcatcagccggaagaaaaggaggtgccagtgttaggcgcagaagagggttggaccagaaaagctggagaggggcaagaggggaaagagggggaagggggaaggcggaaggcggaagaagtcgggagggcgattttcgtgcctcagcctcccgaggagctggatctacag

SEQ ID NO: 3879 - DNA, 3255 bp, Homo sapiens; identical to SEQ ID NO: 2210
  SIMILAR (2080)..(1760): 221254mologous to Cricetulus griseus sterol regulatory element binding protein-2,accession number U12330,Smith-Waterman Score=47.
